United States Patent Application Publication US 2024/0131133 A1 - sequence listing, part 3

SEQ ID NO: 53269 - protein, 9 aa, synthetic construct
  source 1..9: note = Seed: LVVVGAVGV (KRAS G12V)
FVVNGLVGF

SEQ ID NO: 53270 - protein, 9 aa, synthetic construct
  source 1..9: note = Seed: LVVVGAVGV (KRAS G12V)
FVVNGLVGG

SEQ ID NO: 53271 - protein, 9 aa, synthetic construct
  source 1..9: note = Seed: LVVVGAVGV (KRAS G12V)
FVVNGLVGH

SEQ ID NO: 53272 - protein, 9 aa, synthetic construct
  source 1..9: note = Seed: LVVVGAVGV (KRAS G12V)
FVVNGLVGI

SEQ ID NO: 53273 - protein, 9 aa, synthetic construct
  source 1..9: note = Seed: LVVVGAVGV (KRAS G12V)
FVVNGLVGL

SEQ ID NO: 53274 - protein, 9 aa, synthetic construct
  source 1..9: note = Seed: LVVVGAVGV (KRAS G12V)
FVVNGLVGM

SEQ ID NO: 53275 - protein, 9 aa, synthetic construct
  source 1..9: note = Seed: LVVVGAVGV (KRAS G12V)
FVVNGLVGN

SEQ ID NO: 53276 - protein, 9 aa, synthetic construct
  source 1..9: note = Seed: LVVVGAVGV (KRAS G12V)
FVVNGLVGQ

SEQ ID NO: 53277 - protein, 9 aa, synthetic construct
  source 1..9: note = Seed: LVVVGAVGV (KRAS G12V)
FVVNGLVGS

SEQ ID NO: 53278 - protein, 9 aa, synthetic construct
  source 1..9: note = Seed: LVVVGAVGV (KRAS G12V)
FVVNGLVGT

SEQ ID NO: 53279 - protein, 9 aa, synthetic construct
  source 1..9: note = Seed: LVVVGAVGV (KRAS G12V)
FVVNGLVGV

SEQ ID NO: 53280 - protein, 9 aa, synthetic construct
  source 1..9: note = Seed: LVVVGAVGV (KRAS G12V)
FVVNGLVGY

SEQ ID NO: 53281 - protein, 9 aa, synthetic construct
  source 1..9: note = Seed: LVVVGAVGV (KRAS G12V)
FVVNGMVGA

SEQ ID NO: 53282 - protein, 9 aa, synthetic construct
  source 1..9: note = Seed: LVVVGAVGV (KRAS G12V)
FVVNGMVGC

SEQ ID NO: 53283 - protein, 9 aa, synthetic construct
  source 1..9: note = Seed: LVVVGAVGV (KRAS G12V)
FVVNGMVGE

SEQ ID NO: 53284 - protein, 9 aa, synthetic construct
  source 1..9: note = Seed: LVVVGAVGV (KRAS G12V)
FVVNGMVGF

SEQ ID NO: 53285 - protein, 9 aa, synthetic construct
  source 1..9: note = Seed: LVVVGAVGV (KRAS G12V)
FVVNGMVGG

SEQ ID NO: 53286 - protein, 9 aa, synthetic construct
  source 1..9: note = Seed: LVVVGAVGV (KRAS G12V)
FVVNGMVGH

SEQ ID NO: 53287 - protein, 9 aa, synthetic construct
  source 1..9: note = Seed: LVVVGAVGV (KRAS G12V)
FVVNGMVGI

SEQ ID NO: 53288 - protein, 9 aa, synthetic construct
  source 1..9: note = Seed: LVVVGAVGV (KRAS G12V)
FVVNGMVGL

SEQ ID NO: 53289 - protein, 9 aa, synthetic construct
  source 1..9: note = Seed: LVVVGAVGV (KRAS G12V)
FVVNGMVGM

SEQ ID NO: 53290 - protein, 9 aa, synthetic construct
  source 1..9: note = Seed: LVVVGAVGV (KRAS G12V)
FVVNGMVGN

SEQ ID NO: 53291 - protein, 9 aa, synthetic construct
  source 1..9: note = Seed: LVVVGAVGV (KRAS G12V)
FVVNGMVGQ

SEQ ID NO: 53292 - protein, 9 aa, synthetic construct
  source 1..9: note = Seed: LVVVGAVGV (KRAS G12V)
FVVNGMVGR

SEQ ID NO: 53293 - protein, 9 aa, synthetic construct
  source 1..9: note = Seed: LVVVGAVGV (KRAS G12V)
FVVNGMVGS

SEQ ID NO: 53294 - protein, 9 aa, synthetic construct
  source 1..9: note = Seed: LVVVGAVGV (KRAS G12V)
FVVNGMVGT

SEQ ID NO: 53295 - protein, 9 aa, synthetic construct
  source 1..9: note = Seed: LVVVGAVGV (KRAS G12V)
FVVNGMVGV

SEQ ID NO: 53296 - protein, 9 aa, synthetic construct
  source 1..9: note = Seed: LVVVGAVGV (KRAS G12V)
FVVNGMVGY

SEQ ID NO: 53297 - protein, 9 aa, synthetic construct
  source 1..9: note = Seed: LVVVGAVGV (KRAS G12V)
FVVNGNVGA

SEQ ID NO: 53298 - protein, 9 aa, synthetic construct
  source 1..9: note = Seed: LVVVGAVGV (KRAS G12V)
FVVNGNVGC

SEQ ID NO: 53299 - protein, 9 aa, synthetic construct
  source 1..9: note = Seed: LVVVGAVGV (KRAS G12V)
FVVNGNVGD

SEQ ID NO: 53300 - protein, 9 aa, synthetic construct
  source 1..9: note = Seed: LVVVGAVGV (KRAS G12V)
FVVNGNVGE

SEQ ID NO: 53301 - protein, 9 aa, synthetic construct
  source 1..9: note = Seed: LVVVGAVGV (KRAS G12V)
FVVNGNVGF

SEQ ID NO: 53302 - protein, 9 aa, synthetic construct
  source 1..9: note = Seed: LVVVGAVGV (KRAS G12V)
FVVNGNVGG

SEQ ID NO: 53303 - protein, 9 aa, synthetic construct
  source 1..9: note = Seed: LVVVGAVGV (KRAS G12V)
FVVNGNVGH

SEQ ID NO: 53304 - protein, 9 aa, synthetic construct
  source 1..9: note = Seed: LVVVGAVGV (KRAS G12V)
FVVNGNVGI

SEQ ID NO: 53305 - protein, 9 aa, synthetic construct
  source 1..9: note = Seed: LVVVGAVGV (KRAS G12V)
FVVNGNVGK

SEQ ID NO: 53306 - protein, 9 aa, synthetic construct
  source 1..9: note = Seed: LVVVGAVGV (KRAS G12V)
FVVNGNVGL

SEQ ID NO: 53307 - protein, 9 aa, synthetic construct
  source 1..9: note = Seed: LVVVGAVGV (KRAS G12V)
FVVNGNVGM

SEQ ID NO: 53308 - protein, 9 aa, synthetic construct
  source 1..9: note = Seed: LVVVGAVGV (KRAS G12V)
FVVNGNVGN

SEQ ID NO: 53309 - protein, 9 aa, synthetic construct
  source 1..9: note = Seed: LVVVGAVGV (KRAS G12V)
FVVNGNVGP

SEQ ID NO: 53310 - protein, 9 aa, synthetic construct
  source 1..9: note = Seed: LVVVGAVGV (KRAS G12V)
FVVNGNVGQ

SEQ ID NO: 53311 - protein, 9 aa, synthetic construct
  source 1..9: note = Seed: LVVVGAVGV (KRAS G12V)
FVVNGNVGR

SEQ ID NO: 53312 - protein, 9 aa, synthetic construct
  source 1..9: note = Seed: LVVVGAVGV (KRAS G12V)
FVVNGNVGS

SEQ ID NO: 53313 - protein, 9 aa, synthetic construct
  source 1..9: note = Seed: LVVVGAVGV (KRAS G12V)
FVVNGNVGT

SEQ ID NO: 53314 - protein, 9 aa, synthetic construct
  source 1..9: note = Seed: LVVVGAVGV (KRAS G12V)
FVVNGNVGV

SEQ ID NO: 53315 - protein, 9 aa, synthetic construct
  source 1..9: note = Seed: LVVVGAVGV (KRAS G12V)
FVVNGNVGW

SEQ ID NO: 53316 - protein, 9 aa, synthetic construct
  source 1..9: note = Seed: LVVVGAVGV (KRAS G12V)
FVVNGNVGY

SEQ ID NO: 53317 - protein, 9 aa, synthetic construct
  source 1..9: note = Seed: LVVVGAVGV (KRAS G12V)
FVVNGPVGA

SEQ ID NO: 53318 - protein, 9 aa, synthetic construct
  source 1..9: note = Seed: LVVVGAVGV (KRAS G12V)
FVVNGPVGC

SEQ ID NO: 53319 - protein, 9 aa, synthetic construct
  source 1..9: note = Seed: LVVVGAVGV (KRAS G12V)
FVVNGPVGD

SEQ ID NO: 53320 - protein, 9 aa, synthetic construct
  source 1..9: note = Seed: LVVVGAVGV (KRAS G12V)
FVVNGPVGE

SEQ ID NO: 53321 - protein, 9 aa, synthetic construct
  source 1..9: note = Seed: LVVVGAVGV (KRAS G12V)
FVVNGPVGF

SEQ ID NO: 53322 - protein, 9 aa, synthetic construct
  source 1..9: note = Seed: LVVVGAVGV (KRAS G12V)
FVVNGPVGG

SEQ ID NO: 53323 - protein, 9 aa, synthetic construct
  source 1..9: note = Seed: LVVVGAVGV (KRAS G12V)
FVVNGPVGH

SEQ ID NO: 53324 - protein, 9 aa, synthetic construct
  source 1..9: note = Seed: LVVVGAVGV (KRAS G12V)
FVVNGPVGI

SEQ ID NO: 53325 - protein, 9 aa, synthetic construct
  source 1..9: note = Seed: LVVVGAVGV (KRAS G12V)
FVVNGPVGK

SEQ ID NO: 53326 - protein, 9 aa, synthetic construct
  source 1..9: note = Seed: LVVVGAVGV (KRAS G12V)
FVVNGPVGL

SEQ ID NO: 53327 - protein, 9 aa, synthetic construct
  source 1..9: note = Seed: LVVVGAVGV (KRAS G12V)
FVVNGPVGM

SEQ ID NO: 53328 - protein, 9 aa, synthetic construct
  source 1..9: note = Seed: LVVVGAVGV (KRAS G12V)
FVVNGPVGN

SEQ ID NO: 53329 - protein, 9 aa, synthetic construct
  source 1..9: note = Seed: LVVVGAVGV (KRAS G12V)
FVVNGPVGP

SEQ ID NO: 53330 - protein, 9 aa, synthetic construct
  source 1..9: note = Seed: LVVVGAVGV (KRAS G12V)
FVVNGPVGQ

SEQ ID NO: 53331 - protein, 9 aa, synthetic construct
  source 1..9: note = Seed: LVVVGAVGV (KRAS G12V)
FVVNGPVGR

SEQ ID NO: 53332 - protein, 9 aa, synthetic construct
  source 1..9: note = Seed: LVVVGAVGV (KRAS G12V)
FVVNGPVGS

SEQ ID NO: 53333 - protein, 9 aa, synthetic construct
  source 1..9: note = Seed: LVVVGAVGV (KRAS G12V)
FVVNGPVGT

SEQ ID NO: 53334 - protein, 9 aa, synthetic construct
  source 1..9: note = Seed: LVVVGAVGV (KRAS G12V)
FVVNGPVGV

SEQ ID NO: 53335 - protein, 9 aa, synthetic construct
  source 1..9: note = Seed: LVVVGAVGV (KRAS G12V)
FVVNGPVGW

SEQ ID NO: 53336 - protein, 9 aa, synthetic construct
  source 1..9: note = Seed: LVVVGAVGV (KRAS G12V)
FVVNGPVGY

SEQ ID NO: 53337 - protein, 9 aa, synthetic construct
  source 1..9: note = Seed: LVVVGAVGV (KRAS G12V)
FVVNGQVGA

SEQ ID NO: 53338 - protein, 9 aa, synthetic construct
  source 1..9: note = Seed: LVVVGAVGV (KRAS G12V)
FVVNGQVGC

SEQ ID NO: 53339 - protein, 9 aa, synthetic construct
  source 1..9: note = Seed: LVVVGAVGV (KRAS G12V)
FVVNGQVGF

SEQ ID NO: 53340 - protein, 9 aa, synthetic construct
  source 1..9: note = Seed: LVVVGAVGV (KRAS G12V)
FVVNGQVGG

SEQ ID NO: 53341 - protein, 9 aa, synthetic construct
  source 1..9: note = Seed: LVVVGAVGV (KRAS G12V)
FVVNGQVGI

SEQ ID NO: 53342 - protein, 9 aa, synthetic construct
  source 1..9: note = Seed: LVVVGAVGV (KRAS G12V)
FVVNGQVGL

SEQ ID NO: 53343 - protein, 9 aa, synthetic construct
  source 1..9: note = Seed: LVVVGAVGV (KRAS G12V)
FVVNGQVGM

SEQ ID NO: 53344 - protein, 9 aa, synthetic construct
  source 1..9: note = Seed: LVVVGAVGV (KRAS G12V)
FVVNGQVGQ

SEQ ID NO: 53345 - protein, 9 aa, synthetic construct
  source 1..9: note = Seed: LVVVGAVGV (KRAS G12V)
FVVNGQVGS

SEQ ID NO: 53346 - protein, 9 aa, synthetic construct
  source 1..9: note = Seed: LVVVGAVGV (KRAS G12V)
FVVNGQVGT

SEQ ID NO: 53347 - protein, 9 aa, synthetic construct
  source 1..9: note = Seed: LVVVGAVGV (KRAS G12V)
FVVNGQVGV

SEQ ID NO: 53348 - protein, 9 aa, synthetic construct
  source 1..9: note = Seed: LVVVGAVGV (KRAS G12V)
FVVNGQVGY

SEQ ID NO: 53349 - protein, 9 aa, synthetic construct
  source 1..9: note = Seed: LVVVGAVGV (KRAS G12V)
FVVNGRVGA

SEQ ID NO: 53350 - protein, 9 aa, synthetic construct
  source 1..9: note = Seed: LVVVGAVGV (KRAS G12V)
FVVNGRVGF

SEQ ID NO: 53351 - protein, 9 aa, synthetic construct
  source 1..9: note = Seed: LVVVGAVGV (KRAS G12V)
FVVNGRVGG

SEQ ID NO: 53352 - protein, 9 aa, synthetic construct
  source 1..9: note = Seed: LVVVGAVGV (KRAS G12V)
FVVNGRVGH

SEQ ID NO: 53353 - protein, 9 aa, synthetic construct
  source 1..9: note = Seed: LVVVGAVGV (KRAS G12V)
FVVNGRVGI

SEQ ID NO: 53354 - protein, 9 aa, synthetic construct
  source 1..9: note = Seed: LVVVGAVGV (KRAS G12V)
FVVNGRVGL

SEQ ID NO: 53355 - protein, 9 aa, synthetic construct
  source 1..9: note = Seed: LVVVGAVGV (KRAS G12V)
FVVNGRVGM

SEQ ID NO: 53356 - protein, 9 aa, synthetic construct
  source 1..9: note = Seed: LVVVGAVGV (KRAS G12V)
FVVNGRVGN

SEQ ID NO: 53357 - protein, 9 aa, synthetic construct
  source 1..9: note = Seed: LVVVGAVGV (KRAS G12V)
FVVNGRVGQ

SEQ ID NO: 53358 - protein, 9 aa, synthetic construct
  source 1..9: note = Seed: LVVVGAVGV (KRAS G12V)
FVVNGRVGS

SEQ ID NO: 53359 - protein, 9 aa, synthetic construct
  source 1..9: note = Seed: LVVVGAVGV (KRAS G12V)
FVVNGRVGT

SEQ ID NO: 53360 - protein, 9 aa, synthetic construct
  source 1..9: note = Seed: LVVVGAVGV (KRAS G12V)
FVVNGRVGV

SEQ ID NO: 53361 - protein, 9 aa, synthetic construct
  source 1..9: note = Seed: LVVVGAVGV (KRAS G12V)
FVVNGRVGY

SEQ ID NO: 53362 - protein, 9 aa, synthetic construct
  source 1..9: note = Seed: LVVVGAVGV (KRAS G12V)
FVVNGSVGA

SEQ ID NO: 53363 - protein, 9 aa, synthetic construct
  source 1..9: note = Seed: LVVVGAVGV (KRAS G12V)
FVVNGSVGC

SEQ ID NO: 53364 - protein, 9 aa, synthetic construct
  source 1..9: note = Seed: LVVVGAVGV (KRAS G12V)
FVVNGSVGD

SEQ ID NO: 53365 - protein, 9 aa, synthetic construct
  source 1..9: note = Seed: LVVVGAVGV (KRAS G12V)
FVVNGSVGE

SEQ ID NO: 53366 - protein, 9 aa, synthetic construct
  source 1..9: note = Seed: LVVVGAVGV (KRAS G12V)
FVVNGSVGF

SEQ ID NO: 53367 - protein, 9 aa, synthetic construct
  source 1..9: note = Seed: LVVVGAVGV (KRAS G12V)
FVVNGSVGG

SEQ ID NO: 53368 - protein, 9 aa, synthetic construct
  source 1..9: note = Seed: LVVVGAVGV (KRAS G12V)
FVVNGSVGH

SEQ ID NO: 53369 - protein, 9 aa, synthetic construct
  source 1..9: note = Seed: LVVVGAVGV (KRAS G12V)
FVVNGSVGI

SEQ ID NO: 53370 - protein, 9 aa, synthetic construct
  source 1..9: note = Seed: LVVVGAVGV (KRAS G12V)
FVVNGSVGK

SEQ ID NO: 53371 - protein, 9 aa, synthetic construct
  source 1..9: note = Seed: LVVVGAVGV (KRAS G12V)
FVVNGSVGL

SEQ ID NO: 53372 - protein, 9 aa, synthetic construct
  source 1..9: note = Seed: LVVVGAVGV (KRAS G12V)
FVVNGSVGM

SEQ ID NO: 53373 - protein, 9 aa, synthetic construct
  source 1..9: note = Seed: LVVVGAVGV (KRAS G12V)
FVVNGSVGN

SEQ ID NO: 53374 - protein, 9 aa, synthetic construct
  source 1..9: note = Seed: LVVVGAVGV (KRAS G12V)
FVVNGSVGP

SEQ ID NO: 53375 - protein, 9 aa, synthetic construct
  source 1..9: note = Seed: LVVVGAVGV (KRAS G12V)
FVVNGSVGQ

SEQ ID NO: 53376 - protein, 9 aa, synthetic construct
  source 1..9: note = Seed: LVVVGAVGV (KRAS G12V)
FVVNGSVGR

SEQ ID NO: 53377 - protein, 9 aa, synthetic construct
  source 1..9: note = Seed: LVVVGAVGV (KRAS G12V)
FVVNGSVGS

SEQ ID NO: 53378 - protein, 9 aa, synthetic construct
  source 1..9: note = Seed: LVVVGAVGV (KRAS G12V)
FVVNGSVGT

SEQ ID NO: 53379 - protein, 9 aa, synthetic construct
  source 1..9: note = Seed: LVVVGAVGV (KRAS G12V)
FVVNGSVGV

SEQ ID NO: 53380 - protein, 9 aa, synthetic construct
  source 1..9: note = Seed: LVVVGAVGV (KRAS G12V)
FVVNGSVGW

SEQ ID NO: 53381 - protein, 9 aa, synthetic construct
  source 1..9: note = Seed: LVVVGAVGV (KRAS G12V)
FVVNGSVGY

SEQ ID NO: 53382 - protein, 9 aa, synthetic construct
  source 1..9: note = Seed: LVVVGAVGV (KRAS G12V)
FVVNGTVGA

SEQ ID NO: 53383 - protein, 9 aa, synthetic construct
  source 1..9: note = Seed: LVVVGAVGV (KRAS G12V)
FVVNGTVGC

SEQ ID NO: 53384 - protein, 9 aa, synthetic construct
  source 1..9: note = Seed: LVVVGAVGV (KRAS G12V)
FVVNGTVGD

SEQ ID NO: 53385 - protein, 9 aa, synthetic construct
  source 1..9: note = Seed: LVVVGAVGV (KRAS G12V)
FVVNGTVGE

SEQ ID NO: 53386 - protein, 9 aa, synthetic construct
  source 1..9: note = Seed: LVVVGAVGV (KRAS G12V)
FVVNGTVGF

SEQ ID NO: 53387 - protein, 9 aa, synthetic construct
  source 1..9: note = Seed: LVVVGAVGV (KRAS G12V)
FVVNGTVGG

SEQ ID NO: 53388 - protein, 9 aa, synthetic construct
  source 1..9: note = Seed: LVVVGAVGV (KRAS G12V)
FVVNGTVGH

SEQ ID NO: 53389 - protein, 9 aa, synthetic construct
  source 1..9: note = Seed: LVVVGAVGV (KRAS G12V)
FVVNGTVGI

SEQ ID NO: 53390 - protein, 9 aa, synthetic construct
  source 1..9: note = Seed: LVVVGAVGV (KRAS G12V)
FVVNGTVGK

SEQ ID NO: 53391 - protein, 9 aa, synthetic construct
  source 1..9: note = Seed: LVVVGAVGV (KRAS G12V)
FVVNGTVGL

SEQ ID NO: 53392 - protein, 9 aa, synthetic construct
  source 1..9: note = Seed: LVVVGAVGV (KRAS G12V)
FVVNGTVGM

SEQ ID NO: 53393 - protein, 9 aa, synthetic construct
  source 1..9: note = Seed: LVVVGAVGV (KRAS G12V)
FVVNGTVGN

SEQ ID NO: 53394 - protein, 9 aa, synthetic construct
  source 1..9: note = Seed: LVVVGAVGV (KRAS G12V)
FVVNGTVGP

SEQ ID NO: 53395 - protein, 9 aa, synthetic construct
  source 1..9: note = Seed: LVVVGAVGV (KRAS G12V)
FVVNGTVGQ

SEQ ID NO: 53396 - protein, 9 aa, synthetic construct
  source 1..9: note = Seed: LVVVGAVGV (KRAS G12V)
FVVNGTVGR

SEQ ID NO: 53397 - protein, 9 aa, synthetic construct
  source 1..9: note = Seed: LVVVGAVGV (KRAS G12V)
FVVNGTVGS

SEQ ID NO: 53398 - protein, 9 aa, synthetic construct
  source 1..9: note = Seed: LVVVGAVGV (KRAS G12V)
FVVNGTVGT

SEQ ID NO: 53399 - protein, 9 aa, synthetic construct
  source 1..9: note = Seed: LVVVGAVGV (KRAS G12V)
FVVNGTVGV

SEQ ID NO: 53400 - protein, 9 aa, synthetic construct
  source 1..9: note = Seed: LVVVGAVGV (KRAS G12V)
FVVNGTVGW

SEQ ID NO: 53401 - protein, 9 aa, synthetic construct
  source 1..9: note = Seed: LVVVGAVGV (KRAS G12V)
FVVNGTVGY

SEQ ID NO: 53402 - protein, 9 aa, synthetic construct
  source 1..9: note = Seed: LVVVGAVGV (KRAS G12V)
FVVNGVVGA

SEQ ID NO: 53403 - protein, 9 aa, synthetic construct
  source 1..9: note = Seed: LVVVGAVGV (KRAS G12V)
FVVNGVVGC

SEQ ID NO: 53404 - protein, 9 aa, synthetic construct
  source 1..9: note = Seed: LVVVGAVGV (KRAS G12V)
FVVNGVVGD

SEQ ID NO: 53405 - protein, 9 aa, synthetic construct
  source 1..9: note = Seed: LVVVGAVGV (KRAS G12V)
FVVNGVVGE

SEQ ID NO: 53406 - protein, 9 aa, synthetic construct
  source 1..9: note = Seed: LVVVGAVGV (KRAS G12V)
FVVNGVVGF

SEQ ID NO: 53407 - protein, 9 aa, synthetic construct
  source 1..9: note = Seed: LVVVGAVGV (KRAS G12V)
FVVNGVVGG

SEQ ID NO: 53408 - protein, 9 aa, synthetic construct
  source 1..9: note = Seed: LVVVGAVGV (KRAS G12V)
FVVNGVVGH

SEQ ID NO: 53409 - protein, 9 aa, synthetic construct
  source 1..9: note = Seed: LVVVGAVGV (KRAS G12V)
FVVNGVVGI

SEQ ID NO: 53410 - protein, 9 aa, synthetic construct
  source 1..9: note = Seed: LVVVGAVGV (KRAS G12V)
FVVNGVVGK

SEQ ID NO: 53411 - protein, 9 aa, synthetic construct
  source 1..9: note = Seed: LVVVGAVGV (KRAS G12V)
FVVNGVVGL

SEQ ID NO: 53412 - protein, 9 aa, synthetic construct
  source 1..9: note = Seed: LVVVGAVGV (KRAS G12V)
FVVNGVVGM

SEQ ID NO: 53413 - protein, 9 aa, synthetic construct
  source 1..9: note = Seed: LVVVGAVGV (KRAS G12V)
FVVNGVVGN

SEQ ID NO: 53414 - protein, 9 aa, synthetic construct
  source 1..9: note = Seed: LVVVGAVGV (KRAS G12V)
FVVNGVVGP

SEQ ID NO: 53415 - protein, 9 aa, synthetic construct
  source 1..9: note = Seed: LVVVGAVGV (KRAS G12V)
FVVNGVVGQ

SEQ ID NO: 53416 - protein, 9 aa, synthetic construct
  source 1..9: note = Seed: LVVVGAVGV (KRAS G12V)
FVVNGVVGR

SEQ ID NO: 53417 - protein, 9 aa, synthetic construct
  source 1..9: note = Seed: LVVVGAVGV (KRAS G12V)
FVVNGVVGS

SEQ ID NO: 53418 - protein, 9 aa, synthetic construct
  source 1..9: note = Seed: LVVVGAVGV (KRAS G12V)
FVVNGVVGT

SEQ ID NO: 53419 - protein, 9 aa, synthetic construct
  source 1..9: note = Seed: LVVVGAVGV (KRAS G12V)
FVVNGVVGV

SEQ ID NO: 53420 - protein, 9 aa, synthetic construct
  source 1..9: note = Seed: LVVVGAVGV (KRAS G12V)
FVVNGVVGW

SEQ ID NO: 53421 - protein, 9 aa, synthetic construct
  source 1..9: note = Seed: LVVVGAVGV (KRAS G12V)
FVVNGVVGY

SEQ ID NO: 53422 - protein, 9 aa, synthetic construct
  source 1..9: note = Seed: LVVVGAVGV (KRAS G12V)
FVVNGWVGA

SEQ ID NO: 53423 - protein, 9 aa, synthetic construct
  source 1..9: note = Seed: LVVVGAVGV (KRAS G12V)
FVVNGWVGF

SEQ ID NO: 53424 - protein, 9 aa, synthetic construct
  source 1..9: note = Seed: LVVVGAVGV (KRAS G12V)
FVVNGWVGG

SEQ ID NO: 53425 - protein, 9 aa, synthetic construct
  source 1..9: note = Seed: LVVVGAVGV (KRAS G12V)
FVVNGWVGI

SEQ ID NO: 53426 - protein, 9 aa, synthetic construct
  source 1..9: note = Seed: LVVVGAVGV (KRAS G12V)
FVVNGWVGL

SEQ ID NO: 53427 - protein, 9 aa, synthetic construct
  source 1..9: note = Seed: LVVVGAVGV (KRAS G12V)
FVVNGWVGM

SEQ ID NO: 53428 - protein, 9 aa, synthetic construct
  source 1..9: note = Seed: LVVVGAVGV (KRAS G12V)
FVVNGWVGS

SEQ ID NO: 53429 - protein, 9 aa, synthetic construct
  source 1..9: note = Seed: LVVVGAVGV (KRAS G12V)
FVVNGWVGT

SEQ ID NO: 53430 - protein, 9 aa, synthetic construct
  source 1..9: note = Seed: LVVVGAVGV (KRAS G12V)
FVVNGWVGV

SEQ ID NO: 53431 - protein, 9 aa, synthetic construct
  source 1..9: note = Seed: LVVVGAVGV (KRAS G12V)
FVVNGWVGY

SEQ ID NO: 53432 - protein, 9 aa, synthetic construct
  source 1..9: note = Seed: LVVVGAVGV (KRAS G12V)
FVVNGYVGA

SEQ ID NO: 53433 - protein, 9 aa, synthetic construct
  source 1..9: note = Seed: LVVVGAVGV (KRAS G12V)
FVVNGYVGC

SEQ ID NO: 53434 - protein, 9 aa, synthetic construct
  source 1..9: note = Seed: LVVVGAVGV (KRAS G12V)
FVVNGYVGF

SEQ ID NO: 53435 - protein, 9 aa, synthetic construct
  source 1..9: note = Seed: LVVVGAVGV (KRAS G12V)
FVVNGYVGI

SEQ ID NO: 53436 - protein, 9 aa, synthetic construct
  source 1..9: note = Seed: LVVVGAVGV (KRAS G12V)
FVVNGYVGL

SEQ ID NO: 53437 - protein, 9 aa, synthetic construct
  source 1..9: note = Seed: LVVVGAVGV (KRAS G12V)
FVVNGYVGM

SEQ ID NO: 53438 - protein, 9 aa, synthetic construct
  source 1..9: note = Seed: LVVVGAVGV (KRAS G12V)
FVVNGYVGV

SEQ ID NO: 53439 - protein, 9 aa, synthetic construct
  source 1..9: note = Seed: LVVVGAVGV (KRAS G12V)
FVVNGYVGY

SEQ ID NO: 53440 - protein, 9 aa, synthetic construct
  source 1..9: note = Seed: LVVVGAVGV (KRAS G12V)
FVVPGAVGA

SEQ ID NO: 53441 - protein, 9 aa, synthetic construct
  source 1..9: note = Seed: LVVVGAVGV (KRAS G12V)
FVVPGAVGC

SEQ ID NO: 53442 - protein, 9 aa, synthetic construct
  source 1..9: note = Seed: LVVVGAVGV (KRAS G12V)
FVVPGAVGF

SEQ ID NO: 53443 - protein, 9 aa, synthetic construct
  source 1..9: note = Seed: LVVVGAVGV (KRAS G12V)
FVVPGAVGI

SEQ ID NO: 53444 - protein, 9 aa, synthetic construct
  source 1..9: note = Seed: LVVVGAVGV (KRAS G12V)
FVVPGAVGL

SEQ ID NO: 53445 - protein, 9 aa, synthetic construct
  source 1..9: note = Seed: LVVVGAVGV (KRAS G12V)
FVVPGAVGM

SEQ ID NO: 53446 - protein, 9 aa, synthetic construct
  source 1..9: note = Seed: LVVVGAVGV (KRAS G12V)
FVVPGAVGS

SEQ ID NO: 53447 - protein, 9 aa, synthetic construct
  source 1..9: note = Seed: LVVVGAVGV (KRAS G12V)
FVVPGAVGT

SEQ ID NO: 53448 - protein, 9 aa, synthetic construct
  source 1..9: note = Seed: LVVVGAVGV (KRAS G12V)
FVVPGAVGV

SEQ ID NO: 53449 - protein, 9 aa, synthetic construct
  source 1..9: note = Seed: LVVVGAVGV (KRAS G12V)
FVVPGAVGY

SEQ ID NO: 53450 - protein, 9 aa, synthetic construct
  source 1..9: note = Seed: LVVVGAVGV (KRAS G12V)
FVVPGCVGI

SEQ ID NO: 53451 - protein, 9 aa, synthetic construct
  source 1..9: note = Seed: LVVVGAVGV (KRAS G12V)
FVVPGCVGL

SEQ ID NO: 53452 - protein, 9 aa, synthetic construct
  source 1..9: note = Seed: LVVVGAVGV (KRAS G12V)
FVVPGCVGV

SEQ ID NO: 53453 - protein, 9 aa, synthetic construct
  source 1..9: note = Seed: LVVVGAVGV (KRAS G12V)
FVVPGGVGA

SEQ ID NO: 53454 - protein, 9 aa, synthetic construct
  source 1..9: note = Seed: LVVVGAVGV (KRAS G12V)
FVVPGGVGC

SEQ ID NO: 53455 - protein, 9 aa, synthetic construct
  source 1..9: note = Seed: LVVVGAVGV (KRAS G12V)
FVVPGGVGI

SEQ ID NO: 53456 - protein, 9 aa, synthetic construct
  source 1..9: note = Seed: LVVVGAVGV (KRAS G12V)
FVVPGGVGL

SEQ ID NO: 53457 - protein, 9 aa, synthetic construct
  source 1..9: note = Seed: LVVVGAVGV (KRAS G12V)
FVVPGGVGM

SEQ ID NO: 53458 - protein, 9 aa, synthetic construct
  source 1..9: note = Seed: LVVVGAVGV (KRAS G12V)
FVVPGGVGV

SEQ ID NO: 53459 - protein, 9 aa, synthetic construct
  source 1..9: note = Seed: LVVVGAVGV (KRAS G12V)
FVVPGIVGV

SEQ ID NO: 53460 - protein, 9 aa, synthetic construct
  source 1..9: note = Seed: LVVVGAVGV (KRAS G12V)
FVVPGNVGA

SEQ ID NO: 53461 - protein, 9 aa, synthetic construct
  source 1..9: note = Seed: LVVVGAVGV (KRAS G12V)
FVVPGNVGC

SEQ ID NO: 53462 - protein, 9 aa, synthetic construct
  source 1..9: note = Seed: LVVVGAVGV (KRAS G12V)
FVVPGNVGI

SEQ ID NO: 53463 - protein, 9 aa, synthetic construct
  source 1..9: note = Seed: LVVVGAVGV (KRAS G12V)
FVVPGNVGL

SEQ ID NO: 53464 - protein, 9 aa, synthetic construct
  source 1..9: note = Seed: LVVVGAVGV (KRAS G12V)
FVVPGNVGM

SEQ ID NO: 53465 - protein, 9 aa, synthetic construct
  source 1..9: note = Seed: LVVVGAVGV (KRAS G12V)
FVVPGNVGV

SEQ ID NO: 53466 - protein, 9 aa, synthetic construct
  source 1..9: note = Seed: LVVVGAVGV (KRAS G12V)
FVVPGPVGA

SEQ ID NO: 53467 - protein, 9 aa, synthetic construct
  source 1..9: note = Seed: LVVVGAVGV (KRAS G12V)
FVVPGPVGF

SEQ ID NO: 53468 - protein, 9 aa, synthetic construct
  source 1..9: note = Seed: LVVVGAVGV (KRAS G12V)
FVVPGPVGI

SEQ ID NO: 53469 - protein, 9 aa, synthetic construct
  source 1..9: note = Seed: LVVVGAVGV (KRAS G12V)
FVVPGPVGL

SEQ ID NO: 53470 - protein, 9 aa, synthetic construct
  source 1..9: note = Seed: LVVVGAVGV (KRAS G12V)
FVVPGPVGM

SEQ ID NO: 53471 - protein, 9 aa, synthetic construct
  source 1..9: note = Seed: LVVVGAVGV (KRAS G12V)
FVVPGPVGV

SEQ ID NO: 53472 - protein, 9 aa, synthetic construct
  source 1..9: note = Seed: LVVVGAVGV (KRAS G12V)
FVVPGPVGY

SEQ ID NO: 53473 - protein, 9 aa, synthetic construct
  source 1..9: note = Seed: LVVVGAVGV (KRAS G12V)
FVVPGSVGA

SEQ ID NO: 53474 - protein, 9 aa, synthetic construct
  source 1..9: note = Seed: LVVVGAVGV (KRAS G12V)
FVVPGSVGC

SEQ ID NO: 53475 - protein, 9 aa, synthetic construct
  source 1..9: note = Seed: LVVVGAVGV (KRAS G12V)
FVVPGSVGF

SEQ ID NO: 53476 - protein, 9 aa, synthetic construct
  source 1..9: note = Seed: LVVVGAVGV (KRAS G12V)
FVVPGSVGI

SEQ ID NO: 53477 - protein, 9 aa, synthetic construct
  source 1..9: note = Seed: LVVVGAVGV (KRAS G12V)
FVVPGSVGL

SEQ ID NO: 53478 - protein, 9 aa, synthetic construct
  source 1..9: note = Seed: LVVVGAVGV (KRAS G12V)
FVVPGSVGM

SEQ ID NO: 53479 - protein, 9 aa, synthetic construct
  source 1..9: note = Seed: LVVVGAVGV (KRAS G12V)
FVVPGSVGV

SEQ ID NO: 53480 - protein, 9 aa, synthetic construct
  source 1..9: note = Seed: LVVVGAVGV (KRAS G12V)
FVVPGTVGA

SEQ ID NO: 53481 - protein, 9 aa, synthetic construct
  source 1..9: note = Seed: LVVVGAVGV (KRAS G12V)
FVVPGTVGC

SEQ ID NO: 53482 - protein, 9 aa, synthetic construct
  source 1..9: note = Seed: LVVVGAVGV (KRAS G12V)
FVVPGTVGI

SEQ ID NO: 53483 - protein, 9 aa, synthetic construct
  source 1..9: note = Seed: LVVVGAVGV (KRAS G12V)
FVVPGTVGL

SEQ ID NO: 53484 - protein, 9 aa, synthetic construct
  source 1..9: note = Seed: LVVVGAVGV (KRAS G12V)
FVVPGTVGV

SEQ ID NO: 53485 - protein, 9 aa, synthetic construct
  source 1..9: note = Seed: LVVVGAVGV (KRAS G12V)
FVVPGVVGA

SEQ ID NO: 53486 - protein, 9 aa, synthetic construct
  source 1..9: note = Seed: LVVVGAVGV (KRAS G12V)
FVVPGVVGI

SEQ ID NO: 53487 - protein, 9 aa, synthetic construct
  source 1..9: note = Seed: LVVVGAVGV (KRAS G12V)
FVVPGVVGL

SEQ ID NO: 53488 - protein, 9 aa, synthetic construct
  source 1..9: note = Seed: LVVVGAVGV (KRAS G12V)
FVVPGVVGV

SEQ ID NO: 53489 - protein, 9 aa, synthetic construct
  source 1..9: note = Seed: LVVVGAVGV (KRAS G12V)
FVVQGAVGC

SEQ ID NO: 53490 - protein, 9 aa, synthetic construct
  source 1..9: note = Seed: LVVVGAVGV (KRAS G12V)
FVVQGAVGD

SEQ ID NO: 53491 - protein, 9 aa, synthetic construct
  source 1..9: note = Seed: LVVVGAVGV (KRAS G12V)
FVVQGAVGE

SEQ ID NO: 53492 - protein, 9 aa, synthetic construct
  source 1..9: note = Seed: LVVVGAVGV (KRAS G12V)
FVVQGAVGF

SEQ ID NO: 53493 - protein, 9 aa, synthetic construct
  source 1..9: note = Seed: LVVVGAVGV (KRAS G12V)
FVVQGAVGG

SEQ ID NO: 53494 - protein, 9 aa, synthetic construct
  source 1..9: note = Seed: LVVVGAVGV (KRAS G12V)
FVVQGAVGH

SEQ ID NO: 53495 - protein, 9 aa, synthetic construct
  source 1..9: note = Seed: LVVVGAVGV (KRAS G12V)
FVVQGAVGK

SEQ ID NO: 53496 - protein, 9 aa, synthetic construct
  source 1..9: note = Seed: LVVVGAVGV (KRAS G12V)
FVVQGAVGM

SEQ ID NO: 53497 - protein, 9 aa, synthetic construct
  source 1..9: note = Seed: LVVVGAVGV (KRAS G12V)
FVVQGAVGN

SEQ ID NO: 53498 - protein, 9 aa, synthetic construct
  source 1..9: note = Seed: LVVVGAVGV (KRAS G12V)
FVVQGAVGP

SEQ ID NO: 53499 - protein, 9 aa, synthetic construct
  source 1..9: note = Seed: LVVVGAVGV (KRAS G12V)
FVVQGAVGQ

SEQ ID NO: 53500 - protein, 9 aa, synthetic construct
  source 1..9: note = Seed: LVVVGAVGV (KRAS G12V)
FVVQGAVGR

SEQ ID NO: 53501 - protein, 9 aa, synthetic construct
  source 1..9: note = Seed: LVVVGAVGV (KRAS G12V)
FVVQGAVGS

SEQ ID NO: 53502 - protein, 9 aa, synthetic construct
  source 1..9: note = Seed: LVVVGAVGV (KRAS G12V)
FVVQGAVGT

SEQ ID NO: 53503 - protein, 9 aa, synthetic construct
  source 1..9: note = Seed: LVVVGAVGV (KRAS G12V)
FVVQGAVGW

SEQ ID NO: 53504 - protein, 9 aa, synthetic construct
  source 1..9: note = Seed: LVVVGAVGV (KRAS G12V)
FVVQGAVGY

SEQ ID NO: 53505 - protein, 9 aa, synthetic construct
  source 1..9: note = Seed: LVVVGAVGV (KRAS G12V)
FVVQGCVGA

SEQ ID NO: 53506 - protein, 9 aa, synthetic construct
  source 1..9: note = Seed: LVVVGAVGV (KRAS G12V)
FVVQGCVGI

SEQ ID NO: 53507 - protein, 9 aa, synthetic construct
  source 1..9: note = Seed: LVVVGAVGV (KRAS G12V)
FVVQGCVGL

SEQ ID NO: 53508 - protein, 9 aa, synthetic construct
  source 1..9: note = Seed: LVVVGAVGV (KRAS G12V)
FVVQGCVGM

SEQ ID NO: 53509 - protein, 9 aa, synthetic construct
  source 1..9: note = Seed: LVVVGAVGV (KRAS G12V)
FVVQGCVGN

SEQ ID NO: 53510 - protein, 9 aa, synthetic construct
  source 1..9: note = Seed: LVVVGAVGV (KRAS G12V)
FVVQGCVGS

SEQ ID NO: 53511 - protein, 9 aa, synthetic construct
  source 1..9: note = Seed: LVVVGAVGV (KRAS G12V)
FVVQGCVGT

SEQ ID NO: 53512 - protein, 9 aa, synthetic construct
  source 1..9: note = Seed: LVVVGAVGV (KRAS G12V)
FVVQGCVGV

SEQ ID NO: 53513 - protein, 9 aa, synthetic construct
  source 1..9: note = Seed: LVVVGAVGV (KRAS G12V)
FVVQGDVGA

SEQ ID NO: 53514 - protein, 9 aa, synthetic construct
  source 1..9: note = Seed: LVVVGAVGV (KRAS G12V)
FVVQGDVGG

SEQ ID NO: 53515 - protein, 9 aa, synthetic construct
  source 1..9: note = Seed: LVVVGAVGV (KRAS G12V)
FVVQGDVGI

SEQ ID NO: 53516 - protein, 9 aa, synthetic construct
  source 1..9: note = Seed: LVVVGAVGV (KRAS G12V)
FVVQGDVGL

SEQ ID NO: 53517 - protein, 9 aa, synthetic construct
  source 1..9: note = Seed: LVVVGAVGV (KRAS G12V)
FVVQGDVGM

SEQ ID NO: 53518 - protein, 9 aa, synthetic construct
  source 1..9: note = Seed: LVVVGAVGV (KRAS G12V)
FVVQGDVGN

SEQ ID NO: 53519 - protein, 9 aa, synthetic construct
  source 1..9: note = Seed: LVVVGAVGV (KRAS G12V)
FVVQGDVGS

SEQ ID NO: 53520 - protein, 9 aa, synthetic construct
  source 1..9: note = Seed: LVVVGAVGV (KRAS G12V)
FVVQGDVGT

SEQ ID NO: 53521 - protein, 9 aa, synthetic construct
  source 1..9: note = Seed: LVVVGAVGV (KRAS G12V)
FVVQGDVGV

SEQ ID NO: 53522 - protein, 9 aa, synthetic construct
  source 1..9: note = Seed: LVVVGAVGV (KRAS G12V)
FVVQGEVGA

SEQ ID NO: 53523 - protein, 9 aa, synthetic construct
  source 1..9: note = Seed: LVVVGAVGV (KRAS G12V)
FVVQGEVGI

SEQ ID NO: 53524 - protein, 9 aa, synthetic construct
  source 1..9: note = Seed: LVVVGAVGV (KRAS G12V)
FVVQGEVGL

SEQ ID NO: 53525 - protein, 9 aa, synthetic construct
  source 1..9: note = Seed: LVVVGAVGV (KRAS G12V)
FVVQGEVGM

SEQ ID NO: 53526 - protein, 9 aa, synthetic construct
  source 1..9: note = Seed: LVVVGAVGV (KRAS G12V)
FVVQGEVGN

SEQ ID NO: 53527 - protein, 9 aa, synthetic construct
  source 1..9: note = Seed: LVVVGAVGV (KRAS G12V)
FVVQGEVGS

SEQ ID NO: 53528 - protein, 9 aa, synthetic construct
  source 1..9: note = Seed: LVVVGAVGV (KRAS G12V)
FVVQGEVGT

SEQ ID NO: 53529 - protein, 9 aa, synthetic construct
  source 1..9: note = Seed: LVVVGAVGV (KRAS G12V)
FVVQGEVGV

SEQ ID NO: 53530 - protein, 9 aa, synthetic construct
  source 1..9: note = Seed: LVVVGAVGV (KRAS G12V)
FVVQGFVGF

SEQ ID NO: 53531 - protein, 9 aa, synthetic construct
  source 1..9: note = Seed: LVVVGAVGV (KRAS G12V)
FVVQGFVGI

SEQ ID NO: 53532 - protein, 9 aa, synthetic construct
  source 1..9: note = Seed: LVVVGAVGV (KRAS G12V)
FVVQGFVGL

SEQ ID NO: 53533 - protein, 9 aa, synthetic construct
  source 1..9: note = Seed: LVVVGAVGV (KRAS G12V)
FVVQGFVGM

SEQ ID NO: 53534 - protein, 9 aa, synthetic construct
  source 1..9: note = Seed: LVVVGAVGV (KRAS G12V)
FVVQGFVGN

SEQ ID NO: 53535 - protein, 9 aa, synthetic construct
  source 1..9: note = Seed: LVVVGAVGV (KRAS G12V)
FVVQGFVGT

SEQ ID NO: 53536 - protein, 9 aa, synthetic construct
  source 1..9: note = Seed: LVVVGAVGV (KRAS G12V)
FVVQGFVGV

SEQ ID NO: 53537 - protein, 9 aa, synthetic construct
  source 1..9: note = Seed: LVVVGAVGV (KRAS G12V)
FVVQGFVGY

SEQ ID NO: 53538 - protein, 9 aa, synthetic construct
  source 1..9: note = Seed: LVVVGAVGV (KRAS G12V)
FVVQGGVGA

SEQ ID NO: 53539 - protein, 9 aa, synthetic construct
  source 1..9: note = Seed: LVVVGAVGV (KRAS G12V)
FVVQGGVGC

SEQ ID NO: 53540 - protein, 9 aa, synthetic construct
  source 1..9: note = Seed: LVVVGAVGV (KRAS G12V)
FVVQGGVGD

SEQ ID NO: 53541 - protein, 9 aa, synthetic construct
  source 1..9: note = Seed: LVVVGAVGV (KRAS G12V)
FVVQGGVGE

SEQ ID NO: 53542 - protein, 9 aa, synthetic construct
  source 1..9: note = Seed: LVVVGAVGV (KRAS G12V)
FVVQGGVGF

SEQ ID NO: 53543 - protein, 9 aa, synthetic construct
  source 1..9: note = Seed: LVVVGAVGV (KRAS G12V)
FVVQGGVGG

SEQ ID NO: 53544 - protein, 9 aa, synthetic construct
  source 1..9: note = Seed: LVVVGAVGV (KRAS G12V)
FVVQGGVGH

SEQ ID NO: 53545 - protein, 9 aa, synthetic construct
  source 1..9: note = Seed: LVVVGAVGV (KRAS G12V)
FVVQGGVGK

SEQ ID NO: 53546 - protein, 9 aa, synthetic construct
  source 1..9: note = Seed: LVVVGAVGV (KRAS G12V)
FVVQGGVGM

SEQ ID NO: 53547 - protein, 9 aa, synthetic construct
  source 1..9: note = Seed: LVVVGAVGV (KRAS G12V)
FVVQGGVGN

SEQ ID NO: 53548 - protein, 9 aa, synthetic construct
  source 1..9: note = Seed: LVVVGAVGV (KRAS G12V)
FVVQGGVGP

SEQ ID NO: 53549 - protein, 9 aa, synthetic construct
  source 1..9: note = Seed: LVVVGAVGV (KRAS G12V)
FVVQGGVGQ

SEQ ID NO: 53550 - protein, 9 aa, synthetic construct
  source 1..9: note = Seed: LVVVGAVGV (KRAS G12V)
FVVQGGVGR

SEQ ID NO: 53551 - protein, 9 aa, synthetic construct
  source 1..9: note = Seed: LVVVGAVGV (KRAS G12V)
FVVQGGVGS

SEQ ID NO: 53552 - protein, 9 aa, synthetic construct
  source 1..9: note = Seed: LVVVGAVGV (KRAS G12V)
FVVQGGVGT

SEQ ID NO: 53553 - protein, 9 aa, synthetic construct
  source 1..9: note = Seed: LVVVGAVGV (KRAS G12V)
FVVQGGVGW

SEQ ID NO: 53554 - protein, 9 aa, synthetic construct
  source 1..9: note = Seed: LVVVGAVGV (KRAS G12V)
FVVQGGVGY

SEQ ID NO: 53555 - protein, 9 aa, synthetic construct
  source 1..9: note = Seed: LVVVGAVGV (KRAS G12V)
FVVQGHVGA

SEQ ID NO: 53556 - protein, 9 aa, synthetic construct
  source 1..9: note = Seed: LVVVGAVGV (KRAS G12V)
FVVQGHVGF

SEQ ID NO: 53557 - protein, 9 aa, synthetic construct
  source 1..9: note = Seed: LVVVGAVGV (KRAS G12V)
FVVQGHVGG

SEQ ID NO: 53558 - protein, 9 aa, synthetic construct
  source 1..9: note = Seed: LVVVGAVGV (KRAS G12V)
FVVQGHVGH

SEQ ID NO: 53559 - protein, 9 aa, synthetic construct
  source 1..9: note = Seed: LVVVGAVGV (KRAS G12V)
FVVQGHVGI

SEQ ID NO: 53560 - protein, 9 aa, synthetic construct
  source 1..9: note = Seed: LVVVGAVGV (KRAS G12V)
FVVQGHVGL

SEQ ID NO: 53561 - protein, 9 aa, synthetic construct
  source 1..9: note = Seed: LVVVGAVGV (KRAS G12V)
FVVQGHVGM

SEQ ID NO: 53562 - protein, 9 aa, synthetic construct
  source 1..9: note = Seed: LVVVGAVGV (KRAS G12V)
FVVQGHVGN

SEQ ID NO: 53563 - protein, 9 aa, synthetic construct
  source 1..9: note = Seed: LVVVGAVGV (KRAS G12V)
FVVQGHVGS

SEQ ID NO: 53564 - protein, 9 aa, synthetic construct
  source 1..9: note = Seed: LVVVGAVGV (KRAS G12V)
FVVQGHVGT

SEQ ID NO: 53565 - protein, 9 aa, synthetic construct
  source 1..9: note = Seed: LVVVGAVGV (KRAS G12V)
FVVQGHVGV

SEQ ID NO: 53566 - protein, 9 aa, synthetic construct
  source 1..9: note = Seed: LVVVGAVGV (KRAS G12V)
FVVQGHVGY

SEQ ID NO: 53567 - protein, 9 aa, synthetic construct
  source 1..9: note = Seed: LVVVGAVGV (KRAS G12V)
FVVQGIVGA

SEQ ID NO: 53568 - protein, 9 aa, synthetic construct
  source 1..9: note = Seed: LVVVGAVGV (KRAS G12V)
FVVQGIVGC

SEQ ID NO: 53569 - protein, 9 aa, synthetic construct
  source 1..9: note = Seed: LVVVGAVGV (KRAS G12V)
FVVQGIVGD

SEQ ID NO: 53570 - protein, 9 aa, synthetic construct
  source 1..9: note = Seed: LVVVGAVGV (KRAS G12V)
FVVQGIVGE

SEQ ID NO: 53571 - protein, 9 aa, synthetic construct
  source 1..9: note = Seed: LVVVGAVGV (KRAS G12V)
FVVQGIVGF

SEQ ID NO: 53572 - protein, 9 aa, synthetic construct
  source 1..9: note = Seed: LVVVGAVGV (KRAS G12V)
FVVQGIVGG

SEQ ID NO: 53573 - protein, 9 aa, synthetic construct
  source 1..9: note = Seed: LVVVGAVGV (KRAS G12V)
FVVQGIVGH

SEQ ID NO: 53574 - protein, 9 aa, synthetic construct
  source 1..9: note = Seed: LVVVGAVGV (KRAS G12V)
FVVQGIVGI

SEQ ID NO: 53575 - protein, 9 aa, synthetic construct
  source 1..9: note = Seed: LVVVGAVGV (KRAS G12V)
FVVQGIVGK

SEQ ID NO: 53576 - protein, 9 aa, synthetic construct
  source 1..9: note = Seed: LVVVGAVGV (KRAS G12V)
FVVQGIVGL

SEQ ID NO: 53577 - protein, 9 aa, synthetic construct
  source 1..9: note = Seed: LVVVGAVGV (KRAS G12V)
FVVQGIVGM

SEQ ID NO: 53578 - protein, 9 aa, synthetic construct
  source 1..9: note = Seed: LVVVGAVGV (KRAS G12V)
FVVQGIVGN

SEQ ID NO: 53579 - protein, 9 aa, synthetic construct
  source 1..9: note = Seed: LVVVGAVGV (KRAS G12V)
FVVQGIVGP

SEQ ID NO: 53580 - protein, 9 aa, synthetic construct
  source 1..9: note = Seed: LVVVGAVGV (KRAS G12V)
FVVQGIVGQ

SEQ ID NO: 53581 - protein, 9 aa, synthetic construct
  source 1..9: note = Seed: LVVVGAVGV (KRAS G12V)
FVVQGIVGR

SEQ ID NO: 53582 - protein, 9 aa, synthetic construct
  source 1..9: note = Seed: LVVVGAVGV (KRAS G12V)
FVVQGIVGS

SEQ ID NO: 53583 - protein, 9 aa, synthetic construct
  source 1..9: note = Seed: LVVVGAVGV (KRAS G12V)
FVVQGIVGT

SEQ ID NO: 53584 - protein, 9 aa, synthetic construct
  source 1..9: note = Seed: LVVVGAVGV (KRAS G12V)
FVVQGIVGV

SEQ ID NO: 53585 - protein, 9 aa, synthetic construct
  source 1..9: note = Seed: LVVVGAVGV (KRAS G12V)
FVVQGIVGY

SEQ ID NO: 53586 - protein, 9 aa, synthetic construct
  source 1..9: note = Seed: LVVVGAVGV (KRAS G12V)
FVVQGKVGA

SEQ ID NO: 53587 - protein, 9 aa, synthetic construct
  source 1..9: note = Seed: LVVVGAVGV (KRAS G12V)
FVVQGKVGG

SEQ ID NO: 53588 - protein, 9 aa, synthetic construct
  source 1..9: note = Seed: LVVVGAVGV (KRAS G12V)
FVVQGKVGH

SEQ ID NO: 53589 - protein, 9 aa, synthetic construct
  source 1..9: note = Seed: LVVVGAVGV (KRAS G12V)
FVVQGKVGI

SEQ ID NO: 53590 - protein, 9 aa, synthetic construct
  source 1..9: note = Seed: LVVVGAVGV (KRAS G12V)
FVVQGKVGK

SEQ ID NO: 53591 - protein, 9 aa, synthetic construct
  source 1..9: note = Seed: LVVVGAVGV (KRAS G12V)
FVVQGKVGL

SEQ ID NO: 53592 - protein, 9 aa, synthetic construct
  source 1..9: note = Seed: LVVVGAVGV (KRAS G12V)
FVVQGKVGM

SEQ ID NO: 53593 - protein, 9 aa, synthetic construct
  source 1..9: note = Seed: LVVVGAVGV (KRAS G12V)
FVVQGKVGN

SEQ ID NO: 53594 - protein, 9 aa, synthetic construct
  source 1..9: note = Seed: LVVVGAVGV (KRAS G12V)
FVVQGKVGP

SEQ ID NO: 53595 - protein, 9 aa, synthetic construct
  source 1..9: note = Seed: LVVVGAVGV (KRAS G12V)
FVVQGKVGQ

SEQ ID NO: 53596 - protein, 9 aa, synthetic construct
  source 1..9: note = Seed: LVVVGAVGV (KRAS G12V)
FVVQGKVGR

SEQ ID NO: 53597 - protein, 9 aa, synthetic construct
  source 1..9: note = Seed: LVVVGAVGV (KRAS G12V)
FVVQGKVGS

SEQ ID NO: 53598 - protein, 9 aa, synthetic construct
  source 1..9: note = Seed: LVVVGAVGV (KRAS G12V)
FVVQGKVGT

SEQ ID NO: 53599 - protein, 9 aa, synthetic construct
  source 1..9: note = Seed: LVVVGAVGV (KRAS G12V)
FVVQGKVGV

SEQ ID NO: 53600 - protein, 9 aa, synthetic construct
  source 1..9: note = Seed: LVVVGAVGV (KRAS G12V)
FVVQGLVGA

SEQ ID NO: 53601 - protein, 9 aa, synthetic construct
  source 1..9: note = Seed: LVVVGAVGV (KRAS G12V)
FVVQGLVGF

SEQ ID NO: 53602 - protein, 9 aa, synthetic construct
  source 1..9: note = Seed: LVVVGAVGV (KRAS G12V)
FVVQGLVGG

SEQ ID NO: 53603 - protein, 9 aa, synthetic construct
  source 1..9: note = Seed: LVVVGAVGV (KRAS G12V)
FVVQGLVGH

SEQ ID NO: 53604 - protein, 9 aa, synthetic construct
  source 1..9: note = Seed: LVVVGAVGV (KRAS G12V)
FVVQGLVGI

SEQ ID NO: 53605 - protein, 9 aa, synthetic construct
  source 1..9: note = Seed: LVVVGAVGV (KRAS G12V)
FVVQGLVGK

SEQ ID NO: 53606 - protein, 9 aa, synthetic construct
  source 1..9: note = Seed: LVVVGAVGV (KRAS G12V)
FVVQGLVGL

SEQ ID NO: 53607 - protein, 9 aa, synthetic construct
  source 1..9: note = Seed: LVVVGAVGV (KRAS G12V)
FVVQGLVGM

SEQ ID NO: 53608 - protein, 9 aa, synthetic construct
  source 1..9: note = Seed: LVVVGAVGV (KRAS G12V)
FVVQGLVGN

SEQ ID NO: 53609 - protein, 9 aa, synthetic construct
  source 1..9: note = Seed: LVVVGAVGV (KRAS G12V)
FVVQGLVGQ

SEQ ID NO: 53610 - protein, 9 aa, synthetic construct
  source 1..9: note = Seed: LVVVGAVGV (KRAS G12V)
FVVQGLVGR

SEQ ID NO: 53611 - protein, 9 aa, synthetic construct
  source 1..9: note = Seed: LVVVGAVGV (KRAS G12V)
FVVQGLVGS

SEQ ID NO: 53612 - protein, 9 aa, synthetic construct
  source 1..9: note = Seed: LVVVGAVGV (KRAS G12V)
FVVQGLVGT

SEQ ID NO: 53613 - protein, 9 aa, synthetic construct
  source 1..9: note = Seed: LVVVGAVGV (KRAS G12V)
FVVQGLVGV

SEQ ID NO: 53614 - protein, 9 aa, synthetic construct
  source 1..9: note = Seed: LVVVGAVGV (KRAS G12V)
FVVQGLVGY

SEQ ID NO: 53615 - protein, 9 aa, synthetic construct
  source 1..9: note = Seed: LVVVGAVGV (KRAS G12V)
FVVQGMVGA

SEQ ID NO: 53616 - protein, 9 aa, synthetic construct
  source 1..9: note = Seed: LVVVGAVGV (KRAS G12V)
FVVQGMVGF

SEQ ID NO: 53617 - protein, 9 aa, synthetic construct
  source 1..9: note = Seed: LVVVGAVGV (KRAS G12V)
FVVQGMVGG

SEQ ID NO: 53618 - protein, 9 aa, synthetic construct
  source 1..9: note = Seed: LVVVGAVGV (KRAS G12V)
FVVQGMVGH

SEQ ID NO: 53619 - protein, 9 aa, synthetic construct
  source 1..9: note = Seed: LVVVGAVGV (KRAS G12V)
FVVQGMVGI

SEQ ID NO: 53620 - protein, 9 aa, synthetic construct
  source 1..9: note = Seed: LVVVGAVGV (KRAS G12V)
FVVQGMVGK

SEQ ID NO: 53621 - protein, 9 aa, synthetic construct
  source 1..9: note = Seed: LVVVGAVGV (KRAS G12V)
FVVQGMVGL

SEQ ID NO: 53622 - protein, 9 aa, synthetic construct
  source 1..9: note = Seed: LVVVGAVGV (KRAS G12V)
FVVQGMVGM

SEQ ID NO: 53623 - protein, 9 aa, synthetic construct
  source 1..9: note = Seed: LVVVGAVGV (KRAS G12V)
FVVQGMVGN

SEQ ID NO: 53624 - protein, 9 aa, synthetic construct
  source 1..9: note = Seed: LVVVGAVGV (KRAS G12V)
FVVQGMVGQ

SEQ ID NO: 53625 - protein, 9 aa, synthetic construct
  source 1..9: note = Seed: LVVVGAVGV (KRAS G12V)
FVVQGMVGR

SEQ ID NO: 53626 - protein, 9 aa, synthetic construct
  source 1..9: note = Seed: LVVVGAVGV (KRAS G12V)
FVVQGMVGS

SEQ ID NO: 53627 - protein, 9 aa, synthetic construct
  source 1..9: note = Seed: LVVVGAVGV (KRAS G12V)
FVVQGMVGT

SEQ ID NO: 53628 - protein, 9 aa, synthetic construct
  source 1..9: note = Seed: LVVVGAVGV (KRAS G12V)
FVVQGMVGV

SEQ ID NO: 53629 - protein, 9 aa, synthetic construct
  source 1..9: note = Seed: LVVVGAVGV (KRAS G12V)
FVVQGMVGY

SEQ ID NO: 53630 - protein, 9 aa, synthetic construct
  source 1..9: note = Seed: LVVVGAVGV (KRAS G12V)
FVVQGNVGA

SEQ ID NO: 53631 - protein, 9 aa, synthetic construct
  source 1..9: note = Seed: LVVVGAVGV (KRAS G12V)
FVVQGNVGC

SEQ ID NO: 53632 - protein, 9 aa, synthetic construct
  source 1..9: note = Seed: LVVVGAVGV (KRAS G12V)
FVVQGNVGD

SEQ ID NO: 53633 - protein, 9 aa, synthetic construct
  source 1..9: note = Seed: LVVVGAVGV (KRAS G12V)
FVVQGNVGE

SEQ ID NO: 53634 - protein, 9 aa, synthetic construct
  source 1..9: note = Seed: LVVVGAVGV (KRAS G12V)
FVVQGNVGF

SEQ ID NO: 53635 - protein, 9 aa, synthetic construct
  source 1..9: note = Seed: LVVVGAVGV (KRAS G12V)
FVVQGNVGG

SEQ ID NO: 53636 - protein, 9 aa, synthetic construct
  source 1..9: note = Seed: LVVVGAVGV (KRAS G12V)
FVVQGNVGH

SEQ ID NO: 53637 - protein, 9 aa, synthetic construct
  source 1..9: note = Seed: LVVVGAVGV (KRAS G12V)
FVVQGNVGI

SEQ ID NO: 53638 - protein, 9 aa, synthetic construct
  source 1..9: note = Seed: LVVVGAVGV (KRAS G12V)
FVVQGNVGK

SEQ ID NO: 53639 - protein, 9 aa, synthetic construct
  source 1..9: note = Seed: LVVVGAVGV (KRAS G12V)
FVVQGNVGL

SEQ ID NO: 53640 - protein, 9 aa, synthetic construct
  source 1..9: note = Seed: LVVVGAVGV (KRAS G12V)
FVVQGNVGM

SEQ ID NO: 53641 - protein, 9 aa, synthetic construct
  source 1..9: note = Seed: LVVVGAVGV (KRAS G12V)
FVVQGNVGN

SEQ ID NO: 53642 - protein, 9 aa, synthetic construct
  source 1..9: note = Seed: LVVVGAVGV (KRAS G12V)
FVVQGNVGP

SEQ ID NO: 53643 - protein, 9 aa, synthetic construct
  source 1..9: note = Seed: LVVVGAVGV (KRAS G12V)
FVVQGNVGQ

SEQ ID NO: 53644 - protein, 9 aa, synthetic construct
  source 1..9: note = Seed: LVVVGAVGV (KRAS G12V)
FVVQGNVGR

SEQ ID NO: 53645 - protein, 9 aa, synthetic construct
  source 1..9: note = Seed: LVVVGAVGV (KRAS G12V)
FVVQGNVGS

SEQ ID NO: 53646 - protein, 9 aa, synthetic construct
  source 1..9: note = Seed: LVVVGAVGV (KRAS G12V)
FVVQGNVGT

SEQ ID NO: 53647 - protein, 9 aa, synthetic construct
  source 1..9: note = Seed: LVVVGAVGV (KRAS G12V)
FVVQGNVGV

SEQ ID NO: 53648 - protein, 9 aa, synthetic construct
  source 1..9: note = Seed: LVVVGAVGV (KRAS G12V)
FVVQGNVGW

SEQ ID NO: 53649 - protein, 9 aa, synthetic construct
  source 1..9: note = Seed: LVVVGAVGV (KRAS G12V)
FVVQGNVGY

SEQ ID NO: 53650 - protein, 9 aa, synthetic construct
  source 1..9: note = Seed: LVVVGAVGV (KRAS G12V)
FVVQGPVGA

SEQ ID NO: 53651 - protein, 9 aa, synthetic construct
  source 1..9: note = Seed: LVVVGAVGV (KRAS G12V)
FVVQGPVGC

SEQ ID NO: 53652 - protein, 9 aa, synthetic construct
  source 1..9: note = Seed: LVVVGAVGV (KRAS G12V)
FVVQGPVGD

SEQ ID NO: 53653 - protein, 9 aa, synthetic construct
  source 1..9: note = Seed: LVVVGAVGV (KRAS G12V)
FVVQGPVGE

SEQ ID NO: 53654 - protein, 9 aa, synthetic construct
  source 1..9: note = Seed: LVVVGAVGV (KRAS G12V)
FVVQGPVGF

SEQ ID NO: 53655 - protein, 9 aa, synthetic construct
  source 1..9: note = Seed: LVVVGAVGV (KRAS G12V)
FVVQGPVGG

SEQ ID NO: 53656 - protein, 9 aa, synthetic construct
  source 1..9: note = Seed: LVVVGAVGV (KRAS G12V)
FVVQGPVGH

SEQ ID NO: 53657 - protein, 9 aa, synthetic construct
  source 1..9: note = Seed: LVVVGAVGV (KRAS G12V)
FVVQGPVGI

SEQ ID NO: 53658 - protein, 9 aa, synthetic construct
  source 1..9: note = Seed: LVVVGAVGV (KRAS G12V)
FVVQGPVGK

SEQ ID NO: 53659 - protein, 9 aa, synthetic construct
  source 1..9: note = Seed: LVVVGAVGV (KRAS G12V)
FVVQGPVGL

SEQ ID NO: 53660 - protein, 9 aa, synthetic construct
  source 1..9: note = Seed: LVVVGAVGV (KRAS G12V)
FVVQGPVGM

SEQ ID NO: 53661 - protein, 9 aa, synthetic construct
  source 1..9: note = Seed: LVVVGAVGV (KRAS G12V)
FVVQGPVGN

SEQ ID NO: 53662 - protein, 9 aa, synthetic construct
  source 1..9: note = Seed: LVVVGAVGV (KRAS G12V)
FVVQGPVGP

SEQ ID NO: 53663 - protein, 9 aa, synthetic construct
  source 1..9: note = Seed: LVVVGAVGV (KRAS G12V)
FVVQGPVGQ

SEQ ID NO: 53664 - protein, 9 aa, synthetic construct
  source 1..9: note = Seed: LVVVGAVGV (KRAS G12V)
FVVQGPVGR

SEQ ID NO: 53665 - protein, 9 aa, synthetic construct
  source 1..9: note = Seed: LVVVGAVGV (KRAS G12V)
FVVQGPVGS

SEQ ID NO: 53666 - protein, 9 aa, synthetic construct
  source 1..9: note = Seed: LVVVGAVGV (KRAS G12V)
FVVQGPVGT

SEQ ID NO: 53667 - protein, 9 aa, synthetic construct
  source 1..9: note = Seed: LVVVGAVGV (KRAS G12V)
FVVQGPVGV

SEQ ID NO: 53668 - protein, 9 aa, synthetic construct
  source 1..9: note = Seed: LVVVGAVGV (KRAS G12V)
FVVQGPVGW

SEQ ID NO: 53669 - protein, 9 aa, synthetic construct
  source 1..9: note = Seed: LVVVGAVGV (KRAS G12V)
FVVQGPVGY

SEQ ID NO: 53670 - protein, 9 aa, synthetic construct
  source 1..9: note = Seed: LVVVGAVGV (KRAS G12V)
FVVQGQVGA

SEQ ID NO: 53671 - protein, 9 aa, synthetic construct
  source 1..9: note = Seed: LVVVGAVGV (KRAS G12V)
FVVQGQVGF

SEQ ID NO: 53672 - protein, 9 aa, synthetic construct
  source 1..9: note = Seed: LVVVGAVGV (KRAS G12V)
FVVQGQVGG

SEQ ID NO: 53673 - protein, 9 aa, synthetic construct
  source 1..9: note = Seed: LVVVGAVGV (KRAS G12V)
FVVQGQVGI

SEQ ID NO: 53674 - protein, 9 aa, synthetic construct
  source 1..9: note = Seed: LVVVGAVGV (KRAS G12V)
FVVQGQVGL

SEQ ID NO: 53675 - protein, 9 aa, synthetic construct
  source 1..9: note = Seed: LVVVGAVGV (KRAS G12V)
FVVQGQVGM

SEQ ID NO: 53676 - protein, 9 aa, synthetic construct
  source 1..9: note = Seed: LVVVGAVGV (KRAS G12V)
FVVQGQVGS

SEQ ID NO: 53677 - protein, 9 aa, synthetic construct
  source 1..9: note = Seed: LVVVGAVGV (KRAS G12V)
FVVQGQVGT

SEQ ID NO: 53678 - protein, 9 aa, synthetic construct
  source 1..9: note = Seed: LVVVGAVGV (KRAS G12V)
FVVQGQVGV

SEQ ID NO: 53679 - protein, 9 aa, synthetic construct
  source 1..9: note = Seed: LVVVGAVGV (KRAS G12V)
FVVQGRVGA

SEQ ID NO: 53680 - protein, 9 aa, synthetic construct
  source 1..9: note = Seed: LVVVGAVGV (KRAS G12V)
FVVQGRVGG

SEQ ID NO: 53681 - protein, 9 aa, synthetic construct
  source 1..9: note = Seed: LVVVGAVGV (KRAS G12V)
FVVQGRVGH

SEQ ID NO: 53682 - protein, 9 aa, synthetic construct
  source 1..9: note = Seed: LVVVGAVGV (KRAS G12V)
FVVQGRVGI

SEQ ID NO: 53683 - protein, 9 aa, synthetic construct
  source 1..9: note = Seed: LVVVGAVGV (KRAS G12V)
FVVQGRVGK

SEQ ID NO: 53684 - protein, 9 aa, synthetic construct
  source 1..9: note = Seed: LVVVGAVGV (KRAS G12V)
FVVQGRVGL

SEQ ID NO: 53685 - protein, 9 aa, synthetic construct
  source 1..9: note = Seed: LVVVGAVGV (KRAS G12V)
FVVQGRVGM

SEQ ID NO: 53686 - protein, 9 aa, synthetic construct
  source 1..9: note = Seed: LVVVGAVGV (KRAS G12V)
FVVQGRVGN

SEQ ID NO: 53687 - protein, 9 aa, synthetic construct
  source 1..9: note = Seed: LVVVGAVGV (KRAS G12V)
FVVQGRVGP

SEQ ID NO: 53688 - protein, 9 aa, synthetic construct
  source 1..9: note = Seed: LVVVGAVGV (KRAS G12V)
FVVQGRVGQ

SEQ ID NO: 53689 - protein, 9 aa, synthetic construct
  source 1..9: note = Seed: LVVVGAVGV (KRAS G12V)
FVVQGRVGR

SEQ ID NO: 53690 - protein, 9 aa, synthetic construct
  source 1..9: note = Seed: LVVVGAVGV (KRAS G12V)
FVVQGRVGS

SEQ ID NO: 53691 - protein, 9 aa, synthetic construct
  source 1..9: note = Seed: LVVVGAVGV (KRAS G12V)
FVVQGRVGT

SEQ ID NO: 53692 - protein, 9 aa, synthetic construct
  source 1..9: note = Seed: LVVVGAVGV (KRAS G12V)
FVVQGRVGV

SEQ ID NO: 53693 - protein, 9 aa, synthetic construct
  source 1..9: note = Seed: LVVVGAVGV (KRAS G12V)
FVVQGRVGY

SEQ ID NO: 53694 - protein, 9 aa, synthetic construct
  source 1..9: note = Seed: LVVVGAVGV (KRAS G12V)
FVVQGSVGA

SEQ ID NO: 53695 - protein, 9 aa, synthetic construct
  source 1..9: note = Seed: LVVVGAVGV (KRAS G12V)
FVVQGSVGC

SEQ ID NO: 53696 - protein, 9 aa, synthetic construct
  source 1..9: note = Seed: LVVVGAVGV (KRAS G12V)
FVVQGSVGD

SEQ ID NO: 53697 - protein, 9 aa, synthetic construct
  source 1..9: note = Seed: LVVVGAVGV (KRAS G12V)
FVVQGSVGE

SEQ ID NO: 53698 - protein, 9 aa, synthetic construct
  source 1..9: note = Seed: LVVVGAVGV (KRAS G12V)
FVVQGSVGF

SEQ ID NO: 53699 - protein, 9 aa, synthetic construct
  source 1..9: note = Seed: LVVVGAVGV (KRAS G12V)
FVVQGSVGG

SEQ ID NO: 53700 - protein, 9 aa, synthetic construct
  source 1..9: note = Seed: LVVVGAVGV (KRAS G12V)
FVVQGSVGH

SEQ ID NO: 53701 - protein, 9 aa, synthetic construct
  source 1..9: note = Seed: LVVVGAVGV (KRAS G12V)
FVVQGSVGK

SEQ ID NO: 53702 - protein, 9 aa, synthetic construct
  source 1..9: note = Seed: LVVVGAVGV (KRAS G12V)
FVVQGSVGM

SEQ ID NO: 53703 - protein, 9 aa, synthetic construct
  source 1..9: note = Seed: LVVVGAVGV (KRAS G12V)
FVVQGSVGN

SEQ ID NO: 53704 - protein, 9 aa, synthetic construct
  source 1..9: note = Seed: LVVVGAVGV (KRAS G12V)
FVVQGSVGP

SEQ ID NO: 53705 - protein, 9 aa, synthetic construct
  source 1..9: note = Seed: LVVVGAVGV (KRAS G12V)
FVVQGSVGQ

SEQ ID NO: 53706 - protein, 9 aa, synthetic construct
  source 1..9: note = Seed: LVVVGAVGV (KRAS G12V)
FVVQGSVGR

SEQ ID NO: 53707 - protein, 9 aa, synthetic construct
  source 1..9: note = Seed: LVVVGAVGV (KRAS G12V)
FVVQGSVGS

SEQ ID NO: 53708 - protein, 9 aa, synthetic construct
  source 1..9: note = Seed: LVVVGAVGV (KRAS G12V)
FVVQGSVGT

SEQ ID NO: 53709 - protein, 9 aa, synthetic construct
  source 1..9: note = Seed: LVVVGAVGV (KRAS G12V)
FVVQGSVGW

SEQ ID NO: 53710 - protein, 9 aa, synthetic construct
  source 1..9: note = Seed: LVVVGAVGV (KRAS G12V)
FVVQGSVGY

SEQ ID NO: 53711 - protein, 9 aa, synthetic construct
  source 1..9: note = Seed: LVVVGAVGV (KRAS G12V)
FVVQGTVGA

SEQ ID NO: 53712 - protein, 9 aa, synthetic construct
  source 1..9: note = Seed: LVVVGAVGV (KRAS G12V)
FVVQGTVGC

SEQ ID NO: 53713 - protein, 9 aa, synthetic construct
  source 1..9: note = Seed: LVVVGAVGV (KRAS G12V)
FVVQGTVGD

SEQ ID NO: 53714 - protein, 9 aa, synthetic construct
  source 1..9: note = Seed: LVVVGAVGV (KRAS G12V)
FVVQGTVGE

SEQ ID NO: 53715 - protein, 9 aa, synthetic construct
  source 1..9: note = Seed: LVVVGAVGV (KRAS G12V)
FVVQGTVGF

SEQ ID NO: 53716 - protein, 9 aa, synthetic construct
  source 1..9: note = Seed: LVVVGAVGV (KRAS G12V)
FVVQGTVGG

SEQ ID NO: 53717 - protein, 9 aa, synthetic construct
  source 1..9: note = Seed: LVVVGAVGV (KRAS G12V)
FVVQGTVGH

SEQ ID NO: 53718 - protein, 9 aa, synthetic construct
  source 1..9: note = Seed: LVVVGAVGV (KRAS G12V)
FVVQGTVGI

SEQ ID NO: 53719 - protein, 9 aa, synthetic construct
  source 1..9: note = Seed: LVVVGAVGV (KRAS G12V)
FVVQGTVGK

SEQ ID NO: 53720 - protein, 9 aa, synthetic construct
  source 1..9: note = Seed: LVVVGAVGV (KRAS G12V)
FVVQGTVGL

SEQ ID NO: 53721 - protein, 9 aa, synthetic construct
  source 1..9: note = Seed: LVVVGAVGV (KRAS G12V)
FVVQGTVGM

SEQ ID NO: 53722 - protein, 9 aa, synthetic construct
  source 1..9: note = Seed: LVVVGAVGV (KRAS G12V)
FVVQGTVGN

SEQ ID NO: 53723 - protein, 9 aa, synthetic construct
  source 1..9: note = Seed: LVVVGAVGV (KRAS G12V)
FVVQGTVGP

SEQ ID NO: 53724 - protein, 9 aa, synthetic construct
  source 1..9: note = Seed: LVVVGAVGV (KRAS G12V)
FVVQGTVGQ

SEQ ID NO: 53725 - protein, 9 aa, synthetic construct
  source 1..9: note = Seed: LVVVGAVGV (KRAS G12V)
FVVQGTVGR

SEQ ID NO: 53726 - protein, 9 aa, synthetic construct
  source 1..9: note = Seed: LVVVGAVGV (KRAS G12V)
FVVQGTVGS

SEQ ID NO: 53727 - protein, 9 aa, synthetic construct
  source 1..9: note = Seed: LVVVGAVGV (KRAS G12V)
FVVQGTVGT

SEQ ID NO: 53728 - protein, 9 aa, synthetic construct
  source 1..9: note = Seed: LVVVGAVGV (KRAS G12V)
FVVQGTVGV

SEQ ID NO: 53729 - protein, 9 aa, synthetic construct
  source 1..9: note = Seed: LVVVGAVGV (KRAS G12V)
FVVQGTVGW

SEQ ID NO: 53730 - protein, 9 aa, synthetic construct
  source 1..9: note = Seed: LVVVGAVGV (KRAS G12V)
FVVQGTVGY

SEQ ID NO: 53731 - protein, 9 aa, synthetic construct
  source 1..9: note = Seed: LVVVGAVGV (KRAS G12V)
FVVQGVVGA

SEQ ID NO: 53732 - protein, 9 aa, synthetic construct
  source 1..9: note = Seed: LVVVGAVGV (KRAS G12V)
FVVQGVVGC

SEQ ID NO: 53733 - protein, 9 aa, synthetic construct
  source 1..9: note = Seed: LVVVGAVGV (KRAS G12V)
FVVQGVVGD

SEQ ID NO: 53734 - protein, 9 aa, synthetic construct
  source 1..9: note = Seed: LVVVGAVGV (KRAS G12V)
FVVQGVVGE

SEQ ID NO: 53735 - protein, 9 aa, synthetic construct
  source 1..9: note = Seed: LVVVGAVGV (KRAS G12V)
FVVQGVVGF

SEQ ID NO: 53736 - protein, 9 aa, synthetic construct
  source 1..9: note = Seed: LVVVGAVGV (KRAS G12V)
FVVQGVVGG

SEQ ID NO: 53737 - protein, 9 aa, synthetic construct
  source 1..9: note = Seed: LVVVGAVGV (KRAS G12V)
FVVQGVVGH

SEQ ID NO: 53738 - protein, 9 aa, synthetic construct
  source 1..9: note = Seed: LVVVGAVGV (KRAS G12V)
FVVQGVVGI

SEQ ID NO: 53739 - protein, 9 aa, synthetic construct
  source 1..9: note = Seed: LVVVGAVGV (KRAS G12V)
FVVQGVVGK

SEQ ID NO: 53740 - protein, 9 aa, synthetic construct
  source 1..9: note = Seed: LVVVGAVGV (KRAS G12V)
FVVQGVVGL

SEQ ID NO: 53741 - protein, 9 aa, synthetic construct
  source 1..9: note = Seed: LVVVGAVGV (KRAS G12V)
FVVQGVVGM

SEQ ID NO: 53742 - protein, 9 aa, synthetic construct
  source 1..9: note = Seed: LVVVGAVGV (KRAS G12V)
FVVQGVVGN

SEQ ID NO: 53743 - protein, 9 aa, synthetic construct
  source 1..9: note = Seed: LVVVGAVGV (KRAS G12V)
FVVQGVVGP

SEQ ID NO: 53744 - protein, 9 aa, synthetic construct
  source 1..9: note = Seed: LVVVGAVGV (KRAS G12V)
FVVQGVVGQ

SEQ ID NO: 53745 - protein, 9 aa, synthetic construct
  source 1..9: note = Seed: LVVVGAVGV (KRAS G12V)
FVVQGVVGR

SEQ ID NO: 53746 - protein, 9 aa, synthetic construct
  source 1..9: note = Seed: LVVVGAVGV (KRAS G12V)
FVVQGVVGS

SEQ ID NO: 53747 - protein, 9 aa, synthetic construct
  source 1..9: note = Seed: LVVVGAVGV (KRAS G12V)
FVVQGVVGT

SEQ ID NO: 53748 - protein, 9 aa, synthetic construct
  source 1..9: note = Seed: LVVVGAVGV (KRAS G12V)
FVVQGVVGV

SEQ ID NO: 53749 - protein, 9 aa, synthetic construct
  source 1..9: note = Seed: LVVVGAVGV (KRAS G12V)
FVVQGVVGY

SEQ ID NO: 53750 - protein, 9 aa, synthetic construct
  source 1..9: note = Seed: LVVVGAVGV (KRAS G12V)
FVVQGWVGA

SEQ ID NO: 53751 - protein, 9 aa, synthetic construct
  source 1..9: note = Seed: LVVVGAVGV (KRAS G12V)
FVVQGWVGI

SEQ ID NO: 53752 - protein, 9 aa, synthetic construct
  source 1..9: note = Seed: LVVVGAVGV (KRAS G12V)
FVVQGWVGL

SEQ ID NO: 53753 - protein, 9 aa, synthetic construct
  source 1..9: note = Seed: LVVVGAVGV (KRAS G12V)
FVVQGWVGM

SEQ ID NO: 53754 - protein, 9 aa, synthetic construct
  source 1..9: note = Seed: LVVVGAVGV (KRAS G12V)
FVVQGWVGS

SEQ ID NO: 53755 - protein, 9 aa, synthetic construct
  source 1..9: note = Seed: LVVVGAVGV (KRAS G12V)
FVVQGWVGV

SEQ ID NO: 53756 - protein, 9 aa, synthetic construct
  source 1..9: note = Seed: LVVVGAVGV (KRAS G12V)
FVVQGYVGA

SEQ ID NO: 53757 - protein, 9 aa, synthetic construct
  source 1..9: note = Seed: LVVVGAVGV (KRAS G12V)
FVVQGYVGI

SEQ ID NO: 53758 - protein, 9 aa, synthetic construct
  source 1..9: note = Seed: LVVVGAVGV (KRAS G12V)
FVVQGYVGL

SEQ ID NO: 53759 - protein, 9 aa, synthetic construct
  source 1..9: note = Seed: LVVVGAVGV (KRAS G12V)
FVVQGYVGM

SEQ ID NO: 53760 - protein, 9 aa, synthetic construct
  source 1..9: note = Seed: LVVVGAVGV (KRAS G12V)
FVVQGYVGV

SEQ ID NO: 53761 - protein, 9 aa, synthetic construct
  source 1..9: note = Seed: LVVVGAVGV (KRAS G12V)
FVVRGAVGA

SEQ ID NO: 53762 - protein, 9 aa, synthetic construct
  source 1..9: note = Seed: LVVVGAVGV (KRAS G12V)
FVVRGAVGF

SEQ ID NO: 53763 - protein, 9 aa, synthetic construct
  source 1..9: note = Seed: LVVVGAVGV (KRAS G12V)
FVVRGAVGG

SEQ ID NO: 53764 - protein, 9 aa, synthetic construct
  source 1..9: note = Seed: LVVVGAVGV (KRAS G12V)
FVVRGAVGH

SEQ ID NO: 53765 - protein, 9 aa, synthetic construct
  source 1..9: note = Seed: LVVVGAVGV (KRAS G12V)
FVVRGAVGI

SEQ ID NO: 53766 - protein, 9 aa, synthetic construct
  source 1..9: note = Seed: LVVVGAVGV (KRAS G12V)
FVVRGAVGL

SEQ ID NO: 53767 - protein, 9 aa, synthetic construct
  source 1..9: note = Seed: LVVVGAVGV (KRAS G12V)
FVVRGAVGM

SEQ ID NO: 53768 - protein, 9 aa, synthetic construct
  source 1..9: note = Seed: LVVVGAVGV (KRAS G12V)
FVVRGAVGQ

SEQ ID NO: 53769 - protein, 9 aa, synthetic construct
  source 1..9: note = Seed: LVVVGAVGV (KRAS G12V)
FVVRGAVGR

SEQ ID NO: 53770 - protein, 9 aa, synthetic construct
  source 1..9: note = Seed: LVVVGAVGV (KRAS G12V)
FVVRGAVGS

SEQ ID NO: 53771 - protein, 9 aa, synthetic construct
  source 1..9: note = Seed: LVVVGAVGV (KRAS G12V)
FVVRGAVGT

SEQ ID NO: 53772 - protein, 9 aa, synthetic construct
  source 1..9: note = Seed: LVVVGAVGV (KRAS G12V)
FVVRGAVGV

SEQ ID NO: 53773 - protein, 9 aa, synthetic construct
  source 1..9: note = Seed: LVVVGAVGV (KRAS G12V)
FVVRGAVGY

SEQ ID NO: 53774 - protein, 9 aa, synthetic construct
  source 1..9: note = Seed: LVVVGAVGV (KRAS G12V)
FVVRGGVGA

SEQ ID NO: 53775 - protein, 9 aa, synthetic construct
  source 1..9: note = Seed: LVVVGAVGV (KRAS G12V)
FVVRGGVGI

SEQ ID NO: 53776 - protein, 9 aa, synthetic construct
  source 1..9: note = Seed: LVVVGAVGV (KRAS G12V)
FVVRGGVGL

SEQ ID NO: 53777 - protein, 9 aa, synthetic construct
  source 1..9: note = Seed: LVVVGAVGV (KRAS G12V)
FVVRGGVGM

SEQ ID NO: 53778 - protein, 9 aa, synthetic construct
  source 1..9: note = Seed: LVVVGAVGV (KRAS G12V)
FVVRGGVGV

SEQ ID NO: 53779 - protein, 9 aa, synthetic construct
  source 1..9: note = Seed: LVVVGAVGV (KRAS G12V)
FVVRGHVGA

SEQ ID NO: 53780 - protein, 9 aa, synthetic construct
  source 1..9: note = Seed: LVVVGAVGV (KRAS G12V)
FVVRGHVGC

SEQ ID NO: 53781 - protein, 9 aa, synthetic construct
  source 1..9: note = Seed: LVVVGAVGV (KRAS G12V)
FVVRGHVGE

SEQ ID NO: 53782 - protein, 9 aa, synthetic construct
  source 1..9: note = Seed: LVVVGAVGV (KRAS G12V)
FVVRGHVGF

SEQ ID NO: 53783 - protein, 9 aa, synthetic construct
  source 1..9: note = Seed: LVVVGAVGV (KRAS G12V)
FVVRGHVGG

SEQ ID NO: 53784 - protein, 9 aa, synthetic construct
  source 1..9: note = Seed: LVVVGAVGV (KRAS G12V)
FVVRGHVGH

SEQ ID NO: 53785 - protein, 9 aa, synthetic construct
  source 1..9: note = Seed: LVVVGAVGV (KRAS G12V)
FVVRGHVGL

SEQ ID NO: 53786 - protein, 9 aa, synthetic construct
  source 1..9: note = Seed: LVVVGAVGV (KRAS G12V)
FVVRGHVGN

SEQ ID NO: 53787 - protein, 9 aa, synthetic construct
  source 1..9: note = Seed: LVVVGAVGV (KRAS G12V)
FVVRGHVGQ

SEQ ID NO: 53788 - protein, 9 aa, synthetic construct
  source 1..9: note = Seed: LVVVGAVGV (KRAS G12V)
FVVRGHVGR

SEQ ID NO: 53789 - protein, 9 aa, synthetic construct
  source 1..9: note = Seed: LVVVGAVGV (KRAS G12V)
FVVRGHVGS

SEQ ID NO: 53790 - protein, 9 aa, synthetic construct
  source 1..9: note = Seed: LVVVGAVGV (KRAS G12V)
FVVRGIVGA

SEQ ID NO: 53791 - protein, 9 aa, synthetic construct
  source 1..9: note = Seed: LVVVGAVGV (KRAS G12V)
FVVRGIVGK

SEQ ID NO: 53792 - protein, 9 aa, synthetic construct
  source 1..9: note = Seed: LVVVGAVGV (KRAS G12V)
FVVRGIVGL

SEQ ID NO: 53793 - protein, 9 aa, synthetic construct
  source 1..9: note = Seed: LVVVGAVGV (KRAS G12V)
FVVRGIVGQ

SEQ ID NO: 53794 - protein, 9 aa, synthetic construct
  source 1..9: note = Seed: LVVVGAVGV (KRAS G12V)
FVVRGIVGR

SEQ ID NO: 53795 - protein, 9 aa, synthetic construct
  source 1..9: note = Seed: LVVVGAVGV (KRAS G12V)
FVVRGIVGS

SEQ ID NO: 53796 - protein, 9 aa, synthetic construct
  source 1..9: note = Seed: LVVVGAVGV (KRAS G12V)
FVVRGKVGA

SEQ ID NO: 53797 - protein, 9 aa, synthetic construct
  source 1..9: note = Seed: LVVVGAVGV (KRAS G12V)
FVVRGKVGC

SEQ ID NO: 53798 - protein, 9 aa, synthetic construct
  source 1..9: note = Seed: LVVVGAVGV (KRAS G12V)
FVVRGKVGD

SEQ ID NO: 53799 - protein, 9 aa, synthetic construct
  source 1..9: note = Seed: LVVVGAVGV (KRAS G12V)
FVVRGKVGE

SEQ ID NO: 53800 - protein, 9 aa, synthetic construct
  source 1..9: note = Seed: LVVVGAVGV (KRAS G12V)
FVVRGKVGF

SEQ ID NO: 53801 - protein, 9 aa, synthetic construct
  source 1..9: note = Seed: LVVVGAVGV (KRAS G12V)
FVVRGKVGG

SEQ ID NO: 53802 - protein, 9 aa, synthetic construct
  source 1..9: note = Seed: LVVVGAVGV (KRAS G12V)
FVVRGKVGH

SEQ ID NO: 53803 - protein, 9 aa, synthetic construct
  source 1..9: note = Seed: LVVVGAVGV (KRAS G12V)
FVVRGKVGI

SEQ ID NO: 53804 - protein, 9 aa, synthetic construct
  source 1..9: note = Seed: LVVVGAVGV (KRAS G12V)
FVVRGKVGK

SEQ ID NO: 53805 - protein, 9 aa, synthetic construct
  source 1..9: note = Seed: LVVVGAVGV (KRAS G12V)
FVVRGKVGL

SEQ ID NO: 53806 - protein, 9 aa, synthetic construct
  source 1..9: note = Seed: LVVVGAVGV (KRAS G12V)
FVVRGKVGM

SEQ ID NO: 53807 - protein, 9 aa, synthetic construct
  source 1..9: note = Seed: LVVVGAVGV (KRAS G12V)
FVVRGKVGN

SEQ ID NO: 53808 - protein, 9 aa, synthetic construct
  source 1..9: note = Seed: LVVVGAVGV (KRAS G12V)
FVVRGKVGP

SEQ ID NO: 53809 - protein, 9 aa, synthetic construct
  source 1..9: note = Seed: LVVVGAVGV (KRAS G12V)
FVVRGKVGQ

SEQ ID NO: 53810 - protein, 9 aa, synthetic construct
  source 1..9: note = Seed: LVVVGAVGV (KRAS G12V)
FVVRGKVGR

SEQ ID NO: 53811 - protein, 9 aa, synthetic construct
  source 1..9: note = Seed: LVVVGAVGV (KRAS G12V)
FVVRGKVGS

SEQ ID NO: 53812 - protein, 9 aa, synthetic construct
  source 1..9: note = Seed: LVVVGAVGV (KRAS G12V)
FVVRGKVGT

SEQ ID NO: 53813 - protein, 9 aa, synthetic construct
  source 1..9: note = Seed: LVVVGAVGV (KRAS G12V)
FVVRGKVGV

SEQ ID NO: 53814 - protein, 9 aa, synthetic construct
  source 1..9: note = Seed: LVVVGAVGV (KRAS G12V)
FVVRGKVGW

SEQ ID NO: 53815 - protein, 9 aa, synthetic construct
  source 1..9: note = Seed: LVVVGAVGV (KRAS G12V)
FVVRGKVGY

SEQ ID NO: 53816 - protein, 9 aa, synthetic construct
  source 1..9: note = Seed: LVVVGAVGV (KRAS G12V)
FVVRGLVGR

SEQ ID NO: 53817 - protein, 9 aa, synthetic construct
  source 1..9: note = Seed: LVVVGAVGV (KRAS G12V)
FVVRGMVGA

SEQ ID NO: 53818 - protein, 9 aa, synthetic construct
  source 1..9: note = Seed: LVVVGAVGV (KRAS G12V)
FVVRGMVGR

SEQ ID NO: 53819 - protein, 9 aa, synthetic construct
  source 1..9: note = Seed: LVVVGAVGV (KRAS G12V)
FVVRGMVGV

SEQ ID NO: 53820 - protein, 9 aa, synthetic construct
  source 1..9: note = Seed: LVVVGAVGV (KRAS G12V)
FVVRGNVGA

SEQ ID NO: 53821 - protein, 9 aa, synthetic construct
  source 1..9: note = Seed: LVVVGAVGV (KRAS G12V)
FVVRGNVGH

SEQ ID NO: 53822 - protein, 9 aa, synthetic construct
  source 1..9: note = Seed: LVVVGAVGV (KRAS G12V)
FVVRGNVGI

SEQ ID NO: 53823 - protein, 9 aa, synthetic construct
  source 1..9: note = Seed: LVVVGAVGV (KRAS G12V)
FVVRGNVGL

SEQ ID NO: 53824 - protein, 9 aa, synthetic construct
  source 1..9: note = Seed: LVVVGAVGV (KRAS G12V)
FVVRGNVGM

SEQ ID NO: 53825 - protein, 9 aa, synthetic construct
  source 1..9: note = Seed: LVVVGAVGV (KRAS G12V)
FVVRGNVGS

SEQ ID NO: 53826 - protein, 9 aa, synthetic construct
  source 1..9: note = Seed: LVVVGAVGV (KRAS G12V)
FVVRGNVGV

SEQ ID NO: 53827 - protein, 9 aa, synthetic construct
  source 1..9: note = Seed: LVVVGAVGV (KRAS G12V)
FVVRGPVGA

SEQ ID NO: 53828 - protein, 9 aa, synthetic construct
  source 1..9: note = Seed: LVVVGAVGV (KRAS G12V)
FVVRGPVGG

SEQ ID NO: 53829 - protein, 9 aa, synthetic construct
  source 1..9: note = Seed: LVVVGAVGV (KRAS G12V)
FVVRGPVGI

SEQ ID NO: 53830 - protein, 9 aa, synthetic construct
  source 1..9: note = Seed: LVVVGAVGV (KRAS G12V)
FVVRGPVGL

SEQ ID NO: 53831 - protein, 9 aa, synthetic construct
  source 1..9: note = Seed: LVVVGAVGV (KRAS G12V)
FVVRGPVGM

SEQ ID NO: 53832 - protein, 9 aa, synthetic construct
  source 1..9: note = Seed: LVVVGAVGV (KRAS G12V)
FVVRGPVGQ

SEQ ID NO: 53833 - protein, 9 aa, synthetic construct
  source 1..9: note = Seed: LVVVGAVGV (KRAS G12V)
FVVRGPVGR

SEQ ID NO: 53834 - protein, 9 aa, synthetic construct
  source 1..9: note = Seed: LVVVGAVGV (KRAS G12V)
FVVRGPVGV

SEQ ID NO: 53835 - protein, 9 aa, synthetic construct
  source 1..9: note = Seed: LVVVGAVGV (KRAS G12V)
FVVRGQVGA

SEQ ID NO: 53836 - protein, 9 aa, synthetic construct
  source 1..9: note = Seed: LVVVGAVGV (KRAS G12V)
FVVRGQVGH

SEQ ID NO: 53837 - protein, 9 aa, synthetic construct
  source 1..9: note = Seed: LVVVGAVGV (KRAS G12V)
FVVRGQVGQ

SEQ ID NO: 53838 - protein, 9 aa, synthetic construct
  source 1..9: note = Seed: LVVVGAVGV (KRAS G12V)
FVVRGQVGS

SEQ ID NO: 53839 - protein, 9 aa, synthetic construct
  source 1..9: note = Seed: LVVVGAVGV (KRAS G12V)
FVVRGRVGA

SEQ ID NO: 53840 - protein, 9 aa, synthetic construct
  source 1..9: note = Seed: LVVVGAVGV (KRAS G12V)
FVVRGRVGC

SEQ ID NO: 53841 - protein, 9 aa, synthetic construct
  source 1..9: note = Seed: LVVVGAVGV (KRAS G12V)
FVVRGRVGD

SEQ ID NO: 53842 - protein, 9 aa, synthetic construct
  source 1..9: note = Seed: LVVVGAVGV (KRAS G12V)
FVVRGRVGE

SEQ ID NO: 53843 - protein, 9 aa, synthetic construct
  source 1..9: note = Seed: LVVVGAVGV (KRAS G12V)
FVVRGRVGF

SEQ ID NO: 53844 - protein, 9 aa, synthetic construct
  source 1..9: note = Seed: LVVVGAVGV (KRAS G12V)
FVVRGRVGG

SEQ ID NO: 53845 - protein, 9 aa, synthetic construct
  source 1..9: note = Seed: LVVVGAVGV (KRAS G12V)
FVVRGRVGH

SEQ ID NO: 53846 - protein, 9 aa, synthetic construct
  source 1..9: note = Seed: LVVVGAVGV (KRAS G12V)
FVVRGRVGI

SEQ ID NO: 53847 - protein, 9 aa, synthetic construct
  source 1..9: note = Seed: LVVVGAVGV (KRAS G12V)
FVVRGRVGK

SEQ ID NO: 53848 - protein, 9 aa, synthetic construct
  source 1..9: note = Seed: LVVVGAVGV (KRAS G12V)
FVVRGRVGL

SEQ ID NO: 53849 - protein, 9 aa, synthetic construct
  source 1..9: note = Seed: LVVVGAVGV (KRAS G12V)
FVVRGRVGM

SEQ ID NO: 53850 - protein, 9 aa, synthetic construct
  source 1..9: note = Seed: LVVVGAVGV (KRAS G12V)
FVVRGRVGN

SEQ ID NO: 53851 - protein, 9 aa, synthetic construct
  source 1..9: note = Seed: LVVVGAVGV (KRAS G12V)
FVVRGRVGP

SEQ ID NO: 53852 - protein, 9 aa, synthetic construct
  source 1..9: note = Seed: LVVVGAVGV (KRAS G12V)
FVVRGRVGQ

SEQ ID NO: 53853 - protein, 9 aa, synthetic construct
  source 1..9: note = Seed: LVVVGAVGV (KRAS G12V)
FVVRGRVGR

SEQ ID NO: 53854 - protein, 9 aa, synthetic construct
  source 1..9: note = Seed: LVVVGAVGV (KRAS G12V)
FVVRGRVGS

SEQ ID NO: 53855 - protein, 9 aa, synthetic construct
  source 1..9: note = Seed: LVVVGAVGV (KRAS G12V)
FVVRGRVGT

SEQ ID NO: 53856 - protein, 9 aa, synthetic construct
  source 1..9: note = Seed: LVVVGAVGV (KRAS G12V)
FVVRGRVGV

SEQ ID NO: 53857 - protein, 9 aa, synthetic construct
  source 1..9: note = Seed: LVVVGAVGV (KRAS G12V)
FVVRGRVGW

SEQ ID NO: 53858 - protein, 9 aa, synthetic construct
  source 1..9: note = Seed: LVVVGAVGV (KRAS G12V)
FVVRGRVGY

SEQ ID NO: 53859 - protein, 9 aa, synthetic construct
  source 1..9: note = Seed: LVVVGAVGV (KRAS G12V)
FVVRGSVGA

SEQ ID NO: 53860 - protein, 9 aa, synthetic construct
  source 1..9: note = Seed: LVVVGAVGV (KRAS G12V)
FVVRGSVGF

SEQ ID NO: 53861 - protein, 9 aa, synthetic construct
  source 1..9: note = Seed: LVVVGAVGV (KRAS G12V)
FVVRGSVGH

SEQ ID NO: 53862 - protein, 9 aa, synthetic construct
  source 1..9: note = Seed: LVVVGAVGV (KRAS G12V)
FVVRGSVGI

SEQ ID NO: 53863 - protein, 9 aa, synthetic construct
  source 1..9: note = Seed: LVVVGAVGV (KRAS G12V)
FVVRGSVGL

SEQ ID NO: 53864 - protein, 9 aa, synthetic construct
  source 1..9: note = Seed: LVVVGAVGV (KRAS G12V)
FVVRGSVGM

SEQ ID NO: 53865 - protein, 9 aa, synthetic construct
  source 1..9: note = Seed: LVVVGAVGV (KRAS G12V)
FVVRGSVGQ

SEQ ID NO: 53866 - protein, 9 aa, synthetic construct
  source 1..9: note = Seed: LVVVGAVGV (KRAS G12V)
FVVRGSVGR

SEQ ID NO: 53867 - protein, 9 aa, synthetic construct
  source 1..9: note = Seed: LVVVGAVGV (KRAS G12V)
FVVRGSVGS

SEQ ID NO: 53868 - protein, 9 aa, synthetic construct
  source 1..9: note = Seed: LVVVGAVGV (KRAS G12V)
FVVRGSVGT

SEQ ID NO: 53869 - protein, 9 aa, synthetic construct
  source 1..9: note = Seed: LVVVGAVGV (KRAS G12V)
FVVRGSVGV

SEQ ID NO: 53870 - protein, 9 aa, synthetic construct
  source 1..9: note = Seed: LVVVGAVGV (KRAS G12V)
FVVRGTVGA

SEQ ID NO: 53871 - protein, 9 aa, synthetic construct
  source 1..9: note = Seed: LVVVGAVGV (KRAS G12V)
FVVRGTVGH

SEQ ID NO: 53872 - protein, 9 aa, synthetic construct
  source 1..9: note = Seed: LVVVGAVGV (KRAS G12V)
FVVRGTVGI

SEQ ID NO: 53873 - protein, 9 aa, synthetic construct
  source 1..9: note = Seed: LVVVGAVGV (KRAS G12V)
FVVRGTVGL

SEQ ID NO: 53874 - protein, 9 aa, synthetic construct
  source 1..9: note = Seed: LVVVGAVGV (KRAS G12V)
FVVRGTVGM

SEQ ID NO: 53875 - protein, 9 aa, synthetic construct
  source 1..9: note = Seed: LVVVGAVGV (KRAS G12V)
FVVRGTVGQ

SEQ ID NO: 53876 - protein, 9 aa, synthetic construct
  source 1..9: note = Seed: LVVVGAVGV (KRAS G12V)
FVVRGTVGR

SEQ ID NO: 53877 - protein, 9 aa, synthetic construct
  source 1..9: note = Seed: LVVVGAVGV (KRAS G12V)
FVVRGTVGS

SEQ ID NO: 53878 - protein, 9 aa, synthetic construct
  source 1..9: note = Seed: LVVVGAVGV (KRAS G12V)
FVVRGTVGV

SEQ ID NO: 53879 - protein, 9 aa, synthetic construct
  source 1..9: note = Seed: LVVVGAVGV (KRAS G12V)
FVVRGTVGY

SEQ ID NO: 53880 - protein, 9 aa, synthetic construct
  source 1..9: note = Seed: LVVVGAVGV (KRAS G12V)
FVVRGVVGA

SEQ ID NO: 53881 - protein, 9 aa, synthetic construct
  source 1..9: note = Seed: LVVVGAVGV (KRAS G12V)
FVVRGVVGH

SEQ ID NO: 53882 - protein, 9 aa, synthetic construct
  source 1..9: note = Seed: LVVVGAVGV (KRAS G12V)
FVVRGVVGI

SEQ ID NO: 53883 - protein, 9 aa, synthetic construct
  source 1..9: note = Seed: LVVVGAVGV (KRAS G12V)
FVVRGVVGL

SEQ ID NO: 53884 - protein, 9 aa, synthetic construct
  source 1..9: note = Seed: LVVVGAVGV (KRAS G12V)
FVVRGVVGM

SEQ ID NO: 53885 - protein, 9 aa, synthetic construct
  source 1..9: note = Seed: LVVVGAVGV (KRAS G12V)
FVVRGVVGN

SEQ ID NO: 53886 - protein, 9 aa, synthetic construct
  source 1..9: note = Seed: LVVVGAVGV (KRAS G12V)
FVVRGVVGQ

SEQ ID NO: 53887 - protein, 9 aa, synthetic construct
  source 1..9: note = Seed: LVVVGAVGV (KRAS G12V)
FVVRGVVGR

SEQ ID NO: 53888 - protein, 9 aa, synthetic construct
  source 1..9: note = Seed: LVVVGAVGV (KRAS G12V)
FVVRGVVGS

SEQ ID NO: 53889 - protein, 9 aa, synthetic construct
  source 1..9: note = Seed: LVVVGAVGV (KRAS G12V)
FVVRGVVGV

SEQ ID NO: 53890 - protein, 9 aa, synthetic construct
  source 1..9: note = Seed: LVVVGAVGV (KRAS G12V)
FVVSGAVGC

SEQ ID NO: 53891 - protein, 9 aa, synthetic construct
  source 1..9: note = Seed: LVVVGAVGV (KRAS G12V)
FVVSGAVGD

SEQ ID NO: 53892 - protein, 9 aa, synthetic construct
  source 1..9: note = Seed: LVVVGAVGV (KRAS G12V)
FVVSGAVGE

SEQ ID NO: 53893 - protein, 9 aa, synthetic construct
  source 1..9: note = Seed: LVVVGAVGV (KRAS G12V)
FVVSGAVGF

SEQ ID NO: 53894 - protein, 9 aa, synthetic construct
  source 1..9: note = Seed: LVVVGAVGV (KRAS G12V)
FVVSGAVGG

SEQ ID NO: 53895 - protein, 9 aa, synthetic construct
  source 1..9: note = Seed: LVVVGAVGV (KRAS G12V)
FVVSGAVGH

SEQ ID NO: 53896 - protein, 9 aa, synthetic construct
  source 1..9: note = Seed: LVVVGAVGV (KRAS G12V)
FVVSGAVGK

SEQ ID NO: 53897 - protein, 9 aa, synthetic construct
  source 1..9: note = Seed: LVVVGAVGV (KRAS G12V)
FVVSGAVGM

SEQ ID NO: 53898 - protein, 9 aa, synthetic construct
  source 1..9: note = Seed: LVVVGAVGV (KRAS G12V)
FVVSGAVGN

SEQ ID NO: 53899 - protein, 9 aa, synthetic construct
  source 1..9: note = Seed: LVVVGAVGV (KRAS G12V)
FVVSGAVGP

SEQ ID NO: 53900 - protein, 9 aa, synthetic construct
  source 1..9: note = Seed: LVVVGAVGV (KRAS G12V)
FVVSGAVGQ

SEQ ID NO: 53901 - protein, 9 aa, synthetic construct
  source 1..9: note = Seed: LVVVGAVGV (KRAS G12V)
FVVSGAVGR

SEQ ID NO: 53902 - protein, 9 aa, synthetic construct
  source 1..9: note = Seed: LVVVGAVGV (KRAS G12V)
FVVSGAVGS

SEQ ID NO: 53903 - protein, 9 aa, synthetic construct
  source 1..9: note = Seed: LVVVGAVGV (KRAS G12V)
FVVSGAVGT

SEQ ID NO: 53904 - protein, 9 aa, synthetic construct
  source 1..9: note = Seed: LVVVGAVGV (KRAS G12V)
FVVSGAVGW

SEQ ID NO: 53905 - protein, 9 aa, synthetic construct
  source 1..9: note = Seed: LVVVGAVGV (KRAS G12V)
FVVSGAVGY

SEQ ID NO: 53906 - protein, 9 aa, synthetic construct
  source 1..9: note = Seed: LVVVGAVGV (KRAS G12V)
FVVSGCVGA

SEQ ID NO: 53907 - protein, 9 aa, synthetic construct
  source 1..9: note = Seed: LVVVGAVGV (KRAS G12V)
FVVSGCVGC

SEQ ID NO: 53908 - protein, 9 aa, synthetic construct
  source 1..9: note = Seed: LVVVGAVGV (KRAS G12V)
FVVSGCVGF

SEQ ID NO: 53909 - protein, 9 aa, synthetic construct
  source 1..9: note = Seed: LVVVGAVGV (KRAS G12V)
FVVSGCVGG

SEQ ID NO: 53910 - protein, 9 aa, synthetic construct
  source 1..9: note = Seed: LVVVGAVGV (KRAS G12V)
FVVSGCVGH

SEQ ID NO: 53911 - protein, 9 aa, synthetic construct
  source 1..9: note = Seed: LVVVGAVGV (KRAS G12V)
FVVSGCVGI

SEQ ID NO: 53912 - protein, 9 aa, synthetic construct
  source 1..9: note = Seed: LVVVGAVGV (KRAS G12V)
FVVSGCVGL

SEQ ID NO: 53913 - protein, 9 aa, synthetic construct
  source 1..9: note = Seed: LVVVGAVGV (KRAS G12V)
FVVSGCVGM

SEQ ID NO: 53914 - protein, 9 aa, synthetic construct
  source 1..9: note = Seed: LVVVGAVGV (KRAS G12V)
FVVSGCVGN

SEQ ID NO: 53915 - protein, 9 aa, synthetic construct
  source 1..9: note = Seed: LVVVGAVGV (KRAS G12V)
FVVSGCVGQ

SEQ ID NO: 53916 - protein, 9 aa, synthetic construct
  source 1..9: note = Seed: LVVVGAVGV (KRAS G12V)
FVVSGCVGR

SEQ ID NO: 53917 - protein, 9 aa, synthetic construct
  source 1..9: note = Seed: LVVVGAVGV (KRAS G12V)
FVVSGCVGS

SEQ ID NO: 53918 - protein, 9 aa, synthetic construct
  source 1..9: note = Seed: LVVVGAVGV (KRAS G12V)
FVVSGCVGT

SEQ ID NO: 53919 - protein, 9 aa, synthetic construct
  source 1..9: note = Seed: LVVVGAVGV (KRAS G12V)
FVVSGCVGV

SEQ ID NO: 53920 - protein, 9 aa, synthetic construct
  source 1..9: note = Seed: LVVVGAVGV (KRAS G12V)
FVVSGCVGY

SEQ ID NO: 53921 - protein, 9 aa, synthetic construct
  source 1..9: note = Seed: LVVVGAVGV (KRAS G12V)
FVVSGDVGA

SEQ ID NO: 53922 - protein, 9 aa, synthetic construct
  source 1..9: note = Seed: LVVVGAVGV (KRAS G12V)
FVVSGDVGC

SEQ ID NO: 53923 - protein, 9 aa, synthetic construct
  source 1..9: note = Seed: LVVVGAVGV (KRAS G12V)
FVVSGDVGF

SEQ ID NO: 53924 - protein, 9 aa, synthetic construct
  source 1..9: note = Seed: LVVVGAVGV (KRAS G12V)
FVVSGDVGG

SEQ ID NO: 53925 - protein, 9 aa, synthetic construct
  source 1..9: note = Seed: LVVVGAVGV (KRAS G12V)
FVVSGDVGI

SEQ ID NO: 53926 - protein, 9 aa, synthetic construct
  source 1..9: note = Seed: LVVVGAVGV (KRAS G12V)
FVVSGDVGL

SEQ ID NO: 53927 - protein, 9 aa, synthetic construct
  source 1..9: note = Seed: LVVVGAVGV (KRAS G12V)
FVVSGDVGM

SEQ ID NO: 53928 - protein, 9 aa, synthetic construct
  source 1..9: note = Seed: LVVVGAVGV (KRAS G12V)
FVVSGDVGN

SEQ ID NO: 53929 - protein, 9 aa, synthetic construct
  source 1..9: note = Seed: LVVVGAVGV (KRAS G12V)
FVVSGDVGQ

SEQ ID NO: 53930 - protein, 9 aa, synthetic construct
  source 1..9: note = Seed: LVVVGAVGV (KRAS G12V)
FVVSGDVGS

SEQ ID NO: 53931 - protein, 9 aa, synthetic construct
  source 1..9: note = Seed: LVVVGAVGV (KRAS G12V)
FVVSGDVGT

SEQ ID NO: 53932 - protein, 9 aa, synthetic construct
  source 1..9: note = Seed: LVVVGAVGV (KRAS G12V)
FVVSGDVGV

SEQ ID NO: 53933 - protein, 9 aa, synthetic construct
  source 1..9: note = Seed: LVVVGAVGV (KRAS G12V)
FVVSGDVGY

SEQ ID NO: 53934 - protein, 9 aa, synthetic construct
  source 1..9: note = Seed: LVVVGAVGV (KRAS G12V)
FVVSGEVGA

SEQ ID NO: 53935 - protein, 9 aa, synthetic construct
  source 1..9: note = Seed: LVVVGAVGV (KRAS G12V)
FVVSGEVGC

SEQ ID NO: 53936 - protein, 9 aa, synthetic construct
  source 1..9: note = Seed: LVVVGAVGV (KRAS G12V)
FVVSGEVGF

SEQ ID NO: 53937 - protein, 9 aa, synthetic construct
  source 1..9: note = Seed: LVVVGAVGV (KRAS G12V)
FVVSGEVGI

SEQ ID NO: 53938 - protein, 9 aa, synthetic construct
  source 1..9: note = Seed: LVVVGAVGV (KRAS G12V)
FVVSGEVGL

SEQ ID NO: 53939 - protein, 9 aa, synthetic construct
  source 1..9: note = Seed: LVVVGAVGV (KRAS G12V)
FVVSGEVGM

SEQ ID NO: 53940 - protein, 9 aa, synthetic construct
  source 1..9: note = Seed: LVVVGAVGV (KRAS G12V)
FVVSGEVGN

SEQ ID NO: 53941 - protein, 9 aa, synthetic construct
  source 1..9: note = Seed: LVVVGAVGV (KRAS G12V)
FVVSGEVGS

SEQ ID NO: 53942 - protein, 9 aa, synthetic construct
  source 1..9: note = Seed: LVVVGAVGV (KRAS G12V)
FVVSGEVGV

SEQ ID NO: 53943 - protein, 9 aa, synthetic construct
  source 1..9: note = Seed: LVVVGAVGV (KRAS G12V)
FVVSGFVGA

SEQ ID NO: 53944 - protein, 9 aa, synthetic construct
  source 1..9: note = Seed: LVVVGAVGV (KRAS G12V)
FVVSGFVGD

SEQ ID NO: 53945 - protein, 9 aa, synthetic construct
  source 1..9: note = Seed: LVVVGAVGV (KRAS G12V)
FVVSGFVGE

SEQ ID NO: 53946 - protein, 9 aa, synthetic construct
  source 1..9: note = Seed: LVVVGAVGV (KRAS G12V)
FVVSGFVGF

SEQ ID NO: 53947 - protein, 9 aa, synthetic construct
  source 1..9: note = Seed: LVVVGAVGV (KRAS G12V)
FVVSGFVGI

SEQ ID NO: 53948 - protein, 9 aa, synthetic construct
  source 1..9: note = Seed: LVVVGAVGV (KRAS G12V)
FVVSGFVGL

SEQ ID NO: 53949 - protein, 9 aa, synthetic construct
  source 1..9: note = Seed: LVVVGAVGV (KRAS G12V)
FVVSGFVGM

SEQ ID NO: 53950 - protein, 9 aa, synthetic construct
  source 1..9: note = Seed: LVVVGAVGV (KRAS G12V)
FVVSGFVGN

SEQ ID NO: 53951 - protein, 9 aa, synthetic construct
  source 1..9: note = Seed: LVVVGAVGV (KRAS G12V)
FVVSGFVGP

SEQ ID NO: 53952 - protein, 9 aa, synthetic construct
  source 1..9: note = Seed: LVVVGAVGV (KRAS G12V)
FVVSGFVGS

SEQ ID NO: 53953 - protein, 9 aa, synthetic construct
  source 1..9: note = Seed: LVVVGAVGV (KRAS G12V)
FVVSGFVGT

SEQ ID NO: 53954 - protein, 9 aa, synthetic construct
  source 1..9: note = Seed: LVVVGAVGV (KRAS G12V)
FVVSGFVGV

SEQ ID NO: 53955 - protein, 9 aa, synthetic construct
  source 1..9: note = Seed: LVVVGAVGV (KRAS G12V)
FVVSGFVGY

SEQ ID NO: 53956 - protein, 9 aa, synthetic construct
  source 1..9: note = Seed: LVVVGAVGV (KRAS G12V)
FVVSGGVGA

SEQ ID NO: 53957 - protein, 9 aa, synthetic construct
  source 1..9: note = Seed: LVVVGAVGV (KRAS G12V)
FVVSGGVGC

SEQ ID NO: 53958 - protein, 9 aa, synthetic construct
  source 1..9: note = Seed: LVVVGAVGV (KRAS G12V)
FVVSGGVGD

SEQ ID NO: 53959 - protein, 9 aa, synthetic construct
  source 1..9: note = Seed: LVVVGAVGV (KRAS G12V)
FVVSGGVGE

SEQ ID NO: 53960 - protein, 9 aa, synthetic construct
  source 1..9: note = Seed: LVVVGAVGV (KRAS G12V)
FVVSGGVGF

SEQ ID NO: 53961 - protein, 9 aa, synthetic construct
  source 1..9: note = Seed: LVVVGAVGV (KRAS G12V)
FVVSGGVGG

SEQ ID NO: 53962 - protein, 9 aa, synthetic construct
  source 1..9: note = Seed: LVVVGAVGV (KRAS G12V)
FVVSGGVGH

SEQ ID NO: 53963 - protein, 9 aa, synthetic construct
  source 1..9: note = Seed: LVVVGAVGV (KRAS G12V)
FVVSGGVGI

SEQ ID NO: 53964 - protein, 9 aa, synthetic construct
  source 1..9: note = Seed: LVVVGAVGV (KRAS G12V)
FVVSGGVGK

SEQ ID NO: 53965 - protein, 9 aa, synthetic construct
  source 1..9: note = Seed: LVVVGAVGV (KRAS G12V)
FVVSGGVGL

SEQ ID NO: 53966 - protein, 9 aa, synthetic construct
  source 1..9: note = Seed: LVVVGAVGV (KRAS G12V)
FVVSGGVGM

SEQ ID NO: 53967 - protein, 9 aa, synthetic construct
  source 1..9: note = Seed: LVVVGAVGV (KRAS G12V)
FVVSGGVGN

SEQ ID NO: 53968 - protein, 9 aa, synthetic construct
  source 1..9: note = Seed: LVVVGAVGV (KRAS G12V)
FVVSGGVGP

SEQ ID NO: 53969 - protein, 9 aa, synthetic construct
  source 1..9: note = Seed: LVVVGAVGV (KRAS G12V)
FVVSGGVGQ

SEQ ID NO: 53970 - protein, 9 aa, synthetic construct
  source 1..9: note = Seed: LVVVGAVGV (KRAS G12V)
FVVSGGVGR

SEQ ID NO: 53971 - protein, 9 aa, synthetic construct
  source 1..9: note = Seed: LVVVGAVGV (KRAS G12V)
FVVSGGVGS

SEQ ID NO: 53972 - protein, 9 aa, synthetic construct
  source 1..9: note = Seed: LVVVGAVGV (KRAS G12V)
FVVSGGVGT

SEQ ID NO: 53973 - protein, 9 aa, synthetic construct
  source 1..9: note = Seed: LVVVGAVGV (KRAS G12V)
FVVSGGVGV

SEQ ID NO: 53974 - protein, 9 aa, synthetic construct
  source 1..9: note = Seed: LVVVGAVGV (KRAS G12V)
FVVSGGVGW

SEQ ID NO: 53975 - protein, 9 aa, synthetic construct
  source 1..9: note = Seed: LVVVGAVGV (KRAS G12V)
FVVSGGVGY

SEQ ID NO: 53976 - protein, 9 aa, synthetic construct
  source 1..9: note = Seed: LVVVGAVGV (KRAS G12V)
FVVSGHVGA

SEQ ID NO: 53977 - protein, 9 aa, synthetic construct
  source 1..9: note = Seed: LVVVGAVGV (KRAS G12V)
FVVSGHVGC

SEQ ID NO: 53978 - protein, 9 aa, synthetic construct
  source 1..9: note = Seed: LVVVGAVGV (KRAS G12V)
FVVSGHVGF

SEQ ID NO: 53979 - protein, 9 aa, synthetic construct
  source 1..9: note = Seed: LVVVGAVGV (KRAS G12V)
FVVSGHVGG

SEQ ID NO: 53980 - protein, 9 aa, synthetic construct
  source 1..9: note = Seed: LVVVGAVGV (KRAS G12V)
FVVSGHVGH

SEQ ID NO: 53981 - protein, 9 aa, synthetic construct
  source 1..9: note = Seed: LVVVGAVGV (KRAS G12V)
FVVSGHVGI

SEQ ID NO: 53982 - protein, 9 aa, synthetic construct
  source 1..9: note = Seed: LVVVGAVGV (KRAS G12V)
FVVSGHVGL

SEQ ID NO: 53983 - protein, 9 aa, synthetic construct
  source 1..9: note = Seed: LVVVGAVGV (KRAS G12V)
FVVSGHVGM

SEQ ID NO: 53984 - protein, 9 aa, synthetic construct
  source 1..9: note = Seed: LVVVGAVGV (KRAS G12V)
FVVSGHVGN

SEQ ID NO: 53985 - protein, 9 aa, synthetic construct
  source 1..9: note = Seed: LVVVGAVGV (KRAS G12V)
FVVSGHVGQ

SEQ ID NO: 53986 - protein, 9 aa, synthetic construct
  source 1..9: note = Seed: LVVVGAVGV (KRAS G12V)
FVVSGHVGS

SEQ ID NO: 53987 - protein, 9 aa, synthetic construct
  source 1..9: note = Seed: LVVVGAVGV (KRAS G12V)
FVVSGHVGT

SEQ ID NO: 53988 - protein, 9 aa, synthetic construct
  source 1..9: note = Seed: LVVVGAVGV (KRAS G12V)
FVVSGHVGV

SEQ ID NO: 53989 - protein, 9 aa, synthetic construct
  source 1..9: note = Seed: LVVVGAVGV (KRAS G12V)
FVVSGHVGW

SEQ ID NO: 53990 - protein, 9 aa, synthetic construct
  source 1..9: note = Seed: LVVVGAVGV (KRAS G12V)
FVVSGIVGA

SEQ ID NO: 53991 - protein, 9 aa, synthetic construct
  source 1..9: note = Seed: LVVVGAVGV (KRAS G12V)
FVVSGIVGC

SEQ ID NO: 53992 - protein, 9 aa, synthetic construct
  source 1..9: note = Seed: LVVVGAVGV (KRAS G12V)
FVVSGIVGD

SEQ ID NO: 53993 - protein, 9 aa, synthetic construct
  source 1..9: note = Seed: LVVVGAVGV (KRAS G12V)
FVVSGIVGE

SEQ ID NO: 53994 - protein, 9 aa, synthetic construct
  source 1..9: note = Seed: LVVVGAVGV (KRAS G12V)
FVVSGIVGF

SEQ ID NO: 53995 - protein, 9 aa, synthetic construct
  source 1..9: note = Seed: LVVVGAVGV (KRAS G12V)
FVVSGIVGG

SEQ ID NO: 53996 - protein, 9 aa, synthetic construct
  source 1..9: note = Seed: LVVVGAVGV (KRAS G12V)
FVVSGIVGH

SEQ ID NO: 53997 - protein, 9 aa, synthetic construct
  source 1..9: note = Seed: LVVVGAVGV (KRAS G12V)
FVVSGIVGI

SEQ ID NO: 53998 - protein, 9 aa, synthetic construct
  source 1..9: note = Seed: LVVVGAVGV (KRAS G12V)
FVVSGIVGL

SEQ ID NO: 53999 - protein, 9 aa, synthetic construct
  source 1..9: note = Seed: LVVVGAVGV (KRAS G12V)
FVVSGIVGM

SEQ ID NO: 54000 - protein, 9 aa, synthetic construct
  source 1..9: note = Seed: LVVVGAVGV (KRAS G12V)
FVVSGIVGN

SEQ ID NO: 54001 - protein, 9 aa, synthetic construct
  source 1..9: note = Seed: LVVVGAVGV (KRAS G12V)
FVVSGIVGP

SEQ ID NO: 54002 - protein, 9 aa, synthetic construct
  source 1..9: note = Seed: LVVVGAVGV (KRAS G12V)
FVVSGIVGQ

SEQ ID NO: 54003 - protein, 9 aa, synthetic construct
  source 1..9: note = Seed: LVVVGAVGV (KRAS G12V)
FVVSGIVGR

SEQ ID NO: 54004 - protein, 9 aa, synthetic construct
  source 1..9: note = Seed: LVVVGAVGV (KRAS G12V)
FVVSGIVGS

SEQ ID NO: 54005 - protein, 9 aa, synthetic construct
  source 1..9: note = Seed: LVVVGAVGV (KRAS G12V)
FVVSGIVGT

SEQ ID NO: 54006 - protein, 9 aa, synthetic construct
  source 1..9: note = Seed: LVVVGAVGV (KRAS G12V)
FVVSGIVGV

SEQ ID NO: 54007 - protein, 9 aa, synthetic construct
  source 1..9: note = Seed: LVVVGAVGV (KRAS G12V)
FVVSGIVGY

SEQ ID NO: 54008 - protein, 9 aa, synthetic construct
  source 1..9: note = Seed: LVVVGAVGV (KRAS G12V)
FVVSGKVGA

SEQ ID NO: 54009 - protein, 9 aa, synthetic construct
  source 1..9: note = Seed: LVVVGAVGV (KRAS G12V)
FVVSGKVGG

SEQ ID NO: 54010 - protein, 9 aa, synthetic construct
  source 1..9: note = Seed: LVVVGAVGV (KRAS G12V)
FVVSGKVGH

SEQ ID NO: 54011 - protein, 9 aa, synthetic construct
  source 1..9: note = Seed: LVVVGAVGV (KRAS G12V)
FVVSGKVGI

SEQ ID NO: 54012 - protein, 9 aa, synthetic construct
  source 1..9: note = Seed: LVVVGAVGV (KRAS G12V)
FVVSGKVGK

SEQ ID NO: 54013 - protein, 9 aa, synthetic construct
  source 1..9: note = Seed: LVVVGAVGV (KRAS G12V)
FVVSGKVGL

SEQ ID NO: 54014 - protein, 9 aa, synthetic construct
  source 1..9: note = Seed: LVVVGAVGV (KRAS G12V)
FVVSGKVGM

SEQ ID NO: 54015 - protein, 9 aa, synthetic construct
  source 1..9: note = Seed: LVVVGAVGV (KRAS G12V)
FVVSGKVGN

SEQ ID NO: 54016 - protein, 9 aa, synthetic construct
  source 1..9: note = Seed: LVVVGAVGV (KRAS G12V)
FVVSGKVGP

SEQ ID NO: 54017 - protein, 9 aa, synthetic construct
  source 1..9: note = Seed: LVVVGAVGV (KRAS G12V)
FVVSGKVGQ

SEQ ID NO: 54018 - protein, 9 aa, synthetic construct
  source 1..9: note = Seed: LVVVGAVGV (KRAS G12V)
FVVSGKVGR

SEQ ID NO: 54019 - protein, 9 aa, synthetic construct
  source 1..9: note = Seed: LVVVGAVGV (KRAS G12V)
FVVSGKVGS

SEQ ID NO: 54020 - protein, 9 aa, synthetic construct
  source 1..9: note = Seed: LVVVGAVGV (KRAS G12V)
FVVSGKVGT

SEQ ID NO: 54021 - protein, 9 aa, synthetic construct
  source 1..9: note = Seed: LVVVGAVGV (KRAS G12V)
FVVSGKVGV

SEQ ID NO: 54022 - protein, 9 aa, synthetic construct
  source 1..9: note = Seed: LVVVGAVGV (KRAS G12V)
FVVSGKVGY

SEQ ID NO: 54023 - protein, 9 aa, synthetic construct
  source 1..9: note = Seed: LVVVGAVGV (KRAS G12V)
FVVSGLVGA

SEQ ID NO: 54024 - protein, 9 aa, synthetic construct
  source 1..9: note = Seed: LVVVGAVGV (KRAS G12V)
FVVSGLVGD

SEQ ID NO: 54025 - protein, 9 aa, synthetic construct
  source 1..9: note = Seed: LVVVGAVGV (KRAS G12V)
FVVSGLVGE

SEQ ID NO: 54026 - protein, 9 aa, synthetic construct
  source 1..9: note = Seed: LVVVGAVGV (KRAS G12V)
FVVSGLVGG

SEQ ID NO: 54027 - protein, 9 aa, synthetic construct
  source 1..9: note = Seed: LVVVGAVGV (KRAS G12V)
FVVSGLVGH

SEQ ID NO: 54028 - protein, 9 aa, synthetic construct
  source 1..9: note = Seed: LVVVGAVGV (KRAS G12V)
FVVSGLVGI

SEQ ID NO: 54029 - protein, 9 aa, synthetic construct
  source 1..9: note = Seed: LVVVGAVGV (KRAS G12V)
FVVSGLVGL

SEQ ID NO: 54030 - protein, 9 aa, synthetic construct
  source 1..9: note = Seed: LVVVGAVGV (KRAS G12V)
FVVSGLVGM

SEQ ID NO: 54031 - protein, 9 aa, synthetic construct
  source 1..9: note = Seed: LVVVGAVGV (KRAS G12V)
FVVSGLVGN

SEQ ID NO: 54032 - protein, 9 aa, synthetic construct
  source 1..9: note = Seed: LVVVGAVGV (KRAS G12V)
FVVSGLVGQ

SEQ ID NO: 54033 - protein, 9 aa, synthetic construct
  source 1..9: note = Seed: LVVVGAVGV (KRAS G12V)
FVVSGLVGS

SEQ ID NO: 54034 - protein, 9 aa, synthetic construct
  source 1..9: note = Seed: LVVVGAVGV (KRAS G12V)
FVVSGLVGT

SEQ ID NO: 54035 - protein, 9 aa, synthetic construct
  source 1..9: note = Seed: LVVVGAVGV (KRAS G12V)
FVVSGLVGV

SEQ ID NO: 54036 - protein, 9 aa, synthetic construct
  source 1..9: note = Seed: LVVVGAVGV (KRAS G12V)
FVVSGMVGA

SEQ ID NO: 54037 - protein, 9 aa, synthetic construct
  source 1..9: note = Seed: LVVVGAVGV (KRAS G12V)
FVVSGMVGC

SEQ ID NO: 54038 - protein, 9 aa, synthetic construct
  source 1..9: note = Seed: LVVVGAVGV (KRAS G12V)
FVVSGMVGD

SEQ ID NO: 54039 - protein, 9 aa, synthetic construct
  source 1..9: note = Seed: LVVVGAVGV (KRAS G12V)
FVVSGMVGE

SEQ ID NO: 54040 - protein, 9 aa, synthetic construct
  source 1..9: note = Seed: LVVVGAVGV (KRAS G12V)
FVVSGMVGF

SEQ ID NO: 54041 - protein, 9 aa, synthetic construct
  source 1..9: note = Seed: LVVVGAVGV (KRAS G12V)
FVVSGMVGG

SEQ ID NO: 54042 - protein, 9 aa, synthetic construct
  source 1..9: note = Seed: LVVVGAVGV (KRAS G12V)
FVVSGMVGH

SEQ ID NO: 54043 - protein, 9 aa, synthetic construct
  source 1..9: note = Seed: LVVVGAVGV (KRAS G12V)
FVVSGMVGI

SEQ ID NO: 54044 - protein, 9 aa, synthetic construct
  source 1..9: note = Seed: LVVVGAVGV (KRAS G12V)
FVVSGMVGL

SEQ ID NO: 54045 - protein, 9 aa, synthetic construct
  source 1..9: note = Seed: LVVVGAVGV (KRAS G12V)
FVVSGMVGM

SEQ ID NO: 54046 - protein, 9 aa, synthetic construct
  source 1..9: note = Seed: LVVVGAVGV (KRAS G12V)
FVVSGMVGN

SEQ ID NO: 54047 - protein, 9 aa, synthetic construct
  source 1..9: note = Seed: LVVVGAVGV (KRAS G12V)
FVVSGMVGQ

SEQ ID NO: 54048 - protein, 9 aa, synthetic construct
  source 1..9: note = Seed: LVVVGAVGV (KRAS G12V)
FVVSGMVGS

SEQ ID NO: 54049 - protein, 9 aa, synthetic construct
  source 1..9: note = Seed: LVVVGAVGV (KRAS G12V)
FVVSGMVGT

SEQ ID NO: 54050 - protein, 9 aa, synthetic construct
  source 1..9: note = Seed: LVVVGAVGV (KRAS G12V)
FVVSGMVGV

SEQ ID NO: 54051 - protein, 9 aa, synthetic construct
  source 1..9: note = Seed: LVVVGAVGV (KRAS G12V)
FVVSGMVGY

SEQ ID NO: 54052 - protein, 9 aa, synthetic construct
  source 1..9: note = Seed: LVVVGAVGV (KRAS G12V)
FVVSGNVGA

SEQ ID NO: 54053 - protein, 9 aa, synthetic construct
  source 1..9: note = Seed: LVVVGAVGV (KRAS G12V)
FVVSGNVGC

SEQ ID NO: 54054 - protein, 9 aa, synthetic construct
  source 1..9: note = Seed: LVVVGAVGV (KRAS G12V)
FVVSGNVGD

SEQ ID NO: 54055 - protein, 9 aa, synthetic construct
  source 1..9: note = Seed: LVVVGAVGV (KRAS G12V)
FVVSGNVGE

SEQ ID NO: 54056 - protein, 9 aa, synthetic construct
  source 1..9: note = Seed: LVVVGAVGV (KRAS G12V)
FVVSGNVGF

SEQ ID NO: 54057 - protein, 9 aa, synthetic construct
  source 1..9: note = Seed: LVVVGAVGV (KRAS G12V)
FVVSGNVGG

SEQ ID NO: 54058 - protein, 9 aa, synthetic construct
  source 1..9: note = Seed: LVVVGAVGV (KRAS G12V)
FVVSGNVGH

SEQ ID NO: 54059 - protein, 9 aa, synthetic construct
  source 1..9: note = Seed: LVVVGAVGV (KRAS G12V)
FVVSGNVGI

SEQ ID NO: 54060 - protein, 9 aa, synthetic construct
  source 1..9: note = Seed: LVVVGAVGV (KRAS G12V)
FVVSGNVGK

SEQ ID NO: 54061 - protein, 9 aa, synthetic construct
  source 1..9: note = Seed: LVVVGAVGV (KRAS G12V)
FVVSGNVGL

SEQ ID NO: 54062 - protein, 9 aa, synthetic construct
  source 1..9: note = Seed: LVVVGAVGV (KRAS G12V)
FVVSGNVGM

SEQ ID NO: 54063 - protein, 9 aa, synthetic construct
  source 1..9: note = Seed: LVVVGAVGV (KRAS G12V)
FVVSGNVGN

SEQ ID NO: 54064 - protein, 9 aa, synthetic construct
  source 1..9: note = Seed: LVVVGAVGV (KRAS G12V)
FVVSGNVGP

SEQ ID NO: 54065 - protein, 9 aa, synthetic construct
  source 1..9: note = Seed: LVVVGAVGV (KRAS G12V)
FVVSGNVGQ

SEQ ID NO: 54066 - protein, 9 aa, synthetic construct
  source 1..9: note = Seed: LVVVGAVGV (KRAS G12V)
FVVSGNVGR

SEQ ID NO: 54067 - protein, 9 aa, synthetic construct
  source 1..9: note = Seed: LVVVGAVGV (KRAS G12V)
FVVSGNVGS

SEQ ID NO: 54068 - protein, 9 aa, synthetic construct
  source 1..9: note = Seed: LVVVGAVGV (KRAS G12V)
FVVSGNVGT

SEQ ID NO: 54069 - protein, 9 aa, synthetic construct
  source 1..9: note = Seed: LVVVGAVGV (KRAS G12V)
FVVSGNVGV

SEQ ID NO: 54070 - protein, 9 aa, synthetic construct
  source 1..9: note = Seed: LVVVGAVGV (KRAS G12V)
FVVSGNVGW

SEQ ID NO: 54071 - protein, 9 aa, synthetic construct
  source 1..9: note = Seed: LVVVGAVGV (KRAS G12V)
FVVSGNVGY

SEQ ID NO: 54072 - protein, 9 aa, synthetic construct
  source 1..9: note = Seed: LVVVGAVGV (KRAS G12V)
FVVSGPVGA

SEQ ID NO: 54073 - protein, 9 aa, synthetic construct
  source 1..9: note = Seed: LVVVGAVGV (KRAS G12V)
FVVSGPVGC

SEQ ID NO: 54074 - protein, 9 aa, synthetic construct
  source 1..9: note = Seed: LVVVGAVGV (KRAS G12V)
FVVSGPVGD

SEQ ID NO: 54075 - protein, 9 aa, synthetic construct
  source 1..9: note = Seed: LVVVGAVGV (KRAS G12V)
FVVSGPVGE

SEQ ID NO: 54076 - protein, 9 aa, synthetic construct
  source 1..9: note = Seed: LVVVGAVGV (KRAS G12V)
FVVSGPVGF

SEQ ID NO: 54077 - protein, 9 aa, synthetic construct
  source 1..9: note = Seed: LVVVGAVGV (KRAS G12V)
FVVSGPVGG

SEQ ID NO: 54078 - protein, 9 aa, synthetic construct
  source 1..9: note = Seed: LVVVGAVGV (KRAS G12V)
FVVSGPVGH

SEQ ID NO: 54079 - protein, 9 aa, synthetic construct
  source 1..9: note = Seed: LVVVGAVGV (KRAS G12V)
FVVSGPVGI

SEQ ID NO: 54080 - protein, 9 aa, synthetic construct
  source 1..9: note = Seed: LVVVGAVGV (KRAS G12V)
FVVSGPVGK

SEQ ID NO: 54081 - protein, 9 aa, synthetic construct
  source 1..9: note = Seed: LVVVGAVGV (KRAS G12V)
FVVSGPVGL

SEQ ID NO: 54082 - protein, 9 aa, synthetic construct
  source 1..9: note = Seed: LVVVGAVGV (KRAS G12V)
FVVSGPVGM

SEQ ID NO: 54083 - protein, 9 aa, synthetic construct
  source 1..9: note = Seed: LVVVGAVGV (KRAS G12V)
FVVSGPVGN

SEQ ID NO: 54084 - protein, 9 aa, synthetic construct
  source 1..9: note = Seed: LVVVGAVGV (KRAS G12V)
FVVSGPVGP

SEQ ID NO: 54085 - protein, 9 aa, synthetic construct
  source 1..9: note = Seed: LVVVGAVGV (KRAS G12V)
FVVSGPVGQ

SEQ ID NO: 54086 - protein, 9 aa, synthetic construct
  source 1..9: note = Seed: LVVVGAVGV (KRAS G12V)
FVVSGPVGR

SEQ ID NO: 54087 - protein, 9 aa, synthetic construct
  source 1..9: note = Seed: LVVVGAVGV (KRAS G12V)
FVVSGPVGS

SEQ ID NO: 54088 - protein, 9 aa, synthetic construct
  source 1..9: note = Seed: LVVVGAVGV (KRAS G12V)
FVVSGPVGT

SEQ ID NO: 54089 - protein, 9 aa, synthetic construct
  source 1..9: note = Seed: LVVVGAVGV (KRAS G12V)
FVVSGPVGV

SEQ ID NO: 54090 - protein, 9 aa, synthetic construct
  source 1..9: note = Seed: LVVVGAVGV (KRAS G12V)
FVVSGPVGW

SEQ ID NO: 54091 - protein, 9 aa, synthetic construct
  source 1..9: note = Seed: LVVVGAVGV (KRAS G12V)
FVVSGPVGY

SEQ ID NO: 54092 - protein, 9 aa, synthetic construct
  source 1..9: note = Seed: LVVVGAVGV (KRAS G12V)
FVVSGQVGA

SEQ ID NO: 54093 - protein, 9 aa, synthetic construct
  source 1..9: note = Seed: LVVVGAVGV (KRAS G12V)
FVVSGQVGC

SEQ ID NO: 54094 - protein, 9 aa, synthetic construct
  source 1..9: note = Seed: LVVVGAVGV (KRAS G12V)
FVVSGQVGE

SEQ ID NO: 54095 - protein, 9 aa, synthetic construct
  source 1..9: note = Seed: LVVVGAVGV (KRAS G12V)
FVVSGQVGF

SEQ ID NO: 54096 - protein, 9 aa, synthetic construct
  source 1..9: note = Seed: LVVVGAVGV (KRAS G12V)
FVVSGQVGG

SEQ ID NO: 54097 - protein, 9 aa, synthetic construct
  source 1..9: note = Seed: LVVVGAVGV (KRAS G12V)
FVVSGQVGH

SEQ ID NO: 54098 - protein, 9 aa, synthetic construct
  source 1..9: note = Seed: LVVVGAVGV (KRAS G12V)
FVVSGQVGI

SEQ ID NO: 54099 - protein, 9 aa, synthetic construct
  source 1..9: note = Seed: LVVVGAVGV (KRAS G12V)
FVVSGQVGL

SEQ ID NO: 54100 - protein, 9 aa, synthetic construct
  source 1..9: note = Seed: LVVVGAVGV (KRAS G12V)
FVVSGQVGM

SEQ ID NO: 54101 - protein, 9 aa, synthetic construct
  source 1..9: note = Seed: LVVVGAVGV (KRAS G12V)
FVVSGQVGN

SEQ ID NO: 54102 - protein, 9 aa, synthetic construct
  source 1..9: note = Seed: LVVVGAVGV (KRAS G12V)
FVVSGQVGQ

SEQ ID NO: 54103 - protein, 9 aa, synthetic construct
  source 1..9: note = Seed: LVVVGAVGV (KRAS G12V)
FVVSGQVGR

SEQ ID NO: 54104 - protein, 9 aa, synthetic construct
  source 1..9: note = Seed: LVVVGAVGV (KRAS G12V)
FVVSGQVGS

SEQ ID NO: 54105 - protein, 9 aa, synthetic construct
  source 1..9: note = Seed: LVVVGAVGV (KRAS G12V)
FVVSGQVGT

SEQ ID NO: 54106 - protein, 9 aa, synthetic construct
  source 1..9: note = Seed: LVVVGAVGV (KRAS G12V)
FVVSGQVGV

SEQ ID NO: 54107 - protein, 9 aa, synthetic construct
  source 1..9: note = Seed: LVVVGAVGV (KRAS G12V)
FVVSGQVGY

SEQ ID NO: 54108 - protein, 9 aa, synthetic construct
  source 1..9: note = Seed: LVVVGAVGV (KRAS G12V)
FVVSGRVGA

SEQ ID NO: 54109 - protein, 9 aa, synthetic construct
  source 1..9: note = Seed: LVVVGAVGV (KRAS G12V)
FVVSGRVGG

SEQ ID NO: 54110 - protein, 9 aa, synthetic construct
  source 1..9: note = Seed: LVVVGAVGV (KRAS G12V)
FVVSGRVGH

SEQ ID NO: 54111 - protein, 9 aa, synthetic construct
  source 1..9: note = Seed: LVVVGAVGV (KRAS G12V)
FVVSGRVGI

SEQ ID NO: 54112 - protein, 9 aa, synthetic construct
  source 1..9: note = Seed: LVVVGAVGV (KRAS G12V)
FVVSGRVGK

SEQ ID NO: 54113 - protein, 9 aa, synthetic construct
  source 1..9: note = Seed: LVVVGAVGV (KRAS G12V)
FVVSGRVGL

SEQ ID NO: 54114 - protein, 9 aa, synthetic construct
  source 1..9: note = Seed: LVVVGAVGV (KRAS G12V)
FVVSGRVGM

SEQ ID NO: 54115 - protein, 9 aa, synthetic construct
  source 1..9: note = Seed: LVVVGAVGV (KRAS G12V)
FVVSGRVGN

SEQ ID NO: 54116 - protein, 9 aa, synthetic construct
  source 1..9: note = Seed: LVVVGAVGV (KRAS G12V)
FVVSGRVGP

SEQ ID NO: 54117 - protein, 9 aa, synthetic construct
  source 1..9: note = Seed: LVVVGAVGV (KRAS G12V)
FVVSGRVGQ

SEQ ID NO: 54118 - protein, 9 aa, synthetic construct
  source 1..9: note = Seed: LVVVGAVGV (KRAS G12V)
FVVSGRVGR

SEQ ID NO: 54119 - protein, 9 aa, synthetic construct
  source 1..9: note = Seed: LVVVGAVGV (KRAS G12V)
FVVSGRVGS

SEQ ID NO: 54120 - protein, 9 aa, synthetic construct
  source 1..9: note = Seed: LVVVGAVGV (KRAS G12V)
FVVSGRVGT

SEQ ID NO: 54121 - protein, 9 aa, synthetic construct
  source 1..9: note = Seed: LVVVGAVGV (KRAS G12V)
FVVSGRVGV

SEQ ID NO: 54122 - protein, 9 aa, synthetic construct
  source 1..9: note = Seed: LVVVGAVGV (KRAS G12V)
FVVSGRVGY

SEQ ID NO: 54123 - protein, 9 aa, synthetic construct
  source 1..9: note = Seed: LVVVGAVGV (KRAS G12V)
FVVSGSVGA

SEQ ID NO: 54124 - protein, 9 aa, synthetic construct
  source 1..9: note = Seed: LVVVGAVGV (KRAS G12V)
FVVSGSVGC

SEQ ID NO: 54125 - protein, 9 aa, synthetic construct
  source 1..9: note = Seed: LVVVGAVGV (KRAS G12V)
FVVSGSVGD

SEQ ID NO: 54126 - protein, 9 aa, synthetic construct
  source 1..9: note = Seed: LVVVGAVGV (KRAS G12V)
FVVSGSVGE

SEQ ID NO: 54127 - protein, 9 aa, synthetic construct
  source 1..9: note = Seed: LVVVGAVGV (KRAS G12V)
FVVSGSVGF

SEQ ID NO: 54128 - protein, 9 aa, synthetic construct
  source 1..9: note = Seed: LVVVGAVGV (KRAS G12V)
FVVSGSVGG

SEQ ID NO: 54129 - protein, 9 aa, synthetic construct
  source 1..9: note = Seed: LVVVGAVGV (KRAS G12V)
FVVSGSVGH

SEQ ID NO: 54130 - protein, 9 aa, synthetic construct
  source 1..9: note = Seed: LVVVGAVGV (KRAS G12V)
FVVSGSVGI

SEQ ID NO: 54131 - protein, 9 aa, synthetic construct
  source 1..9: note = Seed: LVVVGAVGV (KRAS G12V)
FVVSGSVGK

SEQ ID NO: 54132 - protein, 9 aa, synthetic construct
  source 1..9: note = Seed: LVVVGAVGV (KRAS G12V)
FVVSGSVGL

SEQ ID NO: 54133 - protein, 9 aa, synthetic construct
  source 1..9: note = Seed: LVVVGAVGV (KRAS G12V)
FVVSGSVGM

SEQ ID NO: 54134 - protein, 9 aa, synthetic construct
  source 1..9: note = Seed: LVVVGAVGV (KRAS G12V)
FVVSGSVGN

SEQ ID NO: 54135 - protein, 9 aa, synthetic construct
  source 1..9: note = Seed: LVVVGAVGV (KRAS G12V)
FVVSGSVGP

SEQ ID NO: 54136 - protein, 9 aa, synthetic construct
  source 1..9: note = Seed: LVVVGAVGV (KRAS G12V)
FVVSGSVGQ

SEQ ID NO: 54137 - protein, 9 aa, synthetic construct
  source 1..9: note = Seed: LVVVGAVGV (KRAS G12V)
FVVSGSVGR

SEQ ID NO: 54138 - protein, 9 aa, synthetic construct
  source 1..9: note = Seed: LVVVGAVGV (KRAS G12V)
FVVSGSVGS

SEQ ID NO: 54139 - protein, 9 aa, synthetic construct
  source 1..9: note = Seed: LVVVGAVGV (KRAS G12V)
FVVSGSVGT

SEQ ID NO: 54140 - protein, 9 aa, synthetic construct
  source 1..9: note = Seed: LVVVGAVGV (KRAS G12V)
FVVSGSVGV

SEQ ID NO: 54141 - protein, 9 aa, synthetic construct
  source 1..9: note = Seed: LVVVGAVGV (KRAS G12V)
FVVSGSVGW

SEQ ID NO: 54142 - protein, 9 aa, synthetic construct
  source 1..9: note = Seed: LVVVGAVGV (KRAS G12V)
FVVSGSVGY

SEQ ID NO: 54143 - protein, 9 aa, synthetic construct
  source 1..9: note = Seed: LVVVGAVGV (KRAS G12V)
FVVSGTVGA

SEQ ID NO: 54144 - protein, 9 aa, synthetic construct
  source 1..9: note = Seed: LVVVGAVGV (KRAS G12V)
FVVSGTVGC

SEQ ID NO: 54145 - protein, 9 aa, synthetic construct
  source 1..9: note = Seed: LVVVGAVGV (KRAS G12V)
FVVSGTVGD

SEQ ID NO: 54146 - protein, 9 aa, synthetic construct
  source 1..9: note = Seed: LVVVGAVGV (KRAS G12V)
FVVSGTVGE

SEQ ID NO: 54147 - protein, 9 aa, synthetic construct
  source 1..9: note = Seed: LVVVGAVGV (KRAS G12V)
FVVSGTVGF

SEQ ID NO: 54148 - protein, 9 aa, synthetic construct
  source 1..9: note = Seed: LVVVGAVGV (KRAS G12V)
FVVSGTVGG

SEQ ID NO: 54149 - protein, 9 aa, synthetic construct
  source 1..9: note = Seed: LVVVGAVGV (KRAS G12V)
FVVSGTVGH

SEQ ID NO: 54150 - protein, 9 aa, synthetic construct
  source 1..9: note = Seed: LVVVGAVGV (KRAS G12V)
FVVSGTVGI

SEQ ID NO: 54151 - protein, 9 aa, synthetic construct
  source 1..9: note = Seed: LVVVGAVGV (KRAS G12V)
FVVSGTVGK

SEQ ID NO: 54152 - protein, 9 aa, synthetic construct
  source 1..9: note = Seed: LVVVGAVGV (KRAS G12V)
FVVSGTVGL

SEQ ID NO: 54153 - protein, 9 aa, synthetic construct
  source 1..9: note = Seed: LVVVGAVGV (KRAS G12V)
FVVSGTVGM

SEQ ID NO: 54154 - protein, 9 aa, synthetic construct
  source 1..9: note = Seed: LVVVGAVGV (KRAS G12V)
FVVSGTVGN

SEQ ID NO: 54155 - protein, 9 aa, synthetic construct
  source 1..9: note = Seed: LVVVGAVGV (KRAS G12V)
FVVSGTVGP

SEQ ID NO: 54156 - protein, 9 aa, synthetic construct
  source 1..9: note = Seed: LVVVGAVGV (KRAS G12V)
FVVSGTVGQ

SEQ ID NO: 54157 - protein, 9 aa, synthetic construct
  source 1..9: note = Seed: LVVVGAVGV (KRAS G12V)
FVVSGTVGR

SEQ ID NO: 54158 - protein, 9 aa, synthetic construct
  source 1..9: note = Seed: LVVVGAVGV (KRAS G12V)
FVVSGTVGS

SEQ ID NO: 54159 - protein, 9 aa, synthetic construct
  source 1..9: note = Seed: LVVVGAVGV (KRAS G12V)
FVVSGTVGT

SEQ ID NO: 54160 - protein, 9 aa, synthetic construct
  source 1..9: note = Seed: LVVVGAVGV (KRAS G12V)
FVVSGTVGV

SEQ ID NO: 54161 - protein, 9 aa, synthetic construct
  source 1..9: note = Seed: LVVVGAVGV (KRAS G12V)
FVVSGTVGW

SEQ ID NO: 54162 - protein, 9 aa, synthetic construct
  source 1..9: note = Seed: LVVVGAVGV (KRAS G12V)
FVVSGTVGY

SEQ ID NO: 54163 - protein, 9 aa, synthetic construct
  source 1..9: note = Seed: LVVVGAVGV (KRAS G12V)
FVVSGVVGA

SEQ ID NO: 54164 - protein, 9 aa, synthetic construct
  source 1..9: note = Seed: LVVVGAVGV (KRAS G12V)
FVVSGVVGC

SEQ ID NO: 54165 - protein, 9 aa, synthetic construct
  source 1..9: note = Seed: LVVVGAVGV (KRAS G12V)
FVVSGVVGD

SEQ ID NO: 54166 - protein, 9 aa, synthetic construct
  source 1..9: note = Seed: LVVVGAVGV (KRAS G12V)
FVVSGVVGE

SEQ ID NO: 54167 - protein, 9 aa, synthetic construct
  source 1..9: note = Seed: LVVVGAVGV (KRAS G12V)
FVVSGVVGF

SEQ ID NO: 54168 - protein, 9 aa, synthetic construct
  source 1..9: note = Seed: LVVVGAVGV (KRAS G12V)
FVVSGVVGG

SEQ ID NO: 54169 - protein, 9 aa, synthetic construct
  source 1..9: note = Seed: LVVVGAVGV (KRAS G12V)
FVVSGVVGH

SEQ ID NO: 54170 - protein, 9 aa, synthetic construct
  source 1..9: note = Seed: LVVVGAVGV (KRAS G12V)
FVVSGVVGI

SEQ ID NO: 54171 - protein, 9 aa, synthetic construct
  source 1..9: note = Seed: LVVVGAVGV (KRAS G12V)
FVVSGVVGK

SEQ ID NO: 54172 - protein, 9 aa, synthetic construct
  source 1..9: note = Seed: LVVVGAVGV (KRAS G12V)
FVVSGVVGL

SEQ ID NO: 54173 - protein, 9 aa, synthetic construct
  source 1..9: note = Seed: LVVVGAVGV (KRAS G12V)
FVVSGVVGM

SEQ ID NO: 54174 - protein, 9 aa, synthetic construct
  source 1..9: note = Seed: LVVVGAVGV (KRAS G12V)
FVVSGVVGN

SEQ ID NO: 54175 - protein, 9 aa, synthetic construct
  source 1..9: note = Seed: LVVVGAVGV (KRAS G12V)
FVVSGVVGP

SEQ ID NO: 54176 - protein, 9 aa, synthetic construct
  source 1..9: note = Seed: LVVVGAVGV (KRAS G12V)
FVVSGVVGQ

SEQ ID NO: 54177 - protein, 9 aa, synthetic construct
  source 1..9: note = Seed: LVVVGAVGV (KRAS G12V)
FVVSGVVGR

SEQ ID NO: 54178 - protein, 9 aa, synthetic construct
  source 1..9: note = Seed: LVVVGAVGV (KRAS G12V)
FVVSGVVGS

SEQ ID NO: 54179 - protein, 9 aa, synthetic construct
  source 1..9: note = Seed: LVVVGAVGV (KRAS G12V)
FVVSGVVGT

SEQ ID NO: 54180 - protein, 9 aa, synthetic construct
  source 1..9: note = Seed: LVVVGAVGV (KRAS G12V)
FVVSGVVGV

SEQ ID NO: 54181 - protein, 9 aa, synthetic construct
  source 1..9: note = Seed: LVVVGAVGV (KRAS G12V)
FVVSGVVGW

SEQ ID NO: 54182 - protein, 9 aa, synthetic construct
  source 1..9: note = Seed: LVVVGAVGV (KRAS G12V)
FVVSGVVGY

SEQ ID NO: 54183 - protein, 9 aa, synthetic construct
  source 1..9: note = Seed: LVVVGAVGV (KRAS G12V)
FVVSGWVGA

SEQ ID NO: 54184 - protein, 9 aa, synthetic construct
  source 1..9: note = Seed: LVVVGAVGV (KRAS G12V)
FVVSGWVGI

SEQ ID NO: 54185 - protein, 9 aa, synthetic construct
  source 1..9: note = Seed: LVVVGAVGV (KRAS G12V)
FVVSGWVGL

SEQ ID NO: 54186 - protein, 9 aa, synthetic construct
  source 1..9: note = Seed: LVVVGAVGV (KRAS G12V)
FVVSGWVGM

SEQ ID NO: 54187 - protein, 9 aa, synthetic construct
  source 1..9: note = Seed: LVVVGAVGV (KRAS G12V)
FVVSGWVGV

SEQ ID NO: 54188 - protein, 9 aa, synthetic construct
  source 1..9: note = Seed: LVVVGAVGV (KRAS G12V)
FVVSGYVGF

SEQ ID NO: 54189 - protein, 9 aa, synthetic construct
  source 1..9: note = Seed: LVVVGAVGV (KRAS G12V)
FVVSGYVGI

SEQ ID NO: 54190 - protein, 9 aa, synthetic construct
  source 1..9: note = Seed: LVVVGAVGV (KRAS G12V)
FVVSGYVGL

SEQ ID NO: 54191 - protein, 9 aa, synthetic construct
  source 1..9: note = Seed: LVVVGAVGV (KRAS G12V)
FVVSGYVGM

SEQ ID NO: 54192 - protein, 9 aa, synthetic construct
  source 1..9: note = Seed: LVVVGAVGV (KRAS G12V)
FVVSGYVGV

SEQ ID NO: 54193 - protein, 9 aa, synthetic construct
  source 1..9: note = Seed: LVVVGAVGV (KRAS G12V)
FVVSGYVGY

SEQ ID NO: 54194 - protein, 9 aa, synthetic construct
  source 1..9: note = Seed: LVVVGAVGV (KRAS G12V)
FVVTGAVGA

SEQ ID NO: 54195 - protein, 9 aa, synthetic construct
  source 1..9: note = Seed: LVVVGAVGV (KRAS G12V)
FVVTGAVGC

SEQ ID NO: 54196 - protein, 9 aa, synthetic construct
  source 1..9: note = Seed: LVVVGAVGV (KRAS G12V)
FVVTGAVGD

SEQ ID NO: 54197 - protein, 9 aa, synthetic construct
  source 1..9: note = Seed: LVVVGAVGV (KRAS G12V)
FVVTGAVGE

SEQ ID NO: 54198 - protein, 9 aa, synthetic construct
  source 1..9: note = Seed: LVVVGAVGV (KRAS G12V)
FVVTGAVGF

SEQ ID NO: 54199 - protein, 9 aa, synthetic construct
  source 1..9: note = Seed: LVVVGAVGV (KRAS G12V)
FVVTGAVGG

SEQ ID NO: 54200 - protein, 9 aa, synthetic construct
  source 1..9: note = Seed: LVVVGAVGV (KRAS G12V)
FVVTGAVGH

SEQ ID NO: 54201 - protein, 9 aa, synthetic construct
  source 1..9: note = Seed: LVVVGAVGV (KRAS G12V)
FVVTGAVGI

SEQ ID NO: 54202 - protein, 9 aa, synthetic construct
  source 1..9: note = Seed: LVVVGAVGV (KRAS G12V)
FVVTGAVGK

SEQ ID NO: 54203 - protein, 9 aa, synthetic construct
  source 1..9: note = Seed: LVVVGAVGV (KRAS G12V)
FVVTGAVGL

SEQ ID NO: 54204 - protein, 9 aa, synthetic construct
  source 1..9: note = Seed: LVVVGAVGV (KRAS G12V)
FVVTGAVGM

SEQ ID NO: 54205 - protein, 9 aa, synthetic construct
  source 1..9: note = Seed: LVVVGAVGV (KRAS G12V)
FVVTGAVGN

SEQ ID NO: 54206 - protein, 9 aa, synthetic construct
  source 1..9: note = Seed: LVVVGAVGV (KRAS G12V)
FVVTGAVGP

SEQ ID NO: 54207 - protein, 9 aa, synthetic construct
  source 1..9: note = Seed: LVVVGAVGV (KRAS G12V)
FVVTGAVGQ

SEQ ID NO: 54208 - protein, 9 aa, synthetic construct
  source 1..9: note = Seed: LVVVGAVGV (KRAS G12V)
FVVTGAVGR

SEQ ID NO: 54209 - protein, 9 aa, synthetic construct
  source 1..9: note = Seed: LVVVGAVGV (KRAS G12V)
FVVTGAVGS

SEQ ID NO: 54210 - protein, 9 aa, synthetic construct
  source 1..9: note = Seed: LVVVGAVGV (KRAS G12V)
FVVTGAVGT

SEQ ID NO: 54211 - protein, 9 aa, synthetic construct
  source 1..9: note = Seed: LVVVGAVGV (KRAS G12V)
FVVTGAVGV

SEQ ID NO: 54212 - protein, 9 aa, synthetic construct
  source 1..9: note = Seed: LVVVGAVGV (KRAS G12V)
FVVTGAVGW

SEQ ID NO: 54213 - protein, 9 aa, synthetic construct
  source 1..9: note = Seed: LVVVGAVGV (KRAS G12V)
FVVTGAVGY

SEQ ID NO: 54214 - protein, 9 aa, synthetic construct
  source 1..9: note = Seed: LVVVGAVGV (KRAS G12V)
FVVTGCVGA

SEQ ID NO: 54215 - protein, 9 aa, synthetic construct
  source 1..9: note = Seed: LVVVGAVGV (KRAS G12V)
FVVTGCVGC

SEQ ID NO: 54216 - protein, 9 aa, synthetic construct
  source 1..9: note = Seed: LVVVGAVGV (KRAS G12V)
FVVTGCVGF

SEQ ID NO: 54217 - protein, 9 aa, synthetic construct
  source 1..9: note = Seed: LVVVGAVGV (KRAS G12V)
FVVTGCVGG

SEQ ID NO: 54218 - protein, 9 aa, synthetic construct
  source 1..9: note = Seed: LVVVGAVGV (KRAS G12V)
FVVTGCVGH

SEQ ID NO: 54219 - protein, 9 aa, synthetic construct
  source 1..9: note = Seed: LVVVGAVGV (KRAS G12V)
FVVTGCVGI

SEQ ID NO: 54220 - protein, 9 aa, synthetic construct
  source 1..9: note = Seed: LVVVGAVGV (KRAS G12V)
FVVTGCVGK

SEQ ID NO: 54221 - protein, 9 aa, synthetic construct
  source 1..9: note = Seed: LVVVGAVGV (KRAS G12V)
FVVTGCVGL

SEQ ID NO: 54222 - protein, 9 aa, synthetic construct
  source 1..9: note = Seed: LVVVGAVGV (KRAS G12V)
FVVTGCVGM

SEQ ID NO: 54223 - protein, 9 aa, synthetic construct
  source 1..9: note = Seed: LVVVGAVGV (KRAS G12V)
FVVTGCVGN

SEQ ID NO: 54224 - protein, 9 aa, synthetic construct
  source 1..9: note = Seed: LVVVGAVGV (KRAS G12V)
FVVTGCVGR

SEQ ID NO: 54225 - protein, 9 aa, synthetic construct
  source 1..9: note = Seed: LVVVGAVGV (KRAS G12V)
FVVTGCVGS

SEQ ID NO: 54226 - protein, 9 aa, synthetic construct
  source 1..9: note = Seed: LVVVGAVGV (KRAS G12V)
FVVTGCVGT

SEQ ID NO: 54227 - protein, 9 aa, synthetic construct
  source 1..9: note = Seed: LVVVGAVGV (KRAS G12V)
FVVTGCVGV

SEQ ID NO: 54228 - protein, 9 aa, synthetic construct
  source 1..9: note = Seed: LVVVGAVGV (KRAS G12V)
FVVTGCVGY

SEQ ID NO: 54229 - protein, 9 aa, synthetic construct
  source 1..9: note = Seed: LVVVGAVGV (KRAS G12V)
FVVTGDVGA

SEQ ID NO: 54230 - protein, 9 aa, synthetic construct
  source 1..9: note = Seed: LVVVGAVGV (KRAS G12V)
FVVTGDVGF

SEQ ID NO: 54231 - protein, 9 aa, synthetic construct
  source 1..9: note = Seed: LVVVGAVGV (KRAS G12V)
FVVTGDVGI

SEQ ID NO: 54232 - protein, 9 aa, synthetic construct
  source 1..9: note = Seed: LVVVGAVGV (KRAS G12V)
FVVTGDVGL

SEQ ID NO: 54233 - protein, 9 aa, synthetic construct
  source 1..9: note = Seed: LVVVGAVGV (KRAS G12V)
FVVTGDVGM

SEQ ID NO: 54234 - protein, 9 aa, synthetic construct
  source 1..9: note = Seed: LVVVGAVGV (KRAS G12V)
FVVTGDVGN

SEQ ID NO: 54235 - protein, 9 aa, synthetic construct
  source 1..9: note = Seed: LVVVGAVGV (KRAS G12V)
FVVTGDVGS

SEQ ID NO: 54236 - protein, 9 aa, synthetic construct
  source 1..9: note = Seed: LVVVGAVGV (KRAS G12V)
FVVTGDVGT

SEQ ID NO: 54237 - protein, 9 aa, synthetic construct
  source 1..9: note = Seed: LVVVGAVGV (KRAS G12V)
FVVTGDVGV

SEQ ID NO: 54238 - protein, 9 aa, synthetic construct
  source 1..9: note = Seed: LVVVGAVGV (KRAS G12V)
FVVTGEVGA

SEQ ID NO: 54239 - protein, 9 aa, synthetic construct
  source 1..9: note = Seed: LVVVGAVGV (KRAS G12V)
FVVTGEVGI

SEQ ID NO: 54240 - protein, 9 aa, synthetic construct
  source 1..9: note = Seed: LVVVGAVGV (KRAS G12V)
FVVTGEVGL

SEQ ID NO: 54241 - protein, 9 aa, synthetic construct
  source 1..9: note = Seed: LVVVGAVGV (KRAS G12V)
FVVTGEVGM

SEQ ID NO: 54242 - protein, 9 aa, synthetic construct
  source 1..9: note = Seed: LVVVGAVGV (KRAS G12V)
FVVTGEVGN

SEQ ID NO: 54243 - protein, 9 aa, synthetic construct
  source 1..9: note = Seed: LVVVGAVGV (KRAS G12V)
FVVTGEVGS

SEQ ID NO: 54244 - protein, 9 aa, synthetic construct
  source 1..9: note = Seed: LVVVGAVGV (KRAS G12V)
FVVTGEVGV

SEQ ID NO: 54245 - protein, 9 aa, synthetic construct
  source 1..9: note = Seed: LVVVGAVGV (KRAS G12V)
FVVTGFVGA

SEQ ID NO: 54246 - protein, 9 aa, synthetic construct
  source 1..9: note = Seed: LVVVGAVGV (KRAS G12V)
FVVTGFVGD

SEQ ID NO: 54247 - protein, 9 aa, synthetic construct
  source 1..9: note = Seed: LVVVGAVGV (KRAS G12V)
FVVTGFVGE

SEQ ID NO: 54248 - protein, 9 aa, synthetic construct
  source 1..9: note = Seed: LVVVGAVGV (KRAS G12V)
FVVTGFVGF

SEQ ID NO: 54249 - protein, 9 aa, synthetic construct
  source 1..9: note = Seed: LVVVGAVGV (KRAS G12V)
FVVTGFVGH

SEQ ID NO: 54250 - protein, 9 aa, synthetic construct
  source 1..9: note = Seed: LVVVGAVGV (KRAS G12V)
FVVTGFVGI

SEQ ID NO: 54251 - protein, 9 aa, synthetic construct
  source 1..9: note = Seed: LVVVGAVGV (KRAS G12V)
FVVTGFVGL

SEQ ID NO: 54252 - protein, 9 aa, synthetic construct
  source 1..9: note = Seed: LVVVGAVGV (KRAS G12V)
FVVTGFVGM

SEQ ID NO: 54253 - protein, 9 aa, synthetic construct
  source 1..9: note = Seed: LVVVGAVGV (KRAS G12V)
FVVTGFVGN

SEQ ID NO: 54254 - protein, 9 aa, synthetic construct
  source 1..9: note = Seed: LVVVGAVGV (KRAS G12V)
FVVTGFVGP

SEQ ID NO: 54255 - protein, 9 aa, synthetic construct
  source 1..9: note = Seed: LVVVGAVGV (KRAS G12V)
FVVTGFVGQ

SEQ ID NO: 54256 - protein, 9 aa, synthetic construct
  source 1..9: note = Seed: LVVVGAVGV (KRAS G12V)
FVVTGFVGS

SEQ ID NO: 54257 - protein, 9 aa, synthetic construct
  source 1..9: note = Seed: LVVVGAVGV (KRAS G12V)
FVVTGFVGT

SEQ ID NO: 54258 - protein, 9 aa, synthetic construct
  source 1..9: note = Seed: LVVVGAVGV (KRAS G12V)
FVVTGFVGV

SEQ ID NO: 54259 - protein, 9 aa, synthetic construct
  source 1..9: note = Seed: LVVVGAVGV (KRAS G12V)
FVVTGFVGY

SEQ ID NO: 54260 - protein, 9 aa, synthetic construct
  source 1..9: note = Seed: LVVVGAVGV (KRAS G12V)
FVVTGGVGA

SEQ ID NO: 54261 - protein, 9 aa, synthetic construct
  source 1..9: note = Seed: LVVVGAVGV (KRAS G12V)
FVVTGGVGC

SEQ ID NO: 54262 - protein, 9 aa, synthetic construct
  source 1..9: note = Seed: LVVVGAVGV (KRAS G12V)
FVVTGGVGD

SEQ ID NO: 54263 - protein, 9 aa, synthetic construct
  source 1..9: note = Seed: LVVVGAVGV (KRAS G12V)
FVVTGGVGE

SEQ ID NO: 54264 - protein, 9 aa, synthetic construct
  source 1..9: note = Seed: LVVVGAVGV (KRAS G12V)
FVVTGGVGF

SEQ ID NO: 54265 - protein, 9 aa, synthetic construct
  source 1..9: note = Seed: LVVVGAVGV (KRAS G12V)
FVVTGGVGG

SEQ ID NO: 54266 - protein, 9 aa, synthetic construct
  source 1..9: note = Seed: LVVVGAVGV (KRAS G12V)
FVVTGGVGH

SEQ ID NO: 54267 - protein, 9 aa, synthetic construct
  source 1..9: note = Seed: LVVVGAVGV (KRAS G12V)
FVVTGGVGI

SEQ ID NO: 54268 - protein, 9 aa, synthetic construct
  source 1..9: note = Seed: LVVVGAVGV (KRAS G12V)
FVVTGGVGK

SEQ ID NO: 54269 - protein, 9 aa, synthetic construct
  source 1..9: note = Seed: LVVVGAVGV (KRAS G12V)
FVVTGGVGL

SEQ ID NO: 54270 - protein, 9 aa, synthetic construct
  source 1..9: note = Seed: LVVVGAVGV (KRAS G12V)
FVVTGGVGM

SEQ ID NO: 54271 - protein, 9 aa, synthetic construct
  source 1..9: note = Seed: LVVVGAVGV (KRAS G12V)
FVVTGGVGN

SEQ ID NO: 54272 - protein, 9 aa, synthetic construct
  source 1..9: note = Seed: LVVVGAVGV (KRAS G12V)
FVVTGGVGP

SEQ ID NO: 54273 - protein, 9 aa, synthetic construct
  source 1..9: note = Seed: LVVVGAVGV (KRAS G12V)
FVVTGGVGQ

SEQ ID NO: 54274 - protein, 9 aa, synthetic construct
  source 1..9: note = Seed: LVVVGAVGV (KRAS G12V)
FVVTGGVGR

SEQ ID NO: 54275 - protein, 9 aa, synthetic construct
  source 1..9: note = Seed: LVVVGAVGV (KRAS G12V)
FVVTGGVGS

SEQ ID NO: 54276 - protein, 9 aa, synthetic construct
  source 1..9: note = Seed: LVVVGAVGV (KRAS G12V)
FVVTGGVGT

SEQ ID NO: 54277 - protein, 9 aa, synthetic construct
  source 1..9: note = Seed: LVVVGAVGV (KRAS G12V)
FVVTGGVGV

SEQ ID NO: 54278 - protein, 9 aa, synthetic construct
  source 1..9: note = Seed: LVVVGAVGV (KRAS G12V)
FVVTGGVGW

SEQ ID NO: 54279 - protein, 9 aa, synthetic construct
  source 1..9: note = Seed: LVVVGAVGV (KRAS G12V)
FVVTGGVGY

SEQ ID NO: 54280 - protein, 9 aa, synthetic construct
  source 1..9: note = Seed: LVVVGAVGV (KRAS G12V)
FVVTGHVGA

SEQ ID NO: 54281 - protein, 9 aa, synthetic construct
  source 1..9: note = Seed: LVVVGAVGV (KRAS G12V)
FVVTGHVGC

SEQ ID NO: 54282 - protein, 9 aa, synthetic construct
  source 1..9: note = Seed: LVVVGAVGV (KRAS G12V)
FVVTGHVGF

SEQ ID NO: 54283 - protein, 9 aa, synthetic construct
  source 1..9: note = Seed: LVVVGAVGV (KRAS G12V)
FVVTGHVGG

SEQ ID NO: 54284 - protein, 9 aa, synthetic construct
  source 1..9: note = Seed: LVVVGAVGV (KRAS G12V)
FVVTGHVGH

SEQ ID NO: 54285 - protein, 9 aa, synthetic construct
  source 1..9: note = Seed: LVVVGAVGV (KRAS G12V)
FVVTGHVGI

SEQ ID NO: 54286 - protein, 9 aa, synthetic construct
  source 1..9: note = Seed: LVVVGAVGV (KRAS G12V)
FVVTGHVGL

SEQ ID NO: 54287 - protein, 9 aa, synthetic construct
  source 1..9: note = Seed: LVVVGAVGV (KRAS G12V)
FVVTGHVGM

SEQ ID NO: 54288 - protein, 9 aa, synthetic construct
  source 1..9: note = Seed: LVVVGAVGV (KRAS G12V)
FVVTGHVGN

SEQ ID NO: 54289 - protein, 9 aa, synthetic construct
  source 1..9: note = Seed: LVVVGAVGV (KRAS G12V)
FVVTGHVGR

SEQ ID NO: 54290 - protein, 9 aa, synthetic construct
  source 1..9: note = Seed: LVVVGAVGV (KRAS G12V)
FVVTGHVGS

SEQ ID NO: 54291 - protein, 9 aa, synthetic construct
  source 1..9: note = Seed: LVVVGAVGV (KRAS G12V)
FVVTGHVGT

SEQ ID NO: 54292 - protein, 9 aa, synthetic construct
  source 1..9: note = Seed: LVVVGAVGV (KRAS G12V)
FVVTGHVGV

SEQ ID NO: 54293 - protein, 9 aa, synthetic construct
  source 1..9: note = Seed: LVVVGAVGV (KRAS G12V)
FVVTGHVGY

SEQ ID NO: 54294 - protein, 9 aa, synthetic construct
  source 1..9: note = Seed: LVVVGAVGV (KRAS G12V)
FVVTGIVGA

SEQ ID NO: 54295 - protein, 9 aa, synthetic construct
  source 1..9: note = Seed: LVVVGAVGV (KRAS G12V)
FVVTGIVGC

SEQ ID NO: 54296 - protein, 9 aa, synthetic construct
  source 1..9: note = Seed: LVVVGAVGV (KRAS G12V)
FVVTGIVGD

SEQ ID NO: 54297 - protein, 9 aa, synthetic construct
  source 1..9: note = Seed: LVVVGAVGV (KRAS G12V)
FVVTGIVGE

SEQ ID NO: 54298 - protein, 9 aa, synthetic construct
  source 1..9: note = Seed: LVVVGAVGV (KRAS G12V)
FVVTGIVGF

SEQ ID NO: 54299 - protein, 9 aa, synthetic construct
  source 1..9: note = Seed: LVVVGAVGV (KRAS G12V)
FVVTGIVGG

SEQ ID NO: 54300 - protein, 9 aa, synthetic construct
  source 1..9: note = Seed: LVVVGAVGV (KRAS G12V)
FVVTGIVGH

SEQ ID NO: 54301 - protein, 9 aa, synthetic construct
  source 1..9: note = Seed: LVVVGAVGV (KRAS G12V)
FVVTGIVGI

SEQ ID NO: 54302 - protein, 9 aa, synthetic construct
  source 1..9: note = Seed: LVVVGAVGV (KRAS G12V)
FVVTGIVGK

SEQ ID NO: 54303 - protein, 9 aa, synthetic construct
  source 1..9: note = Seed: LVVVGAVGV (KRAS G12V)
FVVTGIVGL

SEQ ID NO: 54304 - protein, 9 aa, synthetic construct
  source 1..9: note = Seed: LVVVGAVGV (KRAS G12V)
FVVTGIVGM

SEQ ID NO: 54305 - protein, 9 aa, synthetic construct
  source 1..9: note = Seed: LVVVGAVGV (KRAS G12V)
FVVTGIVGN

SEQ ID NO: 54306 - protein, 9 aa, synthetic construct
  source 1..9: note = Seed: LVVVGAVGV (KRAS G12V)
FVVTGIVGP

SEQ ID NO: 54307 - protein, 9 aa, synthetic construct
  source 1..9: note = Seed: LVVVGAVGV (KRAS G12V)
FVVTGIVGQ

SEQ ID NO: 54308 - protein, 9 aa, synthetic construct
  source 1..9: note = Seed: LVVVGAVGV (KRAS G12V)
FVVTGIVGR

SEQ ID NO: 54309 - protein, 9 aa, synthetic construct
  source 1..9: note = Seed: LVVVGAVGV (KRAS G12V)
FVVTGIVGS

SEQ ID NO: 54310 - protein, 9 aa, synthetic construct
  source 1..9: note = Seed: LVVVGAVGV (KRAS G12V)
FVVTGIVGT

SEQ ID NO: 54311 - protein, 9 aa, synthetic construct
  source 1..9: note = Seed: LVVVGAVGV (KRAS G12V)
FVVTGIVGV

SEQ ID NO: 54312 - protein, 9 aa, synthetic construct
  source 1..9: note = Seed: LVVVGAVGV (KRAS G12V)
FVVTGIVGY

SEQ ID NO: 54313 - protein, 9 aa, synthetic construct
  source 1..9: note = Seed: LVVVGAVGV (KRAS G12V)
FVVTGKVGA

SEQ ID NO: 54314 - protein, 9 aa, synthetic construct
  source 1..9: note = Seed: LVVVGAVGV (KRAS G12V)
FVVTGKVGC

SEQ ID NO: 54315 - protein, 9 aa, synthetic construct
  source 1..9: note = Seed: LVVVGAVGV (KRAS G12V)
FVVTGKVGG

SEQ ID NO: 54316 - protein, 9 aa, synthetic construct
  source 1..9: note = Seed: LVVVGAVGV (KRAS G12V)
FVVTGKVGH

SEQ ID NO: 54317 - protein, 9 aa, synthetic construct
  source 1..9: note = Seed: LVVVGAVGV (KRAS G12V)
FVVTGKVGI

SEQ ID NO: 54318 - protein, 9 aa, synthetic construct
  source 1..9: note = Seed: LVVVGAVGV (KRAS G12V)
FVVTGKVGK

SEQ ID NO: 54319 - protein, 9 aa, synthetic construct
  source 1..9: note = Seed: LVVVGAVGV (KRAS G12V)
FVVTGKVGL

SEQ ID NO: 54320 - protein, 9 aa, synthetic construct
  source 1..9: note = Seed: LVVVGAVGV (KRAS G12V)
FVVTGKVGM

SEQ ID NO: 54321 - protein, 9 aa, synthetic construct
  source 1..9: note = Seed: LVVVGAVGV (KRAS G12V)
FVVTGKVGN

SEQ ID NO: 54322 - protein, 9 aa, synthetic construct
  source 1..9: note = Seed: LVVVGAVGV (KRAS G12V)
FVVTGKVGP

SEQ ID NO: 54323 - protein, 9 aa, synthetic construct
  source 1..9: note = Seed: LVVVGAVGV (KRAS G12V)
FVVTGKVGQ

SEQ ID NO: 54324 - protein, 9 aa, synthetic construct
  source 1..9: note = Seed: LVVVGAVGV (KRAS G12V)
FVVTGKVGR

SEQ ID NO: 54325 - protein, 9 aa, synthetic construct
  source 1..9: note = Seed: LVVVGAVGV (KRAS G12V)
FVVTGKVGS

SEQ ID NO: 54326 - protein, 9 aa, synthetic construct
  source 1..9: note = Seed: LVVVGAVGV (KRAS G12V)
FVVTGKVGT

SEQ ID NO: 54327 - protein, 9 aa, synthetic construct
  source 1..9: note = Seed: LVVVGAVGV (KRAS G12V)
FVVTGKVGV

SEQ ID NO: 54328 - protein, 9 aa, synthetic construct
  source 1..9: note = Seed: LVVVGAVGV (KRAS G12V)
FVVTGKVGY

SEQ ID NO: 54329 - protein, 9 aa, synthetic construct
  source 1..9: note = Seed: LVVVGAVGV (KRAS G12V)
FVVTGLVGA

SEQ ID NO: 54330 - protein, 9 aa, synthetic construct
  source 1..9: note = Seed: LVVVGAVGV (KRAS G12V)
FVVTGLVGC

SEQ ID NO: 54331 - protein, 9 aa, synthetic construct
  source 1..9: note = Seed: LVVVGAVGV (KRAS G12V)
FVVTGLVGD

SEQ ID NO: 54332 - protein, 9 aa, synthetic construct
  source 1..9: note = Seed: LVVVGAVGV (KRAS G12V)
FVVTGLVGG

SEQ ID NO: 54333 - protein, 9 aa, synthetic construct
  source 1..9: note = Seed: LVVVGAVGV (KRAS G12V)
FVVTGLVGH

SEQ ID NO: 54334 - protein, 9 aa, synthetic construct
  source 1..9: note = Seed: LVVVGAVGV (KRAS G12V)
FVVTGLVGI

SEQ ID NO: 54335 - protein, 9 aa, synthetic construct
  source 1..9: note = Seed: LVVVGAVGV (KRAS G12V)
FVVTGLVGL

SEQ ID NO: 54336 - protein, 9 aa, synthetic construct
  source 1..9: note = Seed: LVVVGAVGV (KRAS G12V)
FVVTGLVGM

SEQ ID NO: 54337 - protein, 9 aa, synthetic construct
  source 1..9: note = Seed: LVVVGAVGV (KRAS G12V)
FVVTGLVGN

SEQ ID NO: 54338 - protein, 9 aa, synthetic construct
  source 1..9: note = Seed: LVVVGAVGV (KRAS G12V)
FVVTGLVGQ

SEQ ID NO: 54339 - protein, 9 aa, synthetic construct
  source 1..9: note = Seed: LVVVGAVGV (KRAS G12V)
FVVTGLVGS

SEQ ID NO: 54340 - protein, 9 aa, synthetic construct
  source 1..9: note = Seed: LVVVGAVGV (KRAS G12V)
FVVTGLVGT

SEQ ID NO: 54341 - protein, 9 aa, synthetic construct
  source 1..9: note = Seed: LVVVGAVGV (KRAS G12V)
FVVTGLVGV

SEQ ID NO: 54342 - protein, 9 aa, synthetic construct
  source 1..9: note = Seed: LVVVGAVGV (KRAS G12V)
FVVTGLVGY

SEQ ID NO: 54343 - protein, 9 aa, synthetic construct
  source 1..9: note = Seed: LVVVGAVGV (KRAS G12V)
FVVTGMVGA

SEQ ID NO: 54344 - protein, 9 aa, synthetic construct
  source 1..9: note = Seed: LVVVGAVGV (KRAS G12V)
FVVTGMVGC

SEQ ID NO: 54345 - protein, 9 aa, synthetic construct
  source 1..9: note = Seed: LVVVGAVGV (KRAS G12V)
FVVTGMVGD

SEQ ID NO: 54346 - protein, 9 aa, synthetic construct
  source 1..9: note = Seed: LVVVGAVGV (KRAS G12V)
FVVTGMVGE

SEQ ID NO: 54347 - protein, 9 aa, synthetic construct
  source 1..9: note = Seed: LVVVGAVGV (KRAS G12V)
FVVTGMVGF

SEQ ID NO: 54348 - protein, 9 aa, synthetic construct
  source 1..9: note = Seed: LVVVGAVGV (KRAS G12V)
FVVTGMVGG

SEQ ID NO: 54349 - protein, 9 aa, synthetic construct
  source 1..9: note = Seed: LVVVGAVGV (KRAS G12V)
FVVTGMVGH

SEQ ID NO: 54350 - protein, 9 aa, synthetic construct
  source 1..9: note = Seed: LVVVGAVGV (KRAS G12V)
FVVTGMVGI

SEQ ID NO: 54351 - protein, 9 aa, synthetic construct
  source 1..9: note = Seed: LVVVGAVGV (KRAS G12V)
FVVTGMVGK

SEQ ID NO: 54352 - protein, 9 aa, synthetic construct
  source 1..9: note = Seed: LVVVGAVGV (KRAS G12V)
FVVTGMVGL

SEQ ID NO: 54353 - protein, 9 aa, synthetic construct
  source 1..9: note = Seed: LVVVGAVGV (KRAS G12V)
FVVTGMVGM

SEQ ID NO: 54354 - protein, 9 aa, synthetic construct
  source 1..9: note = Seed: LVVVGAVGV (KRAS G12V)
FVVTGMVGN

SEQ ID NO: 54355 - protein, 9 aa, synthetic construct
  source 1..9: note = Seed: LVVVGAVGV (KRAS G12V)
FVVTGMVGQ

SEQ ID NO: 54356 - protein, 9 aa, synthetic construct
  source 1..9: note = Seed: LVVVGAVGV (KRAS G12V)
FVVTGMVGR

SEQ ID NO: 54357 - protein, 9 aa, synthetic construct
  source 1..9: note = Seed: LVVVGAVGV (KRAS G12V)
FVVTGMVGS

SEQ ID NO: 54358 - protein, 9 aa, synthetic construct
  source 1..9: note = Seed: LVVVGAVGV (KRAS G12V)
FVVTGMVGT

SEQ ID NO: 54359 - protein, 9 aa, synthetic construct
  source 1..9: note = Seed: LVVVGAVGV (KRAS G12V)
FVVTGMVGV

SEQ ID NO: 54360 - protein, 9 aa, synthetic construct
  source 1..9: note = Seed: LVVVGAVGV (KRAS G12V)
FVVTGMVGY

SEQ ID NO: 54361 - protein, 9 aa, synthetic construct
  source 1..9: note = Seed: LVVVGAVGV (KRAS G12V)
FVVTGNVGA

SEQ ID NO: 54362 - protein, 9 aa, synthetic construct
  source 1..9: note = Seed: LVVVGAVGV (KRAS G12V)
FVVTGNVGC

SEQ ID NO: 54363 - protein, 9 aa, synthetic construct
  source 1..9: note = Seed: LVVVGAVGV (KRAS G12V)
FVVTGNVGD

SEQ ID NO: 54364 - protein, 9 aa, synthetic construct
  source 1..9: note = Seed: LVVVGAVGV (KRAS G12V)
FVVTGNVGE

SEQ ID NO: 54365 - protein, 9 aa, synthetic construct
  source 1..9: note = Seed: LVVVGAVGV (KRAS G12V)
FVVTGNVGF

SEQ ID NO: 54366 - protein, 9 aa, synthetic construct
  source 1..9: note = Seed: LVVVGAVGV (KRAS G12V)
FVVTGNVGG

SEQ ID NO: 54367 - protein, 9 aa, synthetic construct
  source 1..9: note = Seed: LVVVGAVGV (KRAS G12V)
FVVTGNVGH

SEQ ID NO: 54368 - protein, 9 aa, synthetic construct
  source 1..9: note = Seed: LVVVGAVGV (KRAS G12V)
FVVTGNVGI

SEQ ID NO: 54369 - protein, 9 aa, synthetic construct
  source 1..9: note = Seed: LVVVGAVGV (KRAS G12V)
FVVTGNVGK

SEQ ID NO: 54370 - protein, 9 aa, synthetic construct
  source 1..9: note = Seed: LVVVGAVGV (KRAS G12V)
FVVTGNVGL

SEQ ID NO: 54371 - protein, 9 aa, synthetic construct
  source 1..9: note = Seed: LVVVGAVGV (KRAS G12V)
FVVTGNVGM

SEQ ID NO: 54372 - protein, 9 aa, synthetic construct
  source 1..9: note = Seed: LVVVGAVGV (KRAS G12V)
FVVTGNVGN

SEQ ID NO: 54373 - protein, 9 aa, synthetic construct
  source 1..9: note = Seed: LVVVGAVGV (KRAS G12V)
FVVTGNVGP

SEQ ID NO: 54374 - protein, 9 aa, synthetic construct
  source 1..9: note = Seed: LVVVGAVGV (KRAS G12V)
FVVTGNVGQ

SEQ ID NO: 54375 - protein, 9 aa, synthetic construct
  source 1..9: note = Seed: LVVVGAVGV (KRAS G12V)
FVVTGNVGR

SEQ ID NO: 54376 - protein, 9 aa, synthetic construct
  source 1..9: note = Seed: LVVVGAVGV (KRAS G12V)
FVVTGNVGS

SEQ ID NO: 54377 - protein, 9 aa, synthetic construct
  source 1..9: note = Seed: LVVVGAVGV (KRAS G12V)
FVVTGNVGT

SEQ ID NO: 54378 - protein, 9 aa, synthetic construct
  source 1..9: note = Seed: LVVVGAVGV (KRAS G12V)
FVVTGNVGV

SEQ ID NO: 54379 - protein, 9 aa, synthetic construct
  source 1..9: note = Seed: LVVVGAVGV (KRAS G12V)
FVVTGNVGW

SEQ ID NO: 54380 - protein, 9 aa, synthetic construct
  source 1..9: note = Seed: LVVVGAVGV (KRAS G12V)
FVVTGNVGY

SEQ ID NO: 54381 - protein, 9 aa, synthetic construct
  source 1..9: note = Seed: LVVVGAVGV (KRAS G12V)
FVVTGPVGA

SEQ ID NO: 54382 - protein, 9 aa, synthetic construct
  source 1..9: note = Seed: LVVVGAVGV (KRAS G12V)
FVVTGPVGC

SEQ ID NO: 54383 - protein, 9 aa, synthetic construct
  source 1..9: note = Seed: LVVVGAVGV (KRAS G12V)
FVVTGPVGD

SEQ ID NO: 54384 - protein, 9 aa, synthetic construct
  source 1..9: note = Seed: LVVVGAVGV (KRAS G12V)
FVVTGPVGE

SEQ ID NO: 54385 - protein, 9 aa, synthetic construct
  source 1..9: note = Seed: LVVVGAVGV (KRAS G12V)
FVVTGPVGF

SEQ ID NO: 54386 - protein, 9 aa, synthetic construct
  source 1..9: note = Seed: LVVVGAVGV (KRAS G12V)
FVVTGPVGG

SEQ ID NO: 54387 - protein, 9 aa, synthetic construct
  source 1..9: note = Seed: LVVVGAVGV (KRAS G12V)
FVVTGPVGH

SEQ ID NO: 54388 - protein, 9 aa, synthetic construct
  source 1..9: note = Seed: LVVVGAVGV (KRAS G12V)
FVVTGPVGI

SEQ ID NO: 54389 - protein, 9 aa, synthetic construct
  source 1..9: note = Seed: LVVVGAVGV (KRAS G12V)
FVVTGPVGK

SEQ ID NO: 54390 - protein, 9 aa, synthetic construct
  source 1..9: note = Seed: LVVVGAVGV (KRAS G12V)
FVVTGPVGL

SEQ ID NO: 54391 - protein, 9 aa, synthetic construct
  source 1..9: note = Seed: LVVVGAVGV (KRAS G12V)
FVVTGPVGM

SEQ ID NO: 54392 - protein, 9 aa, synthetic construct
  source 1..9: note = Seed: LVVVGAVGV (KRAS G12V)
FVVTGPVGN

SEQ ID NO: 54393 - protein, 9 aa, synthetic construct
  source 1..9: note = Seed: LVVVGAVGV (KRAS G12V)
FVVTGPVGP

SEQ ID NO: 54394 - protein, 9 aa, synthetic construct
  source 1..9: note = Seed: LVVVGAVGV (KRAS G12V)
FVVTGPVGQ

SEQ ID NO: 54395 - protein, 9 aa, synthetic construct
  source 1..9: note = Seed: LVVVGAVGV (KRAS G12V)
FVVTGPVGR

SEQ ID NO: 54396 - protein, 9 aa, synthetic construct
  source 1..9: note = Seed: LVVVGAVGV (KRAS G12V)
FVVTGPVGS

SEQ ID NO: 54397 - protein, 9 aa, synthetic construct
  source 1..9: note = Seed: LVVVGAVGV (KRAS G12V)
FVVTGPVGT

SEQ ID NO: 54398 - protein, 9 aa, synthetic construct
  source 1..9: note = Seed: LVVVGAVGV (KRAS G12V)
FVVTGPVGV

SEQ ID NO: 54399 - protein, 9 aa, synthetic construct
  source 1..9: note = Seed: LVVVGAVGV (KRAS G12V)
FVVTGPVGW

SEQ ID NO: 54400 - protein, 9 aa, synthetic construct
  source 1..9: note = Seed: LVVVGAVGV (KRAS G12V)
FVVTGPVGY

SEQ ID NO: 54401 - protein, 9 aa, synthetic construct
  source 1..9: note = Seed: LVVVGAVGV (KRAS G12V)
FVVTGQVGA

SEQ ID NO: 54402 - protein, 9 aa, synthetic construct
  source 1..9: note = Seed: LVVVGAVGV (KRAS G12V)
FVVTGQVGF

SEQ ID NO: 54403 - protein, 9 aa, synthetic construct
  source 1..9: note = Seed: LVVVGAVGV (KRAS G12V)
FVVTGQVGG

SEQ ID NO: 54404 - protein, 9 aa, synthetic construct
  source 1..9: note = Seed: LVVVGAVGV (KRAS G12V)
FVVTGQVGI

SEQ ID NO: 54405 - protein, 9 aa, synthetic construct
  source 1..9: note = Seed: LVVVGAVGV (KRAS G12V)
FVVTGQVGL

SEQ ID NO: 54406 - protein, 9 aa, synthetic construct
  source 1..9: note = Seed: LVVVGAVGV (KRAS G12V)
FVVTGQVGM

SEQ ID NO: 54407 - protein, 9 aa, synthetic construct
  source 1..9: note = Seed: LVVVGAVGV (KRAS G12V)
FVVTGQVGN

SEQ ID NO: 54408 - protein, 9 aa, synthetic construct
  source 1..9: note = Seed: LVVVGAVGV (KRAS G12V)
FVVTGQVGQ

SEQ ID NO: 54409 - protein, 9 aa, synthetic construct
  source 1..9: note = Seed: LVVVGAVGV (KRAS G12V)
FVVTGQVGS

SEQ ID NO: 54410 - protein, 9 aa, synthetic construct
  source 1..9: note = Seed: LVVVGAVGV (KRAS G12V)
FVVTGQVGT

SEQ ID NO: 54411 - protein, 9 aa, synthetic construct
  source 1..9: note = Seed: LVVVGAVGV (KRAS G12V)
FVVTGQVGV

SEQ ID NO: 54412 - protein, 9 aa, synthetic construct
  source 1..9: note = Seed: LVVVGAVGV (KRAS G12V)
FVVTGQVGY

SEQ ID NO: 54413 - protein, 9 aa, synthetic construct
  source 1..9: note = Seed: LVVVGAVGV (KRAS G12V)
FVVTGRVGA

SEQ ID NO: 54414 - protein, 9 aa, synthetic construct
  source 1..9: note = Seed: LVVVGAVGV (KRAS G12V)
FVVTGRVGF

SEQ ID NO: 54415 - protein, 9 aa, synthetic construct
  source 1..9: note = Seed: LVVVGAVGV (KRAS G12V)
FVVTGRVGG

SEQ ID NO: 54416 - protein, 9 aa, synthetic construct
  source 1..9: note = Seed: LVVVGAVGV (KRAS G12V)
FVVTGRVGH

SEQ ID NO: 54417 - protein, 9 aa, synthetic construct
  source 1..9: note = Seed: LVVVGAVGV (KRAS G12V)
FVVTGRVGI

SEQ ID NO: 54418 - protein, 9 aa, synthetic construct
  source 1..9: note = Seed: LVVVGAVGV (KRAS G12V)
FVVTGRVGK

SEQ ID NO: 54419 - protein, 9 aa, synthetic construct
  source 1..9: note = Seed: LVVVGAVGV (KRAS G12V)
FVVTGRVGL

SEQ ID NO: 54420 - protein, 9 aa, synthetic construct
  source 1..9: note = Seed: LVVVGAVGV (KRAS G12V)
FVVTGRVGM

SEQ ID NO: 54421 - protein, 9 aa, synthetic construct
  source 1..9: note = Seed: LVVVGAVGV (KRAS G12V)
FVVTGRVGN

SEQ ID NO: 54422 - protein, 9 aa, synthetic construct
  source 1..9: note = Seed: LVVVGAVGV (KRAS G12V)
FVVTGRVGP

SEQ ID NO: 54423 - protein, 9 aa, synthetic construct
  source 1..9: note = Seed: LVVVGAVGV (KRAS G12V)
FVVTGRVGQ

SEQ ID NO: 54424 - protein, 9 aa, synthetic construct
  source 1..9: note = Seed: LVVVGAVGV (KRAS G12V)
FVVTGRVGR

SEQ ID NO: 54425 - protein, 9 aa, synthetic construct
  source 1..9: note = Seed: LVVVGAVGV (KRAS G12V)
FVVTGRVGS

SEQ ID NO: 54426 - protein, 9 aa, synthetic construct
  source 1..9: note = Seed: LVVVGAVGV (KRAS G12V)
FVVTGRVGT

SEQ ID NO: 54427 - protein, 9 aa, synthetic construct
  source 1..9: note = Seed: LVVVGAVGV (KRAS G12V)
FVVTGRVGV

SEQ ID NO: 54428 - protein, 9 aa, synthetic construct
  source 1..9: note = Seed: LVVVGAVGV (KRAS G12V)
FVVTGRVGY

SEQ ID NO: 54429 - protein, 9 aa, synthetic construct
  source 1..9: note = Seed: LVVVGAVGV (KRAS G12V)
FVVTGSVGA

SEQ ID NO: 54430 - protein, 9 aa, synthetic construct
  source 1..9: note = Seed: LVVVGAVGV (KRAS G12V)
FVVTGSVGC

SEQ ID NO: 54431 - protein, 9 aa, synthetic construct
  source 1..9: note = Seed: LVVVGAVGV (KRAS G12V)
FVVTGSVGD

SEQ ID NO: 54432 - protein, 9 aa, synthetic construct
  source 1..9: note = Seed: LVVVGAVGV (KRAS G12V)
FVVTGSVGE

SEQ ID NO: 54433 - protein, 9 aa, synthetic construct
  source 1..9: note = Seed: LVVVGAVGV (KRAS G12V)
FVVTGSVGF

SEQ ID NO: 54434 - protein, 9 aa, synthetic construct
  source 1..9: note = Seed: LVVVGAVGV (KRAS G12V)
FVVTGSVGG

SEQ ID NO: 54435 - protein, 9 aa, synthetic construct
  source 1..9: note = Seed: LVVVGAVGV (KRAS G12V)
FVVTGSVGH

SEQ ID NO: 54436 - protein, 9 aa, synthetic construct
  source 1..9: note = Seed: LVVVGAVGV (KRAS G12V)
FVVTGSVGI

SEQ ID NO: 54437 - protein, 9 aa, synthetic construct
  source 1..9: note = Seed: LVVVGAVGV (KRAS G12V)
FVVTGSVGK

SEQ ID NO: 54438 - protein, 9 aa, synthetic construct
  source 1..9: note = Seed: LVVVGAVGV (KRAS G12V)
FVVTGSVGL

SEQ ID NO: 54439 - protein, 9 aa, synthetic construct
  source 1..9: note = Seed: LVVVGAVGV (KRAS G12V)
FVVTGSVGM

SEQ ID NO: 54440 - protein, 9 aa, synthetic construct
  source 1..9: note = Seed: LVVVGAVGV (KRAS G12V)
FVVTGSVGN

SEQ ID NO: 54441 - protein, 9 aa, synthetic construct
  source 1..9: note = Seed: LVVVGAVGV (KRAS G12V)
FVVTGSVGP

SEQ ID NO: 54442 - protein, 9 aa, synthetic construct
  source 1..9: note = Seed: LVVVGAVGV (KRAS G12V)
FVVTGSVGQ

SEQ ID NO: 54443 - protein, 9 aa, synthetic construct
  source 1..9: note = Seed: LVVVGAVGV (KRAS G12V)
FVVTGSVGR

SEQ ID NO: 54444 - protein, 9 aa, synthetic construct
  source 1..9: note = Seed: LVVVGAVGV (KRAS G12V)
FVVTGSVGS

SEQ ID NO: 54445 - protein, 9 aa, synthetic construct
  source 1..9: note = Seed: LVVVGAVGV (KRAS G12V)
FVVTGSVGT

SEQ ID NO: 54446 - protein, 9 aa, synthetic construct
  source 1..9: note = Seed: LVVVGAVGV (KRAS G12V)
FVVTGSVGV

SEQ ID NO: 54447 - protein, 9 aa, synthetic construct
  source 1..9: note = Seed: LVVVGAVGV (KRAS G12V)
FVVTGSVGW

SEQ ID NO: 54448 - protein, 9 aa, synthetic construct
  source 1..9: note = Seed: LVVVGAVGV (KRAS G12V)
FVVTGSVGY

SEQ ID NO: 54449 - protein, 9 aa, synthetic construct
  source 1..9: note = Seed: LVVVGAVGV (KRAS G12V)
FVVTGTVGA

SEQ ID NO: 54450 - protein, 9 aa, synthetic construct
  source 1..9: note = Seed: LVVVGAVGV (KRAS G12V)
FVVTGTVGC

SEQ ID NO: 54451 - protein, 9 aa, synthetic construct
  source 1..9: note = Seed: LVVVGAVGV (KRAS G12V)
FVVTGTVGD

SEQ ID NO: 54452 - protein, 9 aa, synthetic construct
  source 1..9: note = Seed: LVVVGAVGV (KRAS G12V)
FVVTGTVGE

SEQ ID NO: 54453 - protein, 9 aa, synthetic construct
  source 1..9: note = Seed: LVVVGAVGV (KRAS G12V)
FVVTGTVGF

SEQ ID NO: 54454 - protein, 9 aa, synthetic construct
  source 1..9: note = Seed: LVVVGAVGV (KRAS G12V)
FVVTGTVGG

SEQ ID NO: 54455 - protein, 9 aa, synthetic construct
  source 1..9: note = Seed: LVVVGAVGV (KRAS G12V)
FVVTGTVGH

SEQ ID NO: 54456 - protein, 9 aa, synthetic construct
  source 1..9: note = Seed: LVVVGAVGV (KRAS G12V)
FVVTGTVGI

SEQ ID NO: 54457 - protein, 9 aa, synthetic construct
  source 1..9: note = Seed: LVVVGAVGV (KRAS G12V)
FVVTGTVGK

SEQ ID NO: 54458 - protein, 9 aa, synthetic construct
  source 1..9: note = Seed: LVVVGAVGV (KRAS G12V)
FVVTGTVGL

SEQ ID NO: 54459 - protein, 9 aa, synthetic construct
  source 1..9: note = Seed: LVVVGAVGV (KRAS G12V)
FVVTGTVGM

SEQ ID NO: 54460 - protein, 9 aa, synthetic construct
  source 1..9: note = Seed: LVVVGAVGV (KRAS G12V)
FVVTGTVGN

SEQ ID NO: 54461 - protein, 9 aa, synthetic construct
  source 1..9: note = Seed: LVVVGAVGV (KRAS G12V)
FVVTGTVGP

SEQ ID NO: 54462 - protein, 9 aa, synthetic construct
  source 1..9: note = Seed: LVVVGAVGV (KRAS G12V)
FVVTGTVGQ

SEQ ID NO: 54463 - protein, 9 aa, synthetic construct
  source 1..9: note = Seed: LVVVGAVGV (KRAS G12V)
FVVTGTVGR

SEQ ID NO: 54464 - protein, 9 aa, synthetic construct
  source 1..9: note = Seed: LVVVGAVGV (KRAS G12V)
FVVTGTVGS

SEQ ID NO: 54465 - protein, 9 aa, synthetic construct
  source 1..9: note = Seed: LVVVGAVGV (KRAS G12V)
FVVTGTVGT

SEQ ID NO: 54466 - protein, 9 aa, synthetic construct
  source 1..9: note = Seed: LVVVGAVGV (KRAS G12V)
FVVTGTVGV

SEQ ID NO: 54467 - protein, 9 aa, synthetic construct
  source 1..9: note = Seed: LVVVGAVGV (KRAS G12V)
FVVTGTVGW

SEQ ID NO: 54468 - protein, 9 aa, synthetic construct
  source 1..9: note = Seed: LVVVGAVGV (KRAS G12V)
FVVTGTVGY

SEQ ID NO: 54469 - protein, 9 aa, synthetic construct
  source 1..9: note = Seed: LVVVGAVGV (KRAS G12V)
FVVTGVVGA

SEQ ID NO: 54470 - protein, 9 aa, synthetic construct
  source 1..9: note = Seed: LVVVGAVGV (KRAS G12V)
FVVTGVVGC

SEQ ID NO: 54471 - protein, 9 aa, synthetic construct
  source 1..9: note = Seed: LVVVGAVGV (KRAS G12V)
FVVTGVVGD

SEQ ID NO: 54472 - protein, 9 aa, synthetic construct
  source 1..9: note = Seed: LVVVGAVGV (KRAS G12V)
FVVTGVVGE

SEQ ID NO: 54473 - protein, 9 aa, synthetic construct
  source 1..9: note = Seed: LVVVGAVGV (KRAS G12V)
FVVTGVVGF

SEQ ID NO: 54474 - protein, 9 aa, synthetic construct
  source 1..9: note = Seed: LVVVGAVGV (KRAS G12V)
FVVTGVVGG

SEQ ID NO: 54475 - protein, 9 aa, synthetic construct
  source 1..9: note = Seed: LVVVGAVGV (KRAS G12V)
FVVTGVVGH

SEQ ID NO: 54476 - protein, 9 aa, synthetic construct
  source 1..9: note = Seed: LVVVGAVGV (KRAS G12V)
FVVTGVVGI

SEQ ID NO: 54477 - protein, 9 aa, synthetic construct
  source 1..9: note = Seed: LVVVGAVGV (KRAS G12V)
FVVTGVVGK

SEQ ID NO: 54478 - protein, 9 aa, synthetic construct
  source 1..9: note = Seed: LVVVGAVGV (KRAS G12V)
FVVTGVVGL

SEQ ID NO: 54479 - protein, 9 aa, synthetic construct
  source 1..9: note = Seed: LVVVGAVGV (KRAS G12V)
FVVTGVVGM

SEQ ID NO: 54480 - protein, 9 aa, synthetic construct
  source 1..9: note = Seed: LVVVGAVGV (KRAS G12V)
FVVTGVVGN

SEQ ID NO: 54481 - protein, 9 aa, synthetic construct
  source 1..9: note = Seed: LVVVGAVGV (KRAS G12V)
FVVTGVVGP

SEQ ID NO: 54482 - protein, 9 aa, synthetic construct
  source 1..9: note = Seed: LVVVGAVGV (KRAS G12V)
FVVTGVVGQ

SEQ ID NO: 54483 - protein, 9 aa, synthetic construct
  source 1..9: note = Seed: LVVVGAVGV (KRAS G12V)
FVVTGVVGR

SEQ ID NO: 54484 - protein, 9 aa, synthetic construct
  source 1..9: note = Seed: LVVVGAVGV (KRAS G12V)
FVVTGVVGS

SEQ ID NO: 54485 - protein, 9 aa, synthetic construct
  source 1..9: note = Seed: LVVVGAVGV (KRAS G12V)
FVVTGVVGT

SEQ ID NO: 54486 - protein, 9 aa, synthetic construct
  source 1..9: note = Seed: LVVVGAVGV (KRAS G12V)
FVVTGVVGV

SEQ ID NO: 54487 - protein, 9 aa, synthetic construct
  source 1..9: note = Seed: LVVVGAVGV (KRAS G12V)
FVVTGVVGY

SEQ ID NO: 54488 - protein, 9 aa, synthetic construct
  source 1..9: note = Seed: LVVVGAVGV (KRAS G12V)
FVVTGWVGA

SEQ ID NO: 54489 - protein, 9 aa, synthetic construct
  source 1..9: note = Seed: LVVVGAVGV (KRAS G12V)
FVVTGWVGI

SEQ ID NO: 54490 - protein, 9 aa, synthetic construct
  source 1..9: note = Seed: LVVVGAVGV (KRAS G12V)
FVVTGWVGL

SEQ ID NO: 54491 - protein, 9 aa, synthetic construct
  source 1..9: note = Seed: LVVVGAVGV (KRAS G12V)
FVVTGWVGM

SEQ ID NO: 54492 - protein, 9 aa, synthetic construct
  source 1..9: note = Seed: LVVVGAVGV (KRAS G12V)
FVVTGWVGN

SEQ ID NO: 54493 - protein, 9 aa, synthetic construct
  source 1..9: note = Seed: LVVVGAVGV (KRAS G12V)
FVVTGWVGS

SEQ ID NO: 54494 - protein, 9 aa, synthetic construct
  source 1..9: note = Seed: LVVVGAVGV (KRAS G12V)
FVVTGWVGT

SEQ ID NO: 54495 - protein, 9 aa, synthetic construct
  source 1..9: note = Seed: LVVVGAVGV (KRAS G12V)
FVVTGWVGV

SEQ ID NO: 54496 - protein, 9 aa, synthetic construct
  source 1..9: note = Seed: LVVVGAVGV (KRAS G12V)
FVVTGWVGY

SEQ ID NO: 54497 - protein, 9 aa, synthetic construct
  source 1..9: note = Seed: LVVVGAVGV (KRAS G12V)
FVVTGYVGA

SEQ ID NO: 54498 - protein, 9 aa, synthetic construct
  source 1..9: note = Seed: LVVVGAVGV (KRAS G12V)
FVVTGYVGC

SEQ ID NO: 54499 - protein, 9 aa, synthetic construct
  source 1..9: note = Seed: LVVVGAVGV (KRAS G12V)
FVVTGYVGF

SEQ ID NO: 54500 - protein, 9 aa, synthetic construct
  source 1..9: note = Seed: LVVVGAVGV (KRAS G12V)
FVVTGYVGI

SEQ ID NO: 54501 - protein, 9 aa, synthetic construct
  source 1..9: note = Seed: LVVVGAVGV (KRAS G12V)
FVVTGYVGL

SEQ ID NO: 54502 - protein, 9 aa, synthetic construct
  source 1..9: note = Seed: LVVVGAVGV (KRAS G12V)
FVVTGYVGM

SEQ ID NO: 54503 - protein, 9 aa, synthetic construct
  source 1..9: note = Seed: LVVVGAVGV (KRAS G12V)
FVVTGYVGV

SEQ ID NO: 54504 - protein, 9 aa, synthetic construct
  source 1..9: note = Seed: LVVVGAVGV (KRAS G12V)
FVVTGYVGY

SEQ ID NO: 54505 - protein, 9 aa, synthetic construct
  source 1..9: note = Seed: LVVVGAVGV (KRAS G12V)
FVVVGAVGA

SEQ ID NO: 54506 - protein, 9 aa, synthetic construct
  source 1..9: note = Seed: LVVVGAVGV (KRAS G12V)
FVVVGAVGC

SEQ ID NO: 54507 - protein, 9 aa, synthetic construct
  source 1..9: note = Seed: LVVVGAVGV (KRAS G12V)
FVVVGAVGD

SEQ ID NO: 54508 - protein, 9 aa, synthetic construct
  source 1..9: note = Seed: LVVVGAVGV (KRAS G12V)
FVVVGAVGE

SEQ ID NO: 54509 - protein, 9 aa, synthetic construct
  source 1..9: note = Seed: LVVVGAVGV (KRAS G12V)
FVVVGAVGF

SEQ ID NO: 54510 - protein, 9 aa, synthetic construct
  source 1..9: note = Seed: LVVVGAVGV (KRAS G12V)
FVVVGAVGG

SEQ ID NO: 54511 - protein, 9 aa, synthetic construct
  source 1..9: note = Seed: LVVVGAVGV (KRAS G12V)
FVVVGAVGH

SEQ ID NO: 54512 - protein, 9 aa, synthetic construct
  source 1..9: note = Seed: LVVVGAVGV (KRAS G12V)
FVVVGAVGI

SEQ ID NO: 54513 - protein, 9 aa, synthetic construct
  source 1..9: note = Seed: LVVVGAVGV (KRAS G12V)
FVVVGAVGK

SEQ ID NO: 54514 - protein, 9 aa, synthetic construct
  source 1..9: note = Seed: LVVVGAVGV (KRAS G12V)
FVVVGAVGL

SEQ ID NO: 54515 - protein, 9 aa, synthetic construct
  source 1..9: note = Seed: LVVVGAVGV (KRAS G12V)
FVVVGAVGM

SEQ ID NO: 54516 - protein, 9 aa, synthetic construct
  source 1..9: note = Seed: LVVVGAVGV (KRAS G12V)
FVVVGAVGN

SEQ ID NO: 54517 - protein, 9 aa, synthetic construct
  source 1..9: note = Seed: LVVVGAVGV (KRAS G12V)
FVVVGAVGP

SEQ ID NO: 54518 - protein, 9 aa, synthetic construct
  source 1..9: note = Seed: LVVVGAVGV (KRAS G12V)
FVVVGAVGQ

SEQ ID NO: 54519 - protein, 9 aa, synthetic construct
  source 1..9: note = Seed: LVVVGAVGV (KRAS G12V)
FVVVGAVGR

SEQ ID NO: 54520 - protein, 9 aa, synthetic construct
  source 1..9: note = Seed: LVVVGAVGV (KRAS G12V)
FVVVGAVGS

SEQ ID NO: 54521 - protein, 9 aa, synthetic construct
  source 1..9: note = Seed: LVVVGAVGV (KRAS G12V)
FVVVGAVGT

SEQ ID NO: 54522 - protein, 9 aa, synthetic construct
  source 1..9: note = Seed: LVVVGAVGV (KRAS G12V)
FVVVGAVGV

SEQ ID NO: 54523 - protein, 9 aa, synthetic construct
  source 1..9: note = Seed: LVVVGAVGV (KRAS G12V)
FVVVGAVGW

SEQ ID NO: 54524 - protein, 9 aa, synthetic construct
  source 1..9: note = Seed: LVVVGAVGV (KRAS G12V)
FVVVGAVGY

SEQ ID NO: 54525 - protein, 9 aa, synthetic construct
  source 1..9: note = Seed: LVVVGAVGV (KRAS G12V)
FVVVGCVGA

SEQ ID NO: 54526 - protein, 9 aa, synthetic construct
  source 1..9: note = Seed: LVVVGAVGV (KRAS G12V)
FVVVGCVGK

SEQ ID NO: 54527 - protein, 9 aa, synthetic construct
  source 1..9: note = Seed: LVVVGAVGV (KRAS G12V)
FVVVGCVGN

SEQ ID NO: 54528 - protein, 9 aa, synthetic construct
  source 1..9: note = Seed: LVVVGAVGV (KRAS G12V)
FVVVGCVGR

SEQ ID NO: 54529 - protein, 9 aa, synthetic construct
  source 1..9: note = Seed: LVVVGAVGV (KRAS G12V)
FVVVGCVGV

SEQ ID NO: 54530 - protein, 9 aa, synthetic construct
  source 1..9: note = Seed: LVVVGAVGV (KRAS G12V)
FVVVGDVGA

SEQ ID NO: 54531 - protein, 9 aa, synthetic construct
  source 1..9: note = Seed: LVVVGAVGV (KRAS G12V)
FVVVGDVGD

SEQ ID NO: 54532 - protein, 9 aa, synthetic construct
  source 1..9: note = Seed: LVVVGAVGV (KRAS G12V)
FVVVGDVGE

SEQ ID NO: 54533 - protein, 9 aa, synthetic construct
  source 1..9: note = Seed: LVVVGAVGV (KRAS G12V)
FVVVGDVGF

SEQ ID NO: 54534 - protein, 9 aa, synthetic construct
  source 1..9: note = Seed: LVVVGAVGV (KRAS G12V)
FVVVGDVGG

SEQ ID NO: 54535 - protein, 9 aa, synthetic construct
  source 1..9: note = Seed: LVVVGAVGV (KRAS G12V)
FVVVGDVGH

SEQ ID NO: 54536 - protein, 9 aa, synthetic construct
  source 1..9: note = Seed: LVVVGAVGV (KRAS G12V)
FVVVGDVGI

SEQ ID NO: 54537 - protein, 9 aa, synthetic construct
  source 1..9: note = Seed: LVVVGAVGV (KRAS G12V)
FVVVGDVGL

SEQ ID NO: 54538 - protein, 9 aa, synthetic construct
  source 1..9: note = Seed: LVVVGAVGV (KRAS G12V)
FVVVGDVGM

SEQ ID NO: 54539 - protein, 9 aa, synthetic construct
  source 1..9: note = Seed: LVVVGAVGV (KRAS G12V)
FVVVGDVGN

SEQ ID NO: 54540 - protein, 9 aa, synthetic construct
  source 1..9: note = Seed: LVVVGAVGV (KRAS G12V)
FVVVGDVGQ

SEQ ID NO: 54541 - protein, 9 aa, synthetic construct
  source 1..9: note = Seed: LVVVGAVGV (KRAS G12V)
FVVVGDVGS

SEQ ID NO: 54542 - protein, 9 aa, synthetic construct
  source 1..9: note = Seed: LVVVGAVGV (KRAS G12V)
FVVVGDVGT

SEQ ID NO: 54543 - protein, 9 aa, synthetic construct
  source 1..9: note = Seed: LVVVGAVGV (KRAS G12V)
FVVVGDVGV

SEQ ID NO: 54544 - protein, 9 aa, synthetic construct
  source 1..9: note = Seed: LVVVGAVGV (KRAS G12V)
FVVVGEVGA

SEQ ID NO: 54545 - protein, 9 aa, synthetic construct
  source 1..9: note = Seed: LVVVGAVGV (KRAS G12V)
FVVVGEVGG

SEQ ID NO: 54546 - protein, 9 aa, synthetic construct
  source 1..9: note = Seed: LVVVGAVGV (KRAS G12V)
FVVVGEVGH

SEQ ID NO: 54547 - protein, 9 aa, synthetic construct
  source 1..9: note = Seed: LVVVGAVGV (KRAS G12V)
FVVVGEVGI

SEQ ID NO: 54548 - protein, 9 aa, synthetic construct
  source 1..9: note = Seed: LVVVGAVGV (KRAS G12V)
FVVVGEVGL

SEQ ID NO: 54549 - protein, 9 aa, synthetic construct
  source 1..9: note = Seed: LVVVGAVGV (KRAS G12V)
FVVVGEVGM

SEQ ID NO: 54550 - protein, 9 aa, synthetic construct
  source 1..9: note = Seed: LVVVGAVGV (KRAS G12V)
FVVVGEVGN

SEQ ID NO: 54551 - protein, 9 aa, synthetic construct
  source 1..9: note = Seed: LVVVGAVGV (KRAS G12V)
FVVVGEVGQ

SEQ ID NO: 54552 - protein, 9 aa, synthetic construct
  source 1..9: note = Seed: LVVVGAVGV (KRAS G12V)
FVVVGEVGS

SEQ ID NO: 54553 - protein, 9 aa, synthetic construct
  source 1..9: note = Seed: LVVVGAVGV (KRAS G12V)
FVVVGEVGT

SEQ ID NO: 54554 - protein, 9 aa, synthetic construct
  source 1..9: note = Seed: LVVVGAVGV (KRAS G12V)
FVVVGEVGV

SEQ ID NO: 54555 - protein, 9 aa, synthetic construct
  source 1..9: note = Seed: LVVVGAVGV (KRAS G12V)
FVVVGFVGD

SEQ ID NO: 54556 - protein, 9 aa, synthetic construct
  source 1..9: note = Seed: LVVVGAVGV (KRAS G12V)
FVVVGFVGE

SEQ ID NO: 54557 - protein, 9 aa, synthetic construct
  source 1..9: note = Seed: LVVVGAVGV (KRAS G12V)
FVVVGFVGN

SEQ ID NO: 54558 - protein, 9 aa, synthetic construct
  source 1..9: note = Seed: LVVVGAVGV (KRAS G12V)
FVVVGGVGA

SEQ ID NO: 54559 - protein, 9 aa, synthetic construct
  source 1..9: note = Seed: LVVVGAVGV (KRAS G12V)
FVVVGGVGC

SEQ ID NO: 54560 - protein, 9 aa, synthetic construct
  source 1..9: note = Seed: LVVVGAVGV (KRAS G12V)
FVVVGGVGD

SEQ ID NO: 54561 - protein, 9 aa, synthetic construct
  source 1..9: note = Seed: LVVVGAVGV (KRAS G12V)
FVVVGGVGE

SEQ ID NO: 54562 - protein, 9 aa, synthetic construct
  source 1..9: note = Seed: LVVVGAVGV (KRAS G12V)
FVVVGGVGF

SEQ ID NO: 54563 - protein, 9 aa, synthetic construct
  source 1..9: note = Seed: LVVVGAVGV (KRAS G12V)
FVVVGGVGG

SEQ ID NO: 54564 - protein, 9 aa, synthetic construct
  source 1..9: note = Seed: LVVVGAVGV (KRAS G12V)
FVVVGGVGH

SEQ ID NO: 54565 - protein, 9 aa, synthetic construct
  source 1..9: note = Seed: LVVVGAVGV (KRAS G12V)
FVVVGGVGI

SEQ ID NO: 54566 - protein, 9 aa, synthetic construct
  source 1..9: note = Seed: LVVVGAVGV (KRAS G12V)
FVVVGGVGK

SEQ ID NO: 54567 - protein, 9 aa, synthetic construct
  source 1..9: note = Seed: LVVVGAVGV (KRAS G12V)
FVVVGGVGL

SEQ ID NO: 54568 - protein, 9 aa, synthetic construct
  source 1..9: note = Seed: LVVVGAVGV (KRAS G12V)
FVVVGGVGM

SEQ ID NO: 54569 - protein, 9 aa, synthetic construct
  source 1..9: note = Seed: LVVVGAVGV (KRAS G12V)
FVVVGGVGN

SEQ ID NO: 54570 - protein, 9 aa, synthetic construct
  source 1..9: note = Seed: LVVVGAVGV (KRAS G12V)
FVVVGGVGP

SEQ ID NO: 54571 - protein, 9 aa, synthetic construct
  source 1..9: note = Seed: LVVVGAVGV (KRAS G12V)
FVVVGGVGQ

SEQ ID NO: 54572 - protein, 9 aa, synthetic construct
  source 1..9: note = Seed: LVVVGAVGV (KRAS G12V)
FVVVGGVGR

SEQ ID NO: 54573 - protein, 9 aa, synthetic construct
  source 1..9: note = Seed: LVVVGAVGV (KRAS G12V)
FVVVGGVGS

SEQ ID NO: 54574 - protein, 9 aa, synthetic construct
  source 1..9: note = Seed: LVVVGAVGV (KRAS G12V)
FVVVGGVGT

SEQ ID NO: 54575 - protein, 9 aa, synthetic construct
  source 1..9: note = Seed: LVVVGAVGV (KRAS G12V)
FVVVGGVGV

SEQ ID NO: 54576 - protein, 9 aa, synthetic construct
  source 1..9: note = Seed: LVVVGAVGV (KRAS G12V)
FVVVGGVGY

SEQ ID NO: 54577 - protein, 9 aa, synthetic construct
  source 1..9: note = Seed: LVVVGAVGV (KRAS G12V)
FVVVGHVGA

SEQ ID NO: 54578 - protein, 9 aa, synthetic construct
  source 1..9: note = Seed: LVVVGAVGV (KRAS G12V)
FVVVGHVGD

SEQ ID NO: 54579 - protein, 9 aa, synthetic construct
  source 1..9: note = Seed: LVVVGAVGV (KRAS G12V)
FVVVGHVGE

SEQ ID NO: 54580 - protein, 9 aa, synthetic construct
  source 1..9: note = Seed: LVVVGAVGV (KRAS G12V)
FVVVGHVGF

SEQ ID NO: 54581 - protein, 9 aa, synthetic construct
  source 1..9: note = Seed: LVVVGAVGV (KRAS G12V)
FVVVGHVGG

SEQ ID NO: 54582 - protein, 9 aa, synthetic construct
  source 1..9: note = Seed: LVVVGAVGV (KRAS G12V)
FVVVGHVGH

SEQ ID NO: 54583 - protein, 9 aa, synthetic construct
  source 1..9: note = Seed: LVVVGAVGV (KRAS G12V)
FVVVGHVGI

SEQ ID NO: 54584 - protein, 9 aa, synthetic construct
  source 1..9: note = Seed: LVVVGAVGV (KRAS G12V)
FVVVGHVGK

SEQ ID NO: 54585 - protein, 9 aa, synthetic construct
  source 1..9: note = Seed: LVVVGAVGV (KRAS G12V)
FVVVGHVGL

SEQ ID NO: 54586 - protein, 9 aa, synthetic construct
  source 1..9: note = Seed: LVVVGAVGV (KRAS G12V)
FVVVGHVGM

SEQ ID NO: 54587 - protein, 9 aa, synthetic construct
  source 1..9: note = Seed: LVVVGAVGV (KRAS G12V)
FVVVGHVGN

SEQ ID NO: 54588 - protein, 9 aa, synthetic construct
  source 1..9: note = Seed: LVVVGAVGV (KRAS G12V)
FVVVGHVGQ

SEQ ID NO: 54589 - protein, 9 aa, synthetic construct
  source 1..9: note = Seed: LVVVGAVGV (KRAS G12V)
FVVVGHVGR

SEQ ID NO: 54590 - protein, 9 aa, synthetic construct
  source 1..9: note = Seed: LVVVGAVGV (KRAS G12V)
FVVVGHVGS

SEQ ID NO: 54591 - protein, 9 aa, synthetic construct
  source 1..9: note = Seed: LVVVGAVGV (KRAS G12V)
FVVVGHVGT

SEQ ID NO: 54592 - protein, 9 aa, synthetic construct
  source 1..9: note = Seed: LVVVGAVGV (KRAS G12V)
FVVVGHVGV

SEQ ID NO: 54593 - protein, 9 aa, synthetic construct
  source 1..9: note = Seed: LVVVGAVGV (KRAS G12V)
FVVVGHVGY

SEQ ID NO: 54594 - protein, 9 aa, synthetic construct
  source 1..9: note = Seed: LVVVGAVGV (KRAS G12V)
FVVVGIVGA

SEQ ID NO: 54595 - protein, 9 aa, synthetic construct
  source 1..9: note = Seed: LVVVGAVGV (KRAS G12V)
FVVVGIVGD

SEQ ID NO: 54596 - protein, 9 aa, synthetic construct
  source 1..9: note = Seed: LVVVGAVGV (KRAS G12V)
FVVVGIVGE

SEQ ID NO: 54597 - protein, 9 aa, synthetic construct
  source 1..9: note = Seed: LVVVGAVGV (KRAS G12V)
FVVVGIVGG

SEQ ID NO: 54598 - protein, 9 aa, synthetic construct
  source 1..9: note = Seed: LVVVGAVGV (KRAS G12V)
FVVVGIVGH

SEQ ID NO: 54599 - protein, 9 aa, synthetic construct
  source 1..9: note = Seed: LVVVGAVGV (KRAS G12V)
FVVVGIVGI

SEQ ID NO: 54600 - protein, 9 aa, synthetic construct
  source 1..9: note = Seed: LVVVGAVGV (KRAS G12V)
FVVVGIVGK

SEQ ID NO: 54601 - protein, 9 aa, synthetic construct
  source 1..9: note = Seed: LVVVGAVGV (KRAS G12V)
FVVVGIVGL

SEQ ID NO: 54602 - protein, 9 aa, synthetic construct
  source 1..9: note = Seed: LVVVGAVGV (KRAS G12V)
FVVVGIVGM

SEQ ID NO: 54603 - protein, 9 aa, synthetic construct
  source 1..9: note = Seed: LVVVGAVGV (KRAS G12V)
FVVVGIVGN

SEQ ID NO: 54604 - protein, 9 aa, synthetic construct
  source 1..9: note = Seed: LVVVGAVGV (KRAS G12V)
FVVVGIVGP

SEQ ID NO: 54605 - protein, 9 aa, synthetic construct
  source 1..9: note = Seed: LVVVGAVGV (KRAS G12V)
FVVVGIVGQ

SEQ ID NO: 54606 - protein, 9 aa, synthetic construct
  source 1..9: note = Seed: LVVVGAVGV (KRAS G12V)
FVVVGIVGR

SEQ ID NO: 54607 - protein, 9 aa, synthetic construct
  source 1..9: note = Seed: LVVVGAVGV (KRAS G12V)
FVVVGIVGS

SEQ ID NO: 54608 - protein, 9 aa, synthetic construct
  source 1..9: note = Seed: LVVVGAVGV (KRAS G12V)
FVVVGIVGT

SEQ ID NO: 54609 - protein, 9 aa, synthetic construct
  source 1..9: note = Seed: LVVVGAVGV (KRAS G12V)
FVVVGIVGV

SEQ ID NO: 54610 - protein, 9 aa, synthetic construct
  source 1..9: note = Seed: LVVVGAVGV (KRAS G12V)
FVVVGKVGA

SEQ ID NO: 54611 - protein, 9 aa, synthetic construct
  source 1..9: note = Seed: LVVVGAVGV (KRAS G12V)
FVVVGKVGE

SEQ ID NO: 54612 - protein, 9 aa, synthetic construct
  source 1..9: note = Seed: LVVVGAVGV (KRAS G12V)
FVVVGKVGF

SEQ ID NO: 54613 - protein, 9 aa, synthetic construct
  source 1..9: note = Seed: LVVVGAVGV (KRAS G12V)
FVVVGKVGG

SEQ ID NO: 54614 - protein, 9 aa, synthetic construct
  source 1..9: note = Seed: LVVVGAVGV (KRAS G12V)
FVVVGKVGH

SEQ ID NO: 54615 - protein, 9 aa, synthetic construct
  source 1..9: note = Seed: LVVVGAVGV (KRAS G12V)
FVVVGKVGI

SEQ ID NO: 54616 - protein, 9 aa, synthetic construct
  source 1..9: note = Seed: LVVVGAVGV (KRAS G12V)
FVVVGKVGK

SEQ ID NO: 54617 - protein, 9 aa, synthetic construct
  source 1..9: note = Seed: LVVVGAVGV (KRAS G12V)
FVVVGKVGL

SEQ ID NO: 54618 - protein, 9 aa, synthetic construct
  source 1..9: note = Seed: LVVVGAVGV (KRAS G12V)
FVVVGKVGM

SEQ ID NO: 54619 - protein, 9 aa, synthetic construct
  source 1..9: note = Seed: LVVVGAVGV (KRAS G12V)
FVVVGKVGN

SEQ ID NO: 54620 - protein, 9 aa, synthetic construct
  source 1..9: note = Seed: LVVVGAVGV (KRAS G12V)
FVVVGKVGP

SEQ ID NO: 54621 - protein, 9 aa, synthetic construct
  source 1..9: note = Seed: LVVVGAVGV (KRAS G12V)
FVVVGKVGQ

SEQ ID NO: 54622 - protein, 9 aa, synthetic construct
  source 1..9: note = Seed: LVVVGAVGV (KRAS G12V)
FVVVGKVGR

SEQ ID NO: 54623 - protein, 9 aa, synthetic construct
  source 1..9: note = Seed: LVVVGAVGV (KRAS G12V)
FVVVGKVGS

SEQ ID NO: 54624 - protein, 9 aa, synthetic construct
  source 1..9: note = Seed: LVVVGAVGV (KRAS G12V)
FVVVGKVGT

SEQ ID NO: 54625 - protein, 9 aa, synthetic construct
  source 1..9: note = Seed: LVVVGAVGV (KRAS G12V)
FVVVGKVGV

SEQ ID NO: 54626 - protein, 9 aa, synthetic construct
  source 1..9: note = Seed: LVVVGAVGV (KRAS G12V)
FVVVGKVGY

SEQ ID NO: 54627 - protein, 9 aa, synthetic construct
  source 1..9: note = Seed: LVVVGAVGV (KRAS G12V)
FVVVGLVGA

SEQ ID NO: 54628 - protein, 9 aa, synthetic construct
  source 1..9: note = Seed: LVVVGAVGV (KRAS G12V)
FVVVGLVGD

SEQ ID NO: 54629 - protein, 9 aa, synthetic construct
  source 1..9: note = Seed: LVVVGAVGV (KRAS G12V)
FVVVGLVGE

SEQ ID NO: 54630 - protein, 9 aa, synthetic construct
  source 1..9: note = Seed: LVVVGAVGV (KRAS G12V)
FVVVGLVGH

SEQ ID NO: 54631 - protein, 9 aa, synthetic construct
  source 1..9: note = Seed: LVVVGAVGV (KRAS G12V)
FVVVGLVGI

SEQ ID NO: 54632 - protein, 9 aa, synthetic construct
  source 1..9: note = Seed: LVVVGAVGV (KRAS G12V)
FVVVGLVGL

SEQ ID NO: 54633 - protein, 9 aa, synthetic construct
  source 1..9: note = Seed: LVVVGAVGV (KRAS G12V)
FVVVGLVGM

SEQ ID NO: 54634 - protein, 9 aa, synthetic construct
  source 1..9: note = Seed: LVVVGAVGV (KRAS G12V)
FVVVGLVGN

SEQ ID NO: 54635 - protein, 9 aa, synthetic construct
  source 1..9: note = Seed: LVVVGAVGV (KRAS G12V)
FVVVGLVGQ

SEQ ID NO: 54636 - protein, 9 aa, synthetic construct
  source 1..9: note = Seed: LVVVGAVGV (KRAS G12V)
FVVVGLVGR

SEQ ID NO: 54637 - protein, 9 aa, synthetic construct
  source 1..9: note = Seed: LVVVGAVGV (KRAS G12V)
FVVVGLVGS

SEQ ID NO: 54638 - protein, 9 aa, synthetic construct
  source 1..9: note = Seed: LVVVGAVGV (KRAS G12V)
FVVVGLVGT

SEQ ID NO: 54639 - protein, 9 aa, synthetic construct
  source 1..9: note = Seed: LVVVGAVGV (KRAS G12V)
FVVVGLVGV

SEQ ID NO: 54640 - protein, 9 aa, synthetic construct
  source 1..9: note = Seed: LVVVGAVGV (KRAS G12V)
FVVVGMVGA

SEQ ID NO: 54641 - protein, 9 aa, synthetic construct
  source 1..9: note = Seed: LVVVGAVGV (KRAS G12V)
FVVVGMVGD

SEQ ID NO: 54642 - protein, 9 aa, synthetic construct
  source 1..9: note = Seed: LVVVGAVGV (KRAS G12V)
FVVVGMVGE

SEQ ID NO: 54643 - protein, 9 aa, synthetic construct
  source 1..9: note = Seed: LVVVGAVGV (KRAS G12V)
FVVVGMVGG

SEQ ID NO: 54644 - protein, 9 aa, synthetic construct
  source 1..9: note = Seed: LVVVGAVGV (KRAS G12V)
FVVVGMVGH

SEQ ID NO: 54645 - protein, 9 aa, synthetic construct
  source 1..9: note = Seed: LVVVGAVGV (KRAS G12V)
FVVVGMVGI

SEQ ID NO: 54646 - protein, 9 aa, synthetic construct
  source 1..9: note = Seed: LVVVGAVGV (KRAS G12V)
FVVVGMVGL

SEQ ID NO: 54647 - protein, 9 aa, synthetic construct
  source 1..9: note = Seed: LVVVGAVGV (KRAS G12V)
FVVVGMVGM

SEQ ID NO: 54648 - protein, 9 aa, synthetic construct
  source 1..9: note = Seed: LVVVGAVGV (KRAS G12V)
FVVVGMVGN

SEQ ID NO: 54649 - protein, 9 aa, synthetic construct
  source 1..9: note = Seed: LVVVGAVGV (KRAS G12V)
FVVVGMVGQ

SEQ ID NO: 54650 - protein, 9 aa, synthetic construct
  source 1..9: note = Seed: LVVVGAVGV (KRAS G12V)
FVVVGMVGR

SEQ ID NO: 54651 - protein, 9 aa, synthetic construct
  source 1..9: note = Seed: LVVVGAVGV (KRAS G12V)
FVVVGMVGS

SEQ ID NO: 54652 - protein, 9 aa, synthetic construct
  source 1..9: note = Seed: LVVVGAVGV (KRAS G12V)
FVVVGMVGT

SEQ ID NO: 54653 - protein, 9 aa, synthetic construct
  source 1..9: note = Seed: LVVVGAVGV (KRAS G12V)
FVVVGMVGV

SEQ ID NO: 54654 - protein, 9 aa, synthetic construct
  source 1..9: note = Seed: LVVVGAVGV (KRAS G12V)
FVVVGMVGY

SEQ ID NO: 54655 - protein, 9 aa, synthetic construct
  source 1..9: note = Seed: LVVVGAVGV (KRAS G12V)
FVVVGNVGA

SEQ ID NO: 54656 - protein, 9 aa, synthetic construct
  source 1..9: note = Seed: LVVVGAVGV (KRAS G12V)
FVVVGNVGC

SEQ ID NO: 54657 - protein, 9 aa, synthetic construct
  source 1..9: note = Seed: LVVVGAVGV (KRAS G12V)
FVVVGNVGD

SEQ ID NO: 54658 - protein, 9 aa, synthetic construct
  source 1..9: note = Seed: LVVVGAVGV (KRAS G12V)
FVVVGNVGE

SEQ ID NO: 54659 - protein, 9 aa, synthetic construct
  source 1..9: note = Seed: LVVVGAVGV (KRAS G12V)
FVVVGNVGF

SEQ ID NO: 54660 - protein, 9 aa, synthetic construct
  source 1..9: note = Seed: LVVVGAVGV (KRAS G12V)
FVVVGNVGG

SEQ ID NO: 54661 - protein, 9 aa, synthetic construct
  source 1..9: note = Seed: LVVVGAVGV (KRAS G12V)
FVVVGNVGH

SEQ ID NO: 54662 - protein, 9 aa, synthetic construct
  source 1..9: note = Seed: LVVVGAVGV (KRAS G12V)
FVVVGNVGI

SEQ ID NO: 54663 - protein, 9 aa, synthetic construct
  source 1..9: note = Seed: LVVVGAVGV (KRAS G12V)
FVVVGNVGK

SEQ ID NO: 54664 - protein, 9 aa, synthetic construct
  source 1..9: note = Seed: LVVVGAVGV (KRAS G12V)
FVVVGNVGL

SEQ ID NO: 54665 - protein, 9 aa, synthetic construct
  source 1..9: note = Seed: LVVVGAVGV (KRAS G12V)
FVVVGNVGM

SEQ ID NO: 54666 - protein, 9 aa, synthetic construct
  source 1..9: note = Seed: LVVVGAVGV (KRAS G12V)
FVVVGNVGN

SEQ ID NO: 54667 - protein, 9 aa, synthetic construct
  source 1..9: note = Seed: LVVVGAVGV (KRAS G12V)
FVVVGNVGP

SEQ ID NO: 54668 - protein, 9 aa, synthetic construct
  source 1..9: note = Seed: LVVVGAVGV (KRAS G12V)
FVVVGNVGQ

SEQ ID NO: 54669 - protein, 9 aa, synthetic construct
  source 1..9: note = Seed: LVVVGAVGV (KRAS G12V)
FVVVGNVGR

SEQ ID NO: 54670 - protein, 9 aa, synthetic construct
  source 1..9: note = Seed: LVVVGAVGV (KRAS G12V)
FVVVGNVGS

SEQ ID NO: 54671 - protein, 9 aa, synthetic construct
  source 1..9: note = Seed: LVVVGAVGV (KRAS G12V)
FVVVGNVGT

SEQ ID NO: 54672 - protein, 9 aa, synthetic construct
  source 1..9: note = Seed: LVVVGAVGV (KRAS G12V)
FVVVGNVGV

SEQ ID NO: 54673 - protein, 9 aa, synthetic construct
  source 1..9: note = Seed: LVVVGAVGV (KRAS G12V)
FVVVGNVGY

SEQ ID NO: 54674 - protein, 9 aa, synthetic construct
  source 1..9: note = Seed: LVVVGAVGV (KRAS G12V)
FVVVGPVGA

SEQ ID NO: 54675 - protein, 9 aa, synthetic construct
  source 1..9: note = Seed: LVVVGAVGV (KRAS G12V)
FVVVGPVGC

SEQ ID NO: 54676 - protein, 9 aa, synthetic construct
  source 1..9: note = Seed: LVVVGAVGV (KRAS G12V)
FVVVGPVGD

SEQ ID NO: 54677 - protein, 9 aa, synthetic construct
  source 1..9: note = Seed: LVVVGAVGV (KRAS G12V)
FVVVGPVGE

SEQ ID NO: 54678 - protein, 9 aa, synthetic construct
  source 1..9: note = Seed: LVVVGAVGV (KRAS G12V)
FVVVGPVGF

SEQ ID NO: 54679 - protein, 9 aa, synthetic construct
  source 1..9: note = Seed: LVVVGAVGV (KRAS G12V)
FVVVGPVGG

SEQ ID NO: 54680 - protein, 9 aa, synthetic construct
  source 1..9: note = Seed: LVVVGAVGV (KRAS G12V)
FVVVGPVGH

SEQ ID NO: 54681 - protein, 9 aa, synthetic construct
  source 1..9: note = Seed: LVVVGAVGV (KRAS G12V)
FVVVGPVGI

SEQ ID NO: 54682 - protein, 9 aa, synthetic construct
  source 1..9: note = Seed: LVVVGAVGV (KRAS G12V)
FVVVGPVGK

SEQ ID NO: 54683 - protein, 9 aa, synthetic construct
  source 1..9: note = Seed: LVVVGAVGV (KRAS G12V)
FVVVGPVGL

SEQ ID NO: 54684 - protein, 9 aa, synthetic construct
  source 1..9: note = Seed: LVVVGAVGV (KRAS G12V)
FVVVGPVGM

SEQ ID NO: 54685 - protein, 9 aa, synthetic construct
  source 1..9: note = Seed: LVVVGAVGV (KRAS G12V)
FVVVGPVGN

SEQ ID NO: 54686 - protein, 9 aa, synthetic construct
  source 1..9: note = Seed: LVVVGAVGV (KRAS G12V)
FVVVGPVGP

SEQ ID NO: 54687 - protein, 9 aa, synthetic construct
  source 1..9: note = Seed: LVVVGAVGV (KRAS G12V)
FVVVGPVGQ

SEQ ID NO: 54688 - protein, 9 aa, synthetic construct
  source 1..9: note = Seed: LVVVGAVGV (KRAS G12V)
FVVVGPVGR

SEQ ID NO: 54689 - protein, 9 aa, synthetic construct
  source 1..9: note = Seed: LVVVGAVGV (KRAS G12V)
FVVVGPVGS

SEQ ID NO: 54690 - protein, 9 aa, synthetic construct
  source 1..9: note = Seed: LVVVGAVGV (KRAS G12V)
FVVVGPVGT

SEQ ID NO: 54691 - protein, 9 aa, synthetic construct
  source 1..9: note = Seed: LVVVGAVGV (KRAS G12V)
FVVVGPVGV

SEQ ID NO: 54692 - protein, 9 aa, synthetic construct
  source 1..9: note = Seed: LVVVGAVGV (KRAS G12V)
FVVVGPVGW

SEQ ID NO: 54693 - protein, 9 aa, synthetic construct
  source 1..9: note = Seed: LVVVGAVGV (KRAS G12V)
FVVVGPVGY

SEQ ID NO: 54694 - protein, 9 aa, synthetic construct
  source 1..9: note = Seed: LVVVGAVGV (KRAS G12V)
FVVVGQVGA

SEQ ID NO: 54695 - protein, 9 aa, synthetic construct
  source 1..9: note = Seed: LVVVGAVGV (KRAS G12V)
FVVVGQVGE

SEQ ID NO: 54696 - protein, 9 aa, synthetic construct
  source 1..9: note = Seed: LVVVGAVGV (KRAS G12V)
FVVVGQVGF

SEQ ID NO: 54697 - protein, 9 aa, synthetic construct
  source 1..9: note = Seed: LVVVGAVGV (KRAS G12V)
FVVVGQVGG

SEQ ID NO: 54698 - protein, 9 aa, synthetic construct
  source 1..9: note = Seed: LVVVGAVGV (KRAS G12V)
FVVVGQVGH

SEQ ID NO: 54699 - protein, 9 aa, synthetic construct
  source 1..9: note = Seed: LVVVGAVGV (KRAS G12V)
FVVVGQVGI

SEQ ID NO: 54700 - protein, 9 aa, synthetic construct
  source 1..9: note = Seed: LVVVGAVGV (KRAS G12V)
FVVVGQVGK

SEQ ID NO: 54701 - protein, 9 aa, synthetic construct
  source 1..9: note = Seed: LVVVGAVGV (KRAS G12V)
FVVVGQVGL

SEQ ID NO: 54702 - protein, 9 aa, synthetic construct
  source 1..9: note = Seed: LVVVGAVGV (KRAS G12V)
FVVVGQVGM

SEQ ID NO: 54703 - protein, 9 aa, synthetic construct
  source 1..9: note = Seed: LVVVGAVGV (KRAS G12V)
FVVVGQVGN

SEQ ID NO: 54704 - protein, 9 aa, synthetic construct
  source 1..9: note = Seed: LVVVGAVGV (KRAS G12V)
FVVVGQVGP

SEQ ID NO: 54705 - protein, 9 aa, synthetic construct
  source 1..9: note = Seed: LVVVGAVGV (KRAS G12V)
FVVVGQVGQ

SEQ ID NO: 54706 - protein, 9 aa, synthetic construct
  source 1..9: note = Seed: LVVVGAVGV (KRAS G12V)
FVVVGQVGR

SEQ ID NO: 54707 - protein, 9 aa, synthetic construct
  source 1..9: note = Seed: LVVVGAVGV (KRAS G12V)
FVVVGQVGS

SEQ ID NO: 54708 - protein, 9 aa, synthetic construct
  source 1..9: note = Seed: LVVVGAVGV (KRAS G12V)
FVVVGQVGT

SEQ ID NO: 54709 - protein, 9 aa, synthetic construct
  source 1..9: note = Seed: LVVVGAVGV (KRAS G12V)
FVVVGQVGV

SEQ ID NO: 54710 - protein, 9 aa, synthetic construct
  source 1..9: note = Seed: LVVVGAVGV (KRAS G12V)
FVVVGQVGY

SEQ ID NO: 54711 - protein, 9 aa, synthetic construct
  source 1..9: note = Seed: LVVVGAVGV (KRAS G12V)
FVVVGRVGA

SEQ ID NO: 54712 - protein, 9 aa, synthetic construct
  source 1..9: note = Seed: LVVVGAVGV (KRAS G12V)
FVVVGRVGD

SEQ ID NO: 54713 - protein, 9 aa, synthetic construct
  source 1..9: note = Seed: LVVVGAVGV (KRAS G12V)
FVVVGRVGE

SEQ ID NO: 54714 - protein, 9 aa, synthetic construct
  source 1..9: note = Seed: LVVVGAVGV (KRAS G12V)
FVVVGRVGG

SEQ ID NO: 54715 - protein, 9 aa, synthetic construct
  source 1..9: note = Seed: LVVVGAVGV (KRAS G12V)
FVVVGRVGH

SEQ ID NO: 54716 - protein, 9 aa, synthetic construct
  source 1..9: note = Seed: LVVVGAVGV (KRAS G12V)
FVVVGRVGI

SEQ ID NO: 54717 - protein, 9 aa, synthetic construct
  source 1..9: note = Seed: LVVVGAVGV (KRAS G12V)
FVVVGRVGK

SEQ ID NO: 54718 - protein, 9 aa, synthetic construct
  source 1..9: note = Seed: LVVVGAVGV (KRAS G12V)
FVVVGRVGL

SEQ ID NO: 54719 - protein, 9 aa, synthetic construct
  source 1..9: note = Seed: LVVVGAVGV (KRAS G12V)
FVVVGRVGM

SEQ ID NO: 54720 - protein, 9 aa, synthetic construct
  source 1..9: note = Seed: LVVVGAVGV (KRAS G12V)
FVVVGRVGN

SEQ ID NO: 54721 - protein, 9 aa, synthetic construct
  source 1..9: note = Seed: LVVVGAVGV (KRAS G12V)
FVVVGRVGP

SEQ ID NO: 54722 - protein, 9 aa, synthetic construct
  source 1..9: note = Seed: LVVVGAVGV (KRAS G12V)
FVVVGRVGQ

SEQ ID NO: 54723 - protein, 9 aa, synthetic construct
  source 1..9: note = Seed: LVVVGAVGV (KRAS G12V)
FVVVGRVGR

SEQ ID NO: 54724 - protein, 9 aa, synthetic construct
  source 1..9: note = Seed: LVVVGAVGV (KRAS G12V)
FVVVGRVGS

SEQ ID NO: 54725 - protein, 9 aa, synthetic construct
  source 1..9: note = Seed: LVVVGAVGV (KRAS G12V)
FVVVGRVGT

SEQ ID NO: 54726 - protein, 9 aa, synthetic construct
  source 1..9: note = Seed: LVVVGAVGV (KRAS G12V)
FVVVGRVGV

SEQ ID NO: 54727 - protein, 9 aa, synthetic construct
  source 1..9: note = Seed: LVVVGAVGV (KRAS G12V)
FVVVGRVGY

SEQ ID NO: 54728 - protein, 9 aa, synthetic construct
  source 1..9: note = Seed: LVVVGAVGV (KRAS G12V)
FVVVGSVGA

SEQ ID NO: 54729 - protein, 9 aa, synthetic construct
  source 1..9: note = Seed: LVVVGAVGV (KRAS G12V)
FVVVGSVGC

SEQ ID NO: 54730 - protein, 9 aa, synthetic construct
  source 1..9: note = Seed: LVVVGAVGV (KRAS G12V)
FVVVGSVGD

SEQ ID NO: 54731 - protein, 9 aa, synthetic construct
  source 1..9: note = Seed: LVVVGAVGV (KRAS G12V)
FVVVGSVGE

SEQ ID NO: 54732 - protein, 9 aa, synthetic construct
  source 1..9: note = Seed: LVVVGAVGV (KRAS G12V)
FVVVGSVGF

SEQ ID NO: 54733 - protein, 9 aa, synthetic construct
  source 1..9: note = Seed: LVVVGAVGV (KRAS G12V)
FVVVGSVGG

SEQ ID NO: 54734 - protein, 9 aa, synthetic construct
  source 1..9: note = Seed: LVVVGAVGV (KRAS G12V)
FVVVGSVGH

SEQ ID NO: 54735 - protein, 9 aa, synthetic construct
  source 1..9: note = Seed: LVVVGAVGV (KRAS G12V)
FVVVGSVGI

SEQ ID NO: 54736 - protein, 9 aa, synthetic construct
  source 1..9: note = Seed: LVVVGAVGV (KRAS G12V)
FVVVGSVGK

SEQ ID NO: 54737 - protein, 9 aa, synthetic construct
  source 1..9: note = Seed: LVVVGAVGV (KRAS G12V)
FVVVGSVGL

SEQ ID NO: 54738 - protein, 9 aa, synthetic construct
  source 1..9: note = Seed: LVVVGAVGV (KRAS G12V)
FVVVGSVGM

SEQ ID NO: 54739 - protein, 9 aa, synthetic construct
  source 1..9: note = Seed: LVVVGAVGV (KRAS G12V)
FVVVGSVGN

SEQ ID NO: 54740 - protein, 9 aa, synthetic construct
  source 1..9: note = Seed: LVVVGAVGV (KRAS G12V)
FVVVGSVGP

SEQ ID NO: 54741 - protein, 9 aa, synthetic construct
  source 1..9: note = Seed: LVVVGAVGV (KRAS G12V)
FVVVGSVGQ

SEQ ID NO: 54742 - protein, 9 aa, synthetic construct
  source 1..9: note = Seed: LVVVGAVGV (KRAS G12V)
FVVVGSVGR

SEQ ID NO: 54743 - protein, 9 aa, synthetic construct
  source 1..9: note = Seed: LVVVGAVGV (KRAS G12V)
FVVVGSVGS

SEQ ID NO: 54744 - protein, 9 aa, synthetic construct
  source 1..9: note = Seed: LVVVGAVGV (KRAS G12V)
FVVVGSVGT

SEQ ID NO: 54745 - protein, 9 aa, synthetic construct
  source 1..9: note = Seed: LVVVGAVGV (KRAS G12V)
FVVVGSVGV

SEQ ID NO: 54746 - protein, 9 aa, synthetic construct
  source 1..9: note = Seed: LVVVGAVGV (KRAS G12V)
FVVVGSVGW

SEQ ID NO: 54747 - protein, 9 aa, synthetic construct
  source 1..9: note = Seed: LVVVGAVGV (KRAS G12V)
FVVVGSVGY

SEQ ID NO: 54748 - protein, 9 aa, synthetic construct
  source 1..9: note = Seed: LVVVGAVGV (KRAS G12V)
FVVVGTVGA

SEQ ID NO: 54749 - protein, 9 aa, synthetic construct
  source 1..9: note = Seed: LVVVGAVGV (KRAS G12V)
FVVVGTVGC

SEQ ID NO: 54750 - protein, 9 aa, synthetic construct
  source 1..9: note = Seed: LVVVGAVGV (KRAS G12V)
FVVVGTVGD

SEQ ID NO: 54751 - protein, 9 aa, synthetic construct
  source 1..9: note = Seed: LVVVGAVGV (KRAS G12V)
FVVVGTVGE

SEQ ID NO: 54752 - protein, 9 aa, synthetic construct
  source 1..9: note = Seed: LVVVGAVGV (KRAS G12V)
FVVVGTVGF

SEQ ID NO: 54753 - protein, 9 aa, synthetic construct
  source 1..9: note = Seed: LVVVGAVGV (KRAS G12V)
FVVVGTVGG

SEQ ID NO: 54754 - protein, 9 aa, synthetic construct
  source 1..9: note = Seed: LVVVGAVGV (KRAS G12V)
FVVVGTVGH

SEQ ID NO: 54755 - protein, 9 aa, synthetic construct
  source 1..9: note = Seed: LVVVGAVGV (KRAS G12V)
FVVVGTVGI

SEQ ID NO: 54756 - protein, 9 aa, synthetic construct
  source 1..9: note = Seed: LVVVGAVGV (KRAS G12V)
FVVVGTVGK

SEQ ID NO: 54757 - protein, 9 aa, synthetic construct
  source 1..9: note = Seed: LVVVGAVGV (KRAS G12V)
FVVVGTVGL

SEQ ID NO: 54758 - protein, 9 aa, synthetic construct
  source 1..9: note = Seed: LVVVGAVGV (KRAS G12V)
FVVVGTVGM

SEQ ID NO: 54759 - protein, 9 aa, synthetic construct
  source 1..9: note = Seed: LVVVGAVGV (KRAS G12V)
FVVVGTVGN

SEQ ID NO: 54760 - protein, 9 aa, synthetic construct
  source 1..9: note = Seed: LVVVGAVGV (KRAS G12V)
FVVVGTVGP

SEQ ID NO: 54761 - protein, 9 aa, synthetic construct
  source 1..9: note = Seed: LVVVGAVGV (KRAS G12V)
FVVVGTVGQ

SEQ ID NO: 54762 - protein, 9 aa, synthetic construct
  source 1..9: note = Seed: LVVVGAVGV (KRAS G12V)
FVVVGTVGR

SEQ ID NO: 54763 - protein, 9 aa, synthetic construct
  source 1..9: note = Seed: LVVVGAVGV (KRAS G12V)
FVVVGTVGS

SEQ ID NO: 54764 - protein, 9 aa, synthetic construct
  source 1..9: note = Seed: LVVVGAVGV (KRAS G12V)
FVVVGTVGT

SEQ ID NO: 54765 - protein, 9 aa, synthetic construct
  source 1..9: note = Seed: LVVVGAVGV (KRAS G12V)
FVVVGTVGV

SEQ ID NO: 54766 - protein, 9 aa, synthetic construct
  source 1..9: note = Seed: LVVVGAVGV (KRAS G12V)
FVVVGTVGY

SEQ ID NO: 54767 - protein, 9 aa, synthetic construct
  source 1..9: note = Seed: LVVVGAVGV (KRAS G12V)
FVVVGVVGA

SEQ ID NO: 54768 - protein, 9 aa, synthetic construct
  source 1..9: note = Seed: LVVVGAVGV (KRAS G12V)
FVVVGVVGD

SEQ ID NO: 54769 - protein, 9 aa, synthetic construct
  source 1..9: note = Seed: LVVVGAVGV (KRAS G12V)
FVVVGVVGE

SEQ ID NO: 54770 - protein, 9 aa, synthetic construct
  source 1..9: note = Seed: LVVVGAVGV (KRAS G12V)
FVVVGVVGG

SEQ ID NO: 54771 - protein, 9 aa, synthetic construct
  source 1..9: note = Seed: LVVVGAVGV (KRAS G12V)
FVVVGVVGH

SEQ ID NO: 54772 - protein, 9 aa, synthetic construct
  source 1..9: note = Seed: LVVVGAVGV (KRAS G12V)
FVVVGVVGI

SEQ ID NO: 54773 - protein, 9 aa, synthetic construct
  source 1..9: note = Seed: LVVVGAVGV (KRAS G12V)
FVVVGVVGK

SEQ ID NO: 54774 - protein, 9 aa, synthetic construct
  source 1..9: note = Seed: LVVVGAVGV (KRAS G12V)
FVVVGVVGL

SEQ ID NO: 54775 - protein, 9 aa, synthetic construct
  source 1..9: note = Seed: LVVVGAVGV (KRAS G12V)
FVVVGVVGM

SEQ ID NO: 54776 - protein, 9 aa, synthetic construct
  source 1..9: note = Seed: LVVVGAVGV (KRAS G12V)
FVVVGVVGN

SEQ ID NO: 54777 - protein, 9 aa, synthetic construct
  source 1..9: note = Seed: LVVVGAVGV (KRAS G12V)
FVVVGVVGP

SEQ ID NO: 54778 - protein, 9 aa, synthetic construct
  source 1..9: note = Seed: LVVVGAVGV (KRAS G12V)
FVVVGVVGQ

SEQ ID NO: 54779 - protein, 9 aa, synthetic construct
  source 1..9: note = Seed: LVVVGAVGV (KRAS G12V)
FVVVGVVGR

SEQ ID NO: 54780 - protein, 9 aa, synthetic construct
  source 1..9: note = Seed: LVVVGAVGV (KRAS G12V)
FVVVGVVGS

SEQ ID NO: 54781 - protein, 9 aa, synthetic construct
  source 1..9: note = Seed: LVVVGAVGV (KRAS G12V)
FVVVGVVGT

SEQ ID NO: 54782 - protein, 9 aa, synthetic construct
  source 1..9: note = Seed: LVVVGAVGV (KRAS G12V)
FVVVGVVGV

SEQ ID NO: 54783 - protein, 9 aa, synthetic construct
  source 1..9: note = Seed: LVVVGAVGV (KRAS G12V)
FVVVGVVGY

SEQ ID NO: 54784 - protein, 9 aa, synthetic construct
  source 1..9: note = Seed: LVVVGAVGV (KRAS G12V)
FVVVGWVGH

SEQ ID NO: 54785 - protein, 9 aa, synthetic construct
  source 1..9: note = Seed: LVVVGAVGV (KRAS G12V)
FVVVGYVGA

SEQ ID NO: 54786 - protein, 9 aa, synthetic construct
  source 1..9: note = Seed: LVVVGAVGV (KRAS G12V)
FVVVGYVGH

SEQ ID NO: 54787 - protein, 9 aa, synthetic construct
  source 1..9: note = Seed: LVVVGAVGV (KRAS G12V)
FVVVGYVGI

SEQ ID NO: 54788 - protein, 9 aa, synthetic construct
  source 1..9: note = Seed: LVVVGAVGV (KRAS G12V)
FVVVGYVGL

SEQ ID NO: 54789 - protein, 9 aa, synthetic construct
  source 1..9: note = Seed: LVVVGAVGV (KRAS G12V)
FVVVGYVGM

SEQ ID NO: 54790 - protein, 9 aa, synthetic construct
  source 1..9: note = Seed: LVVVGAVGV (KRAS G12V)
FVVVGYVGN

SEQ ID NO: 54791 - protein, 9 aa, synthetic construct
  source 1..9: note = Seed: LVVVGAVGV (KRAS G12V)
FVVVGYVGQ

SEQ ID NO: 54792 - protein, 9 aa, synthetic construct
  source 1..9: note = Seed: LVVVGAVGV (KRAS G12V)
FVVVGYVGR

SEQ ID NO: 54793 - protein, 9 aa, synthetic construct
  source 1..9: note = Seed: LVVVGAVGV (KRAS G12V)
FVVVGYVGS

SEQ ID NO: 54794 - protein, 9 aa, synthetic construct
  source 1..9: note = Seed: LVVVGAVGV (KRAS G12V)
FVVVGYVGV

SEQ ID NO: 54795 - protein, 9 aa, synthetic construct
  source 1..9: note = Seed: LVVVGAVGV (KRAS G12V)
FVVWGAVGA

SEQ ID NO: 54796 - protein, 9 aa, synthetic construct
  source 1..9: note = Seed: LVVVGAVGV (KRAS G12V)
FVVWGAVGF

SEQ ID NO: 54797 - protein, 9 aa, synthetic construct
  source 1..9: note = Seed: LVVVGAVGV (KRAS G12V)
FVVWGAVGG

SEQ ID NO: 54798 - protein, 9 aa, synthetic construct
  source 1..9: note = Seed: LVVVGAVGV (KRAS G12V)
FVVWGAVGH

SEQ ID NO: 54799 - protein, 9 aa, synthetic construct
  source 1..9: note = Seed: LVVVGAVGV (KRAS G12V)
FVVWGAVGI

SEQ ID NO: 54800 - protein, 9 aa, synthetic construct
  source 1..9: note = Seed: LVVVGAVGV (KRAS G12V)
FVVWGAVGK

SEQ ID NO: 54801 - protein, 9 aa, synthetic construct
  source 1..9: note = Seed: LVVVGAVGV (KRAS G12V)
FVVWGAVGL

SEQ ID NO: 54802 - protein, 9 aa, synthetic construct
  source 1..9: note = Seed: LVVVGAVGV (KRAS G12V)
FVVWGAVGM

SEQ ID NO: 54803 - protein, 9 aa, synthetic construct
  source 1..9: note = Seed: LVVVGAVGV (KRAS G12V)
FVVWGAVGN

SEQ ID NO: 54804 - protein, 9 aa, synthetic construct
  source 1..9: note = Seed: LVVVGAVGV (KRAS G12V)
FVVWGAVGP

SEQ ID NO: 54805 - protein, 9 aa, synthetic construct
  source 1..9: note = Seed: LVVVGAVGV (KRAS G12V)
FVVWGAVGR

SEQ ID NO: 54806 - protein, 9 aa, synthetic construct
  source 1..9: note = Seed: LVVVGAVGV (KRAS G12V)
FVVWGAVGS

SEQ ID NO: 54807 - protein, 9 aa, synthetic construct
  source 1..9: note = Seed: LVVVGAVGV (KRAS G12V)
FVVWGAVGT

SEQ ID NO: 54808 - protein, 9 aa, synthetic construct
  source 1..9: note = Seed: LVVVGAVGV (KRAS G12V)
FVVWGAVGV

SEQ ID NO: 54809 - protein, 9 aa, synthetic construct
  source 1..9: note = Seed: LVVVGAVGV (KRAS G12V)
FVVWGAVGY

SEQ ID NO: 54810 - protein, 9 aa, synthetic construct
  source 1..9: note = Seed: LVVVGAVGV (KRAS G12V)
FVVWGDVGI

SEQ ID NO: 54811 - protein, 9 aa, synthetic construct
  source 1..9: note = Seed: LVVVGAVGV (KRAS G12V)
FVVWGDVGL

SEQ ID NO: 54812 - protein, 9 aa, synthetic construct
  source 1..9: note = Seed: LVVVGAVGV (KRAS G12V)
FVVWGDVGV

SEQ ID NO: 54813 - protein, 9 aa, synthetic construct
  source 1..9: note = Seed: LVVVGAVGV (KRAS G12V)
FVVWGGVGA

SEQ ID NO: 54814 - protein, 9 aa, synthetic construct
  source 1..9: note = Seed: LVVVGAVGV (KRAS G12V)
FVVWGGVGF

SEQ ID NO: 54815 - protein, 9 aa, synthetic construct
  source 1..9: note = Seed: LVVVGAVGV (KRAS G12V)
FVVWGGVGI

SEQ ID NO: 54816 - protein, 9 aa, synthetic construct
  source 1..9: note = Seed: LVVVGAVGV (KRAS G12V)
FVVWGGVGL

SEQ ID NO: 54817 - protein, 9 aa, synthetic construct
  source 1..9: note = Seed: LVVVGAVGV (KRAS G12V)
FVVWGGVGM

SEQ ID NO: 54818 - protein, 9 aa, synthetic construct
  source 1..9: note = Seed: LVVVGAVGV (KRAS G12V)
FVVWGGVGS

SEQ ID NO: 54819 - protein, 9 aa, synthetic construct
  source 1..9: note = Seed: LVVVGAVGV (KRAS G12V)
FVVWGGVGT

SEQ ID NO: 54820 - protein, 9 aa, synthetic construct
  source 1..9: note = Seed: LVVVGAVGV (KRAS G12V)
FVVWGGVGV

SEQ ID NO: 54821 - protein, 9 aa, synthetic construct
  source 1..9: note = Seed: LVVVGAVGV (KRAS G12V)
FVVWGHVGL

SEQ ID NO: 54822 - protein, 9 aa, synthetic construct
  source 1..9: note = Seed: LVVVGAVGV (KRAS G12V)
FVVWGHVGV

SEQ ID NO: 54823 - protein, 9 aa, synthetic construct
  source 1..9: note = Seed: LVVVGAVGV (KRAS G12V)
FVVWGIVGA

SEQ ID NO: 54824 - protein, 9 aa, synthetic construct
  source 1..9: note = Seed: LVVVGAVGV (KRAS G12V)
FVVWGIVGM

SEQ ID NO: 54825 - protein, 9 aa, synthetic construct
  source 1..9: note = Seed: LVVVGAVGV (KRAS G12V)
FVVWGIVGN

SEQ ID NO: 54826 - protein, 9 aa, synthetic construct
  source 1..9: note = Seed: LVVVGAVGV (KRAS G12V)
FVVWGIVGR

SEQ ID NO: 54827 - protein, 9 aa, synthetic construct
  source 1..9: note = Seed: LVVVGAVGV (KRAS G12V)
FVVWGIVGS

SEQ ID NO: 54828 - protein, 9 aa, synthetic construct
  source 1..9: note = Seed: LVVVGAVGV (KRAS G12V)
FVVWGKVGA

SEQ ID NO: 54829 - protein, 9 aa, synthetic construct
  source 1..9: note = Seed: LVVVGAVGV (KRAS G12V)
FVVWGKVGH

SEQ ID NO: 54830 - protein, 9 aa, synthetic construct
  source 1..9: note = Seed: LVVVGAVGV (KRAS G12V)
FVVWGKVGK

SEQ ID NO: 54831 - protein, 9 aa, synthetic construct
  source 1..9: note = Seed: LVVVGAVGV (KRAS G12V)
FVVWGKVGR

SEQ ID NO: 54832 - protein, 9 aa, synthetic construct
  source 1..9: note = Seed: LVVVGAVGV (KRAS G12V)
FVVWGKVGS

SEQ ID NO: 54833 - protein, 9 aa, synthetic construct
  source 1..9: note = Seed: LVVVGAVGV (KRAS G12V)
FVVWGMVGA

SEQ ID NO: 54834 - protein, 9 aa, synthetic construct
  source 1..9: note = Seed: LVVVGAVGV (KRAS G12V)
FVVWGMVGR

SEQ ID NO: 54835 - protein, 9 aa, synthetic construct
  source 1..9: note = Seed: LVVVGAVGV (KRAS G12V)
FVVWGNVGA

SEQ ID NO: 54836 - protein, 9 aa, synthetic construct
  source 1..9: note = Seed: LVVVGAVGV (KRAS G12V)
FVVWGNVGF

SEQ ID NO: 54837 - protein, 9 aa, synthetic construct
  source 1..9: note = Seed: LVVVGAVGV (KRAS G12V)
FVVWGNVGI

SEQ ID NO: 54838 - protein, 9 aa, synthetic construct
  source 1..9: note = Seed: LVVVGAVGV (KRAS G12V)
FVVWGNVGL

SEQ ID NO: 54839 - protein, 9 aa, synthetic construct
  source 1..9: note = Seed: LVVVGAVGV (KRAS G12V)
FVVWGNVGM

SEQ ID NO: 54840 - protein, 9 aa, synthetic construct
  source 1..9: note = Seed: LVVVGAVGV (KRAS G12V)
FVVWGNVGS

SEQ ID NO: 54841 - protein, 9 aa, synthetic construct
  source 1..9: note = Seed: LVVVGAVGV (KRAS G12V)
FVVWGNVGT

SEQ ID NO: 54842 - protein, 9 aa, synthetic construct
  source 1..9: note = Seed: LVVVGAVGV (KRAS G12V)
FVVWGNVGV

SEQ ID NO: 54843 - protein, 9 aa, synthetic construct
  source 1..9: note = Seed: LVVVGAVGV (KRAS G12V)
FVVWGNVGY

SEQ ID NO: 54844 - protein, 9 aa, synthetic construct
  source 1..9: note = Seed: LVVVGAVGV (KRAS G12V)
FVVWGPVGA

SEQ ID NO: 54845 - protein, 9 aa, synthetic construct
  source 1..9: note = Seed: LVVVGAVGV (KRAS G12V)
FVVWGPVGF

SEQ ID NO: 54846 - protein, 9 aa, synthetic construct
  source 1..9: note = Seed: LVVVGAVGV (KRAS G12V)
FVVWGPVGG

SEQ ID NO: 54847 - protein, 9 aa, synthetic construct
  source 1..9: note = Seed: LVVVGAVGV (KRAS G12V)
FVVWGPVGH

SEQ ID NO: 54848 - protein, 9 aa, synthetic construct
  source 1..9: note = Seed: LVVVGAVGV (KRAS G12V)
FVVWGPVGI

SEQ ID NO: 54849 - protein, 9 aa, synthetic construct
  source 1..9: note = Seed: LVVVGAVGV (KRAS G12V)
FVVWGPVGK

SEQ ID NO: 54850 - protein, 9 aa, synthetic construct
  source 1..9: note = Seed: LVVVGAVGV (KRAS G12V)
FVVWGPVGL

SEQ ID NO: 54851 - protein, 9 aa, synthetic construct
  source 1..9: note = Seed: LVVVGAVGV (KRAS G12V)
FVVWGPVGM

SEQ ID NO: 54852 - protein, 9 aa, synthetic construct
  source 1..9: note = Seed: LVVVGAVGV (KRAS G12V)
FVVWGPVGN

SEQ ID NO: 54853 - protein, 9 aa, synthetic construct
  source 1..9: note = Seed: LVVVGAVGV (KRAS G12V)
FVVWGPVGR

SEQ ID NO: 54854 - protein, 9 aa, synthetic construct
  source 1..9: note = Seed: LVVVGAVGV (KRAS G12V)
FVVWGPVGS

SEQ ID NO: 54855 - protein, 9 aa, synthetic construct
  source 1..9: note = Seed: LVVVGAVGV (KRAS G12V)
FVVWGPVGT

SEQ ID NO: 54856 - protein, 9 aa, synthetic construct
  source 1..9: note = Seed: LVVVGAVGV (KRAS G12V)
FVVWGPVGV

SEQ ID NO: 54857 - protein, 9 aa, synthetic construct
  source 1..9: note = Seed: LVVVGAVGV (KRAS G12V)
FVVWGPVGY

SEQ ID NO: 54858 - protein, 9 aa, synthetic construct
  source 1..9: note = Seed: LVVVGAVGV (KRAS G12V)
FVVWGRVGA

SEQ ID NO: 54859 - protein, 9 aa, synthetic construct
  source 1..9: note = Seed: LVVVGAVGV (KRAS G12V)
FVVWGRVGH

SEQ ID NO: 54860 - protein, 9 aa, synthetic construct
  source 1..9: note = Seed: LVVVGAVGV (KRAS G12V)
FVVWGRVGK

SEQ ID NO: 54861 - protein, 9 aa, synthetic construct
  source 1..9: note = Seed: LVVVGAVGV (KRAS G12V)
FVVWGRVGM

SEQ ID NO: 54862 - protein, 9 aa, synthetic construct
  source 1..9: note = Seed: LVVVGAVGV (KRAS G12V)
FVVWGRVGR

SEQ ID NO: 54863 - protein, 9 aa, synthetic construct
  source 1..9: note = Seed: LVVVGAVGV (KRAS G12V)
FVVWGRVGS

SEQ ID NO: 54864 - protein, 9 aa, synthetic construct
  source 1..9: note = Seed: LVVVGAVGV (KRAS G12V)
FVVWGSVGA

SEQ ID NO: 54865 - protein, 9 aa, synthetic construct
  source 1..9: note = Seed: LVVVGAVGV (KRAS G12V)
FVVWGSVGF

SEQ ID NO: 54866 - protein, 9 aa, synthetic construct
  source 1..9: note = Seed: LVVVGAVGV (KRAS G12V)
FVVWGSVGG

SEQ ID NO: 54867 - protein, 9 aa, synthetic construct
  source 1..9: note = Seed: LVVVGAVGV (KRAS G12V)
FVVWGSVGH

SEQ ID NO: 54868 - protein, 9 aa, synthetic construct
  source 1..9: note = Seed: LVVVGAVGV (KRAS G12V)
FVVWGSVGI

SEQ ID NO: 54869 - protein, 9 aa, synthetic construct
  source 1..9: note = Seed: LVVVGAVGV (KRAS G12V)
FVVWGSVGK

SEQ ID NO: 54870 - protein, 9 aa, synthetic construct
  source 1..9: note = Seed: LVVVGAVGV (KRAS G12V)
FVVWGSVGL

SEQ ID NO: 54871 - protein, 9 aa, synthetic construct
  source 1..9: note = Seed: LVVVGAVGV (KRAS G12V)
FVVWGSVGM

SEQ ID NO: 54872 - protein, 9 aa, synthetic construct
  source 1..9: note = Seed: LVVVGAVGV (KRAS G12V)
FVVWGSVGN

SEQ ID NO: 54873 - protein, 9 aa, synthetic construct
  source 1..9: note = Seed: LVVVGAVGV (KRAS G12V)
FVVWGSVGR

SEQ ID NO: 54874 - protein, 9 aa, synthetic construct
  source 1..9: note = Seed: LVVVGAVGV (KRAS G12V)
FVVWGSVGS

SEQ ID NO: 54875 - protein, 9 aa, synthetic construct
  source 1..9: note = Seed: LVVVGAVGV (KRAS G12V)
FVVWGSVGT

SEQ ID NO: 54876 - protein, 9 aa, synthetic construct
  source 1..9: note = Seed: LVVVGAVGV (KRAS G12V)
FVVWGSVGV

SEQ ID NO: 54877 - protein, 9 aa, synthetic construct
  source 1..9: note = Seed: LVVVGAVGV (KRAS G12V)
FVVWGSVGY

SEQ ID NO: 54878 - protein, 9 aa, synthetic construct
  source 1..9: note = Seed: LVVVGAVGV (KRAS G12V)
FVVWGTVGA

SEQ ID NO: 54879 - protein, 9 aa, synthetic construct
  source 1..9: note = Seed: LVVVGAVGV (KRAS G12V)
FVVWGTVGH

SEQ ID NO: 54880 - protein, 9 aa, synthetic construct
  source 1..9: note = Seed: LVVVGAVGV (KRAS G12V)
FVVWGTVGI

SEQ ID NO: 54881 - protein, 9 aa, synthetic construct
  source 1..9: note = Seed: LVVVGAVGV (KRAS G12V)
FVVWGTVGL

SEQ ID NO: 54882 - protein, 9 aa, synthetic construct
  source 1..9: note = Seed: LVVVGAVGV (KRAS G12V)
FVVWGTVGM

SEQ ID NO: 54883 - protein, 9 aa, synthetic construct
  source 1..9: note = Seed: LVVVGAVGV (KRAS G12V)
FVVWGTVGN

SEQ ID NO: 54884 - protein, 9 aa, synthetic construct
  source 1..9: note = Seed: LVVVGAVGV (KRAS G12V)
FVVWGTVGR

SEQ ID NO: 54885 - protein, 9 aa, synthetic construct
  source 1..9: note = Seed: LVVVGAVGV (KRAS G12V)
FVVWGTVGS

SEQ ID NO: 54886 - protein, 9 aa, synthetic construct
  source 1..9: note = Seed: LVVVGAVGV (KRAS G12V)
FVVWGTVGT

SEQ ID NO: 54887 - protein, 9 aa, synthetic construct
  source 1..9: note = Seed: LVVVGAVGV (KRAS G12V)
FVVWGTVGV

SEQ ID NO: 54888 - protein, 9 aa, synthetic construct
  source 1..9: note = Seed: LVVVGAVGV (KRAS G12V)
FVVWGVVGA

SEQ ID NO: 54889 - protein, 9 aa, synthetic construct
  source 1..9: note = Seed: LVVVGAVGV (KRAS G12V)
FVVWGVVGH

SEQ ID NO: 54890 - protein, 9 aa, synthetic construct
  source 1..9: note = Seed: LVVVGAVGV (KRAS G12V)
FVVWGVVGI

SEQ ID NO: 54891 - protein, 9 aa, synthetic construct
  source 1..9: note = Seed: LVVVGAVGV (KRAS G12V)
FVVWGVVGL

SEQ ID NO: 54892 - protein, 9 aa, synthetic construct
  source 1..9: note = Seed: LVVVGAVGV (KRAS G12V)
FVVWGVVGM

SEQ ID NO: 54893 - protein, 9 aa, synthetic construct
  source 1..9: note = Seed: LVVVGAVGV (KRAS G12V)
FVVWGVVGN

SEQ ID NO: 54894 - protein, 9 aa, synthetic construct
  source 1..9: note = Seed: LVVVGAVGV (KRAS G12V)
FVVWGVVGR

SEQ ID NO: 54895 - protein, 9 aa, synthetic construct
  source 1..9: note = Seed: LVVVGAVGV (KRAS G12V)
FVVWGVVGS

SEQ ID NO: 54896 - protein, 9 aa, synthetic construct
  source 1..9: note = Seed: LVVVGAVGV (KRAS G12V)
FVVWGVVGV

SEQ ID NO: 54897 - protein, 9 aa, synthetic construct
  source 1..9: note = Seed: LVVVGAVGV (KRAS G12V)
FVVYGAVGA

SEQ ID NO: 54898 - protein, 9 aa, synthetic construct
  source 1..9: note = Seed: LVVVGAVGV (KRAS G12V)
FVVYGAVGF

SEQ ID NO: 54899 - protein, 9 aa, synthetic construct
  source 1..9: note = Seed: LVVVGAVGV (KRAS G12V)
FVVYGAVGG

SEQ ID NO: 54900 - protein, 9 aa, synthetic construct
  source 1..9: note = Seed: LVVVGAVGV (KRAS G12V)
FVVYGAVGH

SEQ ID NO: 54901 - protein, 9 aa, synthetic construct
  source 1..9: note = Seed: LVVVGAVGV (KRAS G12V)
FVVYGAVGI

SEQ ID NO: 54902 - protein, 9 aa, synthetic construct
  source 1..9: note = Seed: LVVVGAVGV (KRAS G12V)
FVVYGAVGK

SEQ ID NO: 54903 - protein, 9 aa, synthetic construct
  source 1..9: note = Seed: LVVVGAVGV (KRAS G12V)
FVVYGAVGL

SEQ ID NO: 54904 - protein, 9 aa, synthetic construct
  source 1..9: note = Seed: LVVVGAVGV (KRAS G12V)
FVVYGAVGM

SEQ ID NO: 54905 - protein, 9 aa, synthetic construct
  source 1..9: note = Seed: LVVVGAVGV (KRAS G12V)
FVVYGAVGN

SEQ ID NO: 54906 - protein, 9 aa, synthetic construct
  source 1..9: note = Seed: LVVVGAVGV (KRAS G12V)
FVVYGAVGP

SEQ ID NO: 54907 - protein, 9 aa, synthetic construct
  source 1..9: note = Seed: LVVVGAVGV (KRAS G12V)
FVVYGAVGR

SEQ ID NO: 54908 - protein, 9 aa, synthetic construct
  source 1..9: note = Seed: LVVVGAVGV (KRAS G12V)
FVVYGAVGS

SEQ ID NO: 54909 - protein, 9 aa, synthetic construct
  source 1..9: note = Seed: LVVVGAVGV (KRAS G12V)
FVVYGAVGT

SEQ ID NO: 54910 - protein, 9 aa, synthetic construct
  source 1..9: note = Seed: LVVVGAVGV (KRAS G12V)
FVVYGAVGV

SEQ ID NO: 54911 - protein, 9 aa, synthetic construct
  source 1..9: note = Seed: LVVVGAVGV (KRAS G12V)
FVVYGAVGY

SEQ ID NO: 54912 - protein, 9 aa, synthetic construct
  source 1..9: note = Seed: LVVVGAVGV (KRAS G12V)
FVVYGDVGA

SEQ ID NO: 54913 - protein, 9 aa, synthetic construct
  source 1..9: note = Seed: LVVVGAVGV (KRAS G12V)
FVVYGDVGI

SEQ ID NO: 54914 - protein, 9 aa, synthetic construct
  source 1..9: note = Seed: LVVVGAVGV (KRAS G12V)
FVVYGDVGL

SEQ ID NO: 54915 - protein, 9 aa, synthetic construct
  source 1..9: note = Seed: LVVVGAVGV (KRAS G12V)
FVVYGDVGV

SEQ ID NO: 54916 - protein, 9 aa, synthetic construct
  source 1..9: note = Seed: LVVVGAVGV (KRAS G12V)
FVVYGGVGA

SEQ ID NO: 54917 - protein, 9 aa, synthetic construct
  source 1..9: note = Seed: LVVVGAVGV (KRAS G12V)
FVVYGGVGI

SEQ ID NO: 54918 - protein, 9 aa, synthetic construct
  source 1..9: note = Seed: LVVVGAVGV (KRAS G12V)
FVVYGGVGL

SEQ ID NO: 54919 - protein, 9 aa, synthetic construct
  source 1..9: note = Seed: LVVVGAVGV (KRAS G12V)
FVVYGGVGM

SEQ ID NO: 54920 - protein, 9 aa, synthetic construct
  source 1..9: note = Seed: LVVVGAVGV (KRAS G12V)
FVVYGGVGS

SEQ ID NO: 54921 - protein, 9 aa, synthetic construct
  source 1..9: note = Seed: LVVVGAVGV (KRAS G12V)
FVVYGGVGT

SEQ ID NO: 54922 - protein, 9 aa, synthetic construct
  source 1..9: note = Seed: LVVVGAVGV (KRAS G12V)
FVVYGGVGV

SEQ ID NO: 54923 - protein, 9 aa, synthetic construct
  source 1..9: note = Seed: LVVVGAVGV (KRAS G12V)
FVVYGHVGA

SEQ ID NO: 54924 - protein, 9 aa, synthetic construct
  source 1..9: note = Seed: LVVVGAVGV (KRAS G12V)
FVVYGHVGL

SEQ ID NO: 54925 - protein, 9 aa, synthetic construct
  source 1..9: note = Seed: LVVVGAVGV (KRAS G12V)
FVVYGHVGM

SEQ ID NO: 54926 - protein, 9 aa, synthetic construct
  source 1..9: note = Seed: LVVVGAVGV (KRAS G12V)
FVVYGIVGA

SEQ ID NO: 54927 - protein, 9 aa, synthetic construct
  source 1..9: note = Seed: LVVVGAVGV (KRAS G12V)
FVVYGIVGN

SEQ ID NO: 54928 - protein, 9 aa, synthetic construct
  source 1..9: note = Seed: LVVVGAVGV (KRAS G12V)
FVVYGIVGR

SEQ ID NO: 54929 - protein, 9 aa, synthetic construct
  source 1..9: note = Seed: LVVVGAVGV (KRAS G12V)
FVVYGIVGS

SEQ ID NO: 54930 - protein, 9 aa, synthetic construct
  source 1..9: note = Seed: LVVVGAVGV (KRAS G12V)
FVVYGIVGV

SEQ ID NO: 54931 - protein, 9 aa, synthetic construct
  source 1..9: note = Seed: LVVVGAVGV (KRAS G12V)
FVVYGKVGH

SEQ ID NO: 54932 - protein, 9 aa, synthetic construct
  source 1..9: note = Seed: LVVVGAVGV (KRAS G12V)
FVVYGKVGK

SEQ ID NO: 54933 - protein, 9 aa, synthetic construct
  source 1..9: note = Seed: LVVVGAVGV (KRAS G12V)
FVVYGKVGR

SEQ ID NO: 54934 - protein, 9 aa, synthetic construct
  source 1..9: note = Seed: LVVVGAVGV (KRAS G12V)
FVVYGLVGA

SEQ ID NO: 54935 - protein, 9 aa, synthetic construct
  source 1..9: note = Seed: LVVVGAVGV (KRAS G12V)
FVVYGLVGL

SEQ ID NO: 54936 - protein, 9 aa, synthetic construct
  source 1..9: note = Seed: LVVVGAVGV (KRAS G12V)
FVVYGLVGM

SEQ ID NO: 54937 - protein, 9 aa, synthetic construct
  source 1..9: note = Seed: LVVVGAVGV (KRAS G12V)
FVVYGLVGR

SEQ ID NO: 54938 - protein, 9 aa, synthetic construct
  source 1..9: note = Seed: LVVVGAVGV (KRAS G12V)
FVVYGLVGV

SEQ ID NO: 54939 - protein, 9 aa, synthetic construct
  source 1..9: note = Seed: LVVVGAVGV (KRAS G12V)
FVVYGMVGA

SEQ ID NO: 54940 - protein, 9 aa, synthetic construct
  source 1..9: note = Seed: LVVVGAVGV (KRAS G12V)
FVVYGMVGL

SEQ ID NO: 54941 - protein, 9 aa, synthetic construct
  source 1..9: note = Seed: LVVVGAVGV (KRAS G12V)
FVVYGMVGM

SEQ ID NO: 54942 - protein, 9 aa, synthetic construct
  source 1..9: note = Seed: LVVVGAVGV (KRAS G12V)
FVVYGMVGR

SEQ ID NO: 54943 - protein, 9 aa, synthetic construct
  source 1..9: note = Seed: LVVVGAVGV (KRAS G12V)
FVVYGMVGV

SEQ ID NO: 54944 - protein, 9 aa, synthetic construct
  source 1..9: note = Seed: LVVVGAVGV (KRAS G12V)
FVVYGNVGA

SEQ ID NO: 54945 - protein, 9 aa, synthetic construct
  source 1..9: note = Seed: LVVVGAVGV (KRAS G12V)
FVVYGNVGD

SEQ ID NO: 54946 - protein, 9 aa, synthetic construct
  source 1..9: note = Seed: LVVVGAVGV (KRAS G12V)
FVVYGNVGE

SEQ ID NO: 54947 - protein, 9 aa, synthetic construct
  source 1..9: note = Seed: LVVVGAVGV (KRAS G12V)
FVVYGNVGF

SEQ ID NO: 54948 - protein, 9 aa, synthetic construct
  source 1..9: note = Seed: LVVVGAVGV (KRAS G12V)
FVVYGNVGG

SEQ ID NO: 54949 - protein, 9 aa, synthetic construct
  source 1..9: note = Seed: LVVVGAVGV (KRAS G12V)
FVVYGNVGH

SEQ ID NO: 54950 - protein, 9 aa, synthetic construct
  source 1..9: note = Seed: LVVVGAVGV (KRAS G12V)
FVVYGNVGI

SEQ ID NO: 54951 - protein, 9 aa, synthetic construct
  source 1..9: note = Seed: LVVVGAVGV (KRAS G12V)
FVVYGNVGL

SEQ ID NO: 54952 - protein, 9 aa, synthetic construct
  source 1..9: note = Seed: LVVVGAVGV (KRAS G12V)
FVVYGNVGM

SEQ ID NO: 54953 - protein, 9 aa, synthetic construct
  source 1..9: note = Seed: LVVVGAVGV (KRAS G12V)
FVVYGNVGN

SEQ ID NO: 54954 - protein, 9 aa, synthetic construct
  source 1..9: note = Seed: LVVVGAVGV (KRAS G12V)
FVVYGNVGR

SEQ ID NO: 54955 - protein, 9 aa, synthetic construct
  source 1..9: note = Seed: LVVVGAVGV (KRAS G12V)
FVVYGNVGS

SEQ ID NO: 54956 - protein, 9 aa, synthetic construct
  source 1..9: note = Seed: LVVVGAVGV (KRAS G12V)
FVVYGNVGT

SEQ ID NO: 54957 - protein, 9 aa, synthetic construct
  source 1..9: note = Seed: LVVVGAVGV (KRAS G12V)
FVVYGNVGV

SEQ ID NO: 54958 - protein, 9 aa, synthetic construct
  source 1..9: note = Seed: LVVVGAVGV (KRAS G12V)
FVVYGNVGY

SEQ ID NO: 54959 - protein, 9 aa, synthetic construct
  source 1..9: note = Seed: LVVVGAVGV (KRAS G12V)
FVVYGPVGA

SEQ ID NO: 54960 - protein, 9 aa, synthetic construct
  source 1..9: note = Seed: LVVVGAVGV (KRAS G12V)
FVVYGPVGH

SEQ ID NO: 54961 - protein, 9 aa, synthetic construct
  source 1..9: note = Seed: LVVVGAVGV (KRAS G12V)
FVVYGPVGI

SEQ ID NO: 54962 - protein, 9 aa, synthetic construct
  source 1..9: note = Seed: LVVVGAVGV (KRAS G12V)
FVVYGPVGL

SEQ ID NO: 54963 - protein, 9 aa, synthetic construct
  source 1..9: note = Seed: LVVVGAVGV (KRAS G12V)
FVVYGPVGM

SEQ ID NO: 54964 - protein, 9 aa, synthetic construct
  source 1..9: note = Seed: LVVVGAVGV (KRAS G12V)
FVVYGPVGN

SEQ ID NO: 54965 - protein, 9 aa, synthetic construct
  source 1..9: note = Seed: LVVVGAVGV (KRAS G12V)
FVVYGPVGS

SEQ ID NO: 54966 - protein, 9 aa, synthetic construct
  source 1..9: note = Seed: LVVVGAVGV (KRAS G12V)
FVVYGPVGT

SEQ ID NO: 54967 - protein, 9 aa, synthetic construct
  source 1..9: note = Seed: LVVVGAVGV (KRAS G12V)
FVVYGPVGV

SEQ ID NO: 54968 - protein, 9 aa, synthetic construct
  source 1..9: note = Seed: LVVVGAVGV (KRAS G12V)
FVVYGQVGL

SEQ ID NO: 54969 - protein, 9 aa, synthetic construct
  source 1..9: note = Seed: LVVVGAVGV (KRAS G12V)
FVVYGRVGH

SEQ ID NO: 54970 - protein, 9 aa, synthetic construct
  source 1..9: note = Seed: LVVVGAVGV (KRAS G12V)
FVVYGRVGK

SEQ ID NO: 54971 - protein, 9 aa, synthetic construct
  source 1..9: note = Seed: LVVVGAVGV (KRAS G12V)
FVVYGRVGR

SEQ ID NO: 54972 - protein, 9 aa, synthetic construct
  source 1..9: note = Seed: LVVVGAVGV (KRAS G12V)
FVVYGSVGA

SEQ ID NO: 54973 - protein, 9 aa, synthetic construct
  source 1..9: note = Seed: LVVVGAVGV (KRAS G12V)
FVVYGSVGF

SEQ ID NO: 54974 - protein, 9 aa, synthetic construct
  source 1..9: note = Seed: LVVVGAVGV (KRAS G12V)
FVVYGSVGG

SEQ ID NO: 54975 - protein, 9 aa, synthetic construct
  source 1..9: note = Seed: LVVVGAVGV (KRAS G12V)
FVVYGSVGH

SEQ ID NO: 54976 - protein, 9 aa, synthetic construct
  source 1..9: note = Seed: LVVVGAVGV (KRAS G12V)
FVVYGSVGI

SEQ ID NO: 54977 - protein, 9 aa, synthetic construct
  source 1..9: note = Seed: LVVVGAVGV (KRAS G12V)
FVVYGSVGK

SEQ ID NO: 54978 - protein, 9 aa, synthetic construct
  source 1..9: note = Seed: LVVVGAVGV (KRAS G12V)
FVVYGSVGL

SEQ ID NO: 54979 - protein, 9 aa, synthetic construct
  source 1..9: note = Seed: LVVVGAVGV (KRAS G12V)
FVVYGSVGM

SEQ ID NO: 54980 - protein, 9 aa, synthetic construct
  source 1..9: note = Seed: LVVVGAVGV (KRAS G12V)
FVVYGSVGN

SEQ ID NO: 54981 - protein, 9 aa, synthetic construct
  source 1..9: note = Seed: LVVVGAVGV (KRAS G12V)
FVVYGSVGR

SEQ ID NO: 54982 - protein, 9 aa, synthetic construct
  source 1..9: note = Seed: LVVVGAVGV (KRAS G12V)
FVVYGSVGS

SEQ ID NO: 54983 - protein, 9 aa, synthetic construct
  source 1..9: note = Seed: LVVVGAVGV (KRAS G12V)
FVVYGSVGT

SEQ ID NO: 54984 - protein, 9 aa, synthetic construct
  source 1..9: note = Seed: LVVVGAVGV (KRAS G12V)
FVVYGSVGV

SEQ ID NO: 54985 - protein, 9 aa, synthetic construct
  source 1..9: note = Seed: LVVVGAVGV (KRAS G12V)
FVVYGSVGY

SEQ ID NO: 54986 - protein, 9 aa, synthetic construct
  source 1..9: note = Seed: LVVVGAVGV (KRAS G12V)
FVVYGTVGA

SEQ ID NO: 54987 - protein, 9 aa, synthetic construct
  source 1..9: note = Seed: LVVVGAVGV (KRAS G12V)
FVVYGTVGD

SEQ ID NO: 54988 - protein, 9 aa, synthetic construct
  source 1..9: note = Seed: LVVVGAVGV (KRAS G12V)
FVVYGTVGE

SEQ ID NO: 54989 - protein, 9 aa, synthetic construct
  source 1..9: note = Seed: LVVVGAVGV (KRAS G12V)
FVVYGTVGI

SEQ ID NO: 54990 - protein, 9 aa, synthetic construct
  source 1..9: note = Seed: LVVVGAVGV (KRAS G12V)
FVVYGTVGL

SEQ ID NO: 54991 - protein, 9 aa, synthetic construct
  source 1..9: note = Seed: LVVVGAVGV (KRAS G12V)
FVVYGTVGM

SEQ ID NO: 54992 - protein, 9 aa, synthetic construct
  source 1..9: note = Seed: LVVVGAVGV (KRAS G12V)
FVVYGTVGN

SEQ ID NO: 54993 - protein, 9 aa, synthetic construct
  source 1..9: note = Seed: LVVVGAVGV (KRAS G12V)
FVVYGTVGR

SEQ ID NO: 54994 - protein, 9 aa, synthetic construct
  source 1..9: note = Seed: LVVVGAVGV (KRAS G12V)
FVVYGTVGS

SEQ ID NO: 54995 - protein, 9 aa, synthetic construct
  source 1..9: note = Seed: LVVVGAVGV (KRAS G12V)
FVVYGTVGT

SEQ ID NO: 54996 - protein, 9 aa, synthetic construct
  source 1..9: note = Seed: LVVVGAVGV (KRAS G12V)
FVVYGTVGV

SEQ ID NO: 54997 - protein, 9 aa, synthetic construct
  source 1..9: note = Seed: LVVVGAVGV (KRAS G12V)
FVVYGVVGA

SEQ ID NO: 54998 - protein, 9 aa, synthetic construct
  source 1..9: note = Seed: LVVVGAVGV (KRAS G12V)
FVVYGVVGH

SEQ ID NO: 54999 - protein, 9 aa, synthetic construct
  source 1..9: note = Seed: LVVVGAVGV (KRAS G12V)
FVVYGVVGL

SEQ ID NO: 55000 - protein, 9 aa, synthetic construct
  source 1..9: note = Seed: LVVVGAVGV (KRAS G12V)
FVVYGVVGM

SEQ ID NO: 55001 - protein, 9 aa, synthetic construct
  source 1..9: note = Seed: LVVVGAVGV (KRAS G12V)
FVVYGVVGN

SEQ ID NO: 55002 - protein, 9 aa, synthetic construct
  source 1..9: note = Seed: LVVVGAVGV (KRAS G12V)
FVVYGVVGS

SEQ ID NO: 55003 - protein, 9 aa, synthetic construct
  source 1..9: note = Seed: LVVVGAVGV (KRAS G12V)
FVVYGVVGV

SEQ ID NO: 55004 - protein, 9 aa, synthetic construct
  source 1..9: note = Seed: LVVVGAVGV (KRAS G12V)
GVVLGAVGA

SEQ ID NO: 55005 - protein, 9 aa, synthetic construct
  source 1..9: note = Seed: LVVVGAVGV (KRAS G12V)
GVVLGAVGI

SEQ ID NO: 55006 - protein, 9 aa, synthetic construct
  source 1..9: note = Seed: LVVVGAVGV (KRAS G12V)
GVVLGAVGL

SEQ ID NO: 55007 - protein, 9 aa, synthetic construct
  source 1..9: note = Seed: LVVVGAVGV (KRAS G12V)
GVVLGAVGM

SEQ ID NO: 55008 - protein, 9 aa, synthetic construct
  source 1..9: note = Seed: LVVVGAVGV (KRAS G12V)
GVVLGAVGV

SEQ ID NO: 55009 - protein, 9 aa, synthetic construct
  source 1..9: note = Seed: LVVVGAVGV (KRAS G12V)
GVVLGGVGI

SEQ ID NO: 55010 - protein, 9 aa, synthetic construct
  source 1..9: note = Seed: LVVVGAVGV (KRAS G12V)
GVVLGGVGL

SEQ ID NO: 55011 - protein, 9 aa, synthetic construct
  source 1..9: note = Seed: LVVVGAVGV (KRAS G12V)
GVVLGGVGV

SEQ ID NO: 55012 - protein, 9 aa, synthetic construct
  source 1..9: note = Seed: LVVVGAVGV (KRAS G12V)
GVVLGSVGI

SEQ ID NO: 55013 - protein, 9 aa, synthetic construct
  source 1..9: note = Seed: LVVVGAVGV (KRAS G12V)
GVVLGSVGL

SEQ ID NO: 55014 - protein, 9 aa, synthetic construct
  source 1..9: note = Seed: LVVVGAVGV (KRAS G12V)
GVVLGSVGV

SEQ ID NO: 55015 - protein, 9 aa, synthetic construct
  source 1..9: note = Seed: LVVVGAVGV (KRAS G12V)
GVVMGAVGL

SEQ ID NO: 55016 - protein, 9 aa, synthetic construct
  source 1..9: note = Seed: LVVVGAVGV (KRAS G12V)
GVVMGAVGV

SEQ ID NO: 55017 - protein, 9 aa, synthetic construct
  source 1..9: note = Seed: LVVVGAVGV (KRAS G12V)
GVVMGGVGL

SEQ ID NO: 55018 - protein, 9 aa, synthetic construct
  source 1..9: note = Seed: LVVVGAVGV (KRAS G12V)
GVVMGSVGL

SEQ ID NO: 55019 - protein, 9 aa, synthetic construct
  source 1..9: note = Seed: LVVVGAVGV (KRAS G12V)
HVVAGAVGA

SEQ ID NO: 55020 - protein, 9 aa, synthetic construct
  source 1..9: note = Seed: LVVVGAVGV (KRAS G12V)
HVVAGAVGI

SEQ ID NO: 55021 - protein, 9 aa, synthetic construct
  source 1..9: note = Seed: LVVVGAVGV (KRAS G12V)
HVVAGAVGV

SEQ ID NO: 55022 - protein, 9 aa, synthetic construct
  source 1..9: note = Seed: LVVVGAVGV (KRAS G12V)
HVVAGGVGL

SEQ ID NO: 55023 - protein, 9 aa, synthetic construct
  source 1..9: note = Seed: LVVVGAVGV (KRAS G12V)
HVVAGSVGI

SEQ ID NO: 55024 - protein, 9 aa, synthetic construct
  source 1..9: note = Seed: LVVVGAVGV (KRAS G12V)
HVVFGAVGV

SEQ ID NO: 55025 - protein, 9 aa, synthetic construct
  source 1..9: note = Seed: LVVVGAVGV (KRAS G12V)
HVVIGAVGA

SEQ ID NO: 55026 - protein, 9 aa, synthetic construct
  source 1..9: note = Seed: LVVVGAVGV (KRAS G12V)
HVVIGAVGI

SEQ ID NO: 55027 - protein, 9 aa, synthetic construct
  source 1..9: note = Seed: LVVVGAVGV (KRAS G12V)
HVVIGAVGL

SEQ ID NO: 55028 - protein, 9 aa, synthetic construct
  source 1..9: note = Seed: LVVVGAVGV (KRAS G12V)
HVVIGAVGM

SEQ ID NO: 55029 - protein, 9 aa, synthetic construct
  source 1..9: note = Seed: LVVVGAVGV (KRAS G12V)
HVVIGAVGV

SEQ ID NO: 55030 - protein, 9 aa, synthetic construct
  source 1..9: note = Seed: LVVVGAVGV (KRAS G12V)
HVVIGGVGA

SEQ ID NO: 55031 - protein, 9 aa, synthetic construct
  source 1..9: note = Seed: LVVVGAVGV (KRAS G12V)
HVVIGGVGI

SEQ ID NO: 55032 - protein, 9 aa, synthetic construct
  source 1..9: note = Seed: LVVVGAVGV (KRAS G12V)
HVVIGGVGL

SEQ ID NO: 55033 - protein, 9 aa, synthetic construct
  source 1..9: note = Seed: LVVVGAVGV (KRAS G12V)
HVVIGGVGV

SEQ ID NO: 55034 - protein, 9 aa, synthetic construct
  source 1..9: note = Seed: LVVVGAVGV (KRAS G12V)
HVVIGPVGA

SEQ ID NO: 55035 - protein, 9 aa, synthetic construct
  source 1..9: note = Seed: LVVVGAVGV (KRAS G12V)
HVVIGPVGI

SEQ ID NO: 55036 - protein, 9 aa, synthetic construct
  source 1..9: note = Seed: LVVVGAVGV (KRAS G12V)
HVVIGPVGL

SEQ ID NO: 55037 - protein, 9 aa, synthetic construct
  source 1..9: note = Seed: LVVVGAVGV (KRAS G12V)
HVVIGPVGM

SEQ ID NO: 55038 - protein, 9 aa, synthetic construct
  source 1..9: note = Seed: LVVVGAVGV (KRAS G12V)
HVVIGPVGV

SEQ ID NO: 55039 - protein, 9 aa, synthetic construct
  source 1..9: note = Seed: LVVVGAVGV (KRAS G12V)
HVVIGRVGR

SEQ ID NO: 55040 - protein, 9 aa, synthetic construct
  source 1..9: note = Seed: LVVVGAVGV (KRAS G12V)
HVVIGSVGA

SEQ ID NO: 55041 - protein, 9 aa, synthetic construct
  source 1..9: note = Seed: LVVVGAVGV (KRAS G12V)
HVVIGSVGI

SEQ ID NO: 55042 - protein, 9 aa, synthetic construct
  source 1..9: note = Seed: LVVVGAVGV (KRAS G12V)
HVVIGSVGL

SEQ ID NO: 55043 - protein, 9 aa, synthetic construct
  source 1..9: note = Seed: LVVVGAVGV (KRAS G12V)
HVVIGSVGM

SEQ ID NO: 55044 - protein, 9 aa, synthetic construct
  source 1..9: note = Seed: LVVVGAVGV (KRAS G12V)
HVVIGSVGV

SEQ ID NO: 55045 - protein, 9 aa, synthetic construct
  source 1..9: note = Seed: LVVVGAVGV (KRAS G12V)
HVVIGTVGL

SEQ ID NO: 55046 - protein, 9 aa, synthetic construct
  source 1..9: note = Seed: LVVVGAVGV (KRAS G12V)
HVVLGAVGA

SEQ ID NO: 55047 - protein, 9 aa, synthetic construct
  source 1..9: note = Seed: LVVVGAVGV (KRAS G12V)
HVVLGAVGF

SEQ ID NO: 55048 - protein, 9 aa, synthetic construct
  source 1..9: note = Seed: LVVVGAVGV (KRAS G12V)
HVVLGAVGI

SEQ ID NO: 55049 - protein, 9 aa, synthetic construct
  source 1..9: note = Seed: LVVVGAVGV (KRAS G12V)
HVVLGAVGL

SEQ ID NO: 55050 - protein, 9 aa, synthetic construct
  source 1..9: note = Seed: LVVVGAVGV (KRAS G12V)
HVVLGAVGM

SEQ ID NO: 55051 - protein, 9 aa, synthetic construct
  source 1..9: note = Seed: LVVVGAVGV (KRAS G12V)
HVVLGAVGS

SEQ ID NO: 55052 - protein, 9 aa, synthetic construct
  source 1..9: note = Seed: LVVVGAVGV (KRAS G12V)
HVVLGAVGT

SEQ ID NO: 55053 - protein, 9 aa, synthetic construct
  source 1..9: note = Seed: LVVVGAVGV (KRAS G12V)
HVVLGAVGV

SEQ ID NO: 55054 - protein, 9 aa, synthetic construct
  source 1..9: note = Seed: LVVVGAVGV (KRAS G12V)
HVVLGGVGA

SEQ ID NO: 55055 - protein, 9 aa, synthetic construct
  source 1..9: note = Seed: LVVVGAVGV (KRAS G12V)
HVVLGGVGI

SEQ ID NO: 55056 - protein, 9 aa, synthetic construct
  source 1..9: note = Seed: LVVVGAVGV (KRAS G12V)
HVVLGGVGL

SEQ ID NO: 55057 - protein, 9 aa, synthetic construct
  source 1..9: note = Seed: LVVVGAVGV (KRAS G12V)
HVVLGGVGM

SEQ ID NO: 55058 - protein, 9 aa, synthetic construct
  source 1..9: note = Seed: LVVVGAVGV (KRAS G12V)
HVVLGGVGT

SEQ ID NO: 55059 - protein, 9 aa, synthetic construct
  source 1..9: note = Seed: LVVVGAVGV (KRAS G12V)
HVVLGGVGV

SEQ ID NO: 55060 - protein, 9 aa, synthetic construct
  source 1..9: note = Seed: LVVVGAVGV (KRAS G12V)
HVVLGHVGL

SEQ ID NO: 55061 - protein, 9 aa, synthetic construct
  source 1..9: note = Seed: LVVVGAVGV (KRAS G12V)
HVVLGIVGA

SEQ ID NO: 55062 - protein, 9 aa, synthetic construct
  source 1..9: note = Seed: LVVVGAVGV (KRAS G12V)
HVVLGIVGL

SEQ ID NO: 55063 - protein, 9 aa, synthetic construct
  source 1..9: note = Seed: LVVVGAVGV (KRAS G12V)
HVVLGIVGM

SEQ ID NO: 55064 - protein, 9 aa, synthetic construct
  source 1..9: note = Seed: LVVVGAVGV (KRAS G12V)
HVVLGNVGI

SEQ ID NO: 55065 - protein, 9 aa, synthetic construct
  source 1..9: note = Seed: LVVVGAVGV (KRAS G12V)
HVVLGNVGL

SEQ ID NO: 55066 - protein, 9 aa, synthetic construct
  source 1..9: note = Seed: LVVVGAVGV (KRAS G12V)
HVVLGNVGV

SEQ ID NO: 55067 - protein, 9 aa, synthetic construct
  source 1..9: note = Seed: LVVVGAVGV (KRAS G12V)
HVVLGPVGA

SEQ ID NO: 55068 - protein, 9 aa, synthetic construct
  source 1..9: note = Seed: LVVVGAVGV (KRAS G12V)
HVVLGPVGI

SEQ ID NO: 55069 - protein, 9 aa, synthetic construct
  source 1..9: note = Seed: LVVVGAVGV (KRAS G12V)
HVVLGPVGL

SEQ ID NO: 55070 - protein, 9 aa, synthetic construct
  source 1..9: note = Seed: LVVVGAVGV (KRAS G12V)
HVVLGPVGM

SEQ ID NO: 55071 - protein, 9 aa, synthetic construct
  source 1..9: note = Seed: LVVVGAVGV (KRAS G12V)
HVVLGPVGV

SEQ ID NO: 55072 - protein, 9 aa, synthetic construct
  source 1..9: note = Seed: LVVVGAVGV (KRAS G12V)
HVVLGRVGR

SEQ ID NO: 55073 - protein, 9 aa, synthetic construct
  source 1..9: note = Seed: LVVVGAVGV (KRAS G12V)
HVVLGSVGA

SEQ ID NO: 55074 - protein, 9 aa, synthetic construct
  source 1..9: note = Seed: LVVVGAVGV (KRAS G12V)
HVVLGSVGI

SEQ ID NO: 55075 - protein, 9 aa, synthetic construct
  source 1..9: note = Seed: LVVVGAVGV (KRAS G12V)
HVVLGSVGL

SEQ ID NO: 55076 - protein, 9 aa, synthetic construct
  source 1..9: note = Seed: LVVVGAVGV (KRAS G12V)
HVVLGSVGM

SEQ ID NO: 55077 - protein, 9 aa, synthetic construct
  source 1..9: note = Seed: LVVVGAVGV (KRAS G12V)
HVVLGSVGS

SEQ ID NO: 55078 - protein, 9 aa, synthetic construct
  source 1..9: note = Seed: LVVVGAVGV (KRAS G12V)
HVVLGSVGT

SEQ ID NO: 55079 - protein, 9 aa, synthetic construct
  source 1..9: note = Seed: LVVVGAVGV (KRAS G12V)
HVVLGSVGV

SEQ ID NO: 55080 - protein, 9 aa, synthetic construct
  source 1..9: note = Seed: LVVVGAVGV (KRAS G12V)
HVVLGTVGA

SEQ ID NO: 55081 - protein, 9 aa, synthetic construct
  source 1..9: note = Seed: LVVVGAVGV (KRAS G12V)
HVVLGTVGI

SEQ ID NO: 55082 - protein, 9 aa, synthetic construct
  source 1..9: note = Seed: LVVVGAVGV (KRAS G12V)
HVVLGTVGL

SEQ ID NO: 55083 - protein, 9 aa, synthetic construct
  source 1..9: note = Seed: LVVVGAVGV (KRAS G12V)
HVVLGTVGM

SEQ ID NO: 55084 - protein, 9 aa, synthetic construct
  source 1..9: note = Seed: LVVVGAVGV (KRAS G12V)
HVVLGTVGV

SEQ ID NO: 55085 - protein, 9 aa, synthetic construct
  source 1..9: note = Seed: LVVVGAVGV (KRAS G12V)
HVVLGVVGA

SEQ ID NO: 55086 - protein, 9 aa, synthetic construct
  source 1..9: note = Seed: LVVVGAVGV (KRAS G12V)
HVVLGVVGI

SEQ ID NO: 55087 - protein, 9 aa, synthetic construct
  source 1..9: note = Seed: LVVVGAVGV (KRAS G12V)
HVVLGVVGL

SEQ ID NO: 55088 - protein, 9 aa, synthetic construct
  source 1..9: note = Seed: LVVVGAVGV (KRAS G12V)
HVVLGVVGM

SEQ ID NO: 55089 - protein, 9 aa, synthetic construct
  source 1..9: note = Seed: LVVVGAVGV (KRAS G12V)
HVVLGVVGV

SEQ ID NO: 55090 - protein, 9 aa, synthetic construct
  source 1..9: note = Seed: LVVVGAVGV (KRAS G12V)
HVVMGAVGA

SEQ ID NO: 55091 - protein, 9 aa, synthetic construct
  source 1..9: note = Seed: LVVVGAVGV (KRAS G12V)
HVVMGAVGF

SEQ ID NO: 55092 - protein, 9 aa, synthetic construct
  source 1..9: note = Seed: LVVVGAVGV (KRAS G12V)
HVVMGAVGI

SEQ ID NO: 55093 - protein, 9 aa, synthetic construct
  source 1..9: note = Seed: LVVVGAVGV (KRAS G12V)
HVVMGAVGL

SEQ ID NO: 55094 - protein, 9 aa, synthetic construct
  source 1..9: note = Seed: LVVVGAVGV (KRAS G12V)
HVVMGAVGM

SEQ ID NO: 55095 - protein, 9 aa, synthetic construct
  source 1..9: note = Seed: LVVVGAVGV (KRAS G12V)
HVVMGAVGS

SEQ ID NO: 55096 - protein, 9 aa, synthetic construct
  source 1..9: note = Seed: LVVVGAVGV (KRAS G12V)
HVVMGAVGT

SEQ ID NO: 55097 - protein, 9 aa, synthetic construct
  source 1..9: note = Seed: LVVVGAVGV (KRAS G12V)
HVVMGAVGV

SEQ ID NO: 55098 - protein, 9 aa, synthetic construct
  source 1..9: note = Seed: LVVVGAVGV (KRAS G12V)
HVVMGGVGA

SEQ ID NO: 55099 - protein, 9 aa, synthetic construct
  source 1..9: note = Seed: LVVVGAVGV (KRAS G12V)
HVVMGGVGI

SEQ ID NO: 55100 - protein, 9 aa, synthetic construct
  source 1..9: note = Seed: LVVVGAVGV (KRAS G12V)
HVVMGGVGL

SEQ ID NO: 55101 - protein, 9 aa, synthetic construct
  source 1..9: note = Seed: LVVVGAVGV (KRAS G12V)
HVVMGGVGM

SEQ ID NO: 55102 - protein, 9 aa, synthetic construct
  source 1..9: note = Seed: LVVVGAVGV (KRAS G12V)
HVVMGGVGV

SEQ ID NO: 55103 - protein, 9 aa, synthetic construct
  source 1..9: note = Seed: LVVVGAVGV (KRAS G12V)
HVVMGHVGI

SEQ ID NO: 55104 - protein, 9 aa, synthetic construct
  source 1..9: note = Seed: LVVVGAVGV (KRAS G12V)
HVVMGHVGL

SEQ ID NO: 55105 - protein, 9 aa, synthetic construct
  source 1..9: note = Seed: LVVVGAVGV (KRAS G12V)
HVVMGIVGV

SEQ ID NO: 55106 - protein, 9 aa, synthetic construct
  source 1..9: note = Seed: LVVVGAVGV (KRAS G12V)
HVVMGNVGI

SEQ ID NO: 55107 - protein, 9 aa, synthetic construct
  source 1..9: note = Seed: LVVVGAVGV (KRAS G12V)
HVVMGNVGL

SEQ ID NO: 55108 - protein, 9 aa, synthetic construct
  source 1..9: note = Seed: LVVVGAVGV (KRAS G12V)
HVVMGNVGV

SEQ ID NO: 55109 - protein, 9 aa, synthetic construct
  source 1..9: note = Seed: LVVVGAVGV (KRAS G12V)
HVVMGPVGA

SEQ ID NO: 55110 - protein, 9 aa, synthetic construct
  source 1..9: note = Seed: LVVVGAVGV (KRAS G12V)
HVVMGPVGI

SEQ ID NO: 55111 - protein, 9 aa, synthetic construct
  source 1..9: note = Seed: LVVVGAVGV (KRAS G12V)
HVVMGPVGL

SEQ ID NO: 55112 - protein, 9 aa, synthetic construct
  source 1..9: note = Seed: LVVVGAVGV (KRAS G12V)
HVVMGPVGM

SEQ ID NO: 55113 - protein, 9 aa, synthetic construct
  source 1..9: note = Seed: LVVVGAVGV (KRAS G12V)
HVVMGPVGV

SEQ ID NO: 55114 - protein, 9 aa, synthetic construct
  source 1..9: note = Seed: LVVVGAVGV (KRAS G12V)
HVVMGRVGR

SEQ ID NO: 55115 - protein, 9 aa, synthetic construct
  source 1..9: note = Seed: LVVVGAVGV (KRAS G12V)
HVVMGSVGA

SEQ ID NO: 55116 - protein, 9 aa, synthetic construct
  source 1..9: note = Seed: LVVVGAVGV (KRAS G12V)
HVVMGSVGI

SEQ ID NO: 55117 - protein, 9 aa, synthetic construct
  source 1..9: note = Seed: LVVVGAVGV (KRAS G12V)
HVVMGSVGL

SEQ ID NO: 55118 - protein, 9 aa, synthetic construct
  source 1..9: note = Seed: LVVVGAVGV (KRAS G12V)
HVVMGSVGM

SEQ ID NO: 55119 - protein, 9 aa, synthetic construct
  source 1..9: note = Seed: LVVVGAVGV (KRAS G12V)
HVVMGSVGT

SEQ ID NO: 55120 - protein, 9 aa, synthetic construct
  source 1..9: note = Seed: LVVVGAVGV (KRAS G12V)
HVVMGSVGV

SEQ ID NO: 55121 - protein, 9 aa, synthetic construct
  source 1..9: note = Seed: LVVVGAVGV (KRAS G12V)
HVVMGTVGA

SEQ ID NO: 55122 - protein, 9 aa, synthetic construct
  source 1..9: note = Seed: LVVVGAVGV (KRAS G12V)
HVVMGTVGI

SEQ ID NO: 55123 - protein, 9 aa, synthetic construct
  source 1..9: note = Seed: LVVVGAVGV (KRAS G12V)
HVVMGTVGL

SEQ ID NO: 55124 - protein, 9 aa, synthetic construct
  source 1..9: note = Seed: LVVVGAVGV (KRAS G12V)
HVVMGTVGM

SEQ ID NO: 55125 - protein, 9 aa, synthetic construct
  source 1..9: note = Seed: LVVVGAVGV (KRAS G12V)
HVVMGTVGV

SEQ ID NO: 55126 - protein, 9 aa, synthetic construct
  source 1..9: note = Seed: LVVVGAVGV (KRAS G12V)
HVVMGVVGA

SEQ ID NO: 55127 - protein, 9 aa, synthetic construct
  source 1..9: note = Seed: LVVVGAVGV (KRAS G12V)
HVVMGVVGI

SEQ ID NO: 55128 - protein, 9 aa, synthetic construct
  source 1..9: note = Seed: LVVVGAVGV (KRAS G12V)
HVVMGVVGL

SEQ ID NO: 55129 - protein, 9 aa, synthetic construct
  source 1..9: note = Seed: LVVVGAVGV (KRAS G12V)
HVVMGVVGM

SEQ ID NO: 55130 - protein, 9 aa, synthetic construct
  source 1..9: note = Seed: LVVVGAVGV (KRAS G12V)
HVVMGVVGV

SEQ ID NO: 55131 - protein, 9 aa, synthetic construct
  source 1..9: note = Seed: LVVVGAVGV (KRAS G12V)
HVVNGAVGI

SEQ ID NO: 55132 - protein, 9 aa, synthetic construct
  source 1..9: note = Seed: LVVVGAVGV (KRAS G12V)
HVVNGAVGL

SEQ ID NO: 55133 - protein, 9 aa, synthetic construct
  source 1..9: note = Seed: LVVVGAVGV (KRAS G12V)
HVVNGAVGV

SEQ ID NO: 55134 - protein, 9 aa, synthetic construct
  source 1..9: note = Seed: LVVVGAVGV (KRAS G12V)
HVVQGAVGL

SEQ ID NO: 55135 - protein, 9 aa, synthetic construct
  source 1..9: note = Seed: LVVVGAVGV (KRAS G12V)
HVVSGAVGI

SEQ ID NO: 55136 - protein, 9 aa, synthetic construct
  source 1..9: note = Seed: LVVVGAVGV (KRAS G12V)
HVVSGSVGI

SEQ ID NO: 55137 - protein, 9 aa, synthetic construct
  source 1..9: note = Seed: LVVVGAVGV (KRAS G12V)
HVVSGSVGL

SEQ ID NO: 55138 - protein, 9 aa, synthetic construct
  source 1..9: note = Seed: LVVVGAVGV (KRAS G12V)
HVVTGAVGI

SEQ ID NO: 55139 - protein, 9 aa, synthetic construct
  source 1..9: note = Seed: LVVVGAVGV (KRAS G12V)
HVVTGAVGL

SEQ ID NO: 55140 - protein, 9 aa, synthetic construct
  source 1..9: note = Seed: LVVVGAVGV (KRAS G12V)
HVVTGAVGM

SEQ ID NO: 55141 - protein, 9 aa, synthetic construct
  source 1..9: note = Seed: LVVVGAVGV (KRAS G12V)
HVVTGAVGV

SEQ ID NO: 55142 - protein, 9 aa, synthetic construct
  source 1..9: note = Seed: LVVVGAVGV (KRAS G12V)
HVVTGSVGI

SEQ ID NO: 55143 - protein, 9 aa, synthetic construct
  source 1..9: note = Seed: LVVVGAVGV (KRAS G12V)
HVVTGSVGL

SEQ ID NO: 55144 - protein, 9 aa, synthetic construct
  source 1..9: note = Seed: LVVVGAVGV (KRAS G12V)
HVVTGSVGV

SEQ ID NO: 55145 - protein, 9 aa, synthetic construct
  source 1..9: note = Seed: LVVVGAVGV (KRAS G12V)
HVVVGAVGA

SEQ ID NO: 55146 - protein, 9 aa, synthetic construct
  source 1..9: note = Seed: LVVVGAVGV (KRAS G12V)
HVVVGAVGI

SEQ ID NO: 55147 - protein, 9 aa, synthetic construct
  source 1..9: note = Seed: LVVVGAVGV (KRAS G12V)
HVVVGAVGL

SEQ ID NO: 55148 - protein, 9 aa, synthetic construct
  source 1..9: note = Seed: LVVVGAVGV (KRAS G12V)
HVVVGAVGM

SEQ ID NO: 55149 - protein, 9 aa, synthetic construct
  source 1..9: note = Seed: LVVVGAVGV (KRAS G12V)
HVVVGAVGV

SEQ ID NO: 55150 - protein, 9 aa, synthetic construct
  source 1..9: note = Seed: LVVVGAVGV (KRAS G12V)
HVVVGGVGL

SEQ ID NO: 55151 - protein, 9 aa, synthetic construct
  source 1..9: note = Seed: LVVVGAVGV (KRAS G12V)
HVVVGGVGV

SEQ ID NO: 55152 - protein, 9 aa, synthetic construct
  source 1..9: note = Seed: LVVVGAVGV (KRAS G12V)
HVVVGPVGI

SEQ ID NO: 55153 - protein, 9 aa, synthetic construct
  source 1..9: note = Seed: LVVVGAVGV (KRAS G12V)
HVVVGPVGL

SEQ ID NO: 55154 - protein, 9 aa, synthetic construct
  source 1..9: note = Seed: LVVVGAVGV (KRAS G12V)
HVVVGPVGV

SEQ ID NO: 55155 - protein, 9 aa, synthetic construct
  source 1..9: note = Seed: LVVVGAVGV (KRAS G12V)
HVVVGSVGA

SEQ ID NO: 55156 - protein, 9 aa, synthetic construct
  source 1..9: note = Seed: LVVVGAVGV (KRAS G12V)
HVVVGSVGI

SEQ ID NO: 55157 - protein, 9 aa, synthetic construct
  source 1..9: note = Seed: LVVVGAVGV (KRAS G12V)
HVVVGSVGL

SEQ ID NO: 55158 - protein, 9 aa, synthetic construct
  source 1..9: note = Seed: LVVVGAVGV (KRAS G12V)
HVVVGSVGM

SEQ ID NO: 55159 - protein, 9 aa, synthetic construct
  source 1..9: note = Seed: LVVVGAVGV (KRAS G12V)
HVVVGSVGV

SEQ ID NO: 55160 - protein, 9 aa, synthetic construct
  source 1..9: note = Seed: LVVVGAVGV (KRAS G12V)
HVVVGTVGL

SEQ ID NO: 55161 - protein, 9 aa, synthetic construct
  source 1..9: note = Seed: LVVVGAVGV (KRAS G12V)
IVVAGAVGA

SEQ ID NO: 55162 - protein, 9 aa, synthetic construct
  source 1..9: note = Seed: LVVVGAVGV (KRAS G12V)
IVVAGAVGC

SEQ ID NO: 55163 - protein, 9 aa, synthetic construct
  source 1..9: note = Seed: LVVVGAVGV (KRAS G12V)
IVVAGAVGD

SEQ ID NO: 55164 - protein, 9 aa, synthetic construct
  source 1..9: note = Seed: LVVVGAVGV (KRAS G12V)
IVVAGAVGE

SEQ ID NO: 55165 - protein, 9 aa, synthetic construct
  source 1..9: note = Seed: LVVVGAVGV (KRAS G12V)
IVVAGAVGF

SEQ ID NO: 55166 - protein, 9 aa, synthetic construct
  source 1..9: note = Seed: LVVVGAVGV (KRAS G12V)
IVVAGAVGG

SEQ ID NO: 55167 - protein, 9 aa, synthetic construct
  source 1..9: note = Seed: LVVVGAVGV (KRAS G12V)
IVVAGAVGH

SEQ ID NO: 55168 - protein, 9 aa, synthetic construct
  source 1..9: note = Seed: LVVVGAVGV (KRAS G12V)
IVVAGAVGI

SEQ ID NO: 55169 - protein, 9 aa, synthetic construct
  source 1..9: note = Seed: LVVVGAVGV (KRAS G12V)
IVVAGAVGK

SEQ ID NO: 55170 - protein, 9 aa, synthetic construct
  source 1..9: note = Seed: LVVVGAVGV (KRAS G12V)
IVVAGAVGL

SEQ ID NO: 55171 - protein, 9 aa, synthetic construct
  source 1..9: note = Seed: LVVVGAVGV (KRAS G12V)
IVVAGAVGM

SEQ ID NO: 55172 - protein, 9 aa, synthetic construct
  source 1..9: note = Seed: LVVVGAVGV (KRAS G12V)
IVVAGAVGN

SEQ ID NO: 55173 - protein, 9 aa, synthetic construct
  source 1..9: note = Seed: LVVVGAVGV (KRAS G12V)
IVVAGAVGP

SEQ ID NO: 55174 - protein, 9 aa, synthetic construct
  source 1..9: note = Seed: LVVVGAVGV (KRAS G12V)
IVVAGAVGQ

SEQ ID NO: 55175 - protein, 9 aa, synthetic construct
  source 1..9: note = Seed: LVVVGAVGV (KRAS G12V)
IVVAGAVGR

SEQ ID NO: 55176 - protein, 9 aa, synthetic construct
  source 1..9: note = Seed: LVVVGAVGV (KRAS G12V)
IVVAGAVGS

SEQ ID NO: 55177 - protein, 9 aa, synthetic construct
  source 1..9: note = Seed: LVVVGAVGV (KRAS G12V)
IVVAGAVGT

SEQ ID NO: 55178 - protein, 9 aa, synthetic construct
  source 1..9: note = Seed: LVVVGAVGV (KRAS G12V)
IVVAGAVGV

SEQ ID NO: 55179 - protein, 9 aa, synthetic construct
  source 1..9: note = Seed: LVVVGAVGV (KRAS G12V)
IVVAGAVGW

SEQ ID NO: 55180 - protein, 9 aa, synthetic construct
  source 1..9: note = Seed: LVVVGAVGV (KRAS G12V)
IVVAGAVGY

SEQ ID NO: 55181 - protein, 9 aa, synthetic construct
  source 1..9: note = Seed: LVVVGAVGV (KRAS G12V)
IVVAGCVGA

SEQ ID NO: 55182 - protein, 9 aa, synthetic construct
  source 1..9: note = Seed: LVVVGAVGV (KRAS G12V)
IVVAGCVGC

SEQ ID NO: 55183 - protein, 9 aa, synthetic construct
  source 1..9: note = Seed: LVVVGAVGV (KRAS G12V)
IVVAGCVGG

SEQ ID NO: 55184 - protein, 9 aa, synthetic construct
  source 1..9: note = Seed: LVVVGAVGV (KRAS G12V)
IVVAGCVGI

SEQ ID NO: 55185 - protein, 9 aa, synthetic construct
  source 1..9: note = Seed: LVVVGAVGV (KRAS G12V)
IVVAGCVGL

SEQ ID NO: 55186 - protein, 9 aa, synthetic construct
  source 1..9: note = Seed: LVVVGAVGV (KRAS G12V)
IVVAGCVGM

SEQ ID NO: 55187 - protein, 9 aa, synthetic construct
  source 1..9: note = Seed: LVVVGAVGV (KRAS G12V)
IVVAGCVGN

SEQ ID NO: 55188 - protein, 9 aa, synthetic construct
  source 1..9: note = Seed: LVVVGAVGV (KRAS G12V)
IVVAGCVGS

SEQ ID NO: 55189 - protein, 9 aa, synthetic construct
  source 1..9: note = Seed: LVVVGAVGV (KRAS G12V)
IVVAGCVGT

SEQ ID NO: 55190 - protein, 9 aa, synthetic construct
  source 1..9: note = Seed: LVVVGAVGV (KRAS G12V)
IVVAGCVGV

SEQ ID NO: 55191 - protein, 9 aa, synthetic construct
  source 1..9: note = Seed: LVVVGAVGV (KRAS G12V)
IVVAGDVGA

SEQ ID NO: 55192 - protein, 9 aa, synthetic construct
  source 1..9: note = Seed: LVVVGAVGV (KRAS G12V)
IVVAGDVGC

SEQ ID NO: 55193 - protein, 9 aa, synthetic construct
  source 1..9: note = Seed: LVVVGAVGV (KRAS G12V)
IVVAGDVGI

SEQ ID NO: 55194 - protein, 9 aa, synthetic construct
  source 1..9: note = Seed: LVVVGAVGV (KRAS G12V)
IVVAGDVGL

SEQ ID NO: 55195 - protein, 9 aa, synthetic construct
  source 1..9: note = Seed: LVVVGAVGV (KRAS G12V)
IVVAGDVGM

SEQ ID NO: 55196 - protein, 9 aa, synthetic construct
  source 1..9: note = Seed: LVVVGAVGV (KRAS G12V)
IVVAGDVGS

SEQ ID NO: 55197 - protein, 9 aa, synthetic construct
  source 1..9: note = Seed: LVVVGAVGV (KRAS G12V)
IVVAGDVGV

SEQ ID NO: 55198 - protein, 9 aa, synthetic construct
  source 1..9: note = Seed: LVVVGAVGV (KRAS G12V)
IVVAGEVGA

SEQ ID NO: 55199 - protein, 9 aa, synthetic construct
  source 1..9: note = Seed: LVVVGAVGV (KRAS G12V)
IVVAGEVGC

SEQ ID NO: 55200 - protein, 9 aa, synthetic construct
  source 1..9: note = Seed: LVVVGAVGV (KRAS G12V)
IVVAGEVGI

SEQ ID NO: 55201 - protein, 9 aa, synthetic construct
  source 1..9: note = Seed: LVVVGAVGV (KRAS G12V)
IVVAGEVGL

SEQ ID NO: 55202 - protein, 9 aa, synthetic construct
  source 1..9: note = Seed: LVVVGAVGV (KRAS G12V)
IVVAGEVGV

SEQ ID NO: 55203 - protein, 9 aa, synthetic construct
  source 1..9: note = Seed: LVVVGAVGV (KRAS G12V)
IVVAGGVGA

SEQ ID NO: 55204 - protein, 9 aa, synthetic construct
  source 1..9: note = Seed: LVVVGAVGV (KRAS G12V)
IVVAGGVGC

SEQ ID NO: 55205 - protein, 9 aa, synthetic construct
  source 1..9: note = Seed: LVVVGAVGV (KRAS G12V)
IVVAGGVGF

SEQ ID NO: 55206 - protein, 9 aa, synthetic construct
  source 1..9: note = Seed: LVVVGAVGV (KRAS G12V)
IVVAGGVGG

SEQ ID NO: 55207 - protein, 9 aa, synthetic construct
  source 1..9: note = Seed: LVVVGAVGV (KRAS G12V)
IVVAGGVGH

SEQ ID NO: 55208 - protein, 9 aa, synthetic construct
  source 1..9: note = Seed: LVVVGAVGV (KRAS G12V)
IVVAGGVGI

SEQ ID NO: 55209 - protein, 9 aa, synthetic construct
  source 1..9: note = Seed: LVVVGAVGV (KRAS G12V)
IVVAGGVGK

SEQ ID NO: 55210 - protein, 9 aa, synthetic construct
  source 1..9: note = Seed: LVVVGAVGV (KRAS G12V)
IVVAGGVGL

SEQ ID NO: 55211 - protein, 9 aa, synthetic construct
  source 1..9: note = Seed: LVVVGAVGV (KRAS G12V)
IVVAGGVGM

SEQ ID NO: 55212 - protein, 9 aa, synthetic construct
  source 1..9: note = Seed: LVVVGAVGV (KRAS G12V)
IVVAGGVGN

SEQ ID NO: 55213 - protein, 9 aa, synthetic construct
  source 1..9: note = Seed: LVVVGAVGV (KRAS G12V)
IVVAGGVGP

SEQ ID NO: 55214 - protein, 9 aa, synthetic construct
  source 1..9: note = Seed: LVVVGAVGV (KRAS G12V)
IVVAGGVGQ

SEQ ID NO: 55215 - protein, 9 aa, synthetic construct
  source 1..9: note = Seed: LVVVGAVGV (KRAS G12V)
IVVAGGVGR

SEQ ID NO: 55216 - protein, 9 aa, synthetic construct
  source 1..9: note = Seed: LVVVGAVGV (KRAS G12V)
IVVAGGVGS

SEQ ID NO: 55217 - protein, 9 aa, synthetic construct
  source 1..9: note = Seed: LVVVGAVGV (KRAS G12V)
IVVAGGVGT

SEQ ID NO: 55218 - protein, 9 aa, synthetic construct
  source 1..9: note = Seed: LVVVGAVGV (KRAS G12V)
IVVAGGVGV

SEQ ID NO: 55219 - protein, 9 aa, synthetic construct
  source 1..9: note = Seed: LVVVGAVGV (KRAS G12V)
IVVAGGVGY

SEQ ID NO: 55220 - protein, 9 aa, synthetic construct
  source 1..9: note = Seed: LVVVGAVGV (KRAS G12V)
IVVAGHVGA

SEQ ID NO: 55221 - protein, 9 aa, synthetic construct
  source 1..9: note = Seed: LVVVGAVGV (KRAS G12V)
IVVAGHVGF

SEQ ID NO: 55222 - protein, 9 aa, synthetic construct
  source 1..9: note = Seed: LVVVGAVGV (KRAS G12V)
IVVAGHVGG

SEQ ID NO: 55223 - protein, 9 aa, synthetic construct
  source 1..9: note = Seed: LVVVGAVGV (KRAS G12V)
IVVAGHVGI

SEQ ID NO: 55224 - protein, 9 aa, synthetic construct
  source 1..9: note = Seed: LVVVGAVGV (KRAS G12V)
IVVAGHVGL

SEQ ID NO: 55225 - protein, 9 aa, synthetic construct
  source 1..9: note = Seed: LVVVGAVGV (KRAS G12V)
IVVAGHVGM

SEQ ID NO: 55226 - protein, 9 aa, synthetic construct
  source 1..9: note = Seed: LVVVGAVGV (KRAS G12V)
IVVAGHVGR

SEQ ID NO: 55227 - protein, 9 aa, synthetic construct
  source 1..9: note = Seed: LVVVGAVGV (KRAS G12V)
IVVAGHVGS

SEQ ID NO: 55228 - protein, 9 aa, synthetic construct
  source 1..9: note = Seed: LVVVGAVGV (KRAS G12V)
IVVAGHVGV

SEQ ID NO: 55229 - protein, 9 aa, synthetic construct
  source 1..9: note = Seed: LVVVGAVGV (KRAS G12V)
IVVAGHVGY

SEQ ID NO: 55230 - protein, 9 aa, synthetic construct
  source 1..9: note = Seed: LVVVGAVGV (KRAS G12V)
IVVAGIVGA

SEQ ID NO: 55231 - protein, 9 aa, synthetic construct
  source 1..9: note = Seed: LVVVGAVGV (KRAS G12V)
IVVAGIVGC

SEQ ID NO: 55232 - protein, 9 aa, synthetic construct
  source 1..9: note = Seed: LVVVGAVGV (KRAS G12V)
IVVAGIVGE

SEQ ID NO: 55233 - protein, 9 aa, synthetic construct
  source 1..9: note = Seed: LVVVGAVGV (KRAS G12V)
IVVAGIVGG

SEQ ID NO: 55234 - protein, 9 aa, synthetic construct
  source 1..9: note = Seed: LVVVGAVGV (KRAS G12V)
IVVAGIVGH

SEQ ID NO: 55235 - protein, 9 aa, synthetic construct
  source 1..9: note = Seed: LVVVGAVGV (KRAS G12V)
IVVAGIVGI

SEQ ID NO: 55236 - protein, 9 aa, synthetic construct
  source 1..9: note = Seed: LVVVGAVGV (KRAS G12V)
IVVAGIVGL

SEQ ID NO: 55237 - protein, 9 aa, synthetic construct
  source 1..9: note = Seed: LVVVGAVGV (KRAS G12V)
IVVAGIVGM

SEQ ID NO: 55238 - protein, 9 aa, synthetic construct
  source 1..9: note = Seed: LVVVGAVGV (KRAS G12V)
IVVAGIVGN

SEQ ID NO: 55239 - protein, 9 aa, synthetic construct
  source 1..9: note = Seed: LVVVGAVGV (KRAS G12V)
IVVAGIVGQ

SEQ ID NO: 55240 - protein, 9 aa, synthetic construct
  source 1..9: note = Seed: LVVVGAVGV (KRAS G12V)
IVVAGIVGR

SEQ ID NO: 55241 - protein, 9 aa, synthetic construct
  source 1..9: note = Seed: LVVVGAVGV (KRAS G12V)
IVVAGIVGS

SEQ ID NO: 55242 - protein, 9 aa, synthetic construct
  source 1..9: note = Seed: LVVVGAVGV (KRAS G12V)
IVVAGIVGT

SEQ ID NO: 55243 - protein, 9 aa, synthetic construct
  source 1..9: note = Seed: LVVVGAVGV (KRAS G12V)
IVVAGIVGV

SEQ ID NO: 55244 - protein, 9 aa, synthetic construct
  source 1..9: note = Seed: LVVVGAVGV (KRAS G12V)
IVVAGKVGA

SEQ ID NO: 55245 - protein, 9 aa, synthetic construct
  source 1..9: note = Seed: LVVVGAVGV (KRAS G12V)
IVVAGKVGF

SEQ ID NO: 55246 - protein, 9 aa, synthetic construct
  source 1..9: note = Seed: LVVVGAVGV (KRAS G12V)
IVVAGKVGG

SEQ ID NO: 55247 - protein, 9 aa, synthetic construct
  source 1..9: note = Seed: LVVVGAVGV (KRAS G12V)
IVVAGKVGH

SEQ ID NO: 55248 - protein, 9 aa, synthetic construct
  source 1..9: note = Seed: LVVVGAVGV (KRAS G12V)
IVVAGKVGI

SEQ ID NO: 55249 - protein, 9 aa, synthetic construct
  source 1..9: note = Seed: LVVVGAVGV (KRAS G12V)
IVVAGKVGK

SEQ ID NO: 55250 - protein, 9 aa, synthetic construct
  source 1..9: note = Seed: LVVVGAVGV (KRAS G12V)
IVVAGKVGL

SEQ ID NO: 55251 - protein, 9 aa, synthetic construct
  source 1..9: note = Seed: LVVVGAVGV (KRAS G12V)
IVVAGKVGM

SEQ ID NO: 55252 - protein, 9 aa, synthetic construct
  source 1..9: note = Seed: LVVVGAVGV (KRAS G12V)
IVVAGKVGN

SEQ ID NO: 55253 - protein, 9 aa, synthetic construct
  source 1..9: note = Seed: LVVVGAVGV (KRAS G12V)
IVVAGKVGQ

SEQ ID NO: 55254 - protein, 9 aa, synthetic construct
  source 1..9: note = Seed: LVVVGAVGV (KRAS G12V)
IVVAGKVGR

SEQ ID NO: 55255 - protein, 9 aa, synthetic construct
  source 1..9: note = Seed: LVVVGAVGV (KRAS G12V)
IVVAGKVGS

SEQ ID NO: 55256 - protein, 9 aa, synthetic construct
  source 1..9: note = Seed: LVVVGAVGV (KRAS G12V)
IVVAGKVGT

SEQ ID NO: 55257 - protein, 9 aa, synthetic construct
  source 1..9: note = Seed: LVVVGAVGV (KRAS G12V)
IVVAGKVGV

SEQ ID NO: 55258 - protein, 9 aa, synthetic construct
  source 1..9: note = Seed: LVVVGAVGV (KRAS G12V)
IVVAGKVGY

SEQ ID NO: 55259 - protein, 9 aa, synthetic construct
  source 1..9: note = Seed: LVVVGAVGV (KRAS G12V)
IVVAGLVGA

SEQ ID NO: 55260 - protein, 9 aa, synthetic construct
  source 1..9: note = Seed: LVVVGAVGV (KRAS G12V)
IVVAGLVGN

SEQ ID NO: 55261 - protein, 9 aa, synthetic construct
  source 1..9: note = Seed: LVVVGAVGV (KRAS G12V)
IVVAGLVGS

SEQ ID NO: 55262 - protein, 9 aa, synthetic construct
  source 1..9: note = Seed: LVVVGAVGV (KRAS G12V)
IVVAGMVGA

SEQ ID NO: 55263 - protein, 9 aa, synthetic construct
  source 1..9: note = Seed: LVVVGAVGV (KRAS G12V)
IVVAGMVGC

SEQ ID NO: 55264 - protein, 9 aa, synthetic construct
  source 1..9: note = Seed: LVVVGAVGV (KRAS G12V)
IVVAGMVGN

SEQ ID NO: 55265 - protein, 9 aa, synthetic construct
  source 1..9: note = Seed: LVVVGAVGV (KRAS G12V)
IVVAGMVGS

SEQ ID NO: 55266 - protein, 9 aa, synthetic construct
  source 1..9: note = Seed: LVVVGAVGV (KRAS G12V)
IVVAGNVGA

SEQ ID NO: 55267 - protein, 9 aa, synthetic construct
  source 1..9: note = Seed: LVVVGAVGV (KRAS G12V)
IVVAGNVGC

SEQ ID NO: 55268 - protein, 9 aa, synthetic construct
  source 1..9: note = Seed: LVVVGAVGV (KRAS G12V)
IVVAGNVGF

SEQ ID NO: 55269 - protein, 9 aa, synthetic construct
  source 1..9: note = Seed: LVVVGAVGV (KRAS G12V)
IVVAGNVGG

SEQ ID NO: 55270 - protein, 9 aa, synthetic construct
  source 1..9: note = Seed: LVVVGAVGV (KRAS G12V)
IVVAGNVGH

SEQ ID NO: 55271 - protein, 9 aa, synthetic construct
  source 1..9: note = Seed: LVVVGAVGV (KRAS G12V)
IVVAGNVGI

SEQ ID NO: 55272 - protein, 9 aa, synthetic construct
  source 1..9: note = Seed: LVVVGAVGV (KRAS G12V)
IVVAGNVGK

SEQ ID NO: 55273 - protein, 9 aa, synthetic construct
  source 1..9: note = Seed: LVVVGAVGV (KRAS G12V)
IVVAGNVGL

SEQ ID NO: 55274 - protein, 9 aa, synthetic construct
  source 1..9: note = Seed: LVVVGAVGV (KRAS G12V)
IVVAGNVGM

SEQ ID NO: 55275 - protein, 9 aa, synthetic construct
  source 1..9: note = Seed: LVVVGAVGV (KRAS G12V)
IVVAGNVGN

SEQ ID NO: 55276 - protein, 9 aa, synthetic construct
  source 1..9: note = Seed: LVVVGAVGV (KRAS G12V)
IVVAGNVGP

SEQ ID NO: 55277 - protein, 9 aa, synthetic construct
  source 1..9: note = Seed: LVVVGAVGV (KRAS G12V)
IVVAGNVGQ

SEQ ID NO: 55278 - protein, 9 aa, synthetic construct
  source 1..9: note = Seed: LVVVGAVGV (KRAS G12V)
IVVAGNVGR

SEQ ID NO: 55279 - protein, 9 aa, synthetic construct
  source 1..9: note = Seed: LVVVGAVGV (KRAS G12V)
IVVAGNVGS

SEQ ID NO: 55280 - protein, 9 aa, synthetic construct
  source 1..9: note = Seed: LVVVGAVGV (KRAS G12V)
IVVAGNVGT

SEQ ID NO: 55281 - protein, 9 aa, synthetic construct
  source 1..9: note = Seed: LVVVGAVGV (KRAS G12V)
IVVAGNVGV

SEQ ID NO: 55282 - protein, 9 aa, synthetic construct
  source 1..9: note = Seed: LVVVGAVGV (KRAS G12V)
IVVAGNVGY

SEQ ID NO: 55283 - protein, 9 aa, synthetic construct
  source 1..9: note = Seed: LVVVGAVGV (KRAS G12V)
IVVAGPVGA

SEQ ID NO: 55284 - protein, 9 aa, synthetic construct
  source 1..9: note = Seed: LVVVGAVGV (KRAS G12V)
IVVAGPVGC

SEQ ID NO: 55285 - protein, 9 aa, synthetic construct
  source 1..9: note = Seed: LVVVGAVGV (KRAS G12V)
IVVAGPVGD

SEQ ID NO: 55286 - protein, 9 aa, synthetic construct
  source 1..9: note = Seed: LVVVGAVGV (KRAS G12V)
IVVAGPVGE

SEQ ID NO: 55287 - protein, 9 aa, synthetic construct
  source 1..9: note = Seed: LVVVGAVGV (KRAS G12V)
IVVAGPVGF

SEQ ID NO: 55288 - protein, 9 aa, synthetic construct
  source 1..9: note = Seed: LVVVGAVGV (KRAS G12V)
IVVAGPVGG

SEQ ID NO: 55289 - protein, 9 aa, synthetic construct
  source 1..9: note = Seed: LVVVGAVGV (KRAS G12V)
IVVAGPVGH

SEQ ID NO: 55290 - protein, 9 aa, synthetic construct
  source 1..9: note = Seed: LVVVGAVGV (KRAS G12V)
IVVAGPVGI

SEQ ID NO: 55291 - protein, 9 aa, synthetic construct
  source 1..9: note = Seed: LVVVGAVGV (KRAS G12V)
IVVAGPVGL

SEQ ID NO: 55292 - protein, 9 aa, synthetic construct
  source 1..9: note = Seed: LVVVGAVGV (KRAS G12V)
IVVAGPVGM

SEQ ID NO: 55293 - protein, 9 aa, synthetic construct
  source 1..9: note = Seed: LVVVGAVGV (KRAS G12V)
IVVAGPVGN

SEQ ID NO: 55294 - protein, 9 aa, synthetic construct
  source 1..9: note = Seed: LVVVGAVGV (KRAS G12V)
IVVAGPVGP

SEQ ID NO: 55295 - protein, 9 aa, synthetic construct
  source 1..9: note = Seed: LVVVGAVGV (KRAS G12V)
IVVAGPVGQ

SEQ ID NO: 55296 - protein, 9 aa, synthetic construct
  source 1..9: note = Seed: LVVVGAVGV (KRAS G12V)
IVVAGPVGR

SEQ ID NO: 55297 - protein, 9 aa, synthetic construct
  source 1..9: note = Seed: LVVVGAVGV (KRAS G12V)
IVVAGPVGS

SEQ ID NO: 55298 - protein, 9 aa, synthetic construct
  source 1..9: note = Seed: LVVVGAVGV (KRAS G12V)
IVVAGPVGT

SEQ ID NO: 55299 - protein, 9 aa, synthetic construct
  source 1..9: note = Seed: LVVVGAVGV (KRAS G12V)
IVVAGPVGV

SEQ ID NO: 55300 - protein, 9 aa, synthetic construct
  source 1..9: note = Seed: LVVVGAVGV (KRAS G12V)
IVVAGPVGW

SEQ ID NO: 55301 - protein, 9 aa, synthetic construct
  source 1..9: note = Seed: LVVVGAVGV (KRAS G12V)
IVVAGPVGY

SEQ ID NO: 55302 - protein, 9 aa, synthetic construct
  source 1..9: note = Seed: LVVVGAVGV (KRAS G12V)
IVVAGQVGA

SEQ ID NO: 55303 - protein, 9 aa, synthetic construct
  source 1..9: note = Seed: LVVVGAVGV (KRAS G12V)
IVVAGQVGI

SEQ ID NO: 55304 - protein, 9 aa, synthetic construct
  source 1..9: note = Seed: LVVVGAVGV (KRAS G12V)
IVVAGQVGL

SEQ ID NO: 55305 - protein, 9 aa, synthetic construct
  source 1..9: note = Seed: LVVVGAVGV (KRAS G12V)
IVVAGQVGS

SEQ ID NO: 55306 - protein, 9 aa, synthetic construct
  source 1..9: note = Seed: LVVVGAVGV (KRAS G12V)
IVVAGQVGV

SEQ ID NO: 55307 - protein, 9 aa, synthetic construct
  source 1..9: note = Seed: LVVVGAVGV (KRAS G12V)
IVVAGRVGA

SEQ ID NO: 55308 - protein, 9 aa, synthetic construct
  source 1..9: note = Seed: LVVVGAVGV (KRAS G12V)
IVVAGRVGC

SEQ ID NO: 55309 - protein, 9 aa, synthetic construct
  source 1..9: note = Seed: LVVVGAVGV (KRAS G12V)
IVVAGRVGF

SEQ ID NO: 55310 - protein, 9 aa, synthetic construct
  source 1..9: note = Seed: LVVVGAVGV (KRAS G12V)
IVVAGRVGG

SEQ ID NO: 55311 - protein, 9 aa, synthetic construct
  source 1..9: note = Seed: LVVVGAVGV (KRAS G12V)
IVVAGRVGH

SEQ ID NO: 55312 - protein, 9 aa, synthetic construct
  source 1..9: note = Seed: LVVVGAVGV (KRAS G12V)
IVVAGRVGI

SEQ ID NO: 55313 - protein, 9 aa, synthetic construct
  source 1..9: note = Seed: LVVVGAVGV (KRAS G12V)
IVVAGRVGK

SEQ ID NO: 55314 - protein, 9 aa, synthetic construct
  source 1..9: note = Seed: LVVVGAVGV (KRAS G12V)
IVVAGRVGL

SEQ ID NO: 55315 - protein, 9 aa, synthetic construct
  source 1..9: note = Seed: LVVVGAVGV (KRAS G12V)
IVVAGRVGM

SEQ ID NO: 55316 - protein, 9 aa, synthetic construct
  source 1..9: note = Seed: LVVVGAVGV (KRAS G12V)
IVVAGRVGN

SEQ ID NO: 55317 - protein, 9 aa, synthetic construct
  source 1..9: note = Seed: LVVVGAVGV (KRAS G12V)
IVVAGRVGP

SEQ ID NO: 55318 - protein, 9 aa, synthetic construct
  source 1..9: note = Seed: LVVVGAVGV (KRAS G12V)
IVVAGRVGQ

SEQ ID NO: 55319 - protein, 9 aa, synthetic construct
  source 1..9: note = Seed: LVVVGAVGV (KRAS G12V)
IVVAGRVGR

SEQ ID NO: 55320 - protein, 9 aa, synthetic construct
  source 1..9: note = Seed: LVVVGAVGV (KRAS G12V)
IVVAGRVGS

SEQ ID NO: 55321 - protein, 9 aa, synthetic construct
  source 1..9: note = Seed: LVVVGAVGV (KRAS G12V)
IVVAGRVGT

SEQ ID NO: 55322 - protein, 9 aa, synthetic construct
  source 1..9: note = Seed: LVVVGAVGV (KRAS G12V)
IVVAGRVGV

SEQ ID NO: 55323 - protein, 9 aa, synthetic construct
  source 1..9: note = Seed: LVVVGAVGV (KRAS G12V)
IVVAGRVGY

SEQ ID NO: 55324 - protein, 9 aa, synthetic construct
  source 1..9: note = Seed: LVVVGAVGV (KRAS G12V)
IVVAGSVGA

SEQ ID NO: 55325 - protein, 9 aa, synthetic construct
  source 1..9: note = Seed: LVVVGAVGV (KRAS G12V)
IVVAGSVGC

SEQ ID NO: 55326 - protein, 9 aa, synthetic construct
  source 1..9: note = Seed: LVVVGAVGV (KRAS G12V)
IVVAGSVGF

SEQ ID NO: 55327 - protein, 9 aa, synthetic construct
  source 1..9: note = Seed: LVVVGAVGV (KRAS G12V)
IVVAGSVGG

SEQ ID NO: 55328 - protein, 9 aa, synthetic construct
  source 1..9: note = Seed: LVVVGAVGV (KRAS G12V)
IVVAGSVGH

SEQ ID NO: 55329 - protein, 9 aa, synthetic construct
  source 1..9: note = Seed: LVVVGAVGV (KRAS G12V)
IVVAGSVGI

SEQ ID NO: 55330 - protein, 9 aa, synthetic construct
  source 1..9: note = Seed: LVVVGAVGV (KRAS G12V)
IVVAGSVGK

SEQ ID NO: 55331 - protein, 9 aa, synthetic construct
  source 1..9: note = Seed: LVVVGAVGV (KRAS G12V)
IVVAGSVGL

SEQ ID NO: 55332 - protein, 9 aa, synthetic construct
  source 1..9: note = Seed: LVVVGAVGV (KRAS G12V)
IVVAGSVGM

SEQ ID NO: 55333 - protein, 9 aa, synthetic construct
  source 1..9: note = Seed: LVVVGAVGV (KRAS G12V)
IVVAGSVGN

SEQ ID NO: 55334 - protein, 9 aa, synthetic construct
  source 1..9: note = Seed: LVVVGAVGV (KRAS G12V)
IVVAGSVGP

SEQ ID NO: 55335 - protein, 9 aa, synthetic construct
  source 1..9: note = Seed: LVVVGAVGV (KRAS G12V)
IVVAGSVGQ

SEQ ID NO: 55336 - protein, 9 aa, synthetic construct
  source 1..9: note = Seed: LVVVGAVGV (KRAS G12V)
IVVAGSVGR

SEQ ID NO: 55337 - protein, 9 aa, synthetic construct
  source 1..9: note = Seed: LVVVGAVGV (KRAS G12V)
IVVAGSVGS

SEQ ID NO: 55338 - protein, 9 aa, synthetic construct
  source 1..9: note = Seed: LVVVGAVGV (KRAS G12V)
IVVAGSVGT

SEQ ID NO: 55339 - protein, 9 aa, synthetic construct
  source 1..9: note = Seed: LVVVGAVGV (KRAS G12V)
IVVAGSVGV

SEQ ID NO: 55340 - protein, 9 aa, synthetic construct
  source 1..9: note = Seed: LVVVGAVGV (KRAS G12V)
IVVAGSVGY

SEQ ID NO: 55341 - protein, 9 aa, synthetic construct
  source 1..9: note = Seed: LVVVGAVGV (KRAS G12V)
IVVAGTVGA

SEQ ID NO: 55342 - protein, 9 aa, synthetic construct
  source 1..9: note = Seed: LVVVGAVGV (KRAS G12V)
IVVAGTVGC

SEQ ID NO: 55343 - protein, 9 aa, synthetic construct
  source 1..9: note = Seed: LVVVGAVGV (KRAS G12V)
IVVAGTVGF

SEQ ID NO: 55344 - protein, 9 aa, synthetic construct
  source 1..9: note = Seed: LVVVGAVGV (KRAS G12V)
IVVAGTVGG

SEQ ID NO: 55345 - protein, 9 aa, synthetic construct
  source 1..9: note = Seed: LVVVGAVGV (KRAS G12V)
IVVAGTVGH

SEQ ID NO: 55346 - protein, 9 aa, synthetic construct
  source 1..9: note = Seed: LVVVGAVGV (KRAS G12V)
IVVAGTVGI

SEQ ID NO: 55347 - protein, 9 aa, synthetic construct
  source 1..9: note = Seed: LVVVGAVGV (KRAS G12V)
IVVAGTVGL

SEQ ID NO: 55348 - protein, 9 aa, synthetic construct
  source 1..9: note = Seed: LVVVGAVGV (KRAS G12V)
IVVAGTVGM

SEQ ID NO: 55349 - protein, 9 aa, synthetic construct
  source 1..9: note = Seed: LVVVGAVGV (KRAS G12V)
IVVAGTVGN

SEQ ID NO: 55350 - protein, 9 aa, synthetic construct
  source 1..9: note = Seed: LVVVGAVGV (KRAS G12V)
IVVAGTVGQ

SEQ ID NO: 55351 - protein, 9 aa, synthetic construct
  source 1..9: note = Seed: LVVVGAVGV (KRAS G12V)
IVVAGTVGR

SEQ ID NO: 55352 - protein, 9 aa, synthetic construct
  source 1..9: note = Seed: LVVVGAVGV (KRAS G12V)
IVVAGTVGS

SEQ ID NO: 55353 - protein, 9 aa, synthetic construct
  source 1..9: note = Seed: LVVVGAVGV (KRAS G12V)
IVVAGTVGT

SEQ ID NO: 55354 - protein, 9 aa, synthetic construct
  source 1..9: note = Seed: LVVVGAVGV (KRAS G12V)
IVVAGTVGV

SEQ ID NO: 55355 - protein, 9 aa, synthetic construct
  source 1..9: note = Seed: LVVVGAVGV (KRAS G12V)
IVVAGTVGY

SEQ ID NO: 55356 - protein, 9 aa, synthetic construct
  source 1..9: note = Seed: LVVVGAVGV (KRAS G12V)
IVVAGVVGA

SEQ ID NO: 55357 - protein, 9 aa, synthetic construct
  source 1..9: note = Seed: LVVVGAVGV (KRAS G12V)
IVVAGVVGC

SEQ ID NO: 55358 - protein, 9 aa, synthetic construct
  source 1..9: note = Seed: LVVVGAVGV (KRAS G12V)
IVVAGVVGE

SEQ ID NO: 55359 - protein, 9 aa, synthetic construct
  source 1..9: note = Seed: LVVVGAVGV (KRAS G12V)
IVVAGVVGG

SEQ ID NO: 55360 - protein, 9 aa, synthetic construct
  source 1..9: note = Seed: LVVVGAVGV (KRAS G12V)
IVVAGVVGH

SEQ ID NO: 55361 - protein, 9 aa, synthetic construct
  source 1..9: note = Seed: LVVVGAVGV (KRAS G12V)
IVVAGVVGI

SEQ ID NO: 55362 - protein, 9 aa, synthetic construct
  source 1..9: note = Seed: LVVVGAVGV (KRAS G12V)
IVVAGVVGL

SEQ ID NO: 55363 - protein, 9 aa, synthetic construct
  source 1..9: note = Seed: LVVVGAVGV (KRAS G12V)
IVVAGVVGM

SEQ ID NO: 55364 - protein, 9 aa, synthetic construct
  source 1..9: note = Seed: LVVVGAVGV (KRAS G12V)
IVVAGVVGN

SEQ ID NO: 55365 - protein, 9 aa, synthetic construct
  source 1..9: note = Seed: LVVVGAVGV (KRAS G12V)
IVVAGVVGQ

SEQ ID NO: 55366 - protein, 9 aa, synthetic construct
  source 1..9: note = Seed: LVVVGAVGV (KRAS G12V)
IVVAGVVGR

SEQ ID NO: 55367 - protein, 9 aa, synthetic construct
  source 1..9: note = Seed: LVVVGAVGV (KRAS G12V)
IVVAGVVGS

SEQ ID NO: 55368 - protein, 9 aa, synthetic construct
  source 1..9: note = Seed: LVVVGAVGV (KRAS G12V)
IVVAGVVGT

SEQ ID NO: 55369 - protein, 9 aa, synthetic construct
  source 1..9: note = Seed: LVVVGAVGV (KRAS G12V)
IVVAGVVGV

SEQ ID NO: 55370 - protein, 9 aa, synthetic construct
  source 1..9: note = Seed: LVVVGAVGV (KRAS G12V)
IVVCGAVGA

SEQ ID NO: 55371 - protein, 9 aa, synthetic construct
  source 1..9: note = Seed: LVVVGAVGV (KRAS G12V)
IVVCGAVGI

SEQ ID NO: 55372 - protein, 9 aa, synthetic construct
  source 1..9: note = Seed: LVVVGAVGV (KRAS G12V)
IVVCGAVGL

SEQ ID NO: 55373 - protein, 9 aa, synthetic construct
  source 1..9: note = Seed: LVVVGAVGV (KRAS G12V)
IVVCGAVGM

SEQ ID NO: 55374 - protein, 9 aa, synthetic construct
  source 1..9: note = Seed: LVVVGAVGV (KRAS G12V)
IVVCGAVGS

SEQ ID NO: 55375 - protein, 9 aa, synthetic construct
  source 1..9: note = Seed: LVVVGAVGV (KRAS G12V)
IVVCGAVGT

SEQ ID NO: 55376 - protein, 9 aa, synthetic construct
  source 1..9: note = Seed: LVVVGAVGV (KRAS G12V)
IVVCGAVGV

SEQ ID NO: 55377 - protein, 9 aa, synthetic construct
  source 1..9: note = Seed: LVVVGAVGV (KRAS G12V)
IVVCGGVGA

SEQ ID NO: 55378 - protein, 9 aa, synthetic construct
  source 1..9: note = Seed: LVVVGAVGV (KRAS G12V)
IVVCGGVGI

SEQ ID NO: 55379 - protein, 9 aa, synthetic construct
  source 1..9: note = Seed: LVVVGAVGV (KRAS G12V)
IVVCGGVGL

SEQ ID NO: 55380 - protein, 9 aa, synthetic construct
  source 1..9: note = Seed: LVVVGAVGV (KRAS G12V)
IVVCGGVGM

SEQ ID NO: 55381 - protein, 9 aa, synthetic construct
  source 1..9: note = Seed: LVVVGAVGV (KRAS G12V)
IVVCGGVGV

SEQ ID NO: 55382 - protein, 9 aa, synthetic construct
  source 1..9: note = Seed: LVVVGAVGV (KRAS G12V)
IVVCGKVGA

SEQ ID NO: 55383 - protein, 9 aa, synthetic construct
  source 1..9: note = Seed: LVVVGAVGV (KRAS G12V)
IVVCGKVGH

SEQ ID NO: 55384 - protein, 9 aa, synthetic construct
  source 1..9: note = Seed: LVVVGAVGV (KRAS G12V)
IVVCGKVGQ

SEQ ID NO: 55385 - protein, 9 aa, synthetic construct
  source 1..9: note = Seed: LVVVGAVGV (KRAS G12V)
IVVCGKVGS

SEQ ID NO: 55386 - protein, 9 aa, synthetic construct
  source 1..9: note = Seed: LVVVGAVGV (KRAS G12V)
IVVCGNVGA

SEQ ID NO: 55387 - protein, 9 aa, synthetic construct
  source 1..9: note = Seed: LVVVGAVGV (KRAS G12V)
IVVCGNVGI

SEQ ID NO: 55388 - protein, 9 aa, synthetic construct
  source 1..9: note = Seed: LVVVGAVGV (KRAS G12V)
IVVCGNVGL

SEQ ID NO: 55389 - protein, 9 aa, synthetic construct
  source 1..9: note = Seed: LVVVGAVGV (KRAS G12V)
IVVCGNVGS

SEQ ID NO: 55390 - protein, 9 aa, synthetic construct
  source 1..9: note = Seed: LVVVGAVGV (KRAS G12V)
IVVCGNVGV

SEQ ID NO: 55391 - protein, 9 aa, synthetic construct
  source 1..9: note = Seed: LVVVGAVGV (KRAS G12V)
IVVCGPVGA

SEQ ID NO: 55392 - protein, 9 aa, synthetic construct
  source 1..9: note = Seed: LVVVGAVGV (KRAS G12V)
IVVCGPVGI

SEQ ID NO: 55393 - protein, 9 aa, synthetic construct
  source 1..9: note = Seed: LVVVGAVGV (KRAS G12V)
IVVCGPVGL

SEQ ID NO: 55394 - protein, 9 aa, synthetic construct
  source 1..9: note = Seed: LVVVGAVGV (KRAS G12V)
IVVCGPVGM

SEQ ID NO: 55395 - protein, 9 aa, synthetic construct
  source 1..9: note = Seed: LVVVGAVGV (KRAS G12V)
IVVCGPVGV

SEQ ID NO: 55396 - protein, 9 aa, synthetic construct
  source 1..9: note = Seed: LVVVGAVGV (KRAS G12V)
IVVCGRVGA

SEQ ID NO: 55397 - protein, 9 aa, synthetic construct
  source 1..9: note = Seed: LVVVGAVGV (KRAS G12V)
IVVCGRVGH

SEQ ID NO: 55398 - protein, 9 aa, synthetic construct
  source 1..9: note = Seed: LVVVGAVGV (KRAS G12V)
IVVCGRVGK

SEQ ID NO: 55399 - protein, 9 aa, synthetic construct
  source 1..9: note = Seed: LVVVGAVGV (KRAS G12V)
IVVCGRVGQ

SEQ ID NO: 55400 - protein, 9 aa, synthetic construct
  source 1..9: note = Seed: LVVVGAVGV (KRAS G12V)
IVVCGRVGR

SEQ ID NO: 55401 - protein, 9 aa, synthetic construct
  source 1..9: note = Seed: LVVVGAVGV (KRAS G12V)
IVVCGRVGS

SEQ ID NO: 55402 - protein, 9 aa, synthetic construct
  source 1..9: note = Seed: LVVVGAVGV (KRAS G12V)
IVVCGSVGA

SEQ ID NO: 55403 - protein, 9 aa, synthetic construct
  source 1..9: note = Seed: LVVVGAVGV (KRAS G12V)
IVVCGSVGI

SEQ ID NO: 55404 - protein, 9 aa, synthetic construct
  source 1..9: note = Seed: LVVVGAVGV (KRAS G12V)
IVVCGSVGL

SEQ ID NO: 55405 - protein, 9 aa, synthetic construct
  source 1..9: note = Seed: LVVVGAVGV (KRAS G12V)
IVVCGSVGM

SEQ ID NO: 55406 - protein, 9 aa, synthetic construct
  source 1..9: note = Seed: LVVVGAVGV (KRAS G12V)
IVVCGSVGV

SEQ ID NO: 55407 - protein, 9 aa, synthetic construct
  source 1..9: note = Seed: LVVVGAVGV (KRAS G12V)
IVVCGTVGL

SEQ ID NO: 55408 - protein, 9 aa, synthetic construct
  source 1..9: note = Seed: LVVVGAVGV (KRAS G12V)
IVVDGAVGA

SEQ ID NO: 55409 - protein, 9 aa, synthetic construct
  source 1..9: note = Seed: LVVVGAVGV (KRAS G12V)
IVVDGAVGF

SEQ ID NO: 55410 - protein, 9 aa, synthetic construct
  source 1..9: note = Seed: LVVVGAVGV (KRAS G12V)
IVVDGAVGI

SEQ ID NO: 55411 - protein, 9 aa, synthetic construct
  source 1..9: note = Seed: LVVVGAVGV (KRAS G12V)
IVVDGAVGL

SEQ ID NO: 55412 - protein, 9 aa, synthetic construct
  source 1..9: note = Seed: LVVVGAVGV (KRAS G12V)
IVVDGAVGM

SEQ ID NO: 55413 - protein, 9 aa, synthetic construct
  source 1..9: note = Seed: LVVVGAVGV (KRAS G12V)
IVVDGAVGN

SEQ ID NO: 55414 - protein, 9 aa, synthetic construct
  source 1..9: note = Seed: LVVVGAVGV (KRAS G12V)
IVVDGAVGS

SEQ ID NO: 55415 - protein, 9 aa, synthetic construct
  source 1..9: note = Seed: LVVVGAVGV (KRAS G12V)
IVVDGAVGT

SEQ ID NO: 55416 - protein, 9 aa, synthetic construct
  source 1..9: note = Seed: LVVVGAVGV (KRAS G12V)
IVVDGAVGV

SEQ ID NO: 55417 - protein, 9 aa, synthetic construct
  source 1..9: note = Seed: LVVVGAVGV (KRAS G12V)
IVVDGAVGY

SEQ ID NO: 55418 - protein, 9 aa, synthetic construct
  source 1..9: note = Seed: LVVVGAVGV (KRAS G12V)
IVVDGDVGA

SEQ ID NO: 55419 - protein, 9 aa, synthetic construct
  source 1..9: note = Seed: LVVVGAVGV (KRAS G12V)
IVVDGDVGS

SEQ ID NO: 55420 - protein, 9 aa, synthetic construct
  source 1..9: note = Seed: LVVVGAVGV (KRAS G12V)
IVVDGGVGA

SEQ ID NO: 55421 - protein, 9 aa, synthetic construct
  source 1..9: note = Seed: LVVVGAVGV (KRAS G12V)
IVVDGGVGF

SEQ ID NO: 55422 - protein, 9 aa, synthetic construct
  source 1..9: note = Seed: LVVVGAVGV (KRAS G12V)
IVVDGGVGI

SEQ ID NO: 55423 - protein, 9 aa, synthetic construct
  source 1..9: note = Seed: LVVVGAVGV (KRAS G12V)
IVVDGGVGL

SEQ ID NO: 55424 - protein, 9 aa, synthetic construct
  source 1..9: note = Seed: LVVVGAVGV (KRAS G12V)
IVVDGGVGM

SEQ ID NO: 55425 - protein, 9 aa, synthetic construct
  source 1..9: note = Seed: LVVVGAVGV (KRAS G12V)
IVVDGGVGV

SEQ ID NO: 55426 - protein, 9 aa, synthetic construct
  source 1..9: note = Seed: LVVVGAVGV (KRAS G12V)
IVVDGGVGY

SEQ ID NO: 55427 - protein, 9 aa, synthetic construct
  source 1..9: note = Seed: LVVVGAVGV (KRAS G12V)
IVVDGHVGI

SEQ ID NO: 55428 - protein, 9 aa, synthetic construct
  source 1..9: note = Seed: LVVVGAVGV (KRAS G12V)
IVVDGIVGA

SEQ ID NO: 55429 - protein, 9 aa, synthetic construct
  source 1..9: note = Seed: LVVVGAVGV (KRAS G12V)
IVVDGIVGI

SEQ ID NO: 55430 - protein, 9 aa, synthetic construct
  source 1..9: note = Seed: LVVVGAVGV (KRAS G12V)
IVVDGIVGL

SEQ ID NO: 55431 - protein, 9 aa, synthetic construct
  source 1..9: note = Seed: LVVVGAVGV (KRAS G12V)
IVVDGIVGM

SEQ ID NO: 55432 - protein, 9 aa, synthetic construct
  source 1..9: note = Seed: LVVVGAVGV (KRAS G12V)
IVVDGIVGV

SEQ ID NO: 55433 - protein, 9 aa, synthetic construct
  source 1..9: note = Seed: LVVVGAVGV (KRAS G12V)
IVVDGIVGY

SEQ ID NO: 55434 - protein, 9 aa, synthetic construct
  source 1..9: note = Seed: LVVVGAVGV (KRAS G12V)
IVVDGNVGA

SEQ ID NO: 55435 - protein, 9 aa, synthetic construct
  source 1..9: note = Seed: LVVVGAVGV (KRAS G12V)
IVVDGNVGF

SEQ ID NO: 55436 - protein, 9 aa, synthetic construct
  source 1..9: note = Seed: LVVVGAVGV (KRAS G12V)
IVVDGNVGG

SEQ ID NO: 55437 - protein, 9 aa, synthetic construct
  source 1..9: note = Seed: LVVVGAVGV (KRAS G12V)
IVVDGNVGI

SEQ ID NO: 55438 - protein, 9 aa, synthetic construct
  source 1..9: note = Seed: LVVVGAVGV (KRAS G12V)
IVVDGNVGL

SEQ ID NO: 55439 - protein, 9 aa, synthetic construct
  source 1..9: note = Seed: LVVVGAVGV (KRAS G12V)
IVVDGNVGM

SEQ ID NO: 55440 - protein, 9 aa, synthetic construct
  source 1..9: note = Seed: LVVVGAVGV (KRAS G12V)
IVVDGNVGN

SEQ ID NO: 55441 - protein, 9 aa, synthetic construct
  source 1..9: note = Seed: LVVVGAVGV (KRAS G12V)
IVVDGNVGQ

SEQ ID NO: 55442 - protein, 9 aa, synthetic construct
  source 1..9: note = Seed: LVVVGAVGV (KRAS G12V)
IVVDGNVGS

SEQ ID NO: 55443 - protein, 9 aa, synthetic construct
  source 1..9: note = Seed: LVVVGAVGV (KRAS G12V)
IVVDGNVGT

SEQ ID NO: 55444 - protein, 9 aa, synthetic construct
  source 1..9: note = Seed: LVVVGAVGV (KRAS G12V)
IVVDGNVGV

SEQ ID NO: 55445 - protein, 9 aa, synthetic construct
  source 1..9: note = Seed: LVVVGAVGV (KRAS G12V)
IVVDGNVGY

SEQ ID NO: 55446 - protein, 9 aa, synthetic construct
  source 1..9: note = Seed: LVVVGAVGV (KRAS G12V)
IVVDGPVGA

SEQ ID NO: 55447 - protein, 9 aa, synthetic construct
  source 1..9: note = Seed: LVVVGAVGV (KRAS G12V)
IVVDGPVGF

SEQ ID NO: 55448 - protein, 9 aa, synthetic construct
  source 1..9: note = Seed: LVVVGAVGV (KRAS G12V)
IVVDGPVGI

SEQ ID NO: 55449 - protein, 9 aa, synthetic construct
  source 1..9: note = Seed: LVVVGAVGV (KRAS G12V)
IVVDGPVGL

SEQ ID NO: 55450 - protein, 9 aa, synthetic construct
  source 1..9: note = Seed: LVVVGAVGV (KRAS G12V)
IVVDGPVGM

SEQ ID NO: 55451 - protein, 9 aa, synthetic construct
  source 1..9: note = Seed: LVVVGAVGV (KRAS G12V)
IVVDGPVGV

SEQ ID NO: 55452 - protein, 9 aa, synthetic construct
  source 1..9: note = Seed: LVVVGAVGV (KRAS G12V)
IVVDGPVGY

SEQ ID NO: 55453 - protein, 9 aa, synthetic construct
  source 1..9: note = Seed: LVVVGAVGV (KRAS G12V)
IVVDGSVGA

SEQ ID NO: 55454 - protein, 9 aa, synthetic construct
  source 1..9: note = Seed: LVVVGAVGV (KRAS G12V)
IVVDGSVGF

SEQ ID NO: 55455 - protein, 9 aa, synthetic construct
  source 1..9: note = Seed: LVVVGAVGV (KRAS G12V)
IVVDGSVGI

SEQ ID NO: 55456 - protein, 9 aa, synthetic construct
  source 1..9: note = Seed: LVVVGAVGV (KRAS G12V)
IVVDGSVGL

SEQ ID NO: 55457 - protein, 9 aa, synthetic construct
  source 1..9: note = Seed: LVVVGAVGV (KRAS G12V)
IVVDGSVGM

SEQ ID NO: 55458 - protein, 9 aa, synthetic construct
  source 1..9: note = Seed: LVVVGAVGV (KRAS G12V)
IVVDGSVGQ

SEQ ID NO: 55459 - protein, 9 aa, synthetic construct
  source 1..9: note = Seed: LVVVGAVGV (KRAS G12V)
IVVDGSVGS

SEQ ID NO: 55460 - protein, 9 aa, synthetic construct
  source 1..9: note = Seed: LVVVGAVGV (KRAS G12V)
IVVDGSVGT

SEQ ID NO: 55461 - protein, 9 aa, synthetic construct
  source 1..9: note = Seed: LVVVGAVGV (KRAS G12V)
IVVDGSVGV

SEQ ID NO: 55462 - protein, 9 aa, synthetic construct
  source 1..9: note = Seed: LVVVGAVGV (KRAS G12V)
IVVDGSVGY

SEQ ID NO: 55463 - protein, 9 aa, synthetic construct
  source 1..9: note = Seed: LVVVGAVGV (KRAS G12V)
IVVDGTVGA

SEQ ID NO: 55464 - protein, 9 aa, synthetic construct
  source 1..9: note = Seed: LVVVGAVGV (KRAS G12V)
IVVDGTVGF

SEQ ID NO: 55465 - protein, 9 aa, synthetic construct
  source 1..9: note = Seed: LVVVGAVGV (KRAS G12V)
IVVDGTVGI

SEQ ID NO: 55466 - protein, 9 aa, synthetic construct
  source 1..9: note = Seed: LVVVGAVGV (KRAS G12V)
IVVDGTVGL

SEQ ID NO: 55467 - protein, 9 aa, synthetic construct
  source 1..9: note = Seed: LVVVGAVGV (KRAS G12V)
IVVDGTVGM

SEQ ID NO: 55468 - protein, 9 aa, synthetic construct
  source 1..9: note = Seed: LVVVGAVGV (KRAS G12V)
IVVDGTVGQ

SEQ ID NO: 55469 - protein, 9 aa, synthetic construct
  source 1..9: note = Seed: LVVVGAVGV (KRAS G12V)
IVVDGTVGS

SEQ ID NO: 55470 - protein, 9 aa, synthetic construct
  source 1..9: note = Seed: LVVVGAVGV (KRAS G12V)
IVVDGTVGV

SEQ ID NO: 55471 - protein, 9 aa, synthetic construct
  source 1..9: note = Seed: LVVVGAVGV (KRAS G12V)
IVVDGTVGY

SEQ ID NO: 55472 - protein, 9 aa, synthetic construct
  source 1..9: note = Seed: LVVVGAVGV (KRAS G12V)
IVVDGVVGA

SEQ ID NO: 55473 - protein, 9 aa, synthetic construct
  source 1..9: note = Seed: LVVVGAVGV (KRAS G12V)
IVVDGVVGF

SEQ ID NO: 55474 - protein, 9 aa, synthetic construct
  source 1..9: note = Seed: LVVVGAVGV (KRAS G12V)
IVVDGVVGI

SEQ ID NO: 55475 - protein, 9 aa, synthetic construct
  source 1..9: note = Seed: LVVVGAVGV (KRAS G12V)
IVVDGVVGL

SEQ ID NO: 55476 - protein, 9 aa, synthetic construct
  source 1..9: note = Seed: LVVVGAVGV (KRAS G12V)
IVVDGVVGM

SEQ ID NO: 55477 - protein, 9 aa, synthetic construct
  source 1..9: note = Seed: LVVVGAVGV (KRAS G12V)
IVVDGVVGS

SEQ ID NO: 55478 - protein, 9 aa, synthetic construct
  source 1..9: note = Seed: LVVVGAVGV (KRAS G12V)
IVVDGVVGV

SEQ ID NO: 55479 - protein, 9 aa, synthetic construct
  source 1..9: note = Seed: LVVVGAVGV (KRAS G12V)
IVVDGVVGY

SEQ ID NO: 55480 - protein, 9 aa, synthetic construct
  source 1..9: note = Seed: LVVVGAVGV (KRAS G12V)
IVVEGAVGA

SEQ ID NO: 55481 - protein, 9 aa, synthetic construct
  source 1..9: note = Seed: LVVVGAVGV (KRAS G12V)
IVVEGAVGF

SEQ ID NO: 55482 - protein, 9 aa, synthetic construct
  source 1..9: note = Seed: LVVVGAVGV (KRAS G12V)
IVVEGAVGG

SEQ ID NO: 55483 - protein, 9 aa, synthetic construct
  source 1..9: note = Seed: LVVVGAVGV (KRAS G12V)
IVVEGAVGH

SEQ ID NO: 55484 - protein, 9 aa, synthetic construct
  source 1..9: note = Seed: LVVVGAVGV (KRAS G12V)
IVVEGAVGI

SEQ ID NO: 55485 - protein, 9 aa, synthetic construct
  source 1..9: note = Seed: LVVVGAVGV (KRAS G12V)
IVVEGAVGL

SEQ ID NO: 55486 - protein, 9 aa, synthetic construct
  source 1..9: note = Seed: LVVVGAVGV (KRAS G12V)
IVVEGAVGM

SEQ ID NO: 55487 - protein, 9 aa, synthetic construct
  source 1..9: note = Seed: LVVVGAVGV (KRAS G12V)
IVVEGAVGN

SEQ ID NO: 55488 - protein, 9 aa, synthetic construct
  source 1..9: note = Seed: LVVVGAVGV (KRAS G12V)
IVVEGAVGS

SEQ ID NO: 55489 - protein, 9 aa, synthetic construct
  source 1..9: note = Seed: LVVVGAVGV (KRAS G12V)
IVVEGAVGT

SEQ ID NO: 55490 - protein, 9 aa, synthetic construct
  source 1..9: note = Seed: LVVVGAVGV (KRAS G12V)
IVVEGAVGV

SEQ ID NO: 55491 - protein, 9 aa, synthetic construct
  source 1..9: note = Seed: LVVVGAVGV (KRAS G12V)
IVVEGAVGY

SEQ ID NO: 55492 - protein, 9 aa, synthetic construct
  source 1..9: note = Seed: LVVVGAVGV (KRAS G12V)
IVVEGFVGL

SEQ ID NO: 55493 - protein, 9 aa, synthetic construct
  source 1..9: note = Seed: LVVVGAVGV (KRAS G12V)
IVVEGFVGV

SEQ ID NO: 55494 - protein, 9 aa, synthetic construct
  source 1..9: note = Seed: LVVVGAVGV (KRAS G12V)
IVVEGGVGA

SEQ ID NO: 55495 - protein, 9 aa, synthetic construct
  source 1..9: note = Seed: LVVVGAVGV (KRAS G12V)
IVVEGGVGG

SEQ ID NO: 55496 - protein, 9 aa, synthetic construct
  source 1..9: note = Seed: LVVVGAVGV (KRAS G12V)
IVVEGGVGI

SEQ ID NO: 55497 - protein, 9 aa, synthetic construct
  source 1..9: note = Seed: LVVVGAVGV (KRAS G12V)
IVVEGGVGL

SEQ ID NO: 55498 - protein, 9 aa, synthetic construct
  source 1..9: note = Seed: LVVVGAVGV (KRAS G12V)
IVVEGGVGM

SEQ ID NO: 55499 - protein, 9 aa, synthetic construct
  source 1..9: note = Seed: LVVVGAVGV (KRAS G12V)
IVVEGGVGS

SEQ ID NO: 55500 - protein, 9 aa, synthetic construct
  source 1..9: note = Seed: LVVVGAVGV (KRAS G12V)
IVVEGGVGT

SEQ ID NO: 55501 - protein, 9 aa, synthetic construct
  source 1..9: note = Seed: LVVVGAVGV (KRAS G12V)
IVVEGGVGV

SEQ ID NO: 55502 - protein, 9 aa, synthetic construct
  source 1..9: note = Seed: LVVVGAVGV (KRAS G12V)
IVVEGNVGA

SEQ ID NO: 55503 - protein, 9 aa, synthetic construct
  source 1..9: note = Seed: LVVVGAVGV (KRAS G12V)
IVVEGNVGF

SEQ ID NO: 55504 - protein, 9 aa, synthetic construct
  source 1..9: note = Seed: LVVVGAVGV (KRAS G12V)
IVVEGNVGI

SEQ ID NO: 55505 - protein, 9 aa, synthetic construct
  source 1..9: note = Seed: LVVVGAVGV (KRAS G12V)
IVVEGNVGL

SEQ ID NO: 55506 - protein, 9 aa, synthetic construct
  source 1..9: note = Seed: LVVVGAVGV (KRAS G12V)
IVVEGNVGM

SEQ ID NO: 55507 - protein, 9 aa, synthetic construct
  source 1..9: note = Seed: LVVVGAVGV (KRAS G12V)
IVVEGNVGS

SEQ ID NO: 55508 - protein, 9 aa, synthetic construct
  source 1..9: note = Seed: LVVVGAVGV (KRAS G12V)
IVVEGNVGT

SEQ ID NO: 55509 - protein, 9 aa, synthetic construct
  source 1..9: note = Seed: LVVVGAVGV (KRAS G12V)
IVVEGNVGV

SEQ ID NO: 55510 - protein, 9 aa, synthetic construct
  source 1..9: note = Seed: LVVVGAVGV (KRAS G12V)
IVVEGNVGY

SEQ ID NO: 55511 - protein, 9 aa, synthetic construct
  source 1..9: note = Seed: LVVVGAVGV (KRAS G12V)
IVVEGPVGA

SEQ ID NO: 55512 - protein, 9 aa, synthetic construct
  source 1..9: note = Seed: LVVVGAVGV (KRAS G12V)
IVVEGPVGI

SEQ ID NO: 55513 - protein, 9 aa, synthetic construct
  source 1..9: note = Seed: LVVVGAVGV (KRAS G12V)
IVVEGPVGL

SEQ ID NO: 55514 - protein, 9 aa, synthetic construct
  source 1..9: note = Seed: LVVVGAVGV (KRAS G12V)
IVVEGPVGM

SEQ ID NO: 55515 - protein, 9 aa, synthetic construct
  source 1..9: note = Seed: LVVVGAVGV (KRAS G12V)
IVVEGPVGS

SEQ ID NO: 55516 - protein, 9 aa, synthetic construct
  source 1..9: note = Seed: LVVVGAVGV (KRAS G12V)
IVVEGPVGT

SEQ ID NO: 55517 - protein, 9 aa, synthetic construct
  source 1..9: note = Seed: LVVVGAVGV (KRAS G12V)
IVVEGPVGV

SEQ ID NO: 55518 - protein, 9 aa, synthetic construct
  source 1..9: note = Seed: LVVVGAVGV (KRAS G12V)
IVVEGSVGA

SEQ ID NO: 55519 - protein, 9 aa, synthetic construct
  source 1..9: note = Seed: LVVVGAVGV (KRAS G12V)
IVVEGSVGF

SEQ ID NO: 55520 - protein, 9 aa, synthetic construct
  source 1..9: note = Seed: LVVVGAVGV (KRAS G12V)
IVVEGSVGG

SEQ ID NO: 55521 - protein, 9 aa, synthetic construct
  source 1..9: note = Seed: LVVVGAVGV (KRAS G12V)
IVVEGSVGI

SEQ ID NO: 55522 - protein, 9 aa, synthetic construct
  source 1..9: note = Seed: LVVVGAVGV (KRAS G12V)
IVVEGSVGL

SEQ ID NO: 55523 - protein, 9 aa, synthetic construct
  source 1..9: note = Seed: LVVVGAVGV (KRAS G12V)
IVVEGSVGM

SEQ ID NO: 55524 - protein, 9 aa, synthetic construct
  source 1..9: note = Seed: LVVVGAVGV (KRAS G12V)
IVVEGSVGN

SEQ ID NO: 55525 - protein, 9 aa, synthetic construct
  source 1..9: note = Seed: LVVVGAVGV (KRAS G12V)
IVVEGSVGS

SEQ ID NO: 55526 - protein, 9 aa, synthetic construct
  source 1..9: note = Seed: LVVVGAVGV (KRAS G12V)
IVVEGSVGT

SEQ ID NO: 55527 - protein, 9 aa, synthetic construct
  source 1..9: note = Seed: LVVVGAVGV (KRAS G12V)
IVVEGSVGV

SEQ ID NO: 55528 - protein, 9 aa, synthetic construct
  source 1..9: note = Seed: LVVVGAVGV (KRAS G12V)
IVVEGTVGA

SEQ ID NO: 55529 - protein, 9 aa, synthetic construct
  source 1..9: note = Seed: LVVVGAVGV (KRAS G12V)
IVVEGTVGI

SEQ ID NO: 55530 - protein, 9 aa, synthetic construct
  source 1..9: note = Seed: LVVVGAVGV (KRAS G12V)
IVVEGTVGL

SEQ ID NO: 55531 - protein, 9 aa, synthetic construct
  source 1..9: note = Seed: LVVVGAVGV (KRAS G12V)
IVVEGTVGM

SEQ ID NO: 55532 - protein, 9 aa, synthetic construct
  source 1..9: note = Seed: LVVVGAVGV (KRAS G12V)
IVVEGTVGV

SEQ ID NO: 55533 - protein, 9 aa, synthetic construct
  source 1..9: note = Seed: LVVVGAVGV (KRAS G12V)
IVVEGVVGA

SEQ ID NO: 55534 - protein, 9 aa, synthetic construct
  source 1..9: note = Seed: LVVVGAVGV (KRAS G12V)
IVVEGVVGV

SEQ ID NO: 55535 - protein, 9 aa, synthetic construct
  source 1..9: note = Seed: LVVVGAVGV (KRAS G12V)
IVVFGAVGA

SEQ ID NO: 55536 - protein, 9 aa, synthetic construct
  source 1..9: note = Seed: LVVVGAVGV (KRAS G12V)
IVVFGAVGF

SEQ ID NO: 55537 - protein, 9 aa, synthetic construct
  source 1..9: note = Seed: LVVVGAVGV (KRAS G12V)
IVVFGAVGG

SEQ ID NO: 55538 - protein, 9 aa, synthetic construct
  source 1..9: note = Seed: LVVVGAVGV (KRAS G12V)
IVVFGAVGH

SEQ ID NO: 55539 - protein, 9 aa, synthetic construct
  source 1..9: note = Seed: LVVVGAVGV (KRAS G12V)
IVVFGAVGI

SEQ ID NO: 55540 - protein, 9 aa, synthetic construct
  source 1..9: note = Seed: LVVVGAVGV (KRAS G12V)
IVVFGAVGK

SEQ ID NO: 55541 - protein, 9 aa, synthetic construct
  source 1..9: note = Seed: LVVVGAVGV (KRAS G12V)
IVVFGAVGL

SEQ ID NO: 55542 - protein, 9 aa, synthetic construct
  source 1..9: note = Seed: LVVVGAVGV (KRAS G12V)
IVVFGAVGM

SEQ ID NO: 55543 - protein, 9 aa, synthetic construct
  source 1..9: note = Seed: LVVVGAVGV (KRAS G12V)
IVVFGAVGN

SEQ ID NO: 55544 - protein, 9 aa, synthetic construct
  source 1..9: note = Seed: LVVVGAVGV (KRAS G12V)
IVVFGAVGP

SEQ ID NO: 55545 - protein, 9 aa, synthetic construct
  source 1..9: note = Seed: LVVVGAVGV (KRAS G12V)
IVVFGAVGR

SEQ ID NO: 55546 - protein, 9 aa, synthetic construct
  source 1..9: note = Seed: LVVVGAVGV (KRAS G12V)
IVVFGAVGS

SEQ ID NO: 55547 - protein, 9 aa, synthetic construct
  source 1..9: note = Seed: LVVVGAVGV (KRAS G12V)
IVVFGAVGT

SEQ ID NO: 55548 - protein, 9 aa, synthetic construct
  source 1..9: note = Seed: LVVVGAVGV (KRAS G12V)
IVVFGAVGV

SEQ ID NO: 55549 - protein, 9 aa, synthetic construct
  source 1..9: note = Seed: LVVVGAVGV (KRAS G12V)
IVVFGAVGY

SEQ ID NO: 55550 - protein, 9 aa, synthetic construct
  source 1..9: note = Seed: LVVVGAVGV (KRAS G12V)
IVVFGDVGA

SEQ ID NO: 55551 - protein, 9 aa, synthetic construct
  source 1..9: note = Seed: LVVVGAVGV (KRAS G12V)
IVVFGDVGF

SEQ ID NO: 55552 - protein, 9 aa, synthetic construct
  source 1..9: note = Seed: LVVVGAVGV (KRAS G12V)
IVVFGDVGI

SEQ ID NO: 55553 - protein, 9 aa, synthetic construct
  source 1..9: note = Seed: LVVVGAVGV (KRAS G12V)
IVVFGDVGL

SEQ ID NO: 55554 - protein, 9 aa, synthetic construct
  source 1..9: note = Seed: LVVVGAVGV (KRAS G12V)
IVVFGDVGM

SEQ ID NO: 55555 - protein, 9 aa, synthetic construct
  source 1..9: note = Seed: LVVVGAVGV (KRAS G12V)
IVVFGDVGS

SEQ ID NO: 55556 - protein, 9 aa, synthetic construct
  source 1..9: note = Seed: LVVVGAVGV (KRAS G12V)
IVVFGDVGT

SEQ ID NO: 55557 - protein, 9 aa, synthetic construct
  source 1..9: note = Seed: LVVVGAVGV (KRAS G12V)
IVVFGDVGV

SEQ ID NO: 55558 - protein, 9 aa, synthetic construct
  source 1..9: note = Seed: LVVVGAVGV (KRAS G12V)
IVVFGDVGY

SEQ ID NO: 55559 - protein, 9 aa, synthetic construct
  source 1..9: note = Seed: LVVVGAVGV (KRAS G12V)
IVVFGGVGA

SEQ ID NO: 55560 - protein, 9 aa, synthetic construct
  source 1..9: note = Seed: LVVVGAVGV (KRAS G12V)
IVVFGGVGE

SEQ ID NO: 55561 - protein, 9 aa, synthetic construct
  source 1..9: note = Seed: LVVVGAVGV (KRAS G12V)
IVVFGGVGF

SEQ ID NO: 55562 - protein, 9 aa, synthetic construct
  source 1..9: note = Seed: LVVVGAVGV (KRAS G12V)
IVVFGGVGG

SEQ ID NO: 55563 - protein, 9 aa, synthetic construct
  source 1..9: note = Seed: LVVVGAVGV (KRAS G12V)
IVVFGGVGH

SEQ ID NO: 55564 - protein, 9 aa, synthetic construct
  source 1..9: note = Seed: LVVVGAVGV (KRAS G12V)
IVVFGGVGI

SEQ ID NO: 55565 - protein, 9 aa, synthetic construct
  source 1..9: note = Seed: LVVVGAVGV (KRAS G12V)
IVVFGGVGL

SEQ ID NO: 55566 - protein, 9 aa, synthetic construct
  source 1..9: note = Seed: LVVVGAVGV (KRAS G12V)
IVVFGGVGM

SEQ ID NO: 55567 - protein, 9 aa, synthetic construct
  source 1..9: note = Seed: LVVVGAVGV (KRAS G12V)
IVVFGGVGN

SEQ ID NO: 55568 - protein, 9 aa, synthetic construct
  source 1..9: note = Seed: LVVVGAVGV (KRAS G12V)
IVVFGGVGP

SEQ ID NO: 55569 - protein, 9 aa, synthetic construct
  source 1..9: note = Seed: LVVVGAVGV (KRAS G12V)
IVVFGGVGQ

SEQ ID NO: 55570 - protein, 9 aa, synthetic construct
  source 1..9: note = Seed: LVVVGAVGV (KRAS G12V)
IVVFGGVGR

SEQ ID NO: 55571 - protein, 9 aa, synthetic construct
  source 1..9: note = Seed: LVVVGAVGV (KRAS G12V)
IVVFGGVGS

SEQ ID NO: 55572 - protein, 9 aa, synthetic construct
  source 1..9: note = Seed: LVVVGAVGV (KRAS G12V)
IVVFGGVGT

SEQ ID NO: 55573 - protein, 9 aa, synthetic construct
  source 1..9: note = Seed: LVVVGAVGV (KRAS G12V)
IVVFGGVGV

SEQ ID NO: 55574 - protein, 9 aa, synthetic construct
  source 1..9: note = Seed: LVVVGAVGV (KRAS G12V)
IVVFGGVGY

SEQ ID NO: 55575 - protein, 9 aa, synthetic construct
  source 1..9: note = Seed: LVVVGAVGV (KRAS G12V)
IVVFGHVGA

SEQ ID NO: 55576 - protein, 9 aa, synthetic construct
  source 1..9: note = Seed: LVVVGAVGV (KRAS G12V)
IVVFGHVGH

SEQ ID NO: 55577 - protein, 9 aa, synthetic construct
  source 1..9: note = Seed: LVVVGAVGV (KRAS G12V)
IVVFGHVGK

SEQ ID NO: 55578 - protein, 9 aa, synthetic construct
  source 1..9: note = Seed: LVVVGAVGV (KRAS G12V)
IVVFGHVGR

SEQ ID NO: 55579 - protein, 9 aa, synthetic construct
  source 1..9: note = Seed: LVVVGAVGV (KRAS G12V)
IVVFGHVGY

SEQ ID NO: 55580 - protein, 9 aa, synthetic construct
  source 1..9: note = Seed: LVVVGAVGV (KRAS G12V)
IVVFGIVGK

SEQ ID NO: 55581 - protein, 9 aa, synthetic construct
  source 1..9: note = Seed: LVVVGAVGV (KRAS G12V)
IVVFGIVGR

SEQ ID NO: 55582 - protein, 9 aa, synthetic construct
  source 1..9: note = Seed: LVVVGAVGV (KRAS G12V)
IVVFGKVGA

SEQ ID NO: 55583 - protein, 9 aa, synthetic construct
  source 1..9: note = Seed: LVVVGAVGV (KRAS G12V)
IVVFGKVGG

SEQ ID NO: 55584 - protein, 9 aa, synthetic construct
  source 1..9: note = Seed: LVVVGAVGV (KRAS G12V)
IVVFGKVGH

SEQ ID NO: 55585 - protein, 9 aa, synthetic construct
  source 1..9: note = Seed: LVVVGAVGV (KRAS G12V)
IVVFGKVGK

SEQ ID NO: 55586 - protein, 9 aa, synthetic construct
  source 1..9: note = Seed: LVVVGAVGV (KRAS G12V)
IVVFGKVGL

SEQ ID NO: 55587 - protein, 9 aa, synthetic construct
  source 1..9: note = Seed: LVVVGAVGV (KRAS G12V)
IVVFGKVGM

SEQ ID NO: 55588 - protein, 9 aa, synthetic construct
  source 1..9: note = Seed: LVVVGAVGV (KRAS G12V)
IVVFGKVGN

SEQ ID NO: 55589 - protein, 9 aa, synthetic construct
  source 1..9: note = Seed: LVVVGAVGV (KRAS G12V)
IVVFGKVGQ

SEQ ID NO: 55590 - protein, 9 aa, synthetic construct
  source 1..9: note = Seed: LVVVGAVGV (KRAS G12V)
IVVFGKVGR

SEQ ID NO: 55591 - protein, 9 aa, synthetic construct
  source 1..9: note = Seed: LVVVGAVGV (KRAS G12V)
IVVFGKVGS

SEQ ID NO: 55592 - protein, 9 aa, synthetic construct
  source 1..9: note = Seed: LVVVGAVGV (KRAS G12V)
IVVFGKVGT

SEQ ID NO: 55593 - protein, 9 aa, synthetic construct
  source 1..9: note = Seed: LVVVGAVGV (KRAS G12V)
IVVFGKVGY

SEQ ID NO: 55594 - protein, 9 aa, synthetic construct
  source 1..9: note = Seed: LVVVGAVGV (KRAS G12V)
IVVFGLVGK

SEQ ID NO: 55595 - protein, 9 aa, synthetic construct
  source 1..9: note = Seed: LVVVGAVGV (KRAS G12V)
IVVFGLVGR

SEQ ID NO: 55596 - protein, 9 aa, synthetic construct
  source 1..9: note = Seed: LVVVGAVGV (KRAS G12V)
IVVFGMVGA

SEQ ID NO: 55597 - protein, 9 aa, synthetic construct
  source 1..9: note = Seed: LVVVGAVGV (KRAS G12V)
IVVFGMVGK

SEQ ID NO: 55598 - protein, 9 aa, synthetic construct
  source 1..9: note = Seed: LVVVGAVGV (KRAS G12V)
IVVFGMVGR

SEQ ID NO: 55599 - protein, 9 aa, synthetic construct
  source 1..9: note = Seed: LVVVGAVGV (KRAS G12V)
IVVFGNVGA

SEQ ID NO: 55600 - protein, 9 aa, synthetic construct
  source 1..9: note = Seed: LVVVGAVGV (KRAS G12V)
IVVFGNVGD

SEQ ID NO: 55601 - protein, 9 aa, synthetic construct
  source 1..9: note = Seed: LVVVGAVGV (KRAS G12V)
IVVFGNVGE

SEQ ID NO: 55602 - protein, 9 aa, synthetic construct
  source 1..9: note = Seed: LVVVGAVGV (KRAS G12V)
IVVFGNVGF

SEQ ID NO: 55603 - protein, 9 aa, synthetic construct
  source 1..9: note = Seed: LVVVGAVGV (KRAS G12V)
IVVFGNVGG

SEQ ID NO: 55604 - protein, 9 aa, synthetic construct
  source 1..9: note = Seed: LVVVGAVGV (KRAS G12V)
IVVFGNVGH

SEQ ID NO: 55605 - protein, 9 aa, synthetic construct
  source 1..9: note = Seed: LVVVGAVGV (KRAS G12V)
IVVFGNVGI

SEQ ID NO: 55606 - protein, 9 aa, synthetic construct
  source 1..9: note = Seed: LVVVGAVGV (KRAS G12V)
IVVFGNVGK

SEQ ID NO: 55607 - protein, 9 aa, synthetic construct
  source 1..9: note = Seed: LVVVGAVGV (KRAS G12V)
IVVFGNVGL

SEQ ID NO: 55608 - protein, 9 aa, synthetic construct
  source 1..9: note = Seed: LVVVGAVGV (KRAS G12V)
IVVFGNVGM

SEQ ID NO: 55609 - protein, 9 aa, synthetic construct
  source 1..9: note = Seed: LVVVGAVGV (KRAS G12V)
IVVFGNVGN

SEQ ID NO: 55610 - protein, 9 aa, synthetic construct
  source 1..9: note = Seed: LVVVGAVGV (KRAS G12V)
IVVFGNVGP

SEQ ID NO: 55611 - protein, 9 aa, synthetic construct
  source 1..9: note = Seed: LVVVGAVGV (KRAS G12V)
IVVFGNVGQ

SEQ ID NO: 55612 - protein, 9 aa, synthetic construct
  source 1..9: note = Seed: LVVVGAVGV (KRAS G12V)
IVVFGNVGR

SEQ ID NO: 55613 - protein, 9 aa, synthetic construct
  source 1..9: note = Seed: LVVVGAVGV (KRAS G12V)
IVVFGNVGS

SEQ ID NO: 55614 - protein, 9 aa, synthetic construct
  source 1..9: note = Seed: LVVVGAVGV (KRAS G12V)
IVVFGNVGT

SEQ ID NO: 55615 - protein, 9 aa, synthetic construct
  source 1..9: note = Seed: LVVVGAVGV (KRAS G12V)
IVVFGNVGV

SEQ ID NO: 55616 - protein, 9 aa, synthetic construct
  source 1..9: note = Seed: LVVVGAVGV (KRAS G12V)
IVVFGNVGY

SEQ ID NO: 55617 - protein, 9 aa, synthetic construct
  source 1..9: note = Seed: LVVVGAVGV (KRAS G12V)
IVVFGPVGA

SEQ ID NO: 55618 - protein, 9 aa, synthetic construct
  source 1..9: note = Seed: LVVVGAVGV (KRAS G12V)
IVVFGPVGF

SEQ ID NO: 55619 - protein, 9 aa, synthetic construct
  source 1..9: note = Seed: LVVVGAVGV (KRAS G12V)
IVVFGPVGI

SEQ ID NO: 55620 - protein, 9 aa, synthetic construct
  source 1..9: note = Seed: LVVVGAVGV (KRAS G12V)
IVVFGPVGL

SEQ ID NO: 55621 - protein, 9 aa, synthetic construct
  source 1..9: note = Seed: LVVVGAVGV (KRAS G12V)
IVVFGPVGM

SEQ ID NO: 55622 - protein, 9 aa, synthetic construct
  source 1..9: note = Seed: LVVVGAVGV (KRAS G12V)
IVVFGPVGR

SEQ ID NO: 55623 - protein, 9 aa, synthetic construct
  source 1..9: note = Seed: LVVVGAVGV (KRAS G12V)
IVVFGPVGS

SEQ ID NO: 55624 - protein, 9 aa, synthetic construct
  source 1..9: note = Seed: LVVVGAVGV (KRAS G12V)
IVVFGPVGT

SEQ ID NO: 55625 - protein, 9 aa, synthetic construct
  source 1..9: note = Seed: LVVVGAVGV (KRAS G12V)
IVVFGPVGV

SEQ ID NO: 55626 - protein, 9 aa, synthetic construct
  source 1..9: note = Seed: LVVVGAVGV (KRAS G12V)
IVVFGQVGR

SEQ ID NO: 55627 - protein, 9 aa, synthetic construct
  source 1..9: note = Seed: LVVVGAVGV (KRAS G12V)
IVVFGRVGA

SEQ ID NO: 55628 - protein, 9 aa, synthetic construct
  source 1..9: note = Seed: LVVVGAVGV (KRAS G12V)
IVVFGRVGG

SEQ ID NO: 55629 - protein, 9 aa, synthetic construct
  source 1..9: note = Seed: LVVVGAVGV (KRAS G12V)
IVVFGRVGH

SEQ ID NO: 55630 - protein, 9 aa, synthetic construct
  source 1..9: note = Seed: LVVVGAVGV (KRAS G12V)
IVVFGRVGK

SEQ ID NO: 55631 - protein, 9 aa, synthetic construct
  source 1..9: note = Seed: LVVVGAVGV (KRAS G12V)
IVVFGRVGM

SEQ ID NO: 55632 - protein, 9 aa, synthetic construct
  source 1..9: note = Seed: LVVVGAVGV (KRAS G12V)
IVVFGRVGN

SEQ ID NO: 55633 - protein, 9 aa, synthetic construct
  source 1..9: note = Seed: LVVVGAVGV (KRAS G12V)
IVVFGRVGP

SEQ ID NO: 55634 - protein, 9 aa, synthetic construct
  source 1..9: note = Seed: LVVVGAVGV (KRAS G12V)
IVVFGRVGQ

SEQ ID NO: 55635 - protein, 9 aa, synthetic construct
  source 1..9: note = Seed: LVVVGAVGV (KRAS G12V)
IVVFGRVGR

SEQ ID NO: 55636 - protein, 9 aa, synthetic construct
  source 1..9: note = Seed: LVVVGAVGV (KRAS G12V)
IVVFGRVGS

SEQ ID NO: 55637 - protein, 9 aa, synthetic construct
  source 1..9: note = Seed: LVVVGAVGV (KRAS G12V)
IVVFGRVGT

SEQ ID NO: 55638 - protein, 9 aa, synthetic construct
  source 1..9: note = Seed: LVVVGAVGV (KRAS G12V)
IVVFGRVGY

SEQ ID NO: 55639 - protein, 9 aa, synthetic construct
  source 1..9: note = Seed: LVVVGAVGV (KRAS G12V)
IVVFGSVGA

SEQ ID NO: 55640 - protein, 9 aa, synthetic construct
  source 1..9: note = Seed: LVVVGAVGV (KRAS G12V)
IVVFGSVGE

SEQ ID NO: 55641 - protein, 9 aa, synthetic construct
  source 1..9: note = Seed: LVVVGAVGV (KRAS G12V)
IVVFGSVGF

SEQ ID NO: 55642 - protein, 9 aa, synthetic construct
  source 1..9: note = Seed: LVVVGAVGV (KRAS G12V)
IVVFGSVGG

SEQ ID NO: 55643 - protein, 9 aa, synthetic construct
  source 1..9: note = Seed: LVVVGAVGV (KRAS G12V)
IVVFGSVGH

SEQ ID NO: 55644 - protein, 9 aa, synthetic construct
  source 1..9: note = Seed: LVVVGAVGV (KRAS G12V)
IVVFGSVGI

SEQ ID NO: 55645 - protein, 9 aa, synthetic construct
  source 1..9: note = Seed: LVVVGAVGV (KRAS G12V)
IVVFGSVGK

SEQ ID NO: 55646 - protein, 9 aa, synthetic construct
  source 1..9: note = Seed: LVVVGAVGV (KRAS G12V)
IVVFGSVGL

SEQ ID NO: 55647 - protein, 9 aa, synthetic construct
  source 1..9: note = Seed: LVVVGAVGV (KRAS G12V)
IVVFGSVGM

SEQ ID NO: 55648 - protein, 9 aa, synthetic construct
  source 1..9: note = Seed: LVVVGAVGV (KRAS G12V)
IVVFGSVGN

SEQ ID NO: 55649 - protein, 9 aa, synthetic construct
  source 1..9: note = Seed: LVVVGAVGV (KRAS G12V)
IVVFGSVGP

SEQ ID NO: 55650 - protein, 9 aa, synthetic construct
  source 1..9: note = Seed: LVVVGAVGV (KRAS G12V)
IVVFGSVGQ

SEQ ID NO: 55651 - protein, 9 aa, synthetic construct
  source 1..9: note = Seed: LVVVGAVGV (KRAS G12V)
IVVFGSVGR

SEQ ID NO: 55652 - protein, 9 aa, synthetic construct
  source 1..9: note = Seed: LVVVGAVGV (KRAS G12V)
IVVFGSVGS

SEQ ID NO: 55653 - protein, 9 aa, synthetic construct
  source 1..9: note = Seed: LVVVGAVGV (KRAS G12V)
IVVFGSVGT

SEQ ID NO: 55654 - protein, 9 aa, synthetic construct
  source 1..9: note = Seed: LVVVGAVGV (KRAS G12V)
IVVFGSVGV

SEQ ID NO: 55655 - protein, 9 aa, synthetic construct
  source 1..9: note = Seed: LVVVGAVGV (KRAS G12V)
IVVFGSVGY

SEQ ID NO: 55656 - protein, 9 aa, synthetic construct
  source 1..9: note = Seed: LVVVGAVGV (KRAS G12V)
IVVFGTVGA

SEQ ID NO: 55657 - protein, 9 aa, synthetic construct
  source 1..9: note = Seed: LVVVGAVGV (KRAS G12V)
IVVFGTVGF

SEQ ID NO: 55658 - protein, 9 aa, synthetic construct
  source 1..9: note = Seed: LVVVGAVGV (KRAS G12V)
IVVFGTVGG

SEQ ID NO: 55659 - protein, 9 aa, synthetic construct
  source 1..9: note = Seed: LVVVGAVGV (KRAS G12V)
IVVFGTVGH

SEQ ID NO: 55660 - protein, 9 aa, synthetic construct
  source 1..9: note = Seed: LVVVGAVGV (KRAS G12V)
IVVFGTVGI

SEQ ID NO: 55661 - protein, 9 aa, synthetic construct
  source 1..9: note = Seed: LVVVGAVGV (KRAS G12V)
IVVFGTVGK

SEQ ID NO: 55662 - protein, 9 aa, synthetic construct
  source 1..9: note = Seed: LVVVGAVGV (KRAS G12V)
IVVFGTVGL

SEQ ID NO: 55663 - protein, 9 aa, synthetic construct
  source 1..9: note = Seed: LVVVGAVGV (KRAS G12V)
IVVFGTVGM

SEQ ID NO: 55664 - protein, 9 aa, synthetic construct
  source 1..9: note = Seed: LVVVGAVGV (KRAS G12V)
IVVFGTVGN

SEQ ID NO: 55665 - protein, 9 aa, synthetic construct
  source 1..9: note = Seed: LVVVGAVGV (KRAS G12V)
IVVFGTVGQ

SEQ ID NO: 55666 - protein, 9 aa, synthetic construct
  source 1..9: note = Seed: LVVVGAVGV (KRAS G12V)
IVVFGTVGR

SEQ ID NO: 55667 - protein, 9 aa, synthetic construct
  source 1..9: note = Seed: LVVVGAVGV (KRAS G12V)
IVVFGTVGS

SEQ ID NO: 55668 - protein, 9 aa, synthetic construct
  source 1..9: note = Seed: LVVVGAVGV (KRAS G12V)
IVVFGTVGT

SEQ ID NO: 55669 - protein, 9 aa, synthetic construct
  source 1..9: note = Seed: LVVVGAVGV (KRAS G12V)
IVVFGTVGV

SEQ ID NO: 55670 - protein, 9 aa, synthetic construct
  source 1..9: note = Seed: LVVVGAVGV (KRAS G12V)
IVVFGTVGY

SEQ ID NO: 55671 - protein, 9 aa, synthetic construct
  source 1..9: note = Seed: LVVVGAVGV (KRAS G12V)
IVVFGVVGA

SEQ ID NO: 55672 - protein, 9 aa, synthetic construct
  source 1..9: note = Seed: LVVVGAVGV (KRAS G12V)
IVVFGVVGH

SEQ ID NO: 55673 - protein, 9 aa, synthetic construct
  source 1..9: note = Seed: LVVVGAVGV (KRAS G12V)
IVVFGVVGR

SEQ ID NO: 55674 - protein, 9 aa, synthetic construct
  source 1..9: note = Seed: LVVVGAVGV (KRAS G12V)
IVVGGAVGA

SEQ ID NO: 55675 - protein, 9 aa, synthetic construct
  source 1..9: note = Seed: LVVVGAVGV (KRAS G12V)
IVVGGAVGC

SEQ ID NO: 55676 - protein, 9 aa, synthetic construct
  source 1..9: note = Seed: LVVVGAVGV (KRAS G12V)
IVVGGAVGF

SEQ ID NO: 55677 - protein, 9 aa, synthetic construct
  source 1..9: note = Seed: LVVVGAVGV (KRAS G12V)
IVVGGAVGG

SEQ ID NO: 55678 - protein, 9 aa, synthetic construct
  source 1..9: note = Seed: LVVVGAVGV (KRAS G12V)
IVVGGAVGH

SEQ ID NO: 55679 - protein, 9 aa, synthetic construct
  source 1..9: note = Seed: LVVVGAVGV (KRAS G12V)
IVVGGAVGI

SEQ ID NO: 55680 - protein, 9 aa, synthetic construct
  source 1..9: note = Seed: LVVVGAVGV (KRAS G12V)
IVVGGAVGK

SEQ ID NO: 55681 - protein, 9 aa, synthetic construct
  source 1..9: note = Seed: LVVVGAVGV (KRAS G12V)
IVVGGAVGL

SEQ ID NO: 55682 - protein, 9 aa, synthetic construct
  source 1..9: note = Seed: LVVVGAVGV (KRAS G12V)
IVVGGAVGM

SEQ ID NO: 55683 - protein, 9 aa, synthetic construct
  source 1..9: note = Seed: LVVVGAVGV (KRAS G12V)
IVVGGAVGN

SEQ ID NO: 55684 - protein, 9 aa, synthetic construct
  source 1..9: note = Seed: LVVVGAVGV (KRAS G12V)
IVVGGAVGP

SEQ ID NO: 55685 - protein, 9 aa, synthetic construct
  source 1..9: note = Seed: LVVVGAVGV (KRAS G12V)
IVVGGAVGQ

SEQ ID NO: 55686 - protein, 9 aa, synthetic construct
  source 1..9: note = Seed: LVVVGAVGV (KRAS G12V)
IVVGGAVGR

SEQ ID NO: 55687 - protein, 9 aa, synthetic construct
  source 1..9: note = Seed: LVVVGAVGV (KRAS G12V)
IVVGGAVGS

SEQ ID NO: 55688 - protein, 9 aa, synthetic construct
  source 1..9: note = Seed: LVVVGAVGV (KRAS G12V)
IVVGGAVGT

SEQ ID NO: 55689 - protein, 9 aa, synthetic construct
  source 1..9: note = Seed: LVVVGAVGV (KRAS G12V)
IVVGGAVGV

SEQ ID NO: 55690 - protein, 9 aa, synthetic construct
  source 1..9: note = Seed: LVVVGAVGV (KRAS G12V)
IVVGGAVGW

SEQ ID NO: 55691 - protein, 9 aa, synthetic construct
  source 1..9: note = Seed: LVVVGAVGV (KRAS G12V)
IVVGGAVGY

SEQ ID NO: 55692 - protein, 9 aa, synthetic construct
  source 1..9: note = Seed: LVVVGAVGV (KRAS G12V)
IVVGGCVGA

SEQ ID NO: 55693 - protein, 9 aa, synthetic construct
  source 1..9: note = Seed: LVVVGAVGV (KRAS G12V)
IVVGGCVGC

SEQ ID NO: 55694 - protein, 9 aa, synthetic construct
  source 1..9: note = Seed: LVVVGAVGV (KRAS G12V)
IVVGGCVGI

SEQ ID NO: 55695 - protein, 9 aa, synthetic construct
  source 1..9: note = Seed: LVVVGAVGV (KRAS G12V)
IVVGGCVGL

SEQ ID NO: 55696 - protein, 9 aa, synthetic construct
  source 1..9: note = Seed: LVVVGAVGV (KRAS G12V)
IVVGGCVGV

SEQ ID NO: 55697 - protein, 9 aa, synthetic construct
  source 1..9: note = Seed: LVVVGAVGV (KRAS G12V)
IVVGGGVGA

SEQ ID NO: 55698 - protein, 9 aa, synthetic construct
  source 1..9: note = Seed: LVVVGAVGV (KRAS G12V)
IVVGGGVGC

SEQ ID NO: 55699 - protein, 9 aa, synthetic construct
  source 1..9: note = Seed: LVVVGAVGV (KRAS G12V)
IVVGGGVGI

SEQ ID NO: 55700 - protein, 9 aa, synthetic construct
  source 1..9: note = Seed: LVVVGAVGV (KRAS G12V)
IVVGGGVGL

SEQ ID NO: 55701 - protein, 9 aa, synthetic construct
  source 1..9: note = Seed: LVVVGAVGV (KRAS G12V)
IVVGGGVGM

SEQ ID NO: 55702 - protein, 9 aa, synthetic construct
  source 1..9: note = Seed: LVVVGAVGV (KRAS G12V)
IVVGGGVGS

SEQ ID NO: 55703 - protein, 9 aa, synthetic construct
  source 1..9: note = Seed: LVVVGAVGV (KRAS G12V)
IVVGGGVGT

SEQ ID NO: 55704 - protein, 9 aa, synthetic construct
  source 1..9: note = Seed: LVVVGAVGV (KRAS G12V)
IVVGGGVGV

SEQ ID NO: 55705 - protein, 9 aa, synthetic construct
  source 1..9: note = Seed: LVVVGAVGV (KRAS G12V)
IVVGGHVGA

SEQ ID NO: 55706 - protein, 9 aa, synthetic construct
  source 1..9: note = Seed: LVVVGAVGV (KRAS G12V)
IVVGGHVGV

SEQ ID NO: 55707 - protein, 9 aa, synthetic construct
  source 1..9: note = Seed: LVVVGAVGV (KRAS G12V)
IVVGGIVGA

SEQ ID NO: 55708 - protein, 9 aa, synthetic construct
  source 1..9: note = Seed: LVVVGAVGV (KRAS G12V)
IVVGGIVGI

SEQ ID NO: 55709 - protein, 9 aa, synthetic construct
  source 1..9: note = Seed: LVVVGAVGV (KRAS G12V)
IVVGGIVGS

SEQ ID NO: 55710 - protein, 9 aa, synthetic construct
  source 1..9: note = Seed: LVVVGAVGV (KRAS G12V)
IVVGGIVGV

SEQ ID NO: 55711 - protein, 9 aa, synthetic construct
  source 1..9: note = Seed: LVVVGAVGV (KRAS G12V)
IVVGGNVGA

SEQ ID NO: 55712 - protein, 9 aa, synthetic construct
  source 1..9: note = Seed: LVVVGAVGV (KRAS G12V)
IVVGGNVGC

SEQ ID NO: 55713 - protein, 9 aa, synthetic construct
  source 1..9: note = Seed: LVVVGAVGV (KRAS G12V)
IVVGGNVGF

SEQ ID NO: 55714 - protein, 9 aa, synthetic construct
  source 1..9: note = Seed: LVVVGAVGV (KRAS G12V)
IVVGGNVGI

SEQ ID NO: 55715 - protein, 9 aa, synthetic construct
  source 1..9: note = Seed: LVVVGAVGV (KRAS G12V)
IVVGGNVGL

SEQ ID NO: 55716 - protein, 9 aa, synthetic construct
  source 1..9: note = Seed: LVVVGAVGV (KRAS G12V)
IVVGGNVGM

SEQ ID NO: 55717 - protein, 9 aa, synthetic construct
  source 1..9: note = Seed: LVVVGAVGV (KRAS G12V)
IVVGGNVGS

SEQ ID NO: 55718 - protein, 9 aa, synthetic construct
  source 1..9: note = Seed: LVVVGAVGV (KRAS G12V)
IVVGGNVGT

SEQ ID NO: 55719 - protein, 9 aa, synthetic construct
  source 1..9: note = Seed: LVVVGAVGV (KRAS G12V)
IVVGGNVGV

SEQ ID NO: 55720 - protein, 9 aa, synthetic construct
  source 1..9: note = Seed: LVVVGAVGV (KRAS G12V)
IVVGGPVGA

SEQ ID NO: 55721 - protein, 9 aa, synthetic construct
  source 1..9: note = Seed: LVVVGAVGV (KRAS G12V)
IVVGGPVGC

SEQ ID NO: 55722 - protein, 9 aa, synthetic construct
  source 1..9: note = Seed: LVVVGAVGV (KRAS G12V)
IVVGGPVGF

SEQ ID NO: 55723 - protein, 9 aa, synthetic construct
  source 1..9: note = Seed: LVVVGAVGV (KRAS G12V)
IVVGGPVGG

SEQ ID NO: 55724 - protein, 9 aa, synthetic construct
  source 1..9: note = Seed: LVVVGAVGV (KRAS G12V)
IVVGGPVGH

SEQ ID NO: 55725 - protein, 9 aa, synthetic construct
  source 1..9: note = Seed: LVVVGAVGV (KRAS G12V)
IVVGGPVGI

SEQ ID NO: 55726 - protein, 9 aa, synthetic construct
  source 1..9: note = Seed: LVVVGAVGV (KRAS G12V)
IVVGGPVGL

SEQ ID NO: 55727 - protein, 9 aa, synthetic construct
  source 1..9: note = Seed: LVVVGAVGV (KRAS G12V)
IVVGGPVGM

SEQ ID NO: 55728 - protein, 9 aa, synthetic construct
  source 1..9: note = Seed: LVVVGAVGV (KRAS G12V)
IVVGGPVGN

SEQ ID NO: 55729 - protein, 9 aa, synthetic construct
  source 1..9: note = Seed: LVVVGAVGV (KRAS G12V)
IVVGGPVGQ

SEQ ID NO: 55730 - protein, 9 aa, synthetic construct
  source 1..9: note = Seed: LVVVGAVGV (KRAS G12V)
IVVGGPVGR

SEQ ID NO: 55731 - protein, 9 aa, synthetic construct
  source 1..9: note = Seed: LVVVGAVGV (KRAS G12V)
IVVGGPVGS

SEQ ID NO: 55732 - protein, 9 aa, synthetic construct
  source 1..9: note = Seed: LVVVGAVGV (KRAS G12V)
IVVGGPVGT

SEQ ID NO: 55733 - protein, 9 aa, synthetic construct
  source 1..9: note = Seed: LVVVGAVGV (KRAS G12V)
IVVGGPVGV

SEQ ID NO: 55734 - protein, 9 aa, synthetic construct
  source 1..9: note = Seed: LVVVGAVGV (KRAS G12V)
IVVGGPVGY

SEQ ID NO: 55735 - protein, 9 aa, synthetic construct
  source 1..9: note = Seed: LVVVGAVGV (KRAS G12V)
IVVGGQVGV

SEQ ID NO: 55736 - protein, 9 aa, synthetic construct
  source 1..9: note = Seed: LVVVGAVGV (KRAS G12V)
IVVGGSVGA

SEQ ID NO: 55737 - protein, 9 aa, synthetic construct
  source 1..9: note = Seed: LVVVGAVGV (KRAS G12V)
IVVGGSVGC

SEQ ID NO: 55738 - protein, 9 aa, synthetic construct
  source 1..9: note = Seed: LVVVGAVGV (KRAS G12V)
IVVGGSVGF

SEQ ID NO: 55739 - protein, 9 aa, synthetic construct
  source 1..9: note = Seed: LVVVGAVGV (KRAS G12V)
IVVGGSVGI

SEQ ID NO: 55740 - protein, 9 aa, synthetic construct
  source 1..9: note = Seed: LVVVGAVGV (KRAS G12V)
IVVGGSVGL

SEQ ID NO: 55741 - protein, 9 aa, synthetic construct
  source 1..9: note = Seed: LVVVGAVGV (KRAS G12V)
IVVGGSVGM

SEQ ID NO: 55742 - protein, 9 aa, synthetic construct
  source 1..9: note = Seed: LVVVGAVGV (KRAS G12V)
IVVGGSVGN

SEQ ID NO: 55743 - protein, 9 aa, synthetic construct
  source 1..9: note = Seed: LVVVGAVGV (KRAS G12V)
IVVGGSVGR

SEQ ID NO: 55744 - protein, 9 aa, synthetic construct
  source 1..9: note = Seed: LVVVGAVGV (KRAS G12V)
IVVGGSVGS

SEQ ID NO: 55745 - protein, 9 aa, synthetic construct
  source 1..9: note = Seed: LVVVGAVGV (KRAS G12V)
IVVGGSVGT

SEQ ID NO: 55746 - protein, 9 aa, synthetic construct
  source 1..9: note = Seed: LVVVGAVGV (KRAS G12V)
IVVGGSVGV

SEQ ID NO: 55747 - protein, 9 aa, synthetic construct
  source 1..9: note = Seed: LVVVGAVGV (KRAS G12V)
IVVGGSVGY

SEQ ID NO: 55748 - protein, 9 aa, synthetic construct
  source 1..9: note = Seed: LVVVGAVGV (KRAS G12V)
IVVGGTVGA

SEQ ID NO: 55749 - protein, 9 aa, synthetic construct
  source 1..9: note = Seed: LVVVGAVGV (KRAS G12V)
IVVGGTVGC

SEQ ID NO: 55750 - protein, 9 aa, synthetic construct
  source 1..9: note = Seed: LVVVGAVGV (KRAS G12V)
IVVGGTVGI

SEQ ID NO: 55751 - protein, 9 aa, synthetic construct
  source 1..9: note = Seed: LVVVGAVGV (KRAS G12V)
IVVGGTVGL

SEQ ID NO: 55752 - protein, 9 aa, synthetic construct
  source 1..9: note = Seed: LVVVGAVGV (KRAS G12V)
IVVGGTVGM

SEQ ID NO: 55753 - protein, 9 aa, synthetic construct
  source 1..9: note = Seed: LVVVGAVGV (KRAS G12V)
IVVGGTVGS

SEQ ID NO: 55754 - protein, 9 aa, synthetic construct
  source 1..9: note = Seed: LVVVGAVGV (KRAS G12V)
IVVGGTVGT

SEQ ID NO: 55755 - protein, 9 aa, synthetic construct
  source 1..9: note = Seed: LVVVGAVGV (KRAS G12V)
IVVGGTVGV

SEQ ID NO: 55756 - protein, 9 aa, synthetic construct
  source 1..9: note = Seed: LVVVGAVGV (KRAS G12V)
IVVGGVVGA

SEQ ID NO: 55757 - protein, 9 aa, synthetic construct
  source 1..9: note = Seed: LVVVGAVGV (KRAS G12V)
IVVGGVVGI

SEQ ID NO: 55758 - protein, 9 aa, synthetic construct
  source 1..9: note = Seed: LVVVGAVGV (KRAS G12V)
IVVGGVVGL

SEQ ID NO: 55759 - protein, 9 aa, synthetic construct
  source 1..9: note = Seed: LVVVGAVGV (KRAS G12V)
IVVGGVVGM

SEQ ID NO: 55760 - protein, 9 aa, synthetic construct
  source 1..9: note = Seed: LVVVGAVGV (KRAS G12V)
IVVGGVVGN

SEQ ID NO: 55761 - protein, 9 aa, synthetic construct
  source 1..9: note = Seed: LVVVGAVGV (KRAS G12V)
IVVGGVVGS

SEQ ID NO: 55762 - protein, 9 aa, synthetic construct
  source 1..9: note = Seed: LVVVGAVGV (KRAS G12V)
IVVGGVVGT

SEQ ID NO: 55763 - protein, 9 aa, synthetic construct
  source 1..9: note = Seed: LVVVGAVGV (KRAS G12V)
IVVGGVVGV

SEQ ID NO: 55764 - protein, 9 aa, synthetic construct
  source 1..9: note = Seed: LVVVGAVGV (KRAS G12V)
IVVHGAVGA

SEQ ID NO: 55765 - protein, 9 aa, synthetic construct
  source 1..9: note = Seed: LVVVGAVGV (KRAS G12V)
IVVHGAVGF

SEQ ID NO: 55766 - protein, 9 aa, synthetic construct
  source 1..9: note = Seed: LVVVGAVGV (KRAS G12V)
IVVHGAVGH

SEQ ID NO: 55767 - protein, 9 aa, synthetic construct
  source 1..9: note = Seed: LVVVGAVGV (KRAS G12V)
IVVHGAVGI

SEQ ID NO: 55768 - protein, 9 aa, synthetic construct
  source 1..9: note = Seed: LVVVGAVGV (KRAS G12V)
IVVHGAVGK

SEQ ID NO: 55769 - protein, 9 aa, synthetic construct
  source 1..9: note = Seed: LVVVGAVGV (KRAS G12V)
IVVHGAVGL

SEQ ID NO: 55770 - protein, 9 aa, synthetic construct
  source 1..9: note = Seed: LVVVGAVGV (KRAS G12V)
IVVHGAVGM

SEQ ID NO: 55771 - protein, 9 aa, synthetic construct
  source 1..9: note = Seed: LVVVGAVGV (KRAS G12V)
IVVHGAVGR

SEQ ID NO: 55772 - protein, 9 aa, synthetic construct
  source 1..9: note = Seed: LVVVGAVGV (KRAS G12V)
IVVHGAVGS

SEQ ID NO: 55773 - protein, 9 aa, synthetic construct
  source 1..9: note = Seed: LVVVGAVGV (KRAS G12V)
IVVHGAVGT

SEQ ID NO: 55774 - protein, 9 aa, synthetic construct
  source 1..9: note = Seed: LVVVGAVGV (KRAS G12V)
IVVHGAVGV

SEQ ID NO: 55775 - protein, 9 aa, synthetic construct
  source 1..9: note = Seed: LVVVGAVGV (KRAS G12V)
IVVHGAVGY

SEQ ID NO: 55776 - protein, 9 aa, synthetic construct
  source 1..9: note = Seed: LVVVGAVGV (KRAS G12V)
IVVHGFVGI

SEQ ID NO: 55777 - protein, 9 aa, synthetic construct
  source 1..9: note = Seed: LVVVGAVGV (KRAS G12V)
IVVHGFVGL

SEQ ID NO: 55778 - protein, 9 aa, synthetic construct
  source 1..9: note = Seed: LVVVGAVGV (KRAS G12V)
IVVHGFVGV

SEQ ID NO: 55779 - protein, 9 aa, synthetic construct
  source 1..9: note = Seed: LVVVGAVGV (KRAS G12V)
IVVHGGVGA

SEQ ID NO: 55780 - protein, 9 aa, synthetic construct
  source 1..9: note = Seed: LVVVGAVGV (KRAS G12V)
IVVHGGVGF

SEQ ID NO: 55781 - protein, 9 aa, synthetic construct
  source 1..9: note = Seed: LVVVGAVGV (KRAS G12V)
IVVHGGVGI

SEQ ID NO: 55782 - protein, 9 aa, synthetic construct
  source 1..9: note = Seed: LVVVGAVGV (KRAS G12V)
IVVHGGVGL

SEQ ID NO: 55783 - protein, 9 aa, synthetic construct
  source 1..9: note = Seed: LVVVGAVGV (KRAS G12V)
IVVHGGVGM

SEQ ID NO: 55784 - protein, 9 aa, synthetic construct
  source 1..9: note = Seed: LVVVGAVGV (KRAS G12V)
IVVHGGVGR

SEQ ID NO: 55785 - protein, 9 aa, synthetic construct
  source 1..9: note = Seed: LVVVGAVGV (KRAS G12V)
IVVHGGVGV

SEQ ID NO: 55786 - protein, 9 aa, synthetic construct
  source 1..9: note = Seed: LVVVGAVGV (KRAS G12V)
IVVHGGVGY

SEQ ID NO: 55787 - protein, 9 aa, synthetic construct
  source 1..9: note = Seed: LVVVGAVGV (KRAS G12V)
IVVHGHVGA

SEQ ID NO: 55788 - protein, 9 aa, synthetic construct
  source 1..9: note = Seed: LVVVGAVGV (KRAS G12V)
IVVHGHVGF

SEQ ID NO: 55789 - protein, 9 aa, synthetic construct
  source 1..9: note = Seed: LVVVGAVGV (KRAS G12V)
IVVHGHVGH

SEQ ID NO: 55790 - protein, 9 aa, synthetic construct
  source 1..9: note = Seed: LVVVGAVGV (KRAS G12V)
IVVHGHVGI

SEQ ID NO: 55791 - protein, 9 aa, synthetic construct
  source 1..9: note = Seed: LVVVGAVGV (KRAS G12V)
IVVHGHVGK

SEQ ID NO: 55792 - protein, 9 aa, synthetic construct
  source 1..9: note = Seed: LVVVGAVGV (KRAS G12V)
IVVHGHVGL

SEQ ID NO: 55793 - protein, 9 aa, synthetic construct
  source 1..9: note = Seed: LVVVGAVGV (KRAS G12V)
IVVHGHVGM

SEQ ID NO: 55794 - protein, 9 aa, synthetic construct
  source 1..9: note = Seed: LVVVGAVGV (KRAS G12V)
IVVHGHVGR

SEQ ID NO: 55795 - protein, 9 aa, synthetic construct
  source 1..9: note = Seed: LVVVGAVGV (KRAS G12V)
IVVHGHVGV

SEQ ID NO: 55796 - protein, 9 aa, synthetic construct
  source 1..9: note = Seed: LVVVGAVGV (KRAS G12V)
IVVHGHVGY

SEQ ID NO: 55797 - protein, 9 aa, synthetic construct
  source 1..9: note = Seed: LVVVGAVGV (KRAS G12V)
IVVHGIVGF

SEQ ID NO: 55798 - protein, 9 aa, synthetic construct
  source 1..9: note = Seed: LVVVGAVGV (KRAS G12V)
IVVHGIVGI

SEQ ID NO: 55799 - protein, 9 aa, synthetic construct
  source 1..9: note = Seed: LVVVGAVGV (KRAS G12V)
IVVHGIVGK

SEQ ID NO: 55800 - protein, 9 aa, synthetic construct
  source 1..9: note = Seed: LVVVGAVGV (KRAS G12V)
IVVHGIVGL

SEQ ID NO: 55801 - protein, 9 aa, synthetic construct
  source 1..9: note = Seed: LVVVGAVGV (KRAS G12V)
IVVHGIVGM

SEQ ID NO: 55802 - protein, 9 aa, synthetic construct
  source 1..9: note = Seed: LVVVGAVGV (KRAS G12V)
IVVHGIVGR

SEQ ID NO: 55803 - protein, 9 aa, synthetic construct
  source 1..9: note = Seed: LVVVGAVGV (KRAS G12V)
IVVHGIVGV

SEQ ID NO: 55804 - protein, 9 aa, synthetic construct
  source 1..9: note = Seed: LVVVGAVGV (KRAS G12V)
IVVHGIVGY

SEQ ID NO: 55805 - protein, 9 aa, synthetic construct
  source 1..9: note = Seed: LVVVGAVGV (KRAS G12V)
IVVHGKVGA

SEQ ID NO: 55806 - protein, 9 aa, synthetic construct
  source 1..9: note = Seed: LVVVGAVGV (KRAS G12V)
IVVHGKVGF

SEQ ID NO: 55807 - protein, 9 aa, synthetic construct
  source 1..9: note = Seed: LVVVGAVGV (KRAS G12V)
IVVHGKVGH

SEQ ID NO: 55808 - protein, 9 aa, synthetic construct
  source 1..9: note = Seed: LVVVGAVGV (KRAS G12V)
IVVHGKVGI

SEQ ID NO: 55809 - protein, 9 aa, synthetic construct
  source 1..9: note = Seed: LVVVGAVGV (KRAS G12V)
IVVHGKVGK

SEQ ID NO: 55810 - protein, 9 aa, synthetic construct
  source 1..9: note = Seed: LVVVGAVGV (KRAS G12V)
IVVHGKVGL

SEQ ID NO: 55811 - protein, 9 aa, synthetic construct
  source 1..9: note = Seed: LVVVGAVGV (KRAS G12V)
IVVHGKVGM

SEQ ID NO: 55812 - protein, 9 aa, synthetic construct
  source 1..9: note = Seed: LVVVGAVGV (KRAS G12V)
IVVHGKVGR

SEQ ID NO: 55813 - protein, 9 aa, synthetic construct
  source 1..9: note = Seed: LVVVGAVGV (KRAS G12V)
IVVHGKVGS

SEQ ID NO: 55814 - protein, 9 aa, synthetic construct
  source 1..9: note = Seed: LVVVGAVGV (KRAS G12V)
IVVHGKVGV

SEQ ID NO: 55815 - protein, 9 aa, synthetic construct
  source 1..9: note = Seed: LVVVGAVGV (KRAS G12V)
IVVHGKVGW

SEQ ID NO: 55816 - protein, 9 aa, synthetic construct
  source 1..9: note = Seed: LVVVGAVGV (KRAS G12V)
IVVHGKVGY

SEQ ID NO: 55817 - protein, 9 aa, synthetic construct
  source 1..9: note = Seed: LVVVGAVGV (KRAS G12V)
IVVHGLVGL

SEQ ID NO: 55818 - protein, 9 aa, synthetic construct
  source 1..9: note = Seed: LVVVGAVGV (KRAS G12V)
IVVHGLVGR

SEQ ID NO: 55819 - protein, 9 aa, synthetic construct
  source 1..9: note = Seed: LVVVGAVGV (KRAS G12V)
IVVHGLVGY

SEQ ID NO: 55820 - protein, 9 aa, synthetic construct
  source 1..9: note = Seed: LVVVGAVGV (KRAS G12V)
IVVHGMVGA

SEQ ID NO: 55821 - protein, 9 aa, synthetic construct
  source 1..9: note = Seed: LVVVGAVGV (KRAS G12V)
IVVHGMVGI

SEQ ID NO: 55822 - protein, 9 aa, synthetic construct
  source 1..9: note = Seed: LVVVGAVGV (KRAS G12V)
IVVHGMVGL

SEQ ID NO: 55823 - protein, 9 aa, synthetic construct
  source 1..9: note = Seed: LVVVGAVGV (KRAS G12V)
IVVHGMVGM

SEQ ID NO: 55824 - protein, 9 aa, synthetic construct
  source 1..9: note = Seed: LVVVGAVGV (KRAS G12V)
IVVHGMVGR

SEQ ID NO: 55825 - protein, 9 aa, synthetic construct
  source 1..9: note = Seed: LVVVGAVGV (KRAS G12V)
IVVHGMVGV

SEQ ID NO: 55826 - protein, 9 aa, synthetic construct
  source 1..9: note = Seed: LVVVGAVGV (KRAS G12V)
IVVHGNVGA

SEQ ID NO: 55827 - protein, 9 aa, synthetic construct
  source 1..9: note = Seed: LVVVGAVGV (KRAS G12V)
IVVHGNVGF

SEQ ID NO: 55828 - protein, 9 aa, synthetic construct
  source 1..9: note = Seed: LVVVGAVGV (KRAS G12V)
IVVHGNVGH

SEQ ID NO: 55829 - protein, 9 aa, synthetic construct
  source 1..9: note = Seed: LVVVGAVGV (KRAS G12V)
IVVHGNVGI

SEQ ID NO: 55830 - protein, 9 aa, synthetic construct
  source 1..9: note = Seed: LVVVGAVGV (KRAS G12V)
IVVHGNVGK

SEQ ID NO: 55831 - protein, 9 aa, synthetic construct
  source 1..9: note = Seed: LVVVGAVGV (KRAS G12V)
IVVHGNVGL

SEQ ID NO: 55832 - protein, 9 aa, synthetic construct
  source 1..9: note = Seed: LVVVGAVGV (KRAS G12V)
IVVHGNVGM

SEQ ID NO: 55833 - protein, 9 aa, synthetic construct
  source 1..9: note = Seed: LVVVGAVGV (KRAS G12V)
IVVHGNVGR

SEQ ID NO: 55834 - protein, 9 aa, synthetic construct
  source 1..9: note = Seed: LVVVGAVGV (KRAS G12V)
IVVHGNVGS

SEQ ID NO: 55835 - protein, 9 aa, synthetic construct
  source 1..9: note = Seed: LVVVGAVGV (KRAS G12V)
IVVHGNVGV

SEQ ID NO: 55836 - protein, 9 aa, synthetic construct
  source 1..9: note = Seed: LVVVGAVGV (KRAS G12V)
IVVHGNVGY

SEQ ID NO: 55837 - protein, 9 aa, synthetic construct
  source 1..9: note = Seed: LVVVGAVGV (KRAS G12V)
IVVHGPVGA

SEQ ID NO: 55838 - protein, 9 aa, synthetic construct
  source 1..9: note = Seed: LVVVGAVGV (KRAS G12V)
IVVHGPVGF

SEQ ID NO: 55839 - protein, 9 aa, synthetic construct
  source 1..9: note = Seed: LVVVGAVGV (KRAS G12V)
IVVHGPVGI

SEQ ID NO: 55840 - protein, 9 aa, synthetic construct
  source 1..9: note = Seed: LVVVGAVGV (KRAS G12V)
IVVHGPVGK

SEQ ID NO: 55841 - protein, 9 aa, synthetic construct
  source 1..9: note = Seed: LVVVGAVGV (KRAS G12V)
IVVHGPVGL

SEQ ID NO: 55842 - protein, 9 aa, synthetic construct
  source 1..9: note = Seed: LVVVGAVGV (KRAS G12V)
IVVHGPVGM

SEQ ID NO: 55843 - protein, 9 aa, synthetic construct
  source 1..9: note = Seed: LVVVGAVGV (KRAS G12V)
IVVHGPVGR

SEQ ID NO: 55844 - protein, 9 aa, synthetic construct
  source 1..9: note = Seed: LVVVGAVGV (KRAS G12V)
IVVHGPVGV

SEQ ID NO: 55845 - protein, 9 aa, synthetic construct
  source 1..9: note = Seed: LVVVGAVGV (KRAS G12V)
IVVHGPVGY

SEQ ID NO: 55846 - protein, 9 aa, synthetic construct
  source 1..9: note = Seed: LVVVGAVGV (KRAS G12V)
IVVHGQVGL

SEQ ID NO: 55847 - protein, 9 aa, synthetic construct
  source 1..9: note = Seed: LVVVGAVGV (KRAS G12V)
IVVHGQVGR

SEQ ID NO: 55848 - protein, 9 aa, synthetic construct
  source 1..9: note = Seed: LVVVGAVGV (KRAS G12V)
IVVHGRVGA

SEQ ID NO: 55849 - protein, 9 aa, synthetic construct
  source 1..9: note = Seed: LVVVGAVGV (KRAS G12V)
IVVHGRVGF

SEQ ID NO: 55850 - protein, 9 aa, synthetic construct
  source 1..9: note = Seed: LVVVGAVGV (KRAS G12V)
IVVHGRVGG

SEQ ID NO: 55851 - protein, 9 aa, synthetic construct
  source 1..9: note = Seed: LVVVGAVGV (KRAS G12V)
IVVHGRVGH

SEQ ID NO: 55852 - protein, 9 aa, synthetic construct
  source 1..9: note = Seed: LVVVGAVGV (KRAS G12V)
IVVHGRVGI

SEQ ID NO: 55853 - protein, 9 aa, synthetic construct
  source 1..9: note = Seed: LVVVGAVGV (KRAS G12V)
IVVHGRVGK

SEQ ID NO: 55854 - protein, 9 aa, synthetic construct
  source 1..9: note = Seed: LVVVGAVGV (KRAS G12V)
IVVHGRVGL

SEQ ID NO: 55855 - protein, 9 aa, synthetic construct
  source 1..9: note = Seed: LVVVGAVGV (KRAS G12V)
IVVHGRVGM

SEQ ID NO: 55856 - protein, 9 aa, synthetic construct
  source 1..9: note = Seed: LVVVGAVGV (KRAS G12V)
IVVHGRVGQ

SEQ ID NO: 55857 - protein, 9 aa, synthetic construct
  source 1..9: note = Seed: LVVVGAVGV (KRAS G12V)
IVVHGRVGR

SEQ ID NO: 55858 - protein, 9 aa, synthetic construct
  source 1..9: note = Seed: LVVVGAVGV (KRAS G12V)
IVVHGRVGS

SEQ ID NO: 55859 - protein, 9 aa, synthetic construct
  source 1..9: note = Seed: LVVVGAVGV (KRAS G12V)
IVVHGRVGT

SEQ ID NO: 55860 - protein, 9 aa, synthetic construct
  source 1..9: note = Seed: LVVVGAVGV (KRAS G12V)
IVVHGRVGV

SEQ ID NO: 55861 - protein, 9 aa, synthetic construct
  source 1..9: note = Seed: LVVVGAVGV (KRAS G12V)
IVVHGRVGW

SEQ ID NO: 55862 - protein, 9 aa, synthetic construct
  source 1..9: note = Seed: LVVVGAVGV (KRAS G12V)
IVVHGRVGY

SEQ ID NO: 55863 - protein, 9 aa, synthetic construct
  source 1..9: note = Seed: LVVVGAVGV (KRAS G12V)
IVVHGSVGA

SEQ ID NO: 55864 - protein, 9 aa, synthetic construct
  source 1..9: note = Seed: LVVVGAVGV (KRAS G12V)
IVVHGSVGF

SEQ ID NO: 55865 - protein, 9 aa, synthetic construct
  source 1..9: note = Seed: LVVVGAVGV (KRAS G12V)
IVVHGSVGH

SEQ ID NO: 55866 - protein, 9 aa, synthetic construct
  source 1..9: note = Seed: LVVVGAVGV (KRAS G12V)
IVVHGSVGI

SEQ ID NO: 55867 - protein, 9 aa, synthetic construct
  source 1..9: note = Seed: LVVVGAVGV (KRAS G12V)
IVVHGSVGK

SEQ ID NO: 55868 - protein, 9 aa, synthetic construct
  source 1..9: note = Seed: LVVVGAVGV (KRAS G12V)
IVVHGSVGL

SEQ ID NO: 55869 - protein, 9 aa, synthetic construct
  source 1..9: note = Seed: LVVVGAVGV (KRAS G12V)
IVVHGSVGM

SEQ ID NO: 55870 - protein, 9 aa, synthetic construct
  source 1..9: note = Seed: LVVVGAVGV (KRAS G12V)
IVVHGSVGR

SEQ ID NO: 55871 - protein, 9 aa, synthetic construct
  source 1..9: note = Seed: LVVVGAVGV (KRAS G12V)
IVVHGSVGS

SEQ ID NO: 55872 - protein, 9 aa, synthetic construct
  source 1..9: note = Seed: LVVVGAVGV (KRAS G12V)
IVVHGSVGT

SEQ ID NO: 55873 - protein, 9 aa, synthetic construct
  source 1..9: note = Seed: LVVVGAVGV (KRAS G12V)
IVVHGSVGV

SEQ ID NO: 55874 - protein, 9 aa, synthetic construct
  source 1..9: note = Seed: LVVVGAVGV (KRAS G12V)
IVVHGSVGY

SEQ ID NO: 55875 - protein, 9 aa, synthetic construct
  source 1..9: note = Seed: LVVVGAVGV (KRAS G12V)
IVVHGTVGA

SEQ ID NO: 55876 - protein, 9 aa, synthetic construct
  source 1..9: note = Seed: LVVVGAVGV (KRAS G12V)
IVVHGTVGF

SEQ ID NO: 55877 - protein, 9 aa, synthetic construct
  source 1..9: note = Seed: LVVVGAVGV (KRAS G12V)
IVVHGTVGH

SEQ ID NO: 55878 - protein, 9 aa, synthetic construct
  source 1..9: note = Seed: LVVVGAVGV (KRAS G12V)
IVVHGTVGI

SEQ ID NO: 55879 - protein, 9 aa, synthetic construct
  source 1..9: note = Seed: LVVVGAVGV (KRAS G12V)
IVVHGTVGK

SEQ ID NO: 55880 - protein, 9 aa, synthetic construct
  source 1..9: note = Seed: LVVVGAVGV (KRAS G12V)
IVVHGTVGL

SEQ ID NO: 55881 - protein, 9 aa, synthetic construct
  source 1..9: note = Seed: LVVVGAVGV (KRAS G12V)
IVVHGTVGM

SEQ ID NO: 55882 - protein, 9 aa, synthetic construct
  source 1..9: note = Seed: LVVVGAVGV (KRAS G12V)
IVVHGTVGR

SEQ ID NO: 55883 - protein, 9 aa, synthetic construct
  source 1..9: note = Seed: LVVVGAVGV (KRAS G12V)
IVVHGTVGV

SEQ ID NO: 55884 - protein, 9 aa, synthetic construct
  source 1..9: note = Seed: LVVVGAVGV (KRAS G12V)
IVVHGTVGY

SEQ ID NO: 55885 - protein, 9 aa, synthetic construct
  source 1..9: note = Seed: LVVVGAVGV (KRAS G12V)
IVVHGVVGA

SEQ ID NO: 55886 - protein, 9 aa, synthetic construct
  source 1..9: note = Seed: LVVVGAVGV (KRAS G12V)
IVVHGVVGF

SEQ ID NO: 55887 - protein, 9 aa, synthetic construct
  source 1..9: note = Seed: LVVVGAVGV (KRAS G12V)
IVVHGVVGI

SEQ ID NO: 55888 - protein, 9 aa, synthetic construct
  source 1..9: note = Seed: LVVVGAVGV (KRAS G12V)
IVVHGVVGK

SEQ ID NO: 55889 - protein, 9 aa, synthetic construct
  source 1..9: note = Seed: LVVVGAVGV (KRAS G12V)
IVVHGVVGL

SEQ ID NO: 55890 - protein, 9 aa, synthetic construct
  source 1..9: note = Seed: LVVVGAVGV (KRAS G12V)
IVVHGVVGM

SEQ ID NO: 55891 - protein, 9 aa, synthetic construct
  source 1..9: note = Seed: LVVVGAVGV (KRAS G12V)
IVVHGVVGR

SEQ ID NO: 55892 - protein, 9 aa, synthetic construct
  source 1..9: note = Seed: LVVVGAVGV (KRAS G12V)
IVVHGVVGV

SEQ ID NO: 55893 - protein, 9 aa, synthetic construct
  source 1..9: note = Seed: LVVVGAVGV (KRAS G12V)
IVVHGVVGY

SEQ ID NO: 55894 - protein, 9 aa, synthetic construct
  source 1..9: note = Seed: LVVVGAVGV (KRAS G12V)
IVVIGAVGA

SEQ ID NO: 55895 - protein, 9 aa, synthetic construct
  source 1..9: note = Seed: LVVVGAVGV (KRAS G12V)
IVVIGAVGC

SEQ ID NO: 55896 - protein, 9 aa, synthetic construct
  source 1..9: note = Seed: LVVVGAVGV (KRAS G12V)
IVVIGAVGF

SEQ ID NO: 55897 - protein, 9 aa, synthetic construct
  source 1..9: note = Seed: LVVVGAVGV (KRAS G12V)
IVVIGAVGG

SEQ ID NO: 55898 - protein, 9 aa, synthetic construct
  source 1..9: note = Seed: LVVVGAVGV (KRAS G12V)
IVVIGAVGH

SEQ ID NO: 55899 - protein, 9 aa, synthetic construct
  source 1..9: note = Seed: LVVVGAVGV (KRAS G12V)
IVVIGAVGI

SEQ ID NO: 55900 - protein, 9 aa, synthetic construct
  source 1..9: note = Seed: LVVVGAVGV (KRAS G12V)
IVVIGAVGK

SEQ ID NO: 55901 - protein, 9 aa, synthetic construct
  source 1..9: note = Seed: LVVVGAVGV (KRAS G12V)
IVVIGAVGL

SEQ ID NO: 55902 - protein, 9 aa, synthetic construct
  source 1..9: note = Seed: LVVVGAVGV (KRAS G12V)
IVVIGAVGM

SEQ ID NO: 55903 - protein, 9 aa, synthetic construct
  source 1..9: note = Seed: LVVVGAVGV (KRAS G12V)
IVVIGAVGN

SEQ ID NO: 55904 - protein, 9 aa, synthetic construct
  source 1..9: note = Seed: LVVVGAVGV (KRAS G12V)
IVVIGAVGP

SEQ ID NO: 55905 - protein, 9 aa, synthetic construct
  source 1..9: note = Seed: LVVVGAVGV (KRAS G12V)
IVVIGAVGQ

SEQ ID NO: 55906 - protein, 9 aa, synthetic construct
  source 1..9: note = Seed: LVVVGAVGV (KRAS G12V)
IVVIGAVGR

SEQ ID NO: 55907 - protein, 9 aa, synthetic construct
  source 1..9: note = Seed: LVVVGAVGV (KRAS G12V)
IVVIGAVGS

SEQ ID NO: 55908 - protein, 9 aa, synthetic construct
  source 1..9: note = Seed: LVVVGAVGV (KRAS G12V)
IVVIGAVGT

SEQ ID NO: 55909 - protein, 9 aa, synthetic construct
  source 1..9: note = Seed: LVVVGAVGV (KRAS G12V)
IVVIGAVGV

SEQ ID NO: 55910 - protein, 9 aa, synthetic construct
  source 1..9: note = Seed: LVVVGAVGV (KRAS G12V)
IVVIGAVGY

SEQ ID NO: 55911 - protein, 9 aa, synthetic construct
  source 1..9: note = Seed: LVVVGAVGV (KRAS G12V)
IVVIGDVGA

SEQ ID NO: 55912 - protein, 9 aa, synthetic construct
  source 1..9: note = Seed: LVVVGAVGV (KRAS G12V)
IVVIGDVGG

SEQ ID NO: 55913 - protein, 9 aa, synthetic construct
  source 1..9: note = Seed: LVVVGAVGV (KRAS G12V)
IVVIGDVGI

SEQ ID NO: 55914 - protein, 9 aa, synthetic construct
  source 1..9: note = Seed: LVVVGAVGV (KRAS G12V)
IVVIGDVGL

SEQ ID NO: 55915 - protein, 9 aa, synthetic construct
  source 1..9: note = Seed: LVVVGAVGV (KRAS G12V)
IVVIGDVGS

SEQ ID NO: 55916 - protein, 9 aa, synthetic construct
  source 1..9: note = Seed: LVVVGAVGV (KRAS G12V)
IVVIGDVGT

SEQ ID NO: 55917 - protein, 9 aa, synthetic construct
  source 1..9: note = Seed: LVVVGAVGV (KRAS G12V)
IVVIGDVGV

SEQ ID NO: 55918 - protein, 9 aa, synthetic construct
  source 1..9: note = Seed: LVVVGAVGV (KRAS G12V)
IVVIGFVGR

SEQ ID NO: 55919 - protein, 9 aa, synthetic construct
  source 1..9: note = Seed: LVVVGAVGV (KRAS G12V)
IVVIGGVGA

SEQ ID NO: 55920 - protein, 9 aa, synthetic construct
  source 1..9: note = Seed: LVVVGAVGV (KRAS G12V)
IVVIGGVGF

SEQ ID NO: 55921 - protein, 9 aa, synthetic construct
  source 1..9: note = Seed: LVVVGAVGV (KRAS G12V)
IVVIGGVGG

SEQ ID NO: 55922 - protein, 9 aa, synthetic construct
  source 1..9: note = Seed: LVVVGAVGV (KRAS G12V)
IVVIGGVGH

SEQ ID NO: 55923 - protein, 9 aa, synthetic construct
  source 1..9: note = Seed: LVVVGAVGV (KRAS G12V)
IVVIGGVGI

SEQ ID NO: 55924 - protein, 9 aa, synthetic construct
  source 1..9: note = Seed: LVVVGAVGV (KRAS G12V)
IVVIGGVGK

SEQ ID NO: 55925 - protein, 9 aa, synthetic construct
  source 1..9: note = Seed: LVVVGAVGV (KRAS G12V)
IVVIGGVGL

SEQ ID NO: 55926 - protein, 9 aa, synthetic construct
  source 1..9: note = Seed: LVVVGAVGV (KRAS G12V)
IVVIGGVGM

SEQ ID NO: 55927 - protein, 9 aa, synthetic construct
  source 1..9: note = Seed: LVVVGAVGV (KRAS G12V)
IVVIGGVGN

SEQ ID NO: 55928 - protein, 9 aa, synthetic construct
  source 1..9: note = Seed: LVVVGAVGV (KRAS G12V)
IVVIGGVGP

SEQ ID NO: 55929 - protein, 9 aa, synthetic construct
  source 1..9: note = Seed: LVVVGAVGV (KRAS G12V)
IVVIGGVGQ

SEQ ID NO: 55930 - protein, 9 aa, synthetic construct
  source 1..9: note = Seed: LVVVGAVGV (KRAS G12V)
IVVIGGVGR

SEQ ID NO: 55931 - protein, 9 aa, synthetic construct
  source 1..9: note = Seed: LVVVGAVGV (KRAS G12V)
IVVIGGVGS

SEQ ID NO: 55932 - protein, 9 aa, synthetic construct
  source 1..9: note = Seed: LVVVGAVGV (KRAS G12V)
IVVIGGVGT

SEQ ID NO: 55933 - protein, 9 aa, synthetic construct
  source 1..9: note = Seed: LVVVGAVGV (KRAS G12V)
IVVIGGVGV

SEQ ID NO: 55934 - protein, 9 aa, synthetic construct
  source 1..9: note = Seed: LVVVGAVGV (KRAS G12V)
IVVIGGVGY

SEQ ID NO: 55935 - protein, 9 aa, synthetic construct
  source 1..9: note = Seed: LVVVGAVGV (KRAS G12V)
IVVIGHVGA

SEQ ID NO: 55936 - protein, 9 aa, synthetic construct
  source 1..9: note = Seed: LVVVGAVGV (KRAS G12V)
IVVIGHVGF

SEQ ID NO: 55937 - protein, 9 aa, synthetic construct
  source 1..9: note = Seed: LVVVGAVGV (KRAS G12V)
IVVIGHVGH

SEQ ID NO: 55938 - protein, 9 aa, synthetic construct
  source 1..9: note = Seed: LVVVGAVGV (KRAS G12V)
IVVIGHVGI

SEQ ID NO: 55939 - protein, 9 aa, synthetic construct
  source 1..9: note = Seed: LVVVGAVGV (KRAS G12V)
IVVIGHVGK

SEQ ID NO: 55940 - protein, 9 aa, synthetic construct
  source 1..9: note = Seed: LVVVGAVGV (KRAS G12V)
IVVIGHVGL

SEQ ID NO: 55941 - protein, 9 aa, synthetic construct
  source 1..9: note = Seed: LVVVGAVGV (KRAS G12V)
IVVIGHVGM

SEQ ID NO: 55942 - protein, 9 aa, synthetic construct
  source 1..9: note = Seed: LVVVGAVGV (KRAS G12V)
IVVIGHVGR

SEQ ID NO: 55943 - protein, 9 aa, synthetic construct
  source 1..9: note = Seed: LVVVGAVGV (KRAS G12V)
IVVIGHVGS

SEQ ID NO: 55944 - protein, 9 aa, synthetic construct
  source 1..9: note = Seed: LVVVGAVGV (KRAS G12V)
IVVIGHVGT

SEQ ID NO: 55945 - protein, 9 aa, synthetic construct
  source 1..9: note = Seed: LVVVGAVGV (KRAS G12V)
IVVIGHVGV

SEQ ID NO: 55946 - protein, 9 aa, synthetic construct
  source 1..9: note = Seed: LVVVGAVGV (KRAS G12V)
IVVIGHVGY

SEQ ID NO: 55947 - protein, 9 aa, synthetic construct
  source 1..9: note = Seed: LVVVGAVGV (KRAS G12V)
IVVIGIVGA

SEQ ID NO: 55948 - protein, 9 aa, synthetic construct
  source 1..9: note = Seed: LVVVGAVGV (KRAS G12V)
IVVIGIVGK

SEQ ID NO: 55949 - protein, 9 aa, synthetic construct
  source 1..9: note = Seed: LVVVGAVGV (KRAS G12V)
IVVIGIVGN

SEQ ID NO: 55950 - protein, 9 aa, synthetic construct
  source 1..9: note = Seed: LVVVGAVGV (KRAS G12V)
IVVIGIVGR

SEQ ID NO: 55951 - protein, 9 aa, synthetic construct
  source 1..9: note = Seed: LVVVGAVGV (KRAS G12V)
IVVIGKVGA

SEQ ID NO: 55952 - protein, 9 aa, synthetic construct
  source 1..9: note = Seed: LVVVGAVGV (KRAS G12V)
IVVIGKVGF

SEQ ID NO: 55953 - protein, 9 aa, synthetic construct
  source 1..9: note = Seed: LVVVGAVGV (KRAS G12V)
IVVIGKVGG

SEQ ID NO: 55954 - protein, 9 aa, synthetic construct
  source 1..9: note = Seed: LVVVGAVGV (KRAS G12V)
IVVIGKVGH

SEQ ID NO: 55955 - protein, 9 aa, synthetic construct
  source 1..9: note = Seed: LVVVGAVGV (KRAS G12V)
IVVIGKVGI

SEQ ID NO: 55956 - protein, 9 aa, synthetic construct
  source 1..9: note = Seed: LVVVGAVGV (KRAS G12V)
IVVIGKVGK

SEQ ID NO: 55957 - protein, 9 aa, synthetic construct
  source 1..9: note = Seed: LVVVGAVGV (KRAS G12V)
IVVIGKVGL

SEQ ID NO: 55958 - protein, 9 aa, synthetic construct
  source 1..9: note = Seed: LVVVGAVGV (KRAS G12V)
IVVIGKVGM

SEQ ID NO: 55959 - protein, 9 aa, synthetic construct
  source 1..9: note = Seed: LVVVGAVGV (KRAS G12V)
IVVIGKVGN

SEQ ID NO: 55960 - protein, 9 aa, synthetic construct
  source 1..9: note = Seed: LVVVGAVGV (KRAS G12V)
IVVIGKVGP

SEQ ID NO: 55961 - protein, 9 aa, synthetic construct
  source 1..9: note = Seed: LVVVGAVGV (KRAS G12V)
IVVIGKVGQ

SEQ ID NO: 55962 - protein, 9 aa, synthetic construct
  source 1..9: note = Seed: LVVVGAVGV (KRAS G12V)
IVVIGKVGR

SEQ ID NO: 55963 - protein, 9 aa, synthetic construct
  source 1..9: note = Seed: LVVVGAVGV (KRAS G12V)
IVVIGKVGS

SEQ ID NO: 55964 - protein, 9 aa, synthetic construct
  source 1..9: note = Seed: LVVVGAVGV (KRAS G12V)
IVVIGKVGT

SEQ ID NO: 55965 - protein, 9 aa, synthetic construct
  source 1..9: note = Seed: LVVVGAVGV (KRAS G12V)
IVVIGKVGV

SEQ ID NO: 55966 - protein, 9 aa, synthetic construct
  source 1..9: note = Seed: LVVVGAVGV (KRAS G12V)
IVVIGKVGY

SEQ ID NO: 55967 - protein, 9 aa, synthetic construct
  source 1..9: note = Seed: LVVVGAVGV (KRAS G12V)
IVVIGLVGA

SEQ ID NO: 55968 - protein, 9 aa, synthetic construct
  source 1..9: note = Seed: LVVVGAVGV (KRAS G12V)
IVVIGLVGK

SEQ ID NO: 55969 - protein, 9 aa, synthetic construct
  source 1..9: note = Seed: LVVVGAVGV (KRAS G12V)
IVVIGLVGR

SEQ ID NO: 55970 - protein, 9 aa, synthetic construct
  source 1..9: note = Seed: LVVVGAVGV (KRAS G12V)
IVVIGMVGA

SEQ ID NO: 55971 - protein, 9 aa, synthetic construct
  source 1..9: note = Seed: LVVVGAVGV (KRAS G12V)
IVVIGMVGH

SEQ ID NO: 55972 - protein, 9 aa, synthetic construct
  source 1..9: note = Seed: LVVVGAVGV (KRAS G12V)
IVVIGMVGI

SEQ ID NO: 55973 - protein, 9 aa, synthetic construct
  source 1..9: note = Seed: LVVVGAVGV (KRAS G12V)
IVVIGMVGK

SEQ ID NO: 55974 - protein, 9 aa, synthetic construct
  source 1..9: note = Seed: LVVVGAVGV (KRAS G12V)
IVVIGMVGL

SEQ ID NO: 55975 - protein, 9 aa, synthetic construct
  source 1..9: note = Seed: LVVVGAVGV (KRAS G12V)
IVVIGMVGM

SEQ ID NO: 55976 - protein, 9 aa, synthetic construct
  source 1..9: note = Seed: LVVVGAVGV (KRAS G12V)
IVVIGMVGN

SEQ ID NO: 55977 - protein, 9 aa, synthetic construct
  source 1..9: note = Seed: LVVVGAVGV (KRAS G12V)
IVVIGMVGR

SEQ ID NO: 55978 - protein, 9 aa, synthetic construct
  source 1..9: note = Seed: LVVVGAVGV (KRAS G12V)
IVVIGMVGS

SEQ ID NO: 55979 - protein, 9 aa, synthetic construct
  source 1..9: note = Seed: LVVVGAVGV (KRAS G12V)
IVVIGMVGT

SEQ ID NO: 55980 - protein, 9 aa, synthetic construct
  source 1..9: note = Seed: LVVVGAVGV (KRAS G12V)
IVVIGMVGV

SEQ ID NO: 55981 - protein, 9 aa, synthetic construct
  source 1..9: note = Seed: LVVVGAVGV (KRAS G12V)
IVVIGNVGA

SEQ ID NO: 55982 - protein, 9 aa, synthetic construct
  source 1..9: note = Seed: LVVVGAVGV (KRAS G12V)
IVVIGNVGD

SEQ ID NO: 55983 - protein, 9 aa, synthetic construct
  source 1..9: note = Seed: LVVVGAVGV (KRAS G12V)
IVVIGNVGE

SEQ ID NO: 55984 - protein, 9 aa, synthetic construct
  source 1..9: note = Seed: LVVVGAVGV (KRAS G12V)
IVVIGNVGF

SEQ ID NO: 55985 - protein, 9 aa, synthetic construct
  source 1..9: note = Seed: LVVVGAVGV (KRAS G12V)
IVVIGNVGG

SEQ ID NO: 55986 - protein, 9 aa, synthetic construct
  source 1..9: note = Seed: LVVVGAVGV (KRAS G12V)
IVVIGNVGH

SEQ ID NO: 55987 - protein, 9 aa, synthetic construct
  source 1..9: note = Seed: LVVVGAVGV (KRAS G12V)
IVVIGNVGI

SEQ ID NO: 55988 - protein, 9 aa, synthetic construct
  source 1..9: note = Seed: LVVVGAVGV (KRAS G12V)
IVVIGNVGK

SEQ ID NO: 55989 - protein, 9 aa, synthetic construct
  source 1..9: note = Seed: LVVVGAVGV (KRAS G12V)
IVVIGNVGL

SEQ ID NO: 55990 - protein, 9 aa, synthetic construct
  source 1..9: note = Seed: LVVVGAVGV (KRAS G12V)
IVVIGNVGM

SEQ ID NO: 55991 - protein, 9 aa, synthetic construct
  source 1..9: note = Seed: LVVVGAVGV (KRAS G12V)
IVVIGNVGN

SEQ ID NO: 55992 - protein, 9 aa, synthetic construct
  source 1..9: note = Seed: LVVVGAVGV (KRAS G12V)
IVVIGNVGP

SEQ ID NO: 55993 - protein, 9 aa, synthetic construct
  source 1..9: note = Seed: LVVVGAVGV (KRAS G12V)
IVVIGNVGQ

SEQ ID NO: 55994 - protein, 9 aa, synthetic construct
  source 1..9: note = Seed: LVVVGAVGV (KRAS G12V)
IVVIGNVGR

SEQ ID NO: 55995 - protein, 9 aa, synthetic construct
  source 1..9: note = Seed: LVVVGAVGV (KRAS G12V)
IVVIGNVGS

SEQ ID NO: 55996 - protein, 9 aa, synthetic construct
  source 1..9: note = Seed: LVVVGAVGV (KRAS G12V)
IVVIGNVGT

SEQ ID NO: 55997 - protein, 9 aa, synthetic construct
  source 1..9: note = Seed: LVVVGAVGV (KRAS G12V)
IVVIGNVGV

SEQ ID NO: 55998 - protein, 9 aa, synthetic construct
  source 1..9: note = Seed: LVVVGAVGV (KRAS G12V)
IVVIGNVGY

SEQ ID NO: 55999 - protein, 9 aa, synthetic construct
  source 1..9: note = Seed: LVVVGAVGV (KRAS G12V)
IVVIGPVGA

SEQ ID NO: 56000 - protein, 9 aa, synthetic construct
  source 1..9: note = Seed: LVVVGAVGV (KRAS G12V)
IVVIGPVGC

SEQ ID NO: 56001 - protein, 9 aa, synthetic construct
  source 1..9: note = Seed: LVVVGAVGV (KRAS G12V)
IVVIGPVGD

SEQ ID NO: 56002 - protein, 9 aa, synthetic construct
  source 1..9: note = Seed: LVVVGAVGV (KRAS G12V)
IVVIGPVGE

SEQ ID NO: 56003 - protein, 9 aa, synthetic construct
  source 1..9: note = Seed: LVVVGAVGV (KRAS G12V)
IVVIGPVGF

SEQ ID NO: 56004 - protein, 9 aa, synthetic construct
  source 1..9: note = Seed: LVVVGAVGV (KRAS G12V)
IVVIGPVGG

SEQ ID NO: 56005 - protein, 9 aa, synthetic construct
  source 1..9: note = Seed: LVVVGAVGV (KRAS G12V)
IVVIGPVGH

SEQ ID NO: 56006 - protein, 9 aa, synthetic construct
  source 1..9: note = Seed: LVVVGAVGV (KRAS G12V)
IVVIGPVGI

SEQ ID NO: 56007 - protein, 9 aa, synthetic construct
  source 1..9: note = Seed: LVVVGAVGV (KRAS G12V)
IVVIGPVGK

SEQ ID NO: 56008 - protein, 9 aa, synthetic construct
  source 1..9: note = Seed: LVVVGAVGV (KRAS G12V)
IVVIGPVGL

SEQ ID NO: 56009 - protein, 9 aa, synthetic construct
  source 1..9: note = Seed: LVVVGAVGV (KRAS G12V)
IVVIGPVGM

SEQ ID NO: 56010 - protein, 9 aa, synthetic construct
  source 1..9: note = Seed: LVVVGAVGV (KRAS G12V)
IVVIGPVGN

SEQ ID NO: 56011 - protein, 9 aa, synthetic construct
  source 1..9: note = Seed: LVVVGAVGV (KRAS G12V)
IVVIGPVGP

SEQ ID NO: 56012 - protein, 9 aa, synthetic construct
  source 1..9: note = Seed: LVVVGAVGV (KRAS G12V)
IVVIGPVGQ

SEQ ID NO: 56013 - protein, 9 aa, synthetic construct
  source 1..9: note = Seed: LVVVGAVGV (KRAS G12V)
IVVIGPVGR

SEQ ID NO: 56014 - protein, 9 aa, synthetic construct
  source 1..9: note = Seed: LVVVGAVGV (KRAS G12V)
IVVIGPVGS

SEQ ID NO: 56015 - protein, 9 aa, synthetic construct
  source 1..9: note = Seed: LVVVGAVGV (KRAS G12V)
IVVIGPVGT

SEQ ID NO: 56016 - protein, 9 aa, synthetic construct
  source 1..9: note = Seed: LVVVGAVGV (KRAS G12V)
IVVIGPVGV

SEQ ID NO: 56017 - protein, 9 aa, synthetic construct
  source 1..9: note = Seed: LVVVGAVGV (KRAS G12V)
IVVIGPVGW

SEQ ID NO: 56018 - protein, 9 aa, synthetic construct
  source 1..9: note = Seed: LVVVGAVGV (KRAS G12V)
IVVIGPVGY

SEQ ID NO: 56019 - protein, 9 aa, synthetic construct
  source 1..9: note = Seed: LVVVGAVGV (KRAS G12V)
IVVIGQVGA

SEQ ID NO: 56020 - protein, 9 aa, synthetic construct
  source 1..9: note = Seed: LVVVGAVGV (KRAS G12V)
IVVIGQVGI

SEQ ID NO: 56021 - protein, 9 aa, synthetic construct
  source 1..9: note = Seed: LVVVGAVGV (KRAS G12V)
IVVIGQVGL

SEQ ID NO: 56022 - protein, 9 aa, synthetic construct
  source 1..9: note = Seed: LVVVGAVGV (KRAS G12V)
IVVIGQVGM

SEQ ID NO: 56023 - protein, 9 aa, synthetic construct
  source 1..9: note = Seed: LVVVGAVGV (KRAS G12V)
IVVIGQVGR

SEQ ID NO: 56024 - protein, 9 aa, synthetic construct
  source 1..9: note = Seed: LVVVGAVGV (KRAS G12V)
IVVIGQVGV

SEQ ID NO: 56025 - protein, 9 aa, synthetic construct
  source 1..9: note = Seed: LVVVGAVGV (KRAS G12V)
IVVIGRVGA

SEQ ID NO: 56026 - protein, 9 aa, synthetic construct
  source 1..9: note = Seed: LVVVGAVGV (KRAS G12V)
IVVIGRVGE

SEQ ID NO: 56027 - protein, 9 aa, synthetic construct
  source 1..9: note = Seed: LVVVGAVGV (KRAS G12V)
IVVIGRVGF

SEQ ID NO: 56028 - protein, 9 aa, synthetic construct
  source 1..9: note = Seed: LVVVGAVGV (KRAS G12V)
IVVIGRVGG

SEQ ID NO: 56029 - protein, 9 aa, synthetic construct
  source 1..9: note = Seed: LVVVGAVGV (KRAS G12V)
IVVIGRVGH

SEQ ID NO: 56030 - protein, 9 aa, synthetic construct
  source 1..9: note = Seed: LVVVGAVGV (KRAS G12V)
IVVIGRVGI

SEQ ID NO: 56031 - protein, 9 aa, synthetic construct
  source 1..9: note = Seed: LVVVGAVGV (KRAS G12V)
IVVIGRVGK

SEQ ID NO: 56032 - protein, 9 aa, synthetic construct
  source 1..9: note = Seed: LVVVGAVGV (KRAS G12V)
IVVIGRVGL

SEQ ID NO: 56033 - protein, 9 aa, synthetic construct
  source 1..9: note = Seed: LVVVGAVGV (KRAS G12V)
IVVIGRVGM

SEQ ID NO: 56034 - protein, 9 aa, synthetic construct
  source 1..9: note = Seed: LVVVGAVGV (KRAS G12V)
IVVIGRVGN

SEQ ID NO: 56035 - protein, 9 aa, synthetic construct
  source 1..9: note = Seed: LVVVGAVGV (KRAS G12V)
IVVIGRVGP

SEQ ID NO: 56036 - protein, 9 aa, synthetic construct
  source 1..9: note = Seed: LVVVGAVGV (KRAS G12V)
IVVIGRVGQ

SEQ ID NO: 56037 - protein, 9 aa, synthetic construct
  source 1..9: note = Seed: LVVVGAVGV (KRAS G12V)
IVVIGRVGR

SEQ ID NO: 56038 - protein, 9 aa, synthetic construct
  source 1..9: note = Seed: LVVVGAVGV (KRAS G12V)
IVVIGRVGS

SEQ ID NO: 56039 - protein, 9 aa, synthetic construct
  source 1..9: note = Seed: LVVVGAVGV (KRAS G12V)
IVVIGRVGT

SEQ ID NO: 56040 - protein, 9 aa, synthetic construct
  source 1..9: note = Seed: LVVVGAVGV (KRAS G12V)
IVVIGRVGV

SEQ ID NO: 56041 - protein, 9 aa, synthetic construct
  source 1..9: note = Seed: LVVVGAVGV (KRAS G12V)
IVVIGRVGY

SEQ ID NO: 56042 - protein, 9 aa, synthetic construct
  source 1..9: note = Seed: LVVVGAVGV (KRAS G12V)
IVVIGSVGA

SEQ ID NO: 56043 - protein, 9 aa, synthetic construct
  source 1..9: note = Seed: LVVVGAVGV (KRAS G12V)
IVVIGSVGD

SEQ ID NO: 56044 - protein, 9 aa, synthetic construct
  source 1..9: note = Seed: LVVVGAVGV (KRAS G12V)
IVVIGSVGF

SEQ ID NO: 56045 - protein, 9 aa, synthetic construct
  source 1..9: note = Seed: LVVVGAVGV (KRAS G12V)
IVVIGSVGG

SEQ ID NO: 56046 - protein, 9 aa, synthetic construct
  source 1..9: note = Seed: LVVVGAVGV (KRAS G12V)
IVVIGSVGH

SEQ ID NO: 56047 - protein, 9 aa, synthetic construct
  source 1..9: note = Seed: LVVVGAVGV (KRAS G12V)
IVVIGSVGI

SEQ ID NO: 56048 - protein, 9 aa, synthetic construct
  source 1..9: note = Seed: LVVVGAVGV (KRAS G12V)
IVVIGSVGK

SEQ ID NO: 56049 - protein, 9 aa, synthetic construct
  source 1..9: note = Seed: LVVVGAVGV (KRAS G12V)
IVVIGSVGL

SEQ ID NO: 56050 - protein, 9 aa, synthetic construct
  source 1..9: note = Seed: LVVVGAVGV (KRAS G12V)
IVVIGSVGM

SEQ ID NO: 56051 - protein, 9 aa, synthetic construct
  source 1..9: note = Seed: LVVVGAVGV (KRAS G12V)
IVVIGSVGN

SEQ ID NO: 56052 - protein, 9 aa, synthetic construct
  source 1..9: note = Seed: LVVVGAVGV (KRAS G12V)
IVVIGSVGP

SEQ ID NO: 56053 - protein, 9 aa, synthetic construct
  source 1..9: note = Seed: LVVVGAVGV (KRAS G12V)
IVVIGSVGQ

SEQ ID NO: 56054 - protein, 9 aa, synthetic construct
  source 1..9: note = Seed: LVVVGAVGV (KRAS G12V)
IVVIGSVGR

SEQ ID NO: 56055 - protein, 9 aa, synthetic construct
  source 1..9: note = Seed: LVVVGAVGV (KRAS G12V)
IVVIGSVGS

SEQ ID NO: 56056 - protein, 9 aa, synthetic construct
  source 1..9: note = Seed: LVVVGAVGV (KRAS G12V)
IVVIGSVGT

SEQ ID NO: 56057 - protein, 9 aa, synthetic construct
  source 1..9: note = Seed: LVVVGAVGV (KRAS G12V)
IVVIGSVGV

SEQ ID NO: 56058 - protein, 9 aa, synthetic construct
  source 1..9: note = Seed: LVVVGAVGV (KRAS G12V)
IVVIGSVGY

SEQ ID NO: 56059 - protein, 9 aa, synthetic construct
  source 1..9: note = Seed: LVVVGAVGV (KRAS G12V)
IVVIGTVGA

SEQ ID NO: 56060 - protein, 9 aa, synthetic construct
  source 1..9: note = Seed: LVVVGAVGV (KRAS G12V)
IVVIGTVGD

SEQ ID NO: 56061 - protein, 9 aa, synthetic construct
  source 1..9: note = Seed: LVVVGAVGV (KRAS G12V)
IVVIGTVGG

SEQ ID NO: 56062 - protein, 9 aa, synthetic construct
  source 1..9: note = Seed: LVVVGAVGV (KRAS G12V)
IVVIGTVGH

SEQ ID NO: 56063 - protein, 9 aa, synthetic construct
  source 1..9: note = Seed: LVVVGAVGV (KRAS G12V)
IVVIGTVGI

SEQ ID NO: 56064 - protein, 9 aa, synthetic construct
  source 1..9: note = Seed: LVVVGAVGV (KRAS G12V)
IVVIGTVGK

SEQ ID NO: 56065 - protein, 9 aa, synthetic construct
  source 1..9: note = Seed: LVVVGAVGV (KRAS G12V)
IVVIGTVGL

SEQ ID NO: 56066 - protein, 9 aa, synthetic construct
  source 1..9: note = Seed: LVVVGAVGV (KRAS G12V)
IVVIGTVGM

SEQ ID NO: 56067 - protein, 9 aa, synthetic construct
  source 1..9: note = Seed: LVVVGAVGV (KRAS G12V)
IVVIGTVGN

SEQ ID NO: 56068 - protein, 9 aa, synthetic construct
  source 1..9: note = Seed: LVVVGAVGV (KRAS G12V)
IVVIGTVGP

SEQ ID NO: 56069 - protein, 9 aa, synthetic construct
  source 1..9: note = Seed: LVVVGAVGV (KRAS G12V)
IVVIGTVGQ

SEQ ID NO: 56070 - protein, 9 aa, synthetic construct
  source 1..9: note = Seed: LVVVGAVGV (KRAS G12V)
IVVIGTVGR

SEQ ID NO: 56071 - protein, 9 aa, synthetic construct
  source 1..9: note = Seed: LVVVGAVGV (KRAS G12V)
IVVIGTVGS

SEQ ID NO: 56072 - protein, 9 aa, synthetic construct
  source 1..9: note = Seed: LVVVGAVGV (KRAS G12V)
IVVIGTVGT

SEQ ID NO: 56073 - protein, 9 aa, synthetic construct
  source 1..9: note = Seed: LVVVGAVGV (KRAS G12V)
IVVIGTVGV

SEQ ID NO: 56074 - protein, 9 aa, synthetic construct
  source 1..9: note = Seed: LVVVGAVGV (KRAS G12V)
IVVIGTVGY

SEQ ID NO: 56075 - protein, 9 aa, synthetic construct
  source 1..9: note = Seed: LVVVGAVGV (KRAS G12V)
IVVIGVVGA

SEQ ID NO: 56076 - protein, 9 aa, synthetic construct
  source 1..9: note = Seed: LVVVGAVGV (KRAS G12V)
IVVIGVVGH

SEQ ID NO: 56077 - protein, 9 aa, synthetic construct
  source 1..9: note = Seed: LVVVGAVGV (KRAS G12V)
IVVIGVVGK

SEQ ID NO: 56078 - protein, 9 aa, synthetic construct
  source 1..9: note = Seed: LVVVGAVGV (KRAS G12V)
IVVIGVVGN

SEQ ID NO: 56079 - protein, 9 aa, synthetic construct
  source 1..9: note = Seed: LVVVGAVGV (KRAS G12V)
IVVIGVVGR

SEQ ID NO: 56080 - protein, 9 aa, synthetic construct
  source 1..9: note = Seed: LVVVGAVGV (KRAS G12V)
IVVIGWVGR

SEQ ID NO: 56081 - protein, 9 aa, synthetic construct
  source 1..9: note = Seed: LVVVGAVGV (KRAS G12V)
IVVIGYVGR

SEQ ID NO: 56082 - protein, 9 aa, synthetic construct
  source 1..9: note = Seed: LVVVGAVGV (KRAS G12V)
IVVKGAVGA

SEQ ID NO: 56083 - protein, 9 aa, synthetic construct
  source 1..9: note = Seed: LVVVGAVGV (KRAS G12V)
IVVKGAVGF

SEQ ID NO: 56084 - protein, 9 aa, synthetic construct
  source 1..9: note = Seed: LVVVGAVGV (KRAS G12V)
IVVKGAVGI

SEQ ID NO: 56085 - protein, 9 aa, synthetic construct
  source 1..9: note = Seed: LVVVGAVGV (KRAS G12V)
IVVKGAVGL

SEQ ID NO: 56086 - protein, 9 aa, synthetic construct
  source 1..9: note = Seed: LVVVGAVGV (KRAS G12V)
IVVKGAVGM

SEQ ID NO: 56087 - protein, 9 aa, synthetic construct
  source 1..9: note = Seed: LVVVGAVGV (KRAS G12V)
IVVKGAVGR

SEQ ID NO: 56088 - protein, 9 aa, synthetic construct
  source 1..9: note = Seed: LVVVGAVGV (KRAS G12V)
IVVKGAVGV

SEQ ID NO: 56089 - protein, 9 aa, synthetic construct
  source 1..9: note = Seed: LVVVGAVGV (KRAS G12V)
IVVKGAVGY

SEQ ID NO: 56090 - protein, 9 aa, synthetic construct
  source 1..9: note = Seed: LVVVGAVGV (KRAS G12V)
IVVKGGVGL

SEQ ID NO: 56091 - protein, 9 aa, synthetic construct
  source 1..9: note = Seed: LVVVGAVGV (KRAS G12V)
IVVKGHVGF

SEQ ID NO: 56092 - protein, 9 aa, synthetic construct
  source 1..9: note = Seed: LVVVGAVGV (KRAS G12V)
IVVKGHVGI

SEQ ID NO: 56093 - protein, 9 aa, synthetic construct
  source 1..9: note = Seed: LVVVGAVGV (KRAS G12V)
IVVKGHVGL

SEQ ID NO: 56094 - protein, 9 aa, synthetic construct
  source 1..9: note = Seed: LVVVGAVGV (KRAS G12V)
IVVKGHVGM

SEQ ID NO: 56095 - protein, 9 aa, synthetic construct
  source 1..9: note = Seed: LVVVGAVGV (KRAS G12V)
IVVKGHVGQ

SEQ ID NO: 56096 - protein, 9 aa, synthetic construct
  source 1..9: note = Seed: LVVVGAVGV (KRAS G12V)
IVVKGHVGR

SEQ ID NO: 56097 - protein, 9 aa, synthetic construct
  source 1..9: note = Seed: LVVVGAVGV (KRAS G12V)
IVVKGHVGY

SEQ ID NO: 56098 - protein, 9 aa, synthetic construct
  source 1..9: note = Seed: LVVVGAVGV (KRAS G12V)
IVVKGIVGK

SEQ ID NO: 56099 - protein, 9 aa, synthetic construct
  source 1..9: note = Seed: LVVVGAVGV (KRAS G12V)
IVVKGIVGR

SEQ ID NO: 56100 - protein, 9 aa, synthetic construct
  source 1..9: note = Seed: LVVVGAVGV (KRAS G12V)
IVVKGKVGA

SEQ ID NO: 56101 - protein, 9 aa, synthetic construct
  source 1..9: note = Seed: LVVVGAVGV (KRAS G12V)
IVVKGKVGC

SEQ ID NO: 56102 - protein, 9 aa, synthetic construct
  source 1..9: note = Seed: LVVVGAVGV (KRAS G12V)
IVVKGKVGE

SEQ ID NO: 56103 - protein, 9 aa, synthetic construct
  source 1..9: note = Seed: LVVVGAVGV (KRAS G12V)
IVVKGKVGF

SEQ ID NO: 56104 - protein, 9 aa, synthetic construct
  source 1..9: note = Seed: LVVVGAVGV (KRAS G12V)
IVVKGKVGG

SEQ ID NO: 56105 - protein, 9 aa, synthetic construct
  source 1..9: note = Seed: LVVVGAVGV (KRAS G12V)
IVVKGKVGH

SEQ ID NO: 56106 - protein, 9 aa, synthetic construct
  source 1..9: note = Seed: LVVVGAVGV (KRAS G12V)
IVVKGKVGI

SEQ ID NO: 56107 - protein, 9 aa, synthetic construct
  source 1..9: note = Seed: LVVVGAVGV (KRAS G12V)
IVVKGKVGK

SEQ ID NO: 56108 - protein, 9 aa, synthetic construct
  source 1..9: note = Seed: LVVVGAVGV (KRAS G12V)
IVVKGKVGL

SEQ ID NO: 56109 - protein, 9 aa, synthetic construct
  source 1..9: note = Seed: LVVVGAVGV (KRAS G12V)
IVVKGKVGM

SEQ ID NO: 56110 - protein, 9 aa, synthetic construct
  source 1..9: note = Seed: LVVVGAVGV (KRAS G12V)
IVVKGKVGN

SEQ ID NO: 56111 - protein, 9 aa, synthetic construct
  source 1..9: note = Seed: LVVVGAVGV (KRAS G12V)
IVVKGKVGQ

SEQ ID NO: 56112 - protein, 9 aa, synthetic construct
  source 1..9: note = Seed: LVVVGAVGV (KRAS G12V)
IVVKGKVGR

SEQ ID NO: 56113 - protein, 9 aa, synthetic construct
  source 1..9: note = Seed: LVVVGAVGV (KRAS G12V)
IVVKGKVGS

SEQ ID NO: 56114 - protein, 9 aa, synthetic construct
  source 1..9: note = Seed: LVVVGAVGV (KRAS G12V)
IVVKGKVGT

SEQ ID NO: 56115 - protein, 9 aa, synthetic construct
  source 1..9: note = Seed: LVVVGAVGV (KRAS G12V)
IVVKGKVGV

SEQ ID NO: 56116 - protein, 9 aa, synthetic construct
  source 1..9: note = Seed: LVVVGAVGV (KRAS G12V)
IVVKGKVGW

SEQ ID NO: 56117 - protein, 9 aa, synthetic construct
  source 1..9: note = Seed: LVVVGAVGV (KRAS G12V)
IVVKGKVGY

SEQ ID NO: 56118 - protein, 9 aa, synthetic construct
  source 1..9: note = Seed: LVVVGAVGV (KRAS G12V)
IVVKGLVGH

SEQ ID NO: 56119 - protein, 9 aa, synthetic construct
  source 1..9: note = Seed: LVVVGAVGV (KRAS G12V)
IVVKGLVGK

SEQ ID NO: 56120 - protein, 9 aa, synthetic construct
  source 1..9: note = Seed: LVVVGAVGV (KRAS G12V)
IVVKGLVGL

SEQ ID NO: 56121 - protein, 9 aa, synthetic construct
  source 1..9: note = Seed: LVVVGAVGV (KRAS G12V)
IVVKGLVGR

SEQ ID NO: 56122 - protein, 9 aa, synthetic construct
  source 1..9: note = Seed: LVVVGAVGV (KRAS G12V)
IVVKGMVGA

SEQ ID NO: 56123 - protein, 9 aa, synthetic construct
  source 1..9: note = Seed: LVVVGAVGV (KRAS G12V)
IVVKGMVGH

SEQ ID NO: 56124 - protein, 9 aa, synthetic construct
  source 1..9: note = Seed: LVVVGAVGV (KRAS G12V)
IVVKGMVGK

SEQ ID NO: 56125 - protein, 9 aa, synthetic construct
  source 1..9: note = Seed: LVVVGAVGV (KRAS G12V)
IVVKGMVGM

SEQ ID NO: 56126 - protein, 9 aa, synthetic construct
  source 1..9: note = Seed: LVVVGAVGV (KRAS G12V)
IVVKGMVGR

SEQ ID NO: 56127 - protein, 9 aa, synthetic construct
  source 1..9: note = Seed: LVVVGAVGV (KRAS G12V)
IVVKGMVGV

SEQ ID NO: 56128 - protein, 9 aa, synthetic construct
  source 1..9: note = Seed: LVVVGAVGV (KRAS G12V)
IVVKGMVGY

SEQ ID NO: 56129 - protein, 9 aa, synthetic construct
  source 1..9: note = Seed: LVVVGAVGV (KRAS G12V)
IVVKGNVGF

SEQ ID NO: 56130 - protein, 9 aa, synthetic construct
  source 1..9: note = Seed: LVVVGAVGV (KRAS G12V)
IVVKGNVGI

SEQ ID NO: 56131 - protein, 9 aa, synthetic construct
  source 1..9: note = Seed: LVVVGAVGV (KRAS G12V)
IVVKGNVGL

SEQ ID NO: 56132 - protein, 9 aa, synthetic construct
  source 1..9: note = Seed: LVVVGAVGV (KRAS G12V)
IVVKGNVGM

SEQ ID NO: 56133 - protein, 9 aa, synthetic construct
  source 1..9: note = Seed: LVVVGAVGV (KRAS G12V)
IVVKGNVGR

SEQ ID NO: 56134 - protein, 9 aa, synthetic construct
  source 1..9: note = Seed: LVVVGAVGV (KRAS G12V)
IVVKGNVGV

SEQ ID NO: 56135 - protein, 9 aa, synthetic construct
  source 1..9: note = Seed: LVVVGAVGV (KRAS G12V)
IVVKGNVGY

SEQ ID NO: 56136 - protein, 9 aa, synthetic construct
  source 1..9: note = Seed: LVVVGAVGV (KRAS G12V)
IVVKGRVGA

SEQ ID NO: 56137 - protein, 9 aa, synthetic construct
  source 1..9: note = Seed: LVVVGAVGV (KRAS G12V)
IVVKGRVGC

SEQ ID NO: 56138 - protein, 9 aa, synthetic construct
  source 1..9: note = Seed: LVVVGAVGV (KRAS G12V)
IVVKGRVGD

SEQ ID NO: 56139 - protein, 9 aa, synthetic construct
  source 1..9: note = Seed: LVVVGAVGV (KRAS G12V)
IVVKGRVGE

SEQ ID NO: 56140 - protein, 9 aa, synthetic construct
  source 1..9: note = Seed: LVVVGAVGV (KRAS G12V)
IVVKGRVGF

SEQ ID NO: 56141 - protein, 9 aa, synthetic construct
  source 1..9: note = Seed: LVVVGAVGV (KRAS G12V)
IVVKGRVGG

SEQ ID NO: 56142 - protein, 9 aa, synthetic construct
  source 1..9: note = Seed: LVVVGAVGV (KRAS G12V)
IVVKGRVGH

SEQ ID NO: 56143 - protein, 9 aa, synthetic construct
  source 1..9: note = Seed: LVVVGAVGV (KRAS G12V)
IVVKGRVGI

SEQ ID NO: 56144 - protein, 9 aa, synthetic construct
  source 1..9: note = Seed: LVVVGAVGV (KRAS G12V)
IVVKGRVGK

SEQ ID NO: 56145 - protein, 9 aa, synthetic construct
  source 1..9: note = Seed: LVVVGAVGV (KRAS G12V)
IVVKGRVGL

SEQ ID NO: 56146 - protein, 9 aa, synthetic construct
  source 1..9: note = Seed: LVVVGAVGV (KRAS G12V)
IVVKGRVGM

SEQ ID NO: 56147 - protein, 9 aa, synthetic construct
  source 1..9: note = Seed: LVVVGAVGV (KRAS G12V)
IVVKGRVGN

SEQ ID NO: 56148 - protein, 9 aa, synthetic construct
  source 1..9: note = Seed: LVVVGAVGV (KRAS G12V)
IVVKGRVGP

SEQ ID NO: 56149 - protein, 9 aa, synthetic construct
  source 1..9: note = Seed: LVVVGAVGV (KRAS G12V)
IVVKGRVGQ

SEQ ID NO: 56150 - protein, 9 aa, synthetic construct
  source 1..9: note = Seed: LVVVGAVGV (KRAS G12V)
IVVKGRVGR

SEQ ID NO: 56151 - protein, 9 aa, synthetic construct
  source 1..9: note = Seed: LVVVGAVGV (KRAS G12V)
IVVKGRVGS

SEQ ID NO: 56152 - protein, 9 aa, synthetic construct
  source 1..9: note = Seed: LVVVGAVGV (KRAS G12V)
IVVKGRVGT

SEQ ID NO: 56153 - protein, 9 aa, synthetic construct
  source 1..9: note = Seed: LVVVGAVGV (KRAS G12V)
IVVKGRVGV

SEQ ID NO: 56154 - protein, 9 aa, synthetic construct
  source 1..9: note = Seed: LVVVGAVGV (KRAS G12V)
IVVKGRVGW

SEQ ID NO: 56155 - protein, 9 aa, synthetic construct
  source 1..9: note = Seed: LVVVGAVGV (KRAS G12V)
IVVKGRVGY

SEQ ID NO: 56156 - protein, 9 aa, synthetic construct
  source 1..9: note = Seed: LVVVGAVGV (KRAS G12V)
IVVKGSVGF

SEQ ID NO: 56157 - protein, 9 aa, synthetic construct
  source 1..9: note = Seed: LVVVGAVGV (KRAS G12V)
IVVKGSVGI

SEQ ID NO: 56158 - protein, 9 aa, synthetic construct
  source 1..9: note = Seed: LVVVGAVGV (KRAS G12V)
IVVKGSVGL

SEQ ID NO: 56159 - protein, 9 aa, synthetic construct
  source 1..9: note = Seed: LVVVGAVGV (KRAS G12V)
IVVKGSVGM

SEQ ID NO: 56160 - protein, 9 aa, synthetic construct
  source 1..9: note = Seed: LVVVGAVGV (KRAS G12V)
IVVKGSVGR

SEQ ID NO: 56161 - protein, 9 aa, synthetic construct
  source 1..9: note = Seed: LVVVGAVGV (KRAS G12V)
IVVKGSVGY

SEQ ID NO: 56162 - protein, 9 aa, synthetic construct
  source 1..9: note = Seed: LVVVGAVGV (KRAS G12V)
IVVKGTVGA

SEQ ID NO: 56163 - protein, 9 aa, synthetic construct
  source 1..9: note = Seed: LVVVGAVGV (KRAS G12V)
IVVKGTVGF

SEQ ID NO: 56164 - protein, 9 aa, synthetic construct
  source 1..9: note = Seed: LVVVGAVGV (KRAS G12V)
IVVKGTVGR

SEQ ID NO: 56165 - protein, 9 aa, synthetic construct
  source 1..9: note = Seed: LVVVGAVGV (KRAS G12V)
IVVKGTVGY

SEQ ID NO: 56166 - protein, 9 aa, synthetic construct
  source 1..9: note = Seed: LVVVGAVGV (KRAS G12V)
IVVKGVVGR

SEQ ID NO: 56167 - protein, 9 aa, synthetic construct
  source 1..9: note = Seed: LVVVGAVGV (KRAS G12V)
IVVKGWVGR

SEQ ID NO: 56168 - protein, 9 aa, synthetic construct
  source 1..9: note = Seed: LVVVGAVGV (KRAS G12V)
IVVLGAVGA

SEQ ID NO: 56169 - protein, 9 aa, synthetic construct
  source 1..9: note = Seed: LVVVGAVGV (KRAS G12V)
IVVLGAVGC

SEQ ID NO: 56170 - protein, 9 aa, synthetic construct
  source 1..9: note = Seed: LVVVGAVGV (KRAS G12V)
IVVLGAVGD

SEQ ID NO: 56171 - protein, 9 aa, synthetic construct
  source 1..9: note = Seed: LVVVGAVGV (KRAS G12V)
IVVLGAVGE

SEQ ID NO: 56172 - protein, 9 aa, synthetic construct
  source 1..9: note = Seed: LVVVGAVGV (KRAS G12V)
IVVLGAVGF

SEQ ID NO: 56173 - protein, 9 aa, synthetic construct
  source 1..9: note = Seed: LVVVGAVGV (KRAS G12V)
IVVLGAVGG

SEQ ID NO: 56174 - protein, 9 aa, synthetic construct
  source 1..9: note = Seed: LVVVGAVGV (KRAS G12V)
IVVLGAVGH

SEQ ID NO: 56175 - protein, 9 aa, synthetic construct
  source 1..9: note = Seed: LVVVGAVGV (KRAS G12V)
IVVLGAVGI

SEQ ID NO: 56176 - protein, 9 aa, synthetic construct
  source 1..9: note = Seed: LVVVGAVGV (KRAS G12V)
IVVLGAVGK

SEQ ID NO: 56177 - protein, 9 aa, synthetic construct
  source 1..9: note = Seed: LVVVGAVGV (KRAS G12V)
IVVLGAVGL

SEQ ID NO: 56178 - protein, 9 aa, synthetic construct
  source 1..9: note = Seed: LVVVGAVGV (KRAS G12V)
IVVLGAVGM

SEQ ID NO: 56179 - protein, 9 aa, synthetic construct
  source 1..9: note = Seed: LVVVGAVGV (KRAS G12V)
IVVLGAVGN

SEQ ID NO: 56180 - protein, 9 aa, synthetic construct
  source 1..9: note = Seed: LVVVGAVGV (KRAS G12V)
IVVLGAVGP

SEQ ID NO: 56181 - protein, 9 aa, synthetic construct
  source 1..9: note = Seed: LVVVGAVGV (KRAS G12V)
IVVLGAVGQ

SEQ ID NO: 56182 - protein, 9 aa, synthetic construct
  source 1..9: note = Seed: LVVVGAVGV (KRAS G12V)
IVVLGAVGR

SEQ ID NO: 56183 - protein, 9 aa, synthetic construct
  source 1..9: note = Seed: LVVVGAVGV (KRAS G12V)
IVVLGAVGS

SEQ ID NO: 56184 - protein, 9 aa, synthetic construct
  source 1..9: note = Seed: LVVVGAVGV (KRAS G12V)
IVVLGAVGT

SEQ ID NO: 56185 - protein, 9 aa, synthetic construct
  source 1..9: note = Seed: LVVVGAVGV (KRAS G12V)
IVVLGAVGV

SEQ ID NO: 56186 - protein, 9 aa, synthetic construct
  source 1..9: note = Seed: LVVVGAVGV (KRAS G12V)
IVVLGAVGY

SEQ ID NO: 56187 - protein, 9 aa, synthetic construct
  source 1..9: note = Seed: LVVVGAVGV (KRAS G12V)
IVVLGDVGA

SEQ ID NO: 56188 - protein, 9 aa, synthetic construct
  source 1..9: note = Seed: LVVVGAVGV (KRAS G12V)
IVVLGDVGI

SEQ ID NO: 56189 - protein, 9 aa, synthetic construct
  source 1..9: note = Seed: LVVVGAVGV (KRAS G12V)
IVVLGDVGL

SEQ ID NO: 56190 - protein, 9 aa, synthetic construct
  source 1..9: note = Seed: LVVVGAVGV (KRAS G12V)
IVVLGDVGM

SEQ ID NO: 56191 - protein, 9 aa, synthetic construct
  source 1..9: note = Seed: LVVVGAVGV (KRAS G12V)
IVVLGDVGS

SEQ ID NO: 56192 - protein, 9 aa, synthetic construct
  source 1..9: note = Seed: LVVVGAVGV (KRAS G12V)
IVVLGDVGV

SEQ ID NO: 56193 - protein, 9 aa, synthetic construct
  source 1..9: note = Seed: LVVVGAVGV (KRAS G12V)
IVVLGEVGA

SEQ ID NO: 56194 - protein, 9 aa, synthetic construct
  source 1..9: note = Seed: LVVVGAVGV (KRAS G12V)
IVVLGEVGI

SEQ ID NO: 56195 - protein, 9 aa, synthetic construct
  source 1..9: note = Seed: LVVVGAVGV (KRAS G12V)
IVVLGEVGL

SEQ ID NO: 56196 - protein, 9 aa, synthetic construct
  source 1..9: note = Seed: LVVVGAVGV (KRAS G12V)
IVVLGEVGM

SEQ ID NO: 56197 - protein, 9 aa, synthetic construct
  source 1..9: note = Seed: LVVVGAVGV (KRAS G12V)
IVVLGEVGV

SEQ ID NO: 56198 - protein, 9 aa, synthetic construct
  source 1..9: note = Seed: LVVVGAVGV (KRAS G12V)
IVVLGFVGR

SEQ ID NO: 56199 - protein, 9 aa, synthetic construct
  source 1..9: note = Seed: LVVVGAVGV (KRAS G12V)
IVVLGGVGA

SEQ ID NO: 56200 - protein, 9 aa, synthetic construct
  source 1..9: note = Seed: LVVVGAVGV (KRAS G12V)
IVVLGGVGC

SEQ ID NO: 56201 - protein, 9 aa, synthetic construct
  source 1..9: note = Seed: LVVVGAVGV (KRAS G12V)
IVVLGGVGD

SEQ ID NO: 56202 - protein, 9 aa, synthetic construct
  source 1..9: note = Seed: LVVVGAVGV (KRAS G12V)
IVVLGGVGE

SEQ ID NO: 56203 - protein, 9 aa, synthetic construct
  source 1..9: note = Seed: LVVVGAVGV (KRAS G12V)
IVVLGGVGF

SEQ ID NO: 56204 - protein, 9 aa, synthetic construct
  source 1..9: note = Seed: LVVVGAVGV (KRAS G12V)
IVVLGGVGG

SEQ ID NO: 56205 - protein, 9 aa, synthetic construct
  source 1..9: note = Seed: LVVVGAVGV (KRAS G12V)
IVVLGGVGH

SEQ ID NO: 56206 - protein, 9 aa, synthetic construct
  source 1..9: note = Seed: LVVVGAVGV (KRAS G12V)
IVVLGGVGI

SEQ ID NO: 56207 - protein, 9 aa, synthetic construct
  source 1..9: note = Seed: LVVVGAVGV (KRAS G12V)
IVVLGGVGK

SEQ ID NO: 56208 - protein, 9 aa, synthetic construct
  source 1..9: note = Seed: LVVVGAVGV (KRAS G12V)
IVVLGGVGL

SEQ ID NO: 56209 - protein, 9 aa, synthetic construct
  source 1..9: note = Seed: LVVVGAVGV (KRAS G12V)
IVVLGGVGM

SEQ ID NO: 56210 - protein, 9 aa, synthetic construct
  source 1..9: note = Seed: LVVVGAVGV (KRAS G12V)
IVVLGGVGN

SEQ ID NO: 56211 - protein, 9 aa, synthetic construct
  source 1..9: note = Seed: LVVVGAVGV (KRAS G12V)
IVVLGGVGP

SEQ ID NO: 56212 - protein, 9 aa, synthetic construct
  source 1..9: note = Seed: LVVVGAVGV (KRAS G12V)
IVVLGGVGQ

SEQ ID NO: 56213 - protein, 9 aa, synthetic construct
  source 1..9: note = Seed: LVVVGAVGV (KRAS G12V)
IVVLGGVGR

SEQ ID NO: 56214 - protein, 9 aa, synthetic construct
  source 1..9: note = Seed: LVVVGAVGV (KRAS G12V)
IVVLGGVGS

SEQ ID NO: 56215 - protein, 9 aa, synthetic construct
  source 1..9: note = Seed: LVVVGAVGV (KRAS G12V)
IVVLGGVGT

SEQ ID NO: 56216 - protein, 9 aa, synthetic construct
  source 1..9: note = Seed: LVVVGAVGV (KRAS G12V)
IVVLGGVGV

SEQ ID NO: 56217 - protein, 9 aa, synthetic construct
  source 1..9: note = Seed: LVVVGAVGV (KRAS G12V)
IVVLGGVGY

SEQ ID NO: 56218 - protein, 9 aa, synthetic construct
  source 1..9: note = Seed: LVVVGAVGV (KRAS G12V)
IVVLGHVGA

SEQ ID NO: 56219 - protein, 9 aa, synthetic construct
  source 1..9: note = Seed: LVVVGAVGV (KRAS G12V)
IVVLGHVGH

SEQ ID NO: 56220 - protein, 9 aa, synthetic construct
  source 1..9: note = Seed: LVVVGAVGV (KRAS G12V)
IVVLGHVGI

SEQ ID NO: 56221 - protein, 9 aa, synthetic construct
  source 1..9: note = Seed: LVVVGAVGV (KRAS G12V)
IVVLGHVGK

SEQ ID NO: 56222 - protein, 9 aa, synthetic construct
  source 1..9: note = Seed: LVVVGAVGV (KRAS G12V)
IVVLGHVGL

SEQ ID NO: 56223 - protein, 9 aa, synthetic construct
  source 1..9: note = Seed: LVVVGAVGV (KRAS G12V)
IVVLGHVGM

SEQ ID NO: 56224 - protein, 9 aa, synthetic construct
  source 1..9: note = Seed: LVVVGAVGV (KRAS G12V)
IVVLGHVGR

SEQ ID NO: 56225 - protein, 9 aa, synthetic construct
  source 1..9: note = Seed: LVVVGAVGV (KRAS G12V)
IVVLGHVGS

SEQ ID NO: 56226 - protein, 9 aa, synthetic construct
  source 1..9: note = Seed: LVVVGAVGV (KRAS G12V)
IVVLGHVGT

SEQ ID NO: 56227 - protein, 9 aa, synthetic construct
  source 1..9: note = Seed: LVVVGAVGV (KRAS G12V)
IVVLGHVGV

SEQ ID NO: 56228 - protein, 9 aa, synthetic construct
  source 1..9: note = Seed: LVVVGAVGV (KRAS G12V)
IVVLGHVGY

SEQ ID NO: 56229 - protein, 9 aa, synthetic construct
  source 1..9: note = Seed: LVVVGAVGV (KRAS G12V)
IVVLGIVGA

SEQ ID NO: 56230 - protein, 9 aa, synthetic construct
  source 1..9: note = Seed: LVVVGAVGV (KRAS G12V)
IVVLGIVGH

SEQ ID NO: 56231 - protein, 9 aa, synthetic construct
  source 1..9: note = Seed: LVVVGAVGV (KRAS G12V)
IVVLGIVGK

SEQ ID NO: 56232 - protein, 9 aa, synthetic construct
  source 1..9: note = Seed: LVVVGAVGV (KRAS G12V)
IVVLGIVGM

SEQ ID NO: 56233 - protein, 9 aa, synthetic construct
  source 1..9: note = Seed: LVVVGAVGV (KRAS G12V)
IVVLGIVGN

SEQ ID NO: 56234 - protein, 9 aa, synthetic construct
  source 1..9: note = Seed: LVVVGAVGV (KRAS G12V)
IVVLGIVGR

SEQ ID NO: 56235 - protein, 9 aa, synthetic construct
  source 1..9: note = Seed: LVVVGAVGV (KRAS G12V)
IVVLGIVGS

SEQ ID NO: 56236 - protein, 9 aa, synthetic construct
  source 1..9: note = Seed: LVVVGAVGV (KRAS G12V)
IVVLGKVGA

SEQ ID NO: 56237 - protein, 9 aa, synthetic construct
  source 1..9: note = Seed: LVVVGAVGV (KRAS G12V)
IVVLGKVGE

SEQ ID NO: 56238 - protein, 9 aa, synthetic construct
  source 1..9: note = Seed: LVVVGAVGV (KRAS G12V)
IVVLGKVGG

SEQ ID NO: 56239 - protein, 9 aa, synthetic construct
  source 1..9: note = Seed: LVVVGAVGV (KRAS G12V)
IVVLGKVGH

SEQ ID NO: 56240 - protein, 9 aa, synthetic construct
  source 1..9: note = Seed: LVVVGAVGV (KRAS G12V)
IVVLGKVGI

SEQ ID NO: 56241 - protein, 9 aa, synthetic construct
  source 1..9: note = Seed: LVVVGAVGV (KRAS G12V)
IVVLGKVGK

SEQ ID NO: 56242 - protein, 9 aa, synthetic construct
  source 1..9: note = Seed: LVVVGAVGV (KRAS G12V)
IVVLGKVGL

SEQ ID NO: 56243 - protein, 9 aa, synthetic construct
  source 1..9: note = Seed: LVVVGAVGV (KRAS G12V)
IVVLGKVGM

SEQ ID NO: 56244 - protein, 9 aa, synthetic construct
  source 1..9: note = Seed: LVVVGAVGV (KRAS G12V)
IVVLGKVGN

SEQ ID NO: 56245 - protein, 9 aa, synthetic construct
  source 1..9: note = Seed: LVVVGAVGV (KRAS G12V)
IVVLGKVGP

SEQ ID NO: 56246 - protein, 9 aa, synthetic construct
  source 1..9: note = Seed: LVVVGAVGV (KRAS G12V)
IVVLGKVGQ

SEQ ID NO: 56247 - protein, 9 aa, synthetic construct
  source 1..9: note = Seed: LVVVGAVGV (KRAS G12V)
IVVLGKVGR

SEQ ID NO: 56248 - protein, 9 aa, synthetic construct
  source 1..9: note = Seed: LVVVGAVGV (KRAS G12V)
IVVLGKVGS

SEQ ID NO: 56249 - protein, 9 aa, synthetic construct
  source 1..9: note = Seed: LVVVGAVGV (KRAS G12V)
IVVLGKVGT

SEQ ID NO: 56250 - protein, 9 aa, synthetic construct
  source 1..9: note = Seed: LVVVGAVGV (KRAS G12V)
IVVLGKVGV

SEQ ID NO: 56251 - protein, 9 aa, synthetic construct
  source 1..9: note = Seed: LVVVGAVGV (KRAS G12V)
IVVLGKVGY

SEQ ID NO: 56252 - protein, 9 aa, synthetic construct
  source 1..9: note = Seed: LVVVGAVGV (KRAS G12V)
IVVLGLVGA

SEQ ID NO: 56253 - protein, 9 aa, synthetic construct
  source 1..9: note = Seed: LVVVGAVGV (KRAS G12V)
IVVLGLVGH

SEQ ID NO: 56254 - protein, 9 aa, synthetic construct
  source 1..9: note = Seed: LVVVGAVGV (KRAS G12V)
IVVLGLVGK

SEQ ID NO: 56255 - protein, 9 aa, synthetic construct
  source 1..9: note = Seed: LVVVGAVGV (KRAS G12V)
IVVLGLVGM

SEQ ID NO: 56256 - protein, 9 aa, synthetic construct
  source 1..9: note = Seed: LVVVGAVGV (KRAS G12V)
IVVLGLVGR

SEQ ID NO: 56257 - protein, 9 aa, synthetic construct
  source 1..9: note = Seed: LVVVGAVGV (KRAS G12V)
IVVLGMVGA

SEQ ID NO: 56258 - protein, 9 aa, synthetic construct
  source 1..9: note = Seed: LVVVGAVGV (KRAS G12V)
IVVLGMVGH

SEQ ID NO: 56259 - protein, 9 aa, synthetic construct
  source 1..9: note = Seed: LVVVGAVGV (KRAS G12V)
IVVLGMVGI

SEQ ID NO: 56260 - protein, 9 aa, synthetic construct
  source 1..9: note = Seed: LVVVGAVGV (KRAS G12V)
IVVLGMVGK

SEQ ID NO: 56261 - protein, 9 aa, synthetic construct
  source 1..9: note = Seed: LVVVGAVGV (KRAS G12V)
IVVLGMVGL

SEQ ID NO: 56262 - protein, 9 aa, synthetic construct
  source 1..9: note = Seed: LVVVGAVGV (KRAS G12V)
IVVLGMVGM

SEQ ID NO: 56263 - protein, 9 aa, synthetic construct
  source 1..9: note = Seed: LVVVGAVGV (KRAS G12V)
IVVLGMVGN

SEQ ID NO: 56264 - protein, 9 aa, synthetic construct
  source 1..9: note = Seed: LVVVGAVGV (KRAS G12V)
IVVLGMVGR

SEQ ID NO: 56265 - protein, 9 aa, synthetic construct
  source 1..9: note = Seed: LVVVGAVGV (KRAS G12V)
IVVLGMVGS

SEQ ID NO: 56266 - protein, 9 aa, synthetic construct
  source 1..9: note = Seed: LVVVGAVGV (KRAS G12V)
IVVLGMVGT

SEQ ID NO: 56267 - protein, 9 aa, synthetic construct
  source 1..9: note = Seed: LVVVGAVGV (KRAS G12V)
IVVLGMVGV

SEQ ID NO: 56268 - protein, 9 aa, synthetic construct
  source 1..9: note = Seed: LVVVGAVGV (KRAS G12V)
IVVLGNVGA

SEQ ID NO: 56269 - protein, 9 aa, synthetic construct
  source 1..9: note = Seed: LVVVGAVGV (KRAS G12V)
IVVLGNVGD

SEQ ID NO: 56270 - protein, 9 aa, synthetic construct
  source 1..9: note = Seed: LVVVGAVGV (KRAS G12V)
IVVLGNVGE

SEQ ID NO: 56271 - protein, 9 aa, synthetic construct
  source 1..9: note = Seed: LVVVGAVGV (KRAS G12V)
IVVLGNVGF

SEQ ID NO: 56272 - protein, 9 aa, synthetic construct
  source 1..9: note = Seed: LVVVGAVGV (KRAS G12V)
IVVLGNVGG

SEQ ID NO: 56273 - protein, 9 aa, synthetic construct
  source 1..9: note = Seed: LVVVGAVGV (KRAS G12V)
IVVLGNVGH

SEQ ID NO: 56274 - protein, 9 aa, synthetic construct
  source 1..9: note = Seed: LVVVGAVGV (KRAS G12V)
IVVLGNVGI

SEQ ID NO: 56275 - protein, 9 aa, synthetic construct
  source 1..9: note = Seed: LVVVGAVGV (KRAS G12V)
IVVLGNVGK

SEQ ID NO: 56276 - protein, 9 aa, synthetic construct
  source 1..9: note = Seed: LVVVGAVGV (KRAS G12V)
IVVLGNVGL

SEQ ID NO: 56277 - protein, 9 aa, synthetic construct
  source 1..9: note = Seed: LVVVGAVGV (KRAS G12V)
IVVLGNVGM

SEQ ID NO: 56278 - protein, 9 aa, synthetic construct
  source 1..9: note = Seed: LVVVGAVGV (KRAS G12V)
IVVLGNVGN

SEQ ID NO: 56279 - protein, 9 aa, synthetic construct
  source 1..9: note = Seed: LVVVGAVGV (KRAS G12V)
IVVLGNVGP

SEQ ID NO: 56280 - protein, 9 aa, synthetic construct
  source 1..9: note = Seed: LVVVGAVGV (KRAS G12V)
IVVLGNVGQ

SEQ ID NO: 56281 - protein, 9 aa, synthetic construct
  source 1..9: note = Seed: LVVVGAVGV (KRAS G12V)
IVVLGNVGR

SEQ ID NO: 56282 - protein, 9 aa, synthetic construct
  source 1..9: note = Seed: LVVVGAVGV (KRAS G12V)
IVVLGNVGS

SEQ ID NO: 56283 - protein, 9 aa, synthetic construct
  source 1..9: note = Seed: LVVVGAVGV (KRAS G12V)
IVVLGNVGT

SEQ ID NO: 56284 - protein, 9 aa, synthetic construct
  source 1..9: note = Seed: LVVVGAVGV (KRAS G12V)
IVVLGNVGV

SEQ ID NO: 56285 - protein, 9 aa, synthetic construct
  source 1..9: note = Seed: LVVVGAVGV (KRAS G12V)
IVVLGNVGY

SEQ ID NO: 56286 - protein, 9 aa, synthetic construct
  source 1..9: note = Seed: LVVVGAVGV (KRAS G12V)
IVVLGPVGA

SEQ ID NO: 56287 - protein, 9 aa, synthetic construct
  source 1..9: note = Seed: LVVVGAVGV (KRAS G12V)
IVVLGPVGC

SEQ ID NO: 56288 - protein, 9 aa, synthetic construct
  source 1..9: note = Seed: LVVVGAVGV (KRAS G12V)
IVVLGPVGD

SEQ ID NO: 56289 - protein, 9 aa, synthetic construct
  source 1..9: note = Seed: LVVVGAVGV (KRAS G12V)
IVVLGPVGE

SEQ ID NO: 56290 - protein, 9 aa, synthetic construct
  source 1..9: note = Seed: LVVVGAVGV (KRAS G12V)
IVVLGPVGF

SEQ ID NO: 56291 - protein, 9 aa, synthetic construct
  source 1..9: note = Seed: LVVVGAVGV (KRAS G12V)
IVVLGPVGG

SEQ ID NO: 56292 - protein, 9 aa, synthetic construct
  source 1..9: note = Seed: LVVVGAVGV (KRAS G12V)
IVVLGPVGH

SEQ ID NO: 56293 - protein, 9 aa, synthetic construct
  source 1..9: note = Seed: LVVVGAVGV (KRAS G12V)
IVVLGPVGI

SEQ ID NO: 56294 - protein, 9 aa, synthetic construct
  source 1..9: note = Seed: LVVVGAVGV (KRAS G12V)
IVVLGPVGK

SEQ ID NO: 56295 - protein, 9 aa, synthetic construct
  source 1..9: note = Seed: LVVVGAVGV (KRAS G12V)
IVVLGPVGL

SEQ ID NO: 56296 - protein, 9 aa, synthetic construct
  source 1..9: note = Seed: LVVVGAVGV (KRAS G12V)
IVVLGPVGM

SEQ ID NO: 56297 - protein, 9 aa, synthetic construct
  source 1..9: note = Seed: LVVVGAVGV (KRAS G12V)
IVVLGPVGN

SEQ ID NO: 56298 - protein, 9 aa, synthetic construct
  source 1..9: note = Seed: LVVVGAVGV (KRAS G12V)
IVVLGPVGP

SEQ ID NO: 56299 - protein, 9 aa, synthetic construct
  source 1..9: note = Seed: LVVVGAVGV (KRAS G12V)
IVVLGPVGQ

SEQ ID NO: 56300 - protein, 9 aa, synthetic construct
  source 1..9: note = Seed: LVVVGAVGV (KRAS G12V)
IVVLGPVGR

SEQ ID NO: 56301 - protein, 9 aa, synthetic construct
  source 1..9: note = Seed: LVVVGAVGV (KRAS G12V)
IVVLGPVGS

SEQ ID NO: 56302 - protein, 9 aa, synthetic construct
  source 1..9: note = Seed: LVVVGAVGV (KRAS G12V)
IVVLGPVGT

SEQ ID NO: 56303 - protein, 9 aa, synthetic construct
  source 1..9: note = Seed: LVVVGAVGV (KRAS G12V)
IVVLGPVGV

SEQ ID NO: 56304 - protein, 9 aa, synthetic construct
  source 1..9: note = Seed: LVVVGAVGV (KRAS G12V)
IVVLGPVGW

SEQ ID NO: 56305 - protein, 9 aa, synthetic construct
  source 1..9: note = Seed: LVVVGAVGV (KRAS G12V)
IVVLGPVGY

SEQ ID NO: 56306 - protein, 9 aa, synthetic construct
  source 1..9: note = Seed: LVVVGAVGV (KRAS G12V)
IVVLGQVGA

SEQ ID NO: 56307 - protein, 9 aa, synthetic construct
  source 1..9: note = Seed: LVVVGAVGV (KRAS G12V)
IVVLGQVGI

SEQ ID NO: 56308 - protein, 9 aa, synthetic construct
  source 1..9: note = Seed: LVVVGAVGV (KRAS G12V)
IVVLGQVGK

SEQ ID NO: 56309 - protein, 9 aa, synthetic construct
  source 1..9: note = Seed: LVVVGAVGV (KRAS G12V)
IVVLGQVGL

SEQ ID NO: 56310 - protein, 9 aa, synthetic construct
  source 1..9: note = Seed: LVVVGAVGV (KRAS G12V)
IVVLGQVGM

SEQ ID NO: 56311 - protein, 9 aa, synthetic construct
  source 1..9: note = Seed: LVVVGAVGV (KRAS G12V)
IVVLGQVGR

SEQ ID NO: 56312 - protein, 9 aa, synthetic construct
  source 1..9: note = Seed: LVVVGAVGV (KRAS G12V)
IVVLGQVGV

SEQ ID NO: 56313 - protein, 9 aa, synthetic construct
  source 1..9: note = Seed: LVVVGAVGV (KRAS G12V)
IVVLGRVGA

SEQ ID NO: 56314 - protein, 9 aa, synthetic construct
  source 1..9: note = Seed: LVVVGAVGV (KRAS G12V)
IVVLGRVGD

SEQ ID NO: 56315 - protein, 9 aa, synthetic construct
  source 1..9: note = Seed: LVVVGAVGV (KRAS G12V)
IVVLGRVGE

SEQ ID NO: 56316 - protein, 9 aa, synthetic construct
  source 1..9: note = Seed: LVVVGAVGV (KRAS G12V)
IVVLGRVGF

SEQ ID NO: 56317 - protein, 9 aa, synthetic construct
  source 1..9: note = Seed: LVVVGAVGV (KRAS G12V)
IVVLGRVGG

SEQ ID NO: 56318 - protein, 9 aa, synthetic construct
  source 1..9: note = Seed: LVVVGAVGV (KRAS G12V)
IVVLGRVGH

SEQ ID NO: 56319 - protein, 9 aa, synthetic construct
  source 1..9: note = Seed: LVVVGAVGV (KRAS G12V)
IVVLGRVGI

SEQ ID NO: 56320 - protein, 9 aa, synthetic construct
  source 1..9: note = Seed: LVVVGAVGV (KRAS G12V)
IVVLGRVGK

SEQ ID NO: 56321 - protein, 9 aa, synthetic construct
  source 1..9: note = Seed: LVVVGAVGV (KRAS G12V)
IVVLGRVGL

SEQ ID NO: 56322 - protein, 9 aa, synthetic construct
  source 1..9: note = Seed: LVVVGAVGV (KRAS G12V)
IVVLGRVGM

SEQ ID NO: 56323 - protein, 9 aa, synthetic construct
  source 1..9: note = Seed: LVVVGAVGV (KRAS G12V)
IVVLGRVGN

SEQ ID NO: 56324 - protein, 9 aa, synthetic construct
  source 1..9: note = Seed: LVVVGAVGV (KRAS G12V)
IVVLGRVGP

SEQ ID NO: 56325 - protein, 9 aa, synthetic construct
  source 1..9: note = Seed: LVVVGAVGV (KRAS G12V)
IVVLGRVGQ

SEQ ID NO: 56326 - protein, 9 aa, synthetic construct
  source 1..9: note = Seed: LVVVGAVGV (KRAS G12V)
IVVLGRVGR

SEQ ID NO: 56327 - protein, 9 aa, synthetic construct
  source 1..9: note = Seed: LVVVGAVGV (KRAS G12V)
IVVLGRVGS

SEQ ID NO: 56328 - protein, 9 aa, synthetic construct
  source 1..9: note = Seed: LVVVGAVGV (KRAS G12V)
IVVLGRVGT

SEQ ID NO: 56329 - protein, 9 aa, synthetic construct
  source 1..9: note = Seed: LVVVGAVGV (KRAS G12V)
IVVLGRVGV

SEQ ID NO: 56330 - protein, 9 aa, synthetic construct
  source 1..9: note = Seed: LVVVGAVGV (KRAS G12V)
IVVLGRVGY

SEQ ID NO: 56331 - protein, 9 aa, synthetic construct
  source 1..9: note = Seed: LVVVGAVGV (KRAS G12V)
IVVLGSVGA

SEQ ID NO: 56332 - protein, 9 aa, synthetic construct
  source 1..9: note = Seed: LVVVGAVGV (KRAS G12V)
IVVLGSVGC

SEQ ID NO: 56333 - protein, 9 aa, synthetic construct
  source 1..9: note = Seed: LVVVGAVGV (KRAS G12V)
IVVLGSVGD

SEQ ID NO: 56334 - protein, 9 aa, synthetic construct
  source 1..9: note = Seed: LVVVGAVGV (KRAS G12V)
IVVLGSVGE

SEQ ID NO: 56335 - protein, 9 aa, synthetic construct
  source 1..9: note = Seed: LVVVGAVGV (KRAS G12V)
IVVLGSVGF

SEQ ID NO: 56336 - protein, 9 aa, synthetic construct
  source 1..9: note = Seed: LVVVGAVGV (KRAS G12V)
IVVLGSVGG

SEQ ID NO: 56337 - protein, 9 aa, synthetic construct
  source 1..9: note = Seed: LVVVGAVGV (KRAS G12V)
IVVLGSVGH

SEQ ID NO: 56338 - protein, 9 aa, synthetic construct
  source 1..9: note = Seed: LVVVGAVGV (KRAS G12V)
IVVLGSVGI

SEQ ID NO: 56339 - protein, 9 aa, synthetic construct
  source 1..9: note = Seed: LVVVGAVGV (KRAS G12V)
IVVLGSVGK

SEQ ID NO: 56340 - protein, 9 aa, synthetic construct
  source 1..9: note = Seed: LVVVGAVGV (KRAS G12V)
IVVLGSVGL

SEQ ID NO: 56341 - protein, 9 aa, synthetic construct
  source 1..9: note = Seed: LVVVGAVGV (KRAS G12V)
IVVLGSVGM

SEQ ID NO: 56342 - protein, 9 aa, synthetic construct
  source 1..9: note = Seed: LVVVGAVGV (KRAS G12V)
IVVLGSVGN

SEQ ID NO: 56343 - protein, 9 aa, synthetic construct
  source 1..9: note = Seed: LVVVGAVGV (KRAS G12V)
IVVLGSVGP

SEQ ID NO: 56344 - protein, 9 aa, synthetic construct
  source 1..9: note = Seed: LVVVGAVGV (KRAS G12V)
IVVLGSVGQ

SEQ ID NO: 56345 - protein, 9 aa, synthetic construct
  source 1..9: note = Seed: LVVVGAVGV (KRAS G12V)
IVVLGSVGR

SEQ ID NO: 56346 - protein, 9 aa, synthetic construct
  source 1..9: note = Seed: LVVVGAVGV (KRAS G12V)
IVVLGSVGS

SEQ ID NO: 56347 - protein, 9 aa, synthetic construct
  source 1..9: note = Seed: LVVVGAVGV (KRAS G12V)
IVVLGSVGT

SEQ ID NO: 56348 - protein, 9 aa, synthetic construct
  source 1..9: note = Seed: LVVVGAVGV (KRAS G12V)
IVVLGSVGV

SEQ ID NO: 56349 - protein, 9 aa, synthetic construct
  source 1..9: note = Seed: LVVVGAVGV (KRAS G12V)
IVVLGSVGY

SEQ ID NO: 56350 - protein, 9 aa, synthetic construct
  source 1..9: note = Seed: LVVVGAVGV (KRAS G12V)
IVVLGTVGA

SEQ ID NO: 56351 - protein, 9 aa, synthetic construct
  source 1..9: note = Seed: LVVVGAVGV (KRAS G12V)
IVVLGTVGF

SEQ ID NO: 56352 - protein, 9 aa, synthetic construct
  source 1..9: note = Seed: LVVVGAVGV (KRAS G12V)
IVVLGTVGG

SEQ ID NO: 56353 - protein, 9 aa, synthetic construct
  source 1..9: note = Seed: LVVVGAVGV (KRAS G12V)
IVVLGTVGH

SEQ ID NO: 56354 - protein, 9 aa, synthetic construct
  source 1..9: note = Seed: LVVVGAVGV (KRAS G12V)
IVVLGTVGI

SEQ ID NO: 56355 - protein, 9 aa, synthetic construct
  source 1..9: note = Seed: LVVVGAVGV (KRAS G12V)
IVVLGTVGK

SEQ ID NO: 56356 - protein, 9 aa, synthetic construct
  source 1..9: note = Seed: LVVVGAVGV (KRAS G12V)
IVVLGTVGL

SEQ ID NO: 56357 - protein, 9 aa, synthetic construct
  source 1..9: note = Seed: LVVVGAVGV (KRAS G12V)
IVVLGTVGM

SEQ ID NO: 56358 - protein, 9 aa, synthetic construct
  source 1..9: note = Seed: LVVVGAVGV (KRAS G12V)
IVVLGTVGN

SEQ ID NO: 56359 - protein, 9 aa, synthetic construct
  source 1..9: note = Seed: LVVVGAVGV (KRAS G12V)
IVVLGTVGP

SEQ ID NO: 56360 - protein, 9 aa, synthetic construct
  source 1..9: note = Seed: LVVVGAVGV (KRAS G12V)
IVVLGTVGQ

SEQ ID NO: 56361 - protein, 9 aa, synthetic construct
  source 1..9: note = Seed: LVVVGAVGV (KRAS G12V)
IVVLGTVGR

SEQ ID NO: 56362 - protein, 9 aa, synthetic construct
  source 1..9: note = Seed: LVVVGAVGV (KRAS G12V)
IVVLGTVGS

SEQ ID NO: 56363 - protein, 9 aa, synthetic construct
  source 1..9: note = Seed: LVVVGAVGV (KRAS G12V)
IVVLGTVGT

SEQ ID NO: 56364 - protein, 9 aa, synthetic construct
  source 1..9: note = Seed: LVVVGAVGV (KRAS G12V)
IVVLGTVGV

SEQ ID NO: 56365 - protein, 9 aa, synthetic construct
  source 1..9: note = Seed: LVVVGAVGV (KRAS G12V)
IVVLGTVGY

SEQ ID NO: 56366 - protein, 9 aa, synthetic construct
  source 1..9: note = Seed: LVVVGAVGV (KRAS G12V)
IVVLGVVGA

SEQ ID NO: 56367 - protein, 9 aa, synthetic construct
  source 1..9: note = Seed: LVVVGAVGV (KRAS G12V)
IVVLGVVGH

SEQ ID NO: 56368 - protein, 9 aa, synthetic construct
  source 1..9: note = Seed: LVVVGAVGV (KRAS G12V)
IVVLGVVGI

SEQ ID NO: 56369 - protein, 9 aa, synthetic construct
  source 1..9: note = Seed: LVVVGAVGV (KRAS G12V)
IVVLGVVGK

SEQ ID NO: 56370 - protein, 9 aa, synthetic construct
  source 1..9: note = Seed: LVVVGAVGV (KRAS G12V)
IVVLGVVGL

SEQ ID NO: 56371 - protein, 9 aa, synthetic construct
  source 1..9: note = Seed: LVVVGAVGV (KRAS G12V)
IVVLGVVGM

SEQ ID NO: 56372 - protein, 9 aa, synthetic construct
  source 1..9: note = Seed: LVVVGAVGV (KRAS G12V)
IVVLGVVGN

SEQ ID NO: 56373 - protein, 9 aa, synthetic construct
  source 1..9: note = Seed: LVVVGAVGV (KRAS G12V)
IVVLGVVGR

SEQ ID NO: 56374 - protein, 9 aa, synthetic construct
  source 1..9: note = Seed: LVVVGAVGV (KRAS G12V)
IVVLGVVGS

SEQ ID NO: 56375 - protein, 9 aa, synthetic construct
  source 1..9: note = Seed: LVVVGAVGV (KRAS G12V)
IVVLGVVGT

SEQ ID NO: 56376 - protein, 9 aa, synthetic construct
  source 1..9: note = Seed: LVVVGAVGV (KRAS G12V)
IVVLGVVGV

SEQ ID NO: 56377 - protein, 9 aa, synthetic construct
  source 1..9: note = Seed: LVVVGAVGV (KRAS G12V)
IVVLGYVGR

SEQ ID NO: 56378 - protein, 9 aa, synthetic construct
  source 1..9: note = Seed: LVVVGAVGV (KRAS G12V)
IVVMGAVGA

SEQ ID NO: 56379 - protein, 9 aa, synthetic construct
  source 1..9: note = Seed: LVVVGAVGV (KRAS G12V)
IVVMGAVGC

SEQ ID NO: 56380 - protein, 9 aa, synthetic construct
  source 1..9: note = Seed: LVVVGAVGV (KRAS G12V)
IVVMGAVGD

SEQ ID NO: 56381 - protein, 9 aa, synthetic construct
  source 1..9: note = Seed: LVVVGAVGV (KRAS G12V)
IVVMGAVGE

SEQ ID NO: 56382 - protein, 9 aa, synthetic construct
  source 1..9: note = Seed: LVVVGAVGV (KRAS G12V)
IVVMGAVGF

SEQ ID NO: 56383 - protein, 9 aa, synthetic construct
  source 1..9: note = Seed: LVVVGAVGV (KRAS G12V)
IVVMGAVGG

SEQ ID NO: 56384 - protein, 9 aa, synthetic construct
  source 1..9: note = Seed: LVVVGAVGV (KRAS G12V)
IVVMGAVGH

SEQ ID NO: 56385 - protein, 9 aa, synthetic construct
  source 1..9: note = Seed: LVVVGAVGV (KRAS G12V)
IVVMGAVGI

SEQ ID NO: 56386 - protein, 9 aa, synthetic construct
  source 1..9: note = Seed: LVVVGAVGV (KRAS G12V)
IVVMGAVGK

SEQ ID NO: 56387 - protein, 9 aa, synthetic construct
  source 1..9: note = Seed: LVVVGAVGV (KRAS G12V)
IVVMGAVGL

SEQ ID NO: 56388 - protein, 9 aa, synthetic construct
  source 1..9: note = Seed: LVVVGAVGV (KRAS G12V)
IVVMGAVGM

SEQ ID NO: 56389 - protein, 9 aa, synthetic construct
  source 1..9: note = Seed: LVVVGAVGV (KRAS G12V)
IVVMGAVGN

SEQ ID NO: 56390 - protein, 9 aa, synthetic construct
  source 1..9: note = Seed: LVVVGAVGV (KRAS G12V)
IVVMGAVGP

SEQ ID NO: 56391 - protein, 9 aa, synthetic construct
  source 1..9: note = Seed: LVVVGAVGV (KRAS G12V)
IVVMGAVGQ

SEQ ID NO: 56392 - protein, 9 aa, synthetic construct
  source 1..9: note = Seed: LVVVGAVGV (KRAS G12V)
IVVMGAVGR

SEQ ID NO: 56393 - protein, 9 aa, synthetic construct
  source 1..9: note = Seed: LVVVGAVGV (KRAS G12V)
IVVMGAVGS

SEQ ID NO: 56394 - protein, 9 aa, synthetic construct
  source 1..9: note = Seed: LVVVGAVGV (KRAS G12V)
IVVMGAVGT

SEQ ID NO: 56395 - protein, 9 aa, synthetic construct
  source 1..9: note = Seed: LVVVGAVGV (KRAS G12V)
IVVMGAVGV

SEQ ID NO: 56396 - protein, 9 aa, synthetic construct
  source 1..9: note = Seed: LVVVGAVGV (KRAS G12V)
IVVMGAVGY

SEQ ID NO: 56397 - protein, 9 aa, synthetic construct
  source 1..9: note = Seed: LVVVGAVGV (KRAS G12V)
IVVMGDVGA

SEQ ID NO: 56398 - protein, 9 aa, synthetic construct
  source 1..9: note = Seed: LVVVGAVGV (KRAS G12V)
IVVMGDVGG

SEQ ID NO: 56399 - protein, 9 aa, synthetic construct
  source 1..9: note = Seed: LVVVGAVGV (KRAS G12V)
IVVMGDVGH

SEQ ID NO: 56400 - protein, 9 aa, synthetic construct
  source 1..9: note = Seed: LVVVGAVGV (KRAS G12V)
IVVMGDVGI

SEQ ID NO: 56401 - protein, 9 aa, synthetic construct
  source 1..9: note = Seed: LVVVGAVGV (KRAS G12V)
IVVMGDVGL

SEQ ID NO: 56402 - protein, 9 aa, synthetic construct
  source 1..9: note = Seed: LVVVGAVGV (KRAS G12V)
IVVMGDVGM

SEQ ID NO: 56403 - protein, 9 aa, synthetic construct
  source 1..9: note = Seed: LVVVGAVGV (KRAS G12V)
IVVMGDVGQ

SEQ ID NO: 56404 - protein, 9 aa, synthetic construct
  source 1..9: note = Seed: LVVVGAVGV (KRAS G12V)
IVVMGDVGS

SEQ ID NO: 56405 - protein, 9 aa, synthetic construct
  source 1..9: note = Seed: LVVVGAVGV (KRAS G12V)
IVVMGDVGT

SEQ ID NO: 56406 - protein, 9 aa, synthetic construct
  source 1..9: note = Seed: LVVVGAVGV (KRAS G12V)
IVVMGDVGV

SEQ ID NO: 56407 - protein, 9 aa, synthetic construct
  source 1..9: note = Seed: LVVVGAVGV (KRAS G12V)
IVVMGEVGA

SEQ ID NO: 56408 - protein, 9 aa, synthetic construct
  source 1..9: note = Seed: LVVVGAVGV (KRAS G12V)
IVVMGEVGI

SEQ ID NO: 56409 - protein, 9 aa, synthetic construct
  source 1..9: note = Seed: LVVVGAVGV (KRAS G12V)
IVVMGEVGL

SEQ ID NO: 56410 - protein, 9 aa, synthetic construct
  source 1..9: note = Seed: LVVVGAVGV (KRAS G12V)
IVVMGEVGM

SEQ ID NO: 56411 - protein, 9 aa, synthetic construct
  source 1..9: note = Seed: LVVVGAVGV (KRAS G12V)
IVVMGEVGV

SEQ ID NO: 56412 - protein, 9 aa, synthetic construct
  source 1..9: note = Seed: LVVVGAVGV (KRAS G12V)
IVVMGGVGA

SEQ ID NO: 56413 - protein, 9 aa, synthetic construct
  source 1..9: note = Seed: LVVVGAVGV (KRAS G12V)
IVVMGGVGC

SEQ ID NO: 56414 - protein, 9 aa, synthetic construct
  source 1..9: note = Seed: LVVVGAVGV (KRAS G12V)
IVVMGGVGD

SEQ ID NO: 56415 - protein, 9 aa, synthetic construct
  source 1..9: note = Seed: LVVVGAVGV (KRAS G12V)
IVVMGGVGE

SEQ ID NO: 56416 - protein, 9 aa, synthetic construct
  source 1..9: note = Seed: LVVVGAVGV (KRAS G12V)
IVVMGGVGF

SEQ ID NO: 56417 - protein, 9 aa, synthetic construct
  source 1..9: note = Seed: LVVVGAVGV (KRAS G12V)
IVVMGGVGG

SEQ ID NO: 56418 - protein, 9 aa, synthetic construct
  source 1..9: note = Seed: LVVVGAVGV (KRAS G12V)
IVVMGGVGH

SEQ ID NO: 56419 - protein, 9 aa, synthetic construct
  source 1..9: note = Seed: LVVVGAVGV (KRAS G12V)
IVVMGGVGI

SEQ ID NO: 56420 - protein, 9 aa, synthetic construct
  source 1..9: note = Seed: LVVVGAVGV (KRAS G12V)
IVVMGGVGK

SEQ ID NO: 56421 - protein, 9 aa, synthetic construct
  source 1..9: note = Seed: LVVVGAVGV (KRAS G12V)
IVVMGGVGL

SEQ ID NO: 56422 - protein, 9 aa, synthetic construct
  source 1..9: note = Seed: LVVVGAVGV (KRAS G12V)
IVVMGGVGM

SEQ ID NO: 56423 - protein, 9 aa, synthetic construct
  source 1..9: note = Seed: LVVVGAVGV (KRAS G12V)
IVVMGGVGN

SEQ ID NO: 56424 - protein, 9 aa, synthetic construct
  source 1..9: note = Seed: LVVVGAVGV (KRAS G12V)
IVVMGGVGP

SEQ ID NO: 56425 - protein, 9 aa, synthetic construct
  source 1..9: note = Seed: LVVVGAVGV (KRAS G12V)
IVVMGGVGQ

SEQ ID NO: 56426 - protein, 9 aa, synthetic construct
  source 1..9: note = Seed: LVVVGAVGV (KRAS G12V)
IVVMGGVGR

SEQ ID NO: 56427 - protein, 9 aa, synthetic construct
  source 1..9: note = Seed: LVVVGAVGV (KRAS G12V)
IVVMGGVGS

SEQ ID NO: 56428 - protein, 9 aa, synthetic construct
  source 1..9: note = Seed: LVVVGAVGV (KRAS G12V)
IVVMGGVGT

SEQ ID NO: 56429 - protein, 9 aa, synthetic construct
  source 1..9: note = Seed: LVVVGAVGV (KRAS G12V)
IVVMGGVGV

SEQ ID NO: 56430 - protein, 9 aa, synthetic construct
  source 1..9: note = Seed: LVVVGAVGV (KRAS G12V)
IVVMGGVGY

SEQ ID NO: 56431 - protein, 9 aa, synthetic construct
  source 1..9: note = Seed: LVVVGAVGV (KRAS G12V)
IVVMGHVGA

SEQ ID NO: 56432 - protein, 9 aa, synthetic construct
  source 1..9: note = Seed: LVVVGAVGV (KRAS G12V)
IVVMGHVGF

SEQ ID NO: 56433 - protein, 9 aa, synthetic construct
  source 1..9: note = Seed: LVVVGAVGV (KRAS G12V)
IVVMGHVGG

SEQ ID NO: 56434 - protein, 9 aa, synthetic construct
  source 1..9: note = Seed: LVVVGAVGV (KRAS G12V)
IVVMGHVGH

SEQ ID NO: 56435 - protein, 9 aa, synthetic construct
  source 1..9: note = Seed: LVVVGAVGV (KRAS G12V)
IVVMGHVGI

SEQ ID NO: 56436 - protein, 9 aa, synthetic construct
  source 1..9: note = Seed: LVVVGAVGV (KRAS G12V)
IVVMGHVGK

SEQ ID NO: 56437 - protein, 9 aa, synthetic construct
  source 1..9: note = Seed: LVVVGAVGV (KRAS G12V)
IVVMGHVGL

SEQ ID NO: 56438 - protein, 9 aa, synthetic construct
  source 1..9: note = Seed: LVVVGAVGV (KRAS G12V)
IVVMGHVGM

SEQ ID NO: 56439 - protein, 9 aa, synthetic construct
  source 1..9: note = Seed: LVVVGAVGV (KRAS G12V)
IVVMGHVGN

SEQ ID NO: 56440 - protein, 9 aa, synthetic construct
  source 1..9: note = Seed: LVVVGAVGV (KRAS G12V)
IVVMGHVGQ

SEQ ID NO: 56441 - protein, 9 aa, synthetic construct
  source 1..9: note = Seed: LVVVGAVGV (KRAS G12V)
IVVMGHVGR

SEQ ID NO: 56442 - protein, 9 aa, synthetic construct
  source 1..9: note = Seed: LVVVGAVGV (KRAS G12V)
IVVMGHVGS

SEQ ID NO: 56443 - protein, 9 aa, synthetic construct
  source 1..9: note = Seed: LVVVGAVGV (KRAS G12V)
IVVMGHVGT

SEQ ID NO: 56444 - protein, 9 aa, synthetic construct
  source 1..9: note = Seed: LVVVGAVGV (KRAS G12V)
IVVMGHVGV

SEQ ID NO: 56445 - protein, 9 aa, synthetic construct
  source 1..9: note = Seed: LVVVGAVGV (KRAS G12V)
IVVMGHVGY

SEQ ID NO: 56446 - protein, 9 aa, synthetic construct
  source 1..9: note = Seed: LVVVGAVGV (KRAS G12V)
IVVMGIVGA

SEQ ID NO: 56447 - protein, 9 aa, synthetic construct
  source 1..9: note = Seed: LVVVGAVGV (KRAS G12V)
IVVMGIVGH

SEQ ID NO: 56448 - protein, 9 aa, synthetic construct
  source 1..9: note = Seed: LVVVGAVGV (KRAS G12V)
IVVMGIVGI

SEQ ID NO: 56449 - protein, 9 aa, synthetic construct
  source 1..9: note = Seed: LVVVGAVGV (KRAS G12V)
IVVMGIVGK

SEQ ID NO: 56450 - protein, 9 aa, synthetic construct
  source 1..9: note = Seed: LVVVGAVGV (KRAS G12V)
IVVMGIVGL

SEQ ID NO: 56451 - protein, 9 aa, synthetic construct
  source 1..9: note = Seed: LVVVGAVGV (KRAS G12V)
IVVMGIVGM

SEQ ID NO: 56452 - protein, 9 aa, synthetic construct
  source 1..9: note = Seed: LVVVGAVGV (KRAS G12V)
IVVMGIVGN

SEQ ID NO: 56453 - protein, 9 aa, synthetic construct
  source 1..9: note = Seed: LVVVGAVGV (KRAS G12V)
IVVMGIVGR

SEQ ID NO: 56454 - protein, 9 aa, synthetic construct
  source 1..9: note = Seed: LVVVGAVGV (KRAS G12V)
IVVMGIVGS

SEQ ID NO: 56455 - protein, 9 aa, synthetic construct
  source 1..9: note = Seed: LVVVGAVGV (KRAS G12V)
IVVMGIVGT

SEQ ID NO: 56456 - protein, 9 aa, synthetic construct
  source 1..9: note = Seed: LVVVGAVGV (KRAS G12V)
IVVMGIVGV

SEQ ID NO: 56457 - protein, 9 aa, synthetic construct
  source 1..9: note = Seed: LVVVGAVGV (KRAS G12V)
IVVMGKVGA

SEQ ID NO: 56458 - protein, 9 aa, synthetic construct
  source 1..9: note = Seed: LVVVGAVGV (KRAS G12V)
IVVMGKVGE

SEQ ID NO: 56459 - protein, 9 aa, synthetic construct
  source 1..9: note = Seed: LVVVGAVGV (KRAS G12V)
IVVMGKVGF

SEQ ID NO: 56460 - protein, 9 aa, synthetic construct
  source 1..9: note = Seed: LVVVGAVGV (KRAS G12V)
IVVMGKVGG

SEQ ID NO: 56461 - protein, 9 aa, synthetic construct
  source 1..9: note = Seed: LVVVGAVGV (KRAS G12V)
IVVMGKVGH

SEQ ID NO: 56462 - protein, 9 aa, synthetic construct
  source 1..9: note = Seed: LVVVGAVGV (KRAS G12V)
IVVMGKVGI

SEQ ID NO: 56463 - protein, 9 aa, synthetic construct
  source 1..9: note = Seed: LVVVGAVGV (KRAS G12V)
IVVMGKVGK

SEQ ID NO: 56464 - protein, 9 aa, synthetic construct
  source 1..9: note = Seed: LVVVGAVGV (KRAS G12V)
IVVMGKVGL

SEQ ID NO: 56465 - protein, 9 aa, synthetic construct
  source 1..9: note = Seed: LVVVGAVGV (KRAS G12V)
IVVMGKVGM

SEQ ID NO: 56466 - protein, 9 aa, synthetic construct
  source 1..9: note = Seed: LVVVGAVGV (KRAS G12V)
IVVMGKVGN

SEQ ID NO: 56467 - protein, 9 aa, synthetic construct
  source 1..9: note = Seed: LVVVGAVGV (KRAS G12V)
IVVMGKVGP

SEQ ID NO: 56468 - protein, 9 aa, synthetic construct
  source 1..9: note = Seed: LVVVGAVGV (KRAS G12V)
IVVMGKVGQ

SEQ ID NO: 56469 - protein, 9 aa, synthetic construct
  source 1..9: note = Seed: LVVVGAVGV (KRAS G12V)
IVVMGKVGR

SEQ ID NO: 56470 - protein, 9 aa, synthetic construct
  source 1..9: note = Seed: LVVVGAVGV (KRAS G12V)
IVVMGKVGS

SEQ ID NO: 56471 - protein, 9 aa, synthetic construct
  source 1..9: note = Seed: LVVVGAVGV (KRAS G12V)
IVVMGKVGT

SEQ ID NO: 56472 - protein, 9 aa, synthetic construct
  source 1..9: note = Seed: LVVVGAVGV (KRAS G12V)
IVVMGKVGV

SEQ ID NO: 56473 - protein, 9 aa, synthetic construct
  source 1..9: note = Seed: LVVVGAVGV (KRAS G12V)
IVVMGKVGY

SEQ ID NO: 56474 - protein, 9 aa, synthetic construct
  source 1..9: note = Seed: LVVVGAVGV (KRAS G12V)
IVVMGLVGA

SEQ ID NO: 56475 - protein, 9 aa, synthetic construct
  source 1..9: note = Seed: LVVVGAVGV (KRAS G12V)
IVVMGLVGH

SEQ ID NO: 56476 - protein, 9 aa, synthetic construct
  source 1..9: note = Seed: LVVVGAVGV (KRAS G12V)
IVVMGLVGI

SEQ ID NO: 56477 - protein, 9 aa, synthetic construct
  source 1..9: note = Seed: LVVVGAVGV (KRAS G12V)
IVVMGLVGK

SEQ ID NO: 56478 - protein, 9 aa, synthetic construct
  source 1..9: note = Seed: LVVVGAVGV (KRAS G12V)
IVVMGLVGL

SEQ ID NO: 56479 - protein, 9 aa, synthetic construct
  source 1..9: note = Seed: LVVVGAVGV (KRAS G12V)
IVVMGLVGM

SEQ ID NO: 56480 - protein, 9 aa, synthetic construct
  source 1..9: note = Seed: LVVVGAVGV (KRAS G12V)
IVVMGLVGN

SEQ ID NO: 56481 - protein, 9 aa, synthetic construct
  source 1..9: note = Seed: LVVVGAVGV (KRAS G12V)
IVVMGLVGQ

SEQ ID NO: 56482 - protein, 9 aa, synthetic construct
  source 1..9: note = Seed: LVVVGAVGV (KRAS G12V)
IVVMGLVGR

SEQ ID NO: 56483 - protein, 9 aa, synthetic construct
  source 1..9: note = Seed: LVVVGAVGV (KRAS G12V)
IVVMGLVGS

SEQ ID NO: 56484 - protein, 9 aa, synthetic construct
  source 1..9: note = Seed: LVVVGAVGV (KRAS G12V)
IVVMGLVGV

SEQ ID NO: 56485 - protein, 9 aa, synthetic construct
  source 1..9: note = Seed: LVVVGAVGV (KRAS G12V)
IVVMGLVGY

SEQ ID NO: 56486 - protein, 9 aa, synthetic construct
  source 1..9: note = Seed: LVVVGAVGV (KRAS G12V)
IVVMGMVGA

SEQ ID NO: 56487 - protein, 9 aa, synthetic construct
  source 1..9: note = Seed: LVVVGAVGV (KRAS G12V)
IVVMGMVGF

SEQ ID NO: 56488 - protein, 9 aa, synthetic construct
  source 1..9: note = Seed: LVVVGAVGV (KRAS G12V)
IVVMGMVGH

SEQ ID NO: 56489 - protein, 9 aa, synthetic construct
  source 1..9: note = Seed: LVVVGAVGV (KRAS G12V)
IVVMGMVGI

SEQ ID NO: 56490 - protein, 9 aa, synthetic construct
  source 1..9: note = Seed: LVVVGAVGV (KRAS G12V)
IVVMGMVGK

SEQ ID NO: 56491 - protein, 9 aa, synthetic construct
  source 1..9: note = Seed: LVVVGAVGV (KRAS G12V)
IVVMGMVGL

SEQ ID NO: 56492 - protein, 9 aa, synthetic construct
  source 1..9: note = Seed: LVVVGAVGV (KRAS G12V)
IVVMGMVGM

SEQ ID NO: 56493 - protein, 9 aa, synthetic construct
  source 1..9: note = Seed: LVVVGAVGV (KRAS G12V)
IVVMGMVGN

SEQ ID NO: 56494 - protein, 9 aa, synthetic construct
  source 1..9: note = Seed: LVVVGAVGV (KRAS G12V)
IVVMGMVGQ

SEQ ID NO: 56495 - protein, 9 aa, synthetic construct
  source 1..9: note = Seed: LVVVGAVGV (KRAS G12V)
IVVMGMVGR

SEQ ID NO: 56496 - protein, 9 aa, synthetic construct
  source 1..9: note = Seed: LVVVGAVGV (KRAS G12V)
IVVMGMVGS

SEQ ID NO: 56497 - protein, 9 aa, synthetic construct
  source 1..9: note = Seed: LVVVGAVGV (KRAS G12V)
IVVMGMVGT

SEQ ID NO: 56498 - protein, 9 aa, synthetic construct
  source 1..9: note = Seed: LVVVGAVGV (KRAS G12V)
IVVMGMVGV

SEQ ID NO: 56499 - protein, 9 aa, synthetic construct
  source 1..9: note = Seed: LVVVGAVGV (KRAS G12V)
IVVMGMVGY

SEQ ID NO: 56500 - protein, 9 aa, synthetic construct
  source 1..9: note = Seed: LVVVGAVGV (KRAS G12V)
IVVMGNVGA

SEQ ID NO: 56501 - protein, 9 aa, synthetic construct
  source 1..9: note = Seed: LVVVGAVGV (KRAS G12V)
IVVMGNVGC

SEQ ID NO: 56502 - protein, 9 aa, synthetic construct
  source 1..9: note = Seed: LVVVGAVGV (KRAS G12V)
IVVMGNVGD

SEQ ID NO: 56503 - protein, 9 aa, synthetic construct
  source 1..9: note = Seed: LVVVGAVGV (KRAS G12V)
IVVMGNVGE

SEQ ID NO: 56504 - protein, 9 aa, synthetic construct
  source 1..9: note = Seed: LVVVGAVGV (KRAS G12V)
IVVMGNVGF

SEQ ID NO: 56505 - protein, 9 aa, synthetic construct
  source 1..9: note = Seed: LVVVGAVGV (KRAS G12V)
IVVMGNVGG

SEQ ID NO: 56506 - protein, 9 aa, synthetic construct
  source 1..9: note = Seed: LVVVGAVGV (KRAS G12V)
IVVMGNVGH

SEQ ID NO: 56507 - protein, 9 aa, synthetic construct
  source 1..9: note = Seed: LVVVGAVGV (KRAS G12V)
IVVMGNVGI

SEQ ID NO: 56508 - protein, 9 aa, synthetic construct
  source 1..9: note = Seed: LVVVGAVGV (KRAS G12V)
IVVMGNVGK

SEQ ID NO: 56509 - protein, 9 aa, synthetic construct
  source 1..9: note = Seed: LVVVGAVGV (KRAS G12V)
IVVMGNVGL

SEQ ID NO: 56510 - protein, 9 aa, synthetic construct
  source 1..9: note = Seed: LVVVGAVGV (KRAS G12V)
IVVMGNVGM

SEQ ID NO: 56511 - protein, 9 aa, synthetic construct
  source 1..9: note = Seed: LVVVGAVGV (KRAS G12V)
IVVMGNVGN

SEQ ID NO: 56512 - protein, 9 aa, synthetic construct
  source 1..9: note = Seed: LVVVGAVGV (KRAS G12V)
IVVMGNVGP

SEQ ID NO: 56513 - protein, 9 aa, synthetic construct
  source 1..9: note = Seed: LVVVGAVGV (KRAS G12V)
IVVMGNVGQ

SEQ ID NO: 56514 - protein, 9 aa, synthetic construct
  source 1..9: note = Seed: LVVVGAVGV (KRAS G12V)
IVVMGNVGR

SEQ ID NO: 56515 - protein, 9 aa, synthetic construct
  source 1..9: note = Seed: LVVVGAVGV (KRAS G12V)
IVVMGNVGS

SEQ ID NO: 56516 - protein, 9 aa, synthetic construct
  source 1..9: note = Seed: LVVVGAVGV (KRAS G12V)
IVVMGNVGT

SEQ ID NO: 56517 - protein, 9 aa, synthetic construct
  source 1..9: note = Seed: LVVVGAVGV (KRAS G12V)
IVVMGNVGV

SEQ ID NO: 56518 - protein, 9 aa, synthetic construct
  source 1..9: note = Seed: LVVVGAVGV (KRAS G12V)
IVVMGNVGY

SEQ ID NO: 56519 - protein, 9 aa, synthetic construct
  source 1..9: note = Seed: LVVVGAVGV (KRAS G12V)
IVVMGPVGA

SEQ ID NO: 56520 - protein, 9 aa, synthetic construct
  source 1..9: note = Seed: LVVVGAVGV (KRAS G12V)
IVVMGPVGC

SEQ ID NO: 56521 - protein, 9 aa, synthetic construct
  source 1..9: note = Seed: LVVVGAVGV (KRAS G12V)
IVVMGPVGD

SEQ ID NO: 56522 - protein, 9 aa, synthetic construct
  source 1..9: note = Seed: LVVVGAVGV (KRAS G12V)
IVVMGPVGE

SEQ ID NO: 56523 - protein, 9 aa, synthetic construct
  source 1..9: note = Seed: LVVVGAVGV (KRAS G12V)
IVVMGPVGF

SEQ ID NO: 56524 - protein, 9 aa, synthetic construct
  source 1..9: note = Seed: LVVVGAVGV (KRAS G12V)
IVVMGPVGG

SEQ ID NO: 56525 - protein, 9 aa, synthetic construct
  source 1..9: note = Seed: LVVVGAVGV (KRAS G12V)
IVVMGPVGH

SEQ ID NO: 56526 - protein, 9 aa, synthetic construct
  source 1..9: note = Seed: LVVVGAVGV (KRAS G12V)
IVVMGPVGI

SEQ ID NO: 56527 - protein, 9 aa, synthetic construct
  source 1..9: note = Seed: LVVVGAVGV (KRAS G12V)
IVVMGPVGK

SEQ ID NO: 56528 - protein, 9 aa, synthetic construct
  source 1..9: note = Seed: LVVVGAVGV (KRAS G12V)
IVVMGPVGL

SEQ ID NO: 56529 - protein, 9 aa, synthetic construct
  source 1..9: note = Seed: LVVVGAVGV (KRAS G12V)
IVVMGPVGM

SEQ ID NO: 56530 - protein, 9 aa, synthetic construct
  source 1..9: note = Seed: LVVVGAVGV (KRAS G12V)
IVVMGPVGN

SEQ ID NO: 56531 - protein, 9 aa, synthetic construct
  source 1..9: note = Seed: LVVVGAVGV (KRAS G12V)
IVVMGPVGP

SEQ ID NO: 56532 - protein, 9 aa, synthetic construct
  source 1..9: note = Seed: LVVVGAVGV (KRAS G12V)
IVVMGPVGQ

SEQ ID NO: 56533 - protein, 9 aa, synthetic construct
  source 1..9: note = Seed: LVVVGAVGV (KRAS G12V)
IVVMGPVGR

SEQ ID NO: 56534 - protein, 9 aa, synthetic construct
  source 1..9: note = Seed: LVVVGAVGV (KRAS G12V)
IVVMGPVGS

SEQ ID NO: 56535 - protein, 9 aa, synthetic construct
  source 1..9: note = Seed: LVVVGAVGV (KRAS G12V)
IVVMGPVGT

SEQ ID NO: 56536 - protein, 9 aa, synthetic construct
  source 1..9: note = Seed: LVVVGAVGV (KRAS G12V)
IVVMGPVGV

SEQ ID NO: 56537 - protein, 9 aa, synthetic construct
  source 1..9: note = Seed: LVVVGAVGV (KRAS G12V)
IVVMGPVGW

SEQ ID NO: 56538 - protein, 9 aa, synthetic construct
  source 1..9: note = Seed: LVVVGAVGV (KRAS G12V)
IVVMGPVGY

SEQ ID NO: 56539 - protein, 9 aa, synthetic construct
  source 1..9: note = Seed: LVVVGAVGV (KRAS G12V)
IVVMGQVGA

SEQ ID NO: 56540 - protein, 9 aa, synthetic construct
  source 1..9: note = Seed: LVVVGAVGV (KRAS G12V)
IVVMGQVGI

SEQ ID NO: 56541 - protein, 9 aa, synthetic construct
  source 1..9: note = Seed: LVVVGAVGV (KRAS G12V)
IVVMGQVGL

SEQ ID NO: 56542 - protein, 9 aa, synthetic construct
  source 1..9: note = Seed: LVVVGAVGV (KRAS G12V)
IVVMGQVGM

SEQ ID NO: 56543 - protein, 9 aa, synthetic construct
  source 1..9: note = Seed: LVVVGAVGV (KRAS G12V)
IVVMGQVGR

SEQ ID NO: 56544 - protein, 9 aa, synthetic construct
  source 1..9: note = Seed: LVVVGAVGV (KRAS G12V)
IVVMGQVGS

SEQ ID NO: 56545 - protein, 9 aa, synthetic construct
  source 1..9: note = Seed: LVVVGAVGV (KRAS G12V)
IVVMGQVGT

SEQ ID NO: 56546 - protein, 9 aa, synthetic construct
  source 1..9: note = Seed: LVVVGAVGV (KRAS G12V)
IVVMGQVGV

SEQ ID NO: 56547 - protein, 9 aa, synthetic construct
  source 1..9: note = Seed: LVVVGAVGV (KRAS G12V)
IVVMGRVGA

SEQ ID NO: 56548 - protein, 9 aa, synthetic construct
  source 1..9: note = Seed: LVVVGAVGV (KRAS G12V)
IVVMGRVGD

SEQ ID NO: 56549 - protein, 9 aa, synthetic construct
  source 1..9: note = Seed: LVVVGAVGV (KRAS G12V)
IVVMGRVGE

SEQ ID NO: 56550 - protein, 9 aa, synthetic construct
  source 1..9: note = Seed: LVVVGAVGV (KRAS G12V)
IVVMGRVGF

SEQ ID NO: 56551 - protein, 9 aa, synthetic construct
  source 1..9: note = Seed: LVVVGAVGV (KRAS G12V)
IVVMGRVGG

SEQ ID NO: 56552 - protein, 9 aa, synthetic construct
  source 1..9: note = Seed: LVVVGAVGV (KRAS G12V)
IVVMGRVGH

SEQ ID NO: 56553 - protein, 9 aa, synthetic construct
  source 1..9: note = Seed: LVVVGAVGV (KRAS G12V)
IVVMGRVGI

SEQ ID NO: 56554 - protein, 9 aa, synthetic construct
  source 1..9: note = Seed: LVVVGAVGV (KRAS G12V)
IVVMGRVGK

SEQ ID NO: 56555 - protein, 9 aa, synthetic construct
  source 1..9: note = Seed: LVVVGAVGV (KRAS G12V)
IVVMGRVGL

SEQ ID NO: 56556 - protein, 9 aa, synthetic construct
  source 1..9: note = Seed: LVVVGAVGV (KRAS G12V)
IVVMGRVGM

SEQ ID NO: 56557 - protein, 9 aa, synthetic construct
  source 1..9: note = Seed: LVVVGAVGV (KRAS G12V)
IVVMGRVGN

SEQ ID NO: 56558 - protein, 9 aa, synthetic construct
  source 1..9: note = Seed: LVVVGAVGV (KRAS G12V)
IVVMGRVGP

SEQ ID NO: 56559 - protein, 9 aa, synthetic construct
  source 1..9: note = Seed: LVVVGAVGV (KRAS G12V)
IVVMGRVGQ

SEQ ID NO: 56560 - protein, 9 aa, synthetic construct
  source 1..9: note = Seed: LVVVGAVGV (KRAS G12V)
IVVMGRVGR

SEQ ID NO: 56561 - protein, 9 aa, synthetic construct
  source 1..9: note = Seed: LVVVGAVGV (KRAS G12V)
IVVMGRVGS

SEQ ID NO: 56562 - protein, 9 aa, synthetic construct
  source 1..9: note = Seed: LVVVGAVGV (KRAS G12V)
IVVMGRVGT

SEQ ID NO: 56563 - protein, 9 aa, synthetic construct
  source 1..9: note = Seed: LVVVGAVGV (KRAS G12V)
IVVMGRVGV

SEQ ID NO: 56564 - protein, 9 aa, synthetic construct
  source 1..9: note = Seed: LVVVGAVGV (KRAS G12V)
IVVMGRVGY

SEQ ID NO: 56565 - protein, 9 aa, synthetic construct
  source 1..9: note = Seed: LVVVGAVGV (KRAS G12V)
IVVMGSVGA

SEQ ID NO: 56566 - protein, 9 aa, synthetic construct
  source 1..9: note = Seed: LVVVGAVGV (KRAS G12V)
IVVMGSVGC

SEQ ID NO: 56567 - protein, 9 aa, synthetic construct
  source 1..9: note = Seed: LVVVGAVGV (KRAS G12V)
IVVMGSVGD

SEQ ID NO: 56568 - protein, 9 aa, synthetic construct
  source 1..9: note = Seed: LVVVGAVGV (KRAS G12V)
IVVMGSVGE

SEQ ID NO: 56569 - protein, 9 aa, synthetic construct
  source 1..9: note = Seed: LVVVGAVGV (KRAS G12V)
IVVMGSVGF

SEQ ID NO: 56570 - protein, 9 aa, synthetic construct
  source 1..9: note = Seed: LVVVGAVGV (KRAS G12V)
IVVMGSVGG

SEQ ID NO: 56571 - protein, 9 aa, synthetic construct
  source 1..9: note = Seed: LVVVGAVGV (KRAS G12V)
IVVMGSVGH

SEQ ID NO: 56572 - protein, 9 aa, synthetic construct
  source 1..9: note = Seed: LVVVGAVGV (KRAS G12V)
IVVMGSVGI

SEQ ID NO: 56573 - protein, 9 aa, synthetic construct
  source 1..9: note = Seed: LVVVGAVGV (KRAS G12V)
IVVMGSVGK

SEQ ID NO: 56574 - protein, 9 aa, synthetic construct
  source 1..9: note = Seed: LVVVGAVGV (KRAS G12V)
IVVMGSVGL

SEQ ID NO: 56575 - protein, 9 aa, synthetic construct
  source 1..9: note = Seed: LVVVGAVGV (KRAS G12V)
IVVMGSVGM

SEQ ID NO: 56576 - protein, 9 aa, synthetic construct
  source 1..9: note = Seed: LVVVGAVGV (KRAS G12V)
IVVMGSVGN

SEQ ID NO: 56577 - protein, 9 aa, synthetic construct
  source 1..9: note = Seed: LVVVGAVGV (KRAS G12V)
IVVMGSVGP

SEQ ID NO: 56578 - protein, 9 aa, synthetic construct
  source 1..9: note = Seed: LVVVGAVGV (KRAS G12V)
IVVMGSVGQ

SEQ ID NO: 56579 - protein, 9 aa, synthetic construct
  source 1..9: note = Seed: LVVVGAVGV (KRAS G12V)
IVVMGSVGR

SEQ ID NO: 56580 - protein, 9 aa, synthetic construct
  source 1..9: note = Seed: LVVVGAVGV (KRAS G12V)
IVVMGSVGS

SEQ ID NO: 56581 - protein, 9 aa, synthetic construct
  source 1..9: note = Seed: LVVVGAVGV (KRAS G12V)
IVVMGSVGT

SEQ ID NO: 56582 - protein, 9 aa, synthetic construct
  source 1..9: note = Seed: LVVVGAVGV (KRAS G12V)
IVVMGSVGV

SEQ ID NO: 56583 - protein, 9 aa, synthetic construct
  source 1..9: note = Seed: LVVVGAVGV (KRAS G12V)
IVVMGSVGY

SEQ ID NO: 56584 - protein, 9 aa, synthetic construct
  source 1..9: note = Seed: LVVVGAVGV (KRAS G12V)
IVVMGTVGA

SEQ ID NO: 56585 - protein, 9 aa, synthetic construct
  source 1..9: note = Seed: LVVVGAVGV (KRAS G12V)
IVVMGTVGE

SEQ ID NO: 56586 - protein, 9 aa, synthetic construct
  source 1..9: note = Seed: LVVVGAVGV (KRAS G12V)
IVVMGTVGF

SEQ ID NO: 56587 - protein, 9 aa, synthetic construct
  source 1..9: note = Seed: LVVVGAVGV (KRAS G12V)
IVVMGTVGG

SEQ ID NO: 56588 - protein, 9 aa, synthetic construct
  source 1..9: note = Seed: LVVVGAVGV (KRAS G12V)
IVVMGTVGH

SEQ ID NO: 56589 - protein, 9 aa, synthetic construct
  source 1..9: note = Seed: LVVVGAVGV (KRAS G12V)
IVVMGTVGI

SEQ ID NO: 56590 - protein, 9 aa, synthetic construct
  source 1..9: note = Seed: LVVVGAVGV (KRAS G12V)
IVVMGTVGK

SEQ ID NO: 56591 - protein, 9 aa, synthetic construct
  source 1..9: note = Seed: LVVVGAVGV (KRAS G12V)
IVVMGTVGL

SEQ ID NO: 56592 - protein, 9 aa, synthetic construct
  source 1..9: note = Seed: LVVVGAVGV (KRAS G12V)
IVVMGTVGM

SEQ ID NO: 56593 - protein, 9 aa, synthetic construct
  source 1..9: note = Seed: LVVVGAVGV (KRAS G12V)
IVVMGTVGN

SEQ ID NO: 56594 - protein, 9 aa, synthetic construct
  source 1..9: note = Seed: LVVVGAVGV (KRAS G12V)
IVVMGTVGP

SEQ ID NO: 56595 - protein, 9 aa, synthetic construct
  source 1..9: note = Seed: LVVVGAVGV (KRAS G12V)
IVVMGTVGQ

SEQ ID NO: 56596 - protein, 9 aa, synthetic construct
  source 1..9: note = Seed: LVVVGAVGV (KRAS G12V)
IVVMGTVGR

SEQ ID NO: 56597 - protein, 9 aa, synthetic construct
  source 1..9: note = Seed: LVVVGAVGV (KRAS G12V)
IVVMGTVGS

SEQ ID NO: 56598 - protein, 9 aa, synthetic construct
  source 1..9: note = Seed: LVVVGAVGV (KRAS G12V)
IVVMGTVGT

SEQ ID NO: 56599 - protein, 9 aa, synthetic construct
  source 1..9: note = Seed: LVVVGAVGV (KRAS G12V)
IVVMGTVGV

SEQ ID NO: 56600 - protein, 9 aa, synthetic construct
  source 1..9: note = Seed: LVVVGAVGV (KRAS G12V)
IVVMGTVGY

SEQ ID NO: 56601 - protein, 9 aa, synthetic construct
  source 1..9: note = Seed: LVVVGAVGV (KRAS G12V)
IVVMGVVGA

SEQ ID NO: 56602 - protein, 9 aa, synthetic construct
  source 1..9: note = Seed: LVVVGAVGV (KRAS G12V)
IVVMGVVGH

SEQ ID NO: 56603 - protein, 9 aa, synthetic construct
  source 1..9: note = Seed: LVVVGAVGV (KRAS G12V)
IVVMGVVGI

SEQ ID NO: 56604 - protein, 9 aa, synthetic construct
  source 1..9: note = Seed: LVVVGAVGV (KRAS G12V)
IVVMGVVGK

SEQ ID NO: 56605 - protein, 9 aa, synthetic construct
  source 1..9: note = Seed: LVVVGAVGV (KRAS G12V)
IVVMGVVGL

SEQ ID NO: 56606 - protein, 9 aa, synthetic construct
  source 1..9: note = Seed: LVVVGAVGV (KRAS G12V)
IVVMGVVGM

SEQ ID NO: 56607 - protein, 9 aa, synthetic construct
  source 1..9: note = Seed: LVVVGAVGV (KRAS G12V)
IVVMGVVGN

SEQ ID NO: 56608 - protein, 9 aa, synthetic construct
  source 1..9: note = Seed: LVVVGAVGV (KRAS G12V)
IVVMGVVGP

SEQ ID NO: 56609 - protein, 9 aa, synthetic construct
  source 1..9: note = Seed: LVVVGAVGV (KRAS G12V)
IVVMGVVGQ

SEQ ID NO: 56610 - protein, 9 aa, synthetic construct
  source 1..9: note = Seed: LVVVGAVGV (KRAS G12V)
IVVMGVVGR

SEQ ID NO: 56611 - protein, 9 aa, synthetic construct
  source 1..9: note = Seed: LVVVGAVGV (KRAS G12V)
IVVMGVVGS

SEQ ID NO: 56612 - protein, 9 aa, synthetic construct
  source 1..9: note = Seed: LVVVGAVGV (KRAS G12V)
IVVMGVVGT

SEQ ID NO: 56613 - protein, 9 aa, synthetic construct
  source 1..9: note = Seed: LVVVGAVGV (KRAS G12V)
IVVMGVVGV

SEQ ID NO: 56614 - protein, 9 aa, synthetic construct
  source 1..9: note = Seed: LVVVGAVGV (KRAS G12V)
IVVMGVVGY

SEQ ID NO: 56615 - protein, 9 aa, synthetic construct
  source 1..9: note = Seed: LVVVGAVGV (KRAS G12V)
IVVMGWVGR

SEQ ID NO: 56616 - protein, 9 aa, synthetic construct
  source 1..9: note = Seed: LVVVGAVGV (KRAS G12V)
IVVMGYVGA

SEQ ID NO: 56617 - protein, 9 aa, synthetic construct
  source 1..9: note = Seed: LVVVGAVGV (KRAS G12V)
IVVMGYVGL

SEQ ID NO: 56618 - protein, 9 aa, synthetic construct
  source 1..9: note = Seed: LVVVGAVGV (KRAS G12V)
IVVMGYVGM

SEQ ID NO: 56619 - protein, 9 aa, synthetic construct
  source 1..9: note = Seed: LVVVGAVGV (KRAS G12V)
IVVNGAVGA

SEQ ID NO: 56620 - protein, 9 aa, synthetic construct
  source 1..9: note = Seed: LVVVGAVGV (KRAS G12V)
IVVNGAVGC

SEQ ID NO: 56621 - protein, 9 aa, synthetic construct
  source 1..9: note = Seed: LVVVGAVGV (KRAS G12V)
IVVNGAVGD

SEQ ID NO: 56622 - protein, 9 aa, synthetic construct
  source 1..9: note = Seed: LVVVGAVGV (KRAS G12V)
IVVNGAVGE

SEQ ID NO: 56623 - protein, 9 aa, synthetic construct
  source 1..9: note = Seed: LVVVGAVGV (KRAS G12V)
IVVNGAVGF

SEQ ID NO: 56624 - protein, 9 aa, synthetic construct
  source 1..9: note = Seed: LVVVGAVGV (KRAS G12V)
IVVNGAVGG

SEQ ID NO: 56625 - protein, 9 aa, synthetic construct
  source 1..9: note = Seed: LVVVGAVGV (KRAS G12V)
IVVNGAVGH

SEQ ID NO: 56626 - protein, 9 aa, synthetic construct
  source 1..9: note = Seed: LVVVGAVGV (KRAS G12V)
IVVNGAVGI

SEQ ID NO: 56627 - protein, 9 aa, synthetic construct
  source 1..9: note = Seed: LVVVGAVGV (KRAS G12V)
IVVNGAVGK

SEQ ID NO: 56628 - protein, 9 aa, synthetic construct
  source 1..9: note = Seed: LVVVGAVGV (KRAS G12V)
IVVNGAVGL

SEQ ID NO: 56629 - protein, 9 aa, synthetic construct
  source 1..9: note = Seed: LVVVGAVGV (KRAS G12V)
IVVNGAVGM

SEQ ID NO: 56630 - protein, 9 aa, synthetic construct
  source 1..9: note = Seed: LVVVGAVGV (KRAS G12V)
IVVNGAVGN

SEQ ID NO: 56631 - protein, 9 aa, synthetic construct
  source 1..9: note = Seed: LVVVGAVGV (KRAS G12V)
IVVNGAVGP

SEQ ID NO: 56632 - protein, 9 aa, synthetic construct
  source 1..9: note = Seed: LVVVGAVGV (KRAS G12V)
IVVNGAVGQ

SEQ ID NO: 56633 - protein, 9 aa, synthetic construct
  source 1..9: note = Seed: LVVVGAVGV (KRAS G12V)
IVVNGAVGR

SEQ ID NO: 56634 - protein, 9 aa, synthetic construct
  source 1..9: note = Seed: LVVVGAVGV (KRAS G12V)
IVVNGAVGS

SEQ ID NO: 56635 - protein, 9 aa, synthetic construct
  source 1..9: note = Seed: LVVVGAVGV (KRAS G12V)
IVVNGAVGT

SEQ ID NO: 56636 - protein, 9 aa, synthetic construct
  source 1..9: note = Seed: LVVVGAVGV (KRAS G12V)
IVVNGAVGV

SEQ ID NO: 56637 - protein, 9 aa, synthetic construct
  source 1..9: note = Seed: LVVVGAVGV (KRAS G12V)
IVVNGAVGW

SEQ ID NO: 56638 - protein, 9 aa, synthetic construct
  source 1..9: note = Seed: LVVVGAVGV (KRAS G12V)
IVVNGAVGY

SEQ ID NO: 56639 - protein, 9 aa, synthetic construct
  source 1..9: note = Seed: LVVVGAVGV (KRAS G12V)
IVVNGCVGA

SEQ ID NO: 56640 - protein, 9 aa, synthetic construct
  source 1..9: note = Seed: LVVVGAVGV (KRAS G12V)
IVVNGCVGF

SEQ ID NO: 56641 - protein, 9 aa, synthetic construct
  source 1..9: note = Seed: LVVVGAVGV (KRAS G12V)
IVVNGCVGG

SEQ ID NO: 56642 - protein, 9 aa, synthetic construct
  source 1..9: note = Seed: LVVVGAVGV (KRAS G12V)
IVVNGCVGH

SEQ ID NO: 56643 - protein, 9 aa, synthetic construct
  source 1..9: note = Seed: LVVVGAVGV (KRAS G12V)
IVVNGCVGI

SEQ ID NO: 56644 - protein, 9 aa, synthetic construct
  source 1..9: note = Seed: LVVVGAVGV (KRAS G12V)
IVVNGCVGL

SEQ ID NO: 56645 - protein, 9 aa, synthetic construct
  source 1..9: note = Seed: LVVVGAVGV (KRAS G12V)
IVVNGCVGM

SEQ ID NO: 56646 - protein, 9 aa, synthetic construct
  source 1..9: note = Seed: LVVVGAVGV (KRAS G12V)
IVVNGCVGN

SEQ ID NO: 56647 - protein, 9 aa, synthetic construct
  source 1..9: note = Seed: LVVVGAVGV (KRAS G12V)
IVVNGCVGQ

SEQ ID NO: 56648 - protein, 9 aa, synthetic construct
  source 1..9: note = Seed: LVVVGAVGV (KRAS G12V)
IVVNGCVGS

SEQ ID NO: 56649 - protein, 9 aa, synthetic construct
  source 1..9: note = Seed: LVVVGAVGV (KRAS G12V)
IVVNGCVGT

SEQ ID NO: 56650 - protein, 9 aa, synthetic construct
  source 1..9: note = Seed: LVVVGAVGV (KRAS G12V)
IVVNGCVGV

SEQ ID NO: 56651 - protein, 9 aa, synthetic construct
  source 1..9: note = Seed: LVVVGAVGV (KRAS G12V)
IVVNGCVGY

SEQ ID NO: 56652 - protein, 9 aa, synthetic construct
  source 1..9: note = Seed: LVVVGAVGV (KRAS G12V)
IVVNGDVGA

SEQ ID NO: 56653 - protein, 9 aa, synthetic construct
  source 1..9: note = Seed: LVVVGAVGV (KRAS G12V)
IVVNGDVGF

SEQ ID NO: 56654 - protein, 9 aa, synthetic construct
  source 1..9: note = Seed: LVVVGAVGV (KRAS G12V)
IVVNGDVGI

SEQ ID NO: 56655 - protein, 9 aa, synthetic construct
  source 1..9: note = Seed: LVVVGAVGV (KRAS G12V)
IVVNGDVGL

SEQ ID NO: 56656 - protein, 9 aa, synthetic construct
  source 1..9: note = Seed: LVVVGAVGV (KRAS G12V)
IVVNGDVGM

SEQ ID NO: 56657 - protein, 9 aa, synthetic construct
  source 1..9: note = Seed: LVVVGAVGV (KRAS G12V)
IVVNGDVGS

SEQ ID NO: 56658 - protein, 9 aa, synthetic construct
  source 1..9: note = Seed: LVVVGAVGV (KRAS G12V)
IVVNGDVGT

SEQ ID NO: 56659 - protein, 9 aa, synthetic construct
  source 1..9: note = Seed: LVVVGAVGV (KRAS G12V)
IVVNGDVGV

SEQ ID NO: 56660 - protein, 9 aa, synthetic construct
  source 1..9: note = Seed: LVVVGAVGV (KRAS G12V)
IVVNGDVGY

SEQ ID NO: 56661 - protein, 9 aa, synthetic construct
  source 1..9: note = Seed: LVVVGAVGV (KRAS G12V)
IVVNGEVGA

SEQ ID NO: 56662 - protein, 9 aa, synthetic construct
  source 1..9: note = Seed: LVVVGAVGV (KRAS G12V)
IVVNGEVGF

SEQ ID NO: 56663 - protein, 9 aa, synthetic construct
  source 1..9: note = Seed: LVVVGAVGV (KRAS G12V)
IVVNGEVGI

SEQ ID NO: 56664 - protein, 9 aa, synthetic construct
  source 1..9: note = Seed: LVVVGAVGV (KRAS G12V)
IVVNGEVGL

SEQ ID NO: 56665 - protein, 9 aa, synthetic construct
  source 1..9: note = Seed: LVVVGAVGV (KRAS G12V)
IVVNGEVGM

SEQ ID NO: 56666 - protein, 9 aa, synthetic construct
  source 1..9: note = Seed: LVVVGAVGV (KRAS G12V)
IVVNGEVGV

SEQ ID NO: 56667 - protein, 9 aa, synthetic construct
  source 1..9: note = Seed: LVVVGAVGV (KRAS G12V)
IVVNGEVGY

SEQ ID NO: 56668 - protein, 9 aa, synthetic construct
  source 1..9: note = Seed: LVVVGAVGV (KRAS G12V)
IVVNGFVGA

SEQ ID NO: 56669 - protein, 9 aa, synthetic construct
  source 1..9: note = Seed: LVVVGAVGV (KRAS G12V)
IVVNGFVGF

SEQ ID NO: 56670 - protein, 9 aa, synthetic construct
  source 1..9: note = Seed: LVVVGAVGV (KRAS G12V)
IVVNGFVGI

SEQ ID NO: 56671 - protein, 9 aa, synthetic construct
  source 1..9: note = Seed: LVVVGAVGV (KRAS G12V)
IVVNGFVGL

SEQ ID NO: 56672 - protein, 9 aa, synthetic construct
  source 1..9: note = Seed: LVVVGAVGV (KRAS G12V)
IVVNGFVGM

SEQ ID NO: 56673 - protein, 9 aa, synthetic construct
  source 1..9: note = Seed: LVVVGAVGV (KRAS G12V)
IVVNGFVGS

SEQ ID NO: 56674 - protein, 9 aa, synthetic construct
  source 1..9: note = Seed: LVVVGAVGV (KRAS G12V)
IVVNGFVGT

SEQ ID NO: 56675 - protein, 9 aa, synthetic construct
  source 1..9: note = Seed: LVVVGAVGV (KRAS G12V)
IVVNGFVGV

SEQ ID NO: 56676 - protein, 9 aa, synthetic construct
  source 1..9: note = Seed: LVVVGAVGV (KRAS G12V)
IVVNGFVGY

SEQ ID NO: 56677 - protein, 9 aa, synthetic construct
  source 1..9: note = Seed: LVVVGAVGV (KRAS G12V)
IVVNGGVGA

SEQ ID NO: 56678 - protein, 9 aa, synthetic construct
  source 1..9: note = Seed: LVVVGAVGV (KRAS G12V)
IVVNGGVGC

SEQ ID NO: 56679 - protein, 9 aa, synthetic construct
  source 1..9: note = Seed: LVVVGAVGV (KRAS G12V)
IVVNGGVGD

SEQ ID NO: 56680 - protein, 9 aa, synthetic construct
  source 1..9: note = Seed: LVVVGAVGV (KRAS G12V)
IVVNGGVGE

SEQ ID NO: 56681 - protein, 9 aa, synthetic construct
  source 1..9: note = Seed: LVVVGAVGV (KRAS G12V)
IVVNGGVGF

SEQ ID NO: 56682 - protein, 9 aa, synthetic construct
  source 1..9: note = Seed: LVVVGAVGV (KRAS G12V)
IVVNGGVGG

SEQ ID NO: 56683 - protein, 9 aa, synthetic construct
  source 1..9: note = Seed: LVVVGAVGV (KRAS G12V)
IVVNGGVGH

SEQ ID NO: 56684 - protein, 9 aa, synthetic construct
  source 1..9: note = Seed: LVVVGAVGV (KRAS G12V)
IVVNGGVGI

SEQ ID NO: 56685 - protein, 9 aa, synthetic construct
  source 1..9: note = Seed: LVVVGAVGV (KRAS G12V)
IVVNGGVGL

SEQ ID NO: 56686 - protein, 9 aa, synthetic construct
  source 1..9: note = Seed: LVVVGAVGV (KRAS G12V)
IVVNGGVGM

SEQ ID NO: 56687 - protein, 9 aa, synthetic construct
  source 1..9: note = Seed: LVVVGAVGV (KRAS G12V)
IVVNGGVGN

SEQ ID NO: 56688 - protein, 9 aa, synthetic construct
  source 1..9: note = Seed: LVVVGAVGV (KRAS G12V)
IVVNGGVGP

SEQ ID NO: 56689 - protein, 9 aa, synthetic construct
  source 1..9: note = Seed: LVVVGAVGV (KRAS G12V)
IVVNGGVGQ

SEQ ID NO: 56690 - protein, 9 aa, synthetic construct
  source 1..9: note = Seed: LVVVGAVGV (KRAS G12V)
IVVNGGVGR

SEQ ID NO: 56691 - protein, 9 aa, synthetic construct
  source 1..9: note = Seed: LVVVGAVGV (KRAS G12V)
IVVNGGVGS

SEQ ID NO: 56692 - protein, 9 aa, synthetic construct
  source 1..9: note = Seed: LVVVGAVGV (KRAS G12V)
IVVNGGVGT

SEQ ID NO: 56693 - protein, 9 aa, synthetic construct
  source 1..9: note = Seed: LVVVGAVGV (KRAS G12V)
IVVNGGVGV

SEQ ID NO: 56694 - protein, 9 aa, synthetic construct
  source 1..9: note = Seed: LVVVGAVGV (KRAS G12V)
IVVNGGVGW

SEQ ID NO: 56695 - protein, 9 aa, synthetic construct
  source 1..9: note = Seed: LVVVGAVGV (KRAS G12V)
IVVNGGVGY

SEQ ID NO: 56696 - protein, 9 aa, synthetic construct
  source 1..9: note = Seed: LVVVGAVGV (KRAS G12V)
IVVNGHVGA

SEQ ID NO: 56697 - protein, 9 aa, synthetic construct
  source 1..9: note = Seed: LVVVGAVGV (KRAS G12V)
IVVNGHVGF

SEQ ID NO: 56698 - protein, 9 aa, synthetic construct
  source 1..9: note = Seed: LVVVGAVGV (KRAS G12V)
IVVNGHVGH

SEQ ID NO: 56699 - protein, 9 aa, synthetic construct
  source 1..9: note = Seed: LVVVGAVGV (KRAS G12V)
IVVNGHVGI

SEQ ID NO: 56700 - protein, 9 aa, synthetic construct
  source 1..9: note = Seed: LVVVGAVGV (KRAS G12V)
IVVNGHVGL

SEQ ID NO: 56701 - protein, 9 aa, synthetic construct
  source 1..9: note = Seed: LVVVGAVGV (KRAS G12V)
IVVNGHVGM

SEQ ID NO: 56702 - protein, 9 aa, synthetic construct
  source 1..9: note = Seed: LVVVGAVGV (KRAS G12V)
IVVNGHVGN

SEQ ID NO: 56703 - protein, 9 aa, synthetic construct
  source 1..9: note = Seed: LVVVGAVGV (KRAS G12V)
IVVNGHVGQ

SEQ ID NO: 56704 - protein, 9 aa, synthetic construct
  source 1..9: note = Seed: LVVVGAVGV (KRAS G12V)
IVVNGHVGS

SEQ ID NO: 56705 - protein, 9 aa, synthetic construct
  source 1..9: note = Seed: LVVVGAVGV (KRAS G12V)
IVVNGHVGT

SEQ ID NO: 56706 - protein, 9 aa, synthetic construct
  source 1..9: note = Seed: LVVVGAVGV (KRAS G12V)
IVVNGHVGV

SEQ ID NO: 56707 - protein, 9 aa, synthetic construct
  source 1..9: note = Seed: LVVVGAVGV (KRAS G12V)
IVVNGHVGW

SEQ ID NO: 56708 - protein, 9 aa, synthetic construct
  source 1..9: note = Seed: LVVVGAVGV (KRAS G12V)
IVVNGHVGY

SEQ ID NO: 56709 - protein, 9 aa, synthetic construct
  source 1..9: note = Seed: LVVVGAVGV (KRAS G12V)
IVVNGIVGA

SEQ ID NO: 56710 - protein, 9 aa, synthetic construct
  source 1..9: note = Seed: LVVVGAVGV (KRAS G12V)
IVVNGIVGC

SEQ ID NO: 56711 - protein, 9 aa, synthetic construct
  source 1..9: note = Seed: LVVVGAVGV (KRAS G12V)
IVVNGIVGD

SEQ ID NO: 56712 - protein, 9 aa, synthetic construct
  source 1..9: note = Seed: LVVVGAVGV (KRAS G12V)
IVVNGIVGE

SEQ ID NO: 56713 - protein, 9 aa, synthetic construct
  source 1..9: note = Seed: LVVVGAVGV (KRAS G12V)
IVVNGIVGF

SEQ ID NO: 56714 - protein, 9 aa, synthetic construct
  source 1..9: note = Seed: LVVVGAVGV (KRAS G12V)
IVVNGIVGG

SEQ ID NO: 56715 - protein, 9 aa, synthetic construct
  source 1..9: note = Seed: LVVVGAVGV (KRAS G12V)
IVVNGIVGH

SEQ ID NO: 56716 - protein, 9 aa, synthetic construct
  source 1..9: note = Seed: LVVVGAVGV (KRAS G12V)
IVVNGIVGI

SEQ ID NO: 56717 - protein, 9 aa, synthetic construct
  source 1..9: note = Seed: LVVVGAVGV (KRAS G12V)
IVVNGIVGK

SEQ ID NO: 56718 - protein, 9 aa, synthetic construct
  source 1..9: note = Seed: LVVVGAVGV (KRAS G12V)
IVVNGIVGL

SEQ ID NO: 56719 - protein, 9 aa, synthetic construct
  source 1..9: note = Seed: LVVVGAVGV (KRAS G12V)
IVVNGIVGM

SEQ ID NO: 56720 - protein, 9 aa, synthetic construct
  source 1..9: note = Seed: LVVVGAVGV (KRAS G12V)
IVVNGIVGN

SEQ ID NO: 56721 - protein, 9 aa, synthetic construct
  source 1..9: note = Seed: LVVVGAVGV (KRAS G12V)
IVVNGIVGP

SEQ ID NO: 56722 - protein, 9 aa, synthetic construct
  source 1..9: note = Seed: LVVVGAVGV (KRAS G12V)
IVVNGIVGQ

SEQ ID NO: 56723 - protein, 9 aa, synthetic construct
  source 1..9: note = Seed: LVVVGAVGV (KRAS G12V)
IVVNGIVGR

SEQ ID NO: 56724 - protein, 9 aa, synthetic construct
  source 1..9: note = Seed: LVVVGAVGV (KRAS G12V)
IVVNGIVGS

SEQ ID NO: 56725 - protein, 9 aa, synthetic construct
  source 1..9: note = Seed: LVVVGAVGV (KRAS G12V)
IVVNGIVGT

SEQ ID NO: 56726 - protein, 9 aa, synthetic construct
  source 1..9: note = Seed: LVVVGAVGV (KRAS G12V)
IVVNGIVGV

SEQ ID NO: 56727 - protein, 9 aa, synthetic construct
  source 1..9: note = Seed: LVVVGAVGV (KRAS G12V)
IVVNGIVGW

SEQ ID NO: 56728 - protein, 9 aa, synthetic construct
  source 1..9: note = Seed: LVVVGAVGV (KRAS G12V)
IVVNGIVGY

SEQ ID NO: 56729 - protein, 9 aa, synthetic construct
  source 1..9: note = Seed: LVVVGAVGV (KRAS G12V)
IVVNGKVGA

SEQ ID NO: 56730 - protein, 9 aa, synthetic construct
  source 1..9: note = Seed: LVVVGAVGV (KRAS G12V)
IVVNGKVGF

SEQ ID NO: 56731 - protein, 9 aa, synthetic construct
  source 1..9: note = Seed: LVVVGAVGV (KRAS G12V)
IVVNGKVGI

SEQ ID NO: 56732 - protein, 9 aa, synthetic construct
  source 1..9: note = Seed: LVVVGAVGV (KRAS G12V)
IVVNGKVGL

SEQ ID NO: 56733 - protein, 9 aa, synthetic construct
  source 1..9: note = Seed: LVVVGAVGV (KRAS G12V)
IVVNGKVGM

SEQ ID NO: 56734 - protein, 9 aa, synthetic construct
  source 1..9: note = Seed: LVVVGAVGV (KRAS G12V)
IVVNGKVGS

SEQ ID NO: 56735 - protein, 9 aa, synthetic construct
  source 1..9: note = Seed: LVVVGAVGV (KRAS G12V)
IVVNGKVGT

SEQ ID NO: 56736 - protein, 9 aa, synthetic construct
  source 1..9: note = Seed: LVVVGAVGV (KRAS G12V)
IVVNGKVGV

SEQ ID NO: 56737 - protein, 9 aa, synthetic construct
  source 1..9: note = Seed: LVVVGAVGV (KRAS G12V)
IVVNGKVGY

SEQ ID NO: 56738 - protein, 9 aa, synthetic construct
  source 1..9: note = Seed: LVVVGAVGV (KRAS G12V)
IVVNGLVGA

SEQ ID NO: 56739 - protein, 9 aa, synthetic construct
  source 1..9: note = Seed: LVVVGAVGV (KRAS G12V)
IVVNGLVGD

SEQ ID NO: 56740 - protein, 9 aa, synthetic construct
  source 1..9: note = Seed: LVVVGAVGV (KRAS G12V)
IVVNGLVGE

SEQ ID NO: 56741 - protein, 9 aa, synthetic construct
  source 1..9: note = Seed: LVVVGAVGV (KRAS G12V)
IVVNGLVGF

SEQ ID NO: 56742 - protein, 9 aa, synthetic construct
  source 1..9: note = Seed: LVVVGAVGV (KRAS G12V)
IVVNGLVGG

SEQ ID NO: 56743 - protein, 9 aa, synthetic construct
  source 1..9: note = Seed: LVVVGAVGV (KRAS G12V)
IVVNGLVGH

SEQ ID NO: 56744 - protein, 9 aa, synthetic construct
  source 1..9: note = Seed: LVVVGAVGV (KRAS G12V)
IVVNGLVGI

SEQ ID NO: 56745 - protein, 9 aa, synthetic construct
  source 1..9: note = Seed: LVVVGAVGV (KRAS G12V)
IVVNGLVGK

SEQ ID NO: 56746 - protein, 9 aa, synthetic construct
  source 1..9: note = Seed: LVVVGAVGV (KRAS G12V)
IVVNGLVGL

SEQ ID NO: 56747 - protein, 9 aa, synthetic construct
  source 1..9: note = Seed: LVVVGAVGV (KRAS G12V)
IVVNGLVGM

SEQ ID NO: 56748 - protein, 9 aa, synthetic construct
  source 1..9: note = Seed: LVVVGAVGV (KRAS G12V)
IVVNGLVGN

SEQ ID NO: 56749 - protein, 9 aa, synthetic construct
  source 1..9: note = Seed: LVVVGAVGV (KRAS G12V)
IVVNGLVGP

SEQ ID NO: 56750 - protein, 9 aa, synthetic construct
  source 1..9: note = Seed: LVVVGAVGV (KRAS G12V)
IVVNGLVGQ

SEQ ID NO: 56751 - protein, 9 aa, synthetic construct
  source 1..9: note = Seed: LVVVGAVGV (KRAS G12V)
IVVNGLVGR

SEQ ID NO: 56752 - protein, 9 aa, synthetic construct
  source 1..9: note = Seed: LVVVGAVGV (KRAS G12V)
IVVNGLVGS

SEQ ID NO: 56753 - protein, 9 aa, synthetic construct
  source 1..9: note = Seed: LVVVGAVGV (KRAS G12V)
IVVNGLVGT

SEQ ID NO: 56754 - protein, 9 aa, synthetic construct
  source 1..9: note = Seed: LVVVGAVGV (KRAS G12V)
IVVNGLVGV

SEQ ID NO: 56755 - protein, 9 aa, synthetic construct
  source 1..9: note = Seed: LVVVGAVGV (KRAS G12V)
IVVNGLVGW

SEQ ID NO: 56756 - protein, 9 aa, synthetic construct
  source 1..9: note = Seed: LVVVGAVGV (KRAS G12V)
IVVNGLVGY

SEQ ID NO: 56757 - protein, 9 aa, synthetic construct
  source 1..9: note = Seed: LVVVGAVGV (KRAS G12V)
IVVNGMVGA

SEQ ID NO: 56758 - protein, 9 aa, synthetic construct
  source 1..9: note = Seed: LVVVGAVGV (KRAS G12V)
IVVNGMVGF

SEQ ID NO: 56759 - protein, 9 aa, synthetic construct
  source 1..9: note = Seed: LVVVGAVGV (KRAS G12V)
IVVNGMVGG

SEQ ID NO: 56760 - protein, 9 aa, synthetic construct
  source 1..9: note = Seed: LVVVGAVGV (KRAS G12V)
IVVNGMVGH

SEQ ID NO: 56761 - protein, 9 aa, synthetic construct
  source 1..9: note = Seed: LVVVGAVGV (KRAS G12V)
IVVNGMVGI

SEQ ID NO: 56762 - protein, 9 aa, synthetic construct
  source 1..9: note = Seed: LVVVGAVGV (KRAS G12V)
IVVNGMVGK

SEQ ID NO: 56763 - protein, 9 aa, synthetic construct
  source 1..9: note = Seed: LVVVGAVGV (KRAS G12V)
IVVNGMVGL

SEQ ID NO: 56764 - protein, 9 aa, synthetic construct
  source 1..9: note = Seed: LVVVGAVGV (KRAS G12V)
IVVNGMVGM

SEQ ID NO: 56765 - protein, 9 aa, synthetic construct
  source 1..9: note = Seed: LVVVGAVGV (KRAS G12V)
IVVNGMVGN

SEQ ID NO: 56766 - protein, 9 aa, synthetic construct
  source 1..9: note = Seed: LVVVGAVGV (KRAS G12V)
IVVNGMVGQ

SEQ ID NO: 56767 - protein, 9 aa, synthetic construct
  source 1..9: note = Seed: LVVVGAVGV (KRAS G12V)
IVVNGMVGR

SEQ ID NO: 56768 - protein, 9 aa, synthetic construct
  source 1..9: note = Seed: LVVVGAVGV (KRAS G12V)
IVVNGMVGS

SEQ ID NO: 56769 - protein, 9 aa, synthetic construct
  source 1..9: note = Seed: LVVVGAVGV (KRAS G12V)
IVVNGMVGT

SEQ ID NO: 56770 - protein, 9 aa, synthetic construct
  source 1..9: note = Seed: LVVVGAVGV (KRAS G12V)
IVVNGMVGV

SEQ ID NO: 56771 - protein, 9 aa, synthetic construct
  source 1..9: note = Seed: LVVVGAVGV (KRAS G12V)
IVVNGMVGW

SEQ ID NO: 56772 - protein, 9 aa, synthetic construct
  source 1..9: note = Seed: LVVVGAVGV (KRAS G12V)
IVVNGMVGY

SEQ ID NO: 56773 - protein, 9 aa, synthetic construct
  source 1..9: note = Seed: LVVVGAVGV (KRAS G12V)
IVVNGNVGA

SEQ ID NO: 56774 - protein, 9 aa, synthetic construct
  source 1..9: note = Seed: LVVVGAVGV (KRAS G12V)
IVVNGNVGC

SEQ ID NO: 56775 - protein, 9 aa, synthetic construct
  source 1..9: note = Seed: LVVVGAVGV (KRAS G12V)
IVVNGNVGD

SEQ ID NO: 56776 - protein, 9 aa, synthetic construct
  source 1..9: note = Seed: LVVVGAVGV (KRAS G12V)
IVVNGNVGE

SEQ ID NO: 56777 - protein, 9 aa, synthetic construct
  source 1..9: note = Seed: LVVVGAVGV (KRAS G12V)
IVVNGNVGF

SEQ ID NO: 56778 - protein, 9 aa, synthetic construct
  source 1..9: note = Seed: LVVVGAVGV (KRAS G12V)
IVVNGNVGG

SEQ ID NO: 56779 - protein, 9 aa, synthetic construct
  source 1..9: note = Seed: LVVVGAVGV (KRAS G12V)
IVVNGNVGH

SEQ ID NO: 56780 - protein, 9 aa, synthetic construct
  source 1..9: note = Seed: LVVVGAVGV (KRAS G12V)
IVVNGNVGI

SEQ ID NO: 56781 - protein, 9 aa, synthetic construct
  source 1..9: note = Seed: LVVVGAVGV (KRAS G12V)
IVVNGNVGK

SEQ ID NO: 56782 - protein, 9 aa, synthetic construct
  source 1..9: note = Seed: LVVVGAVGV (KRAS G12V)
IVVNGNVGL

SEQ ID NO: 56783 - protein, 9 aa, synthetic construct
  source 1..9: note = Seed: LVVVGAVGV (KRAS G12V)
IVVNGNVGM

SEQ ID NO: 56784 - protein, 9 aa, synthetic construct
  source 1..9: note = Seed: LVVVGAVGV (KRAS G12V)
IVVNGNVGN

SEQ ID NO: 56785 - protein, 9 aa, synthetic construct
  source 1..9: note = Seed: LVVVGAVGV (KRAS G12V)
IVVNGNVGP

SEQ ID NO: 56786 - protein, 9 aa, synthetic construct
  source 1..9: note = Seed: LVVVGAVGV (KRAS G12V)
IVVNGNVGQ

SEQ ID NO: 56787 - protein, 9 aa, synthetic construct
  source 1..9: note = Seed: LVVVGAVGV (KRAS G12V)
IVVNGNVGR

SEQ ID NO: 56788 - protein, 9 aa, synthetic construct
  source 1..9: note = Seed: LVVVGAVGV (KRAS G12V)
IVVNGNVGS

SEQ ID NO: 56789 - protein, 9 aa, synthetic construct
  source 1..9: note = Seed: LVVVGAVGV (KRAS G12V)
IVVNGNVGT

SEQ ID NO: 56790 - protein, 9 aa, synthetic construct
  source 1..9: note = Seed: LVVVGAVGV (KRAS G12V)
IVVNGNVGV

SEQ ID NO: 56791 - protein, 9 aa, synthetic construct
  source 1..9: note = Seed: LVVVGAVGV (KRAS G12V)
IVVNGNVGW

SEQ ID NO: 56792 - protein, 9 aa, synthetic construct
  source 1..9: note = Seed: LVVVGAVGV (KRAS G12V)
IVVNGNVGY

SEQ ID NO: 56793 - protein, 9 aa, synthetic construct
  source 1..9: note = Seed: LVVVGAVGV (KRAS G12V)
IVVNGPVGA

SEQ ID NO: 56794 - protein, 9 aa, synthetic construct
  source 1..9: note = Seed: LVVVGAVGV (KRAS G12V)
IVVNGPVGC

SEQ ID NO: 56795 - protein, 9 aa, synthetic construct
  source 1..9: note = Seed: LVVVGAVGV (KRAS G12V)
IVVNGPVGD

SEQ ID NO: 56796 - protein, 9 aa, synthetic construct
  source 1..9: note = Seed: LVVVGAVGV (KRAS G12V)
IVVNGPVGE

SEQ ID NO: 56797 - protein, 9 aa, synthetic construct
  source 1..9: note = Seed: LVVVGAVGV (KRAS G12V)
IVVNGPVGF

SEQ ID NO: 56798 - protein, 9 aa, synthetic construct
  source 1..9: note = Seed: LVVVGAVGV (KRAS G12V)
IVVNGPVGG

SEQ ID NO: 56799 - protein, 9 aa, synthetic construct
  source 1..9: note = Seed: LVVVGAVGV (KRAS G12V)
IVVNGPVGH

SEQ ID NO: 56800 - protein, 9 aa, synthetic construct
  source 1..9: note = Seed: LVVVGAVGV (KRAS G12V)
IVVNGPVGI

SEQ ID NO: 56801 - protein, 9 aa, synthetic construct
  source 1..9: note = Seed: LVVVGAVGV (KRAS G12V)
IVVNGPVGK

SEQ ID NO: 56802 - protein, 9 aa, synthetic construct
  source 1..9: note = Seed: LVVVGAVGV (KRAS G12V)
IVVNGPVGL

SEQ ID NO: 56803 - protein, 9 aa, synthetic construct
  source 1..9: note = Seed: LVVVGAVGV (KRAS G12V)
IVVNGPVGM

SEQ ID NO: 56804 - protein, 9 aa, synthetic construct
  source 1..9: note = Seed: LVVVGAVGV (KRAS G12V)
IVVNGPVGN

SEQ ID NO: 56805 - protein, 9 aa, synthetic construct
  source 1..9: note = Seed: LVVVGAVGV (KRAS G12V)
IVVNGPVGP

SEQ ID NO: 56806 - protein, 9 aa, synthetic construct
  source 1..9: note = Seed: LVVVGAVGV (KRAS G12V)
IVVNGPVGQ

SEQ ID NO: 56807 - protein, 9 aa, synthetic construct
  source 1..9: note = Seed: LVVVGAVGV (KRAS G12V)
IVVNGPVGR

SEQ ID NO: 56808 - protein, 9 aa, synthetic construct
  source 1..9: note = Seed: LVVVGAVGV (KRAS G12V)
IVVNGPVGS

SEQ ID NO: 56809 - protein, 9 aa, synthetic construct
  source 1..9: note = Seed: LVVVGAVGV (KRAS G12V)
IVVNGPVGT

SEQ ID NO: 56810 - protein, 9 aa, synthetic construct
  source 1..9: note = Seed: LVVVGAVGV (KRAS G12V)
IVVNGPVGV

SEQ ID NO: 56811 - protein, 9 aa, synthetic construct
  source 1..9: note = Seed: LVVVGAVGV (KRAS G12V)
IVVNGPVGW

SEQ ID NO: 56812 - protein, 9 aa, synthetic construct
  source 1..9: note = Seed: LVVVGAVGV (KRAS G12V)
IVVNGPVGY

SEQ ID NO: 56813 - protein, 9 aa, synthetic construct
  source 1..9: note = Seed: LVVVGAVGV (KRAS G12V)
IVVNGQVGA

SEQ ID NO: 56814 - protein, 9 aa, synthetic construct
  source 1..9: note = Seed: LVVVGAVGV (KRAS G12V)
IVVNGQVGF

SEQ ID NO: 56815 - protein, 9 aa, synthetic construct
  source 1..9: note = Seed: LVVVGAVGV (KRAS G12V)
IVVNGQVGI

SEQ ID NO: 56816 - protein, 9 aa, synthetic construct
  source 1..9: note = Seed: LVVVGAVGV (KRAS G12V)
IVVNGQVGL

SEQ ID NO: 56817 - protein, 9 aa, synthetic construct
  source 1..9: note = Seed: LVVVGAVGV (KRAS G12V)
IVVNGQVGM

SEQ ID NO: 56818 - protein, 9 aa, synthetic construct
  source 1..9: note = Seed: LVVVGAVGV (KRAS G12V)
IVVNGQVGS

SEQ ID NO: 56819 - protein, 9 aa, synthetic construct
  source 1..9: note = Seed: LVVVGAVGV (KRAS G12V)
IVVNGQVGT

SEQ ID NO: 56820 - protein, 9 aa, synthetic construct
  source 1..9: note = Seed: LVVVGAVGV (KRAS G12V)
IVVNGQVGV

SEQ ID NO: 56821 - protein, 9 aa, synthetic construct
  source 1..9: note = Seed: LVVVGAVGV (KRAS G12V)
IVVNGQVGY

SEQ ID NO: 56822 - protein, 9 aa, synthetic construct
  source 1..9: note = Seed: LVVVGAVGV (KRAS G12V)
IVVNGRVGA

SEQ ID NO: 56823 - protein, 9 aa, synthetic construct
  source 1..9: note = Seed: LVVVGAVGV (KRAS G12V)
IVVNGRVGF

SEQ ID NO: 56824 - protein, 9 aa, synthetic construct
  source 1..9: note = Seed: LVVVGAVGV (KRAS G12V)
IVVNGRVGI

SEQ ID NO: 56825 - protein, 9 aa, synthetic construct
  source 1..9: note = Seed: LVVVGAVGV (KRAS G12V)
IVVNGRVGL

SEQ ID NO: 56826 - protein, 9 aa, synthetic construct
  source 1..9: note = Seed: LVVVGAVGV (KRAS G12V)
IVVNGRVGM

SEQ ID NO: 56827 - protein, 9 aa, synthetic construct
  source 1..9: note = Seed: LVVVGAVGV (KRAS G12V)
IVVNGRVGR

SEQ ID NO: 56828 - protein, 9 aa, synthetic construct
  source 1..9: note = Seed: LVVVGAVGV (KRAS G12V)
IVVNGRVGS

SEQ ID NO: 56829 - protein, 9 aa, synthetic construct
  source 1..9: note = Seed: LVVVGAVGV (KRAS G12V)
IVVNGRVGT

SEQ ID NO: 56830 - protein, 9 aa, synthetic construct
  source 1..9: note = Seed: LVVVGAVGV (KRAS G12V)
IVVNGRVGV

SEQ ID NO: 56831 - protein, 9 aa, synthetic construct
  source 1..9: note = Seed: LVVVGAVGV (KRAS G12V)
IVVNGRVGY

SEQ ID NO: 56832 - protein, 9 aa, synthetic construct
  source 1..9: note = Seed: LVVVGAVGV (KRAS G12V)
IVVNGSVGA

SEQ ID NO: 56833 - protein, 9 aa, synthetic construct
  source 1..9: note = Seed: LVVVGAVGV (KRAS G12V)
IVVNGSVGC

SEQ ID NO: 56834 - protein, 9 aa, synthetic construct
  source 1..9: note = Seed: LVVVGAVGV (KRAS G12V)
IVVNGSVGD

SEQ ID NO: 56835 - protein, 9 aa, synthetic construct
  source 1..9: note = Seed: LVVVGAVGV (KRAS G12V)
IVVNGSVGE

SEQ ID NO: 56836 - protein, 9 aa, synthetic construct
  source 1..9: note = Seed: LVVVGAVGV (KRAS G12V)
IVVNGSVGF

SEQ ID NO: 56837 - protein, 9 aa, synthetic construct
  source 1..9: note = Seed: LVVVGAVGV (KRAS G12V)
IVVNGSVGG

SEQ ID NO: 56838 - protein, 9 aa, synthetic construct
  source 1..9: note = Seed: LVVVGAVGV (KRAS G12V)
IVVNGSVGH

SEQ ID NO: 56839 - protein, 9 aa, synthetic construct
  source 1..9: note = Seed: LVVVGAVGV (KRAS G12V)
IVVNGSVGI

SEQ ID NO: 56840 - protein, 9 aa, synthetic construct
  source 1..9: note = Seed: LVVVGAVGV (KRAS G12V)
IVVNGSVGK

SEQ ID NO: 56841 - protein, 9 aa, synthetic construct
  source 1..9: note = Seed: LVVVGAVGV (KRAS G12V)
IVVNGSVGL

SEQ ID NO: 56842 - protein, 9 aa, synthetic construct
  source 1..9: note = Seed: LVVVGAVGV (KRAS G12V)
IVVNGSVGM

SEQ ID NO: 56843 - protein, 9 aa, synthetic construct
  source 1..9: note = Seed: LVVVGAVGV (KRAS G12V)
IVVNGSVGN

SEQ ID NO: 56844 - protein, 9 aa, synthetic construct
  source 1..9: note = Seed: LVVVGAVGV (KRAS G12V)
IVVNGSVGP

SEQ ID NO: 56845 - protein, 9 aa, synthetic construct
  source 1..9: note = Seed: LVVVGAVGV (KRAS G12V)
IVVNGSVGQ

SEQ ID NO: 56846 - protein, 9 aa, synthetic construct
  source 1..9: note = Seed: LVVVGAVGV (KRAS G12V)
IVVNGSVGR

SEQ ID NO: 56847 - protein, 9 aa, synthetic construct
  source 1..9: note = Seed: LVVVGAVGV (KRAS G12V)
IVVNGSVGS

SEQ ID NO: 56848 - protein, 9 aa, synthetic construct
  source 1..9: note = Seed: LVVVGAVGV (KRAS G12V)
IVVNGSVGT

SEQ ID NO: 56849 - protein, 9 aa, synthetic construct
  source 1..9: note = Seed: LVVVGAVGV (KRAS G12V)
IVVNGSVGV

SEQ ID NO: 56850 - protein, 9 aa, synthetic construct
  source 1..9: note = Seed: LVVVGAVGV (KRAS G12V)
IVVNGSVGW

SEQ ID NO: 56851 - protein, 9 aa, synthetic construct
  source 1..9: note = Seed: LVVVGAVGV (KRAS G12V)
IVVNGSVGY

SEQ ID NO: 56852 - protein, 9 aa, synthetic construct
  source 1..9: note = Seed: LVVVGAVGV (KRAS G12V)
IVVNGTVGA

SEQ ID NO: 56853 - protein, 9 aa, synthetic construct
  source 1..9: note = Seed: LVVVGAVGV (KRAS G12V)
IVVNGTVGC

SEQ ID NO: 56854 - protein, 9 aa, synthetic construct
  source 1..9: note = Seed: LVVVGAVGV (KRAS G12V)
IVVNGTVGD

SEQ ID NO: 56855 - protein, 9 aa, synthetic construct
  source 1..9: note = Seed: LVVVGAVGV (KRAS G12V)
IVVNGTVGE

SEQ ID NO: 56856 - protein, 9 aa, synthetic construct
  source 1..9: note = Seed: LVVVGAVGV (KRAS G12V)
IVVNGTVGF

SEQ ID NO: 56857 - protein, 9 aa, synthetic construct
  source 1..9: note = Seed: LVVVGAVGV (KRAS G12V)
IVVNGTVGG

SEQ ID NO: 56858 - protein, 9 aa, synthetic construct
  source 1..9: note = Seed: LVVVGAVGV (KRAS G12V)
IVVNGTVGH

SEQ ID NO: 56859 - protein, 9 aa, synthetic construct
  source 1..9: note = Seed: LVVVGAVGV (KRAS G12V)
IVVNGTVGI

SEQ ID NO: 56860 - protein, 9 aa, synthetic construct
  source 1..9: note = Seed: LVVVGAVGV (KRAS G12V)
IVVNGTVGK

SEQ ID NO: 56861 - protein, 9 aa, synthetic construct
  source 1..9: note = Seed: LVVVGAVGV (KRAS G12V)
IVVNGTVGL

SEQ ID NO: 56862 - protein, 9 aa, synthetic construct
  source 1..9: note = Seed: LVVVGAVGV (KRAS G12V)
IVVNGTVGM

SEQ ID NO: 56863 - protein, 9 aa, synthetic construct
  source 1..9: note = Seed: LVVVGAVGV (KRAS G12V)
IVVNGTVGN

SEQ ID NO: 56864 - protein, 9 aa, synthetic construct
  source 1..9: note = Seed: LVVVGAVGV (KRAS G12V)
IVVNGTVGP

SEQ ID NO: 56865 - protein, 9 aa, synthetic construct
  source 1..9: note = Seed: LVVVGAVGV (KRAS G12V)
IVVNGTVGQ

SEQ ID NO: 56866 - protein, 9 aa, synthetic construct
  source 1..9: note = Seed: LVVVGAVGV (KRAS G12V)
IVVNGTVGR

SEQ ID NO: 56867 - protein, 9 aa, synthetic construct
  source 1..9: note = Seed: LVVVGAVGV (KRAS G12V)
IVVNGTVGS

SEQ ID NO: 56868 - protein, 9 aa, synthetic construct
  source 1..9: note = Seed: LVVVGAVGV (KRAS G12V)
IVVNGTVGT

SEQ ID NO: 56869 - protein, 9 aa, synthetic construct
  source 1..9: note = Seed: LVVVGAVGV (KRAS G12V)
IVVNGTVGV

SEQ ID NO: 56870 - protein, 9 aa, synthetic construct
  source 1..9: note = Seed: LVVVGAVGV (KRAS G12V)
IVVNGTVGW

SEQ ID NO: 56871 - protein, 9 aa, synthetic construct
  source 1..9: note = Seed: LVVVGAVGV (KRAS G12V)
IVVNGTVGY

SEQ ID NO: 56872 - protein, 9 aa, synthetic construct
  source 1..9: note = Seed: LVVVGAVGV (KRAS G12V)
IVVNGVVGA

SEQ ID NO: 56873 - protein, 9 aa, synthetic construct
  source 1..9: note = Seed: LVVVGAVGV (KRAS G12V)
IVVNGVVGC

SEQ ID NO: 56874 - protein, 9 aa, synthetic construct
  source 1..9: note = Seed: LVVVGAVGV (KRAS G12V)
IVVNGVVGD

SEQ ID NO: 56875 - protein, 9 aa, synthetic construct
  source 1..9: note = Seed: LVVVGAVGV (KRAS G12V)
IVVNGVVGE

SEQ ID NO: 56876 - protein, 9 aa, synthetic construct
  source 1..9: note = Seed: LVVVGAVGV (KRAS G12V)
IVVNGVVGF

SEQ ID NO: 56877 - protein, 9 aa, synthetic construct
  source 1..9: note = Seed: LVVVGAVGV (KRAS G12V)
IVVNGVVGG

SEQ ID NO: 56878 - protein, 9 aa, synthetic construct
  source 1..9: note = Seed: LVVVGAVGV (KRAS G12V)
IVVNGVVGH

SEQ ID NO: 56879 - protein, 9 aa, synthetic construct
  source 1..9: note = Seed: LVVVGAVGV (KRAS G12V)
IVVNGVVGI

SEQ ID NO: 56880 - protein, 9 aa, synthetic construct
  source 1..9: note = Seed: LVVVGAVGV (KRAS G12V)
IVVNGVVGK

SEQ ID NO: 56881 - protein, 9 aa, synthetic construct
  source 1..9: note = Seed: LVVVGAVGV (KRAS G12V)
IVVNGVVGL

SEQ ID NO: 56882 - protein, 9 aa, synthetic construct
  source 1..9: note = Seed: LVVVGAVGV (KRAS G12V)
IVVNGVVGM

SEQ ID NO: 56883 - protein, 9 aa, synthetic construct
  source 1..9: note = Seed: LVVVGAVGV (KRAS G12V)
IVVNGVVGN

SEQ ID NO: 56884 - protein, 9 aa, synthetic construct
  source 1..9: note = Seed: LVVVGAVGV (KRAS G12V)
IVVNGVVGP

SEQ ID NO: 56885 - protein, 9 aa, synthetic construct
  source 1..9: note = Seed: LVVVGAVGV (KRAS G12V)
IVVNGVVGQ

SEQ ID NO: 56886 - protein, 9 aa, synthetic construct
  source 1..9: note = Seed: LVVVGAVGV (KRAS G12V)
IVVNGVVGR

SEQ ID NO: 56887 - protein, 9 aa, synthetic construct
  source 1..9: note = Seed: LVVVGAVGV (KRAS G12V)
IVVNGVVGS

SEQ ID NO: 56888 - protein, 9 aa, synthetic construct
  source 1..9: note = Seed: LVVVGAVGV (KRAS G12V)
IVVNGVVGT

SEQ ID NO: 56889 - protein, 9 aa, synthetic construct
  source 1..9: note = Seed: LVVVGAVGV (KRAS G12V)
IVVNGVVGV

SEQ ID NO: 56890 - protein, 9 aa, synthetic construct
  source 1..9: note = Seed: LVVVGAVGV (KRAS G12V)
IVVNGVVGW

SEQ ID NO: 56891 - protein, 9 aa, synthetic construct
  source 1..9: note = Seed: LVVVGAVGV (KRAS G12V)
IVVNGVVGY

SEQ ID NO: 56892 - protein, 9 aa, synthetic construct
  source 1..9: note = Seed: LVVVGAVGV (KRAS G12V)
IVVNGWVGA

SEQ ID NO: 56893 - protein, 9 aa, synthetic construct
  source 1..9: note = Seed: LVVVGAVGV (KRAS G12V)
IVVNGWVGF

SEQ ID NO: 56894 - protein, 9 aa, synthetic construct
  source 1..9: note = Seed: LVVVGAVGV (KRAS G12V)
IVVNGWVGI

SEQ ID NO: 56895 - protein, 9 aa, synthetic construct
  source 1..9: note = Seed: LVVVGAVGV (KRAS G12V)
IVVNGWVGL

SEQ ID NO: 56896 - protein, 9 aa, synthetic construct
  source 1..9: note = Seed: LVVVGAVGV (KRAS G12V)
IVVNGWVGM

SEQ ID NO: 56897 - protein, 9 aa, synthetic construct
  source 1..9: note = Seed: LVVVGAVGV (KRAS G12V)
IVVNGWVGV

SEQ ID NO: 56898 - protein, 9 aa, synthetic construct
  source 1..9: note = Seed: LVVVGAVGV (KRAS G12V)
IVVNGWVGY

SEQ ID NO: 56899 - protein, 9 aa, synthetic construct
  source 1..9: note = Seed: LVVVGAVGV (KRAS G12V)
IVVNGYVGA

SEQ ID NO: 56900 - protein, 9 aa, synthetic construct
  source 1..9: note = Seed: LVVVGAVGV (KRAS G12V)
IVVNGYVGF

SEQ ID NO: 56901 - protein, 9 aa, synthetic construct
  source 1..9: note = Seed: LVVVGAVGV (KRAS G12V)
IVVNGYVGI

SEQ ID NO: 56902 - protein, 9 aa, synthetic construct
  source 1..9: note = Seed: LVVVGAVGV (KRAS G12V)
IVVNGYVGL

SEQ ID NO: 56903 - protein, 9 aa, synthetic construct
  source 1..9: note = Seed: LVVVGAVGV (KRAS G12V)
IVVNGYVGM

SEQ ID NO: 56904 - protein, 9 aa, synthetic construct
  source 1..9: note = Seed: LVVVGAVGV (KRAS G12V)
IVVNGYVGN

SEQ ID NO: 56905 - protein, 9 aa, synthetic construct
  source 1..9: note = Seed: LVVVGAVGV (KRAS G12V)
IVVNGYVGS

SEQ ID NO: 56906 - protein, 9 aa, synthetic construct
  source 1..9: note = Seed: LVVVGAVGV (KRAS G12V)
IVVNGYVGT

SEQ ID NO: 56907 - protein, 9 aa, synthetic construct
  source 1..9: note = Seed: LVVVGAVGV (KRAS G12V)
IVVNGYVGV

SEQ ID NO: 56908 - protein, 9 aa, synthetic construct
  source 1..9: note = Seed: LVVVGAVGV (KRAS G12V)
IVVNGYVGY

SEQ ID NO: 56909 - protein, 9 aa, synthetic construct
  source 1..9: note = Seed: LVVVGAVGV (KRAS G12V)
IVVPGAVGA

SEQ ID NO: 56910 - protein, 9 aa, synthetic construct
  source 1..9: note = Seed: LVVVGAVGV (KRAS G12V)
IVVPGAVGC

SEQ ID NO: 56911 - protein, 9 aa, synthetic construct
  source 1..9: note = Seed: LVVVGAVGV (KRAS G12V)
IVVPGAVGI

SEQ ID NO: 56912 - protein, 9 aa, synthetic construct
  source 1..9: note = Seed: LVVVGAVGV (KRAS G12V)
IVVPGAVGL

SEQ ID NO: 56913 - protein, 9 aa, synthetic construct
  source 1..9: note = Seed: LVVVGAVGV (KRAS G12V)
IVVPGAVGV

SEQ ID NO: 56914 - protein, 9 aa, synthetic construct
  source 1..9: note = Seed: LVVVGAVGV (KRAS G12V)
IVVPGGVGL

SEQ ID NO: 56915 - protein, 9 aa, synthetic construct
  source 1..9: note = Seed: LVVVGAVGV (KRAS G12V)
IVVPGGVGV

SEQ ID NO: 56916 - protein, 9 aa, synthetic construct
  source 1..9: note = Seed: LVVVGAVGV (KRAS G12V)
IVVPGSVGC

SEQ ID NO: 56917 - protein, 9 aa, synthetic construct
  source 1..9: note = Seed: LVVVGAVGV (KRAS G12V)
IVVPGSVGL

SEQ ID NO: 56918 - protein, 9 aa, synthetic construct
  source 1..9: note = Seed: LVVVGAVGV (KRAS G12V)
IVVPGSVGV

SEQ ID NO: 56919 - protein, 9 aa, synthetic construct
  source 1..9: note = Seed: LVVVGAVGV (KRAS G12V)
IVVQGAVGA

SEQ ID NO: 56920 - protein, 9 aa, synthetic construct
  source 1..9: note = Seed: LVVVGAVGV (KRAS G12V)
IVVQGAVGC

SEQ ID NO: 56921 - protein, 9 aa, synthetic construct
  source 1..9: note = Seed: LVVVGAVGV (KRAS G12V)
IVVQGAVGF

SEQ ID NO: 56922 - protein, 9 aa, synthetic construct
  source 1..9: note = Seed: LVVVGAVGV (KRAS G12V)
IVVQGAVGG

SEQ ID NO: 56923 - protein, 9 aa, synthetic construct
  source 1..9: note = Seed: LVVVGAVGV (KRAS G12V)
IVVQGAVGH

SEQ ID NO: 56924 - protein, 9 aa, synthetic construct
  source 1..9: note = Seed: LVVVGAVGV (KRAS G12V)
IVVQGAVGI

SEQ ID NO: 56925 - protein, 9 aa, synthetic construct
  source 1..9: note = Seed: LVVVGAVGV (KRAS G12V)
IVVQGAVGK

SEQ ID NO: 56926 - protein, 9 aa, synthetic construct
  source 1..9: note = Seed: LVVVGAVGV (KRAS G12V)
IVVQGAVGL

SEQ ID NO: 56927 - protein, 9 aa, synthetic construct
  source 1..9: note = Seed: LVVVGAVGV (KRAS G12V)
IVVQGAVGM

SEQ ID NO: 56928 - protein, 9 aa, synthetic construct
  source 1..9: note = Seed: LVVVGAVGV (KRAS G12V)
IVVQGAVGN

SEQ ID NO: 56929 - protein, 9 aa, synthetic construct
  source 1..9: note = Seed: LVVVGAVGV (KRAS G12V)
IVVQGAVGP

SEQ ID NO: 56930 - protein, 9 aa, synthetic construct
  source 1..9: note = Seed: LVVVGAVGV (KRAS G12V)
IVVQGAVGQ

SEQ ID NO: 56931 - protein, 9 aa, synthetic construct
  source 1..9: note = Seed: LVVVGAVGV (KRAS G12V)
IVVQGAVGR

SEQ ID NO: 56932 - protein, 9 aa, synthetic construct
  source 1..9: note = Seed: LVVVGAVGV (KRAS G12V)
IVVQGAVGS

SEQ ID NO: 56933 - protein, 9 aa, synthetic construct
  source 1..9: note = Seed: LVVVGAVGV (KRAS G12V)
IVVQGAVGT

SEQ ID NO: 56934 - protein, 9 aa, synthetic construct
  source 1..9: note = Seed: LVVVGAVGV (KRAS G12V)
IVVQGAVGV

SEQ ID NO: 56935 - protein, 9 aa, synthetic construct
  source 1..9: note = Seed: LVVVGAVGV (KRAS G12V)
IVVQGAVGY

SEQ ID NO: 56936 - protein, 9 aa, synthetic construct
  source 1..9: note = Seed: LVVVGAVGV (KRAS G12V)
IVVQGDVGA

SEQ ID NO: 56937 - protein, 9 aa, synthetic construct
  source 1..9: note = Seed: LVVVGAVGV (KRAS G12V)
IVVQGDVGS

SEQ ID NO: 56938 - protein, 9 aa, synthetic construct
  source 1..9: note = Seed: LVVVGAVGV (KRAS G12V)
IVVQGGVGA

SEQ ID NO: 56939 - protein, 9 aa, synthetic construct
  source 1..9: note = Seed: LVVVGAVGV (KRAS G12V)
IVVQGGVGC

SEQ ID NO: 56940 - protein, 9 aa, synthetic construct
  source 1..9: note = Seed: LVVVGAVGV (KRAS G12V)
IVVQGGVGF

SEQ ID NO: 56941 - protein, 9 aa, synthetic construct
  source 1..9: note = Seed: LVVVGAVGV (KRAS G12V)
IVVQGGVGG

SEQ ID NO: 56942 - protein, 9 aa, synthetic construct
  source 1..9: note = Seed: LVVVGAVGV (KRAS G12V)
IVVQGGVGH

SEQ ID NO: 56943 - protein, 9 aa, synthetic construct
  source 1..9: note = Seed: LVVVGAVGV (KRAS G12V)
IVVQGGVGI

SEQ ID NO: 56944 - protein, 9 aa, synthetic construct
  source 1..9: note = Seed: LVVVGAVGV (KRAS G12V)
IVVQGGVGL

SEQ ID NO: 56945 - protein, 9 aa, synthetic construct
  source 1..9: note = Seed: LVVVGAVGV (KRAS G12V)
IVVQGGVGM

SEQ ID NO: 56946 - protein, 9 aa, synthetic construct
  source 1..9: note = Seed: LVVVGAVGV (KRAS G12V)
IVVQGGVGN

SEQ ID NO: 56947 - protein, 9 aa, synthetic construct
  source 1..9: note = Seed: LVVVGAVGV (KRAS G12V)
IVVQGGVGQ

SEQ ID NO: 56948 - protein, 9 aa, synthetic construct
  source 1..9: note = Seed: LVVVGAVGV (KRAS G12V)
IVVQGGVGS

SEQ ID NO: 56949 - protein, 9 aa, synthetic construct
  source 1..9: note = Seed: LVVVGAVGV (KRAS G12V)
IVVQGGVGT

SEQ ID NO: 56950 - protein, 9 aa, synthetic construct
  source 1..9: note = Seed: LVVVGAVGV (KRAS G12V)
IVVQGGVGV

SEQ ID NO: 56951 - protein, 9 aa, synthetic construct
  source 1..9: note = Seed: LVVVGAVGV (KRAS G12V)
IVVQGHVGA

SEQ ID NO: 56952 - protein, 9 aa, synthetic construct
  source 1..9: note = Seed: LVVVGAVGV (KRAS G12V)
IVVQGHVGF

SEQ ID NO: 56953 - protein, 9 aa, synthetic construct
  source 1..9: note = Seed: LVVVGAVGV (KRAS G12V)
IVVQGHVGI

SEQ ID NO: 56954 - protein, 9 aa, synthetic construct
  source 1..9: note = Seed: LVVVGAVGV (KRAS G12V)
IVVQGHVGL

SEQ ID NO: 56955 - protein, 9 aa, synthetic construct
  source 1..9: note = Seed: LVVVGAVGV (KRAS G12V)
IVVQGHVGM

SEQ ID NO: 56956 - protein, 9 aa, synthetic construct
  source 1..9: note = Seed: LVVVGAVGV (KRAS G12V)
IVVQGHVGR

SEQ ID NO: 56957 - protein, 9 aa, synthetic construct
  source 1..9: note = Seed: LVVVGAVGV (KRAS G12V)
IVVQGHVGV

SEQ ID NO: 56958 - protein, 9 aa, synthetic construct
  source 1..9: note = Seed: LVVVGAVGV (KRAS G12V)
IVVQGHVGY

SEQ ID NO: 56959 - protein, 9 aa, synthetic construct
  source 1..9: note = Seed: LVVVGAVGV (KRAS G12V)
IVVQGIVGA

SEQ ID NO: 56960 - protein, 9 aa, synthetic construct
  source 1..9: note = Seed: LVVVGAVGV (KRAS G12V)
IVVQGIVGI

SEQ ID NO: 56961 - protein, 9 aa, synthetic construct
  source 1..9: note = Seed: LVVVGAVGV (KRAS G12V)
IVVQGIVGL

SEQ ID NO: 56962 - protein, 9 aa, synthetic construct
  source 1..9: note = Seed: LVVVGAVGV (KRAS G12V)
IVVQGIVGM

SEQ ID NO: 56963 - protein, 9 aa, synthetic construct
  source 1..9: note = Seed: LVVVGAVGV (KRAS G12V)
IVVQGIVGR

SEQ ID NO: 56964 - protein, 9 aa, synthetic construct
  source 1..9: note = Seed: LVVVGAVGV (KRAS G12V)
IVVQGIVGS

SEQ ID NO: 56965 - protein, 9 aa, synthetic construct
  source 1..9: note = Seed: LVVVGAVGV (KRAS G12V)
IVVQGIVGV

SEQ ID NO: 56966 - protein, 9 aa, synthetic construct
  source 1..9: note = Seed: LVVVGAVGV (KRAS G12V)
IVVQGKVGA

SEQ ID NO: 56967 - protein, 9 aa, synthetic construct
  source 1..9: note = Seed: LVVVGAVGV (KRAS G12V)
IVVQGKVGF

SEQ ID NO: 56968 - protein, 9 aa, synthetic construct
  source 1..9: note = Seed: LVVVGAVGV (KRAS G12V)
IVVQGKVGG

SEQ ID NO: 56969 - protein, 9 aa, synthetic construct
  source 1..9: note = Seed: LVVVGAVGV (KRAS G12V)
IVVQGKVGH

SEQ ID NO: 56970 - protein, 9 aa, synthetic construct
  source 1..9: note = Seed: LVVVGAVGV (KRAS G12V)
IVVQGKVGI

SEQ ID NO: 56971 - protein, 9 aa, synthetic construct
  source 1..9: note = Seed: LVVVGAVGV (KRAS G12V)
IVVQGKVGK

SEQ ID NO: 56972 - protein, 9 aa, synthetic construct
  source 1..9: note = Seed: LVVVGAVGV (KRAS G12V)
IVVQGKVGL

SEQ ID NO: 56973 - protein, 9 aa, synthetic construct
  source 1..9: note = Seed: LVVVGAVGV (KRAS G12V)
IVVQGKVGM

SEQ ID NO: 56974 - protein, 9 aa, synthetic construct
  source 1..9: note = Seed: LVVVGAVGV (KRAS G12V)
IVVQGKVGQ

SEQ ID NO: 56975 - protein, 9 aa, synthetic construct
  source 1..9: note = Seed: LVVVGAVGV (KRAS G12V)
IVVQGKVGR

SEQ ID NO: 56976 - protein, 9 aa, synthetic construct
  source 1..9: note = Seed: LVVVGAVGV (KRAS G12V)
IVVQGKVGS

SEQ ID NO: 56977 - protein, 9 aa, synthetic construct
  source 1..9: note = Seed: LVVVGAVGV (KRAS G12V)
IVVQGKVGV

SEQ ID NO: 56978 - protein, 9 aa, synthetic construct
  source 1..9: note = Seed: LVVVGAVGV (KRAS G12V)
IVVQGKVGY

SEQ ID NO: 56979 - protein, 9 aa, synthetic construct
  source 1..9: note = Seed: LVVVGAVGV (KRAS G12V)
IVVQGLVGA

SEQ ID NO: 56980 - protein, 9 aa, synthetic construct
  source 1..9: note = Seed: LVVVGAVGV (KRAS G12V)
IVVQGLVGL

SEQ ID NO: 56981 - protein, 9 aa, synthetic construct
  source 1..9: note = Seed: LVVVGAVGV (KRAS G12V)
IVVQGLVGV

SEQ ID NO: 56982 - protein, 9 aa, synthetic construct
  source 1..9: note = Seed: LVVVGAVGV (KRAS G12V)
IVVQGMVGA

SEQ ID NO: 56983 - protein, 9 aa, synthetic construct
  source 1..9: note = Seed: LVVVGAVGV (KRAS G12V)
IVVQGMVGI

SEQ ID NO: 56984 - protein, 9 aa, synthetic construct
  source 1..9: note = Seed: LVVVGAVGV (KRAS G12V)
IVVQGMVGL

SEQ ID NO: 56985 - protein, 9 aa, synthetic construct
  source 1..9: note = Seed: LVVVGAVGV (KRAS G12V)
IVVQGMVGM

SEQ ID NO: 56986 - protein, 9 aa, synthetic construct
  source 1..9: note = Seed: LVVVGAVGV (KRAS G12V)
IVVQGMVGV

SEQ ID NO: 56987 - protein, 9 aa, synthetic construct
  source 1..9: note = Seed: LVVVGAVGV (KRAS G12V)
IVVQGNVGA

SEQ ID NO: 56988 - protein, 9 aa, synthetic construct
  source 1..9: note = Seed: LVVVGAVGV (KRAS G12V)
IVVQGNVGF

SEQ ID NO: 56989 - protein, 9 aa, synthetic construct
  source 1..9: note = Seed: LVVVGAVGV (KRAS G12V)
IVVQGNVGG

SEQ ID NO: 56990 - protein, 9 aa, synthetic construct
  source 1..9: note = Seed: LVVVGAVGV (KRAS G12V)
IVVQGNVGH

SEQ ID NO: 56991 - protein, 9 aa, synthetic construct
  source 1..9: note = Seed: LVVVGAVGV (KRAS G12V)
IVVQGNVGI

SEQ ID NO: 56992 - protein, 9 aa, synthetic construct
  source 1..9: note = Seed: LVVVGAVGV (KRAS G12V)
IVVQGNVGL

SEQ ID NO: 56993 - protein, 9 aa, synthetic construct
  source 1..9: note = Seed: LVVVGAVGV (KRAS G12V)
IVVQGNVGM

SEQ ID NO: 56994 - protein, 9 aa, synthetic construct
  source 1..9: note = Seed: LVVVGAVGV (KRAS G12V)
IVVQGNVGN

SEQ ID NO: 56995 - protein, 9 aa, synthetic construct
  source 1..9: note = Seed: LVVVGAVGV (KRAS G12V)
IVVQGNVGQ

SEQ ID NO: 56996 - protein, 9 aa, synthetic construct
  source 1..9: note = Seed: LVVVGAVGV (KRAS G12V)
IVVQGNVGR

SEQ ID NO: 56997 - protein, 9 aa, synthetic construct
  source 1..9: note = Seed: LVVVGAVGV (KRAS G12V)
IVVQGNVGS

SEQ ID NO: 56998 - protein, 9 aa, synthetic construct
  source 1..9: note = Seed: LVVVGAVGV (KRAS G12V)
IVVQGNVGT

SEQ ID NO: 56999 - protein, 9 aa, synthetic construct
  source 1..9: note = Seed: LVVVGAVGV (KRAS G12V)
IVVQGNVGV

SEQ ID NO: 57000 - protein, 9 aa, synthetic construct
  source 1..9: note = Seed: LVVVGAVGV (KRAS G12V)
IVVQGNVGY

SEQ ID NO: 57001 - protein, 9 aa, synthetic construct
  source 1..9: note = Seed: LVVVGAVGV (KRAS G12V)
IVVQGPVGA

SEQ ID NO: 57002 - protein, 9 aa, synthetic construct
  source 1..9: note = Seed: LVVVGAVGV (KRAS G12V)
IVVQGPVGC

SEQ ID NO: 57003 - protein, 9 aa, synthetic construct
  source 1..9: note = Seed: LVVVGAVGV (KRAS G12V)
IVVQGPVGF

SEQ ID NO: 57004 - protein, 9 aa, synthetic construct
  source 1..9: note = Seed: LVVVGAVGV (KRAS G12V)
IVVQGPVGG

SEQ ID NO: 57005 - protein, 9 aa, synthetic construct
  source 1..9: note = Seed: LVVVGAVGV (KRAS G12V)
IVVQGPVGH

SEQ ID NO: 57006 - protein, 9 aa, synthetic construct
  source 1..9: note = Seed: LVVVGAVGV (KRAS G12V)
IVVQGPVGI

SEQ ID NO: 57007 - protein, 9 aa, synthetic construct
  source 1..9: note = Seed: LVVVGAVGV (KRAS G12V)
IVVQGPVGL

SEQ ID NO: 57008 - protein, 9 aa, synthetic construct
  source 1..9: note = Seed: LVVVGAVGV (KRAS G12V)
IVVQGPVGM

SEQ ID NO: 57009 - protein, 9 aa, synthetic construct
  source 1..9: note = Seed: LVVVGAVGV (KRAS G12V)
IVVQGPVGN

SEQ ID NO: 57010 - protein, 9 aa, synthetic construct
  source 1..9: note = Seed: LVVVGAVGV (KRAS G12V)
IVVQGPVGQ

SEQ ID NO: 57011 - protein, 9 aa, synthetic construct
  source 1..9: note = Seed: LVVVGAVGV (KRAS G12V)
IVVQGPVGR

SEQ ID NO: 57012 - protein, 9 aa, synthetic construct
  source 1..9: note = Seed: LVVVGAVGV (KRAS G12V)
IVVQGPVGS

SEQ ID NO: 57013 - protein, 9 aa, synthetic construct
  source 1..9: note = Seed: LVVVGAVGV (KRAS G12V)
IVVQGPVGT

SEQ ID NO: 57014 - protein, 9 aa, synthetic construct
  source 1..9: note = Seed: LVVVGAVGV (KRAS G12V)
IVVQGPVGV

SEQ ID NO: 57015 - protein, 9 aa, synthetic construct
  source 1..9: note = Seed: LVVVGAVGV (KRAS G12V)
IVVQGPVGW

SEQ ID NO: 57016 - protein, 9 aa, synthetic construct
  source 1..9: note = Seed: LVVVGAVGV (KRAS G12V)
IVVQGPVGY

SEQ ID NO: 57017 - protein, 9 aa, synthetic construct
  source 1..9: note = Seed: LVVVGAVGV (KRAS G12V)
IVVQGQVGL

SEQ ID NO: 57018 - protein, 9 aa, synthetic construct
  source 1..9: note = Seed: LVVVGAVGV (KRAS G12V)
IVVQGRVGA

SEQ ID NO: 57019 - protein, 9 aa, synthetic construct
  source 1..9: note = Seed: LVVVGAVGV (KRAS G12V)
IVVQGRVGF

SEQ ID NO: 57020 - protein, 9 aa, synthetic construct
  source 1..9: note = Seed: LVVVGAVGV (KRAS G12V)
IVVQGRVGG

SEQ ID NO: 57021 - protein, 9 aa, synthetic construct
  source 1..9: note = Seed: LVVVGAVGV (KRAS G12V)
IVVQGRVGH

SEQ ID NO: 57022 - protein, 9 aa, synthetic construct
  source 1..9: note = Seed: LVVVGAVGV (KRAS G12V)
IVVQGRVGI

SEQ ID NO: 57023 - protein, 9 aa, synthetic construct
  source 1..9: note = Seed: LVVVGAVGV (KRAS G12V)
IVVQGRVGK

SEQ ID NO: 57024 - protein, 9 aa, synthetic construct
  source 1..9: note = Seed: LVVVGAVGV (KRAS G12V)
IVVQGRVGL

SEQ ID NO: 57025 - protein, 9 aa, synthetic construct
  source 1..9: note = Seed: LVVVGAVGV (KRAS G12V)
IVVQGRVGM

SEQ ID NO: 57026 - protein, 9 aa, synthetic construct
  source 1..9: note = Seed: LVVVGAVGV (KRAS G12V)
IVVQGRVGN

SEQ ID NO: 57027 - protein, 9 aa, synthetic construct
  source 1..9: note = Seed: LVVVGAVGV (KRAS G12V)
IVVQGRVGQ

SEQ ID NO: 57028 - protein, 9 aa, synthetic construct
  source 1..9: note = Seed: LVVVGAVGV (KRAS G12V)
IVVQGRVGR

SEQ ID NO: 57029 - protein, 9 aa, synthetic construct
  source 1..9: note = Seed: LVVVGAVGV (KRAS G12V)
IVVQGRVGS

SEQ ID NO: 57030 - protein, 9 aa, synthetic construct
  source 1..9: note = Seed: LVVVGAVGV (KRAS G12V)
IVVQGRVGT

SEQ ID NO: 57031 - protein, 9 aa, synthetic construct
  source 1..9: note = Seed: LVVVGAVGV (KRAS G12V)
IVVQGRVGV

SEQ ID NO: 57032 - protein, 9 aa, synthetic construct
  source 1..9: note = Seed: LVVVGAVGV (KRAS G12V)
IVVQGRVGY

SEQ ID NO: 57033 - protein, 9 aa, synthetic construct
  source 1..9: note = Seed: LVVVGAVGV (KRAS G12V)
IVVQGSVGA

SEQ ID NO: 57034 - protein, 9 aa, synthetic construct
  source 1..9: note = Seed: LVVVGAVGV (KRAS G12V)
IVVQGSVGC

SEQ ID NO: 57035 - protein, 9 aa, synthetic construct
  source 1..9: note = Seed: LVVVGAVGV (KRAS G12V)
IVVQGSVGF

SEQ ID NO: 57036 - protein, 9 aa, synthetic construct
  source 1..9: note = Seed: LVVVGAVGV (KRAS G12V)
IVVQGSVGG

SEQ ID NO: 57037 - protein, 9 aa, synthetic construct
  source 1..9: note = Seed: LVVVGAVGV (KRAS G12V)
IVVQGSVGH

SEQ ID NO: 57038 - protein, 9 aa, synthetic construct
  source 1..9: note = Seed: LVVVGAVGV (KRAS G12V)
IVVQGSVGI

SEQ ID NO: 57039 - protein, 9 aa, synthetic construct
  source 1..9: note = Seed: LVVVGAVGV (KRAS G12V)
IVVQGSVGL

SEQ ID NO: 57040 - protein, 9 aa, synthetic construct
  source 1..9: note = Seed: LVVVGAVGV (KRAS G12V)
IVVQGSVGM

SEQ ID NO: 57041 - protein, 9 aa, synthetic construct
  source 1..9: note = Seed: LVVVGAVGV (KRAS G12V)
IVVQGSVGN

SEQ ID NO: 57042 - protein, 9 aa, synthetic construct
  source 1..9: note = Seed: LVVVGAVGV (KRAS G12V)
IVVQGSVGQ

SEQ ID NO: 57043 - protein, 9 aa, synthetic construct
  source 1..9: note = Seed: LVVVGAVGV (KRAS G12V)
IVVQGSVGR

SEQ ID NO: 57044 - protein, 9 aa, synthetic construct
  source 1..9: note = Seed: LVVVGAVGV (KRAS G12V)
IVVQGSVGS

SEQ ID NO: 57045 - protein, 9 aa, synthetic construct
  source 1..9: note = Seed: LVVVGAVGV (KRAS G12V)
IVVQGSVGT

SEQ ID NO: 57046 - protein, 9 aa, synthetic construct
  source 1..9: note = Seed: LVVVGAVGV (KRAS G12V)
IVVQGSVGV

SEQ ID NO: 57047 - protein, 9 aa, synthetic construct
  source 1..9: note = Seed: LVVVGAVGV (KRAS G12V)
IVVQGSVGY

SEQ ID NO: 57048 - protein, 9 aa, synthetic construct
  source 1..9: note = Seed: LVVVGAVGV (KRAS G12V)
IVVQGTVGA

SEQ ID NO: 57049 - protein, 9 aa, synthetic construct
  source 1..9: note = Seed: LVVVGAVGV (KRAS G12V)
IVVQGTVGF

SEQ ID NO: 57050 - protein, 9 aa, synthetic construct
  source 1..9: note = Seed: LVVVGAVGV (KRAS G12V)
IVVQGTVGI

SEQ ID NO: 57051 - protein, 9 aa, synthetic construct
  source 1..9: note = Seed: LVVVGAVGV (KRAS G12V)
IVVQGTVGL

SEQ ID NO: 57052 - protein, 9 aa, synthetic construct
  source 1..9: note = Seed: LVVVGAVGV (KRAS G12V)
IVVQGTVGM

SEQ ID NO: 57053 - protein, 9 aa, synthetic construct
  source 1..9: note = Seed: LVVVGAVGV (KRAS G12V)
IVVQGTVGN

SEQ ID NO: 57054 - protein, 9 aa, synthetic construct
  source 1..9: note = Seed: LVVVGAVGV (KRAS G12V)
IVVQGTVGQ

SEQ ID NO: 57055 - protein, 9 aa, synthetic construct
  source 1..9: note = Seed: LVVVGAVGV (KRAS G12V)
IVVQGTVGR

SEQ ID NO: 57056 - protein, 9 aa, synthetic construct
  source 1..9: note = Seed: LVVVGAVGV (KRAS G12V)
IVVQGTVGS

SEQ ID NO: 57057 - protein, 9 aa, synthetic construct
  source 1..9: note = Seed: LVVVGAVGV (KRAS G12V)
IVVQGTVGT

SEQ ID NO: 57058 - protein, 9 aa, synthetic construct
  source 1..9: note = Seed: LVVVGAVGV (KRAS G12V)
IVVQGTVGV

SEQ ID NO: 57059 - protein, 9 aa, synthetic construct
  source 1..9: note = Seed: LVVVGAVGV (KRAS G12V)
IVVQGTVGY

SEQ ID NO: 57060 - protein, 9 aa, synthetic construct
  source 1..9: note = Seed: LVVVGAVGV (KRAS G12V)
IVVQGVVGA

SEQ ID NO: 57061 - protein, 9 aa, synthetic construct
  source 1..9: note = Seed: LVVVGAVGV (KRAS G12V)
IVVQGVVGI

SEQ ID NO: 57062 - protein, 9 aa, synthetic construct
  source 1..9: note = Seed: LVVVGAVGV (KRAS G12V)
IVVQGVVGL

SEQ ID NO: 57063 - protein, 9 aa, synthetic construct
  source 1..9: note = Seed: LVVVGAVGV (KRAS G12V)
IVVQGVVGM

SEQ ID NO: 57064 - protein, 9 aa, synthetic construct
  source 1..9: note = Seed: LVVVGAVGV (KRAS G12V)
IVVQGVVGR

SEQ ID NO: 57065 - protein, 9 aa, synthetic construct
  source 1..9: note = Seed: LVVVGAVGV (KRAS G12V)
IVVQGVVGS

SEQ ID NO: 57066 - protein, 9 aa, synthetic construct
  source 1..9: note = Seed: LVVVGAVGV (KRAS G12V)
IVVQGVVGT

SEQ ID NO: 57067 - protein, 9 aa, synthetic construct
  source 1..9: note = Seed: LVVVGAVGV (KRAS G12V)
IVVQGVVGV

SEQ ID NO: 57068 - protein, 9 aa, synthetic construct
  source 1..9: note = Seed: LVVVGAVGV (KRAS G12V)
IVVRGAVGF

SEQ ID NO: 57069 - protein, 9 aa, synthetic construct
  source 1..9: note = Seed: LVVVGAVGV (KRAS G12V)
IVVRGAVGH

SEQ ID NO: 57070 - protein, 9 aa, synthetic construct
  source 1..9: note = Seed: LVVVGAVGV (KRAS G12V)
IVVRGAVGI

SEQ ID NO: 57071 - protein, 9 aa, synthetic construct
  source 1..9: note = Seed: LVVVGAVGV (KRAS G12V)
IVVRGAVGK

SEQ ID NO: 57072 - protein, 9 aa, synthetic construct
  source 1..9: note = Seed: LVVVGAVGV (KRAS G12V)
IVVRGAVGL

SEQ ID NO: 57073 - protein, 9 aa, synthetic construct
  source 1..9: note = Seed: LVVVGAVGV (KRAS G12V)
IVVRGAVGM

SEQ ID NO: 57074 - protein, 9 aa, synthetic construct
  source 1..9: note = Seed: LVVVGAVGV (KRAS G12V)
IVVRGAVGR

SEQ ID NO: 57075 - protein, 9 aa, synthetic construct
  source 1..9: note = Seed: LVVVGAVGV (KRAS G12V)
IVVRGAVGV

SEQ ID NO: 57076 - protein, 9 aa, synthetic construct
  source 1..9: note = Seed: LVVVGAVGV (KRAS G12V)
IVVRGAVGY

SEQ ID NO: 57077 - protein, 9 aa, synthetic construct
  source 1..9: note = Seed: LVVVGAVGV (KRAS G12V)
IVVRGHVGA

SEQ ID NO: 57078 - protein, 9 aa, synthetic construct
  source 1..9: note = Seed: LVVVGAVGV (KRAS G12V)
IVVRGHVGF

SEQ ID NO: 57079 - protein, 9 aa, synthetic construct
  source 1..9: note = Seed: LVVVGAVGV (KRAS G12V)
IVVRGHVGH

SEQ ID NO: 57080 - protein, 9 aa, synthetic construct
  source 1..9: note = Seed: LVVVGAVGV (KRAS G12V)
IVVRGHVGI

SEQ ID NO: 57081 - protein, 9 aa, synthetic construct
  source 1..9: note = Seed: LVVVGAVGV (KRAS G12V)
IVVRGHVGK

SEQ ID NO: 57082 - protein, 9 aa, synthetic construct
  source 1..9: note = Seed: LVVVGAVGV (KRAS G12V)
IVVRGHVGL

SEQ ID NO: 57083 - protein, 9 aa, synthetic construct
  source 1..9: note = Seed: LVVVGAVGV (KRAS G12V)
IVVRGHVGM

SEQ ID NO: 57084 - protein, 9 aa, synthetic construct
  source 1..9: note = Seed: LVVVGAVGV (KRAS G12V)
IVVRGHVGR

SEQ ID NO: 57085 - protein, 9 aa, synthetic construct
  source 1..9: note = Seed: LVVVGAVGV (KRAS G12V)
IVVRGHVGV

SEQ ID NO: 57086 - protein, 9 aa, synthetic construct
  source 1..9: note = Seed: LVVVGAVGV (KRAS G12V)
IVVRGHVGY

SEQ ID NO: 57087 - protein, 9 aa, synthetic construct
  source 1..9: note = Seed: LVVVGAVGV (KRAS G12V)
IVVRGIVGH

SEQ ID NO: 57088 - protein, 9 aa, synthetic construct
  source 1..9: note = Seed: LVVVGAVGV (KRAS G12V)
IVVRGIVGK

SEQ ID NO: 57089 - protein, 9 aa, synthetic construct
  source 1..9: note = Seed: LVVVGAVGV (KRAS G12V)
IVVRGIVGL

SEQ ID NO: 57090 - protein, 9 aa, synthetic construct
  source 1..9: note = Seed: LVVVGAVGV (KRAS G12V)
IVVRGIVGR

SEQ ID NO: 57091 - protein, 9 aa, synthetic construct
  source 1..9: note = Seed: LVVVGAVGV (KRAS G12V)
IVVRGIVGY

SEQ ID NO: 57092 - protein, 9 aa, synthetic construct
  source 1..9: note = Seed: LVVVGAVGV (KRAS G12V)
IVVRGKVGA

SEQ ID NO: 57093 - protein, 9 aa, synthetic construct
  source 1..9: note = Seed: LVVVGAVGV (KRAS G12V)
IVVRGKVGF

SEQ ID NO: 57094 - protein, 9 aa, synthetic construct
  source 1..9: note = Seed: LVVVGAVGV (KRAS G12V)
IVVRGKVGG

SEQ ID NO: 57095 - protein, 9 aa, synthetic construct
  source 1..9: note = Seed: LVVVGAVGV (KRAS G12V)
IVVRGKVGH

SEQ ID NO: 57096 - protein, 9 aa, synthetic construct
  source 1..9: note = Seed: LVVVGAVGV (KRAS G12V)
IVVRGKVGI

SEQ ID NO: 57097 - protein, 9 aa, synthetic construct
  source 1..9: note = Seed: LVVVGAVGV (KRAS G12V)
IVVRGKVGK

SEQ ID NO: 57098 - protein, 9 aa, synthetic construct
  source 1..9: note = Seed: LVVVGAVGV (KRAS G12V)
IVVRGKVGL

SEQ ID NO: 57099 - protein, 9 aa, synthetic construct
  source 1..9: note = Seed: LVVVGAVGV (KRAS G12V)
IVVRGKVGM

SEQ ID NO: 57100 - protein, 9 aa, synthetic construct
  source 1..9: note = Seed: LVVVGAVGV (KRAS G12V)
IVVRGKVGN

SEQ ID NO: 57101 - protein, 9 aa, synthetic construct
  source 1..9: note = Seed: LVVVGAVGV (KRAS G12V)
IVVRGKVGQ

SEQ ID NO: 57102 - protein, 9 aa, synthetic construct
  source 1..9: note = Seed: LVVVGAVGV (KRAS G12V)
IVVRGKVGR

SEQ ID NO: 57103 - protein, 9 aa, synthetic construct
  source 1..9: note = Seed: LVVVGAVGV (KRAS G12V)
IVVRGKVGS

SEQ ID NO: 57104 - protein, 9 aa, synthetic construct
  source 1..9: note = Seed: LVVVGAVGV (KRAS G12V)
IVVRGKVGT

SEQ ID NO: 57105 - protein, 9 aa, synthetic construct
  source 1..9: note = Seed: LVVVGAVGV (KRAS G12V)
IVVRGKVGV

SEQ ID NO: 57106 - protein, 9 aa, synthetic construct
  source 1..9: note = Seed: LVVVGAVGV (KRAS G12V)
IVVRGKVGW

SEQ ID NO: 57107 - protein, 9 aa, synthetic construct
  source 1..9: note = Seed: LVVVGAVGV (KRAS G12V)
IVVRGKVGY

SEQ ID NO: 57108 - protein, 9 aa, synthetic construct
  source 1..9: note = Seed: LVVVGAVGV (KRAS G12V)
IVVRGLVGA

SEQ ID NO: 57109 - protein, 9 aa, synthetic construct
  source 1..9: note = Seed: LVVVGAVGV (KRAS G12V)
IVVRGLVGH

SEQ ID NO: 57110 - protein, 9 aa, synthetic construct
  source 1..9: note = Seed: LVVVGAVGV (KRAS G12V)
IVVRGLVGR

SEQ ID NO: 57111 - protein, 9 aa, synthetic construct
  source 1..9: note = Seed: LVVVGAVGV (KRAS G12V)
IVVRGMVGA

SEQ ID NO: 57112 - protein, 9 aa, synthetic construct
  source 1..9: note = Seed: LVVVGAVGV (KRAS G12V)
IVVRGMVGK

SEQ ID NO: 57113 - protein, 9 aa, synthetic construct
  source 1..9: note = Seed: LVVVGAVGV (KRAS G12V)
IVVRGMVGQ

SEQ ID NO: 57114 - protein, 9 aa, synthetic construct
  source 1..9: note = Seed: LVVVGAVGV (KRAS G12V)
IVVRGMVGR

SEQ ID NO: 57115 - protein, 9 aa, synthetic construct
  source 1..9: note = Seed: LVVVGAVGV (KRAS G12V)
IVVRGMVGS

SEQ ID NO: 57116 - protein, 9 aa, synthetic construct
  source 1..9: note = Seed: LVVVGAVGV (KRAS G12V)
IVVRGMVGY

SEQ ID NO: 57117 - protein, 9 aa, synthetic construct
  source 1..9: note = Seed: LVVVGAVGV (KRAS G12V)
IVVRGNVGF

SEQ ID NO: 57118 - protein, 9 aa, synthetic construct
  source 1..9: note = Seed: LVVVGAVGV (KRAS G12V)
IVVRGNVGI

SEQ ID NO: 57119 - protein, 9 aa, synthetic construct
  source 1..9: note = Seed: LVVVGAVGV (KRAS G12V)
IVVRGNVGL

SEQ ID NO: 57120 - protein, 9 aa, synthetic construct
  source 1..9: note = Seed: LVVVGAVGV (KRAS G12V)
IVVRGNVGM

SEQ ID NO: 57121 - protein, 9 aa, synthetic construct
  source 1..9: note = Seed: LVVVGAVGV (KRAS G12V)
IVVRGNVGR

SEQ ID NO: 57122 - protein, 9 aa, synthetic construct
  source 1..9: note = Seed: LVVVGAVGV (KRAS G12V)
IVVRGNVGV

SEQ ID NO: 57123 - protein, 9 aa, synthetic construct
  source 1..9: note = Seed: LVVVGAVGV (KRAS G12V)
IVVRGNVGY

SEQ ID NO: 57124 - protein, 9 aa, synthetic construct
  source 1..9: note = Seed: LVVVGAVGV (KRAS G12V)
IVVRGPVGR

SEQ ID NO: 57125 - protein, 9 aa, synthetic construct
  source 1..9: note = Seed: LVVVGAVGV (KRAS G12V)
IVVRGPVGY

SEQ ID NO: 57126 - protein, 9 aa, synthetic construct
  source 1..9: note = Seed: LVVVGAVGV (KRAS G12V)
IVVRGQVGR

SEQ ID NO: 57127 - protein, 9 aa, synthetic construct
  source 1..9: note = Seed: LVVVGAVGV (KRAS G12V)
IVVRGRVGA

SEQ ID NO: 57128 - protein, 9 aa, synthetic construct
  source 1..9: note = Seed: LVVVGAVGV (KRAS G12V)
IVVRGRVGC

SEQ ID NO: 57129 - protein, 9 aa, synthetic construct
  source 1..9: note = Seed: LVVVGAVGV (KRAS G12V)
IVVRGRVGE

SEQ ID NO: 57130 - protein, 9 aa, synthetic construct
  source 1..9: note = Seed: LVVVGAVGV (KRAS G12V)
IVVRGRVGF

SEQ ID NO: 57131 - protein, 9 aa, synthetic construct
  source 1..9: note = Seed: LVVVGAVGV (KRAS G12V)
IVVRGRVGG

SEQ ID NO: 57132 - protein, 9 aa, synthetic construct
  source 1..9: note = Seed: LVVVGAVGV (KRAS G12V)
IVVRGRVGH

SEQ ID NO: 57133 - protein, 9 aa, synthetic construct
  source 1..9: note = Seed: LVVVGAVGV (KRAS G12V)
IVVRGRVGI

SEQ ID NO: 57134 - protein, 9 aa, synthetic construct
  source 1..9: note = Seed: LVVVGAVGV (KRAS G12V)
IVVRGRVGK

SEQ ID NO: 57135 - protein, 9 aa, synthetic construct
  source 1..9: note = Seed: LVVVGAVGV (KRAS G12V)
IVVRGRVGL

SEQ ID NO: 57136 - protein, 9 aa, synthetic construct
  source 1..9: note = Seed: LVVVGAVGV (KRAS G12V)
IVVRGRVGM

SEQ ID NO: 57137 - protein, 9 aa, synthetic construct
  source 1..9: note = Seed: LVVVGAVGV (KRAS G12V)
IVVRGRVGN

SEQ ID NO: 57138 - protein, 9 aa, synthetic construct
  source 1..9: note = Seed: LVVVGAVGV (KRAS G12V)
IVVRGRVGP

SEQ ID NO: 57139 - protein, 9 aa, synthetic construct
  source 1..9: note = Seed: LVVVGAVGV (KRAS G12V)
IVVRGRVGQ

SEQ ID NO: 57140 - protein, 9 aa, synthetic construct
  source 1..9: note = Seed: LVVVGAVGV (KRAS G12V)
IVVRGRVGR

SEQ ID NO: 57141 - protein, 9 aa, synthetic construct
  source 1..9: note = Seed: LVVVGAVGV (KRAS G12V)
IVVRGRVGS

SEQ ID NO: 57142 - protein, 9 aa, synthetic construct
  source 1..9: note = Seed: LVVVGAVGV (KRAS G12V)
IVVRGRVGT

SEQ ID NO: 57143 - protein, 9 aa, synthetic construct
  source 1..9: note = Seed: LVVVGAVGV (KRAS G12V)
IVVRGRVGV

SEQ ID NO: 57144 - protein, 9 aa, synthetic construct
  source 1..9: note = Seed: LVVVGAVGV (KRAS G12V)
IVVRGRVGW

SEQ ID NO: 57145 - protein, 9 aa, synthetic construct
  source 1..9: note = Seed: LVVVGAVGV (KRAS G12V)
IVVRGRVGY

SEQ ID NO: 57146 - protein, 9 aa, synthetic construct
  source 1..9: note = Seed: LVVVGAVGV (KRAS G12V)
IVVRGSVGF

SEQ ID NO: 57147 - protein, 9 aa, synthetic construct
  source 1..9: note = Seed: LVVVGAVGV (KRAS G12V)
IVVRGSVGI

SEQ ID NO: 57148 - protein, 9 aa, synthetic construct
  source 1..9: note = Seed: LVVVGAVGV (KRAS G12V)
IVVRGSVGL

SEQ ID NO: 57149 - protein, 9 aa, synthetic construct
  source 1..9: note = Seed: LVVVGAVGV (KRAS G12V)
IVVRGSVGM

SEQ ID NO: 57150 - protein, 9 aa, synthetic construct
  source 1..9: note = Seed: LVVVGAVGV (KRAS G12V)
IVVRGSVGR

SEQ ID NO: 57151 - protein, 9 aa, synthetic construct
  source 1..9: note = Seed: LVVVGAVGV (KRAS G12V)
IVVRGSVGV

SEQ ID NO: 57152 - protein, 9 aa, synthetic construct
  source 1..9: note = Seed: LVVVGAVGV (KRAS G12V)
IVVRGSVGY

SEQ ID NO: 57153 - protein, 9 aa, synthetic construct
  source 1..9: note = Seed: LVVVGAVGV (KRAS G12V)
IVVRGTVGF

SEQ ID NO: 57154 - protein, 9 aa, synthetic construct
  source 1..9: note = Seed: LVVVGAVGV (KRAS G12V)
IVVRGTVGL

SEQ ID NO: 57155 - protein, 9 aa, synthetic construct
  source 1..9: note = Seed: LVVVGAVGV (KRAS G12V)
IVVRGTVGM

SEQ ID NO: 57156 - protein, 9 aa, synthetic construct
  source 1..9: note = Seed: LVVVGAVGV (KRAS G12V)
IVVRGTVGR

SEQ ID NO: 57157 - protein, 9 aa, synthetic construct
  source 1..9: note = Seed: LVVVGAVGV (KRAS G12V)
IVVRGTVGY

SEQ ID NO: 57158 - protein, 9 aa, synthetic construct
  source 1..9: note = Seed: LVVVGAVGV (KRAS G12V)
IVVRGVVGK

SEQ ID NO: 57159 - protein, 9 aa, synthetic construct
  source 1..9: note = Seed: LVVVGAVGV (KRAS G12V)
IVVRGVVGR

SEQ ID NO: 57160 - protein, 9 aa, synthetic construct
  source 1..9: note = Seed: LVVVGAVGV (KRAS G12V)
IVVRGVVGY

SEQ ID NO: 57161 - protein, 9 aa, synthetic construct
  source 1..9: note = Seed: LVVVGAVGV (KRAS G12V)
IVVRGYVGR

SEQ ID NO: 57162 - protein, 9 aa, synthetic construct
  source 1..9: note = Seed: LVVVGAVGV (KRAS G12V)
IVVSGAVGA

SEQ ID NO: 57163 - protein, 9 aa, synthetic construct
  source 1..9: note = Seed: LVVVGAVGV (KRAS G12V)
IVVSGAVGC

SEQ ID NO: 57164 - protein, 9 aa, synthetic construct
  source 1..9: note = Seed: LVVVGAVGV (KRAS G12V)
IVVSGAVGD

SEQ ID NO: 57165 - protein, 9 aa, synthetic construct
  source 1..9: note = Seed: LVVVGAVGV (KRAS G12V)
IVVSGAVGE

SEQ ID NO: 57166 - protein, 9 aa, synthetic construct
  source 1..9: note = Seed: LVVVGAVGV (KRAS G12V)
IVVSGAVGF

SEQ ID NO: 57167 - protein, 9 aa, synthetic construct
  source 1..9: note = Seed: LVVVGAVGV (KRAS G12V)
IVVSGAVGG

SEQ ID NO: 57168 - protein, 9 aa, synthetic construct
  source 1..9: note = Seed: LVVVGAVGV (KRAS G12V)
IVVSGAVGH

SEQ ID NO: 57169 - protein, 9 aa, synthetic construct
  source 1..9: note = Seed: LVVVGAVGV (KRAS G12V)
IVVSGAVGI

SEQ ID NO: 57170 - protein, 9 aa, synthetic construct
  source 1..9: note = Seed: LVVVGAVGV (KRAS G12V)
IVVSGAVGK

SEQ ID NO: 57171 - protein, 9 aa, synthetic construct
  source 1..9: note = Seed: LVVVGAVGV (KRAS G12V)
IVVSGAVGL

SEQ ID NO: 57172 - protein, 9 aa, synthetic construct
  source 1..9: note = Seed: LVVVGAVGV (KRAS G12V)
IVVSGAVGM

SEQ ID NO: 57173 - protein, 9 aa, synthetic construct
  source 1..9: note = Seed: LVVVGAVGV (KRAS G12V)
IVVSGAVGN

SEQ ID NO: 57174 - protein, 9 aa, synthetic construct
  source 1..9: note = Seed: LVVVGAVGV (KRAS G12V)
IVVSGAVGQ

SEQ ID NO: 57175 - protein, 9 aa, synthetic construct
  source 1..9: note = Seed: LVVVGAVGV (KRAS G12V)
IVVSGAVGR

SEQ ID NO: 57176 - protein, 9 aa, synthetic construct
  source 1..9: note = Seed: LVVVGAVGV (KRAS G12V)
IVVSGAVGS

SEQ ID NO: 57177 - protein, 9 aa, synthetic construct
  source 1..9: note = Seed: LVVVGAVGV (KRAS G12V)
IVVSGAVGT

SEQ ID NO: 57178 - protein, 9 aa, synthetic construct
  source 1..9: note = Seed: LVVVGAVGV (KRAS G12V)
IVVSGAVGV

SEQ ID NO: 57179 - protein, 9 aa, synthetic construct
  source 1..9: note = Seed: LVVVGAVGV (KRAS G12V)
IVVSGAVGY

SEQ ID NO: 57180 - protein, 9 aa, synthetic construct
  source 1..9: note = Seed: LVVVGAVGV (KRAS G12V)
IVVSGCVGA

SEQ ID NO: 57181 - protein, 9 aa, synthetic construct
  source 1..9: note = Seed: LVVVGAVGV (KRAS G12V)
IVVSGCVGC

SEQ ID NO: 57182 - protein, 9 aa, synthetic construct
  source 1..9: note = Seed: LVVVGAVGV (KRAS G12V)
IVVSGCVGG

SEQ ID NO: 57183 - protein, 9 aa, synthetic construct
  source 1..9: note = Seed: LVVVGAVGV (KRAS G12V)
IVVSGCVGI

SEQ ID NO: 57184 - protein, 9 aa, synthetic construct
  source 1..9: note = Seed: LVVVGAVGV (KRAS G12V)
IVVSGCVGL

SEQ ID NO: 57185 - protein, 9 aa, synthetic construct
  source 1..9: note = Seed: LVVVGAVGV (KRAS G12V)
IVVSGCVGM

SEQ ID NO: 57186 - protein, 9 aa, synthetic construct
  source 1..9: note = Seed: LVVVGAVGV (KRAS G12V)
IVVSGCVGS

SEQ ID NO: 57187 - protein, 9 aa, synthetic construct
  source 1..9: note = Seed: LVVVGAVGV (KRAS G12V)
IVVSGCVGT

SEQ ID NO: 57188 - protein, 9 aa, synthetic construct
  source 1..9: note = Seed: LVVVGAVGV (KRAS G12V)
IVVSGCVGV

SEQ ID NO: 57189 - protein, 9 aa, synthetic construct
  source 1..9: note = Seed: LVVVGAVGV (KRAS G12V)
IVVSGDVGA

SEQ ID NO: 57190 - protein, 9 aa, synthetic construct
  source 1..9: note = Seed: LVVVGAVGV (KRAS G12V)
IVVSGDVGF

SEQ ID NO: 57191 - protein, 9 aa, synthetic construct
  source 1..9: note = Seed: LVVVGAVGV (KRAS G12V)
IVVSGDVGI

SEQ ID NO: 57192 - protein, 9 aa, synthetic construct
  source 1..9: note = Seed: LVVVGAVGV (KRAS G12V)
IVVSGDVGL

SEQ ID NO: 57193 - protein, 9 aa, synthetic construct
  source 1..9: note = Seed: LVVVGAVGV (KRAS G12V)
IVVSGDVGM

SEQ ID NO: 57194 - protein, 9 aa, synthetic construct
  source 1..9: note = Seed: LVVVGAVGV (KRAS G12V)
IVVSGDVGV

SEQ ID NO: 57195 - protein, 9 aa, synthetic construct
  source 1..9: note = Seed: LVVVGAVGV (KRAS G12V)
IVVSGEVGC

SEQ ID NO: 57196 - protein, 9 aa, synthetic construct
  source 1..9: note = Seed: LVVVGAVGV (KRAS G12V)
IVVSGEVGI

SEQ ID NO: 57197 - protein, 9 aa, synthetic construct
  source 1..9: note = Seed: LVVVGAVGV (KRAS G12V)
IVVSGEVGL

SEQ ID NO: 57198 - protein, 9 aa, synthetic construct
  source 1..9: note = Seed: LVVVGAVGV (KRAS G12V)
IVVSGEVGV

SEQ ID NO: 57199 - protein, 9 aa, synthetic construct
  source 1..9: note = Seed: LVVVGAVGV (KRAS G12V)
IVVSGFVGI

SEQ ID NO: 57200 - protein, 9 aa, synthetic construct
  source 1..9: note = Seed: LVVVGAVGV (KRAS G12V)
IVVSGFVGL

SEQ ID NO: 57201 - protein, 9 aa, synthetic construct
  source 1..9: note = Seed: LVVVGAVGV (KRAS G12V)
IVVSGFVGV

SEQ ID NO: 57202 - protein, 9 aa, synthetic construct
  source 1..9: note = Seed: LVVVGAVGV (KRAS G12V)
IVVSGGVGA

SEQ ID NO: 57203 - protein, 9 aa, synthetic construct
  source 1..9: note = Seed: LVVVGAVGV (KRAS G12V)
IVVSGGVGC

SEQ ID NO: 57204 - protein, 9 aa, synthetic construct
  source 1..9: note = Seed: LVVVGAVGV (KRAS G12V)
IVVSGGVGF

SEQ ID NO: 57205 - protein, 9 aa, synthetic construct
  source 1..9: note = Seed: LVVVGAVGV (KRAS G12V)
IVVSGGVGG

SEQ ID NO: 57206 - protein, 9 aa, synthetic construct
  source 1..9: note = Seed: LVVVGAVGV (KRAS G12V)
IVVSGGVGI

SEQ ID NO: 57207 - protein, 9 aa, synthetic construct
  source 1..9: note = Seed: LVVVGAVGV (KRAS G12V)
IVVSGGVGL

SEQ ID NO: 57208 - protein, 9 aa, synthetic construct
  source 1..9: note = Seed: LVVVGAVGV (KRAS G12V)
IVVSGGVGM

SEQ ID NO: 57209 - protein, 9 aa, synthetic construct
  source 1..9: note = Seed: LVVVGAVGV (KRAS G12V)
IVVSGGVGN

SEQ ID NO: 57210 - protein, 9 aa, synthetic construct
  source 1..9: note = Seed: LVVVGAVGV (KRAS G12V)
IVVSGGVGQ

SEQ ID NO: 57211 - protein, 9 aa, synthetic construct
  source 1..9: note = Seed: LVVVGAVGV (KRAS G12V)
IVVSGGVGR

SEQ ID NO: 57212 - protein, 9 aa, synthetic construct
  source 1..9: note = Seed: LVVVGAVGV (KRAS G12V)
IVVSGGVGS

SEQ ID NO: 57213 - protein, 9 aa, synthetic construct
  source 1..9: note = Seed: LVVVGAVGV (KRAS G12V)
IVVSGGVGT

SEQ ID NO: 57214 - protein, 9 aa, synthetic construct
  source 1..9: note = Seed: LVVVGAVGV (KRAS G12V)
IVVSGGVGV

SEQ ID NO: 57215 - protein, 9 aa, synthetic construct
  source 1..9: note = Seed: LVVVGAVGV (KRAS G12V)
IVVSGGVGY

SEQ ID NO: 57216 - protein, 9 aa, synthetic construct
  source 1..9: note = Seed: LVVVGAVGV (KRAS G12V)
IVVSGHVGF

SEQ ID NO: 57217 - protein, 9 aa, synthetic construct
  source 1..9: note = Seed: LVVVGAVGV (KRAS G12V)
IVVSGHVGI

SEQ ID NO: 57218 - protein, 9 aa, synthetic construct
  source 1..9: note = Seed: LVVVGAVGV (KRAS G12V)
IVVSGHVGL

SEQ ID NO: 57219 - protein, 9 aa, synthetic construct
  source 1..9: note = Seed: LVVVGAVGV (KRAS G12V)
IVVSGHVGM

SEQ ID NO: 57220 - protein, 9 aa, synthetic construct
  source 1..9: note = Seed: LVVVGAVGV (KRAS G12V)
IVVSGHVGR

SEQ ID NO: 57221 - protein, 9 aa, synthetic construct
  source 1..9: note = Seed: LVVVGAVGV (KRAS G12V)
IVVSGHVGV

SEQ ID NO: 57222 - protein, 9 aa, synthetic construct
  source 1..9: note = Seed: LVVVGAVGV (KRAS G12V)
IVVSGHVGY

SEQ ID NO: 57223 - protein, 9 aa, synthetic construct
  source 1..9: note = Seed: LVVVGAVGV (KRAS G12V)
IVVSGIVGA

SEQ ID NO: 57224 - protein, 9 aa, synthetic construct
  source 1..9: note = Seed: LVVVGAVGV (KRAS G12V)
IVVSGIVGF

SEQ ID NO: 57225 - protein, 9 aa, synthetic construct
  source 1..9: note = Seed: LVVVGAVGV (KRAS G12V)
IVVSGIVGI

SEQ ID NO: 57226 - protein, 9 aa, synthetic construct
  source 1..9: note = Seed: LVVVGAVGV (KRAS G12V)
IVVSGIVGL

SEQ ID NO: 57227 - protein, 9 aa, synthetic construct
  source 1..9: note = Seed: LVVVGAVGV (KRAS G12V)
IVVSGIVGM

SEQ ID NO: 57228 - protein, 9 aa, synthetic construct
  source 1..9: note = Seed: LVVVGAVGV (KRAS G12V)
IVVSGIVGN

SEQ ID NO: 57229 - protein, 9 aa, synthetic construct
  source 1..9: note = Seed: LVVVGAVGV (KRAS G12V)
IVVSGIVGQ

SEQ ID NO: 57230 - protein, 9 aa, synthetic construct
  source 1..9: note = Seed: LVVVGAVGV (KRAS G12V)
IVVSGIVGR

SEQ ID NO: 57231 - protein, 9 aa, synthetic construct
  source 1..9: note = Seed: LVVVGAVGV (KRAS G12V)
IVVSGIVGS

SEQ ID NO: 57232 - protein, 9 aa, synthetic construct
  source 1..9: note = Seed: LVVVGAVGV (KRAS G12V)
IVVSGIVGV

SEQ ID NO: 57233 - protein, 9 aa, synthetic construct
  source 1..9: note = Seed: LVVVGAVGV (KRAS G12V)
IVVSGIVGY

SEQ ID NO: 57234 - protein, 9 aa, synthetic construct
  source 1..9: note = Seed: LVVVGAVGV (KRAS G12V)
IVVSGKVGA

SEQ ID NO: 57235 - protein, 9 aa, synthetic construct
  source 1..9: note = Seed: LVVVGAVGV (KRAS G12V)
IVVSGKVGF

SEQ ID NO: 57236 - protein, 9 aa, synthetic construct
  source 1..9: note = Seed: LVVVGAVGV (KRAS G12V)
IVVSGKVGG

SEQ ID NO: 57237 - protein, 9 aa, synthetic construct
  source 1..9: note = Seed: LVVVGAVGV (KRAS G12V)
IVVSGKVGH

SEQ ID NO: 57238 - protein, 9 aa, synthetic construct
  source 1..9: note = Seed: LVVVGAVGV (KRAS G12V)
IVVSGKVGI

SEQ ID NO: 57239 - protein, 9 aa, synthetic construct
  source 1..9: note = Seed: LVVVGAVGV (KRAS G12V)
IVVSGKVGK

SEQ ID NO: 57240 - protein, 9 aa, synthetic construct
  source 1..9: note = Seed: LVVVGAVGV (KRAS G12V)
IVVSGKVGL

SEQ ID NO: 57241 - protein, 9 aa, synthetic construct
  source 1..9: note = Seed: LVVVGAVGV (KRAS G12V)
IVVSGKVGM

SEQ ID NO: 57242 - protein, 9 aa, synthetic construct
  source 1..9: note = Seed: LVVVGAVGV (KRAS G12V)
IVVSGKVGN

SEQ ID NO: 57243 - protein, 9 aa, synthetic construct
  source 1..9: note = Seed: LVVVGAVGV (KRAS G12V)
IVVSGKVGQ

SEQ ID NO: 57244 - protein, 9 aa, synthetic construct
  source 1..9: note = Seed: LVVVGAVGV (KRAS G12V)
IVVSGKVGR

SEQ ID NO: 57245 - protein, 9 aa, synthetic construct
  source 1..9: note = Seed: LVVVGAVGV (KRAS G12V)
IVVSGKVGS

SEQ ID NO: 57246 - protein, 9 aa, synthetic construct
  source 1..9: note = Seed: LVVVGAVGV (KRAS G12V)
IVVSGKVGV

SEQ ID NO: 57247 - protein, 9 aa, synthetic construct
  source 1..9: note = Seed: LVVVGAVGV (KRAS G12V)
IVVSGKVGY

SEQ ID NO: 57248 - protein, 9 aa, synthetic construct
  source 1..9: note = Seed: LVVVGAVGV (KRAS G12V)
IVVSGLVGA

SEQ ID NO: 57249 - protein, 9 aa, synthetic construct
  source 1..9: note = Seed: LVVVGAVGV (KRAS G12V)
IVVSGLVGI

SEQ ID NO: 57250 - protein, 9 aa, synthetic construct
  source 1..9: note = Seed: LVVVGAVGV (KRAS G12V)
IVVSGLVGN

SEQ ID NO: 57251 - protein, 9 aa, synthetic construct
  source 1..9: note = Seed: LVVVGAVGV (KRAS G12V)
IVVSGLVGS

SEQ ID NO: 57252 - protein, 9 aa, synthetic construct
  source 1..9: note = Seed: LVVVGAVGV (KRAS G12V)
IVVSGLVGV

SEQ ID NO: 57253 - protein, 9 aa, synthetic construct
  source 1..9: note = Seed: LVVVGAVGV (KRAS G12V)
IVVSGLVGY

SEQ ID NO: 57254 - protein, 9 aa, synthetic construct
  source 1..9: note = Seed: LVVVGAVGV (KRAS G12V)
IVVSGMVGI

SEQ ID NO: 57255 - protein, 9 aa, synthetic construct
  source 1..9: note = Seed: LVVVGAVGV (KRAS G12V)
IVVSGMVGN

SEQ ID NO: 57256 - protein, 9 aa, synthetic construct
  source 1..9: note = Seed: LVVVGAVGV (KRAS G12V)
IVVSGMVGR

SEQ ID NO: 57257 - protein, 9 aa, synthetic construct
  source 1..9: note = Seed: LVVVGAVGV (KRAS G12V)
IVVSGMVGS

SEQ ID NO: 57258 - protein, 9 aa, synthetic construct
  source 1..9: note = Seed: LVVVGAVGV (KRAS G12V)
IVVSGMVGV

SEQ ID NO: 57259 - protein, 9 aa, synthetic construct
  source 1..9: note = Seed: LVVVGAVGV (KRAS G12V)
IVVSGMVGY

SEQ ID NO: 57260 - protein, 9 aa, synthetic construct
  source 1..9: note = Seed: LVVVGAVGV (KRAS G12V)
IVVSGNVGA

SEQ ID NO: 57261 - protein, 9 aa, synthetic construct
  source 1..9: note = Seed: LVVVGAVGV (KRAS G12V)
IVVSGNVGC

SEQ ID NO: 57262 - protein, 9 aa, synthetic construct
  source 1..9: note = Seed: LVVVGAVGV (KRAS G12V)
IVVSGNVGF

SEQ ID NO: 57263 - protein, 9 aa, synthetic construct
  source 1..9: note = Seed: LVVVGAVGV (KRAS G12V)
IVVSGNVGG

SEQ ID NO: 57264 - protein, 9 aa, synthetic construct
  source 1..9: note = Seed: LVVVGAVGV (KRAS G12V)
IVVSGNVGH

SEQ ID NO: 57265 - protein, 9 aa, synthetic construct
  source 1..9: note = Seed: LVVVGAVGV (KRAS G12V)
IVVSGNVGI

SEQ ID NO: 57266 - protein, 9 aa, synthetic construct
  source 1..9: note = Seed: LVVVGAVGV (KRAS G12V)
IVVSGNVGL

SEQ ID NO: 57267 - protein, 9 aa, synthetic construct
  source 1..9: note = Seed: LVVVGAVGV (KRAS G12V)
IVVSGNVGM

SEQ ID NO: 57268 - protein, 9 aa, synthetic construct
  source 1..9: note = Seed: LVVVGAVGV (KRAS G12V)
IVVSGNVGN

SEQ ID NO: 57269 - protein, 9 aa, synthetic construct
  source 1..9: note = Seed: LVVVGAVGV (KRAS G12V)
IVVSGNVGQ

SEQ ID NO: 57270 - protein, 9 aa, synthetic construct
  source 1..9: note = Seed: LVVVGAVGV (KRAS G12V)
IVVSGNVGR

SEQ ID NO: 57271 - protein, 9 aa, synthetic construct
  source 1..9: note = Seed: LVVVGAVGV (KRAS G12V)
IVVSGNVGS

SEQ ID NO: 57272 - protein, 9 aa, synthetic construct
  source 1..9: note = Seed: LVVVGAVGV (KRAS G12V)
IVVSGNVGT

SEQ ID NO: 57273 - protein, 9 aa, synthetic construct
  source 1..9: note = Seed: LVVVGAVGV (KRAS G12V)
IVVSGNVGV

SEQ ID NO: 57274 - protein, 9 aa, synthetic construct
  source 1..9: note = Seed: LVVVGAVGV (KRAS G12V)
IVVSGNVGW

SEQ ID NO: 57275 - protein, 9 aa, synthetic construct
  source 1..9: note = Seed: LVVVGAVGV (KRAS G12V)
IVVSGNVGY

SEQ ID NO: 57276 - protein, 9 aa, synthetic construct
  source 1..9: note = Seed: LVVVGAVGV (KRAS G12V)
IVVSGPVGA

SEQ ID NO: 57277 - protein, 9 aa, synthetic construct
  source 1..9: note = Seed: LVVVGAVGV (KRAS G12V)
IVVSGPVGC

SEQ ID NO: 57278 - protein, 9 aa, synthetic construct
  source 1..9: note = Seed: LVVVGAVGV (KRAS G12V)
IVVSGPVGD

SEQ ID NO: 57279 - protein, 9 aa, synthetic construct
  source 1..9: note = Seed: LVVVGAVGV (KRAS G12V)
IVVSGPVGF

SEQ ID NO: 57280 - protein, 9 aa, synthetic construct
  source 1..9: note = Seed: LVVVGAVGV (KRAS G12V)
IVVSGPVGG

SEQ ID NO: 57281 - protein, 9 aa, synthetic construct
  source 1..9: note = Seed: LVVVGAVGV (KRAS G12V)
IVVSGPVGI

SEQ ID NO: 57282 - protein, 9 aa, synthetic construct
  source 1..9: note = Seed: LVVVGAVGV (KRAS G12V)
IVVSGPVGL

SEQ ID NO: 57283 - protein, 9 aa, synthetic construct
  source 1..9: note = Seed: LVVVGAVGV (KRAS G12V)
IVVSGPVGM

SEQ ID NO: 57284 - protein, 9 aa, synthetic construct
  source 1..9: note = Seed: LVVVGAVGV (KRAS G12V)
IVVSGPVGN

SEQ ID NO: 57285 - protein, 9 aa, synthetic construct
  source 1..9: note = Seed: LVVVGAVGV (KRAS G12V)
IVVSGPVGQ

SEQ ID NO: 57286 - protein, 9 aa, synthetic construct
  source 1..9: note = Seed: LVVVGAVGV (KRAS G12V)
IVVSGPVGR

SEQ ID NO: 57287 - protein, 9 aa, synthetic construct
  source 1..9: note = Seed: LVVVGAVGV (KRAS G12V)
IVVSGPVGS

SEQ ID NO: 57288 - protein, 9 aa, synthetic construct
  source 1..9: note = Seed: LVVVGAVGV (KRAS G12V)
IVVSGPVGT

SEQ ID NO: 57289 - protein, 9 aa, synthetic construct
  source 1..9: note = Seed: LVVVGAVGV (KRAS G12V)
IVVSGPVGV

SEQ ID NO: 57290 - protein, 9 aa, synthetic construct
  source 1..9: note = Seed: LVVVGAVGV (KRAS G12V)
IVVSGPVGY

SEQ ID NO: 57291 - protein, 9 aa, synthetic construct
  source 1..9: note = Seed: LVVVGAVGV (KRAS G12V)
IVVSGQVGI

SEQ ID NO: 57292 - protein, 9 aa, synthetic construct
  source 1..9: note = Seed: LVVVGAVGV (KRAS G12V)
IVVSGQVGL

SEQ ID NO: 57293 - protein, 9 aa, synthetic construct
  source 1..9: note = Seed: LVVVGAVGV (KRAS G12V)
IVVSGQVGV

SEQ ID NO: 57294 - protein, 9 aa, synthetic construct
  source 1..9: note = Seed: LVVVGAVGV (KRAS G12V)
IVVSGRVGA

SEQ ID NO: 57295 - protein, 9 aa, synthetic construct
  source 1..9: note = Seed: LVVVGAVGV (KRAS G12V)
IVVSGRVGF

SEQ ID NO: 57296 - protein, 9 aa, synthetic construct
  source 1..9: note = Seed: LVVVGAVGV (KRAS G12V)
IVVSGRVGG

SEQ ID NO: 57297 - protein, 9 aa, synthetic construct
  source 1..9: note = Seed: LVVVGAVGV (KRAS G12V)
IVVSGRVGH

SEQ ID NO: 57298 - protein, 9 aa, synthetic construct
  source 1..9: note = Seed: LVVVGAVGV (KRAS G12V)
IVVSGRVGI

SEQ ID NO: 57299 - protein, 9 aa, synthetic construct
  source 1..9: note = Seed: LVVVGAVGV (KRAS G12V)
IVVSGRVGK

SEQ ID NO: 57300 - protein, 9 aa, synthetic construct
  source 1..9: note = Seed: LVVVGAVGV (KRAS G12V)
IVVSGRVGL

SEQ ID NO: 57301 - protein, 9 aa, synthetic construct
  source 1..9: note = Seed: LVVVGAVGV (KRAS G12V)
IVVSGRVGM

SEQ ID NO: 57302 - protein, 9 aa, synthetic construct
  source 1..9: note = Seed: LVVVGAVGV (KRAS G12V)
IVVSGRVGN

SEQ ID NO: 57303 - protein, 9 aa, synthetic construct
  source 1..9: note = Seed: LVVVGAVGV (KRAS G12V)
IVVSGRVGQ

SEQ ID NO: 57304 - protein, 9 aa, synthetic construct
  source 1..9: note = Seed: LVVVGAVGV (KRAS G12V)
IVVSGRVGR

SEQ ID NO: 57305 - protein, 9 aa, synthetic construct
  source 1..9: note = Seed: LVVVGAVGV (KRAS G12V)
IVVSGRVGS

SEQ ID NO: 57306 - protein, 9 aa, synthetic construct
  source 1..9: note = Seed: LVVVGAVGV (KRAS G12V)
IVVSGRVGT

SEQ ID NO: 57307 - protein, 9 aa, synthetic construct
  source 1..9: note = Seed: LVVVGAVGV (KRAS G12V)
IVVSGRVGV

SEQ ID NO: 57308 - protein, 9 aa, synthetic construct
  source 1..9: note = Seed: LVVVGAVGV (KRAS G12V)
IVVSGRVGY

SEQ ID NO: 57309 - protein, 9 aa, synthetic construct
  source 1..9: note = Seed: LVVVGAVGV (KRAS G12V)
IVVSGSVGA

SEQ ID NO: 57310 - protein, 9 aa, synthetic construct
  source 1..9: note = Seed: LVVVGAVGV (KRAS G12V)
IVVSGSVGC

SEQ ID NO: 57311 - protein, 9 aa, synthetic construct
  source 1..9: note = Seed: LVVVGAVGV (KRAS G12V)
IVVSGSVGF

SEQ ID NO: 57312 - protein, 9 aa, synthetic construct
  source 1..9: note = Seed: LVVVGAVGV (KRAS G12V)
IVVSGSVGG

SEQ ID NO: 57313 - protein, 9 aa, synthetic construct
  source 1..9: note = Seed: LVVVGAVGV (KRAS G12V)
IVVSGSVGI

SEQ ID NO: 57314 - protein, 9 aa, synthetic construct
  source 1..9: note = Seed: LVVVGAVGV (KRAS G12V)
IVVSGSVGL

SEQ ID NO: 57315 - protein, 9 aa, synthetic construct
  source 1..9: note = Seed: LVVVGAVGV (KRAS G12V)
IVVSGSVGM

SEQ ID NO: 57316 - protein, 9 aa, synthetic construct
  source 1..9: note = Seed: LVVVGAVGV (KRAS G12V)
IVVSGSVGN

SEQ ID NO: 57317 - protein, 9 aa, synthetic construct
  source 1..9: note = Seed: LVVVGAVGV (KRAS G12V)
IVVSGSVGR

SEQ ID NO: 57318 - protein, 9 aa, synthetic construct
  source 1..9: note = Seed: LVVVGAVGV (KRAS G12V)
IVVSGSVGS

SEQ ID NO: 57319 - protein, 9 aa, synthetic construct
  source 1..9: note = Seed: LVVVGAVGV (KRAS G12V)
IVVSGSVGT

SEQ ID NO: 57320 - protein, 9 aa, synthetic construct
  source 1..9: note = Seed: LVVVGAVGV (KRAS G12V)
IVVSGSVGV

SEQ ID NO: 57321 - protein, 9 aa, synthetic construct
  source 1..9: note = Seed: LVVVGAVGV (KRAS G12V)
IVVSGSVGY

SEQ ID NO: 57322 - protein, 9 aa, synthetic construct
  source 1..9: note = Seed: LVVVGAVGV (KRAS G12V)
IVVSGTVGA

SEQ ID NO: 57323 - protein, 9 aa, synthetic construct
  source 1..9: note = Seed: LVVVGAVGV (KRAS G12V)
IVVSGTVGC

SEQ ID NO: 57324 - protein, 9 aa, synthetic construct
  source 1..9: note = Seed: LVVVGAVGV (KRAS G12V)
IVVSGTVGF

SEQ ID NO: 57325 - protein, 9 aa, synthetic construct
  source 1..9: note = Seed: LVVVGAVGV (KRAS G12V)
IVVSGTVGG

SEQ ID NO: 57326 - protein, 9 aa, synthetic construct
  source 1..9: note = Seed: LVVVGAVGV (KRAS G12V)
IVVSGTVGI

SEQ ID NO: 57327 - protein, 9 aa, synthetic construct
  source 1..9: note = Seed: LVVVGAVGV (KRAS G12V)
IVVSGTVGL

SEQ ID NO: 57328 - protein, 9 aa, synthetic construct
  source 1..9: note = Seed: LVVVGAVGV (KRAS G12V)
IVVSGTVGM

SEQ ID NO: 57329 - protein, 9 aa, synthetic construct
  source 1..9: note = Seed: LVVVGAVGV (KRAS G12V)
IVVSGTVGN

SEQ ID NO: 57330 - protein, 9 aa, synthetic construct
  source 1..9: note = Seed: LVVVGAVGV (KRAS G12V)
IVVSGTVGR

SEQ ID NO: 57331 - protein, 9 aa, synthetic construct
  source 1..9: note = Seed: LVVVGAVGV (KRAS G12V)
IVVSGTVGS

SEQ ID NO: 57332 - protein, 9 aa, synthetic construct
  source 1..9: note = Seed: LVVVGAVGV (KRAS G12V)
IVVSGTVGT

SEQ ID NO: 57333 - protein, 9 aa, synthetic construct
  source 1..9: note = Seed: LVVVGAVGV (KRAS G12V)
IVVSGTVGV

SEQ ID NO: 57334 - protein, 9 aa, synthetic construct
  source 1..9: note = Seed: LVVVGAVGV (KRAS G12V)
IVVSGTVGY

SEQ ID NO: 57335 - protein, 9 aa, synthetic construct
  source 1..9: note = Seed: LVVVGAVGV (KRAS G12V)
IVVSGVVGA

SEQ ID NO: 57336 - protein, 9 aa, synthetic construct
  source 1..9: note = Seed: LVVVGAVGV (KRAS G12V)
IVVSGVVGC

SEQ ID NO: 57337 - protein, 9 aa, synthetic construct
  source 1..9: note = Seed: LVVVGAVGV (KRAS G12V)
IVVSGVVGF

SEQ ID NO: 57338 - protein, 9 aa, synthetic construct
  source 1..9: note = Seed: LVVVGAVGV (KRAS G12V)
IVVSGVVGH

SEQ ID NO: 57339 - protein, 9 aa, synthetic construct
  source 1..9: note = Seed: LVVVGAVGV (KRAS G12V)
IVVSGVVGI

SEQ ID NO: 57340 - protein, 9 aa, synthetic construct
  source 1..9: note = Seed: LVVVGAVGV (KRAS G12V)
IVVSGVVGL

SEQ ID NO: 57341 - protein, 9 aa, synthetic construct
  source 1..9: note = Seed: LVVVGAVGV (KRAS G12V)
IVVSGVVGM

SEQ ID NO: 57342 - protein, 9 aa, synthetic construct
  source 1..9: note = Seed: LVVVGAVGV (KRAS G12V)
IVVSGVVGN

SEQ ID NO: 57343 - protein, 9 aa, synthetic construct
  source 1..9: note = Seed: LVVVGAVGV (KRAS G12V)
IVVSGVVGQ

SEQ ID NO: 57344 - protein, 9 aa, synthetic construct
  source 1..9: note = Seed: LVVVGAVGV (KRAS G12V)
IVVSGVVGR

SEQ ID NO: 57345 - protein, 9 aa, synthetic construct
  source 1..9: note = Seed: LVVVGAVGV (KRAS G12V)
IVVSGVVGS

SEQ ID NO: 57346 - protein, 9 aa, synthetic construct
  source 1..9: note = Seed: LVVVGAVGV (KRAS G12V)
IVVSGVVGT

SEQ ID NO: 57347 - protein, 9 aa, synthetic construct
  source 1..9: note = Seed: LVVVGAVGV (KRAS G12V)
IVVSGVVGV

SEQ ID NO: 57348 - protein, 9 aa, synthetic construct
  source 1..9: note = Seed: LVVVGAVGV (KRAS G12V)
IVVSGVVGY

SEQ ID NO: 57349 - protein, 9 aa, synthetic construct
  source 1..9: note = Seed: LVVVGAVGV (KRAS G12V)
IVVTGAVGA

SEQ ID NO: 57350 - protein, 9 aa, synthetic construct
  source 1..9: note = Seed: LVVVGAVGV (KRAS G12V)
IVVTGAVGC

SEQ ID NO: 57351 - protein, 9 aa, synthetic construct
  source 1..9: note = Seed: LVVVGAVGV (KRAS G12V)
IVVTGAVGF

SEQ ID NO: 57352 - protein, 9 aa, synthetic construct
  source 1..9: note = Seed: LVVVGAVGV (KRAS G12V)
IVVTGAVGG

SEQ ID NO: 57353 - protein, 9 aa, synthetic construct
  source 1..9: note = Seed: LVVVGAVGV (KRAS G12V)
IVVTGAVGH

SEQ ID NO: 57354 - protein, 9 aa, synthetic construct
  source 1..9: note = Seed: LVVVGAVGV (KRAS G12V)
IVVTGAVGI

SEQ ID NO: 57355 - protein, 9 aa, synthetic construct
  source 1..9: note = Seed: LVVVGAVGV (KRAS G12V)
IVVTGAVGK

SEQ ID NO: 57356 - protein, 9 aa, synthetic construct
  source 1..9: note = Seed: LVVVGAVGV (KRAS G12V)
IVVTGAVGL

SEQ ID NO: 57357 - protein, 9 aa, synthetic construct
  source 1..9: note = Seed: LVVVGAVGV (KRAS G12V)
IVVTGAVGM

SEQ ID NO: 57358 - protein, 9 aa, synthetic construct
  source 1..9: note = Seed: LVVVGAVGV (KRAS G12V)
IVVTGAVGN

SEQ ID NO: 57359 - protein, 9 aa, synthetic construct
  source 1..9: note = Seed: LVVVGAVGV (KRAS G12V)
IVVTGAVGP

SEQ ID NO: 57360 - protein, 9 aa, synthetic construct
  source 1..9: note = Seed: LVVVGAVGV (KRAS G12V)
IVVTGAVGQ

SEQ ID NO: 57361 - protein, 9 aa, synthetic construct
  source 1..9: note = Seed: LVVVGAVGV (KRAS G12V)
IVVTGAVGR

SEQ ID NO: 57362 - protein, 9 aa, synthetic construct
  source 1..9: note = Seed: LVVVGAVGV (KRAS G12V)
IVVTGAVGS

SEQ ID NO: 57363 - protein, 9 aa, synthetic construct
  source 1..9: note = Seed: LVVVGAVGV (KRAS G12V)
IVVTGAVGT

SEQ ID NO: 57364 - protein, 9 aa, synthetic construct
  source 1..9: note = Seed: LVVVGAVGV (KRAS G12V)
IVVTGAVGV

SEQ ID NO: 57365 - protein, 9 aa, synthetic construct
  source 1..9: note = Seed: LVVVGAVGV (KRAS G12V)
IVVTGAVGY

SEQ ID NO: 57366 - protein, 9 aa, synthetic construct
  source 1..9: note = Seed: LVVVGAVGV (KRAS G12V)
IVVTGCVGA

SEQ ID NO: 57367 - protein, 9 aa, synthetic construct
  source 1..9: note = Seed: LVVVGAVGV (KRAS G12V)
IVVTGCVGI

SEQ ID NO: 57368 - protein, 9 aa, synthetic construct
  source 1..9: note = Seed: LVVVGAVGV (KRAS G12V)
IVVTGCVGL

SEQ ID NO: 57369 - protein, 9 aa, synthetic construct
  source 1..9: note = Seed: LVVVGAVGV (KRAS G12V)
IVVTGCVGM

SEQ ID NO: 57370 - protein, 9 aa, synthetic construct
  source 1..9: note = Seed: LVVVGAVGV (KRAS G12V)
IVVTGCVGN

SEQ ID NO: 57371 - protein, 9 aa, synthetic construct
  source 1..9: note = Seed: LVVVGAVGV (KRAS G12V)
IVVTGCVGQ

SEQ ID NO: 57372 - protein, 9 aa, synthetic construct
  source 1..9: note = Seed: LVVVGAVGV (KRAS G12V)
IVVTGCVGR

SEQ ID NO: 57373 - protein, 9 aa, synthetic construct
  source 1..9: note = Seed: LVVVGAVGV (KRAS G12V)
IVVTGCVGS

SEQ ID NO: 57374 - protein, 9 aa, synthetic construct
  source 1..9: note = Seed: LVVVGAVGV (KRAS G12V)
IVVTGCVGT

SEQ ID NO: 57375 - protein, 9 aa, synthetic construct
  source 1..9: note = Seed: LVVVGAVGV (KRAS G12V)
IVVTGCVGV

SEQ ID NO: 57376 - protein, 9 aa, synthetic construct
  source 1..9: note = Seed: LVVVGAVGV (KRAS G12V)
IVVTGCVGY

SEQ ID NO: 57377 - protein, 9 aa, synthetic construct
  source 1..9: note = Seed: LVVVGAVGV (KRAS G12V)
IVVTGDVGI

SEQ ID NO: 57378 - protein, 9 aa, synthetic construct
  source 1..9: note = Seed: LVVVGAVGV (KRAS G12V)
IVVTGDVGV

SEQ ID NO: 57379 - protein, 9 aa, synthetic construct
  source 1..9: note = Seed: LVVVGAVGV (KRAS G12V)
IVVTGFVGL

SEQ ID NO: 57380 - protein, 9 aa, synthetic construct
  source 1..9: note = Seed: LVVVGAVGV (KRAS G12V)
IVVTGGVGA

SEQ ID NO: 57381 - protein, 9 aa, synthetic construct
  source 1..9: note = Seed: LVVVGAVGV (KRAS G12V)
IVVTGGVGC

SEQ ID NO: 57382 - protein, 9 aa, synthetic construct
  source 1..9: note = Seed: LVVVGAVGV (KRAS G12V)
IVVTGGVGF

SEQ ID NO: 57383 - protein, 9 aa, synthetic construct
  source 1..9: note = Seed: LVVVGAVGV (KRAS G12V)
IVVTGGVGG

SEQ ID NO: 57384 - protein, 9 aa, synthetic construct
  source 1..9: note = Seed: LVVVGAVGV (KRAS G12V)
IVVTGGVGH

SEQ ID NO: 57385 - protein, 9 aa, synthetic construct
  source 1..9: note = Seed: LVVVGAVGV (KRAS G12V)
IVVTGGVGI

SEQ ID NO: 57386 - protein, 9 aa, synthetic construct
  source 1..9: note = Seed: LVVVGAVGV (KRAS G12V)
IVVTGGVGL

SEQ ID NO: 57387 - protein, 9 aa, synthetic construct
  source 1..9: note = Seed: LVVVGAVGV (KRAS G12V)
IVVTGGVGM

SEQ ID NO: 57388 - protein, 9 aa, synthetic construct
  source 1..9: note = Seed: LVVVGAVGV (KRAS G12V)
IVVTGGVGN

SEQ ID NO: 57389 - protein, 9 aa, synthetic construct
  source 1..9: note = Seed: LVVVGAVGV (KRAS G12V)
IVVTGGVGQ

SEQ ID NO: 57390 - protein, 9 aa, synthetic construct
  source 1..9: note = Seed: LVVVGAVGV (KRAS G12V)
IVVTGGVGR

SEQ ID NO: 57391 - protein, 9 aa, synthetic construct
  source 1..9: note = Seed: LVVVGAVGV (KRAS G12V)
IVVTGGVGS

SEQ ID NO: 57392 - protein, 9 aa, synthetic construct
  source 1..9: note = Seed: LVVVGAVGV (KRAS G12V)
IVVTGGVGT

SEQ ID NO: 57393 - protein, 9 aa, synthetic construct
  source 1..9: note = Seed: LVVVGAVGV (KRAS G12V)
IVVTGGVGV

SEQ ID NO: 57394 - protein, 9 aa, synthetic construct
  source 1..9: note = Seed: LVVVGAVGV (KRAS G12V)
IVVTGGVGY

SEQ ID NO: 57395 - protein, 9 aa, synthetic construct
  source 1..9: note = Seed: LVVVGAVGV (KRAS G12V)
IVVTGHVGC

SEQ ID NO: 57396 - protein, 9 aa, synthetic construct
  source 1..9: note = Seed: LVVVGAVGV (KRAS G12V)
IVVTGHVGI

SEQ ID NO: 57397 - protein, 9 aa, synthetic construct
  source 1..9: note = Seed: LVVVGAVGV (KRAS G12V)
IVVTGHVGL

SEQ ID NO: 57398 - protein, 9 aa, synthetic construct
  source 1..9: note = Seed: LVVVGAVGV (KRAS G12V)
IVVTGHVGV

SEQ ID NO: 57399 - protein, 9 aa, synthetic construct
  source 1..9: note = Seed: LVVVGAVGV (KRAS G12V)
IVVTGHVGY

SEQ ID NO: 57400 - protein, 9 aa, synthetic construct
  source 1..9: note = Seed: LVVVGAVGV (KRAS G12V)
IVVTGIVGA

SEQ ID NO: 57401 - protein, 9 aa, synthetic construct
  source 1..9: note = Seed: LVVVGAVGV (KRAS G12V)
IVVTGIVGI

SEQ ID NO: 57402 - protein, 9 aa, synthetic construct
  source 1..9: note = Seed: LVVVGAVGV (KRAS G12V)
IVVTGIVGL

SEQ ID NO: 57403 - protein, 9 aa, synthetic construct
  source 1..9: note = Seed: LVVVGAVGV (KRAS G12V)
IVVTGIVGM

SEQ ID NO: 57404 - protein, 9 aa, synthetic construct
  source 1..9: note = Seed: LVVVGAVGV (KRAS G12V)
IVVTGIVGN

SEQ ID NO: 57405 - protein, 9 aa, synthetic construct
  source 1..9: note = Seed: LVVVGAVGV (KRAS G12V)
IVVTGIVGQ

SEQ ID NO: 57406 - protein, 9 aa, synthetic construct
  source 1..9: note = Seed: LVVVGAVGV (KRAS G12V)
IVVTGIVGS

SEQ ID NO: 57407 - protein, 9 aa, synthetic construct
  source 1..9: note = Seed: LVVVGAVGV (KRAS G12V)
IVVTGIVGV

SEQ ID NO: 57408 - protein, 9 aa, synthetic construct
  source 1..9: note = Seed: LVVVGAVGV (KRAS G12V)
IVVTGKVGA

SEQ ID NO: 57409 - protein, 9 aa, synthetic construct
  source 1..9: note = Seed: LVVVGAVGV (KRAS G12V)
IVVTGKVGC

SEQ ID NO: 57410 - protein, 9 aa, synthetic construct
  source 1..9: note = Seed: LVVVGAVGV (KRAS G12V)
IVVTGKVGF

SEQ ID NO: 57411 - protein, 9 aa, synthetic construct
  source 1..9: note = Seed: LVVVGAVGV (KRAS G12V)
IVVTGKVGG

SEQ ID NO: 57412 - protein, 9 aa, synthetic construct
  source 1..9: note = Seed: LVVVGAVGV (KRAS G12V)
IVVTGKVGH

SEQ ID NO: 57413 - protein, 9 aa, synthetic construct
  source 1..9: note = Seed: LVVVGAVGV (KRAS G12V)
IVVTGKVGK

SEQ ID NO: 57414 - protein, 9 aa, synthetic construct
  source 1..9: note = Seed: LVVVGAVGV (KRAS G12V)
IVVTGKVGM

SEQ ID NO: 57415 - protein, 9 aa, synthetic construct
  source 1..9: note = Seed: LVVVGAVGV (KRAS G12V)
IVVTGKVGN

SEQ ID NO: 57416 - protein, 9 aa, synthetic construct
  source 1..9: note = Seed: LVVVGAVGV (KRAS G12V)
IVVTGKVGQ

SEQ ID NO: 57417 - protein, 9 aa, synthetic construct
  source 1..9: note = Seed: LVVVGAVGV (KRAS G12V)
IVVTGKVGR

SEQ ID NO: 57418 - protein, 9 aa, synthetic construct
  source 1..9: note = Seed: LVVVGAVGV (KRAS G12V)
IVVTGKVGS

SEQ ID NO: 57419 - protein, 9 aa, synthetic construct
  source 1..9: note = Seed: LVVVGAVGV (KRAS G12V)
IVVTGKVGY

SEQ ID NO: 57420 - protein, 9 aa, synthetic construct
  source 1..9: note = Seed: LVVVGAVGV (KRAS G12V)
IVVTGMVGC

SEQ ID NO: 57421 - protein, 9 aa, synthetic construct
  source 1..9: note = Seed: LVVVGAVGV (KRAS G12V)
IVVTGMVGI

SEQ ID NO: 57422 - protein, 9 aa, synthetic construct
  source 1..9: note = Seed: LVVVGAVGV (KRAS G12V)
IVVTGMVGN

SEQ ID NO: 57423 - protein, 9 aa, synthetic construct
  source 1..9: note = Seed: LVVVGAVGV (KRAS G12V)
IVVTGMVGV

SEQ ID NO: 57424 - protein, 9 aa, synthetic construct
  source 1..9: note = Seed: LVVVGAVGV (KRAS G12V)
IVVTGNVGA

SEQ ID NO: 57425 - protein, 9 aa, synthetic construct
  source 1..9: note = Seed: LVVVGAVGV (KRAS G12V)
IVVTGNVGC

SEQ ID NO: 57426 - protein, 9 aa, synthetic construct
  source 1..9: note = Seed: LVVVGAVGV (KRAS G12V)
IVVTGNVGF

SEQ ID NO: 57427 - protein, 9 aa, synthetic construct
  source 1..9: note = Seed: LVVVGAVGV (KRAS G12V)
IVVTGNVGG

SEQ ID NO: 57428 - protein, 9 aa, synthetic construct
  source 1..9: note = Seed: LVVVGAVGV (KRAS G12V)
IVVTGNVGI

SEQ ID NO: 57429 - protein, 9 aa, synthetic construct
  source 1..9: note = Seed: LVVVGAVGV (KRAS G12V)
IVVTGNVGL

SEQ ID NO: 57430 - protein, 9 aa, synthetic construct
  source 1..9: note = Seed: LVVVGAVGV (KRAS G12V)
IVVTGNVGM

SEQ ID NO: 57431 - protein, 9 aa, synthetic construct
  source 1..9: note = Seed: LVVVGAVGV (KRAS G12V)
IVVTGNVGN

SEQ ID NO: 57432 - protein, 9 aa, synthetic construct
  source 1..9: note = Seed: LVVVGAVGV (KRAS G12V)
IVVTGNVGQ

SEQ ID NO: 57433 - protein, 9 aa, synthetic construct
  source 1..9: note = Seed: LVVVGAVGV (KRAS G12V)
IVVTGNVGR

SEQ ID NO: 57434 - protein, 9 aa, synthetic construct
  source 1..9: note = Seed: LVVVGAVGV (KRAS G12V)
IVVTGNVGS

SEQ ID NO: 57435 - protein, 9 aa, synthetic construct
  source 1..9: note = Seed: LVVVGAVGV (KRAS G12V)
IVVTGNVGT

SEQ ID NO: 57436 - protein, 9 aa, synthetic construct
  source 1..9: note = Seed: LVVVGAVGV (KRAS G12V)
IVVTGNVGV

SEQ ID NO: 57437 - protein, 9 aa, synthetic construct
  source 1..9: note = Seed: LVVVGAVGV (KRAS G12V)
IVVTGNVGY

SEQ ID NO: 57438 - protein, 9 aa, synthetic construct
  source 1..9: note = Seed: LVVVGAVGV (KRAS G12V)
IVVTGPVGA

SEQ ID NO: 57439 - protein, 9 aa, synthetic construct
  source 1..9: note = Seed: LVVVGAVGV (KRAS G12V)
IVVTGPVGC

SEQ ID NO: 57440 - protein, 9 aa, synthetic construct
  source 1..9: note = Seed: LVVVGAVGV (KRAS G12V)
IVVTGPVGF

SEQ ID NO: 57441 - protein, 9 aa, synthetic construct
  source 1..9: note = Seed: LVVVGAVGV (KRAS G12V)
IVVTGPVGG

SEQ ID NO: 57442 - protein, 9 aa, synthetic construct
  source 1..9: note = Seed: LVVVGAVGV (KRAS G12V)
IVVTGPVGI

SEQ ID NO: 57443 - protein, 9 aa, synthetic construct
  source 1..9: note = Seed: LVVVGAVGV (KRAS G12V)
IVVTGPVGK

SEQ ID NO: 57444 - protein, 9 aa, synthetic construct
  source 1..9: note = Seed: LVVVGAVGV (KRAS G12V)
IVVTGPVGL

SEQ ID NO: 57445 - protein, 9 aa, synthetic construct
  source 1..9: note = Seed: LVVVGAVGV (KRAS G12V)
IVVTGPVGM

SEQ ID NO: 57446 - protein, 9 aa, synthetic construct
  source 1..9: note = Seed: LVVVGAVGV (KRAS G12V)
IVVTGPVGN

SEQ ID NO: 57447 - protein, 9 aa, synthetic construct
  source 1..9: note = Seed: LVVVGAVGV (KRAS G12V)
IVVTGPVGQ

SEQ ID NO: 57448 - protein, 9 aa, synthetic construct
  source 1..9: note = Seed: LVVVGAVGV (KRAS G12V)
IVVTGPVGR

SEQ ID NO: 57449 - protein, 9 aa, synthetic construct
  source 1..9: note = Seed: LVVVGAVGV (KRAS G12V)
IVVTGPVGS

SEQ ID NO: 57450 - protein, 9 aa, synthetic construct
  source 1..9: note = Seed: LVVVGAVGV (KRAS G12V)
IVVTGPVGT

SEQ ID NO: 57451 - protein, 9 aa, synthetic construct
  source 1..9: note = Seed: LVVVGAVGV (KRAS G12V)
IVVTGPVGV

SEQ ID NO: 57452 - protein, 9 aa, synthetic construct
  source 1..9: note = Seed: LVVVGAVGV (KRAS G12V)
IVVTGPVGY

SEQ ID NO: 57453 - protein, 9 aa, synthetic construct
  source 1..9: note = Seed: LVVVGAVGV (KRAS G12V)
IVVTGQVGA

SEQ ID NO: 57454 - protein, 9 aa, synthetic construct
  source 1..9: note = Seed: LVVVGAVGV (KRAS G12V)
IVVTGQVGI

SEQ ID NO: 57455 - protein, 9 aa, synthetic construct
  source 1..9: note = Seed: LVVVGAVGV (KRAS G12V)
IVVTGQVGL

SEQ ID NO: 57456 - protein, 9 aa, synthetic construct
  source 1..9: note = Seed: LVVVGAVGV (KRAS G12V)
IVVTGQVGM

SEQ ID NO: 57457 - protein, 9 aa, synthetic construct
  source 1..9: note = Seed: LVVVGAVGV (KRAS G12V)
IVVTGQVGV

SEQ ID NO: 57458 - protein, 9 aa, synthetic construct
  source 1..9: note = Seed: LVVVGAVGV (KRAS G12V)
IVVTGRVGA

SEQ ID NO: 57459 - protein, 9 aa, synthetic construct
  source 1..9: note = Seed: LVVVGAVGV (KRAS G12V)
IVVTGRVGF

SEQ ID NO: 57460 - protein, 9 aa, synthetic construct
  source 1..9: note = Seed: LVVVGAVGV (KRAS G12V)
IVVTGRVGG

SEQ ID NO: 57461 - protein, 9 aa, synthetic construct
  source 1..9: note = Seed: LVVVGAVGV (KRAS G12V)
IVVTGRVGH

SEQ ID NO: 57462 - protein, 9 aa, synthetic construct
  source 1..9: note = Seed: LVVVGAVGV (KRAS G12V)
IVVTGRVGI

SEQ ID NO: 57463 - protein, 9 aa, synthetic construct
  source 1..9: note = Seed: LVVVGAVGV (KRAS G12V)
IVVTGRVGK

SEQ ID NO: 57464 - protein, 9 aa, synthetic construct
  source 1..9: note = Seed: LVVVGAVGV (KRAS G12V)
IVVTGRVGL

SEQ ID NO: 57465 - protein, 9 aa, synthetic construct
  source 1..9: note = Seed: LVVVGAVGV (KRAS G12V)
IVVTGRVGM

SEQ ID NO: 57466 - protein, 9 aa, synthetic construct
  source 1..9: note = Seed: LVVVGAVGV (KRAS G12V)
IVVTGRVGN

SEQ ID NO: 57467 - protein, 9 aa, synthetic construct
  source 1..9: note = Seed: LVVVGAVGV (KRAS G12V)
IVVTGRVGQ

SEQ ID NO: 57468 - protein, 9 aa, synthetic construct
  source 1..9: note = Seed: LVVVGAVGV (KRAS G12V)
IVVTGRVGR

SEQ ID NO: 57469 - protein, 9 aa, synthetic construct
  source 1..9: note = Seed: LVVVGAVGV (KRAS G12V)
IVVTGRVGS

SEQ ID NO: 57470 - protein, 9 aa, synthetic construct
  source 1..9: note = Seed: LVVVGAVGV (KRAS G12V)
IVVTGRVGT

SEQ ID NO: 57471 - protein, 9 aa, synthetic construct
  source 1..9: note = Seed: LVVVGAVGV (KRAS G12V)
IVVTGRVGV

SEQ ID NO: 57472 - protein, 9 aa, synthetic construct
  source 1..9: note = Seed: LVVVGAVGV (KRAS G12V)
IVVTGRVGY

SEQ ID NO: 57473 - protein, 9 aa, synthetic construct
  source 1..9: note = Seed: LVVVGAVGV (KRAS G12V)
IVVTGSVGA

SEQ ID NO: 57474 - protein, 9 aa, synthetic construct
  source 1..9: note = Seed: LVVVGAVGV (KRAS G12V)
IVVTGSVGC

SEQ ID NO: 57475 - protein, 9 aa, synthetic construct
  source 1..9: note = Seed: LVVVGAVGV (KRAS G12V)
IVVTGSVGF

SEQ ID NO: 57476 - protein, 9 aa, synthetic construct
  source 1..9: note = Seed: LVVVGAVGV (KRAS G12V)
IVVTGSVGG

SEQ ID NO: 57477 - protein, 9 aa, synthetic construct
  source 1..9: note = Seed: LVVVGAVGV (KRAS G12V)
IVVTGSVGH

SEQ ID NO: 57478 - protein, 9 aa, synthetic construct
  source 1..9: note = Seed: LVVVGAVGV (KRAS G12V)
IVVTGSVGI

SEQ ID NO: 57479 - protein, 9 aa, synthetic construct
  source 1..9: note = Seed: LVVVGAVGV (KRAS G12V)
IVVTGSVGK

SEQ ID NO: 57480 - protein, 9 aa, synthetic construct
  source 1..9: note = Seed: LVVVGAVGV (KRAS G12V)
IVVTGSVGL

SEQ ID NO: 57481 - protein, 9 aa, synthetic construct
  source 1..9: note = Seed: LVVVGAVGV (KRAS G12V)
IVVTGSVGM

SEQ ID NO: 57482 - protein, 9 aa, synthetic construct
  source 1..9: note = Seed: LVVVGAVGV (KRAS G12V)
IVVTGSVGN

SEQ ID NO: 57483 - protein, 9 aa, synthetic construct
  source 1..9: note = Seed: LVVVGAVGV (KRAS G12V)
IVVTGSVGQ

SEQ ID NO: 57484 - protein, 9 aa, synthetic construct
  source 1..9: note = Seed: LVVVGAVGV (KRAS G12V)
IVVTGSVGR

SEQ ID NO: 57485 - protein, 9 aa, synthetic construct
  source 1..9: note = Seed: LVVVGAVGV (KRAS G12V)
IVVTGSVGS

SEQ ID NO: 57486 - protein, 9 aa, synthetic construct
  source 1..9: note = Seed: LVVVGAVGV (KRAS G12V)
IVVTGSVGT

SEQ ID NO: 57487 - protein, 9 aa, synthetic construct
  source 1..9: note = Seed: LVVVGAVGV (KRAS G12V)
IVVTGSVGV

SEQ ID NO: 57488 - protein, 9 aa, synthetic construct
  source 1..9: note = Seed: LVVVGAVGV (KRAS G12V)
IVVTGSVGY

SEQ ID NO: 57489 - protein, 9 aa, synthetic construct
  source 1..9: note = Seed: LVVVGAVGV (KRAS G12V)
IVVTGTVGA

SEQ ID NO: 57490 - protein, 9 aa, synthetic construct
  source 1..9: note = Seed: LVVVGAVGV (KRAS G12V)
IVVTGTVGF

SEQ ID NO: 57491 - protein, 9 aa, synthetic construct
  source 1..9: note = Seed: LVVVGAVGV (KRAS G12V)
IVVTGTVGG

SEQ ID NO: 57492 - protein, 9 aa, synthetic construct
  source 1..9: note = Seed: LVVVGAVGV (KRAS G12V)
IVVTGTVGH

SEQ ID NO: 57493 - protein, 9 aa, synthetic construct
  source 1..9: note = Seed: LVVVGAVGV (KRAS G12V)
IVVTGTVGI

SEQ ID NO: 57494 - protein, 9 aa, synthetic construct
  source 1..9: note = Seed: LVVVGAVGV (KRAS G12V)
IVVTGTVGL

SEQ ID NO: 57495 - protein, 9 aa, synthetic construct
  source 1..9: note = Seed: LVVVGAVGV (KRAS G12V)
IVVTGTVGM

SEQ ID NO: 57496 - protein, 9 aa, synthetic construct
  source 1..9: note = Seed: LVVVGAVGV (KRAS G12V)
IVVTGTVGN

SEQ ID NO: 57497 - protein, 9 aa, synthetic construct
  source 1..9: note = Seed: LVVVGAVGV (KRAS G12V)
IVVTGTVGQ

SEQ ID NO: 57498 - protein, 9 aa, synthetic construct
  source 1..9: note = Seed: LVVVGAVGV (KRAS G12V)
IVVTGTVGS

SEQ ID NO: 57499 - protein, 9 aa, synthetic construct
  source 1..9: note = Seed: LVVVGAVGV (KRAS G12V)
IVVTGTVGT

SEQ ID NO: 57500 - protein, 9 aa, synthetic construct
  source 1..9: note = Seed: LVVVGAVGV (KRAS G12V)
IVVTGTVGV

SEQ ID NO: 57501 - protein, 9 aa, synthetic construct
  source 1..9: note = Seed: LVVVGAVGV (KRAS G12V)
IVVTGTVGY

SEQ ID NO: 57502 - protein, 9 aa, synthetic construct
  source 1..9: note = Seed: LVVVGAVGV (KRAS G12V)
IVVTGVVGA

SEQ ID NO: 57503 - protein, 9 aa, synthetic construct
  source 1..9: note = Seed: LVVVGAVGV (KRAS G12V)
IVVTGVVGG

SEQ ID NO: 57504 - protein, 9 aa, synthetic construct
  source 1..9: note = Seed: LVVVGAVGV (KRAS G12V)
IVVTGVVGH

SEQ ID NO: 57505 - protein, 9 aa, synthetic construct
  source 1..9: note = Seed: LVVVGAVGV (KRAS G12V)
IVVTGVVGI

SEQ ID NO: 57506 - protein, 9 aa, synthetic construct
  source 1..9: note = Seed: LVVVGAVGV (KRAS G12V)
IVVTGVVGL

SEQ ID NO: 57507 - protein, 9 aa, synthetic construct
  source 1..9: note = Seed: LVVVGAVGV (KRAS G12V)
IVVTGVVGM

SEQ ID NO: 57508 - protein, 9 aa, synthetic construct
  source 1..9: note = Seed: LVVVGAVGV (KRAS G12V)
IVVTGVVGN

SEQ ID NO: 57509 - protein, 9 aa, synthetic construct
  source 1..9: note = Seed: LVVVGAVGV (KRAS G12V)
IVVTGVVGQ

SEQ ID NO: 57510 - protein, 9 aa, synthetic construct
  source 1..9: note = Seed: LVVVGAVGV (KRAS G12V)
IVVTGVVGS

SEQ ID NO: 57511 - protein, 9 aa, synthetic construct
  source 1..9: note = Seed: LVVVGAVGV (KRAS G12V)
IVVTGVVGT

SEQ ID NO: 57512 - protein, 9 aa, synthetic construct
  source 1..9: note = Seed: LVVVGAVGV (KRAS G12V)
IVVTGVVGV

SEQ ID NO: 57513 - protein, 9 aa, synthetic construct
  source 1..9: note = Seed: LVVVGAVGV (KRAS G12V)
IVVTGWVGA

SEQ ID NO: 57514 - protein, 9 aa, synthetic construct
  source 1..9: note = Seed: LVVVGAVGV (KRAS G12V)
IVVTGYVGI

SEQ ID NO: 57515 - protein, 9 aa, synthetic construct
  source 1..9: note = Seed: LVVVGAVGV (KRAS G12V)
IVVTGYVGL

SEQ ID NO: 57516 - protein, 9 aa, synthetic construct
  source 1..9: note = Seed: LVVVGAVGV (KRAS G12V)
IVVTGYVGV

SEQ ID NO: 57517 - protein, 9 aa, synthetic construct
  source 1..9: note = Seed: LVVVGAVGV (KRAS G12V)
IVVVGAVGA

SEQ ID NO: 57518 - protein, 9 aa, synthetic construct
  source 1..9: note = Seed: LVVVGAVGV (KRAS G12V)
IVVVGAVGC

SEQ ID NO: 57519 - protein, 9 aa, synthetic construct
  source 1..9: note = Seed: LVVVGAVGV (KRAS G12V)
IVVVGAVGF

SEQ ID NO: 57520 - protein, 9 aa, synthetic construct
  source 1..9: note = Seed: LVVVGAVGV (KRAS G12V)
IVVVGAVGG

SEQ ID NO: 57521 - protein, 9 aa, synthetic construct
  source 1..9: note = Seed: LVVVGAVGV (KRAS G12V)
IVVVGAVGH

SEQ ID NO: 57522 - protein, 9 aa, synthetic construct
  source 1..9: note = Seed: LVVVGAVGV (KRAS G12V)
IVVVGAVGI

SEQ ID NO: 57523 - protein, 9 aa, synthetic construct
  source 1..9: note = Seed: LVVVGAVGV (KRAS G12V)
IVVVGAVGK

SEQ ID NO: 57524 - protein, 9 aa, synthetic construct
  source 1..9: note = Seed: LVVVGAVGV (KRAS G12V)
IVVVGAVGL

SEQ ID NO: 57525 - protein, 9 aa, synthetic construct
  source 1..9: note = Seed: LVVVGAVGV (KRAS G12V)
IVVVGAVGM

SEQ ID NO: 57526 - protein, 9 aa, synthetic construct
  source 1..9: note = Seed: LVVVGAVGV (KRAS G12V)
IVVVGAVGN

SEQ ID NO: 57527 - protein, 9 aa, synthetic construct
  source 1..9: note = Seed: LVVVGAVGV (KRAS G12V)
IVVVGAVGP

SEQ ID NO: 57528 - protein, 9 aa, synthetic construct
  source 1..9: note = Seed: LVVVGAVGV (KRAS G12V)
IVVVGAVGQ

SEQ ID NO: 57529 - protein, 9 aa, synthetic construct
  source 1..9: note = Seed: LVVVGAVGV (KRAS G12V)
IVVVGAVGR

SEQ ID NO: 57530 - protein, 9 aa, synthetic construct
  source 1..9: note = Seed: LVVVGAVGV (KRAS G12V)
IVVVGAVGS

SEQ ID NO: 57531 - protein, 9 aa, synthetic construct
  source 1..9: note = Seed: LVVVGAVGV (KRAS G12V)
IVVVGAVGT

SEQ ID NO: 57532 - protein, 9 aa, synthetic construct
  source 1..9: note = Seed: LVVVGAVGV (KRAS G12V)
IVVVGAVGV

SEQ ID NO: 57533 - protein, 9 aa, synthetic construct
  source 1..9: note = Seed: LVVVGAVGV (KRAS G12V)
IVVVGAVGY

SEQ ID NO: 57534 - protein, 9 aa, synthetic construct
  source 1..9: note = Seed: LVVVGAVGV (KRAS G12V)
IVVVGDVGA

SEQ ID NO: 57535 - protein, 9 aa, synthetic construct
  source 1..9: note = Seed: LVVVGAVGV (KRAS G12V)
IVVVGDVGI

SEQ ID NO: 57536 - protein, 9 aa, synthetic construct
  source 1..9: note = Seed: LVVVGAVGV (KRAS G12V)
IVVVGDVGL

SEQ ID NO: 57537 - protein, 9 aa, synthetic construct
  source 1..9: note = Seed: LVVVGAVGV (KRAS G12V)
IVVVGDVGS

SEQ ID NO: 57538 - protein, 9 aa, synthetic construct
  source 1..9: note = Seed: LVVVGAVGV (KRAS G12V)
IVVVGDVGV

SEQ ID NO: 57539 - protein, 9 aa, synthetic construct
  source 1..9: note = Seed: LVVVGAVGV (KRAS G12V)
IVVVGGVGA

SEQ ID NO: 57540 - protein, 9 aa, synthetic construct
  source 1..9: note = Seed: LVVVGAVGV (KRAS G12V)
IVVVGGVGF

SEQ ID NO: 57541 - protein, 9 aa, synthetic construct
  source 1..9: note = Seed: LVVVGAVGV (KRAS G12V)
IVVVGGVGG

SEQ ID NO: 57542 - protein, 9 aa, synthetic construct
  source 1..9: note = Seed: LVVVGAVGV (KRAS G12V)
IVVVGGVGH

SEQ ID NO: 57543 - protein, 9 aa, synthetic construct
  source 1..9: note = Seed: LVVVGAVGV (KRAS G12V)
IVVVGGVGI

SEQ ID NO: 57544 - protein, 9 aa, synthetic construct
  source 1..9: note = Seed: LVVVGAVGV (KRAS G12V)
IVVVGGVGK

SEQ ID NO: 57545 - protein, 9 aa, synthetic construct
  source 1..9: note = Seed: LVVVGAVGV (KRAS G12V)
IVVVGGVGL

SEQ ID NO: 57546 - protein, 9 aa, synthetic construct
  source 1..9: note = Seed: LVVVGAVGV (KRAS G12V)
IVVVGGVGM

SEQ ID NO: 57547 - protein, 9 aa, synthetic construct
  source 1..9: note = Seed: LVVVGAVGV (KRAS G12V)
IVVVGGVGN

SEQ ID NO: 57548 - protein, 9 aa, synthetic construct
  source 1..9: note = Seed: LVVVGAVGV (KRAS G12V)
IVVVGGVGQ

SEQ ID NO: 57549 - protein, 9 aa, synthetic construct
  source 1..9: note = Seed: LVVVGAVGV (KRAS G12V)
IVVVGGVGR

SEQ ID NO: 57550 - protein, 9 aa, synthetic construct
  source 1..9: note = Seed: LVVVGAVGV (KRAS G12V)
IVVVGGVGS

SEQ ID NO: 57551 - protein, 9 aa, synthetic construct
  source 1..9: note = Seed: LVVVGAVGV (KRAS G12V)
IVVVGGVGT

SEQ ID NO: 57552 - protein, 9 aa, synthetic construct
  source 1..9: note = Seed: LVVVGAVGV (KRAS G12V)
IVVVGGVGV

SEQ ID NO: 57553 - protein, 9 aa, synthetic construct
  source 1..9: note = Seed: LVVVGAVGV (KRAS G12V)
IVVVGHVGA

SEQ ID NO: 57554 - protein, 9 aa, synthetic construct
  source 1..9: note = Seed: LVVVGAVGV (KRAS G12V)
IVVVGHVGH

SEQ ID NO: 57555 - protein, 9 aa, synthetic construct
  source 1..9: note = Seed: LVVVGAVGV (KRAS G12V)
IVVVGHVGI

SEQ ID NO: 57556 - protein, 9 aa, synthetic construct
  source 1..9: note = Seed: LVVVGAVGV (KRAS G12V)
IVVVGHVGK

SEQ ID NO: 57557 - protein, 9 aa, synthetic construct
  source 1..9: note = Seed: LVVVGAVGV (KRAS G12V)
IVVVGHVGL

SEQ ID NO: 57558 - protein, 9 aa, synthetic construct
  source 1..9: note = Seed: LVVVGAVGV (KRAS G12V)
IVVVGHVGM

SEQ ID NO: 57559 - protein, 9 aa, synthetic construct
  source 1..9: note = Seed: LVVVGAVGV (KRAS G12V)
IVVVGHVGQ

SEQ ID NO: 57560 - protein, 9 aa, synthetic construct
  source 1..9: note = Seed: LVVVGAVGV (KRAS G12V)
IVVVGHVGR

SEQ ID NO: 57561 - protein, 9 aa, synthetic construct
  source 1..9: note = Seed: LVVVGAVGV (KRAS G12V)
IVVVGHVGS

SEQ ID NO: 57562 - protein, 9 aa, synthetic construct
  source 1..9: note = Seed: LVVVGAVGV (KRAS G12V)
IVVVGHVGT

SEQ ID NO: 57563 - protein, 9 aa, synthetic construct
  source 1..9: note = Seed: LVVVGAVGV (KRAS G12V)
IVVVGHVGV

SEQ ID NO: 57564 - protein, 9 aa, synthetic construct
  source 1..9: note = Seed: LVVVGAVGV (KRAS G12V)
IVVVGHVGY

SEQ ID NO: 57565 - protein, 9 aa, synthetic construct
  source 1..9: note = Seed: LVVVGAVGV (KRAS G12V)
IVVVGIVGR

SEQ ID NO: 57566 - protein, 9 aa, synthetic construct
  source 1..9: note = Seed: LVVVGAVGV (KRAS G12V)
IVVVGKVGA

SEQ ID NO: 57567 - protein, 9 aa, synthetic construct
  source 1..9: note = Seed: LVVVGAVGV (KRAS G12V)
IVVVGKVGG

SEQ ID NO: 57568 - protein, 9 aa, synthetic construct
  source 1..9: note = Seed: LVVVGAVGV (KRAS G12V)
IVVVGKVGH

SEQ ID NO: 57569 - protein, 9 aa, synthetic construct
  source 1..9: note = Seed: LVVVGAVGV (KRAS G12V)
IVVVGKVGI

SEQ ID NO: 57570 - protein, 9 aa, synthetic construct
  source 1..9: note = Seed: LVVVGAVGV (KRAS G12V)
IVVVGKVGK

SEQ ID NO: 57571 - protein, 9 aa, synthetic construct
  source 1..9: note = Seed: LVVVGAVGV (KRAS G12V)
IVVVGKVGL

SEQ ID NO: 57572 - protein, 9 aa, synthetic construct
  source 1..9: note = Seed: LVVVGAVGV (KRAS G12V)
IVVVGKVGM

SEQ ID NO: 57573 - protein, 9 aa, synthetic construct
  source 1..9: note = Seed: LVVVGAVGV (KRAS G12V)
IVVVGKVGN

SEQ ID NO: 57574 - protein, 9 aa, synthetic construct
  source 1..9: note = Seed: LVVVGAVGV (KRAS G12V)
IVVVGKVGP

SEQ ID NO: 57575 - protein, 9 aa, synthetic construct
  source 1..9: note = Seed: LVVVGAVGV (KRAS G12V)
IVVVGKVGQ

SEQ ID NO: 57576 - protein, 9 aa, synthetic construct
  source 1..9: note = Seed: LVVVGAVGV (KRAS G12V)
IVVVGKVGR

SEQ ID NO: 57577 - protein, 9 aa, synthetic construct
  source 1..9: note = Seed: LVVVGAVGV (KRAS G12V)
IVVVGKVGS

SEQ ID NO: 57578 - protein, 9 aa, synthetic construct
  source 1..9: note = Seed: LVVVGAVGV (KRAS G12V)
IVVVGKVGT

SEQ ID NO: 57579 - protein, 9 aa, synthetic construct
  source 1..9: note = Seed: LVVVGAVGV (KRAS G12V)
IVVVGKVGV

SEQ ID NO: 57580 - protein, 9 aa, synthetic construct
  source 1..9: note = Seed: LVVVGAVGV (KRAS G12V)
IVVVGKVGY

SEQ ID NO: 57581 - protein, 9 aa, synthetic construct
  source 1..9: note = Seed: LVVVGAVGV (KRAS G12V)
IVVVGLVGR

SEQ ID NO: 57582 - protein, 9 aa, synthetic construct
  source 1..9: note = Seed: LVVVGAVGV (KRAS G12V)
IVVVGMVGA

SEQ ID NO: 57583 - protein, 9 aa, synthetic construct
  source 1..9: note = Seed: LVVVGAVGV (KRAS G12V)
IVVVGMVGL

SEQ ID NO: 57584 - protein, 9 aa, synthetic construct
  source 1..9: note = Seed: LVVVGAVGV (KRAS G12V)
IVVVGMVGM

SEQ ID NO: 57585 - protein, 9 aa, synthetic construct
  source 1..9: note = Seed: LVVVGAVGV (KRAS G12V)
IVVVGMVGN

SEQ ID NO: 57586 - protein, 9 aa, synthetic construct
  source 1..9: note = Seed: LVVVGAVGV (KRAS G12V)
IVVVGMVGR

SEQ ID NO: 57587 - protein, 9 aa, synthetic construct
  source 1..9: note = Seed: LVVVGAVGV (KRAS G12V)
IVVVGMVGS

SEQ ID NO: 57588 - protein, 9 aa, synthetic construct
  source 1..9: note = Seed: LVVVGAVGV (KRAS G12V)
IVVVGMVGV

SEQ ID NO: 57589 - protein, 9 aa, synthetic construct
  source 1..9: note = Seed: LVVVGAVGV (KRAS G12V)
IVVVGNVGA

SEQ ID NO: 57590 - protein, 9 aa, synthetic construct
  source 1..9: note = Seed: LVVVGAVGV (KRAS G12V)
IVVVGNVGF

SEQ ID NO: 57591 - protein, 9 aa, synthetic construct
  source 1..9: note = Seed: LVVVGAVGV (KRAS G12V)
IVVVGNVGG

SEQ ID NO: 57592 - protein, 9 aa, synthetic construct
  source 1..9: note = Seed: LVVVGAVGV (KRAS G12V)
IVVVGNVGH

SEQ ID NO: 57593 - protein, 9 aa, synthetic construct
  source 1..9: note = Seed: LVVVGAVGV (KRAS G12V)
IVVVGNVGI

SEQ ID NO: 57594 - protein, 9 aa, synthetic construct
  source 1..9: note = Seed: LVVVGAVGV (KRAS G12V)
IVVVGNVGK

SEQ ID NO: 57595 - protein, 9 aa, synthetic construct
  source 1..9: note = Seed: LVVVGAVGV (KRAS G12V)
IVVVGNVGL

SEQ ID NO: 57596 - protein, 9 aa, synthetic construct
  source 1..9: note = Seed: LVVVGAVGV (KRAS G12V)
IVVVGNVGM

SEQ ID NO: 57597 - protein, 9 aa, synthetic construct
  source 1..9: note = Seed: LVVVGAVGV (KRAS G12V)
IVVVGNVGN

SEQ ID NO: 57598 - protein, 9 aa, synthetic construct
  source 1..9: note = Seed: LVVVGAVGV (KRAS G12V)
IVVVGNVGQ

SEQ ID NO: 57599 - protein, 9 aa, synthetic construct
  source 1..9: note = Seed: LVVVGAVGV (KRAS G12V)
IVVVGNVGR

SEQ ID NO: 57600 - protein, 9 aa, synthetic construct
  source 1..9: note = Seed: LVVVGAVGV (KRAS G12V)
IVVVGNVGS

SEQ ID NO: 57601 - protein, 9 aa, synthetic construct
  source 1..9: note = Seed: LVVVGAVGV (KRAS G12V)
IVVVGNVGT

SEQ ID NO: 57602 - protein, 9 aa, synthetic construct
  source 1..9: note = Seed: LVVVGAVGV (KRAS G12V)
IVVVGNVGV

SEQ ID NO: 57603 - protein, 9 aa, synthetic construct
  source 1..9: note = Seed: LVVVGAVGV (KRAS G12V)
IVVVGNVGY

SEQ ID NO: 57604 - protein, 9 aa, synthetic construct
  source 1..9: note = Seed: LVVVGAVGV (KRAS G12V)
IVVVGPVGA

SEQ ID NO: 57605 - protein, 9 aa, synthetic construct
  source 1..9: note = Seed: LVVVGAVGV (KRAS G12V)
IVVVGPVGC

SEQ ID NO: 57606 - protein, 9 aa, synthetic construct
  source 1..9: note = Seed: LVVVGAVGV (KRAS G12V)
IVVVGPVGD

SEQ ID NO: 57607 - protein, 9 aa, synthetic construct
  source 1..9: note = Seed: LVVVGAVGV (KRAS G12V)
IVVVGPVGE

SEQ ID NO: 57608 - protein, 9 aa, synthetic construct
  source 1..9: note = Seed: LVVVGAVGV (KRAS G12V)
IVVVGPVGF

SEQ ID NO: 57609 - protein, 9 aa, synthetic construct
  source 1..9: note = Seed: LVVVGAVGV (KRAS G12V)
IVVVGPVGG

SEQ ID NO: 57610 - protein, 9 aa, synthetic construct
  source 1..9: note = Seed: LVVVGAVGV (KRAS G12V)
IVVVGPVGH

SEQ ID NO: 57611 - protein, 9 aa, synthetic construct
  source 1..9: note = Seed: LVVVGAVGV (KRAS G12V)
IVVVGPVGI

SEQ ID NO: 57612 - protein, 9 aa, synthetic construct
  source 1..9: note = Seed: LVVVGAVGV (KRAS G12V)
IVVVGPVGL

SEQ ID NO: 57613 - protein, 9 aa, synthetic construct
  source 1..9: note = Seed: LVVVGAVGV (KRAS G12V)
IVVVGPVGM

SEQ ID NO: 57614 - protein, 9 aa, synthetic construct
  source 1..9: note = Seed: LVVVGAVGV (KRAS G12V)
IVVVGPVGN

SEQ ID NO: 57615 - protein, 9 aa, synthetic construct
  source 1..9: note = Seed: LVVVGAVGV (KRAS G12V)
IVVVGPVGQ

SEQ ID NO: 57616 - protein, 9 aa, synthetic construct
  source 1..9: note = Seed: LVVVGAVGV (KRAS G12V)
IVVVGPVGR

SEQ ID NO: 57617 - protein, 9 aa, synthetic construct
  source 1..9: note = Seed: LVVVGAVGV (KRAS G12V)
IVVVGPVGS

SEQ ID NO: 57618 - protein, 9 aa, synthetic construct
  source 1..9: note = Seed: LVVVGAVGV (KRAS G12V)
IVVVGPVGT

SEQ ID NO: 57619 - protein, 9 aa, synthetic construct
  source 1..9: note = Seed: LVVVGAVGV (KRAS G12V)
IVVVGPVGV

SEQ ID NO: 57620 - protein, 9 aa, synthetic construct
  source 1..9: note = Seed: LVVVGAVGV (KRAS G12V)
IVVVGPVGY

SEQ ID NO: 57621 - protein, 9 aa, synthetic construct
  source 1..9: note = Seed: LVVVGAVGV (KRAS G12V)
IVVVGQVGA

SEQ ID NO: 57622 - protein, 9 aa, synthetic construct
  source 1..9: note = Seed: LVVVGAVGV (KRAS G12V)
IVVVGQVGI

SEQ ID NO: 57623 - protein, 9 aa, synthetic construct
  source 1..9: note = Seed: LVVVGAVGV (KRAS G12V)
IVVVGQVGL

SEQ ID NO: 57624 - protein, 9 aa, synthetic construct
  source 1..9: note = Seed: LVVVGAVGV (KRAS G12V)
IVVVGQVGM

SEQ ID NO: 57625 - protein, 9 aa, synthetic construct
  source 1..9: note = Seed: LVVVGAVGV (KRAS G12V)
IVVVGQVGR

SEQ ID NO: 57626 - protein, 9 aa, synthetic construct
  source 1..9: note = Seed: LVVVGAVGV (KRAS G12V)
IVVVGQVGV

SEQ ID NO: 57627 - protein, 9 aa, synthetic construct
  source 1..9: note = Seed: LVVVGAVGV (KRAS G12V)
IVVVGRVGA

SEQ ID NO: 57628 - protein, 9 aa, synthetic construct
  source 1..9: note = Seed: LVVVGAVGV (KRAS G12V)
IVVVGRVGF

SEQ ID NO: 57629 - protein, 9 aa, synthetic construct
  source 1..9: note = Seed: LVVVGAVGV (KRAS G12V)
IVVVGRVGG

SEQ ID NO: 57630 - protein, 9 aa, synthetic construct
  source 1..9: note = Seed: LVVVGAVGV (KRAS G12V)
IVVVGRVGH

SEQ ID NO: 57631 - protein, 9 aa, synthetic construct
  source 1..9: note = Seed: LVVVGAVGV (KRAS G12V)
IVVVGRVGK

SEQ ID NO: 57632 - protein, 9 aa, synthetic construct
  source 1..9: note = Seed: LVVVGAVGV (KRAS G12V)
IVVVGRVGL

SEQ ID NO: 57633 - protein, 9 aa, synthetic construct
  source 1..9: note = Seed: LVVVGAVGV (KRAS G12V)
IVVVGRVGM

SEQ ID NO: 57634 - protein, 9 aa, synthetic construct
  source 1..9: note = Seed: LVVVGAVGV (KRAS G12V)
IVVVGRVGN

SEQ ID NO: 57635 - protein, 9 aa, synthetic construct
  source 1..9: note = Seed: LVVVGAVGV (KRAS G12V)
IVVVGRVGP

SEQ ID NO: 57636 - protein, 9 aa, synthetic construct
  source 1..9: note = Seed: LVVVGAVGV (KRAS G12V)
IVVVGRVGQ

SEQ ID NO: 57637 - protein, 9 aa, synthetic construct
  source 1..9: note = Seed: LVVVGAVGV (KRAS G12V)
IVVVGRVGR

SEQ ID NO: 57638 - protein, 9 aa, synthetic construct
  source 1..9: note = Seed: LVVVGAVGV (KRAS G12V)
IVVVGRVGS

SEQ ID NO: 57639 - protein, 9 aa, synthetic construct
  source 1..9: note = Seed: LVVVGAVGV (KRAS G12V)
IVVVGRVGT

SEQ ID NO: 57640 - protein, 9 aa, synthetic construct
  source 1..9: note = Seed: LVVVGAVGV (KRAS G12V)
IVVVGRVGV

SEQ ID NO: 57641 - protein, 9 aa, synthetic construct
  source 1..9: note = Seed: LVVVGAVGV (KRAS G12V)
IVVVGRVGY

SEQ ID NO: 57642 - protein, 9 aa, synthetic construct
  source 1..9: note = Seed: LVVVGAVGV (KRAS G12V)
IVVVGSVGA

SEQ ID NO: 57643 - protein, 9 aa, synthetic construct
  source 1..9: note = Seed: LVVVGAVGV (KRAS G12V)
IVVVGSVGF

SEQ ID NO: 57644 - protein, 9 aa, synthetic construct
  source 1..9: note = Seed: LVVVGAVGV (KRAS G12V)
IVVVGSVGG

SEQ ID NO: 57645 - protein, 9 aa, synthetic construct
  source 1..9: note = Seed: LVVVGAVGV (KRAS G12V)
IVVVGSVGH

SEQ ID NO: 57646 - protein, 9 aa, synthetic construct
  source 1..9: note = Seed: LVVVGAVGV (KRAS G12V)
IVVVGSVGI

SEQ ID NO: 57647 - protein, 9 aa, synthetic construct
  source 1..9: note = Seed: LVVVGAVGV (KRAS G12V)
IVVVGSVGK

SEQ ID NO: 57648 - protein, 9 aa, synthetic construct
  source 1..9: note = Seed: LVVVGAVGV (KRAS G12V)
IVVVGSVGL

SEQ ID NO: 57649 - protein, 9 aa, synthetic construct
  source 1..9: note = Seed: LVVVGAVGV (KRAS G12V)
IVVVGSVGM

SEQ ID NO: 57650 - protein, 9 aa, synthetic construct
  source 1..9: note = Seed: LVVVGAVGV (KRAS G12V)
IVVVGSVGN

SEQ ID NO: 57651 - protein, 9 aa, synthetic construct
  source 1..9: note = Seed: LVVVGAVGV (KRAS G12V)
IVVVGSVGP

SEQ ID NO: 57652 - protein, 9 aa, synthetic construct
  source 1..9: note = Seed: LVVVGAVGV (KRAS G12V)
IVVVGSVGQ

SEQ ID NO: 57653 - protein, 9 aa, synthetic construct
  source 1..9: note = Seed: LVVVGAVGV (KRAS G12V)
IVVVGSVGR

SEQ ID NO: 57654 - protein, 9 aa, synthetic construct
  source 1..9: note = Seed: LVVVGAVGV (KRAS G12V)
IVVVGSVGS

SEQ ID NO: 57655 - protein, 9 aa, synthetic construct
  source 1..9: note = Seed: LVVVGAVGV (KRAS G12V)
IVVVGSVGT

SEQ ID NO: 57656 - protein, 9 aa, synthetic construct
  source 1..9: note = Seed: LVVVGAVGV (KRAS G12V)
IVVVGSVGV

SEQ ID NO: 57657 - protein, 9 aa, synthetic construct
  source 1..9: note = Seed: LVVVGAVGV (KRAS G12V)
IVVVGSVGY

SEQ ID NO: 57658 - protein, 9 aa, synthetic construct
  source 1..9: note = Seed: LVVVGAVGV (KRAS G12V)
IVVVGTVGA

SEQ ID NO: 57659 - protein, 9 aa, synthetic construct
  source 1..9: note = Seed: LVVVGAVGV (KRAS G12V)
IVVVGTVGG

SEQ ID NO: 57660 - protein, 9 aa, synthetic construct
  source 1..9: note = Seed: LVVVGAVGV (KRAS G12V)
IVVVGTVGH

SEQ ID NO: 57661 - protein, 9 aa, synthetic construct
  source 1..9: note = Seed: LVVVGAVGV (KRAS G12V)
IVVVGTVGI

SEQ ID NO: 57662 - protein, 9 aa, synthetic construct
  source 1..9: note = Seed: LVVVGAVGV (KRAS G12V)
IVVVGTVGK

SEQ ID NO: 57663 - protein, 9 aa, synthetic construct
  source 1..9: note = Seed: LVVVGAVGV (KRAS G12V)
IVVVGTVGL

SEQ ID NO: 57664 - protein, 9 aa, synthetic construct
  source 1..9: note = Seed: LVVVGAVGV (KRAS G12V)
IVVVGTVGM

SEQ ID NO: 57665 - protein, 9 aa, synthetic construct
  source 1..9: note = Seed: LVVVGAVGV (KRAS G12V)
IVVVGTVGN

SEQ ID NO: 57666 - protein, 9 aa, synthetic construct
  source 1..9: note = Seed: LVVVGAVGV (KRAS G12V)
IVVVGTVGQ

SEQ ID NO: 57667 - protein, 9 aa, synthetic construct
  source 1..9: note = Seed: LVVVGAVGV (KRAS G12V)
IVVVGTVGR

SEQ ID NO: 57668 - protein, 9 aa, synthetic construct
  source 1..9: note = Seed: LVVVGAVGV (KRAS G12V)
IVVVGTVGS

SEQ ID NO: 57669 - protein, 9 aa, synthetic construct
  source 1..9: note = Seed: LVVVGAVGV (KRAS G12V)
IVVVGTVGT

SEQ ID NO: 57670 - protein, 9 aa, synthetic construct
  source 1..9: note = Seed: LVVVGAVGV (KRAS G12V)
IVVVGTVGV

SEQ ID NO: 57671 - protein, 9 aa, synthetic construct
  source 1..9: note = Seed: LVVVGAVGV (KRAS G12V)
IVVVGVVGA

SEQ ID NO: 57672 - protein, 9 aa, synthetic construct
  source 1..9: note = Seed: LVVVGAVGV (KRAS G12V)
IVVVGVVGN

SEQ ID NO: 57673 - protein, 9 aa, synthetic construct
  source 1..9: note = Seed: LVVVGAVGV (KRAS G12V)
IVVVGVVGR

SEQ ID NO: 57674 - protein, 9 aa, synthetic construct
  source 1..9: note = Seed: LVVVGAVGV (KRAS G12V)
IVVWGAVGA

SEQ ID NO: 57675 - protein, 9 aa, synthetic construct
  source 1..9: note = Seed: LVVVGAVGV (KRAS G12V)
IVVWGAVGF

SEQ ID NO: 57676 - protein, 9 aa, synthetic construct
  source 1..9: note = Seed: LVVVGAVGV (KRAS G12V)
IVVWGAVGI

SEQ ID NO: 57677 - protein, 9 aa, synthetic construct
  source 1..9: note = Seed: LVVVGAVGV (KRAS G12V)
IVVWGAVGL

SEQ ID NO: 57678 - protein, 9 aa, synthetic construct
  source 1..9: note = Seed: LVVVGAVGV (KRAS G12V)
IVVWGAVGM

SEQ ID NO: 57679 - protein, 9 aa, synthetic construct
  source 1..9: note = Seed: LVVVGAVGV (KRAS G12V)
IVVWGAVGR

SEQ ID NO: 57680 - protein, 9 aa, synthetic construct
  source 1..9: note = Seed: LVVVGAVGV (KRAS G12V)
IVVWGAVGS

SEQ ID NO: 57681 - protein, 9 aa, synthetic construct
  source 1..9: note = Seed: LVVVGAVGV (KRAS G12V)
IVVWGAVGT

SEQ ID NO: 57682 - protein, 9 aa, synthetic construct
  source 1..9: note = Seed: LVVVGAVGV (KRAS G12V)
IVVWGAVGV

SEQ ID NO: 57683 - protein, 9 aa, synthetic construct
  source 1..9: note = Seed: LVVVGAVGV (KRAS G12V)
IVVWGDVGA

SEQ ID NO: 57684 - protein, 9 aa, synthetic construct
  source 1..9: note = Seed: LVVVGAVGV (KRAS G12V)
IVVWGDVGF

SEQ ID NO: 57685 - protein, 9 aa, synthetic construct
  source 1..9: note = Seed: LVVVGAVGV (KRAS G12V)
IVVWGDVGI

SEQ ID NO: 57686 - protein, 9 aa, synthetic construct
  source 1..9: note = Seed: LVVVGAVGV (KRAS G12V)
IVVWGDVGL

SEQ ID NO: 57687 - protein, 9 aa, synthetic construct
  source 1..9: note = Seed: LVVVGAVGV (KRAS G12V)
IVVWGDVGM

SEQ ID NO: 57688 - protein, 9 aa, synthetic construct
  source 1..9: note = Seed: LVVVGAVGV (KRAS G12V)
IVVWGDVGV

SEQ ID NO: 57689 - protein, 9 aa, synthetic construct
  source 1..9: note = Seed: LVVVGAVGV (KRAS G12V)
IVVWGGVGA

SEQ ID NO: 57690 - protein, 9 aa, synthetic construct
  source 1..9: note = Seed: LVVVGAVGV (KRAS G12V)
IVVWGGVGF

SEQ ID NO: 57691 - protein, 9 aa, synthetic construct
  source 1..9: note = Seed: LVVVGAVGV (KRAS G12V)
IVVWGGVGI

SEQ ID NO: 57692 - protein, 9 aa, synthetic construct
  source 1..9: note = Seed: LVVVGAVGV (KRAS G12V)
IVVWGGVGL

SEQ ID NO: 57693 - protein, 9 aa, synthetic construct
  source 1..9: note = Seed: LVVVGAVGV (KRAS G12V)
IVVWGGVGM

SEQ ID NO: 57694 - protein, 9 aa, synthetic construct
  source 1..9: note = Seed: LVVVGAVGV (KRAS G12V)
IVVWGGVGS

SEQ ID NO: 57695 - protein, 9 aa, synthetic construct
  source 1..9: note = Seed: LVVVGAVGV (KRAS G12V)
IVVWGGVGT

SEQ ID NO: 57696 - protein, 9 aa, synthetic construct
  source 1..9: note = Seed: LVVVGAVGV (KRAS G12V)
IVVWGGVGV

SEQ ID NO: 57697 - protein, 9 aa, synthetic construct
  source 1..9: note = Seed: LVVVGAVGV (KRAS G12V)
IVVWGHVGM

SEQ ID NO: 57698 - protein, 9 aa, synthetic construct
  source 1..9: note = Seed: LVVVGAVGV (KRAS G12V)
IVVWGHVGR

SEQ ID NO: 57699 - protein, 9 aa, synthetic construct
  source 1..9: note = Seed: LVVVGAVGV (KRAS G12V)
IVVWGHVGY

SEQ ID NO: 57700 - protein, 9 aa, synthetic construct
  source 1..9: note = Seed: LVVVGAVGV (KRAS G12V)
IVVWGKVGA

SEQ ID NO: 57701 - protein, 9 aa, synthetic construct
  source 1..9: note = Seed: LVVVGAVGV (KRAS G12V)
IVVWGKVGH

SEQ ID NO: 57702 - protein, 9 aa, synthetic construct
  source 1..9: note = Seed: LVVVGAVGV (KRAS G12V)
IVVWGKVGI

SEQ ID NO: 57703 - protein, 9 aa, synthetic construct
  source 1..9: note = Seed: LVVVGAVGV (KRAS G12V)
IVVWGKVGK

SEQ ID NO: 57704 - protein, 9 aa, synthetic construct
  source 1..9: note = Seed: LVVVGAVGV (KRAS G12V)
IVVWGKVGL

SEQ ID NO: 57705 - protein, 9 aa, synthetic construct
  source 1..9: note = Seed: LVVVGAVGV (KRAS G12V)
IVVWGKVGM

SEQ ID NO: 57706 - protein, 9 aa, synthetic construct
  source 1..9: note = Seed: LVVVGAVGV (KRAS G12V)
IVVWGKVGQ

SEQ ID NO: 57707 - protein, 9 aa, synthetic construct
  source 1..9: note = Seed: LVVVGAVGV (KRAS G12V)
IVVWGKVGR

SEQ ID NO: 57708 - protein, 9 aa, synthetic construct
  source 1..9: note = Seed: LVVVGAVGV (KRAS G12V)
IVVWGKVGS

SEQ ID NO: 57709 - protein, 9 aa, synthetic construct
  source 1..9: note = Seed: LVVVGAVGV (KRAS G12V)
IVVWGKVGV

SEQ ID NO: 57710 - protein, 9 aa, synthetic construct
  source 1..9: note = Seed: LVVVGAVGV (KRAS G12V)
IVVWGKVGY

SEQ ID NO: 57711 - protein, 9 aa, synthetic construct
  source 1..9: note = Seed: LVVVGAVGV (KRAS G12V)
IVVWGNVGA

SEQ ID NO: 57712 - protein, 9 aa, synthetic construct
  source 1..9: note = Seed: LVVVGAVGV (KRAS G12V)
IVVWGNVGF

SEQ ID NO: 57713 - protein, 9 aa, synthetic construct
  source 1..9: note = Seed: LVVVGAVGV (KRAS G12V)
IVVWGNVGG

SEQ ID NO: 57714 - protein, 9 aa, synthetic construct
  source 1..9: note = Seed: LVVVGAVGV (KRAS G12V)
IVVWGNVGH

SEQ ID NO: 57715 - protein, 9 aa, synthetic construct
  source 1..9: note = Seed: LVVVGAVGV (KRAS G12V)
IVVWGNVGI

SEQ ID NO: 57716 - protein, 9 aa, synthetic construct
  source 1..9: note = Seed: LVVVGAVGV (KRAS G12V)
IVVWGNVGL

SEQ ID NO: 57717 - protein, 9 aa, synthetic construct
  source 1..9: note = Seed: LVVVGAVGV (KRAS G12V)
IVVWGNVGM

SEQ ID NO: 57718 - protein, 9 aa, synthetic construct
  source 1..9: note = Seed: LVVVGAVGV (KRAS G12V)
IVVWGNVGN

SEQ ID NO: 57719 - protein, 9 aa, synthetic construct
  source 1..9: note = Seed: LVVVGAVGV (KRAS G12V)
IVVWGNVGR

SEQ ID NO: 57720 - protein, 9 aa, synthetic construct
  source 1..9: note = Seed: LVVVGAVGV (KRAS G12V)
IVVWGNVGS

SEQ ID NO: 57721 - protein, 9 aa, synthetic construct
  source 1..9: note = Seed: LVVVGAVGV (KRAS G12V)
IVVWGNVGT

SEQ ID NO: 57722 - protein, 9 aa, synthetic construct
  source 1..9: note = Seed: LVVVGAVGV (KRAS G12V)
IVVWGNVGV

SEQ ID NO: 57723 - protein, 9 aa, synthetic construct
  source 1..9: note = Seed: LVVVGAVGV (KRAS G12V)
IVVWGNVGY

SEQ ID NO: 57724 - protein, 9 aa, synthetic construct
  source 1..9: note = Seed: LVVVGAVGV (KRAS G12V)
IVVWGPVGA

SEQ ID NO: 57725 - protein, 9 aa, synthetic construct
  source 1..9: note = Seed: LVVVGAVGV (KRAS G12V)
IVVWGPVGI

SEQ ID NO: 57726 - protein, 9 aa, synthetic construct
  source 1..9: note = Seed: LVVVGAVGV (KRAS G12V)
IVVWGPVGL

SEQ ID NO: 57727 - protein, 9 aa, synthetic construct
  source 1..9: note = Seed: LVVVGAVGV (KRAS G12V)
IVVWGPVGM

SEQ ID NO: 57728 - protein, 9 aa, synthetic construct
  source 1..9: note = Seed: LVVVGAVGV (KRAS G12V)
IVVWGPVGR

SEQ ID NO: 57729 - protein, 9 aa, synthetic construct
  source 1..9: note = Seed: LVVVGAVGV (KRAS G12V)
IVVWGPVGV

SEQ ID NO: 57730 - protein, 9 aa, synthetic construct
  source 1..9: note = Seed: LVVVGAVGV (KRAS G12V)
IVVWGRVGA

SEQ ID NO: 57731 - protein, 9 aa, synthetic construct
  source 1..9: note = Seed: LVVVGAVGV (KRAS G12V)
IVVWGRVGF

SEQ ID NO: 57732 - protein, 9 aa, synthetic construct
  source 1..9: note = Seed: LVVVGAVGV (KRAS G12V)
IVVWGRVGG

SEQ ID NO: 57733 - protein, 9 aa, synthetic construct
  source 1..9: note = Seed: LVVVGAVGV (KRAS G12V)
IVVWGRVGH

SEQ ID NO: 57734 - protein, 9 aa, synthetic construct
  source 1..9: note = Seed: LVVVGAVGV (KRAS G12V)
IVVWGRVGI

SEQ ID NO: 57735 - protein, 9 aa, synthetic construct
  source 1..9: note = Seed: LVVVGAVGV (KRAS G12V)
IVVWGRVGK

SEQ ID NO: 57736 - protein, 9 aa, synthetic construct
  source 1..9: note = Seed: LVVVGAVGV (KRAS G12V)
IVVWGRVGL

SEQ ID NO: 57737 - protein, 9 aa, synthetic construct
  source 1..9: note = Seed: LVVVGAVGV (KRAS G12V)
IVVWGRVGM

SEQ ID NO: 57738 - protein, 9 aa, synthetic construct
  source 1..9: note = Seed: LVVVGAVGV (KRAS G12V)
IVVWGRVGQ

SEQ ID NO: 57739 - protein, 9 aa, synthetic construct
  source 1..9: note = Seed: LVVVGAVGV (KRAS G12V)
IVVWGRVGR

SEQ ID NO: 57740 - protein, 9 aa, synthetic construct
  source 1..9: note = Seed: LVVVGAVGV (KRAS G12V)
IVVWGRVGS

SEQ ID NO: 57741 - protein, 9 aa, synthetic construct
  source 1..9: note = Seed: LVVVGAVGV (KRAS G12V)
IVVWGRVGV

SEQ ID NO: 57742 - protein, 9 aa, synthetic construct
  source 1..9: note = Seed: LVVVGAVGV (KRAS G12V)
IVVWGRVGY

SEQ ID NO: 57743 - protein, 9 aa, synthetic construct
  source 1..9: note = Seed: LVVVGAVGV (KRAS G12V)
IVVWGSVGA

SEQ ID NO: 57744 - protein, 9 aa, synthetic construct
  source 1..9: note = Seed: LVVVGAVGV (KRAS G12V)
IVVWGSVGF

SEQ ID NO: 57745 - protein, 9 aa, synthetic construct
  source 1..9: note = Seed: LVVVGAVGV (KRAS G12V)
IVVWGSVGG

SEQ ID NO: 57746 - protein, 9 aa, synthetic construct
  source 1..9: note = Seed: LVVVGAVGV (KRAS G12V)
IVVWGSVGH

SEQ ID NO: 57747 - protein, 9 aa, synthetic construct
  source 1..9: note = Seed: LVVVGAVGV (KRAS G12V)
IVVWGSVGI

SEQ ID NO: 57748 - protein, 9 aa, synthetic construct
  source 1..9: note = Seed: LVVVGAVGV (KRAS G12V)
IVVWGSVGL

SEQ ID NO: 57749 - protein, 9 aa, synthetic construct
  source 1..9: note = Seed: LVVVGAVGV (KRAS G12V)
IVVWGSVGM

SEQ ID NO: 57750 - protein, 9 aa, synthetic construct
  source 1..9: note = Seed: LVVVGAVGV (KRAS G12V)
IVVWGSVGN

SEQ ID NO: 57751 - protein, 9 aa, synthetic construct
  source 1..9: note = Seed: LVVVGAVGV (KRAS G12V)
IVVWGSVGR

SEQ ID NO: 57752 - protein, 9 aa, synthetic construct
  source 1..9: note = Seed: LVVVGAVGV (KRAS G12V)
IVVWGSVGS

SEQ ID NO: 57753 - protein, 9 aa, synthetic construct
  source 1..9: note = Seed: LVVVGAVGV (KRAS G12V)
IVVWGSVGT

SEQ ID NO: 57754 - protein, 9 aa, synthetic construct
  source 1..9: note = Seed: LVVVGAVGV (KRAS G12V)
IVVWGSVGV

SEQ ID NO: 57755 - protein, 9 aa, synthetic construct
  source 1..9: note = Seed: LVVVGAVGV (KRAS G12V)
IVVWGSVGY

SEQ ID NO: 57756 - protein, 9 aa, synthetic construct
  source 1..9: note = Seed: LVVVGAVGV (KRAS G12V)
IVVWGTVGA

SEQ ID NO: 57757 - protein, 9 aa, synthetic construct
  source 1..9: note = Seed: LVVVGAVGV (KRAS G12V)
IVVWGTVGF

SEQ ID NO: 57758 - protein, 9 aa, synthetic construct
  source 1..9: note = Seed: LVVVGAVGV (KRAS G12V)
IVVWGTVGI

SEQ ID NO: 57759 - protein, 9 aa, synthetic construct
  source 1..9: note = Seed: LVVVGAVGV (KRAS G12V)
IVVWGTVGL

SEQ ID NO: 57760 - protein, 9 aa, synthetic construct
  source 1..9: note = Seed: LVVVGAVGV (KRAS G12V)
IVVWGTVGM

SEQ ID NO: 57761 - protein, 9 aa, synthetic construct
  source 1..9: note = Seed: LVVVGAVGV (KRAS G12V)
IVVWGTVGR

SEQ ID NO: 57762 - protein, 9 aa, synthetic construct
  source 1..9: note = Seed: LVVVGAVGV (KRAS G12V)
IVVWGTVGS

SEQ ID NO: 57763 - protein, 9 aa, synthetic construct
  source 1..9: note = Seed: LVVVGAVGV (KRAS G12V)
IVVWGTVGT

SEQ ID NO: 57764 - protein, 9 aa, synthetic construct
  source 1..9: note = Seed: LVVVGAVGV (KRAS G12V)
IVVWGTVGV

SEQ ID NO: 57765 - protein, 9 aa, synthetic construct
  source 1..9: note = Seed: LVVVGAVGV (KRAS G12V)
IVVWGVVGL

SEQ ID NO: 57766 - protein, 9 aa, synthetic construct
  source 1..9: note = Seed: LVVVGAVGV (KRAS G12V)
IVVWGVVGR

SEQ ID NO: 57767 - protein, 9 aa, synthetic construct
  source 1..9: note = Seed: LVVVGAVGV (KRAS G12V)
IVVYGAVGA

SEQ ID NO: 57768 - protein, 9 aa, synthetic construct
  source 1..9: note = Seed: LVVVGAVGV (KRAS G12V)
IVVYGAVGF

SEQ ID NO: 57769 - protein, 9 aa, synthetic construct
  source 1..9: note = Seed: LVVVGAVGV (KRAS G12V)
IVVYGAVGG

SEQ ID NO: 57770 - protein, 9 aa, synthetic construct
  source 1..9: note = Seed: LVVVGAVGV (KRAS G12V)
IVVYGAVGH

SEQ ID NO: 57771 - protein, 9 aa, synthetic construct
  source 1..9: note = Seed: LVVVGAVGV (KRAS G12V)
IVVYGAVGI

SEQ ID NO: 57772 - protein, 9 aa, synthetic construct
  source 1..9: note = Seed: LVVVGAVGV (KRAS G12V)
IVVYGAVGK

SEQ ID NO: 57773 - protein, 9 aa, synthetic construct
  source 1..9: note = Seed: LVVVGAVGV (KRAS G12V)
IVVYGAVGL

SEQ ID NO: 57774 - protein, 9 aa, synthetic construct
  source 1..9: note = Seed: LVVVGAVGV (KRAS G12V)
IVVYGAVGM

SEQ ID NO: 57775 - protein, 9 aa, synthetic construct
  source 1..9: note = Seed: LVVVGAVGV (KRAS G12V)
IVVYGAVGN

SEQ ID NO: 57776 - protein, 9 aa, synthetic construct
  source 1..9: note = Seed: LVVVGAVGV (KRAS G12V)
IVVYGAVGP

SEQ ID NO: 57777 - protein, 9 aa, synthetic construct
  source 1..9: note = Seed: LVVVGAVGV (KRAS G12V)
IVVYGAVGQ

SEQ ID NO: 57778 - protein, 9 aa, synthetic construct
  source 1..9: note = Seed: LVVVGAVGV (KRAS G12V)
IVVYGAVGR

SEQ ID NO: 57779 - protein, 9 aa, synthetic construct
  source 1..9: note = Seed: LVVVGAVGV (KRAS G12V)
IVVYGAVGS

SEQ ID NO: 57780 - protein, 9 aa, synthetic construct
  source 1..9: note = Seed: LVVVGAVGV (KRAS G12V)
IVVYGAVGT

SEQ ID NO: 57781 - protein, 9 aa, synthetic construct
  source 1..9: note = Seed: LVVVGAVGV (KRAS G12V)
IVVYGAVGV

SEQ ID NO: 57782 - protein, 9 aa, synthetic construct
  source 1..9: note = Seed: LVVVGAVGV (KRAS G12V)
IVVYGAVGY

SEQ ID NO: 57783 - protein, 9 aa, synthetic construct
  source 1..9: note = Seed: LVVVGAVGV (KRAS G12V)
IVVYGDVGA

SEQ ID NO: 57784 - protein, 9 aa, synthetic construct
  source 1..9: note = Seed: LVVVGAVGV (KRAS G12V)
IVVYGDVGF

SEQ ID NO: 57785 - protein, 9 aa, synthetic construct
  source 1..9: note = Seed: LVVVGAVGV (KRAS G12V)
IVVYGDVGI

SEQ ID NO: 57786 - protein, 9 aa, synthetic construct
  source 1..9: note = Seed: LVVVGAVGV (KRAS G12V)
IVVYGDVGL

SEQ ID NO: 57787 - protein, 9 aa, synthetic construct
  source 1..9: note = Seed: LVVVGAVGV (KRAS G12V)
IVVYGDVGM

SEQ ID NO: 57788 - protein, 9 aa, synthetic construct
  source 1..9: note = Seed: LVVVGAVGV (KRAS G12V)
IVVYGDVGS

SEQ ID NO: 57789 - protein, 9 aa, synthetic construct
  source 1..9: note = Seed: LVVVGAVGV (KRAS G12V)
IVVYGDVGT

SEQ ID NO: 57790 - protein, 9 aa, synthetic construct
  source 1..9: note = Seed: LVVVGAVGV (KRAS G12V)
IVVYGDVGV

SEQ ID NO: 57791 - protein, 9 aa, synthetic construct
  source 1..9: note = Seed: LVVVGAVGV (KRAS G12V)
IVVYGDVGY

SEQ ID NO: 57792 - protein, 9 aa, synthetic construct
  source 1..9: note = Seed: LVVVGAVGV (KRAS G12V)
IVVYGGVGA

SEQ ID NO: 57793 - protein, 9 aa, synthetic construct
  source 1..9: note = Seed: LVVVGAVGV (KRAS G12V)
IVVYGGVGF

SEQ ID NO: 57794 - protein, 9 aa, synthetic construct
  source 1..9: note = Seed: LVVVGAVGV (KRAS G12V)
IVVYGGVGG

SEQ ID NO: 57795 - protein, 9 aa, synthetic construct
  source 1..9: note = Seed: LVVVGAVGV (KRAS G12V)
IVVYGGVGH

SEQ ID NO: 57796 - protein, 9 aa, synthetic construct
  source 1..9: note = Seed: LVVVGAVGV (KRAS G12V)
IVVYGGVGI

SEQ ID NO: 57797 - protein, 9 aa, synthetic construct
  source 1..9: note = Seed: LVVVGAVGV (KRAS G12V)
IVVYGGVGK

SEQ ID NO: 57798 - protein, 9 aa, synthetic construct
  source 1..9: note = Seed: LVVVGAVGV (KRAS G12V)
IVVYGGVGL

SEQ ID NO: 57799 - protein, 9 aa, synthetic construct
  source 1..9: note = Seed: LVVVGAVGV (KRAS G12V)
IVVYGGVGM

SEQ ID NO: 57800 - protein, 9 aa, synthetic construct
  source 1..9: note = Seed: LVVVGAVGV (KRAS G12V)
IVVYGGVGN

SEQ ID NO: 57801 - protein, 9 aa, synthetic construct
  source 1..9: note = Seed: LVVVGAVGV (KRAS G12V)
IVVYGGVGP

SEQ ID NO: 57802 - protein, 9 aa, synthetic construct
  source 1..9: note = Seed: LVVVGAVGV (KRAS G12V)
IVVYGGVGQ

SEQ ID NO: 57803 - protein, 9 aa, synthetic construct
  source 1..9: note = Seed: LVVVGAVGV (KRAS G12V)
IVVYGGVGR

SEQ ID NO: 57804 - protein, 9 aa, synthetic construct
  source 1..9: note = Seed: LVVVGAVGV (KRAS G12V)
IVVYGGVGS

SEQ ID NO: 57805 - protein, 9 aa, synthetic construct
  source 1..9: note = Seed: LVVVGAVGV (KRAS G12V)
IVVYGGVGT

SEQ ID NO: 57806 - protein, 9 aa, synthetic construct
  source 1..9: note = Seed: LVVVGAVGV (KRAS G12V)
IVVYGGVGV

SEQ ID NO: 57807 - protein, 9 aa, synthetic construct
  source 1..9: note = Seed: LVVVGAVGV (KRAS G12V)
IVVYGGVGY

SEQ ID NO: 57808 - protein, 9 aa, synthetic construct
  source 1..9: note = Seed: LVVVGAVGV (KRAS G12V)
IVVYGHVGA

SEQ ID NO: 57809 - protein, 9 aa, synthetic construct
  source 1..9: note = Seed: LVVVGAVGV (KRAS G12V)
IVVYGHVGL

SEQ ID NO: 57810 - protein, 9 aa, synthetic construct
  source 1..9: note = Seed: LVVVGAVGV (KRAS G12V)
IVVYGHVGR

SEQ ID NO: 57811 - protein, 9 aa, synthetic construct
  source 1..9: note = Seed: LVVVGAVGV (KRAS G12V)
IVVYGIVGR

SEQ ID NO: 57812 - protein, 9 aa, synthetic construct
  source 1..9: note = Seed: LVVVGAVGV (KRAS G12V)
IVVYGKVGA

SEQ ID NO: 57813 - protein, 9 aa, synthetic construct
  source 1..9: note = Seed: LVVVGAVGV (KRAS G12V)
IVVYGKVGH

SEQ ID NO: 57814 - protein, 9 aa, synthetic construct
  source 1..9: note = Seed: LVVVGAVGV (KRAS G12V)
IVVYGKVGK

SEQ ID NO: 57815 - protein, 9 aa, synthetic construct
  source 1..9: note = Seed: LVVVGAVGV (KRAS G12V)
IVVYGKVGR

SEQ ID NO: 57816 - protein, 9 aa, synthetic construct
  source 1..9: note = Seed: LVVVGAVGV (KRAS G12V)
IVVYGLVGA

SEQ ID NO: 57817 - protein, 9 aa, synthetic construct
  source 1..9: note = Seed: LVVVGAVGV (KRAS G12V)
IVVYGLVGR

SEQ ID NO: 57818 - protein, 9 aa, synthetic construct
  source 1..9: note = Seed: LVVVGAVGV (KRAS G12V)
IVVYGMVGA

SEQ ID NO: 57819 - protein, 9 aa, synthetic construct
  source 1..9: note = Seed: LVVVGAVGV (KRAS G12V)
IVVYGMVGR

SEQ ID NO: 57820 - protein, 9 aa, synthetic construct
  source 1..9: note = Seed: LVVVGAVGV (KRAS G12V)
IVVYGNVGA

SEQ ID NO: 57821 - protein, 9 aa, synthetic construct
  source 1..9: note = Seed: LVVVGAVGV (KRAS G12V)
IVVYGNVGE

SEQ ID NO: 57822 - protein, 9 aa, synthetic construct
  source 1..9: note = Seed: LVVVGAVGV (KRAS G12V)
IVVYGNVGF

SEQ ID NO: 57823 - protein, 9 aa, synthetic construct
  source 1..9: note = Seed: LVVVGAVGV (KRAS G12V)
IVVYGNVGG

SEQ ID NO: 57824 - protein, 9 aa, synthetic construct
  source 1..9: note = Seed: LVVVGAVGV (KRAS G12V)
IVVYGNVGH

SEQ ID NO: 57825 - protein, 9 aa, synthetic construct
  source 1..9: note = Seed: LVVVGAVGV (KRAS G12V)
IVVYGNVGI

SEQ ID NO: 57826 - protein, 9 aa, synthetic construct
  source 1..9: note = Seed: LVVVGAVGV (KRAS G12V)
IVVYGNVGK

SEQ ID NO: 57827 - protein, 9 aa, synthetic construct
  source 1..9: note = Seed: LVVVGAVGV (KRAS G12V)
IVVYGNVGL

SEQ ID NO: 57828 - protein, 9 aa, synthetic construct
  source 1..9: note = Seed: LVVVGAVGV (KRAS G12V)
IVVYGNVGM

SEQ ID NO: 57829 - protein, 9 aa, synthetic construct
  source 1..9: note = Seed: LVVVGAVGV (KRAS G12V)
IVVYGNVGN

SEQ ID NO: 57830 - protein, 9 aa, synthetic construct
  source 1..9: note = Seed: LVVVGAVGV (KRAS G12V)
IVVYGNVGP

SEQ ID NO: 57831 - protein, 9 aa, synthetic construct
  source 1..9: note = Seed: LVVVGAVGV (KRAS G12V)
IVVYGNVGQ

SEQ ID NO: 57832 - protein, 9 aa, synthetic construct
  source 1..9: note = Seed: LVVVGAVGV (KRAS G12V)
IVVYGNVGR

SEQ ID NO: 57833 - protein, 9 aa, synthetic construct
  source 1..9: note = Seed: LVVVGAVGV (KRAS G12V)
IVVYGNVGS

SEQ ID NO: 57834 - protein, 9 aa, synthetic construct
  source 1..9: note = Seed: LVVVGAVGV (KRAS G12V)
IVVYGNVGT

SEQ ID NO: 57835 - protein, 9 aa, synthetic construct
  source 1..9: note = Seed: LVVVGAVGV (KRAS G12V)
IVVYGNVGV

SEQ ID NO: 57836 - protein, 9 aa, synthetic construct
  source 1..9: note = Seed: LVVVGAVGV (KRAS G12V)
IVVYGNVGY

SEQ ID NO: 57837 - protein, 9 aa, synthetic construct
  source 1..9: note = Seed: LVVVGAVGV (KRAS G12V)
IVVYGPVGA

SEQ ID NO: 57838 - protein, 9 aa, synthetic construct
  source 1..9: note = Seed: LVVVGAVGV (KRAS G12V)
IVVYGPVGF

SEQ ID NO: 57839 - protein, 9 aa, synthetic construct
  source 1..9: note = Seed: LVVVGAVGV (KRAS G12V)
IVVYGPVGH

SEQ ID NO: 57840 - protein, 9 aa, synthetic construct
  source 1..9: note = Seed: LVVVGAVGV (KRAS G12V)
IVVYGPVGI

SEQ ID NO: 57841 - protein, 9 aa, synthetic construct
  source 1..9: note = Seed: LVVVGAVGV (KRAS G12V)
IVVYGPVGL

SEQ ID NO: 57842 - protein, 9 aa, synthetic construct
  source 1..9: note = Seed: LVVVGAVGV (KRAS G12V)
IVVYGPVGM

SEQ ID NO: 57843 - protein, 9 aa, synthetic construct
  source 1..9: note = Seed: LVVVGAVGV (KRAS G12V)
IVVYGPVGS

SEQ ID NO: 57844 - protein, 9 aa, synthetic construct
  source 1..9: note = Seed: LVVVGAVGV (KRAS G12V)
IVVYGPVGT

SEQ ID NO: 57845 - protein, 9 aa, synthetic construct
  source 1..9: note = Seed: LVVVGAVGV (KRAS G12V)
IVVYGPVGV

SEQ ID NO: 57846 - protein, 9 aa, synthetic construct
  source 1..9: note = Seed: LVVVGAVGV (KRAS G12V)
IVVYGQVGA

SEQ ID NO: 57847 - protein, 9 aa, synthetic construct
  source 1..9: note = Seed: LVVVGAVGV (KRAS G12V)
IVVYGRVGH

SEQ ID NO: 57848 - protein, 9 aa, synthetic construct
  source 1..9: note = Seed: LVVVGAVGV (KRAS G12V)
IVVYGRVGK

SEQ ID NO: 57849 - protein, 9 aa, synthetic construct
  source 1..9: note = Seed: LVVVGAVGV (KRAS G12V)
IVVYGRVGR

SEQ ID NO: 57850 - protein, 9 aa, synthetic construct
  source 1..9: note = Seed: LVVVGAVGV (KRAS G12V)
IVVYGRVGY

SEQ ID NO: 57851 - protein, 9 aa, synthetic construct
  source 1..9: note = Seed: LVVVGAVGV (KRAS G12V)
IVVYGSVGA

SEQ ID NO: 57852 - protein, 9 aa, synthetic construct
  source 1..9: note = Seed: LVVVGAVGV (KRAS G12V)
IVVYGSVGE

SEQ ID NO: 57853 - protein, 9 aa, synthetic construct
  source 1..9: note = Seed: LVVVGAVGV (KRAS G12V)
IVVYGSVGF

SEQ ID NO: 57854 - protein, 9 aa, synthetic construct
  source 1..9: note = Seed: LVVVGAVGV (KRAS G12V)
IVVYGSVGG

SEQ ID NO: 57855 - protein, 9 aa, synthetic construct
  source 1..9: note = Seed: LVVVGAVGV (KRAS G12V)
IVVYGSVGH

SEQ ID NO: 57856 - protein, 9 aa, synthetic construct
  source 1..9: note = Seed: LVVVGAVGV (KRAS G12V)
IVVYGSVGI

SEQ ID NO: 57857 - protein, 9 aa, synthetic construct
  source 1..9: note = Seed: LVVVGAVGV (KRAS G12V)
IVVYGSVGK

SEQ ID NO: 57858 - protein, 9 aa, synthetic construct
  source 1..9: note = Seed: LVVVGAVGV (KRAS G12V)
IVVYGSVGL

SEQ ID NO: 57859 - protein, 9 aa, synthetic construct
  source 1..9: note = Seed: LVVVGAVGV (KRAS G12V)
IVVYGSVGM

SEQ ID NO: 57860 - protein, 9 aa, synthetic construct
  source 1..9: note = Seed: LVVVGAVGV (KRAS G12V)
IVVYGSVGN

SEQ ID NO: 57861 - protein, 9 aa, synthetic construct
  source 1..9: note = Seed: LVVVGAVGV (KRAS G12V)
IVVYGSVGP

SEQ ID NO: 57862 - protein, 9 aa, synthetic construct
  source 1..9: note = Seed: LVVVGAVGV (KRAS G12V)
IVVYGSVGQ

SEQ ID NO: 57863 - protein, 9 aa, synthetic construct
  source 1..9: note = Seed: LVVVGAVGV (KRAS G12V)
IVVYGSVGR

SEQ ID NO: 57864 - protein, 9 aa, synthetic construct
  source 1..9: note = Seed: LVVVGAVGV (KRAS G12V)
IVVYGSVGS

SEQ ID NO: 57865 - protein, 9 aa, synthetic construct
  source 1..9: note = Seed: LVVVGAVGV (KRAS G12V)
IVVYGSVGT

SEQ ID NO: 57866 - protein, 9 aa, synthetic construct
  source 1..9: note = Seed: LVVVGAVGV (KRAS G12V)
IVVYGSVGV

SEQ ID NO: 57867 - protein, 9 aa, synthetic construct
  source 1..9: note = Seed: LVVVGAVGV (KRAS G12V)
IVVYGSVGY

SEQ ID NO: 57868 - protein, 9 aa, synthetic construct
  source 1..9: note = Seed: LVVVGAVGV (KRAS G12V)
IVVYGTVGA

SEQ ID NO: 57869 - protein, 9 aa, synthetic construct
  source 1..9: note = Seed: LVVVGAVGV (KRAS G12V)
IVVYGTVGF

SEQ ID NO: 57870 - protein, 9 aa, synthetic construct
  source 1..9: note = Seed: LVVVGAVGV (KRAS G12V)
IVVYGTVGG

SEQ ID NO: 57871 - protein, 9 aa, synthetic construct
  source 1..9: note = Seed: LVVVGAVGV (KRAS G12V)
IVVYGTVGH

SEQ ID NO: 57872 - protein, 9 aa, synthetic construct
  source 1..9: note = Seed: LVVVGAVGV (KRAS G12V)
IVVYGTVGI

SEQ ID NO: 57873 - protein, 9 aa, synthetic construct
  source 1..9: note = Seed: LVVVGAVGV (KRAS G12V)
IVVYGTVGL

SEQ ID NO: 57874 - protein, 9 aa, synthetic construct
  source 1..9: note = Seed: LVVVGAVGV (KRAS G12V)
IVVYGTVGM

SEQ ID NO: 57875 - protein, 9 aa, synthetic construct
  source 1..9: note = Seed: LVVVGAVGV (KRAS G12V)
IVVYGTVGN

SEQ ID NO: 57876 - protein, 9 aa, synthetic construct
  source 1..9: note = Seed: LVVVGAVGV (KRAS G12V)
IVVYGTVGR

SEQ ID NO: 57877 - protein, 9 aa, synthetic construct
  source 1..9: note = Seed: LVVVGAVGV (KRAS G12V)
IVVYGTVGS

SEQ ID NO: 57878 - protein, 9 aa, synthetic construct
  source 1..9: note = Seed: LVVVGAVGV (KRAS G12V)
IVVYGTVGT

SEQ ID NO: 57879 - protein, 9 aa, synthetic construct
  source 1..9: note = Seed: LVVVGAVGV (KRAS G12V)
IVVYGTVGV

SEQ ID NO: 57880 - protein, 9 aa, synthetic construct
  source 1..9: note = Seed: LVVVGAVGV (KRAS G12V)
IVVYGTVGY

SEQ ID NO: 57881 - protein, 9 aa, synthetic construct
  source 1..9: note = Seed: LVVVGAVGV (KRAS G12V)
IVVYGVVGA

SEQ ID NO: 57882 - protein, 9 aa, synthetic construct
  source 1..9: note = Seed: LVVVGAVGV (KRAS G12V)
IVVYGVVGH

SEQ ID NO: 57883 - protein, 9 aa, synthetic construct
  source 1..9: note = Seed: LVVVGAVGV (KRAS G12V)
IVVYGVVGL

SEQ ID NO: 57884 - protein, 9 aa, synthetic construct
  source 1..9: note = Seed: LVVVGAVGV (KRAS G12V)
IVVYGVVGV

SEQ ID NO: 57885 - protein, 9 aa, synthetic construct
  source 1..9: note = Seed: LVVVGAVGV (KRAS G12V)
KVVLGAVGA

SEQ ID NO: 57886 - protein, 9 aa, synthetic construct
  source 1..9: note = Seed: LVVVGAVGV (KRAS G12V)
KVVLGAVGI

SEQ ID NO: 57887 - protein, 9 aa, synthetic construct
  source 1..9: note = Seed: LVVVGAVGV (KRAS G12V)
KVVLGAVGL

SEQ ID NO: 57888 - protein, 9 aa, synthetic construct
  source 1..9: note = Seed: LVVVGAVGV (KRAS G12V)
KVVLGAVGM

SEQ ID NO: 57889 - protein, 9 aa, synthetic construct
  source 1..9: note = Seed: LVVVGAVGV (KRAS G12V)
KVVLGAVGV

SEQ ID NO: 57890 - protein, 9 aa, synthetic construct
  source 1..9: note = Seed: LVVVGAVGV (KRAS G12V)
KVVLGGVGI

SEQ ID NO: 57891 - protein, 9 aa, synthetic construct
  source 1..9: note = Seed: LVVVGAVGV (KRAS G12V)
KVVLGGVGL

SEQ ID NO: 57892 - protein, 9 aa, synthetic construct
  source 1..9: note = Seed: LVVVGAVGV (KRAS G12V)
KVVLGGVGM

SEQ ID NO: 57893 - protein, 9 aa, synthetic construct
  source 1..9: note = Seed: LVVVGAVGV (KRAS G12V)
KVVLGGVGV

SEQ ID NO: 57894 - protein, 9 aa, synthetic construct
  source 1..9: note = Seed: LVVVGAVGV (KRAS G12V)
KVVLGPVGL

SEQ ID NO: 57895 - protein, 9 aa, synthetic construct
  source 1..9: note = Seed: LVVVGAVGV (KRAS G12V)
KVVLGRVGR

SEQ ID NO: 57896 - protein, 9 aa, synthetic construct
  source 1..9: note = Seed: LVVVGAVGV (KRAS G12V)
KVVLGSVGA

SEQ ID NO: 57897 - protein, 9 aa, synthetic construct
  source 1..9: note = Seed: LVVVGAVGV (KRAS G12V)
KVVLGSVGI

SEQ ID NO: 57898 - protein, 9 aa, synthetic construct
  source 1..9: note = Seed: LVVVGAVGV (KRAS G12V)
KVVLGSVGL

SEQ ID NO: 57899 - protein, 9 aa, synthetic construct
  source 1..9: note = Seed: LVVVGAVGV (KRAS G12V)
KVVLGSVGM

SEQ ID NO: 57900 - protein, 9 aa, synthetic construct
  source 1..9: note = Seed: LVVVGAVGV (KRAS G12V)
KVVLGSVGV

SEQ ID NO: 57901 - protein, 9 aa, synthetic construct
  source 1..9: note = Seed: LVVVGAVGV (KRAS G12V)
KVVMGAVGA

SEQ ID NO: 57902 - protein, 9 aa, synthetic construct
  source 1..9: note = Seed: LVVVGAVGV (KRAS G12V)
KVVMGAVGI

SEQ ID NO: 57903 - protein, 9 aa, synthetic construct
  source 1..9: note = Seed: LVVVGAVGV (KRAS G12V)
KVVMGAVGL

SEQ ID NO: 57904 - protein, 9 aa, synthetic construct
  source 1..9: note = Seed: LVVVGAVGV (KRAS G12V)
KVVMGAVGM

SEQ ID NO: 57905 - protein, 9 aa, synthetic construct
  source 1..9: note = Seed: LVVVGAVGV (KRAS G12V)
KVVMGAVGV

SEQ ID NO: 57906 - protein, 9 aa, synthetic construct
  source 1..9: note = Seed: LVVVGAVGV (KRAS G12V)
KVVMGGVGI

SEQ ID NO: 57907 - protein, 9 aa, synthetic construct
  source 1..9: note = Seed: LVVVGAVGV (KRAS G12V)
KVVMGGVGL

SEQ ID NO: 57908 - protein, 9 aa, synthetic construct
  source 1..9: note = Seed: LVVVGAVGV (KRAS G12V)
KVVMGGVGM

SEQ ID NO: 57909 - protein, 9 aa, synthetic construct
  source 1..9: note = Seed: LVVVGAVGV (KRAS G12V)
KVVMGSVGI

SEQ ID NO: 57910 - protein, 9 aa, synthetic construct
  source 1..9: note = Seed: LVVVGAVGV (KRAS G12V)
KVVMGSVGL

SEQ ID NO: 57911 - protein, 9 aa, synthetic construct
  source 1..9: note = Seed: LVVVGAVGV (KRAS G12V)
KVVMGSVGM

SEQ ID NO: 57912 - protein, 9 aa, synthetic construct
  source 1..9: note = Seed: LVVVGAVGV (KRAS G12V)
KVVMGSVGV

SEQ ID NO: 57913 - protein, 9 aa, synthetic construct
  source 1..9: note = Seed: LVVVGAVGV (KRAS G12V)
KVVTGAVGI

SEQ ID NO: 57914 - protein, 9 aa, synthetic construct
  source 1..9: note = Seed: LVVVGAVGV (KRAS G12V)
KVVTGAVGV

SEQ ID NO: 57915 - protein, 9 aa, synthetic construct
  source 1..9: note = Seed: LVVVGAVGV (KRAS G12V)
LVVAGAVGA

SEQ ID NO: 57916 - protein, 9 aa, synthetic construct
  source 1..9: note = Seed: LVVVGAVGV (KRAS G12V)
LVVAGAVGC

SEQ ID NO: 57917 - protein, 9 aa, synthetic construct
  source 1..9: note = Seed: LVVVGAVGV (KRAS G12V)
LVVAGAVGD

SEQ ID NO: 57918 - protein, 9 aa, synthetic construct
  source 1..9: note = Seed: LVVVGAVGV (KRAS G12V)
LVVAGAVGE

SEQ ID NO: 57919 - protein, 9 aa, synthetic construct
  source 1..9: note = Seed: LVVVGAVGV (KRAS G12V)
LVVAGAVGF

SEQ ID NO: 57920 - protein, 9 aa, synthetic construct
  source 1..9: note = Seed: LVVVGAVGV (KRAS G12V)
LVVAGAVGG

SEQ ID NO: 57921 - protein, 9 aa, synthetic construct
  source 1..9: note = Seed: LVVVGAVGV (KRAS G12V)
LVVAGAVGH

SEQ ID NO: 57922 - protein, 9 aa, synthetic construct
  source 1..9: note = Seed: LVVVGAVGV (KRAS G12V)
LVVAGAVGI

SEQ ID NO: 57923 - protein, 9 aa, synthetic construct
  source 1..9: note = Seed: LVVVGAVGV (KRAS G12V)
LVVAGAVGK

SEQ ID NO: 57924 - protein, 9 aa, synthetic construct
  source 1..9: note = Seed: LVVVGAVGV (KRAS G12V)
LVVAGAVGL

SEQ ID NO: 57925 - protein, 9 aa, synthetic construct
  source 1..9: note = Seed: LVVVGAVGV (KRAS G12V)
LVVAGAVGM

SEQ ID NO: 57926 - protein, 9 aa, synthetic construct
  source 1..9: note = Seed: LVVVGAVGV (KRAS G12V)
LVVAGAVGN

SEQ ID NO: 57927 - protein, 9 aa, synthetic construct
  source 1..9: note = Seed: LVVVGAVGV (KRAS G12V)
LVVAGAVGP

SEQ ID NO: 57928 - protein, 9 aa, synthetic construct
  source 1..9: note = Seed: LVVVGAVGV (KRAS G12V)
LVVAGAVGQ

SEQ ID NO: 57929 - protein, 9 aa, synthetic construct
  source 1..9: note = Seed: LVVVGAVGV (KRAS G12V)
LVVAGAVGR

SEQ ID NO: 57930 - protein, 9 aa, synthetic construct
  source 1..9: note = Seed: LVVVGAVGV (KRAS G12V)
LVVAGAVGS

SEQ ID NO: 57931 - protein, 9 aa, synthetic construct
  source 1..9: note = Seed: LVVVGAVGV (KRAS G12V)
LVVAGAVGT

SEQ ID NO: 57932 - protein, 9 aa, synthetic construct
  source 1..9: note = Seed: LVVVGAVGV (KRAS G12V)
LVVAGAVGV

SEQ ID NO: 57933 - protein, 9 aa, synthetic construct
  source 1..9: note = Seed: LVVVGAVGV (KRAS G12V)
LVVAGAVGW

SEQ ID NO: 57934 - protein, 9 aa, synthetic construct
  source 1..9: note = Seed: LVVVGAVGV (KRAS G12V)
LVVAGAVGY

SEQ ID NO: 57935 - protein, 9 aa, synthetic construct
  source 1..9: note = Seed: LVVVGAVGV (KRAS G12V)
LVVAGCVGA

SEQ ID NO: 57936 - protein, 9 aa, synthetic construct
  source 1..9: note = Seed: LVVVGAVGV (KRAS G12V)
LVVAGCVGC

SEQ ID NO: 57937 - protein, 9 aa, synthetic construct
  source 1..9: note = Seed: LVVVGAVGV (KRAS G12V)
LVVAGCVGG

SEQ ID NO: 57938 - protein, 9 aa, synthetic construct
  source 1..9: note = Seed: LVVVGAVGV (KRAS G12V)
LVVAGCVGI

SEQ ID NO: 57939 - protein, 9 aa, synthetic construct
  source 1..9: note = Seed: LVVVGAVGV (KRAS G12V)
LVVAGCVGL

SEQ ID NO: 57940 - protein, 9 aa, synthetic construct
  source 1..9: note = Seed: LVVVGAVGV (KRAS G12V)
LVVAGCVGM

SEQ ID NO: 57941 - protein, 9 aa, synthetic construct
  source 1..9: note = Seed: LVVVGAVGV (KRAS G12V)
LVVAGCVGN

SEQ ID NO: 57942 - protein, 9 aa, synthetic construct
  source 1..9: note = Seed: LVVVGAVGV (KRAS G12V)
LVVAGCVGS

SEQ ID NO: 57943 - protein, 9 aa, synthetic construct
  source 1..9: note = Seed: LVVVGAVGV (KRAS G12V)
LVVAGCVGT

SEQ ID NO: 57944 - protein, 9 aa, synthetic construct
  source 1..9: note = Seed: LVVVGAVGV (KRAS G12V)
LVVAGCVGV

SEQ ID NO: 57945 - protein, 9 aa, synthetic construct
  source 1..9: note = Seed: LVVVGAVGV (KRAS G12V)
LVVAGDVGA

SEQ ID NO: 57946 - protein, 9 aa, synthetic construct
  source 1..9: note = Seed: LVVVGAVGV (KRAS G12V)
LVVAGDVGC

SEQ ID NO: 57947 - protein, 9 aa, synthetic construct
  source 1..9: note = Seed: LVVVGAVGV (KRAS G12V)
LVVAGDVGI

SEQ ID NO: 57948 - protein, 9 aa, synthetic construct
  source 1..9: note = Seed: LVVVGAVGV (KRAS G12V)
LVVAGDVGL

SEQ ID NO: 57949 - protein, 9 aa, synthetic construct
  source 1..9: note = Seed: LVVVGAVGV (KRAS G12V)
LVVAGDVGS

SEQ ID NO: 57950 - protein, 9 aa, synthetic construct
  source 1..9: note = Seed: LVVVGAVGV (KRAS G12V)
LVVAGDVGV

SEQ ID NO: 57951 - protein, 9 aa, synthetic construct
  source 1..9: note = Seed: LVVVGAVGV (KRAS G12V)
LVVAGEVGA

SEQ ID NO: 57952 - protein, 9 aa, synthetic construct
  source 1..9: note = Seed: LVVVGAVGV (KRAS G12V)
LVVAGEVGC

SEQ ID NO: 57953 - protein, 9 aa, synthetic construct
  source 1..9: note = Seed: LVVVGAVGV (KRAS G12V)
LVVAGEVGI

SEQ ID NO: 57954 - protein, 9 aa, synthetic construct
  source 1..9: note = Seed: LVVVGAVGV (KRAS G12V)
LVVAGEVGL

SEQ ID NO: 57955 - protein, 9 aa, synthetic construct
  source 1..9: note = Seed: LVVVGAVGV (KRAS G12V)
LVVAGEVGM

SEQ ID NO: 57956 - protein, 9 aa, synthetic construct
  source 1..9: note = Seed: LVVVGAVGV (KRAS G12V)
LVVAGEVGN

SEQ ID NO: 57957 - protein, 9 aa, synthetic construct
  source 1..9: note = Seed: LVVVGAVGV (KRAS G12V)
LVVAGEVGS

SEQ ID NO: 57958 - protein, 9 aa, synthetic construct
  source 1..9: note = Seed: LVVVGAVGV (KRAS G12V)
LVVAGEVGV

SEQ ID NO: 57959 - protein, 9 aa, synthetic construct
  source 1..9: note = Seed: LVVVGAVGV (KRAS G12V)
LVVAGGVGA

SEQ ID NO: 57960 - protein, 9 aa, synthetic construct
  source 1..9: note = Seed: LVVVGAVGV (KRAS G12V)
LVVAGGVGC

SEQ ID NO: 57961 - protein, 9 aa, synthetic construct
  source 1..9: note = Seed: LVVVGAVGV (KRAS G12V)
LVVAGGVGF

SEQ ID NO: 57962 - protein, 9 aa, synthetic construct
  source 1..9: note = Seed: LVVVGAVGV (KRAS G12V)
LVVAGGVGG

SEQ ID NO: 57963 - protein, 9 aa, synthetic construct
  source 1..9: note = Seed: LVVVGAVGV (KRAS G12V)
LVVAGGVGH

SEQ ID NO: 57964 - protein, 9 aa, synthetic construct
  source 1..9: note = Seed: LVVVGAVGV (KRAS G12V)
LVVAGGVGI

SEQ ID NO: 57965 - protein, 9 aa, synthetic construct
  source 1..9: note = Seed: LVVVGAVGV (KRAS G12V)
LVVAGGVGK

SEQ ID NO: 57966 - protein, 9 aa, synthetic construct
  source 1..9: note = Seed: LVVVGAVGV (KRAS G12V)
LVVAGGVGL

SEQ ID NO: 57967 - protein, 9 aa, synthetic construct
  source 1..9: note = Seed: LVVVGAVGV (KRAS G12V)
LVVAGGVGM

SEQ ID NO: 57968 - protein, 9 aa, synthetic construct
  source 1..9: note = Seed: LVVVGAVGV (KRAS G12V)
LVVAGGVGN

SEQ ID NO: 57969 - protein, 9 aa, synthetic construct
  source 1..9: note = Seed: LVVVGAVGV (KRAS G12V)
LVVAGGVGP

SEQ ID NO: 57970 - protein, 9 aa, synthetic construct
  source 1..9: note = Seed: LVVVGAVGV (KRAS G12V)
LVVAGGVGQ

SEQ ID NO: 57971 - protein, 9 aa, synthetic construct
  source 1..9: note = Seed: LVVVGAVGV (KRAS G12V)
LVVAGGVGR

SEQ ID NO: 57972 - protein, 9 aa, synthetic construct
  source 1..9: note = Seed: LVVVGAVGV (KRAS G12V)
LVVAGGVGS

SEQ ID NO: 57973 - protein, 9 aa, synthetic construct
  source 1..9: note = Seed: LVVVGAVGV (KRAS G12V)
LVVAGGVGT

SEQ ID NO: 57974 - protein, 9 aa, synthetic construct
  source 1..9: note = Seed: LVVVGAVGV (KRAS G12V)
LVVAGGVGV

SEQ ID NO: 57975 - protein, 9 aa, synthetic construct
  source 1..9: note = Seed: LVVVGAVGV (KRAS G12V)
LVVAGGVGW

SEQ ID NO: 57976 - protein, 9 aa, synthetic construct
  source 1..9: note = Seed: LVVVGAVGV (KRAS G12V)
LVVAGGVGY

SEQ ID NO: 57977 - protein, 9 aa, synthetic construct
  source 1..9: note = Seed: LVVVGAVGV (KRAS G12V)
LVVAGHVGA

SEQ ID NO: 57978 - protein, 9 aa, synthetic construct
  source 1..9: note = Seed: LVVVGAVGV (KRAS G12V)
LVVAGHVGG

SEQ ID NO: 57979 - protein, 9 aa, synthetic construct
  source 1..9: note = Seed: LVVVGAVGV (KRAS G12V)
LVVAGHVGR

SEQ ID NO: 57980 - protein, 9 aa, synthetic construct
  source 1..9: note = Seed: LVVVGAVGV (KRAS G12V)
LVVAGHVGS

SEQ ID NO: 57981 - protein, 9 aa, synthetic construct
  source 1..9: note = Seed: LVVVGAVGV (KRAS G12V)
LVVAGHVGV

SEQ ID NO: 57982 - protein, 9 aa, synthetic construct
  source 1..9: note = Seed: LVVVGAVGV (KRAS G12V)
LVVAGHVGY

SEQ ID NO: 57983 - protein, 9 aa, synthetic construct
  source 1..9: note = Seed: LVVVGAVGV (KRAS G12V)
LVVAGIVGA

SEQ ID NO: 57984 - protein, 9 aa, synthetic construct
  source 1..9: note = Seed: LVVVGAVGV (KRAS G12V)
LVVAGIVGD

SEQ ID NO: 57985 - protein, 9 aa, synthetic construct
  source 1..9: note = Seed: LVVVGAVGV (KRAS G12V)
LVVAGIVGE

SEQ ID NO: 57986 - protein, 9 aa, synthetic construct
  source 1..9: note = Seed: LVVVGAVGV (KRAS G12V)
LVVAGIVGG

SEQ ID NO: 57987 - protein, 9 aa, synthetic construct
  source 1..9: note = Seed: LVVVGAVGV (KRAS G12V)
LVVAGIVGH

SEQ ID NO: 57988 - protein, 9 aa, synthetic construct
  source 1..9: note = Seed: LVVVGAVGV (KRAS G12V)
LVVAGIVGI

SEQ ID NO: 57989 - protein, 9 aa, synthetic construct
  source 1..9: note = Seed: LVVVGAVGV (KRAS G12V)
LVVAGIVGL

SEQ ID NO: 57990 - protein, 9 aa, synthetic construct
  source 1..9: note = Seed: LVVVGAVGV (KRAS G12V)
LVVAGIVGM

SEQ ID NO: 57991 - protein, 9 aa, synthetic construct
  source 1..9: note = Seed: LVVVGAVGV (KRAS G12V)
LVVAGIVGN

SEQ ID NO: 57992 - protein, 9 aa, synthetic construct
  source 1..9: note = Seed: LVVVGAVGV (KRAS G12V)
LVVAGIVGQ

SEQ ID NO: 57993 - protein, 9 aa, synthetic construct
  source 1..9: note = Seed: LVVVGAVGV (KRAS G12V)
LVVAGIVGS

SEQ ID NO: 57994 - protein, 9 aa, synthetic construct
  source 1..9: note = Seed: LVVVGAVGV (KRAS G12V)
LVVAGIVGT

SEQ ID NO: 57995 - protein, 9 aa, synthetic construct
  source 1..9: note = Seed: LVVVGAVGV (KRAS G12V)
LVVAGIVGV

SEQ ID NO: 57996 - protein, 9 aa, synthetic construct
  source 1..9: note = Seed: LVVVGAVGV (KRAS G12V)
LVVAGKVGA

SEQ ID NO: 57997 - protein, 9 aa, synthetic construct
  source 1..9: note = Seed: LVVVGAVGV (KRAS G12V)
LVVAGKVGF

SEQ ID NO: 57998 - protein, 9 aa, synthetic construct
  source 1..9: note = Seed: LVVVGAVGV (KRAS G12V)
LVVAGKVGG

SEQ ID NO: 57999 - protein, 9 aa, synthetic construct
  source 1..9: note = Seed: LVVVGAVGV (KRAS G12V)
LVVAGKVGH

SEQ ID NO: 58000 - protein, 9 aa, synthetic construct
  source 1..9: note = Seed: LVVVGAVGV (KRAS G12V)
LVVAGKVGI

SEQ ID NO: 58001 - protein, 9 aa, synthetic construct
  source 1..9: note = Seed: LVVVGAVGV (KRAS G12V)
LVVAGKVGK

SEQ ID NO: 58002 - protein, 9 aa, synthetic construct
  source 1..9: note = Seed: LVVVGAVGV (KRAS G12V)
LVVAGKVGL

SEQ ID NO: 58003 - protein, 9 aa, synthetic construct
  source 1..9: note = Seed: LVVVGAVGV (KRAS G12V)
LVVAGKVGM

SEQ ID NO: 58004 - protein, 9 aa, synthetic construct
  source 1..9: note = Seed: LVVVGAVGV (KRAS G12V)
LVVAGKVGN

SEQ ID NO: 58005 - protein, 9 aa, synthetic construct
  source 1..9: note = Seed: LVVVGAVGV (KRAS G12V)
LVVAGKVGQ

SEQ ID NO: 58006 - protein, 9 aa, synthetic construct
  source 1..9: note = Seed: LVVVGAVGV (KRAS G12V)
LVVAGKVGR

SEQ ID NO: 58007 - protein, 9 aa, synthetic construct
  source 1..9: note = Seed: LVVVGAVGV (KRAS G12V)
LVVAGKVGS

SEQ ID NO: 58008 - protein, 9 aa, synthetic construct
  source 1..9: note = Seed: LVVVGAVGV (KRAS G12V)
LVVAGKVGT

SEQ ID NO: 58009 - protein, 9 aa, synthetic construct
  source 1..9: note = Seed: LVVVGAVGV (KRAS G12V)
LVVAGKVGV

SEQ ID NO: 58010 - protein, 9 aa, synthetic construct
  source 1..9: note = Seed: LVVVGAVGV (KRAS G12V)
LVVAGKVGY

SEQ ID NO: 58011 - protein, 9 aa, synthetic construct
  source 1..9: note = Seed: LVVVGAVGV (KRAS G12V)
LVVAGLVGA

SEQ ID NO: 58012 - protein, 9 aa, synthetic construct
  source 1..9: note = Seed: LVVVGAVGV (KRAS G12V)
LVVAGLVGG

SEQ ID NO: 58013 - protein, 9 aa, synthetic construct
  source 1..9: note = Seed: LVVVGAVGV (KRAS G12V)
LVVAGLVGN

SEQ ID NO: 58014 - protein, 9 aa, synthetic construct
  source 1..9: note = Seed: LVVVGAVGV (KRAS G12V)
LVVAGLVGS

SEQ ID NO: 58015 - protein, 9 aa, synthetic construct
  source 1..9: note = Seed: LVVVGAVGV (KRAS G12V)
LVVAGMVGA

SEQ ID NO: 58016 - protein, 9 aa, synthetic construct
  source 1..9: note = Seed: LVVVGAVGV (KRAS G12V)
LVVAGMVGC

SEQ ID NO: 58017 - protein, 9 aa, synthetic construct
  source 1..9: note = Seed: LVVVGAVGV (KRAS G12V)
LVVAGMVGG

SEQ ID NO: 58018 - protein, 9 aa, synthetic construct
  source 1..9: note = Seed: LVVVGAVGV (KRAS G12V)
LVVAGMVGN

SEQ ID NO: 58019 - protein, 9 aa, synthetic construct
  source 1..9: note = Seed: LVVVGAVGV (KRAS G12V)
LVVAGMVGS

SEQ ID NO: 58020 - protein, 9 aa, synthetic construct
  source 1..9: note = Seed: LVVVGAVGV (KRAS G12V)
LVVAGNVGA

SEQ ID NO: 58021 - protein, 9 aa, synthetic construct
  source 1..9: note = Seed: LVVVGAVGV (KRAS G12V)
LVVAGNVGC

SEQ ID NO: 58022 - protein, 9 aa, synthetic construct
  source 1..9: note = Seed: LVVVGAVGV (KRAS G12V)
LVVAGNVGD

SEQ ID NO: 58023 - protein, 9 aa, synthetic construct
  source 1..9: note = Seed: LVVVGAVGV (KRAS G12V)
LVVAGNVGE

SEQ ID NO: 58024 - protein, 9 aa, synthetic construct
  source 1..9: note = Seed: LVVVGAVGV (KRAS G12V)
LVVAGNVGF

SEQ ID NO: 58025 - protein, 9 aa, synthetic construct
  source 1..9: note = Seed: LVVVGAVGV (KRAS G12V)
LVVAGNVGG

SEQ ID NO: 58026 - protein, 9 aa, synthetic construct
  source 1..9: note = Seed: LVVVGAVGV (KRAS G12V)
LVVAGNVGH

SEQ ID NO: 58027 - protein, 9 aa, synthetic construct
  source 1..9: note = Seed: LVVVGAVGV (KRAS G12V)
LVVAGNVGI

SEQ ID NO: 58028 - protein, 9 aa, synthetic construct
  source 1..9: note = Seed: LVVVGAVGV (KRAS G12V)
LVVAGNVGL

SEQ ID NO: 58029 - protein, 9 aa, synthetic construct
  source 1..9: note = Seed: LVVVGAVGV (KRAS G12V)
LVVAGNVGM

SEQ ID NO: 58030 - protein, 9 aa, synthetic construct
  source 1..9: note = Seed: LVVVGAVGV (KRAS G12V)
LVVAGNVGN

SEQ ID NO: 58031 - protein, 9 aa, synthetic construct
  source 1..9: note = Seed: LVVVGAVGV (KRAS G12V)
LVVAGNVGQ

SEQ ID NO: 58032 - protein, 9 aa, synthetic construct
  source 1..9: note = Seed: LVVVGAVGV (KRAS G12V)
LVVAGNVGR

SEQ ID NO: 58033 - protein, 9 aa, synthetic construct
  source 1..9: note = Seed: LVVVGAVGV (KRAS G12V)
LVVAGNVGS

SEQ ID NO: 58034 - protein, 9 aa, synthetic construct
  source 1..9: note = Seed: LVVVGAVGV (KRAS G12V)
LVVAGNVGT

SEQ ID NO: 58035 - protein, 9 aa, synthetic construct
  source 1..9: note = Seed: LVVVGAVGV (KRAS G12V)
LVVAGNVGV

SEQ ID NO: 58036 - protein, 9 aa, synthetic construct
  source 1..9: note = Seed: LVVVGAVGV (KRAS G12V)
LVVAGNVGY

SEQ ID NO: 58037 - protein, 9 aa, synthetic construct
  source 1..9: note = Seed: LVVVGAVGV (KRAS G12V)
LVVAGPVGA

SEQ ID NO: 58038 - protein, 9 aa, synthetic construct
  source 1..9: note = Seed: LVVVGAVGV (KRAS G12V)
LVVAGPVGC

SEQ ID NO: 58039 - protein, 9 aa, synthetic construct
  source 1..9: note = Seed: LVVVGAVGV (KRAS G12V)
LVVAGPVGD

SEQ ID NO: 58040 - protein, 9 aa, synthetic construct
  source 1..9: note = Seed: LVVVGAVGV (KRAS G12V)
LVVAGPVGE

SEQ ID NO: 58041 - protein, 9 aa, synthetic construct
  source 1..9: note = Seed: LVVVGAVGV (KRAS G12V)
LVVAGPVGF

SEQ ID NO: 58042 - protein, 9 aa, synthetic construct
  source 1..9: note = Seed: LVVVGAVGV (KRAS G12V)
LVVAGPVGG

SEQ ID NO: 58043 - protein, 9 aa, synthetic construct
  source 1..9: note = Seed: LVVVGAVGV (KRAS G12V)
LVVAGPVGH

SEQ ID NO: 58044 - protein, 9 aa, synthetic construct
  source 1..9: note = Seed: LVVVGAVGV (KRAS G12V)
LVVAGPVGI

SEQ ID NO: 58045 - protein, 9 aa, synthetic construct
  source 1..9: note = Seed: LVVVGAVGV (KRAS G12V)
LVVAGPVGL

SEQ ID NO: 58046 - protein, 9 aa, synthetic construct
  source 1..9: note = Seed: LVVVGAVGV (KRAS G12V)
LVVAGPVGM

SEQ ID NO: 58047 - protein, 9 aa, synthetic construct
  source 1..9: note = Seed: LVVVGAVGV (KRAS G12V)
LVVAGPVGN

SEQ ID NO: 58048 - protein, 9 aa, synthetic construct
  source 1..9: note = Seed: LVVVGAVGV (KRAS G12V)
LVVAGPVGQ

SEQ ID NO: 58049 - protein, 9 aa, synthetic construct
  source 1..9: note = Seed: LVVVGAVGV (KRAS G12V)
LVVAGPVGR

SEQ ID NO: 58050 - protein, 9 aa, synthetic construct
  source 1..9: note = Seed: LVVVGAVGV (KRAS G12V)
LVVAGPVGS

SEQ ID NO: 58051 - protein, 9 aa, synthetic construct
  source 1..9: note = Seed: LVVVGAVGV (KRAS G12V)
LVVAGPVGT

SEQ ID NO: 58052 - protein, 9 aa, synthetic construct
  source 1..9: note = Seed: LVVVGAVGV (KRAS G12V)
LVVAGPVGV

SEQ ID NO: 58053 - protein, 9 aa, synthetic construct
  source 1..9: note = Seed: LVVVGAVGV (KRAS G12V)
LVVAGPVGW

SEQ ID NO: 58054 - protein, 9 aa, synthetic construct
  source 1..9: note = Seed: LVVVGAVGV (KRAS G12V)
LVVAGPVGY

SEQ ID NO: 58055 - protein, 9 aa, synthetic construct
  source 1..9: note = Seed: LVVVGAVGV (KRAS G12V)
LVVAGQVGA

SEQ ID NO: 58056 - protein, 9 aa, synthetic construct
  source 1..9: note = Seed: LVVVGAVGV (KRAS G12V)
LVVAGQVGG

SEQ ID NO: 58057 - protein, 9 aa, synthetic construct
  source 1..9: note = Seed: LVVVGAVGV (KRAS G12V)
LVVAGQVGI

SEQ ID NO: 58058 - protein, 9 aa, synthetic construct
  source 1..9: note = Seed: LVVVGAVGV (KRAS G12V)
LVVAGQVGL

SEQ ID NO: 58059 - protein, 9 aa, synthetic construct
  source 1..9: note = Seed: LVVVGAVGV (KRAS G12V)
LVVAGQVGN

SEQ ID NO: 58060 - protein, 9 aa, synthetic construct
  source 1..9: note = Seed: LVVVGAVGV (KRAS G12V)
LVVAGQVGS

SEQ ID NO: 58061 - protein, 9 aa, synthetic construct
  source 1..9: note = Seed: LVVVGAVGV (KRAS G12V)
LVVAGQVGV

SEQ ID NO: 58062 - protein, 9 aa, synthetic construct
  source 1..9: note = Seed: LVVVGAVGV (KRAS G12V)
LVVAGRVGA

SEQ ID NO: 58063 - protein, 9 aa, synthetic construct
  source 1..9: note = Seed: LVVVGAVGV (KRAS G12V)
LVVAGRVGC

SEQ ID NO: 58064 - protein, 9 aa, synthetic construct
  source 1..9: note = Seed: LVVVGAVGV (KRAS G12V)
LVVAGRVGF

SEQ ID NO: 58065 - protein, 9 aa, synthetic construct
  source 1..9: note = Seed: LVVVGAVGV (KRAS G12V)
LVVAGRVGG

SEQ ID NO: 58066 - protein, 9 aa, synthetic construct
  source 1..9: note = Seed: LVVVGAVGV (KRAS G12V)
LVVAGRVGH

SEQ ID NO: 58067 - protein, 9 aa, synthetic construct
  source 1..9: note = Seed: LVVVGAVGV (KRAS G12V)
LVVAGRVGI

SEQ ID NO: 58068 - protein, 9 aa, synthetic construct
  source 1..9: note = Seed: LVVVGAVGV (KRAS G12V)
LVVAGRVGK

SEQ ID NO: 58069 - protein, 9 aa, synthetic construct
  source 1..9: note = Seed: LVVVGAVGV (KRAS G12V)
LVVAGRVGL

SEQ ID NO: 58070 - protein, 9 aa, synthetic construct
  source 1..9: note = Seed: LVVVGAVGV (KRAS G12V)
LVVAGRVGM

SEQ ID NO: 58071 - protein, 9 aa, synthetic construct
  source 1..9: note = Seed: LVVVGAVGV (KRAS G12V)
LVVAGRVGN

SEQ ID NO: 58072 - protein, 9 aa, synthetic construct
  source 1..9: note = Seed: LVVVGAVGV (KRAS G12V)
LVVAGRVGP

SEQ ID NO: 58073 - protein, 9 aa, synthetic construct
  source 1..9: note = Seed: LVVVGAVGV (KRAS G12V)
LVVAGRVGQ

SEQ ID NO: 58074 - protein, 9 aa, synthetic construct
  source 1..9: note = Seed: LVVVGAVGV (KRAS G12V)
LVVAGRVGR

SEQ ID NO: 58075 - protein, 9 aa, synthetic construct
  source 1..9: note = Seed: LVVVGAVGV (KRAS G12V)
LVVAGRVGS

SEQ ID NO: 58076 - protein, 9 aa, synthetic construct
  source 1..9: note = Seed: LVVVGAVGV (KRAS G12V)
LVVAGRVGT

SEQ ID NO: 58077 - protein, 9 aa, synthetic construct
  source 1..9: note = Seed: LVVVGAVGV (KRAS G12V)
LVVAGRVGV

SEQ ID NO: 58078 - protein, 9 aa, synthetic construct
  source 1..9: note = Seed: LVVVGAVGV (KRAS G12V)
LVVAGRVGY

SEQ ID NO: 58079 - protein, 9 aa, synthetic construct
  source 1..9: note = Seed: LVVVGAVGV (KRAS G12V)
LVVAGSVGA

SEQ ID NO: 58080 - protein, 9 aa, synthetic construct
  source 1..9: note = Seed: LVVVGAVGV (KRAS G12V)
LVVAGSVGC

SEQ ID NO: 58081 - protein, 9 aa, synthetic construct
  source 1..9: note = Seed: LVVVGAVGV (KRAS G12V)
LVVAGSVGD

SEQ ID NO: 58082 - protein, 9 aa, synthetic construct
  source 1..9: note = Seed: LVVVGAVGV (KRAS G12V)
LVVAGSVGE

SEQ ID NO: 58083 - protein, 9 aa, synthetic construct
  source 1..9: note = Seed: LVVVGAVGV (KRAS G12V)
LVVAGSVGF

SEQ ID NO: 58084 - protein, 9 aa, synthetic construct
  source 1..9: note = Seed: LVVVGAVGV (KRAS G12V)
LVVAGSVGG

SEQ ID NO: 58085 - protein, 9 aa, synthetic construct
  source 1..9: note = Seed: LVVVGAVGV (KRAS G12V)
LVVAGSVGH

SEQ ID NO: 58086 - protein, 9 aa, synthetic construct
  source 1..9: note = Seed: LVVVGAVGV (KRAS G12V)
LVVAGSVGI

SEQ ID NO: 58087 - protein, 9 aa, synthetic construct
  source 1..9: note = Seed: LVVVGAVGV (KRAS G12V)
LVVAGSVGL

SEQ ID NO: 58088 - protein, 9 aa, synthetic construct
  source 1..9: note = Seed: LVVVGAVGV (KRAS G12V)
LVVAGSVGM

SEQ ID NO: 58089 - protein, 9 aa, synthetic construct
  source 1..9: note = Seed: LVVVGAVGV (KRAS G12V)
LVVAGSVGN

SEQ ID NO: 58090 - protein, 9 aa, synthetic construct
  source 1..9: note = Seed: LVVVGAVGV (KRAS G12V)
LVVAGSVGQ

SEQ ID NO: 58091 - protein, 9 aa, synthetic construct
  source 1..9: note = Seed: LVVVGAVGV (KRAS G12V)
LVVAGSVGR

SEQ ID NO: 58092 - protein, 9 aa, synthetic construct
  source 1..9: note = Seed: LVVVGAVGV (KRAS G12V)
LVVAGSVGS

SEQ ID NO: 58093 - protein, 9 aa, synthetic construct
  source 1..9: note = Seed: LVVVGAVGV (KRAS G12V)
LVVAGSVGT

SEQ ID NO: 58094 - protein, 9 aa, synthetic construct
  source 1..9: note = Seed: LVVVGAVGV (KRAS G12V)
LVVAGSVGV

SEQ ID NO: 58095 - protein, 9 aa, synthetic construct
  source 1..9: note = Seed: LVVVGAVGV (KRAS G12V)
LVVAGSVGY

SEQ ID NO: 58096 - protein, 9 aa, synthetic construct
  source 1..9: note = Seed: LVVVGAVGV (KRAS G12V)
LVVAGTVGA

SEQ ID NO: 58097 - protein, 9 aa, synthetic construct
  source 1..9: note = Seed: LVVVGAVGV (KRAS G12V)
LVVAGTVGC

SEQ ID NO: 58098 - protein, 9 aa, synthetic construct
  source 1..9: note = Seed: LVVVGAVGV (KRAS G12V)
LVVAGTVGD

SEQ ID NO: 58099 - protein, 9 aa, synthetic construct
  source 1..9: note = Seed: LVVVGAVGV (KRAS G12V)
LVVAGTVGE

SEQ ID NO: 58100 - protein, 9 aa, synthetic construct
  source 1..9: note = Seed: LVVVGAVGV (KRAS G12V)
LVVAGTVGF

SEQ ID NO: 58101 - protein, 9 aa, synthetic construct
  source 1..9: note = Seed: LVVVGAVGV (KRAS G12V)
LVVAGTVGG

SEQ ID NO: 58102 - protein, 9 aa, synthetic construct
  source 1..9: note = Seed: LVVVGAVGV (KRAS G12V)
LVVAGTVGH

SEQ ID NO: 58103 - protein, 9 aa, synthetic construct
  source 1..9: note = Seed: LVVVGAVGV (KRAS G12V)
LVVAGTVGI

SEQ ID NO: 58104 - protein, 9 aa, synthetic construct
  source 1..9: note = Seed: LVVVGAVGV (KRAS G12V)
LVVAGTVGL

SEQ ID NO: 58105 - protein, 9 aa, synthetic construct
  source 1..9: note = Seed: LVVVGAVGV (KRAS G12V)
LVVAGTVGM

SEQ ID NO: 58106 - protein, 9 aa, synthetic construct
  source 1..9: note = Seed: LVVVGAVGV (KRAS G12V)
LVVAGTVGN

SEQ ID NO: 58107 - protein, 9 aa, synthetic construct
  source 1..9: note = Seed: LVVVGAVGV (KRAS G12V)
LVVAGTVGQ

SEQ ID NO: 58108 - protein, 9 aa, synthetic construct
  source 1..9: note = Seed: LVVVGAVGV (KRAS G12V)
LVVAGTVGR

SEQ ID NO: 58109 - protein, 9 aa, synthetic construct
  source 1..9: note = Seed: LVVVGAVGV (KRAS G12V)
LVVAGTVGS

SEQ ID NO: 58110 - protein, 9 aa, synthetic construct
  source 1..9: note = Seed: LVVVGAVGV (KRAS G12V)
LVVAGTVGT

SEQ ID NO: 58111 - protein, 9 aa, synthetic construct
  source 1..9: note = Seed: LVVVGAVGV (KRAS G12V)
LVVAGTVGV

SEQ ID NO: 58112 - protein, 9 aa, synthetic construct
  source 1..9: note = Seed: LVVVGAVGV (KRAS G12V)
LVVAGTVGY

SEQ ID NO: 58113 - protein, 9 aa, synthetic construct
  source 1..9: note = Seed: LVVVGAVGV (KRAS G12V)
LVVAGVVGA

SEQ ID NO: 58114 - protein, 9 aa, synthetic construct
  source 1..9: note = Seed: LVVVGAVGV (KRAS G12V)
LVVAGVVGC

SEQ ID NO: 58115 - protein, 9 aa, synthetic construct
  source 1..9: note = Seed: LVVVGAVGV (KRAS G12V)
LVVAGVVGD

SEQ ID NO: 58116 - protein, 9 aa, synthetic construct
  source 1..9: note = Seed: LVVVGAVGV (KRAS G12V)
LVVAGVVGE

SEQ ID NO: 58117 - protein, 9 aa, synthetic construct
  source 1..9: note = Seed: LVVVGAVGV (KRAS G12V)
LVVAGVVGG

SEQ ID NO: 58118 - protein, 9 aa, synthetic construct
  source 1..9: note = Seed: LVVVGAVGV (KRAS G12V)
LVVAGVVGH

SEQ ID NO: 58119 - protein, 9 aa, synthetic construct
  source 1..9: note = Seed: LVVVGAVGV (KRAS G12V)
LVVAGVVGI

SEQ ID NO: 58120 - protein, 9 aa, synthetic construct
  source 1..9: note = Seed: LVVVGAVGV (KRAS G12V)
LVVAGVVGL

SEQ ID NO: 58121 - protein, 9 aa, synthetic construct
  source 1..9: note = Seed: LVVVGAVGV (KRAS G12V)
LVVAGVVGM

SEQ ID NO: 58122 - protein, 9 aa, synthetic construct
  source 1..9: note = Seed: LVVVGAVGV (KRAS G12V)
LVVAGVVGN

SEQ ID NO: 58123 - protein, 9 aa, synthetic construct
  source 1..9: note = Seed: LVVVGAVGV (KRAS G12V)
LVVAGVVGQ

SEQ ID NO: 58124 - protein, 9 aa, synthetic construct
  source 1..9: note = Seed: LVVVGAVGV (KRAS G12V)
LVVAGVVGR

SEQ ID NO: 58125 - protein, 9 aa, synthetic construct
  source 1..9: note = Seed: LVVVGAVGV (KRAS G12V)
LVVAGVVGS

SEQ ID NO: 58126 - protein, 9 aa, synthetic construct
  source 1..9: note = Seed: LVVVGAVGV (KRAS G12V)
LVVAGVVGT

SEQ ID NO: 58127 - protein, 9 aa, synthetic construct
  source 1..9: note = Seed: LVVVGAVGV (KRAS G12V)
LVVAGVVGV

SEQ ID NO: 58128 - protein, 9 aa, synthetic construct
  source 1..9: note = Seed: LVVVGAVGV (KRAS G12V)
LVVCGAVGA

SEQ ID NO: 58129 - protein, 9 aa, synthetic construct
  source 1..9: note = Seed: LVVVGAVGV (KRAS G12V)
LVVCGAVGI

SEQ ID NO: 58130 - protein, 9 aa, synthetic construct
  source 1..9: note = Seed: LVVVGAVGV (KRAS G12V)
LVVCGAVGL

SEQ ID NO: 58131 - protein, 9 aa, synthetic construct
  source 1..9: note = Seed: LVVVGAVGV (KRAS G12V)
LVVCGAVGM

SEQ ID NO: 58132 - protein, 9 aa, synthetic construct
  source 1..9: note = Seed: LVVVGAVGV (KRAS G12V)
LVVCGAVGS

SEQ ID NO: 58133 - protein, 9 aa, synthetic construct
  source 1..9: note = Seed: LVVVGAVGV (KRAS G12V)
LVVCGAVGT

SEQ ID NO: 58134 - protein, 9 aa, synthetic construct
  source 1..9: note = Seed: LVVVGAVGV (KRAS G12V)
LVVCGAVGV

SEQ ID NO: 58135 - protein, 9 aa, synthetic construct
  source 1..9: note = Seed: LVVVGAVGV (KRAS G12V)
LVVCGGVGA

SEQ ID NO: 58136 - protein, 9 aa, synthetic construct
  source 1..9: note = Seed: LVVVGAVGV (KRAS G12V)
LVVCGGVGI

SEQ ID NO: 58137 - protein, 9 aa, synthetic construct
  source 1..9: note = Seed: LVVVGAVGV (KRAS G12V)
LVVCGGVGL

SEQ ID NO: 58138 - protein, 9 aa, synthetic construct
  source 1..9: note = Seed: LVVVGAVGV (KRAS G12V)
LVVCGGVGM

SEQ ID NO: 58139 - protein, 9 aa, synthetic construct
  source 1..9: note = Seed: LVVVGAVGV (KRAS G12V)
LVVCGGVGV

SEQ ID NO: 58140 - protein, 9 aa, synthetic construct
  source 1..9: note = Seed: LVVVGAVGV (KRAS G12V)
LVVCGKVGA

SEQ ID NO: 58141 - protein, 9 aa, synthetic construct
  source 1..9: note = Seed: LVVVGAVGV (KRAS G12V)
LVVCGKVGH

SEQ ID NO: 58142 - protein, 9 aa, synthetic construct
  source 1..9: note = Seed: LVVVGAVGV (KRAS G12V)
LVVCGKVGS

SEQ ID NO: 58143 - protein, 9 aa, synthetic construct
  source 1..9: note = Seed: LVVVGAVGV (KRAS G12V)
LVVCGNVGA

SEQ ID NO: 58144 - protein, 9 aa, synthetic construct
  source 1..9: note = Seed: LVVVGAVGV (KRAS G12V)
LVVCGNVGL

SEQ ID NO: 58145 - protein, 9 aa, synthetic construct
  source 1..9: note = Seed: LVVVGAVGV (KRAS G12V)
LVVCGNVGV

SEQ ID NO: 58146 - protein, 9 aa, synthetic construct
  source 1..9: note = Seed: LVVVGAVGV (KRAS G12V)
LVVCGPVGA

SEQ ID NO: 58147 - protein, 9 aa, synthetic construct
  source 1..9: note = Seed: LVVVGAVGV (KRAS G12V)
LVVCGPVGI

SEQ ID NO: 58148 - protein, 9 aa, synthetic construct
  source 1..9: note = Seed: LVVVGAVGV (KRAS G12V)
LVVCGPVGL

SEQ ID NO: 58149 - protein, 9 aa, synthetic construct
  source 1..9: note = Seed: LVVVGAVGV (KRAS G12V)
LVVCGPVGM

SEQ ID NO: 58150 - protein, 9 aa, synthetic construct
  source 1..9: note = Seed: LVVVGAVGV (KRAS G12V)
LVVCGPVGV

SEQ ID NO: 58151 - protein, 9 aa, synthetic construct
  source 1..9: note = Seed: LVVVGAVGV (KRAS G12V)
LVVCGRVGA

SEQ ID NO: 58152 - protein, 9 aa, synthetic construct
  source 1..9: note = Seed: LVVVGAVGV (KRAS G12V)
LVVCGRVGG

SEQ ID NO: 58153 - protein, 9 aa, synthetic construct
  source 1..9: note = Seed: LVVVGAVGV (KRAS G12V)
LVVCGRVGH

SEQ ID NO: 58154 - protein, 9 aa, synthetic construct
  source 1..9: note = Seed: LVVVGAVGV (KRAS G12V)
LVVCGRVGK

SEQ ID NO: 58155 - protein, 9 aa, synthetic construct
  source 1..9: note = Seed: LVVVGAVGV (KRAS G12V)
LVVCGRVGQ

SEQ ID NO: 58156 - protein, 9 aa, synthetic construct
  source 1..9: note = Seed: LVVVGAVGV (KRAS G12V)
LVVCGRVGR

SEQ ID NO: 58157 - protein, 9 aa, synthetic construct
  source 1..9: note = Seed: LVVVGAVGV (KRAS G12V)
LVVCGRVGS

SEQ ID NO: 58158 - protein, 9 aa, synthetic construct
  source 1..9: note = Seed: LVVVGAVGV (KRAS G12V)
LVVCGSVGA

SEQ ID NO: 58159 - protein, 9 aa, synthetic construct
  source 1..9: note = Seed: LVVVGAVGV (KRAS G12V)
LVVCGSVGI

SEQ ID NO: 58160 - protein, 9 aa, synthetic construct
  source 1..9: note = Seed: LVVVGAVGV (KRAS G12V)
LVVCGSVGL

SEQ ID NO: 58161 - protein, 9 aa, synthetic construct
  source 1..9: note = Seed: LVVVGAVGV (KRAS G12V)
LVVCGSVGM

SEQ ID NO: 58162 - protein, 9 aa, synthetic construct
  source 1..9: note = Seed: LVVVGAVGV (KRAS G12V)
LVVCGSVGS

SEQ ID NO: 58163 - protein, 9 aa, synthetic construct
  source 1..9: note = Seed: LVVVGAVGV (KRAS G12V)
LVVCGSVGV

SEQ ID NO: 58164 - protein, 9 aa, synthetic construct
  source 1..9: note = Seed: LVVVGAVGV (KRAS G12V)
LVVCGTVGL

SEQ ID NO: 58165 - protein, 9 aa, synthetic construct
  source 1..9: note = Seed: LVVVGAVGV (KRAS G12V)
LVVDGAVGA

SEQ ID NO: 58166 - protein, 9 aa, synthetic construct
  source 1..9: note = Seed: LVVVGAVGV (KRAS G12V)
LVVDGAVGF

SEQ ID NO: 58167 - protein, 9 aa, synthetic construct
  source 1..9: note = Seed: LVVVGAVGV (KRAS G12V)
LVVDGAVGI

SEQ ID NO: 58168 - protein, 9 aa, synthetic construct
  source 1..9: note = Seed: LVVVGAVGV (KRAS G12V)
LVVDGAVGL

SEQ ID NO: 58169 - protein, 9 aa, synthetic construct
  source 1..9: note = Seed: LVVVGAVGV (KRAS G12V)
LVVDGAVGM

SEQ ID NO: 58170 - protein, 9 aa, synthetic construct
  source 1..9: note = Seed: LVVVGAVGV (KRAS G12V)
LVVDGAVGS

SEQ ID NO: 58171 - protein, 9 aa, synthetic construct
  source 1..9: note = Seed: LVVVGAVGV (KRAS G12V)
LVVDGAVGT

SEQ ID NO: 58172 - protein, 9 aa, synthetic construct
  source 1..9: note = Seed: LVVVGAVGV (KRAS G12V)
LVVDGAVGV

SEQ ID NO: 58173 - protein, 9 aa, synthetic construct
  source 1..9: note = Seed: LVVVGAVGV (KRAS G12V)
LVVDGAVGY

SEQ ID NO: 58174 - protein, 9 aa, synthetic construct
  source 1..9: note = Seed: LVVVGAVGV (KRAS G12V)
LVVDGDVGA

SEQ ID NO: 58175 - protein, 9 aa, synthetic construct
  source 1..9: note = Seed: LVVVGAVGV (KRAS G12V)
LVVDGDVGS

SEQ ID NO: 58176 - protein, 9 aa, synthetic construct
  source 1..9: note = Seed: LVVVGAVGV (KRAS G12V)
LVVDGGVGF

SEQ ID NO: 58177 - protein, 9 aa, synthetic construct
  source 1..9: note = Seed: LVVVGAVGV (KRAS G12V)
LVVDGGVGI

SEQ ID NO: 58178 - protein, 9 aa, synthetic construct
  source 1..9: note = Seed: LVVVGAVGV (KRAS G12V)
LVVDGGVGL

SEQ ID NO: 58179 - protein, 9 aa, synthetic construct
  source 1..9: note = Seed: LVVVGAVGV (KRAS G12V)
LVVDGGVGM

SEQ ID NO: 58180 - protein, 9 aa, synthetic construct
  source 1..9: note = Seed: LVVVGAVGV (KRAS G12V)
LVVDGGVGV

SEQ ID NO: 58181 - protein, 9 aa, synthetic construct
  source 1..9: note = Seed: LVVVGAVGV (KRAS G12V)
LVVDGIVGA

SEQ ID NO: 58182 - protein, 9 aa, synthetic construct
  source 1..9: note = Seed: LVVVGAVGV (KRAS G12V)
LVVDGIVGI

SEQ ID NO: 58183 - protein, 9 aa, synthetic construct
  source 1..9: note = Seed: LVVVGAVGV (KRAS G12V)
LVVDGIVGL

SEQ ID NO: 58184 - protein, 9 aa, synthetic construct
  source 1..9: note = Seed: LVVVGAVGV (KRAS G12V)
LVVDGIVGV

SEQ ID NO: 58185 - protein, 9 aa, synthetic construct
  source 1..9: note = Seed: LVVVGAVGV (KRAS G12V)
LVVDGIVGY

SEQ ID NO: 58186 - protein, 9 aa, synthetic construct
  source 1..9: note = Seed: LVVVGAVGV (KRAS G12V)
LVVDGNVGA

SEQ ID NO: 58187 - protein, 9 aa, synthetic construct
  source 1..9: note = Seed: LVVVGAVGV (KRAS G12V)
LVVDGNVGF

SEQ ID NO: 58188 - protein, 9 aa, synthetic construct
  source 1..9: note = Seed: LVVVGAVGV (KRAS G12V)
LVVDGNVGG

SEQ ID NO: 58189 - protein, 9 aa, synthetic construct
  source 1..9: note = Seed: LVVVGAVGV (KRAS G12V)
LVVDGNVGI

SEQ ID NO: 58190 - protein, 9 aa, synthetic construct
  source 1..9: note = Seed: LVVVGAVGV (KRAS G12V)
LVVDGNVGL

SEQ ID NO: 58191 - protein, 9 aa, synthetic construct
  source 1..9: note = Seed: LVVVGAVGV (KRAS G12V)
LVVDGNVGM

SEQ ID NO: 58192 - protein, 9 aa, synthetic construct
  source 1..9: note = Seed: LVVVGAVGV (KRAS G12V)
LVVDGNVGN

SEQ ID NO: 58193 - protein, 9 aa, synthetic construct
  source 1..9: note = Seed: LVVVGAVGV (KRAS G12V)
LVVDGNVGQ

SEQ ID NO: 58194 - protein, 9 aa, synthetic construct
  source 1..9: note = Seed: LVVVGAVGV (KRAS G12V)
LVVDGNVGS

SEQ ID NO: 58195 - protein, 9 aa, synthetic construct
  source 1..9: note = Seed: LVVVGAVGV (KRAS G12V)
LVVDGNVGT

SEQ ID NO: 58196 - protein, 9 aa, synthetic construct
  source 1..9: note = Seed: LVVVGAVGV (KRAS G12V)
LVVDGNVGV

SEQ ID NO: 58197 - protein, 9 aa, synthetic construct
  source 1..9: note = Seed: LVVVGAVGV (KRAS G12V)
LVVDGNVGY

SEQ ID NO: 58198 - protein, 9 aa, synthetic construct
  source 1..9: note = Seed: LVVVGAVGV (KRAS G12V)
LVVDGPVGF

SEQ ID NO: 58199 - protein, 9 aa, synthetic construct
  source 1..9: note = Seed: LVVVGAVGV (KRAS G12V)
LVVDGPVGI

SEQ ID NO: 58200 - protein, 9 aa, synthetic construct
  source 1..9: note = Seed: LVVVGAVGV (KRAS G12V)
LVVDGPVGL

SEQ ID NO: 58201 - protein, 9 aa, synthetic construct
  source 1..9: note = Seed: LVVVGAVGV (KRAS G12V)
LVVDGPVGM

SEQ ID NO: 58202 - protein, 9 aa, synthetic construct
  source 1..9: note = Seed: LVVVGAVGV (KRAS G12V)
LVVDGPVGV

SEQ ID NO: 58203 - protein, 9 aa, synthetic construct
  source 1..9: note = Seed: LVVVGAVGV (KRAS G12V)
LVVDGPVGY

SEQ ID NO: 58204 - protein, 9 aa, synthetic construct
  source 1..9: note = Seed: LVVVGAVGV (KRAS G12V)
LVVDGSVGA

SEQ ID NO: 58205 - protein, 9 aa, synthetic construct
  source 1..9: note = Seed: LVVVGAVGV (KRAS G12V)
LVVDGSVGF

SEQ ID NO: 58206 - protein, 9 aa, synthetic construct
  source 1..9: note = Seed: LVVVGAVGV (KRAS G12V)
LVVDGSVGI

SEQ ID NO: 58207 - protein, 9 aa, synthetic construct
  source 1..9: note = Seed: LVVVGAVGV (KRAS G12V)
LVVDGSVGL

SEQ ID NO: 58208 - protein, 9 aa, synthetic construct
  source 1..9: note = Seed: LVVVGAVGV (KRAS G12V)
LVVDGSVGM

SEQ ID NO: 58209 - protein, 9 aa, synthetic construct
  source 1..9: note = Seed: LVVVGAVGV (KRAS G12V)
LVVDGSVGQ

SEQ ID NO: 58210 - protein, 9 aa, synthetic construct
  source 1..9: note = Seed: LVVVGAVGV (KRAS G12V)
LVVDGSVGS

SEQ ID NO: 58211 - protein, 9 aa, synthetic construct
  source 1..9: note = Seed: LVVVGAVGV (KRAS G12V)
LVVDGSVGV

SEQ ID NO: 58212 - protein, 9 aa, synthetic construct
  source 1..9: note = Seed: LVVVGAVGV (KRAS G12V)
LVVDGSVGY

SEQ ID NO: 58213 - protein, 9 aa, synthetic construct
  source 1..9: note = Seed: LVVVGAVGV (KRAS G12V)
LVVDGTVGA

SEQ ID NO: 58214 - protein, 9 aa, synthetic construct
  source 1..9: note = Seed: LVVVGAVGV (KRAS G12V)
LVVDGTVGF

SEQ ID NO: 58215 - protein, 9 aa, synthetic construct
  source 1..9: note = Seed: LVVVGAVGV (KRAS G12V)
LVVDGTVGI

SEQ ID NO: 58216 - protein, 9 aa, synthetic construct
  source 1..9: note = Seed: LVVVGAVGV (KRAS G12V)
LVVDGTVGL

SEQ ID NO: 58217 - protein, 9 aa, synthetic construct
  source 1..9: note = Seed: LVVVGAVGV (KRAS G12V)
LVVDGTVGM

SEQ ID NO: 58218 - protein, 9 aa, synthetic construct
  source 1..9: note = Seed: LVVVGAVGV (KRAS G12V)
LVVDGTVGQ

SEQ ID NO: 58219 - protein, 9 aa, synthetic construct
  source 1..9: note = Seed: LVVVGAVGV (KRAS G12V)
LVVDGTVGS

SEQ ID NO: 58220 - protein, 9 aa, synthetic construct
  source 1..9: note = Seed: LVVVGAVGV (KRAS G12V)
LVVDGTVGV

SEQ ID NO: 58221 - protein, 9 aa, synthetic construct
  source 1..9: note = Seed: LVVVGAVGV (KRAS G12V)
LVVDGTVGY

SEQ ID NO: 58222 - protein, 9 aa, synthetic construct
  source 1..9: note = Seed: LVVVGAVGV (KRAS G12V)
LVVDGVVGA

SEQ ID NO: 58223 - protein, 9 aa, synthetic construct
  source 1..9: note = Seed: LVVVGAVGV (KRAS G12V)
LVVDGVVGI

SEQ ID NO: 58224 - protein, 9 aa, synthetic construct
  source 1..9: note = Seed: LVVVGAVGV (KRAS G12V)
LVVDGVVGL

SEQ ID NO: 58225 - protein, 9 aa, synthetic construct
  source 1..9: note = Seed: LVVVGAVGV (KRAS G12V)
LVVDGVVGS

SEQ ID NO: 58226 - protein, 9 aa, synthetic construct
  source 1..9: note = Seed: LVVVGAVGV (KRAS G12V)
LVVDGVVGV

SEQ ID NO: 58227 - protein, 9 aa, synthetic construct
  source 1..9: note = Seed: LVVVGAVGV (KRAS G12V)
LVVDGVVGY

SEQ ID NO: 58228 - protein, 9 aa, synthetic construct
  source 1..9: note = Seed: LVVVGAVGV (KRAS G12V)
LVVEGAVGA

SEQ ID NO: 58229 - protein, 9 aa, synthetic construct
  source 1..9: note = Seed: LVVVGAVGV (KRAS G12V)
LVVEGAVGC

SEQ ID NO: 58230 - protein, 9 aa, synthetic construct
  source 1..9: note = Seed: LVVVGAVGV (KRAS G12V)
LVVEGAVGF

SEQ ID NO: 58231 - protein, 9 aa, synthetic construct
  source 1..9: note = Seed: LVVVGAVGV (KRAS G12V)
LVVEGAVGG

SEQ ID NO: 58232 - protein, 9 aa, synthetic construct
  source 1..9: note = Seed: LVVVGAVGV (KRAS G12V)
LVVEGAVGH

SEQ ID NO: 58233 - protein, 9 aa, synthetic construct
  source 1..9: note = Seed: LVVVGAVGV (KRAS G12V)
LVVEGAVGI

SEQ ID NO: 58234 - protein, 9 aa, synthetic construct
  source 1..9: note = Seed: LVVVGAVGV (KRAS G12V)
LVVEGAVGL

SEQ ID NO: 58235 - protein, 9 aa, synthetic construct
  source 1..9: note = Seed: LVVVGAVGV (KRAS G12V)
LVVEGAVGM

SEQ ID NO: 58236 - protein, 9 aa, synthetic construct
  source 1..9: note = Seed: LVVVGAVGV (KRAS G12V)
LVVEGAVGN

SEQ ID NO: 58237 - protein, 9 aa, synthetic construct
  source 1..9: note = Seed: LVVVGAVGV (KRAS G12V)
LVVEGAVGS

SEQ ID NO: 58238 - protein, 9 aa, synthetic construct
  source 1..9: note = Seed: LVVVGAVGV (KRAS G12V)
LVVEGAVGT

SEQ ID NO: 58239 - protein, 9 aa, synthetic construct
  source 1..9: note = Seed: LVVVGAVGV (KRAS G12V)
LVVEGAVGV

SEQ ID NO: 58240 - protein, 9 aa, synthetic construct
  source 1..9: note = Seed: LVVVGAVGV (KRAS G12V)
LVVEGFVGI

SEQ ID NO: 58241 - protein, 9 aa, synthetic construct
  source 1..9: note = Seed: LVVVGAVGV (KRAS G12V)
LVVEGFVGL

SEQ ID NO: 58242 - protein, 9 aa, synthetic construct
  source 1..9: note = Seed: LVVVGAVGV (KRAS G12V)
LVVEGFVGM

SEQ ID NO: 58243 - protein, 9 aa, synthetic construct
  source 1..9: note = Seed: LVVVGAVGV (KRAS G12V)
LVVEGFVGV

SEQ ID NO: 58244 - protein, 9 aa, synthetic construct
  source 1..9: note = Seed: LVVVGAVGV (KRAS G12V)
LVVEGGVGA

SEQ ID NO: 58245 - protein, 9 aa, synthetic construct
  source 1..9: note = Seed: LVVVGAVGV (KRAS G12V)
LVVEGGVGG

SEQ ID NO: 58246 - protein, 9 aa, synthetic construct
  source 1..9: note = Seed: LVVVGAVGV (KRAS G12V)
LVVEGGVGI

SEQ ID NO: 58247 - protein, 9 aa, synthetic construct
  source 1..9: note = Seed: LVVVGAVGV (KRAS G12V)
LVVEGGVGL

SEQ ID NO: 58248 - protein, 9 aa, synthetic construct
  source 1..9: note = Seed: LVVVGAVGV (KRAS G12V)
LVVEGGVGM

SEQ ID NO: 58249 - protein, 9 aa, synthetic construct
  source 1..9: note = Seed: LVVVGAVGV (KRAS G12V)
LVVEGGVGS

SEQ ID NO: 58250 - protein, 9 aa, synthetic construct
  source 1..9: note = Seed: LVVVGAVGV (KRAS G12V)
LVVEGGVGT

SEQ ID NO: 58251 - protein, 9 aa, synthetic construct
  source 1..9: note = Seed: LVVVGAVGV (KRAS G12V)
LVVEGGVGV

SEQ ID NO: 58252 - protein, 9 aa, synthetic construct
  source 1..9: note = Seed: LVVVGAVGV (KRAS G12V)
LVVEGNVGA

SEQ ID NO: 58253 - protein, 9 aa, synthetic construct
  source 1..9: note = Seed: LVVVGAVGV (KRAS G12V)
LVVEGNVGF

SEQ ID NO: 58254 - protein, 9 aa, synthetic construct
  source 1..9: note = Seed: LVVVGAVGV (KRAS G12V)
LVVEGNVGI

SEQ ID NO: 58255 - protein, 9 aa, synthetic construct
  source 1..9: note = Seed: LVVVGAVGV (KRAS G12V)
LVVEGNVGL

SEQ ID NO: 58256 - protein, 9 aa, synthetic construct
  source 1..9: note = Seed: LVVVGAVGV (KRAS G12V)
LVVEGNVGM

SEQ ID NO: 58257 - protein, 9 aa, synthetic construct
  source 1..9: note = Seed: LVVVGAVGV (KRAS G12V)
LVVEGNVGS

SEQ ID NO: 58258 - protein, 9 aa, synthetic construct
  source 1..9: note = Seed: LVVVGAVGV (KRAS G12V)
LVVEGNVGT

SEQ ID NO: 58259 - protein, 9 aa, synthetic construct
  source 1..9: note = Seed: LVVVGAVGV (KRAS G12V)
LVVEGNVGV

SEQ ID NO: 58260 - protein, 9 aa, synthetic construct
  source 1..9: note = Seed: LVVVGAVGV (KRAS G12V)
LVVEGPVGA

SEQ ID NO: 58261 - protein, 9 aa, synthetic construct
  source 1..9: note = Seed: LVVVGAVGV (KRAS G12V)
LVVEGPVGI

SEQ ID NO: 58262 - protein, 9 aa, synthetic construct
  source 1..9: note = Seed: LVVVGAVGV (KRAS G12V)
LVVEGPVGL

SEQ ID NO: 58263 - protein, 9 aa, synthetic construct
  source 1..9: note = Seed: LVVVGAVGV (KRAS G12V)
LVVEGPVGM

SEQ ID NO: 58264 - protein, 9 aa, synthetic construct
  source 1..9: note = Seed: LVVVGAVGV (KRAS G12V)
LVVEGPVGS

SEQ ID NO: 58265 - protein, 9 aa, synthetic construct
  source 1..9: note = Seed: LVVVGAVGV (KRAS G12V)
LVVEGPVGT

SEQ ID NO: 58266 - protein, 9 aa, synthetic construct
  source 1..9: note = Seed: LVVVGAVGV (KRAS G12V)
LVVEGPVGV

SEQ ID NO: 58267 - protein, 9 aa, synthetic construct
  source 1..9: note = Seed: LVVVGAVGV (KRAS G12V)
LVVEGSVGA

SEQ ID NO: 58268 - protein, 9 aa, synthetic construct
  source 1..9: note = Seed: LVVVGAVGV (KRAS G12V)
LVVEGSVGG

SEQ ID NO: 58269 - protein, 9 aa, synthetic construct
  source 1..9: note = Seed: LVVVGAVGV (KRAS G12V)
LVVEGSVGI

SEQ ID NO: 58270 - protein, 9 aa, synthetic construct
  source 1..9: note = Seed: LVVVGAVGV (KRAS G12V)
LVVEGSVGL

SEQ ID NO: 58271 - protein, 9 aa, synthetic construct
  source 1..9: note = Seed: LVVVGAVGV (KRAS G12V)
LVVEGSVGM

SEQ ID NO: 58272 - protein, 9 aa, synthetic construct
  source 1..9: note = Seed: LVVVGAVGV (KRAS G12V)
LVVEGSVGS

SEQ ID NO: 58273 - protein, 9 aa, synthetic construct
  source 1..9: note = Seed: LVVVGAVGV (KRAS G12V)
LVVEGSVGT

SEQ ID NO: 58274 - protein, 9 aa, synthetic construct
  source 1..9: note = Seed: LVVVGAVGV (KRAS G12V)
LVVEGSVGV

SEQ ID NO: 58275 - protein, 9 aa, synthetic construct
  source 1..9: note = Seed: LVVVGAVGV (KRAS G12V)
LVVEGTVGA

SEQ ID NO: 58276 - protein, 9 aa, synthetic construct
  source 1..9: note = Seed: LVVVGAVGV (KRAS G12V)
LVVEGTVGI

SEQ ID NO: 58277 - protein, 9 aa, synthetic construct
  source 1..9: note = Seed: LVVVGAVGV (KRAS G12V)
LVVEGTVGL

SEQ ID NO: 58278 - protein, 9 aa, synthetic construct
  source 1..9: note = Seed: LVVVGAVGV (KRAS G12V)
LVVEGTVGM

SEQ ID NO: 58279 - protein, 9 aa, synthetic construct
  source 1..9: note = Seed: LVVVGAVGV (KRAS G12V)
LVVEGTVGS

SEQ ID NO: 58280 - protein, 9 aa, synthetic construct
  source 1..9: note = Seed: LVVVGAVGV (KRAS G12V)
LVVEGTVGT

SEQ ID NO: 58281 - protein, 9 aa, synthetic construct
  source 1..9: note = Seed: LVVVGAVGV (KRAS G12V)
LVVEGTVGV

SEQ ID NO: 58282 - protein, 9 aa, synthetic construct
  source 1..9: note = Seed: LVVVGAVGV (KRAS G12V)
LVVEGVVGA

SEQ ID NO: 58283 - protein, 9 aa, synthetic construct
  source 1..9: note = Seed: LVVVGAVGV (KRAS G12V)
LVVEGVVGL

SEQ ID NO: 58284 - protein, 9 aa, synthetic construct
  source 1..9: note = Seed: LVVVGAVGV (KRAS G12V)
LVVEGVVGV

SEQ ID NO: 58285 - protein, 9 aa, synthetic construct
  source 1..9: note = Seed: LVVVGAVGV (KRAS G12V)
LVVFGAVGA

SEQ ID NO: 58286 - protein, 9 aa, synthetic construct
  source 1..9: note = Seed: LVVVGAVGV (KRAS G12V)
LVVFGAVGG

SEQ ID NO: 58287 - protein, 9 aa, synthetic construct
  source 1..9: note = Seed: LVVVGAVGV (KRAS G12V)
LVVFGAVGH

SEQ ID NO: 58288 - protein, 9 aa, synthetic construct
  source 1..9: note = Seed: LVVVGAVGV (KRAS G12V)
LVVFGAVGI

SEQ ID NO: 58289 - protein, 9 aa, synthetic construct
  source 1..9: note = Seed: LVVVGAVGV (KRAS G12V)
LVVFGAVGL

SEQ ID NO: 58290 - protein, 9 aa, synthetic construct
  source 1..9: note = Seed: LVVVGAVGV (KRAS G12V)
LVVFGAVGM

SEQ ID NO: 58291 - protein, 9 aa, synthetic construct
  source 1..9: note = Seed: LVVVGAVGV (KRAS G12V)
LVVFGAVGN

SEQ ID NO: 58292 - protein, 9 aa, synthetic construct
  source 1..9: note = Seed: LVVVGAVGV (KRAS G12V)
LVVFGAVGR

SEQ ID NO: 58293 - protein, 9 aa, synthetic construct
  source 1..9: note = Seed: LVVVGAVGV (KRAS G12V)
LVVFGAVGS

SEQ ID NO: 58294 - protein, 9 aa, synthetic construct
  source 1..9: note = Seed: LVVVGAVGV (KRAS G12V)
LVVFGAVGT

SEQ ID NO: 58295 - protein, 9 aa, synthetic construct
  source 1..9: note = Seed: LVVVGAVGV (KRAS G12V)
LVVFGAVGV

SEQ ID NO: 58296 - protein, 9 aa, synthetic construct
  source 1..9: note = Seed: LVVVGAVGV (KRAS G12V)
LVVFGDVGA

SEQ ID NO: 58297 - protein, 9 aa, synthetic construct
  source 1..9: note = Seed: LVVVGAVGV (KRAS G12V)
LVVFGDVGF

SEQ ID NO: 58298 - protein, 9 aa, synthetic construct
  source 1..9: note = Seed: LVVVGAVGV (KRAS G12V)
LVVFGDVGI

SEQ ID NO: 58299 - protein, 9 aa, synthetic construct
  source 1..9: note = Seed: LVVVGAVGV (KRAS G12V)
LVVFGDVGL

SEQ ID NO: 58300 - protein, 9 aa, synthetic construct
  source 1..9: note = Seed: LVVVGAVGV (KRAS G12V)
LVVFGDVGM

SEQ ID NO: 58301 - protein, 9 aa, synthetic construct
  source 1..9: note = Seed: LVVVGAVGV (KRAS G12V)
LVVFGDVGS

SEQ ID NO: 58302 - protein, 9 aa, synthetic construct
  source 1..9: note = Seed: LVVVGAVGV (KRAS G12V)
LVVFGDVGT

SEQ ID NO: 58303 - protein, 9 aa, synthetic construct
  source 1..9: note = Seed: LVVVGAVGV (KRAS G12V)
LVVFGDVGV

SEQ ID NO: 58304 - protein, 9 aa, synthetic construct
  source 1..9: note = Seed: LVVVGAVGV (KRAS G12V)
LVVFGGVGA

SEQ ID NO: 58305 - protein, 9 aa, synthetic construct
  source 1..9: note = Seed: LVVVGAVGV (KRAS G12V)
LVVFGGVGF

SEQ ID NO: 58306 - protein, 9 aa, synthetic construct
  source 1..9: note = Seed: LVVVGAVGV (KRAS G12V)
LVVFGGVGG

SEQ ID NO: 58307 - protein, 9 aa, synthetic construct
  source 1..9: note = Seed: LVVVGAVGV (KRAS G12V)
LVVFGGVGH

SEQ ID NO: 58308 - protein, 9 aa, synthetic construct
  source 1..9: note = Seed: LVVVGAVGV (KRAS G12V)
LVVFGGVGI

SEQ ID NO: 58309 - protein, 9 aa, synthetic construct
  source 1..9: note = Seed: LVVVGAVGV (KRAS G12V)
LVVFGGVGL

SEQ ID NO: 58310 - protein, 9 aa, synthetic construct
  source 1..9: note = Seed: LVVVGAVGV (KRAS G12V)
LVVFGGVGM

SEQ ID NO: 58311 - protein, 9 aa, synthetic construct
  source 1..9: note = Seed: LVVVGAVGV (KRAS G12V)
LVVFGGVGR

SEQ ID NO: 58312 - protein, 9 aa, synthetic construct
  source 1..9: note = Seed: LVVVGAVGV (KRAS G12V)
LVVFGGVGS

SEQ ID NO: 58313 - protein, 9 aa, synthetic construct
  source 1..9: note = Seed: LVVVGAVGV (KRAS G12V)
LVVFGGVGT

SEQ ID NO: 58314 - protein, 9 aa, synthetic construct
  source 1..9: note = Seed: LVVVGAVGV (KRAS G12V)
LVVFGGVGV

SEQ ID NO: 58315 - protein, 9 aa, synthetic construct
  source 1..9: note = Seed: LVVVGAVGV (KRAS G12V)
LVVFGGVGY

SEQ ID NO: 58316 - protein, 9 aa, synthetic construct
  source 1..9: note = Seed: LVVVGAVGV (KRAS G12V)
LVVFGHVGH

SEQ ID NO: 58317 - protein, 9 aa, synthetic construct
  source 1..9: note = Seed: LVVVGAVGV (KRAS G12V)
LVVFGHVGK

SEQ ID NO: 58318 - protein, 9 aa, synthetic construct
  source 1..9: note = Seed: LVVVGAVGV (KRAS G12V)
LVVFGHVGR

SEQ ID NO: 58319 - protein, 9 aa, synthetic construct
  source 1..9: note = Seed: LVVVGAVGV (KRAS G12V)
LVVFGIVGK

SEQ ID NO: 58320 - protein, 9 aa, synthetic construct
  source 1..9: note = Seed: LVVVGAVGV (KRAS G12V)
LVVFGIVGR

SEQ ID NO: 58321 - protein, 9 aa, synthetic construct
  source 1..9: note = Seed: LVVVGAVGV (KRAS G12V)
LVVFGKVGA

SEQ ID NO: 58322 - protein, 9 aa, synthetic construct
  source 1..9: note = Seed: LVVVGAVGV (KRAS G12V)
LVVFGKVGG

SEQ ID NO: 58323 - protein, 9 aa, synthetic construct
  source 1..9: note = Seed: LVVVGAVGV (KRAS G12V)
LVVFGKVGH

SEQ ID NO: 58324 - protein, 9 aa, synthetic construct
  source 1..9: note = Seed: LVVVGAVGV (KRAS G12V)
LVVFGKVGK

SEQ ID NO: 58325 - protein, 9 aa, synthetic construct
  source 1..9: note = Seed: LVVVGAVGV (KRAS G12V)
LVVFGKVGM

SEQ ID NO: 58326 - protein, 9 aa, synthetic construct
  source 1..9: note = Seed: LVVVGAVGV (KRAS G12V)
LVVFGKVGN

SEQ ID NO: 58327 - protein, 9 aa, synthetic construct
  source 1..9: note = Seed: LVVVGAVGV (KRAS G12V)
LVVFGKVGQ

SEQ ID NO: 58328 - protein, 9 aa, synthetic construct
  source 1..9: note = Seed: LVVVGAVGV (KRAS G12V)
LVVFGKVGR

SEQ ID NO: 58329 - protein, 9 aa, synthetic construct
  source 1..9: note = Seed: LVVVGAVGV (KRAS G12V)
LVVFGKVGS

SEQ ID NO: 58330 - protein, 9 aa, synthetic construct
  source 1..9: note = Seed: LVVVGAVGV (KRAS G12V)
LVVFGKVGT

SEQ ID NO: 58331 - protein, 9 aa, synthetic construct
  source 1..9: note = Seed: LVVVGAVGV (KRAS G12V)
LVVFGKVGY

SEQ ID NO: 58332 - protein, 9 aa, synthetic construct
  source 1..9: note = Seed: LVVVGAVGV (KRAS G12V)
LVVFGLVGR

SEQ ID NO: 58333 - protein, 9 aa, synthetic construct
  source 1..9: note = Seed: LVVVGAVGV (KRAS G12V)
LVVFGMVGA

SEQ ID NO: 58334 - protein, 9 aa, synthetic construct
  source 1..9: note = Seed: LVVVGAVGV (KRAS G12V)
LVVFGMVGR

SEQ ID NO: 58335 - protein, 9 aa, synthetic construct
  source 1..9: note = Seed: LVVVGAVGV (KRAS G12V)
LVVFGNVGA

SEQ ID NO: 58336 - protein, 9 aa, synthetic construct
  source 1..9: note = Seed: LVVVGAVGV (KRAS G12V)
LVVFGNVGD

SEQ ID NO: 58337 - protein, 9 aa, synthetic construct
  source 1..9: note = Seed: LVVVGAVGV (KRAS G12V)
LVVFGNVGE

SEQ ID NO: 58338 - protein, 9 aa, synthetic construct
  source 1..9: note = Seed: LVVVGAVGV (KRAS G12V)
LVVFGNVGF

SEQ ID NO: 58339 - protein, 9 aa, synthetic construct
  source 1..9: note = Seed: LVVVGAVGV (KRAS G12V)
LVVFGNVGG

SEQ ID NO: 58340 - protein, 9 aa, synthetic construct
  source 1..9: note = Seed: LVVVGAVGV (KRAS G12V)
LVVFGNVGH

SEQ ID NO: 58341 - protein, 9 aa, synthetic construct
  source 1..9: note = Seed: LVVVGAVGV (KRAS G12V)
LVVFGNVGI

SEQ ID NO: 58342 - protein, 9 aa, synthetic construct
  source 1..9: note = Seed: LVVVGAVGV (KRAS G12V)
LVVFGNVGL

SEQ ID NO: 58343 - protein, 9 aa, synthetic construct
  source 1..9: note = Seed: LVVVGAVGV (KRAS G12V)
LVVFGNVGM

SEQ ID NO: 58344 - protein, 9 aa, synthetic construct
  source 1..9: note = Seed: LVVVGAVGV (KRAS G12V)
LVVFGNVGN

SEQ ID NO: 58345 - protein, 9 aa, synthetic construct
  source 1..9: note = Seed: LVVVGAVGV (KRAS G12V)
LVVFGNVGP

SEQ ID NO: 58346 - protein, 9 aa, synthetic construct
  source 1..9: note = Seed: LVVVGAVGV (KRAS G12V)
LVVFGNVGQ

SEQ ID NO: 58347 - protein, 9 aa, synthetic construct
  source 1..9: note = Seed: LVVVGAVGV (KRAS G12V)
LVVFGNVGR

SEQ ID NO: 58348 - protein, 9 aa, synthetic construct
  source 1..9: note = Seed: LVVVGAVGV (KRAS G12V)
LVVFGNVGS

SEQ ID NO: 58349 - protein, 9 aa, synthetic construct
  source 1..9: note = Seed: LVVVGAVGV (KRAS G12V)
LVVFGNVGT

SEQ ID NO: 58350 - protein, 9 aa, synthetic construct
  source 1..9: note = Seed: LVVVGAVGV (KRAS G12V)
LVVFGNVGV

SEQ ID NO: 58351 - protein, 9 aa, synthetic construct
  source 1..9: note = Seed: LVVVGAVGV (KRAS G12V)
LVVFGNVGY

SEQ ID NO: 58352 - protein, 9 aa, synthetic construct
  source 1..9: note = Seed: LVVVGAVGV (KRAS G12V)
LVVFGPVGA

SEQ ID NO: 58353 - protein, 9 aa, synthetic construct
  source 1..9: note = Seed: LVVVGAVGV (KRAS G12V)
LVVFGPVGI

SEQ ID NO: 58354 - protein, 9 aa, synthetic construct
  source 1..9: note = Seed: LVVVGAVGV (KRAS G12V)
LVVFGPVGL

SEQ ID NO: 58355 - protein, 9 aa, synthetic construct
  source 1..9: note = Seed: LVVVGAVGV (KRAS G12V)
LVVFGPVGM

SEQ ID NO: 58356 - protein, 9 aa, synthetic construct
  source 1..9: note = Seed: LVVVGAVGV (KRAS G12V)
LVVFGPVGN

SEQ ID NO: 58357 - protein, 9 aa, synthetic construct
  source 1..9: note = Seed: LVVVGAVGV (KRAS G12V)
LVVFGPVGR

SEQ ID NO: 58358 - protein, 9 aa, synthetic construct
  source 1..9: note = Seed: LVVVGAVGV (KRAS G12V)
LVVFGPVGS

SEQ ID NO: 58359 - protein, 9 aa, synthetic construct
  source 1..9: note = Seed: LVVVGAVGV (KRAS G12V)
LVVFGPVGT

SEQ ID NO: 58360 - protein, 9 aa, synthetic construct
  source 1..9: note = Seed: LVVVGAVGV (KRAS G12V)
LVVFGPVGV

SEQ ID NO: 58361 - protein, 9 aa, synthetic construct
  source 1..9: note = Seed: LVVVGAVGV (KRAS G12V)
LVVFGRVGA

SEQ ID NO: 58362 - protein, 9 aa, synthetic construct
  source 1..9: note = Seed: LVVVGAVGV (KRAS G12V)
LVVFGRVGG

SEQ ID NO: 58363 - protein, 9 aa, synthetic construct
  source 1..9: note = Seed: LVVVGAVGV (KRAS G12V)
LVVFGRVGH

SEQ ID NO: 58364 - protein, 9 aa, synthetic construct
  source 1..9: note = Seed: LVVVGAVGV (KRAS G12V)
LVVFGRVGK

SEQ ID NO: 58365 - protein, 9 aa, synthetic construct
  source 1..9: note = Seed: LVVVGAVGV (KRAS G12V)
LVVFGRVGM

SEQ ID NO: 58366 - protein, 9 aa, synthetic construct
  source 1..9: note = Seed: LVVVGAVGV (KRAS G12V)
LVVFGRVGN

SEQ ID NO: 58367 - protein, 9 aa, synthetic construct
  source 1..9: note = Seed: LVVVGAVGV (KRAS G12V)
LVVFGRVGP

SEQ ID NO: 58368 - protein, 9 aa, synthetic construct
  source 1..9: note = Seed: LVVVGAVGV (KRAS G12V)
LVVFGRVGQ

SEQ ID NO: 58369 - protein, 9 aa, synthetic construct
  source 1..9: note = Seed: LVVVGAVGV (KRAS G12V)
LVVFGRVGR

SEQ ID NO: 58370 - protein, 9 aa, synthetic construct
  source 1..9: note = Seed: LVVVGAVGV (KRAS G12V)
LVVFGRVGS

SEQ ID NO: 58371 - protein, 9 aa, synthetic construct
  source 1..9: note = Seed: LVVVGAVGV (KRAS G12V)
LVVFGRVGT

SEQ ID NO: 58372 - protein, 9 aa, synthetic construct
  source 1..9: note = Seed: LVVVGAVGV (KRAS G12V)
LVVFGRVGY

SEQ ID NO: 58373 - protein, 9 aa, synthetic construct
  source 1..9: note = Seed: LVVVGAVGV (KRAS G12V)
LVVFGSVGA

SEQ ID NO: 58374 - protein, 9 aa, synthetic construct
  source 1..9: note = Seed: LVVVGAVGV (KRAS G12V)
LVVFGSVGF

SEQ ID NO: 58375 - protein, 9 aa, synthetic construct
  source 1..9: note = Seed: LVVVGAVGV (KRAS G12V)
LVVFGSVGG

SEQ ID NO: 58376 - protein, 9 aa, synthetic construct
  source 1..9: note = Seed: LVVVGAVGV (KRAS G12V)
LVVFGSVGH

SEQ ID NO: 58377 - protein, 9 aa, synthetic construct
  source 1..9: note = Seed: LVVVGAVGV (KRAS G12V)
LVVFGSVGI

SEQ ID NO: 58378 - protein, 9 aa, synthetic construct
  source 1..9: note = Seed: LVVVGAVGV (KRAS G12V)
LVVFGSVGK

SEQ ID NO: 58379 - protein, 9 aa, synthetic construct
  source 1..9: note = Seed: LVVVGAVGV (KRAS G12V)
LVVFGSVGL

SEQ ID NO: 58380 - protein, 9 aa, synthetic construct
  source 1..9: note = Seed: LVVVGAVGV (KRAS G12V)
LVVFGSVGM

SEQ ID NO: 58381 - protein, 9 aa, synthetic construct
  source 1..9: note = Seed: LVVVGAVGV (KRAS G12V)
LVVFGSVGN

SEQ ID NO: 58382 - protein, 9 aa, synthetic construct
  source 1..9: note = Seed: LVVVGAVGV (KRAS G12V)
LVVFGSVGP

SEQ ID NO: 58383 - protein, 9 aa, synthetic construct
  source 1..9: note = Seed: LVVVGAVGV (KRAS G12V)
LVVFGSVGQ

SEQ ID NO: 58384 - protein, 9 aa, synthetic construct
  source 1..9: note = Seed: LVVVGAVGV (KRAS G12V)
LVVFGSVGR

SEQ ID NO: 58385 - protein, 9 aa, synthetic construct
  source 1..9: note = Seed: LVVVGAVGV (KRAS G12V)
LVVFGSVGS

SEQ ID NO: 58386 - protein, 9 aa, synthetic construct
  source 1..9: note = Seed: LVVVGAVGV (KRAS G12V)
LVVFGSVGT

SEQ ID NO: 58387 - protein, 9 aa, synthetic construct
  source 1..9: note = Seed: LVVVGAVGV (KRAS G12V)
LVVFGSVGV

SEQ ID NO: 58388 - protein, 9 aa, synthetic construct
  source 1..9: note = Seed: LVVVGAVGV (KRAS G12V)
LVVFGSVGY

SEQ ID NO: 58389 - protein, 9 aa, synthetic construct
  source 1..9: note = Seed: LVVVGAVGV (KRAS G12V)
LVVFGTVGA

SEQ ID NO: 58390 - protein, 9 aa, synthetic construct
  source 1..9: note = Seed: LVVVGAVGV (KRAS G12V)
LVVFGTVGD

SEQ ID NO: 58391 - protein, 9 aa, synthetic construct
  source 1..9: note = Seed: LVVVGAVGV (KRAS G12V)
LVVFGTVGG

SEQ ID NO: 58392 - protein, 9 aa, synthetic construct
  source 1..9: note = Seed: LVVVGAVGV (KRAS G12V)
LVVFGTVGH

SEQ ID NO: 58393 - protein, 9 aa, synthetic construct
  source 1..9: note = Seed: LVVVGAVGV (KRAS G12V)
LVVFGTVGI

SEQ ID NO: 58394 - protein, 9 aa, synthetic construct
  source 1..9: note = Seed: LVVVGAVGV (KRAS G12V)
LVVFGTVGK

SEQ ID NO: 58395 - protein, 9 aa, synthetic construct
  source 1..9: note = Seed: LVVVGAVGV (KRAS G12V)
LVVFGTVGL

SEQ ID NO: 58396 - protein, 9 aa, synthetic construct
  source 1..9: note = Seed: LVVVGAVGV (KRAS G12V)
LVVFGTVGM

SEQ ID NO: 58397 - protein, 9 aa, synthetic construct
  source 1..9: note = Seed: LVVVGAVGV (KRAS G12V)
LVVFGTVGN

SEQ ID NO: 58398 - protein, 9 aa, synthetic construct
  source 1..9: note = Seed: LVVVGAVGV (KRAS G12V)
LVVFGTVGQ

SEQ ID NO: 58399 - protein, 9 aa, synthetic construct
  source 1..9: note = Seed: LVVVGAVGV (KRAS G12V)
LVVFGTVGR

SEQ ID NO: 58400 - protein, 9 aa, synthetic construct
  source 1..9: note = Seed: LVVVGAVGV (KRAS G12V)
LVVFGTVGS

SEQ ID NO: 58401 - protein, 9 aa, synthetic construct
  source 1..9: note = Seed: LVVVGAVGV (KRAS G12V)
LVVFGTVGT

SEQ ID NO: 58402 - protein, 9 aa, synthetic construct
  source 1..9: note = Seed: LVVVGAVGV (KRAS G12V)
LVVFGTVGV

SEQ ID NO: 58403 - protein, 9 aa, synthetic construct
  source 1..9: note = Seed: LVVVGAVGV (KRAS G12V)
LVVFGVVGA

SEQ ID NO: 58404 - protein, 9 aa, synthetic construct
  source 1..9: note = Seed: LVVVGAVGV (KRAS G12V)
LVVFGVVGR

SEQ ID NO: 58405 - protein, 9 aa, synthetic construct
  source 1..9: note = Seed: LVVVGAVGV (KRAS G12V)
LVVFGVVGS

SEQ ID NO: 58406 - protein, 9 aa, synthetic construct
  source 1..9: note = Seed: LVVVGAVGV (KRAS G12V)
LVVGGAVGA

SEQ ID NO: 58407 - protein, 9 aa, synthetic construct
  source 1..9: note = Seed: LVVVGAVGV (KRAS G12V)
LVVGGAVGC

SEQ ID NO: 58408 - protein, 9 aa, synthetic construct
  source 1..9: note = Seed: LVVVGAVGV (KRAS G12V)
LVVGGAVGF

SEQ ID NO: 58409 - protein, 9 aa, synthetic construct
  source 1..9: note = Seed: LVVVGAVGV (KRAS G12V)
LVVGGAVGG

SEQ ID NO: 58410 - protein, 9 aa, synthetic construct
  source 1..9: note = Seed: LVVVGAVGV (KRAS G12V)
LVVGGAVGH

SEQ ID NO: 58411 - protein, 9 aa, synthetic construct
  source 1..9: note = Seed: LVVVGAVGV (KRAS G12V)
LVVGGAVGI

SEQ ID NO: 58412 - protein, 9 aa, synthetic construct
  source 1..9: note = Seed: LVVVGAVGV (KRAS G12V)
LVVGGAVGL

SEQ ID NO: 58413 - protein, 9 aa, synthetic construct
  source 1..9: note = Seed: LVVVGAVGV (KRAS G12V)
LVVGGAVGM

SEQ ID NO: 58414 - protein, 9 aa, synthetic construct
  source 1..9: note = Seed: LVVVGAVGV (KRAS G12V)
LVVGGAVGN

SEQ ID NO: 58415 - protein, 9 aa, synthetic construct
  source 1..9: note = Seed: LVVVGAVGV (KRAS G12V)
LVVGGAVGQ

SEQ ID NO: 58416 - protein, 9 aa, synthetic construct
  source 1..9: note = Seed: LVVVGAVGV (KRAS G12V)
LVVGGAVGR

SEQ ID NO: 58417 - protein, 9 aa, synthetic construct
  source 1..9: note = Seed: LVVVGAVGV (KRAS G12V)
LVVGGAVGS

SEQ ID NO: 58418 - protein, 9 aa, synthetic construct
  source 1..9: note = Seed: LVVVGAVGV (KRAS G12V)
LVVGGAVGT

SEQ ID NO: 58419 - protein, 9 aa, synthetic construct
  source 1..9: note = Seed: LVVVGAVGV (KRAS G12V)
LVVGGAVGV

SEQ ID NO: 58420 - protein, 9 aa, synthetic construct
  source 1..9: note = Seed: LVVVGAVGV (KRAS G12V)
LVVGGAVGY

SEQ ID NO: 58421 - protein, 9 aa, synthetic construct
  source 1..9: note = Seed: LVVVGAVGV (KRAS G12V)
LVVGGCVGC

SEQ ID NO: 58422 - protein, 9 aa, synthetic construct
  source 1..9: note = Seed: LVVVGAVGV (KRAS G12V)
LVVGGCVGI

SEQ ID NO: 58423 - protein, 9 aa, synthetic construct
  source 1..9: note = Seed: LVVVGAVGV (KRAS G12V)
LVVGGCVGL

SEQ ID NO: 58424 - protein, 9 aa, synthetic construct
  source 1..9: note = Seed: LVVVGAVGV (KRAS G12V)
LVVGGCVGV

SEQ ID NO: 58425 - protein, 9 aa, synthetic construct
  source 1..9: note = Seed: LVVVGAVGV (KRAS G12V)
LVVGGGVGA

SEQ ID NO: 58426 - protein, 9 aa, synthetic construct
  source 1..9: note = Seed: LVVVGAVGV (KRAS G12V)
LVVGGGVGC

SEQ ID NO: 58427 - protein, 9 aa, synthetic construct
  source 1..9: note = Seed: LVVVGAVGV (KRAS G12V)
LVVGGGVGF

SEQ ID NO: 58428 - protein, 9 aa, synthetic construct
  source 1..9: note = Seed: LVVVGAVGV (KRAS G12V)
LVVGGGVGI

SEQ ID NO: 58429 - protein, 9 aa, synthetic construct
  source 1..9: note = Seed: LVVVGAVGV (KRAS G12V)
LVVGGGVGL

SEQ ID NO: 58430 - protein, 9 aa, synthetic construct
  source 1..9: note = Seed: LVVVGAVGV (KRAS G12V)
LVVGGGVGM

SEQ ID NO: 58431 - protein, 9 aa, synthetic construct
  source 1..9: note = Seed: LVVVGAVGV (KRAS G12V)
LVVGGGVGS

SEQ ID NO: 58432 - protein, 9 aa, synthetic construct
  source 1..9: note = Seed: LVVVGAVGV (KRAS G12V)
LVVGGGVGT

SEQ ID NO: 58433 - protein, 9 aa, synthetic construct
  source 1..9: note = Seed: LVVVGAVGV (KRAS G12V)
LVVGGGVGV

SEQ ID NO: 58434 - protein, 9 aa, synthetic construct
  source 1..9: note = Seed: LVVVGAVGV (KRAS G12V)
LVVGGIVGA

SEQ ID NO: 58435 - protein, 9 aa, synthetic construct
  source 1..9: note = Seed: LVVVGAVGV (KRAS G12V)
LVVGGIVGG

SEQ ID NO: 58436 - protein, 9 aa, synthetic construct
  source 1..9: note = Seed: LVVVGAVGV (KRAS G12V)
LVVGGIVGI

SEQ ID NO: 58437 - protein, 9 aa, synthetic construct
  source 1..9: note = Seed: LVVVGAVGV (KRAS G12V)
LVVGGIVGN

SEQ ID NO: 58438 - protein, 9 aa, synthetic construct
  source 1..9: note = Seed: LVVVGAVGV (KRAS G12V)
LVVGGIVGS

SEQ ID NO: 58439 - protein, 9 aa, synthetic construct
  source 1..9: note = Seed: LVVVGAVGV (KRAS G12V)
LVVGGIVGV

SEQ ID NO: 58440 - protein, 9 aa, synthetic construct
  source 1..9: note = Seed: LVVVGAVGV (KRAS G12V)
LVVGGNVGA

SEQ ID NO: 58441 - protein, 9 aa, synthetic construct
  source 1..9: note = Seed: LVVVGAVGV (KRAS G12V)
LVVGGNVGC

SEQ ID NO: 58442 - protein, 9 aa, synthetic construct
  source 1..9: note = Seed: LVVVGAVGV (KRAS G12V)
LVVGGNVGI

SEQ ID NO: 58443 - protein, 9 aa, synthetic construct
  source 1..9: note = Seed: LVVVGAVGV (KRAS G12V)
LVVGGNVGL

SEQ ID NO: 58444 - protein, 9 aa, synthetic construct
  source 1..9: note = Seed: LVVVGAVGV (KRAS G12V)
LVVGGNVGM

SEQ ID NO: 58445 - protein, 9 aa, synthetic construct
  source 1..9: note = Seed: LVVVGAVGV (KRAS G12V)
LVVGGNVGR

SEQ ID NO: 58446 - protein, 9 aa, synthetic construct
  source 1..9: note = Seed: LVVVGAVGV (KRAS G12V)
LVVGGNVGS

SEQ ID NO: 58447 - protein, 9 aa, synthetic construct
  source 1..9: note = Seed: LVVVGAVGV (KRAS G12V)
LVVGGNVGT

SEQ ID NO: 58448 - protein, 9 aa, synthetic construct
  source 1..9: note = Seed: LVVVGAVGV (KRAS G12V)
LVVGGNVGV

SEQ ID NO: 58449 - protein, 9 aa, synthetic construct
  source 1..9: note = Seed: LVVVGAVGV (KRAS G12V)
LVVGGPVGA

SEQ ID NO: 58450 - protein, 9 aa, synthetic construct
  source 1..9: note = Seed: LVVVGAVGV (KRAS G12V)
LVVGGPVGC

SEQ ID NO: 58451 - protein, 9 aa, synthetic construct
  source 1..9: note = Seed: LVVVGAVGV (KRAS G12V)
LVVGGPVGD

SEQ ID NO: 58452 - protein, 9 aa, synthetic construct
  source 1..9: note = Seed: LVVVGAVGV (KRAS G12V)
LVVGGPVGE

SEQ ID NO: 58453 - protein, 9 aa, synthetic construct
  source 1..9: note = Seed: LVVVGAVGV (KRAS G12V)
LVVGGPVGF

SEQ ID NO: 58454 - protein, 9 aa, synthetic construct
  source 1..9: note = Seed: LVVVGAVGV (KRAS G12V)
LVVGGPVGG

SEQ ID NO: 58455 - protein, 9 aa, synthetic construct
  source 1..9: note = Seed: LVVVGAVGV (KRAS G12V)
LVVGGPVGI

SEQ ID NO: 58456 - protein, 9 aa, synthetic construct
  source 1..9: note = Seed: LVVVGAVGV (KRAS G12V)
LVVGGPVGL

SEQ ID NO: 58457 - protein, 9 aa, synthetic construct
  source 1..9: note = Seed: LVVVGAVGV (KRAS G12V)
LVVGGPVGM

SEQ ID NO: 58458 - protein, 9 aa, synthetic construct
  source 1..9: note = Seed: LVVVGAVGV (KRAS G12V)
LVVGGPVGN

SEQ ID NO: 58459 - protein, 9 aa, synthetic construct
  source 1..9: note = Seed: LVVVGAVGV (KRAS G12V)
LVVGGPVGQ

SEQ ID NO: 58460 - protein, 9 aa, synthetic construct
  source 1..9: note = Seed: LVVVGAVGV (KRAS G12V)
LVVGGPVGS

SEQ ID NO: 58461 - protein, 9 aa, synthetic construct
  source 1..9: note = Seed: LVVVGAVGV (KRAS G12V)
LVVGGPVGT

SEQ ID NO: 58462 - protein, 9 aa, synthetic construct
  source 1..9: note = Seed: LVVVGAVGV (KRAS G12V)
LVVGGPVGV

SEQ ID NO: 58463 - protein, 9 aa, synthetic construct
  source 1..9: note = Seed: LVVVGAVGV (KRAS G12V)
LVVGGSVGA

SEQ ID NO: 58464 - protein, 9 aa, synthetic construct
  source 1..9: note = Seed: LVVVGAVGV (KRAS G12V)
LVVGGSVGC

SEQ ID NO: 58465 - protein, 9 aa, synthetic construct
  source 1..9: note = Seed: LVVVGAVGV (KRAS G12V)
LVVGGSVGI

SEQ ID NO: 58466 - protein, 9 aa, synthetic construct
  source 1..9: note = Seed: LVVVGAVGV (KRAS G12V)
LVVGGSVGL

SEQ ID NO: 58467 - protein, 9 aa, synthetic construct
  source 1..9: note = Seed: LVVVGAVGV (KRAS G12V)
LVVGGSVGM

SEQ ID NO: 58468 - protein, 9 aa, synthetic construct
  source 1..9: note = Seed: LVVVGAVGV (KRAS G12V)
LVVGGSVGN

SEQ ID NO: 58469 - protein, 9 aa, synthetic construct
  source 1..9: note = Seed: LVVVGAVGV (KRAS G12V)
LVVGGSVGQ

SEQ ID NO: 58470 - protein, 9 aa, synthetic construct
  source 1..9: note = Seed: LVVVGAVGV (KRAS G12V)
LVVGGSVGS

SEQ ID NO: 58471 - protein, 9 aa, synthetic construct
  source 1..9: note = Seed: LVVVGAVGV (KRAS G12V)
LVVGGSVGT

SEQ ID NO: 58472 - protein, 9 aa, synthetic construct
  source 1..9: note = Seed: LVVVGAVGV (KRAS G12V)
LVVGGSVGV

SEQ ID NO: 58473 - protein, 9 aa, synthetic construct
  source 1..9: note = Seed: LVVVGAVGV (KRAS G12V)
LVVGGTVGA

SEQ ID NO: 58474 - protein, 9 aa, synthetic construct
  source 1..9: note = Seed: LVVVGAVGV (KRAS G12V)
LVVGGTVGC

SEQ ID NO: 58475 - protein, 9 aa, synthetic construct
  source 1..9: note = Seed: LVVVGAVGV (KRAS G12V)
LVVGGTVGI

SEQ ID NO: 58476 - protein, 9 aa, synthetic construct
  source 1..9: note = Seed: LVVVGAVGV (KRAS G12V)
LVVGGTVGL

SEQ ID NO: 58477 - protein, 9 aa, synthetic construct
  source 1..9: note = Seed: LVVVGAVGV (KRAS G12V)
LVVGGTVGM

SEQ ID NO: 58478 - protein, 9 aa, synthetic construct
  source 1..9: note = Seed: LVVVGAVGV (KRAS G12V)
LVVGGTVGN

SEQ ID NO: 58479 - protein, 9 aa, synthetic construct
  source 1..9: note = Seed: LVVVGAVGV (KRAS G12V)
LVVGGTVGS

SEQ ID NO: 58480 - protein, 9 aa, synthetic construct
  source 1..9: note = Seed: LVVVGAVGV (KRAS G12V)
LVVGGTVGT

SEQ ID NO: 58481 - protein, 9 aa, synthetic construct
  source 1..9: note = Seed: LVVVGAVGV (KRAS G12V)
LVVGGTVGV

SEQ ID NO: 58482 - protein, 9 aa, synthetic construct
  source 1..9: note = Seed: LVVVGAVGV (KRAS G12V)
LVVGGVVGA

SEQ ID NO: 58483 - protein, 9 aa, synthetic construct
  source 1..9: note = Seed: LVVVGAVGV (KRAS G12V)
LVVGGVVGG

SEQ ID NO: 58484 - protein, 9 aa, synthetic construct
  source 1..9: note = Seed: LVVVGAVGV (KRAS G12V)
LVVGGVVGI

SEQ ID NO: 58485 - protein, 9 aa, synthetic construct
  source 1..9: note = Seed: LVVVGAVGV (KRAS G12V)
LVVGGVVGL

SEQ ID NO: 58486 - protein, 9 aa, synthetic construct
  source 1..9: note = Seed: LVVVGAVGV (KRAS G12V)
LVVGGVVGM

SEQ ID NO: 58487 - protein, 9 aa, synthetic construct
  source 1..9: note = Seed: LVVVGAVGV (KRAS G12V)
LVVGGVVGN

SEQ ID NO: 58488 - protein, 9 aa, synthetic construct
  source 1..9: note = Seed: LVVVGAVGV (KRAS G12V)
LVVGGVVGS

SEQ ID NO: 58489 - protein, 9 aa, synthetic construct
  source 1..9: note = Seed: LVVVGAVGV (KRAS G12V)
LVVGGVVGT

SEQ ID NO: 58490 - protein, 9 aa, synthetic construct
  source 1..9: note = Seed: LVVVGAVGV (KRAS G12V)
LVVGGVVGV

SEQ ID NO: 58491 - protein, 9 aa, synthetic construct
  source 1..9: note = Seed: LVVVGAVGV (KRAS G12V)
LVVHGAVGA

SEQ ID NO: 58492 - protein, 9 aa, synthetic construct
  source 1..9: note = Seed: LVVVGAVGV (KRAS G12V)
LVVHGAVGF

SEQ ID NO: 58493 - protein, 9 aa, synthetic construct
  source 1..9: note = Seed: LVVVGAVGV (KRAS G12V)
LVVHGAVGI

SEQ ID NO: 58494 - protein, 9 aa, synthetic construct
  source 1..9: note = Seed: LVVVGAVGV (KRAS G12V)
LVVHGAVGK

SEQ ID NO: 58495 - protein, 9 aa, synthetic construct
  source 1..9: note = Seed: LVVVGAVGV (KRAS G12V)
LVVHGAVGL

SEQ ID NO: 58496 - protein, 9 aa, synthetic construct
  source 1..9: note = Seed: LVVVGAVGV (KRAS G12V)
LVVHGAVGM

SEQ ID NO: 58497 - protein, 9 aa, synthetic construct
  source 1..9: note = Seed: LVVVGAVGV (KRAS G12V)
LVVHGAVGR

SEQ ID NO: 58498 - protein, 9 aa, synthetic construct
  source 1..9: note = Seed: LVVVGAVGV (KRAS G12V)
LVVHGAVGS

SEQ ID NO: 58499 - protein, 9 aa, synthetic construct
  source 1..9: note = Seed: LVVVGAVGV (KRAS G12V)
LVVHGAVGT

SEQ ID NO: 58500 - protein, 9 aa, synthetic construct
  source 1..9: note = Seed: LVVVGAVGV (KRAS G12V)
LVVHGAVGV

SEQ ID NO: 58501 - protein, 9 aa, synthetic construct
  source 1..9: note = Seed: LVVVGAVGV (KRAS G12V)
LVVHGAVGY

SEQ ID NO: 58502 - protein, 9 aa, synthetic construct
  source 1..9: note = Seed: LVVVGAVGV (KRAS G12V)
LVVHGFVGF

SEQ ID NO: 58503 - protein, 9 aa, synthetic construct
  source 1..9: note = Seed: LVVVGAVGV (KRAS G12V)
LVVHGFVGI

SEQ ID NO: 58504 - protein, 9 aa, synthetic construct
  source 1..9: note = Seed: LVVVGAVGV (KRAS G12V)
LVVHGFVGL

SEQ ID NO: 58505 - protein, 9 aa, synthetic construct
  source 1..9: note = Seed: LVVVGAVGV (KRAS G12V)
LVVHGFVGM

SEQ ID NO: 58506 - protein, 9 aa, synthetic construct
  source 1..9: note = Seed: LVVVGAVGV (KRAS G12V)
LVVHGFVGV

SEQ ID NO: 58507 - protein, 9 aa, synthetic construct
  source 1..9: note = Seed: LVVVGAVGV (KRAS G12V)
LVVHGGVGA

SEQ ID NO: 58508 - protein, 9 aa, synthetic construct
  source 1..9: note = Seed: LVVVGAVGV (KRAS G12V)
LVVHGGVGI

SEQ ID NO: 58509 - protein, 9 aa, synthetic construct
  source 1..9: note = Seed: LVVVGAVGV (KRAS G12V)
LVVHGGVGL

SEQ ID NO: 58510 - protein, 9 aa, synthetic construct
  source 1..9: note = Seed: LVVVGAVGV (KRAS G12V)
LVVHGGVGM

SEQ ID NO: 58511 - protein, 9 aa, synthetic construct
  source 1..9: note = Seed: LVVVGAVGV (KRAS G12V)
LVVHGGVGR

SEQ ID NO: 58512 - protein, 9 aa, synthetic construct
  source 1..9: note = Seed: LVVVGAVGV (KRAS G12V)
LVVHGGVGV

SEQ ID NO: 58513 - protein, 9 aa, synthetic construct
  source 1..9: note = Seed: LVVVGAVGV (KRAS G12V)
LVVHGGVGY

SEQ ID NO: 58514 - protein, 9 aa, synthetic construct
  source 1..9: note = Seed: LVVVGAVGV (KRAS G12V)
LVVHGHVGF

SEQ ID NO: 58515 - protein, 9 aa, synthetic construct
  source 1..9: note = Seed: LVVVGAVGV (KRAS G12V)
LVVHGHVGI

SEQ ID NO: 58516 - protein, 9 aa, synthetic construct
  source 1..9: note = Seed: LVVVGAVGV (KRAS G12V)
LVVHGHVGL

SEQ ID NO: 58517 - protein, 9 aa, synthetic construct
  source 1..9: note = Seed: LVVVGAVGV (KRAS G12V)
LVVHGHVGM

SEQ ID NO: 58518 - protein, 9 aa, synthetic construct
  source 1..9: note = Seed: LVVVGAVGV (KRAS G12V)
LVVHGHVGR

SEQ ID NO: 58519 - protein, 9 aa, synthetic construct
  source 1..9: note = Seed: LVVVGAVGV (KRAS G12V)
LVVHGHVGY

SEQ ID NO: 58520 - protein, 9 aa, synthetic construct
  source 1..9: note = Seed: LVVVGAVGV (KRAS G12V)
LVVHGIVGF

SEQ ID NO: 58521 - protein, 9 aa, synthetic construct
  source 1..9: note = Seed: LVVVGAVGV (KRAS G12V)
LVVHGIVGI

SEQ ID NO: 58522 - protein, 9 aa, synthetic construct
  source 1..9: note = Seed: LVVVGAVGV (KRAS G12V)
LVVHGIVGK

SEQ ID NO: 58523 - protein, 9 aa, synthetic construct
  source 1..9: note = Seed: LVVVGAVGV (KRAS G12V)
LVVHGIVGL

SEQ ID NO: 58524 - protein, 9 aa, synthetic construct
  source 1..9: note = Seed: LVVVGAVGV (KRAS G12V)
LVVHGIVGM

SEQ ID NO: 58525 - protein, 9 aa, synthetic construct
  source 1..9: note = Seed: LVVVGAVGV (KRAS G12V)
LVVHGIVGR

SEQ ID NO: 58526 - protein, 9 aa, synthetic construct
  source 1..9: note = Seed: LVVVGAVGV (KRAS G12V)
LVVHGIVGY

SEQ ID NO: 58527 - protein, 9 aa, synthetic construct
  source 1..9: note = Seed: LVVVGAVGV (KRAS G12V)
LVVHGKVGA

SEQ ID NO: 58528 - protein, 9 aa, synthetic construct
  source 1..9: note = Seed: LVVVGAVGV (KRAS G12V)
LVVHGKVGF

SEQ ID NO: 58529 - protein, 9 aa, synthetic construct
  source 1..9: note = Seed: LVVVGAVGV (KRAS G12V)
LVVHGKVGH

SEQ ID NO: 58530 - protein, 9 aa, synthetic construct
  source 1..9: note = Seed: LVVVGAVGV (KRAS G12V)
LVVHGKVGI

SEQ ID NO: 58531 - protein, 9 aa, synthetic construct
  source 1..9: note = Seed: LVVVGAVGV (KRAS G12V)
LVVHGKVGK

SEQ ID NO: 58532 - protein, 9 aa, synthetic construct
  source 1..9: note = Seed: LVVVGAVGV (KRAS G12V)
LVVHGKVGL

SEQ ID NO: 58533 - protein, 9 aa, synthetic construct
  source 1..9: note = Seed: LVVVGAVGV (KRAS G12V)
LVVHGKVGM

SEQ ID NO: 58534 - protein, 9 aa, synthetic construct
  source 1..9: note = Seed: LVVVGAVGV (KRAS G12V)
LVVHGKVGR

SEQ ID NO: 58535 - protein, 9 aa, synthetic construct
  source 1..9: note = Seed: LVVVGAVGV (KRAS G12V)
LVVHGKVGS

SEQ ID NO: 58536 - protein, 9 aa, synthetic construct
  source 1..9: note = Seed: LVVVGAVGV (KRAS G12V)
LVVHGKVGV

SEQ ID NO: 58537 - protein, 9 aa, synthetic construct
  source 1..9: note = Seed: LVVVGAVGV (KRAS G12V)
LVVHGKVGY

SEQ ID NO: 58538 - protein, 9 aa, synthetic construct
  source 1..9: note = Seed: LVVVGAVGV (KRAS G12V)
LVVHGLVGR

SEQ ID NO: 58539 - protein, 9 aa, synthetic construct
  source 1..9: note = Seed: LVVVGAVGV (KRAS G12V)
LVVHGMVGR

SEQ ID NO: 58540 - protein, 9 aa, synthetic construct
  source 1..9: note = Seed: LVVVGAVGV (KRAS G12V)
LVVHGNVGA

SEQ ID NO: 58541 - protein, 9 aa, synthetic construct
  source 1..9: note = Seed: LVVVGAVGV (KRAS G12V)
LVVHGNVGF

SEQ ID NO: 58542 - protein, 9 aa, synthetic construct
  source 1..9: note = Seed: LVVVGAVGV (KRAS G12V)
LVVHGNVGI

SEQ ID NO: 58543 - protein, 9 aa, synthetic construct
  source 1..9: note = Seed: LVVVGAVGV (KRAS G12V)
LVVHGNVGL

SEQ ID NO: 58544 - protein, 9 aa, synthetic construct
  source 1..9: note = Seed: LVVVGAVGV (KRAS G12V)
LVVHGNVGM

SEQ ID NO: 58545 - protein, 9 aa, synthetic construct
  source 1..9: note = Seed: LVVVGAVGV (KRAS G12V)
LVVHGNVGR

SEQ ID NO: 58546 - protein, 9 aa, synthetic construct
  source 1..9: note = Seed: LVVVGAVGV (KRAS G12V)
LVVHGNVGV

SEQ ID NO: 58547 - protein, 9 aa, synthetic construct
  source 1..9: note = Seed: LVVVGAVGV (KRAS G12V)
LVVHGNVGY

SEQ ID NO: 58548 - protein, 9 aa, synthetic construct
  source 1..9: note = Seed: LVVVGAVGV (KRAS G12V)
LVVHGPVGA

SEQ ID NO: 58549 - protein, 9 aa, synthetic construct
  source 1..9: note = Seed: LVVVGAVGV (KRAS G12V)
LVVHGPVGF

SEQ ID NO: 58550 - protein, 9 aa, synthetic construct
  source 1..9: note = Seed: LVVVGAVGV (KRAS G12V)
LVVHGPVGI

SEQ ID NO: 58551 - protein, 9 aa, synthetic construct
  source 1..9: note = Seed: LVVVGAVGV (KRAS G12V)
LVVHGPVGL

SEQ ID NO: 58552 - protein, 9 aa, synthetic construct
  source 1..9: note = Seed: LVVVGAVGV (KRAS G12V)
LVVHGPVGM

SEQ ID NO: 58553 - protein, 9 aa, synthetic construct
  source 1..9: note = Seed: LVVVGAVGV (KRAS G12V)
LVVHGPVGR

SEQ ID NO: 58554 - protein, 9 aa, synthetic construct
  source 1..9: note = Seed: LVVVGAVGV (KRAS G12V)
LVVHGPVGV

SEQ ID NO: 58555 - protein, 9 aa, synthetic construct
  source 1..9: note = Seed: LVVVGAVGV (KRAS G12V)
LVVHGPVGY

SEQ ID NO: 58556 - protein, 9 aa, synthetic construct
  source 1..9: note = Seed: LVVVGAVGV (KRAS G12V)
LVVHGRVGA

SEQ ID NO: 58557 - protein, 9 aa, synthetic construct
  source 1..9: note = Seed: LVVVGAVGV (KRAS G12V)
LVVHGRVGF

SEQ ID NO: 58558 - protein, 9 aa, synthetic construct
  source 1..9: note = Seed: LVVVGAVGV (KRAS G12V)
LVVHGRVGG

SEQ ID NO: 58559 - protein, 9 aa, synthetic construct
  source 1..9: note = Seed: LVVVGAVGV (KRAS G12V)
LVVHGRVGH

SEQ ID NO: 58560 - protein, 9 aa, synthetic construct
  source 1..9: note = Seed: LVVVGAVGV (KRAS G12V)
LVVHGRVGI

SEQ ID NO: 58561 - protein, 9 aa, synthetic construct
  source 1..9: note = Seed: LVVVGAVGV (KRAS G12V)
LVVHGRVGK

SEQ ID NO: 58562 - protein, 9 aa, synthetic construct
  source 1..9: note = Seed: LVVVGAVGV (KRAS G12V)
LVVHGRVGL

SEQ ID NO: 58563 - protein, 9 aa, synthetic construct
  source 1..9: note = Seed: LVVVGAVGV (KRAS G12V)
LVVHGRVGM

SEQ ID NO: 58564 - protein, 9 aa, synthetic construct
  source 1..9: note = Seed: LVVVGAVGV (KRAS G12V)
LVVHGRVGQ

SEQ ID NO: 58565 - protein, 9 aa, synthetic construct
  source 1..9: note = Seed: LVVVGAVGV (KRAS G12V)
LVVHGRVGR

SEQ ID NO: 58566 - protein, 9 aa, synthetic construct
  source 1..9: note = Seed: LVVVGAVGV (KRAS G12V)
LVVHGRVGS

SEQ ID NO: 58567 - protein, 9 aa, synthetic construct
  source 1..9: note = Seed: LVVVGAVGV (KRAS G12V)
LVVHGRVGV

SEQ ID NO: 58568 - protein, 9 aa, synthetic construct
  source 1..9: note = Seed: LVVVGAVGV (KRAS G12V)
LVVHGRVGY

SEQ ID NO: 58569 - protein, 9 aa, synthetic construct
  source 1..9: note = Seed: LVVVGAVGV (KRAS G12V)
LVVHGSVGA

SEQ ID NO: 58570 - protein, 9 aa, synthetic construct
  source 1..9: note = Seed: LVVVGAVGV (KRAS G12V)
LVVHGSVGF

SEQ ID NO: 58571 - protein, 9 aa, synthetic construct
  source 1..9: note = Seed: LVVVGAVGV (KRAS G12V)
LVVHGSVGI

SEQ ID NO: 58572 - protein, 9 aa, synthetic construct
  source 1..9: note = Seed: LVVVGAVGV (KRAS G12V)
LVVHGSVGK

SEQ ID NO: 58573 - protein, 9 aa, synthetic construct
  source 1..9: note = Seed: LVVVGAVGV (KRAS G12V)
LVVHGSVGL

SEQ ID NO: 58574 - protein, 9 aa, synthetic construct
  source 1..9: note = Seed: LVVVGAVGV (KRAS G12V)
LVVHGSVGM

SEQ ID NO: 58575 - protein, 9 aa, synthetic construct
  source 1..9: note = Seed: LVVVGAVGV (KRAS G12V)
LVVHGSVGR

SEQ ID NO: 58576 - protein, 9 aa, synthetic construct
  source 1..9: note = Seed: LVVVGAVGV (KRAS G12V)
LVVHGSVGS

SEQ ID NO: 58577 - protein, 9 aa, synthetic construct
  source 1..9: note = Seed: LVVVGAVGV (KRAS G12V)
LVVHGSVGT

SEQ ID NO: 58578 - protein, 9 aa, synthetic construct
  source 1..9: note = Seed: LVVVGAVGV (KRAS G12V)
LVVHGSVGV

SEQ ID NO: 58579 - protein, 9 aa, synthetic construct
  source 1..9: note = Seed: LVVVGAVGV (KRAS G12V)
LVVHGSVGY

SEQ ID NO: 58580 - protein, 9 aa, synthetic construct
  source 1..9: note = Seed: LVVVGAVGV (KRAS G12V)
LVVHGTVGA

SEQ ID NO: 58581 - protein, 9 aa, synthetic construct
  source 1..9: note = Seed: LVVVGAVGV (KRAS G12V)
LVVHGTVGF

SEQ ID NO: 58582 - protein, 9 aa, synthetic construct
  source 1..9: note = Seed: LVVVGAVGV (KRAS G12V)
LVVHGTVGI

SEQ ID NO: 58583 - protein, 9 aa, synthetic construct
  source 1..9: note = Seed: LVVVGAVGV (KRAS G12V)
LVVHGTVGL

SEQ ID NO: 58584 - protein, 9 aa, synthetic construct
  source 1..9: note = Seed: LVVVGAVGV (KRAS G12V)
LVVHGTVGM

SEQ ID NO: 58585 - protein, 9 aa, synthetic construct
  source 1..9: note = Seed: LVVVGAVGV (KRAS G12V)
LVVHGTVGR

SEQ ID NO: 58586 - protein, 9 aa, synthetic construct
  source 1..9: note = Seed: LVVVGAVGV (KRAS G12V)
LVVHGTVGV

SEQ ID NO: 58587 - protein, 9 aa, synthetic construct
  source 1..9: note = Seed: LVVVGAVGV (KRAS G12V)
LVVHGTVGY

SEQ ID NO: 58588 - protein, 9 aa, synthetic construct
  source 1..9: note = Seed: LVVVGAVGV (KRAS G12V)
LVVHGVVGA

SEQ ID NO: 58589 - protein, 9 aa, synthetic construct
  source 1..9: note = Seed: LVVVGAVGV (KRAS G12V)
LVVHGVVGF

SEQ ID NO: 58590 - protein, 9 aa, synthetic construct
  source 1..9: note = Seed: LVVVGAVGV (KRAS G12V)
LVVHGVVGI

SEQ ID NO: 58591 - protein, 9 aa, synthetic construct
  source 1..9: note = Seed: LVVVGAVGV (KRAS G12V)
LVVHGVVGK

SEQ ID NO: 58592 - protein, 9 aa, synthetic construct
  source 1..9: note = Seed: LVVVGAVGV (KRAS G12V)
LVVHGVVGL

SEQ ID NO: 58593 - protein, 9 aa, synthetic construct
  source 1..9: note = Seed: LVVVGAVGV (KRAS G12V)
LVVHGVVGM

SEQ ID NO: 58594 - protein, 9 aa, synthetic construct
  source 1..9: note = Seed: LVVVGAVGV (KRAS G12V)
LVVHGVVGR

SEQ ID NO: 58595 - protein, 9 aa, synthetic construct
  source 1..9: note = Seed: LVVVGAVGV (KRAS G12V)
LVVHGVVGV

SEQ ID NO: 58596 - protein, 9 aa, synthetic construct
  source 1..9: note = Seed: LVVVGAVGV (KRAS G12V)
LVVHGVVGY

SEQ ID NO: 58597 - protein, 9 aa, synthetic construct
  source 1..9: note = Seed: LVVVGAVGV (KRAS G12V)
LVVIGAVGA

SEQ ID NO: 58598 - protein, 9 aa, synthetic construct
  source 1..9: note = Seed: LVVVGAVGV (KRAS G12V)
LVVIGAVGC

SEQ ID NO: 58599 - protein, 9 aa, synthetic construct
  source 1..9: note = Seed: LVVVGAVGV (KRAS G12V)
LVVIGAVGD

SEQ ID NO: 58600 - protein, 9 aa, synthetic construct
  source 1..9: note = Seed: LVVVGAVGV (KRAS G12V)
LVVIGAVGE

SEQ ID NO: 58601 - protein, 9 aa, synthetic construct
  source 1..9: note = Seed: LVVVGAVGV (KRAS G12V)
LVVIGAVGF

SEQ ID NO: 58602 - protein, 9 aa, synthetic construct
  source 1..9: note = Seed: LVVVGAVGV (KRAS G12V)
LVVIGAVGG

SEQ ID NO: 58603 - protein, 9 aa, synthetic construct
  source 1..9: note = Seed: LVVVGAVGV (KRAS G12V)
LVVIGAVGH

SEQ ID NO: 58604 - protein, 9 aa, synthetic construct
  source 1..9: note = Seed: LVVVGAVGV (KRAS G12V)
LVVIGAVGI

SEQ ID NO: 58605 - protein, 9 aa, synthetic construct
  source 1..9: note = Seed: LVVVGAVGV (KRAS G12V)
LVVIGAVGK

SEQ ID NO: 58606 - protein, 9 aa, synthetic construct
  source 1..9: note = Seed: LVVVGAVGV (KRAS G12V)
LVVIGAVGL

SEQ ID NO: 58607 - protein, 9 aa, synthetic construct
  source 1..9: note = Seed: LVVVGAVGV (KRAS G12V)
LVVIGAVGM

SEQ ID NO: 58608 - protein, 9 aa, synthetic construct
  source 1..9: note = Seed: LVVVGAVGV (KRAS G12V)
LVVIGAVGN

SEQ ID NO: 58609 - protein, 9 aa, synthetic construct
  source 1..9: note = Seed: LVVVGAVGV (KRAS G12V)
LVVIGAVGP

SEQ ID NO: 58610 - protein, 9 aa, synthetic construct
  source 1..9: note = Seed: LVVVGAVGV (KRAS G12V)
LVVIGAVGQ

SEQ ID NO: 58611 - protein, 9 aa, synthetic construct
  source 1..9: note = Seed: LVVVGAVGV (KRAS G12V)
LVVIGAVGR

SEQ ID NO: 58612 - protein, 9 aa, synthetic construct
  source 1..9: note = Seed: LVVVGAVGV (KRAS G12V)
LVVIGAVGS

SEQ ID NO: 58613 - protein, 9 aa, synthetic construct
  source 1..9: note = Seed: LVVVGAVGV (KRAS G12V)
LVVIGAVGT

SEQ ID NO: 58614 - protein, 9 aa, synthetic construct
  source 1..9: note = Seed: LVVVGAVGV (KRAS G12V)
LVVIGAVGV

SEQ ID NO: 58615 - protein, 9 aa, synthetic construct
  source 1..9: note = Seed: LVVVGAVGV (KRAS G12V)
LVVIGAVGY

SEQ ID NO: 58616 - protein, 9 aa, synthetic construct
  source 1..9: note = Seed: LVVVGAVGV (KRAS G12V)
LVVIGDVGA

SEQ ID NO: 58617 - protein, 9 aa, synthetic construct
  source 1..9: note = Seed: LVVVGAVGV (KRAS G12V)
LVVIGDVGI

SEQ ID NO: 58618 - protein, 9 aa, synthetic construct
  source 1..9: note = Seed: LVVVGAVGV (KRAS G12V)
LVVIGDVGL

SEQ ID NO: 58619 - protein, 9 aa, synthetic construct
  source 1..9: note = Seed: LVVVGAVGV (KRAS G12V)
LVVIGDVGS

SEQ ID NO: 58620 - protein, 9 aa, synthetic construct
  source 1..9: note = Seed: LVVVGAVGV (KRAS G12V)
LVVIGDVGV

SEQ ID NO: 58621 - protein, 9 aa, synthetic construct
  source 1..9: note = Seed: LVVVGAVGV (KRAS G12V)
LVVIGEVGA

SEQ ID NO: 58622 - protein, 9 aa, synthetic construct
  source 1..9: note = Seed: LVVVGAVGV (KRAS G12V)
LVVIGEVGL

SEQ ID NO: 58623 - protein, 9 aa, synthetic construct
  source 1..9: note = Seed: LVVVGAVGV (KRAS G12V)
LVVIGEVGV

SEQ ID NO: 58624 - protein, 9 aa, synthetic construct
  source 1..9: note = Seed: LVVVGAVGV (KRAS G12V)
LVVIGGVGA

SEQ ID NO: 58625 - protein, 9 aa, synthetic construct
  source 1..9: note = Seed: LVVVGAVGV (KRAS G12V)
LVVIGGVGC

SEQ ID NO: 58626 - protein, 9 aa, synthetic construct
  source 1..9: note = Seed: LVVVGAVGV (KRAS G12V)
LVVIGGVGF

SEQ ID NO: 58627 - protein, 9 aa, synthetic construct
  source 1..9: note = Seed: LVVVGAVGV (KRAS G12V)
LVVIGGVGG

SEQ ID NO: 58628 - protein, 9 aa, synthetic construct
  source 1..9: note = Seed: LVVVGAVGV (KRAS G12V)
LVVIGGVGH

SEQ ID NO: 58629 - protein, 9 aa, synthetic construct
  source 1..9: note = Seed: LVVVGAVGV (KRAS G12V)
LVVIGGVGI

SEQ ID NO: 58630 - protein, 9 aa, synthetic construct
  source 1..9: note = Seed: LVVVGAVGV (KRAS G12V)
LVVIGGVGK

SEQ ID NO: 58631 - protein, 9 aa, synthetic construct
  source 1..9: note = Seed: LVVVGAVGV (KRAS G12V)
LVVIGGVGL

SEQ ID NO: 58632 - protein, 9 aa, synthetic construct
  source 1..9: note = Seed: LVVVGAVGV (KRAS G12V)
LVVIGGVGM

SEQ ID NO: 58633 - protein, 9 aa, synthetic construct
  source 1..9: note = Seed: LVVVGAVGV (KRAS G12V)
LVVIGGVGN

SEQ ID NO: 58634 - protein, 9 aa, synthetic construct
  source 1..9: note = Seed: LVVVGAVGV (KRAS G12V)
LVVIGGVGP

SEQ ID NO: 58635 - protein, 9 aa, synthetic construct
  source 1..9: note = Seed: LVVVGAVGV (KRAS G12V)
LVVIGGVGQ

SEQ ID NO: 58636 - protein, 9 aa, synthetic construct
  source 1..9: note = Seed: LVVVGAVGV (KRAS G12V)
LVVIGGVGR

SEQ ID NO: 58637 - protein, 9 aa, synthetic construct
  source 1..9: note = Seed: LVVVGAVGV (KRAS G12V)
LVVIGGVGS

SEQ ID NO: 58638 - protein, 9 aa, synthetic construct
  source 1..9: note = Seed: LVVVGAVGV (KRAS G12V)
LVVIGGVGT

SEQ ID NO: 58639 - protein, 9 aa, synthetic construct
  source 1..9: note = Seed: LVVVGAVGV (KRAS G12V)
LVVIGGVGV

SEQ ID NO: 58640 - protein, 9 aa, synthetic construct
  source 1..9: note = Seed: LVVVGAVGV (KRAS G12V)
LVVIGGVGY

SEQ ID NO: 58641 - protein, 9 aa, synthetic construct
  source 1..9: note = Seed: LVVVGAVGV (KRAS G12V)
LVVIGHVGA

SEQ ID NO: 58642 - protein, 9 aa, synthetic construct
  source 1..9: note = Seed: LVVVGAVGV (KRAS G12V)
LVVIGHVGC

SEQ ID NO: 58643 - protein, 9 aa, synthetic construct
  source 1..9: note = Seed: LVVVGAVGV (KRAS G12V)
LVVIGHVGF

SEQ ID NO: 58644 - protein, 9 aa, synthetic construct
  source 1..9: note = Seed: LVVVGAVGV (KRAS G12V)
LVVIGHVGG

SEQ ID NO: 58645 - protein, 9 aa, synthetic construct
  source 1..9: note = Seed: LVVVGAVGV (KRAS G12V)
LVVIGHVGH

SEQ ID NO: 58646 - protein, 9 aa, synthetic construct
  source 1..9: note = Seed: LVVVGAVGV (KRAS G12V)
LVVIGHVGI

SEQ ID NO: 58647 - protein, 9 aa, synthetic construct
  source 1..9: note = Seed: LVVVGAVGV (KRAS G12V)
LVVIGHVGK

SEQ ID NO: 58648 - protein, 9 aa, synthetic construct
  source 1..9: note = Seed: LVVVGAVGV (KRAS G12V)
LVVIGHVGL

SEQ ID NO: 58649 - protein, 9 aa, synthetic construct
  source 1..9: note = Seed: LVVVGAVGV (KRAS G12V)
LVVIGHVGM

SEQ ID NO: 58650 - protein, 9 aa, synthetic construct
  source 1..9: note = Seed: LVVVGAVGV (KRAS G12V)
LVVIGHVGN

SEQ ID NO: 58651 - protein, 9 aa, synthetic construct
  source 1..9: note = Seed: LVVVGAVGV (KRAS G12V)
LVVIGHVGQ

SEQ ID NO: 58652 - protein, 9 aa, synthetic construct
  source 1..9: note = Seed: LVVVGAVGV (KRAS G12V)
LVVIGHVGR

SEQ ID NO: 58653 - protein, 9 aa, synthetic construct
  source 1..9: note = Seed: LVVVGAVGV (KRAS G12V)
LVVIGHVGS

SEQ ID NO: 58654 - protein, 9 aa, synthetic construct
  source 1..9: note = Seed: LVVVGAVGV (KRAS G12V)
LVVIGHVGT

SEQ ID NO: 58655 - protein, 9 aa, synthetic construct
  source 1..9: note = Seed: LVVVGAVGV (KRAS G12V)
LVVIGHVGV

SEQ ID NO: 58656 - protein, 9 aa, synthetic construct
  source 1..9: note = Seed: LVVVGAVGV (KRAS G12V)
LVVIGHVGY

SEQ ID NO: 58657 - protein, 9 aa, synthetic construct
  source 1..9: note = Seed: LVVVGAVGV (KRAS G12V)
LVVIGIVGA

SEQ ID NO: 58658 - protein, 9 aa, synthetic construct
  source 1..9: note = Seed: LVVVGAVGV (KRAS G12V)
LVVIGIVGK

SEQ ID NO: 58659 - protein, 9 aa, synthetic construct
  source 1..9: note = Seed: LVVVGAVGV (KRAS G12V)
LVVIGIVGN

SEQ ID NO: 58660 - protein, 9 aa, synthetic construct
  source 1..9: note = Seed: LVVVGAVGV (KRAS G12V)
LVVIGIVGR

SEQ ID NO: 58661 - protein, 9 aa, synthetic construct
  source 1..9: note = Seed: LVVVGAVGV (KRAS G12V)
LVVIGKVGA

SEQ ID NO: 58662 - protein, 9 aa, synthetic construct
  source 1..9: note = Seed: LVVVGAVGV (KRAS G12V)
LVVIGKVGF

SEQ ID NO: 58663 - protein, 9 aa, synthetic construct
  source 1..9: note = Seed: LVVVGAVGV (KRAS G12V)
LVVIGKVGG

SEQ ID NO: 58664 - protein, 9 aa, synthetic construct
  source 1..9: note = Seed: LVVVGAVGV (KRAS G12V)
LVVIGKVGH

SEQ ID NO: 58665 - protein, 9 aa, synthetic construct
  source 1..9: note = Seed: LVVVGAVGV (KRAS G12V)
LVVIGKVGI

SEQ ID NO: 58666 - protein, 9 aa, synthetic construct
  source 1..9: note = Seed: LVVVGAVGV (KRAS G12V)
LVVIGKVGK

SEQ ID NO: 58667 - protein, 9 aa, synthetic construct
  source 1..9: note = Seed: LVVVGAVGV (KRAS G12V)
LVVIGKVGL

SEQ ID NO: 58668 - protein, 9 aa, synthetic construct
  source 1..9: note = Seed: LVVVGAVGV (KRAS G12V)
LVVIGKVGM

SEQ ID NO: 58669 - protein, 9 aa, synthetic construct
  source 1..9: note = Seed: LVVVGAVGV (KRAS G12V)
LVVIGKVGN

SEQ ID NO: 58670 - protein, 9 aa, synthetic construct
  source 1..9: note = Seed: LVVVGAVGV (KRAS G12V)
LVVIGKVGP

SEQ ID NO: 58671 - protein, 9 aa, synthetic construct
  source 1..9: note = Seed: LVVVGAVGV (KRAS G12V)
LVVIGKVGQ

SEQ ID NO: 58672 - protein, 9 aa, synthetic construct
  source 1..9: note = Seed: LVVVGAVGV (KRAS G12V)
LVVIGKVGR

SEQ ID NO: 58673 - protein, 9 aa, synthetic construct
  source 1..9: note = Seed: LVVVGAVGV (KRAS G12V)
LVVIGKVGS

SEQ ID NO: 58674 - protein, 9 aa, synthetic construct
  source 1..9: note = Seed: LVVVGAVGV (KRAS G12V)
LVVIGKVGT

SEQ ID NO: 58675 - protein, 9 aa, synthetic construct
  source 1..9: note = Seed: LVVVGAVGV (KRAS G12V)
LVVIGKVGV

SEQ ID NO: 58676 - protein, 9 aa, synthetic construct
  source 1..9: note = Seed: LVVVGAVGV (KRAS G12V)
LVVIGKVGY

SEQ ID NO: 58677 - protein, 9 aa, synthetic construct
  source 1..9: note = Seed: LVVVGAVGV (KRAS G12V)
LVVIGLVGA

SEQ ID NO: 58678 - protein, 9 aa, synthetic construct
  source 1..9: note = Seed: LVVVGAVGV (KRAS G12V)
LVVIGLVGK

SEQ ID NO: 58679 - protein, 9 aa, synthetic construct
  source 1..9: note = Seed: LVVVGAVGV (KRAS G12V)
LVVIGLVGR

SEQ ID NO: 58680 - protein, 9 aa, synthetic construct
  source 1..9: note = Seed: LVVVGAVGV (KRAS G12V)
LVVIGLVGS

SEQ ID NO: 58681 - protein, 9 aa, synthetic construct
  source 1..9: note = Seed: LVVVGAVGV (KRAS G12V)
LVVIGMVGA

SEQ ID NO: 58682 - protein, 9 aa, synthetic construct
  source 1..9: note = Seed: LVVVGAVGV (KRAS G12V)
LVVIGMVGE

SEQ ID NO: 58683 - protein, 9 aa, synthetic construct
  source 1..9: note = Seed: LVVVGAVGV (KRAS G12V)
LVVIGMVGG

SEQ ID NO: 58684 - protein, 9 aa, synthetic construct
  source 1..9: note = Seed: LVVVGAVGV (KRAS G12V)
LVVIGMVGH

SEQ ID NO: 58685 - protein, 9 aa, synthetic construct
  source 1..9: note = Seed: LVVVGAVGV (KRAS G12V)
LVVIGMVGK

SEQ ID NO: 58686 - protein, 9 aa, synthetic construct
  source 1..9: note = Seed: LVVVGAVGV (KRAS G12V)
LVVIGMVGL

SEQ ID NO: 58687 - protein, 9 aa, synthetic construct
  source 1..9: note = Seed: LVVVGAVGV (KRAS G12V)
LVVIGMVGM

SEQ ID NO: 58688 - protein, 9 aa, synthetic construct
  source 1..9: note = Seed: LVVVGAVGV (KRAS G12V)
LVVIGMVGN

SEQ ID NO: 58689 - protein, 9 aa, synthetic construct
  source 1..9: note = Seed: LVVVGAVGV (KRAS G12V)
LVVIGMVGQ

SEQ ID NO: 58690 - protein, 9 aa, synthetic construct
  source 1..9: note = Seed: LVVVGAVGV (KRAS G12V)
LVVIGMVGR

SEQ ID NO: 58691 - protein, 9 aa, synthetic construct
  source 1..9: note = Seed: LVVVGAVGV (KRAS G12V)
LVVIGMVGS

SEQ ID NO: 58692 - protein, 9 aa, synthetic construct
  source 1..9: note = Seed: LVVVGAVGV (KRAS G12V)
LVVIGMVGT

SEQ ID NO: 58693 - protein, 9 aa, synthetic construct
  source 1..9: note = Seed: LVVVGAVGV (KRAS G12V)
LVVIGMVGV

SEQ ID NO: 58694 - protein, 9 aa, synthetic construct
  source 1..9: note = Seed: LVVVGAVGV (KRAS G12V)
LVVIGNVGA

SEQ ID NO: 58695 - protein, 9 aa, synthetic construct
  source 1..9: note = Seed: LVVVGAVGV (KRAS G12V)
LVVIGNVGC

SEQ ID NO: 58696 - protein, 9 aa, synthetic construct
  source 1..9: note = Seed: LVVVGAVGV (KRAS G12V)
LVVIGNVGD

SEQ ID NO: 58697 - protein, 9 aa, synthetic construct
  source 1..9: note = Seed: LVVVGAVGV (KRAS G12V)
LVVIGNVGE

SEQ ID NO: 58698 - protein, 9 aa, synthetic construct
  source 1..9: note = Seed: LVVVGAVGV (KRAS G12V)
LVVIGNVGF

SEQ ID NO: 58699 - protein, 9 aa, synthetic construct
  source 1..9: note = Seed: LVVVGAVGV (KRAS G12V)
LVVIGNVGG

SEQ ID NO: 58700 - protein, 9 aa, synthetic construct
  source 1..9: note = Seed: LVVVGAVGV (KRAS G12V)
LVVIGNVGH

SEQ ID NO: 58701 - protein, 9 aa, synthetic construct
  source 1..9: note = Seed: LVVVGAVGV (KRAS G12V)
LVVIGNVGI

SEQ ID NO: 58702 - protein, 9 aa, synthetic construct
  source 1..9: note = Seed: LVVVGAVGV (KRAS G12V)
LVVIGNVGK

SEQ ID NO: 58703 - protein, 9 aa, synthetic construct
  source 1..9: note = Seed: LVVVGAVGV (KRAS G12V)
LVVIGNVGL

SEQ ID NO: 58704 - protein, 9 aa, synthetic construct
  source 1..9: note = Seed: LVVVGAVGV (KRAS G12V)
LVVIGNVGM

SEQ ID NO: 58705 - protein, 9 aa, synthetic construct
  source 1..9: note = Seed: LVVVGAVGV (KRAS G12V)
LVVIGNVGN

SEQ ID NO: 58706 - protein, 9 aa, synthetic construct
  source 1..9: note = Seed: LVVVGAVGV (KRAS G12V)
LVVIGNVGP

SEQ ID NO: 58707 - protein, 9 aa, synthetic construct
  source 1..9: note = Seed: LVVVGAVGV (KRAS G12V)
LVVIGNVGQ

SEQ ID NO: 58708 - protein, 9 aa, synthetic construct
  source 1..9: note = Seed: LVVVGAVGV (KRAS G12V)
LVVIGNVGR

SEQ ID NO: 58709 - protein, 9 aa, synthetic construct
  source 1..9: note = Seed: LVVVGAVGV (KRAS G12V)
LVVIGNVGS

SEQ ID NO: 58710 - protein, 9 aa, synthetic construct
  source 1..9: note = Seed: LVVVGAVGV (KRAS G12V)
LVVIGNVGT

SEQ ID NO: 58711 - protein, 9 aa, synthetic construct
  source 1..9: note = Seed: LVVVGAVGV (KRAS G12V)
LVVIGNVGV

SEQ ID NO: 58712 - protein, 9 aa, synthetic construct
  source 1..9: note = Seed: LVVVGAVGV (KRAS G12V)
LVVIGNVGY

SEQ ID NO: 58713 - protein, 9 aa, synthetic construct
  source 1..9: note = Seed: LVVVGAVGV (KRAS G12V)
LVVIGPVGA

SEQ ID NO: 58714 - protein, 9 aa, synthetic construct
  source 1..9: note = Seed: LVVVGAVGV (KRAS G12V)
LVVIGPVGC

SEQ ID NO: 58715 - protein, 9 aa, synthetic construct
  source 1..9: note = Seed: LVVVGAVGV (KRAS G12V)
LVVIGPVGD

SEQ ID NO: 58716 - protein, 9 aa, synthetic construct
  source 1..9: note = Seed: LVVVGAVGV (KRAS G12V)
LVVIGPVGE

SEQ ID NO: 58717 - protein, 9 aa, synthetic construct
  source 1..9: note = Seed: LVVVGAVGV (KRAS G12V)
LVVIGPVGF

SEQ ID NO: 58718 - protein, 9 aa, synthetic construct
  source 1..9: note = Seed: LVVVGAVGV (KRAS G12V)
LVVIGPVGG

SEQ ID NO: 58719 - protein, 9 aa, synthetic construct
  source 1..9: note = Seed: LVVVGAVGV (KRAS G12V)
LVVIGPVGH

SEQ ID NO: 58720 - protein, 9 aa, synthetic construct
  source 1..9: note = Seed: LVVVGAVGV (KRAS G12V)
LVVIGPVGI

SEQ ID NO: 58721 - protein, 9 aa, synthetic construct
  source 1..9: note = Seed: LVVVGAVGV (KRAS G12V)
LVVIGPVGK

SEQ ID NO: 58722 - protein, 9 aa, synthetic construct
  source 1..9: note = Seed: LVVVGAVGV (KRAS G12V)
LVVIGPVGL

SEQ ID NO: 58723 - protein, 9 aa, synthetic construct
  source 1..9: note = Seed: LVVVGAVGV (KRAS G12V)
LVVIGPVGM

SEQ ID NO: 58724 - protein, 9 aa, synthetic construct
  source 1..9: note = Seed: LVVVGAVGV (KRAS G12V)
LVVIGPVGN

SEQ ID NO: 58725 - protein, 9 aa, synthetic construct
  source 1..9: note = Seed: LVVVGAVGV (KRAS G12V)
LVVIGPVGP

SEQ ID NO: 58726 - protein, 9 aa, synthetic construct
  source 1..9: note = Seed: LVVVGAVGV (KRAS G12V)
LVVIGPVGQ

SEQ ID NO: 58727 - protein, 9 aa, synthetic construct
  source 1..9: note = Seed: LVVVGAVGV (KRAS G12V)
LVVIGPVGR

SEQ ID NO: 58728 - protein, 9 aa, synthetic construct
  source 1..9: note = Seed: LVVVGAVGV (KRAS G12V)
LVVIGPVGS

SEQ ID NO: 58729 - protein, 9 aa, synthetic construct
  source 1..9: note = Seed: LVVVGAVGV (KRAS G12V)
LVVIGPVGT

SEQ ID NO: 58730 - protein, 9 aa, synthetic construct
  source 1..9: note = Seed: LVVVGAVGV (KRAS G12V)
LVVIGPVGV

SEQ ID NO: 58731 - protein, 9 aa, synthetic construct
  source 1..9: note = Seed: LVVVGAVGV (KRAS G12V)
LVVIGPVGW

SEQ ID NO: 58732 - protein, 9 aa, synthetic construct
  source 1..9: note = Seed: LVVVGAVGV (KRAS G12V)
LVVIGPVGY

SEQ ID NO: 58733 - protein, 9 aa, synthetic construct
  source 1..9: note = Seed: LVVVGAVGV (KRAS G12V)
LVVIGQVGA

SEQ ID NO: 58734 - protein, 9 aa, synthetic construct
  source 1..9: note = Seed: LVVVGAVGV (KRAS G12V)
LVVIGQVGI

SEQ ID NO: 58735 - protein, 9 aa, synthetic construct
  source 1..9: note = Seed: LVVVGAVGV (KRAS G12V)
LVVIGQVGL

SEQ ID NO: 58736 - protein, 9 aa, synthetic construct
  source 1..9: note = Seed: LVVVGAVGV (KRAS G12V)
LVVIGQVGM

SEQ ID NO: 58737 - protein, 9 aa, synthetic construct
  source 1..9: note = Seed: LVVVGAVGV (KRAS G12V)
LVVIGQVGR

SEQ ID NO: 58738 - protein, 9 aa, synthetic construct
  source 1..9: note = Seed: LVVVGAVGV (KRAS G12V)
LVVIGQVGV

SEQ ID NO: 58739 - protein, 9 aa, synthetic construct
  source 1..9: note = Seed: LVVVGAVGV (KRAS G12V)
LVVIGRVGA

SEQ ID NO: 58740 - protein, 9 aa, synthetic construct
  source 1..9: note = Seed: LVVVGAVGV (KRAS G12V)
LVVIGRVGE

SEQ ID NO: 58741 - protein, 9 aa, synthetic construct
  source 1..9: note = Seed: LVVVGAVGV (KRAS G12V)
LVVIGRVGF

SEQ ID NO: 58742 - protein, 9 aa, synthetic construct
  source 1..9: note = Seed: LVVVGAVGV (KRAS G12V)
LVVIGRVGG

SEQ ID NO: 58743 - protein, 9 aa, synthetic construct
  source 1..9: note = Seed: LVVVGAVGV (KRAS G12V)
LVVIGRVGH

SEQ ID NO: 58744 - protein, 9 aa, synthetic construct
  source 1..9: note = Seed: LVVVGAVGV (KRAS G12V)
LVVIGRVGI

SEQ ID NO: 58745 - protein, 9 aa, synthetic construct
  source 1..9: note = Seed: LVVVGAVGV (KRAS G12V)
LVVIGRVGK

SEQ ID NO: 58746 - protein, 9 aa, synthetic construct
  source 1..9: note = Seed: LVVVGAVGV (KRAS G12V)
LVVIGRVGL

SEQ ID NO: 58747 - protein, 9 aa, synthetic construct
  source 1..9: note = Seed: LVVVGAVGV (KRAS G12V)
LVVIGRVGM

SEQ ID NO: 58748 - protein, 9 aa, synthetic construct
  source 1..9: note = Seed: LVVVGAVGV (KRAS G12V)
LVVIGRVGN

SEQ ID NO: 58749 - protein, 9 aa, synthetic construct
  source 1..9: note = Seed: LVVVGAVGV (KRAS G12V)
LVVIGRVGP

SEQ ID NO: 58750 - protein, 9 aa, synthetic construct
  source 1..9: note = Seed: LVVVGAVGV (KRAS G12V)
LVVIGRVGQ

SEQ ID NO: 58751 - protein, 9 aa, synthetic construct
  source 1..9: note = Seed: LVVVGAVGV (KRAS G12V)
LVVIGRVGR

SEQ ID NO: 58752 - protein, 9 aa, synthetic construct
  source 1..9: note = Seed: LVVVGAVGV (KRAS G12V)
LVVIGRVGS

SEQ ID NO: 58753 - protein, 9 aa, synthetic construct
  source 1..9: note = Seed: LVVVGAVGV (KRAS G12V)
LVVIGRVGT

SEQ ID NO: 58754 - protein, 9 aa, synthetic construct
  source 1..9: note = Seed: LVVVGAVGV (KRAS G12V)
LVVIGRVGV

SEQ ID NO: 58755 - protein, 9 aa, synthetic construct
  source 1..9: note = Seed: LVVVGAVGV (KRAS G12V)
LVVIGRVGY

SEQ ID NO: 58756 - protein, 9 aa, synthetic construct
  source 1..9: note = Seed: LVVVGAVGV (KRAS G12V)
LVVIGSVGA

SEQ ID NO: 58757 - protein, 9 aa, synthetic construct
  source 1..9: note = Seed: LVVVGAVGV (KRAS G12V)
LVVIGSVGC

SEQ ID NO: 58758 - protein, 9 aa, synthetic construct
  source 1..9: note = Seed: LVVVGAVGV (KRAS G12V)
LVVIGSVGD

SEQ ID NO: 58759 - protein, 9 aa, synthetic construct
  source 1..9: note = Seed: LVVVGAVGV (KRAS G12V)
LVVIGSVGE

SEQ ID NO: 58760 - protein, 9 aa, synthetic construct
  source 1..9: note = Seed: LVVVGAVGV (KRAS G12V)
LVVIGSVGF

SEQ ID NO: 58761 - protein, 9 aa, synthetic construct
  source 1..9: note = Seed: LVVVGAVGV (KRAS G12V)
LVVIGSVGG

SEQ ID NO: 58762 - protein, 9 aa, synthetic construct
  source 1..9: note = Seed: LVVVGAVGV (KRAS G12V)
LVVIGSVGH

SEQ ID NO: 58763 - protein, 9 aa, synthetic construct
  source 1..9: note = Seed: LVVVGAVGV (KRAS G12V)
LVVIGSVGI

SEQ ID NO: 58764 - protein, 9 aa, synthetic construct
  source 1..9: note = Seed: LVVVGAVGV (KRAS G12V)
LVVIGSVGK

SEQ ID NO: 58765 - protein, 9 aa, synthetic construct
  source 1..9: note = Seed: LVVVGAVGV (KRAS G12V)
LVVIGSVGL

SEQ ID NO: 58766 - protein, 9 aa, synthetic construct
  source 1..9: note = Seed: LVVVGAVGV (KRAS G12V)
LVVIGSVGM

SEQ ID NO: 58767 - protein, 9 aa, synthetic construct
  source 1..9: note = Seed: LVVVGAVGV (KRAS G12V)
LVVIGSVGN

SEQ ID NO: 58768 - protein, 9 aa, synthetic construct
  source 1..9: note = Seed: LVVVGAVGV (KRAS G12V)
LVVIGSVGP

SEQ ID NO: 58769 - protein, 9 aa, synthetic construct
  source 1..9: note = Seed: LVVVGAVGV (KRAS G12V)
LVVIGSVGQ

SEQ ID NO: 58770 - protein, 9 aa, synthetic construct
  source 1..9: note = Seed: LVVVGAVGV (KRAS G12V)
LVVIGSVGR

SEQ ID NO: 58771 - protein, 9 aa, synthetic construct
  source 1..9: note = Seed: LVVVGAVGV (KRAS G12V)
LVVIGSVGS

SEQ ID NO: 58772 - protein, 9 aa, synthetic construct
  source 1..9: note = Seed: LVVVGAVGV (KRAS G12V)
LVVIGSVGT

SEQ ID NO: 58773 - protein, 9 aa, synthetic construct
  source 1..9: note = Seed: LVVVGAVGV (KRAS G12V)
LVVIGSVGV

SEQ ID NO: 58774 - protein, 9 aa, synthetic construct
  source 1..9: note = Seed: LVVVGAVGV (KRAS G12V)
LVVIGSVGY

SEQ ID NO: 58775 - protein, 9 aa, synthetic construct
  source 1..9: note = Seed: LVVVGAVGV (KRAS G12V)
LVVIGTVGA

SEQ ID NO: 58776 - protein, 9 aa, synthetic construct
  source 1..9: note = Seed: LVVVGAVGV (KRAS G12V)
LVVIGTVGD

SEQ ID NO: 58777 - protein, 9 aa, synthetic construct
  source 1..9: note = Seed: LVVVGAVGV (KRAS G12V)
LVVIGTVGE

SEQ ID NO: 58778 - protein, 9 aa, synthetic construct
  source 1..9: note = Seed: LVVVGAVGV (KRAS G12V)
LVVIGTVGF

SEQ ID NO: 58779 - protein, 9 aa, synthetic construct
  source 1..9: note = Seed: LVVVGAVGV (KRAS G12V)
LVVIGTVGG

SEQ ID NO: 58780 - protein, 9 aa, synthetic construct
  source 1..9: note = Seed: LVVVGAVGV (KRAS G12V)
LVVIGTVGH

SEQ ID NO: 58781 - protein, 9 aa, synthetic construct
  source 1..9: note = Seed: LVVVGAVGV (KRAS G12V)
LVVIGTVGI

SEQ ID NO: 58782 - protein, 9 aa, synthetic construct
  source 1..9: note = Seed: LVVVGAVGV (KRAS G12V)
LVVIGTVGK

SEQ ID NO: 58783 - protein, 9 aa, synthetic construct
  source 1..9: note = Seed: LVVVGAVGV (KRAS G12V)
LVVIGTVGL

SEQ ID NO: 58784 - protein, 9 aa, synthetic construct
  source 1..9: note = Seed: LVVVGAVGV (KRAS G12V)
LVVIGTVGM

SEQ ID NO: 58785 - protein, 9 aa, synthetic construct
  source 1..9: note = Seed: LVVVGAVGV (KRAS G12V)
LVVIGTVGN

SEQ ID NO: 58786 - protein, 9 aa, synthetic construct
  source 1..9: note = Seed: LVVVGAVGV (KRAS G12V)
LVVIGTVGP

SEQ ID NO: 58787 - protein, 9 aa, synthetic construct
  source 1..9: note = Seed: LVVVGAVGV (KRAS G12V)
LVVIGTVGQ

SEQ ID NO: 58788 - protein, 9 aa, synthetic construct
  source 1..9: note = Seed: LVVVGAVGV (KRAS G12V)
LVVIGTVGR

SEQ ID NO: 58789 - protein, 9 aa, synthetic construct
  source 1..9: note = Seed: LVVVGAVGV (KRAS G12V)
LVVIGTVGS

SEQ ID NO: 58790 - protein, 9 aa, synthetic construct
  source 1..9: note = Seed: LVVVGAVGV (KRAS G12V)
LVVIGTVGT

SEQ ID NO: 58791 - protein, 9 aa, synthetic construct
  source 1..9: note = Seed: LVVVGAVGV (KRAS G12V)
LVVIGTVGV

SEQ ID NO: 58792 - protein, 9 aa, synthetic construct
  source 1..9: note = Seed: LVVVGAVGV (KRAS G12V)
LVVIGTVGY

SEQ ID NO: 58793 - protein, 9 aa, synthetic construct
  source 1..9: note = Seed: LVVVGAVGV (KRAS G12V)
LVVIGVVGA

SEQ ID NO: 58794 - protein, 9 aa, synthetic construct
  source 1..9: note = Seed: LVVVGAVGV (KRAS G12V)
LVVIGVVGH

SEQ ID NO: 58795 - protein, 9 aa, synthetic construct
  source 1..9: note = Seed: LVVVGAVGV (KRAS G12V)
LVVIGVVGK

SEQ ID NO: 58796 - protein, 9 aa, synthetic construct
  source 1..9: note = Seed: LVVVGAVGV (KRAS G12V)
LVVIGVVGM

SEQ ID NO: 58797 - protein, 9 aa, synthetic construct
  source 1..9: note = Seed: LVVVGAVGV (KRAS G12V)
LVVIGVVGN

SEQ ID NO: 58798 - protein, 9 aa, synthetic construct
  source 1..9: note = Seed: LVVVGAVGV (KRAS G12V)
LVVIGVVGR

SEQ ID NO: 58799 - protein, 9 aa, synthetic construct
  source 1..9: note = Seed: LVVVGAVGV (KRAS G12V)
LVVIGVVGS

SEQ ID NO: 58800 - protein, 9 aa, synthetic construct
  source 1..9: note = Seed: LVVVGAVGV (KRAS G12V)
LVVIGVVGT

SEQ ID NO: 58801 - protein, 9 aa, synthetic construct
  source 1..9: note = Seed: LVVVGAVGV (KRAS G12V)
LVVIGVVGV

SEQ ID NO: 58802 - protein, 9 aa, synthetic construct
  source 1..9: note = Seed: LVVVGAVGV (KRAS G12V)
LVVIGWVGR

SEQ ID NO: 58803 - protein, 9 aa, synthetic construct
  source 1..9: note = Seed: LVVVGAVGV (KRAS G12V)
LVVIGYVGR

SEQ ID NO: 58804 - protein, 9 aa, synthetic construct
  source 1..9: note = Seed: LVVVGAVGV (KRAS G12V)
LVVKGAVGA

SEQ ID NO: 58805 - protein, 9 aa, synthetic construct
  source 1..9: note = Seed: LVVVGAVGV (KRAS G12V)
LVVKGAVGF

SEQ ID NO: 58806 - protein, 9 aa, synthetic construct
  source 1..9: note = Seed: LVVVGAVGV (KRAS G12V)
LVVKGAVGI

SEQ ID NO: 58807 - protein, 9 aa, synthetic construct
  source 1..9: note = Seed: LVVVGAVGV (KRAS G12V)
LVVKGAVGL

SEQ ID NO: 58808 - protein, 9 aa, synthetic construct
  source 1..9: note = Seed: LVVVGAVGV (KRAS G12V)
LVVKGAVGM

SEQ ID NO: 58809 - protein, 9 aa, synthetic construct
  source 1..9: note = Seed: LVVVGAVGV (KRAS G12V)
LVVKGAVGQ

SEQ ID NO: 58810 - protein, 9 aa, synthetic construct
  source 1..9: note = Seed: LVVVGAVGV (KRAS G12V)
LVVKGAVGR

SEQ ID NO: 58811 - protein, 9 aa, synthetic construct
  source 1..9: note = Seed: LVVVGAVGV (KRAS G12V)
LVVKGAVGV

SEQ ID NO: 58812 - protein, 9 aa, synthetic construct
  source 1..9: note = Seed: LVVVGAVGV (KRAS G12V)
LVVKGAVGY

SEQ ID NO: 58813 - protein, 9 aa, synthetic construct
  source 1..9: note = Seed: LVVVGAVGV (KRAS G12V)
LVVKGGVGL

SEQ ID NO: 58814 - protein, 9 aa, synthetic construct
  source 1..9: note = Seed: LVVVGAVGV (KRAS G12V)
LVVKGHVGA

SEQ ID NO: 58815 - protein, 9 aa, synthetic construct
  source 1..9: note = Seed: LVVVGAVGV (KRAS G12V)
LVVKGHVGF

SEQ ID NO: 58816 - protein, 9 aa, synthetic construct
  source 1..9: note = Seed: LVVVGAVGV (KRAS G12V)
LVVKGHVGG

SEQ ID NO: 58817 - protein, 9 aa, synthetic construct
  source 1..9: note = Seed: LVVVGAVGV (KRAS G12V)
LVVKGHVGL

SEQ ID NO: 58818 - protein, 9 aa, synthetic construct
  source 1..9: note = Seed: LVVVGAVGV (KRAS G12V)
LVVKGHVGQ

SEQ ID NO: 58819 - protein, 9 aa, synthetic construct
  source 1..9: note = Seed: LVVVGAVGV (KRAS G12V)
LVVKGHVGR

SEQ ID NO: 58820 - protein, 9 aa, synthetic construct
  source 1..9: note = Seed: LVVVGAVGV (KRAS G12V)
LVVKGHVGS

SEQ ID NO: 58821 - protein, 9 aa, synthetic construct
  source 1..9: note = Seed: LVVVGAVGV (KRAS G12V)
LVVKGIVGK

SEQ ID NO: 58822 - protein, 9 aa, synthetic construct
  source 1..9: note = Seed: LVVVGAVGV (KRAS G12V)
LVVKGIVGR

SEQ ID NO: 58823 - protein, 9 aa, synthetic construct
  source 1..9: note = Seed: LVVVGAVGV (KRAS G12V)
LVVKGKVGA

SEQ ID NO: 58824 - protein, 9 aa, synthetic construct
  source 1..9: note = Seed: LVVVGAVGV (KRAS G12V)
LVVKGKVGC

SEQ ID NO: 58825 - protein, 9 aa, synthetic construct
  source 1..9: note = Seed: LVVVGAVGV (KRAS G12V)
LVVKGKVGD

SEQ ID NO: 58826 - protein, 9 aa, synthetic construct
  source 1..9: note = Seed: LVVVGAVGV (KRAS G12V)
LVVKGKVGE

SEQ ID NO: 58827 - protein, 9 aa, synthetic construct
  source 1..9: note = Seed: LVVVGAVGV (KRAS G12V)
LVVKGKVGF

SEQ ID NO: 58828 - protein, 9 aa, synthetic construct
  source 1..9: note = Seed: LVVVGAVGV (KRAS G12V)
LVVKGKVGG

SEQ ID NO: 58829 - protein, 9 aa, synthetic construct
  source 1..9: note = Seed: LVVVGAVGV (KRAS G12V)
LVVKGKVGH

SEQ ID NO: 58830 - protein, 9 aa, synthetic construct
  source 1..9: note = Seed: LVVVGAVGV (KRAS G12V)
LVVKGKVGI

SEQ ID NO: 58831 - protein, 9 aa, synthetic construct
  source 1..9: note = Seed: LVVVGAVGV (KRAS G12V)
LVVKGKVGK

SEQ ID NO: 58832 - protein, 9 aa, synthetic construct
  source 1..9: note = Seed: LVVVGAVGV (KRAS G12V)
LVVKGKVGL

SEQ ID NO: 58833 - protein, 9 aa, synthetic construct
  source 1..9: note = Seed: LVVVGAVGV (KRAS G12V)
LVVKGKVGM

SEQ ID NO: 58834 - protein, 9 aa, synthetic construct
  source 1..9: note = Seed: LVVVGAVGV (KRAS G12V)
LVVKGKVGN

SEQ ID NO: 58835 - protein, 9 aa, synthetic construct
  source 1..9: note = Seed: LVVVGAVGV (KRAS G12V)
LVVKGKVGP

SEQ ID NO: 58836 - protein, 9 aa, synthetic construct
  source 1..9: note = Seed: LVVVGAVGV (KRAS G12V)
LVVKGKVGQ

SEQ ID NO: 58837 - protein, 9 aa, synthetic construct
  source 1..9: note = Seed: LVVVGAVGV (KRAS G12V)
LVVKGKVGR

SEQ ID NO: 58838 - protein, 9 aa, synthetic construct
  source 1..9: note = Seed: LVVVGAVGV (KRAS G12V)
LVVKGKVGS

SEQ ID NO: 58839 - protein, 9 aa, synthetic construct
  source 1..9: note = Seed: LVVVGAVGV (KRAS G12V)
LVVKGKVGT

SEQ ID NO: 58840 - protein, 9 aa, synthetic construct
  source 1..9: note = Seed: LVVVGAVGV (KRAS G12V)
LVVKGKVGV

SEQ ID NO: 58841 - protein, 9 aa, synthetic construct
  source 1..9: note = Seed: LVVVGAVGV (KRAS G12V)
LVVKGKVGW

SEQ ID NO: 58842 - protein, 9 aa, synthetic construct
  source 1..9: note = Seed: LVVVGAVGV (KRAS G12V)
LVVKGKVGY

SEQ ID NO: 58843 - protein, 9 aa, synthetic construct
  source 1..9: note = Seed: LVVVGAVGV (KRAS G12V)
LVVKGLVGH

SEQ ID NO: 58844 - protein, 9 aa, synthetic construct
  source 1..9: note = Seed: LVVVGAVGV (KRAS G12V)
LVVKGLVGK

SEQ ID NO: 58845 - protein, 9 aa, synthetic construct
  source 1..9: note = Seed: LVVVGAVGV (KRAS G12V)
LVVKGLVGM

SEQ ID NO: 58846 - protein, 9 aa, synthetic construct
  source 1..9: note = Seed: LVVVGAVGV (KRAS G12V)
LVVKGLVGR

SEQ ID NO: 58847 - protein, 9 aa, synthetic construct
  source 1..9: note = Seed: LVVVGAVGV (KRAS G12V)
LVVKGMVGA

SEQ ID NO: 58848 - protein, 9 aa, synthetic construct
  source 1..9: note = Seed: LVVVGAVGV (KRAS G12V)
LVVKGMVGH

SEQ ID NO: 58849 - protein, 9 aa, synthetic construct
  source 1..9: note = Seed: LVVVGAVGV (KRAS G12V)
LVVKGMVGK

SEQ ID NO: 58850 - protein, 9 aa, synthetic construct
  source 1..9: note = Seed: LVVVGAVGV (KRAS G12V)
LVVKGMVGM

SEQ ID NO: 58851 - protein, 9 aa, synthetic construct
  source 1..9: note = Seed: LVVVGAVGV (KRAS G12V)
LVVKGMVGR

SEQ ID NO: 58852 - protein, 9 aa, synthetic construct
  source 1..9: note = Seed: LVVVGAVGV (KRAS G12V)
LVVKGMVGV

SEQ ID NO: 58853 - protein, 9 aa, synthetic construct
  source 1..9: note = Seed: LVVVGAVGV (KRAS G12V)
LVVKGMVGY

SEQ ID NO: 58854 - protein, 9 aa, synthetic construct
  source 1..9: note = Seed: LVVVGAVGV (KRAS G12V)
LVVKGNVGA

SEQ ID NO: 58855 - protein, 9 aa, synthetic construct
  source 1..9: note = Seed: LVVVGAVGV (KRAS G12V)
LVVKGNVGF

SEQ ID NO: 58856 - protein, 9 aa, synthetic construct
  source 1..9: note = Seed: LVVVGAVGV (KRAS G12V)
LVVKGNVGR

SEQ ID NO: 58857 - protein, 9 aa, synthetic construct
  source 1..9: note = Seed: LVVVGAVGV (KRAS G12V)
LVVKGNVGY

SEQ ID NO: 58858 - protein, 9 aa, synthetic construct
  source 1..9: note = Seed: LVVVGAVGV (KRAS G12V)
LVVKGQVGG

SEQ ID NO: 58859 - protein, 9 aa, synthetic construct
  source 1..9: note = Seed: LVVVGAVGV (KRAS G12V)
LVVKGQVGQ

SEQ ID NO: 58860 - protein, 9 aa, synthetic construct
  source 1..9: note = Seed: LVVVGAVGV (KRAS G12V)
LVVKGRVGA

SEQ ID NO: 58861 - protein, 9 aa, synthetic construct
  source 1..9: note = Seed: LVVVGAVGV (KRAS G12V)
LVVKGRVGC

SEQ ID NO: 58862 - protein, 9 aa, synthetic construct
  source 1..9: note = Seed: LVVVGAVGV (KRAS G12V)
LVVKGRVGD

SEQ ID NO: 58863 - protein, 9 aa, synthetic construct
  source 1..9: note = Seed: LVVVGAVGV (KRAS G12V)
LVVKGRVGE

SEQ ID NO: 58864 - protein, 9 aa, synthetic construct
  source 1..9: note = Seed: LVVVGAVGV (KRAS G12V)
LVVKGRVGF

SEQ ID NO: 58865 - protein, 9 aa, synthetic construct
  source 1..9: note = Seed: LVVVGAVGV (KRAS G12V)
LVVKGRVGG

SEQ ID NO: 58866 - protein, 9 aa, synthetic construct
  source 1..9: note = Seed: LVVVGAVGV (KRAS G12V)
LVVKGRVGH

SEQ ID NO: 58867 - protein, 9 aa, synthetic construct
  source 1..9: note = Seed: LVVVGAVGV (KRAS G12V)
LVVKGRVGI

SEQ ID NO: 58868 - protein, 9 aa, synthetic construct
  source 1..9: note = Seed: LVVVGAVGV (KRAS G12V)
LVVKGRVGK

SEQ ID NO: 58869 - protein, 9 aa, synthetic construct
  source 1..9: note = Seed: LVVVGAVGV (KRAS G12V)
LVVKGRVGL

SEQ ID NO: 58870 - protein, 9 aa, synthetic construct
  source 1..9: note = Seed: LVVVGAVGV (KRAS G12V)
LVVKGRVGM

SEQ ID NO: 58871 - protein, 9 aa, synthetic construct
  source 1..9: note = Seed: LVVVGAVGV (KRAS G12V)
LVVKGRVGN

SEQ ID NO: 58872 - protein, 9 aa, synthetic construct
  source 1..9: note = Seed: LVVVGAVGV (KRAS G12V)
LVVKGRVGP

SEQ ID NO: 58873 - protein, 9 aa, synthetic construct
  source 1..9: note = Seed: LVVVGAVGV (KRAS G12V)
LVVKGRVGQ

SEQ ID NO: 58874 - protein, 9 aa, synthetic construct
  source 1..9: note = Seed: LVVVGAVGV (KRAS G12V)
LVVKGRVGR

SEQ ID NO: 58875 - protein, 9 aa, synthetic construct
  source 1..9: note = Seed: LVVVGAVGV (KRAS G12V)
LVVKGRVGS

SEQ ID NO: 58876 - protein, 9 aa, synthetic construct
  source 1..9: note = Seed: LVVVGAVGV (KRAS G12V)
LVVKGRVGT

SEQ ID NO: 58877 - protein, 9 aa, synthetic construct
  source 1..9: note = Seed: LVVVGAVGV (KRAS G12V)
LVVKGRVGV

SEQ ID NO: 58878 - protein, 9 aa, synthetic construct
  source 1..9: note = Seed: LVVVGAVGV (KRAS G12V)
LVVKGRVGW

SEQ ID NO: 58879 - protein, 9 aa, synthetic construct
  source 1..9: note = Seed: LVVVGAVGV (KRAS G12V)
LVVKGRVGY

SEQ ID NO: 58880 - protein, 9 aa, synthetic construct
  source 1..9: note = Seed: LVVVGAVGV (KRAS G12V)
LVVKGSVGA

SEQ ID NO: 58881 - protein, 9 aa, synthetic construct
  source 1..9: note = Seed: LVVVGAVGV (KRAS G12V)
LVVKGSVGL

SEQ ID NO: 58882 - protein, 9 aa, synthetic construct
  source 1..9: note = Seed: LVVVGAVGV (KRAS G12V)
LVVKGSVGQ

SEQ ID NO: 58883 - protein, 9 aa, synthetic construct
  source 1..9: note = Seed: LVVVGAVGV (KRAS G12V)
LVVKGSVGR

SEQ ID NO: 58884 - protein, 9 aa, synthetic construct
  source 1..9: note = Seed: LVVVGAVGV (KRAS G12V)
LVVKGSVGS

SEQ ID NO: 58885 - protein, 9 aa, synthetic construct
  source 1..9: note = Seed: LVVVGAVGV (KRAS G12V)
LVVKGSVGV

SEQ ID NO: 58886 - protein, 9 aa, synthetic construct
  source 1..9: note = Seed: LVVVGAVGV (KRAS G12V)
LVVKGSVGY

SEQ ID NO: 58887 - protein, 9 aa, synthetic construct
  source 1..9: note = Seed: LVVVGAVGV (KRAS G12V)
LVVKGTVGA

SEQ ID NO: 58888 - protein, 9 aa, synthetic construct
  source 1..9: note = Seed: LVVVGAVGV (KRAS G12V)
LVVKGTVGQ

SEQ ID NO: 58889 - protein, 9 aa, synthetic construct
  source 1..9: note = Seed: LVVVGAVGV (KRAS G12V)
LVVKGTVGR

SEQ ID NO: 58890 - protein, 9 aa, synthetic construct
  source 1..9: note = Seed: LVVVGAVGV (KRAS G12V)
LVVKGTVGS

SEQ ID NO: 58891 - protein, 9 aa, synthetic construct
  source 1..9: note = Seed: LVVVGAVGV (KRAS G12V)
LVVKGVVGQ

SEQ ID NO: 58892 - protein, 9 aa, synthetic construct
  source 1..9: note = Seed: LVVVGAVGV (KRAS G12V)
LVVKGVVGR

SEQ ID NO: 58893 - protein, 9 aa, synthetic construct
  source 1..9: note = Seed: LVVVGAVGV (KRAS G12V)
LVVKGWVGR

SEQ ID NO: 58894 - protein, 9 aa, synthetic construct
  source 1..9: note = Seed: LVVVGAVGV (KRAS G12V)
LVVLGAVGA

SEQ ID NO: 58895 - protein, 9 aa, synthetic construct
  source 1..9: note = Seed: LVVVGAVGV (KRAS G12V)
LVVLGAVGC

SEQ ID NO: 58896 - protein, 9 aa, synthetic construct
  source 1..9: note = Seed: LVVVGAVGV (KRAS G12V)
LVVLGAVGD

SEQ ID NO: 58897 - protein, 9 aa, synthetic construct
  source 1..9: note = Seed: LVVVGAVGV (KRAS G12V)
LVVLGAVGE

SEQ ID NO: 58898 - protein, 9 aa, synthetic construct
  source 1..9: note = Seed: LVVVGAVGV (KRAS G12V)
LVVLGAVGF

SEQ ID NO: 58899 - protein, 9 aa, synthetic construct
  source 1..9: note = Seed: LVVVGAVGV (KRAS G12V)
LVVLGAVGG

SEQ ID NO: 58900 - protein, 9 aa, synthetic construct
  source 1..9: note = Seed: LVVVGAVGV (KRAS G12V)
LVVLGAVGH

SEQ ID NO: 58901 - protein, 9 aa, synthetic construct
  source 1..9: note = Seed: LVVVGAVGV (KRAS G12V)
LVVLGAVGI

SEQ ID NO: 58902 - protein, 9 aa, synthetic construct
  source 1..9: note = Seed: LVVVGAVGV (KRAS G12V)
LVVLGAVGK

SEQ ID NO: 58903 - protein, 9 aa, synthetic construct
  source 1..9: note = Seed: LVVVGAVGV (KRAS G12V)
LVVLGAVGL

SEQ ID NO: 58904 - protein, 9 aa, synthetic construct
  source 1..9: note = Seed: LVVVGAVGV (KRAS G12V)
LVVLGAVGM

SEQ ID NO: 58905 - protein, 9 aa, synthetic construct
  source 1..9: note = Seed: LVVVGAVGV (KRAS G12V)
LVVLGAVGN

SEQ ID NO: 58906 - protein, 9 aa, synthetic construct
  source 1..9: note = Seed: LVVVGAVGV (KRAS G12V)
LVVLGAVGP

SEQ ID NO: 58907 - protein, 9 aa, synthetic construct
  source 1..9: note = Seed: LVVVGAVGV (KRAS G12V)
LVVLGAVGQ

SEQ ID NO: 58908 - protein, 9 aa, synthetic construct
  source 1..9: note = Seed: LVVVGAVGV (KRAS G12V)
LVVLGAVGR

SEQ ID NO: 58909 - protein, 9 aa, synthetic construct
  source 1..9: note = Seed: LVVVGAVGV (KRAS G12V)
LVVLGAVGS

SEQ ID NO: 58910 - protein, 9 aa, synthetic construct
  source 1..9: note = Seed: LVVVGAVGV (KRAS G12V)
LVVLGAVGT

SEQ ID NO: 58911 - protein, 9 aa, synthetic construct
  source 1..9: note = Seed: LVVVGAVGV (KRAS G12V)
LVVLGAVGV

SEQ ID NO: 58912 - protein, 9 aa, synthetic construct
  source 1..9: note = Seed: LVVVGAVGV (KRAS G12V)
LVVLGAVGY

SEQ ID NO: 58913 - protein, 9 aa, synthetic construct
  source 1..9: note = Seed: LVVVGAVGV (KRAS G12V)
LVVLGDVGA

SEQ ID NO: 58914 - protein, 9 aa, synthetic construct
  source 1..9: note = Seed: LVVVGAVGV (KRAS G12V)
LVVLGDVGI

SEQ ID NO: 58915 - protein, 9 aa, synthetic construct
  source 1..9: note = Seed: LVVVGAVGV (KRAS G12V)
LVVLGDVGL

SEQ ID NO: 58916 - protein, 9 aa, synthetic construct
  source 1..9: note = Seed: LVVVGAVGV (KRAS G12V)
LVVLGDVGS

SEQ ID NO: 58917 - protein, 9 aa, synthetic construct
  source 1..9: note = Seed: LVVVGAVGV (KRAS G12V)
LVVLGDVGV

SEQ ID NO: 58918 - protein, 9 aa, synthetic construct
  source 1..9: note = Seed: LVVVGAVGV (KRAS G12V)
LVVLGEVGA

SEQ ID NO: 58919 - protein, 9 aa, synthetic construct
  source 1..9: note = Seed: LVVVGAVGV (KRAS G12V)
LVVLGEVGI

SEQ ID NO: 58920 - protein, 9 aa, synthetic construct
  source 1..9: note = Seed: LVVVGAVGV (KRAS G12V)
LVVLGEVGL

SEQ ID NO: 58921 - protein, 9 aa, synthetic construct
  source 1..9: note = Seed: LVVVGAVGV (KRAS G12V)
LVVLGEVGM

SEQ ID NO: 58922 - protein, 9 aa, synthetic construct
  source 1..9: note = Seed: LVVVGAVGV (KRAS G12V)
LVVLGEVGV

SEQ ID NO: 58923 - protein, 9 aa, synthetic construct
  source 1..9: note = Seed: LVVVGAVGV (KRAS G12V)
LVVLGFVGR

SEQ ID NO: 58924 - protein, 9 aa, synthetic construct
  source 1..9: note = Seed: LVVVGAVGV (KRAS G12V)
LVVLGGVGA

SEQ ID NO: 58925 - protein, 9 aa, synthetic construct
  source 1..9: note = Seed: LVVVGAVGV (KRAS G12V)
LVVLGGVGC

SEQ ID NO: 58926 - protein, 9 aa, synthetic construct
  source 1..9: note = Seed: LVVVGAVGV (KRAS G12V)
LVVLGGVGD

SEQ ID NO: 58927 - protein, 9 aa, synthetic construct
  source 1..9: note = Seed: LVVVGAVGV (KRAS G12V)
LVVLGGVGE

SEQ ID NO: 58928 - protein, 9 aa, synthetic construct
  source 1..9: note = Seed: LVVVGAVGV (KRAS G12V)
LVVLGGVGF

SEQ ID NO: 58929 - protein, 9 aa, synthetic construct
  source 1..9: note = Seed: LVVVGAVGV (KRAS G12V)
LVVLGGVGG

SEQ ID NO: 58930 - protein, 9 aa, synthetic construct
  source 1..9: note = Seed: LVVVGAVGV (KRAS G12V)
LVVLGGVGH

SEQ ID NO: 58931 - protein, 9 aa, synthetic construct
  source 1..9: note = Seed: LVVVGAVGV (KRAS G12V)
LVVLGGVGI

SEQ ID NO: 58932 - protein, 9 aa, synthetic construct
  source 1..9: note = Seed: LVVVGAVGV (KRAS G12V)
LVVLGGVGK

SEQ ID NO: 58933 - protein, 9 aa, synthetic construct
  source 1..9: note = Seed: LVVVGAVGV (KRAS G12V)
LVVLGGVGL

SEQ ID NO: 58934 - protein, 9 aa, synthetic construct
  source 1..9: note = Seed: LVVVGAVGV (KRAS G12V)
LVVLGGVGM

SEQ ID NO: 58935 - protein, 9 aa, synthetic construct
  source 1..9: note = Seed: LVVVGAVGV (KRAS G12V)
LVVLGGVGN

SEQ ID NO: 58936 - protein, 9 aa, synthetic construct
  source 1..9: note = Seed: LVVVGAVGV (KRAS G12V)
LVVLGGVGP

SEQ ID NO: 58937 - protein, 9 aa, synthetic construct
  source 1..9: note = Seed: LVVVGAVGV (KRAS G12V)
LVVLGGVGQ

SEQ ID NO: 58938 - protein, 9 aa, synthetic construct
  source 1..9: note = Seed: LVVVGAVGV (KRAS G12V)
LVVLGGVGR

SEQ ID NO: 58939 - protein, 9 aa, synthetic construct
  source 1..9: note = Seed: LVVVGAVGV (KRAS G12V)
LVVLGGVGS

SEQ ID NO: 58940 - protein, 9 aa, synthetic construct
  source 1..9: note = Seed: LVVVGAVGV (KRAS G12V)
LVVLGGVGT

SEQ ID NO: 58941 - protein, 9 aa, synthetic construct
  source 1..9: note = Seed: LVVVGAVGV (KRAS G12V)
LVVLGGVGV

SEQ ID NO: 58942 - protein, 9 aa, synthetic construct
  source 1..9: note = Seed: LVVVGAVGV (KRAS G12V)
LVVLGGVGY

SEQ ID NO: 58943 - protein, 9 aa, synthetic construct
  source 1..9: note = Seed: LVVVGAVGV (KRAS G12V)
LVVLGHVGA

SEQ ID NO: 58944 - protein, 9 aa, synthetic construct
  source 1..9: note = Seed: LVVVGAVGV (KRAS G12V)
LVVLGHVGF

SEQ ID NO: 58945 - protein, 9 aa, synthetic construct
  source 1..9: note = Seed: LVVVGAVGV (KRAS G12V)
LVVLGHVGH

SEQ ID NO: 58946 - protein, 9 aa, synthetic construct
  source 1..9: note = Seed: LVVVGAVGV (KRAS G12V)
LVVLGHVGI

SEQ ID NO: 58947 - protein, 9 aa, synthetic construct
  source 1..9: note = Seed: LVVVGAVGV (KRAS G12V)
LVVLGHVGK

SEQ ID NO: 58948 - protein, 9 aa, synthetic construct
  source 1..9: note = Seed: LVVVGAVGV (KRAS G12V)
LVVLGHVGL

SEQ ID NO: 58949 - protein, 9 aa, synthetic construct
  source 1..9: note = Seed: LVVVGAVGV (KRAS G12V)
LVVLGHVGM

SEQ ID NO: 58950 - protein, 9 aa, synthetic construct
  source 1..9: note = Seed: LVVVGAVGV (KRAS G12V)
LVVLGHVGR

SEQ ID NO: 58951 - protein, 9 aa, synthetic construct
  source 1..9: note = Seed: LVVVGAVGV (KRAS G12V)
LVVLGHVGS

SEQ ID NO: 58952 - protein, 9 aa, synthetic construct
  source 1..9: note = Seed: LVVVGAVGV (KRAS G12V)
LVVLGHVGT

SEQ ID NO: 58953 - protein, 9 aa, synthetic construct
  source 1..9: note = Seed: LVVVGAVGV (KRAS G12V)
LVVLGHVGV

SEQ ID NO: 58954 - protein, 9 aa, synthetic construct
  source 1..9: note = Seed: LVVVGAVGV (KRAS G12V)
LVVLGHVGY

SEQ ID NO: 58955 - protein, 9 aa, synthetic construct
  source 1..9: note = Seed: LVVVGAVGV (KRAS G12V)
LVVLGIVGA

SEQ ID NO: 58956 - protein, 9 aa, synthetic construct
  source 1..9: note = Seed: LVVVGAVGV (KRAS G12V)
LVVLGIVGH

SEQ ID NO: 58957 - protein, 9 aa, synthetic construct
  source 1..9: note = Seed: LVVVGAVGV (KRAS G12V)
LVVLGIVGK

SEQ ID NO: 58958 - protein, 9 aa, synthetic construct
  source 1..9: note = Seed: LVVVGAVGV (KRAS G12V)
LVVLGIVGM

SEQ ID NO: 58959 - protein, 9 aa, synthetic construct
  source 1..9: note = Seed: LVVVGAVGV (KRAS G12V)
LVVLGIVGN

SEQ ID NO: 58960 - protein, 9 aa, synthetic construct
  source 1..9: note = Seed: LVVVGAVGV (KRAS G12V)
LVVLGIVGR

SEQ ID NO: 58961 - protein, 9 aa, synthetic construct
  source 1..9: note = Seed: LVVVGAVGV (KRAS G12V)
LVVLGIVGS

SEQ ID NO: 58962 - protein, 9 aa, synthetic construct
  source 1..9: note = Seed: LVVVGAVGV (KRAS G12V)
LVVLGIVGT

SEQ ID NO: 58963 - protein, 9 aa, synthetic construct
  source 1..9: note = Seed: LVVVGAVGV (KRAS G12V)
LVVLGIVGV

SEQ ID NO: 58964 - protein, 9 aa, synthetic construct
  source 1..9: note = Seed: LVVVGAVGV (KRAS G12V)
LVVLGKVGA

SEQ ID NO: 58965 - protein, 9 aa, synthetic construct
  source 1..9: note = Seed: LVVVGAVGV (KRAS G12V)
LVVLGKVGG

SEQ ID NO: 58966 - protein, 9 aa, synthetic construct
  source 1..9: note = Seed: LVVVGAVGV (KRAS G12V)
LVVLGKVGH

SEQ ID NO: 58967 - protein, 9 aa, synthetic construct
  source 1..9: note = Seed: LVVVGAVGV (KRAS G12V)
LVVLGKVGI

SEQ ID NO: 58968 - protein, 9 aa, synthetic construct
  source 1..9: note = Seed: LVVVGAVGV (KRAS G12V)
LVVLGKVGK

SEQ ID NO: 58969 - protein, 9 aa, synthetic construct
  source 1..9: note = Seed: LVVVGAVGV (KRAS G12V)
LVVLGKVGL

SEQ ID NO: 58970 - protein, 9 aa, synthetic construct
  source 1..9: note = Seed: LVVVGAVGV (KRAS G12V)
LVVLGKVGM

SEQ ID NO: 58971 - protein, 9 aa, synthetic construct
  source 1..9: note = Seed: LVVVGAVGV (KRAS G12V)
LVVLGKVGN

SEQ ID NO: 58972 - protein, 9 aa, synthetic construct
  source 1..9: note = Seed: LVVVGAVGV (KRAS G12V)
LVVLGKVGP

SEQ ID NO: 58973 - protein, 9 aa, synthetic construct
  source 1..9: note = Seed: LVVVGAVGV (KRAS G12V)
LVVLGKVGQ

SEQ ID NO: 58974 - protein, 9 aa, synthetic construct
  source 1..9: note = Seed: LVVVGAVGV (KRAS G12V)
LVVLGKVGR

SEQ ID NO: 58975 - protein, 9 aa, synthetic construct
  source 1..9: note = Seed: LVVVGAVGV (KRAS G12V)
LVVLGKVGS

SEQ ID NO: 58976 - protein, 9 aa, synthetic construct
  source 1..9: note = Seed: LVVVGAVGV (KRAS G12V)
LVVLGKVGT

SEQ ID NO: 58977 - protein, 9 aa, synthetic construct
  source 1..9: note = Seed: LVVVGAVGV (KRAS G12V)
LVVLGKVGV

SEQ ID NO: 58978 - protein, 9 aa, synthetic construct
  source 1..9: note = Seed: LVVVGAVGV (KRAS G12V)
LVVLGKVGY

SEQ ID NO: 58979 - protein, 9 aa, synthetic construct
  source 1..9: note = Seed: LVVVGAVGV (KRAS G12V)
LVVLGLVGA

SEQ ID NO: 58980 - protein, 9 aa, synthetic construct
  source 1..9: note = Seed: LVVVGAVGV (KRAS G12V)
LVVLGLVGH

SEQ ID NO: 58981 - protein, 9 aa, synthetic construct
  source 1..9: note = Seed: LVVVGAVGV (KRAS G12V)
LVVLGLVGK

SEQ ID NO: 58982 - protein, 9 aa, synthetic construct
  source 1..9: note = Seed: LVVVGAVGV (KRAS G12V)
LVVLGLVGM

SEQ ID NO: 58983 - protein, 9 aa, synthetic construct
  source 1..9: note = Seed: LVVVGAVGV (KRAS G12V)
LVVLGLVGR

SEQ ID NO: 58984 - protein, 9 aa, synthetic construct
  source 1..9: note = Seed: LVVVGAVGV (KRAS G12V)
LVVLGMVGA

SEQ ID NO: 58985 - protein, 9 aa, synthetic construct
  source 1..9: note = Seed: LVVVGAVGV (KRAS G12V)
LVVLGMVGH

SEQ ID NO: 58986 - protein, 9 aa, synthetic construct
  source 1..9: note = Seed: LVVVGAVGV (KRAS G12V)
LVVLGMVGI

SEQ ID NO: 58987 - protein, 9 aa, synthetic construct
  source 1..9: note = Seed: LVVVGAVGV (KRAS G12V)
LVVLGMVGK

SEQ ID NO: 58988 - protein, 9 aa, synthetic construct
  source 1..9: note = Seed: LVVVGAVGV (KRAS G12V)
LVVLGMVGL

SEQ ID NO: 58989 - protein, 9 aa, synthetic construct
  source 1..9: note = Seed: LVVVGAVGV (KRAS G12V)
LVVLGMVGM

SEQ ID NO: 58990 - protein, 9 aa, synthetic construct
  source 1..9: note = Seed: LVVVGAVGV (KRAS G12V)
LVVLGMVGN

SEQ ID NO: 58991 - protein, 9 aa, synthetic construct
  source 1..9: note = Seed: LVVVGAVGV (KRAS G12V)
LVVLGMVGR

SEQ ID NO: 58992 - protein, 9 aa, synthetic construct
  source 1..9: note = Seed: LVVVGAVGV (KRAS G12V)
LVVLGMVGS

SEQ ID NO: 58993 - protein, 9 aa, synthetic construct
  source 1..9: note = Seed: LVVVGAVGV (KRAS G12V)
LVVLGMVGT

SEQ ID NO: 58994 - protein, 9 aa, synthetic construct
  source 1..9: note = Seed: LVVVGAVGV (KRAS G12V)
LVVLGMVGV

SEQ ID NO: 58995 - protein, 9 aa, synthetic construct
  source 1..9: note = Seed: LVVVGAVGV (KRAS G12V)
LVVLGMVGY

SEQ ID NO: 58996 - protein, 9 aa, synthetic construct
  source 1..9: note = Seed: LVVVGAVGV (KRAS G12V)
LVVLGNVGA

SEQ ID NO: 58997 - protein, 9 aa, synthetic construct
  source 1..9: note = Seed: LVVVGAVGV (KRAS G12V)
LVVLGNVGC

SEQ ID NO: 58998 - protein, 9 aa, synthetic construct
  source 1..9: note = Seed: LVVVGAVGV (KRAS G12V)
LVVLGNVGD

SEQ ID NO: 58999 - protein, 9 aa, synthetic construct
  source 1..9: note = Seed: LVVVGAVGV (KRAS G12V)
LVVLGNVGE

SEQ ID NO: 59000 - protein, 9 aa, synthetic construct
  source 1..9: note = Seed: LVVVGAVGV (KRAS G12V)
LVVLGNVGF

SEQ ID NO: 59001 - protein, 9 aa, synthetic construct
  source 1..9: note = Seed: LVVVGAVGV (KRAS G12V)
LVVLGNVGG

SEQ ID NO: 59002 - protein, 9 aa, synthetic construct
  source 1..9: note = Seed: LVVVGAVGV (KRAS G12V)
LVVLGNVGH

SEQ ID NO: 59003 - protein, 9 aa, synthetic construct
  source 1..9: note = Seed: LVVVGAVGV (KRAS G12V)
LVVLGNVGI

SEQ ID NO: 59004 - protein, 9 aa, synthetic construct
  source 1..9: note = Seed: LVVVGAVGV (KRAS G12V)
LVVLGNVGK

SEQ ID NO: 59005 - protein, 9 aa, synthetic construct
  source 1..9: note = Seed: LVVVGAVGV (KRAS G12V)
LVVLGNVGL

SEQ ID NO: 59006 - protein, 9 aa, synthetic construct
  source 1..9: note = Seed: LVVVGAVGV (KRAS G12V)
LVVLGNVGM

SEQ ID NO: 59007 - protein, 9 aa, synthetic construct
  source 1..9: note = Seed: LVVVGAVGV (KRAS G12V)
LVVLGNVGN

SEQ ID NO: 59008 - protein, 9 aa, synthetic construct
  source 1..9: note = Seed: LVVVGAVGV (KRAS G12V)
LVVLGNVGP

SEQ ID NO: 59009 - protein, 9 aa, synthetic construct
  source 1..9: note = Seed: LVVVGAVGV (KRAS G12V)
LVVLGNVGQ

SEQ ID NO: 59010 - protein, 9 aa, synthetic construct
  source 1..9: note = Seed: LVVVGAVGV (KRAS G12V)
LVVLGNVGR

SEQ ID NO: 59011 - protein, 9 aa, synthetic construct
  source 1..9: note = Seed: LVVVGAVGV (KRAS G12V)
LVVLGNVGS

SEQ ID NO: 59012 - protein, 9 aa, synthetic construct
  source 1..9: note = Seed: LVVVGAVGV (KRAS G12V)
LVVLGNVGT

SEQ ID NO: 59013 - protein, 9 aa, synthetic construct
  source 1..9: note = Seed: LVVVGAVGV (KRAS G12V)
LVVLGNVGV

SEQ ID NO: 59014 - protein, 9 aa, synthetic construct
  source 1..9: note = Seed: LVVVGAVGV (KRAS G12V)
LVVLGNVGY

SEQ ID NO: 59015 - protein, 9 aa, synthetic construct
  source 1..9: note = Seed: LVVVGAVGV (KRAS G12V)
LVVLGPVGA

SEQ ID NO: 59016 - protein, 9 aa, synthetic construct
  source 1..9: note = Seed: LVVVGAVGV (KRAS G12V)
LVVLGPVGC

SEQ ID NO: 59017 - protein, 9 aa, synthetic construct
  source 1..9: note = Seed: LVVVGAVGV (KRAS G12V)
LVVLGPVGD

SEQ ID NO: 59018 - protein, 9 aa, synthetic construct
  source 1..9: note = Seed: LVVVGAVGV (KRAS G12V)
LVVLGPVGE

SEQ ID NO: 59019 - protein, 9 aa, synthetic construct
  source 1..9: note = Seed: LVVVGAVGV (KRAS G12V)
LVVLGPVGF

SEQ ID NO: 59020 - protein, 9 aa, synthetic construct
  source 1..9: note = Seed: LVVVGAVGV (KRAS G12V)
LVVLGPVGG

SEQ ID NO: 59021 - protein, 9 aa, synthetic construct
  source 1..9: note = Seed: LVVVGAVGV (KRAS G12V)
LVVLGPVGH

SEQ ID NO: 59022 - protein, 9 aa, synthetic construct
  source 1..9: note = Seed: LVVVGAVGV (KRAS G12V)
LVVLGPVGI

SEQ ID NO: 59023 - protein, 9 aa, synthetic construct
  source 1..9: note = Seed: LVVVGAVGV (KRAS G12V)
LVVLGPVGK

SEQ ID NO: 59024 - protein, 9 aa, synthetic construct
  source 1..9: note = Seed: LVVVGAVGV (KRAS G12V)
LVVLGPVGL

SEQ ID NO: 59025 - protein, 9 aa, synthetic construct
  source 1..9: note = Seed: LVVVGAVGV (KRAS G12V)
LVVLGPVGM

SEQ ID NO: 59026 - protein, 9 aa, synthetic construct
  source 1..9: note = Seed: LVVVGAVGV (KRAS G12V)
LVVLGPVGN

SEQ ID NO: 59027 - protein, 9 aa, synthetic construct
  source 1..9: note = Seed: LVVVGAVGV (KRAS G12V)
LVVLGPVGP

SEQ ID NO: 59028 - protein, 9 aa, synthetic construct
  source 1..9: note = Seed: LVVVGAVGV (KRAS G12V)
LVVLGPVGQ

SEQ ID NO: 59029 - protein, 9 aa, synthetic construct
  source 1..9: note = Seed: LVVVGAVGV (KRAS G12V)
LVVLGPVGR

SEQ ID NO: 59030 - protein, 9 aa, synthetic construct
  source 1..9: note = Seed: LVVVGAVGV (KRAS G12V)
LVVLGPVGS

SEQ ID NO: 59031 - protein, 9 aa, synthetic construct
  source 1..9: note = Seed: LVVVGAVGV (KRAS G12V)
LVVLGPVGT

SEQ ID NO: 59032 - protein, 9 aa, synthetic construct
  source 1..9: note = Seed: LVVVGAVGV (KRAS G12V)
LVVLGPVGV

SEQ ID NO: 59033 - protein, 9 aa, synthetic construct
  source 1..9: note = Seed: LVVVGAVGV (KRAS G12V)
LVVLGPVGW

SEQ ID NO: 59034 - protein, 9 aa, synthetic construct
  source 1..9: note = Seed: LVVVGAVGV (KRAS G12V)
LVVLGPVGY

SEQ ID NO: 59035 - protein, 9 aa, synthetic construct
  source 1..9: note = Seed: LVVVGAVGV (KRAS G12V)
LVVLGQVGA

SEQ ID NO: 59036 - protein, 9 aa, synthetic construct
  source 1..9: note = Seed: LVVVGAVGV (KRAS G12V)
LVVLGQVGI

SEQ ID NO: 59037 - protein, 9 aa, synthetic construct
  source 1..9: note = Seed: LVVVGAVGV (KRAS G12V)
LVVLGQVGL

SEQ ID NO: 59038 - protein, 9 aa, synthetic construct
  source 1..9: note = Seed: LVVVGAVGV (KRAS G12V)
LVVLGQVGM

SEQ ID NO: 59039 - protein, 9 aa, synthetic construct
  source 1..9: note = Seed: LVVVGAVGV (KRAS G12V)
LVVLGQVGT

SEQ ID NO: 59040 - protein, 9 aa, synthetic construct
  source 1..9: note = Seed: LVVVGAVGV (KRAS G12V)
LVVLGQVGV

SEQ ID NO: 59041 - protein, 9 aa, synthetic construct
  source 1..9: note = Seed: LVVVGAVGV (KRAS G12V)
LVVLGRVGA

SEQ ID NO: 59042 - protein, 9 aa, synthetic construct
  source 1..9: note = Seed: LVVVGAVGV (KRAS G12V)
LVVLGRVGE

SEQ ID NO: 59043 - protein, 9 aa, synthetic construct
  source 1..9: note = Seed: LVVVGAVGV (KRAS G12V)
LVVLGRVGF

SEQ ID NO: 59044 - protein, 9 aa, synthetic construct
  source 1..9: note = Seed: LVVVGAVGV (KRAS G12V)
LVVLGRVGG

SEQ ID NO: 59045 - protein, 9 aa, synthetic construct
  source 1..9: note = Seed: LVVVGAVGV (KRAS G12V)
LVVLGRVGH

SEQ ID NO: 59046 - protein, 9 aa, synthetic construct
  source 1..9: note = Seed: LVVVGAVGV (KRAS G12V)
LVVLGRVGI

SEQ ID NO: 59047 - protein, 9 aa, synthetic construct
  source 1..9: note = Seed: LVVVGAVGV (KRAS G12V)
LVVLGRVGK

SEQ ID NO: 59048 - protein, 9 aa, synthetic construct
  source 1..9: note = Seed: LVVVGAVGV (KRAS G12V)
LVVLGRVGL

SEQ ID NO: 59049 - protein, 9 aa, synthetic construct
  source 1..9: note = Seed: LVVVGAVGV (KRAS G12V)
LVVLGRVGM

SEQ ID NO: 59050 - protein, 9 aa, synthetic construct
  source 1..9: note = Seed: LVVVGAVGV (KRAS G12V)
LVVLGRVGN

SEQ ID NO: 59051 - protein, 9 aa, synthetic construct
  source 1..9: note = Seed: LVVVGAVGV (KRAS G12V)
LVVLGRVGP

SEQ ID NO: 59052 - protein, 9 aa, synthetic construct
  source 1..9: note = Seed: LVVVGAVGV (KRAS G12V)
LVVLGRVGQ

SEQ ID NO: 59053 - protein, 9 aa, synthetic construct
  source 1..9: note = Seed: LVVVGAVGV (KRAS G12V)
LVVLGRVGR

SEQ ID NO: 59054 - protein, 9 aa, synthetic construct
  source 1..9: note = Seed: LVVVGAVGV (KRAS G12V)
LVVLGRVGS

SEQ ID NO: 59055 - protein, 9 aa, synthetic construct
  source 1..9: note = Seed: LVVVGAVGV (KRAS G12V)
LVVLGRVGT

SEQ ID NO: 59056 - protein, 9 aa, synthetic construct
  source 1..9: note = Seed: LVVVGAVGV (KRAS G12V)
LVVLGRVGV

SEQ ID NO: 59057 - protein, 9 aa, synthetic construct
  source 1..9: note = Seed: LVVVGAVGV (KRAS G12V)
LVVLGRVGY

SEQ ID NO: 59058 - protein, 9 aa, synthetic construct
  source 1..9: note = Seed: LVVVGAVGV (KRAS G12V)
LVVLGSVGA

SEQ ID NO: 59059 - protein, 9 aa, synthetic construct
  source 1..9: note = Seed: LVVVGAVGV (KRAS G12V)
LVVLGSVGC

SEQ ID NO: 59060 - protein, 9 aa, synthetic construct
  source 1..9: note = Seed: LVVVGAVGV (KRAS G12V)
LVVLGSVGD

SEQ ID NO: 59061 - protein, 9 aa, synthetic construct
  source 1..9: note = Seed: LVVVGAVGV (KRAS G12V)
LVVLGSVGE

SEQ ID NO: 59062 - protein, 9 aa, synthetic construct
  source 1..9: note = Seed: LVVVGAVGV (KRAS G12V)
LVVLGSVGF

SEQ ID NO: 59063 - protein, 9 aa, synthetic construct
  source 1..9: note = Seed: LVVVGAVGV (KRAS G12V)
LVVLGSVGG

SEQ ID NO: 59064 - protein, 9 aa, synthetic construct
  source 1..9: note = Seed: LVVVGAVGV (KRAS G12V)
LVVLGSVGH

SEQ ID NO: 59065 - protein, 9 aa, synthetic construct
  source 1..9: note = Seed: LVVVGAVGV (KRAS G12V)
LVVLGSVGI

SEQ ID NO: 59066 - protein, 9 aa, synthetic construct
  source 1..9: note = Seed: LVVVGAVGV (KRAS G12V)
LVVLGSVGK

SEQ ID NO: 59067 - protein, 9 aa, synthetic construct
  source 1..9: note = Seed: LVVVGAVGV (KRAS G12V)
LVVLGSVGL

SEQ ID NO: 59068 - protein, 9 aa, synthetic construct
  source 1..9: note = Seed: LVVVGAVGV (KRAS G12V)
LVVLGSVGM

SEQ ID NO: 59069 - protein, 9 aa, synthetic construct
  source 1..9: note = Seed: LVVVGAVGV (KRAS G12V)
LVVLGSVGN

SEQ ID NO: 59070 - protein, 9 aa, synthetic construct
  source 1..9: note = Seed: LVVVGAVGV (KRAS G12V)
LVVLGSVGP

SEQ ID NO: 59071 - protein, 9 aa, synthetic construct
  source 1..9: note = Seed: LVVVGAVGV (KRAS G12V)
LVVLGSVGQ

SEQ ID NO: 59072 - protein, 9 aa, synthetic construct
  source 1..9: note = Seed: LVVVGAVGV (KRAS G12V)
LVVLGSVGR

SEQ ID NO: 59073 - protein, 9 aa, synthetic construct
  source 1..9: note = Seed: LVVVGAVGV (KRAS G12V)
LVVLGSVGS

SEQ ID NO: 59074 - protein, 9 aa, synthetic construct
  source 1..9: note = Seed: LVVVGAVGV (KRAS G12V)
LVVLGSVGT

SEQ ID NO: 59075 - protein, 9 aa, synthetic construct
  source 1..9: note = Seed: LVVVGAVGV (KRAS G12V)
LVVLGSVGV

SEQ ID NO: 59076 - protein, 9 aa, synthetic construct
  source 1..9: note = Seed: LVVVGAVGV (KRAS G12V)
LVVLGSVGY

SEQ ID NO: 59077 - protein, 9 aa, synthetic construct
  source 1..9: note = Seed: LVVVGAVGV (KRAS G12V)
LVVLGTVGA

SEQ ID NO: 59078 - protein, 9 aa, synthetic construct
  source 1..9: note = Seed: LVVVGAVGV (KRAS G12V)
LVVLGTVGD

SEQ ID NO: 59079 - protein, 9 aa, synthetic construct
  source 1..9: note = Seed: LVVVGAVGV (KRAS G12V)
LVVLGTVGF

SEQ ID NO: 59080 - protein, 9 aa, synthetic construct
  source 1..9: note = Seed: LVVVGAVGV (KRAS G12V)
LVVLGTVGG

SEQ ID NO: 59081 - protein, 9 aa, synthetic construct
  source 1..9: note = Seed: LVVVGAVGV (KRAS G12V)
LVVLGTVGH

SEQ ID NO: 59082 - protein, 9 aa, synthetic construct
  source 1..9: note = Seed: LVVVGAVGV (KRAS G12V)
LVVLGTVGI

SEQ ID NO: 59083 - protein, 9 aa, synthetic construct
  source 1..9: note = Seed: LVVVGAVGV (KRAS G12V)
LVVLGTVGK

SEQ ID NO: 59084 - protein, 9 aa, synthetic construct
  source 1..9: note = Seed: LVVVGAVGV (KRAS G12V)
LVVLGTVGL

SEQ ID NO: 59085 - protein, 9 aa, synthetic construct
  source 1..9: note = Seed: LVVVGAVGV (KRAS G12V)
LVVLGTVGM

SEQ ID NO: 59086 - protein, 9 aa, synthetic construct
  source 1..9: note = Seed: LVVVGAVGV (KRAS G12V)
LVVLGTVGN

SEQ ID NO: 59087 - protein, 9 aa, synthetic construct
  source 1..9: note = Seed: LVVVGAVGV (KRAS G12V)
LVVLGTVGP

SEQ ID NO: 59088 - protein, 9 aa, synthetic construct
  source 1..9: note = Seed: LVVVGAVGV (KRAS G12V)
LVVLGTVGQ

SEQ ID NO: 59089 - protein, 9 aa, synthetic construct
  source 1..9: note = Seed: LVVVGAVGV (KRAS G12V)
LVVLGTVGR

SEQ ID NO: 59090 - protein, 9 aa, synthetic construct
  source 1..9: note = Seed: LVVVGAVGV (KRAS G12V)
LVVLGTVGS

SEQ ID NO: 59091 - protein, 9 aa, synthetic construct
  source 1..9: note = Seed: LVVVGAVGV (KRAS G12V)
LVVLGTVGT

SEQ ID NO: 59092 - protein, 9 aa, synthetic construct
  source 1..9: note = Seed: LVVVGAVGV (KRAS G12V)
LVVLGTVGV

SEQ ID NO: 59093 - protein, 9 aa, synthetic construct
  source 1..9: note = Seed: LVVVGAVGV (KRAS G12V)
LVVLGTVGY

SEQ ID NO: 59094 - protein, 9 aa, synthetic construct
  source 1..9: note = Seed: LVVVGAVGV (KRAS G12V)
LVVLGVVGA

SEQ ID NO: 59095 - protein, 9 aa, synthetic construct
  source 1..9: note = Seed: LVVVGAVGV (KRAS G12V)
LVVLGVVGG

SEQ ID NO: 59096 - protein, 9 aa, synthetic construct
  source 1..9: note = Seed: LVVVGAVGV (KRAS G12V)
LVVLGVVGH

SEQ ID NO: 59097 - protein, 9 aa, synthetic construct
  source 1..9: note = Seed: LVVVGAVGV (KRAS G12V)
LVVLGVVGI

SEQ ID NO: 59098 - protein, 9 aa, synthetic construct
  source 1..9: note = Seed: LVVVGAVGV (KRAS G12V)
LVVLGVVGK

SEQ ID NO: 59099 - protein, 9 aa, synthetic construct
  source 1..9: note = Seed: LVVVGAVGV (KRAS G12V)
LVVLGVVGL

SEQ ID NO: 59100 - protein, 9 aa, synthetic construct
  source 1..9: note = Seed: LVVVGAVGV (KRAS G12V)
LVVLGVVGM

SEQ ID NO: 59101 - protein, 9 aa, synthetic construct
  source 1..9: note = Seed: LVVVGAVGV (KRAS G12V)
LVVLGVVGN

SEQ ID NO: 59102 - protein, 9 aa, synthetic construct
  source 1..9: note = Seed: LVVVGAVGV (KRAS G12V)
LVVLGVVGP

SEQ ID NO: 59103 - protein, 9 aa, synthetic construct
  source 1..9: note = Seed: LVVVGAVGV (KRAS G12V)
LVVLGVVGR

SEQ ID NO: 59104 - protein, 9 aa, synthetic construct
  source 1..9: note = Seed: LVVVGAVGV (KRAS G12V)
LVVLGVVGS

SEQ ID NO: 59105 - protein, 9 aa, synthetic construct
  source 1..9: note = Seed: LVVVGAVGV (KRAS G12V)
LVVLGVVGT

SEQ ID NO: 59106 - protein, 9 aa, synthetic construct
  source 1..9: note = Seed: LVVVGAVGV (KRAS G12V)
LVVLGVVGV

SEQ ID NO: 59107 - protein, 9 aa, synthetic construct
  source 1..9: note = Seed: LVVVGAVGV (KRAS G12V)
LVVLGYVGR

SEQ ID NO: 59108 - protein, 9 aa, synthetic construct
  source 1..9: note = Seed: LVVVGAVGV (KRAS G12V)
LVVMGAVGA

SEQ ID NO: 59109 - protein, 9 aa, synthetic construct
  source 1..9: note = Seed: LVVVGAVGV (KRAS G12V)
LVVMGAVGC

SEQ ID NO: 59110 - protein, 9 aa, synthetic construct
  source 1..9: note = Seed: LVVVGAVGV (KRAS G12V)
LVVMGAVGD

SEQ ID NO: 59111 - protein, 9 aa, synthetic construct
  source 1..9: note = Seed: LVVVGAVGV (KRAS G12V)
LVVMGAVGE

SEQ ID NO: 59112 - protein, 9 aa, synthetic construct
  source 1..9: note = Seed: LVVVGAVGV (KRAS G12V)
LVVMGAVGF

SEQ ID NO: 59113 - protein, 9 aa, synthetic construct
  source 1..9: note = Seed: LVVVGAVGV (KRAS G12V)
LVVMGAVGG

SEQ ID NO: 59114 - protein, 9 aa, synthetic construct
  source 1..9: note = Seed: LVVVGAVGV (KRAS G12V)
LVVMGAVGH

SEQ ID NO: 59115 - protein, 9 aa, synthetic construct
  source 1..9: note = Seed: LVVVGAVGV (KRAS G12V)
LVVMGAVGI

SEQ ID NO: 59116 - protein, 9 aa, synthetic construct
  source 1..9: note = Seed: LVVVGAVGV (KRAS G12V)
LVVMGAVGK

SEQ ID NO: 59117 - protein, 9 aa, synthetic construct
  source 1..9: note = Seed: LVVVGAVGV (KRAS G12V)
LVVMGAVGL

SEQ ID NO: 59118 - protein, 9 aa, synthetic construct
  source 1..9: note = Seed: LVVVGAVGV (KRAS G12V)
LVVMGAVGM

SEQ ID NO: 59119 - protein, 9 aa, synthetic construct
  source 1..9: note = Seed: LVVVGAVGV (KRAS G12V)
LVVMGAVGN

SEQ ID NO: 59120 - protein, 9 aa, synthetic construct
  source 1..9: note = Seed: LVVVGAVGV (KRAS G12V)
LVVMGAVGP

SEQ ID NO: 59121 - protein, 9 aa, synthetic construct
  source 1..9: note = Seed: LVVVGAVGV (KRAS G12V)
LVVMGAVGQ

SEQ ID NO: 59122 - protein, 9 aa, synthetic construct
  source 1..9: note = Seed: LVVVGAVGV (KRAS G12V)
LVVMGAVGR

SEQ ID NO: 59123 - protein, 9 aa, synthetic construct
  source 1..9: note = Seed: LVVVGAVGV (KRAS G12V)
LVVMGAVGS

SEQ ID NO: 59124 - protein, 9 aa, synthetic construct
  source 1..9: note = Seed: LVVVGAVGV (KRAS G12V)
LVVMGAVGT

SEQ ID NO: 59125 - protein, 9 aa, synthetic construct
  source 1..9: note = Seed: LVVVGAVGV (KRAS G12V)
LVVMGAVGV

SEQ ID NO: 59126 - protein, 9 aa, synthetic construct
  source 1..9: note = Seed: LVVVGAVGV (KRAS G12V)
LVVMGAVGW

SEQ ID NO: 59127 - protein, 9 aa, synthetic construct
  source 1..9: note = Seed: LVVVGAVGV (KRAS G12V)
LVVMGAVGY

SEQ ID NO: 59128 - protein, 9 aa, synthetic construct
  source 1..9: note = Seed: LVVVGAVGV (KRAS G12V)
LVVMGDVGA

SEQ ID NO: 59129 - protein, 9 aa, synthetic construct
  source 1..9: note = Seed: LVVVGAVGV (KRAS G12V)
LVVMGDVGI

SEQ ID NO: 59130 - protein, 9 aa, synthetic construct
  source 1..9: note = Seed: LVVVGAVGV (KRAS G12V)
LVVMGDVGL

SEQ ID NO: 59131 - protein, 9 aa, synthetic construct
  source 1..9: note = Seed: LVVVGAVGV (KRAS G12V)
LVVMGDVGM

SEQ ID NO: 59132 - protein, 9 aa, synthetic construct
  source 1..9: note = Seed: LVVVGAVGV (KRAS G12V)
LVVMGDVGS

SEQ ID NO: 59133 - protein, 9 aa, synthetic construct
  source 1..9: note = Seed: LVVVGAVGV (KRAS G12V)
LVVMGDVGT

SEQ ID NO: 59134 - protein, 9 aa, synthetic construct
  source 1..9: note = Seed: LVVVGAVGV (KRAS G12V)
LVVMGDVGV

SEQ ID NO: 59135 - protein, 9 aa, synthetic construct
  source 1..9: note = Seed: LVVVGAVGV (KRAS G12V)
LVVMGEVGA

SEQ ID NO: 59136 - protein, 9 aa, synthetic construct
  source 1..9: note = Seed: LVVVGAVGV (KRAS G12V)
LVVMGEVGI

SEQ ID NO: 59137 - protein, 9 aa, synthetic construct
  source 1..9: note = Seed: LVVVGAVGV (KRAS G12V)
LVVMGEVGL

SEQ ID NO: 59138 - protein, 9 aa, synthetic construct
  source 1..9: note = Seed: LVVVGAVGV (KRAS G12V)
LVVMGEVGM

SEQ ID NO: 59139 - protein, 9 aa, synthetic construct
  source 1..9: note = Seed: LVVVGAVGV (KRAS G12V)
LVVMGEVGV

SEQ ID NO: 59140 - protein, 9 aa, synthetic construct
  source 1..9: note = Seed: LVVVGAVGV (KRAS G12V)
LVVMGGVGA

SEQ ID NO: 59141 - protein, 9 aa, synthetic construct
  source 1..9: note = Seed: LVVVGAVGV (KRAS G12V)
LVVMGGVGC

SEQ ID NO: 59142 - protein, 9 aa, synthetic construct
  source 1..9: note = Seed: LVVVGAVGV (KRAS G12V)
LVVMGGVGD

SEQ ID NO: 59143 - protein, 9 aa, synthetic construct
  source 1..9: note = Seed: LVVVGAVGV (KRAS G12V)
LVVMGGVGE

SEQ ID NO: 59144 - protein, 9 aa, synthetic construct
  source 1..9: note = Seed: LVVVGAVGV (KRAS G12V)
LVVMGGVGF

SEQ ID NO: 59145 - protein, 9 aa, synthetic construct
  source 1..9: note = Seed: LVVVGAVGV (KRAS G12V)
LVVMGGVGG

SEQ ID NO: 59146 - protein, 9 aa, synthetic construct
  source 1..9: note = Seed: LVVVGAVGV (KRAS G12V)
LVVMGGVGH

SEQ ID NO: 59147 - protein, 9 aa, synthetic construct
  source 1..9: note = Seed: LVVVGAVGV (KRAS G12V)
LVVMGGVGI

SEQ ID NO: 59148 - protein, 9 aa, synthetic construct
  source 1..9: note = Seed: LVVVGAVGV (KRAS G12V)
LVVMGGVGK

SEQ ID NO: 59149 - protein, 9 aa, synthetic construct
  source 1..9: note = Seed: LVVVGAVGV (KRAS G12V)
LVVMGGVGL

SEQ ID NO: 59150 - protein, 9 aa, synthetic construct
  source 1..9: note = Seed: LVVVGAVGV (KRAS G12V)
LVVMGGVGM

SEQ ID NO: 59151 - protein, 9 aa, synthetic construct
  source 1..9: note = Seed: LVVVGAVGV (KRAS G12V)
LVVMGGVGN

SEQ ID NO: 59152 - protein, 9 aa, synthetic construct
  source 1..9: note = Seed: LVVVGAVGV (KRAS G12V)
LVVMGGVGP

SEQ ID NO: 59153 - protein, 9 aa, synthetic construct
  source 1..9: note = Seed: LVVVGAVGV (KRAS G12V)
LVVMGGVGQ

SEQ ID NO: 59154 - protein, 9 aa, synthetic construct
  source 1..9: note = Seed: LVVVGAVGV (KRAS G12V)
LVVMGGVGR

SEQ ID NO: 59155 - protein, 9 aa, synthetic construct
  source 1..9: note = Seed: LVVVGAVGV (KRAS G12V)
LVVMGGVGS

SEQ ID NO: 59156 - protein, 9 aa, synthetic construct
  source 1..9: note = Seed: LVVVGAVGV (KRAS G12V)
LVVMGGVGT

SEQ ID NO: 59157 - protein, 9 aa, synthetic construct
  source 1..9: note = Seed: LVVVGAVGV (KRAS G12V)
LVVMGGVGV

SEQ ID NO: 59158 - protein, 9 aa, synthetic construct
  source 1..9: note = Seed: LVVVGAVGV (KRAS G12V)
LVVMGGVGY

SEQ ID NO: 59159 - protein, 9 aa, synthetic construct
  source 1..9: note = Seed: LVVVGAVGV (KRAS G12V)
LVVMGHVGA

SEQ ID NO: 59160 - protein, 9 aa, synthetic construct
  source 1..9: note = Seed: LVVVGAVGV (KRAS G12V)
LVVMGHVGF

SEQ ID NO: 59161 - protein, 9 aa, synthetic construct
  source 1..9: note = Seed: LVVVGAVGV (KRAS G12V)
LVVMGHVGG

SEQ ID NO: 59162 - protein, 9 aa, synthetic construct
  source 1..9: note = Seed: LVVVGAVGV (KRAS G12V)
LVVMGHVGH

SEQ ID NO: 59163 - protein, 9 aa, synthetic construct
  source 1..9: note = Seed: LVVVGAVGV (KRAS G12V)
LVVMGHVGI

SEQ ID NO: 59164 - protein, 9 aa, synthetic construct
  source 1..9: note = Seed: LVVVGAVGV (KRAS G12V)
LVVMGHVGK

SEQ ID NO: 59165 - protein, 9 aa, synthetic construct
  source 1..9: note = Seed: LVVVGAVGV (KRAS G12V)
LVVMGHVGL

SEQ ID NO: 59166 - protein, 9 aa, synthetic construct
  source 1..9: note = Seed: LVVVGAVGV (KRAS G12V)
LVVMGHVGM

SEQ ID NO: 59167 - protein, 9 aa, synthetic construct
  source 1..9: note = Seed: LVVVGAVGV (KRAS G12V)
LVVMGHVGN

SEQ ID NO: 59168 - protein, 9 aa, synthetic construct
  source 1..9: note = Seed: LVVVGAVGV (KRAS G12V)
LVVMGHVGP

SEQ ID NO: 59169 - protein, 9 aa, synthetic construct
  source 1..9: note = Seed: LVVVGAVGV (KRAS G12V)
LVVMGHVGQ

SEQ ID NO: 59170 - protein, 9 aa, synthetic construct
  source 1..9: note = Seed: LVVVGAVGV (KRAS G12V)
LVVMGHVGR

SEQ ID NO: 59171 - protein, 9 aa, synthetic construct
  source 1..9: note = Seed: LVVVGAVGV (KRAS G12V)
LVVMGHVGS

SEQ ID NO: 59172 - protein, 9 aa, synthetic construct
  source 1..9: note = Seed: LVVVGAVGV (KRAS G12V)
LVVMGHVGT

SEQ ID NO: 59173 - protein, 9 aa, synthetic construct
  source 1..9: note = Seed: LVVVGAVGV (KRAS G12V)
LVVMGHVGV

SEQ ID NO: 59174 - protein, 9 aa, synthetic construct
  source 1..9: note = Seed: LVVVGAVGV (KRAS G12V)
LVVMGHVGY

SEQ ID NO: 59175 - protein, 9 aa, synthetic construct
  source 1..9: note = Seed: LVVVGAVGV (KRAS G12V)
LVVMGIVGA

SEQ ID NO: 59176 - protein, 9 aa, synthetic construct
  source 1..9: note = Seed: LVVVGAVGV (KRAS G12V)
LVVMGIVGH

SEQ ID NO: 59177 - protein, 9 aa, synthetic construct
  source 1..9: note = Seed: LVVVGAVGV (KRAS G12V)
LVVMGIVGI

SEQ ID NO: 59178 - protein, 9 aa, synthetic construct
  source 1..9: note = Seed: LVVVGAVGV (KRAS G12V)
LVVMGIVGK

SEQ ID NO: 59179 - protein, 9 aa, synthetic construct
  source 1..9: note = Seed: LVVVGAVGV (KRAS G12V)
LVVMGIVGL

SEQ ID NO: 59180 - protein, 9 aa, synthetic construct
  source 1..9: note = Seed: LVVVGAVGV (KRAS G12V)
LVVMGIVGM

SEQ ID NO: 59181 - protein, 9 aa, synthetic construct
  source 1..9: note = Seed: LVVVGAVGV (KRAS G12V)
LVVMGIVGN

SEQ ID NO: 59182 - protein, 9 aa, synthetic construct
  source 1..9: note = Seed: LVVVGAVGV (KRAS G12V)
LVVMGIVGQ

SEQ ID NO: 59183 - protein, 9 aa, synthetic construct
  source 1..9: note = Seed: LVVVGAVGV (KRAS G12V)
LVVMGIVGR

SEQ ID NO: 59184 - protein, 9 aa, synthetic construct
  source 1..9: note = Seed: LVVVGAVGV (KRAS G12V)
LVVMGIVGS

SEQ ID NO: 59185 - protein, 9 aa, synthetic construct
  source 1..9: note = Seed: LVVVGAVGV (KRAS G12V)
LVVMGIVGT

SEQ ID NO: 59186 - protein, 9 aa, synthetic construct
  source 1..9: note = Seed: LVVVGAVGV (KRAS G12V)
LVVMGIVGV

SEQ ID NO: 59187 - protein, 9 aa, synthetic construct
  source 1..9: note = Seed: LVVVGAVGV (KRAS G12V)
LVVMGIVGY

SEQ ID NO: 59188 - protein, 9 aa, synthetic construct
  source 1..9: note = Seed: LVVVGAVGV (KRAS G12V)
LVVMGKVGA

SEQ ID NO: 59189 - protein, 9 aa, synthetic construct
  source 1..9: note = Seed: LVVVGAVGV (KRAS G12V)
LVVMGKVGE

SEQ ID NO: 59190 - protein, 9 aa, synthetic construct
  source 1..9: note = Seed: LVVVGAVGV (KRAS G12V)
LVVMGKVGF

SEQ ID NO: 59191 - protein, 9 aa, synthetic construct
  source 1..9: note = Seed: LVVVGAVGV (KRAS G12V)
LVVMGKVGG

SEQ ID NO: 59192 - protein, 9 aa, synthetic construct
  source 1..9: note = Seed: LVVVGAVGV (KRAS G12V)
LVVMGKVGH

SEQ ID NO: 59193 - protein, 9 aa, synthetic construct
  source 1..9: note = Seed: LVVVGAVGV (KRAS G12V)
LVVMGKVGI

SEQ ID NO: 59194 - protein, 9 aa, synthetic construct
  source 1..9: note = Seed: LVVVGAVGV (KRAS G12V)
LVVMGKVGK

SEQ ID NO: 59195 - protein, 9 aa, synthetic construct
  source 1..9: note = Seed: LVVVGAVGV (KRAS G12V)
LVVMGKVGL

SEQ ID NO: 59196 - protein, 9 aa, synthetic construct
  source 1..9: note = Seed: LVVVGAVGV (KRAS G12V)
LVVMGKVGM

SEQ ID NO: 59197 - protein, 9 aa, synthetic construct
  source 1..9: note = Seed: LVVVGAVGV (KRAS G12V)
LVVMGKVGN

SEQ ID NO: 59198 - protein, 9 aa, synthetic construct
  source 1..9: note = Seed: LVVVGAVGV (KRAS G12V)
LVVMGKVGP

SEQ ID NO: 59199 - protein, 9 aa, synthetic construct
  source 1..9: note = Seed: LVVVGAVGV (KRAS G12V)
LVVMGKVGQ

SEQ ID NO: 59200 - protein, 9 aa, synthetic construct
  source 1..9: note = Seed: LVVVGAVGV (KRAS G12V)
LVVMGKVGR

SEQ ID NO: 59201 - protein, 9 aa, synthetic construct
  source 1..9: note = Seed: LVVVGAVGV (KRAS G12V)
LVVMGKVGS

SEQ ID NO: 59202 - protein, 9 aa, synthetic construct
  source 1..9: note = Seed: LVVVGAVGV (KRAS G12V)
LVVMGKVGT

SEQ ID NO: 59203 - protein, 9 aa, synthetic construct
  source 1..9: note = Seed: LVVVGAVGV (KRAS G12V)
LVVMGKVGV

SEQ ID NO: 59204 - protein, 9 aa, synthetic construct
  source 1..9: note = Seed: LVVVGAVGV (KRAS G12V)
LVVMGKVGY

SEQ ID NO: 59205 - protein, 9 aa, synthetic construct
  source 1..9: note = Seed: LVVVGAVGV (KRAS G12V)
LVVMGLVGA

SEQ ID NO: 59206 - protein, 9 aa, synthetic construct
  source 1..9: note = Seed: LVVVGAVGV (KRAS G12V)
LVVMGLVGH

SEQ ID NO: 59207 - protein, 9 aa, synthetic construct
  source 1..9: note = Seed: LVVVGAVGV (KRAS G12V)
LVVMGLVGI

SEQ ID NO: 59208 - protein, 9 aa, synthetic construct
  source 1..9: note = Seed: LVVVGAVGV (KRAS G12V)
LVVMGLVGK

SEQ ID NO: 59209 - protein, 9 aa, synthetic construct
  source 1..9: note = Seed: LVVVGAVGV (KRAS G12V)
LVVMGLVGL

SEQ ID NO: 59210 - protein, 9 aa, synthetic construct
  source 1..9: note = Seed: LVVVGAVGV (KRAS G12V)
LVVMGLVGM

SEQ ID NO: 59211 - protein, 9 aa, synthetic construct
  source 1..9: note = Seed: LVVVGAVGV (KRAS G12V)
LVVMGLVGN

SEQ ID NO: 59212 - protein, 9 aa, synthetic construct
  source 1..9: note = Seed: LVVVGAVGV (KRAS G12V)
LVVMGLVGQ

SEQ ID NO: 59213 - protein, 9 aa, synthetic construct
  source 1..9: note = Seed: LVVVGAVGV (KRAS G12V)
LVVMGLVGR

SEQ ID NO: 59214 - protein, 9 aa, synthetic construct
  source 1..9: note = Seed: LVVVGAVGV (KRAS G12V)
LVVMGLVGS

SEQ ID NO: 59215 - protein, 9 aa, synthetic construct
  source 1..9: note = Seed: LVVVGAVGV (KRAS G12V)
LVVMGLVGT

SEQ ID NO: 59216 - protein, 9 aa, synthetic construct
  source 1..9: note = Seed: LVVVGAVGV (KRAS G12V)
LVVMGLVGV

SEQ ID NO: 59217 - protein, 9 aa, synthetic construct
  source 1..9: note = Seed: LVVVGAVGV (KRAS G12V)
LVVMGLVGY

SEQ ID NO: 59218 - protein, 9 aa, synthetic construct
  source 1..9: note = Seed: LVVVGAVGV (KRAS G12V)
LVVMGMVGA

SEQ ID NO: 59219 - protein, 9 aa, synthetic construct
  source 1..9: note = Seed: LVVVGAVGV (KRAS G12V)
LVVMGMVGF

SEQ ID NO: 59220 - protein, 9 aa, synthetic construct
  source 1..9: note = Seed: LVVVGAVGV (KRAS G12V)
LVVMGMVGG

SEQ ID NO: 59221 - protein, 9 aa, synthetic construct
  source 1..9: note = Seed: LVVVGAVGV (KRAS G12V)
LVVMGMVGH

SEQ ID NO: 59222 - protein, 9 aa, synthetic construct
  source 1..9: note = Seed: LVVVGAVGV (KRAS G12V)
LVVMGMVGI

SEQ ID NO: 59223 - protein, 9 aa, synthetic construct
  source 1..9: note = Seed: LVVVGAVGV (KRAS G12V)
LVVMGMVGK

SEQ ID NO: 59224 - protein, 9 aa, synthetic construct
  source 1..9: note = Seed: LVVVGAVGV (KRAS G12V)
LVVMGMVGL

SEQ ID NO: 59225 - protein, 9 aa, synthetic construct
  source 1..9: note = Seed: LVVVGAVGV (KRAS G12V)
LVVMGMVGM

SEQ ID NO: 59226 - protein, 9 aa, synthetic construct
  source 1..9: note = Seed: LVVVGAVGV (KRAS G12V)
LVVMGMVGN

SEQ ID NO: 59227 - protein, 9 aa, synthetic construct
  source 1..9: note = Seed: LVVVGAVGV (KRAS G12V)
LVVMGMVGQ

SEQ ID NO: 59228 - protein, 9 aa, synthetic construct
  source 1..9: note = Seed: LVVVGAVGV (KRAS G12V)
LVVMGMVGR

SEQ ID NO: 59229 - protein, 9 aa, synthetic construct
  source 1..9: note = Seed: LVVVGAVGV (KRAS G12V)
LVVMGMVGS

SEQ ID NO: 59230 - protein, 9 aa, synthetic construct
  source 1..9: note = Seed: LVVVGAVGV (KRAS G12V)
LVVMGMVGT

SEQ ID NO: 59231 - protein, 9 aa, synthetic construct
  source 1..9: note = Seed: LVVVGAVGV (KRAS G12V)
LVVMGMVGV

SEQ ID NO: 59232 - protein, 9 aa, synthetic construct
  source 1..9: note = Seed: LVVVGAVGV (KRAS G12V)
LVVMGMVGY

SEQ ID NO: 59233 - protein, 9 aa, synthetic construct
  source 1..9: note = Seed: LVVVGAVGV (KRAS G12V)
LVVMGNVGA

SEQ ID NO: 59234 - protein, 9 aa, synthetic construct
  source 1..9: note = Seed: LVVVGAVGV (KRAS G12V)
LVVMGNVGC

SEQ ID NO: 59235 - protein, 9 aa, synthetic construct
  source 1..9: note = Seed: LVVVGAVGV (KRAS G12V)
LVVMGNVGD

SEQ ID NO: 59236 - protein, 9 aa, synthetic construct
  source 1..9: note = Seed: LVVVGAVGV (KRAS G12V)
LVVMGNVGE

SEQ ID NO: 59237 - protein, 9 aa, synthetic construct
  source 1..9: note = Seed: LVVVGAVGV (KRAS G12V)
LVVMGNVGF

SEQ ID NO: 59238 - protein, 9 aa, synthetic construct
  source 1..9: note = Seed: LVVVGAVGV (KRAS G12V)
LVVMGNVGG

SEQ ID NO: 59239 - protein, 9 aa, synthetic construct
  source 1..9: note = Seed: LVVVGAVGV (KRAS G12V)
LVVMGNVGH

SEQ ID NO: 59240 - protein, 9 aa, synthetic construct
  source 1..9: note = Seed: LVVVGAVGV (KRAS G12V)
LVVMGNVGI

SEQ ID NO: 59241 - protein, 9 aa, synthetic construct
  source 1..9: note = Seed: LVVVGAVGV (KRAS G12V)
LVVMGNVGK

SEQ ID NO: 59242 - protein, 9 aa, synthetic construct
  source 1..9: note = Seed: LVVVGAVGV (KRAS G12V)
LVVMGNVGL

SEQ ID NO: 59243 - protein, 9 aa, synthetic construct
  source 1..9: note = Seed: LVVVGAVGV (KRAS G12V)
LVVMGNVGM

SEQ ID NO: 59244 - protein, 9 aa, synthetic construct
  source 1..9: note = Seed: LVVVGAVGV (KRAS G12V)
LVVMGNVGN

SEQ ID NO: 59245 - protein, 9 aa, synthetic construct
  source 1..9: note = Seed: LVVVGAVGV (KRAS G12V)
LVVMGNVGP

SEQ ID NO: 59246 - protein, 9 aa, synthetic construct
  source 1..9: note = Seed: LVVVGAVGV (KRAS G12V)
LVVMGNVGQ

SEQ ID NO: 59247 - protein, 9 aa, synthetic construct
  source 1..9: note = Seed: LVVVGAVGV (KRAS G12V)
LVVMGNVGR

SEQ ID NO: 59248 - protein, 9 aa, synthetic construct
  source 1..9: note = Seed: LVVVGAVGV (KRAS G12V)
LVVMGNVGS

SEQ ID NO: 59249 - protein, 9 aa, synthetic construct
  source 1..9: note = Seed: LVVVGAVGV (KRAS G12V)
LVVMGNVGT

SEQ ID NO: 59250 - protein, 9 aa, synthetic construct
  source 1..9: note = Seed: LVVVGAVGV (KRAS G12V)
LVVMGNVGV

SEQ ID NO: 59251 - protein, 9 aa, synthetic construct
  source 1..9: note = Seed: LVVVGAVGV (KRAS G12V)
LVVMGNVGY

SEQ ID NO: 59252 - protein, 9 aa, synthetic construct
  source 1..9: note = Seed: LVVVGAVGV (KRAS G12V)
LVVMGPVGA

SEQ ID NO: 59253 - protein, 9 aa, synthetic construct
  source 1..9: note = Seed: LVVVGAVGV (KRAS G12V)
LVVMGPVGC

SEQ ID NO: 59254 - protein, 9 aa, synthetic construct
  source 1..9: note = Seed: LVVVGAVGV (KRAS G12V)
LVVMGPVGD

SEQ ID NO: 59255 - protein, 9 aa, synthetic construct
  source 1..9: note = Seed: LVVVGAVGV (KRAS G12V)
LVVMGPVGE

SEQ ID NO: 59256 - protein, 9 aa, synthetic construct
  source 1..9: note = Seed: LVVVGAVGV (KRAS G12V)
LVVMGPVGF

SEQ ID NO: 59257 - protein, 9 aa, synthetic construct
  source 1..9: note = Seed: LVVVGAVGV (KRAS G12V)
LVVMGPVGG

SEQ ID NO: 59258 - protein, 9 aa, synthetic construct
  source 1..9: note = Seed: LVVVGAVGV (KRAS G12V)
LVVMGPVGH

SEQ ID NO: 59259 - protein, 9 aa, synthetic construct
  source 1..9: note = Seed: LVVVGAVGV (KRAS G12V)
LVVMGPVGI

SEQ ID NO: 59260 - protein, 9 aa, synthetic construct
  source 1..9: note = Seed: LVVVGAVGV (KRAS G12V)
LVVMGPVGK

SEQ ID NO: 59261 - protein, 9 aa, synthetic construct
  source 1..9: note = Seed: LVVVGAVGV (KRAS G12V)
LVVMGPVGL

SEQ ID NO: 59262 - protein, 9 aa, synthetic construct
  source 1..9: note = Seed: LVVVGAVGV (KRAS G12V)
LVVMGPVGM

SEQ ID NO: 59263 - protein, 9 aa, synthetic construct
  source 1..9: note = Seed: LVVVGAVGV (KRAS G12V)
LVVMGPVGN

SEQ ID NO: 59264 - protein, 9 aa, synthetic construct
  source 1..9: note = Seed: LVVVGAVGV (KRAS G12V)
LVVMGPVGP

SEQ ID NO: 59265 - protein, 9 aa, synthetic construct
  source 1..9: note = Seed: LVVVGAVGV (KRAS G12V)
LVVMGPVGQ

SEQ ID NO: 59266 - protein, 9 aa, synthetic construct
  source 1..9: note = Seed: LVVVGAVGV (KRAS G12V)
LVVMGPVGR

SEQ ID NO: 59267 - protein, 9 aa, synthetic construct
  source 1..9: note = Seed: LVVVGAVGV (KRAS G12V)
LVVMGPVGS

SEQ ID NO: 59268 - protein, 9 aa, synthetic construct
  source 1..9: note = Seed: LVVVGAVGV (KRAS G12V)
LVVMGPVGT

SEQ ID NO: 59269 - protein, 9 aa, synthetic construct
  source 1..9: note = Seed: LVVVGAVGV (KRAS G12V)
LVVMGPVGV

SEQ ID NO: 59270 - protein, 9 aa, synthetic construct
  source 1..9: note = Seed: LVVVGAVGV (KRAS G12V)
LVVMGPVGW

SEQ ID NO: 59271 - protein, 9 aa, synthetic construct
  source 1..9: note = Seed: LVVVGAVGV (KRAS G12V)
LVVMGPVGY

SEQ ID NO: 59272 - protein, 9 aa, synthetic construct
  source 1..9: note = Seed: LVVVGAVGV (KRAS G12V)
LVVMGQVGA

SEQ ID NO: 59273 - protein, 9 aa, synthetic construct
  source 1..9: note = Seed: LVVVGAVGV (KRAS G12V)
LVVMGQVGH

SEQ ID NO: 59274 - protein, 9 aa, synthetic construct
  source 1..9: note = Seed: LVVVGAVGV (KRAS G12V)
LVVMGQVGI

SEQ ID NO: 59275 - protein, 9 aa, synthetic construct
  source 1..9: note = Seed: LVVVGAVGV (KRAS G12V)
LVVMGQVGL

SEQ ID NO: 59276 - protein, 9 aa, synthetic construct
  source 1..9: note = Seed: LVVVGAVGV (KRAS G12V)
LVVMGQVGM

SEQ ID NO: 59277 - protein, 9 aa, synthetic construct
  source 1..9: note = Seed: LVVVGAVGV (KRAS G12V)
LVVMGQVGR

SEQ ID NO: 59278 - protein, 9 aa, synthetic construct
  source 1..9: note = Seed: LVVVGAVGV (KRAS G12V)
LVVMGQVGS

SEQ ID NO: 59279 - protein, 9 aa, synthetic construct
  source 1..9: note = Seed: LVVVGAVGV (KRAS G12V)
LVVMGQVGT

SEQ ID NO: 59280 - protein, 9 aa, synthetic construct
  source 1..9: note = Seed: LVVVGAVGV (KRAS G12V)
LVVMGQVGV

SEQ ID NO: 59281 - protein, 9 aa, synthetic construct
  source 1..9: note = Seed: LVVVGAVGV (KRAS G12V)
LVVMGQVGY

SEQ ID NO: 59282 - protein, 9 aa, synthetic construct
  source 1..9: note = Seed: LVVVGAVGV (KRAS G12V)
LVVMGRVGA

SEQ ID NO: 59283 - protein, 9 aa, synthetic construct
  source 1..9: note = Seed: LVVVGAVGV (KRAS G12V)
LVVMGRVGC

SEQ ID NO: 59284 - protein, 9 aa, synthetic construct
  source 1..9: note = Seed: LVVVGAVGV (KRAS G12V)
LVVMGRVGD

SEQ ID NO: 59285 - protein, 9 aa, synthetic construct
  source 1..9: note = Seed: LVVVGAVGV (KRAS G12V)
LVVMGRVGE

SEQ ID NO: 59286 - protein, 9 aa, synthetic construct
  source 1..9: note = Seed: LVVVGAVGV (KRAS G12V)
LVVMGRVGF

SEQ ID NO: 59287 - protein, 9 aa, synthetic construct
  source 1..9: note = Seed: LVVVGAVGV (KRAS G12V)
LVVMGRVGG

SEQ ID NO: 59288 - protein, 9 aa, synthetic construct
  source 1..9: note = Seed: LVVVGAVGV (KRAS G12V)
LVVMGRVGH

SEQ ID NO: 59289 - protein, 9 aa, synthetic construct
  source 1..9: note = Seed: LVVVGAVGV (KRAS G12V)
LVVMGRVGI

SEQ ID NO: 59290 - protein, 9 aa, synthetic construct
  source 1..9: note = Seed: LVVVGAVGV (KRAS G12V)
LVVMGRVGK

SEQ ID NO: 59291 - protein, 9 aa, synthetic construct
  source 1..9: note = Seed: LVVVGAVGV (KRAS G12V)
LVVMGRVGL

SEQ ID NO: 59292 - protein, 9 aa, synthetic construct
  source 1..9: note = Seed: LVVVGAVGV (KRAS G12V)
LVVMGRVGM

SEQ ID NO: 59293 - protein, 9 aa, synthetic construct
  source 1..9: note = Seed: LVVVGAVGV (KRAS G12V)
LVVMGRVGN

SEQ ID NO: 59294 - protein, 9 aa, synthetic construct
  source 1..9: note = Seed: LVVVGAVGV (KRAS G12V)
LVVMGRVGP

SEQ ID NO: 59295 - protein, 9 aa, synthetic construct
  source 1..9: note = Seed: LVVVGAVGV (KRAS G12V)
LVVMGRVGQ

SEQ ID NO: 59296 - protein, 9 aa, synthetic construct
  source 1..9: note = Seed: LVVVGAVGV (KRAS G12V)
LVVMGRVGR

SEQ ID NO: 59297 - protein, 9 aa, synthetic construct
  source 1..9: note = Seed: LVVVGAVGV (KRAS G12V)
LVVMGRVGS

SEQ ID NO: 59298 - protein, 9 aa, synthetic construct
  source 1..9: note = Seed: LVVVGAVGV (KRAS G12V)
LVVMGRVGT

SEQ ID NO: 59299 - protein, 9 aa, synthetic construct
  source 1..9: note = Seed: LVVVGAVGV (KRAS G12V)
LVVMGRVGV

SEQ ID NO: 59300 - protein, 9 aa, synthetic construct
  source 1..9: note = Seed: LVVVGAVGV (KRAS G12V)
LVVMGRVGW

SEQ ID NO: 59301 - protein, 9 aa, synthetic construct
  source 1..9: note = Seed: LVVVGAVGV (KRAS G12V)
LVVMGRVGY

SEQ ID NO: 59302 - protein, 9 aa, synthetic construct
  source 1..9: note = Seed: LVVVGAVGV (KRAS G12V)
LVVMGSVGA

SEQ ID NO: 59303 - protein, 9 aa, synthetic construct
  source 1..9: note = Seed: LVVVGAVGV (KRAS G12V)
LVVMGSVGC

SEQ ID NO: 59304 - protein, 9 aa, synthetic construct
  source 1..9: note = Seed: LVVVGAVGV (KRAS G12V)
LVVMGSVGD

SEQ ID NO: 59305 - protein, 9 aa, synthetic construct
  source 1..9: note = Seed: LVVVGAVGV (KRAS G12V)
LVVMGSVGE

SEQ ID NO: 59306 - protein, 9 aa, synthetic construct
  source 1..9: note = Seed: LVVVGAVGV (KRAS G12V)
LVVMGSVGF

SEQ ID NO: 59307 - protein, 9 aa, synthetic construct
  source 1..9: note = Seed: LVVVGAVGV (KRAS G12V)
LVVMGSVGG

SEQ ID NO: 59308 - protein, 9 aa, synthetic construct
  source 1..9: note = Seed: LVVVGAVGV (KRAS G12V)
LVVMGSVGH

SEQ ID NO: 59309 - protein, 9 aa, synthetic construct
  source 1..9: note = Seed: LVVVGAVGV (KRAS G12V)
LVVMGSVGI

SEQ ID NO: 59310 - protein, 9 aa, synthetic construct
  source 1..9: note = Seed: LVVVGAVGV (KRAS G12V)
LVVMGSVGK

SEQ ID NO: 59311 - protein, 9 aa, synthetic construct
  source 1..9: note = Seed: LVVVGAVGV (KRAS G12V)
LVVMGSVGL

SEQ ID NO: 59312 - protein, 9 aa, synthetic construct
  source 1..9: note = Seed: LVVVGAVGV (KRAS G12V)
LVVMGSVGM

SEQ ID NO: 59313 - protein, 9 aa, synthetic construct
  source 1..9: note = Seed: LVVVGAVGV (KRAS G12V)
LVVMGSVGN

SEQ ID NO: 59314 - protein, 9 aa, synthetic construct
  source 1..9: note = Seed: LVVVGAVGV (KRAS G12V)
LVVMGSVGP

SEQ ID NO: 59315 - protein, 9 aa, synthetic construct
  source 1..9: note = Seed: LVVVGAVGV (KRAS G12V)
LVVMGSVGQ

SEQ ID NO: 59316 - protein, 9 aa, synthetic construct
  source 1..9: note = Seed: LVVVGAVGV (KRAS G12V)
LVVMGSVGR

SEQ ID NO: 59317 - protein, 9 aa, synthetic construct
  source 1..9: note = Seed: LVVVGAVGV (KRAS G12V)
LVVMGSVGS

SEQ ID NO: 59318 - protein, 9 aa, synthetic construct
  source 1..9: note = Seed: LVVVGAVGV (KRAS G12V)
LVVMGSVGT

SEQ ID NO: 59319 - protein, 9 aa, synthetic construct
  source 1..9: note = Seed: LVVVGAVGV (KRAS G12V)
LVVMGSVGV

SEQ ID NO: 59320 - protein, 9 aa, synthetic construct
  source 1..9: note = Seed: LVVVGAVGV (KRAS G12V)
LVVMGSVGY

SEQ ID NO: 59321 - protein, 9 aa, synthetic construct
  source 1..9: note = Seed: LVVVGAVGV (KRAS G12V)
LVVMGTVGA

SEQ ID NO: 59322 - protein, 9 aa, synthetic construct
  source 1..9: note = Seed: LVVVGAVGV (KRAS G12V)
LVVMGTVGC

SEQ ID NO: 59323 - protein, 9 aa, synthetic construct
  source 1..9: note = Seed: LVVVGAVGV (KRAS G12V)
LVVMGTVGD

SEQ ID NO: 59324 - protein, 9 aa, synthetic construct
  source 1..9: note = Seed: LVVVGAVGV (KRAS G12V)
LVVMGTVGF

SEQ ID NO: 59325 - protein, 9 aa, synthetic construct
  source 1..9: note = Seed: LVVVGAVGV (KRAS G12V)
LVVMGTVGG

SEQ ID NO: 59326 - protein, 9 aa, synthetic construct
  source 1..9: note = Seed: LVVVGAVGV (KRAS G12V)
LVVMGTVGH

SEQ ID NO: 59327 - protein, 9 aa, synthetic construct
  source 1..9: note = Seed: LVVVGAVGV (KRAS G12V)
LVVMGTVGI

SEQ ID NO: 59328 - protein, 9 aa, synthetic construct
  source 1..9: note = Seed: LVVVGAVGV (KRAS G12V)
LVVMGTVGK

SEQ ID NO: 59329 - protein, 9 aa, synthetic construct
  source 1..9: note = Seed: LVVVGAVGV (KRAS G12V)
LVVMGTVGL

SEQ ID NO: 59330 - protein, 9 aa, synthetic construct
  source 1..9: note = Seed: LVVVGAVGV (KRAS G12V)
LVVMGTVGM

SEQ ID NO: 59331 - protein, 9 aa, synthetic construct
  source 1..9: note = Seed: LVVVGAVGV (KRAS G12V)
LVVMGTVGN

SEQ ID NO: 59332 - protein, 9 aa, synthetic construct
  source 1..9: note = Seed: LVVVGAVGV (KRAS G12V)
LVVMGTVGP

SEQ ID NO: 59333 - protein, 9 aa, synthetic construct
  source 1..9: note = Seed: LVVVGAVGV (KRAS G12V)
LVVMGTVGQ

SEQ ID NO: 59334 - protein, 9 aa, synthetic construct
  source 1..9: note = Seed: LVVVGAVGV (KRAS G12V)
LVVMGTVGR

SEQ ID NO: 59335 - protein, 9 aa, synthetic construct
  source 1..9: note = Seed: LVVVGAVGV (KRAS G12V)
LVVMGTVGS

SEQ ID NO: 59336 - protein, 9 aa, synthetic construct
  source 1..9: note = Seed: LVVVGAVGV (KRAS G12V)
LVVMGTVGT

SEQ ID NO: 59337 - protein, 9 aa, synthetic construct
  source 1..9: note = Seed: LVVVGAVGV (KRAS G12V)
LVVMGTVGV

SEQ ID NO: 59338 - protein, 9 aa, synthetic construct
  source 1..9: note = Seed: LVVVGAVGV (KRAS G12V)
LVVMGTVGY

SEQ ID NO: 59339 - protein, 9 aa, synthetic construct
  source 1..9: note = Seed: LVVVGAVGV (KRAS G12V)
LVVMGVVGA

SEQ ID NO: 59340 - protein, 9 aa, synthetic construct
  source 1..9: note = Seed: LVVVGAVGV (KRAS G12V)
LVVMGVVGG

SEQ ID NO: 59341 - protein, 9 aa, synthetic construct
  source 1..9: note = Seed: LVVVGAVGV (KRAS G12V)
LVVMGVVGH

SEQ ID NO: 59342 - protein, 9 aa, synthetic construct
  source 1..9: note = Seed: LVVVGAVGV (KRAS G12V)
LVVMGVVGI

SEQ ID NO: 59343 - protein, 9 aa, synthetic construct
  source 1..9: note = Seed: LVVVGAVGV (KRAS G12V)
LVVMGVVGK

SEQ ID NO: 59344 - protein, 9 aa, synthetic construct
  source 1..9: note = Seed: LVVVGAVGV (KRAS G12V)
LVVMGVVGL

SEQ ID NO: 59345 - protein, 9 aa, synthetic construct
  source 1..9: note = Seed: LVVVGAVGV (KRAS G12V)
LVVMGVVGM

SEQ ID NO: 59346 - protein, 9 aa, synthetic construct
  source 1..9: note = Seed: LVVVGAVGV (KRAS G12V)
LVVMGVVGN

SEQ ID NO: 59347 - protein, 9 aa, synthetic construct
  source 1..9: note = Seed: LVVVGAVGV (KRAS G12V)
LVVMGVVGP

SEQ ID NO: 59348 - protein, 9 aa, synthetic construct
  source 1..9: note = Seed: LVVVGAVGV (KRAS G12V)
LVVMGVVGQ

SEQ ID NO: 59349 - protein, 9 aa, synthetic construct
  source 1..9: note = Seed: LVVVGAVGV (KRAS G12V)
LVVMGVVGR

SEQ ID NO: 59350 - protein, 9 aa, synthetic construct
  source 1..9: note = Seed: LVVVGAVGV (KRAS G12V)
LVVMGVVGS

SEQ ID NO: 59351 - protein, 9 aa, synthetic construct
  source 1..9: note = Seed: LVVVGAVGV (KRAS G12V)
LVVMGVVGT

SEQ ID NO: 59352 - protein, 9 aa, synthetic construct
  source 1..9: note = Seed: LVVVGAVGV (KRAS G12V)
LVVMGVVGV

SEQ ID NO: 59353 - protein, 9 aa, synthetic construct
  source 1..9: note = Seed: LVVVGAVGV (KRAS G12V)
LVVMGVVGY

SEQ ID NO: 59354 - protein, 9 aa, synthetic construct
  source 1..9: note = Seed: LVVVGAVGV (KRAS G12V)
LVVMGYVGA

SEQ ID NO: 59355 - protein, 9 aa, synthetic construct
  source 1..9: note = Seed: LVVVGAVGV (KRAS G12V)
LVVMGYVGL

SEQ ID NO: 59356 - protein, 9 aa, synthetic construct
  source 1..9: note = Seed: LVVVGAVGV (KRAS G12V)
LVVMGYVGM

SEQ ID NO: 59357 - protein, 9 aa, synthetic construct
  source 1..9: note = Seed: LVVVGAVGV (KRAS G12V)
LVVMGYVGR

SEQ ID NO: 59358 - protein, 9 aa, synthetic construct
  source 1..9: note = Seed: LVVVGAVGV (KRAS G12V)
LVVMGYVGS

SEQ ID NO: 59359 - protein, 9 aa, synthetic construct
  source 1..9: note = Seed: LVVVGAVGV (KRAS G12V)
LVVMGYVGV

SEQ ID NO: 59360 - protein, 9 aa, synthetic construct
  source 1..9: note = Seed: LVVVGAVGV (KRAS G12V)
LVVNGAVGA

SEQ ID NO: 59361 - protein, 9 aa, synthetic construct
  source 1..9: note = Seed: LVVVGAVGV (KRAS G12V)
LVVNGAVGC

SEQ ID NO: 59362 - protein, 9 aa, synthetic construct
  source 1..9: note = Seed: LVVVGAVGV (KRAS G12V)
LVVNGAVGD

SEQ ID NO: 59363 - protein, 9 aa, synthetic construct
  source 1..9: note = Seed: LVVVGAVGV (KRAS G12V)
LVVNGAVGE

SEQ ID NO: 59364 - protein, 9 aa, synthetic construct
  source 1..9: note = Seed: LVVVGAVGV (KRAS G12V)
LVVNGAVGF

SEQ ID NO: 59365 - protein, 9 aa, synthetic construct
  source 1..9: note = Seed: LVVVGAVGV (KRAS G12V)
LVVNGAVGG

SEQ ID NO: 59366 - protein, 9 aa, synthetic construct
  source 1..9: note = Seed: LVVVGAVGV (KRAS G12V)
LVVNGAVGH

SEQ ID NO: 59367 - protein, 9 aa, synthetic construct
  source 1..9: note = Seed: LVVVGAVGV (KRAS G12V)
LVVNGAVGI

SEQ ID NO: 59368 - protein, 9 aa, synthetic construct
  source 1..9: note = Seed: LVVVGAVGV (KRAS G12V)
LVVNGAVGK

SEQ ID NO: 59369 - protein, 9 aa, synthetic construct
  source 1..9: note = Seed: LVVVGAVGV (KRAS G12V)
LVVNGAVGL

SEQ ID NO: 59370 - protein, 9 aa, synthetic construct
  source 1..9: note = Seed: LVVVGAVGV (KRAS G12V)
LVVNGAVGM

SEQ ID NO: 59371 - protein, 9 aa, synthetic construct
  source 1..9: note = Seed: LVVVGAVGV (KRAS G12V)
LVVNGAVGN

SEQ ID NO: 59372 - protein, 9 aa, synthetic construct
  source 1..9: note = Seed: LVVVGAVGV (KRAS G12V)
LVVNGAVGP

SEQ ID NO: 59373 - protein, 9 aa, synthetic construct
  source 1..9: note = Seed: LVVVGAVGV (KRAS G12V)
LVVNGAVGQ

SEQ ID NO: 59374 - protein, 9 aa, synthetic construct
  source 1..9: note = Seed: LVVVGAVGV (KRAS G12V)
LVVNGAVGR

SEQ ID NO: 59375 - protein, 9 aa, synthetic construct
  source 1..9: note = Seed: LVVVGAVGV (KRAS G12V)
LVVNGAVGS

SEQ ID NO: 59376 - protein, 9 aa, synthetic construct
  source 1..9: note = Seed: LVVVGAVGV (KRAS G12V)
LVVNGAVGT

SEQ ID NO: 59377 - protein, 9 aa, synthetic construct
  source 1..9: note = Seed: LVVVGAVGV (KRAS G12V)
LVVNGAVGV

SEQ ID NO: 59378 - protein, 9 aa, synthetic construct
  source 1..9: note = Seed: LVVVGAVGV (KRAS G12V)
LVVNGAVGW

SEQ ID NO: 59379 - protein, 9 aa, synthetic construct
  source 1..9: note = Seed: LVVVGAVGV (KRAS G12V)
LVVNGAVGY

SEQ ID NO: 59380 - protein, 9 aa, synthetic construct
  source 1..9: note = Seed: LVVVGAVGV (KRAS G12V)
LVVNGCVGA

SEQ ID NO: 59381 - protein, 9 aa, synthetic construct
  source 1..9: note = Seed: LVVVGAVGV (KRAS G12V)
LVVNGCVGF

SEQ ID NO: 59382 - protein, 9 aa, synthetic construct
  source 1..9: note = Seed: LVVVGAVGV (KRAS G12V)
LVVNGCVGG

SEQ ID NO: 59383 - protein, 9 aa, synthetic construct
  source 1..9: note = Seed: LVVVGAVGV (KRAS G12V)
LVVNGCVGI

SEQ ID NO: 59384 - protein, 9 aa, synthetic construct
  source 1..9: note = Seed: LVVVGAVGV (KRAS G12V)
LVVNGCVGL

SEQ ID NO: 59385 - protein, 9 aa, synthetic construct
  source 1..9: note = Seed: LVVVGAVGV (KRAS G12V)
LVVNGCVGM

SEQ ID NO: 59386 - protein, 9 aa, synthetic construct
  source 1..9: note = Seed: LVVVGAVGV (KRAS G12V)
LVVNGCVGN

SEQ ID NO: 59387 - protein, 9 aa, synthetic construct
  source 1..9: note = Seed: LVVVGAVGV (KRAS G12V)
LVVNGCVGQ

SEQ ID NO: 59388 - protein, 9 aa, synthetic construct
  source 1..9: note = Seed: LVVVGAVGV (KRAS G12V)
LVVNGCVGS

SEQ ID NO: 59389 - protein, 9 aa, synthetic construct
  source 1..9: note = Seed: LVVVGAVGV (KRAS G12V)
LVVNGCVGT

SEQ ID NO: 59390 - protein, 9 aa, synthetic construct
  source 1..9: note = Seed: LVVVGAVGV (KRAS G12V)
LVVNGCVGV

SEQ ID NO: 59391 - protein, 9 aa, synthetic construct
  source 1..9: note = Seed: LVVVGAVGV (KRAS G12V)
LVVNGCVGY

SEQ ID NO: 59392 - protein, 9 aa, synthetic construct
  source 1..9: note = Seed: LVVVGAVGV (KRAS G12V)
LVVNGDVGA

SEQ ID NO: 59393 - protein, 9 aa, synthetic construct
  source 1..9: note = Seed: LVVVGAVGV (KRAS G12V)
LVVNGDVGF

SEQ ID NO: 59394 - protein, 9 aa, synthetic construct
  source 1..9: note = Seed: LVVVGAVGV (KRAS G12V)
LVVNGDVGI

SEQ ID NO: 59395 - protein, 9 aa, synthetic construct
  source 1..9: note = Seed: LVVVGAVGV (KRAS G12V)
LVVNGDVGL

SEQ ID NO: 59396 - protein, 9 aa, synthetic construct
  source 1..9: note = Seed: LVVVGAVGV (KRAS G12V)
LVVNGDVGM

SEQ ID NO: 59397 - protein, 9 aa, synthetic construct
  source 1..9: note = Seed: LVVVGAVGV (KRAS G12V)
LVVNGDVGS

SEQ ID NO: 59398 - protein, 9 aa, synthetic construct
  source 1..9: note = Seed: LVVVGAVGV (KRAS G12V)
LVVNGDVGT

SEQ ID NO: 59399 - protein, 9 aa, synthetic construct
  source 1..9: note = Seed: LVVVGAVGV (KRAS G12V)
LVVNGDVGV

SEQ ID NO: 59400 - protein, 9 aa, synthetic construct
  source 1..9: note = Seed: LVVVGAVGV (KRAS G12V)
LVVNGDVGY

SEQ ID NO: 59401 - protein, 9 aa, synthetic construct
  source 1..9: note = Seed: LVVVGAVGV (KRAS G12V)
LVVNGEVGA

SEQ ID NO: 59402 - protein, 9 aa, synthetic construct
  source 1..9: note = Seed: LVVVGAVGV (KRAS G12V)
LVVNGEVGF

SEQ ID NO: 59403 - protein, 9 aa, synthetic construct
  source 1..9: note = Seed: LVVVGAVGV (KRAS G12V)
LVVNGEVGI

SEQ ID NO: 59404 - protein, 9 aa, synthetic construct
  source 1..9: note = Seed: LVVVGAVGV (KRAS G12V)
LVVNGEVGL

SEQ ID NO: 59405 - protein, 9 aa, synthetic construct
  source 1..9: note = Seed: LVVVGAVGV (KRAS G12V)
LVVNGEVGM

SEQ ID NO: 59406 - protein, 9 aa, synthetic construct
  source 1..9: note = Seed: LVVVGAVGV (KRAS G12V)
LVVNGEVGV

SEQ ID NO: 59407 - protein, 9 aa, synthetic construct
  source 1..9: note = Seed: LVVVGAVGV (KRAS G12V)
LVVNGEVGY

SEQ ID NO: 59408 - protein, 9 aa, synthetic construct
  source 1..9: note = Seed: LVVVGAVGV (KRAS G12V)
LVVNGFVGA

SEQ ID NO: 59409 - protein, 9 aa, synthetic construct
  source 1..9: note = Seed: LVVVGAVGV (KRAS G12V)
LVVNGFVGF

SEQ ID NO: 59410 - protein, 9 aa, synthetic construct
  source 1..9: note = Seed: LVVVGAVGV (KRAS G12V)
LVVNGFVGI

SEQ ID NO: 59411 - protein, 9 aa, synthetic construct
  source 1..9: note = Seed: LVVVGAVGV (KRAS G12V)
LVVNGFVGL

SEQ ID NO: 59412 - protein, 9 aa, synthetic construct
  source 1..9: note = Seed: LVVVGAVGV (KRAS G12V)
LVVNGFVGM

SEQ ID NO: 59413 - protein, 9 aa, synthetic construct
  source 1..9: note = Seed: LVVVGAVGV (KRAS G12V)
LVVNGFVGS

SEQ ID NO: 59414 - protein, 9 aa, synthetic construct
  source 1..9: note = Seed: LVVVGAVGV (KRAS G12V)
LVVNGFVGV

SEQ ID NO: 59415 - protein, 9 aa, synthetic construct
  source 1..9: note = Seed: LVVVGAVGV (KRAS G12V)
LVVNGFVGY

SEQ ID NO: 59416 - protein, 9 aa, synthetic construct
  source 1..9: note = Seed: LVVVGAVGV (KRAS G12V)
LVVNGGVGA

SEQ ID NO: 59417 - protein, 9 aa, synthetic construct
  source 1..9: note = Seed: LVVVGAVGV (KRAS G12V)
LVVNGGVGC

SEQ ID NO: 59418 - protein, 9 aa, synthetic construct
  source 1..9: note = Seed: LVVVGAVGV (KRAS G12V)
LVVNGGVGE

SEQ ID NO: 59419 - protein, 9 aa, synthetic construct
  source 1..9: note = Seed: LVVVGAVGV (KRAS G12V)
LVVNGGVGF

SEQ ID NO: 59420 - protein, 9 aa, synthetic construct
  source 1..9: note = Seed: LVVVGAVGV (KRAS G12V)
LVVNGGVGG

SEQ ID NO: 59421 - protein, 9 aa, synthetic construct
  source 1..9: note = Seed: LVVVGAVGV (KRAS G12V)
LVVNGGVGH

SEQ ID NO: 59422 - protein, 9 aa, synthetic construct
  source 1..9: note = Seed: LVVVGAVGV (KRAS G12V)
LVVNGGVGI

SEQ ID NO: 59423 - protein, 9 aa, synthetic construct
  source 1..9: note = Seed: LVVVGAVGV (KRAS G12V)
LVVNGGVGL

SEQ ID NO: 59424 - protein, 9 aa, synthetic construct
  source 1..9: note = Seed: LVVVGAVGV (KRAS G12V)
LVVNGGVGM

SEQ ID NO: 59425 - protein, 9 aa, synthetic construct
  source 1..9: note = Seed: LVVVGAVGV (KRAS G12V)
LVVNGGVGN

SEQ ID NO: 59426 - protein, 9 aa, synthetic construct
  source 1..9: note = Seed: LVVVGAVGV (KRAS G12V)
LVVNGGVGP

SEQ ID NO: 59427 - protein, 9 aa, synthetic construct
  source 1..9: note = Seed: LVVVGAVGV (KRAS G12V)
LVVNGGVGQ

SEQ ID NO: 59428 - protein, 9 aa, synthetic construct
  source 1..9: note = Seed: LVVVGAVGV (KRAS G12V)
LVVNGGVGS

SEQ ID NO: 59429 - protein, 9 aa, synthetic construct
  source 1..9: note = Seed: LVVVGAVGV (KRAS G12V)
LVVNGGVGT

SEQ ID NO: 59430 - protein, 9 aa, synthetic construct
  source 1..9: note = Seed: LVVVGAVGV (KRAS G12V)
LVVNGGVGV

SEQ ID NO: 59431 - protein, 9 aa, synthetic construct
  source 1..9: note = Seed: LVVVGAVGV (KRAS G12V)
LVVNGGVGW

SEQ ID NO: 59432 - protein, 9 aa, synthetic construct
  source 1..9: note = Seed: LVVVGAVGV (KRAS G12V)
LVVNGGVGY

SEQ ID NO: 59433 - protein, 9 aa, synthetic construct
  source 1..9: note = Seed: LVVVGAVGV (KRAS G12V)
LVVNGHVGA

SEQ ID NO: 59434 - protein, 9 aa, synthetic construct
  source 1..9: note = Seed: LVVVGAVGV (KRAS G12V)
LVVNGHVGF

SEQ ID NO: 59435 - protein, 9 aa, synthetic construct
  source 1..9: note = Seed: LVVVGAVGV (KRAS G12V)
LVVNGHVGI

SEQ ID NO: 59436 - protein, 9 aa, synthetic construct
  source 1..9: note = Seed: LVVVGAVGV (KRAS G12V)
LVVNGHVGL

SEQ ID NO: 59437 - protein, 9 aa, synthetic construct
  source 1..9: note = Seed: LVVVGAVGV (KRAS G12V)
LVVNGHVGM

SEQ ID NO: 59438 - protein, 9 aa, synthetic construct
  source 1..9: note = Seed: LVVVGAVGV (KRAS G12V)
LVVNGHVGS

SEQ ID NO: 59439 - protein, 9 aa, synthetic construct
  source 1..9: note = Seed: LVVVGAVGV (KRAS G12V)
LVVNGHVGT

SEQ ID NO: 59440 - protein, 9 aa, synthetic construct
  source 1..9: note = Seed: LVVVGAVGV (KRAS G12V)
LVVNGHVGV

SEQ ID NO: 59441 - protein, 9 aa, synthetic construct
  source 1..9: note = Seed: LVVVGAVGV (KRAS G12V)
LVVNGHVGW

SEQ ID NO: 59442 - protein, 9 aa, synthetic construct
  source 1..9: note = Seed: LVVVGAVGV (KRAS G12V)
LVVNGHVGY

SEQ ID NO: 59443 - protein, 9 aa, synthetic construct
  source 1..9: note = Seed: LVVVGAVGV (KRAS G12V)
LVVNGIVGA

SEQ ID NO: 59444 - protein, 9 aa, synthetic construct
  source 1..9: note = Seed: LVVVGAVGV (KRAS G12V)
LVVNGIVGC

SEQ ID NO: 59445 - protein, 9 aa, synthetic construct
  source 1..9: note = Seed: LVVVGAVGV (KRAS G12V)
LVVNGIVGD

SEQ ID NO: 59446 - protein, 9 aa, synthetic construct
  source 1..9: note = Seed: LVVVGAVGV (KRAS G12V)
LVVNGIVGE

SEQ ID NO: 59447 - protein, 9 aa, synthetic construct
  source 1..9: note = Seed: LVVVGAVGV (KRAS G12V)
LVVNGIVGF

SEQ ID NO: 59448 - protein, 9 aa, synthetic construct
  source 1..9: note = Seed: LVVVGAVGV (KRAS G12V)
LVVNGIVGG

SEQ ID NO: 59449 - protein, 9 aa, synthetic construct
  source 1..9: note = Seed: LVVVGAVGV (KRAS G12V)
LVVNGIVGH

SEQ ID NO: 59450 - protein, 9 aa, synthetic construct
  source 1..9: note = Seed: LVVVGAVGV (KRAS G12V)
LVVNGIVGI

SEQ ID NO: 59451 - protein, 9 aa, synthetic construct
  source 1..9: note = Seed: LVVVGAVGV (KRAS G12V)
LVVNGIVGK

SEQ ID NO: 59452 - protein, 9 aa, synthetic construct
  source 1..9: note = Seed: LVVVGAVGV (KRAS G12V)
LVVNGIVGL

SEQ ID NO: 59453 - protein, 9 aa, synthetic construct
  source 1..9: note = Seed: LVVVGAVGV (KRAS G12V)
LVVNGIVGM

SEQ ID NO: 59454 - protein, 9 aa, synthetic construct
  source 1..9: note = Seed: LVVVGAVGV (KRAS G12V)
LVVNGIVGN

SEQ ID NO: 59455 - protein, 9 aa, synthetic construct
  source 1..9: note = Seed: LVVVGAVGV (KRAS G12V)
LVVNGIVGP

SEQ ID NO: 59456 - protein, 9 aa, synthetic construct
  source 1..9: note = Seed: LVVVGAVGV (KRAS G12V)
LVVNGIVGQ

SEQ ID NO: 59457 - protein, 9 aa, synthetic construct
  source 1..9: note = Seed: LVVVGAVGV (KRAS G12V)
LVVNGIVGR

SEQ ID NO: 59458 - protein, 9 aa, synthetic construct
  source 1..9: note = Seed: LVVVGAVGV (KRAS G12V)
LVVNGIVGS

SEQ ID NO: 59459 - protein, 9 aa, synthetic construct
  source 1..9: note = Seed: LVVVGAVGV (KRAS G12V)
LVVNGIVGT

SEQ ID NO: 59460 - protein, 9 aa, synthetic construct
  source 1..9: note = Seed: LVVVGAVGV (KRAS G12V)
LVVNGIVGV

SEQ ID NO: 59461 - protein, 9 aa, synthetic construct
  source 1..9: note = Seed: LVVVGAVGV (KRAS G12V)
LVVNGIVGW

SEQ ID NO: 59462 - protein, 9 aa, synthetic construct
  source 1..9: note = Seed: LVVVGAVGV (KRAS G12V)
LVVNGIVGY

SEQ ID NO: 59463 - protein, 9 aa, synthetic construct
  source 1..9: note = Seed: LVVVGAVGV (KRAS G12V)
LVVNGKVGA

SEQ ID NO: 59464 - protein, 9 aa, synthetic construct
  source 1..9: note = Seed: LVVVGAVGV (KRAS G12V)
LVVNGKVGF

SEQ ID NO: 59465 - protein, 9 aa, synthetic construct
  source 1..9: note = Seed: LVVVGAVGV (KRAS G12V)
LVVNGKVGI

SEQ ID NO: 59466 - protein, 9 aa, synthetic construct
  source 1..9: note = Seed: LVVVGAVGV (KRAS G12V)
LVVNGKVGL

SEQ ID NO: 59467 - protein, 9 aa, synthetic construct
  source 1..9: note = Seed: LVVVGAVGV (KRAS G12V)
LVVNGKVGM

SEQ ID NO: 59468 - protein, 9 aa, synthetic construct
  source 1..9: note = Seed: LVVVGAVGV (KRAS G12V)
LVVNGKVGS

SEQ ID NO: 59469 - protein, 9 aa, synthetic construct
  source 1..9: note = Seed: LVVVGAVGV (KRAS G12V)
LVVNGKVGV

SEQ ID NO: 59470 - protein, 9 aa, synthetic construct
  source 1..9: note = Seed: LVVVGAVGV (KRAS G12V)
LVVNGKVGY

SEQ ID NO: 59471 - protein, 9 aa, synthetic construct
  source 1..9: note = Seed: LVVVGAVGV (KRAS G12V)
LVVNGLVGA

SEQ ID NO: 59472 - protein, 9 aa, synthetic construct
  source 1..9: note = Seed: LVVVGAVGV (KRAS G12V)
LVVNGLVGF

SEQ ID NO: 59473 - protein, 9 aa, synthetic construct
  source 1..9: note = Seed: LVVVGAVGV (KRAS G12V)
LVVNGLVGG

SEQ ID NO: 59474 - protein, 9 aa, synthetic construct
  source 1..9: note = Seed: LVVVGAVGV (KRAS G12V)
LVVNGLVGH

SEQ ID NO: 59475 - protein, 9 aa, synthetic construct
  source 1..9: note = Seed: LVVVGAVGV (KRAS G12V)
LVVNGLVGI

SEQ ID NO: 59476 - protein, 9 aa, synthetic construct
  source 1..9: note = Seed: LVVVGAVGV (KRAS G12V)
LVVNGLVGK

SEQ ID NO: 59477 - protein, 9 aa, synthetic construct
  source 1..9: note = Seed: LVVVGAVGV (KRAS G12V)
LVVNGLVGL

SEQ ID NO: 59478 - protein, 9 aa, synthetic construct
  source 1..9: note = Seed: LVVVGAVGV (KRAS G12V)
LVVNGLVGM

SEQ ID NO: 59479 - protein, 9 aa, synthetic construct
  source 1..9: note = Seed: LVVVGAVGV (KRAS G12V)
LVVNGLVGN

SEQ ID NO: 59480 - protein, 9 aa, synthetic construct
  source 1..9: note = Seed: LVVVGAVGV (KRAS G12V)
LVVNGLVGQ

SEQ ID NO: 59481 - protein, 9 aa, synthetic construct
  source 1..9: note = Seed: LVVVGAVGV (KRAS G12V)
LVVNGLVGR

SEQ ID NO: 59482 - protein, 9 aa, synthetic construct
  source 1..9: note = Seed: LVVVGAVGV (KRAS G12V)
LVVNGLVGS

SEQ ID NO: 59483 - protein, 9 aa, synthetic construct
  source 1..9: note = Seed: LVVVGAVGV (KRAS G12V)
LVVNGLVGT

SEQ ID NO: 59484 - protein, 9 aa, synthetic construct
  source 1..9: note = Seed: LVVVGAVGV (KRAS G12V)
LVVNGLVGV

SEQ ID NO: 59485 - protein, 9 aa, synthetic construct
  source 1..9: note = Seed: LVVVGAVGV (KRAS G12V)
LVVNGLVGY

SEQ ID NO: 59486 - protein, 9 aa, synthetic construct
  source 1..9: note = Seed: LVVVGAVGV (KRAS G12V)
LVVNGMVGA

SEQ ID NO: 59487 - protein, 9 aa, synthetic construct
  source 1..9: note = Seed: LVVVGAVGV (KRAS G12V)
LVVNGMVGC

SEQ ID NO: 59488 - protein, 9 aa, synthetic construct
  source 1..9: note = Seed: LVVVGAVGV (KRAS G12V)
LVVNGMVGF

SEQ ID NO: 59489 - protein, 9 aa, synthetic construct
  source 1..9: note = Seed: LVVVGAVGV (KRAS G12V)
LVVNGMVGH

SEQ ID NO: 59490 - protein, 9 aa, synthetic construct
  source 1..9: note = Seed: LVVVGAVGV (KRAS G12V)
LVVNGMVGI

SEQ ID NO: 59491 - protein, 9 aa, synthetic construct
  source 1..9: note = Seed: LVVVGAVGV (KRAS G12V)
LVVNGMVGL

SEQ ID NO: 59492 - protein, 9 aa, synthetic construct
  source 1..9: note = Seed: LVVVGAVGV (KRAS G12V)
LVVNGMVGM

SEQ ID NO: 59493 - protein, 9 aa, synthetic construct
  source 1..9: note = Seed: LVVVGAVGV (KRAS G12V)
LVVNGMVGN

SEQ ID NO: 59494 - protein, 9 aa, synthetic construct
  source 1..9: note = Seed: LVVVGAVGV (KRAS G12V)
LVVNGMVGQ

SEQ ID NO: 59495 - protein, 9 aa, synthetic construct
  source 1..9: note = Seed: LVVVGAVGV (KRAS G12V)
LVVNGMVGR

SEQ ID NO: 59496 - protein, 9 aa, synthetic construct
  source 1..9: note = Seed: LVVVGAVGV (KRAS G12V)
LVVNGMVGS

SEQ ID NO: 59497 - protein, 9 aa, synthetic construct
  source 1..9: note = Seed: LVVVGAVGV (KRAS G12V)
LVVNGMVGT

SEQ ID NO: 59498 - protein, 9 aa, synthetic construct
  source 1..9: note = Seed: LVVVGAVGV (KRAS G12V)
LVVNGMVGV

SEQ ID NO: 59499 - protein, 9 aa, synthetic construct
  source 1..9: note = Seed: LVVVGAVGV (KRAS G12V)
LVVNGMVGY

SEQ ID NO: 59500 - protein, 9 aa, synthetic construct
  source 1..9: note = Seed: LVVVGAVGV (KRAS G12V)
LVVNGNVGA

SEQ ID NO: 59501 - protein, 9 aa, synthetic construct
  source 1..9: note = Seed: LVVVGAVGV (KRAS G12V)
LVVNGNVGC

SEQ ID NO: 59502 - protein, 9 aa, synthetic construct
  source 1..9: note = Seed: LVVVGAVGV (KRAS G12V)
LVVNGNVGD

SEQ ID NO: 59503 - protein, 9 aa, synthetic construct
  source 1..9: note = Seed: LVVVGAVGV (KRAS G12V)
LVVNGNVGE

SEQ ID NO: 59504 - protein, 9 aa, synthetic construct
  source 1..9: note = Seed: LVVVGAVGV (KRAS G12V)
LVVNGNVGF

SEQ ID NO: 59505 - protein, 9 aa, synthetic construct
  source 1..9: note = Seed: LVVVGAVGV (KRAS G12V)
LVVNGNVGG

SEQ ID NO: 59506 - protein, 9 aa, synthetic construct
  source 1..9: note = Seed: LVVVGAVGV (KRAS G12V)
LVVNGNVGH

SEQ ID NO: 59507 - protein, 9 aa, synthetic construct
  source 1..9: note = Seed: LVVVGAVGV (KRAS G12V)
LVVNGNVGI

SEQ ID NO: 59508 - protein, 9 aa, synthetic construct
  source 1..9: note = Seed: LVVVGAVGV (KRAS G12V)
LVVNGNVGK

SEQ ID NO: 59509 - protein, 9 aa, synthetic construct
  source 1..9: note = Seed: LVVVGAVGV (KRAS G12V)
LVVNGNVGL

SEQ ID NO: 59510 - protein, 9 aa, synthetic construct
  source 1..9: note = Seed: LVVVGAVGV (KRAS G12V)
LVVNGNVGM

SEQ ID NO: 59511 - protein, 9 aa, synthetic construct
  source 1..9: note = Seed: LVVVGAVGV (KRAS G12V)
LVVNGNVGN

SEQ ID NO: 59512 - protein, 9 aa, synthetic construct
  source 1..9: note = Seed: LVVVGAVGV (KRAS G12V)
LVVNGNVGP

SEQ ID NO: 59513 - protein, 9 aa, synthetic construct
  source 1..9: note = Seed: LVVVGAVGV (KRAS G12V)
LVVNGNVGQ

SEQ ID NO: 59514 - protein, 9 aa, synthetic construct
  source 1..9: note = Seed: LVVVGAVGV (KRAS G12V)
LVVNGNVGR

SEQ ID NO: 59515 - protein, 9 aa, synthetic construct
  source 1..9: note = Seed: LVVVGAVGV (KRAS G12V)
LVVNGNVGS

SEQ ID NO: 59516 - protein, 9 aa, synthetic construct
  source 1..9: note = Seed: LVVVGAVGV (KRAS G12V)
LVVNGNVGT

SEQ ID NO: 59517 - protein, 9 aa, synthetic construct
  source 1..9: note = Seed: LVVVGAVGV (KRAS G12V)
LVVNGNVGV

SEQ ID NO: 59518 - protein, 9 aa, synthetic construct
  source 1..9: note = Seed: LVVVGAVGV (KRAS G12V)
LVVNGNVGW

SEQ ID NO: 59519 - protein, 9 aa, synthetic construct
  source 1..9: note = Seed: LVVVGAVGV (KRAS G12V)
LVVNGNVGY

SEQ ID NO: 59520 - protein, 9 aa, synthetic construct
  source 1..9: note = Seed: LVVVGAVGV (KRAS G12V)
LVVNGPVGA

SEQ ID NO: 59521 - protein, 9 aa, synthetic construct
  source 1..9: note = Seed: LVVVGAVGV (KRAS G12V)
LVVNGPVGC

SEQ ID NO: 59522 - protein, 9 aa, synthetic construct
  source 1..9: note = Seed: LVVVGAVGV (KRAS G12V)
LVVNGPVGE

SEQ ID NO: 59523 - protein, 9 aa, synthetic construct
  source 1..9: note = Seed: LVVVGAVGV (KRAS G12V)
LVVNGPVGF

SEQ ID NO: 59524 - protein, 9 aa, synthetic construct
  source 1..9: note = Seed: LVVVGAVGV (KRAS G12V)
LVVNGPVGG

SEQ ID NO: 59525 - protein, 9 aa, synthetic construct
  source 1..9: note = Seed: LVVVGAVGV (KRAS G12V)
LVVNGPVGH

SEQ ID NO: 59526 - protein, 9 aa, synthetic construct
  source 1..9: note = Seed: LVVVGAVGV (KRAS G12V)
LVVNGPVGI

SEQ ID NO: 59527 - protein, 9 aa, synthetic construct
  source 1..9: note = Seed: LVVVGAVGV (KRAS G12V)
LVVNGPVGK

SEQ ID NO: 59528 - protein, 9 aa, synthetic construct
  source 1..9: note = Seed: LVVVGAVGV (KRAS G12V)
LVVNGPVGL

SEQ ID NO: 59529 - protein, 9 aa, synthetic construct
  source 1..9: note = Seed: LVVVGAVGV (KRAS G12V)
LVVNGPVGM

SEQ ID NO: 59530 - protein, 9 aa, synthetic construct
  source 1..9: note = Seed: LVVVGAVGV (KRAS G12V)
LVVNGPVGN

SEQ ID NO: 59531 - protein, 9 aa, synthetic construct
  source 1..9: note = Seed: LVVVGAVGV (KRAS G12V)
LVVNGPVGP

SEQ ID NO: 59532 - protein, 9 aa, synthetic construct
  source 1..9: note = Seed: LVVVGAVGV (KRAS G12V)
LVVNGPVGQ

SEQ ID NO: 59533 - protein, 9 aa, synthetic construct
  source 1..9: note = Seed: LVVVGAVGV (KRAS G12V)
LVVNGPVGR

SEQ ID NO: 59534 - protein, 9 aa, synthetic construct
  source 1..9: note = Seed: LVVVGAVGV (KRAS G12V)
LVVNGPVGS

SEQ ID NO: 59535 - protein, 9 aa, synthetic construct
  source 1..9: note = Seed: LVVVGAVGV (KRAS G12V)
LVVNGPVGT

SEQ ID NO: 59536 - protein, 9 aa, synthetic construct
  source 1..9: note = Seed: LVVVGAVGV (KRAS G12V)
LVVNGPVGV

SEQ ID NO: 59537 - protein, 9 aa, synthetic construct
  source 1..9: note = Seed: LVVVGAVGV (KRAS G12V)
LVVNGPVGW

SEQ ID NO: 59538 - protein, 9 aa, synthetic construct
  source 1..9: note = Seed: LVVVGAVGV (KRAS G12V)
LVVNGPVGY

SEQ ID NO: 59539 - protein, 9 aa, synthetic construct
  source 1..9: note = Seed: LVVVGAVGV (KRAS G12V)
LVVNGQVGA

SEQ ID NO: 59540 - protein, 9 aa, synthetic construct
  source 1..9: note = Seed: LVVVGAVGV (KRAS G12V)
LVVNGQVGC

SEQ ID NO: 59541 - protein, 9 aa, synthetic construct
  source 1..9: note = Seed: LVVVGAVGV (KRAS G12V)
LVVNGQVGF

SEQ ID NO: 59542 - protein, 9 aa, synthetic construct
  source 1..9: note = Seed: LVVVGAVGV (KRAS G12V)
LVVNGQVGI

SEQ ID NO: 59543 - protein, 9 aa, synthetic construct
  source 1..9: note = Seed: LVVVGAVGV (KRAS G12V)
LVVNGQVGL

SEQ ID NO: 59544 - protein, 9 aa, synthetic construct
  source 1..9: note = Seed: LVVVGAVGV (KRAS G12V)
LVVNGQVGM

SEQ ID NO: 59545 - protein, 9 aa, synthetic construct
  source 1..9: note = Seed: LVVVGAVGV (KRAS G12V)
LVVNGQVGS

SEQ ID NO: 59546 - protein, 9 aa, synthetic construct
  source 1..9: note = Seed: LVVVGAVGV (KRAS G12V)
LVVNGQVGT

SEQ ID NO: 59547 - protein, 9 aa, synthetic construct
  source 1..9: note = Seed: LVVVGAVGV (KRAS G12V)
LVVNGQVGV

SEQ ID NO: 59548 - protein, 9 aa, synthetic construct
  source 1..9: note = Seed: LVVVGAVGV (KRAS G12V)
LVVNGQVGY

SEQ ID NO: 59549 - protein, 9 aa, synthetic construct
  source 1..9: note = Seed: LVVVGAVGV (KRAS G12V)
LVVNGRVGA

SEQ ID NO: 59550 - protein, 9 aa, synthetic construct
  source 1..9: note = Seed: LVVVGAVGV (KRAS G12V)
LVVNGRVGF

SEQ ID NO: 59551 - protein, 9 aa, synthetic construct
  source 1..9: note = Seed: LVVVGAVGV (KRAS G12V)
LVVNGRVGI

SEQ ID NO: 59552 - protein, 9 aa, synthetic construct
  source 1..9: note = Seed: LVVVGAVGV (KRAS G12V)
LVVNGRVGL

SEQ ID NO: 59553 - protein, 9 aa, synthetic construct
  source 1..9: note = Seed: LVVVGAVGV (KRAS G12V)
LVVNGRVGM

SEQ ID NO: 59554 - protein, 9 aa, synthetic construct
  source 1..9: note = Seed: LVVVGAVGV (KRAS G12V)
LVVNGRVGR

SEQ ID NO: 59555 - protein, 9 aa, synthetic construct
  source 1..9: note = Seed: LVVVGAVGV (KRAS G12V)
LVVNGRVGS

SEQ ID NO: 59556 - protein, 9 aa, synthetic construct
  source 1..9: note = Seed: LVVVGAVGV (KRAS G12V)
LVVNGRVGV

SEQ ID NO: 59557 - protein, 9 aa, synthetic construct
  source 1..9: note = Seed: LVVVGAVGV (KRAS G12V)
LVVNGRVGY

SEQ ID NO: 59558 - protein, 9 aa, synthetic construct
  source 1..9: note = Seed: LVVVGAVGV (KRAS G12V)
LVVNGSVGA

SEQ ID NO: 59559 - protein, 9 aa, synthetic construct
  source 1..9: note = Seed: LVVVGAVGV (KRAS G12V)
LVVNGSVGC

SEQ ID NO: 59560 - protein, 9 aa, synthetic construct
  source 1..9: note = Seed: LVVVGAVGV (KRAS G12V)
LVVNGSVGD

SEQ ID NO: 59561 - protein, 9 aa, synthetic construct
  source 1..9: note = Seed: LVVVGAVGV (KRAS G12V)
LVVNGSVGE

SEQ ID NO: 59562 - protein, 9 aa, synthetic construct
  source 1..9: note = Seed: LVVVGAVGV (KRAS G12V)
LVVNGSVGF

SEQ ID NO: 59563 - protein, 9 aa, synthetic construct
  source 1..9: note = Seed: LVVVGAVGV (KRAS G12V)
LVVNGSVGG

SEQ ID NO: 59564 - protein, 9 aa, synthetic construct
  source 1..9: note = Seed: LVVVGAVGV (KRAS G12V)
LVVNGSVGH

SEQ ID NO: 59565 - protein, 9 aa, synthetic construct
  source 1..9: note = Seed: LVVVGAVGV (KRAS G12V)
LVVNGSVGI

SEQ ID NO: 59566 - protein, 9 aa, synthetic construct
  source 1..9: note = Seed: LVVVGAVGV (KRAS G12V)
LVVNGSVGK

SEQ ID NO: 59567 - protein, 9 aa, synthetic construct
  source 1..9: note = Seed: LVVVGAVGV (KRAS G12V)
LVVNGSVGL

SEQ ID NO: 59568 - protein, 9 aa, synthetic construct
  source 1..9: note = Seed: LVVVGAVGV (KRAS G12V)
LVVNGSVGM

SEQ ID NO: 59569 - protein, 9 aa, synthetic construct
  source 1..9: note = Seed: LVVVGAVGV (KRAS G12V)
LVVNGSVGN

SEQ ID NO: 59570 - protein, 9 aa, synthetic construct
  source 1..9: note = Seed: LVVVGAVGV (KRAS G12V)
LVVNGSVGP

SEQ ID NO: 59571 - protein, 9 aa, synthetic construct
  source 1..9: note = Seed: LVVVGAVGV (KRAS G12V)
LVVNGSVGQ

SEQ ID NO: 59572 - protein, 9 aa, synthetic construct
  source 1..9: note = Seed: LVVVGAVGV (KRAS G12V)
LVVNGSVGR

SEQ ID NO: 59573 - protein, 9 aa, synthetic construct
  source 1..9: note = Seed: LVVVGAVGV (KRAS G12V)
LVVNGSVGS

SEQ ID NO: 59574 - protein, 9 aa, synthetic construct
  source 1..9: note = Seed: LVVVGAVGV (KRAS G12V)
LVVNGSVGT

SEQ ID NO: 59575 - protein, 9 aa, synthetic construct
  source 1..9: note = Seed: LVVVGAVGV (KRAS G12V)
LVVNGSVGV

SEQ ID NO: 59576 - protein, 9 aa, synthetic construct
  source 1..9: note = Seed: LVVVGAVGV (KRAS G12V)
LVVNGSVGW

SEQ ID NO: 59577 - protein, 9 aa, synthetic construct
  source 1..9: note = Seed: LVVVGAVGV (KRAS G12V)
LVVNGSVGY

SEQ ID NO: 59578 - protein, 9 aa, synthetic construct
  source 1..9: note = Seed: LVVVGAVGV (KRAS G12V)
LVVNGTVGA

SEQ ID NO: 59579 - protein, 9 aa, synthetic construct
  source 1..9: note = Seed: LVVVGAVGV (KRAS G12V)
LVVNGTVGC

SEQ ID NO: 59580 - protein, 9 aa, synthetic construct
  source 1..9: note = Seed: LVVVGAVGV (KRAS G12V)
LVVNGTVGF

SEQ ID NO: 59581 - protein, 9 aa, synthetic construct
  source 1..9: note = Seed: LVVVGAVGV (KRAS G12V)
LVVNGTVGG

SEQ ID NO: 59582 - protein, 9 aa, synthetic construct
  source 1..9: note = Seed: LVVVGAVGV (KRAS G12V)
LVVNGTVGH

SEQ ID NO: 59583 - protein, 9 aa, synthetic construct
  source 1..9: note = Seed: LVVVGAVGV (KRAS G12V)
LVVNGTVGI

SEQ ID NO: 59584 - protein, 9 aa, synthetic construct
  source 1..9: note = Seed: LVVVGAVGV (KRAS G12V)
LVVNGTVGL

SEQ ID NO: 59585 - protein, 9 aa, synthetic construct
  source 1..9: note = Seed: LVVVGAVGV (KRAS G12V)
LVVNGTVGM

SEQ ID NO: 59586 - protein, 9 aa, synthetic construct
  source 1..9: note = Seed: LVVVGAVGV (KRAS G12V)
LVVNGTVGN

SEQ ID NO: 59587 - protein, 9 aa, synthetic construct
  source 1..9: note = Seed: LVVVGAVGV (KRAS G12V)
LVVNGTVGQ

SEQ ID NO: 59588 - protein, 9 aa, synthetic construct
  source 1..9: note = Seed: LVVVGAVGV (KRAS G12V)
LVVNGTVGR

SEQ ID NO: 59589 - protein, 9 aa, synthetic construct
  source 1..9: note = Seed: LVVVGAVGV (KRAS G12V)
LVVNGTVGS

SEQ ID NO: 59590 - protein, 9 aa, synthetic construct
  source 1..9: note = Seed: LVVVGAVGV (KRAS G12V)
LVVNGTVGT

SEQ ID NO: 59591 - protein, 9 aa, synthetic construct
  source 1..9: note = Seed: LVVVGAVGV (KRAS G12V)
LVVNGTVGV

SEQ ID NO: 59592 - protein, 9 aa, synthetic construct
  source 1..9: note = Seed: LVVVGAVGV (KRAS G12V)
LVVNGTVGW

SEQ ID NO: 59593 - protein, 9 aa, synthetic construct
  source 1..9: note = Seed: LVVVGAVGV (KRAS G12V)
LVVNGTVGY

SEQ ID NO: 59594 - protein, 9 aa, synthetic construct
  source 1..9: note = Seed: LVVVGAVGV (KRAS G12V)
LVVNGVVGA

SEQ ID NO: 59595 - protein, 9 aa, synthetic construct
  source 1..9: note = Seed: LVVVGAVGV (KRAS G12V)
LVVNGVVGC

SEQ ID NO: 59596 - protein, 9 aa, synthetic construct
  source 1..9: note = Seed: LVVVGAVGV (KRAS G12V)
LVVNGVVGD

SEQ ID NO: 59597 - protein, 9 aa, synthetic construct
  source 1..9: note = Seed: LVVVGAVGV (KRAS G12V)
LVVNGVVGE

SEQ ID NO: 59598 - protein, 9 aa, synthetic construct
  source 1..9: note = Seed: LVVVGAVGV (KRAS G12V)
LVVNGVVGF

SEQ ID NO: 59599 - protein, 9 aa, synthetic construct
  source 1..9: note = Seed: LVVVGAVGV (KRAS G12V)
LVVNGVVGG

SEQ ID NO: 59600 - protein, 9 aa, synthetic construct
  source 1..9: note = Seed: LVVVGAVGV (KRAS G12V)
LVVNGVVGH

SEQ ID NO: 59601 - protein, 9 aa, synthetic construct
  source 1..9: note = Seed: LVVVGAVGV (KRAS G12V)
LVVNGVVGI

SEQ ID NO: 59602 - protein, 9 aa, synthetic construct
  source 1..9: note = Seed: LVVVGAVGV (KRAS G12V)
LVVNGVVGK

SEQ ID NO: 59603 - protein, 9 aa, synthetic construct
  source 1..9: note = Seed: LVVVGAVGV (KRAS G12V)
LVVNGVVGL

SEQ ID NO: 59604 - protein, 9 aa, synthetic construct
  source 1..9: note = Seed: LVVVGAVGV (KRAS G12V)
LVVNGVVGM

SEQ ID NO: 59605 - protein, 9 aa, synthetic construct
  source 1..9: note = Seed: LVVVGAVGV (KRAS G12V)
LVVNGVVGN

SEQ ID NO: 59606 - protein, 9 aa, synthetic construct
  source 1..9: note = Seed: LVVVGAVGV (KRAS G12V)
LVVNGVVGP

SEQ ID NO: 59607 - protein, 9 aa, synthetic construct
  source 1..9: note = Seed: LVVVGAVGV (KRAS G12V)
LVVNGVVGQ

SEQ ID NO: 59608 - protein, 9 aa, synthetic construct
  source 1..9: note = Seed: LVVVGAVGV (KRAS G12V)
LVVNGVVGR

SEQ ID NO: 59609 - protein, 9 aa, synthetic construct
  source 1..9: note = Seed: LVVVGAVGV (KRAS G12V)
LVVNGVVGS

SEQ ID NO: 59610 - protein, 9 aa, synthetic construct
  source 1..9: note = Seed: LVVVGAVGV (KRAS G12V)
LVVNGVVGT

SEQ ID NO: 59611 - protein, 9 aa, synthetic construct
  source 1..9: note = Seed: LVVVGAVGV (KRAS G12V)
LVVNGVVGV

SEQ ID NO: 59612 - protein, 9 aa, synthetic construct
  source 1..9: note = Seed: LVVVGAVGV (KRAS G12V)
LVVNGVVGW

SEQ ID NO: 59613 - protein, 9 aa, synthetic construct
  source 1..9: note = Seed: LVVVGAVGV (KRAS G12V)
LVVNGVVGY

SEQ ID NO: 59614 - protein, 9 aa, synthetic construct
  source 1..9: note = Seed: LVVVGAVGV (KRAS G12V)
LVVNGWVGA

SEQ ID NO: 59615 - protein, 9 aa, synthetic construct
  source 1..9: note = Seed: LVVVGAVGV (KRAS G12V)
LVVNGWVGF

SEQ ID NO: 59616 - protein, 9 aa, synthetic construct
  source 1..9: note = Seed: LVVVGAVGV (KRAS G12V)
LVVNGWVGI

SEQ ID NO: 59617 - protein, 9 aa, synthetic construct
  source 1..9: note = Seed: LVVVGAVGV (KRAS G12V)
LVVNGWVGL

SEQ ID NO: 59618 - protein, 9 aa, synthetic construct
  source 1..9: note = Seed: LVVVGAVGV (KRAS G12V)
LVVNGWVGM

SEQ ID NO: 59619 - protein, 9 aa, synthetic construct
  source 1..9: note = Seed: LVVVGAVGV (KRAS G12V)
LVVNGWVGV

SEQ ID NO: 59620 - protein, 9 aa, synthetic construct
  source 1..9: note = Seed: LVVVGAVGV (KRAS G12V)
LVVNGWVGY

SEQ ID NO: 59621 - protein, 9 aa, synthetic construct
  source 1..9: note = Seed: LVVVGAVGV (KRAS G12V)
LVVNGYVGA

SEQ ID NO: 59622 - protein, 9 aa, synthetic construct
  source 1..9: note = Seed: LVVVGAVGV (KRAS G12V)
LVVNGYVGF

SEQ ID NO: 59623 - protein, 9 aa, synthetic construct
  source 1..9: note = Seed: LVVVGAVGV (KRAS G12V)
LVVNGYVGI

SEQ ID NO: 59624 - protein, 9 aa, synthetic construct
  source 1..9: note = Seed: LVVVGAVGV (KRAS G12V)
LVVNGYVGL

SEQ ID NO: 59625 - protein, 9 aa, synthetic construct
  source 1..9: note = Seed: LVVVGAVGV (KRAS G12V)
LVVNGYVGM

SEQ ID NO: 59626 - protein, 9 aa, synthetic construct
  source 1..9: note = Seed: LVVVGAVGV (KRAS G12V)
LVVNGYVGS

SEQ ID NO: 59627 - protein, 9 aa, synthetic construct
  source 1..9: note = Seed: LVVVGAVGV (KRAS G12V)
LVVNGYVGT

SEQ ID NO: 59628 - protein, 9 aa, synthetic construct
  source 1..9: note = Seed: LVVVGAVGV (KRAS G12V)
LVVNGYVGV

SEQ ID NO: 59629 - protein, 9 aa, synthetic construct
  source 1..9: note = Seed: LVVVGAVGV (KRAS G12V)
LVVNGYVGY

SEQ ID NO: 59630 - protein, 9 aa, synthetic construct
  source 1..9: note = Seed: LVVVGAVGV (KRAS G12V)
LVVPGAVGA

SEQ ID NO: 59631 - protein, 9 aa, synthetic construct
  source 1..9: note = Seed: LVVVGAVGV (KRAS G12V)
LVVPGAVGC

SEQ ID NO: 59632 - protein, 9 aa, synthetic construct
  source 1..9: note = Seed: LVVVGAVGV (KRAS G12V)
LVVPGAVGI

SEQ ID NO: 59633 - protein, 9 aa, synthetic construct
  source 1..9: note = Seed: LVVVGAVGV (KRAS G12V)
LVVPGAVGL

SEQ ID NO: 59634 - protein, 9 aa, synthetic construct
  source 1..9: note = Seed: LVVVGAVGV (KRAS G12V)
LVVPGAVGM

SEQ ID NO: 59635 - protein, 9 aa, synthetic construct
  source 1..9: note = Seed: LVVVGAVGV (KRAS G12V)
LVVPGAVGV

SEQ ID NO: 59636 - protein, 9 aa, synthetic construct
  source 1..9: note = Seed: LVVVGAVGV (KRAS G12V)
LVVPGCVGC

SEQ ID NO: 59637 - protein, 9 aa, synthetic construct
  source 1..9: note = Seed: LVVVGAVGV (KRAS G12V)
LVVPGGVGC

SEQ ID NO: 59638 - protein, 9 aa, synthetic construct
  source 1..9: note = Seed: LVVVGAVGV (KRAS G12V)
LVVPGSVGC

SEQ ID NO: 59639 - protein, 9 aa, synthetic construct
  source 1..9: note = Seed: LVVVGAVGV (KRAS G12V)
LVVPGSVGI

SEQ ID NO: 59640 - protein, 9 aa, synthetic construct
  source 1..9: note = Seed: LVVVGAVGV (KRAS G12V)
LVVPGSVGL

SEQ ID NO: 59641 - protein, 9 aa, synthetic construct
  source 1..9: note = Seed: LVVVGAVGV (KRAS G12V)
LVVPGSVGV

SEQ ID NO: 59642 - protein, 9 aa, synthetic construct
  source 1..9: note = Seed: LVVVGAVGV (KRAS G12V)
LVVQGAVGA

SEQ ID NO: 59643 - protein, 9 aa, synthetic construct
  source 1..9: note = Seed: LVVVGAVGV (KRAS G12V)
LVVQGAVGC

SEQ ID NO: 59644 - protein, 9 aa, synthetic construct
  source 1..9: note = Seed: LVVVGAVGV (KRAS G12V)
LVVQGAVGF

SEQ ID NO: 59645 - protein, 9 aa, synthetic construct
  source 1..9: note = Seed: LVVVGAVGV (KRAS G12V)
LVVQGAVGG

SEQ ID NO: 59646 - protein, 9 aa, synthetic construct
  source 1..9: note = Seed: LVVVGAVGV (KRAS G12V)
LVVQGAVGH

SEQ ID NO: 59647 - protein, 9 aa, synthetic construct
  source 1..9: note = Seed: LVVVGAVGV (KRAS G12V)
LVVQGAVGI

SEQ ID NO: 59648 - protein, 9 aa, synthetic construct
  source 1..9: note = Seed: LVVVGAVGV (KRAS G12V)
LVVQGAVGK

SEQ ID NO: 59649 - protein, 9 aa, synthetic construct
  source 1..9: note = Seed: LVVVGAVGV (KRAS G12V)
LVVQGAVGL

SEQ ID NO: 59650 - protein, 9 aa, synthetic construct
  source 1..9: note = Seed: LVVVGAVGV (KRAS G12V)
LVVQGAVGM

SEQ ID NO: 59651 - protein, 9 aa, synthetic construct
  source 1..9: note = Seed: LVVVGAVGV (KRAS G12V)
LVVQGAVGN

SEQ ID NO: 59652 - protein, 9 aa, synthetic construct
  source 1..9: note = Seed: LVVVGAVGV (KRAS G12V)
LVVQGAVGP

SEQ ID NO: 59653 - protein, 9 aa, synthetic construct
  source 1..9: note = Seed: LVVVGAVGV (KRAS G12V)
LVVQGAVGQ

SEQ ID NO: 59654 - protein, 9 aa, synthetic construct
  source 1..9: note = Seed: LVVVGAVGV (KRAS G12V)
LVVQGAVGR

SEQ ID NO: 59655 - protein, 9 aa, synthetic construct
  source 1..9: note = Seed: LVVVGAVGV (KRAS G12V)
LVVQGAVGS

SEQ ID NO: 59656 - protein, 9 aa, synthetic construct
  source 1..9: note = Seed: LVVVGAVGV (KRAS G12V)
LVVQGAVGT

SEQ ID NO: 59657 - protein, 9 aa, synthetic construct
  source 1..9: note = Seed: LVVVGAVGV (KRAS G12V)
LVVQGAVGV

SEQ ID NO: 59658 - protein, 9 aa, synthetic construct
  source 1..9: note = Seed: LVVVGAVGV (KRAS G12V)
LVVQGAVGW

SEQ ID NO: 59659 - protein, 9 aa, synthetic construct
  source 1..9: note = Seed: LVVVGAVGV (KRAS G12V)
LVVQGAVGY

SEQ ID NO: 59660 - protein, 9 aa, synthetic construct
  source 1..9: note = Seed: LVVVGAVGV (KRAS G12V)
LVVQGDVGA

SEQ ID NO: 59661 - protein, 9 aa, synthetic construct
  source 1..9: note = Seed: LVVVGAVGV (KRAS G12V)
LVVQGFVGL

SEQ ID NO: 59662 - protein, 9 aa, synthetic construct
  source 1..9: note = Seed: LVVVGAVGV (KRAS G12V)
LVVQGGVGA

SEQ ID NO: 59663 - protein, 9 aa, synthetic construct
  source 1..9: note = Seed: LVVVGAVGV (KRAS G12V)
LVVQGGVGC

SEQ ID NO: 59664 - protein, 9 aa, synthetic construct
  source 1..9: note = Seed: LVVVGAVGV (KRAS G12V)
LVVQGGVGF

SEQ ID NO: 59665 - protein, 9 aa, synthetic construct
  source 1..9: note = Seed: LVVVGAVGV (KRAS G12V)
LVVQGGVGG

SEQ ID NO: 59666 - protein, 9 aa, synthetic construct
  source 1..9: note = Seed: LVVVGAVGV (KRAS G12V)
LVVQGGVGH

SEQ ID NO: 59667 - protein, 9 aa, synthetic construct
  source 1..9: note = Seed: LVVVGAVGV (KRAS G12V)
LVVQGGVGI

SEQ ID NO: 59668 - protein, 9 aa, synthetic construct
  source 1..9: note = Seed: LVVVGAVGV (KRAS G12V)
LVVQGGVGL

SEQ ID NO: 59669 - protein, 9 aa, synthetic construct
  source 1..9: note = Seed: LVVVGAVGV (KRAS G12V)
LVVQGGVGM

SEQ ID NO: 59670 - protein, 9 aa, synthetic construct
  source 1..9: note = Seed: LVVVGAVGV (KRAS G12V)
LVVQGGVGN

SEQ ID NO: 59671 - protein, 9 aa, synthetic construct
  source 1..9: note = Seed: LVVVGAVGV (KRAS G12V)
LVVQGGVGQ

SEQ ID NO: 59672 - protein, 9 aa, synthetic construct
  source 1..9: note = Seed: LVVVGAVGV (KRAS G12V)
LVVQGGVGS

SEQ ID NO: 59673 - protein, 9 aa, synthetic construct
  source 1..9: note = Seed: LVVVGAVGV (KRAS G12V)
LVVQGGVGT

SEQ ID NO: 59674 - protein, 9 aa, synthetic construct
  source 1..9: note = Seed: LVVVGAVGV (KRAS G12V)
LVVQGGVGV

SEQ ID NO: 59675 - protein, 9 aa, synthetic construct
  source 1..9: note = Seed: LVVVGAVGV (KRAS G12V)
LVVQGGVGY

SEQ ID NO: 59676 - protein, 9 aa, synthetic construct
  source 1..9: note = Seed: LVVVGAVGV (KRAS G12V)
LVVQGHVGA

SEQ ID NO: 59677 - protein, 9 aa, synthetic construct
  source 1..9: note = Seed: LVVVGAVGV (KRAS G12V)
LVVQGHVGI

SEQ ID NO: 59678 - protein, 9 aa, synthetic construct
  source 1..9: note = Seed: LVVVGAVGV (KRAS G12V)
LVVQGHVGL

SEQ ID NO: 59679 - protein, 9 aa, synthetic construct
  source 1..9: note = Seed: LVVVGAVGV (KRAS G12V)
LVVQGHVGM

SEQ ID NO: 59680 - protein, 9 aa, synthetic construct
  source 1..9: note = Seed: LVVVGAVGV (KRAS G12V)
LVVQGHVGV

SEQ ID NO: 59681 - protein, 9 aa, synthetic construct
  source 1..9: note = Seed: LVVVGAVGV (KRAS G12V)
LVVQGHVGY

SEQ ID NO: 59682 - protein, 9 aa, synthetic construct
  source 1..9: note = Seed: LVVVGAVGV (KRAS G12V)
LVVQGIVGA

SEQ ID NO: 59683 - protein, 9 aa, synthetic construct
  source 1..9: note = Seed: LVVVGAVGV (KRAS G12V)
LVVQGIVGI

SEQ ID NO: 59684 - protein, 9 aa, synthetic construct
  source 1..9: note = Seed: LVVVGAVGV (KRAS G12V)
LVVQGIVGL

SEQ ID NO: 59685 - protein, 9 aa, synthetic construct
  source 1..9: note = Seed: LVVVGAVGV (KRAS G12V)
LVVQGIVGM

SEQ ID NO: 59686 - protein, 9 aa, synthetic construct
  source 1..9: note = Seed: LVVVGAVGV (KRAS G12V)
LVVQGIVGS

SEQ ID NO: 59687 - protein, 9 aa, synthetic construct
  source 1..9: note = Seed: LVVVGAVGV (KRAS G12V)
LVVQGIVGT

SEQ ID NO: 59688 - protein, 9 aa, synthetic construct
  source 1..9: note = Seed: LVVVGAVGV (KRAS G12V)
LVVQGIVGV

SEQ ID NO: 59689 - protein, 9 aa, synthetic construct
  source 1..9: note = Seed: LVVVGAVGV (KRAS G12V)
LVVQGKVGA

SEQ ID NO: 59690 - protein, 9 aa, synthetic construct
  source 1..9: note = Seed: LVVVGAVGV (KRAS G12V)
LVVQGKVGF

SEQ ID NO: 59691 - protein, 9 aa, synthetic construct
  source 1..9: note = Seed: LVVVGAVGV (KRAS G12V)
LVVQGKVGG

SEQ ID NO: 59692 - protein, 9 aa, synthetic construct
  source 1..9: note = Seed: LVVVGAVGV (KRAS G12V)
LVVQGKVGH

SEQ ID NO: 59693 - protein, 9 aa, synthetic construct
  source 1..9: note = Seed: LVVVGAVGV (KRAS G12V)
LVVQGKVGI

SEQ ID NO: 59694 - protein, 9 aa, synthetic construct
  source 1..9: note = Seed: LVVVGAVGV (KRAS G12V)
LVVQGKVGL

SEQ ID NO: 59695 - protein, 9 aa, synthetic construct
  source 1..9: note = Seed: LVVVGAVGV (KRAS G12V)
LVVQGKVGM

SEQ ID NO: 59696 - protein, 9 aa, synthetic construct
  source 1..9: note = Seed: LVVVGAVGV (KRAS G12V)
LVVQGKVGQ

SEQ ID NO: 59697 - protein, 9 aa, synthetic construct
  source 1..9: note = Seed: LVVVGAVGV (KRAS G12V)
LVVQGKVGR

SEQ ID NO: 59698 - protein, 9 aa, synthetic construct
  source 1..9: note = Seed: LVVVGAVGV (KRAS G12V)
LVVQGKVGS

SEQ ID NO: 59699 - protein, 9 aa, synthetic construct
  source 1..9: note = Seed: LVVVGAVGV (KRAS G12V)
LVVQGKVGV

SEQ ID NO: 59700 - protein, 9 aa, synthetic construct
  source 1..9: note = Seed: LVVVGAVGV (KRAS G12V)
LVVQGKVGY

SEQ ID NO: 59701 - protein, 9 aa, synthetic construct
  source 1..9: note = Seed: LVVVGAVGV (KRAS G12V)
LVVQGLVGA

SEQ ID NO: 59702 - protein, 9 aa, synthetic construct
  source 1..9: note = Seed: LVVVGAVGV (KRAS G12V)
LVVQGLVGI

SEQ ID NO: 59703 - protein, 9 aa, synthetic construct
  source 1..9: note = Seed: LVVVGAVGV (KRAS G12V)
LVVQGLVGL

SEQ ID NO: 59704 - protein, 9 aa, synthetic construct
  source 1..9: note = Seed: LVVVGAVGV (KRAS G12V)
LVVQGLVGM

SEQ ID NO: 59705 - protein, 9 aa, synthetic construct
  source 1..9: note = Seed: LVVVGAVGV (KRAS G12V)
LVVQGLVGS

SEQ ID NO: 59706 - protein, 9 aa, synthetic construct
  source 1..9: note = Seed: LVVVGAVGV (KRAS G12V)
LVVQGLVGV

SEQ ID NO: 59707 - protein, 9 aa, synthetic construct
  source 1..9: note = Seed: LVVVGAVGV (KRAS G12V)
LVVQGMVGA

SEQ ID NO: 59708 - protein, 9 aa, synthetic construct
  source 1..9: note = Seed: LVVVGAVGV (KRAS G12V)
LVVQGMVGI

SEQ ID NO: 59709 - protein, 9 aa, synthetic construct
  source 1..9: note = Seed: LVVVGAVGV (KRAS G12V)
LVVQGMVGL

SEQ ID NO: 59710 - protein, 9 aa, synthetic construct
  source 1..9: note = Seed: LVVVGAVGV (KRAS G12V)
LVVQGMVGM

SEQ ID NO: 59711 - protein, 9 aa, synthetic construct
  source 1..9: note = Seed: LVVVGAVGV (KRAS G12V)
LVVQGMVGR

SEQ ID NO: 59712 - protein, 9 aa, synthetic construct
  source 1..9: note = Seed: LVVVGAVGV (KRAS G12V)
LVVQGMVGS

SEQ ID NO: 59713 - protein, 9 aa, synthetic construct
  source 1..9: note = Seed: LVVVGAVGV (KRAS G12V)
LVVQGMVGT

SEQ ID NO: 59714 - protein, 9 aa, synthetic construct
  source 1..9: note = Seed: LVVVGAVGV (KRAS G12V)
LVVQGMVGV

SEQ ID NO: 59715 - protein, 9 aa, synthetic construct
  source 1..9: note = Seed: LVVVGAVGV (KRAS G12V)
LVVQGMVGY

SEQ ID NO: 59716 - protein, 9 aa, synthetic construct
  source 1..9: note = Seed: LVVVGAVGV (KRAS G12V)
LVVQGNVGA

SEQ ID NO: 59717 - protein, 9 aa, synthetic construct
  source 1..9: note = Seed: LVVVGAVGV (KRAS G12V)
LVVQGNVGF

SEQ ID NO: 59718 - protein, 9 aa, synthetic construct
  source 1..9: note = Seed: LVVVGAVGV (KRAS G12V)
LVVQGNVGG

SEQ ID NO: 59719 - protein, 9 aa, synthetic construct
  source 1..9: note = Seed: LVVVGAVGV (KRAS G12V)
LVVQGNVGH

SEQ ID NO: 59720 - protein, 9 aa, synthetic construct
  source 1..9: note = Seed: LVVVGAVGV (KRAS G12V)
LVVQGNVGI

SEQ ID NO: 59721 - protein, 9 aa, synthetic construct
  source 1..9: note = Seed: LVVVGAVGV (KRAS G12V)
LVVQGNVGL

SEQ ID NO: 59722 - protein, 9 aa, synthetic construct
  source 1..9: note = Seed: LVVVGAVGV (KRAS G12V)
LVVQGNVGM

SEQ ID NO: 59723 - protein, 9 aa, synthetic construct
  source 1..9: note = Seed: LVVVGAVGV (KRAS G12V)
LVVQGNVGN

SEQ ID NO: 59724 - protein, 9 aa, synthetic construct
  source 1..9: note = Seed: LVVVGAVGV (KRAS G12V)
LVVQGNVGQ

SEQ ID NO: 59725 - protein, 9 aa, synthetic construct
  source 1..9: note = Seed: LVVVGAVGV (KRAS G12V)
LVVQGNVGR

SEQ ID NO: 59726 - protein, 9 aa, synthetic construct
  source 1..9: note = Seed: LVVVGAVGV (KRAS G12V)
LVVQGNVGS

SEQ ID NO: 59727 - protein, 9 aa, synthetic construct
  source 1..9: note = Seed: LVVVGAVGV (KRAS G12V)
LVVQGNVGT

SEQ ID NO: 59728 - protein, 9 aa, synthetic construct
  source 1..9: note = Seed: LVVVGAVGV (KRAS G12V)
LVVQGNVGV

SEQ ID NO: 59729 - protein, 9 aa, synthetic construct
  source 1..9: note = Seed: LVVVGAVGV (KRAS G12V)
LVVQGNVGY

SEQ ID NO: 59730 - protein, 9 aa, synthetic construct
  source 1..9: note = Seed: LVVVGAVGV (KRAS G12V)
LVVQGPVGA

SEQ ID NO: 59731 - protein, 9 aa, synthetic construct
  source 1..9: note = Seed: LVVVGAVGV (KRAS G12V)
LVVQGPVGC

SEQ ID NO: 59732 - protein, 9 aa, synthetic construct
  source 1..9: note = Seed: LVVVGAVGV (KRAS G12V)
LVVQGPVGF

SEQ ID NO: 59733 - protein, 9 aa, synthetic construct
  source 1..9: note = Seed: LVVVGAVGV (KRAS G12V)
LVVQGPVGG

SEQ ID NO: 59734 - protein, 9 aa, synthetic construct
  source 1..9: note = Seed: LVVVGAVGV (KRAS G12V)
LVVQGPVGH

SEQ ID NO: 59735 - protein, 9 aa, synthetic construct
  source 1..9: note = Seed: LVVVGAVGV (KRAS G12V)
LVVQGPVGI

SEQ ID NO: 59736 - protein, 9 aa, synthetic construct
  source 1..9: note = Seed: LVVVGAVGV (KRAS G12V)
LVVQGPVGL

SEQ ID NO: 59737 - protein, 9 aa, synthetic construct
  source 1..9: note = Seed: LVVVGAVGV (KRAS G12V)
LVVQGPVGM

SEQ ID NO: 59738 - protein, 9 aa, synthetic construct
  source 1..9: note = Seed: LVVVGAVGV (KRAS G12V)
LVVQGPVGN

SEQ ID NO: 59739 - protein, 9 aa, synthetic construct
  source 1..9: note = Seed: LVVVGAVGV (KRAS G12V)
LVVQGPVGQ

SEQ ID NO: 59740 - protein, 9 aa, synthetic construct
  source 1..9: note = Seed: LVVVGAVGV (KRAS G12V)
LVVQGPVGR

SEQ ID NO: 59741 - protein, 9 aa, synthetic construct
  source 1..9: note = Seed: LVVVGAVGV (KRAS G12V)
LVVQGPVGS

SEQ ID NO: 59742 - protein, 9 aa, synthetic construct
  source 1..9: note = Seed: LVVVGAVGV (KRAS G12V)
LVVQGPVGT

SEQ ID NO: 59743 - protein, 9 aa, synthetic construct
  source 1..9: note = Seed: LVVVGAVGV (KRAS G12V)
LVVQGPVGV

SEQ ID NO: 59744 - protein, 9 aa, synthetic construct
  source 1..9: note = Seed: LVVVGAVGV (KRAS G12V)
LVVQGPVGW

SEQ ID NO: 59745 - protein, 9 aa, synthetic construct
  source 1..9: note = Seed: LVVVGAVGV (KRAS G12V)
LVVQGPVGY

SEQ ID NO: 59746 - protein, 9 aa, synthetic construct
  source 1..9: note = Seed: LVVVGAVGV (KRAS G12V)
LVVQGQVGI

SEQ ID NO: 59747 - protein, 9 aa, synthetic construct
  source 1..9: note = Seed: LVVVGAVGV (KRAS G12V)
LVVQGQVGL

SEQ ID NO: 59748 - protein, 9 aa, synthetic construct
  source 1..9: note = Seed: LVVVGAVGV (KRAS G12V)
LVVQGQVGV

SEQ ID NO: 59749 - protein, 9 aa, synthetic construct
  source 1..9: note = Seed: LVVVGAVGV (KRAS G12V)
LVVQGRVGA

SEQ ID NO: 59750 - protein, 9 aa, synthetic construct
  source 1..9: note = Seed: LVVVGAVGV (KRAS G12V)
LVVQGRVGF

SEQ ID NO: 59751 - protein, 9 aa, synthetic construct
  source 1..9: note = Seed: LVVVGAVGV (KRAS G12V)
LVVQGRVGG

SEQ ID NO: 59752 - protein, 9 aa, synthetic construct
  source 1..9: note = Seed: LVVVGAVGV (KRAS G12V)
LVVQGRVGH

SEQ ID NO: 59753 - protein, 9 aa, synthetic construct
  source 1..9: note = Seed: LVVVGAVGV (KRAS G12V)
LVVQGRVGI

SEQ ID NO: 59754 - protein, 9 aa, synthetic construct
  source 1..9: note = Seed: LVVVGAVGV (KRAS G12V)
LVVQGRVGK

SEQ ID NO: 59755 - protein, 9 aa, synthetic construct
  source 1..9: note = Seed: LVVVGAVGV (KRAS G12V)
LVVQGRVGL

SEQ ID NO: 59756 - protein, 9 aa, synthetic construct
  source 1..9: note = Seed: LVVVGAVGV (KRAS G12V)
LVVQGRVGM

SEQ ID NO: 59757 - protein, 9 aa, synthetic construct
  source 1..9: note = Seed: LVVVGAVGV (KRAS G12V)
LVVQGRVGN

SEQ ID NO: 59758 - protein, 9 aa, synthetic construct
  source 1..9: note = Seed: LVVVGAVGV (KRAS G12V)
LVVQGRVGQ

SEQ ID NO: 59759 - protein, 9 aa, synthetic construct
  source 1..9: note = Seed: LVVVGAVGV (KRAS G12V)
LVVQGRVGR

SEQ ID NO: 59760 - protein, 9 aa, synthetic construct
  source 1..9: note = Seed: LVVVGAVGV (KRAS G12V)
LVVQGRVGS

SEQ ID NO: 59761 - protein, 9 aa, synthetic construct
  source 1..9: note = Seed: LVVVGAVGV (KRAS G12V)
LVVQGRVGT

SEQ ID NO: 59762 - protein, 9 aa, synthetic construct
  source 1..9: note = Seed: LVVVGAVGV (KRAS G12V)
LVVQGRVGV

SEQ ID NO: 59763 - protein, 9 aa, synthetic construct
  source 1..9: note = Seed: LVVVGAVGV (KRAS G12V)
LVVQGRVGY

SEQ ID NO: 59764 - protein, 9 aa, synthetic construct
  source 1..9: note = Seed: LVVVGAVGV (KRAS G12V)
LVVQGSVGA

SEQ ID NO: 59765 - protein, 9 aa, synthetic construct
  source 1..9: note = Seed: LVVVGAVGV (KRAS G12V)
LVVQGSVGC

SEQ ID NO: 59766 - protein, 9 aa, synthetic construct
  source 1..9: note = Seed: LVVVGAVGV (KRAS G12V)
LVVQGSVGF

SEQ ID NO: 59767 - protein, 9 aa, synthetic construct
  source 1..9: note = Seed: LVVVGAVGV (KRAS G12V)
LVVQGSVGG

SEQ ID NO: 59768 - protein, 9 aa, synthetic construct
  source 1..9: note = Seed: LVVVGAVGV (KRAS G12V)
LVVQGSVGH

SEQ ID NO: 59769 - protein, 9 aa, synthetic construct
  source 1..9: note = Seed: LVVVGAVGV (KRAS G12V)
LVVQGSVGI

SEQ ID NO: 59770 - protein, 9 aa, synthetic construct
  source 1..9: note = Seed: LVVVGAVGV (KRAS G12V)
LVVQGSVGL

SEQ ID NO: 59771 - protein, 9 aa, synthetic construct
  source 1..9: note = Seed: LVVVGAVGV (KRAS G12V)
LVVQGSVGM

SEQ ID NO: 59772 - protein, 9 aa, synthetic construct
  source 1..9: note = Seed: LVVVGAVGV (KRAS G12V)
LVVQGSVGN

SEQ ID NO: 59773 - protein, 9 aa, synthetic construct
  source 1..9: note = Seed: LVVVGAVGV (KRAS G12V)
LVVQGSVGQ

SEQ ID NO: 59774 - protein, 9 aa, synthetic construct
  source 1..9: note = Seed: LVVVGAVGV (KRAS G12V)
LVVQGSVGR

SEQ ID NO: 59775 - protein, 9 aa, synthetic construct
  source 1..9: note = Seed: LVVVGAVGV (KRAS G12V)
LVVQGSVGS

SEQ ID NO: 59776 - protein, 9 aa, synthetic construct
  source 1..9: note = Seed: LVVVGAVGV (KRAS G12V)
LVVQGSVGT

SEQ ID NO: 59777 - protein, 9 aa, synthetic construct
  source 1..9: note = Seed: LVVVGAVGV (KRAS G12V)
LVVQGSVGV

SEQ ID NO: 59778 - protein, 9 aa, synthetic construct
  source 1..9: note = Seed: LVVVGAVGV (KRAS G12V)
LVVQGSVGY

SEQ ID NO: 59779 - protein, 9 aa, synthetic construct
  source 1..9: note = Seed: LVVVGAVGV (KRAS G12V)
LVVQGTVGA

SEQ ID NO: 59780 - protein, 9 aa, synthetic construct
  source 1..9: note = Seed: LVVVGAVGV (KRAS G12V)
LVVQGTVGF

SEQ ID NO: 59781 - protein, 9 aa, synthetic construct
  source 1..9: note = Seed: LVVVGAVGV (KRAS G12V)
LVVQGTVGG

SEQ ID NO: 59782 - protein, 9 aa, synthetic construct
  source 1..9: note = Seed: LVVVGAVGV (KRAS G12V)
LVVQGTVGH

SEQ ID NO: 59783 - protein, 9 aa, synthetic construct
  source 1..9: note = Seed: LVVVGAVGV (KRAS G12V)
LVVQGTVGI

SEQ ID NO: 59784 - protein, 9 aa, synthetic construct
  source 1..9: note = Seed: LVVVGAVGV (KRAS G12V)
LVVQGTVGL

SEQ ID NO: 59785 - protein, 9 aa, synthetic construct
  source 1..9: note = Seed: LVVVGAVGV (KRAS G12V)
LVVQGTVGM

SEQ ID NO: 59786 - protein, 9 aa, synthetic construct
  source 1..9: note = Seed: LVVVGAVGV (KRAS G12V)
LVVQGTVGN

SEQ ID NO: 59787 - protein, 9 aa, synthetic construct
  source 1..9: note = Seed: LVVVGAVGV (KRAS G12V)
LVVQGTVGQ

SEQ ID NO: 59788 - protein, 9 aa, synthetic construct
  source 1..9: note = Seed: LVVVGAVGV (KRAS G12V)
LVVQGTVGS

SEQ ID NO: 59789 - protein, 9 aa, synthetic construct
  source 1..9: note = Seed: LVVVGAVGV (KRAS G12V)
LVVQGTVGT

SEQ ID NO: 59790 - protein, 9 aa, synthetic construct
  source 1..9: note = Seed: LVVVGAVGV (KRAS G12V)
LVVQGTVGV

SEQ ID NO: 59791 - protein, 9 aa, synthetic construct
  source 1..9: note = Seed: LVVVGAVGV (KRAS G12V)
LVVQGTVGY

SEQ ID NO: 59792 - protein, 9 aa, synthetic construct
  source 1..9: note = Seed: LVVVGAVGV (KRAS G12V)
LVVQGVVGA

SEQ ID NO: 59793 - protein, 9 aa, synthetic construct
  source 1..9: note = Seed: LVVVGAVGV (KRAS G12V)
LVVQGVVGI

SEQ ID NO: 59794 - protein, 9 aa, synthetic construct
  source 1..9: note = Seed: LVVVGAVGV (KRAS G12V)
LVVQGVVGL

SEQ ID NO: 59795 - protein, 9 aa, synthetic construct
  source 1..9: note = Seed: LVVVGAVGV (KRAS G12V)
LVVQGVVGM

SEQ ID NO: 59796 - protein, 9 aa, synthetic construct
  source 1..9: note = Seed: LVVVGAVGV (KRAS G12V)
LVVQGVVGN

SEQ ID NO: 59797 - protein, 9 aa, synthetic construct
  source 1..9: note = Seed: LVVVGAVGV (KRAS G12V)
LVVQGVVGR

SEQ ID NO: 59798 - protein, 9 aa, synthetic construct
  source 1..9: note = Seed: LVVVGAVGV (KRAS G12V)
LVVQGVVGS

SEQ ID NO: 59799 - protein, 9 aa, synthetic construct
  source 1..9: note = Seed: LVVVGAVGV (KRAS G12V)
LVVQGVVGT

SEQ ID NO: 59800 - protein, 9 aa, synthetic construct
  source 1..9: note = Seed: LVVVGAVGV (KRAS G12V)
LVVQGVVGV

SEQ ID NO: 59801 - protein, 9 aa, synthetic construct
  source 1..9: note = Seed: LVVVGAVGV (KRAS G12V)
LVVRGAVGF

SEQ ID NO: 59802 - protein, 9 aa, synthetic construct
  source 1..9: note = Seed: LVVVGAVGV (KRAS G12V)
LVVRGAVGI

SEQ ID NO: 59803 - protein, 9 aa, synthetic construct
  source 1..9: note = Seed: LVVVGAVGV (KRAS G12V)
LVVRGAVGK

SEQ ID NO: 59804 - protein, 9 aa, synthetic construct
  source 1..9: note = Seed: LVVVGAVGV (KRAS G12V)
LVVRGAVGL

SEQ ID NO: 59805 - protein, 9 aa, synthetic construct
  source 1..9: note = Seed: LVVVGAVGV (KRAS G12V)
LVVRGAVGM

SEQ ID NO: 59806 - protein, 9 aa, synthetic construct
  source 1..9: note = Seed: LVVVGAVGV (KRAS G12V)
LVVRGAVGR

SEQ ID NO: 59807 - protein, 9 aa, synthetic construct
  source 1..9: note = Seed: LVVVGAVGV (KRAS G12V)
LVVRGAVGV

SEQ ID NO: 59808 - protein, 9 aa, synthetic construct
  source 1..9: note = Seed: LVVVGAVGV (KRAS G12V)
LVVRGAVGY

SEQ ID NO: 59809 - protein, 9 aa, synthetic construct
  source 1..9: note = Seed: LVVVGAVGV (KRAS G12V)
LVVRGHVGA

SEQ ID NO: 59810 - protein, 9 aa, synthetic construct
  source 1..9: note = Seed: LVVVGAVGV (KRAS G12V)
LVVRGHVGF

SEQ ID NO: 59811 - protein, 9 aa, synthetic construct
  source 1..9: note = Seed: LVVVGAVGV (KRAS G12V)
LVVRGHVGH

SEQ ID NO: 59812 - protein, 9 aa, synthetic construct
  source 1..9: note = Seed: LVVVGAVGV (KRAS G12V)
LVVRGHVGI

SEQ ID NO: 59813 - protein, 9 aa, synthetic construct
  source 1..9: note = Seed: LVVVGAVGV (KRAS G12V)
LVVRGHVGK

SEQ ID NO: 59814 - protein, 9 aa, synthetic construct
  source 1..9: note = Seed: LVVVGAVGV (KRAS G12V)
LVVRGHVGL

SEQ ID NO: 59815 - protein, 9 aa, synthetic construct
  source 1..9: note = Seed: LVVVGAVGV (KRAS G12V)
LVVRGHVGM

SEQ ID NO: 59816 - protein, 9 aa, synthetic construct
  source 1..9: note = Seed: LVVVGAVGV (KRAS G12V)
LVVRGHVGR

SEQ ID NO: 59817 - protein, 9 aa, synthetic construct
  source 1..9: note = Seed: LVVVGAVGV (KRAS G12V)
LVVRGHVGY

SEQ ID NO: 59818 - protein, 9 aa, synthetic construct
  source 1..9: note = Seed: LVVVGAVGV (KRAS G12V)
LVVRGIVGH

SEQ ID NO: 59819 - protein, 9 aa, synthetic construct
  source 1..9: note = Seed: LVVVGAVGV (KRAS G12V)
LVVRGIVGK

SEQ ID NO: 59820 - protein, 9 aa, synthetic construct
  source 1..9: note = Seed: LVVVGAVGV (KRAS G12V)
LVVRGIVGM

SEQ ID NO: 59821 - protein, 9 aa, synthetic construct
  source 1..9: note = Seed: LVVVGAVGV (KRAS G12V)
LVVRGIVGR

SEQ ID NO: 59822 - protein, 9 aa, synthetic construct
  source 1..9: note = Seed: LVVVGAVGV (KRAS G12V)
LVVRGKVGA

SEQ ID NO: 59823 - protein, 9 aa, synthetic construct
  source 1..9: note = Seed: LVVVGAVGV (KRAS G12V)
LVVRGKVGC

SEQ ID NO: 59824 - protein, 9 aa, synthetic construct
  source 1..9: note = Seed: LVVVGAVGV (KRAS G12V)
LVVRGKVGF

SEQ ID NO: 59825 - protein, 9 aa, synthetic construct
  source 1..9: note = Seed: LVVVGAVGV (KRAS G12V)
LVVRGKVGG

SEQ ID NO: 59826 - protein, 9 aa, synthetic construct
  source 1..9: note = Seed: LVVVGAVGV (KRAS G12V)
LVVRGKVGH

SEQ ID NO: 59827 - protein, 9 aa, synthetic construct
  source 1..9: note = Seed: LVVVGAVGV (KRAS G12V)
LVVRGKVGI

SEQ ID NO: 59828 - protein, 9 aa, synthetic construct
  source 1..9: note = Seed: LVVVGAVGV (KRAS G12V)
LVVRGKVGK

SEQ ID NO: 59829 - protein, 9 aa, synthetic construct
  source 1..9: note = Seed: LVVVGAVGV (KRAS G12V)
LVVRGKVGL

SEQ ID NO: 59830 - protein, 9 aa, synthetic construct
  source 1..9: note = Seed: LVVVGAVGV (KRAS G12V)
LVVRGKVGM

SEQ ID NO: 59831 - protein, 9 aa, synthetic construct
  source 1..9: note = Seed: LVVVGAVGV (KRAS G12V)
LVVRGKVGN

SEQ ID NO: 59832 - protein, 9 aa, synthetic construct
  source 1..9: note = Seed: LVVVGAVGV (KRAS G12V)
LVVRGKVGQ

SEQ ID NO: 59833 - protein, 9 aa, synthetic construct
  source 1..9: note = Seed: LVVVGAVGV (KRAS G12V)
LVVRGKVGR

SEQ ID NO: 59834 - protein, 9 aa, synthetic construct
  source 1..9: note = Seed: LVVVGAVGV (KRAS G12V)
LVVRGKVGS

SEQ ID NO: 59835 - protein, 9 aa, synthetic construct
  source 1..9: note = Seed: LVVVGAVGV (KRAS G12V)
LVVRGKVGT

SEQ ID NO: 59836 - protein, 9 aa, synthetic construct
  source 1..9: note = Seed: LVVVGAVGV (KRAS G12V)
LVVRGKVGV

SEQ ID NO: 59837 - protein, 9 aa, synthetic construct
  source 1..9: note = Seed: LVVVGAVGV (KRAS G12V)
LVVRGKVGW

SEQ ID NO: 59838 - protein, 9 aa, synthetic construct
  source 1..9: note = Seed: LVVVGAVGV (KRAS G12V)
LVVRGKVGY

SEQ ID NO: 59839 - protein, 9 aa, synthetic construct
  source 1..9: note = Seed: LVVVGAVGV (KRAS G12V)
LVVRGLVGA

SEQ ID NO: 59840 - protein, 9 aa, synthetic construct
  source 1..9: note = Seed: LVVVGAVGV (KRAS G12V)
LVVRGLVGR

SEQ ID NO: 59841 - protein, 9 aa, synthetic construct
  source 1..9: note = Seed: LVVVGAVGV (KRAS G12V)
LVVRGLVGY

SEQ ID NO: 59842 - protein, 9 aa, synthetic construct
  source 1..9: note = Seed: LVVVGAVGV (KRAS G12V)
LVVRGMVGK

SEQ ID NO: 59843 - protein, 9 aa, synthetic construct
  source 1..9: note = Seed: LVVVGAVGV (KRAS G12V)
LVVRGMVGQ

SEQ ID NO: 59844 - protein, 9 aa, synthetic construct
  source 1..9: note = Seed: LVVVGAVGV (KRAS G12V)
LVVRGMVGR

SEQ ID NO: 59845 - protein, 9 aa, synthetic construct
  source 1..9: note = Seed: LVVVGAVGV (KRAS G12V)
LVVRGMVGY

SEQ ID NO: 59846 - protein, 9 aa, synthetic construct
  source 1..9: note = Seed: LVVVGAVGV (KRAS G12V)
LVVRGNVGF

SEQ ID NO: 59847 - protein, 9 aa, synthetic construct
  source 1..9: note = Seed: LVVVGAVGV (KRAS G12V)
LVVRGNVGL

SEQ ID NO: 59848 - protein, 9 aa, synthetic construct
  source 1..9: note = Seed: LVVVGAVGV (KRAS G12V)
LVVRGNVGR

SEQ ID NO: 59849 - protein, 9 aa, synthetic construct
  source 1..9: note = Seed: LVVVGAVGV (KRAS G12V)
LVVRGNVGY

SEQ ID NO: 59850 - protein, 9 aa, synthetic construct
  source 1..9: note = Seed: LVVVGAVGV (KRAS G12V)
LVVRGPVGR

SEQ ID NO: 59851 - protein, 9 aa, synthetic construct
  source 1..9: note = Seed: LVVVGAVGV (KRAS G12V)
LVVRGPVGY

SEQ ID NO: 59852 - protein, 9 aa, synthetic construct
  source 1..9: note = Seed: LVVVGAVGV (KRAS G12V)
LVVRGQVGK

SEQ ID NO: 59853 - protein, 9 aa, synthetic construct
  source 1..9: note = Seed: LVVVGAVGV (KRAS G12V)
LVVRGQVGR

SEQ ID NO: 59854 - protein, 9 aa, synthetic construct
  source 1..9: note = Seed: LVVVGAVGV (KRAS G12V)
LVVRGRVGA

SEQ ID NO: 59855 - protein, 9 aa, synthetic construct
  source 1..9: note = Seed: LVVVGAVGV (KRAS G12V)
LVVRGRVGC

SEQ ID NO: 59856 - protein, 9 aa, synthetic construct
  source 1..9: note = Seed: LVVVGAVGV (KRAS G12V)
LVVRGRVGE

SEQ ID NO: 59857 - protein, 9 aa, synthetic construct
  source 1..9: note = Seed: LVVVGAVGV (KRAS G12V)
LVVRGRVGF

SEQ ID NO: 59858 - protein, 9 aa, synthetic construct
  source 1..9: note = Seed: LVVVGAVGV (KRAS G12V)
LVVRGRVGG

SEQ ID NO: 59859 - protein, 9 aa, synthetic construct
  source 1..9: note = Seed: LVVVGAVGV (KRAS G12V)
LVVRGRVGH

SEQ ID NO: 59860 - protein, 9 aa, synthetic construct
  source 1..9: note = Seed: LVVVGAVGV (KRAS G12V)
LVVRGRVGI

SEQ ID NO: 59861 - protein, 9 aa, synthetic construct
  source 1..9: note = Seed: LVVVGAVGV (KRAS G12V)
LVVRGRVGK

SEQ ID NO: 59862 - protein, 9 aa, synthetic construct
  source 1..9: note = Seed: LVVVGAVGV (KRAS G12V)
LVVRGRVGL

SEQ ID NO: 59863 - protein, 9 aa, synthetic construct
  source 1..9: note = Seed: LVVVGAVGV (KRAS G12V)
LVVRGRVGM

SEQ ID NO: 59864 - protein, 9 aa, synthetic construct
  source 1..9: note = Seed: LVVVGAVGV (KRAS G12V)
LVVRGRVGN

SEQ ID NO: 59865 - protein, 9 aa, synthetic construct
  source 1..9: note = Seed: LVVVGAVGV (KRAS G12V)
LVVRGRVGP

SEQ ID NO: 59866 - protein, 9 aa, synthetic construct
  source 1..9: note = Seed: LVVVGAVGV (KRAS G12V)
LVVRGRVGQ

SEQ ID NO: 59867 - protein, 9 aa, synthetic construct
  source 1..9: note = Seed: LVVVGAVGV (KRAS G12V)
LVVRGRVGR

SEQ ID NO: 59868 - protein, 9 aa, synthetic construct
  source 1..9: note = Seed: LVVVGAVGV (KRAS G12V)
LVVRGRVGS

SEQ ID NO: 59869 - protein, 9 aa, synthetic construct
  source 1..9: note = Seed: LVVVGAVGV (KRAS G12V)
LVVRGRVGT

SEQ ID NO: 59870 - protein, 9 aa, synthetic construct
  source 1..9: note = Seed: LVVVGAVGV (KRAS G12V)
LVVRGRVGV

SEQ ID NO: 59871 - protein, 9 aa, synthetic construct
  source 1..9: note = Seed: LVVVGAVGV (KRAS G12V)
LVVRGRVGW

SEQ ID NO: 59872 - protein, 9 aa, synthetic construct
  source 1..9: note = Seed: LVVVGAVGV (KRAS G12V)
LVVRGRVGY

SEQ ID NO: 59873 - protein, 9 aa, synthetic construct
  source 1..9: note = Seed: LVVVGAVGV (KRAS G12V)
LVVRGSVGF

SEQ ID NO: 59874 - protein, 9 aa, synthetic construct
  source 1..9: note = Seed: LVVVGAVGV (KRAS G12V)
LVVRGSVGL

SEQ ID NO: 59875 - protein, 9 aa, synthetic construct
  source 1..9: note = Seed: LVVVGAVGV (KRAS G12V)
LVVRGSVGM

SEQ ID NO: 59876 - protein, 9 aa, synthetic construct
  source 1..9: note = Seed: LVVVGAVGV (KRAS G12V)
LVVRGSVGR

SEQ ID NO: 59877 - protein, 9 aa, synthetic construct
  source 1..9: note = Seed: LVVVGAVGV (KRAS G12V)
LVVRGSVGY

SEQ ID NO: 59878 - protein, 9 aa, synthetic construct
  source 1..9: note = Seed: LVVVGAVGV (KRAS G12V)
LVVRGTVGF

SEQ ID NO: 59879 - protein, 9 aa, synthetic construct
  source 1..9: note = Seed: LVVVGAVGV (KRAS G12V)
LVVRGTVGQ

SEQ ID NO: 59880 - protein, 9 aa, synthetic construct
  source 1..9: note = Seed: LVVVGAVGV (KRAS G12V)
LVVRGTVGR

SEQ ID NO: 59881 - protein, 9 aa, synthetic construct
  source 1..9: note = Seed: LVVVGAVGV (KRAS G12V)
LVVRGTVGY

SEQ ID NO: 59882 - protein, 9 aa, synthetic construct
  source 1..9: note = Seed: LVVVGAVGV (KRAS G12V)
LVVRGVVGK

SEQ ID NO: 59883 - protein, 9 aa, synthetic construct
  source 1..9: note = Seed: LVVVGAVGV (KRAS G12V)
LVVRGVVGL

SEQ ID NO: 59884 - protein, 9 aa, synthetic construct
  source 1..9: note = Seed: LVVVGAVGV (KRAS G12V)
LVVRGVVGR

SEQ ID NO: 59885 - protein, 9 aa, synthetic construct
  source 1..9: note = Seed: LVVVGAVGV (KRAS G12V)
LVVRGYVGR

SEQ ID NO: 59886 - protein, 9 aa, synthetic construct
  source 1..9: note = Seed: LVVVGAVGV (KRAS G12V)
LVVSGAVGA

SEQ ID NO: 59887 - protein, 9 aa, synthetic construct
  source 1..9: note = Seed: LVVVGAVGV (KRAS G12V)
LVVSGAVGC

SEQ ID NO: 59888 - protein, 9 aa, synthetic construct
  source 1..9: note = Seed: LVVVGAVGV (KRAS G12V)
LVVSGAVGD

SEQ ID NO: 59889 - protein, 9 aa, synthetic construct
  source 1..9: note = Seed: LVVVGAVGV (KRAS G12V)
LVVSGAVGE

SEQ ID NO: 59890 - protein, 9 aa, synthetic construct
  source 1..9: note = Seed: LVVVGAVGV (KRAS G12V)
LVVSGAVGF

SEQ ID NO: 59891 - protein, 9 aa, synthetic construct
  source 1..9: note = Seed: LVVVGAVGV (KRAS G12V)
LVVSGAVGG

SEQ ID NO: 59892 - protein, 9 aa, synthetic construct
  source 1..9: note = Seed: LVVVGAVGV (KRAS G12V)
LVVSGAVGH

SEQ ID NO: 59893 - protein, 9 aa, synthetic construct
  source 1..9: note = Seed: LVVVGAVGV (KRAS G12V)
LVVSGAVGI

SEQ ID NO: 59894 - protein, 9 aa, synthetic construct
  source 1..9: note = Seed: LVVVGAVGV (KRAS G12V)
LVVSGAVGL

SEQ ID NO: 59895 - protein, 9 aa, synthetic construct
  source 1..9: note = Seed: LVVVGAVGV (KRAS G12V)
LVVSGAVGM

SEQ ID NO: 59896 - protein, 9 aa, synthetic construct
  source 1..9: note = Seed: LVVVGAVGV (KRAS G12V)
LVVSGAVGN

SEQ ID NO: 59897 - protein, 9 aa, synthetic construct
  source 1..9: note = Seed: LVVVGAVGV (KRAS G12V)
LVVSGAVGQ

SEQ ID NO: 59898 - protein, 9 aa, synthetic construct
  source 1..9: note = Seed: LVVVGAVGV (KRAS G12V)
LVVSGAVGR

SEQ ID NO: 59899 - protein, 9 aa, synthetic construct
  source 1..9: note = Seed: LVVVGAVGV (KRAS G12V)
LVVSGAVGS

SEQ ID NO: 59900 - protein, 9 aa, synthetic construct
  source 1..9: note = Seed: LVVVGAVGV (KRAS G12V)
LVVSGAVGT

SEQ ID NO: 59901 - protein, 9 aa, synthetic construct
  source 1..9: note = Seed: LVVVGAVGV (KRAS G12V)
LVVSGAVGV

SEQ ID NO: 59902 - protein, 9 aa, synthetic construct
  source 1..9: note = Seed: LVVVGAVGV (KRAS G12V)
LVVSGAVGY

SEQ ID NO: 59903 - protein, 9 aa, synthetic construct
  source 1..9: note = Seed: LVVVGAVGV (KRAS G12V)
LVVSGCVGA

SEQ ID NO: 59904 - protein, 9 aa, synthetic construct
  source 1..9: note = Seed: LVVVGAVGV (KRAS G12V)
LVVSGCVGC

SEQ ID NO: 59905 - protein, 9 aa, synthetic construct
  source 1..9: note = Seed: LVVVGAVGV (KRAS G12V)
LVVSGCVGI

SEQ ID NO: 59906 - protein, 9 aa, synthetic construct
  source 1..9: note = Seed: LVVVGAVGV (KRAS G12V)
LVVSGCVGL

SEQ ID NO: 59907 - protein, 9 aa, synthetic construct
  source 1..9: note = Seed: LVVVGAVGV (KRAS G12V)
LVVSGCVGM

SEQ ID NO: 59908 - protein, 9 aa, synthetic construct
  source 1..9: note = Seed: LVVVGAVGV (KRAS G12V)
LVVSGCVGV

SEQ ID NO: 59909 - protein, 9 aa, synthetic construct
  source 1..9: note = Seed: LVVVGAVGV (KRAS G12V)
LVVSGCVGY

SEQ ID NO: 59910 - protein, 9 aa, synthetic construct
  source 1..9: note = Seed: LVVVGAVGV (KRAS G12V)
LVVSGDVGC

SEQ ID NO: 59911 - protein, 9 aa, synthetic construct
  source 1..9: note = Seed: LVVVGAVGV (KRAS G12V)
LVVSGDVGF

SEQ ID NO: 59912 - protein, 9 aa, synthetic construct
  source 1..9: note = Seed: LVVVGAVGV (KRAS G12V)
LVVSGDVGI

SEQ ID NO: 59913 - protein, 9 aa, synthetic construct
  source 1..9: note = Seed: LVVVGAVGV (KRAS G12V)
LVVSGDVGL

SEQ ID NO: 59914 - protein, 9 aa, synthetic construct
  source 1..9: note = Seed: LVVVGAVGV (KRAS G12V)
LVVSGDVGM

SEQ ID NO: 59915 - protein, 9 aa, synthetic construct
  source 1..9: note = Seed: LVVVGAVGV (KRAS G12V)
LVVSGDVGV

SEQ ID NO: 59916 - protein, 9 aa, synthetic construct
  source 1..9: note = Seed: LVVVGAVGV (KRAS G12V)
LVVSGEVGA

SEQ ID NO: 59917 - protein, 9 aa, synthetic construct
  source 1..9: note = Seed: LVVVGAVGV (KRAS G12V)
LVVSGEVGC

SEQ ID NO: 59918 - protein, 9 aa, synthetic construct
  source 1..9: note = Seed: LVVVGAVGV (KRAS G12V)
LVVSGEVGI

SEQ ID NO: 59919 - protein, 9 aa, synthetic construct
  source 1..9: note = Seed: LVVVGAVGV (KRAS G12V)
LVVSGEVGL

SEQ ID NO: 59920 - protein, 9 aa, synthetic construct
  source 1..9: note = Seed: LVVVGAVGV (KRAS G12V)
LVVSGEVGV

SEQ ID NO: 59921 - protein, 9 aa, synthetic construct
  source 1..9: note = Seed: LVVVGAVGV (KRAS G12V)
LVVSGFVGI

SEQ ID NO: 59922 - protein, 9 aa, synthetic construct
  source 1..9: note = Seed: LVVVGAVGV (KRAS G12V)
LVVSGFVGL

SEQ ID NO: 59923 - protein, 9 aa, synthetic construct
  source 1..9: note = Seed: LVVVGAVGV (KRAS G12V)
LVVSGFVGM

SEQ ID NO: 59924 - protein, 9 aa, synthetic construct
  source 1..9: note = Seed: LVVVGAVGV (KRAS G12V)
LVVSGFVGV

SEQ ID NO: 59925 - protein, 9 aa, synthetic construct
  source 1..9: note = Seed: LVVVGAVGV (KRAS G12V)
LVVSGGVGA

SEQ ID NO: 59926 - protein, 9 aa, synthetic construct
  source 1..9: note = Seed: LVVVGAVGV (KRAS G12V)
LVVSGGVGC

SEQ ID NO: 59927 - protein, 9 aa, synthetic construct
  source 1..9: note = Seed: LVVVGAVGV (KRAS G12V)
LVVSGGVGF

SEQ ID NO: 59928 - protein, 9 aa, synthetic construct
  source 1..9: note = Seed: LVVVGAVGV (KRAS G12V)
LVVSGGVGG

SEQ ID NO: 59929 - protein, 9 aa, synthetic construct
  source 1..9: note = Seed: LVVVGAVGV (KRAS G12V)
LVVSGGVGI

SEQ ID NO: 59930 - protein, 9 aa, synthetic construct
  source 1..9: note = Seed: LVVVGAVGV (KRAS G12V)
LVVSGGVGL

SEQ ID NO: 59931 - protein, 9 aa, synthetic construct
  source 1..9: note = Seed: LVVVGAVGV (KRAS G12V)
LVVSGGVGM

SEQ ID NO: 59932 - protein, 9 aa, synthetic construct
  source 1..9: note = Seed: LVVVGAVGV (KRAS G12V)
LVVSGGVGN

SEQ ID NO: 59933 - protein, 9 aa, synthetic construct
  source 1..9: note = Seed: LVVVGAVGV (KRAS G12V)
LVVSGGVGR

SEQ ID NO: 59934 - protein, 9 aa, synthetic construct
  source 1..9: note = Seed: LVVVGAVGV (KRAS G12V)
LVVSGGVGS

SEQ ID NO: 59935 - protein, 9 aa, synthetic construct
  source 1..9: note = Seed: LVVVGAVGV (KRAS G12V)
LVVSGGVGT

SEQ ID NO: 59936 - protein, 9 aa, synthetic construct
  source 1..9: note = Seed: LVVVGAVGV (KRAS G12V)
LVVSGGVGV

SEQ ID NO: 59937 - protein, 9 aa, synthetic construct
  source 1..9: note = Seed: LVVVGAVGV (KRAS G12V)
LVVSGGVGY

SEQ ID NO: 59938 - protein, 9 aa, synthetic construct
  source 1..9: note = Seed: LVVVGAVGV (KRAS G12V)
LVVSGHVGI

SEQ ID NO: 59939 - protein, 9 aa, synthetic construct
  source 1..9: note = Seed: LVVVGAVGV (KRAS G12V)
LVVSGHVGR

SEQ ID NO: 59940 - protein, 9 aa, synthetic construct
  source 1..9: note = Seed: LVVVGAVGV (KRAS G12V)
LVVSGHVGV

SEQ ID NO: 59941 - protein, 9 aa, synthetic construct
  source 1..9: note = Seed: LVVVGAVGV (KRAS G12V)
LVVSGHVGY

SEQ ID NO: 59942 - protein, 9 aa, synthetic construct
  source 1..9: note = Seed: LVVVGAVGV (KRAS G12V)
LVVSGIVGA

SEQ ID NO: 59943 - protein, 9 aa, synthetic construct
  source 1..9: note = Seed: LVVVGAVGV (KRAS G12V)
LVVSGIVGE

SEQ ID NO: 59944 - protein, 9 aa, synthetic construct
  source 1..9: note = Seed: LVVVGAVGV (KRAS G12V)
LVVSGIVGF

SEQ ID NO: 59945 - protein, 9 aa, synthetic construct
  source 1..9: note = Seed: LVVVGAVGV (KRAS G12V)
LVVSGIVGG

SEQ ID NO: 59946 - protein, 9 aa, synthetic construct
  source 1..9: note = Seed: LVVVGAVGV (KRAS G12V)
LVVSGIVGI

SEQ ID NO: 59947 - protein, 9 aa, synthetic construct
  source 1..9: note = Seed: LVVVGAVGV (KRAS G12V)
LVVSGIVGL

SEQ ID NO: 59948 - protein, 9 aa, synthetic construct
  source 1..9: note = Seed: LVVVGAVGV (KRAS G12V)
LVVSGIVGM

SEQ ID NO: 59949 - protein, 9 aa, synthetic construct
  source 1..9: note = Seed: LVVVGAVGV (KRAS G12V)
LVVSGIVGN

SEQ ID NO: 59950 - protein, 9 aa, synthetic construct
  source 1..9: note = Seed: LVVVGAVGV (KRAS G12V)
LVVSGIVGQ

SEQ ID NO: 59951 - protein, 9 aa, synthetic construct
  source 1..9: note = Seed: LVVVGAVGV (KRAS G12V)
LVVSGIVGR

SEQ ID NO: 59952 - protein, 9 aa, synthetic construct
  source 1..9: note = Seed: LVVVGAVGV (KRAS G12V)
LVVSGIVGS

SEQ ID NO: 59953 - protein, 9 aa, synthetic construct
  source 1..9: note = Seed: LVVVGAVGV (KRAS G12V)
LVVSGIVGT

SEQ ID NO: 59954 - protein, 9 aa, synthetic construct
  source 1..9: note = Seed: LVVVGAVGV (KRAS G12V)
LVVSGIVGV

SEQ ID NO: 59955 - protein, 9 aa, synthetic construct
  source 1..9: note = Seed: LVVVGAVGV (KRAS G12V)
LVVSGIVGY

SEQ ID NO: 59956 - protein, 9 aa, synthetic construct
  source 1..9: note = Seed: LVVVGAVGV (KRAS G12V)
LVVSGKVGA

SEQ ID NO: 59957 - protein, 9 aa, synthetic construct
  source 1..9: note = Seed: LVVVGAVGV (KRAS G12V)
LVVSGKVGF

SEQ ID NO: 59958 - protein, 9 aa, synthetic construct
  source 1..9: note = Seed: LVVVGAVGV (KRAS G12V)
LVVSGKVGG

SEQ ID NO: 59959 - protein, 9 aa, synthetic construct
  source 1..9: note = Seed: LVVVGAVGV (KRAS G12V)
LVVSGKVGH

SEQ ID NO: 59960 - protein, 9 aa, synthetic construct
  source 1..9: note = Seed: LVVVGAVGV (KRAS G12V)
LVVSGKVGI

SEQ ID NO: 59961 - protein, 9 aa, synthetic construct
  source 1..9: note = Seed: LVVVGAVGV (KRAS G12V)
LVVSGKVGK

SEQ ID NO: 59962 - protein, 9 aa, synthetic construct
  source 1..9: note = Seed: LVVVGAVGV (KRAS G12V)
LVVSGKVGL

SEQ ID NO: 59963 - protein, 9 aa, synthetic construct
  source 1..9: note = Seed: LVVVGAVGV (KRAS G12V)
LVVSGKVGM

SEQ ID NO: 59964 - protein, 9 aa, synthetic construct
  source 1..9: note = Seed: LVVVGAVGV (KRAS G12V)
LVVSGKVGQ

SEQ ID NO: 59965 - protein, 9 aa, synthetic construct
  source 1..9: note = Seed: LVVVGAVGV (KRAS G12V)
LVVSGKVGR

SEQ ID NO: 59966 - protein, 9 aa, synthetic construct
  source 1..9: note = Seed: LVVVGAVGV (KRAS G12V)
LVVSGKVGS

SEQ ID NO: 59967 - protein, 9 aa, synthetic construct
  source 1..9: note = Seed: LVVVGAVGV (KRAS G12V)
LVVSGKVGV

SEQ ID NO: 59968 - protein, 9 aa, synthetic construct
  source 1..9: note = Seed: LVVVGAVGV (KRAS G12V)
LVVSGKVGY

SEQ ID NO: 59969 - protein, 9 aa, synthetic construct
  source 1..9: note = Seed: LVVVGAVGV (KRAS G12V)
LVVSGLVGA

SEQ ID NO: 59970 - protein, 9 aa, synthetic construct
  source 1..9: note = Seed: LVVVGAVGV (KRAS G12V)
LVVSGLVGN

SEQ ID NO: 59971 - protein, 9 aa, synthetic construct
  source 1..9: note = Seed: LVVVGAVGV (KRAS G12V)
LVVSGLVGS

SEQ ID NO: 59972 - protein, 9 aa, synthetic construct
  source 1..9: note = Seed: LVVVGAVGV (KRAS G12V)
LVVSGMVGI

SEQ ID NO: 59973 - protein, 9 aa, synthetic construct
  source 1..9: note = Seed: LVVVGAVGV (KRAS G12V)
LVVSGMVGN

SEQ ID NO: 59974 - protein, 9 aa, synthetic construct
  source 1..9: note = Seed: LVVVGAVGV (KRAS G12V)
LVVSGMVGS

SEQ ID NO: 59975 - protein, 9 aa, synthetic construct
  source 1..9: note = Seed: LVVVGAVGV (KRAS G12V)
LVVSGMVGV

SEQ ID NO: 59976 - protein, 9 aa, synthetic construct
  source 1..9: note = Seed: LVVVGAVGV (KRAS G12V)
LVVSGNVGA

SEQ ID NO: 59977 - protein, 9 aa, synthetic construct
  source 1..9: note = Seed: LVVVGAVGV (KRAS G12V)
LVVSGNVGC

SEQ ID NO: 59978 - protein, 9 aa, synthetic construct
  source 1..9: note = Seed: LVVVGAVGV (KRAS G12V)
LVVSGNVGF

SEQ ID NO: 59979 - protein, 9 aa, synthetic construct
  source 1..9: note = Seed: LVVVGAVGV (KRAS G12V)
LVVSGNVGG

SEQ ID NO: 59980 - protein, 9 aa, synthetic construct
  source 1..9: note = Seed: LVVVGAVGV (KRAS G12V)
LVVSGNVGH

SEQ ID NO: 59981 - protein, 9 aa, synthetic construct
  source 1..9: note = Seed: LVVVGAVGV (KRAS G12V)
LVVSGNVGI

SEQ ID NO: 59982 - protein, 9 aa, synthetic construct
  source 1..9: note = Seed: LVVVGAVGV (KRAS G12V)
LVVSGNVGL

SEQ ID NO: 59983 - protein, 9 aa, synthetic construct
  source 1..9: note = Seed: LVVVGAVGV (KRAS G12V)
LVVSGNVGM

SEQ ID NO: 59984 - protein, 9 aa, synthetic construct
  source 1..9: note = Seed: LVVVGAVGV (KRAS G12V)
LVVSGNVGN

SEQ ID NO: 59985 - protein, 9 aa, synthetic construct
  source 1..9: note = Seed: LVVVGAVGV (KRAS G12V)
LVVSGNVGQ

SEQ ID NO: 59986 - protein, 9 aa, synthetic construct
  source 1..9: note = Seed: LVVVGAVGV (KRAS G12V)
LVVSGNVGR

SEQ ID NO: 59987 - protein, 9 aa, synthetic construct
  source 1..9: note = Seed: LVVVGAVGV (KRAS G12V)
LVVSGNVGS

SEQ ID NO: 59988 - protein, 9 aa, synthetic construct
  source 1..9: note = Seed: LVVVGAVGV (KRAS G12V)
LVVSGNVGT

SEQ ID NO: 59989 - protein, 9 aa, synthetic construct
  source 1..9: note = Seed: LVVVGAVGV (KRAS G12V)
LVVSGNVGV

SEQ ID NO: 59990 - protein, 9 aa, synthetic construct
  source 1..9: note = Seed: LVVVGAVGV (KRAS G12V)
LVVSGNVGY

SEQ ID NO: 59991 - protein, 9 aa, synthetic construct
  source 1..9: note = Seed: LVVVGAVGV (KRAS G12V)
LVVSGPVGA

SEQ ID NO: 59992 - protein, 9 aa, synthetic construct
  source 1..9: note = Seed: LVVVGAVGV (KRAS G12V)
LVVSGPVGC

SEQ ID NO: 59993 - protein, 9 aa, synthetic construct
  source 1..9: note = Seed: LVVVGAVGV (KRAS G12V)
LVVSGPVGD

SEQ ID NO: 59994 - protein, 9 aa, synthetic construct
  source 1..9: note = Seed: LVVVGAVGV (KRAS G12V)
LVVSGPVGE

SEQ ID NO: 59995 - protein, 9 aa, synthetic construct
  source 1..9: note = Seed: LVVVGAVGV (KRAS G12V)
LVVSGPVGF

SEQ ID NO: 59996 - protein, 9 aa, synthetic construct
  source 1..9: note = Seed: LVVVGAVGV (KRAS G12V)
LVVSGPVGG

SEQ ID NO: 59997 - protein, 9 aa, synthetic construct
  source 1..9: note = Seed: LVVVGAVGV (KRAS G12V)
LVVSGPVGH

SEQ ID NO: 59998 - protein, 9 aa, synthetic construct
  source 1..9: note = Seed: LVVVGAVGV (KRAS G12V)
LVVSGPVGI

SEQ ID NO: 59999 - protein, 9 aa, synthetic construct
  source 1..9: note = Seed: LVVVGAVGV (KRAS G12V)
LVVSGPVGL

SEQ ID NO: 60000 - protein, 9 aa, synthetic construct
  source 1..9: note = Seed: LVVVGAVGV (KRAS G12V)
LVVSGPVGM

SEQ ID NO: 60001 - protein, 9 aa, synthetic construct
  source 1..9: note = Seed: LVVVGAVGV (KRAS G12V)
LVVSGPVGN

SEQ ID NO: 60002 - protein, 9 aa, synthetic construct
  source 1..9: note = Seed: LVVVGAVGV (KRAS G12V)
LVVSGPVGQ

SEQ ID NO: 60003 - protein, 9 aa, synthetic construct
  source 1..9: note = Seed: LVVVGAVGV (KRAS G12V)
LVVSGPVGS

SEQ ID NO: 60004 - protein, 9 aa, synthetic construct
  source 1..9: note = Seed: LVVVGAVGV (KRAS G12V)
LVVSGPVGT

SEQ ID NO: 60005 - protein, 9 aa, synthetic construct
  source 1..9: note = Seed: LVVVGAVGV (KRAS G12V)
LVVSGPVGV

SEQ ID NO: 60006 - protein, 9 aa, synthetic construct
  source 1..9: note = Seed: LVVVGAVGV (KRAS G12V)
LVVSGPVGY

SEQ ID NO: 60007 - protein, 9 aa, synthetic construct
  source 1..9: note = Seed: LVVVGAVGV (KRAS G12V)
LVVSGQVGI

SEQ ID NO: 60008 - protein, 9 aa, synthetic construct
  source 1..9: note = Seed: LVVVGAVGV (KRAS G12V)
LVVSGQVGL

SEQ ID NO: 60009 - protein, 9 aa, synthetic construct
  source 1..9: note = Seed: LVVVGAVGV (KRAS G12V)
LVVSGQVGV

SEQ ID NO: 60010 - protein, 9 aa, synthetic construct
  source 1..9: note = Seed: LVVVGAVGV (KRAS G12V)
LVVSGRVGA

SEQ ID NO: 60011 - protein, 9 aa, synthetic construct
  source 1..9: note = Seed: LVVVGAVGV (KRAS G12V)
LVVSGRVGF

SEQ ID NO: 60012 - protein, 9 aa, synthetic construct
  source 1..9: note = Seed: LVVVGAVGV (KRAS G12V)
LVVSGRVGG

SEQ ID NO: 60013 - protein, 9 aa, synthetic construct
  source 1..9: note = Seed: LVVVGAVGV (KRAS G12V)
LVVSGRVGH

SEQ ID NO: 60014 - protein, 9 aa, synthetic construct
  source 1..9: note = Seed: LVVVGAVGV (KRAS G12V)
LVVSGRVGI

SEQ ID NO: 60015 - protein, 9 aa, synthetic construct
  source 1..9: note = Seed: LVVVGAVGV (KRAS G12V)
LVVSGRVGK

SEQ ID NO: 60016 - protein, 9 aa, synthetic construct
  source 1..9: note = Seed: LVVVGAVGV (KRAS G12V)
LVVSGRVGL

SEQ ID NO: 60017 - protein, 9 aa, synthetic construct
  source 1..9: note = Seed: LVVVGAVGV (KRAS G12V)
LVVSGRVGM

SEQ ID NO: 60018 - protein, 9 aa, synthetic construct
  source 1..9: note = Seed: LVVVGAVGV (KRAS G12V)
LVVSGRVGN

SEQ ID NO: 60019 - protein, 9 aa, synthetic construct
  source 1..9: note = Seed: LVVVGAVGV (KRAS G12V)
LVVSGRVGQ

SEQ ID NO: 60020 - protein, 9 aa, synthetic construct
  source 1..9: note = Seed: LVVVGAVGV (KRAS G12V)
LVVSGRVGR

SEQ ID NO: 60021 - protein, 9 aa, synthetic construct
  source 1..9: note = Seed: LVVVGAVGV (KRAS G12V)
LVVSGRVGS

SEQ ID NO: 60022 - protein, 9 aa, synthetic construct
  source 1..9: note = Seed: LVVVGAVGV (KRAS G12V)
LVVSGRVGT

SEQ ID NO: 60023 - protein, 9 aa, synthetic construct
  source 1..9: note = Seed: LVVVGAVGV (KRAS G12V)
LVVSGRVGV

SEQ ID NO: 60024 - protein, 9 aa, synthetic construct
  source 1..9: note = Seed: LVVVGAVGV (KRAS G12V)
LVVSGRVGY

SEQ ID NO: 60025 - protein, 9 aa, synthetic construct
  source 1..9: note = Seed: LVVVGAVGV (KRAS G12V)
LVVSGSVGA

SEQ ID NO: 60026 - protein, 9 aa, synthetic construct
  source 1..9: note = Seed: LVVVGAVGV (KRAS G12V)
LVVSGSVGC

SEQ ID NO: 60027 - protein, 9 aa, synthetic construct
  source 1..9: note = Seed: LVVVGAVGV (KRAS G12V)
LVVSGSVGD

SEQ ID NO: 60028 - protein, 9 aa, synthetic construct
  source 1..9: note = Seed: LVVVGAVGV (KRAS G12V)
LVVSGSVGF

SEQ ID NO: 60029 - protein, 9 aa, synthetic construct
  source 1..9: note = Seed: LVVVGAVGV (KRAS G12V)
LVVSGSVGG

SEQ ID NO: 60030 - protein, 9 aa, synthetic construct
  source 1..9: note = Seed: LVVVGAVGV (KRAS G12V)
LVVSGSVGH

SEQ ID NO: 60031 - protein, 9 aa, synthetic construct
  source 1..9: note = Seed: LVVVGAVGV (KRAS G12V)
LVVSGSVGI

SEQ ID NO: 60032 - protein, 9 aa, synthetic construct
  source 1..9: note = Seed: LVVVGAVGV (KRAS G12V)
LVVSGSVGL

SEQ ID NO: 60033 - protein, 9 aa, synthetic construct
  source 1..9: note = Seed: LVVVGAVGV (KRAS G12V)
LVVSGSVGM

SEQ ID NO: 60034 - protein, 9 aa, synthetic construct
  source 1..9: note = Seed: LVVVGAVGV (KRAS G12V)
LVVSGSVGN

SEQ ID NO: 60035 - protein, 9 aa, synthetic construct
  source 1..9: note = Seed: LVVVGAVGV (KRAS G12V)
LVVSGSVGQ

SEQ ID NO: 60036 - protein, 9 aa, synthetic construct
  source 1..9: note = Seed: LVVVGAVGV (KRAS G12V)
LVVSGSVGR

SEQ ID NO: 60037 - protein, 9 aa, synthetic construct
  source 1..9: note = Seed: LVVVGAVGV (KRAS G12V)
LVVSGSVGS

SEQ ID NO: 60038 - protein, 9 aa, synthetic construct
  source 1..9: note = Seed: LVVVGAVGV (KRAS G12V)
LVVSGSVGT

SEQ ID NO: 60039 - protein, 9 aa, synthetic construct
  source 1..9: note = Seed: LVVVGAVGV (KRAS G12V)
LVVSGSVGV

SEQ ID NO: 60040 - protein, 9 aa, synthetic construct
  source 1..9: note = Seed: LVVVGAVGV (KRAS G12V)
LVVSGSVGY

SEQ ID NO: 60041 - protein, 9 aa, synthetic construct
  source 1..9: note = Seed: LVVVGAVGV (KRAS G12V)
LVVSGTVGA

SEQ ID NO: 60042 - protein, 9 aa, synthetic construct
  source 1..9: note = Seed: LVVVGAVGV (KRAS G12V)
LVVSGTVGC

SEQ ID NO: 60043 - protein, 9 aa, synthetic construct
  source 1..9: note = Seed: LVVVGAVGV (KRAS G12V)
LVVSGTVGF

SEQ ID NO: 60044 - protein, 9 aa, synthetic construct
  source 1..9: note = Seed: LVVVGAVGV (KRAS G12V)
LVVSGTVGG

SEQ ID NO: 60045 - protein, 9 aa, synthetic construct
  source 1..9: note = Seed: LVVVGAVGV (KRAS G12V)
LVVSGTVGH

SEQ ID NO: 60046 - protein, 9 aa, synthetic construct
  source 1..9: note = Seed: LVVVGAVGV (KRAS G12V)
LVVSGTVGI

SEQ ID NO: 60047 - protein, 9 aa, synthetic construct
  source 1..9: note = Seed: LVVVGAVGV (KRAS G12V)
LVVSGTVGL

SEQ ID NO: 60048 - protein, 9 aa, synthetic construct
  source 1..9: note = Seed: LVVVGAVGV (KRAS G12V)
LVVSGTVGM

SEQ ID NO: 60049 - protein, 9 aa, synthetic construct
  source 1..9: note = Seed: LVVVGAVGV (KRAS G12V)
LVVSGTVGN

SEQ ID NO: 60050 - protein, 9 aa, synthetic construct
  source 1..9: note = Seed: LVVVGAVGV (KRAS G12V)
LVVSGTVGQ

SEQ ID NO: 60051 - protein, 9 aa, synthetic construct
  source 1..9: note = Seed: LVVVGAVGV (KRAS G12V)
LVVSGTVGR

SEQ ID NO: 60052 - protein, 9 aa, synthetic construct
  source 1..9: note = Seed: LVVVGAVGV (KRAS G12V)
LVVSGTVGS

SEQ ID NO: 60053 - protein, 9 aa, synthetic construct
  source 1..9: note = Seed: LVVVGAVGV (KRAS G12V)
LVVSGTVGT

SEQ ID NO: 60054 - protein, 9 aa, synthetic construct
  source 1..9: note = Seed: LVVVGAVGV (KRAS G12V)
LVVSGTVGV

SEQ ID NO: 60055 - protein, 9 aa, synthetic construct
  source 1..9: note = Seed: LVVVGAVGV (KRAS G12V)
LVVSGTVGY

SEQ ID NO: 60056 - protein, 9 aa, synthetic construct
  source 1..9: note = Seed: LVVVGAVGV (KRAS G12V)
LVVSGVVGA

SEQ ID NO: 60057 - protein, 9 aa, synthetic construct
  source 1..9: note = Seed: LVVVGAVGV (KRAS G12V)
LVVSGVVGC

SEQ ID NO: 60058 - protein, 9 aa, synthetic construct
  source 1..9: note = Seed: LVVVGAVGV (KRAS G12V)
LVVSGVVGD

SEQ ID NO: 60059 - protein, 9 aa, synthetic construct
  source 1..9: note = Seed: LVVVGAVGV (KRAS G12V)
LVVSGVVGE

SEQ ID NO: 60060 - protein, 9 aa, synthetic construct
  source 1..9: note = Seed: LVVVGAVGV (KRAS G12V)
LVVSGVVGF

SEQ ID NO: 60061 - protein, 9 aa, synthetic construct
  source 1..9: note = Seed: LVVVGAVGV (KRAS G12V)
LVVSGVVGG

SEQ ID NO: 60062 - protein, 9 aa, synthetic construct
  source 1..9: note = Seed: LVVVGAVGV (KRAS G12V)
LVVSGVVGH

SEQ ID NO: 60063 - protein, 9 aa, synthetic construct
  source 1..9: note = Seed: LVVVGAVGV (KRAS G12V)
LVVSGVVGI

SEQ ID NO: 60064 - protein, 9 aa, synthetic construct
  source 1..9: note = Seed: LVVVGAVGV (KRAS G12V)
LVVSGVVGL

SEQ ID NO: 60065 - protein, 9 aa, synthetic construct
  source 1..9: note = Seed: LVVVGAVGV (KRAS G12V)
LVVSGVVGM

SEQ ID NO: 60066 - protein, 9 aa, synthetic construct
  source 1..9: note = Seed: LVVVGAVGV (KRAS G12V)
LVVSGVVGN

SEQ ID NO: 60067 - protein, 9 aa, synthetic construct
  source 1..9: note = Seed: LVVVGAVGV (KRAS G12V)
LVVSGVVGQ

SEQ ID NO: 60068 - protein, 9 aa, synthetic construct
  source 1..9: note = Seed: LVVVGAVGV (KRAS G12V)
LVVSGVVGR

SEQ ID NO: 60069 - protein, 9 aa, synthetic construct
  source 1..9: note = Seed: LVVVGAVGV (KRAS G12V)
LVVSGVVGS

SEQ ID NO: 60070 - protein, 9 aa, synthetic construct
  source 1..9: note = Seed: LVVVGAVGV (KRAS G12V)
LVVSGVVGT

SEQ ID NO: 60071 - protein, 9 aa, synthetic construct
  source 1..9: note = Seed: LVVVGAVGV (KRAS G12V)
LVVSGVVGV

SEQ ID NO: 60072 - protein, 9 aa, synthetic construct
  source 1..9: note = Seed: LVVVGAVGV (KRAS G12V)
LVVSGVVGY

SEQ ID NO: 60073 - protein, 9 aa, synthetic construct
  source 1..9: note = Seed: LVVVGAVGV (KRAS G12V)
LVVTGAVGA

SEQ ID NO: 60074 - protein, 9 aa, synthetic construct
  source 1..9: note = Seed: LVVVGAVGV (KRAS G12V)
LVVTGAVGC

SEQ ID NO: 60075 - protein, 9 aa, synthetic construct
  source 1..9: note = Seed: LVVVGAVGV (KRAS G12V)
LVVTGAVGD

SEQ ID NO: 60076 - protein, 9 aa, synthetic construct
  source 1..9: note = Seed: LVVVGAVGV (KRAS G12V)
LVVTGAVGE

SEQ ID NO: 60077 - protein, 9 aa, synthetic construct
  source 1..9: note = Seed: LVVVGAVGV (KRAS G12V)
LVVTGAVGF

SEQ ID NO: 60078 - protein, 9 aa, synthetic construct
  source 1..9: note = Seed: LVVVGAVGV (KRAS G12V)
LVVTGAVGG

SEQ ID NO: 60079 - protein, 9 aa, synthetic construct
  source 1..9: note = Seed: LVVVGAVGV (KRAS G12V)
LVVTGAVGH

SEQ ID NO: 60080 - protein, 9 aa, synthetic construct
  source 1..9: note = Seed: LVVVGAVGV (KRAS G12V)
LVVTGAVGI

SEQ ID NO: 60081 - protein, 9 aa, synthetic construct
  source 1..9: note = Seed: LVVVGAVGV (KRAS G12V)
LVVTGAVGK

SEQ ID NO: 60082 - protein, 9 aa, synthetic construct
  source 1..9: note = Seed: LVVVGAVGV (KRAS G12V)
LVVTGAVGL

SEQ ID NO: 60083 - protein, 9 aa, synthetic construct
  source 1..9: note = Seed: LVVVGAVGV (KRAS G12V)
LVVTGAVGM

SEQ ID NO: 60084 - protein, 9 aa, synthetic construct
  source 1..9: note = Seed: LVVVGAVGV (KRAS G12V)
LVVTGAVGN

SEQ ID NO: 60085 - protein, 9 aa, synthetic construct
  source 1..9: note = Seed: LVVVGAVGV (KRAS G12V)
LVVTGAVGP

SEQ ID NO: 60086 - protein, 9 aa, synthetic construct
  source 1..9: note = Seed: LVVVGAVGV (KRAS G12V)
LVVTGAVGQ

SEQ ID NO: 60087 - protein, 9 aa, synthetic construct
  source 1..9: note = Seed: LVVVGAVGV (KRAS G12V)
LVVTGAVGR

SEQ ID NO: 60088 - protein, 9 aa, synthetic construct
  source 1..9: note = Seed: LVVVGAVGV (KRAS G12V)
LVVTGAVGS

SEQ ID NO: 60089 - protein, 9 aa, synthetic construct
  source 1..9: note = Seed: LVVVGAVGV (KRAS G12V)
LVVTGAVGT

SEQ ID NO: 60090 - protein, 9 aa, synthetic construct
  source 1..9: note = Seed: LVVVGAVGV (KRAS G12V)
LVVTGAVGV

SEQ ID NO: 60091 - protein, 9 aa, synthetic construct
  source 1..9: note = Seed: LVVVGAVGV (KRAS G12V)
LVVTGAVGW

SEQ ID NO: 60092 - protein, 9 aa, synthetic construct
  source 1..9: note = Seed: LVVVGAVGV (KRAS G12V)
LVVTGAVGY

SEQ ID NO: 60093 - protein, 9 aa, synthetic construct
  source 1..9: note = Seed: LVVVGAVGV (KRAS G12V)
LVVTGCVGA

SEQ ID NO: 60094 - protein, 9 aa, synthetic construct
  source 1..9: note = Seed: LVVVGAVGV (KRAS G12V)
LVVTGCVGG

SEQ ID NO: 60095 - protein, 9 aa, synthetic construct
  source 1..9: note = Seed: LVVVGAVGV (KRAS G12V)
LVVTGCVGI

SEQ ID NO: 60096 - protein, 9 aa, synthetic construct
  source 1..9: note = Seed: LVVVGAVGV (KRAS G12V)
LVVTGCVGL

SEQ ID NO: 60097 - protein, 9 aa, synthetic construct
  source 1..9: note = Seed: LVVVGAVGV (KRAS G12V)
LVVTGCVGM

SEQ ID NO: 60098 - protein, 9 aa, synthetic construct
  source 1..9: note = Seed: LVVVGAVGV (KRAS G12V)
LVVTGCVGN

SEQ ID NO: 60099 - protein, 9 aa, synthetic construct
  source 1..9: note = Seed: LVVVGAVGV (KRAS G12V)
LVVTGCVGR

SEQ ID NO: 60100 - protein, 9 aa, synthetic construct
  source 1..9: note = Seed: LVVVGAVGV (KRAS G12V)
LVVTGCVGS

SEQ ID NO: 60101 - protein, 9 aa, synthetic construct
  source 1..9: note = Seed: LVVVGAVGV (KRAS G12V)
LVVTGCVGT

SEQ ID NO: 60102 - protein, 9 aa, synthetic construct
  source 1..9: note = Seed: LVVVGAVGV (KRAS G12V)
LVVTGCVGV

SEQ ID NO: 60103 - protein, 9 aa, synthetic construct
  source 1..9: note = Seed: LVVVGAVGV (KRAS G12V)
LVVTGCVGY

SEQ ID NO: 60104 - protein, 9 aa, synthetic construct
  source 1..9: note = Seed: LVVVGAVGV (KRAS G12V)
LVVTGDVGA

SEQ ID NO: 60105 - protein, 9 aa, synthetic construct
  source 1..9: note = Seed: LVVVGAVGV (KRAS G12V)
LVVTGDVGI

SEQ ID NO: 60106 - protein, 9 aa, synthetic construct
  source 1..9: note = Seed: LVVVGAVGV (KRAS G12V)
LVVTGDVGL

SEQ ID NO: 60107 - protein, 9 aa, synthetic construct
  source 1..9: note = Seed: LVVVGAVGV (KRAS G12V)
LVVTGDVGV

SEQ ID NO: 60108 - protein, 9 aa, synthetic construct
  source 1..9: note = Seed: LVVVGAVGV (KRAS G12V)
LVVTGEVGA

SEQ ID NO: 60109 - protein, 9 aa, synthetic construct
  source 1..9: note = Seed: LVVVGAVGV (KRAS G12V)
LVVTGEVGI

SEQ ID NO: 60110 - protein, 9 aa, synthetic construct
  source 1..9: note = Seed: LVVVGAVGV (KRAS G12V)
LVVTGEVGL

SEQ ID NO: 60111 - protein, 9 aa, synthetic construct
  source 1..9: note = Seed: LVVVGAVGV (KRAS G12V)
LVVTGEVGM

SEQ ID NO: 60112 - protein, 9 aa, synthetic construct
  source 1..9: note = Seed: LVVVGAVGV (KRAS G12V)
LVVTGEVGV

SEQ ID NO: 60113 - protein, 9 aa, synthetic construct
  source 1..9: note = Seed: LVVVGAVGV (KRAS G12V)
LVVTGFVGI

SEQ ID NO: 60114 - protein, 9 aa, synthetic construct
  source 1..9: note = Seed: LVVVGAVGV (KRAS G12V)
LVVTGFVGL

SEQ ID NO: 60115 - protein, 9 aa, synthetic construct
  source 1..9: note = Seed: LVVVGAVGV (KRAS G12V)
LVVTGFVGM

SEQ ID NO: 60116 - protein, 9 aa, synthetic construct
  source 1..9: note = Seed: LVVVGAVGV (KRAS G12V)
LVVTGFVGV

SEQ ID NO: 60117 - protein, 9 aa, synthetic construct
  source 1..9: note = Seed: LVVVGAVGV (KRAS G12V)
LVVTGGVGA

SEQ ID NO: 60118 - protein, 9 aa, synthetic construct
  source 1..9: note = Seed: LVVVGAVGV (KRAS G12V)
LVVTGGVGC

SEQ ID NO: 60119 - protein, 9 aa, synthetic construct
  source 1..9: note = Seed: LVVVGAVGV (KRAS G12V)
LVVTGGVGF

SEQ ID NO: 60120 - protein, 9 aa, synthetic construct
  source 1..9: note = Seed: LVVVGAVGV (KRAS G12V)
LVVTGGVGG

SEQ ID NO: 60121 - protein, 9 aa, synthetic construct
  source 1..9: note = Seed: LVVVGAVGV (KRAS G12V)
LVVTGGVGH

SEQ ID NO: 60122 - protein, 9 aa, synthetic construct
  source 1..9: note = Seed: LVVVGAVGV (KRAS G12V)
LVVTGGVGI

SEQ ID NO: 60123 - protein, 9 aa, synthetic construct
  source 1..9: note = Seed: LVVVGAVGV (KRAS G12V)
LVVTGGVGL

SEQ ID NO: 60124 - protein, 9 aa, synthetic construct
  source 1..9: note = Seed: LVVVGAVGV (KRAS G12V)
LVVTGGVGM

SEQ ID NO: 60125 - protein, 9 aa, synthetic construct
  source 1..9: note = Seed: LVVVGAVGV (KRAS G12V)
LVVTGGVGN

SEQ ID NO: 60126 - protein, 9 aa, synthetic construct
  source 1..9: note = Seed: LVVVGAVGV (KRAS G12V)
LVVTGGVGP

SEQ ID NO: 60127 - protein, 9 aa, synthetic construct
  source 1..9: note = Seed: LVVVGAVGV (KRAS G12V)
LVVTGGVGQ

SEQ ID NO: 60128 - protein, 9 aa, synthetic construct
  source 1..9: note = Seed: LVVVGAVGV (KRAS G12V)
LVVTGGVGR

SEQ ID NO: 60129 - protein, 9 aa, synthetic construct
  source 1..9: note = Seed: LVVVGAVGV (KRAS G12V)
LVVTGGVGS

SEQ ID NO: 60130 - protein, 9 aa, synthetic construct
  source 1..9: note = Seed: LVVVGAVGV (KRAS G12V)
LVVTGGVGT

SEQ ID NO: 60131 - protein, 9 aa, synthetic construct
  source 1..9: note = Seed: LVVVGAVGV (KRAS G12V)
LVVTGGVGV

SEQ ID NO: 60132 - protein, 9 aa, synthetic construct
  source 1..9: note = Seed: LVVVGAVGV (KRAS G12V)
LVVTGGVGW

SEQ ID NO: 60133 - protein, 9 aa, synthetic construct
  source 1..9: note = Seed: LVVVGAVGV (KRAS G12V)
LVVTGGVGY

SEQ ID NO: 60134 - protein, 9 aa, synthetic construct
  source 1..9: note = Seed: LVVVGAVGV (KRAS G12V)
LVVTGHVGA

SEQ ID NO: 60135 - protein, 9 aa, synthetic construct
  source 1..9: note = Seed: LVVVGAVGV (KRAS G12V)
LVVTGHVGC

SEQ ID NO: 60136 - protein, 9 aa, synthetic construct
  source 1..9: note = Seed: LVVVGAVGV (KRAS G12V)
LVVTGHVGI

SEQ ID NO: 60137 - protein, 9 aa, synthetic construct
  source 1..9: note = Seed: LVVVGAVGV (KRAS G12V)
LVVTGHVGL

SEQ ID NO: 60138 - protein, 9 aa, synthetic construct
  source 1..9: note = Seed: LVVVGAVGV (KRAS G12V)
LVVTGHVGM

SEQ ID NO: 60139 - protein, 9 aa, synthetic construct
  source 1..9: note = Seed: LVVVGAVGV (KRAS G12V)
LVVTGHVGV

SEQ ID NO: 60140 - protein, 9 aa, synthetic construct
  source 1..9: note = Seed: LVVVGAVGV (KRAS G12V)
LVVTGIVGA

SEQ ID NO: 60141 - protein, 9 aa, synthetic construct
  source 1..9: note = Seed: LVVVGAVGV (KRAS G12V)
LVVTGIVGC

SEQ ID NO: 60142 - protein, 9 aa, synthetic construct
  source 1..9: note = Seed: LVVVGAVGV (KRAS G12V)
LVVTGIVGG

SEQ ID NO: 60143 - protein, 9 aa, synthetic construct
  source 1..9: note = Seed: LVVVGAVGV (KRAS G12V)
LVVTGIVGI

SEQ ID NO: 60144 - protein, 9 aa, synthetic construct
  source 1..9: note = Seed: LVVVGAVGV (KRAS G12V)
LVVTGIVGL

SEQ ID NO: 60145 - protein, 9 aa, synthetic construct
  source 1..9: note = Seed: LVVVGAVGV (KRAS G12V)
LVVTGIVGM

SEQ ID NO: 60146 - protein, 9 aa, synthetic construct
  source 1..9: note = Seed: LVVVGAVGV (KRAS G12V)
LVVTGIVGN

SEQ ID NO: 60147 - protein, 9 aa, synthetic construct
  source 1..9: note = Seed: LVVVGAVGV (KRAS G12V)
LVVTGIVGQ

SEQ ID NO: 60148 - protein, 9 aa, synthetic construct
  source 1..9: note = Seed: LVVVGAVGV (KRAS G12V)
LVVTGIVGS

SEQ ID NO: 60149 - protein, 9 aa, synthetic construct
  source 1..9: note = Seed: LVVVGAVGV (KRAS G12V)
LVVTGIVGT

SEQ ID NO: 60150 - protein, 9 aa, synthetic construct
  source 1..9: note = Seed: LVVVGAVGV (KRAS G12V)
LVVTGIVGV

SEQ ID NO: 60151 - protein, 9 aa, synthetic construct
  source 1..9: note = Seed: LVVVGAVGV (KRAS G12V)
LVVTGKVGA

SEQ ID NO: 60152 - protein, 9 aa, synthetic construct
  source 1..9: note = Seed: LVVVGAVGV (KRAS G12V)
LVVTGKVGC

SEQ ID NO: 60153 - protein, 9 aa, synthetic construct
  source 1..9: note = Seed: LVVVGAVGV (KRAS G12V)
LVVTGKVGG

SEQ ID NO: 60154 - protein, 9 aa, synthetic construct
  source 1..9: note = Seed: LVVVGAVGV (KRAS G12V)
LVVTGKVGH

SEQ ID NO: 60155 - protein, 9 aa, synthetic construct
  source 1..9: note = Seed: LVVVGAVGV (KRAS G12V)
LVVTGKVGK

SEQ ID NO: 60156 - protein, 9 aa, synthetic construct
  source 1..9: note = Seed: LVVVGAVGV (KRAS G12V)
LVVTGKVGQ

SEQ ID NO: 60157 - protein, 9 aa, synthetic construct
  source 1..9: note = Seed: LVVVGAVGV (KRAS G12V)
LVVTGKVGR

SEQ ID NO: 60158 - protein, 9 aa, synthetic construct
  source 1..9: note = Seed: LVVVGAVGV (KRAS G12V)
LVVTGKVGS

SEQ ID NO: 60159 - protein, 9 aa, synthetic construct
  source 1..9: note = Seed: LVVVGAVGV (KRAS G12V)
LVVTGKVGY

SEQ ID NO: 60160 - protein, 9 aa, synthetic construct
  source 1..9: note = Seed: LVVVGAVGV (KRAS G12V)
LVVTGLVGN

SEQ ID NO: 60161 - protein, 9 aa, synthetic construct
  source 1..9: note = Seed: LVVVGAVGV (KRAS G12V)
LVVTGMVGA

SEQ ID NO: 60162 - protein, 9 aa, synthetic construct
  source 1..9: note = Seed: LVVVGAVGV (KRAS G12V)
LVVTGMVGC

SEQ ID NO: 60163 - protein, 9 aa, synthetic construct
  source 1..9: note = Seed: LVVVGAVGV (KRAS G12V)
LVVTGMVGF

SEQ ID NO: 60164 - protein, 9 aa, synthetic construct
  source 1..9: note = Seed: LVVVGAVGV (KRAS G12V)
LVVTGMVGI

SEQ ID NO: 60165 - protein, 9 aa, synthetic construct
  source 1..9: note = Seed: LVVVGAVGV (KRAS G12V)
LVVTGMVGL

SEQ ID NO: 60166 - protein, 9 aa, synthetic construct
  source 1..9: note = Seed: LVVVGAVGV (KRAS G12V)
LVVTGMVGM

SEQ ID NO: 60167 - protein, 9 aa, synthetic construct
  source 1..9: note = Seed: LVVVGAVGV (KRAS G12V)
LVVTGMVGN

SEQ ID NO: 60168 - protein, 9 aa, synthetic construct
  source 1..9: note = Seed: LVVVGAVGV (KRAS G12V)
LVVTGMVGV

SEQ ID NO: 60169 - protein, 9 aa, synthetic construct
  source 1..9: note = Seed: LVVVGAVGV (KRAS G12V)
LVVTGMVGY

SEQ ID NO: 60170 - protein, 9 aa, synthetic construct
  source 1..9: note = Seed: LVVVGAVGV (KRAS G12V)
LVVTGNVGA

SEQ ID NO: 60171 - protein, 9 aa, synthetic construct
  source 1..9: note = Seed: LVVVGAVGV (KRAS G12V)
LVVTGNVGC

SEQ ID NO: 60172 - protein, 9 aa, synthetic construct
  source 1..9: note = Seed: LVVVGAVGV (KRAS G12V)
LVVTGNVGF

SEQ ID NO: 60173 - protein, 9 aa, synthetic construct
  source 1..9: note = Seed: LVVVGAVGV (KRAS G12V)
LVVTGNVGG

SEQ ID NO: 60174 - protein, 9 aa, synthetic construct
  source 1..9: note = Seed: LVVVGAVGV (KRAS G12V)
LVVTGNVGH

SEQ ID NO: 60175 - protein, 9 aa, synthetic construct
  source 1..9: note = Seed: LVVVGAVGV (KRAS G12V)
LVVTGNVGI

SEQ ID NO: 60176 - protein, 9 aa, synthetic construct
  source 1..9: note = Seed: LVVVGAVGV (KRAS G12V)
LVVTGNVGL

SEQ ID NO: 60177 - protein, 9 aa, synthetic construct
  source 1..9: note = Seed: LVVVGAVGV (KRAS G12V)
LVVTGNVGM

SEQ ID NO: 60178 - protein, 9 aa, synthetic construct
  source 1..9: note = Seed: LVVVGAVGV (KRAS G12V)
LVVTGNVGN

SEQ ID NO: 60179 - protein, 9 aa, synthetic construct
  source 1..9: note = Seed: LVVVGAVGV (KRAS G12V)
LVVTGNVGQ

SEQ ID NO: 60180 - protein, 9 aa, synthetic construct
  source 1..9: note = Seed: LVVVGAVGV (KRAS G12V)
LVVTGNVGR

SEQ ID NO: 60181 - protein, 9 aa, synthetic construct
  source 1..9: note = Seed: LVVVGAVGV (KRAS G12V)
LVVTGNVGS

SEQ ID NO: 60182 - protein, 9 aa, synthetic construct
  source 1..9: note = Seed: LVVVGAVGV (KRAS G12V)
LVVTGNVGT

SEQ ID NO: 60183 - protein, 9 aa, synthetic construct
  source 1..9: note = Seed: LVVVGAVGV (KRAS G12V)
LVVTGNVGV

SEQ ID NO: 60184 - protein, 9 aa, synthetic construct
  source 1..9: note = Seed: LVVVGAVGV (KRAS G12V)
LVVTGNVGY

SEQ ID NO: 60185 - protein, 9 aa, synthetic construct
  source 1..9: note = Seed: LVVVGAVGV (KRAS G12V)
LVVTGPVGA

SEQ ID NO: 60186 - protein, 9 aa, synthetic construct
  source 1..9: note = Seed: LVVVGAVGV (KRAS G12V)
LVVTGPVGC

SEQ ID NO: 60187 - protein, 9 aa, synthetic construct
  source 1..9: note = Seed: LVVVGAVGV (KRAS G12V)
LVVTGPVGD

SEQ ID NO: 60188 - protein, 9 aa, synthetic construct
  source 1..9: note = Seed: LVVVGAVGV (KRAS G12V)
LVVTGPVGF

SEQ ID NO: 60189 - protein, 9 aa, synthetic construct
  source 1..9: note = Seed: LVVVGAVGV (KRAS G12V)
LVVTGPVGG

SEQ ID NO: 60190 - protein, 9 aa, synthetic construct
  source 1..9: note = Seed: LVVVGAVGV (KRAS G12V)
LVVTGPVGH

SEQ ID NO: 60191 - protein, 9 aa, synthetic construct
  source 1..9: note = Seed: LVVVGAVGV (KRAS G12V)
LVVTGPVGI

SEQ ID NO: 60192 - protein, 9 aa, synthetic construct
  source 1..9: note = Seed: LVVVGAVGV (KRAS G12V)
LVVTGPVGL

SEQ ID NO: 60193 - protein, 9 aa, synthetic construct
  source 1..9: note = Seed: LVVVGAVGV (KRAS G12V)
LVVTGPVGM

SEQ ID NO: 60194 - protein, 9 aa, synthetic construct
  source 1..9: note = Seed: LVVVGAVGV (KRAS G12V)
LVVTGPVGN

SEQ ID NO: 60195 - protein, 9 aa, synthetic construct
  source 1..9: note = Seed: LVVVGAVGV (KRAS G12V)
LVVTGPVGQ

SEQ ID NO: 60196 - protein, 9 aa, synthetic construct
  source 1..9: note = Seed: LVVVGAVGV (KRAS G12V)
LVVTGPVGR

SEQ ID NO: 60197 - protein, 9 aa, synthetic construct
  source 1..9: note = Seed: LVVVGAVGV (KRAS G12V)
LVVTGPVGS

SEQ ID NO: 60198 - protein, 9 aa, synthetic construct
  source 1..9: note = Seed: LVVVGAVGV (KRAS G12V)
LVVTGPVGT

SEQ ID NO: 60199 - protein, 9 aa, synthetic construct
  source 1..9: note = Seed: LVVVGAVGV (KRAS G12V)
LVVTGPVGV

SEQ ID NO: 60200 - protein, 9 aa, synthetic construct
  source 1..9: note = Seed: LVVVGAVGV (KRAS G12V)
LVVTGPVGY

SEQ ID NO: 60201 - protein, 9 aa, synthetic construct
  source 1..9: note = Seed: LVVVGAVGV (KRAS G12V)
LVVTGQVGA

SEQ ID NO: 60202 - protein, 9 aa, synthetic construct
  source 1..9: note = Seed: LVVVGAVGV (KRAS G12V)
LVVTGQVGC

SEQ ID NO: 60203 - protein, 9 aa, synthetic construct
  source 1..9: note = Seed: LVVVGAVGV (KRAS G12V)
LVVTGQVGI

SEQ ID NO: 60204 - protein, 9 aa, synthetic construct
  source 1..9: note = Seed: LVVVGAVGV (KRAS G12V)
LVVTGQVGL

SEQ ID NO: 60205 - protein, 9 aa, synthetic construct
  source 1..9: note = Seed: LVVVGAVGV (KRAS G12V)
LVVTGQVGM

SEQ ID NO: 60206 - protein, 9 aa, synthetic construct
  source 1..9: note = Seed: LVVVGAVGV (KRAS G12V)
LVVTGQVGV

SEQ ID NO: 60207 - protein, 9 aa, synthetic construct
  source 1..9: note = Seed: LVVVGAVGV (KRAS G12V)
LVVTGRVGA

SEQ ID NO: 60208 - protein, 9 aa, synthetic construct
  source 1..9: note = Seed: LVVVGAVGV (KRAS G12V)
LVVTGRVGF

SEQ ID NO: 60209 - protein, 9 aa, synthetic construct
  source 1..9: note = Seed: LVVVGAVGV (KRAS G12V)
LVVTGRVGG

SEQ ID NO: 60210 - protein, 9 aa, synthetic construct
  source 1..9: note = Seed: LVVVGAVGV (KRAS G12V)
LVVTGRVGH

SEQ ID NO: 60211 - protein, 9 aa, synthetic construct
  source 1..9: note = Seed: LVVVGAVGV (KRAS G12V)
LVVTGRVGK

SEQ ID NO: 60212 - protein, 9 aa, synthetic construct
  source 1..9: note = Seed: LVVVGAVGV (KRAS G12V)
LVVTGRVGM

SEQ ID NO: 60213 - protein, 9 aa, synthetic construct
  source 1..9: note = Seed: LVVVGAVGV (KRAS G12V)
LVVTGRVGN

SEQ ID NO: 60214 - protein, 9 aa, synthetic construct
  source 1..9: note = Seed: LVVVGAVGV (KRAS G12V)
LVVTGRVGQ

SEQ ID NO: 60215 - protein, 9 aa, synthetic construct
  source 1..9: note = Seed: LVVVGAVGV (KRAS G12V)
LVVTGRVGR

SEQ ID NO: 60216 - protein, 9 aa, synthetic construct
  source 1..9: note = Seed: LVVVGAVGV (KRAS G12V)
LVVTGRVGS

SEQ ID NO: 60217 - protein, 9 aa, synthetic construct
  source 1..9: note = Seed: LVVVGAVGV (KRAS G12V)
LVVTGRVGT

SEQ ID NO: 60218 - protein, 9 aa, synthetic construct
  source 1..9: note = Seed: LVVVGAVGV (KRAS G12V)
LVVTGRVGY

SEQ ID NO: 60219 - protein, 9 aa, synthetic construct
  source 1..9: note = Seed: LVVVGAVGV (KRAS G12V)
LVVTGSVGA

SEQ ID NO: 60220 - protein, 9 aa, synthetic construct
  source 1..9: note = Seed: LVVVGAVGV (KRAS G12V)
LVVTGSVGC

SEQ ID NO: 60221 - protein, 9 aa, synthetic construct
  source 1..9: note = Seed: LVVVGAVGV (KRAS G12V)
LVVTGSVGD

SEQ ID NO: 60222 - protein, 9 aa, synthetic construct
  source 1..9: note = Seed: LVVVGAVGV (KRAS G12V)
LVVTGSVGF

SEQ ID NO: 60223 - protein, 9 aa, synthetic construct
  source 1..9: note = Seed: LVVVGAVGV (KRAS G12V)
LVVTGSVGG

SEQ ID NO: 60224 - protein, 9 aa, synthetic construct
  source 1..9: note = Seed: LVVVGAVGV (KRAS G12V)
LVVTGSVGH

SEQ ID NO: 60225 - protein, 9 aa, synthetic construct
  source 1..9: note = Seed: LVVVGAVGV (KRAS G12V)
LVVTGSVGI

SEQ ID NO: 60226 - protein, 9 aa, synthetic construct
  source 1..9: note = Seed: LVVVGAVGV (KRAS G12V)
LVVTGSVGK

SEQ ID NO: 60227 - protein, 9 aa, synthetic construct
  source 1..9: note = Seed: LVVVGAVGV (KRAS G12V)
LVVTGSVGL

SEQ ID NO: 60228 - protein, 9 aa, synthetic construct
  source 1..9: note = Seed: LVVVGAVGV (KRAS G12V)
LVVTGSVGM

SEQ ID NO: 60229 - protein, 9 aa, synthetic construct
  source 1..9: note = Seed: LVVVGAVGV (KRAS G12V)
LVVTGSVGN

SEQ ID NO: 60230 - protein, 9 aa, synthetic construct
  source 1..9: note = Seed: LVVVGAVGV (KRAS G12V)
LVVTGSVGQ

SEQ ID NO: 60231 - protein, 9 aa, synthetic construct
  source 1..9: note = Seed: LVVVGAVGV (KRAS G12V)
LVVTGSVGR

SEQ ID NO: 60232 - protein, 9 aa, synthetic construct
  source 1..9: note = Seed: LVVVGAVGV (KRAS G12V)
LVVTGSVGS

SEQ ID NO: 60233 - protein, 9 aa, synthetic construct
  source 1..9: note = Seed: LVVVGAVGV (KRAS G12V)
LVVTGSVGT

SEQ ID NO: 60234 - protein, 9 aa, synthetic construct
  source 1..9: note = Seed: LVVVGAVGV (KRAS G12V)
LVVTGSVGV

SEQ ID NO: 60235 - protein, 9 aa, synthetic construct
  source 1..9: note = Seed: LVVVGAVGV (KRAS G12V)
LVVTGSVGY

SEQ ID NO: 60236 - protein, 9 aa, synthetic construct
  source 1..9: note = Seed: LVVVGAVGV (KRAS G12V)
LVVTGTVGA

SEQ ID NO: 60237 - protein, 9 aa, synthetic construct
  source 1..9: note = Seed: LVVVGAVGV (KRAS G12V)
LVVTGTVGC

SEQ ID NO: 60238 - protein, 9 aa, synthetic construct
  source 1..9: note = Seed: LVVVGAVGV (KRAS G12V)
LVVTGTVGF

SEQ ID NO: 60239 - protein, 9 aa, synthetic construct
  source 1..9: note = Seed: LVVVGAVGV (KRAS G12V)
LVVTGTVGG

SEQ ID NO: 60240 - protein, 9 aa, synthetic construct
  source 1..9: note = Seed: LVVVGAVGV (KRAS G12V)
LVVTGTVGH

SEQ ID NO: 60241 - protein, 9 aa, synthetic construct
  source 1..9: note = Seed: LVVVGAVGV (KRAS G12V)
LVVTGTVGI

SEQ ID NO: 60242 - protein, 9 aa, synthetic construct
  source 1..9: note = Seed: LVVVGAVGV (KRAS G12V)
LVVTGTVGL

SEQ ID NO: 60243 - protein, 9 aa, synthetic construct
  source 1..9: note = Seed: LVVVGAVGV (KRAS G12V)
LVVTGTVGM

SEQ ID NO: 60244 - protein, 9 aa, synthetic construct
  source 1..9: note = Seed: LVVVGAVGV (KRAS G12V)
LVVTGTVGN

SEQ ID NO: 60245 - protein, 9 aa, synthetic construct
  source 1..9: note = Seed: LVVVGAVGV (KRAS G12V)
LVVTGTVGQ

SEQ ID NO: 60246 - protein, 9 aa, synthetic construct
  source 1..9: note = Seed: LVVVGAVGV (KRAS G12V)
LVVTGTVGS

SEQ ID NO: 60247 - protein, 9 aa, synthetic construct
  source 1..9: note = Seed: LVVVGAVGV (KRAS G12V)
LVVTGTVGT

SEQ ID NO: 60248 - protein, 9 aa, synthetic construct
  source 1..9: note = Seed: LVVVGAVGV (KRAS G12V)
LVVTGTVGV

SEQ ID NO: 60249 - protein, 9 aa, synthetic construct
  source 1..9: note = Seed: LVVVGAVGV (KRAS G12V)
LVVTGTVGY

SEQ ID NO: 60250 - protein, 9 aa, synthetic construct
  source 1..9: note = Seed: LVVVGAVGV (KRAS G12V)
LVVTGVVGA

SEQ ID NO: 60251 - protein, 9 aa, synthetic construct
  source 1..9: note = Seed: LVVVGAVGV (KRAS G12V)
LVVTGVVGC

SEQ ID NO: 60252 - protein, 9 aa, synthetic construct
  source 1..9: note = Seed: LVVVGAVGV (KRAS G12V)
LVVTGVVGE

SEQ ID NO: 60253 - protein, 9 aa, synthetic construct
  source 1..9: note = Seed: LVVVGAVGV (KRAS G12V)
LVVTGVVGF

SEQ ID NO: 60254 - protein, 9 aa, synthetic construct
  source 1..9: note = Seed: LVVVGAVGV (KRAS G12V)
LVVTGVVGG

SEQ ID NO: 60255 - protein, 9 aa, synthetic construct
  source 1..9: note = Seed: LVVVGAVGV (KRAS G12V)
LVVTGVVGH

SEQ ID NO: 60256 - protein, 9 aa, synthetic construct
  source 1..9: note = Seed: LVVVGAVGV (KRAS G12V)
LVVTGVVGI

SEQ ID NO: 60257 - protein, 9 aa, synthetic construct
  source 1..9: note = Seed: LVVVGAVGV (KRAS G12V)
LVVTGVVGL

SEQ ID NO: 60258 - protein, 9 aa, synthetic construct
  source 1..9: note = Seed: LVVVGAVGV (KRAS G12V)
LVVTGVVGM

SEQ ID NO: 60259 - protein, 9 aa, synthetic construct
  source 1..9: note = Seed: LVVVGAVGV (KRAS G12V)
LVVTGVVGN

SEQ ID NO: 60260 - protein, 9 aa, synthetic construct
  source 1..9: note = Seed: LVVVGAVGV (KRAS G12V)
LVVTGVVGQ

SEQ ID NO: 60261 - protein, 9 aa, synthetic construct
  source 1..9: note = Seed: LVVVGAVGV (KRAS G12V)
LVVTGVVGS

SEQ ID NO: 60262 - protein, 9 aa, synthetic construct
  source 1..9: note = Seed: LVVVGAVGV (KRAS G12V)
LVVTGVVGT

SEQ ID NO: 60263 - protein, 9 aa, synthetic construct
  source 1..9: note = Seed: LVVVGAVGV (KRAS G12V)
LVVTGVVGV

SEQ ID NO: 60264 - protein, 9 aa, synthetic construct
  source 1..9: note = Seed: LVVVGAVGV (KRAS G12V)
LVVTGWVGA

SEQ ID NO: 60265 - protein, 9 aa, synthetic construct
  source 1..9: note = Seed: LVVVGAVGV (KRAS G12V)
LVVTGWVGM

SEQ ID NO: 60266 - protein, 9 aa, synthetic construct
  source 1..9: note = Seed: LVVVGAVGV (KRAS G12V)
LVVTGWVGS

SEQ ID NO: 60267 - protein, 9 aa, synthetic construct
  source 1..9: note = Seed: LVVVGAVGV (KRAS G12V)
LVVVGAVGA

SEQ ID NO: 60268 - protein, 9 aa, synthetic construct
  source 1..9: note = Seed: LVVVGAVGV (KRAS G12V)
LVVVGAVGC

SEQ ID NO: 60269 - protein, 9 aa, synthetic construct
  source 1..9: note = Seed: LVVVGAVGV (KRAS G12V)
LVVVGAVGD

SEQ ID NO: 60270 - protein, 9 aa, synthetic construct
  source 1..9: note = Seed: LVVVGAVGV (KRAS G12V)
LVVVGAVGE

SEQ ID NO: 60271 - protein, 9 aa, synthetic construct
  source 1..9: note = Seed: LVVVGAVGV (KRAS G12V)
LVVVGAVGF

SEQ ID NO: 60272 - protein, 9 aa, synthetic construct
  source 1..9: note = Seed: LVVVGAVGV (KRAS G12V)
LVVVGAVGG

SEQ ID NO: 60273 - protein, 9 aa, synthetic construct
  source 1..9: note = Seed: LVVVGAVGV (KRAS G12V)
LVVVGAVGH

SEQ ID NO: 60274 - protein, 9 aa, synthetic construct
  source 1..9: note = Seed: LVVVGAVGV (KRAS G12V)
LVVVGAVGI

SEQ ID NO: 60275 - protein, 9 aa, synthetic construct
  source 1..9: note = Seed: LVVVGAVGV (KRAS G12V)
LVVVGAVGK

SEQ ID NO: 60276 - protein, 9 aa, synthetic construct
  source 1..9: note = Seed: LVVVGAVGV (KRAS G12V)
LVVVGAVGL

SEQ ID NO: 60277 - protein, 9 aa, synthetic construct
  source 1..9: note = Seed: LVVVGAVGV (KRAS G12V)
LVVVGAVGM

SEQ ID NO: 60278 - protein, 9 aa, synthetic construct
  source 1..9: note = Seed: LVVVGAVGV (KRAS G12V)
LVVVGAVGN

SEQ ID NO: 60279 - protein, 9 aa, synthetic construct
  source 1..9: note = Seed: LVVVGAVGV (KRAS G12V)
LVVVGAVGP

SEQ ID NO: 60280 - protein, 9 aa, synthetic construct
  source 1..9: note = Seed: LVVVGAVGV (KRAS G12V)
LVVVGAVGQ

SEQ ID NO: 60281 - protein, 9 aa, synthetic construct
  source 1..9: note = Seed: LVVVGAVGV (KRAS G12V)
LVVVGAVGR

SEQ ID NO: 60282 - protein, 9 aa, synthetic construct
  source 1..9: note = Seed: LVVVGAVGV (KRAS G12V)
LVVVGAVGS

SEQ ID NO: 60283 - protein, 9 aa, synthetic construct
  source 1..9: note = Seed: LVVVGAVGV (KRAS G12V)
LVVVGAVGT

SEQ ID NO: 60284 - protein, 9 aa, synthetic construct
  source 1..9: note = Seed: LVVVGAVGV (KRAS G12V)
LVVVGAVGY

SEQ ID NO: 60285 - protein, 9 aa, synthetic construct
  source 1..9: note = Seed: LVVVGAVGV (KRAS G12V)
LVVVGCVGA

SEQ ID NO: 60286 - protein, 9 aa, synthetic construct
  source 1..9: note = Seed: LVVVGAVGV (KRAS G12V)
LVVVGDVGA

SEQ ID NO: 60287 - protein, 9 aa, synthetic construct
  source 1..9: note = Seed: LVVVGAVGV (KRAS G12V)
LVVVGDVGI

SEQ ID NO: 60288 - protein, 9 aa, synthetic construct
  source 1..9: note = Seed: LVVVGAVGV (KRAS G12V)
LVVVGDVGL

SEQ ID NO: 60289 - protein, 9 aa, synthetic construct
  source 1..9: note = Seed: LVVVGAVGV (KRAS G12V)
LVVVGDVGS

SEQ ID NO: 60290 - protein, 9 aa, synthetic construct
  source 1..9: note = Seed: LVVVGAVGV (KRAS G12V)
LVVVGDVGV

SEQ ID NO: 60291 - protein, 9 aa, synthetic construct
  source 1..9: note = Seed: LVVVGAVGV (KRAS G12V)
LVVVGEVGA

SEQ ID NO: 60292 - protein, 9 aa, synthetic construct
  source 1..9: note = Seed: LVVVGAVGV (KRAS G12V)
LVVVGGVGA

SEQ ID NO: 60293 - protein, 9 aa, synthetic construct
  source 1..9: note = Seed: LVVVGAVGV (KRAS G12V)
LVVVGGVGC

SEQ ID NO: 60294 - protein, 9 aa, synthetic construct
  source 1..9: note = Seed: LVVVGAVGV (KRAS G12V)
LVVVGGVGF

SEQ ID NO: 60295 - protein, 9 aa, synthetic construct
  source 1..9: note = Seed: LVVVGAVGV (KRAS G12V)
LVVVGGVGG

SEQ ID NO: 60296 - protein, 9 aa, synthetic construct
  source 1..9: note = Seed: LVVVGAVGV (KRAS G12V)
LVVVGGVGH

SEQ ID NO: 60297 - protein, 9 aa, synthetic construct
  source 1..9: note = Seed: LVVVGAVGV (KRAS G12V)
LVVVGGVGI

SEQ ID NO: 60298 - protein, 9 aa, synthetic construct
  source 1..9: note = Seed: LVVVGAVGV (KRAS G12V)
LVVVGGVGK

SEQ ID NO: 60299 - protein, 9 aa, synthetic construct
  source 1..9: note = Seed: LVVVGAVGV (KRAS G12V)
LVVVGGVGL

SEQ ID NO: 60300 - protein, 9 aa, synthetic construct
  source 1..9: note = Seed: LVVVGAVGV (KRAS G12V)
LVVVGGVGM

SEQ ID NO: 60301 - protein, 9 aa, synthetic construct
  source 1..9: note = Seed: LVVVGAVGV (KRAS G12V)
LVVVGGVGN

SEQ ID NO: 60302 - protein, 9 aa, synthetic construct
  source 1..9: note = Seed: LVVVGAVGV (KRAS G12V)
LVVVGGVGP

SEQ ID NO: 60303 - protein, 9 aa, synthetic construct
  source 1..9: note = Seed: LVVVGAVGV (KRAS G12V)
LVVVGGVGQ

SEQ ID NO: 60304 - protein, 9 aa, synthetic construct
  source 1..9: note = Seed: LVVVGAVGV (KRAS G12V)
LVVVGGVGR

SEQ ID NO: 60305 - protein, 9 aa, synthetic construct
  source 1..9: note = Seed: LVVVGAVGV (KRAS G12V)
LVVVGGVGS

SEQ ID NO: 60306 - protein, 9 aa, synthetic construct
  source 1..9: note = Seed: LVVVGAVGV (KRAS G12V)
LVVVGGVGT

SEQ ID NO: 60307 - protein, 9 aa, synthetic construct
  source 1..9: note = Seed: LVVVGAVGV (KRAS G12V)
LVVVGGVGV

SEQ ID NO: 60308 - protein, 9 aa, synthetic construct
  source 1..9: note = Seed: LVVVGAVGV (KRAS G12V)
LVVVGGVGY

SEQ ID NO: 60309 - protein, 9 aa, synthetic construct
  source 1..9: note = Seed: LVVVGAVGV (KRAS G12V)
LVVVGHVGA

SEQ ID NO: 60310 - protein, 9 aa, synthetic construct
  source 1..9: note = Seed: LVVVGAVGV (KRAS G12V)
LVVVGHVGG

SEQ ID NO: 60311 - protein, 9 aa, synthetic construct
  source 1..9: note = Seed: LVVVGAVGV (KRAS G12V)
LVVVGHVGH

SEQ ID NO: 60312 - protein, 9 aa, synthetic construct
  source 1..9: note = Seed: LVVVGAVGV (KRAS G12V)
LVVVGHVGI

SEQ ID NO: 60313 - protein, 9 aa, synthetic construct
  source 1..9: note = Seed: LVVVGAVGV (KRAS G12V)
LVVVGHVGK

SEQ ID NO: 60314 - protein, 9 aa, synthetic construct
  source 1..9: note = Seed: LVVVGAVGV (KRAS G12V)
LVVVGHVGL

SEQ ID NO: 60315 - protein, 9 aa, synthetic construct
  source 1..9: note = Seed: LVVVGAVGV (KRAS G12V)
LVVVGHVGM

SEQ ID NO: 60316 - protein, 9 aa, synthetic construct
  source 1..9: note = Seed: LVVVGAVGV (KRAS G12V)
LVVVGHVGR

SEQ ID NO: 60317 - protein, 9 aa, synthetic construct
  source 1..9: note = Seed: LVVVGAVGV (KRAS G12V)
LVVVGHVGS

SEQ ID NO: 60318 - protein, 9 aa, synthetic construct
  source 1..9: note = Seed: LVVVGAVGV (KRAS G12V)
LVVVGHVGT

SEQ ID NO: 60319 - protein, 9 aa, synthetic construct
  source 1..9: note = Seed: LVVVGAVGV (KRAS G12V)
LVVVGHVGV

SEQ ID NO: 60320 - protein, 9 aa, synthetic construct
  source 1..9: note = Seed: LVVVGAVGV (KRAS G12V)
LVVVGHVGY

SEQ ID NO: 60321 - protein, 9 aa, synthetic construct
  source 1..9: note = Seed: LVVVGAVGV (KRAS G12V)
LVVVGIVGA

SEQ ID NO: 60322 - protein, 9 aa, synthetic construct
  source 1..9: note = Seed: LVVVGAVGV (KRAS G12V)
LVVVGIVGN

SEQ ID NO: 60323 - protein, 9 aa, synthetic construct
  source 1..9: note = Seed: LVVVGAVGV (KRAS G12V)
LVVVGIVGR

SEQ ID NO: 60324 - protein, 9 aa, synthetic construct
  source 1..9: note = Seed: LVVVGAVGV (KRAS G12V)
LVVVGKVGA

SEQ ID NO: 60325 - protein, 9 aa, synthetic construct
  source 1..9: note = Seed: LVVVGAVGV (KRAS G12V)
LVVVGKVGG

SEQ ID NO: 60326 - protein, 9 aa, synthetic construct
  source 1..9: note = Seed: LVVVGAVGV (KRAS G12V)
LVVVGKVGH

SEQ ID NO: 60327 - protein, 9 aa, synthetic construct
  source 1..9: note = Seed: LVVVGAVGV (KRAS G12V)
LVVVGKVGI

SEQ ID NO: 60328 - protein, 9 aa, synthetic construct
  source 1..9: note = Seed: LVVVGAVGV (KRAS G12V)
LVVVGKVGK

SEQ ID NO: 60329 - protein, 9 aa, synthetic construct
  source 1..9: note = Seed: LVVVGAVGV (KRAS G12V)
LVVVGKVGL

SEQ ID NO: 60330 - protein, 9 aa, synthetic construct
  source 1..9: note = Seed: LVVVGAVGV (KRAS G12V)
LVVVGKVGM

SEQ ID NO: 60331 - protein, 9 aa, synthetic construct
  source 1..9: note = Seed: LVVVGAVGV (KRAS G12V)
LVVVGKVGN

SEQ ID NO: 60332 - protein, 9 aa, synthetic construct
  source 1..9: note = Seed: LVVVGAVGV (KRAS G12V)
LVVVGKVGP

SEQ ID NO: 60333 - protein, 9 aa, synthetic construct
  source 1..9: note = Seed: LVVVGAVGV (KRAS G12V)
LVVVGKVGQ

SEQ ID NO: 60334 - protein, 9 aa, synthetic construct
  source 1..9: note = Seed: LVVVGAVGV (KRAS G12V)
LVVVGKVGR

SEQ ID NO: 60335 - protein, 9 aa, synthetic construct
  source 1..9: note = Seed: LVVVGAVGV (KRAS G12V)
LVVVGKVGS

SEQ ID NO: 60336 - protein, 9 aa, synthetic construct
  source 1..9: note = Seed: LVVVGAVGV (KRAS G12V)
LVVVGKVGT

SEQ ID NO: 60337 - protein, 9 aa, synthetic construct
  source 1..9: note = Seed: LVVVGAVGV (KRAS G12V)
LVVVGKVGV

SEQ ID NO: 60338 - protein, 9 aa, synthetic construct
  source 1..9: note = Seed: LVVVGAVGV (KRAS G12V)
LVVVGKVGY

SEQ ID NO: 60339 - protein, 9 aa, synthetic construct
  source 1..9: note = Seed: LVVVGAVGV (KRAS G12V)
LVVVGLVGA

SEQ ID NO: 60340 - protein, 9 aa, synthetic construct
  source 1..9: note = Seed: LVVVGAVGV (KRAS G12V)
LVVVGLVGN

SEQ ID NO: 60341 - protein, 9 aa, synthetic construct
  source 1..9: note = Seed: LVVVGAVGV (KRAS G12V)
LVVVGLVGR

SEQ ID NO: 60342 - protein, 9 aa, synthetic construct
  source 1..9: note = Seed: LVVVGAVGV (KRAS G12V)
LVVVGMVGA

SEQ ID NO: 60343 - protein, 9 aa, synthetic construct
  source 1..9: note = Seed: LVVVGAVGV (KRAS G12V)
LVVVGMVGD

SEQ ID NO: 60344 - protein, 9 aa, synthetic construct
  source 1..9: note = Seed: LVVVGAVGV (KRAS G12V)
LVVVGMVGG

SEQ ID NO: 60345 - protein, 9 aa, synthetic construct
  source 1..9: note = Seed: LVVVGAVGV (KRAS G12V)
LVVVGMVGN

SEQ ID NO: 60346 - protein, 9 aa, synthetic construct
  source 1..9: note = Seed: LVVVGAVGV (KRAS G12V)
LVVVGMVGR

SEQ ID NO: 60347 - protein, 9 aa, synthetic construct
  source 1..9: note = Seed: LVVVGAVGV (KRAS G12V)
LVVVGMVGS

SEQ ID NO: 60348 - protein, 9 aa, synthetic construct
  source 1..9: note = Seed: LVVVGAVGV (KRAS G12V)
LVVVGNVGA

SEQ ID NO: 60349 - protein, 9 aa, synthetic construct
  source 1..9: note = Seed: LVVVGAVGV (KRAS G12V)
LVVVGNVGC

SEQ ID NO: 60350 - protein, 9 aa, synthetic construct
  source 1..9: note = Seed: LVVVGAVGV (KRAS G12V)
LVVVGNVGD

SEQ ID NO: 60351 - protein, 9 aa, synthetic construct
  source 1..9: note = Seed: LVVVGAVGV (KRAS G12V)
LVVVGNVGF

SEQ ID NO: 60352 - protein, 9 aa, synthetic construct
  source 1..9: note = Seed: LVVVGAVGV (KRAS G12V)
LVVVGNVGG

SEQ ID NO: 60353 - protein, 9 aa, synthetic construct
  source 1..9: note = Seed: LVVVGAVGV (KRAS G12V)
LVVVGNVGH

SEQ ID NO: 60354 - protein, 9 aa, synthetic construct
  source 1..9: note = Seed: LVVVGAVGV (KRAS G12V)
LVVVGNVGI

SEQ ID NO: 60355 - protein, 9 aa, synthetic construct
  source 1..9: note = Seed: LVVVGAVGV (KRAS G12V)
LVVVGNVGK

SEQ ID NO: 60356 - protein, 9 aa, synthetic construct
  source 1..9: note = Seed: LVVVGAVGV (KRAS G12V)
LVVVGNVGL

SEQ ID NO: 60357 - protein, 9 aa, synthetic construct
  source 1..9: note = Seed: LVVVGAVGV (KRAS G12V)
LVVVGNVGM

SEQ ID NO: 60358 - protein, 9 aa, synthetic construct
  source 1..9: note = Seed: LVVVGAVGV (KRAS G12V)
LVVVGNVGN

SEQ ID NO: 60359 - protein, 9 aa, synthetic construct
  source 1..9: note = Seed: LVVVGAVGV (KRAS G12V)
LVVVGNVGP

SEQ ID NO: 60360 - protein, 9 aa, synthetic construct
  source 1..9: note = Seed: LVVVGAVGV (KRAS G12V)
LVVVGNVGQ

SEQ ID NO: 60361 - protein, 9 aa, synthetic construct
  source 1..9: note = Seed: LVVVGAVGV (KRAS G12V)
LVVVGNVGR

SEQ ID NO: 60362 - protein, 9 aa, synthetic construct
  source 1..9: note = Seed: LVVVGAVGV (KRAS G12V)
LVVVGNVGS

SEQ ID NO: 60363 - protein, 9 aa, synthetic construct
  source 1..9: note = Seed: LVVVGAVGV (KRAS G12V)
LVVVGNVGT

SEQ ID NO: 60364 - protein, 9 aa, synthetic construct
  source 1..9: note = Seed: LVVVGAVGV (KRAS G12V)
LVVVGNVGV

SEQ ID NO: 60365 - protein, 9 aa, synthetic construct
  source 1..9: note = Seed: LVVVGAVGV (KRAS G12V)
LVVVGNVGY

SEQ ID NO: 60366 - protein, 9 aa, synthetic construct
  source 1..9: note = Seed: LVVVGAVGV (KRAS G12V)
LVVVGPVGA

SEQ ID NO: 60367 - protein, 9 aa, synthetic construct
  source 1..9: note = Seed: LVVVGAVGV (KRAS G12V)
LVVVGPVGC

SEQ ID NO: 60368 - protein, 9 aa, synthetic construct
  source 1..9: note = Seed: LVVVGAVGV (KRAS G12V)
LVVVGPVGD

SEQ ID NO: 60369 - protein, 9 aa, synthetic construct
  source 1..9: note = Seed: LVVVGAVGV (KRAS G12V)
LVVVGPVGE

SEQ ID NO: 60370 - protein, 9 aa, synthetic construct
  source 1..9: note = Seed: LVVVGAVGV (KRAS G12V)
LVVVGPVGF

SEQ ID NO: 60371 - protein, 9 aa, synthetic construct
  source 1..9: note = Seed: LVVVGAVGV (KRAS G12V)
LVVVGPVGG

SEQ ID NO: 60372 - protein, 9 aa, synthetic construct
  source 1..9: note = Seed: LVVVGAVGV (KRAS G12V)
LVVVGPVGH

SEQ ID NO: 60373 - protein, 9 aa, synthetic construct
  source 1..9: note = Seed: LVVVGAVGV (KRAS G12V)
LVVVGPVGI

SEQ ID NO: 60374 - protein, 9 aa, synthetic construct
  source 1..9: note = Seed: LVVVGAVGV (KRAS G12V)
LVVVGPVGL

SEQ ID NO: 60375 - protein, 9 aa, synthetic construct
  source 1..9: note = Seed: LVVVGAVGV (KRAS G12V)
LVVVGPVGM

SEQ ID NO: 60376 - protein, 9 aa, synthetic construct
  source 1..9: note = Seed: LVVVGAVGV (KRAS G12V)
LVVVGPVGN

SEQ ID NO: 60377 - protein, 9 aa, synthetic construct
  source 1..9: note = Seed: LVVVGAVGV (KRAS G12V)
LVVVGPVGP

SEQ ID NO: 60378 - protein, 9 aa, synthetic construct
  source 1..9: note = Seed: LVVVGAVGV (KRAS G12V)
LVVVGPVGQ

SEQ ID NO: 60379 - protein, 9 aa, synthetic construct
  source 1..9: note = Seed: LVVVGAVGV (KRAS G12V)
LVVVGPVGR

SEQ ID NO: 60380 - protein, 9 aa, synthetic construct
  source 1..9: note = Seed: LVVVGAVGV (KRAS G12V)
LVVVGPVGS

SEQ ID NO: 60381 - protein, 9 aa, synthetic construct
  source 1..9: note = Seed: LVVVGAVGV (KRAS G12V)
LVVVGPVGT

SEQ ID NO: 60382 - protein, 9 aa, synthetic construct
  source 1..9: note = Seed: LVVVGAVGV (KRAS G12V)
LVVVGPVGV

SEQ ID NO: 60383 - protein, 9 aa, synthetic construct
  source 1..9: note = Seed: LVVVGAVGV (KRAS G12V)
LVVVGPVGY

SEQ ID NO: 60384 - protein, 9 aa, synthetic construct
  source 1..9: note = Seed: LVVVGAVGV (KRAS G12V)
LVVVGQVGA

SEQ ID NO: 60385 - protein, 9 aa, synthetic construct
  source 1..9: note = Seed: LVVVGAVGV (KRAS G12V)
LVVVGQVGF

SEQ ID NO: 60386 - protein, 9 aa, synthetic construct
  source 1..9: note = Seed: LVVVGAVGV (KRAS G12V)
LVVVGQVGI

SEQ ID NO: 60387 - protein, 9 aa, synthetic construct
  source 1..9: note = Seed: LVVVGAVGV (KRAS G12V)
LVVVGQVGL

SEQ ID NO: 60388 - protein, 9 aa, synthetic construct
  source 1..9: note = Seed: LVVVGAVGV (KRAS G12V)
LVVVGQVGM

SEQ ID NO: 60389 - protein, 9 aa, synthetic construct
  source 1..9: note = Seed: LVVVGAVGV (KRAS G12V)
LVVVGQVGN

SEQ ID NO: 60390 - protein, 9 aa, synthetic construct
  source 1..9: note = Seed: LVVVGAVGV (KRAS G12V)
LVVVGQVGQ

SEQ ID NO: 60391 - protein, 9 aa, synthetic construct
  source 1..9: note = Seed: LVVVGAVGV (KRAS G12V)
LVVVGQVGR

SEQ ID NO: 60392 - protein, 9 aa, synthetic construct
  source 1..9: note = Seed: LVVVGAVGV (KRAS G12V)
LVVVGQVGS

SEQ ID NO: 60393 - protein, 9 aa, synthetic construct
  source 1..9: note = Seed: LVVVGAVGV (KRAS G12V)
LVVVGQVGT

SEQ ID NO: 60394 - protein, 9 aa, synthetic construct
  source 1..9: note = Seed: LVVVGAVGV (KRAS G12V)
LVVVGQVGV

SEQ ID NO: 60395 - protein, 9 aa, synthetic construct
  source 1..9: note = Seed: LVVVGAVGV (KRAS G12V)
LVVVGQVGY

SEQ ID NO: 60396 - protein, 9 aa, synthetic construct
  source 1..9: note = Seed: LVVVGAVGV (KRAS G12V)
LVVVGRVGA

SEQ ID NO: 60397 - protein, 9 aa, synthetic construct
  source 1..9: note = Seed: LVVVGAVGV (KRAS G12V)
LVVVGRVGC

SEQ ID NO: 60398 - protein, 9 aa, synthetic construct
  source 1..9: note = Seed: LVVVGAVGV (KRAS G12V)
LVVVGRVGG

SEQ ID NO: 60399 - protein, 9 aa, synthetic construct
  source 1..9: note = Seed: LVVVGAVGV (KRAS G12V)
LVVVGRVGH

SEQ ID NO: 60400 - protein, 9 aa, synthetic construct
  source 1..9: note = Seed: LVVVGAVGV (KRAS G12V)
LVVVGRVGK

SEQ ID NO: 60401 - protein, 9 aa, synthetic construct
  source 1..9: note = Seed: LVVVGAVGV (KRAS G12V)
LVVVGRVGL

SEQ ID NO: 60402 - protein, 9 aa, synthetic construct
  source 1..9: note = Seed: LVVVGAVGV (KRAS G12V)
LVVVGRVGM

SEQ ID NO: 60403 - protein, 9 aa, synthetic construct
  source 1..9: note = Seed: LVVVGAVGV (KRAS G12V)
LVVVGRVGN

SEQ ID NO: 60404 - protein, 9 aa, synthetic construct
  source 1..9: note = Seed: LVVVGAVGV (KRAS G12V)
LVVVGRVGP

SEQ ID NO: 60405 - protein, 9 aa, synthetic construct
  source 1..9: note = Seed: LVVVGAVGV (KRAS G12V)
LVVVGRVGQ

SEQ ID NO: 60406 - protein, 9 aa, synthetic construct
  source 1..9: note = Seed: LVVVGAVGV (KRAS G12V)
LVVVGRVGR

SEQ ID NO: 60407 - protein, 9 aa, synthetic construct
  source 1..9: note = Seed: LVVVGAVGV (KRAS G12V)
LVVVGRVGS

SEQ ID NO: 60408 - protein, 9 aa, synthetic construct
  source 1..9: note = Seed: LVVVGAVGV (KRAS G12V)
LVVVGRVGT

SEQ ID NO: 60409 - protein, 9 aa, synthetic construct
  source 1..9: note = Seed: LVVVGAVGV (KRAS G12V)
LVVVGRVGV

SEQ ID NO: 60410 - protein, 9 aa, synthetic construct
  source 1..9: note = Seed: LVVVGAVGV (KRAS G12V)
LVVVGRVGY

SEQ ID NO: 60411 - protein, 9 aa, synthetic construct
  source 1..9: note = Seed: LVVVGAVGV (KRAS G12V)
LVVVGSVGA

SEQ ID NO: 60412 - protein, 9 aa, synthetic construct
  source 1..9: note = Seed: LVVVGAVGV (KRAS G12V)
LVVVGSVGC

SEQ ID NO: 60413 - protein, 9 aa, synthetic construct
  source 1..9: note = Seed: LVVVGAVGV (KRAS G12V)
LVVVGSVGF

SEQ ID NO: 60414 - protein, 9 aa, synthetic construct
  source 1..9: note = Seed: LVVVGAVGV (KRAS G12V)
LVVVGSVGG

SEQ ID NO: 60415 - protein, 9 aa, synthetic construct
  source 1..9: note = Seed: LVVVGAVGV (KRAS G12V)
LVVVGSVGH

SEQ ID NO: 60416 - protein, 9 aa, synthetic construct
  source 1..9: note = Seed: LVVVGAVGV (KRAS G12V)
LVVVGSVGI

SEQ ID NO: 60417 - protein, 9 aa, synthetic construct
  source 1..9: note = Seed: LVVVGAVGV (KRAS G12V)
LVVVGSVGK

SEQ ID NO: 60418 - protein, 9 aa, synthetic construct
  source 1..9: note = Seed: LVVVGAVGV (KRAS G12V)
LVVVGSVGL

SEQ ID NO: 60419 - protein, 9 aa, synthetic construct
  source 1..9: note = Seed: LVVVGAVGV (KRAS G12V)
LVVVGSVGM

SEQ ID NO: 60420 - protein, 9 aa, synthetic construct
  source 1..9: note = Seed: LVVVGAVGV (KRAS G12V)
LVVVGSVGN

SEQ ID NO: 60421 - protein, 9 aa, synthetic construct
  source 1..9: note = Seed: LVVVGAVGV (KRAS G12V)
LVVVGSVGP

SEQ ID NO: 60422 - protein, 9 aa, synthetic construct
  source 1..9: note = Seed: LVVVGAVGV (KRAS G12V)
LVVVGSVGQ

SEQ ID NO: 60423 - protein, 9 aa, synthetic construct
  source 1..9: note = Seed: LVVVGAVGV (KRAS G12V)
LVVVGSVGR

SEQ ID NO: 60424 - protein, 9 aa, synthetic construct
  source 1..9: note = Seed: LVVVGAVGV (KRAS G12V)
LVVVGSVGS

SEQ ID NO: 60425 - protein, 9 aa, synthetic construct
  source 1..9: note = Seed: LVVVGAVGV (KRAS G12V)
LVVVGSVGT

SEQ ID NO: 60426 - protein, 9 aa, synthetic construct
  source 1..9: note = Seed: LVVVGAVGV (KRAS G12V)
LVVVGSVGV

SEQ ID NO: 60427 - protein, 9 aa, synthetic construct
  source 1..9: note = Seed: LVVVGAVGV (KRAS G12V)
LVVVGSVGY

SEQ ID NO: 60428 - protein, 9 aa, synthetic construct
  source 1..9: note = Seed: LVVVGAVGV (KRAS G12V)
LVVVGTVGA

SEQ ID NO: 60429 - protein, 9 aa, synthetic construct
  source 1..9: note = Seed: LVVVGAVGV (KRAS G12V)
LVVVGTVGC

SEQ ID NO: 60430 - protein, 9 aa, synthetic construct
  source 1..9: note = Seed: LVVVGAVGV (KRAS G12V)
LVVVGTVGG

SEQ ID NO: 60431 - protein, 9 aa, synthetic construct
  source 1..9: note = Seed: LVVVGAVGV (KRAS G12V)
LVVVGTVGH

SEQ ID NO: 60432 - protein, 9 aa, synthetic construct
  source 1..9: note = Seed: LVVVGAVGV (KRAS G12V)
LVVVGTVGI

SEQ ID NO: 60433 - protein, 9 aa, synthetic construct
  source 1..9: note = Seed: LVVVGAVGV (KRAS G12V)
LVVVGTVGK

SEQ ID NO: 60434 - protein, 9 aa, synthetic construct
  source 1..9: note = Seed: LVVVGAVGV (KRAS G12V)
LVVVGTVGL

SEQ ID NO: 60435 - protein, 9 aa, synthetic construct
  source 1..9: note = Seed: LVVVGAVGV (KRAS G12V)
LVVVGTVGM

SEQ ID NO: 60436 - protein, 9 aa, synthetic construct
  source 1..9: note = Seed: LVVVGAVGV (KRAS G12V)
LVVVGTVGN

SEQ ID NO: 60437 - protein, 9 aa, synthetic construct
  source 1..9: note = Seed: LVVVGAVGV (KRAS G12V)
LVVVGTVGP

SEQ ID NO: 60438 - protein, 9 aa, synthetic construct
  source 1..9: note = Seed: LVVVGAVGV (KRAS G12V)
LVVVGTVGQ

SEQ ID NO: 60439 - protein, 9 aa, synthetic construct
  source 1..9: note = Seed: LVVVGAVGV (KRAS G12V)
LVVVGTVGR

SEQ ID NO: 60440 - protein, 9 aa, synthetic construct
  source 1..9: note = Seed: LVVVGAVGV (KRAS G12V)
LVVVGTVGS

SEQ ID NO: 60441 - protein, 9 aa, synthetic construct
  source 1..9: note = Seed: LVVVGAVGV (KRAS G12V)
LVVVGTVGT

SEQ ID NO: 60442 - protein, 9 aa, synthetic construct
  source 1..9: note = Seed: LVVVGAVGV (KRAS G12V)
LVVVGTVGV

SEQ ID NO: 60443 - protein, 9 aa, synthetic construct
  source 1..9: note = Seed: LVVVGAVGV (KRAS G12V)
LVVVGTVGY

SEQ ID NO: 60444 - protein, 9 aa, synthetic construct
  source 1..9: note = Seed: LVVVGAVGV (KRAS G12V)
LVVVGVVGA

SEQ ID NO: 60445 - protein, 9 aa, synthetic construct
  source 1..9: note = Seed: LVVVGAVGV (KRAS G12V)
LVVVGVVGH

SEQ ID NO: 60446 - protein, 9 aa, synthetic construct
  source 1..9: note = Seed: LVVVGAVGV (KRAS G12V)
LVVVGVVGM

SEQ ID NO: 60447 - protein, 9 aa, synthetic construct
  source 1..9: note = Seed: LVVVGAVGV (KRAS G12V)
LVVVGVVGN

SEQ ID NO: 60448 - protein, 9 aa, synthetic construct
  source 1..9: note = Seed: LVVVGAVGV (KRAS G12V)
LVVVGVVGR

SEQ ID NO: 60449 - protein, 9 aa, synthetic construct
  source 1..9: note = Seed: LVVVGAVGV (KRAS G12V)
LVVVGVVGS

SEQ ID NO: 60450 - protein, 9 aa, synthetic construct
  source 1..9: note = Seed: LVVVGAVGV (KRAS G12V)
LVVVGVVGV

SEQ ID NO: 60451 - protein, 9 aa, synthetic construct
  source 1..9: note = Seed: LVVVGAVGV (KRAS G12V)
LVVVGYVGA

SEQ ID NO: 60452 - protein, 9 aa, synthetic construct
  source 1..9: note = Seed: LVVVGAVGV (KRAS G12V)
LVVWGAVGA

SEQ ID NO: 60453 - protein, 9 aa, synthetic construct
  source 1..9: note = Seed: LVVVGAVGV (KRAS G12V)
LVVWGAVGI

SEQ ID NO: 60454 - protein, 9 aa, synthetic construct
  source 1..9: note = Seed: LVVVGAVGV (KRAS G12V)
LVVWGAVGL

SEQ ID NO: 60455 - protein, 9 aa, synthetic construct
  source 1..9: note = Seed: LVVVGAVGV (KRAS G12V)
LVVWGAVGM

SEQ ID NO: 60456 - protein, 9 aa, synthetic construct
  source 1..9: note = Seed: LVVVGAVGV (KRAS G12V)
LVVWGAVGR

SEQ ID NO: 60457 - protein, 9 aa, synthetic construct
  source 1..9: note = Seed: LVVVGAVGV (KRAS G12V)
LVVWGAVGV

SEQ ID NO: 60458 - protein, 9 aa, synthetic construct
  source 1..9: note = Seed: LVVVGAVGV (KRAS G12V)
LVVWGDVGA

SEQ ID NO: 60459 - protein, 9 aa, synthetic construct
  source 1..9: note = Seed: LVVVGAVGV (KRAS G12V)
LVVWGDVGI

SEQ ID NO: 60460 - protein, 9 aa, synthetic construct
  source 1..9: note = Seed: LVVVGAVGV (KRAS G12V)
LVVWGDVGL

SEQ ID NO: 60461 - protein, 9 aa, synthetic construct
  source 1..9: note = Seed: LVVVGAVGV (KRAS G12V)
LVVWGDVGM

SEQ ID NO: 60462 - protein, 9 aa, synthetic construct
  source 1..9: note = Seed: LVVVGAVGV (KRAS G12V)
LVVWGDVGV

SEQ ID NO: 60463 - protein, 9 aa, synthetic construct
  source 1..9: note = Seed: LVVVGAVGV (KRAS G12V)
LVVWGGVGA

SEQ ID NO: 60464 - protein, 9 aa, synthetic construct
  source 1..9: note = Seed: LVVVGAVGV (KRAS G12V)
LVVWGGVGI

SEQ ID NO: 60465 - protein, 9 aa, synthetic construct
  source 1..9: note = Seed: LVVVGAVGV (KRAS G12V)
LVVWGGVGL

SEQ ID NO: 60466 - protein, 9 aa, synthetic construct
  source 1..9: note = Seed: LVVVGAVGV (KRAS G12V)
LVVWGGVGM

SEQ ID NO: 60467 - protein, 9 aa, synthetic construct
  source 1..9: note = Seed: LVVVGAVGV (KRAS G12V)
LVVWGGVGV

SEQ ID NO: 60468 - protein, 9 aa, synthetic construct
  source 1..9: note = Seed: LVVVGAVGV (KRAS G12V)
LVVWGHVGR

SEQ ID NO: 60469 - protein, 9 aa, synthetic construct
  source 1..9: note = Seed: LVVVGAVGV (KRAS G12V)
LVVWGHVGY

SEQ ID NO: 60470 - protein, 9 aa, synthetic construct
  source 1..9: note = Seed: LVVVGAVGV (KRAS G12V)
LVVWGKVGA

SEQ ID NO: 60471 - protein, 9 aa, synthetic construct
  source 1..9: note = Seed: LVVVGAVGV (KRAS G12V)
LVVWGKVGH

SEQ ID NO: 60472 - protein, 9 aa, synthetic construct
  source 1..9: note = Seed: LVVVGAVGV (KRAS G12V)
LVVWGKVGK

SEQ ID NO: 60473 - protein, 9 aa, synthetic construct
  source 1..9: note = Seed: LVVVGAVGV (KRAS G12V)
LVVWGKVGL

SEQ ID NO: 60474 - protein, 9 aa, synthetic construct
  source 1..9: note = Seed: LVVVGAVGV (KRAS G12V)
LVVWGKVGM

SEQ ID NO: 60475 - protein, 9 aa, synthetic construct
  source 1..9: note = Seed: LVVVGAVGV (KRAS G12V)
LVVWGKVGQ

SEQ ID NO: 60476 - protein, 9 aa, synthetic construct
  source 1..9: note = Seed: LVVVGAVGV (KRAS G12V)
LVVWGKVGR

SEQ ID NO: 60477 - protein, 9 aa, synthetic construct
  source 1..9: note = Seed: LVVVGAVGV (KRAS G12V)
LVVWGKVGS

SEQ ID NO: 60478 - protein, 9 aa, synthetic construct
  source 1..9: note = Seed: LVVVGAVGV (KRAS G12V)
LVVWGKVGY

SEQ ID NO: 60479 - protein, 9 aa, synthetic construct
  source 1..9: note = Seed: LVVVGAVGV (KRAS G12V)
LVVWGNVGA

SEQ ID NO: 60480 - protein, 9 aa, synthetic construct
  source 1..9: note = Seed: LVVVGAVGV (KRAS G12V)
LVVWGNVGF

SEQ ID NO: 60481 - protein, 9 aa, synthetic construct
  source 1..9: note = Seed: LVVVGAVGV (KRAS G12V)
LVVWGNVGI

SEQ ID NO: 60482 - protein, 9 aa, synthetic construct
  source 1..9: note = Seed: LVVVGAVGV (KRAS G12V)
LVVWGNVGL

SEQ ID NO: 60483 - protein, 9 aa, synthetic construct
  source 1..9: note = Seed: LVVVGAVGV (KRAS G12V)
LVVWGNVGM

SEQ ID NO: 60484 - protein, 9 aa, synthetic construct
  source 1..9: note = Seed: LVVVGAVGV (KRAS G12V)
LVVWGNVGS

SEQ ID NO: 60485 - protein, 9 aa, synthetic construct
  source 1..9: note = Seed: LVVVGAVGV (KRAS G12V)
LVVWGNVGT

SEQ ID NO: 60486 - protein, 9 aa, synthetic construct
  source 1..9: note = Seed: LVVVGAVGV (KRAS G12V)
LVVWGNVGV

SEQ ID NO: 60487 - protein, 9 aa, synthetic construct
  source 1..9: note = Seed: LVVVGAVGV (KRAS G12V)
LVVWGNVGY

SEQ ID NO: 60488 - protein, 9 aa, synthetic construct
  source 1..9: note = Seed: LVVVGAVGV (KRAS G12V)
LVVWGPVGA

SEQ ID NO: 60489 - protein, 9 aa, synthetic construct
  source 1..9: note = Seed: LVVVGAVGV (KRAS G12V)
LVVWGPVGI

SEQ ID NO: 60490 - protein, 9 aa, synthetic construct
  source 1..9: note = Seed: LVVVGAVGV (KRAS G12V)
LVVWGPVGL

SEQ ID NO: 60491 - protein, 9 aa, synthetic construct
  source 1..9: note = Seed: LVVVGAVGV (KRAS G12V)
LVVWGPVGM

SEQ ID NO: 60492 - protein, 9 aa, synthetic construct
  source 1..9: note = Seed: LVVVGAVGV (KRAS G12V)
LVVWGPVGV

SEQ ID NO: 60493 - protein, 9 aa, synthetic construct
  source 1..9: note = Seed: LVVVGAVGV (KRAS G12V)
LVVWGRVGA

SEQ ID NO: 60494 - protein, 9 aa, synthetic construct
  source 1..9: note = Seed: LVVVGAVGV (KRAS G12V)
LVVWGRVGF

SEQ ID NO: 60495 - protein, 9 aa, synthetic construct
  source 1..9: note = Seed: LVVVGAVGV (KRAS G12V)
LVVWGRVGG

SEQ ID NO: 60496 - protein, 9 aa, synthetic construct
  source 1..9: note = Seed: LVVVGAVGV (KRAS G12V)
LVVWGRVGH

SEQ ID NO: 60497 - protein, 9 aa, synthetic construct
  source 1..9: note = Seed: LVVVGAVGV (KRAS G12V)
LVVWGRVGK

SEQ ID NO: 60498 - protein, 9 aa, synthetic construct
  source 1..9: note = Seed: LVVVGAVGV (KRAS G12V)
LVVWGRVGL

SEQ ID NO: 60499 - protein, 9 aa, synthetic construct
  source 1..9: note = Seed: LVVVGAVGV (KRAS G12V)
LVVWGRVGM

SEQ ID NO: 60500 - protein, 9 aa, synthetic construct
  source 1..9: note = Seed: LVVVGAVGV (KRAS G12V)
LVVWGRVGQ

SEQ ID NO: 60501 - protein, 9 aa, synthetic construct
  source 1..9: note = Seed: LVVVGAVGV (KRAS G12V)
LVVWGRVGR

SEQ ID NO: 60502 - protein, 9 aa, synthetic construct
  source 1..9: note = Seed: LVVVGAVGV (KRAS G12V)
LVVWGRVGS

SEQ ID NO: 60503 - protein, 9 aa, synthetic construct
  source 1..9: note = Seed: LVVVGAVGV (KRAS G12V)
LVVWGRVGY

SEQ ID NO: 60504 - protein, 9 aa, synthetic construct
  source 1..9: note = Seed: LVVVGAVGV (KRAS G12V)
LVVWGSVGA

SEQ ID NO: 60505 - protein, 9 aa, synthetic construct
  source 1..9: note = Seed: LVVVGAVGV (KRAS G12V)
LVVWGSVGF

SEQ ID NO: 60506 - protein, 9 aa, synthetic construct
  source 1..9: note = Seed: LVVVGAVGV (KRAS G12V)
LVVWGSVGH

SEQ ID NO: 60507 - protein, 9 aa, synthetic construct
  source 1..9: note = Seed: LVVVGAVGV (KRAS G12V)
LVVWGSVGI

SEQ ID NO: 60508 - protein, 9 aa, synthetic construct
  source 1..9: note = Seed: LVVVGAVGV (KRAS G12V)
LVVWGSVGL

SEQ ID NO: 60509 - protein, 9 aa, synthetic construct
  source 1..9: note = Seed: LVVVGAVGV (KRAS G12V)
LVVWGSVGM

SEQ ID NO: 60510 - protein, 9 aa, synthetic construct
  source 1..9: note = Seed: LVVVGAVGV (KRAS G12V)
LVVWGSVGR

SEQ ID NO: 60511 - protein, 9 aa, synthetic construct
  source 1..9: note = Seed: LVVVGAVGV (KRAS G12V)
LVVWGSVGS

SEQ ID NO: 60512 - protein, 9 aa, synthetic construct
  source 1..9: note = Seed: LVVVGAVGV (KRAS G12V)
LVVWGSVGT

SEQ ID NO: 60513 - protein, 9 aa, synthetic construct
  source 1..9: note = Seed: LVVVGAVGV (KRAS G12V)
LVVWGSVGV

SEQ ID NO: 60514 - protein, 9 aa, synthetic construct
  source 1..9: note = Seed: LVVVGAVGV (KRAS G12V)
LVVWGSVGY

SEQ ID NO: 60515 - protein, 9 aa, synthetic construct
  source 1..9: note = Seed: LVVVGAVGV (KRAS G12V)
LVVWGTVGA

SEQ ID NO: 60516 - protein, 9 aa, synthetic construct
  source 1..9: note = Seed: LVVVGAVGV (KRAS G12V)
LVVWGTVGI

SEQ ID NO: 60517 - protein, 9 aa, synthetic construct
  source 1..9: note = Seed: LVVVGAVGV (KRAS G12V)
LVVWGTVGL

SEQ ID NO: 60518 - protein, 9 aa, synthetic construct
  source 1..9: note = Seed: LVVVGAVGV (KRAS G12V)
LVVWGTVGM

SEQ ID NO: 60519 - protein, 9 aa, synthetic construct
  source 1..9: note = Seed: LVVVGAVGV (KRAS G12V)
LVVWGTVGR

SEQ ID NO: 60520 - protein, 9 aa, synthetic construct
  source 1..9: note = Seed: LVVVGAVGV (KRAS G12V)
LVVWGTVGS

SEQ ID NO: 60521 - protein, 9 aa, synthetic construct
  source 1..9: note = Seed: LVVVGAVGV (KRAS G12V)
LVVWGTVGV

SEQ ID NO: 60522 - protein, 9 aa, synthetic construct
  source 1..9: note = Seed: LVVVGAVGV (KRAS G12V)
LVVYGAVGA

SEQ ID NO: 60523 - protein, 9 aa, synthetic construct
  source 1..9: note = Seed: LVVVGAVGV (KRAS G12V)
LVVYGAVGF

SEQ ID NO: 60524 - protein, 9 aa, synthetic construct
  source 1..9: note = Seed: LVVVGAVGV (KRAS G12V)
LVVYGAVGG

SEQ ID NO: 60525 - protein, 9 aa, synthetic construct
  source 1..9: note = Seed: LVVVGAVGV (KRAS G12V)
LVVYGAVGH

SEQ ID NO: 60526 - protein, 9 aa, synthetic construct
  source 1..9: note = Seed: LVVVGAVGV (KRAS G12V)
LVVYGAVGI

SEQ ID NO: 60527 - protein, 9 aa, synthetic construct
  source 1..9: note = Seed: LVVVGAVGV (KRAS G12V)
LVVYGAVGL

SEQ ID NO: 60528 - protein, 9 aa, synthetic construct
  source 1..9: note = Seed: LVVVGAVGV (KRAS G12V)
LVVYGAVGM

SEQ ID NO: 60529 - protein, 9 aa, synthetic construct
  source 1..9: note = Seed: LVVVGAVGV (KRAS G12V)
LVVYGAVGQ

SEQ ID NO: 60530 - protein, 9 aa, synthetic construct
  source 1..9: note = Seed: LVVVGAVGV (KRAS G12V)
LVVYGAVGR

SEQ ID NO: 60531 - protein, 9 aa, synthetic construct
  source 1..9: note = Seed: LVVVGAVGV (KRAS G12V)
LVVYGAVGS

SEQ ID NO: 60532 - protein, 9 aa, synthetic construct
  source 1..9: note = Seed: LVVVGAVGV (KRAS G12V)
LVVYGAVGT

SEQ ID NO: 60533 - protein, 9 aa, synthetic construct
  source 1..9: note = Seed: LVVVGAVGV (KRAS G12V)
LVVYGAVGV

SEQ ID NO: 60534 - protein, 9 aa, synthetic construct
  source 1..9: note = Seed: LVVVGAVGV (KRAS G12V)
LVVYGAVGY

SEQ ID NO: 60535 - protein, 9 aa, synthetic construct
  source 1..9: note = Seed: LVVVGAVGV (KRAS G12V)
LVVYGDVGA

SEQ ID NO: 60536 - protein, 9 aa, synthetic construct
  source 1..9: note = Seed: LVVVGAVGV (KRAS G12V)
LVVYGDVGF

SEQ ID NO: 60537 - protein, 9 aa, synthetic construct
  source 1..9: note = Seed: LVVVGAVGV (KRAS G12V)
LVVYGDVGI

SEQ ID NO: 60538 - protein, 9 aa, synthetic construct
  source 1..9: note = Seed: LVVVGAVGV (KRAS G12V)
LVVYGDVGL

SEQ ID NO: 60539 - protein, 9 aa, synthetic construct
  source 1..9: note = Seed: LVVVGAVGV (KRAS G12V)
LVVYGDVGM

SEQ ID NO: 60540 - protein, 9 aa, synthetic construct
  source 1..9: note = Seed: LVVVGAVGV (KRAS G12V)
LVVYGDVGS

SEQ ID NO: 60541 - protein, 9 aa, synthetic construct
  source 1..9: note = Seed: LVVVGAVGV (KRAS G12V)
LVVYGDVGT

SEQ ID NO: 60542 - protein, 9 aa, synthetic construct
  source 1..9: note = Seed: LVVVGAVGV (KRAS G12V)
LVVYGDVGV

SEQ ID NO: 60543 - protein, 9 aa, synthetic construct
  source 1..9: note = Seed: LVVVGAVGV (KRAS G12V)
LVVYGGVGA

SEQ ID NO: 60544 - protein, 9 aa, synthetic construct
  source 1..9: note = Seed: LVVVGAVGV (KRAS G12V)
LVVYGGVGF

SEQ ID NO: 60545 - protein, 9 aa, synthetic construct
  source 1..9: note = Seed: LVVVGAVGV (KRAS G12V)
LVVYGGVGG

SEQ ID NO: 60546 - protein, 9 aa, synthetic construct
  source 1..9: note = Seed: LVVVGAVGV (KRAS G12V)
LVVYGGVGH

SEQ ID NO: 60547 - protein, 9 aa, synthetic construct
  source 1..9: note = Seed: LVVVGAVGV (KRAS G12V)
LVVYGGVGI

SEQ ID NO: 60548 - protein, 9 aa, synthetic construct
  source 1..9: note = Seed: LVVVGAVGV (KRAS G12V)
LVVYGGVGL

SEQ ID NO: 60549 - protein, 9 aa, synthetic construct
  source 1..9: note = Seed: LVVVGAVGV (KRAS G12V)
LVVYGGVGM

SEQ ID NO: 60550 - protein, 9 aa, synthetic construct
  source 1..9: note = Seed: LVVVGAVGV (KRAS G12V)
LVVYGGVGQ

SEQ ID NO: 60551 - protein, 9 aa, synthetic construct
  source 1..9: note = Seed: LVVVGAVGV (KRAS G12V)
LVVYGGVGR

SEQ ID NO: 60552 - protein, 9 aa, synthetic construct
  source 1..9: note = Seed: LVVVGAVGV (KRAS G12V)
LVVYGGVGS

SEQ ID NO: 60553 - protein, 9 aa, synthetic construct
  source 1..9: note = Seed: LVVVGAVGV (KRAS G12V)
LVVYGGVGT

SEQ ID NO: 60554 - protein, 9 aa, synthetic construct
  source 1..9: note = Seed: LVVVGAVGV (KRAS G12V)
LVVYGGVGV

SEQ ID NO: 60555 - protein, 9 aa, synthetic construct
  source 1..9: note = Seed: LVVVGAVGV (KRAS G12V)
LVVYGGVGY

SEQ ID NO: 60556 - protein, 9 aa, synthetic construct
  source 1..9: note = Seed: LVVVGAVGV (KRAS G12V)
LVVYGIVGR

SEQ ID NO: 60557 - protein, 9 aa, synthetic construct
  source 1..9: note = Seed: LVVVGAVGV (KRAS G12V)
LVVYGKVGA

SEQ ID NO: 60558 - protein, 9 aa, synthetic construct
  source 1..9: note = Seed: LVVVGAVGV (KRAS G12V)
LVVYGKVGH

SEQ ID NO: 60559 - protein, 9 aa, synthetic construct
  source 1..9: note = Seed: LVVVGAVGV (KRAS G12V)
LVVYGKVGK

SEQ ID NO: 60560 - protein, 9 aa, synthetic construct
  source 1..9: note = Seed: LVVVGAVGV (KRAS G12V)
LVVYGKVGR

SEQ ID NO: 60561 - protein, 9 aa, synthetic construct
  source 1..9: note = Seed: LVVVGAVGV (KRAS G12V)
LVVYGLVGR

SEQ ID NO: 60562 - protein, 9 aa, synthetic construct
  source 1..9: note = Seed: LVVVGAVGV (KRAS G12V)
LVVYGMVGA

SEQ ID NO: 60563 - protein, 9 aa, synthetic construct
  source 1..9: note = Seed: LVVVGAVGV (KRAS G12V)
LVVYGMVGR

SEQ ID NO: 60564 - protein, 9 aa, synthetic construct
  source 1..9: note = Seed: LVVVGAVGV (KRAS G12V)
LVVYGNVGA

SEQ ID NO: 60565 - protein, 9 aa, synthetic construct
  source 1..9: note = Seed: LVVVGAVGV (KRAS G12V)
LVVYGNVGE

SEQ ID NO: 60566 - protein, 9 aa, synthetic construct
  source 1..9: note = Seed: LVVVGAVGV (KRAS G12V)
LVVYGNVGF

SEQ ID NO: 60567 - protein, 9 aa, synthetic construct
  source 1..9: note = Seed: LVVVGAVGV (KRAS G12V)
LVVYGNVGG

SEQ ID NO: 60568 - protein, 9 aa, synthetic construct
  source 1..9: note = Seed: LVVVGAVGV (KRAS G12V)
LVVYGNVGH

SEQ ID NO: 60569 - protein, 9 aa, synthetic construct
  source 1..9: note = Seed: LVVVGAVGV (KRAS G12V)
LVVYGNVGI

SEQ ID NO: 60570 - protein, 9 aa, synthetic construct
  source 1..9: note = Seed: LVVVGAVGV (KRAS G12V)
LVVYGNVGK

SEQ ID NO: 60571 - protein, 9 aa, synthetic construct
  source 1..9: note = Seed: LVVVGAVGV (KRAS G12V)
LVVYGNVGL

SEQ ID NO: 60572 - protein, 9 aa, synthetic construct
  source 1..9: note = Seed: LVVVGAVGV (KRAS G12V)
LVVYGNVGM

SEQ ID NO: 60573 - protein, 9 aa, synthetic construct
  source 1..9: note = Seed: LVVVGAVGV (KRAS G12V)
LVVYGNVGN

SEQ ID NO: 60574 - protein, 9 aa, synthetic construct
  source 1..9: note = Seed: LVVVGAVGV (KRAS G12V)
LVVYGNVGP

SEQ ID NO: 60575 - protein, 9 aa, synthetic construct
  source 1..9: note = Seed: LVVVGAVGV (KRAS G12V)
LVVYGNVGQ

SEQ ID NO: 60576 - protein, 9 aa, synthetic construct
  source 1..9: note = Seed: LVVVGAVGV (KRAS G12V)
LVVYGNVGR

SEQ ID NO: 60577 - protein, 9 aa, synthetic construct
  source 1..9: note = Seed: LVVVGAVGV (KRAS G12V)
LVVYGNVGS

SEQ ID NO: 60578 - protein, 9 aa, synthetic construct
  source 1..9: note = Seed: LVVVGAVGV (KRAS G12V)
LVVYGNVGT

SEQ ID NO: 60579 - protein, 9 aa, synthetic construct
  source 1..9: note = Seed: LVVVGAVGV (KRAS G12V)
LVVYGNVGV

SEQ ID NO: 60580 - protein, 9 aa, synthetic construct
  source 1..9: note = Seed: LVVVGAVGV (KRAS G12V)
LVVYGNVGY

SEQ ID NO: 60581 - protein, 9 aa, synthetic construct
  source 1..9: note = Seed: LVVVGAVGV (KRAS G12V)
LVVYGPVGA

SEQ ID NO: 60582 - protein, 9 aa, synthetic construct
  source 1..9: note = Seed: LVVVGAVGV (KRAS G12V)
LVVYGPVGI

SEQ ID NO: 60583 - protein, 9 aa, synthetic construct
  source 1..9: note = Seed: LVVVGAVGV (KRAS G12V)
LVVYGPVGL

SEQ ID NO: 60584 - protein, 9 aa, synthetic construct
  source 1..9: note = Seed: LVVVGAVGV (KRAS G12V)
LVVYGPVGM

SEQ ID NO: 60585 - protein, 9 aa, synthetic construct
  source 1..9: note = Seed: LVVVGAVGV (KRAS G12V)
LVVYGPVGT

SEQ ID NO: 60586 - protein, 9 aa, synthetic construct
  source 1..9: note = Seed: LVVVGAVGV (KRAS G12V)
LVVYGPVGV

SEQ ID NO: 60587 - protein, 9 aa, synthetic construct
  source 1..9: note = Seed: LVVVGAVGV (KRAS G12V)
LVVYGRVGH

SEQ ID NO: 60588 - protein, 9 aa, synthetic construct
  source 1..9: note = Seed: LVVVGAVGV (KRAS G12V)
LVVYGRVGK

SEQ ID NO: 60589 - protein, 9 aa, synthetic construct
  source 1..9: note = Seed: LVVVGAVGV (KRAS G12V)
LVVYGRVGR

SEQ ID NO: 60590 - protein, 9 aa, synthetic construct
  source 1..9: note = Seed: LVVVGAVGV (KRAS G12V)
LVVYGRVGY

SEQ ID NO: 60591 - protein, 9 aa, synthetic construct
  source 1..9: note = Seed: LVVVGAVGV (KRAS G12V)
LVVYGSVGA

SEQ ID NO: 60592 - protein, 9 aa, synthetic construct
  source 1..9: note = Seed: LVVVGAVGV (KRAS G12V)
LVVYGSVGF

SEQ ID NO: 60593 - protein, 9 aa, synthetic construct
  source 1..9: note = Seed: LVVVGAVGV (KRAS G12V)
LVVYGSVGG

SEQ ID NO: 60594 - protein, 9 aa, synthetic construct
  source 1..9: note = Seed: LVVVGAVGV (KRAS G12V)
LVVYGSVGH

SEQ ID NO: 60595 - protein, 9 aa, synthetic construct
  source 1..9: note = Seed: LVVVGAVGV (KRAS G12V)
LVVYGSVGI

SEQ ID NO: 60596 - protein, 9 aa, synthetic construct
  source 1..9: note = Seed: LVVVGAVGV (KRAS G12V)
LVVYGSVGK

SEQ ID NO: 60597 - protein, 9 aa, synthetic construct
  source 1..9: note = Seed: LVVVGAVGV (KRAS G12V)
LVVYGSVGL

SEQ ID NO: 60598 - protein, 9 aa, synthetic construct
  source 1..9: note = Seed: LVVVGAVGV (KRAS G12V)
LVVYGSVGM

SEQ ID NO: 60599 - protein, 9 aa, synthetic construct
  source 1..9: note = Seed: LVVVGAVGV (KRAS G12V)
LVVYGSVGN

SEQ ID NO: 60600 - protein, 9 aa, synthetic construct
  source 1..9: note = Seed: LVVVGAVGV (KRAS G12V)
LVVYGSVGP

SEQ ID NO: 60601 - protein, 9 aa, synthetic construct
  source 1..9: note = Seed: LVVVGAVGV (KRAS G12V)
LVVYGSVGQ

SEQ ID NO: 60602 - protein, 9 aa, synthetic construct
  source 1..9: note = Seed: LVVVGAVGV (KRAS G12V)
LVVYGSVGR

SEQ ID NO: 60603 - protein, 9 aa, synthetic construct
  source 1..9: note = Seed: LVVVGAVGV (KRAS G12V)
LVVYGSVGS

SEQ ID NO: 60604 - protein, 9 aa, synthetic construct
  source 1..9: note = Seed: LVVVGAVGV (KRAS G12V)
LVVYGSVGT

SEQ ID NO: 60605 - protein, 9 aa, synthetic construct
  source 1..9: note = Seed: LVVVGAVGV (KRAS G12V)
LVVYGSVGV

SEQ ID NO: 60606 - protein, 9 aa, synthetic construct
  source 1..9: note = Seed: LVVVGAVGV (KRAS G12V)
LVVYGSVGY

SEQ ID NO: 60607 - protein, 9 aa, synthetic construct
  source 1..9: note = Seed: LVVVGAVGV (KRAS G12V)
LVVYGTVGA

SEQ ID NO: 60608 - protein, 9 aa, synthetic construct
  source 1..9: note = Seed: LVVVGAVGV (KRAS G12V)
LVVYGTVGF

SEQ ID NO: 60609 - protein, 9 aa, synthetic construct
  source 1..9: note = Seed: LVVVGAVGV (KRAS G12V)
LVVYGTVGH

SEQ ID NO: 60610 - protein, 9 aa, synthetic construct
  source 1..9: note = Seed: LVVVGAVGV (KRAS G12V)
LVVYGTVGI

SEQ ID NO: 60611 - protein, 9 aa, synthetic construct
  source 1..9: note = Seed: LVVVGAVGV (KRAS G12V)
LVVYGTVGL

SEQ ID NO: 60612 - protein, 9 aa, synthetic construct
  source 1..9: note = Seed: LVVVGAVGV (KRAS G12V)
LVVYGTVGM

SEQ ID NO: 60613 - protein, 9 aa, synthetic construct
  source 1..9: note = Seed: LVVVGAVGV (KRAS G12V)
LVVYGTVGS

SEQ ID NO: 60614 - protein, 9 aa, synthetic construct
  source 1..9: note = Seed: LVVVGAVGV (KRAS G12V)
LVVYGTVGT

SEQ ID NO: 60615 - protein, 9 aa, synthetic construct
  source 1..9: note = Seed: LVVVGAVGV (KRAS G12V)
LVVYGTVGV

SEQ ID NO: 60616 - protein, 9 aa, synthetic construct
  source 1..9: note = Seed: LVVVGAVGV (KRAS G12V)
LVVYGTVGY

SEQ ID NO: 60617 - protein, 9 aa, synthetic construct
  source 1..9: note = Seed: LVVVGAVGV (KRAS G12V)
LVVYGVVGA

SEQ ID NO: 60618 - protein, 9 aa, synthetic construct
  source 1..9: note = Seed: LVVVGAVGV (KRAS G12V)
MVVAGAVGA

SEQ ID NO: 60619 - protein, 9 aa, synthetic construct
  source 1..9: note = Seed: LVVVGAVGV (KRAS G12V)
MVVAGAVGC

SEQ ID NO: 60620 - protein, 9 aa, synthetic construct
  source 1..9: note = Seed: LVVVGAVGV (KRAS G12V)
MVVAGAVGD

SEQ ID NO: 60621 - protein, 9 aa, synthetic construct
  source 1..9: note = Seed: LVVVGAVGV (KRAS G12V)
MVVAGAVGE

SEQ ID NO: 60622 - protein, 9 aa, synthetic construct
  source 1..9: note = Seed: LVVVGAVGV (KRAS G12V)
MVVAGAVGF

SEQ ID NO: 60623 - protein, 9 aa, synthetic construct
  source 1..9: note = Seed: LVVVGAVGV (KRAS G12V)
MVVAGAVGG

SEQ ID NO: 60624 - protein, 9 aa, synthetic construct
  source 1..9: note = Seed: LVVVGAVGV (KRAS G12V)
MVVAGAVGH

SEQ ID NO: 60625 - protein, 9 aa, synthetic construct
  source 1..9: note = Seed: LVVVGAVGV (KRAS G12V)
MVVAGAVGI

SEQ ID NO: 60626 - protein, 9 aa, synthetic construct
  source 1..9: note = Seed: LVVVGAVGV (KRAS G12V)
MVVAGAVGL

SEQ ID NO: 60627 - protein, 9 aa, synthetic construct
  source 1..9: note = Seed: LVVVGAVGV (KRAS G12V)
MVVAGAVGM

SEQ ID NO: 60628 - protein, 9 aa, synthetic construct
  source 1..9: note = Seed: LVVVGAVGV (KRAS G12V)
MVVAGAVGN

SEQ ID NO: 60629 - protein, 9 aa, synthetic construct
  source 1..9: note = Seed: LVVVGAVGV (KRAS G12V)
MVVAGAVGQ

SEQ ID NO: 60630 - protein, 9 aa, synthetic construct
  source 1..9: note = Seed: LVVVGAVGV (KRAS G12V)
MVVAGAVGR

SEQ ID NO: 60631 - protein, 9 aa, synthetic construct
  source 1..9: note = Seed: LVVVGAVGV (KRAS G12V)
MVVAGAVGS

SEQ ID NO: 60632 - protein, 9 aa, synthetic construct
  source 1..9: note = Seed: LVVVGAVGV (KRAS G12V)
MVVAGAVGT

SEQ ID NO: 60633 - protein, 9 aa, synthetic construct
  source 1..9: note = Seed: LVVVGAVGV (KRAS G12V)
MVVAGAVGV

SEQ ID NO: 60634 - protein, 9 aa, synthetic construct
  source 1..9: note = Seed: LVVVGAVGV (KRAS G12V)
MVVAGAVGY

SEQ ID NO: 60635 - protein, 9 aa, synthetic construct
  source 1..9: note = Seed: LVVVGAVGV (KRAS G12V)
MVVAGCVGA

SEQ ID NO: 60636 - protein, 9 aa, synthetic construct
  source 1..9: note = Seed: LVVVGAVGV (KRAS G12V)
MVVAGCVGC

SEQ ID NO: 60637 - protein, 9 aa, synthetic construct
  source 1..9: note = Seed: LVVVGAVGV (KRAS G12V)
MVVAGCVGH

SEQ ID NO: 60638 - protein, 9 aa, synthetic construct
  source 1..9: note = Seed: LVVVGAVGV (KRAS G12V)
MVVAGCVGI

SEQ ID NO: 60639 - protein, 9 aa, synthetic construct
  source 1..9: note = Seed: LVVVGAVGV (KRAS G12V)
MVVAGCVGL

SEQ ID NO: 60640 - protein, 9 aa, synthetic construct
  source 1..9: note = Seed: LVVVGAVGV (KRAS G12V)
MVVAGCVGM

SEQ ID NO: 60641 - protein, 9 aa, synthetic construct
  source 1..9: note = Seed: LVVVGAVGV (KRAS G12V)
MVVAGCVGN

SEQ ID NO: 60642 - protein, 9 aa, synthetic construct
  source 1..9: note = Seed: LVVVGAVGV (KRAS G12V)
MVVAGCVGS

SEQ ID NO: 60643 - protein, 9 aa, synthetic construct
  source 1..9: note = Seed: LVVVGAVGV (KRAS G12V)
MVVAGCVGV

SEQ ID NO: 60644 - protein, 9 aa, synthetic construct
  source 1..9: note = Seed: LVVVGAVGV (KRAS G12V)
MVVAGDVGA

SEQ ID NO: 60645 - protein, 9 aa, synthetic construct
  source 1..9: note = Seed: LVVVGAVGV (KRAS G12V)
MVVAGDVGV

SEQ ID NO: 60646 - protein, 9 aa, synthetic construct
  source 1..9: note = Seed: LVVVGAVGV (KRAS G12V)
MVVAGEVGA

SEQ ID NO: 60647 - protein, 9 aa, synthetic construct
  source 1..9: note = Seed: LVVVGAVGV (KRAS G12V)
MVVAGEVGV

SEQ ID NO: 60648 - protein, 9 aa, synthetic construct
  source 1..9: note = Seed: LVVVGAVGV (KRAS G12V)
MVVAGGVGA

SEQ ID NO: 60649 - protein, 9 aa, synthetic construct
  source 1..9: note = Seed: LVVVGAVGV (KRAS G12V)
MVVAGGVGC

SEQ ID NO: 60650 - protein, 9 aa, synthetic construct
  source 1..9: note = Seed: LVVVGAVGV (KRAS G12V)
MVVAGGVGF

SEQ ID NO: 60651 - protein, 9 aa, synthetic construct
  source 1..9: note = Seed: LVVVGAVGV (KRAS G12V)
MVVAGGVGG

SEQ ID NO: 60652 - protein, 9 aa, synthetic construct
  source 1..9: note = Seed: LVVVGAVGV (KRAS G12V)
MVVAGGVGH

SEQ ID NO: 60653 - protein, 9 aa, synthetic construct
  source 1..9: note = Seed: LVVVGAVGV (KRAS G12V)
MVVAGGVGI

SEQ ID NO: 60654 - protein, 9 aa, synthetic construct
  source 1..9: note = Seed: LVVVGAVGV (KRAS G12V)
MVVAGGVGL

SEQ ID NO: 60655 - protein, 9 aa, synthetic construct
  source 1..9: note = Seed: LVVVGAVGV (KRAS G12V)
MVVAGGVGM

SEQ ID NO: 60656 - protein, 9 aa, synthetic construct
  source 1..9: note = Seed: LVVVGAVGV (KRAS G12V)
MVVAGGVGN

SEQ ID NO: 60657 - protein, 9 aa, synthetic construct
  source 1..9: note = Seed: LVVVGAVGV (KRAS G12V)
MVVAGGVGP

SEQ ID NO: 60658 - protein, 9 aa, synthetic construct
  source 1..9: note = Seed: LVVVGAVGV (KRAS G12V)
MVVAGGVGQ

SEQ ID NO: 60659 - protein, 9 aa, synthetic construct
  source 1..9: note = Seed: LVVVGAVGV (KRAS G12V)
MVVAGGVGR

SEQ ID NO: 60660 - protein, 9 aa, synthetic construct
  source 1..9: note = Seed: LVVVGAVGV (KRAS G12V)
MVVAGGVGS

SEQ ID NO: 60661 - protein, 9 aa, synthetic construct
  source 1..9: note = Seed: LVVVGAVGV (KRAS G12V)
MVVAGGVGT

SEQ ID NO: 60662 - protein, 9 aa, synthetic construct
  source 1..9: note = Seed: LVVVGAVGV (KRAS G12V)
MVVAGGVGV

SEQ ID NO: 60663 - protein, 9 aa, synthetic construct
  source 1..9: note = Seed: LVVVGAVGV (KRAS G12V)
MVVAGGVGW

SEQ ID NO: 60664 - protein, 9 aa, synthetic construct
  source 1..9: note = Seed: LVVVGAVGV (KRAS G12V)
MVVAGGVGY

SEQ ID NO: 60665 - protein, 9 aa, synthetic construct
  source 1..9: note = Seed: LVVVGAVGV (KRAS G12V)
MVVAGHVGA

SEQ ID NO: 60666 - protein, 9 aa, synthetic construct
  source 1..9: note = Seed: LVVVGAVGV (KRAS G12V)
MVVAGHVGC

SEQ ID NO: 60667 - protein, 9 aa, synthetic construct
  source 1..9: note = Seed: LVVVGAVGV (KRAS G12V)
MVVAGIVGA

SEQ ID NO: 60668 - protein, 9 aa, synthetic construct
  source 1..9: note = Seed: LVVVGAVGV (KRAS G12V)
MVVAGIVGC

SEQ ID NO: 60669 - protein, 9 aa, synthetic construct
  source 1..9: note = Seed: LVVVGAVGV (KRAS G12V)
MVVAGIVGG

SEQ ID NO: 60670 - protein, 9 aa, synthetic construct
  source 1..9: note = Seed: LVVVGAVGV (KRAS G12V)
MVVAGIVGN

SEQ ID NO: 60671 - protein, 9 aa, synthetic construct
  source 1..9: note = Seed: LVVVGAVGV (KRAS G12V)
MVVAGIVGQ

SEQ ID NO: 60672 - protein, 9 aa, synthetic construct
  source 1..9: note = Seed: LVVVGAVGV (KRAS G12V)
MVVAGIVGS

SEQ ID NO: 60673 - protein, 9 aa, synthetic construct
  source 1..9: note = Seed: LVVVGAVGV (KRAS G12V)
MVVAGIVGT

SEQ ID NO: 60674 - protein, 9 aa, synthetic construct
  source 1..9: note = Seed: LVVVGAVGV (KRAS G12V)
MVVAGIVGV

SEQ ID NO: 60675 - protein, 9 aa, synthetic construct
  source 1..9: note = Seed: LVVVGAVGV (KRAS G12V)
MVVAGKVGA

SEQ ID NO: 60676 - protein, 9 aa, synthetic construct
  source 1..9: note = Seed: LVVVGAVGV (KRAS G12V)
MVVAGKVGC

SEQ ID NO: 60677 - protein, 9 aa, synthetic construct
  source 1..9: note = Seed: LVVVGAVGV (KRAS G12V)
MVVAGKVGG

SEQ ID NO: 60678 - protein, 9 aa, synthetic construct
  source 1..9: note = Seed: LVVVGAVGV (KRAS G12V)
MVVAGKVGH

SEQ ID NO: 60679 - protein, 9 aa, synthetic construct
  source 1..9: note = Seed: LVVVGAVGV (KRAS G12V)
MVVAGKVGK

SEQ ID NO: 60680 - protein, 9 aa, synthetic construct
  source 1..9: note = Seed: LVVVGAVGV (KRAS G12V)
MVVAGKVGM

SEQ ID NO: 60681 - protein, 9 aa, synthetic construct
  source 1..9: note = Seed: LVVVGAVGV (KRAS G12V)
MVVAGKVGN

SEQ ID NO: 60682 - protein, 9 aa, synthetic construct
  source 1..9: note = Seed: LVVVGAVGV (KRAS G12V)
MVVAGKVGQ

SEQ ID NO: 60683 - protein, 9 aa, synthetic construct
  source 1..9: note = Seed: LVVVGAVGV (KRAS G12V)
MVVAGKVGR

SEQ ID NO: 60684 - protein, 9 aa, synthetic construct
  source 1..9: note = Seed: LVVVGAVGV (KRAS G12V)
MVVAGKVGS

SEQ ID NO: 60685 - protein, 9 aa, synthetic construct
  source 1..9: note = Seed: LVVVGAVGV (KRAS G12V)
MVVAGKVGT

SEQ ID NO: 60686 - protein, 9 aa, synthetic construct
  source 1..9: note = Seed: LVVVGAVGV (KRAS G12V)
MVVAGKVGY

SEQ ID NO: 60687 - protein, 9 aa, synthetic construct
  source 1..9: note = Seed: LVVVGAVGV (KRAS G12V)
MVVAGNVGA

SEQ ID NO: 60688 - protein, 9 aa, synthetic construct
  source 1..9: note = Seed: LVVVGAVGV (KRAS G12V)
MVVAGNVGC

SEQ ID NO: 60689 - protein, 9 aa, synthetic construct
  source 1..9: note = Seed: LVVVGAVGV (KRAS G12V)
MVVAGNVGF

SEQ ID NO: 60690 - protein, 9 aa, synthetic construct
  source 1..9: note = Seed: LVVVGAVGV (KRAS G12V)
MVVAGNVGG

SEQ ID NO: 60691 - protein, 9 aa, synthetic construct
  source 1..9: note = Seed: LVVVGAVGV (KRAS G12V)
MVVAGNVGI

SEQ ID NO: 60692 - protein, 9 aa, synthetic construct
  source 1..9: note = Seed: LVVVGAVGV (KRAS G12V)
MVVAGNVGL

SEQ ID NO: 60693 - protein, 9 aa, synthetic construct
  source 1..9: note = Seed: LVVVGAVGV (KRAS G12V)
MVVAGNVGM

SEQ ID NO: 60694 - protein, 9 aa, synthetic construct
  source 1..9: note = Seed: LVVVGAVGV (KRAS G12V)
MVVAGNVGN

SEQ ID NO: 60695 - protein, 9 aa, synthetic construct
  source 1..9: note = Seed: LVVVGAVGV (KRAS G12V)
MVVAGNVGQ

SEQ ID NO: 60696 - protein, 9 aa, synthetic construct
  source 1..9: note = Seed: LVVVGAVGV (KRAS G12V)
MVVAGNVGR

SEQ ID NO: 60697 - protein, 9 aa, synthetic construct
  source 1..9: note = Seed: LVVVGAVGV (KRAS G12V)
MVVAGNVGS

SEQ ID NO: 60698 - protein, 9 aa, synthetic construct
  source 1..9: note = Seed: LVVVGAVGV (KRAS G12V)
MVVAGNVGT

SEQ ID NO: 60699 - protein, 9 aa, synthetic construct
  source 1..9: note = Seed: LVVVGAVGV (KRAS G12V)
MVVAGNVGV

SEQ ID NO: 60700 - protein, 9 aa, synthetic construct
  source 1..9: note = Seed: LVVVGAVGV (KRAS G12V)
MVVAGPVGA

SEQ ID NO: 60701 - protein, 9 aa, synthetic construct
  source 1..9: note = Seed: LVVVGAVGV (KRAS G12V)
MVVAGPVGC

SEQ ID NO: 60702 - protein, 9 aa, synthetic construct
  source 1..9: note = Seed: LVVVGAVGV (KRAS G12V)
MVVAGPVGD

SEQ ID NO: 60703 - protein, 9 aa, synthetic construct
  source 1..9: note = Seed: LVVVGAVGV (KRAS G12V)
MVVAGPVGF

SEQ ID NO: 60704 - protein, 9 aa, synthetic construct
  source 1..9: note = Seed: LVVVGAVGV (KRAS G12V)
MVVAGPVGG

SEQ ID NO: 60705 - protein, 9 aa, synthetic construct
  source 1..9: note = Seed: LVVVGAVGV (KRAS G12V)
MVVAGPVGI

SEQ ID NO: 60706 - protein, 9 aa, synthetic construct
  source 1..9: note = Seed: LVVVGAVGV (KRAS G12V)
MVVAGPVGL

SEQ ID NO: 60707 - protein, 9 aa, synthetic construct
  source 1..9: note = Seed: LVVVGAVGV (KRAS G12V)
MVVAGPVGM

SEQ ID NO: 60708 - protein, 9 aa, synthetic construct
  source 1..9: note = Seed: LVVVGAVGV (KRAS G12V)
MVVAGPVGN

SEQ ID NO: 60709 - protein, 9 aa, synthetic construct
  source 1..9: note = Seed: LVVVGAVGV (KRAS G12V)
MVVAGPVGQ

SEQ ID NO: 60710 - protein, 9 aa, synthetic construct
  source 1..9: note = Seed: LVVVGAVGV (KRAS G12V)
MVVAGPVGS

SEQ ID NO: 60711 - protein, 9 aa, synthetic construct
  source 1..9: note = Seed: LVVVGAVGV (KRAS G12V)
MVVAGPVGT

SEQ ID NO: 60712 - protein, 9 aa, synthetic construct
  source 1..9: note = Seed: LVVVGAVGV (KRAS G12V)
MVVAGPVGV

SEQ ID NO: 60713 - protein, 9 aa, synthetic construct
  source 1..9: note = Seed: LVVVGAVGV (KRAS G12V)
MVVAGPVGW

SEQ ID NO: 60714 - protein, 9 aa, synthetic construct
  source 1..9: note = Seed: LVVVGAVGV (KRAS G12V)
MVVAGQVGV

SEQ ID NO: 60715 - protein, 9 aa, synthetic construct
  source 1..9: note = Seed: LVVVGAVGV (KRAS G12V)
MVVAGRVGA

SEQ ID NO: 60716 - protein, 9 aa, synthetic construct
  source 1..9: note = Seed: LVVVGAVGV (KRAS G12V)
MVVAGRVGC

SEQ ID NO: 60717 - protein, 9 aa, synthetic construct
  source 1..9: note = Seed: LVVVGAVGV (KRAS G12V)
MVVAGRVGF

SEQ ID NO: 60718 - protein, 9 aa, synthetic construct
  source 1..9: note = Seed: LVVVGAVGV (KRAS G12V)
MVVAGRVGG

SEQ ID NO: 60719 - protein, 9 aa, synthetic construct
  source 1..9: note = Seed: LVVVGAVGV (KRAS G12V)
MVVAGRVGH

SEQ ID NO: 60720 - protein, 9 aa, synthetic construct
  source 1..9: note = Seed: LVVVGAVGV (KRAS G12V)
MVVAGRVGK

SEQ ID NO: 60721 - protein, 9 aa, synthetic construct
  source 1..9: note = Seed: LVVVGAVGV (KRAS G12V)
MVVAGRVGL

SEQ ID NO: 60722 - protein, 9 aa, synthetic construct
  source 1..9: note = Seed: LVVVGAVGV (KRAS G12V)
MVVAGRVGM

SEQ ID NO: 60723 - protein, 9 aa, synthetic construct
  source 1..9: note = Seed: LVVVGAVGV (KRAS G12V)
MVVAGRVGN

SEQ ID NO: 60724 - protein, 9 aa, synthetic construct
  source 1..9: note = Seed: LVVVGAVGV (KRAS G12V)
MVVAGRVGQ

SEQ ID NO: 60725 - protein, 9 aa, synthetic construct
  source 1..9: note = Seed: LVVVGAVGV (KRAS G12V)
MVVAGRVGR

SEQ ID NO: 60726 - protein, 9 aa, synthetic construct
  source 1..9: note = Seed: LVVVGAVGV (KRAS G12V)
MVVAGRVGS

SEQ ID NO: 60727 - protein, 9 aa, synthetic construct
  source 1..9: note = Seed: LVVVGAVGV (KRAS G12V)
MVVAGRVGT

SEQ ID NO: 60728 - protein, 9 aa, synthetic construct
  source 1..9: note = Seed: LVVVGAVGV (KRAS G12V)
MVVAGRVGV

SEQ ID NO: 60729 - protein, 9 aa, synthetic construct
  source 1..9: note = Seed: LVVVGAVGV (KRAS G12V)
MVVAGRVGY

SEQ ID NO: 60730 - protein, 9 aa, synthetic construct
  source 1..9: note = Seed: LVVVGAVGV (KRAS G12V)
MVVAGSVGA

SEQ ID NO: 60731 - protein, 9 aa, synthetic construct
  source 1..9: note = Seed: LVVVGAVGV (KRAS G12V)
MVVAGSVGC

SEQ ID NO: 60732 - protein, 9 aa, synthetic construct
  source 1..9: note = Seed: LVVVGAVGV (KRAS G12V)
MVVAGSVGD

SEQ ID NO: 60733 - protein, 9 aa, synthetic construct
  source 1..9: note = Seed: LVVVGAVGV (KRAS G12V)
MVVAGSVGF

SEQ ID NO: 60734 - protein, 9 aa, synthetic construct
  source 1..9: note = Seed: LVVVGAVGV (KRAS G12V)
MVVAGSVGG

SEQ ID NO: 60735 - protein, 9 aa, synthetic construct
  source 1..9: note = Seed: LVVVGAVGV (KRAS G12V)
MVVAGSVGI

SEQ ID NO: 60736 - protein, 9 aa, synthetic construct
  source 1..9: note = Seed: LVVVGAVGV (KRAS G12V)
MVVAGSVGL

SEQ ID NO: 60737 - protein, 9 aa, synthetic construct
  source 1..9: note = Seed: LVVVGAVGV (KRAS G12V)
MVVAGSVGM

SEQ ID NO: 60738 - protein, 9 aa, synthetic construct
  source 1..9: note = Seed: LVVVGAVGV (KRAS G12V)
MVVAGSVGN

SEQ ID NO: 60739 - protein, 9 aa, synthetic construct
  source 1..9: note = Seed: LVVVGAVGV (KRAS G12V)
MVVAGSVGQ

SEQ ID NO: 60740 - protein, 9 aa, synthetic construct
  source 1..9: note = Seed: LVVVGAVGV (KRAS G12V)
MVVAGSVGS

SEQ ID NO: 60741 - protein, 9 aa, synthetic construct
  source 1..9: note = Seed: LVVVGAVGV (KRAS G12V)
MVVAGSVGT

SEQ ID NO: 60742 - protein, 9 aa, synthetic construct
  source 1..9: note = Seed: LVVVGAVGV (KRAS G12V)
MVVAGSVGV

SEQ ID NO: 60743 - protein, 9 aa, synthetic construct
  source 1..9: note = Seed: LVVVGAVGV (KRAS G12V)
MVVAGTVGA

SEQ ID NO: 60744 - protein, 9 aa, synthetic construct
  source 1..9: note = Seed: LVVVGAVGV (KRAS G12V)
MVVAGTVGC

SEQ ID NO: 60745 - protein, 9 aa, synthetic construct
  source 1..9: note = Seed: LVVVGAVGV (KRAS G12V)
MVVAGTVGD

SEQ ID NO: 60746 - protein, 9 aa, synthetic construct
  source 1..9: note = Seed: LVVVGAVGV (KRAS G12V)
MVVAGTVGG

SEQ ID NO: 60747 - protein, 9 aa, synthetic construct
  source 1..9: note = Seed: LVVVGAVGV (KRAS G12V)
MVVAGTVGI

SEQ ID NO: 60748 - protein, 9 aa, synthetic construct
  source 1..9: note = Seed: LVVVGAVGV (KRAS G12V)
MVVAGTVGL

SEQ ID NO: 60749 - protein, 9 aa, synthetic construct
  source 1..9: note = Seed: LVVVGAVGV (KRAS G12V)
MVVAGTVGM

SEQ ID NO: 60750 - protein, 9 aa, synthetic construct
  source 1..9: note = Seed: LVVVGAVGV (KRAS G12V)
MVVAGTVGN

SEQ ID NO: 60751 - protein, 9 aa, synthetic construct
  source 1..9: note = Seed: LVVVGAVGV (KRAS G12V)
MVVAGTVGQ

SEQ ID NO: 60752 - protein, 9 aa, synthetic construct
  source 1..9: note = Seed: LVVVGAVGV (KRAS G12V)
MVVAGTVGS

SEQ ID NO: 60753 - protein, 9 aa, synthetic construct
  source 1..9: note = Seed: LVVVGAVGV (KRAS G12V)
MVVAGTVGT

SEQ ID NO: 60754 - protein, 9 aa, synthetic construct
  source 1..9: note = Seed: LVVVGAVGV (KRAS G12V)
MVVAGTVGV

SEQ ID NO: 60755 - protein, 9 aa, synthetic construct
  source 1..9: note = Seed: LVVVGAVGV (KRAS G12V)
MVVAGVVGA

SEQ ID NO: 60756 - protein, 9 aa, synthetic construct
  source 1..9: note = Seed: LVVVGAVGV (KRAS G12V)
MVVAGVVGC

SEQ ID NO: 60757 - protein, 9 aa, synthetic construct
  source 1..9: note = Seed: LVVVGAVGV (KRAS G12V)
MVVAGVVGD

SEQ ID NO: 60758 - protein, 9 aa, synthetic construct
  source 1..9: note = Seed: LVVVGAVGV (KRAS G12V)
MVVAGVVGG

SEQ ID NO: 60759 - protein, 9 aa, synthetic construct
  source 1..9: note = Seed: LVVVGAVGV (KRAS G12V)
MVVAGVVGH

SEQ ID NO: 60760 - protein, 9 aa, synthetic construct
  source 1..9: note = Seed: LVVVGAVGV (KRAS G12V)
MVVAGVVGI

SEQ ID NO: 60761 - protein, 9 aa, synthetic construct
  source 1..9: note = Seed: LVVVGAVGV (KRAS G12V)
MVVAGVVGL

SEQ ID NO: 60762 - protein, 9 aa, synthetic construct
  source 1..9: note = Seed: LVVVGAVGV (KRAS G12V)
MVVAGVVGM

SEQ ID NO: 60763 - protein, 9 aa, synthetic construct
  source 1..9: note = Seed: LVVVGAVGV (KRAS G12V)
MVVAGVVGN

SEQ ID NO: 60764 - protein, 9 aa, synthetic construct
  source 1..9: note = Seed: LVVVGAVGV (KRAS G12V)
MVVAGVVGQ

SEQ ID NO: 60765 - protein, 9 aa, synthetic construct
  source 1..9: note = Seed: LVVVGAVGV (KRAS G12V)
MVVAGVVGS

SEQ ID NO: 60766 - protein, 9 aa, synthetic construct
  source 1..9: note = Seed: LVVVGAVGV (KRAS G12V)
MVVAGVVGT

SEQ ID NO: 60767 - protein, 9 aa, synthetic construct
  source 1..9: note = Seed: LVVVGAVGV (KRAS G12V)
MVVAGVVGV

SEQ ID NO: 60768 - protein, 9 aa, synthetic construct
  source 1..9: note = Seed: LVVVGAVGV (KRAS G12V)
MVVCGAVGA

SEQ ID NO: 60769 - protein, 9 aa, synthetic construct
  source 1..9: note = Seed: LVVVGAVGV (KRAS G12V)
MVVCGAVGI

SEQ ID NO: 60770 - protein, 9 aa, synthetic construct
  source 1..9: note = Seed: LVVVGAVGV (KRAS G12V)
MVVCGAVGL

SEQ ID NO: 60771 - protein, 9 aa, synthetic construct
  source 1..9: note = Seed: LVVVGAVGV (KRAS G12V)
MVVCGAVGM

SEQ ID NO: 60772 - protein, 9 aa, synthetic construct
  source 1..9: note = Seed: LVVVGAVGV (KRAS G12V)
MVVCGAVGV

SEQ ID NO: 60773 - protein, 9 aa, synthetic construct
  source 1..9: note = Seed: LVVVGAVGV (KRAS G12V)
MVVCGGVGA

SEQ ID NO: 60774 - protein, 9 aa, synthetic construct
  source 1..9: note = Seed: LVVVGAVGV (KRAS G12V)
MVVCGGVGI

SEQ ID NO: 60775 - protein, 9 aa, synthetic construct
  source 1..9: note = Seed: LVVVGAVGV (KRAS G12V)
MVVCGGVGL

SEQ ID NO: 60776 - protein, 9 aa, synthetic construct
  source 1..9: note = Seed: LVVVGAVGV (KRAS G12V)
MVVCGGVGV

SEQ ID NO: 60777 - protein, 9 aa, synthetic construct
  source 1..9: note = Seed: LVVVGAVGV (KRAS G12V)
MVVCGPVGA

SEQ ID NO: 60778 - protein, 9 aa, synthetic construct
  source 1..9: note = Seed: LVVVGAVGV (KRAS G12V)
MVVCGPVGI

SEQ ID NO: 60779 - protein, 9 aa, synthetic construct
  source 1..9: note = Seed: LVVVGAVGV (KRAS G12V)
MVVCGPVGL

SEQ ID NO: 60780 - protein, 9 aa, synthetic construct
  source 1..9: note = Seed: LVVVGAVGV (KRAS G12V)
MVVCGPVGV

SEQ ID NO: 60781 - protein, 9 aa, synthetic construct
  source 1..9: note = Seed: LVVVGAVGV (KRAS G12V)
MVVCGRVGA

SEQ ID NO: 60782 - protein, 9 aa, synthetic construct
  source 1..9: note = Seed: LVVVGAVGV (KRAS G12V)
MVVCGRVGS

SEQ ID NO: 60783 - protein, 9 aa, synthetic construct
  source 1..9: note = Seed: LVVVGAVGV (KRAS G12V)
MVVCGSVGA

SEQ ID NO: 60784 - protein, 9 aa, synthetic construct
  source 1..9: note = Seed: LVVVGAVGV (KRAS G12V)
MVVCGSVGI

SEQ ID NO: 60785 - protein, 9 aa, synthetic construct
  source 1..9: note = Seed: LVVVGAVGV (KRAS G12V)
MVVCGSVGL

SEQ ID NO: 60786 - protein, 9 aa, synthetic construct
  source 1..9: note = Seed: LVVVGAVGV (KRAS G12V)
MVVCGSVGV

SEQ ID NO: 60787 - protein, 9 aa, synthetic construct
  source 1..9: note = Seed: LVVVGAVGV (KRAS G12V)
MVVDGAVGF

SEQ ID NO: 60788 - protein, 9 aa, synthetic construct
  source 1..9: note = Seed: LVVVGAVGV (KRAS G12V)
MVVDGAVGI

SEQ ID NO: 60789 - protein, 9 aa, synthetic construct
  source 1..9: note = Seed: LVVVGAVGV (KRAS G12V)
MVVDGAVGL

SEQ ID NO: 60790 - protein, 9 aa, synthetic construct
  source 1..9: note = Seed: LVVVGAVGV (KRAS G12V)
MVVDGAVGM

SEQ ID NO: 60791 - protein, 9 aa, synthetic construct
  source 1..9: note = Seed: LVVVGAVGV (KRAS G12V)
MVVDGAVGV

SEQ ID NO: 60792 - protein, 9 aa, synthetic construct
  source 1..9: note = Seed: LVVVGAVGV (KRAS G12V)
MVVDGAVGY

SEQ ID NO: 60793 - protein, 9 aa, synthetic construct
  source 1..9: note = Seed: LVVVGAVGV (KRAS G12V)
MVVDGGVGI

SEQ ID NO: 60794 - protein, 9 aa, synthetic construct
  source 1..9: note = Seed: LVVVGAVGV (KRAS G12V)
MVVDGNVGA

SEQ ID NO: 60795 - protein, 9 aa, synthetic construct
  source 1..9: note = Seed: LVVVGAVGV (KRAS G12V)
MVVDGNVGI

SEQ ID NO: 60796 - protein, 9 aa, synthetic construct
  source 1..9: note = Seed: LVVVGAVGV (KRAS G12V)
MVVDGNVGL

SEQ ID NO: 60797 - protein, 9 aa, synthetic construct
  source 1..9: note = Seed: LVVVGAVGV (KRAS G12V)
MVVDGNVGS

SEQ ID NO: 60798 - protein, 9 aa, synthetic construct
  source 1..9: note = Seed: LVVVGAVGV (KRAS G12V)
MVVDGNVGV

SEQ ID NO: 60799 - protein, 9 aa, synthetic construct
  source 1..9: note = Seed: LVVVGAVGV (KRAS G12V)
MVVDGPVGI

SEQ ID NO: 60800 - protein, 9 aa, synthetic construct
  source 1..9: note = Seed: LVVVGAVGV (KRAS G12V)
MVVDGSVGA

SEQ ID NO: 60801 - protein, 9 aa, synthetic construct
  source 1..9: note = Seed: LVVVGAVGV (KRAS G12V)
MVVDGSVGI

SEQ ID NO: 60802 - protein, 9 aa, synthetic construct
  source 1..9: note = Seed: LVVVGAVGV (KRAS G12V)
MVVDGSVGL

SEQ ID NO: 60803 - protein, 9 aa, synthetic construct
  source 1..9: note = Seed: LVVVGAVGV (KRAS G12V)
MVVDGSVGV

SEQ ID NO: 60804 - protein, 9 aa, synthetic construct
  source 1..9: note = Seed: LVVVGAVGV (KRAS G12V)
MVVDGTVGA

SEQ ID NO: 60805 - protein, 9 aa, synthetic construct
  source 1..9: note = Seed: LVVVGAVGV (KRAS G12V)
MVVDGTVGI

SEQ ID NO: 60806 - protein, 9 aa, synthetic construct
  source 1..9: note = Seed: LVVVGAVGV (KRAS G12V)
MVVDGTVGV

SEQ ID NO: 60807 - protein, 9 aa, synthetic construct
  source 1..9: note = Seed: LVVVGAVGV (KRAS G12V)
MVVDGVVGI

SEQ ID NO: 60808 - protein, 9 aa, synthetic construct
  source 1..9: note = Seed: LVVVGAVGV (KRAS G12V)
MVVEGAVGA

SEQ ID NO: 60809 - protein, 9 aa, synthetic construct
  source 1..9: note = Seed: LVVVGAVGV (KRAS G12V)
MVVEGAVGI

SEQ ID NO: 60810 - protein, 9 aa, synthetic construct
  source 1..9: note = Seed: LVVVGAVGV (KRAS G12V)
MVVEGAVGL

SEQ ID NO: 60811 - protein, 9 aa, synthetic construct
  source 1..9: note = Seed: LVVVGAVGV (KRAS G12V)
MVVEGAVGM

SEQ ID NO: 60812 - protein, 9 aa, synthetic construct
  source 1..9: note = Seed: LVVVGAVGV (KRAS G12V)
MVVEGAVGS

SEQ ID NO: 60813 - protein, 9 aa, synthetic construct
  source 1..9: note = Seed: LVVVGAVGV (KRAS G12V)
MVVEGAVGT

SEQ ID NO: 60814 - protein, 9 aa, synthetic construct
  source 1..9: note = Seed: LVVVGAVGV (KRAS G12V)
MVVEGAVGV

SEQ ID NO: 60815 - protein, 9 aa, synthetic construct
  source 1..9: note = Seed: LVVVGAVGV (KRAS G12V)
MVVEGFVGI

SEQ ID NO: 60816 - protein, 9 aa, synthetic construct
  source 1..9: note = Seed: LVVVGAVGV (KRAS G12V)
MVVEGFVGL

SEQ ID NO: 60817 - protein, 9 aa, synthetic construct
  source 1..9: note = Seed: LVVVGAVGV (KRAS G12V)
MVVEGFVGV

SEQ ID NO: 60818 - protein, 9 aa, synthetic construct
  source 1..9: note = Seed: LVVVGAVGV (KRAS G12V)
MVVEGGVGA

SEQ ID NO: 60819 - protein, 9 aa, synthetic construct
  source 1..9: note = Seed: LVVVGAVGV (KRAS G12V)
MVVEGGVGI

SEQ ID NO: 60820 - protein, 9 aa, synthetic construct
  source 1..9: note = Seed: LVVVGAVGV (KRAS G12V)
MVVEGGVGL

SEQ ID NO: 60821 - protein, 9 aa, synthetic construct
  source 1..9: note = Seed: LVVVGAVGV (KRAS G12V)
MVVEGGVGM

SEQ ID NO: 60822 - protein, 9 aa, synthetic construct
  source 1..9: note = Seed: LVVVGAVGV (KRAS G12V)
MVVEGGVGS

SEQ ID NO: 60823 - protein, 9 aa, synthetic construct
  source 1..9: note = Seed: LVVVGAVGV (KRAS G12V)
MVVEGGVGT

SEQ ID NO: 60824 - protein, 9 aa, synthetic construct
  source 1..9: note = Seed: LVVVGAVGV (KRAS G12V)
MVVEGGVGV

SEQ ID NO: 60825 - protein, 9 aa, synthetic construct
  source 1..9: note = Seed: LVVVGAVGV (KRAS G12V)
MVVEGNVGA

SEQ ID NO: 60826 - protein, 9 aa, synthetic construct
  source 1..9: note = Seed: LVVVGAVGV (KRAS G12V)
MVVEGNVGI

SEQ ID NO: 60827 - protein, 9 aa, synthetic construct
  source 1..9: note = Seed: LVVVGAVGV (KRAS G12V)
MVVEGNVGL

SEQ ID NO: 60828 - protein, 9 aa, synthetic construct
  source 1..9: note = Seed: LVVVGAVGV (KRAS G12V)
MVVEGNVGV

SEQ ID NO: 60829 - protein, 9 aa, synthetic construct
  source 1..9: note = Seed: LVVVGAVGV (KRAS G12V)
MVVEGPVGA

SEQ ID NO: 60830 - protein, 9 aa, synthetic construct
  source 1..9: note = Seed: LVVVGAVGV (KRAS G12V)
MVVEGPVGI

SEQ ID NO: 60831 - protein, 9 aa, synthetic construct
  source 1..9: note = Seed: LVVVGAVGV (KRAS G12V)
MVVEGPVGL

SEQ ID NO: 60832 - protein, 9 aa, synthetic construct
  source 1..9: note = Seed: LVVVGAVGV (KRAS G12V)
MVVEGPVGV

SEQ ID NO: 60833 - protein, 9 aa, synthetic construct
  source 1..9: note = Seed: LVVVGAVGV (KRAS G12V)
MVVEGSVGA

SEQ ID NO: 60834 - protein, 9 aa, synthetic construct
  source 1..9: note = Seed: LVVVGAVGV (KRAS G12V)
MVVEGSVGI

SEQ ID NO: 60835 - protein, 9 aa, synthetic construct
  source 1..9: note = Seed: LVVVGAVGV (KRAS G12V)
MVVEGSVGL

SEQ ID NO: 60836 - protein, 9 aa, synthetic construct
  source 1..9: note = Seed: LVVVGAVGV (KRAS G12V)
MVVEGSVGM

SEQ ID NO: 60837 - protein, 9 aa, synthetic construct
  source 1..9: note = Seed: LVVVGAVGV (KRAS G12V)
MVVEGSVGS

SEQ ID NO: 60838 - protein, 9 aa, synthetic construct
  source 1..9: note = Seed: LVVVGAVGV (KRAS G12V)
MVVEGSVGT

SEQ ID NO: 60839 - protein, 9 aa, synthetic construct
  source 1..9: note = Seed: LVVVGAVGV (KRAS G12V)
MVVEGSVGV

SEQ ID NO: 60840 - protein, 9 aa, synthetic construct
  source 1..9: note = Seed: LVVVGAVGV (KRAS G12V)
MVVEGTVGA

SEQ ID NO: 60841 - protein, 9 aa, synthetic construct
  source 1..9: note = Seed: LVVVGAVGV (KRAS G12V)
MVVEGTVGI

SEQ ID NO: 60842 - protein, 9 aa, synthetic construct
  source 1..9: note = Seed: LVVVGAVGV (KRAS G12V)
MVVEGTVGL

SEQ ID NO: 60843 - protein, 9 aa, synthetic construct
  source 1..9: note = Seed: LVVVGAVGV (KRAS G12V)
MVVEGTVGV

SEQ ID NO: 60844 - protein, 9 aa, synthetic construct
  source 1..9: note = Seed: LVVVGAVGV (KRAS G12V)
MVVFGAVGA

SEQ ID NO: 60845 - protein, 9 aa, synthetic construct
  source 1..9: note = Seed: LVVVGAVGV (KRAS G12V)
MVVFGAVGG

SEQ ID NO: 60846 - protein, 9 aa, synthetic construct
  source 1..9: note = Seed: LVVVGAVGV (KRAS G12V)
MVVFGAVGI

SEQ ID NO: 60847 - protein, 9 aa, synthetic construct
  source 1..9: note = Seed: LVVVGAVGV (KRAS G12V)
MVVFGAVGL

SEQ ID NO: 60848 - protein, 9 aa, synthetic construct
  source 1..9: note = Seed: LVVVGAVGV (KRAS G12V)
MVVFGAVGM

SEQ ID NO: 60849 - protein, 9 aa, synthetic construct
  source 1..9: note = Seed: LVVVGAVGV (KRAS G12V)
MVVFGAVGN

SEQ ID NO: 60850 - protein, 9 aa, synthetic construct
  source 1..9: note = Seed: LVVVGAVGV (KRAS G12V)
MVVFGAVGR

SEQ ID NO: 60851 - protein, 9 aa, synthetic construct
  source 1..9: note = Seed: LVVVGAVGV (KRAS G12V)
MVVFGAVGS

SEQ ID NO: 60852 - protein, 9 aa, synthetic construct
  source 1..9: note = Seed: LVVVGAVGV (KRAS G12V)
MVVFGAVGT

SEQ ID NO: 60853 - protein, 9 aa, synthetic construct
  source 1..9: note = Seed: LVVVGAVGV (KRAS G12V)
MVVFGAVGV

SEQ ID NO: 60854 - protein, 9 aa, synthetic construct
  source 1..9: note = Seed: LVVVGAVGV (KRAS G12V)
MVVFGDVGA

SEQ ID NO: 60855 - protein, 9 aa, synthetic construct
  source 1..9: note = Seed: LVVVGAVGV (KRAS G12V)
MVVFGDVGI

SEQ ID NO: 60856 - protein, 9 aa, synthetic construct
  source 1..9: note = Seed: LVVVGAVGV (KRAS G12V)
MVVFGDVGL

SEQ ID NO: 60857 - protein, 9 aa, synthetic construct
  source 1..9: note = Seed: LVVVGAVGV (KRAS G12V)
MVVFGDVGM

SEQ ID NO: 60858 - protein, 9 aa, synthetic construct
  source 1..9: note = Seed: LVVVGAVGV (KRAS G12V)
MVVFGDVGV

SEQ ID NO: 60859 - protein, 9 aa, synthetic construct
  source 1..9: note = Seed: LVVVGAVGV (KRAS G12V)
MVVFGGVGA

SEQ ID NO: 60860 - protein, 9 aa, synthetic construct
  source 1..9: note = Seed: LVVVGAVGV (KRAS G12V)
MVVFGGVGI

SEQ ID NO: 60861 - protein, 9 aa, synthetic construct
  source 1..9: note = Seed: LVVVGAVGV (KRAS G12V)
MVVFGGVGL

SEQ ID NO: 60862 - protein, 9 aa, synthetic construct
  source 1..9: note = Seed: LVVVGAVGV (KRAS G12V)
MVVFGGVGM

SEQ ID NO: 60863 - protein, 9 aa, synthetic construct
  source 1..9: note = Seed: LVVVGAVGV (KRAS G12V)
MVVFGGVGS

SEQ ID NO: 60864 - protein, 9 aa, synthetic construct
  source 1..9: note = Seed: LVVVGAVGV (KRAS G12V)
MVVFGGVGT

SEQ ID NO: 60865 - protein, 9 aa, synthetic construct
  source 1..9: note = Seed: LVVVGAVGV (KRAS G12V)
MVVFGGVGV

SEQ ID NO: 60866 - protein, 9 aa, synthetic construct
  source 1..9: note = Seed: LVVVGAVGV (KRAS G12V)
MVVFGHVGK

SEQ ID NO: 60867 - protein, 9 aa, synthetic construct
  source 1..9: note = Seed: LVVVGAVGV (KRAS G12V)
MVVFGHVGR

SEQ ID NO: 60868 - protein, 9 aa, synthetic construct
  source 1..9: note = Seed: LVVVGAVGV (KRAS G12V)
MVVFGIVGK

SEQ ID NO: 60869 - protein, 9 aa, synthetic construct
  source 1..9: note = Seed: LVVVGAVGV (KRAS G12V)
MVVFGIVGR

SEQ ID NO: 60870 - protein, 9 aa, synthetic construct
  source 1..9: note = Seed: LVVVGAVGV (KRAS G12V)
MVVFGKVGA

SEQ ID NO: 60871 - protein, 9 aa, synthetic construct
  source 1..9: note = Seed: LVVVGAVGV (KRAS G12V)
MVVFGKVGG

SEQ ID NO: 60872 - protein, 9 aa, synthetic construct
  source 1..9: note = Seed: LVVVGAVGV (KRAS G12V)
MVVFGKVGH

SEQ ID NO: 60873 - protein, 9 aa, synthetic construct
  source 1..9: note = Seed: LVVVGAVGV (KRAS G12V)
MVVFGKVGK

SEQ ID NO: 60874 - protein, 9 aa, synthetic construct
  source 1..9: note = Seed: LVVVGAVGV (KRAS G12V)
MVVFGKVGM

SEQ ID NO: 60875 - protein, 9 aa, synthetic construct
  source 1..9: note = Seed: LVVVGAVGV (KRAS G12V)
MVVFGKVGN

SEQ ID NO: 60876 - protein, 9 aa, synthetic construct
  source 1..9: note = Seed: LVVVGAVGV (KRAS G12V)
MVVFGKVGQ

SEQ ID NO: 60877 - protein, 9 aa, synthetic construct
  source 1..9: note = Seed: LVVVGAVGV (KRAS G12V)
MVVFGKVGR

SEQ ID NO: 60878 - protein, 9 aa, synthetic construct
  source 1..9: note = Seed: LVVVGAVGV (KRAS G12V)
MVVFGKVGS

SEQ ID NO: 60879 - protein, 9 aa, synthetic construct
  source 1..9: note = Seed: LVVVGAVGV (KRAS G12V)
MVVFGKVGT

SEQ ID NO: 60880 - protein, 9 aa, synthetic construct
  source 1..9: note = Seed: LVVVGAVGV (KRAS G12V)
MVVFGKVGY

SEQ ID NO: 60881 - protein, 9 aa, synthetic construct
  source 1..9: note = Seed: LVVVGAVGV (KRAS G12V)
MVVFGLVGR

SEQ ID NO: 60882 - protein, 9 aa, synthetic construct
  source 1..9: note = Seed: LVVVGAVGV (KRAS G12V)
MVVFGMVGR

SEQ ID NO: 60883 - protein, 9 aa, synthetic construct
  source 1..9: note = Seed: LVVVGAVGV (KRAS G12V)
MVVFGNVGA

SEQ ID NO: 60884 - protein, 9 aa, synthetic construct
  source 1..9: note = Seed: LVVVGAVGV (KRAS G12V)
MVVFGNVGF

SEQ ID NO: 60885 - protein, 9 aa, synthetic construct
  source 1..9: note = Seed: LVVVGAVGV (KRAS G12V)
MVVFGNVGG

SEQ ID NO: 60886 - protein, 9 aa, synthetic construct
  source 1..9: note = Seed: LVVVGAVGV (KRAS G12V)
MVVFGNVGH

SEQ ID NO: 60887 - protein, 9 aa, synthetic construct
  source 1..9: note = Seed: LVVVGAVGV (KRAS G12V)
MVVFGNVGI

SEQ ID NO: 60888 - protein, 9 aa, synthetic construct
  source 1..9: note = Seed: LVVVGAVGV (KRAS G12V)
MVVFGNVGL

SEQ ID NO: 60889 - protein, 9 aa, synthetic construct
  source 1..9: note = Seed: LVVVGAVGV (KRAS G12V)
MVVFGNVGM

SEQ ID NO: 60890 - protein, 9 aa, synthetic construct
  source 1..9: note = Seed: LVVVGAVGV (KRAS G12V)
MVVFGNVGQ

SEQ ID NO: 60891 - protein, 9 aa, synthetic construct
  source 1..9: note = Seed: LVVVGAVGV (KRAS G12V)
MVVFGNVGS

SEQ ID NO: 60892 - protein, 9 aa, synthetic construct
  source 1..9: note = Seed: LVVVGAVGV (KRAS G12V)
MVVFGNVGT

SEQ ID NO: 60893 - protein, 9 aa, synthetic construct
  source 1..9: note = Seed: LVVVGAVGV (KRAS G12V)
MVVFGNVGV

SEQ ID NO: 60894 - protein, 9 aa, synthetic construct
  source 1..9: note = Seed: LVVVGAVGV (KRAS G12V)
MVVFGNVGY

SEQ ID NO: 60895 - protein, 9 aa, synthetic construct
  source 1..9: note = Seed: LVVVGAVGV (KRAS G12V)
MVVFGPVGA

SEQ ID NO: 60896 - protein, 9 aa, synthetic construct
  source 1..9: note = Seed: LVVVGAVGV (KRAS G12V)
MVVFGPVGI

SEQ ID NO: 60897 - protein, 9 aa, synthetic construct
  source 1..9: note = Seed: LVVVGAVGV (KRAS G12V)
MVVFGPVGL

SEQ ID NO: 60898 - protein, 9 aa, synthetic construct
  source 1..9: note = Seed: LVVVGAVGV (KRAS G12V)
MVVFGPVGM

SEQ ID NO: 60899 - protein, 9 aa, synthetic construct
  source 1..9: note = Seed: LVVVGAVGV (KRAS G12V)
MVVFGPVGN

SEQ ID NO: 60900 - protein, 9 aa, synthetic construct
  source 1..9: note = Seed: LVVVGAVGV (KRAS G12V)
MVVFGPVGS

SEQ ID NO: 60901 - protein, 9 aa, synthetic construct
  source 1..9: note = Seed: LVVVGAVGV (KRAS G12V)
MVVFGPVGT

SEQ ID NO: 60902 - protein, 9 aa, synthetic construct
  source 1..9: note = Seed: LVVVGAVGV (KRAS G12V)
MVVFGPVGV

SEQ ID NO: 60903 - protein, 9 aa, synthetic construct
  source 1..9: note = Seed: LVVVGAVGV (KRAS G12V)
MVVFGRVGA

SEQ ID NO: 60904 - protein, 9 aa, synthetic construct
  source 1..9: note = Seed: LVVVGAVGV (KRAS G12V)
MVVFGRVGG

SEQ ID NO: 60905 - protein, 9 aa, synthetic construct
  source 1..9: note = Seed: LVVVGAVGV (KRAS G12V)
MVVFGRVGH

SEQ ID NO: 60906 - protein, 9 aa, synthetic construct
  source 1..9: note = Seed: LVVVGAVGV (KRAS G12V)
MVVFGRVGK

SEQ ID NO: 60907 - protein, 9 aa, synthetic construct
  source 1..9: note = Seed: LVVVGAVGV (KRAS G12V)
MVVFGRVGL

SEQ ID NO: 60908 - protein, 9 aa, synthetic construct
  source 1..9: note = Seed: LVVVGAVGV (KRAS G12V)
MVVFGRVGM

SEQ ID NO: 60909 - protein, 9 aa, synthetic construct
  source 1..9: note = Seed: LVVVGAVGV (KRAS G12V)
MVVFGRVGN

SEQ ID NO: 60910 - protein, 9 aa, synthetic construct
  source 1..9: note = Seed: LVVVGAVGV (KRAS G12V)
MVVFGRVGP

SEQ ID NO: 60911 - protein, 9 aa, synthetic construct
  source 1..9: note = Seed: LVVVGAVGV (KRAS G12V)
MVVFGRVGQ

SEQ ID NO: 60912 - protein, 9 aa, synthetic construct
  source 1..9: note = Seed: LVVVGAVGV (KRAS G12V)
MVVFGRVGR

SEQ ID NO: 60913 - protein, 9 aa, synthetic construct
  source 1..9: note = Seed: LVVVGAVGV (KRAS G12V)
MVVFGRVGS

SEQ ID NO: 60914 - protein, 9 aa, synthetic construct
  source 1..9: note = Seed: LVVVGAVGV (KRAS G12V)
MVVFGRVGT

SEQ ID NO: 60915 - protein, 9 aa, synthetic construct
  source 1..9: note = Seed: LVVVGAVGV (KRAS G12V)
MVVFGRVGY

SEQ ID NO: 60916 - protein, 9 aa, synthetic construct
  source 1..9: note = Seed: LVVVGAVGV (KRAS G12V)
MVVFGSVGA

SEQ ID NO: 60917 - protein, 9 aa, synthetic construct
  source 1..9: note = Seed: LVVVGAVGV (KRAS G12V)
MVVFGSVGF

SEQ ID NO: 60918 - protein, 9 aa, synthetic construct
  source 1..9: note = Seed: LVVVGAVGV (KRAS G12V)
MVVFGSVGG

SEQ ID NO: 60919 - protein, 9 aa, synthetic construct
  source 1..9: note = Seed: LVVVGAVGV (KRAS G12V)
MVVFGSVGH

SEQ ID NO: 60920 - protein, 9 aa, synthetic construct
  source 1..9: note = Seed: LVVVGAVGV (KRAS G12V)
MVVFGSVGI

SEQ ID NO: 60921 - protein, 9 aa, synthetic construct
  source 1..9: note = Seed: LVVVGAVGV (KRAS G12V)
MVVFGSVGL

SEQ ID NO: 60922 - protein, 9 aa, synthetic construct
  source 1..9: note = Seed: LVVVGAVGV (KRAS G12V)
MVVFGSVGM

SEQ ID NO: 60923 - protein, 9 aa, synthetic construct
  source 1..9: note = Seed: LVVVGAVGV (KRAS G12V)
MVVFGSVGR

SEQ ID NO: 60924 - protein, 9 aa, synthetic construct
  source 1..9: note = Seed: LVVVGAVGV (KRAS G12V)
MVVFGSVGS

SEQ ID NO: 60925 - protein, 9 aa, synthetic construct
  source 1..9: note = Seed: LVVVGAVGV (KRAS G12V)
MVVFGSVGT

SEQ ID NO: 60926 - protein, 9 aa, synthetic construct
  source 1..9: note = Seed: LVVVGAVGV (KRAS G12V)
MVVFGSVGV

SEQ ID NO: 60927 - protein, 9 aa, synthetic construct
  source 1..9: note = Seed: LVVVGAVGV (KRAS G12V)
MVVFGSVGY

SEQ ID NO: 60928 - protein, 9 aa, synthetic construct
  source 1..9: note = Seed: LVVVGAVGV (KRAS G12V)
MVVFGTVGA

SEQ ID NO: 60929 - protein, 9 aa, synthetic construct
  source 1..9: note = Seed: LVVVGAVGV (KRAS G12V)
MVVFGTVGH

SEQ ID NO: 60930 - protein, 9 aa, synthetic construct
  source 1..9: note = Seed: LVVVGAVGV (KRAS G12V)
MVVFGTVGI

SEQ ID NO: 60931 - protein, 9 aa, synthetic construct
  source 1..9: note = Seed: LVVVGAVGV (KRAS G12V)
MVVFGTVGL

SEQ ID NO: 60932 - protein, 9 aa, synthetic construct
  source 1..9: note = Seed: LVVVGAVGV (KRAS G12V)
MVVFGTVGM

SEQ ID NO: 60933 - protein, 9 aa, synthetic construct
  source 1..9: note = Seed: LVVVGAVGV (KRAS G12V)
MVVFGTVGQ

SEQ ID NO: 60934 - protein, 9 aa, synthetic construct
  source 1..9: note = Seed: LVVVGAVGV (KRAS G12V)
MVVFGTVGR

SEQ ID NO: 60935 - protein, 9 aa, synthetic construct
  source 1..9: note = Seed: LVVVGAVGV (KRAS G12V)
MVVFGTVGS

SEQ ID NO: 60936 - protein, 9 aa, synthetic construct
  source 1..9: note = Seed: LVVVGAVGV (KRAS G12V)
MVVFGTVGT

SEQ ID NO: 60937 - protein, 9 aa, synthetic construct
  source 1..9: note = Seed: LVVVGAVGV (KRAS G12V)
MVVFGTVGV

SEQ ID NO: 60938 - protein, 9 aa, synthetic construct
  source 1..9: note = Seed: LVVVGAVGV (KRAS G12V)
MVVFGVVGR

SEQ ID NO: 60939 - protein, 9 aa, synthetic construct
  source 1..9: note = Seed: LVVVGAVGV (KRAS G12V)
MVVFGVVGS

SEQ ID NO: 60940 - protein, 9 aa, synthetic construct
  source 1..9: note = Seed: LVVVGAVGV (KRAS G12V)
MVVFGYVGF

SEQ ID NO: 60941 - protein, 9 aa, synthetic construct
  source 1..9: note = Seed: LVVVGAVGV (KRAS G12V)
MVVGGAVGA

SEQ ID NO: 60942 - protein, 9 aa, synthetic construct
  source 1..9: note = Seed: LVVVGAVGV (KRAS G12V)
MVVGGAVGC

SEQ ID NO: 60943 - protein, 9 aa, synthetic construct
  source 1..9: note = Seed: LVVVGAVGV (KRAS G12V)
MVVGGAVGF

SEQ ID NO: 60944 - protein, 9 aa, synthetic construct
  source 1..9: note = Seed: LVVVGAVGV (KRAS G12V)
MVVGGAVGG

SEQ ID NO: 60945 - protein, 9 aa, synthetic construct
  source 1..9: note = Seed: LVVVGAVGV (KRAS G12V)
MVVGGAVGI

SEQ ID NO: 60946 - protein, 9 aa, synthetic construct
  source 1..9: note = Seed: LVVVGAVGV (KRAS G12V)
MVVGGAVGL

SEQ ID NO: 60947 - protein, 9 aa, synthetic construct
  source 1..9: note = Seed: LVVVGAVGV (KRAS G12V)
MVVGGAVGM

SEQ ID NO: 60948 - protein, 9 aa, synthetic construct
  source 1..9: note = Seed: LVVVGAVGV (KRAS G12V)
MVVGGAVGN

SEQ ID NO: 60949 - protein, 9 aa, synthetic construct
  source 1..9: note = Seed: LVVVGAVGV (KRAS G12V)
MVVGGAVGQ

SEQ ID NO: 60950 - protein, 9 aa, synthetic construct
  source 1..9: note = Seed: LVVVGAVGV (KRAS G12V)
MVVGGAVGS

SEQ ID NO: 60951 - protein, 9 aa, synthetic construct
  source 1..9: note = Seed: LVVVGAVGV (KRAS G12V)
MVVGGAVGT

SEQ ID NO: 60952 - protein, 9 aa, synthetic construct
  source 1..9: note = Seed: LVVVGAVGV (KRAS G12V)
MVVGGAVGV

SEQ ID NO: 60953 - protein, 9 aa, synthetic construct
  source 1..9: note = Seed: LVVVGAVGV (KRAS G12V)
MVVGGGVGA

SEQ ID NO: 60954 - protein, 9 aa, synthetic construct
  source 1..9: note = Seed: LVVVGAVGV (KRAS G12V)
MVVGGGVGC

SEQ ID NO: 60955 - protein, 9 aa, synthetic construct
  source 1..9: note = Seed: LVVVGAVGV (KRAS G12V)
MVVGGGVGI

SEQ ID NO: 60956 - protein, 9 aa, synthetic construct
  source 1..9: note = Seed: LVVVGAVGV (KRAS G12V)
MVVGGGVGL

SEQ ID NO: 60957 - protein, 9 aa, synthetic construct
  source 1..9: note = Seed: LVVVGAVGV (KRAS G12V)
MVVGGGVGM

SEQ ID NO: 60958 - protein, 9 aa, synthetic construct
  source 1..9: note = Seed: LVVVGAVGV (KRAS G12V)
MVVGGGVGS

SEQ ID NO: 60959 - protein, 9 aa, synthetic construct
  source 1..9: note = Seed: LVVVGAVGV (KRAS G12V)
MVVGGGVGV

SEQ ID NO: 60960 - protein, 9 aa, synthetic construct
  source 1..9: note = Seed: LVVVGAVGV (KRAS G12V)
MVVGGNVGA

SEQ ID NO: 60961 - protein, 9 aa, synthetic construct
  source 1..9: note = Seed: LVVVGAVGV (KRAS G12V)
MVVGGNVGI

SEQ ID NO: 60962 - protein, 9 aa, synthetic construct
  source 1..9: note = Seed: LVVVGAVGV (KRAS G12V)
MVVGGNVGL

SEQ ID NO: 60963 - protein, 9 aa, synthetic construct
  source 1..9: note = Seed: LVVVGAVGV (KRAS G12V)
MVVGGNVGM

SEQ ID NO: 60964 - protein, 9 aa, synthetic construct
  source 1..9: note = Seed: LVVVGAVGV (KRAS G12V)
MVVGGNVGS

SEQ ID NO: 60965 - protein, 9 aa, synthetic construct
  source 1..9: note = Seed: LVVVGAVGV (KRAS G12V)
MVVGGNVGT

SEQ ID NO: 60966 - protein, 9 aa, synthetic construct
  source 1..9: note = Seed: LVVVGAVGV (KRAS G12V)
MVVGGNVGV

SEQ ID NO: 60967 - protein, 9 aa, synthetic construct
  source 1..9: note = Seed: LVVVGAVGV (KRAS G12V)
MVVGGPVGA

SEQ ID NO: 60968 - protein, 9 aa, synthetic construct
  source 1..9: note = Seed: LVVVGAVGV (KRAS G12V)
MVVGGPVGG

SEQ ID NO: 60969 - protein, 9 aa, synthetic construct
  source 1..9: note = Seed: LVVVGAVGV (KRAS G12V)
MVVGGPVGI

SEQ ID NO: 60970 - protein, 9 aa, synthetic construct
  source 1..9: note = Seed: LVVVGAVGV (KRAS G12V)
MVVGGPVGL

SEQ ID NO: 60971 - protein, 9 aa, synthetic construct
  source 1..9: note = Seed: LVVVGAVGV (KRAS G12V)
MVVGGPVGM

SEQ ID NO: 60972 - protein, 9 aa, synthetic construct
  source 1..9: note = Seed: LVVVGAVGV (KRAS G12V)
MVVGGPVGN

SEQ ID NO: 60973 - protein, 9 aa, synthetic construct
  source 1..9: note = Seed: LVVVGAVGV (KRAS G12V)
MVVGGPVGS

SEQ ID NO: 60974 - protein, 9 aa, synthetic construct
  source 1..9: note = Seed: LVVVGAVGV (KRAS G12V)
MVVGGPVGT

SEQ ID NO: 60975 - protein, 9 aa, synthetic construct
  source 1..9: note = Seed: LVVVGAVGV (KRAS G12V)
MVVGGPVGV

SEQ ID NO: 60976 - protein, 9 aa, synthetic construct
  source 1..9: note = Seed: LVVVGAVGV (KRAS G12V)
MVVGGSVGA

SEQ ID NO: 60977 - protein, 9 aa, synthetic construct
  source 1..9: note = Seed: LVVVGAVGV (KRAS G12V)
MVVGGSVGC

SEQ ID NO: 60978 - protein, 9 aa, synthetic construct
  source 1..9: note = Seed: LVVVGAVGV (KRAS G12V)
MVVGGSVGI

SEQ ID NO: 60979 - protein, 9 aa, synthetic construct
  source 1..9: note = Seed: LVVVGAVGV (KRAS G12V)
MVVGGSVGL

SEQ ID NO: 60980 - protein, 9 aa, synthetic construct
  source 1..9: note = Seed: LVVVGAVGV (KRAS G12V)
MVVGGSVGM

SEQ ID NO: 60981 - protein, 9 aa, synthetic construct
  source 1..9: note = Seed: LVVVGAVGV (KRAS G12V)
MVVGGSVGS

SEQ ID NO: 60982 - protein, 9 aa, synthetic construct
  source 1..9: note = Seed: LVVVGAVGV (KRAS G12V)
MVVGGSVGT

SEQ ID NO: 60983 - protein, 9 aa, synthetic construct
  source 1..9: note = Seed: LVVVGAVGV (KRAS G12V)
MVVGGSVGV

SEQ ID NO: 60984 - protein, 9 aa, synthetic construct
  source 1..9: note = Seed: LVVVGAVGV (KRAS G12V)
MVVGGTVGA

SEQ ID NO: 60985 - protein, 9 aa, synthetic construct
  source 1..9: note = Seed: LVVVGAVGV (KRAS G12V)
MVVGGTVGI

SEQ ID NO: 60986 - protein, 9 aa, synthetic construct
  source 1..9: note = Seed: LVVVGAVGV (KRAS G12V)
MVVGGTVGL

SEQ ID NO: 60987 - protein, 9 aa, synthetic construct
  source 1..9: note = Seed: LVVVGAVGV (KRAS G12V)
MVVGGTVGS

SEQ ID NO: 60988 - protein, 9 aa, synthetic construct
  source 1..9: note = Seed: LVVVGAVGV (KRAS G12V)
MVVGGTVGT

SEQ ID NO: 60989 - protein, 9 aa, synthetic construct
  source 1..9: note = Seed: LVVVGAVGV (KRAS G12V)
MVVGGTVGV

SEQ ID NO: 60990 - protein, 9 aa, synthetic construct
  source 1..9: note = Seed: LVVVGAVGV (KRAS G12V)
MVVGGVVGA

SEQ ID NO: 60991 - protein, 9 aa, synthetic construct
  source 1..9: note = Seed: LVVVGAVGV (KRAS G12V)
MVVGGVVGG

SEQ ID NO: 60992 - protein, 9 aa, synthetic construct
  source 1..9: note = Seed: LVVVGAVGV (KRAS G12V)
MVVGGVVGI

SEQ ID NO: 60993 - protein, 9 aa, synthetic construct
  source 1..9: note = Seed: LVVVGAVGV (KRAS G12V)
MVVGGVVGN

SEQ ID NO: 60994 - protein, 9 aa, synthetic construct
  source 1..9: note = Seed: LVVVGAVGV (KRAS G12V)
MVVGGVVGS

SEQ ID NO: 60995 - protein, 9 aa, synthetic construct
  source 1..9: note = Seed: LVVVGAVGV (KRAS G12V)
MVVGGVVGV

SEQ ID NO: 60996 - protein, 9 aa, synthetic construct
  source 1..9: note = Seed: LVVVGAVGV (KRAS G12V)
MVVHGAVGA

SEQ ID NO: 60997 - protein, 9 aa, synthetic construct
  source 1..9: note = Seed: LVVVGAVGV (KRAS G12V)
MVVHGAVGF

SEQ ID NO: 60998 - protein, 9 aa, synthetic construct
  source 1..9: note = Seed: LVVVGAVGV (KRAS G12V)
MVVHGAVGI

SEQ ID NO: 60999 - protein, 9 aa, synthetic construct
  source 1..9: note = Seed: LVVVGAVGV (KRAS G12V)
MVVHGAVGL

SEQ ID NO: 61000 - protein, 9 aa, synthetic construct
  source 1..9: note = Seed: LVVVGAVGV (KRAS G12V)
MVVHGAVGM

SEQ ID NO: 61001 - protein, 9 aa, synthetic construct
  source 1..9: note = Seed: LVVVGAVGV (KRAS G12V)
MVVHGAVGR

SEQ ID NO: 61002 - protein, 9 aa, synthetic construct
  source 1..9: note = Seed: LVVVGAVGV (KRAS G12V)
MVVHGAVGS

SEQ ID NO: 61003 - protein, 9 aa, synthetic construct
  source 1..9: note = Seed: LVVVGAVGV (KRAS G12V)
MVVHGAVGV

SEQ ID NO: 61004 - protein, 9 aa, synthetic construct
  source 1..9: note = Seed: LVVVGAVGV (KRAS G12V)
MVVHGAVGY

SEQ ID NO: 61005 - protein, 9 aa, synthetic construct
  source 1..9: note = Seed: LVVVGAVGV (KRAS G12V)
MVVHGFVGI

SEQ ID NO: 61006 - protein, 9 aa, synthetic construct
  source 1..9: note = Seed: LVVVGAVGV (KRAS G12V)
MVVHGFVGL

SEQ ID NO: 61007 - protein, 9 aa, synthetic construct
  source 1..9: note = Seed: LVVVGAVGV (KRAS G12V)
MVVHGFVGV

SEQ ID NO: 61008 - protein, 9 aa, synthetic construct
  source 1..9: note = Seed: LVVVGAVGV (KRAS G12V)
MVVHGGVGA

SEQ ID NO: 61009 - protein, 9 aa, synthetic construct
  source 1..9: note = Seed: LVVVGAVGV (KRAS G12V)
MVVHGGVGI

SEQ ID NO: 61010 - protein, 9 aa, synthetic construct
  source 1..9: note = Seed: LVVVGAVGV (KRAS G12V)
MVVHGGVGL

SEQ ID NO: 61011 - protein, 9 aa, synthetic construct
  source 1..9: note = Seed: LVVVGAVGV (KRAS G12V)
MVVHGGVGM

SEQ ID NO: 61012 - protein, 9 aa, synthetic construct
  source 1..9: note = Seed: LVVVGAVGV (KRAS G12V)
MVVHGGVGV

SEQ ID NO: 61013 - protein, 9 aa, synthetic construct
  source 1..9: note = Seed: LVVVGAVGV (KRAS G12V)
MVVHGIVGR

SEQ ID NO: 61014 - protein, 9 aa, synthetic construct
  source 1..9: note = Seed: LVVVGAVGV (KRAS G12V)
MVVHGKVGF

SEQ ID NO: 61015 - protein, 9 aa, synthetic construct
  source 1..9: note = Seed: LVVVGAVGV (KRAS G12V)
MVVHGKVGL

SEQ ID NO: 61016 - protein, 9 aa, synthetic construct
  source 1..9: note = Seed: LVVVGAVGV (KRAS G12V)
MVVHGKVGM

SEQ ID NO: 61017 - protein, 9 aa, synthetic construct
  source 1..9: note = Seed: LVVVGAVGV (KRAS G12V)
MVVHGKVGR

SEQ ID NO: 61018 - protein, 9 aa, synthetic construct
  source 1..9: note = Seed: LVVVGAVGV (KRAS G12V)
MVVHGKVGY

SEQ ID NO: 61019 - protein, 9 aa, synthetic construct
  source 1..9: note = Seed: LVVVGAVGV (KRAS G12V)
MVVHGNVGI

SEQ ID NO: 61020 - protein, 9 aa, synthetic construct
  source 1..9: note = Seed: LVVVGAVGV (KRAS G12V)
MVVHGNVGL

SEQ ID NO: 61021 - protein, 9 aa, synthetic construct
  source 1..9: note = Seed: LVVVGAVGV (KRAS G12V)
MVVHGNVGR

SEQ ID NO: 61022 - protein, 9 aa, synthetic construct
  source 1..9: note = Seed: LVVVGAVGV (KRAS G12V)
MVVHGNVGV

SEQ ID NO: 61023 - protein, 9 aa, synthetic construct
  source 1..9: note = Seed: LVVVGAVGV (KRAS G12V)
MVVHGNVGY

SEQ ID NO: 61024 - protein, 9 aa, synthetic construct
  source 1..9: note = Seed: LVVVGAVGV (KRAS G12V)
MVVHGPVGA

SEQ ID NO: 61025 - protein, 9 aa, synthetic construct
  source 1..9: note = Seed: LVVVGAVGV (KRAS G12V)
MVVHGPVGI

SEQ ID NO: 61026 - protein, 9 aa, synthetic construct
  source 1..9: note = Seed: LVVVGAVGV (KRAS G12V)
MVVHGPVGL

SEQ ID NO: 61027 - protein, 9 aa, synthetic construct
  source 1..9: note = Seed: LVVVGAVGV (KRAS G12V)
MVVHGPVGM

SEQ ID NO: 61028 - protein, 9 aa, synthetic construct
  source 1..9: note = Seed: LVVVGAVGV (KRAS G12V)
MVVHGPVGV

SEQ ID NO: 61029 - protein, 9 aa, synthetic construct
  source 1..9: note = Seed: LVVVGAVGV (KRAS G12V)
MVVHGRVGA

SEQ ID NO: 61030 - protein, 9 aa, synthetic construct
  source 1..9: note = Seed: LVVVGAVGV (KRAS G12V)
MVVHGRVGF

SEQ ID NO: 61031 - protein, 9 aa, synthetic construct
  source 1..9: note = Seed: LVVVGAVGV (KRAS G12V)
MVVHGRVGG

SEQ ID NO: 61032 - protein, 9 aa, synthetic construct
  source 1..9: note = Seed: LVVVGAVGV (KRAS G12V)
MVVHGRVGH

SEQ ID NO: 61033 - protein, 9 aa, synthetic construct
  source 1..9: note = Seed: LVVVGAVGV (KRAS G12V)
MVVHGRVGI

SEQ ID NO: 61034 - protein, 9 aa, synthetic construct
  source 1..9: note = Seed: LVVVGAVGV (KRAS G12V)
MVVHGRVGK

SEQ ID NO: 61035 - protein, 9 aa, synthetic construct
  source 1..9: note = Seed: LVVVGAVGV (KRAS G12V)
MVVHGRVGL

SEQ ID NO: 61036 - protein, 9 aa, synthetic construct
  source 1..9: note = Seed: LVVVGAVGV (KRAS G12V)
MVVHGRVGM

SEQ ID NO: 61037 - protein, 9 aa, synthetic construct
  source 1..9: note = Seed: LVVVGAVGV (KRAS G12V)
MVVHGRVGR

SEQ ID NO: 61038 - protein, 9 aa, synthetic construct
  source 1..9: note = Seed: LVVVGAVGV (KRAS G12V)
MVVHGRVGS

SEQ ID NO: 61039 - protein, 9 aa, synthetic construct
  source 1..9: note = Seed: LVVVGAVGV (KRAS G12V)
MVVHGRVGV

SEQ ID NO: 61040 - protein, 9 aa, synthetic construct
  source 1..9: note = Seed: LVVVGAVGV (KRAS G12V)
MVVHGRVGY

SEQ ID NO: 61041 - protein, 9 aa, synthetic construct
  source 1..9: note = Seed: LVVVGAVGV (KRAS G12V)
MVVHGSVGA

SEQ ID NO: 61042 - protein, 9 aa, synthetic construct
  source 1..9: note = Seed: LVVVGAVGV (KRAS G12V)
MVVHGSVGI

SEQ ID NO: 61043 - protein, 9 aa, synthetic construct
  source 1..9: note = Seed: LVVVGAVGV (KRAS G12V)
MVVHGSVGL

SEQ ID NO: 61044 - protein, 9 aa, synthetic construct
  source 1..9: note = Seed: LVVVGAVGV (KRAS G12V)
MVVHGSVGM

SEQ ID NO: 61045 - protein, 9 aa, synthetic construct
  source 1..9: note = Seed: LVVVGAVGV (KRAS G12V)
MVVHGSVGR

SEQ ID NO: 61046 - protein, 9 aa, synthetic construct
  source 1..9: note = Seed: LVVVGAVGV (KRAS G12V)
MVVHGSVGV

SEQ ID NO: 61047 - protein, 9 aa, synthetic construct
  source 1..9: note = Seed: LVVVGAVGV (KRAS G12V)
MVVHGSVGY

SEQ ID NO: 61048 - protein, 9 aa, synthetic construct
  source 1..9: note = Seed: LVVVGAVGV (KRAS G12V)
MVVHGTVGL

SEQ ID NO: 61049 - protein, 9 aa, synthetic construct
  source 1..9: note = Seed: LVVVGAVGV (KRAS G12V)
MVVHGTVGR

SEQ ID NO: 61050 - protein, 9 aa, synthetic construct
  source 1..9: note = Seed: LVVVGAVGV (KRAS G12V)
MVVHGVVGL

SEQ ID NO: 61051 - protein, 9 aa, synthetic construct
  source 1..9: note = Seed: LVVVGAVGV (KRAS G12V)
MVVHGVVGR

SEQ ID NO: 61052 - protein, 9 aa, synthetic construct
  source 1..9: note = Seed: LVVVGAVGV (KRAS G12V)
MVVIGAVGA

SEQ ID NO: 61053 - protein, 9 aa, synthetic construct
  source 1..9: note = Seed: LVVVGAVGV (KRAS G12V)
MVVIGAVGC

SEQ ID NO: 61054 - protein, 9 aa, synthetic construct
  source 1..9: note = Seed: LVVVGAVGV (KRAS G12V)
MVVIGAVGD

SEQ ID NO: 61055 - protein, 9 aa, synthetic construct
  source 1..9: note = Seed: LVVVGAVGV (KRAS G12V)
MVVIGAVGE

SEQ ID NO: 61056 - protein, 9 aa, synthetic construct
  source 1..9: note = Seed: LVVVGAVGV (KRAS G12V)
MVVIGAVGF

SEQ ID NO: 61057 - protein, 9 aa, synthetic construct
  source 1..9: note = Seed: LVVVGAVGV (KRAS G12V)
MVVIGAVGG

SEQ ID NO: 61058 - protein, 9 aa, synthetic construct
  source 1..9: note = Seed: LVVVGAVGV (KRAS G12V)
MVVIGAVGH

SEQ ID NO: 61059 - protein, 9 aa, synthetic construct
  source 1..9: note = Seed: LVVVGAVGV (KRAS G12V)
MVVIGAVGI

SEQ ID NO: 61060 - protein, 9 aa, synthetic construct
  source 1..9: note = Seed: LVVVGAVGV (KRAS G12V)
MVVIGAVGK

SEQ ID NO: 61061 - protein, 9 aa, synthetic construct
  source 1..9: note = Seed: LVVVGAVGV (KRAS G12V)
MVVIGAVGL

SEQ ID NO: 61062 - protein, 9 aa, synthetic construct
  source 1..9: note = Seed: LVVVGAVGV (KRAS G12V)
MVVIGAVGM

SEQ ID NO: 61063 - protein, 9 aa, synthetic construct
  source 1..9: note = Seed: LVVVGAVGV (KRAS G12V)
MVVIGAVGN

SEQ ID NO: 61064 - protein, 9 aa, synthetic construct
  source 1..9: note = Seed: LVVVGAVGV (KRAS G12V)
MVVIGAVGP

SEQ ID NO: 61065 - protein, 9 aa, synthetic construct
  source 1..9: note = Seed: LVVVGAVGV (KRAS G12V)
MVVIGAVGQ

SEQ ID NO: 61066 - protein, 9 aa, synthetic construct
  source 1..9: note = Seed: LVVVGAVGV (KRAS G12V)
MVVIGAVGR

SEQ ID NO: 61067 - protein, 9 aa, synthetic construct
  source 1..9: note = Seed: LVVVGAVGV (KRAS G12V)
MVVIGAVGS

SEQ ID NO: 61068 - protein, 9 aa, synthetic construct
  source 1..9: note = Seed: LVVVGAVGV (KRAS G12V)
MVVIGAVGT

SEQ ID NO: 61069 - protein, 9 aa, synthetic construct
  source 1..9: note = Seed: LVVVGAVGV (KRAS G12V)
MVVIGAVGV

SEQ ID NO: 61070 - protein, 9 aa, synthetic construct
  source 1..9: note = Seed: LVVVGAVGV (KRAS G12V)
MVVIGAVGY

SEQ ID NO: 61071 - protein, 9 aa, synthetic construct
  source 1..9: note = Seed: LVVVGAVGV (KRAS G12V)
MVVIGDVGA

SEQ ID NO: 61072 - protein, 9 aa, synthetic construct
  source 1..9: note = Seed: LVVVGAVGV (KRAS G12V)
MVVIGDVGV

SEQ ID NO: 61073 - protein, 9 aa, synthetic construct
  source 1..9: note = Seed: LVVVGAVGV (KRAS G12V)
MVVIGEVGL

SEQ ID NO: 61074 - protein, 9 aa, synthetic construct
  source 1..9: note = Seed: LVVVGAVGV (KRAS G12V)
MVVIGEVGV

SEQ ID NO: 61075 - protein, 9 aa, synthetic construct
  source 1..9: note = Seed: LVVVGAVGV (KRAS G12V)
MVVIGGVGA

SEQ ID NO: 61076 - protein, 9 aa, synthetic construct
  source 1..9: note = Seed: LVVVGAVGV (KRAS G12V)
MVVIGGVGC

SEQ ID NO: 61077 - protein, 9 aa, synthetic construct
  source 1..9: note = Seed: LVVVGAVGV (KRAS G12V)
MVVIGGVGF

SEQ ID NO: 61078 - protein, 9 aa, synthetic construct
  source 1..9: note = Seed: LVVVGAVGV (KRAS G12V)
MVVIGGVGG

SEQ ID NO: 61079 - protein, 9 aa, synthetic construct
  source 1..9: note = Seed: LVVVGAVGV (KRAS G12V)
MVVIGGVGH

SEQ ID NO: 61080 - protein, 9 aa, synthetic construct
  source 1..9: note = Seed: LVVVGAVGV (KRAS G12V)
MVVIGGVGI

SEQ ID NO: 61081 - protein, 9 aa, synthetic construct
  source 1..9: note = Seed: LVVVGAVGV (KRAS G12V)
MVVIGGVGK

SEQ ID NO: 61082 - protein, 9 aa, synthetic construct
  source 1..9: note = Seed: LVVVGAVGV (KRAS G12V)
MVVIGGVGL

SEQ ID NO: 61083 - protein, 9 aa, synthetic construct
  source 1..9: note = Seed: LVVVGAVGV (KRAS G12V)
MVVIGGVGM

SEQ ID NO: 61084 - protein, 9 aa, synthetic construct
  source 1..9: note = Seed: LVVVGAVGV (KRAS G12V)
MVVIGGVGN

SEQ ID NO: 61085 - protein, 9 aa, synthetic construct
  source 1..9: note = Seed: LVVVGAVGV (KRAS G12V)
MVVIGGVGP

SEQ ID NO: 61086 - protein, 9 aa, synthetic construct
  source 1..9: note = Seed: LVVVGAVGV (KRAS G12V)
MVVIGGVGQ

SEQ ID NO: 61087 - protein, 9 aa, synthetic construct
  source 1..9: note = Seed: LVVVGAVGV (KRAS G12V)
MVVIGGVGR

SEQ ID NO: 61088 - protein, 9 aa, synthetic construct
  source 1..9: note = Seed: LVVVGAVGV (KRAS G12V)
MVVIGGVGS

SEQ ID NO: 61089 - protein, 9 aa, synthetic construct
  source 1..9: note = Seed: LVVVGAVGV (KRAS G12V)
MVVIGGVGT

SEQ ID NO: 61090 - protein, 9 aa, synthetic construct
  source 1..9: note = Seed: LVVVGAVGV (KRAS G12V)
MVVIGGVGV

SEQ ID NO: 61091 - protein, 9 aa, synthetic construct
  source 1..9: note = Seed: LVVVGAVGV (KRAS G12V)
MVVIGGVGY

SEQ ID NO: 61092 - protein, 9 aa, synthetic construct
  source 1..9: note = Seed: LVVVGAVGV (KRAS G12V)
MVVIGHVGA

SEQ ID NO: 61093 - protein, 9 aa, synthetic construct
  source 1..9: note = Seed: LVVVGAVGV (KRAS G12V)
MVVIGHVGF

SEQ ID NO: 61094 - protein, 9 aa, synthetic construct
  source 1..9: note = Seed: LVVVGAVGV (KRAS G12V)
MVVIGHVGH

SEQ ID NO: 61095 - protein, 9 aa, synthetic construct
  source 1..9: note = Seed: LVVVGAVGV (KRAS G12V)
MVVIGHVGI

SEQ ID NO: 61096 - protein, 9 aa, synthetic construct
  source 1..9: note = Seed: LVVVGAVGV (KRAS G12V)
MVVIGHVGK

SEQ ID NO: 61097 - protein, 9 aa, synthetic construct
  source 1..9: note = Seed: LVVVGAVGV (KRAS G12V)
MVVIGHVGL

SEQ ID NO: 61098 - protein, 9 aa, synthetic construct
  source 1..9: note = Seed: LVVVGAVGV (KRAS G12V)
MVVIGHVGM

SEQ ID NO: 61099 - protein, 9 aa, synthetic construct
  source 1..9: note = Seed: LVVVGAVGV (KRAS G12V)
MVVIGHVGN

SEQ ID NO: 61100 - protein, 9 aa, synthetic construct
  source 1..9: note = Seed: LVVVGAVGV (KRAS G12V)
MVVIGHVGQ

SEQ ID NO: 61101 - protein, 9 aa, synthetic construct
  source 1..9: note = Seed: LVVVGAVGV (KRAS G12V)
MVVIGHVGR

SEQ ID NO: 61102 - protein, 9 aa, synthetic construct
  source 1..9: note = Seed: LVVVGAVGV (KRAS G12V)
MVVIGHVGS

SEQ ID NO: 61103 - protein, 9 aa, synthetic construct
  source 1..9: note = Seed: LVVVGAVGV (KRAS G12V)
MVVIGHVGT

SEQ ID NO: 61104 - protein, 9 aa, synthetic construct
  source 1..9: note = Seed: LVVVGAVGV (KRAS G12V)
MVVIGHVGV

SEQ ID NO: 61105 - protein, 9 aa, synthetic construct
  source 1..9: note = Seed: LVVVGAVGV (KRAS G12V)
MVVIGHVGY

SEQ ID NO: 61106 - protein, 9 aa, synthetic construct
  source 1..9: note = Seed: LVVVGAVGV (KRAS G12V)
MVVIGIVGA

SEQ ID NO: 61107 - protein, 9 aa, synthetic construct
  source 1..9: note = Seed: LVVVGAVGV (KRAS G12V)
MVVIGIVGH

SEQ ID NO: 61108 - protein, 9 aa, synthetic construct
  source 1..9: note = Seed: LVVVGAVGV (KRAS G12V)
MVVIGIVGK

SEQ ID NO: 61109 - protein, 9 aa, synthetic construct
  source 1..9: note = Seed: LVVVGAVGV (KRAS G12V)
MVVIGIVGM

SEQ ID NO: 61110 - protein, 9 aa, synthetic construct
  source 1..9: note = Seed: LVVVGAVGV (KRAS G12V)
MVVIGIVGN

SEQ ID NO: 61111 - protein, 9 aa, synthetic construct
  source 1..9: note = Seed: LVVVGAVGV (KRAS G12V)
MVVIGIVGQ

SEQ ID NO: 61112 - protein, 9 aa, synthetic construct
  source 1..9: note = Seed: LVVVGAVGV (KRAS G12V)
MVVIGIVGR

SEQ ID NO: 61113 - protein, 9 aa, synthetic construct
  source 1..9: note = Seed: LVVVGAVGV (KRAS G12V)
MVVIGIVGS

SEQ ID NO: 61114 - protein, 9 aa, synthetic construct
  source 1..9: note = Seed: LVVVGAVGV (KRAS G12V)
MVVIGIVGT

SEQ ID NO: 61115 - protein, 9 aa, synthetic construct
  source 1..9: note = Seed: LVVVGAVGV (KRAS G12V)
MVVIGKVGA

SEQ ID NO: 61116 - protein, 9 aa, synthetic construct
  source 1..9: note = Seed: LVVVGAVGV (KRAS G12V)
MVVIGKVGG

SEQ ID NO: 61117 - protein, 9 aa, synthetic construct
  source 1..9: note = Seed: LVVVGAVGV (KRAS G12V)
MVVIGKVGH

SEQ ID NO: 61118 - protein, 9 aa, synthetic construct
  source 1..9: note = Seed: LVVVGAVGV (KRAS G12V)
MVVIGKVGI

SEQ ID NO: 61119 - protein, 9 aa, synthetic construct
  source 1..9: note = Seed: LVVVGAVGV (KRAS G12V)
MVVIGKVGK

SEQ ID NO: 61120 - protein, 9 aa, synthetic construct
  source 1..9: note = Seed: LVVVGAVGV (KRAS G12V)
MVVIGKVGL

SEQ ID NO: 61121 - protein, 9 aa, synthetic construct
  source 1..9: note = Seed: LVVVGAVGV (KRAS G12V)
MVVIGKVGM

SEQ ID NO: 61122 - protein, 9 aa, synthetic construct
  source 1..9: note = Seed: LVVVGAVGV (KRAS G12V)
MVVIGKVGN

SEQ ID NO: 61123 - protein, 9 aa, synthetic construct
  source 1..9: note = Seed: LVVVGAVGV (KRAS G12V)
MVVIGKVGP

SEQ ID NO: 61124 - protein, 9 aa, synthetic construct
  source 1..9: note = Seed: LVVVGAVGV (KRAS G12V)
MVVIGKVGQ

SEQ ID NO: 61125 - protein, 9 aa, synthetic construct
  source 1..9: note = Seed: LVVVGAVGV (KRAS G12V)
MVVIGKVGR

SEQ ID NO: 61126 - protein, 9 aa, synthetic construct
  source 1..9: note = Seed: LVVVGAVGV (KRAS G12V)
MVVIGKVGS

SEQ ID NO: 61127 - protein, 9 aa, synthetic construct
  source 1..9: note = Seed: LVVVGAVGV (KRAS G12V)
MVVIGKVGT

SEQ ID NO: 61128 - protein, 9 aa, synthetic construct
  source 1..9: note = Seed: LVVVGAVGV (KRAS G12V)
MVVIGKVGV

SEQ ID NO: 61129 - protein, 9 aa, synthetic construct
  source 1..9: note = Seed: LVVVGAVGV (KRAS G12V)
MVVIGKVGY

SEQ ID NO: 61130 - protein, 9 aa, synthetic construct
  source 1..9: note = Seed: LVVVGAVGV (KRAS G12V)
MVVIGLVGA

SEQ ID NO: 61131 - protein, 9 aa, synthetic construct
  source 1..9: note = Seed: LVVVGAVGV (KRAS G12V)
MVVIGLVGK

SEQ ID NO: 61132 - protein, 9 aa, synthetic construct
  source 1..9: note = Seed: LVVVGAVGV (KRAS G12V)
MVVIGLVGN

SEQ ID NO: 61133 - protein, 9 aa, synthetic construct
  source 1..9: note = Seed: LVVVGAVGV (KRAS G12V)
MVVIGLVGQ

SEQ ID NO: 61134 - protein, 9 aa, synthetic construct
  source 1..9: note = Seed: LVVVGAVGV (KRAS G12V)
MVVIGLVGR

SEQ ID NO: 61135 - protein, 9 aa, synthetic construct
  source 1..9: note = Seed: LVVVGAVGV (KRAS G12V)
MVVIGLVGS

SEQ ID NO: 61136 - protein, 9 aa, synthetic construct
  source 1..9: note = Seed: LVVVGAVGV (KRAS G12V)
MVVIGLVGT

SEQ ID NO: 61137 - protein, 9 aa, synthetic construct
  source 1..9: note = Seed: LVVVGAVGV (KRAS G12V)
MVVIGMVGA

SEQ ID NO: 61138 - protein, 9 aa, synthetic construct
  source 1..9: note = Seed: LVVVGAVGV (KRAS G12V)
MVVIGMVGD

SEQ ID NO: 61139 - protein, 9 aa, synthetic construct
  source 1..9: note = Seed: LVVVGAVGV (KRAS G12V)
MVVIGMVGG

SEQ ID NO: 61140 - protein, 9 aa, synthetic construct
  source 1..9: note = Seed: LVVVGAVGV (KRAS G12V)
MVVIGMVGN

SEQ ID NO: 61141 - protein, 9 aa, synthetic construct
  source 1..9: note = Seed: LVVVGAVGV (KRAS G12V)
MVVIGMVGQ

SEQ ID NO: 61142 - protein, 9 aa, synthetic construct
  source 1..9: note = Seed: LVVVGAVGV (KRAS G12V)
MVVIGMVGR

SEQ ID NO: 61143 - protein, 9 aa, synthetic construct
  source 1..9: note = Seed: LVVVGAVGV (KRAS G12V)
MVVIGMVGS

SEQ ID NO: 61144 - protein, 9 aa, synthetic construct
  source 1..9: note = Seed: LVVVGAVGV (KRAS G12V)
MVVIGNVGA

SEQ ID NO: 61145 - protein, 9 aa, synthetic construct
  source 1..9: note = Seed: LVVVGAVGV (KRAS G12V)
MVVIGNVGF

SEQ ID NO: 61146 - protein, 9 aa, synthetic construct
  source 1..9: note = Seed: LVVVGAVGV (KRAS G12V)
MVVIGNVGG

SEQ ID NO: 61147 - protein, 9 aa, synthetic construct
  source 1..9: note = Seed: LVVVGAVGV (KRAS G12V)
MVVIGNVGH

SEQ ID NO: 61148 - protein, 9 aa, synthetic construct
  source 1..9: note = Seed: LVVVGAVGV (KRAS G12V)
MVVIGNVGI

SEQ ID NO: 61149 - protein, 9 aa, synthetic construct
  source 1..9: note = Seed: LVVVGAVGV (KRAS G12V)
MVVIGNVGK

SEQ ID NO: 61150 - protein, 9 aa, synthetic construct
  source 1..9: note = Seed: LVVVGAVGV (KRAS G12V)
MVVIGNVGL

SEQ ID NO: 61151 - protein, 9 aa, synthetic construct
  source 1..9: note = Seed: LVVVGAVGV (KRAS G12V)
MVVIGNVGM

SEQ ID NO: 61152 - protein, 9 aa, synthetic construct
  source 1..9: note = Seed: LVVVGAVGV (KRAS G12V)
MVVIGNVGN

SEQ ID NO: 61153 - protein, 9 aa, synthetic construct
  source 1..9: note = Seed: LVVVGAVGV (KRAS G12V)
MVVIGNVGQ

SEQ ID NO: 61154 - protein, 9 aa, synthetic construct
  source 1..9: note = Seed: LVVVGAVGV (KRAS G12V)
MVVIGNVGR

SEQ ID NO: 61155 - protein, 9 aa, synthetic construct
  source 1..9: note = Seed: LVVVGAVGV (KRAS G12V)
MVVIGNVGS

SEQ ID NO: 61156 - protein, 9 aa, synthetic construct
  source 1..9: note = Seed: LVVVGAVGV (KRAS G12V)
MVVIGNVGT

SEQ ID NO: 61157 - protein, 9 aa, synthetic construct
  source 1..9: note = Seed: LVVVGAVGV (KRAS G12V)
MVVIGNVGV

SEQ ID NO: 61158 - protein, 9 aa, synthetic construct
  source 1..9: note = Seed: LVVVGAVGV (KRAS G12V)
MVVIGPVGA

SEQ ID NO: 61159 - protein, 9 aa, synthetic construct
  source 1..9: note = Seed: LVVVGAVGV (KRAS G12V)
MVVIGPVGC

SEQ ID NO: 61160 - protein, 9 aa, synthetic construct
  source 1..9: note = Seed: LVVVGAVGV (KRAS G12V)
MVVIGPVGD

SEQ ID NO: 61161 - protein, 9 aa, synthetic construct
  source 1..9: note = Seed: LVVVGAVGV (KRAS G12V)
MVVIGPVGE

SEQ ID NO: 61162 - protein, 9 aa, synthetic construct
  source 1..9: note = Seed: LVVVGAVGV (KRAS G12V)
MVVIGPVGF

SEQ ID NO: 61163 - protein, 9 aa, synthetic construct
  source 1..9: note = Seed: LVVVGAVGV (KRAS G12V)
MVVIGPVGG

SEQ ID NO: 61164 - protein, 9 aa, synthetic construct
  source 1..9: note = Seed: LVVVGAVGV (KRAS G12V)
MVVIGPVGH

SEQ ID NO: 61165 - protein, 9 aa, synthetic construct
  source 1..9: note = Seed: LVVVGAVGV (KRAS G12V)
MVVIGPVGI

SEQ ID NO: 61166 - protein, 9 aa, synthetic construct
  source 1..9: note = Seed: LVVVGAVGV (KRAS G12V)
MVVIGPVGK

SEQ ID NO: 61167 - protein, 9 aa, synthetic construct
  source 1..9: note = Seed: LVVVGAVGV (KRAS G12V)
MVVIGPVGL

SEQ ID NO: 61168 - protein, 9 aa, synthetic construct
  source 1..9: note = Seed: LVVVGAVGV (KRAS G12V)
MVVIGPVGM

SEQ ID NO: 61169 - protein, 9 aa, synthetic construct
  source 1..9: note = Seed: LVVVGAVGV (KRAS G12V)
MVVIGPVGN

SEQ ID NO: 61170 - protein, 9 aa, synthetic construct
  source 1..9: note = Seed: LVVVGAVGV (KRAS G12V)
MVVIGPVGP

SEQ ID NO: 61171 - protein, 9 aa, synthetic construct
  source 1..9: note = Seed: LVVVGAVGV (KRAS G12V)
MVVIGPVGQ

SEQ ID NO: 61172 - protein, 9 aa, synthetic construct
  source 1..9: note = Seed: LVVVGAVGV (KRAS G12V)
MVVIGPVGR

SEQ ID NO: 61173 - protein, 9 aa, synthetic construct
  source 1..9: note = Seed: LVVVGAVGV (KRAS G12V)
MVVIGPVGS

SEQ ID NO: 61174 - protein, 9 aa, synthetic construct
  source 1..9: note = Seed: LVVVGAVGV (KRAS G12V)
MVVIGPVGT

SEQ ID NO: 61175 - protein, 9 aa, synthetic construct
  source 1..9: note = Seed: LVVVGAVGV (KRAS G12V)
MVVIGPVGV

SEQ ID NO: 61176 - protein, 9 aa, synthetic construct
  source 1..9: note = Seed: LVVVGAVGV (KRAS G12V)
MVVIGPVGW

SEQ ID NO: 61177 - protein, 9 aa, synthetic construct
  source 1..9: note = Seed: LVVVGAVGV (KRAS G12V)
MVVIGPVGY

SEQ ID NO: 61178 - protein, 9 aa, synthetic construct
  source 1..9: note = Seed: LVVVGAVGV (KRAS G12V)
MVVIGQVGA

SEQ ID NO: 61179 - protein, 9 aa, synthetic construct
  source 1..9: note = Seed: LVVVGAVGV (KRAS G12V)
MVVIGQVGI

SEQ ID NO: 61180 - protein, 9 aa, synthetic construct
  source 1..9: note = Seed: LVVVGAVGV (KRAS G12V)
MVVIGQVGL

SEQ ID NO: 61181 - protein, 9 aa, synthetic construct
  source 1..9: note = Seed: LVVVGAVGV (KRAS G12V)
MVVIGQVGM

SEQ ID NO: 61182 - protein, 9 aa, synthetic construct
  source 1..9: note = Seed: LVVVGAVGV (KRAS G12V)
MVVIGQVGN

SEQ ID NO: 61183 - protein, 9 aa, synthetic construct
  source 1..9: note = Seed: LVVVGAVGV (KRAS G12V)
MVVIGQVGQ

SEQ ID NO: 61184 - protein, 9 aa, synthetic construct
  source 1..9: note = Seed: LVVVGAVGV (KRAS G12V)
MVVIGQVGR

SEQ ID NO: 61185 - protein, 9 aa, synthetic construct
  source 1..9: note = Seed: LVVVGAVGV (KRAS G12V)
MVVIGQVGS

SEQ ID NO: 61186 - protein, 9 aa, synthetic construct
  source 1..9: note = Seed: LVVVGAVGV (KRAS G12V)
MVVIGQVGV

SEQ ID NO: 61187 - protein, 9 aa, synthetic construct
  source 1..9: note = Seed: LVVVGAVGV (KRAS G12V)
MVVIGRVGA

SEQ ID NO: 61188 - protein, 9 aa, synthetic construct
  source 1..9: note = Seed: LVVVGAVGV (KRAS G12V)
MVVIGRVGF

SEQ ID NO: 61189 - protein, 9 aa, synthetic construct
  source 1..9: note = Seed: LVVVGAVGV (KRAS G12V)
MVVIGRVGG

SEQ ID NO: 61190 - protein, 9 aa, synthetic construct
  source 1..9: note = Seed: LVVVGAVGV (KRAS G12V)
MVVIGRVGH

SEQ ID NO: 61191 - protein, 9 aa, synthetic construct
  source 1..9: note = Seed: LVVVGAVGV (KRAS G12V)
MVVIGRVGI

SEQ ID NO: 61192 - protein, 9 aa, synthetic construct
  source 1..9: note = Seed: LVVVGAVGV (KRAS G12V)
MVVIGRVGK

SEQ ID NO: 61193 - protein, 9 aa, synthetic construct
  source 1..9: note = Seed: LVVVGAVGV (KRAS G12V)
MVVIGRVGL

SEQ ID NO: 61194 - protein, 9 aa, synthetic construct
  source 1..9: note = Seed: LVVVGAVGV (KRAS G12V)
MVVIGRVGM

SEQ ID NO: 61195 - protein, 9 aa, synthetic construct
  source 1..9: note = Seed: LVVVGAVGV (KRAS G12V)
MVVIGRVGN

SEQ ID NO: 61196 - protein, 9 aa, synthetic construct
  source 1..9: note = Seed: LVVVGAVGV (KRAS G12V)
MVVIGRVGP

SEQ ID NO: 61197 - protein, 9 aa, synthetic construct
  source 1..9: note = Seed: LVVVGAVGV (KRAS G12V)
MVVIGRVGQ

SEQ ID NO: 61198 - protein, 9 aa, synthetic construct
  source 1..9: note = Seed: LVVVGAVGV (KRAS G12V)
MVVIGRVGR

SEQ ID NO: 61199 - protein, 9 aa, synthetic construct
  source 1..9: note = Seed: LVVVGAVGV (KRAS G12V)
MVVIGRVGS

SEQ ID NO: 61200 - protein, 9 aa, synthetic construct
  source 1..9: note = Seed: LVVVGAVGV (KRAS G12V)
MVVIGRVGT

SEQ ID NO: 61201 - protein, 9 aa, synthetic construct
  source 1..9: note = Seed: LVVVGAVGV (KRAS G12V)
MVVIGRVGV

SEQ ID NO: 61202 - protein, 9 aa, synthetic construct
  source 1..9: note = Seed: LVVVGAVGV (KRAS G12V)
MVVIGRVGY

SEQ ID NO: 61203 - protein, 9 aa, synthetic construct
  source 1..9: note = Seed: LVVVGAVGV (KRAS G12V)
MVVIGSVGA

SEQ ID NO: 61204 - protein, 9 aa, synthetic construct
  source 1..9: note = Seed: LVVVGAVGV (KRAS G12V)
MVVIGSVGC

SEQ ID NO: 61205 - protein, 9 aa, synthetic construct
  source 1..9: note = Seed: LVVVGAVGV (KRAS G12V)
MVVIGSVGF

SEQ ID NO: 61206 - protein, 9 aa, synthetic construct
  source 1..9: note = Seed: LVVVGAVGV (KRAS G12V)
MVVIGSVGG

SEQ ID NO: 61207 - protein, 9 aa, synthetic construct
  source 1..9: note = Seed: LVVVGAVGV (KRAS G12V)
MVVIGSVGH

SEQ ID NO: 61208 - protein, 9 aa, synthetic construct
  source 1..9: note = Seed: LVVVGAVGV (KRAS G12V)
MVVIGSVGI

SEQ ID NO: 61209 - protein, 9 aa, synthetic construct
  source 1..9: note = Seed: LVVVGAVGV (KRAS G12V)
MVVIGSVGK

SEQ ID NO: 61210 - protein, 9 aa, synthetic construct
  source 1..9: note = Seed: LVVVGAVGV (KRAS G12V)
MVVIGSVGL

SEQ ID NO: 61211 - protein, 9 aa, synthetic construct
  source 1..9: note = Seed: LVVVGAVGV (KRAS G12V)
MVVIGSVGM

SEQ ID NO: 61212 - protein, 9 aa, synthetic construct
  source 1..9: note = Seed: LVVVGAVGV (KRAS G12V)
MVVIGSVGN

SEQ ID NO: 61213 - protein, 9 aa, synthetic construct
  source 1..9: note = Seed: LVVVGAVGV (KRAS G12V)
MVVIGSVGP

SEQ ID NO: 61214 - protein, 9 aa, synthetic construct
  source 1..9: note = Seed: LVVVGAVGV (KRAS G12V)
MVVIGSVGQ

SEQ ID NO: 61215 - protein, 9 aa, synthetic construct
  source 1..9: note = Seed: LVVVGAVGV (KRAS G12V)
MVVIGSVGR

SEQ ID NO: 61216 - protein, 9 aa, synthetic construct
  source 1..9: note = Seed: LVVVGAVGV (KRAS G12V)
MVVIGSVGS

SEQ ID NO: 61217 - protein, 9 aa, synthetic construct
  source 1..9: note = Seed: LVVVGAVGV (KRAS G12V)
MVVIGSVGT

SEQ ID NO: 61218 - protein, 9 aa, synthetic construct
  source 1..9: note = Seed: LVVVGAVGV (KRAS G12V)
MVVIGSVGV

SEQ ID NO: 61219 - protein, 9 aa, synthetic construct
  source 1..9: note = Seed: LVVVGAVGV (KRAS G12V)
MVVIGSVGY

SEQ ID NO: 61220 - protein, 9 aa, synthetic construct
  source 1..9: note = Seed: LVVVGAVGV (KRAS G12V)
MVVIGTVGA

SEQ ID NO: 61221 - protein, 9 aa, synthetic construct
  source 1..9: note = Seed: LVVVGAVGV (KRAS G12V)
MVVIGTVGG

SEQ ID NO: 61222 - protein, 9 aa, synthetic construct
  source 1..9: note = Seed: LVVVGAVGV (KRAS G12V)
MVVIGTVGH

SEQ ID NO: 61223 - protein, 9 aa, synthetic construct
  source 1..9: note = Seed: LVVVGAVGV (KRAS G12V)
MVVIGTVGI

SEQ ID NO: 61224 - protein, 9 aa, synthetic construct
  source 1..9: note = Seed: LVVVGAVGV (KRAS G12V)
MVVIGTVGK

SEQ ID NO: 61225 - protein, 9 aa, synthetic construct
  source 1..9: note = Seed: LVVVGAVGV (KRAS G12V)
MVVIGTVGL

SEQ ID NO: 61226 - protein, 9 aa, synthetic construct
  source 1..9: note = Seed: LVVVGAVGV (KRAS G12V)
MVVIGTVGM

SEQ ID NO: 61227 - protein, 9 aa, synthetic construct
  source 1..9: note = Seed: LVVVGAVGV (KRAS G12V)
MVVIGTVGN

SEQ ID NO: 61228 - protein, 9 aa, synthetic construct
  source 1..9: note = Seed: LVVVGAVGV (KRAS G12V)
MVVIGTVGP

SEQ ID NO: 61229 - protein, 9 aa, synthetic construct
  source 1..9: note = Seed: LVVVGAVGV (KRAS G12V)
MVVIGTVGQ

SEQ ID NO: 61230 - protein, 9 aa, synthetic construct
  source 1..9: note = Seed: LVVVGAVGV (KRAS G12V)
MVVIGTVGR

SEQ ID NO: 61231 - protein, 9 aa, synthetic construct
  source 1..9: note = Seed: LVVVGAVGV (KRAS G12V)
MVVIGTVGS

SEQ ID NO: 61232 - protein, 9 aa, synthetic construct
  source 1..9: note = Seed: LVVVGAVGV (KRAS G12V)
MVVIGTVGT

SEQ ID NO: 61233 - protein, 9 aa, synthetic construct
  source 1..9: note = Seed: LVVVGAVGV (KRAS G12V)
MVVIGTVGV

SEQ ID NO: 61234 - protein, 9 aa, synthetic construct
  source 1..9: note = Seed: LVVVGAVGV (KRAS G12V)
MVVIGTVGY

SEQ ID NO: 61235 - protein, 9 aa, synthetic construct
  source 1..9: note = Seed: LVVVGAVGV (KRAS G12V)
MVVIGVVGA

SEQ ID NO: 61236 - protein, 9 aa, synthetic construct
  source 1..9: note = Seed: LVVVGAVGV (KRAS G12V)
MVVIGVVGH

SEQ ID NO: 61237 - protein, 9 aa, synthetic construct
  source 1..9: note = Seed: LVVVGAVGV (KRAS G12V)
MVVIGVVGI

SEQ ID NO: 61238 - protein, 9 aa, synthetic construct
  source 1..9: note = Seed: LVVVGAVGV (KRAS G12V)
MVVIGVVGK

SEQ ID NO: 61239 - protein, 9 aa, synthetic construct
  source 1..9: note = Seed: LVVVGAVGV (KRAS G12V)
MVVIGVVGL

SEQ ID NO: 61240 - protein, 9 aa, synthetic construct
  source 1..9: note = Seed: LVVVGAVGV (KRAS G12V)
MVVIGVVGM

SEQ ID NO: 61241 - protein, 9 aa, synthetic construct
  source 1..9: note = Seed: LVVVGAVGV (KRAS G12V)
MVVIGVVGN

SEQ ID NO: 61242 - protein, 9 aa, synthetic construct
  source 1..9: note = Seed: LVVVGAVGV (KRAS G12V)
MVVIGVVGQ

SEQ ID NO: 61243 - protein, 9 aa, synthetic construct
  source 1..9: note = Seed: LVVVGAVGV (KRAS G12V)
MVVIGVVGR

SEQ ID NO: 61244 - protein, 9 aa, synthetic construct
  source 1..9: note = Seed: LVVVGAVGV (KRAS G12V)
MVVIGVVGS

SEQ ID NO: 61245 - protein, 9 aa, synthetic construct
  source 1..9: note = Seed: LVVVGAVGV (KRAS G12V)
MVVIGVVGT

SEQ ID NO: 61246 - protein, 9 aa, synthetic construct
  source 1..9: note = Seed: LVVVGAVGV (KRAS G12V)
MVVIGVVGV

SEQ ID NO: 61247 - protein, 9 aa, synthetic construct
  source 1..9: note = Seed: LVVVGAVGV (KRAS G12V)
MVVIGWVGR

SEQ ID NO: 61248 - protein, 9 aa, synthetic construct
  source 1..9: note = Seed: LVVVGAVGV (KRAS G12V)
MVVIGYVGA

SEQ ID NO: 61249 - protein, 9 aa, synthetic construct
  source 1..9: note = Seed: LVVVGAVGV (KRAS G12V)
MVVIGYVGM

SEQ ID NO: 61250 - protein, 9 aa, synthetic construct
  source 1..9: note = Seed: LVVVGAVGV (KRAS G12V)
MVVIGYVGN

SEQ ID NO: 61251 - protein, 9 aa, synthetic construct
  source 1..9: note = Seed: LVVVGAVGV (KRAS G12V)
MVVIGYVGR

SEQ ID NO: 61252 - protein, 9 aa, synthetic construct
  source 1..9: note = Seed: LVVVGAVGV (KRAS G12V)
MVVIGYVGS

SEQ ID NO: 61253 - protein, 9 aa, synthetic construct
  source 1..9: note = Seed: LVVVGAVGV (KRAS G12V)
MVVKGAVGL

SEQ ID NO: 61254 - protein, 9 aa, synthetic construct
  source 1..9: note = Seed: LVVVGAVGV (KRAS G12V)
MVVKGHVGR

SEQ ID NO: 61255 - protein, 9 aa, synthetic construct
  source 1..9: note = Seed: LVVVGAVGV (KRAS G12V)
MVVKGIVGR

SEQ ID NO: 61256 - protein, 9 aa, synthetic construct
  source 1..9: note = Seed: LVVVGAVGV (KRAS G12V)
MVVKGKVGA

SEQ ID NO: 61257 - protein, 9 aa, synthetic construct
  source 1..9: note = Seed: LVVVGAVGV (KRAS G12V)
MVVKGKVGC

SEQ ID NO: 61258 - protein, 9 aa, synthetic construct
  source 1..9: note = Seed: LVVVGAVGV (KRAS G12V)
MVVKGKVGF

SEQ ID NO: 61259 - protein, 9 aa, synthetic construct
  source 1..9: note = Seed: LVVVGAVGV (KRAS G12V)
MVVKGKVGG

SEQ ID NO: 61260 - protein, 9 aa, synthetic construct
  source 1..9: note = Seed: LVVVGAVGV (KRAS G12V)
MVVKGKVGH

SEQ ID NO: 61261 - protein, 9 aa, synthetic construct
  source 1..9: note = Seed: LVVVGAVGV (KRAS G12V)
MVVKGKVGK

SEQ ID NO: 61262 - protein, 9 aa, synthetic construct
  source 1..9: note = Seed: LVVVGAVGV (KRAS G12V)
MVVKGKVGL

SEQ ID NO: 61263 - protein, 9 aa, synthetic construct
  source 1..9: note = Seed: LVVVGAVGV (KRAS G12V)
MVVKGKVGM

SEQ ID NO: 61264 - protein, 9 aa, synthetic construct
  source 1..9: note = Seed: LVVVGAVGV (KRAS G12V)
MVVKGKVGQ

SEQ ID NO: 61265 - protein, 9 aa, synthetic construct
  source 1..9: note = Seed: LVVVGAVGV (KRAS G12V)
MVVKGKVGR

SEQ ID NO: 61266 - protein, 9 aa, synthetic construct
  source 1..9: note = Seed: LVVVGAVGV (KRAS G12V)
MVVKGKVGS

SEQ ID NO: 61267 - protein, 9 aa, synthetic construct
  source 1..9: note = Seed: LVVVGAVGV (KRAS G12V)
MVVKGKVGT

SEQ ID NO: 61268 - protein, 9 aa, synthetic construct
  source 1..9: note = Seed: LVVVGAVGV (KRAS G12V)
MVVKGKVGV

SEQ ID NO: 61269 - protein, 9 aa, synthetic construct
  source 1..9: note = Seed: LVVVGAVGV (KRAS G12V)
MVVKGKVGW

SEQ ID NO: 61270 - protein, 9 aa, synthetic construct
  source 1..9: note = Seed: LVVVGAVGV (KRAS G12V)
MVVKGKVGY

SEQ ID NO: 61271 - protein, 9 aa, synthetic construct
  source 1..9: note = Seed: LVVVGAVGV (KRAS G12V)
MVVKGLVGR

SEQ ID NO: 61272 - protein, 9 aa, synthetic construct
  source 1..9: note = Seed: LVVVGAVGV (KRAS G12V)
MVVKGLVGY

SEQ ID NO: 61273 - protein, 9 aa, synthetic construct
  source 1..9: note = Seed: LVVVGAVGV (KRAS G12V)
MVVKGMVGA

SEQ ID NO: 61274 - protein, 9 aa, synthetic construct
  source 1..9: note = Seed: LVVVGAVGV (KRAS G12V)
MVVKGMVGR

SEQ ID NO: 61275 - protein, 9 aa, synthetic construct
  source 1..9: note = Seed: LVVVGAVGV (KRAS G12V)
MVVKGMVGY

SEQ ID NO: 61276 - protein, 9 aa, synthetic construct
  source 1..9: note = Seed: LVVVGAVGV (KRAS G12V)
MVVKGRVGA

SEQ ID NO: 61277 - protein, 9 aa, synthetic construct
  source 1..9: note = Seed: LVVVGAVGV (KRAS G12V)
MVVKGRVGC

SEQ ID NO: 61278 - protein, 9 aa, synthetic construct
  source 1..9: note = Seed: LVVVGAVGV (KRAS G12V)
MVVKGRVGF

SEQ ID NO: 61279 - protein, 9 aa, synthetic construct
  source 1..9: note = Seed: LVVVGAVGV (KRAS G12V)
MVVKGRVGG

SEQ ID NO: 61280 - protein, 9 aa, synthetic construct
  source 1..9: note = Seed: LVVVGAVGV (KRAS G12V)
MVVKGRVGH

SEQ ID NO: 61281 - protein, 9 aa, synthetic construct
  source 1..9: note = Seed: LVVVGAVGV (KRAS G12V)
MVVKGRVGI

SEQ ID NO: 61282 - protein, 9 aa, synthetic construct
  source 1..9: note = Seed: LVVVGAVGV (KRAS G12V)
MVVKGRVGK

SEQ ID NO: 61283 - protein, 9 aa, synthetic construct
  source 1..9: note = Seed: LVVVGAVGV (KRAS G12V)
MVVKGRVGL

SEQ ID NO: 61284 - protein, 9 aa, synthetic construct
  source 1..9: note = Seed: LVVVGAVGV (KRAS G12V)
MVVKGRVGM

SEQ ID NO: 61285 - protein, 9 aa, synthetic construct
  source 1..9: note = Seed: LVVVGAVGV (KRAS G12V)
MVVKGRVGN

SEQ ID NO: 61286 - protein, 9 aa, synthetic construct
  source 1..9: note = Seed: LVVVGAVGV (KRAS G12V)
MVVKGRVGQ

SEQ ID NO: 61287 - protein, 9 aa, synthetic construct
  source 1..9: note = Seed: LVVVGAVGV (KRAS G12V)
MVVKGRVGR

SEQ ID NO: 61288 - protein, 9 aa, synthetic construct
  source 1..9: note = Seed: LVVVGAVGV (KRAS G12V)
MVVKGRVGS

SEQ ID NO: 61289 - protein, 9 aa, synthetic construct
  source 1..9: note = Seed: LVVVGAVGV (KRAS G12V)
MVVKGRVGT

SEQ ID NO: 61290 - protein, 9 aa, synthetic construct
  source 1..9: note = Seed: LVVVGAVGV (KRAS G12V)
MVVKGRVGV

SEQ ID NO: 61291 - protein, 9 aa, synthetic construct
  source 1..9: note = Seed: LVVVGAVGV (KRAS G12V)
MVVKGRVGW

SEQ ID NO: 61292 - protein, 9 aa, synthetic construct
  source 1..9: note = Seed: LVVVGAVGV (KRAS G12V)
MVVKGRVGY

SEQ ID NO: 61293 - protein, 9 aa, synthetic construct
  source 1..9: note = Seed: LVVVGAVGV (KRAS G12V)
MVVKGVVGR

SEQ ID NO: 61294 - protein, 9 aa, synthetic construct
  source 1..9: note = Seed: LVVVGAVGV (KRAS G12V)
MVVLGAVGA

SEQ ID NO: 61295 - protein, 9 aa, synthetic construct
  source 1..9: note = Seed: LVVVGAVGV (KRAS G12V)
MVVLGAVGC

SEQ ID NO: 61296 - protein, 9 aa, synthetic construct
  source 1..9: note = Seed: LVVVGAVGV (KRAS G12V)
MVVLGAVGF

SEQ ID NO: 61297 - protein, 9 aa, synthetic construct
  source 1..9: note = Seed: LVVVGAVGV (KRAS G12V)
MVVLGAVGG

SEQ ID NO: 61298 - protein, 9 aa, synthetic construct
  source 1..9: note = Seed: LVVVGAVGV (KRAS G12V)
MVVLGAVGH

SEQ ID NO: 61299 - protein, 9 aa, synthetic construct
  source 1..9: note = Seed: LVVVGAVGV (KRAS G12V)
MVVLGAVGI

SEQ ID NO: 61300 - protein, 9 aa, synthetic construct
  source 1..9: note = Seed: LVVVGAVGV (KRAS G12V)
MVVLGAVGK

SEQ ID NO: 61301 - protein, 9 aa, synthetic construct
  source 1..9: note = Seed: LVVVGAVGV (KRAS G12V)
MVVLGAVGL

SEQ ID NO: 61302 - protein, 9 aa, synthetic construct
  source 1..9: note = Seed: LVVVGAVGV (KRAS G12V)
MVVLGAVGM

SEQ ID NO: 61303 - protein, 9 aa, synthetic construct
  source 1..9: note = Seed: LVVVGAVGV (KRAS G12V)
MVVLGAVGN

SEQ ID NO: 61304 - protein, 9 aa, synthetic construct
  source 1..9: note = Seed: LVVVGAVGV (KRAS G12V)
MVVLGAVGP

SEQ ID NO: 61305 - protein, 9 aa, synthetic construct
  source 1..9: note = Seed: LVVVGAVGV (KRAS G12V)
MVVLGAVGQ

SEQ ID NO: 61306 - protein, 9 aa, synthetic construct
  source 1..9: note = Seed: LVVVGAVGV (KRAS G12V)
MVVLGAVGR

SEQ ID NO: 61307 - protein, 9 aa, synthetic construct
  source 1..9: note = Seed: LVVVGAVGV (KRAS G12V)
MVVLGAVGS

SEQ ID NO: 61308 - protein, 9 aa, synthetic construct
  source 1..9: note = Seed: LVVVGAVGV (KRAS G12V)
MVVLGAVGT

SEQ ID NO: 61309 - protein, 9 aa, synthetic construct
  source 1..9: note = Seed: LVVVGAVGV (KRAS G12V)
MVVLGAVGV

SEQ ID NO: 61310 - protein, 9 aa, synthetic construct
  source 1..9: note = Seed: LVVVGAVGV (KRAS G12V)
MVVLGAVGY

SEQ ID NO: 61311 - protein, 9 aa, synthetic construct
  source 1..9: note = Seed: LVVVGAVGV (KRAS G12V)
MVVLGDVGI

SEQ ID NO: 61312 - protein, 9 aa, synthetic construct
  source 1..9: note = Seed: LVVVGAVGV (KRAS G12V)
MVVLGDVGL

SEQ ID NO: 61313 - protein, 9 aa, synthetic construct
  source 1..9: note = Seed: LVVVGAVGV (KRAS G12V)
MVVLGDVGV

SEQ ID NO: 61314 - protein, 9 aa, synthetic construct
  source 1..9: note = Seed: LVVVGAVGV (KRAS G12V)
MVVLGEVGL

SEQ ID NO: 61315 - protein, 9 aa, synthetic construct
  source 1..9: note = Seed: LVVVGAVGV (KRAS G12V)
MVVLGFVGR

SEQ ID NO: 61316 - protein, 9 aa, synthetic construct
  source 1..9: note = Seed: LVVVGAVGV (KRAS G12V)
MVVLGGVGA

SEQ ID NO: 61317 - protein, 9 aa, synthetic construct
  source 1..9: note = Seed: LVVVGAVGV (KRAS G12V)
MVVLGGVGC

SEQ ID NO: 61318 - protein, 9 aa, synthetic construct
  source 1..9: note = Seed: LVVVGAVGV (KRAS G12V)
MVVLGGVGF

SEQ ID NO: 61319 - protein, 9 aa, synthetic construct
  source 1..9: note = Seed: LVVVGAVGV (KRAS G12V)
MVVLGGVGG

SEQ ID NO: 61320 - protein, 9 aa, synthetic construct
  source 1..9: note = Seed: LVVVGAVGV (KRAS G12V)
MVVLGGVGH

SEQ ID NO: 61321 - protein, 9 aa, synthetic construct
  source 1..9: note = Seed: LVVVGAVGV (KRAS G12V)
MVVLGGVGI

SEQ ID NO: 61322 - protein, 9 aa, synthetic construct
  source 1..9: note = Seed: LVVVGAVGV (KRAS G12V)
MVVLGGVGK

SEQ ID NO: 61323 - protein, 9 aa, synthetic construct
  source 1..9: note = Seed: LVVVGAVGV (KRAS G12V)
MVVLGGVGL

SEQ ID NO: 61324 - protein, 9 aa, synthetic construct
  source 1..9: note = Seed: LVVVGAVGV (KRAS G12V)
MVVLGGVGM

SEQ ID NO: 61325 - protein, 9 aa, synthetic construct
  source 1..9: note = Seed: LVVVGAVGV (KRAS G12V)
MVVLGGVGN

SEQ ID NO: 61326 - protein, 9 aa, synthetic construct
  source 1..9: note = Seed: LVVVGAVGV (KRAS G12V)
MVVLGGVGP

SEQ ID NO: 61327 - protein, 9 aa, synthetic construct
  source 1..9: note = Seed: LVVVGAVGV (KRAS G12V)
MVVLGGVGQ

SEQ ID NO: 61328 - protein, 9 aa, synthetic construct
  source 1..9: note = Seed: LVVVGAVGV (KRAS G12V)
MVVLGGVGR

SEQ ID NO: 61329 - protein, 9 aa, synthetic construct
  source 1..9: note = Seed: LVVVGAVGV (KRAS G12V)
MVVLGGVGS

SEQ ID NO: 61330 - protein, 9 aa, synthetic construct
  source 1..9: note = Seed: LVVVGAVGV (KRAS G12V)
MVVLGGVGT

SEQ ID NO: 61331 - protein, 9 aa, synthetic construct
  source 1..9: note = Seed: LVVVGAVGV (KRAS G12V)
MVVLGGVGV

SEQ ID NO: 61332 - protein, 9 aa, synthetic construct
  source 1..9: note = Seed: LVVVGAVGV (KRAS G12V)
MVVLGGVGY

SEQ ID NO: 61333 - protein, 9 aa, synthetic construct
  source 1..9: note = Seed: LVVVGAVGV (KRAS G12V)
MVVLGHVGA

SEQ ID NO: 61334 - protein, 9 aa, synthetic construct
  source 1..9: note = Seed: LVVVGAVGV (KRAS G12V)
MVVLGHVGH

SEQ ID NO: 61335 - protein, 9 aa, synthetic construct
  source 1..9: note = Seed: LVVVGAVGV (KRAS G12V)
MVVLGHVGI

SEQ ID NO: 61336 - protein, 9 aa, synthetic construct
  source 1..9: note = Seed: LVVVGAVGV (KRAS G12V)
MVVLGHVGK

SEQ ID NO: 61337 - protein, 9 aa, synthetic construct
  source 1..9: note = Seed: LVVVGAVGV (KRAS G12V)
MVVLGHVGL

SEQ ID NO: 61338 - protein, 9 aa, synthetic construct
  source 1..9: note = Seed: LVVVGAVGV (KRAS G12V)
MVVLGHVGM

SEQ ID NO: 61339 - protein, 9 aa, synthetic construct
  source 1..9: note = Seed: LVVVGAVGV (KRAS G12V)
MVVLGHVGR

SEQ ID NO: 61340 - protein, 9 aa, synthetic construct
  source 1..9: note = Seed: LVVVGAVGV (KRAS G12V)
MVVLGHVGS

SEQ ID NO: 61341 - protein, 9 aa, synthetic construct
  source 1..9: note = Seed: LVVVGAVGV (KRAS G12V)
MVVLGHVGT

SEQ ID NO: 61342 - protein, 9 aa, synthetic construct
  source 1..9: note = Seed: LVVVGAVGV (KRAS G12V)
MVVLGHVGV

SEQ ID NO: 61343 - protein, 9 aa, synthetic construct
  source 1..9: note = Seed: LVVVGAVGV (KRAS G12V)
MVVLGIVGA

SEQ ID NO: 61344 - protein, 9 aa, synthetic construct
  source 1..9: note = Seed: LVVVGAVGV (KRAS G12V)
MVVLGIVGH

SEQ ID NO: 61345 - protein, 9 aa, synthetic construct
  source 1..9: note = Seed: LVVVGAVGV (KRAS G12V)
MVVLGIVGK

SEQ ID NO: 61346 - protein, 9 aa, synthetic construct
  source 1..9: note = Seed: LVVVGAVGV (KRAS G12V)
MVVLGIVGL

SEQ ID NO: 61347 - protein, 9 aa, synthetic construct
  source 1..9: note = Seed: LVVVGAVGV (KRAS G12V)
MVVLGIVGM

SEQ ID NO: 61348 - protein, 9 aa, synthetic construct
  source 1..9: note = Seed: LVVVGAVGV (KRAS G12V)
MVVLGIVGN

SEQ ID NO: 61349 - protein, 9 aa, synthetic construct
  source 1..9: note = Seed: LVVVGAVGV (KRAS G12V)
MVVLGIVGR

SEQ ID NO: 61350 - protein, 9 aa, synthetic construct
  source 1..9: note = Seed: LVVVGAVGV (KRAS G12V)
MVVLGIVGS

SEQ ID NO: 61351 - protein, 9 aa, synthetic construct
  source 1..9: note = Seed: LVVVGAVGV (KRAS G12V)
MVVLGIVGT

SEQ ID NO: 61352 - protein, 9 aa, synthetic construct
  source 1..9: note = Seed: LVVVGAVGV (KRAS G12V)
MVVLGIVGV

SEQ ID NO: 61353 - protein, 9 aa, synthetic construct
  source 1..9: note = Seed: LVVVGAVGV (KRAS G12V)
MVVLGKVGA

SEQ ID NO: 61354 - protein, 9 aa, synthetic construct
  source 1..9: note = Seed: LVVVGAVGV (KRAS G12V)
MVVLGKVGG

SEQ ID NO: 61355 - protein, 9 aa, synthetic construct
  source 1..9: note = Seed: LVVVGAVGV (KRAS G12V)
MVVLGKVGH

SEQ ID NO: 61356 - protein, 9 aa, synthetic construct
  source 1..9: note = Seed: LVVVGAVGV (KRAS G12V)
MVVLGKVGI

SEQ ID NO: 61357 - protein, 9 aa, synthetic construct
  source 1..9: note = Seed: LVVVGAVGV (KRAS G12V)
MVVLGKVGK

SEQ ID NO: 61358 - protein, 9 aa, synthetic construct
  source 1..9: note = Seed: LVVVGAVGV (KRAS G12V)
MVVLGKVGL

SEQ ID NO: 61359 - protein, 9 aa, synthetic construct
  source 1..9: note = Seed: LVVVGAVGV (KRAS G12V)
MVVLGKVGM

SEQ ID NO: 61360 - protein, 9 aa, synthetic construct
  source 1..9: note = Seed: LVVVGAVGV (KRAS G12V)
MVVLGKVGN

SEQ ID NO: 61361 - protein, 9 aa, synthetic construct
  source 1..9: note = Seed: LVVVGAVGV (KRAS G12V)
MVVLGKVGP

SEQ ID NO: 61362 - protein, 9 aa, synthetic construct
  source 1..9: note = Seed: LVVVGAVGV (KRAS G12V)
MVVLGKVGQ

SEQ ID NO: 61363 - protein, 9 aa, synthetic construct
  source 1..9: note = Seed: LVVVGAVGV (KRAS G12V)
MVVLGKVGR

SEQ ID NO: 61364 - protein, 9 aa, synthetic construct
  source 1..9: note = Seed: LVVVGAVGV (KRAS G12V)
MVVLGKVGS

SEQ ID NO: 61365 - protein, 9 aa, synthetic construct
  source 1..9: note = Seed: LVVVGAVGV (KRAS G12V)
MVVLGKVGT

SEQ ID NO: 61366 - protein, 9 aa, synthetic construct
  source 1..9: note = Seed: LVVVGAVGV (KRAS G12V)
MVVLGKVGV

SEQ ID NO: 61367 - protein, 9 aa, synthetic construct
  source 1..9: note = Seed: LVVVGAVGV (KRAS G12V)
MVVLGKVGY

SEQ ID NO: 61368 - protein, 9 aa, synthetic construct
  source 1..9: note = Seed: LVVVGAVGV (KRAS G12V)
MVVLGLVGA

SEQ ID NO: 61369 - protein, 9 aa, synthetic construct
  source 1..9: note = Seed: LVVVGAVGV (KRAS G12V)
MVVLGLVGH

SEQ ID NO: 61370 - protein, 9 aa, synthetic construct
  source 1..9: note = Seed: LVVVGAVGV (KRAS G12V)
MVVLGLVGK

SEQ ID NO: 61371 - protein, 9 aa, synthetic construct
  source 1..9: note = Seed: LVVVGAVGV (KRAS G12V)
MVVLGLVGM

SEQ ID NO: 61372 - protein, 9 aa, synthetic construct
  source 1..9: note = Seed: LVVVGAVGV (KRAS G12V)
MVVLGLVGN

SEQ ID NO: 61373 - protein, 9 aa, synthetic construct
  source 1..9: note = Seed: LVVVGAVGV (KRAS G12V)
MVVLGLVGR

SEQ ID NO: 61374 - protein, 9 aa, synthetic construct
  source 1..9: note = Seed: LVVVGAVGV (KRAS G12V)
MVVLGLVGS

SEQ ID NO: 61375 - protein, 9 aa, synthetic construct
  source 1..9: note = Seed: LVVVGAVGV (KRAS G12V)
MVVLGLVGV

SEQ ID NO: 61376 - protein, 9 aa, synthetic construct
  source 1..9: note = Seed: LVVVGAVGV (KRAS G12V)
MVVLGMVGA

SEQ ID NO: 61377 - protein, 9 aa, synthetic construct
  source 1..9: note = Seed: LVVVGAVGV (KRAS G12V)
MVVLGMVGG

SEQ ID NO: 61378 - protein, 9 aa, synthetic construct
  source 1..9: note = Seed: LVVVGAVGV (KRAS G12V)
MVVLGMVGH

SEQ ID NO: 61379 - protein, 9 aa, synthetic construct
  source 1..9: note = Seed: LVVVGAVGV (KRAS G12V)
MVVLGMVGI

SEQ ID NO: 61380 - protein, 9 aa, synthetic construct
  source 1..9: note = Seed: LVVVGAVGV (KRAS G12V)
MVVLGMVGK

SEQ ID NO: 61381 - protein, 9 aa, synthetic construct
  source 1..9: note = Seed: LVVVGAVGV (KRAS G12V)
MVVLGMVGL

SEQ ID NO: 61382 - protein, 9 aa, synthetic construct
  source 1..9: note = Seed: LVVVGAVGV (KRAS G12V)
MVVLGMVGM

SEQ ID NO: 61383 - protein, 9 aa, synthetic construct
  source 1..9: note = Seed: LVVVGAVGV (KRAS G12V)
MVVLGMVGN

SEQ ID NO: 61384 - protein, 9 aa, synthetic construct
  source 1..9: note = Seed: LVVVGAVGV (KRAS G12V)
MVVLGMVGQ

SEQ ID NO: 61385 - protein, 9 aa, synthetic construct
  source 1..9: note = Seed: LVVVGAVGV (KRAS G12V)
MVVLGMVGR

SEQ ID NO: 61386 - protein, 9 aa, synthetic construct
  source 1..9: note = Seed: LVVVGAVGV (KRAS G12V)
MVVLGMVGS

SEQ ID NO: 61387 - protein, 9 aa, synthetic construct
  source 1..9: note = Seed: LVVVGAVGV (KRAS G12V)
MVVLGMVGT

SEQ ID NO: 61388 - protein, 9 aa, synthetic construct
  source 1..9: note = Seed: LVVVGAVGV (KRAS G12V)
MVVLGMVGV

SEQ ID NO: 61389 - protein, 9 aa, synthetic construct
  source 1..9: note = Seed: LVVVGAVGV (KRAS G12V)
MVVLGMVGY

SEQ ID NO: 61390 - protein, 9 aa, synthetic construct
  source 1..9: note = Seed: LVVVGAVGV (KRAS G12V)
MVVLGNVGA

SEQ ID NO: 61391 - protein, 9 aa, synthetic construct
  source 1..9: note = Seed: LVVVGAVGV (KRAS G12V)
MVVLGNVGC

SEQ ID NO: 61392 - protein, 9 aa, synthetic construct
  source 1..9: note = Seed: LVVVGAVGV (KRAS G12V)
MVVLGNVGF

SEQ ID NO: 61393 - protein, 9 aa, synthetic construct
  source 1..9: note = Seed: LVVVGAVGV (KRAS G12V)
MVVLGNVGG

SEQ ID NO: 61394 - protein, 9 aa, synthetic construct
  source 1..9: note = Seed: LVVVGAVGV (KRAS G12V)
MVVLGNVGH

SEQ ID NO: 61395 - protein, 9 aa, synthetic construct
  source 1..9: note = Seed: LVVVGAVGV (KRAS G12V)
MVVLGNVGI

SEQ ID NO: 61396 - protein, 9 aa, synthetic construct
  source 1..9: note = Seed: LVVVGAVGV (KRAS G12V)
MVVLGNVGK

SEQ ID NO: 61397 - protein, 9 aa, synthetic construct
  source 1..9: note = Seed: LVVVGAVGV (KRAS G12V)
MVVLGNVGL

SEQ ID NO: 61398 - protein, 9 aa, synthetic construct
  source 1..9: note = Seed: LVVVGAVGV (KRAS G12V)
MVVLGNVGM

SEQ ID NO: 61399 - protein, 9 aa, synthetic construct
  source 1..9: note = Seed: LVVVGAVGV (KRAS G12V)
MVVLGNVGN

SEQ ID NO: 61400 - protein, 9 aa, synthetic construct
  source 1..9: note = Seed: LVVVGAVGV (KRAS G12V)
MVVLGNVGP

SEQ ID NO: 61401 - protein, 9 aa, synthetic construct
  source 1..9: note = Seed: LVVVGAVGV (KRAS G12V)
MVVLGNVGQ

SEQ ID NO: 61402 - protein, 9 aa, synthetic construct
  source 1..9: note = Seed: LVVVGAVGV (KRAS G12V)
MVVLGNVGR

SEQ ID NO: 61403 - protein, 9 aa, synthetic construct
  source 1..9: note = Seed: LVVVGAVGV (KRAS G12V)
MVVLGNVGS

SEQ ID NO: 61404 - protein, 9 aa, synthetic construct
  source 1..9: note = Seed: LVVVGAVGV (KRAS G12V)
MVVLGNVGT

SEQ ID NO: 61405 - protein, 9 aa, synthetic construct
  source 1..9: note = Seed: LVVVGAVGV (KRAS G12V)
MVVLGNVGV

SEQ ID NO: 61406 - protein, 9 aa, synthetic construct
  source 1..9: note = Seed: LVVVGAVGV (KRAS G12V)
MVVLGNVGY

SEQ ID NO: 61407 - protein, 9 aa, synthetic construct
  source 1..9: note = Seed: LVVVGAVGV (KRAS G12V)
MVVLGPVGA

SEQ ID NO: 61408 - protein, 9 aa, synthetic construct
  source 1..9: note = Seed: LVVVGAVGV (KRAS G12V)
MVVLGPVGC

SEQ ID NO: 61409 - protein, 9 aa, synthetic construct
  source 1..9: note = Seed: LVVVGAVGV (KRAS G12V)
MVVLGPVGD

SEQ ID NO: 61410 - protein, 9 aa, synthetic construct
  source 1..9: note = Seed: LVVVGAVGV (KRAS G12V)
MVVLGPVGE

SEQ ID NO: 61411 - protein, 9 aa, synthetic construct
  source 1..9: note = Seed: LVVVGAVGV (KRAS G12V)
MVVLGPVGF

SEQ ID NO: 61412 - protein, 9 aa, synthetic construct
  source 1..9: note = Seed: LVVVGAVGV (KRAS G12V)
MVVLGPVGG

SEQ ID NO: 61413 - protein, 9 aa, synthetic construct
  source 1..9: note = Seed: LVVVGAVGV (KRAS G12V)
MVVLGPVGH

SEQ ID NO: 61414 - protein, 9 aa, synthetic construct
  source 1..9: note = Seed: LVVVGAVGV (KRAS G12V)
MVVLGPVGI

SEQ ID NO: 61415 - protein, 9 aa, synthetic construct
  source 1..9: note = Seed: LVVVGAVGV (KRAS G12V)
MVVLGPVGK

SEQ ID NO: 61416 - protein, 9 aa, synthetic construct
  source 1..9: note = Seed: LVVVGAVGV (KRAS G12V)
MVVLGPVGL

SEQ ID NO: 61417 - protein, 9 aa, synthetic construct
  source 1..9: note = Seed: LVVVGAVGV (KRAS G12V)
MVVLGPVGM

SEQ ID NO: 61418 - protein, 9 aa, synthetic construct
  source 1..9: note = Seed: LVVVGAVGV (KRAS G12V)
MVVLGPVGN

SEQ ID NO: 61419 - protein, 9 aa, synthetic construct
  source 1..9: note = Seed: LVVVGAVGV (KRAS G12V)
MVVLGPVGP

SEQ ID NO: 61420 - protein, 9 aa, synthetic construct
  source 1..9: note = Seed: LVVVGAVGV (KRAS G12V)
MVVLGPVGQ

SEQ ID NO: 61421 - protein, 9 aa, synthetic construct
  source 1..9: note = Seed: LVVVGAVGV (KRAS G12V)
MVVLGPVGR

SEQ ID NO: 61422 - protein, 9 aa, synthetic construct
  source 1..9: note = Seed: LVVVGAVGV (KRAS G12V)
MVVLGPVGS

SEQ ID NO: 61423 - protein, 9 aa, synthetic construct
  source 1..9: note = Seed: LVVVGAVGV (KRAS G12V)
MVVLGPVGT

SEQ ID NO: 61424 - protein, 9 aa, synthetic construct
  source 1..9: note = Seed: LVVVGAVGV (KRAS G12V)
MVVLGPVGV

SEQ ID NO: 61425 - protein, 9 aa, synthetic construct
  source 1..9: note = Seed: LVVVGAVGV (KRAS G12V)
MVVLGPVGW

SEQ ID NO: 61426 - protein, 9 aa, synthetic construct
  source 1..9: note = Seed: LVVVGAVGV (KRAS G12V)
MVVLGPVGY

SEQ ID NO: 61427 - protein, 9 aa, synthetic construct
  source 1..9: note = Seed: LVVVGAVGV (KRAS G12V)
MVVLGQVGA

SEQ ID NO: 61428 - protein, 9 aa, synthetic construct
  source 1..9: note = Seed: LVVVGAVGV (KRAS G12V)
MVVLGQVGI

SEQ ID NO: 61429 - protein, 9 aa, synthetic construct
  source 1..9: note = Seed: LVVVGAVGV (KRAS G12V)
MVVLGQVGL

SEQ ID NO: 61430 - protein, 9 aa, synthetic construct
  source 1..9: note = Seed: LVVVGAVGV (KRAS G12V)
MVVLGQVGM

SEQ ID NO: 61431 - protein, 9 aa, synthetic construct
  source 1..9: note = Seed: LVVVGAVGV (KRAS G12V)
MVVLGQVGV

SEQ ID NO: 61432 - protein, 9 aa, synthetic construct
  source 1..9: note = Seed: LVVVGAVGV (KRAS G12V)
MVVLGRVGA

SEQ ID NO: 61433 - protein, 9 aa, synthetic construct
  source 1..9: note = Seed: LVVVGAVGV (KRAS G12V)
MVVLGRVGE

SEQ ID NO: 61434 - protein, 9 aa, synthetic construct
  source 1..9: note = Seed: LVVVGAVGV (KRAS G12V)
MVVLGRVGF

SEQ ID NO: 61435 - protein, 9 aa, synthetic construct
  source 1..9: note = Seed: LVVVGAVGV (KRAS G12V)
MVVLGRVGG

SEQ ID NO: 61436 - protein, 9 aa, synthetic construct
  source 1..9: note = Seed: LVVVGAVGV (KRAS G12V)
MVVLGRVGH

SEQ ID NO: 61437 - protein, 9 aa, synthetic construct
  source 1..9: note = Seed: LVVVGAVGV (KRAS G12V)
MVVLGRVGI

SEQ ID NO: 61438 - protein, 9 aa, synthetic construct
  source 1..9: note = Seed: LVVVGAVGV (KRAS G12V)
MVVLGRVGK

SEQ ID NO: 61439 - protein, 9 aa, synthetic construct
  source 1..9: note = Seed: LVVVGAVGV (KRAS G12V)
MVVLGRVGL

SEQ ID NO: 61440 - protein, 9 aa, synthetic construct
  source 1..9: note = Seed: LVVVGAVGV (KRAS G12V)
MVVLGRVGM

SEQ ID NO: 61441 - protein, 9 aa, synthetic construct
  source 1..9: note = Seed: LVVVGAVGV (KRAS G12V)
MVVLGRVGN

SEQ ID NO: 61442 - protein, 9 aa, synthetic construct
  source 1..9: note = Seed: LVVVGAVGV (KRAS G12V)
MVVLGRVGP

SEQ ID NO: 61443 - protein, 9 aa, synthetic construct
  source 1..9: note = Seed: LVVVGAVGV (KRAS G12V)
MVVLGRVGQ

SEQ ID NO: 61444 - protein, 9 aa, synthetic construct
  source 1..9: note = Seed: LVVVGAVGV (KRAS G12V)
MVVLGRVGR

SEQ ID NO: 61445 - protein, 9 aa, synthetic construct
  source 1..9: note = Seed: LVVVGAVGV (KRAS G12V)
MVVLGRVGS

SEQ ID NO: 61446 - protein, 9 aa, synthetic construct
  source 1..9: note = Seed: LVVVGAVGV (KRAS G12V)
MVVLGRVGT

SEQ ID NO: 61447 - protein, 9 aa, synthetic construct
  source 1..9: note = Seed: LVVVGAVGV (KRAS G12V)
MVVLGRVGV

SEQ ID NO: 61448 - protein, 9 aa, synthetic construct
  source 1..9: note = Seed: LVVVGAVGV (KRAS G12V)
MVVLGRVGY

SEQ ID NO: 61449 - protein, 9 aa, synthetic construct
  source 1..9: note = Seed: LVVVGAVGV (KRAS G12V)
MVVLGSVGA

SEQ ID NO: 61450 - protein, 9 aa, synthetic construct
  source 1..9: note = Seed: LVVVGAVGV (KRAS G12V)
MVVLGSVGC

SEQ ID NO: 61451 - protein, 9 aa, synthetic construct
  source 1..9: note = Seed: LVVVGAVGV (KRAS G12V)
MVVLGSVGF

SEQ ID NO: 61452 - protein, 9 aa, synthetic construct
  source 1..9: note = Seed: LVVVGAVGV (KRAS G12V)
MVVLGSVGG

SEQ ID NO: 61453 - protein, 9 aa, synthetic construct
  source 1..9: note = Seed: LVVVGAVGV (KRAS G12V)
MVVLGSVGH

SEQ ID NO: 61454 - protein, 9 aa, synthetic construct
  source 1..9: note = Seed: LVVVGAVGV (KRAS G12V)
MVVLGSVGI

SEQ ID NO: 61455 - protein, 9 aa, synthetic construct
  source 1..9: note = Seed: LVVVGAVGV (KRAS G12V)
MVVLGSVGK

SEQ ID NO: 61456 - protein, 9 aa, synthetic construct
  source 1..9: note = Seed: LVVVGAVGV (KRAS G12V)
MVVLGSVGL

SEQ ID NO: 61457 - protein, 9 aa, synthetic construct
  source 1..9: note = Seed: LVVVGAVGV (KRAS G12V)
MVVLGSVGM

SEQ ID NO: 61458 - protein, 9 aa, synthetic construct
  source 1..9: note = Seed: LVVVGAVGV (KRAS G12V)
MVVLGSVGN

SEQ ID NO: 61459 - protein, 9 aa, synthetic construct
  source 1..9: note = Seed: LVVVGAVGV (KRAS G12V)
MVVLGSVGP

SEQ ID NO: 61460 - protein, 9 aa, synthetic construct
  source 1..9: note = Seed: LVVVGAVGV (KRAS G12V)
MVVLGSVGQ

SEQ ID NO: 61461 - protein, 9 aa, synthetic construct
  source 1..9: note = Seed: LVVVGAVGV (KRAS G12V)
MVVLGSVGR

SEQ ID NO: 61462 - protein, 9 aa, synthetic construct
  source 1..9: note = Seed: LVVVGAVGV (KRAS G12V)
MVVLGSVGS

SEQ ID NO: 61463 - protein, 9 aa, synthetic construct
  source 1..9: note = Seed: LVVVGAVGV (KRAS G12V)
MVVLGSVGT

SEQ ID NO: 61464 - protein, 9 aa, synthetic construct
  source 1..9: note = Seed: LVVVGAVGV (KRAS G12V)
MVVLGSVGV

SEQ ID NO: 61465 - protein, 9 aa, synthetic construct
  source 1..9: note = Seed: LVVVGAVGV (KRAS G12V)
MVVLGSVGY

SEQ ID NO: 61466 - protein, 9 aa, synthetic construct
  source 1..9: note = Seed: LVVVGAVGV (KRAS G12V)
MVVLGTVGA

SEQ ID NO: 61467 - protein, 9 aa, synthetic construct
  source 1..9: note = Seed: LVVVGAVGV (KRAS G12V)
MVVLGTVGF

SEQ ID NO: 61468 - protein, 9 aa, synthetic construct
  source 1..9: note = Seed: LVVVGAVGV (KRAS G12V)
MVVLGTVGG

SEQ ID NO: 61469 - protein, 9 aa, synthetic construct
  source 1..9: note = Seed: LVVVGAVGV (KRAS G12V)
MVVLGTVGH

SEQ ID NO: 61470 - protein, 9 aa, synthetic construct
  source 1..9: note = Seed: LVVVGAVGV (KRAS G12V)
MVVLGTVGI

SEQ ID NO: 61471 - protein, 9 aa, synthetic construct
  source 1..9: note = Seed: LVVVGAVGV (KRAS G12V)
MVVLGTVGK

SEQ ID NO: 61472 - protein, 9 aa, synthetic construct
  source 1..9: note = Seed: LVVVGAVGV (KRAS G12V)
MVVLGTVGL

SEQ ID NO: 61473 - protein, 9 aa, synthetic construct
  source 1..9: note = Seed: LVVVGAVGV (KRAS G12V)
MVVLGTVGM

SEQ ID NO: 61474 - protein, 9 aa, synthetic construct
  source 1..9: note = Seed: LVVVGAVGV (KRAS G12V)
MVVLGTVGN

SEQ ID NO: 61475 - protein, 9 aa, synthetic construct
  source 1..9: note = Seed: LVVVGAVGV (KRAS G12V)
MVVLGTVGP

SEQ ID NO: 61476 - protein, 9 aa, synthetic construct
  source 1..9: note = Seed: LVVVGAVGV (KRAS G12V)
MVVLGTVGQ

SEQ ID NO: 61477 - protein, 9 aa, synthetic construct
  source 1..9: note = Seed: LVVVGAVGV (KRAS G12V)
MVVLGTVGR

SEQ ID NO: 61478 - protein, 9 aa, synthetic construct
  source 1..9: note = Seed: LVVVGAVGV (KRAS G12V)
MVVLGTVGS

SEQ ID NO: 61479 - protein, 9 aa, synthetic construct
  source 1..9: note = Seed: LVVVGAVGV (KRAS G12V)
MVVLGTVGT

SEQ ID NO: 61480 - protein, 9 aa, synthetic construct
  source 1..9: note = Seed: LVVVGAVGV (KRAS G12V)
MVVLGTVGV

SEQ ID NO: 61481 - protein, 9 aa, synthetic construct
  source 1..9: note = Seed: LVVVGAVGV (KRAS G12V)
MVVLGTVGY

SEQ ID NO: 61482 - protein, 9 aa, synthetic construct
  source 1..9: note = Seed: LVVVGAVGV (KRAS G12V)
MVVLGVVGA

SEQ ID NO: 61483 - protein, 9 aa, synthetic construct
  source 1..9: note = Seed: LVVVGAVGV (KRAS G12V)
MVVLGVVGG

SEQ ID NO: 61484 - protein, 9 aa, synthetic construct
  source 1..9: note = Seed: LVVVGAVGV (KRAS G12V)
MVVLGVVGH

SEQ ID NO: 61485 - protein, 9 aa, synthetic construct
  source 1..9: note = Seed: LVVVGAVGV (KRAS G12V)
MVVLGVVGI

SEQ ID NO: 61486 - protein, 9 aa, synthetic construct
  source 1..9: note = Seed: LVVVGAVGV (KRAS G12V)
MVVLGVVGK

SEQ ID NO: 61487 - protein, 9 aa, synthetic construct
  source 1..9: note = Seed: LVVVGAVGV (KRAS G12V)
MVVLGVVGL

SEQ ID NO: 61488 - protein, 9 aa, synthetic construct
  source 1..9: note = Seed: LVVVGAVGV (KRAS G12V)
MVVLGVVGM

SEQ ID NO: 61489 - protein, 9 aa, synthetic construct
  source 1..9: note = Seed: LVVVGAVGV (KRAS G12V)
MVVLGVVGN

SEQ ID NO: 61490 - protein, 9 aa, synthetic construct
  source 1..9: note = Seed: LVVVGAVGV (KRAS G12V)
MVVLGVVGQ

SEQ ID NO: 61491 - protein, 9 aa, synthetic construct
  source 1..9: note = Seed: LVVVGAVGV (KRAS G12V)
MVVLGVVGR

SEQ ID NO: 61492 - protein, 9 aa, synthetic construct
  source 1..9: note = Seed: LVVVGAVGV (KRAS G12V)
MVVLGVVGS

SEQ ID NO: 61493 - protein, 9 aa, synthetic construct
  source 1..9: note = Seed: LVVVGAVGV (KRAS G12V)
MVVLGVVGT

SEQ ID NO: 61494 - protein, 9 aa, synthetic construct
  source 1..9: note = Seed: LVVVGAVGV (KRAS G12V)
MVVLGVVGV

SEQ ID NO: 61495 - protein, 9 aa, synthetic construct
  source 1..9: note = Seed: LVVVGAVGV (KRAS G12V)
MVVLGYVGA

SEQ ID NO: 61496 - protein, 9 aa, synthetic construct
  source 1..9: note = Seed: LVVVGAVGV (KRAS G12V)
MVVLGYVGM

SEQ ID NO: 61497 - protein, 9 aa, synthetic construct
  source 1..9: note = Seed: LVVVGAVGV (KRAS G12V)
MVVLGYVGR

SEQ ID NO: 61498 - protein, 9 aa, synthetic construct
  source 1..9: note = Seed: LVVVGAVGV (KRAS G12V)
MVVMGAVGA

SEQ ID NO: 61499 - protein, 9 aa, synthetic construct
  source 1..9: note = Seed: LVVVGAVGV (KRAS G12V)
MVVMGAVGC

SEQ ID NO: 61500 - protein, 9 aa, synthetic construct
  source 1..9: note = Seed: LVVVGAVGV (KRAS G12V)
MVVMGAVGD

SEQ ID NO: 61501 - protein, 9 aa, synthetic construct
  source 1..9: note = Seed: LVVVGAVGV (KRAS G12V)
MVVMGAVGE

SEQ ID NO: 61502 - protein, 9 aa, synthetic construct
  source 1..9: note = Seed: LVVVGAVGV (KRAS G12V)
MVVMGAVGF

SEQ ID NO: 61503 - protein, 9 aa, synthetic construct
  source 1..9: note = Seed: LVVVGAVGV (KRAS G12V)
MVVMGAVGG

SEQ ID NO: 61504 - protein, 9 aa, synthetic construct
  source 1..9: note = Seed: LVVVGAVGV (KRAS G12V)
MVVMGAVGH

SEQ ID NO: 61505 - protein, 9 aa, synthetic construct
  source 1..9: note = Seed: LVVVGAVGV (KRAS G12V)
MVVMGAVGI

SEQ ID NO: 61506 - protein, 9 aa, synthetic construct
  source 1..9: note = Seed: LVVVGAVGV (KRAS G12V)
MVVMGAVGK

SEQ ID NO: 61507 - protein, 9 aa, synthetic construct
  source 1..9: note = Seed: LVVVGAVGV (KRAS G12V)
MVVMGAVGL

SEQ ID NO: 61508 - protein, 9 aa, synthetic construct
  source 1..9: note = Seed: LVVVGAVGV (KRAS G12V)
MVVMGAVGM

SEQ ID NO: 61509 - protein, 9 aa, synthetic construct
  source 1..9: note = Seed: LVVVGAVGV (KRAS G12V)
MVVMGAVGN

SEQ ID NO: 61510 - protein, 9 aa, synthetic construct
  source 1..9: note = Seed: LVVVGAVGV (KRAS G12V)
MVVMGAVGP

SEQ ID NO: 61511 - protein, 9 aa, synthetic construct
  source 1..9: note = Seed: LVVVGAVGV (KRAS G12V)
MVVMGAVGQ

SEQ ID NO: 61512 - protein, 9 aa, synthetic construct
  source 1..9: note = Seed: LVVVGAVGV (KRAS G12V)
MVVMGAVGR

SEQ ID NO: 61513 - protein, 9 aa, synthetic construct
  source 1..9: note = Seed: LVVVGAVGV (KRAS G12V)
MVVMGAVGS

SEQ ID NO: 61514 - protein, 9 aa, synthetic construct
  source 1..9: note = Seed: LVVVGAVGV (KRAS G12V)
MVVMGAVGT

SEQ ID NO: 61515 - protein, 9 aa, synthetic construct
  source 1..9: note = Seed: LVVVGAVGV (KRAS G12V)
MVVMGAVGV

SEQ ID NO: 61516 - protein, 9 aa, synthetic construct
  source 1..9: note = Seed: LVVVGAVGV (KRAS G12V)
MVVMGAVGW

SEQ ID NO: 61517 - protein, 9 aa, synthetic construct
  source 1..9: note = Seed: LVVVGAVGV (KRAS G12V)
MVVMGAVGY

SEQ ID NO: 61518 - protein, 9 aa, synthetic construct
  source 1..9: note = Seed: LVVVGAVGV (KRAS G12V)
MVVMGDVGA

SEQ ID NO: 61519 - protein, 9 aa, synthetic construct
  source 1..9: note = Seed: LVVVGAVGV (KRAS G12V)
MVVMGDVGI

SEQ ID NO: 61520 - protein, 9 aa, synthetic construct
  source 1..9: note = Seed: LVVVGAVGV (KRAS G12V)
MVVMGDVGL

SEQ ID NO: 61521 - protein, 9 aa, synthetic construct
  source 1..9: note = Seed: LVVVGAVGV (KRAS G12V)
MVVMGDVGV

SEQ ID NO: 61522 - protein, 9 aa, synthetic construct
  source 1..9: note = Seed: LVVVGAVGV (KRAS G12V)
MVVMGEVGA

SEQ ID NO: 61523 - protein, 9 aa, synthetic construct
  source 1..9: note = Seed: LVVVGAVGV (KRAS G12V)
MVVMGEVGI

SEQ ID NO: 61524 - protein, 9 aa, synthetic construct
  source 1..9: note = Seed: LVVVGAVGV (KRAS G12V)
MVVMGEVGL

SEQ ID NO: 61525 - protein, 9 aa, synthetic construct
  source 1..9: note = Seed: LVVVGAVGV (KRAS G12V)
MVVMGEVGV

SEQ ID NO: 61526 - protein, 9 aa, synthetic construct
  source 1..9: note = Seed: LVVVGAVGV (KRAS G12V)
MVVMGGVGA

SEQ ID NO: 61527 - protein, 9 aa, synthetic construct
  source 1..9: note = Seed: LVVVGAVGV (KRAS G12V)
MVVMGGVGC

SEQ ID NO: 61528 - protein, 9 aa, synthetic construct
  source 1..9: note = Seed: LVVVGAVGV (KRAS G12V)
MVVMGGVGF

SEQ ID NO: 61529 - protein, 9 aa, synthetic construct
  source 1..9: note = Seed: LVVVGAVGV (KRAS G12V)
MVVMGGVGG

SEQ ID NO: 61530 - protein, 9 aa, synthetic construct
  source 1..9: note = Seed: LVVVGAVGV (KRAS G12V)
MVVMGGVGH

SEQ ID NO: 61531 - protein, 9 aa, synthetic construct
  source 1..9: note = Seed: LVVVGAVGV (KRAS G12V)
MVVMGGVGI

SEQ ID NO: 61532 - protein, 9 aa, synthetic construct
  source 1..9: note = Seed: LVVVGAVGV (KRAS G12V)
MVVMGGVGK

SEQ ID NO: 61533 - protein, 9 aa, synthetic construct
  source 1..9: note = Seed: LVVVGAVGV (KRAS G12V)
MVVMGGVGL

SEQ ID NO: 61534 - protein, 9 aa, synthetic construct
  source 1..9: note = Seed: LVVVGAVGV (KRAS G12V)
MVVMGGVGM

SEQ ID NO: 61535 - protein, 9 aa, synthetic construct
  source 1..9: note = Seed: LVVVGAVGV (KRAS G12V)
MVVMGGVGN

SEQ ID NO: 61536 - protein, 9 aa, synthetic construct
  source 1..9: note = Seed: LVVVGAVGV (KRAS G12V)
MVVMGGVGP

SEQ ID NO: 61537 - protein, 9 aa, synthetic construct
  source 1..9: note = Seed: LVVVGAVGV (KRAS G12V)
MVVMGGVGQ

SEQ ID NO: 61538 - protein, 9 aa, synthetic construct
  source 1..9: note = Seed: LVVVGAVGV (KRAS G12V)
MVVMGGVGR

SEQ ID NO: 61539 - protein, 9 aa, synthetic construct
  source 1..9: note = Seed: LVVVGAVGV (KRAS G12V)
MVVMGGVGS

SEQ ID NO: 61540 - protein, 9 aa, synthetic construct
  source 1..9: note = Seed: LVVVGAVGV (KRAS G12V)
MVVMGGVGT

SEQ ID NO: 61541 - protein, 9 aa, synthetic construct
  source 1..9: note = Seed: LVVVGAVGV (KRAS G12V)
MVVMGGVGV

SEQ ID NO: 61542 - protein, 9 aa, synthetic construct
  source 1..9: note = Seed: LVVVGAVGV (KRAS G12V)
MVVMGGVGY

SEQ ID NO: 61543 - protein, 9 aa, synthetic construct
  source 1..9: note = Seed: LVVVGAVGV (KRAS G12V)
MVVMGHVGA

SEQ ID NO: 61544 - protein, 9 aa, synthetic construct
  source 1..9: note = Seed: LVVVGAVGV (KRAS G12V)
MVVMGHVGF

SEQ ID NO: 61545 - protein, 9 aa, synthetic construct
  source 1..9: note = Seed: LVVVGAVGV (KRAS G12V)
MVVMGHVGG

SEQ ID NO: 61546 - protein, 9 aa, synthetic construct
  source 1..9: note = Seed: LVVVGAVGV (KRAS G12V)
MVVMGHVGH

SEQ ID NO: 61547 - protein, 9 aa, synthetic construct
  source 1..9: note = Seed: LVVVGAVGV (KRAS G12V)
MVVMGHVGI

SEQ ID NO: 61548 - protein, 9 aa, synthetic construct
  source 1..9: note = Seed: LVVVGAVGV (KRAS G12V)
MVVMGHVGK

SEQ ID NO: 61549 - protein, 9 aa, synthetic construct
  source 1..9: note = Seed: LVVVGAVGV (KRAS G12V)
MVVMGHVGL

SEQ ID NO: 61550 - protein, 9 aa, synthetic construct
  source 1..9: note = Seed: LVVVGAVGV (KRAS G12V)
MVVMGHVGM

SEQ ID NO: 61551 - protein, 9 aa, synthetic construct
  source 1..9: note = Seed: LVVVGAVGV (KRAS G12V)
MVVMGHVGN

SEQ ID NO: 61552 - protein, 9 aa, synthetic construct
  source 1..9: note = Seed: LVVVGAVGV (KRAS G12V)
MVVMGHVGQ

SEQ ID NO: 61553 - protein, 9 aa, synthetic construct
  source 1..9: note = Seed: LVVVGAVGV (KRAS G12V)
MVVMGHVGR

SEQ ID NO: 61554 - protein, 9 aa, synthetic construct
  source 1..9: note = Seed: LVVVGAVGV (KRAS G12V)
MVVMGHVGS

SEQ ID NO: 61555 - protein, 9 aa, synthetic construct
  source 1..9: note = Seed: LVVVGAVGV (KRAS G12V)
MVVMGHVGT

SEQ ID NO: 61556 - protein, 9 aa, synthetic construct
  source 1..9: note = Seed: LVVVGAVGV (KRAS G12V)
MVVMGHVGV

SEQ ID NO: 61557 - protein, 9 aa, synthetic construct
  source 1..9: note = Seed: LVVVGAVGV (KRAS G12V)
MVVMGHVGY

SEQ ID NO: 61558 - protein, 9 aa, synthetic construct
  source 1..9: note = Seed: LVVVGAVGV (KRAS G12V)
MVVMGIVGA

SEQ ID NO: 61559 - protein, 9 aa, synthetic construct
  source 1..9: note = Seed: LVVVGAVGV (KRAS G12V)
MVVMGIVGG

SEQ ID NO: 61560 - protein, 9 aa, synthetic construct
  source 1..9: note = Seed: LVVVGAVGV (KRAS G12V)
MVVMGIVGH

SEQ ID NO: 61561 - protein, 9 aa, synthetic construct
  source 1..9: note = Seed: LVVVGAVGV (KRAS G12V)
MVVMGIVGI

SEQ ID NO: 61562 - protein, 9 aa, synthetic construct
  source 1..9: note = Seed: LVVVGAVGV (KRAS G12V)
MVVMGIVGK

SEQ ID NO: 61563 - protein, 9 aa, synthetic construct
  source 1..9: note = Seed: LVVVGAVGV (KRAS G12V)
MVVMGIVGL

SEQ ID NO: 61564 - protein, 9 aa, synthetic construct
  source 1..9: note = Seed: LVVVGAVGV (KRAS G12V)
MVVMGIVGM

SEQ ID NO: 61565 - protein, 9 aa, synthetic construct
  source 1..9: note = Seed: LVVVGAVGV (KRAS G12V)
MVVMGIVGN

SEQ ID NO: 61566 - protein, 9 aa, synthetic construct
  source 1..9: note = Seed: LVVVGAVGV (KRAS G12V)
MVVMGIVGQ

SEQ ID NO: 61567 - protein, 9 aa, synthetic construct
  source 1..9: note = Seed: LVVVGAVGV (KRAS G12V)
MVVMGIVGR

SEQ ID NO: 61568 - protein, 9 aa, synthetic construct
  source 1..9: note = Seed: LVVVGAVGV (KRAS G12V)
MVVMGIVGS

SEQ ID NO: 61569 - protein, 9 aa, synthetic construct
  source 1..9: note = Seed: LVVVGAVGV (KRAS G12V)
MVVMGIVGT

SEQ ID NO: 61570 - protein, 9 aa, synthetic construct
  source 1..9: note = Seed: LVVVGAVGV (KRAS G12V)
MVVMGIVGV

SEQ ID NO: 61571 - protein, 9 aa, synthetic construct
  source 1..9: note = Seed: LVVVGAVGV (KRAS G12V)
MVVMGIVGY

SEQ ID NO: 61572 - protein, 9 aa, synthetic construct
  source 1..9: note = Seed: LVVVGAVGV (KRAS G12V)
MVVMGKVGA

SEQ ID NO: 61573 - protein, 9 aa, synthetic construct
  source 1..9: note = Seed: LVVVGAVGV (KRAS G12V)
MVVMGKVGF

SEQ ID NO: 61574 - protein, 9 aa, synthetic construct
  source 1..9: note = Seed: LVVVGAVGV (KRAS G12V)
MVVMGKVGG

SEQ ID NO: 61575 - protein, 9 aa, synthetic construct
  source 1..9: note = Seed: LVVVGAVGV (KRAS G12V)
MVVMGKVGH

SEQ ID NO: 61576 - protein, 9 aa, synthetic construct
  source 1..9: note = Seed: LVVVGAVGV (KRAS G12V)
MVVMGKVGI

SEQ ID NO: 61577 - protein, 9 aa, synthetic construct
  source 1..9: note = Seed: LVVVGAVGV (KRAS G12V)
MVVMGKVGK

SEQ ID NO: 61578 - protein, 9 aa, synthetic construct
  source 1..9: note = Seed: LVVVGAVGV (KRAS G12V)
MVVMGKVGL

SEQ ID NO: 61579 - protein, 9 aa, synthetic construct
  source 1..9: note = Seed: LVVVGAVGV (KRAS G12V)
MVVMGKVGM

SEQ ID NO: 61580 - protein, 9 aa, synthetic construct
  source 1..9: note = Seed: LVVVGAVGV (KRAS G12V)
MVVMGKVGN

SEQ ID NO: 61581 - protein, 9 aa, synthetic construct
  source 1..9: note = Seed: LVVVGAVGV (KRAS G12V)
MVVMGKVGP

SEQ ID NO: 61582 - protein, 9 aa, synthetic construct
  source 1..9: note = Seed: LVVVGAVGV (KRAS G12V)
MVVMGKVGQ

SEQ ID NO: 61583 - protein, 9 aa, synthetic construct
  source 1..9: note = Seed: LVVVGAVGV (KRAS G12V)
MVVMGKVGR

SEQ ID NO: 61584 - protein, 9 aa, synthetic construct
  source 1..9: note = Seed: LVVVGAVGV (KRAS G12V)
MVVMGKVGS

SEQ ID NO: 61585 - protein, 9 aa, synthetic construct
  source 1..9: note = Seed: LVVVGAVGV (KRAS G12V)
MVVMGKVGT

SEQ ID NO: 61586 - protein, 9 aa, synthetic construct
  source 1..9: note = Seed: LVVVGAVGV (KRAS G12V)
MVVMGKVGV

SEQ ID NO: 61587 - protein, 9 aa, synthetic construct
  source 1..9: note = Seed: LVVVGAVGV (KRAS G12V)
MVVMGKVGY

SEQ ID NO: 61588 - protein, 9 aa, synthetic construct
  source 1..9: note = Seed: LVVVGAVGV (KRAS G12V)
MVVMGLVGA

SEQ ID NO: 61589 - protein, 9 aa, synthetic construct
  source 1..9: note = Seed: LVVVGAVGV (KRAS G12V)
MVVMGLVGG

SEQ ID NO: 61590 - protein, 9 aa, synthetic construct
  source 1..9: note = Seed: LVVVGAVGV (KRAS G12V)
MVVMGLVGH

SEQ ID NO: 61591 - protein, 9 aa, synthetic construct
  source 1..9: note = Seed: LVVVGAVGV (KRAS G12V)
MVVMGLVGI

SEQ ID NO: 61592 - protein, 9 aa, synthetic construct
  source 1..9: note = Seed: LVVVGAVGV (KRAS G12V)
MVVMGLVGK

SEQ ID NO: 61593 - protein, 9 aa, synthetic construct
  source 1..9: note = Seed: LVVVGAVGV (KRAS G12V)
MVVMGLVGL

SEQ ID NO: 61594 - protein, 9 aa, synthetic construct
  source 1..9: note = Seed: LVVVGAVGV (KRAS G12V)
MVVMGLVGM

SEQ ID NO: 61595 - protein, 9 aa, synthetic construct
  source 1..9: note = Seed: LVVVGAVGV (KRAS G12V)
MVVMGLVGN

SEQ ID NO: 61596 - protein, 9 aa, synthetic construct
  source 1..9: note = Seed: LVVVGAVGV (KRAS G12V)
MVVMGLVGQ

SEQ ID NO: 61597 - protein, 9 aa, synthetic construct
  source 1..9: note = Seed: LVVVGAVGV (KRAS G12V)
MVVMGLVGR

SEQ ID NO: 61598 - protein, 9 aa, synthetic construct
  source 1..9: note = Seed: LVVVGAVGV (KRAS G12V)
MVVMGLVGS

SEQ ID NO: 61599 - protein, 9 aa, synthetic construct
  source 1..9: note = Seed: LVVVGAVGV (KRAS G12V)
MVVMGLVGT

SEQ ID NO: 61600 - protein, 9 aa, synthetic construct
  source 1..9: note = Seed: LVVVGAVGV (KRAS G12V)
MVVMGLVGV

SEQ ID NO: 61601 - protein, 9 aa, synthetic construct
  source 1..9: note = Seed: LVVVGAVGV (KRAS G12V)
MVVMGLVGY

SEQ ID NO: 61602 - protein, 9 aa, synthetic construct
  source 1..9: note = Seed: LVVVGAVGV (KRAS G12V)
MVVMGMVGA

SEQ ID NO: 61603 - protein, 9 aa, synthetic construct
  source 1..9: note = Seed: LVVVGAVGV (KRAS G12V)
MVVMGMVGC

SEQ ID NO: 61604 - protein, 9 aa, synthetic construct
  source 1..9: note = Seed: LVVVGAVGV (KRAS G12V)
MVVMGMVGE

SEQ ID NO: 61605 - protein, 9 aa, synthetic construct
  source 1..9: note = Seed: LVVVGAVGV (KRAS G12V)
MVVMGMVGG

SEQ ID NO: 61606 - protein, 9 aa, synthetic construct
  source 1..9: note = Seed: LVVVGAVGV (KRAS G12V)
MVVMGMVGH

SEQ ID NO: 61607 - protein, 9 aa, synthetic construct
  source 1..9: note = Seed: LVVVGAVGV (KRAS G12V)
MVVMGMVGI

SEQ ID NO: 61608 - protein, 9 aa, synthetic construct
  source 1..9: note = Seed: LVVVGAVGV (KRAS G12V)
MVVMGMVGL

SEQ ID NO: 61609 - protein, 9 aa, synthetic construct
  source 1..9: note = Seed: LVVVGAVGV (KRAS G12V)
MVVMGMVGM

SEQ ID NO: 61610 - protein, 9 aa, synthetic construct
  source 1..9: note = Seed: LVVVGAVGV (KRAS G12V)
MVVMGMVGN

SEQ ID NO: 61611 - protein, 9 aa, synthetic construct
  source 1..9: note = Seed: LVVVGAVGV (KRAS G12V)
MVVMGMVGQ

SEQ ID NO: 61612 - protein, 9 aa, synthetic construct
  source 1..9: note = Seed: LVVVGAVGV (KRAS G12V)
MVVMGMVGR

SEQ ID NO: 61613 - protein, 9 aa, synthetic construct
  source 1..9: note = Seed: LVVVGAVGV (KRAS G12V)
MVVMGMVGS

SEQ ID NO: 61614 - protein, 9 aa, synthetic construct
  source 1..9: note = Seed: LVVVGAVGV (KRAS G12V)
MVVMGMVGT

SEQ ID NO: 61615 - protein, 9 aa, synthetic construct
  source 1..9: note = Seed: LVVVGAVGV (KRAS G12V)
MVVMGMVGV

SEQ ID NO: 61616 - protein, 9 aa, synthetic construct
  source 1..9: note = Seed: LVVVGAVGV (KRAS G12V)
MVVMGMVGY

SEQ ID NO: 61617 - protein, 9 aa, synthetic construct
  source 1..9: note = Seed: LVVVGAVGV (KRAS G12V)
MVVMGNVGA

SEQ ID NO: 61618 - protein, 9 aa, synthetic construct
  source 1..9: note = Seed: LVVVGAVGV (KRAS G12V)
MVVMGNVGC

SEQ ID NO: 61619 - protein, 9 aa, synthetic construct
  source 1..9: note = Seed: LVVVGAVGV (KRAS G12V)
MVVMGNVGF

SEQ ID NO: 61620 - protein, 9 aa, synthetic construct
  source 1..9: note = Seed: LVVVGAVGV (KRAS G12V)
MVVMGNVGG

SEQ ID NO: 61621 - protein, 9 aa, synthetic construct
  source 1..9: note = Seed: LVVVGAVGV (KRAS G12V)
MVVMGNVGH

SEQ ID NO: 61622 - protein, 9 aa, synthetic construct
  source 1..9: note = Seed: LVVVGAVGV (KRAS G12V)
MVVMGNVGI

SEQ ID NO: 61623 - protein, 9 aa, synthetic construct
  source 1..9: note = Seed: LVVVGAVGV (KRAS G12V)
MVVMGNVGK

SEQ ID NO: 61624 - protein, 9 aa, synthetic construct
  source 1..9: note = Seed: LVVVGAVGV (KRAS G12V)
MVVMGNVGL

SEQ ID NO: 61625 - protein, 9 aa, synthetic construct
  source 1..9: note = Seed: LVVVGAVGV (KRAS G12V)
MVVMGNVGM

SEQ ID NO: 61626 - protein, 9 aa, synthetic construct
  source 1..9: note = Seed: LVVVGAVGV (KRAS G12V)
MVVMGNVGN

SEQ ID NO: 61627 - protein, 9 aa, synthetic construct
  source 1..9: note = Seed: LVVVGAVGV (KRAS G12V)
MVVMGNVGP

SEQ ID NO: 61628 - protein, 9 aa, synthetic construct
  source 1..9: note = Seed: LVVVGAVGV (KRAS G12V)
MVVMGNVGQ

SEQ ID NO: 61629 - protein, 9 aa, synthetic construct
  source 1..9: note = Seed: LVVVGAVGV (KRAS G12V)
MVVMGNVGR

SEQ ID NO: 61630 - protein, 9 aa, synthetic construct
  source 1..9: note = Seed: LVVVGAVGV (KRAS G12V)
MVVMGNVGS

SEQ ID NO: 61631 - protein, 9 aa, synthetic construct
  source 1..9: note = Seed: LVVVGAVGV (KRAS G12V)
MVVMGNVGT

SEQ ID NO: 61632 - protein, 9 aa, synthetic construct
  source 1..9: note = Seed: LVVVGAVGV (KRAS G12V)
MVVMGNVGV

SEQ ID NO: 61633 - protein, 9 aa, synthetic construct
  source 1..9: note = Seed: LVVVGAVGV (KRAS G12V)
MVVMGNVGY

SEQ ID NO: 61634 - protein, 9 aa, synthetic construct
  source 1..9: note = Seed: LVVVGAVGV (KRAS G12V)
MVVMGPVGA

SEQ ID NO: 61635 - protein, 9 aa, synthetic construct
  source 1..9: note = Seed: LVVVGAVGV (KRAS G12V)
MVVMGPVGC

SEQ ID NO: 61636 - protein, 9 aa, synthetic construct
  source 1..9: note = Seed: LVVVGAVGV (KRAS G12V)
MVVMGPVGD

SEQ ID NO: 61637 - protein, 9 aa, synthetic construct
  source 1..9: note = Seed: LVVVGAVGV (KRAS G12V)
MVVMGPVGE

SEQ ID NO: 61638 - protein, 9 aa, synthetic construct
  source 1..9: note = Seed: LVVVGAVGV (KRAS G12V)
MVVMGPVGF

SEQ ID NO: 61639 - protein, 9 aa, synthetic construct
  source 1..9: note = Seed: LVVVGAVGV (KRAS G12V)
MVVMGPVGG

SEQ ID NO: 61640 - protein, 9 aa, synthetic construct
  source 1..9: note = Seed: LVVVGAVGV (KRAS G12V)
MVVMGPVGH

SEQ ID NO: 61641 - protein, 9 aa, synthetic construct
  source 1..9: note = Seed: LVVVGAVGV (KRAS G12V)
MVVMGPVGI

SEQ ID NO: 61642 - protein, 9 aa, synthetic construct
  source 1..9: note = Seed: LVVVGAVGV (KRAS G12V)
MVVMGPVGK

SEQ ID NO: 61643 - protein, 9 aa, synthetic construct
  source 1..9: note = Seed: LVVVGAVGV (KRAS G12V)
MVVMGPVGL

SEQ ID NO: 61644 - protein, 9 aa, synthetic construct
  source 1..9: note = Seed: LVVVGAVGV (KRAS G12V)
MVVMGPVGM

SEQ ID NO: 61645 - protein, 9 aa, synthetic construct
  source 1..9: note = Seed: LVVVGAVGV (KRAS G12V)
MVVMGPVGN

SEQ ID NO: 61646 - protein, 9 aa, synthetic construct
  source 1..9: note = Seed: LVVVGAVGV (KRAS G12V)
MVVMGPVGP

SEQ ID NO: 61647 - protein, 9 aa, synthetic construct
  source 1..9: note = Seed: LVVVGAVGV (KRAS G12V)
MVVMGPVGQ

SEQ ID NO: 61648 - protein, 9 aa, synthetic construct
  source 1..9: note = Seed: LVVVGAVGV (KRAS G12V)
MVVMGPVGR

SEQ ID NO: 61649 - protein, 9 aa, synthetic construct
  source 1..9: note = Seed: LVVVGAVGV (KRAS G12V)
MVVMGPVGS

SEQ ID NO: 61650 - protein, 9 aa, synthetic construct
  source 1..9: note = Seed: LVVVGAVGV (KRAS G12V)
MVVMGPVGT

SEQ ID NO: 61651 - protein, 9 aa, synthetic construct
  source 1..9: note = Seed: LVVVGAVGV (KRAS G12V)
MVVMGPVGV

SEQ ID NO: 61652 - protein, 9 aa, synthetic construct
  source 1..9: note = Seed: LVVVGAVGV (KRAS G12V)
MVVMGPVGW

SEQ ID NO: 61653 - protein, 9 aa, synthetic construct
  source 1..9: note = Seed: LVVVGAVGV (KRAS G12V)
MVVMGPVGY

SEQ ID NO: 61654 - protein, 9 aa, synthetic construct
  source 1..9: note = Seed: LVVVGAVGV (KRAS G12V)
MVVMGQVGA

SEQ ID NO: 61655 - protein, 9 aa, synthetic construct
  source 1..9: note = Seed: LVVVGAVGV (KRAS G12V)
MVVMGQVGI

SEQ ID NO: 61656 - protein, 9 aa, synthetic construct
  source 1..9: note = Seed: LVVVGAVGV (KRAS G12V)
MVVMGQVGL

SEQ ID NO: 61657 - protein, 9 aa, synthetic construct
  source 1..9: note = Seed: LVVVGAVGV (KRAS G12V)
MVVMGQVGM

SEQ ID NO: 61658 - protein, 9 aa, synthetic construct
  source 1..9: note = Seed: LVVVGAVGV (KRAS G12V)
MVVMGQVGS

SEQ ID NO: 61659 - protein, 9 aa, synthetic construct
  source 1..9: note = Seed: LVVVGAVGV (KRAS G12V)
MVVMGQVGT

SEQ ID NO: 61660 - protein, 9 aa, synthetic construct
  source 1..9: note = Seed: LVVVGAVGV (KRAS G12V)
MVVMGQVGV

SEQ ID NO: 61661 - protein, 9 aa, synthetic construct
  source 1..9: note = Seed: LVVVGAVGV (KRAS G12V)
MVVMGRVGA

SEQ ID NO: 61662 - protein, 9 aa, synthetic construct
  source 1..9: note = Seed: LVVVGAVGV (KRAS G12V)
MVVMGRVGC

SEQ ID NO: 61663 - protein, 9 aa, synthetic construct
  source 1..9: note = Seed: LVVVGAVGV (KRAS G12V)
MVVMGRVGE

SEQ ID NO: 61664 - protein, 9 aa, synthetic construct
  source 1..9: note = Seed: LVVVGAVGV (KRAS G12V)
MVVMGRVGF

SEQ ID NO: 61665 - protein, 9 aa, synthetic construct
  source 1..9: note = Seed: LVVVGAVGV (KRAS G12V)
MVVMGRVGG

SEQ ID NO: 61666 - protein, 9 aa, synthetic construct
  source 1..9: note = Seed: LVVVGAVGV (KRAS G12V)
MVVMGRVGH

SEQ ID NO: 61667 - protein, 9 aa, synthetic construct
  source 1..9: note = Seed: LVVVGAVGV (KRAS G12V)
MVVMGRVGI

SEQ ID NO: 61668 - protein, 9 aa, synthetic construct
  source 1..9: note = Seed: LVVVGAVGV (KRAS G12V)
MVVMGRVGK

SEQ ID NO: 61669 - protein, 9 aa, synthetic construct
  source 1..9: note = Seed: LVVVGAVGV (KRAS G12V)
MVVMGRVGL

SEQ ID NO: 61670 - protein, 9 aa, synthetic construct
  source 1..9: note = Seed: LVVVGAVGV (KRAS G12V)
MVVMGRVGM

SEQ ID NO: 61671 - protein, 9 aa, synthetic construct
  source 1..9: note = Seed: LVVVGAVGV (KRAS G12V)
MVVMGRVGN

SEQ ID NO: 61672 - protein, 9 aa, synthetic construct
  source 1..9: note = Seed: LVVVGAVGV (KRAS G12V)
MVVMGRVGP

SEQ ID NO: 61673 - protein, 9 aa, synthetic construct
  source 1..9: note = Seed: LVVVGAVGV (KRAS G12V)
MVVMGRVGQ

SEQ ID NO: 61674 - protein, 9 aa, synthetic construct
  source 1..9: note = Seed: LVVVGAVGV (KRAS G12V)
MVVMGRVGR

SEQ ID NO: 61675 - protein, 9 aa, synthetic construct
  source 1..9: note = Seed: LVVVGAVGV (KRAS G12V)
MVVMGRVGS

SEQ ID NO: 61676 - protein, 9 aa, synthetic construct
  source 1..9: note = Seed: LVVVGAVGV (KRAS G12V)
MVVMGRVGT

SEQ ID NO: 61677 - protein, 9 aa, synthetic construct
  source 1..9: note = Seed: LVVVGAVGV (KRAS G12V)
MVVMGRVGV

SEQ ID NO: 61678 - protein, 9 aa, synthetic construct
  source 1..9: note = Seed: LVVVGAVGV (KRAS G12V)
MVVMGRVGW

SEQ ID NO: 61679 - protein, 9 aa, synthetic construct
  source 1..9: note = Seed: LVVVGAVGV (KRAS G12V)
MVVMGRVGY

SEQ ID NO: 61680 - protein, 9 aa, synthetic construct
  source 1..9: note = Seed: LVVVGAVGV (KRAS G12V)
MVVMGSVGA

SEQ ID NO: 61681 - protein, 9 aa, synthetic construct
  source 1..9: note = Seed: LVVVGAVGV (KRAS G12V)
MVVMGSVGC

SEQ ID NO: 61682 - protein, 9 aa, synthetic construct
  source 1..9: note = Seed: LVVVGAVGV (KRAS G12V)
MVVMGSVGF

SEQ ID NO: 61683 - protein, 9 aa, synthetic construct
  source 1..9: note = Seed: LVVVGAVGV (KRAS G12V)
MVVMGSVGG

SEQ ID NO: 61684 - protein, 9 aa, synthetic construct
  source 1..9: note = Seed: LVVVGAVGV (KRAS G12V)
MVVMGSVGH

SEQ ID NO: 61685 - protein, 9 aa, synthetic construct
  source 1..9: note = Seed: LVVVGAVGV (KRAS G12V)
MVVMGSVGI

SEQ ID NO: 61686 - protein, 9 aa, synthetic construct
  source 1..9: note = Seed: LVVVGAVGV (KRAS G12V)
MVVMGSVGK

SEQ ID NO: 61687 - protein, 9 aa, synthetic construct
  source 1..9: note = Seed: LVVVGAVGV (KRAS G12V)
MVVMGSVGL

SEQ ID NO: 61688 - protein, 9 aa, synthetic construct
  source 1..9: note = Seed: LVVVGAVGV (KRAS G12V)
MVVMGSVGM

SEQ ID NO: 61689 - protein, 9 aa, synthetic construct
  source 1..9: note = Seed: LVVVGAVGV (KRAS G12V)
MVVMGSVGN

SEQ ID NO: 61690 - protein, 9 aa, synthetic construct
  source 1..9: note = Seed: LVVVGAVGV (KRAS G12V)
MVVMGSVGP

SEQ ID NO: 61691 - protein, 9 aa, synthetic construct
  source 1..9: note = Seed: LVVVGAVGV (KRAS G12V)
MVVMGSVGQ

SEQ ID NO: 61692 - protein, 9 aa, synthetic construct
  source 1..9: note = Seed: LVVVGAVGV (KRAS G12V)
MVVMGSVGR

SEQ ID NO: 61693 - protein, 9 aa, synthetic construct
  source 1..9: note = Seed: LVVVGAVGV (KRAS G12V)
MVVMGSVGS

SEQ ID NO: 61694 - protein, 9 aa, synthetic construct
  source 1..9: note = Seed: LVVVGAVGV (KRAS G12V)
MVVMGSVGT

SEQ ID NO: 61695 - protein, 9 aa, synthetic construct
  source 1..9: note = Seed: LVVVGAVGV (KRAS G12V)
MVVMGSVGV

SEQ ID NO: 61696 - protein, 9 aa, synthetic construct
  source 1..9: note = Seed: LVVVGAVGV (KRAS G12V)
MVVMGSVGY

SEQ ID NO: 61697 - protein, 9 aa, synthetic construct
  source 1..9: note = Seed: LVVVGAVGV (KRAS G12V)
MVVMGTVGA

SEQ ID NO: 61698 - protein, 9 aa, synthetic construct
  source 1..9: note = Seed: LVVVGAVGV (KRAS G12V)
MVVMGTVGC

SEQ ID NO: 61699 - protein, 9 aa, synthetic construct
  source 1..9: note = Seed: LVVVGAVGV (KRAS G12V)
MVVMGTVGF

SEQ ID NO: 61700 - protein, 9 aa, synthetic construct
  source 1..9: note = Seed: LVVVGAVGV (KRAS G12V)
MVVMGTVGG

SEQ ID NO: 61701 - protein, 9 aa, synthetic construct
  source 1..9: note = Seed: LVVVGAVGV (KRAS G12V)
MVVMGTVGH

SEQ ID NO: 61702 - protein, 9 aa, synthetic construct
  source 1..9: note = Seed: LVVVGAVGV (KRAS G12V)
MVVMGTVGI

SEQ ID NO: 61703 - protein, 9 aa, synthetic construct
  source 1..9: note = Seed: LVVVGAVGV (KRAS G12V)
MVVMGTVGK

SEQ ID NO: 61704 - protein, 9 aa, synthetic construct
  source 1..9: note = Seed: LVVVGAVGV (KRAS G12V)
MVVMGTVGL

SEQ ID NO: 61705 - protein, 9 aa, synthetic construct
  source 1..9: note = Seed: LVVVGAVGV (KRAS G12V)
MVVMGTVGM

SEQ ID NO: 61706 - protein, 9 aa, synthetic construct
  source 1..9: note = Seed: LVVVGAVGV (KRAS G12V)
MVVMGTVGN

SEQ ID NO: 61707 - protein, 9 aa, synthetic construct
  source 1..9: note = Seed: LVVVGAVGV (KRAS G12V)
MVVMGTVGP

SEQ ID NO: 61708 - protein, 9 aa, synthetic construct
  source 1..9: note = Seed: LVVVGAVGV (KRAS G12V)
MVVMGTVGQ

SEQ ID NO: 61709 - protein, 9 aa, synthetic construct
  source 1..9: note = Seed: LVVVGAVGV (KRAS G12V)
MVVMGTVGR

SEQ ID NO: 61710 - protein, 9 aa, synthetic construct
  source 1..9: note = Seed: LVVVGAVGV (KRAS G12V)
MVVMGTVGS

SEQ ID NO: 61711 - protein, 9 aa, synthetic construct
  source 1..9: note = Seed: LVVVGAVGV (KRAS G12V)
MVVMGTVGT

SEQ ID NO: 61712 - protein, 9 aa, synthetic construct
  source 1..9: note = Seed: LVVVGAVGV (KRAS G12V)
MVVMGTVGV

SEQ ID NO: 61713 - protein, 9 aa, synthetic construct
  source 1..9: note = Seed: LVVVGAVGV (KRAS G12V)
MVVMGTVGY

SEQ ID NO: 61714 - protein, 9 aa, synthetic construct
  source 1..9: note = Seed: LVVVGAVGV (KRAS G12V)
MVVMGVVGA

SEQ ID NO: 61715 - protein, 9 aa, synthetic construct
  source 1..9: note = Seed: LVVVGAVGV (KRAS G12V)
MVVMGVVGG

SEQ ID NO: 61716 - protein, 9 aa, synthetic construct
  source 1..9: note = Seed: LVVVGAVGV (KRAS G12V)
MVVMGVVGH

SEQ ID NO: 61717 - protein, 9 aa, synthetic construct
  source 1..9: note = Seed: LVVVGAVGV (KRAS G12V)
MVVMGVVGI

SEQ ID NO: 61718 - protein, 9 aa, synthetic construct
  source 1..9: note = Seed: LVVVGAVGV (KRAS G12V)
MVVMGVVGK

SEQ ID NO: 61719 - protein, 9 aa, synthetic construct
  source 1..9: note = Seed: LVVVGAVGV (KRAS G12V)
MVVMGVVGL

SEQ ID NO: 61720 - protein, 9 aa, synthetic construct
  source 1..9: note = Seed: LVVVGAVGV (KRAS G12V)
MVVMGVVGM

SEQ ID NO: 61721 - protein, 9 aa, synthetic construct
  source 1..9: note = Seed: LVVVGAVGV (KRAS G12V)
MVVMGVVGN

SEQ ID NO: 61722 - protein, 9 aa, synthetic construct
  source 1..9: note = Seed: LVVVGAVGV (KRAS G12V)
MVVMGVVGP

SEQ ID NO: 61723 - protein, 9 aa, synthetic construct
  source 1..9: note = Seed: LVVVGAVGV (KRAS G12V)
MVVMGVVGQ

SEQ ID NO: 61724 - protein, 9 aa, synthetic construct
  source 1..9: note = Seed: LVVVGAVGV (KRAS G12V)
MVVMGVVGR

SEQ ID NO: 61725 - protein, 9 aa, synthetic construct
  source 1..9: note = Seed: LVVVGAVGV (KRAS G12V)
MVVMGVVGS

SEQ ID NO: 61726 - protein, 9 aa, synthetic construct
  source 1..9: note = Seed: LVVVGAVGV (KRAS G12V)
MVVMGVVGT

SEQ ID NO: 61727 - protein, 9 aa, synthetic construct
  source 1..9: note = Seed: LVVVGAVGV (KRAS G12V)
MVVMGVVGV

SEQ ID NO: 61728 - protein, 9 aa, synthetic construct
  source 1..9: note = Seed: LVVVGAVGV (KRAS G12V)
MVVMGVVGY

SEQ ID NO: 61729 - protein, 9 aa, synthetic construct
  source 1..9: note = Seed: LVVVGAVGV (KRAS G12V)
MVVMGYVGA

SEQ ID NO: 61730 - protein, 9 aa, synthetic construct
  source 1..9: note = Seed: LVVVGAVGV (KRAS G12V)
MVVMGYVGI

SEQ ID NO: 61731 - protein, 9 aa, synthetic construct
  source 1..9: note = Seed: LVVVGAVGV (KRAS G12V)
MVVMGYVGL

SEQ ID NO: 61732 - protein, 9 aa, synthetic construct
  source 1..9: note = Seed: LVVVGAVGV (KRAS G12V)
MVVMGYVGM

SEQ ID NO: 61733 - protein, 9 aa, synthetic construct
  source 1..9: note = Seed: LVVVGAVGV (KRAS G12V)
MVVMGYVGR

SEQ ID NO: 61734 - protein, 9 aa, synthetic construct
  source 1..9: note = Seed: LVVVGAVGV (KRAS G12V)
MVVMGYVGS

SEQ ID NO: 61735 - protein, 9 aa, synthetic construct
  source 1..9: note = Seed: LVVVGAVGV (KRAS G12V)
MVVMGYVGV

SEQ ID NO: 61736 - protein, 9 aa, synthetic construct
  source 1..9: note = Seed: LVVVGAVGV (KRAS G12V)
MVVNGAVGA

SEQ ID NO: 61737 - protein, 9 aa, synthetic construct
  source 1..9: note = Seed: LVVVGAVGV (KRAS G12V)
MVVNGAVGC

SEQ ID NO: 61738 - protein, 9 aa, synthetic construct
  source 1..9: note = Seed: LVVVGAVGV (KRAS G12V)
MVVNGAVGF

SEQ ID NO: 61739 - protein, 9 aa, synthetic construct
  source 1..9: note = Seed: LVVVGAVGV (KRAS G12V)
MVVNGAVGG

SEQ ID NO: 61740 - protein, 9 aa, synthetic construct
  source 1..9: note = Seed: LVVVGAVGV (KRAS G12V)
MVVNGAVGH

SEQ ID NO: 61741 - protein, 9 aa, synthetic construct
  source 1..9: note = Seed: LVVVGAVGV (KRAS G12V)
MVVNGAVGI

SEQ ID NO: 61742 - protein, 9 aa, synthetic construct
  source 1..9: note = Seed: LVVVGAVGV (KRAS G12V)
MVVNGAVGL

SEQ ID NO: 61743 - protein, 9 aa, synthetic construct
  source 1..9: note = Seed: LVVVGAVGV (KRAS G12V)
MVVNGAVGM

SEQ ID NO: 61744 - protein, 9 aa, synthetic construct
  source 1..9: note = Seed: LVVVGAVGV (KRAS G12V)
MVVNGAVGN

SEQ ID NO: 61745 - protein, 9 aa, synthetic construct
  source 1..9: note = Seed: LVVVGAVGV (KRAS G12V)
MVVNGAVGQ

SEQ ID NO: 61746 - protein, 9 aa, synthetic construct
  source 1..9: note = Seed: LVVVGAVGV (KRAS G12V)
MVVNGAVGS

SEQ ID NO: 61747 - protein, 9 aa, synthetic construct
  source 1..9: note = Seed: LVVVGAVGV (KRAS G12V)
MVVNGAVGT

SEQ ID NO: 61748 - protein, 9 aa, synthetic construct
  source 1..9: note = Seed: LVVVGAVGV (KRAS G12V)
MVVNGAVGV

SEQ ID NO: 61749 - protein, 9 aa, synthetic construct
  source 1..9: note = Seed: LVVVGAVGV (KRAS G12V)
MVVNGAVGW

SEQ ID NO: 61750 - protein, 9 aa, synthetic construct
  source 1..9: note = Seed: LVVVGAVGV (KRAS G12V)
MVVNGAVGY

SEQ ID NO: 61751 - protein, 9 aa, synthetic construct
  source 1..9: note = Seed: LVVVGAVGV (KRAS G12V)
MVVNGCVGA

SEQ ID NO: 61752 - protein, 9 aa, synthetic construct
  source 1..9: note = Seed: LVVVGAVGV (KRAS G12V)
MVVNGCVGF

SEQ ID NO: 61753 - protein, 9 aa, synthetic construct
  source 1..9: note = Seed: LVVVGAVGV (KRAS G12V)
MVVNGCVGI

SEQ ID NO: 61754 - protein, 9 aa, synthetic construct
  source 1..9: note = Seed: LVVVGAVGV (KRAS G12V)
MVVNGCVGL

SEQ ID NO: 61755 - protein, 9 aa, synthetic construct
  source 1..9: note = Seed: LVVVGAVGV (KRAS G12V)
MVVNGCVGM

SEQ ID NO: 61756 - protein, 9 aa, synthetic construct
  source 1..9: note = Seed: LVVVGAVGV (KRAS G12V)
MVVNGCVGV

SEQ ID NO: 61757 - protein, 9 aa, synthetic construct
  source 1..9: note = Seed: LVVVGAVGV (KRAS G12V)
MVVNGDVGF

SEQ ID NO: 61758 - protein, 9 aa, synthetic construct
  source 1..9: note = Seed: LVVVGAVGV (KRAS G12V)
MVVNGDVGI

SEQ ID NO: 61759 - protein, 9 aa, synthetic construct
  source 1..9: note = Seed: LVVVGAVGV (KRAS G12V)
MVVNGDVGL

SEQ ID NO: 61760 - protein, 9 aa, synthetic construct
  source 1..9: note = Seed: LVVVGAVGV (KRAS G12V)
MVVNGDVGV

SEQ ID NO: 61761 - protein, 9 aa, synthetic construct
  source 1..9: note = Seed: LVVVGAVGV (KRAS G12V)
MVVNGEVGI

SEQ ID NO: 61762 - protein, 9 aa, synthetic construct
  source 1..9: note = Seed: LVVVGAVGV (KRAS G12V)
MVVNGEVGV

SEQ ID NO: 61763 - protein, 9 aa, synthetic construct
  source 1..9: note = Seed: LVVVGAVGV (KRAS G12V)
MVVNGFVGF

SEQ ID NO: 61764 - protein, 9 aa, synthetic construct
  source 1..9: note = Seed: LVVVGAVGV (KRAS G12V)
MVVNGFVGI

SEQ ID NO: 61765 - protein, 9 aa, synthetic construct
  source 1..9: note = Seed: LVVVGAVGV (KRAS G12V)
MVVNGFVGL

SEQ ID NO: 61766 - protein, 9 aa, synthetic construct
  source 1..9: note = Seed: LVVVGAVGV (KRAS G12V)
MVVNGFVGV

SEQ ID NO: 61767 - protein, 9 aa, synthetic construct
  source 1..9: note = Seed: LVVVGAVGV (KRAS G12V)
MVVNGGVGA

SEQ ID NO: 61768 - protein, 9 aa, synthetic construct
  source 1..9: note = Seed: LVVVGAVGV (KRAS G12V)
MVVNGGVGC

SEQ ID NO: 61769 - protein, 9 aa, synthetic construct
  source 1..9: note = Seed: LVVVGAVGV (KRAS G12V)
MVVNGGVGF

SEQ ID NO: 61770 - protein, 9 aa, synthetic construct
  source 1..9: note = Seed: LVVVGAVGV (KRAS G12V)
MVVNGGVGG

SEQ ID NO: 61771 - protein, 9 aa, synthetic construct
  source 1..9: note = Seed: LVVVGAVGV (KRAS G12V)
MVVNGGVGI

SEQ ID NO: 61772 - protein, 9 aa, synthetic construct
  source 1..9: note = Seed: LVVVGAVGV (KRAS G12V)
MVVNGGVGL

SEQ ID NO: 61773 - protein, 9 aa, synthetic construct
  source 1..9: note = Seed: LVVVGAVGV (KRAS G12V)
MVVNGGVGM

SEQ ID NO: 61774 - protein, 9 aa, synthetic construct
  source 1..9: note = Seed: LVVVGAVGV (KRAS G12V)
MVVNGGVGS

SEQ ID NO: 61775 - protein, 9 aa, synthetic construct
  source 1..9: note = Seed: LVVVGAVGV (KRAS G12V)
MVVNGGVGT

SEQ ID NO: 61776 - protein, 9 aa, synthetic construct
  source 1..9: note = Seed: LVVVGAVGV (KRAS G12V)
MVVNGGVGV

SEQ ID NO: 61777 - protein, 9 aa, synthetic construct
  source 1..9: note = Seed: LVVVGAVGV (KRAS G12V)
MVVNGGVGY

SEQ ID NO: 61778 - protein, 9 aa, synthetic construct
  source 1..9: note = Seed: LVVVGAVGV (KRAS G12V)
MVVNGHVGA

SEQ ID NO: 61779 - protein, 9 aa, synthetic construct
  source 1..9: note = Seed: LVVVGAVGV (KRAS G12V)
MVVNGHVGF

SEQ ID NO: 61780 - protein, 9 aa, synthetic construct
  source 1..9: note = Seed: LVVVGAVGV (KRAS G12V)
MVVNGHVGI

SEQ ID NO: 61781 - protein, 9 aa, synthetic construct
  source 1..9: note = Seed: LVVVGAVGV (KRAS G12V)
MVVNGHVGL

SEQ ID NO: 61782 - protein, 9 aa, synthetic construct
  source 1..9: note = Seed: LVVVGAVGV (KRAS G12V)
MVVNGHVGM

SEQ ID NO: 61783 - protein, 9 aa, synthetic construct
  source 1..9: note = Seed: LVVVGAVGV (KRAS G12V)
MVVNGHVGV

SEQ ID NO: 61784 - protein, 9 aa, synthetic construct
  source 1..9: note = Seed: LVVVGAVGV (KRAS G12V)
MVVNGHVGY

SEQ ID NO: 61785 - protein, 9 aa, synthetic construct
  source 1..9: note = Seed: LVVVGAVGV (KRAS G12V)
MVVNGIVGA

SEQ ID NO: 61786 - protein, 9 aa, synthetic construct
  source 1..9: note = Seed: LVVVGAVGV (KRAS G12V)
MVVNGIVGF

SEQ ID NO: 61787 - protein, 9 aa, synthetic construct
  source 1..9: note = Seed: LVVVGAVGV (KRAS G12V)
MVVNGIVGH

SEQ ID NO: 61788 - protein, 9 aa, synthetic construct
  source 1..9: note = Seed: LVVVGAVGV (KRAS G12V)
MVVNGIVGI

SEQ ID NO: 61789 - protein, 9 aa, synthetic construct
  source 1..9: note = Seed: LVVVGAVGV (KRAS G12V)
MVVNGIVGL

SEQ ID NO: 61790 - protein, 9 aa, synthetic construct
  source 1..9: note = Seed: LVVVGAVGV (KRAS G12V)
MVVNGIVGM

SEQ ID NO: 61791 - protein, 9 aa, synthetic construct
  source 1..9: note = Seed: LVVVGAVGV (KRAS G12V)
MVVNGIVGN

SEQ ID NO: 61792 - protein, 9 aa, synthetic construct
  source 1..9: note = Seed: LVVVGAVGV (KRAS G12V)
MVVNGIVGS

SEQ ID NO: 61793 - protein, 9 aa, synthetic construct
  source 1..9: note = Seed: LVVVGAVGV (KRAS G12V)
MVVNGIVGT

SEQ ID NO: 61794 - protein, 9 aa, synthetic construct
  source 1..9: note = Seed: LVVVGAVGV (KRAS G12V)
MVVNGIVGV

SEQ ID NO: 61795 - protein, 9 aa, synthetic construct
  source 1..9: note = Seed: LVVVGAVGV (KRAS G12V)
MVVNGIVGW

SEQ ID NO: 61796 - protein, 9 aa, synthetic construct
  source 1..9: note = Seed: LVVVGAVGV (KRAS G12V)
MVVNGIVGY

SEQ ID NO: 61797 - protein, 9 aa, synthetic construct
  source 1..9: note = Seed: LVVVGAVGV (KRAS G12V)
MVVNGKVGI

SEQ ID NO: 61798 - protein, 9 aa, synthetic construct
  source 1..9: note = Seed: LVVVGAVGV (KRAS G12V)
MVVNGKVGL

SEQ ID NO: 61799 - protein, 9 aa, synthetic construct
  source 1..9: note = Seed: LVVVGAVGV (KRAS G12V)
MVVNGKVGV

SEQ ID NO: 61800 - protein, 9 aa, synthetic construct
  source 1..9: note = Seed: LVVVGAVGV (KRAS G12V)
MVVNGLVGA

SEQ ID NO: 61801 - protein, 9 aa, synthetic construct
  source 1..9: note = Seed: LVVVGAVGV (KRAS G12V)
MVVNGLVGF

SEQ ID NO: 61802 - protein, 9 aa, synthetic construct
  source 1..9: note = Seed: LVVVGAVGV (KRAS G12V)
MVVNGLVGI

SEQ ID NO: 61803 - protein, 9 aa, synthetic construct
  source 1..9: note = Seed: LVVVGAVGV (KRAS G12V)
MVVNGLVGL

SEQ ID NO: 61804 - protein, 9 aa, synthetic construct
  source 1..9: note = Seed: LVVVGAVGV (KRAS G12V)
MVVNGLVGM

SEQ ID NO: 61805 - protein, 9 aa, synthetic construct
  source 1..9: note = Seed: LVVVGAVGV (KRAS G12V)
MVVNGLVGS

SEQ ID NO: 61806 - protein, 9 aa, synthetic construct
  source 1..9: note = Seed: LVVVGAVGV (KRAS G12V)
MVVNGLVGT

SEQ ID NO: 61807 - protein, 9 aa, synthetic construct
  source 1..9: note = Seed: LVVVGAVGV (KRAS G12V)
MVVNGLVGV

SEQ ID NO: 61808 - protein, 9 aa, synthetic construct
  source 1..9: note = Seed: LVVVGAVGV (KRAS G12V)
MVVNGLVGY

SEQ ID NO: 61809 - protein, 9 aa, synthetic construct
  source 1..9: note = Seed: LVVVGAVGV (KRAS G12V)
MVVNGMVGA

SEQ ID NO: 61810 - protein, 9 aa, synthetic construct
  source 1..9: note = Seed: LVVVGAVGV (KRAS G12V)
MVVNGMVGF

SEQ ID NO: 61811 - protein, 9 aa, synthetic construct
  source 1..9: note = Seed: LVVVGAVGV (KRAS G12V)
MVVNGMVGI

SEQ ID NO: 61812 - protein, 9 aa, synthetic construct
  source 1..9: note = Seed: LVVVGAVGV (KRAS G12V)
MVVNGMVGL

SEQ ID NO: 61813 - protein, 9 aa, synthetic construct
  source 1..9: note = Seed: LVVVGAVGV (KRAS G12V)
MVVNGMVGM

SEQ ID NO: 61814 - protein, 9 aa, synthetic construct
  source 1..9: note = Seed: LVVVGAVGV (KRAS G12V)
MVVNGMVGS

SEQ ID NO: 61815 - protein, 9 aa, synthetic construct
  source 1..9: note = Seed: LVVVGAVGV (KRAS G12V)
MVVNGMVGT

SEQ ID NO: 61816 - protein, 9 aa, synthetic construct
  source 1..9: note = Seed: LVVVGAVGV (KRAS G12V)
MVVNGMVGV

SEQ ID NO: 61817 - protein, 9 aa, synthetic construct
  source 1..9: note = Seed: LVVVGAVGV (KRAS G12V)
MVVNGMVGY

SEQ ID NO: 61818 - protein, 9 aa, synthetic construct
  source 1..9: note = Seed: LVVVGAVGV (KRAS G12V)
MVVNGNVGA

SEQ ID NO: 61819 - protein, 9 aa, synthetic construct
  source 1..9: note = Seed: LVVVGAVGV (KRAS G12V)
MVVNGNVGC

SEQ ID NO: 61820 - protein, 9 aa, synthetic construct
  source 1..9: note = Seed: LVVVGAVGV (KRAS G12V)
MVVNGNVGF

SEQ ID NO: 61821 - protein, 9 aa, synthetic construct
  source 1..9: note = Seed: LVVVGAVGV (KRAS G12V)
MVVNGNVGH

SEQ ID NO: 61822 - protein, 9 aa, synthetic construct
  source 1..9: note = Seed: LVVVGAVGV (KRAS G12V)
MVVNGNVGI

SEQ ID NO: 61823 - protein, 9 aa, synthetic construct
  source 1..9: note = Seed: LVVVGAVGV (KRAS G12V)
MVVNGNVGL

SEQ ID NO: 61824 - protein, 9 aa, synthetic construct
  source 1..9: note = Seed: LVVVGAVGV (KRAS G12V)
MVVNGNVGM

SEQ ID NO: 61825 - protein, 9 aa, synthetic construct
  source 1..9: note = Seed: LVVVGAVGV (KRAS G12V)
MVVNGNVGN

SEQ ID NO: 61826 - protein, 9 aa, synthetic construct
  source 1..9: note = Seed: LVVVGAVGV (KRAS G12V)
MVVNGNVGQ

SEQ ID NO: 61827 - protein, 9 aa, synthetic construct
  source 1..9: note = Seed: LVVVGAVGV (KRAS G12V)
MVVNGNVGS

SEQ ID NO: 61828 - protein, 9 aa, synthetic construct
  source 1..9: note = Seed: LVVVGAVGV (KRAS G12V)
MVVNGNVGT

SEQ ID NO: 61829 - protein, 9 aa, synthetic construct
  source 1..9: note = Seed: LVVVGAVGV (KRAS G12V)
MVVNGNVGV

SEQ ID NO: 61830 - protein, 9 aa, synthetic construct
  source 1..9: note = Seed: LVVVGAVGV (KRAS G12V)
MVVNGNVGW

SEQ ID NO: 61831 - protein, 9 aa, synthetic construct
  source 1..9: note = Seed: LVVVGAVGV (KRAS G12V)
MVVNGNVGY

SEQ ID NO: 61832 - protein, 9 aa, synthetic construct
  source 1..9: note = Seed: LVVVGAVGV (KRAS G12V)
MVVNGPVGA

SEQ ID NO: 61833 - protein, 9 aa, synthetic construct
  source 1..9: note = Seed: LVVVGAVGV (KRAS G12V)
MVVNGPVGC

SEQ ID NO: 61834 - protein, 9 aa, synthetic construct
  source 1..9: note = Seed: LVVVGAVGV (KRAS G12V)
MVVNGPVGF

SEQ ID NO: 61835 - protein, 9 aa, synthetic construct
  source 1..9: note = Seed: LVVVGAVGV (KRAS G12V)
MVVNGPVGI

SEQ ID NO: 61836 - protein, 9 aa, synthetic construct
  source 1..9: note = Seed: LVVVGAVGV (KRAS G12V)
MVVNGPVGL

SEQ ID NO: 61837 - protein, 9 aa, synthetic construct
  source 1..9: note = Seed: LVVVGAVGV (KRAS G12V)
MVVNGPVGM

SEQ ID NO: 61838 - protein, 9 aa, synthetic construct
  source 1..9: note = Seed: LVVVGAVGV (KRAS G12V)
MVVNGPVGS

SEQ ID NO: 61839 - protein, 9 aa, synthetic construct
  source 1..9: note = Seed: LVVVGAVGV (KRAS G12V)
MVVNGPVGT

SEQ ID NO: 61840 - protein, 9 aa, synthetic construct
  source 1..9: note = Seed: LVVVGAVGV (KRAS G12V)
MVVNGPVGV

SEQ ID NO: 61841 - protein, 9 aa, synthetic construct
  source 1..9: note = Seed: LVVVGAVGV (KRAS G12V)
MVVNGPVGW

SEQ ID NO: 61842 - protein, 9 aa, synthetic construct
  source 1..9: note = Seed: LVVVGAVGV (KRAS G12V)
MVVNGPVGY

SEQ ID NO: 61843 - protein, 9 aa, synthetic construct
  source 1..9: note = Seed: LVVVGAVGV (KRAS G12V)
MVVNGQVGF

SEQ ID NO: 61844 - protein, 9 aa, synthetic construct
  source 1..9: note = Seed: LVVVGAVGV (KRAS G12V)
MVVNGQVGI

SEQ ID NO: 61845 - protein, 9 aa, synthetic construct
  source 1..9: note = Seed: LVVVGAVGV (KRAS G12V)
MVVNGQVGL

SEQ ID NO: 61846 - protein, 9 aa, synthetic construct
  source 1..9: note = Seed: LVVVGAVGV (KRAS G12V)
MVVNGQVGV

SEQ ID NO: 61847 - protein, 9 aa, synthetic construct
  source 1..9: note = Seed: LVVVGAVGV (KRAS G12V)
MVVNGRVGF

SEQ ID NO: 61848 - protein, 9 aa, synthetic construct
  source 1..9: note = Seed: LVVVGAVGV (KRAS G12V)
MVVNGRVGI

SEQ ID NO: 61849 - protein, 9 aa, synthetic construct
  source 1..9: note = Seed: LVVVGAVGV (KRAS G12V)
MVVNGRVGL

SEQ ID NO: 61850 - protein, 9 aa, synthetic construct
  source 1..9: note = Seed: LVVVGAVGV (KRAS G12V)
MVVNGRVGV

SEQ ID NO: 61851 - protein, 9 aa, synthetic construct
  source 1..9: note = Seed: LVVVGAVGV (KRAS G12V)
MVVNGSVGA

SEQ ID NO: 61852 - protein, 9 aa, synthetic construct
  source 1..9: note = Seed: LVVVGAVGV (KRAS G12V)
MVVNGSVGC

SEQ ID NO: 61853 - protein, 9 aa, synthetic construct
  source 1..9: note = Seed: LVVVGAVGV (KRAS G12V)
MVVNGSVGF

SEQ ID NO: 61854 - protein, 9 aa, synthetic construct
  source 1..9: note = Seed: LVVVGAVGV (KRAS G12V)
MVVNGSVGG

SEQ ID NO: 61855 - protein, 9 aa, synthetic construct
  source 1..9: note = Seed: LVVVGAVGV (KRAS G12V)
MVVNGSVGI

SEQ ID NO: 61856 - protein, 9 aa, synthetic construct
  source 1..9: note = Seed: LVVVGAVGV (KRAS G12V)
MVVNGSVGL

SEQ ID NO: 61857 - protein, 9 aa, synthetic construct
  source 1..9: note = Seed: LVVVGAVGV (KRAS G12V)
MVVNGSVGM

SEQ ID NO: 61858 - protein, 9 aa, synthetic construct
  source 1..9: note = Seed: LVVVGAVGV (KRAS G12V)
MVVNGSVGN

SEQ ID NO: 61859 - protein, 9 aa, synthetic construct
  source 1..9: note = Seed: LVVVGAVGV (KRAS G12V)
MVVNGSVGS

SEQ ID NO: 61860 - protein, 9 aa, synthetic construct
  source 1..9: note = Seed: LVVVGAVGV (KRAS G12V)
MVVNGSVGT

SEQ ID NO: 61861 - protein, 9 aa, synthetic construct
  source 1..9: note = Seed: LVVVGAVGV (KRAS G12V)
MVVNGSVGV

SEQ ID NO: 61862 - protein, 9 aa, synthetic construct
  source 1..9: note = Seed: LVVVGAVGV (KRAS G12V)
MVVNGSVGW

SEQ ID NO: 61863 - protein, 9 aa, synthetic construct
  source 1..9: note = Seed: LVVVGAVGV (KRAS G12V)
MVVNGSVGY

SEQ ID NO: 61864 - protein, 9 aa, synthetic construct
  source 1..9: note = Seed: LVVVGAVGV (KRAS G12V)
MVVNGTVGA

SEQ ID NO: 61865 - protein, 9 aa, synthetic construct
  source 1..9: note = Seed: LVVVGAVGV (KRAS G12V)
MVVNGTVGC

SEQ ID NO: 61866 - protein, 9 aa, synthetic construct
  source 1..9: note = Seed: LVVVGAVGV (KRAS G12V)
MVVNGTVGF

SEQ ID NO: 61867 - protein, 9 aa, synthetic construct
  source 1..9: note = Seed: LVVVGAVGV (KRAS G12V)
MVVNGTVGI

SEQ ID NO: 61868 - protein, 9 aa, synthetic construct
  source 1..9: note = Seed: LVVVGAVGV (KRAS G12V)
MVVNGTVGL

SEQ ID NO: 61869 - protein, 9 aa, synthetic construct
  source 1..9: note = Seed: LVVVGAVGV (KRAS G12V)
MVVNGTVGM

SEQ ID NO: 61870 - protein, 9 aa, synthetic construct
  source 1..9: note = Seed: LVVVGAVGV (KRAS G12V)
MVVNGTVGS

SEQ ID NO: 61871 - protein, 9 aa, synthetic construct
  source 1..9: note = Seed: LVVVGAVGV (KRAS G12V)
MVVNGTVGT

SEQ ID NO: 61872 - protein, 9 aa, synthetic construct
  source 1..9: note = Seed: LVVVGAVGV (KRAS G12V)
MVVNGTVGV

SEQ ID NO: 61873 - protein, 9 aa, synthetic construct
  source 1..9: note = Seed: LVVVGAVGV (KRAS G12V)
MVVNGTVGW

SEQ ID NO: 61874 - protein, 9 aa, synthetic construct
  source 1..9: note = Seed: LVVVGAVGV (KRAS G12V)
MVVNGTVGY

SEQ ID NO: 61875 - protein, 9 aa, synthetic construct
  source 1..9: note = Seed: LVVVGAVGV (KRAS G12V)
MVVNGVVGA

SEQ ID NO: 61876 - protein, 9 aa, synthetic construct
  source 1..9: note = Seed: LVVVGAVGV (KRAS G12V)
MVVNGVVGC

SEQ ID NO: 61877 - protein, 9 aa, synthetic construct
  source 1..9: note = Seed: LVVVGAVGV (KRAS G12V)
MVVNGVVGF

SEQ ID NO: 61878 - protein, 9 aa, synthetic construct
  source 1..9: note = Seed: LVVVGAVGV (KRAS G12V)
MVVNGVVGI

SEQ ID NO: 61879 - protein, 9 aa, synthetic construct
  source 1..9: note = Seed: LVVVGAVGV (KRAS G12V)
MVVNGVVGL

SEQ ID NO: 61880 - protein, 9 aa, synthetic construct
  source 1..9: note = Seed: LVVVGAVGV (KRAS G12V)
MVVNGVVGM

SEQ ID NO: 61881 - protein, 9 aa, synthetic construct
  source 1..9: note = Seed: LVVVGAVGV (KRAS G12V)
MVVNGVVGN

SEQ ID NO: 61882 - protein, 9 aa, synthetic construct
  source 1..9: note = Seed: LVVVGAVGV (KRAS G12V)
MVVNGVVGS

SEQ ID NO: 61883 - protein, 9 aa, synthetic construct
  source 1..9: note = Seed: LVVVGAVGV (KRAS G12V)
MVVNGVVGT

SEQ ID NO: 61884 - protein, 9 aa, synthetic construct
  source 1..9: note = Seed: LVVVGAVGV (KRAS G12V)
MVVNGVVGV

SEQ ID NO: 61885 - protein, 9 aa, synthetic construct
  source 1..9: note = Seed: LVVVGAVGV (KRAS G12V)
MVVNGVVGW

SEQ ID NO: 61886 - protein, 9 aa, synthetic construct
  source 1..9: note = Seed: LVVVGAVGV (KRAS G12V)
MVVNGVVGY

SEQ ID NO: 61887 - protein, 9 aa, synthetic construct
  source 1..9: note = Seed: LVVVGAVGV (KRAS G12V)
MVVNGWVGI

SEQ ID NO: 61888 - protein, 9 aa, synthetic construct
  source 1..9: note = Seed: LVVVGAVGV (KRAS G12V)
MVVNGWVGV

SEQ ID NO: 61889 - protein, 9 aa, synthetic construct
  source 1..9: note = Seed: LVVVGAVGV (KRAS G12V)
MVVNGYVGF

SEQ ID NO: 61890 - protein, 9 aa, synthetic construct
  source 1..9: note = Seed: LVVVGAVGV (KRAS G12V)
MVVNGYVGI

SEQ ID NO: 61891 - protein, 9 aa, synthetic construct
  source 1..9: note = Seed: LVVVGAVGV (KRAS G12V)
MVVNGYVGL

SEQ ID NO: 61892 - protein, 9 aa, synthetic construct
  source 1..9: note = Seed: LVVVGAVGV (KRAS G12V)
MVVNGYVGM

SEQ ID NO: 61893 - protein, 9 aa, synthetic construct
  source 1..9: note = Seed: LVVVGAVGV (KRAS G12V)
MVVNGYVGV

SEQ ID NO: 61894 - protein, 9 aa, synthetic construct
  source 1..9: note = Seed: LVVVGAVGV (KRAS G12V)
MVVNGYVGY

SEQ ID NO: 61895 - protein, 9 aa, synthetic construct
  source 1..9: note = Seed: LVVVGAVGV (KRAS G12V)
MVVPGAVGI

SEQ ID NO: 61896 - protein, 9 aa, synthetic construct
  source 1..9: note = Seed: LVVVGAVGV (KRAS G12V)
MVVPGAVGV

SEQ ID NO: 61897 - protein, 9 aa, synthetic construct
  source 1..9: note = Seed: LVVVGAVGV (KRAS G12V)
MVVQGAVGA

SEQ ID NO: 61898 - protein, 9 aa, synthetic construct
  source 1..9: note = Seed: LVVVGAVGV (KRAS G12V)
MVVQGAVGC

SEQ ID NO: 61899 - protein, 9 aa, synthetic construct
  source 1..9: note = Seed: LVVVGAVGV (KRAS G12V)
MVVQGAVGF

SEQ ID NO: 61900 - protein, 9 aa, synthetic construct
  source 1..9: note = Seed: LVVVGAVGV (KRAS G12V)
MVVQGAVGG

SEQ ID NO: 61901 - protein, 9 aa, synthetic construct
  source 1..9: note = Seed: LVVVGAVGV (KRAS G12V)
MVVQGAVGH

SEQ ID NO: 61902 - protein, 9 aa, synthetic construct
  source 1..9: note = Seed: LVVVGAVGV (KRAS G12V)
MVVQGAVGI

SEQ ID NO: 61903 - protein, 9 aa, synthetic construct
  source 1..9: note = Seed: LVVVGAVGV (KRAS G12V)
MVVQGAVGK

SEQ ID NO: 61904 - protein, 9 aa, synthetic construct
  source 1..9: note = Seed: LVVVGAVGV (KRAS G12V)
MVVQGAVGL

SEQ ID NO: 61905 - protein, 9 aa, synthetic construct
  source 1..9: note = Seed: LVVVGAVGV (KRAS G12V)
MVVQGAVGM

SEQ ID NO: 61906 - protein, 9 aa, synthetic construct
  source 1..9: note = Seed: LVVVGAVGV (KRAS G12V)
MVVQGAVGN

SEQ ID NO: 61907 - protein, 9 aa, synthetic construct
  source 1..9: note = Seed: LVVVGAVGV (KRAS G12V)
MVVQGAVGQ

SEQ ID NO: 61908 - protein, 9 aa, synthetic construct
  source 1..9: note = Seed: LVVVGAVGV (KRAS G12V)
MVVQGAVGR

SEQ ID NO: 61909 - protein, 9 aa, synthetic construct
  source 1..9: note = Seed: LVVVGAVGV (KRAS G12V)
MVVQGAVGS

SEQ ID NO: 61910 - protein, 9 aa, synthetic construct
  source 1..9: note = Seed: LVVVGAVGV (KRAS G12V)
MVVQGAVGT

SEQ ID NO: 61911 - protein, 9 aa, synthetic construct
  source 1..9: note = Seed: LVVVGAVGV (KRAS G12V)
MVVQGAVGV

SEQ ID NO: 61912 - protein, 9 aa, synthetic construct
  source 1..9: note = Seed: LVVVGAVGV (KRAS G12V)
MVVQGAVGW

SEQ ID NO: 61913 - protein, 9 aa, synthetic construct
  source 1..9: note = Seed: LVVVGAVGV (KRAS G12V)
MVVQGAVGY

SEQ ID NO: 61914 - protein, 9 aa, synthetic construct
  source 1..9: note = Seed: LVVVGAVGV (KRAS G12V)
MVVQGGVGA

SEQ ID NO: 61915 - protein, 9 aa, synthetic construct
  source 1..9: note = Seed: LVVVGAVGV (KRAS G12V)
MVVQGGVGI

SEQ ID NO: 61916 - protein, 9 aa, synthetic construct
  source 1..9: note = Seed: LVVVGAVGV (KRAS G12V)
MVVQGGVGL

SEQ ID NO: 61917 - protein, 9 aa, synthetic construct
  source 1..9: note = Seed: LVVVGAVGV (KRAS G12V)
MVVQGGVGM

SEQ ID NO: 61918 - protein, 9 aa, synthetic construct
  source 1..9: note = Seed: LVVVGAVGV (KRAS G12V)
MVVQGGVGS

SEQ ID NO: 61919 - protein, 9 aa, synthetic construct
  source 1..9: note = Seed: LVVVGAVGV (KRAS G12V)
MVVQGGVGT

SEQ ID NO: 61920 - protein, 9 aa, synthetic construct
  source 1..9: note = Seed: LVVVGAVGV (KRAS G12V)
MVVQGGVGV

SEQ ID NO: 61921 - protein, 9 aa, synthetic construct
  source 1..9: note = Seed: LVVVGAVGV (KRAS G12V)
MVVQGHVGL

SEQ ID NO: 61922 - protein, 9 aa, synthetic construct
  source 1..9: note = Seed: LVVVGAVGV (KRAS G12V)
MVVQGIVGA

SEQ ID NO: 61923 - protein, 9 aa, synthetic construct
  source 1..9: note = Seed: LVVVGAVGV (KRAS G12V)
MVVQGIVGI

SEQ ID NO: 61924 - protein, 9 aa, synthetic construct
  source 1..9: note = Seed: LVVVGAVGV (KRAS G12V)
MVVQGIVGL

SEQ ID NO: 61925 - protein, 9 aa, synthetic construct
  source 1..9: note = Seed: LVVVGAVGV (KRAS G12V)
MVVQGIVGM

SEQ ID NO: 61926 - protein, 9 aa, synthetic construct
  source 1..9: note = Seed: LVVVGAVGV (KRAS G12V)
MVVQGIVGS

SEQ ID NO: 61927 - protein, 9 aa, synthetic construct
  source 1..9: note = Seed: LVVVGAVGV (KRAS G12V)
MVVQGIVGV

SEQ ID NO: 61928 - protein, 9 aa, synthetic construct
  source 1..9: note = Seed: LVVVGAVGV (KRAS G12V)
MVVQGKVGA

SEQ ID NO: 61929 - protein, 9 aa, synthetic construct
  source 1..9: note = Seed: LVVVGAVGV (KRAS G12V)
MVVQGKVGS

SEQ ID NO: 61930 - protein, 9 aa, synthetic construct
  source 1..9: note = Seed: LVVVGAVGV (KRAS G12V)
MVVQGLVGA

SEQ ID NO: 61931 - protein, 9 aa, synthetic construct
  source 1..9: note = Seed: LVVVGAVGV (KRAS G12V)
MVVQGLVGI

SEQ ID NO: 61932 - protein, 9 aa, synthetic construct
  source 1..9: note = Seed: LVVVGAVGV (KRAS G12V)
MVVQGLVGL

SEQ ID NO: 61933 - protein, 9 aa, synthetic construct
  source 1..9: note = Seed: LVVVGAVGV (KRAS G12V)
MVVQGLVGM

SEQ ID NO: 61934 - protein, 9 aa, synthetic construct
  source 1..9: note = Seed: LVVVGAVGV (KRAS G12V)
MVVQGLVGV

SEQ ID NO: 61935 - protein, 9 aa, synthetic construct
  source 1..9: note = Seed: LVVVGAVGV (KRAS G12V)
MVVQGMVGA

SEQ ID NO: 61936 - protein, 9 aa, synthetic construct
  source 1..9: note = Seed: LVVVGAVGV (KRAS G12V)
MVVQGMVGI

SEQ ID NO: 61937 - protein, 9 aa, synthetic construct
  source 1..9: note = Seed: LVVVGAVGV (KRAS G12V)
MVVQGMVGL

SEQ ID NO: 61938 - protein, 9 aa, synthetic construct
  source 1..9: note = Seed: LVVVGAVGV (KRAS G12V)
MVVQGMVGM

SEQ ID NO: 61939 - protein, 9 aa, synthetic construct
  source 1..9: note = Seed: LVVVGAVGV (KRAS G12V)
MVVQGMVGS

SEQ ID NO: 61940 - protein, 9 aa, synthetic construct
  source 1..9: note = Seed: LVVVGAVGV (KRAS G12V)
MVVQGMVGT

SEQ ID NO: 61941 - protein, 9 aa, synthetic construct
  source 1..9: note = Seed: LVVVGAVGV (KRAS G12V)
MVVQGMVGV

SEQ ID NO: 61942 - protein, 9 aa, synthetic construct
  source 1..9: note = Seed: LVVVGAVGV (KRAS G12V)
MVVQGNVGA

SEQ ID NO: 61943 - protein, 9 aa, synthetic construct
  source 1..9: note = Seed: LVVVGAVGV (KRAS G12V)
MVVQGNVGI

SEQ ID NO: 61944 - protein, 9 aa, synthetic construct
  source 1..9: note = Seed: LVVVGAVGV (KRAS G12V)
MVVQGNVGL

SEQ ID NO: 61945 - protein, 9 aa, synthetic construct
  source 1..9: note = Seed: LVVVGAVGV (KRAS G12V)
MVVQGNVGM

SEQ ID NO: 61946 - protein, 9 aa, synthetic construct
  source 1..9: note = Seed: LVVVGAVGV (KRAS G12V)
MVVQGNVGS

SEQ ID NO: 61947 - protein, 9 aa, synthetic construct
  source 1..9: note = Seed: LVVVGAVGV (KRAS G12V)
MVVQGNVGT

SEQ ID NO: 61948 - protein, 9 aa, synthetic construct
  source 1..9: note = Seed: LVVVGAVGV (KRAS G12V)
MVVQGNVGV

SEQ ID NO: 61949 - protein, 9 aa, synthetic construct
  source 1..9: note = Seed: LVVVGAVGV (KRAS G12V)
MVVQGPVGA

SEQ ID NO: 61950 - protein, 9 aa, synthetic construct
  source 1..9: note = Seed: LVVVGAVGV (KRAS G12V)
MVVQGPVGC

SEQ ID NO: 61951 - protein, 9 aa, synthetic construct
  source 1..9: note = Seed: LVVVGAVGV (KRAS G12V)
MVVQGPVGF

SEQ ID NO: 61952 - protein, 9 aa, synthetic construct
  source 1..9: note = Seed: LVVVGAVGV (KRAS G12V)
MVVQGPVGI

SEQ ID NO: 61953 - protein, 9 aa, synthetic construct
  source 1..9: note = Seed: LVVVGAVGV (KRAS G12V)
MVVQGPVGL

SEQ ID NO: 61954 - protein, 9 aa, synthetic construct
  source 1..9: note = Seed: LVVVGAVGV (KRAS G12V)
MVVQGPVGM

SEQ ID NO: 61955 - protein, 9 aa, synthetic construct
  source 1..9: note = Seed: LVVVGAVGV (KRAS G12V)
MVVQGPVGN

SEQ ID NO: 61956 - protein, 9 aa, synthetic construct
  source 1..9: note = Seed: LVVVGAVGV (KRAS G12V)
MVVQGPVGS

SEQ ID NO: 61957 - protein, 9 aa, synthetic construct
  source 1..9: note = Seed: LVVVGAVGV (KRAS G12V)
MVVQGPVGT

SEQ ID NO: 61958 - protein, 9 aa, synthetic construct
  source 1..9: note = Seed: LVVVGAVGV (KRAS G12V)
MVVQGPVGV

SEQ ID NO: 61959 - protein, 9 aa, synthetic construct
  source 1..9: note = Seed: LVVVGAVGV (KRAS G12V)
MVVQGPVGW

SEQ ID NO: 61960 - protein, 9 aa, synthetic construct
  source 1..9: note = Seed: LVVVGAVGV (KRAS G12V)
MVVQGPVGY

SEQ ID NO: 61961 - protein, 9 aa, synthetic construct
  source 1..9: note = Seed: LVVVGAVGV (KRAS G12V)
MVVQGRVGA

SEQ ID NO: 61962 - protein, 9 aa, synthetic construct
  source 1..9: note = Seed: LVVVGAVGV (KRAS G12V)
MVVQGRVGF

SEQ ID NO: 61963 - protein, 9 aa, synthetic construct
  source 1..9: note = Seed: LVVVGAVGV (KRAS G12V)
MVVQGRVGG

SEQ ID NO: 61964 - protein, 9 aa, synthetic construct
  source 1..9: note = Seed: LVVVGAVGV (KRAS G12V)
MVVQGRVGH

SEQ ID NO: 61965 - protein, 9 aa, synthetic construct
  source 1..9: note = Seed: LVVVGAVGV (KRAS G12V)
MVVQGRVGI

SEQ ID NO: 61966 - protein, 9 aa, synthetic construct
  source 1..9: note = Seed: LVVVGAVGV (KRAS G12V)
MVVQGRVGK

SEQ ID NO: 61967 - protein, 9 aa, synthetic construct
  source 1..9: note = Seed: LVVVGAVGV (KRAS G12V)
MVVQGRVGL

SEQ ID NO: 61968 - protein, 9 aa, synthetic construct
  source 1..9: note = Seed: LVVVGAVGV (KRAS G12V)
MVVQGRVGM

SEQ ID NO: 61969 - protein, 9 aa, synthetic construct
  source 1..9: note = Seed: LVVVGAVGV (KRAS G12V)
MVVQGRVGQ

SEQ ID NO: 61970 - protein, 9 aa, synthetic construct
  source 1..9: note = Seed: LVVVGAVGV (KRAS G12V)
MVVQGRVGR

SEQ ID NO: 61971 - protein, 9 aa, synthetic construct
  source 1..9: note = Seed: LVVVGAVGV (KRAS G12V)
MVVQGRVGS

SEQ ID NO: 61972 - protein, 9 aa, synthetic construct
  source 1..9: note = Seed: LVVVGAVGV (KRAS G12V)
MVVQGRVGT

SEQ ID NO: 61973 - protein, 9 aa, synthetic construct
  source 1..9: note = Seed: LVVVGAVGV (KRAS G12V)
MVVQGRVGY

SEQ ID NO: 61974 - protein, 9 aa, synthetic construct
  source 1..9: note = Seed: LVVVGAVGV (KRAS G12V)
MVVQGSVGA

SEQ ID NO: 61975 - protein, 9 aa, synthetic construct
  source 1..9: note = Seed: LVVVGAVGV (KRAS G12V)
MVVQGSVGF

SEQ ID NO: 61976 - protein, 9 aa, synthetic construct
  source 1..9: note = Seed: LVVVGAVGV (KRAS G12V)
MVVQGSVGG

SEQ ID NO: 61977 - protein, 9 aa, synthetic construct
  source 1..9: note = Seed: LVVVGAVGV (KRAS G12V)
MVVQGSVGI

SEQ ID NO: 61978 - protein, 9 aa, synthetic construct
  source 1..9: note = Seed: LVVVGAVGV (KRAS G12V)
MVVQGSVGL

SEQ ID NO: 61979 - protein, 9 aa, synthetic construct
  source 1..9: note = Seed: LVVVGAVGV (KRAS G12V)
MVVQGSVGM

SEQ ID NO: 61980 - protein, 9 aa, synthetic construct
  source 1..9: note = Seed: LVVVGAVGV (KRAS G12V)
MVVQGSVGN

SEQ ID NO: 61981 - protein, 9 aa, synthetic construct
  source 1..9: note = Seed: LVVVGAVGV (KRAS G12V)
MVVQGSVGS

SEQ ID NO: 61982 - protein, 9 aa, synthetic construct
  source 1..9: note = Seed: LVVVGAVGV (KRAS G12V)
MVVQGSVGT

SEQ ID NO: 61983 - protein, 9 aa, synthetic construct
  source 1..9: note = Seed: LVVVGAVGV (KRAS G12V)
MVVQGSVGV

SEQ ID NO: 61984 - protein, 9 aa, synthetic construct
  source 1..9: note = Seed: LVVVGAVGV (KRAS G12V)
MVVQGTVGA

SEQ ID NO: 61985 - protein, 9 aa, synthetic construct
  source 1..9: note = Seed: LVVVGAVGV (KRAS G12V)
MVVQGTVGI

SEQ ID NO: 61986 - protein, 9 aa, synthetic construct
  source 1..9: note = Seed: LVVVGAVGV (KRAS G12V)
MVVQGTVGL

SEQ ID NO: 61987 - protein, 9 aa, synthetic construct
  source 1..9: note = Seed: LVVVGAVGV (KRAS G12V)
MVVQGTVGM

SEQ ID NO: 61988 - protein, 9 aa, synthetic construct
  source 1..9: note = Seed: LVVVGAVGV (KRAS G12V)
MVVQGTVGS

SEQ ID NO: 61989 - protein, 9 aa, synthetic construct
  source 1..9: note = Seed: LVVVGAVGV (KRAS G12V)
MVVQGTVGT

SEQ ID NO: 61990 - protein, 9 aa, synthetic construct
  source 1..9: note = Seed: LVVVGAVGV (KRAS G12V)
MVVQGTVGV

SEQ ID NO: 61991 - protein, 9 aa, synthetic construct
  source 1..9: note = Seed: LVVVGAVGV (KRAS G12V)
MVVQGVVGA

SEQ ID NO: 61992 - protein, 9 aa, synthetic construct
  source 1..9: note = Seed: LVVVGAVGV (KRAS G12V)
MVVQGVVGI

SEQ ID NO: 61993 - protein, 9 aa, synthetic construct
  source 1..9: note = Seed: LVVVGAVGV (KRAS G12V)
MVVQGVVGL

SEQ ID NO: 61994 - protein, 9 aa, synthetic construct
  source 1..9: note = Seed: LVVVGAVGV (KRAS G12V)
MVVQGVVGM

SEQ ID NO: 61995 - protein, 9 aa, synthetic construct
  source 1..9: note = Seed: LVVVGAVGV (KRAS G12V)
MVVQGVVGN

SEQ ID NO: 61996 - protein, 9 aa, synthetic construct
  source 1..9: note = Seed: LVVVGAVGV (KRAS G12V)
MVVQGVVGS

SEQ ID NO: 61997 - protein, 9 aa, synthetic construct
  source 1..9: note = Seed: LVVVGAVGV (KRAS G12V)
MVVQGVVGT

SEQ ID NO: 61998 - protein, 9 aa, synthetic construct
  source 1..9: note = Seed: LVVVGAVGV (KRAS G12V)
MVVQGVVGV

SEQ ID NO: 61999 - protein, 9 aa, synthetic construct
  source 1..9: note = Seed: LVVVGAVGV (KRAS G12V)
MVVRGAVGL

SEQ ID NO: 62000 - protein, 9 aa, synthetic construct
  source 1..9: note = Seed: LVVVGAVGV (KRAS G12V)
MVVRGAVGR

SEQ ID NO: 62001 - protein, 9 aa, synthetic construct
  source 1..9: note = Seed: LVVVGAVGV (KRAS G12V)
MVVRGHVGF

SEQ ID NO: 62002 - protein, 9 aa, synthetic construct
  source 1..9: note = Seed: LVVVGAVGV (KRAS G12V)
MVVRGHVGK

SEQ ID NO: 62003 - protein, 9 aa, synthetic construct
  source 1..9: note = Seed: LVVVGAVGV (KRAS G12V)
MVVRGHVGL

SEQ ID NO: 62004 - protein, 9 aa, synthetic construct
  source 1..9: note = Seed: LVVVGAVGV (KRAS G12V)
MVVRGHVGM

SEQ ID NO: 62005 - protein, 9 aa, synthetic construct
  source 1..9: note = Seed: LVVVGAVGV (KRAS G12V)
MVVRGHVGR

SEQ ID NO: 62006 - protein, 9 aa, synthetic construct
  source 1..9: note = Seed: LVVVGAVGV (KRAS G12V)
MVVRGHVGY

SEQ ID NO: 62007 - protein, 9 aa, synthetic construct
  source 1..9: note = Seed: LVVVGAVGV (KRAS G12V)
MVVRGIVGA

SEQ ID NO: 62008 - protein, 9 aa, synthetic construct
  source 1..9: note = Seed: LVVVGAVGV (KRAS G12V)
MVVRGIVGR

SEQ ID NO: 62009 - protein, 9 aa, synthetic construct
  source 1..9: note = Seed: LVVVGAVGV (KRAS G12V)
MVVRGIVGY

SEQ ID NO: 62010 - protein, 9 aa, synthetic construct
  source 1..9: note = Seed: LVVVGAVGV (KRAS G12V)
MVVRGKVGA

SEQ ID NO: 62011 - protein, 9 aa, synthetic construct
  source 1..9: note = Seed: LVVVGAVGV (KRAS G12V)
MVVRGKVGF

SEQ ID NO: 62012 - protein, 9 aa, synthetic construct
  source 1..9: note = Seed: LVVVGAVGV (KRAS G12V)
MVVRGKVGG

SEQ ID NO: 62013 - protein, 9 aa, synthetic construct
  source 1..9: note = Seed: LVVVGAVGV (KRAS G12V)
MVVRGKVGH

SEQ ID NO: 62014 - protein, 9 aa, synthetic construct
  source 1..9: note = Seed: LVVVGAVGV (KRAS G12V)
MVVRGKVGI

SEQ ID NO: 62015 - protein, 9 aa, synthetic construct
  source 1..9: note = Seed: LVVVGAVGV (KRAS G12V)
MVVRGKVGK

SEQ ID NO: 62016 - protein, 9 aa, synthetic construct
  source 1..9: note = Seed: LVVVGAVGV (KRAS G12V)
MVVRGKVGL

SEQ ID NO: 62017 - protein, 9 aa, synthetic construct
  source 1..9: note = Seed: LVVVGAVGV (KRAS G12V)
MVVRGKVGM

SEQ ID NO: 62018 - protein, 9 aa, synthetic construct
  source 1..9: note = Seed: LVVVGAVGV (KRAS G12V)
MVVRGKVGQ

SEQ ID NO: 62019 - protein, 9 aa, synthetic construct
  source 1..9: note = Seed: LVVVGAVGV (KRAS G12V)
MVVRGKVGR

SEQ ID NO: 62020 - protein, 9 aa, synthetic construct
  source 1..9: note = Seed: LVVVGAVGV (KRAS G12V)
MVVRGKVGS

SEQ ID NO: 62021 - protein, 9 aa, synthetic construct
  source 1..9: note = Seed: LVVVGAVGV (KRAS G12V)
MVVRGKVGT

SEQ ID NO: 62022 - protein, 9 aa, synthetic construct
  source 1..9: note = Seed: LVVVGAVGV (KRAS G12V)
MVVRGKVGV

SEQ ID NO: 62023 - protein, 9 aa, synthetic construct
  source 1..9: note = Seed: LVVVGAVGV (KRAS G12V)
MVVRGKVGY

SEQ ID NO: 62024 - protein, 9 aa, synthetic construct
  source 1..9: note = Seed: LVVVGAVGV (KRAS G12V)
MVVRGLVGR

SEQ ID NO: 62025 - protein, 9 aa, synthetic construct
  source 1..9: note = Seed: LVVVGAVGV (KRAS G12V)
MVVRGMVGK

SEQ ID NO: 62026 - protein, 9 aa, synthetic construct
  source 1..9: note = Seed: LVVVGAVGV (KRAS G12V)
MVVRGMVGR

SEQ ID NO: 62027 - protein, 9 aa, synthetic construct
  source 1..9: note = Seed: LVVVGAVGV (KRAS G12V)
MVVRGRVGA

SEQ ID NO: 62028 - protein, 9 aa, synthetic construct
  source 1..9: note = Seed: LVVVGAVGV (KRAS G12V)
MVVRGRVGC

SEQ ID NO: 62029 - protein, 9 aa, synthetic construct
  source 1..9: note = Seed: LVVVGAVGV (KRAS G12V)
MVVRGRVGE

SEQ ID NO: 62030 - protein, 9 aa, synthetic construct
  source 1..9: note = Seed: LVVVGAVGV (KRAS G12V)
MVVRGRVGF

SEQ ID NO: 62031 - protein, 9 aa, synthetic construct
  source 1..9: note = Seed: LVVVGAVGV (KRAS G12V)
MVVRGRVGG

SEQ ID NO: 62032 - protein, 9 aa, synthetic construct
  source 1..9: note = Seed: LVVVGAVGV (KRAS G12V)
MVVRGRVGH

SEQ ID NO: 62033 - protein, 9 aa, synthetic construct
  source 1..9: note = Seed: LVVVGAVGV (KRAS G12V)
MVVRGRVGI

SEQ ID NO: 62034 - protein, 9 aa, synthetic construct
  source 1..9: note = Seed: LVVVGAVGV (KRAS G12V)
MVVRGRVGK

SEQ ID NO: 62035 - protein, 9 aa, synthetic construct
  source 1..9: note = Seed: LVVVGAVGV (KRAS G12V)
MVVRGRVGL

SEQ ID NO: 62036 - protein, 9 aa, synthetic construct
  source 1..9: note = Seed: LVVVGAVGV (KRAS G12V)
MVVRGRVGM

SEQ ID NO: 62037 - protein, 9 aa, synthetic construct
  source 1..9: note = Seed: LVVVGAVGV (KRAS G12V)
MVVRGRVGN

SEQ ID NO: 62038 - protein, 9 aa, synthetic construct
  source 1..9: note = Seed: LVVVGAVGV (KRAS G12V)
MVVRGRVGP

SEQ ID NO: 62039 - protein, 9 aa, synthetic construct
  source 1..9: note = Seed: LVVVGAVGV (KRAS G12V)
MVVRGRVGQ

SEQ ID NO: 62040 - protein, 9 aa, synthetic construct
  source 1..9: note = Seed: LVVVGAVGV (KRAS G12V)
MVVRGRVGR

SEQ ID NO: 62041 - protein, 9 aa, synthetic construct
  source 1..9: note = Seed: LVVVGAVGV (KRAS G12V)
MVVRGRVGS

SEQ ID NO: 62042 - protein, 9 aa, synthetic construct
  source 1..9: note = Seed: LVVVGAVGV (KRAS G12V)
MVVRGRVGT

SEQ ID NO: 62043 - protein, 9 aa, synthetic construct
  source 1..9: note = Seed: LVVVGAVGV (KRAS G12V)
MVVRGRVGV

SEQ ID NO: 62044 - protein, 9 aa, synthetic construct
  source 1..9: note = Seed: LVVVGAVGV (KRAS G12V)
MVVRGRVGW

SEQ ID NO: 62045 - protein, 9 aa, synthetic construct
  source 1..9: note = Seed: LVVVGAVGV (KRAS G12V)
MVVRGRVGY

SEQ ID NO: 62046 - protein, 9 aa, synthetic construct
  source 1..9: note = Seed: LVVVGAVGV (KRAS G12V)
MVVRGSVGR

SEQ ID NO: 62047 - protein, 9 aa, synthetic construct
  source 1..9: note = Seed: LVVVGAVGV (KRAS G12V)
MVVRGTVGR

SEQ ID NO: 62048 - protein, 9 aa, synthetic construct
  source 1..9: note = Seed: LVVVGAVGV (KRAS G12V)
MVVRGVVGR

SEQ ID NO: 62049 - protein, 9 aa, synthetic construct
  source 1..9: note = Seed: LVVVGAVGV (KRAS G12V)
MVVSGAVGA

SEQ ID NO: 62050 - protein, 9 aa, synthetic construct
  source 1..9: note = Seed: LVVVGAVGV (KRAS G12V)
MVVSGAVGC

SEQ ID NO: 62051 - protein, 9 aa, synthetic construct
  source 1..9: note = Seed: LVVVGAVGV (KRAS G12V)
MVVSGAVGD

SEQ ID NO: 62052 - protein, 9 aa, synthetic construct
  source 1..9: note = Seed: LVVVGAVGV (KRAS G12V)
MVVSGAVGE

SEQ ID NO: 62053 - protein, 9 aa, synthetic construct
  source 1..9: note = Seed: LVVVGAVGV (KRAS G12V)
MVVSGAVGF

SEQ ID NO: 62054 - protein, 9 aa, synthetic construct
  source 1..9: note = Seed: LVVVGAVGV (KRAS G12V)
MVVSGAVGG

SEQ ID NO: 62055 - protein, 9 aa, synthetic construct
  source 1..9: note = Seed: LVVVGAVGV (KRAS G12V)
MVVSGAVGH

SEQ ID NO: 62056 - protein, 9 aa, synthetic construct
  source 1..9: note = Seed: LVVVGAVGV (KRAS G12V)
MVVSGAVGI

SEQ ID NO: 62057 - protein, 9 aa, synthetic construct
  source 1..9: note = Seed: LVVVGAVGV (KRAS G12V)
MVVSGAVGL

SEQ ID NO: 62058 - protein, 9 aa, synthetic construct
  source 1..9: note = Seed: LVVVGAVGV (KRAS G12V)
MVVSGAVGM

SEQ ID NO: 62059 - protein, 9 aa, synthetic construct
  source 1..9: note = Seed: LVVVGAVGV (KRAS G12V)
MVVSGAVGN

SEQ ID NO: 62060 - protein, 9 aa, synthetic construct
  source 1..9: note = Seed: LVVVGAVGV (KRAS G12V)
MVVSGAVGQ

SEQ ID NO: 62061 - protein, 9 aa, synthetic construct
  source 1..9: note = Seed: LVVVGAVGV (KRAS G12V)
MVVSGAVGS

SEQ ID NO: 62062 - protein, 9 aa, synthetic construct
  source 1..9: note = Seed: LVVVGAVGV (KRAS G12V)
MVVSGAVGT

SEQ ID NO: 62063 - protein, 9 aa, synthetic construct
  source 1..9: note = Seed: LVVVGAVGV (KRAS G12V)
MVVSGAVGV

SEQ ID NO: 62064 - protein, 9 aa, synthetic construct
  source 1..9: note = Seed: LVVVGAVGV (KRAS G12V)
MVVSGAVGY

SEQ ID NO: 62065 - protein, 9 aa, synthetic construct
  source 1..9: note = Seed: LVVVGAVGV (KRAS G12V)
MVVSGCVGA

SEQ ID NO: 62066 - protein, 9 aa, synthetic construct
  source 1..9: note = Seed: LVVVGAVGV (KRAS G12V)
MVVSGCVGI

SEQ ID NO: 62067 - protein, 9 aa, synthetic construct
  source 1..9: note = Seed: LVVVGAVGV (KRAS G12V)
MVVSGCVGL

SEQ ID NO: 62068 - protein, 9 aa, synthetic construct
  source 1..9: note = Seed: LVVVGAVGV (KRAS G12V)
MVVSGCVGV

SEQ ID NO: 62069 - protein, 9 aa, synthetic construct
  source 1..9: note = Seed: LVVVGAVGV (KRAS G12V)
MVVSGDVGI

SEQ ID NO: 62070 - protein, 9 aa, synthetic construct
  source 1..9: note = Seed: LVVVGAVGV (KRAS G12V)
MVVSGDVGL

SEQ ID NO: 62071 - protein, 9 aa, synthetic construct
  source 1..9: note = Seed: LVVVGAVGV (KRAS G12V)
MVVSGDVGV

SEQ ID NO: 62072 - protein, 9 aa, synthetic construct
  source 1..9: note = Seed: LVVVGAVGV (KRAS G12V)
MVVSGFVGI

SEQ ID NO: 62073 - protein, 9 aa, synthetic construct
  source 1..9: note = Seed: LVVVGAVGV (KRAS G12V)
MVVSGFVGL

SEQ ID NO: 62074 - protein, 9 aa, synthetic construct
  source 1..9: note = Seed: LVVVGAVGV (KRAS G12V)
MVVSGFVGV

SEQ ID NO: 62075 - protein, 9 aa, synthetic construct
  source 1..9: note = Seed: LVVVGAVGV (KRAS G12V)
MVVSGGVGA

SEQ ID NO: 62076 - protein, 9 aa, synthetic construct
  source 1..9: note = Seed: LVVVGAVGV (KRAS G12V)
MVVSGGVGC

SEQ ID NO: 62077 - protein, 9 aa, synthetic construct
  source 1..9: note = Seed: LVVVGAVGV (KRAS G12V)
MVVSGGVGF

SEQ ID NO: 62078 - protein, 9 aa, synthetic construct
  source 1..9: note = Seed: LVVVGAVGV (KRAS G12V)
MVVSGGVGG

SEQ ID NO: 62079 - protein, 9 aa, synthetic construct
  source 1..9: note = Seed: LVVVGAVGV (KRAS G12V)
MVVSGGVGI

SEQ ID NO: 62080 - protein, 9 aa, synthetic construct
  source 1..9: note = Seed: LVVVGAVGV (KRAS G12V)
MVVSGGVGL

SEQ ID NO: 62081 - protein, 9 aa, synthetic construct
  source 1..9: note = Seed: LVVVGAVGV (KRAS G12V)
MVVSGGVGM

SEQ ID NO: 62082 - protein, 9 aa, synthetic construct
  source 1..9: note = Seed: LVVVGAVGV (KRAS G12V)
MVVSGGVGS

SEQ ID NO: 62083 - protein, 9 aa, synthetic construct
  source 1..9: note = Seed: LVVVGAVGV (KRAS G12V)
MVVSGGVGT

SEQ ID NO: 62084 - protein, 9 aa, synthetic construct
  source 1..9: note = Seed: LVVVGAVGV (KRAS G12V)
MVVSGGVGV

SEQ ID NO: 62085 - protein, 9 aa, synthetic construct
  source 1..9: note = Seed: LVVVGAVGV (KRAS G12V)
MVVSGIVGA

SEQ ID NO: 62086 - protein, 9 aa, synthetic construct
  source 1..9: note = Seed: LVVVGAVGV (KRAS G12V)
MVVSGIVGG

SEQ ID NO: 62087 - protein, 9 aa, synthetic construct
  source 1..9: note = Seed: LVVVGAVGV (KRAS G12V)
MVVSGIVGI

SEQ ID NO: 62088 - protein, 9 aa, synthetic construct
  source 1..9: note = Seed: LVVVGAVGV (KRAS G12V)
MVVSGIVGN

SEQ ID NO: 62089 - protein, 9 aa, synthetic construct
  source 1..9: note = Seed: LVVVGAVGV (KRAS G12V)
MVVSGIVGS

SEQ ID NO: 62090 - protein, 9 aa, synthetic construct
  source 1..9: note = Seed: LVVVGAVGV (KRAS G12V)
MVVSGIVGV

SEQ ID NO: 62091 - protein, 9 aa, synthetic construct
  source 1..9: note = Seed: LVVVGAVGV (KRAS G12V)
MVVSGKVGA

SEQ ID NO: 62092 - protein, 9 aa, synthetic construct
  source 1..9: note = Seed: LVVVGAVGV (KRAS G12V)
MVVSGKVGR

SEQ ID NO: 62093 - protein, 9 aa, synthetic construct
  source 1..9: note = Seed: LVVVGAVGV (KRAS G12V)
MVVSGKVGS

SEQ ID NO: 62094 - protein, 9 aa, synthetic construct
  source 1..9: note = Seed: LVVVGAVGV (KRAS G12V)
MVVSGKVGY

SEQ ID NO: 62095 - protein, 9 aa, synthetic construct
  source 1..9: note = Seed: LVVVGAVGV (KRAS G12V)
MVVSGNVGA

SEQ ID NO: 62096 - protein, 9 aa, synthetic construct
  source 1..9: note = Seed: LVVVGAVGV (KRAS G12V)
MVVSGNVGC

SEQ ID NO: 62097 - protein, 9 aa, synthetic construct
  source 1..9: note = Seed: LVVVGAVGV (KRAS G12V)
MVVSGNVGF

SEQ ID NO: 62098 - protein, 9 aa, synthetic construct
  source 1..9: note = Seed: LVVVGAVGV (KRAS G12V)
MVVSGNVGI

SEQ ID NO: 62099 - protein, 9 aa, synthetic construct
  source 1..9: note = Seed: LVVVGAVGV (KRAS G12V)
MVVSGNVGL

SEQ ID NO: 62100 - protein, 9 aa, synthetic construct
  source 1..9: note = Seed: LVVVGAVGV (KRAS G12V)
MVVSGNVGM

SEQ ID NO: 62101 - protein, 9 aa, synthetic construct
  source 1..9: note = Seed: LVVVGAVGV (KRAS G12V)
MVVSGNVGN

SEQ ID NO: 62102 - protein, 9 aa, synthetic construct
  source 1..9: note = Seed: LVVVGAVGV (KRAS G12V)
MVVSGNVGS

SEQ ID NO: 62103 - protein, 9 aa, synthetic construct
  source 1..9: note = Seed: LVVVGAVGV (KRAS G12V)
MVVSGNVGV

SEQ ID NO: 62104 - protein, 9 aa, synthetic construct
  source 1..9: note = Seed: LVVVGAVGV (KRAS G12V)
MVVSGNVGY

SEQ ID NO: 62105 - protein, 9 aa, synthetic construct
  source 1..9: note = Seed: LVVVGAVGV (KRAS G12V)
MVVSGPVGA

SEQ ID NO: 62106 - protein, 9 aa, synthetic construct
  source 1..9: note = Seed: LVVVGAVGV (KRAS G12V)
MVVSGPVGC

SEQ ID NO: 62107 - protein, 9 aa, synthetic construct
  source 1..9: note = Seed: LVVVGAVGV (KRAS G12V)
MVVSGPVGF

SEQ ID NO: 62108 - protein, 9 aa, synthetic construct
  source 1..9: note = Seed: LVVVGAVGV (KRAS G12V)
MVVSGPVGG

SEQ ID NO: 62109 - protein, 9 aa, synthetic construct
  source 1..9: note = Seed: LVVVGAVGV (KRAS G12V)
MVVSGPVGI

SEQ ID NO: 62110 - protein, 9 aa, synthetic construct
  source 1..9: note = Seed: LVVVGAVGV (KRAS G12V)
MVVSGPVGL

SEQ ID NO: 62111 - protein, 9 aa, synthetic construct
  source 1..9: note = Seed: LVVVGAVGV (KRAS G12V)
MVVSGPVGM

SEQ ID NO: 62112 - protein, 9 aa, synthetic construct
  source 1..9: note = Seed: LVVVGAVGV (KRAS G12V)
MVVSGPVGN

SEQ ID NO: 62113 - protein, 9 aa, synthetic construct
  source 1..9: note = Seed: LVVVGAVGV (KRAS G12V)
MVVSGPVGQ

SEQ ID NO: 62114 - protein, 9 aa, synthetic construct
  source 1..9: note = Seed: LVVVGAVGV (KRAS G12V)
MVVSGPVGS

SEQ ID NO: 62115 - protein, 9 aa, synthetic construct
  source 1..9: note = Seed: LVVVGAVGV (KRAS G12V)
MVVSGPVGT

SEQ ID NO: 62116 - protein, 9 aa, synthetic construct
  source 1..9: note = Seed: LVVVGAVGV (KRAS G12V)
MVVSGPVGV

SEQ ID NO: 62117 - protein, 9 aa, synthetic construct
  source 1..9: note = Seed: LVVVGAVGV (KRAS G12V)
MVVSGPVGY

SEQ ID NO: 62118 - protein, 9 aa, synthetic construct
  source 1..9: note = Seed: LVVVGAVGV (KRAS G12V)
MVVSGRVGA

SEQ ID NO: 62119 - protein, 9 aa, synthetic construct
  source 1..9: note = Seed: LVVVGAVGV (KRAS G12V)
MVVSGRVGF

SEQ ID NO: 62120 - protein, 9 aa, synthetic construct
  source 1..9: note = Seed: LVVVGAVGV (KRAS G12V)
MVVSGRVGG

SEQ ID NO: 62121 - protein, 9 aa, synthetic construct
  source 1..9: note = Seed: LVVVGAVGV (KRAS G12V)
MVVSGRVGH

SEQ ID NO: 62122 - protein, 9 aa, synthetic construct
  source 1..9: note = Seed: LVVVGAVGV (KRAS G12V)
MVVSGRVGK

SEQ ID NO: 62123 - protein, 9 aa, synthetic construct
  source 1..9: note = Seed: LVVVGAVGV (KRAS G12V)
MVVSGRVGL

SEQ ID NO: 62124 - protein, 9 aa, synthetic construct
  source 1..9: note = Seed: LVVVGAVGV (KRAS G12V)
MVVSGRVGM

SEQ ID NO: 62125 - protein, 9 aa, synthetic construct
  source 1..9: note = Seed: LVVVGAVGV (KRAS G12V)
MVVSGRVGQ

SEQ ID NO: 62126 - protein, 9 aa, synthetic construct
  source 1..9: note = Seed: LVVVGAVGV (KRAS G12V)
MVVSGRVGR

SEQ ID NO: 62127 - protein, 9 aa, synthetic construct
  source 1..9: note = Seed: LVVVGAVGV (KRAS G12V)
MVVSGRVGS

SEQ ID NO: 62128 - protein, 9 aa, synthetic construct
  source 1..9: note = Seed: LVVVGAVGV (KRAS G12V)
MVVSGRVGY

SEQ ID NO: 62129 - protein, 9 aa, synthetic construct
  source 1..9: note = Seed: LVVVGAVGV (KRAS G12V)
MVVSGSVGA

SEQ ID NO: 62130 - protein, 9 aa, synthetic construct
  source 1..9: note = Seed: LVVVGAVGV (KRAS G12V)
MVVSGSVGC

SEQ ID NO: 62131 - protein, 9 aa, synthetic construct
  source 1..9: note = Seed: LVVVGAVGV (KRAS G12V)
MVVSGSVGF

SEQ ID NO: 62132 - protein, 9 aa, synthetic construct
  source 1..9: note = Seed: LVVVGAVGV (KRAS G12V)
MVVSGSVGG

SEQ ID NO: 62133 - protein, 9 aa, synthetic construct
  source 1..9: note = Seed: LVVVGAVGV (KRAS G12V)
MVVSGSVGI

SEQ ID NO: 62134 - protein, 9 aa, synthetic construct
  source 1..9: note = Seed: LVVVGAVGV (KRAS G12V)
MVVSGSVGL

SEQ ID NO: 62135 - protein, 9 aa, synthetic construct
  source 1..9: note = Seed: LVVVGAVGV (KRAS G12V)
MVVSGSVGM

SEQ ID NO: 62136 - protein, 9 aa, synthetic construct
  source 1..9: note = Seed: LVVVGAVGV (KRAS G12V)
MVVSGSVGN

SEQ ID NO: 62137 - protein, 9 aa, synthetic construct
  source 1..9: note = Seed: LVVVGAVGV (KRAS G12V)
MVVSGSVGQ

SEQ ID NO: 62138 - protein, 9 aa, synthetic construct
  source 1..9: note = Seed: LVVVGAVGV (KRAS G12V)
MVVSGSVGS

SEQ ID NO: 62139 - protein, 9 aa, synthetic construct
  source 1..9: note = Seed: LVVVGAVGV (KRAS G12V)
MVVSGSVGT

SEQ ID NO: 62140 - protein, 9 aa, synthetic construct
  source 1..9: note = Seed: LVVVGAVGV (KRAS G12V)
MVVSGSVGV

SEQ ID NO: 62141 - protein, 9 aa, synthetic construct
  source 1..9: note = Seed: LVVVGAVGV (KRAS G12V)
MVVSGSVGY

SEQ ID NO: 62142 - protein, 9 aa, synthetic construct
  source 1..9: note = Seed: LVVVGAVGV (KRAS G12V)
MVVSGTVGA

SEQ ID NO: 62143 - protein, 9 aa, synthetic construct
  source 1..9: note = Seed: LVVVGAVGV (KRAS G12V)
MVVSGTVGC

SEQ ID NO: 62144 - protein, 9 aa, synthetic construct
  source 1..9: note = Seed: LVVVGAVGV (KRAS G12V)
MVVSGTVGF

SEQ ID NO: 62145 - protein, 9 aa, synthetic construct
  source 1..9: note = Seed: LVVVGAVGV (KRAS G12V)
MVVSGTVGI

SEQ ID NO: 62146 - protein, 9 aa, synthetic construct
  source 1..9: note = Seed: LVVVGAVGV (KRAS G12V)
MVVSGTVGL

SEQ ID NO: 62147 - protein, 9 aa, synthetic construct
  source 1..9: note = Seed: LVVVGAVGV (KRAS G12V)
MVVSGTVGM

SEQ ID NO: 62148 - protein, 9 aa, synthetic construct
  source 1..9: note = Seed: LVVVGAVGV (KRAS G12V)
MVVSGTVGN

SEQ ID NO: 62149 - protein, 9 aa, synthetic construct
  source 1..9: note = Seed: LVVVGAVGV (KRAS G12V)
MVVSGTVGQ

SEQ ID NO: 62150 - protein, 9 aa, synthetic construct
  source 1..9: note = Seed: LVVVGAVGV (KRAS G12V)
MVVSGTVGS

SEQ ID NO: 62151 - protein, 9 aa, synthetic construct
  source 1..9: note = Seed: LVVVGAVGV (KRAS G12V)
MVVSGTVGT

SEQ ID NO: 62152 - protein, 9 aa, synthetic construct
  source 1..9: note = Seed: LVVVGAVGV (KRAS G12V)
MVVSGTVGV

SEQ ID NO: 62153 - protein, 9 aa, synthetic construct
  source 1..9: note = Seed: LVVVGAVGV (KRAS G12V)
MVVSGVVGA

SEQ ID NO: 62154 - protein, 9 aa, synthetic construct
  source 1..9: note = Seed: LVVVGAVGV (KRAS G12V)
MVVSGVVGG

SEQ ID NO: 62155 - protein, 9 aa, synthetic construct
  source 1..9: note = Seed: LVVVGAVGV (KRAS G12V)
MVVSGVVGI

SEQ ID NO: 62156 - protein, 9 aa, synthetic construct
  source 1..9: note = Seed: LVVVGAVGV (KRAS G12V)
MVVSGVVGL

SEQ ID NO: 62157 - protein, 9 aa, synthetic construct
  source 1..9: note = Seed: LVVVGAVGV (KRAS G12V)
MVVSGVVGM

SEQ ID NO: 62158 - protein, 9 aa, synthetic construct
  source 1..9: note = Seed: LVVVGAVGV (KRAS G12V)
MVVSGVVGN

SEQ ID NO: 62159 - protein, 9 aa, synthetic construct
  source 1..9: note = Seed: LVVVGAVGV (KRAS G12V)
MVVSGVVGQ

SEQ ID NO: 62160 - protein, 9 aa, synthetic construct
  source 1..9: note = Seed: LVVVGAVGV (KRAS G12V)
MVVSGVVGS

SEQ ID NO: 62161 - protein, 9 aa, synthetic construct
  source 1..9: note = Seed: LVVVGAVGV (KRAS G12V)
MVVSGVVGT

SEQ ID NO: 62162 - protein, 9 aa, synthetic construct
  source 1..9: note = Seed: LVVVGAVGV (KRAS G12V)
MVVSGVVGV

SEQ ID NO: 62163 - protein, 9 aa, synthetic construct
  source 1..9: note = Seed: LVVVGAVGV (KRAS G12V)
MVVTGAVGA

SEQ ID NO: 62164 - protein, 9 aa, synthetic construct
  source 1..9: note = Seed: LVVVGAVGV (KRAS G12V)
MVVTGAVGC

SEQ ID NO: 62165 - protein, 9 aa, synthetic construct
  source 1..9: note = Seed: LVVVGAVGV (KRAS G12V)
MVVTGAVGD

SEQ ID NO: 62166 - protein, 9 aa, synthetic construct
  source 1..9: note = Seed: LVVVGAVGV (KRAS G12V)
MVVTGAVGF

SEQ ID NO: 62167 - protein, 9 aa, synthetic construct
  source 1..9: note = Seed: LVVVGAVGV (KRAS G12V)
MVVTGAVGG

SEQ ID NO: 62168 - protein, 9 aa, synthetic construct
  source 1..9: note = Seed: LVVVGAVGV (KRAS G12V)
MVVTGAVGH

SEQ ID NO: 62169 - protein, 9 aa, synthetic construct
  source 1..9: note = Seed: LVVVGAVGV (KRAS G12V)
MVVTGAVGI

SEQ ID NO: 62170 - protein, 9 aa, synthetic construct
  source 1..9: note = Seed: LVVVGAVGV (KRAS G12V)
MVVTGAVGL

SEQ ID NO: 62171 - protein, 9 aa, synthetic construct
  source 1..9: note = Seed: LVVVGAVGV (KRAS G12V)
MVVTGAVGM

SEQ ID NO: 62172 - protein, 9 aa, synthetic construct
  source 1..9: note = Seed: LVVVGAVGV (KRAS G12V)
MVVTGAVGN

SEQ ID NO: 62173 - protein, 9 aa, synthetic construct
  source 1..9: note = Seed: LVVVGAVGV (KRAS G12V)
MVVTGAVGQ

SEQ ID NO: 62174 - protein, 9 aa, synthetic construct
  source 1..9: note = Seed: LVVVGAVGV (KRAS G12V)
MVVTGAVGR

SEQ ID NO: 62175 - protein, 9 aa, synthetic construct
  source 1..9: note = Seed: LVVVGAVGV (KRAS G12V)
MVVTGAVGS

SEQ ID NO: 62176 - protein, 9 aa, synthetic construct
  source 1..9: note = Seed: LVVVGAVGV (KRAS G12V)
MVVTGAVGT

SEQ ID NO: 62177 - protein, 9 aa, synthetic construct
  source 1..9: note = Seed: LVVVGAVGV (KRAS G12V)
MVVTGAVGV

SEQ ID NO: 62178 - protein, 9 aa, synthetic construct
  source 1..9: note = Seed: LVVVGAVGV (KRAS G12V)
MVVTGAVGY

SEQ ID NO: 62179 - protein, 9 aa, synthetic construct
  source 1..9: note = Seed: LVVVGAVGV (KRAS G12V)
MVVTGCVGA

SEQ ID NO: 62180 - protein, 9 aa, synthetic construct
  source 1..9: note = Seed: LVVVGAVGV (KRAS G12V)
MVVTGCVGI

SEQ ID NO: 62181 - protein, 9 aa, synthetic construct
  source 1..9: note = Seed: LVVVGAVGV (KRAS G12V)
MVVTGCVGL

SEQ ID NO: 62182 - protein, 9 aa, synthetic construct
  source 1..9: note = Seed: LVVVGAVGV (KRAS G12V)
MVVTGCVGM

SEQ ID NO: 62183 - protein, 9 aa, synthetic construct
  source 1..9: note = Seed: LVVVGAVGV (KRAS G12V)
MVVTGCVGV

SEQ ID NO: 62184 - protein, 9 aa, synthetic construct
  source 1..9: note = Seed: LVVVGAVGV (KRAS G12V)
MVVTGDVGL

SEQ ID NO: 62185 - protein, 9 aa, synthetic construct
  source 1..9: note = Seed: LVVVGAVGV (KRAS G12V)
MVVTGDVGV

SEQ ID NO: 62186 - protein, 9 aa, synthetic construct
  source 1..9: note = Seed: LVVVGAVGV (KRAS G12V)
MVVTGEVGL

SEQ ID NO: 62187 - protein, 9 aa, synthetic construct
  source 1..9: note = Seed: LVVVGAVGV (KRAS G12V)
MVVTGFVGL

SEQ ID NO: 62188 - protein, 9 aa, synthetic construct
  source 1..9: note = Seed: LVVVGAVGV (KRAS G12V)
MVVTGGVGA

SEQ ID NO: 62189 - protein, 9 aa, synthetic construct
  source 1..9: note = Seed: LVVVGAVGV (KRAS G12V)
MVVTGGVGC

SEQ ID NO: 62190 - protein, 9 aa, synthetic construct
  source 1..9: note = Seed: LVVVGAVGV (KRAS G12V)
MVVTGGVGF

SEQ ID NO: 62191 - protein, 9 aa, synthetic construct
  source 1..9: note = Seed: LVVVGAVGV (KRAS G12V)
MVVTGGVGG

SEQ ID NO: 62192 - protein, 9 aa, synthetic construct
  source 1..9: note = Seed: LVVVGAVGV (KRAS G12V)
MVVTGGVGI

SEQ ID NO: 62193 - protein, 9 aa, synthetic construct
  source 1..9: note = Seed: LVVVGAVGV (KRAS G12V)
MVVTGGVGL

SEQ ID NO: 62194 - protein, 9 aa, synthetic construct
  source 1..9: note = Seed: LVVVGAVGV (KRAS G12V)
MVVTGGVGM

SEQ ID NO: 62195 - protein, 9 aa, synthetic construct
  source 1..9: note = Seed: LVVVGAVGV (KRAS G12V)
MVVTGGVGN

SEQ ID NO: 62196 - protein, 9 aa, synthetic construct
  source 1..9: note = Seed: LVVVGAVGV (KRAS G12V)
MVVTGGVGS

SEQ ID NO: 62197 - protein, 9 aa, synthetic construct
  source 1..9: note = Seed: LVVVGAVGV (KRAS G12V)
MVVTGGVGT

SEQ ID NO: 62198 - protein, 9 aa, synthetic construct
  source 1..9: note = Seed: LVVVGAVGV (KRAS G12V)
MVVTGGVGV

SEQ ID NO: 62199 - protein, 9 aa, synthetic construct
  source 1..9: note = Seed: LVVVGAVGV (KRAS G12V)
MVVTGIVGA

SEQ ID NO: 62200 - protein, 9 aa, synthetic construct
  source 1..9: note = Seed: LVVVGAVGV (KRAS G12V)
MVVTGIVGI

SEQ ID NO: 62201 - protein, 9 aa, synthetic construct
  source 1..9: note = Seed: LVVVGAVGV (KRAS G12V)
MVVTGIVGL

SEQ ID NO: 62202 - protein, 9 aa, synthetic construct
  source 1..9: note = Seed: LVVVGAVGV (KRAS G12V)
MVVTGIVGN

SEQ ID NO: 62203 - protein, 9 aa, synthetic construct
  source 1..9: note = Seed: LVVVGAVGV (KRAS G12V)
MVVTGIVGS

SEQ ID NO: 62204 - protein, 9 aa, synthetic construct
  source 1..9: note = Seed: LVVVGAVGV (KRAS G12V)
MVVTGIVGV

SEQ ID NO: 62205 - protein, 9 aa, synthetic construct
  source 1..9: note = Seed: LVVVGAVGV (KRAS G12V)
MVVTGKVGA

SEQ ID NO: 62206 - protein, 9 aa, synthetic construct
  source 1..9: note = Seed: LVVVGAVGV (KRAS G12V)
MVVTGKVGS

SEQ ID NO: 62207 - protein, 9 aa, synthetic construct
  source 1..9: note = Seed: LVVVGAVGV (KRAS G12V)
MVVTGLVGI

SEQ ID NO: 62208 - protein, 9 aa, synthetic construct
  source 1..9: note = Seed: LVVVGAVGV (KRAS G12V)
MVVTGMVGI

SEQ ID NO: 62209 - protein, 9 aa, synthetic construct
  source 1..9: note = Seed: LVVVGAVGV (KRAS G12V)
MVVTGMVGL

SEQ ID NO: 62210 - protein, 9 aa, synthetic construct
  source 1..9: note = Seed: LVVVGAVGV (KRAS G12V)
MVVTGMVGV

SEQ ID NO: 62211 - protein, 9 aa, synthetic construct
  source 1..9: note = Seed: LVVVGAVGV (KRAS G12V)
MVVTGNVGA

SEQ ID NO: 62212 - protein, 9 aa, synthetic construct
  source 1..9: note = Seed: LVVVGAVGV (KRAS G12V)
MVVTGNVGC

SEQ ID NO: 62213 - protein, 9 aa, synthetic construct
  source 1..9: note = Seed: LVVVGAVGV (KRAS G12V)
MVVTGNVGF

SEQ ID NO: 62214 - protein, 9 aa, synthetic construct
  source 1..9: note = Seed: LVVVGAVGV (KRAS G12V)
MVVTGNVGG

SEQ ID NO: 62215 - protein, 9 aa, synthetic construct
  source 1..9: note = Seed: LVVVGAVGV (KRAS G12V)
MVVTGNVGI

SEQ ID NO: 62216 - protein, 9 aa, synthetic construct
  source 1..9: note = Seed: LVVVGAVGV (KRAS G12V)
MVVTGNVGL

SEQ ID NO: 62217 - protein, 9 aa, synthetic construct
  source 1..9: note = Seed: LVVVGAVGV (KRAS G12V)
MVVTGNVGM

SEQ ID NO: 62218 - protein, 9 aa, synthetic construct
  source 1..9: note = Seed: LVVVGAVGV (KRAS G12V)
MVVTGNVGN

SEQ ID NO: 62219 - protein, 9 aa, synthetic construct
  source 1..9: note = Seed: LVVVGAVGV (KRAS G12V)
MVVTGNVGS

SEQ ID NO: 62220 - protein, 9 aa, synthetic construct
  source 1..9: note = Seed: LVVVGAVGV (KRAS G12V)
MVVTGNVGT

SEQ ID NO: 62221 - protein, 9 aa, synthetic construct
  source 1..9: note = Seed: LVVVGAVGV (KRAS G12V)
MVVTGNVGV

SEQ ID NO: 62222 - protein, 9 aa, synthetic construct
  source 1..9: note = Seed: LVVVGAVGV (KRAS G12V)
MVVTGPVGA

SEQ ID NO: 62223 - protein, 9 aa, synthetic construct
  source 1..9: note = Seed: LVVVGAVGV (KRAS G12V)
MVVTGPVGC

SEQ ID NO: 62224 - protein, 9 aa, synthetic construct
  source 1..9: note = Seed: LVVVGAVGV (KRAS G12V)
MVVTGPVGF

SEQ ID NO: 62225 - protein, 9 aa, synthetic construct
  source 1..9: note = Seed: LVVVGAVGV (KRAS G12V)
MVVTGPVGI

SEQ ID NO: 62226 - protein, 9 aa, synthetic construct
  source 1..9: note = Seed: LVVVGAVGV (KRAS G12V)
MVVTGPVGL

SEQ ID NO: 62227 - protein, 9 aa, synthetic construct
  source 1..9: note = Seed: LVVVGAVGV (KRAS G12V)
MVVTGPVGM

SEQ ID NO: 62228 - protein, 9 aa, synthetic construct
  source 1..9: note = Seed: LVVVGAVGV (KRAS G12V)
MVVTGPVGN

SEQ ID NO: 62229 - protein, 9 aa, synthetic construct
  source 1..9: note = Seed: LVVVGAVGV (KRAS G12V)
MVVTGPVGS

SEQ ID NO: 62230 - protein, 9 aa, synthetic construct
  source 1..9: note = Seed: LVVVGAVGV (KRAS G12V)
MVVTGPVGT

SEQ ID NO: 62231 - protein, 9 aa, synthetic construct
  source 1..9: note = Seed: LVVVGAVGV (KRAS G12V)
MVVTGPVGV

SEQ ID NO: 62232 - protein, 9 aa, synthetic construct
  source 1..9: note = Seed: LVVVGAVGV (KRAS G12V)
MVVTGPVGY

SEQ ID NO: 62233 - protein, 9 aa, synthetic construct
  source 1..9: note = Seed: LVVVGAVGV (KRAS G12V)
MVVTGQVGC

SEQ ID NO: 62234 - protein, 9 aa, synthetic construct
  source 1..9: note = Seed: LVVVGAVGV (KRAS G12V)
MVVTGQVGL

SEQ ID NO: 62235 - protein, 9 aa, synthetic construct
  source 1..9: note = Seed: LVVVGAVGV (KRAS G12V)
MVVTGRVGA

SEQ ID NO: 62236 - protein, 9 aa, synthetic construct
  source 1..9: note = Seed: LVVVGAVGV (KRAS G12V)
MVVTGRVGG

SEQ ID NO: 62237 - protein, 9 aa, synthetic construct
  source 1..9: note = Seed: LVVVGAVGV (KRAS G12V)
MVVTGRVGH

SEQ ID NO: 62238 - protein, 9 aa, synthetic construct
  source 1..9: note = Seed: LVVVGAVGV (KRAS G12V)
MVVTGRVGK

SEQ ID NO: 62239 - protein, 9 aa, synthetic construct
  source 1..9: note = Seed: LVVVGAVGV (KRAS G12V)
MVVTGRVGN

SEQ ID NO: 62240 - protein, 9 aa, synthetic construct
  source 1..9: note = Seed: LVVVGAVGV (KRAS G12V)
MVVTGRVGQ

SEQ ID NO: 62241 - protein, 9 aa, synthetic construct
  source 1..9: note = Seed: LVVVGAVGV (KRAS G12V)
MVVTGRVGR

SEQ ID NO: 62242 - protein, 9 aa, synthetic construct
  source 1..9: note = Seed: LVVVGAVGV (KRAS G12V)
MVVTGRVGS

SEQ ID NO: 62243 - protein, 9 aa, synthetic construct
  source 1..9: note = Seed: LVVVGAVGV (KRAS G12V)
MVVTGRVGT

SEQ ID NO: 62244 - protein, 9 aa, synthetic construct
  source 1..9: note = Seed: LVVVGAVGV (KRAS G12V)
MVVTGSVGA

SEQ ID NO: 62245 - protein, 9 aa, synthetic construct
  source 1..9: note = Seed: LVVVGAVGV (KRAS G12V)
MVVTGSVGC

SEQ ID NO: 62246 - protein, 9 aa, synthetic construct
  source 1..9: note = Seed: LVVVGAVGV (KRAS G12V)
MVVTGSVGF

SEQ ID NO: 62247 - protein, 9 aa, synthetic construct
  source 1..9: note = Seed: LVVVGAVGV (KRAS G12V)
MVVTGSVGG

SEQ ID NO: 62248 - protein, 9 aa, synthetic construct
  source 1..9: note = Seed: LVVVGAVGV (KRAS G12V)
MVVTGSVGI

SEQ ID NO: 62249 - protein, 9 aa, synthetic construct
  source 1..9: note = Seed: LVVVGAVGV (KRAS G12V)
MVVTGSVGL

SEQ ID NO: 62250 - protein, 9 aa, synthetic construct
  source 1..9: note = Seed: LVVVGAVGV (KRAS G12V)
MVVTGSVGM

SEQ ID NO: 62251 - protein, 9 aa, synthetic construct
  source 1..9: note = Seed: LVVVGAVGV (KRAS G12V)
MVVTGSVGN

SEQ ID NO: 62252 - protein, 9 aa, synthetic construct
  source 1..9: note = Seed: LVVVGAVGV (KRAS G12V)
MVVTGSVGQ

SEQ ID NO: 62253 - protein, 9 aa, synthetic construct
  source 1..9: note = Seed: LVVVGAVGV (KRAS G12V)
MVVTGSVGS

SEQ ID NO: 62254 - protein, 9 aa, synthetic construct
  source 1..9: note = Seed: LVVVGAVGV (KRAS G12V)
MVVTGSVGT

SEQ ID NO: 62255 - protein, 9 aa, synthetic construct
  source 1..9: note = Seed: LVVVGAVGV (KRAS G12V)
MVVTGSVGV

SEQ ID NO: 62256 - protein, 9 aa, synthetic construct
  source 1..9: note = Seed: LVVVGAVGV (KRAS G12V)
MVVTGSVGY

SEQ ID NO: 62257 - protein, 9 aa, synthetic construct
  source 1..9: note = Seed: LVVVGAVGV (KRAS G12V)
MVVTGTVGA

SEQ ID NO: 62258 - protein, 9 aa, synthetic construct
  source 1..9: note = Seed: LVVVGAVGV (KRAS G12V)
MVVTGTVGC

SEQ ID NO: 62259 - protein, 9 aa, synthetic construct
  source 1..9: note = Seed: LVVVGAVGV (KRAS G12V)
MVVTGTVGF

SEQ ID NO: 62260 - protein, 9 aa, synthetic construct
  source 1..9: note = Seed: LVVVGAVGV (KRAS G12V)
MVVTGTVGI

SEQ ID NO: 62261 - protein, 9 aa, synthetic construct
  source 1..9: note = Seed: LVVVGAVGV (KRAS G12V)
MVVTGTVGL

SEQ ID NO: 62262 - protein, 9 aa, synthetic construct
  source 1..9: note = Seed: LVVVGAVGV (KRAS G12V)
MVVTGTVGM

SEQ ID NO: 62263 - protein, 9 aa, synthetic construct
  source 1..9: note = Seed: LVVVGAVGV (KRAS G12V)
MVVTGTVGN

SEQ ID NO: 62264 - protein, 9 aa, synthetic construct
  source 1..9: note = Seed: LVVVGAVGV (KRAS G12V)
MVVTGTVGQ

SEQ ID NO: 62265 - protein, 9 aa, synthetic construct
  source 1..9: note = Seed: LVVVGAVGV (KRAS G12V)
MVVTGTVGS

SEQ ID NO: 62266 - protein, 9 aa, synthetic construct
  source 1..9: note = Seed: LVVVGAVGV (KRAS G12V)
MVVTGTVGT

SEQ ID NO: 62267 - protein, 9 aa, synthetic construct
  source 1..9: note = Seed: LVVVGAVGV (KRAS G12V)
MVVTGTVGV

SEQ ID NO: 62268 - protein, 9 aa, synthetic construct
  source 1..9: note = Seed: LVVVGAVGV (KRAS G12V)
MVVTGVVGA

SEQ ID NO: 62269 - protein, 9 aa, synthetic construct
  source 1..9: note = Seed: LVVVGAVGV (KRAS G12V)
MVVTGVVGC

SEQ ID NO: 62270 - protein, 9 aa, synthetic construct
  source 1..9: note = Seed: LVVVGAVGV (KRAS G12V)
MVVTGVVGF

SEQ ID NO: 62271 - protein, 9 aa, synthetic construct
  source 1..9: note = Seed: LVVVGAVGV (KRAS G12V)
MVVTGVVGG

SEQ ID NO: 62272 - protein, 9 aa, synthetic construct
  source 1..9: note = Seed: LVVVGAVGV (KRAS G12V)
MVVTGVVGI

SEQ ID NO: 62273 - protein, 9 aa, synthetic construct
  source 1..9: note = Seed: LVVVGAVGV (KRAS G12V)
MVVTGVVGL

SEQ ID NO: 62274 - protein, 9 aa, synthetic construct
  source 1..9: note = Seed: LVVVGAVGV (KRAS G12V)
MVVTGVVGM

SEQ ID NO: 62275 - protein, 9 aa, synthetic construct
  source 1..9: note = Seed: LVVVGAVGV (KRAS G12V)
MVVTGVVGN

SEQ ID NO: 62276 - protein, 9 aa, synthetic construct
  source 1..9: note = Seed: LVVVGAVGV (KRAS G12V)
MVVTGVVGQ

SEQ ID NO: 62277 - protein, 9 aa, synthetic construct
  source 1..9: note = Seed: LVVVGAVGV (KRAS G12V)
MVVTGVVGS

SEQ ID NO: 62278 - protein, 9 aa, synthetic construct
  source 1..9: note = Seed: LVVVGAVGV (KRAS G12V)
MVVTGVVGV

SEQ ID NO: 62279 - protein, 9 aa, synthetic construct
  source 1..9: note = Seed: LVVVGAVGV (KRAS G12V)
MVVTGYVGI

SEQ ID NO: 62280 - protein, 9 aa, synthetic construct
  source 1..9: note = Seed: LVVVGAVGV (KRAS G12V)
MVVTGYVGL

SEQ ID NO: 62281 - protein, 9 aa, synthetic construct
  source 1..9: note = Seed: LVVVGAVGV (KRAS G12V)
MVVTGYVGV

SEQ ID NO: 62282 - protein, 9 aa, synthetic construct
  source 1..9: note = Seed: LVVVGAVGV (KRAS G12V)
MVVVGAVGA

SEQ ID NO: 62283 - protein, 9 aa, synthetic construct
  source 1..9: note = Seed: LVVVGAVGV (KRAS G12V)
MVVVGAVGC

SEQ ID NO: 62284 - protein, 9 aa, synthetic construct
  source 1..9: note = Seed: LVVVGAVGV (KRAS G12V)
MVVVGAVGD

SEQ ID NO: 62285 - protein, 9 aa, synthetic construct
  source 1..9: note = Seed: LVVVGAVGV (KRAS G12V)
MVVVGAVGE

SEQ ID NO: 62286 - protein, 9 aa, synthetic construct
  source 1..9: note = Seed: LVVVGAVGV (KRAS G12V)
MVVVGAVGF

SEQ ID NO: 62287 - protein, 9 aa, synthetic construct
  source 1..9: note = Seed: LVVVGAVGV (KRAS G12V)
MVVVGAVGG

SEQ ID NO: 62288 - protein, 9 aa, synthetic construct
  source 1..9: note = Seed: LVVVGAVGV (KRAS G12V)
MVVVGAVGH

SEQ ID NO: 62289 - protein, 9 aa, synthetic construct
  source 1..9: note = Seed: LVVVGAVGV (KRAS G12V)
MVVVGAVGI

SEQ ID NO: 62290 - protein, 9 aa, synthetic construct
  source 1..9: note = Seed: LVVVGAVGV (KRAS G12V)
MVVVGAVGK

SEQ ID NO: 62291 - protein, 9 aa, synthetic construct
  source 1..9: note = Seed: LVVVGAVGV (KRAS G12V)
MVVVGAVGL

SEQ ID NO: 62292 - protein, 9 aa, synthetic construct
  source 1..9: note = Seed: LVVVGAVGV (KRAS G12V)
MVVVGAVGM

SEQ ID NO: 62293 - protein, 9 aa, synthetic construct
  source 1..9: note = Seed: LVVVGAVGV (KRAS G12V)
MVVVGAVGN

SEQ ID NO: 62294 - protein, 9 aa, synthetic construct
  source 1..9: note = Seed: LVVVGAVGV (KRAS G12V)
MVVVGAVGP

SEQ ID NO: 62295 - protein, 9 aa, synthetic construct
  source 1..9: note = Seed: LVVVGAVGV (KRAS G12V)
MVVVGAVGQ

SEQ ID NO: 62296 - protein, 9 aa, synthetic construct
  source 1..9: note = Seed: LVVVGAVGV (KRAS G12V)
MVVVGAVGR

SEQ ID NO: 62297 - protein, 9 aa, synthetic construct
  source 1..9: note = Seed: LVVVGAVGV (KRAS G12V)
MVVVGAVGS

SEQ ID NO: 62298 - protein, 9 aa, synthetic construct
  source 1..9: note = Seed: LVVVGAVGV (KRAS G12V)
MVVVGAVGT

SEQ ID NO: 62299 - protein, 9 aa, synthetic construct
  source 1..9: note = Seed: LVVVGAVGV (KRAS G12V)
MVVVGAVGV

SEQ ID NO: 62300 - protein, 9 aa, synthetic construct
  source 1..9: note = Seed: LVVVGAVGV (KRAS G12V)
MVVVGAVGY

SEQ ID NO: 62301 - protein, 9 aa, synthetic construct
  source 1..9: note = Seed: LVVVGAVGV (KRAS G12V)
MVVVGCVGR

SEQ ID NO: 62302 - protein, 9 aa, synthetic construct
  source 1..9: note = Seed: LVVVGAVGV (KRAS G12V)
MVVVGCVGV

SEQ ID NO: 62303 - protein, 9 aa, synthetic construct
  source 1..9: note = Seed: LVVVGAVGV (KRAS G12V)
MVVVGGVGA

SEQ ID NO: 62304 - protein, 9 aa, synthetic construct
  source 1..9: note = Seed: LVVVGAVGV (KRAS G12V)
MVVVGGVGC

SEQ ID NO: 62305 - protein, 9 aa, synthetic construct
  source 1..9: note = Seed: LVVVGAVGV (KRAS G12V)
MVVVGGVGF

SEQ ID NO: 62306 - protein, 9 aa, synthetic construct
  source 1..9: note = Seed: LVVVGAVGV (KRAS G12V)
MVVVGGVGG

SEQ ID NO: 62307 - protein, 9 aa, synthetic construct
  source 1..9: note = Seed: LVVVGAVGV (KRAS G12V)
MVVVGGVGH

SEQ ID NO: 62308 - protein, 9 aa, synthetic construct
  source 1..9: note = Seed: LVVVGAVGV (KRAS G12V)
MVVVGGVGI

SEQ ID NO: 62309 - protein, 9 aa, synthetic construct
  source 1..9: note = Seed: LVVVGAVGV (KRAS G12V)
MVVVGGVGK

SEQ ID NO: 62310 - protein, 9 aa, synthetic construct
  source 1..9: note = Seed: LVVVGAVGV (KRAS G12V)
MVVVGGVGL

SEQ ID NO: 62311 - protein, 9 aa, synthetic construct
  source 1..9: note = Seed: LVVVGAVGV (KRAS G12V)
MVVVGGVGM

SEQ ID NO: 62312 - protein, 9 aa, synthetic construct
  source 1..9: note = Seed: LVVVGAVGV (KRAS G12V)
MVVVGGVGN

SEQ ID NO: 62313 - protein, 9 aa, synthetic construct
  source 1..9: note = Seed: LVVVGAVGV (KRAS G12V)
MVVVGGVGR

SEQ ID NO: 62314 - protein, 9 aa, synthetic construct
  source 1..9: note = Seed: LVVVGAVGV (KRAS G12V)
MVVVGGVGS

SEQ ID NO: 62315 - protein, 9 aa, synthetic construct
  source 1..9: note = Seed: LVVVGAVGV (KRAS G12V)
MVVVGGVGT

SEQ ID NO: 62316 - protein, 9 aa, synthetic construct
  source 1..9: note = Seed: LVVVGAVGV (KRAS G12V)
MVVVGGVGV

SEQ ID NO: 62317 - protein, 9 aa, synthetic construct
  source 1..9: note = Seed: LVVVGAVGV (KRAS G12V)
MVVVGGVGY

SEQ ID NO: 62318 - protein, 9 aa, synthetic construct
  source 1..9: note = Seed: LVVVGAVGV (KRAS G12V)
MVVVGHVGC

SEQ ID NO: 62319 - protein, 9 aa, synthetic construct
  source 1..9: note = Seed: LVVVGAVGV (KRAS G12V)
MVVVGHVGI

SEQ ID NO: 62320 - protein, 9 aa, synthetic construct
  source 1..9: note = Seed: LVVVGAVGV (KRAS G12V)
MVVVGHVGL

SEQ ID NO: 62321 - protein, 9 aa, synthetic construct
  source 1..9: note = Seed: LVVVGAVGV (KRAS G12V)
MVVVGHVGR

SEQ ID NO: 62322 - protein, 9 aa, synthetic construct
  source 1..9: note = Seed: LVVVGAVGV (KRAS G12V)
MVVVGHVGV

SEQ ID NO: 62323 - protein, 9 aa, synthetic construct
  source 1..9: note = Seed: LVVVGAVGV (KRAS G12V)
MVVVGIVGA

SEQ ID NO: 62324 - protein, 9 aa, synthetic construct
  source 1..9: note = Seed: LVVVGAVGV (KRAS G12V)
MVVVGIVGN

SEQ ID NO: 62325 - protein, 9 aa, synthetic construct
  source 1..9: note = Seed: LVVVGAVGV (KRAS G12V)
MVVVGIVGQ

SEQ ID NO: 62326 - protein, 9 aa, synthetic construct
  source 1..9: note = Seed: LVVVGAVGV (KRAS G12V)
MVVVGIVGR

SEQ ID NO: 62327 - protein, 9 aa, synthetic construct
  source 1..9: note = Seed: LVVVGAVGV (KRAS G12V)
MVVVGIVGS

SEQ ID NO: 62328 - protein, 9 aa, synthetic construct
  source 1..9: note = Seed: LVVVGAVGV (KRAS G12V)
MVVVGIVGT

SEQ ID NO: 62329 - protein, 9 aa, synthetic construct
  source 1..9: note = Seed: LVVVGAVGV (KRAS G12V)
MVVVGIVGV

SEQ ID NO: 62330 - protein, 9 aa, synthetic construct
  source 1..9: note = Seed: LVVVGAVGV (KRAS G12V)
MVVVGKVGA

SEQ ID NO: 62331 - protein, 9 aa, synthetic construct
  source 1..9: note = Seed: LVVVGAVGV (KRAS G12V)
MVVVGKVGC

SEQ ID NO: 62332 - protein, 9 aa, synthetic construct
  source 1..9: note = Seed: LVVVGAVGV (KRAS G12V)
MVVVGKVGG

SEQ ID NO: 62333 - protein, 9 aa, synthetic construct
  source 1..9: note = Seed: LVVVGAVGV (KRAS G12V)
MVVVGKVGH

SEQ ID NO: 62334 - protein, 9 aa, synthetic construct
  source 1..9: note = Seed: LVVVGAVGV (KRAS G12V)
MVVVGKVGK

SEQ ID NO: 62335 - protein, 9 aa, synthetic construct
  source 1..9: note = Seed: LVVVGAVGV (KRAS G12V)
MVVVGKVGM

SEQ ID NO: 62336 - protein, 9 aa, synthetic construct
  source 1..9: note = Seed: LVVVGAVGV (KRAS G12V)
MVVVGKVGN

SEQ ID NO: 62337 - protein, 9 aa, synthetic construct
  source 1..9: note = Seed: LVVVGAVGV (KRAS G12V)
MVVVGKVGQ

SEQ ID NO: 62338 - protein, 9 aa, synthetic construct
  source 1..9: note = Seed: LVVVGAVGV (KRAS G12V)
MVVVGKVGR

SEQ ID NO: 62339 - protein, 9 aa, synthetic construct
  source 1..9: note = Seed: LVVVGAVGV (KRAS G12V)
MVVVGKVGS

SEQ ID NO: 62340 - protein, 9 aa, synthetic construct
  source 1..9: note = Seed: LVVVGAVGV (KRAS G12V)
MVVVGKVGT

SEQ ID NO: 62341 - protein, 9 aa, synthetic construct
  source 1..9: note = Seed: LVVVGAVGV (KRAS G12V)
MVVVGKVGY

SEQ ID NO: 62342 - protein, 9 aa, synthetic construct
  source 1..9: note = Seed: LVVVGAVGV (KRAS G12V)
MVVVGLVGN

SEQ ID NO: 62343 - protein, 9 aa, synthetic construct
  source 1..9: note = Seed: LVVVGAVGV (KRAS G12V)
MVVVGLVGR

SEQ ID NO: 62344 - protein, 9 aa, synthetic construct
  source 1..9: note = Seed: LVVVGAVGV (KRAS G12V)
MVVVGMVGR

SEQ ID NO: 62345 - protein, 9 aa, synthetic construct
  source 1..9: note = Seed: LVVVGAVGV (KRAS G12V)
MVVVGNVGA

SEQ ID NO: 62346 - protein, 9 aa, synthetic construct
  source 1..9: note = Seed: LVVVGAVGV (KRAS G12V)
MVVVGNVGC

SEQ ID NO: 62347 - protein, 9 aa, synthetic construct
  source 1..9: note = Seed: LVVVGAVGV (KRAS G12V)
MVVVGNVGF

SEQ ID NO: 62348 - protein, 9 aa, synthetic construct
  source 1..9: note = Seed: LVVVGAVGV (KRAS G12V)
MVVVGNVGG

SEQ ID NO: 62349 - protein, 9 aa, synthetic construct
  source 1..9: note = Seed: LVVVGAVGV (KRAS G12V)
MVVVGNVGH

SEQ ID NO: 62350 - protein, 9 aa, synthetic construct
  source 1..9: note = Seed: LVVVGAVGV (KRAS G12V)
MVVVGNVGI

SEQ ID NO: 62351 - protein, 9 aa, synthetic construct
  source 1..9: note = Seed: LVVVGAVGV (KRAS G12V)
MVVVGNVGL

SEQ ID NO: 62352 - protein, 9 aa, synthetic construct
  source 1..9: note = Seed: LVVVGAVGV (KRAS G12V)
MVVVGNVGM

SEQ ID NO: 62353 - protein, 9 aa, synthetic construct
  source 1..9: note = Seed: LVVVGAVGV (KRAS G12V)
MVVVGNVGN

SEQ ID NO: 62354 - protein, 9 aa, synthetic construct
  source 1..9: note = Seed: LVVVGAVGV (KRAS G12V)
MVVVGNVGQ

SEQ ID NO: 62355 - protein, 9 aa, synthetic construct
  source 1..9: note = Seed: LVVVGAVGV (KRAS G12V)
MVVVGNVGR

SEQ ID NO: 62356 - protein, 9 aa, synthetic construct
  source 1..9: note = Seed: LVVVGAVGV (KRAS G12V)
MVVVGNVGS

SEQ ID NO: 62357 - protein, 9 aa, synthetic construct
  source 1..9: note = Seed: LVVVGAVGV (KRAS G12V)
MVVVGNVGT

SEQ ID NO: 62358 - protein, 9 aa, synthetic construct
  source 1..9: note = Seed: LVVVGAVGV (KRAS G12V)
MVVVGNVGV

SEQ ID NO: 62359 - protein, 9 aa, synthetic construct
  source 1..9: note = Seed: LVVVGAVGV (KRAS G12V)
MVVVGNVGY

SEQ ID NO: 62360 - protein, 9 aa, synthetic construct
  source 1..9: note = Seed: LVVVGAVGV (KRAS G12V)
MVVVGPVGA

SEQ ID NO: 62361 - protein, 9 aa, synthetic construct
  source 1..9: note = Seed: LVVVGAVGV (KRAS G12V)
MVVVGPVGC

SEQ ID NO: 62362 - protein, 9 aa, synthetic construct
  source 1..9: note = Seed: LVVVGAVGV (KRAS G12V)
MVVVGPVGD

SEQ ID NO: 62363 - protein, 9 aa, synthetic construct
  source 1..9: note = Seed: LVVVGAVGV (KRAS G12V)
MVVVGPVGE

SEQ ID NO: 62364 - protein, 9 aa, synthetic construct
  source 1..9: note = Seed: LVVVGAVGV (KRAS G12V)
MVVVGPVGF

SEQ ID NO: 62365 - protein, 9 aa, synthetic construct
  source 1..9: note = Seed: LVVVGAVGV (KRAS G12V)
MVVVGPVGG

SEQ ID NO: 62366 - protein, 9 aa, synthetic construct
  source 1..9: note = Seed: LVVVGAVGV (KRAS G12V)
MVVVGPVGH

SEQ ID NO: 62367 - protein, 9 aa, synthetic construct
  source 1..9: note = Seed: LVVVGAVGV (KRAS G12V)
MVVVGPVGI

SEQ ID NO: 62368 - protein, 9 aa, synthetic construct
  source 1..9: note = Seed: LVVVGAVGV (KRAS G12V)
MVVVGPVGL

SEQ ID NO: 62369 - protein, 9 aa, synthetic construct
  source 1..9: note = Seed: LVVVGAVGV (KRAS G12V)
MVVVGPVGM

SEQ ID NO: 62370 - protein, 9 aa, synthetic construct
  source 1..9: note = Seed: LVVVGAVGV (KRAS G12V)
MVVVGPVGN

SEQ ID NO: 62371 - protein, 9 aa, synthetic construct
  source 1..9: note = Seed: LVVVGAVGV (KRAS G12V)
MVVVGPVGQ

SEQ ID NO: 62372 - protein, 9 aa, synthetic construct
  source 1..9: note = Seed: LVVVGAVGV (KRAS G12V)
MVVVGPVGR

SEQ ID NO: 62373 - protein, 9 aa, synthetic construct
  source 1..9: note = Seed: LVVVGAVGV (KRAS G12V)
MVVVGPVGS

SEQ ID NO: 62374 - protein, 9 aa, synthetic construct
  source 1..9: note = Seed: LVVVGAVGV (KRAS G12V)
MVVVGPVGT

SEQ ID NO: 62375 - protein, 9 aa, synthetic construct
  source 1..9: note = Seed: LVVVGAVGV (KRAS G12V)
MVVVGPVGV

SEQ ID NO: 62376 - protein, 9 aa, synthetic construct
  source 1..9: note = Seed: LVVVGAVGV (KRAS G12V)
MVVVGQVGA

SEQ ID NO: 62377 - protein, 9 aa, synthetic construct
  source 1..9: note = Seed: LVVVGAVGV (KRAS G12V)
MVVVGQVGI

SEQ ID NO: 62378 - protein, 9 aa, synthetic construct
  source 1..9: note = Seed: LVVVGAVGV (KRAS G12V)
MVVVGQVGL

SEQ ID NO: 62379 - protein, 9 aa, synthetic construct
  source 1..9: note = Seed: LVVVGAVGV (KRAS G12V)
MVVVGQVGM

SEQ ID NO: 62380 - protein, 9 aa, synthetic construct
  source 1..9: note = Seed: LVVVGAVGV (KRAS G12V)
MVVVGQVGV

SEQ ID NO: 62381 - protein, 9 aa, synthetic construct
  source 1..9: note = Seed: LVVVGAVGV (KRAS G12V)
MVVVGRVGA

SEQ ID NO: 62382 - protein, 9 aa, synthetic construct
  source 1..9: note = Seed: LVVVGAVGV (KRAS G12V)
MVVVGRVGG

SEQ ID NO: 62383 - protein, 9 aa, synthetic construct
  source 1..9: note = Seed: LVVVGAVGV (KRAS G12V)
MVVVGRVGH

SEQ ID NO: 62384 - protein, 9 aa, synthetic construct
  source 1..9: note = Seed: LVVVGAVGV (KRAS G12V)
MVVVGRVGI

SEQ ID NO: 62385 - protein, 9 aa, synthetic construct
  source 1..9: note = Seed: LVVVGAVGV (KRAS G12V)
MVVVGRVGK

SEQ ID NO: 62386 - protein, 9 aa, synthetic construct
  source 1..9: note = Seed: LVVVGAVGV (KRAS G12V)
MVVVGRVGL

SEQ ID NO: 62387 - protein, 9 aa, synthetic construct
  source 1..9: note = Seed: LVVVGAVGV (KRAS G12V)
MVVVGRVGM

SEQ ID NO: 62388 - protein, 9 aa, synthetic construct
  source 1..9: note = Seed: LVVVGAVGV (KRAS G12V)
MVVVGRVGN

SEQ ID NO: 62389 - protein, 9 aa, synthetic construct
  source 1..9: note = Seed: LVVVGAVGV (KRAS G12V)
MVVVGRVGP

SEQ ID NO: 62390 - protein, 9 aa, synthetic construct
  source 1..9: note = Seed: LVVVGAVGV (KRAS G12V)
MVVVGRVGQ

SEQ ID NO: 62391 - protein, 9 aa, synthetic construct
  source 1..9: note = Seed: LVVVGAVGV (KRAS G12V)
MVVVGRVGR

SEQ ID NO: 62392 - protein, 9 aa, synthetic construct
  source 1..9: note = Seed: LVVVGAVGV (KRAS G12V)
MVVVGRVGS

SEQ ID NO: 62393 - protein, 9 aa, synthetic construct
  source 1..9: note = Seed: LVVVGAVGV (KRAS G12V)
MVVVGRVGT

SEQ ID NO: 62394 - protein, 9 aa, synthetic construct
  source 1..9: note = Seed: LVVVGAVGV (KRAS G12V)
MVVVGRVGV

SEQ ID NO: 62395 - protein, 9 aa, synthetic construct
  source 1..9: note = Seed: LVVVGAVGV (KRAS G12V)
MVVVGRVGY

SEQ ID NO: 62396 - protein, 9 aa, synthetic construct
  source 1..9: note = Seed: LVVVGAVGV (KRAS G12V)
MVVVGSVGA

SEQ ID NO: 62397 - protein, 9 aa, synthetic construct
  source 1..9: note = Seed: LVVVGAVGV (KRAS G12V)
MVVVGSVGC

SEQ ID NO: 62398 - protein, 9 aa, synthetic construct
  source 1..9: note = Seed: LVVVGAVGV (KRAS G12V)
MVVVGSVGE

SEQ ID NO: 62399 - protein, 9 aa, synthetic construct
  source 1..9: note = Seed: LVVVGAVGV (KRAS G12V)
MVVVGSVGF

SEQ ID NO: 62400 - protein, 9 aa, synthetic construct
  source 1..9: note = Seed: LVVVGAVGV (KRAS G12V)
MVVVGSVGG

SEQ ID NO: 62401 - protein, 9 aa, synthetic construct
  source 1..9: note = Seed: LVVVGAVGV (KRAS G12V)
MVVVGSVGH

SEQ ID NO: 62402 - protein, 9 aa, synthetic construct
  source 1..9: note = Seed: LVVVGAVGV (KRAS G12V)
MVVVGSVGI

SEQ ID NO: 62403 - protein, 9 aa, synthetic construct
  source 1..9: note = Seed: LVVVGAVGV (KRAS G12V)
MVVVGSVGK

SEQ ID NO: 62404 - protein, 9 aa, synthetic construct
  source 1..9: note = Seed: LVVVGAVGV (KRAS G12V)
MVVVGSVGL

SEQ ID NO: 62405 - protein, 9 aa, synthetic construct
  source 1..9: note = Seed: LVVVGAVGV (KRAS G12V)
MVVVGSVGM

SEQ ID NO: 62406 - protein, 9 aa, synthetic construct
  source 1..9: note = Seed: LVVVGAVGV (KRAS G12V)
MVVVGSVGN

SEQ ID NO: 62407 - protein, 9 aa, synthetic construct
  source 1..9: note = Seed: LVVVGAVGV (KRAS G12V)
MVVVGSVGQ

SEQ ID NO: 62408 - protein, 9 aa, synthetic construct
  source 1..9: note = Seed: LVVVGAVGV (KRAS G12V)
MVVVGSVGR

SEQ ID NO: 62409 - protein, 9 aa, synthetic construct
  source 1..9: note = Seed: LVVVGAVGV (KRAS G12V)
MVVVGSVGS

SEQ ID NO: 62410 - protein, 9 aa, synthetic construct
  source 1..9: note = Seed: LVVVGAVGV (KRAS G12V)
MVVVGSVGT

SEQ ID NO: 62411 - protein, 9 aa, synthetic construct
  source 1..9: note = Seed: LVVVGAVGV (KRAS G12V)
MVVVGSVGV

SEQ ID NO: 62412 - protein, 9 aa, synthetic construct
  source 1..9: note = Seed: LVVVGAVGV (KRAS G12V)
MVVVGSVGY

SEQ ID NO: 62413 - protein, 9 aa, synthetic construct
  source 1..9: note = Seed: LVVVGAVGV (KRAS G12V)
MVVVGTVGA

SEQ ID NO: 62414 - protein, 9 aa, synthetic construct
  source 1..9: note = Seed: LVVVGAVGV (KRAS G12V)
MVVVGTVGC

SEQ ID NO: 62415 - protein, 9 aa, synthetic construct
  source 1..9: note = Seed: LVVVGAVGV (KRAS G12V)
MVVVGTVGE

SEQ ID NO: 62416 - protein, 9 aa, synthetic construct
  source 1..9: note = Seed: LVVVGAVGV (KRAS G12V)
MVVVGTVGF

SEQ ID NO: 62417 - protein, 9 aa, synthetic construct
  source 1..9: note = Seed: LVVVGAVGV (KRAS G12V)
MVVVGTVGG

SEQ ID NO: 62418 - protein, 9 aa, synthetic construct
  source 1..9: note = Seed: LVVVGAVGV (KRAS G12V)
MVVVGTVGH

SEQ ID NO: 62419 - protein, 9 aa, synthetic construct
  source 1..9: note = Seed: LVVVGAVGV (KRAS G12V)
MVVVGTVGI

SEQ ID NO: 62420 - protein, 9 aa, synthetic construct
  source 1..9: note = Seed: LVVVGAVGV (KRAS G12V)
MVVVGTVGL

SEQ ID NO: 62421 - protein, 9 aa, synthetic construct
  source 1..9: note = Seed: LVVVGAVGV (KRAS G12V)
MVVVGTVGM

SEQ ID NO: 62422 - protein, 9 aa, synthetic construct
  source 1..9: note = Seed: LVVVGAVGV (KRAS G12V)
MVVVGTVGN

SEQ ID NO: 62423 - protein, 9 aa, synthetic construct
  source 1..9: note = Seed: LVVVGAVGV (KRAS G12V)
MVVVGTVGQ

SEQ ID NO: 62424 - protein, 9 aa, synthetic construct
  source 1..9: note = Seed: LVVVGAVGV (KRAS G12V)
MVVVGTVGR

SEQ ID NO: 62425 - protein, 9 aa, synthetic construct
  source 1..9: note = Seed: LVVVGAVGV (KRAS G12V)
MVVVGTVGS

SEQ ID NO: 62426 - protein, 9 aa, synthetic construct
  source 1..9: note = Seed: LVVVGAVGV (KRAS G12V)
MVVVGTVGT

SEQ ID NO: 62427 - protein, 9 aa, synthetic construct
  source 1..9: note = Seed: LVVVGAVGV (KRAS G12V)
MVVVGTVGV

SEQ ID NO: 62428 - protein, 9 aa, synthetic construct
  source 1..9: note = Seed: LVVVGAVGV (KRAS G12V)
MVVVGTVGY

SEQ ID NO: 62429 - protein, 9 aa, synthetic construct
  source 1..9: note = Seed: LVVVGAVGV (KRAS G12V)
MVVVGVVGA

SEQ ID NO: 62430 - protein, 9 aa, synthetic construct
  source 1..9: note = Seed: LVVVGAVGV (KRAS G12V)
MVVVGVVGH

SEQ ID NO: 62431 - protein, 9 aa, synthetic construct
  source 1..9: note = Seed: LVVVGAVGV (KRAS G12V)
MVVVGVVGI

SEQ ID NO: 62432 - protein, 9 aa, synthetic construct
  source 1..9: note = Seed: LVVVGAVGV (KRAS G12V)
MVVVGVVGL

SEQ ID NO: 62433 - protein, 9 aa, synthetic construct
  source 1..9: note = Seed: LVVVGAVGV (KRAS G12V)
MVVVGVVGM

SEQ ID NO: 62434 - protein, 9 aa, synthetic construct
  source 1..9: note = Seed: LVVVGAVGV (KRAS G12V)
MVVVGVVGN

SEQ ID NO: 62435 - protein, 9 aa, synthetic construct
  source 1..9: note = Seed: LVVVGAVGV (KRAS G12V)
MVVVGVVGQ

SEQ ID NO: 62436 - protein, 9 aa, synthetic construct
  source 1..9: note = Seed: LVVVGAVGV (KRAS G12V)
MVVVGVVGS

SEQ ID NO: 62437 - protein, 9 aa, synthetic construct
  source 1..9: note = Seed: LVVVGAVGV (KRAS G12V)
MVVVGVVGT

SEQ ID NO: 62438 - protein, 9 aa, synthetic construct
  source 1..9: note = Seed: LVVVGAVGV (KRAS G12V)
MVVVGVVGV

SEQ ID NO: 62439 - protein, 9 aa, synthetic construct
  source 1..9: note = Seed: LVVVGAVGV (KRAS G12V)
MVVWGAVGA

SEQ ID NO: 62440 - protein, 9 aa, synthetic construct
  source 1..9: note = Seed: LVVVGAVGV (KRAS G12V)
MVVWGAVGI

SEQ ID NO: 62441 - protein, 9 aa, synthetic construct
  source 1..9: note = Seed: LVVVGAVGV (KRAS G12V)
MVVWGAVGL

SEQ ID NO: 62442 - protein, 9 aa, synthetic construct
  source 1..9: note = Seed: LVVVGAVGV (KRAS G12V)
MVVWGAVGM

SEQ ID NO: 62443 - protein, 9 aa, synthetic construct
  source 1..9: note = Seed: LVVVGAVGV (KRAS G12V)
MVVWGAVGV

SEQ ID NO: 62444 - protein, 9 aa, synthetic construct
  source 1..9: note = Seed: LVVVGAVGV (KRAS G12V)
MVVWGDVGA

SEQ ID NO: 62445 - protein, 9 aa, synthetic construct
  source 1..9: note = Seed: LVVVGAVGV (KRAS G12V)
MVVWGDVGI

SEQ ID NO: 62446 - protein, 9 aa, synthetic construct
  source 1..9: note = Seed: LVVVGAVGV (KRAS G12V)
MVVWGDVGL

SEQ ID NO: 62447 - protein, 9 aa, synthetic construct
  source 1..9: note = Seed: LVVVGAVGV (KRAS G12V)
MVVWGDVGV

SEQ ID NO: 62448 - protein, 9 aa, synthetic construct
  source 1..9: note = Seed: LVVVGAVGV (KRAS G12V)
MVVWGGVGI

SEQ ID NO: 62449 - protein, 9 aa, synthetic construct
  source 1..9: note = Seed: LVVVGAVGV (KRAS G12V)
MVVWGGVGL

SEQ ID NO: 62450 - protein, 9 aa, synthetic construct
  source 1..9: note = Seed: LVVVGAVGV (KRAS G12V)
MVVWGGVGV

SEQ ID NO: 62451 - protein, 9 aa, synthetic construct
  source 1..9: note = Seed: LVVVGAVGV (KRAS G12V)
MVVWGKVGA

SEQ ID NO: 62452 - protein, 9 aa, synthetic construct
  source 1..9: note = Seed: LVVVGAVGV (KRAS G12V)
MVVWGKVGH

SEQ ID NO: 62453 - protein, 9 aa, synthetic construct
  source 1..9: note = Seed: LVVVGAVGV (KRAS G12V)
MVVWGKVGK

SEQ ID NO: 62454 - protein, 9 aa, synthetic construct
  source 1..9: note = Seed: LVVVGAVGV (KRAS G12V)
MVVWGKVGR

SEQ ID NO: 62455 - protein, 9 aa, synthetic construct
  source 1..9: note = Seed: LVVVGAVGV (KRAS G12V)
MVVWGKVGS

SEQ ID NO: 62456 - protein, 9 aa, synthetic construct
  source 1..9: note = Seed: LVVVGAVGV (KRAS G12V)
MVVWGNVGA

SEQ ID NO: 62457 - protein, 9 aa, synthetic construct
  source 1..9: note = Seed: LVVVGAVGV (KRAS G12V)
MVVWGNVGF

SEQ ID NO: 62458 - protein, 9 aa, synthetic construct
  source 1..9: note = Seed: LVVVGAVGV (KRAS G12V)
MVVWGNVGI

SEQ ID NO: 62459 - protein, 9 aa, synthetic construct
  source 1..9: note = Seed: LVVVGAVGV (KRAS G12V)
MVVWGNVGL

SEQ ID NO: 62460 - protein, 9 aa, synthetic construct
  source 1..9: note = Seed: LVVVGAVGV (KRAS G12V)
MVVWGNVGM

SEQ ID NO: 62461 - protein, 9 aa, synthetic construct
  source 1..9: note = Seed: LVVVGAVGV (KRAS G12V)
MVVWGNVGT

SEQ ID NO: 62462 - protein, 9 aa, synthetic construct
  source 1..9: note = Seed: LVVVGAVGV (KRAS G12V)
MVVWGNVGV

SEQ ID NO: 62463 - protein, 9 aa, synthetic construct
  source 1..9: note = Seed: LVVVGAVGV (KRAS G12V)
MVVWGPVGA

SEQ ID NO: 62464 - protein, 9 aa, synthetic construct
  source 1..9: note = Seed: LVVVGAVGV (KRAS G12V)
MVVWGPVGI

SEQ ID NO: 62465 - protein, 9 aa, synthetic construct
  source 1..9: note = Seed: LVVVGAVGV (KRAS G12V)
MVVWGPVGL

SEQ ID NO: 62466 - protein, 9 aa, synthetic construct
  source 1..9: note = Seed: LVVVGAVGV (KRAS G12V)
MVVWGPVGM

SEQ ID NO: 62467 - protein, 9 aa, synthetic construct
  source 1..9: note = Seed: LVVVGAVGV (KRAS G12V)
MVVWGPVGV

SEQ ID NO: 62468 - protein, 9 aa, synthetic construct
  source 1..9: note = Seed: LVVVGAVGV (KRAS G12V)
MVVWGRVGA

SEQ ID NO: 62469 - protein, 9 aa, synthetic construct
  source 1..9: note = Seed: LVVVGAVGV (KRAS G12V)
MVVWGRVGF

SEQ ID NO: 62470 - protein, 9 aa, synthetic construct
  source 1..9: note = Seed: LVVVGAVGV (KRAS G12V)
MVVWGRVGH

SEQ ID NO: 62471 - protein, 9 aa, synthetic construct
  source 1..9: note = Seed: LVVVGAVGV (KRAS G12V)
MVVWGRVGK

SEQ ID NO: 62472 - protein, 9 aa, synthetic construct
  source 1..9: note = Seed: LVVVGAVGV (KRAS G12V)
MVVWGRVGL

SEQ ID NO: 62473 - protein, 9 aa, synthetic construct
  source 1..9: note = Seed: LVVVGAVGV (KRAS G12V)
MVVWGRVGM

SEQ ID NO: 62474 - protein, 9 aa, synthetic construct
  source 1..9: note = Seed: LVVVGAVGV (KRAS G12V)
MVVWGRVGQ

SEQ ID NO: 62475 - protein, 9 aa, synthetic construct
  source 1..9: note = Seed: LVVVGAVGV (KRAS G12V)
MVVWGRVGR

SEQ ID NO: 62476 - protein, 9 aa, synthetic construct
  source 1..9: note = Seed: LVVVGAVGV (KRAS G12V)
MVVWGRVGS

SEQ ID NO: 62477 - protein, 9 aa, synthetic construct
  source 1..9: note = Seed: LVVVGAVGV (KRAS G12V)
MVVWGRVGY

SEQ ID NO: 62478 - protein, 9 aa, synthetic construct
  source 1..9: note = Seed: LVVVGAVGV (KRAS G12V)
MVVWGSVGA

SEQ ID NO: 62479 - protein, 9 aa, synthetic construct
  source 1..9: note = Seed: LVVVGAVGV (KRAS G12V)
MVVWGSVGF

SEQ ID NO: 62480 - protein, 9 aa, synthetic construct
  source 1..9: note = Seed: LVVVGAVGV (KRAS G12V)
MVVWGSVGI

SEQ ID NO: 62481 - protein, 9 aa, synthetic construct
  source 1..9: note = Seed: LVVVGAVGV (KRAS G12V)
MVVWGSVGL

SEQ ID NO: 62482 - protein, 9 aa, synthetic construct
  source 1..9: note = Seed: LVVVGAVGV (KRAS G12V)
MVVWGSVGM

SEQ ID NO: 62483 - protein, 9 aa, synthetic construct
  source 1..9: note = Seed: LVVVGAVGV (KRAS G12V)
MVVWGSVGS

SEQ ID NO: 62484 - protein, 9 aa, synthetic construct
  source 1..9: note = Seed: LVVVGAVGV (KRAS G12V)
MVVWGSVGT

SEQ ID NO: 62485 - protein, 9 aa, synthetic construct
  source 1..9: note = Seed: LVVVGAVGV (KRAS G12V)
MVVWGSVGV

SEQ ID NO: 62486 - protein, 9 aa, synthetic construct
  source 1..9: note = Seed: LVVVGAVGV (KRAS G12V)
MVVWGTVGI

SEQ ID NO: 62487 - protein, 9 aa, synthetic construct
  source 1..9: note = Seed: LVVVGAVGV (KRAS G12V)
MVVWGTVGL

SEQ ID NO: 62488 - protein, 9 aa, synthetic construct
  source 1..9: note = Seed: LVVVGAVGV (KRAS G12V)
MVVWGTVGV

SEQ ID NO: 62489 - protein, 9 aa, synthetic construct
  source 1..9: note = Seed: LVVVGAVGV (KRAS G12V)
MVVYGAVGA

SEQ ID NO: 62490 - protein, 9 aa, synthetic construct
  source 1..9: note = Seed: LVVVGAVGV (KRAS G12V)
MVVYGAVGF

SEQ ID NO: 62491 - protein, 9 aa, synthetic construct
  source 1..9: note = Seed: LVVVGAVGV (KRAS G12V)
MVVYGAVGI

SEQ ID NO: 62492 - protein, 9 aa, synthetic construct
  source 1..9: note = Seed: LVVVGAVGV (KRAS G12V)
MVVYGAVGL

SEQ ID NO: 62493 - protein, 9 aa, synthetic construct
  source 1..9: note = Seed: LVVVGAVGV (KRAS G12V)
MVVYGAVGM

SEQ ID NO: 62494 - protein, 9 aa, synthetic construct
  source 1..9: note = Seed: LVVVGAVGV (KRAS G12V)
MVVYGAVGS

SEQ ID NO: 62495 - protein, 9 aa, synthetic construct
  source 1..9: note = Seed: LVVVGAVGV (KRAS G12V)
MVVYGAVGT

SEQ ID NO: 62496 - protein, 9 aa, synthetic construct
  source 1..9: note = Seed: LVVVGAVGV (KRAS G12V)
MVVYGAVGV

SEQ ID NO: 62497 - protein, 9 aa, synthetic construct
  source 1..9: note = Seed: LVVVGAVGV (KRAS G12V)
MVVYGDVGA

SEQ ID NO: 62498 - protein, 9 aa, synthetic construct
  source 1..9: note = Seed: LVVVGAVGV (KRAS G12V)
MVVYGDVGI

SEQ ID NO: 62499 - protein, 9 aa, synthetic construct
  source 1..9: note = Seed: LVVVGAVGV (KRAS G12V)
MVVYGDVGL

SEQ ID NO: 62500 - protein, 9 aa, synthetic construct
  source 1..9: note = Seed: LVVVGAVGV (KRAS G12V)
MVVYGDVGM

SEQ ID NO: 62501 - protein, 9 aa, synthetic construct
  source 1..9: note = Seed: LVVVGAVGV (KRAS G12V)
MVVYGDVGV

SEQ ID NO: 62502 - protein, 9 aa, synthetic construct
  source 1..9: note = Seed: LVVVGAVGV (KRAS G12V)
MVVYGGVGA

SEQ ID NO: 62503 - protein, 9 aa, synthetic construct
  source 1..9: note = Seed: LVVVGAVGV (KRAS G12V)
MVVYGGVGF

SEQ ID NO: 62504 - protein, 9 aa, synthetic construct
  source 1..9: note = Seed: LVVVGAVGV (KRAS G12V)
MVVYGGVGI

SEQ ID NO: 62505 - protein, 9 aa, synthetic construct
  source 1..9: note = Seed: LVVVGAVGV (KRAS G12V)
MVVYGGVGL

SEQ ID NO: 62506 - protein, 9 aa, synthetic construct
  source 1..9: note = Seed: LVVVGAVGV (KRAS G12V)
MVVYGGVGM

SEQ ID NO: 62507 - protein, 9 aa, synthetic construct
  source 1..9: note = Seed: LVVVGAVGV (KRAS G12V)
MVVYGGVGS

SEQ ID NO: 62508 - protein, 9 aa, synthetic construct
  source 1..9: note = Seed: LVVVGAVGV (KRAS G12V)
MVVYGGVGT

SEQ ID NO: 62509 - protein, 9 aa, synthetic construct
  source 1..9: note = Seed: LVVVGAVGV (KRAS G12V)
MVVYGGVGV

SEQ ID NO: 62510 - protein, 9 aa, synthetic construct
  source 1..9: note = Seed: LVVVGAVGV (KRAS G12V)
MVVYGKVGH

SEQ ID NO: 62511 - protein, 9 aa, synthetic construct
  source 1..9: note = Seed: LVVVGAVGV (KRAS G12V)
MVVYGKVGK

SEQ ID NO: 62512 - protein, 9 aa, synthetic construct
  source 1..9: note = Seed: LVVVGAVGV (KRAS G12V)
MVVYGKVGR

SEQ ID NO: 62513 - protein, 9 aa, synthetic construct
  source 1..9: note = Seed: LVVVGAVGV (KRAS G12V)
MVVYGLVGR

SEQ ID NO: 62514 - protein, 9 aa, synthetic construct
  source 1..9: note = Seed: LVVVGAVGV (KRAS G12V)
MVVYGMVGA

SEQ ID NO: 62515 - protein, 9 aa, synthetic construct
  source 1..9: note = Seed: LVVVGAVGV (KRAS G12V)
MVVYGMVGR

SEQ ID NO: 62516 - protein, 9 aa, synthetic construct
  source 1..9: note = Seed: LVVVGAVGV (KRAS G12V)
MVVYGNVGA

SEQ ID NO: 62517 - protein, 9 aa, synthetic construct
  source 1..9: note = Seed: LVVVGAVGV (KRAS G12V)
MVVYGNVGF

SEQ ID NO: 62518 - protein, 9 aa, synthetic construct
  source 1..9: note = Seed: LVVVGAVGV (KRAS G12V)
MVVYGNVGG

SEQ ID NO: 62519 - protein, 9 aa, synthetic construct
  source 1..9: note = Seed: LVVVGAVGV (KRAS G12V)
MVVYGNVGH

SEQ ID NO: 62520 - protein, 9 aa, synthetic construct
  source 1..9: note = Seed: LVVVGAVGV (KRAS G12V)
MVVYGNVGI

SEQ ID NO: 62521 - protein, 9 aa, synthetic construct
  source 1..9: note = Seed: LVVVGAVGV (KRAS G12V)
MVVYGNVGL

SEQ ID NO: 62522 - protein, 9 aa, synthetic construct
  source 1..9: note = Seed: LVVVGAVGV (KRAS G12V)
MVVYGNVGM

SEQ ID NO: 62523 - protein, 9 aa, synthetic construct
  source 1..9: note = Seed: LVVVGAVGV (KRAS G12V)
MVVYGNVGR

SEQ ID NO: 62524 - protein, 9 aa, synthetic construct
  source 1..9: note = Seed: LVVVGAVGV (KRAS G12V)
MVVYGNVGS

SEQ ID NO: 62525 - protein, 9 aa, synthetic construct
  source 1..9: note = Seed: LVVVGAVGV (KRAS G12V)
MVVYGNVGT

SEQ ID NO: 62526 - protein, 9 aa, synthetic construct
  source 1..9: note = Seed: LVVVGAVGV (KRAS G12V)
MVVYGNVGV

SEQ ID NO: 62527 - protein, 9 aa, synthetic construct
  source 1..9: note = Seed: LVVVGAVGV (KRAS G12V)
MVVYGNVGY

SEQ ID NO: 62528 - protein, 9 aa, synthetic construct
  source 1..9: note = Seed: LVVVGAVGV (KRAS G12V)
MVVYGPVGL

SEQ ID NO: 62529 - protein, 9 aa, synthetic construct
  source 1..9: note = Seed: LVVVGAVGV (KRAS G12V)
MVVYGPVGV

SEQ ID NO: 62530 - protein, 9 aa, synthetic construct
  source 1..9: note = Seed: LVVVGAVGV (KRAS G12V)
MVVYGRVGA

SEQ ID NO: 62531 - protein, 9 aa, synthetic construct
  source 1..9: note = Seed: LVVVGAVGV (KRAS G12V)
MVVYGRVGH

SEQ ID NO: 62532 - protein, 9 aa, synthetic construct
  source 1..9: note = Seed: LVVVGAVGV (KRAS G12V)
MVVYGRVGK

SEQ ID NO: 62533 - protein, 9 aa, synthetic construct
  source 1..9: note = Seed: LVVVGAVGV (KRAS G12V)
MVVYGRVGR

SEQ ID NO: 62534 - protein, 9 aa, synthetic construct
  source 1..9: note = Seed: LVVVGAVGV (KRAS G12V)
MVVYGSVGA

SEQ ID NO: 62535 - protein, 9 aa, synthetic construct
  source 1..9: note = Seed: LVVVGAVGV (KRAS G12V)
MVVYGSVGF

SEQ ID NO: 62536 - protein, 9 aa, synthetic construct
  source 1..9: note = Seed: LVVVGAVGV (KRAS G12V)
MVVYGSVGG

SEQ ID NO: 62537 - protein, 9 aa, synthetic construct
  source 1..9: note = Seed: LVVVGAVGV (KRAS G12V)
MVVYGSVGH

SEQ ID NO: 62538 - protein, 9 aa, synthetic construct
  source 1..9: note = Seed: LVVVGAVGV (KRAS G12V)
MVVYGSVGI

SEQ ID NO: 62539 - protein, 9 aa, synthetic construct
  source 1..9: note = Seed: LVVVGAVGV (KRAS G12V)
MVVYGSVGL

SEQ ID NO: 62540 - protein, 9 aa, synthetic construct
  source 1..9: note = Seed: LVVVGAVGV (KRAS G12V)
MVVYGSVGM

SEQ ID NO: 62541 - protein, 9 aa, synthetic construct
  source 1..9: note = Seed: LVVVGAVGV (KRAS G12V)
MVVYGSVGR

SEQ ID NO: 62542 - protein, 9 aa, synthetic construct
  source 1..9: note = Seed: LVVVGAVGV (KRAS G12V)
MVVYGSVGS

SEQ ID NO: 62543 - protein, 9 aa, synthetic construct
  source 1..9: note = Seed: LVVVGAVGV (KRAS G12V)
MVVYGSVGT

SEQ ID NO: 62544 - protein, 9 aa, synthetic construct
  source 1..9: note = Seed: LVVVGAVGV (KRAS G12V)
MVVYGSVGV

SEQ ID NO: 62545 - protein, 9 aa, synthetic construct
  source 1..9: note = Seed: LVVVGAVGV (KRAS G12V)
MVVYGSVGY

SEQ ID NO: 62546 - protein, 9 aa, synthetic construct
  source 1..9: note = Seed: LVVVGAVGV (KRAS G12V)
MVVYGTVGA

SEQ ID NO: 62547 - protein, 9 aa, synthetic construct
  source 1..9: note = Seed: LVVVGAVGV (KRAS G12V)
MVVYGTVGI

SEQ ID NO: 62548 - protein, 9 aa, synthetic construct
  source 1..9: note = Seed: LVVVGAVGV (KRAS G12V)
MVVYGTVGL

SEQ ID NO: 62549 - protein, 9 aa, synthetic construct
  source 1..9: note = Seed: LVVVGAVGV (KRAS G12V)
MVVYGTVGM

SEQ ID NO: 62550 - protein, 9 aa, synthetic construct
  source 1..9: note = Seed: LVVVGAVGV (KRAS G12V)
MVVYGTVGT

SEQ ID NO: 62551 - protein, 9 aa, synthetic construct
  source 1..9: note = Seed: LVVVGAVGV (KRAS G12V)
MVVYGTVGV

SEQ ID NO: 62552 - protein, 9 aa, synthetic construct
  source 1..9: note = Seed: LVVVGAVGV (KRAS G12V)
NVVIGRVGR

SEQ ID NO: 62553 - protein, 9 aa, synthetic construct
  source 1..9: note = Seed: LVVVGAVGV (KRAS G12V)
NVVLGAVGA

SEQ ID NO: 62554 - protein, 9 aa, synthetic construct
  source 1..9: note = Seed: LVVVGAVGV (KRAS G12V)
NVVLGAVGI

SEQ ID NO: 62555 - protein, 9 aa, synthetic construct
  source 1..9: note = Seed: LVVVGAVGV (KRAS G12V)
NVVLGAVGL

SEQ ID NO: 62556 - protein, 9 aa, synthetic construct
  source 1..9: note = Seed: LVVVGAVGV (KRAS G12V)
NVVLGAVGM

SEQ ID NO: 62557 - protein, 9 aa, synthetic construct
  source 1..9: note = Seed: LVVVGAVGV (KRAS G12V)
NVVLGAVGV

SEQ ID NO: 62558 - protein, 9 aa, synthetic construct
  source 1..9: note = Seed: LVVVGAVGV (KRAS G12V)
NVVLGGVGI

SEQ ID NO: 62559 - protein, 9 aa, synthetic construct
  source 1..9: note = Seed: LVVVGAVGV (KRAS G12V)
NVVLGGVGL

SEQ ID NO: 62560 - protein, 9 aa, synthetic construct
  source 1..9: note = Seed: LVVVGAVGV (KRAS G12V)
NVVLGGVGV

SEQ ID NO: 62561 - protein, 9 aa, synthetic construct
  source 1..9: note = Seed: LVVVGAVGV (KRAS G12V)
NVVLGRVGR

SEQ ID NO: 62562 - protein, 9 aa, synthetic construct
  source 1..9: note = Seed: LVVVGAVGV (KRAS G12V)
NVVLGSVGI

SEQ ID NO: 62563 - protein, 9 aa, synthetic construct
  source 1..9: note = Seed: LVVVGAVGV (KRAS G12V)
NVVLGSVGL

SEQ ID NO: 62564 - protein, 9 aa, synthetic construct
  source 1..9: note = Seed: LVVVGAVGV (KRAS G12V)
NVVLGSVGM

SEQ ID NO: 62565 - protein, 9 aa, synthetic construct
  source 1..9: note = Seed: LVVVGAVGV (KRAS G12V)
NVVLGSVGV

SEQ ID NO: 62566 - protein, 9 aa, synthetic construct
  source 1..9: note = Seed: LVVVGAVGV (KRAS G12V)
NVVMGAVGI

SEQ ID NO: 62567 - protein, 9 aa, synthetic construct
  source 1..9: note = Seed: LVVVGAVGV (KRAS G12V)
NVVMGAVGL

SEQ ID NO: 62568 - protein, 9 aa, synthetic construct
  source 1..9: note = Seed: LVVVGAVGV (KRAS G12V)
NVVMGAVGM

SEQ ID NO: 62569 - protein, 9 aa, synthetic construct
  source 1..9: note = Seed: LVVVGAVGV (KRAS G12V)
NVVMGAVGV

SEQ ID NO: 62570 - protein, 9 aa, synthetic construct
  source 1..9: note = Seed: LVVVGAVGV (KRAS G12V)
NVVMGGVGI

SEQ ID NO: 62571 - protein, 9 aa, synthetic construct
  source 1..9: note = Seed: LVVVGAVGV (KRAS G12V)
NVVMGGVGL

SEQ ID NO: 62572 - protein, 9 aa, synthetic construct
  source 1..9: note = Seed: LVVVGAVGV (KRAS G12V)
NVVMGSVGI

SEQ ID NO: 62573 - protein, 9 aa, synthetic construct
  source 1..9: note = Seed: LVVVGAVGV (KRAS G12V)
NVVMGSVGL

SEQ ID NO: 62574 - protein, 9 aa, synthetic construct
  source 1..9: note = Seed: LVVVGAVGV (KRAS G12V)
NVVMGSVGV

SEQ ID NO: 62575 - protein, 9 aa, synthetic construct
  source 1..9: note = Seed: LVVVGAVGV (KRAS G12V)
PVVLGAVGI

SEQ ID NO: 62576 - protein, 9 aa, synthetic construct
  source 1..9: note = Seed: LVVVGAVGV (KRAS G12V)
PVVLGAVGL

SEQ ID NO: 62577 - protein, 9 aa, synthetic construct
  source 1..9: note = Seed: LVVVGAVGV (KRAS G12V)
PVVLGAVGM

SEQ ID NO: 62578 - protein, 9 aa, synthetic construct
  source 1..9: note = Seed: LVVVGAVGV (KRAS G12V)
PVVLGAVGV

SEQ ID NO: 62579 - protein, 9 aa, synthetic construct
  source 1..9: note = Seed: LVVVGAVGV (KRAS G12V)
PVVLGSVGL

SEQ ID NO: 62580 - protein, 9 aa, synthetic construct
  source 1..9: note = Seed: LVVVGAVGV (KRAS G12V)
PVVMGAVGI

SEQ ID NO: 62581 - protein, 9 aa, synthetic construct
  source 1..9: note = Seed: LVVVGAVGV (KRAS G12V)
PVVMGAVGL

SEQ ID NO: 62582 - protein, 9 aa, synthetic construct
  source 1..9: note = Seed: LVVVGAVGV (KRAS G12V)
PVVMGSVGL

SEQ ID NO: 62583 - protein, 9 aa, synthetic construct
  source 1..9: note = Seed: LVVVGAVGV (KRAS G12V)
QVVIGAVGL

SEQ ID NO: 62584 - protein, 9 aa, synthetic construct
  source 1..9: note = Seed: LVVVGAVGV (KRAS G12V)
QVVIGAVGV

SEQ ID NO: 62585 - protein, 9 aa, synthetic construct
  source 1..9: note = Seed: LVVVGAVGV (KRAS G12V)
QVVIGRVGR

SEQ ID NO: 62586 - protein, 9 aa, synthetic construct
  source 1..9: note = Seed: LVVVGAVGV (KRAS G12V)
QVVLGAVGA

SEQ ID NO: 62587 - protein, 9 aa, synthetic construct
  source 1..9: note = Seed: LVVVGAVGV (KRAS G12V)
QVVLGAVGI

SEQ ID NO: 62588 - protein, 9 aa, synthetic construct
  source 1..9: note = Seed: LVVVGAVGV (KRAS G12V)
QVVLGAVGL

SEQ ID NO: 62589 - protein, 9 aa, synthetic construct
  source 1..9: note = Seed: LVVVGAVGV (KRAS G12V)
QVVLGAVGM

SEQ ID NO: 62590 - protein, 9 aa, synthetic construct
  source 1..9: note = Seed: LVVVGAVGV (KRAS G12V)
QVVLGAVGV

SEQ ID NO: 62591 - protein, 9 aa, synthetic construct
  source 1..9: note = Seed: LVVVGAVGV (KRAS G12V)
QVVLGGVGI

SEQ ID NO: 62592 - protein, 9 aa, synthetic construct
  source 1..9: note = Seed: LVVVGAVGV (KRAS G12V)
QVVLGGVGL

SEQ ID NO: 62593 - protein, 9 aa, synthetic construct
  source 1..9: note = Seed: LVVVGAVGV (KRAS G12V)
QVVLGGVGM

SEQ ID NO: 62594 - protein, 9 aa, synthetic construct
  source 1..9: note = Seed: LVVVGAVGV (KRAS G12V)
QVVLGGVGV

SEQ ID NO: 62595 - protein, 9 aa, synthetic construct
  source 1..9: note = Seed: LVVVGAVGV (KRAS G12V)
QVVLGPVGL

SEQ ID NO: 62596 - protein, 9 aa, synthetic construct
  source 1..9: note = Seed: LVVVGAVGV (KRAS G12V)
QVVLGRVGR

SEQ ID NO: 62597 - protein, 9 aa, synthetic construct
  source 1..9: note = Seed: LVVVGAVGV (KRAS G12V)
QVVLGSVGA

SEQ ID NO: 62598 - protein, 9 aa, synthetic construct
  source 1..9: note = Seed: LVVVGAVGV (KRAS G12V)
QVVLGSVGI

SEQ ID NO: 62599 - protein, 9 aa, synthetic construct
  source 1..9: note = Seed: LVVVGAVGV (KRAS G12V)
QVVLGSVGL

SEQ ID NO: 62600 - protein, 9 aa, synthetic construct
  source 1..9: note = Seed: LVVVGAVGV (KRAS G12V)
QVVLGSVGM

SEQ ID NO: 62601 - protein, 9 aa, synthetic construct
  source 1..9: note = Seed: LVVVGAVGV (KRAS G12V)
QVVLGSVGV

SEQ ID NO: 62602 - protein, 9 aa, synthetic construct
  source 1..9: note = Seed: LVVVGAVGV (KRAS G12V)
QVVMGAVGA

SEQ ID NO: 62603 - protein, 9 aa, synthetic construct
  source 1..9: note = Seed: LVVVGAVGV (KRAS G12V)
QVVMGAVGI

SEQ ID NO: 62604 - protein, 9 aa, synthetic construct
  source 1..9: note = Seed: LVVVGAVGV (KRAS G12V)
QVVMGAVGL

SEQ ID NO: 62605 - protein, 9 aa, synthetic construct
  source 1..9: note = Seed: LVVVGAVGV (KRAS G12V)
QVVMGAVGM

SEQ ID NO: 62606 - protein, 9 aa, synthetic construct
  source 1..9: note = Seed: LVVVGAVGV (KRAS G12V)
QVVMGAVGV

SEQ ID NO: 62607 - protein, 9 aa, synthetic construct
  source 1..9: note = Seed: LVVVGAVGV (KRAS G12V)
QVVMGGVGI

SEQ ID NO: 62608 - protein, 9 aa, synthetic construct
  source 1..9: note = Seed: LVVVGAVGV (KRAS G12V)
QVVMGGVGL

SEQ ID NO: 62609 - protein, 9 aa, synthetic construct
  source 1..9: note = Seed: LVVVGAVGV (KRAS G12V)
QVVMGGVGM

SEQ ID NO: 62610 - protein, 9 aa, synthetic construct
  source 1..9: note = Seed: LVVVGAVGV (KRAS G12V)
QVVMGGVGV

SEQ ID NO: 62611 - protein, 9 aa, synthetic construct
  source 1..9: note = Seed: LVVVGAVGV (KRAS G12V)
QVVMGPVGL

SEQ ID NO: 62612 - protein, 9 aa, synthetic construct
  source 1..9: note = Seed: LVVVGAVGV (KRAS G12V)
QVVMGSVGI

SEQ ID NO: 62613 - protein, 9 aa, synthetic construct
  source 1..9: note = Seed: LVVVGAVGV (KRAS G12V)
QVVMGSVGL

SEQ ID NO: 62614 - protein, 9 aa, synthetic construct
  source 1..9: note = Seed: LVVVGAVGV (KRAS G12V)
QVVMGSVGM

SEQ ID NO: 62615 - protein, 9 aa, synthetic construct
  source 1..9: note = Seed: LVVVGAVGV (KRAS G12V)
QVVMGSVGV

SEQ ID NO: 62616 - protein, 9 aa, synthetic construct
  source 1..9: note = Seed: LVVVGAVGV (KRAS G12V)
QVVMGTVGL

SEQ ID NO: 62617 - protein, 9 aa, synthetic construct
  source 1..9: note = Seed: LVVVGAVGV (KRAS G12V)
RVVIGAVGI

SEQ ID NO: 62618 - protein, 9 aa, synthetic construct
  source 1..9: note = Seed: LVVVGAVGV (KRAS G12V)
RVVIGAVGV

SEQ ID NO: 62619 - protein, 9 aa, synthetic construct
  source 1..9: note = Seed: LVVVGAVGV (KRAS G12V)
RVVLGAVGI

SEQ ID NO: 62620 - protein, 9 aa, synthetic construct
  source 1..9: note = Seed: LVVVGAVGV (KRAS G12V)
RVVLGAVGL

SEQ ID NO: 62621 - protein, 9 aa, synthetic construct
  source 1..9: note = Seed: LVVVGAVGV (KRAS G12V)
RVVLGAVGM

SEQ ID NO: 62622 - protein, 9 aa, synthetic construct
  source 1..9: note = Seed: LVVVGAVGV (KRAS G12V)
RVVLGAVGV

SEQ ID NO: 62623 - protein, 9 aa, synthetic construct
  source 1..9: note = Seed: LVVVGAVGV (KRAS G12V)
RVVLGGVGL

SEQ ID NO: 62624 - protein, 9 aa, synthetic construct
  source 1..9: note = Seed: LVVVGAVGV (KRAS G12V)
RVVLGSVGI

SEQ ID NO: 62625 - protein, 9 aa, synthetic construct
  source 1..9: note = Seed: LVVVGAVGV (KRAS G12V)
RVVLGSVGL

SEQ ID NO: 62626 - protein, 9 aa, synthetic construct
  source 1..9: note = Seed: LVVVGAVGV (KRAS G12V)
RVVLGSVGV

SEQ ID NO: 62627 - protein, 9 aa, synthetic construct
  source 1..9: note = Seed: LVVVGAVGV (KRAS G12V)
RVVMGAVGI

SEQ ID NO: 62628 - protein, 9 aa, synthetic construct
  source 1..9: note = Seed: LVVVGAVGV (KRAS G12V)
RVVMGAVGL

SEQ ID NO: 62629 - protein, 9 aa, synthetic construct
  source 1..9: note = Seed: LVVVGAVGV (KRAS G12V)
RVVMGAVGM

SEQ ID NO: 62630 - protein, 9 aa, synthetic construct
  source 1..9: note = Seed: LVVVGAVGV (KRAS G12V)
RVVMGAVGV

SEQ ID NO: 62631 - protein, 9 aa, synthetic construct
  source 1..9: note = Seed: LVVVGAVGV (KRAS G12V)
RVVMGGVGL

SEQ ID NO: 62632 - protein, 9 aa, synthetic construct
  source 1..9: note = Seed: LVVVGAVGV (KRAS G12V)
RVVMGSVGI

SEQ ID NO: 62633 - protein, 9 aa, synthetic construct
  source 1..9: note = Seed: LVVVGAVGV (KRAS G12V)
RVVMGSVGL

SEQ ID NO: 62634 - protein, 9 aa, synthetic construct
  source 1..9: note = Seed: LVVVGAVGV (KRAS G12V)
RVVMGSVGV

SEQ ID NO: 62635 - protein, 9 aa, synthetic construct
  source 1..9: note = Seed: LVVVGAVGV (KRAS G12V)
RVVVGAVGI

SEQ ID NO: 62636 - protein, 9 aa, synthetic construct
  source 1..9: note = Seed: LVVVGAVGV (KRAS G12V)
RVVVGAVGV

SEQ ID NO: 62637 - protein, 9 aa, synthetic construct
  source 1..9: note = Seed: LVVVGAVGV (KRAS G12V)
SVVIGAVGL

SEQ ID NO: 62638 - protein, 9 aa, synthetic construct
  source 1..9: note = Seed: LVVVGAVGV (KRAS G12V)
SVVLGAVGA

SEQ ID NO: 62639 - protein, 9 aa, synthetic construct
  source 1..9: note = Seed: LVVVGAVGV (KRAS G12V)
SVVLGAVGI

SEQ ID NO: 62640 - protein, 9 aa, synthetic construct
  source 1..9: note = Seed: LVVVGAVGV (KRAS G12V)
SVVLGAVGL

SEQ ID NO: 62641 - protein, 9 aa, synthetic construct
  source 1..9: note = Seed: LVVVGAVGV (KRAS G12V)
SVVLGAVGM

SEQ ID NO: 62642 - protein, 9 aa, synthetic construct
  source 1..9: note = Seed: LVVVGAVGV (KRAS G12V)
SVVLGAVGV

SEQ ID NO: 62643 - protein, 9 aa, synthetic construct
  source 1..9: note = Seed: LVVVGAVGV (KRAS G12V)
SVVLGGVGI

SEQ ID NO: 62644 - protein, 9 aa, synthetic construct
  source 1..9: note = Seed: LVVVGAVGV (KRAS G12V)
SVVLGGVGL

SEQ ID NO: 62645 - protein, 9 aa, synthetic construct
  source 1..9: note = Seed: LVVVGAVGV (KRAS G12V)
SVVLGGVGV

SEQ ID NO: 62646 - protein, 9 aa, synthetic construct
  source 1..9: note = Seed: LVVVGAVGV (KRAS G12V)
SVVLGPVGL

SEQ ID NO: 62647 - protein, 9 aa, synthetic construct
  source 1..9: note = Seed: LVVVGAVGV (KRAS G12V)
SVVLGSVGI

SEQ ID NO: 62648 - protein, 9 aa, synthetic construct
  source 1..9: note = Seed: LVVVGAVGV (KRAS G12V)
SVVLGSVGL

SEQ ID NO: 62649 - protein, 9 aa, synthetic construct
  source 1..9: note = Seed: LVVVGAVGV (KRAS G12V)
SVVLGSVGV

SEQ ID NO: 62650 - protein, 9 aa, synthetic construct
  source 1..9: note = Seed: LVVVGAVGV (KRAS G12V)
SVVMGAVGI

SEQ ID NO: 62651 - protein, 9 aa, synthetic construct
  source 1..9: note = Seed: LVVVGAVGV (KRAS G12V)
SVVMGAVGL

SEQ ID NO: 62652 - protein, 9 aa, synthetic construct
  source 1..9: note = Seed: LVVVGAVGV (KRAS G12V)
SVVMGAVGM

SEQ ID NO: 62653 - protein, 9 aa, synthetic construct
  source 1..9: note = Seed: LVVVGAVGV (KRAS G12V)
SVVMGAVGV

SEQ ID NO: 62654 - protein, 9 aa, synthetic construct
  source 1..9: note = Seed: LVVVGAVGV (KRAS G12V)
SVVMGGVGL

SEQ ID NO: 62655 - protein, 9 aa, synthetic construct
  source 1..9: note = Seed: LVVVGAVGV (KRAS G12V)
SVVMGSVGI

SEQ ID NO: 62656 - protein, 9 aa, synthetic construct
  source 1..9: note = Seed: LVVVGAVGV (KRAS G12V)
SVVMGSVGL

SEQ ID NO: 62657 - protein, 9 aa, synthetic construct
  source 1..9: note = Seed: LVVVGAVGV (KRAS G12V)
SVVMGSVGV

SEQ ID NO: 62658 - protein, 9 aa, synthetic construct
  source 1..9: note = Seed: LVVVGAVGV (KRAS G12V)
SVVVGAVGI

SEQ ID NO: 62659 - protein, 9 aa, synthetic construct
  source 1..9: note = Seed: LVVVGAVGV (KRAS G12V)
SVVVGAVGV

SEQ ID NO: 62660 - protein, 9 aa, synthetic construct
  source 1..9: note = Seed: LVVVGAVGV (KRAS G12V)
TVVIGRVGR

SEQ ID NO: 62661 - protein, 9 aa, synthetic construct
  source 1..9: note = Seed: LVVVGAVGV (KRAS G12V)
TVVLGAVGA

SEQ ID NO: 62662 - protein, 9 aa, synthetic construct
  source 1..9: note = Seed: LVVVGAVGV (KRAS G12V)
TVVLGAVGI

SEQ ID NO: 62663 - protein, 9 aa, synthetic construct
  source 1..9: note = Seed: LVVVGAVGV (KRAS G12V)
TVVLGAVGL

SEQ ID NO: 62664 - protein, 9 aa, synthetic construct
  source 1..9: note = Seed: LVVVGAVGV (KRAS G12V)
TVVLGAVGM

SEQ ID NO: 62665 - protein, 9 aa, synthetic construct
  source 1..9: note = Seed: LVVVGAVGV (KRAS G12V)
TVVLGAVGV

SEQ ID NO: 62666 - protein, 9 aa, synthetic construct
  source 1..9: note = Seed: LVVVGAVGV (KRAS G12V)
TVVLGGVGI

SEQ ID NO: 62667 - protein, 9 aa, synthetic construct
  source 1..9: note = Seed: LVVVGAVGV (KRAS G12V)
TVVLGGVGL

SEQ ID NO: 62668 - protein, 9 aa, synthetic construct
  source 1..9: note = Seed: LVVVGAVGV (KRAS G12V)
TVVLGGVGM

SEQ ID NO: 62669 - protein, 9 aa, synthetic construct
  source 1..9: note = Seed: LVVVGAVGV (KRAS G12V)
TVVLGGVGV

SEQ ID NO: 62670 - protein, 9 aa, synthetic construct
  source 1..9: note = Seed: LVVVGAVGV (KRAS G12V)
TVVLGPVGL

SEQ ID NO: 62671 - protein, 9 aa, synthetic construct
  source 1..9: note = Seed: LVVVGAVGV (KRAS G12V)
TVVLGRVGR

SEQ ID NO: 62672 - protein, 9 aa, synthetic construct
  source 1..9: note = Seed: LVVVGAVGV (KRAS G12V)
TVVLGSVGI

SEQ ID NO: 62673 - protein, 9 aa, synthetic construct
  source 1..9: note = Seed: LVVVGAVGV (KRAS G12V)
TVVLGSVGL

SEQ ID NO: 62674 - protein, 9 aa, synthetic construct
  source 1..9: note = Seed: LVVVGAVGV (KRAS G12V)
TVVLGSVGM

SEQ ID NO: 62675 - protein, 9 aa, synthetic construct
  source 1..9: note = Seed: LVVVGAVGV (KRAS G12V)
TVVLGSVGV

SEQ ID NO: 62676 - protein, 9 aa, synthetic construct
  source 1..9: note = Seed: LVVVGAVGV (KRAS G12V)
TVVMGAVGI

SEQ ID NO: 62677 - protein, 9 aa, synthetic construct
  source 1..9: note = Seed: LVVVGAVGV (KRAS G12V)
TVVMGAVGL

SEQ ID NO: 62678 - protein, 9 aa, synthetic construct
  source 1..9: note = Seed: LVVVGAVGV (KRAS G12V)
TVVMGAVGM

SEQ ID NO: 62679 - protein, 9 aa, synthetic construct
  source 1..9: note = Seed: LVVVGAVGV (KRAS G12V)
TVVMGAVGV

SEQ ID NO: 62680 - protein, 9 aa, synthetic construct
  source 1..9: note = Seed: LVVVGAVGV (KRAS G12V)
TVVMGGVGI

SEQ ID NO: 62681 - protein, 9 aa, synthetic construct
  source 1..9: note = Seed: LVVVGAVGV (KRAS G12V)
TVVMGGVGL

SEQ ID NO: 62682 - protein, 9 aa, synthetic construct
  source 1..9: note = Seed: LVVVGAVGV (KRAS G12V)
TVVMGPVGL

SEQ ID NO: 62683 - protein, 9 aa, synthetic construct
  source 1..9: note = Seed: LVVVGAVGV (KRAS G12V)
TVVMGRVGR

SEQ ID NO: 62684 - protein, 9 aa, synthetic construct
  source 1..9: note = Seed: LVVVGAVGV (KRAS G12V)
TVVMGSVGI

SEQ ID NO: 62685 - protein, 9 aa, synthetic construct
  source 1..9: note = Seed: LVVVGAVGV (KRAS G12V)
TVVMGSVGL

SEQ ID NO: 62686 - protein, 9 aa, synthetic construct
  source 1..9: note = Seed: LVVVGAVGV (KRAS G12V)
TVVMGSVGM

SEQ ID NO: 62687 - protein, 9 aa, synthetic construct
  source 1..9: note = Seed: LVVVGAVGV (KRAS G12V)
TVVMGSVGV

SEQ ID NO: 62688 - protein, 9 aa, synthetic construct
  source 1..9: note = Seed: LVVVGAVGV (KRAS G12V)
TVVSGAVGI

SEQ ID NO: 62689 - protein, 9 aa, synthetic construct
  source 1..9: note = Seed: LVVVGAVGV (KRAS G12V)
TVVSGSVGI

SEQ ID NO: 62690 - protein, 9 aa, synthetic construct
  source 1..9: note = Seed: LVVVGAVGV (KRAS G12V)
TVVTGSVGI

SEQ ID NO: 62691 - protein, 9 aa, synthetic construct
  source 1..9: note = Seed: LVVVGAVGV (KRAS G12V)
VVVAGAVGA

SEQ ID NO: 62692 - protein, 9 aa, synthetic construct
  source 1..9: note = Seed: LVVVGAVGV (KRAS G12V)
VVVAGAVGC

SEQ ID NO: 62693 - protein, 9 aa, synthetic construct
  source 1..9: note = Seed: LVVVGAVGV (KRAS G12V)
VVVAGAVGF

SEQ ID NO: 62694 - protein, 9 aa, synthetic construct
  source 1..9: note = Seed: LVVVGAVGV (KRAS G12V)
VVVAGAVGG

SEQ ID NO: 62695 - protein, 9 aa, synthetic construct
  source 1..9: note = Seed: LVVVGAVGV (KRAS G12V)
VVVAGAVGH

SEQ ID NO: 62696 - protein, 9 aa, synthetic construct
  source 1..9: note = Seed: LVVVGAVGV (KRAS G12V)
VVVAGAVGI

SEQ ID NO: 62697 - protein, 9 aa, synthetic construct
  source 1..9: note = Seed: LVVVGAVGV (KRAS G12V)
VVVAGAVGL

SEQ ID NO: 62698 - protein, 9 aa, synthetic construct
  source 1..9: note = Seed: LVVVGAVGV (KRAS G12V)
VVVAGAVGM

SEQ ID NO: 62699 - protein, 9 aa, synthetic construct
  source 1..9: note = Seed: LVVVGAVGV (KRAS G12V)
VVVAGAVGN

SEQ ID NO: 62700 - protein, 9 aa, synthetic construct
  source 1..9: note = Seed: LVVVGAVGV (KRAS G12V)
VVVAGAVGQ

SEQ ID NO: 62701 - protein, 9 aa, synthetic construct
  source 1..9: note = Seed: LVVVGAVGV (KRAS G12V)
VVVAGAVGR

SEQ ID NO: 62702 - protein, 9 aa, synthetic construct
  source 1..9: note = Seed: LVVVGAVGV (KRAS G12V)
VVVAGAVGS

SEQ ID NO: 62703 - protein, 9 aa, synthetic construct
  source 1..9: note = Seed: LVVVGAVGV (KRAS G12V)
VVVAGAVGT

SEQ ID NO: 62704 - protein, 9 aa, synthetic construct
  source 1..9: note = Seed: LVVVGAVGV (KRAS G12V)
VVVAGAVGV

SEQ ID NO: 62705 - protein, 9 aa, synthetic construct
  source 1..9: note = Seed: LVVVGAVGV (KRAS G12V)
VVVAGAVGY

SEQ ID NO: 62706 - protein, 9 aa, synthetic construct
  source 1..9: note = Seed: LVVVGAVGV (KRAS G12V)
VVVAGCVGA

SEQ ID NO: 62707 - protein, 9 aa, synthetic construct
  source 1..9: note = Seed: LVVVGAVGV (KRAS G12V)
VVVAGCVGC

SEQ ID NO: 62708 - protein, 9 aa, synthetic construct
  source 1..9: note = Seed: LVVVGAVGV (KRAS G12V)
VVVAGCVGG

SEQ ID NO: 62709 - protein, 9 aa, synthetic construct
  source 1..9: note = Seed: LVVVGAVGV (KRAS G12V)
VVVAGCVGI

SEQ ID NO: 62710 - protein, 9 aa, synthetic construct
  source 1..9: note = Seed: LVVVGAVGV (KRAS G12V)
VVVAGCVGL

SEQ ID NO: 62711 - protein, 9 aa, synthetic construct
  source 1..9: note = Seed: LVVVGAVGV (KRAS G12V)
VVVAGCVGM

SEQ ID NO: 62712 - protein, 9 aa, synthetic construct
  source 1..9: note = Seed: LVVVGAVGV (KRAS G12V)
VVVAGCVGV

SEQ ID NO: 62713 - protein, 9 aa, synthetic construct
  source 1..9: note = Seed: LVVVGAVGV (KRAS G12V)
VVVAGDVGI

SEQ ID NO: 62714 - protein, 9 aa, synthetic construct
  source 1..9: note = Seed: LVVVGAVGV (KRAS G12V)
VVVAGDVGL

SEQ ID NO: 62715 - protein, 9 aa, synthetic construct
  source 1..9: note = Seed: LVVVGAVGV (KRAS G12V)
VVVAGDVGV

SEQ ID NO: 62716 - protein, 9 aa, synthetic construct
  source 1..9: note = Seed: LVVVGAVGV (KRAS G12V)
VVVAGGVGA

SEQ ID NO: 62717 - protein, 9 aa, synthetic construct
  source 1..9: note = Seed: LVVVGAVGV (KRAS G12V)
VVVAGGVGC

SEQ ID NO: 62718 - protein, 9 aa, synthetic construct
  source 1..9: note = Seed: LVVVGAVGV (KRAS G12V)
VVVAGGVGG

SEQ ID NO: 62719 - protein, 9 aa, synthetic construct
  source 1..9: note = Seed: LVVVGAVGV (KRAS G12V)
VVVAGGVGI

SEQ ID NO: 62720 - protein, 9 aa, synthetic construct
  source 1..9: note = Seed: LVVVGAVGV (KRAS G12V)
VVVAGGVGL

SEQ ID NO: 62721 - protein, 9 aa, synthetic construct
  source 1..9: note = Seed: LVVVGAVGV (KRAS G12V)
VVVAGGVGM

SEQ ID NO: 62722 - protein, 9 aa, synthetic construct
  source 1..9: note = Seed: LVVVGAVGV (KRAS G12V)
VVVAGGVGN

SEQ ID NO: 62723 - protein, 9 aa, synthetic construct
  source 1..9: note = Seed: LVVVGAVGV (KRAS G12V)
VVVAGGVGS

SEQ ID NO: 62724 - protein, 9 aa, synthetic construct
  source 1..9: note = Seed: LVVVGAVGV (KRAS G12V)
VVVAGGVGT

SEQ ID NO: 62725 - protein, 9 aa, synthetic construct
  source 1..9: note = Seed: LVVVGAVGV (KRAS G12V)
VVVAGGVGV

SEQ ID NO: 62726 - protein, 9 aa, synthetic construct
  source 1..9: note = Seed: LVVVGAVGV (KRAS G12V)
VVVAGGVGY

SEQ ID NO: 62727 - protein, 9 aa, synthetic construct
  source 1..9: note = Seed: LVVVGAVGV (KRAS G12V)
VVVAGIVGA

SEQ ID NO: 62728 - protein, 9 aa, synthetic construct
  source 1..9: note = Seed: LVVVGAVGV (KRAS G12V)
VVVAGIVGM

SEQ ID NO: 62729 - protein, 9 aa, synthetic construct
  source 1..9: note = Seed: LVVVGAVGV (KRAS G12V)
VVVAGIVGN

SEQ ID NO: 62730 - protein, 9 aa, synthetic construct
  source 1..9: note = Seed: LVVVGAVGV (KRAS G12V)
VVVAGIVGS

SEQ ID NO: 62731 - protein, 9 aa, synthetic construct
  source 1..9: note = Seed: LVVVGAVGV (KRAS G12V)
VVVAGKVGA

SEQ ID NO: 62732 - protein, 9 aa, synthetic construct
  source 1..9: note = Seed: LVVVGAVGV (KRAS G12V)
VVVAGKVGH

SEQ ID NO: 62733 - protein, 9 aa, synthetic construct
  source 1..9: note = Seed: LVVVGAVGV (KRAS G12V)
VVVAGKVGR

SEQ ID NO: 62734 - protein, 9 aa, synthetic construct
  source 1..9: note = Seed: LVVVGAVGV (KRAS G12V)
VVVAGKVGS

SEQ ID NO: 62735 - protein, 9 aa, synthetic construct
  source 1..9: note = Seed: LVVVGAVGV (KRAS G12V)
VVVAGKVGY

SEQ ID NO: 62736 - protein, 9 aa, synthetic construct
  source 1..9: note = Seed: LVVVGAVGV (KRAS G12V)
VVVAGNVGA

SEQ ID NO: 62737 - protein, 9 aa, synthetic construct
  source 1..9: note = Seed: LVVVGAVGV (KRAS G12V)
VVVAGNVGC

SEQ ID NO: 62738 - protein, 9 aa, synthetic construct
  source 1..9: note = Seed: LVVVGAVGV (KRAS G12V)
VVVAGNVGF

SEQ ID NO: 62739 - protein, 9 aa, synthetic construct
  source 1..9: note = Seed: LVVVGAVGV (KRAS G12V)
VVVAGNVGI

SEQ ID NO: 62740 - protein, 9 aa, synthetic construct
  source 1..9: note = Seed: LVVVGAVGV (KRAS G12V)
VVVAGNVGL

SEQ ID NO: 62741 - protein, 9 aa, synthetic construct
  source 1..9: note = Seed: LVVVGAVGV (KRAS G12V)
VVVAGNVGM

SEQ ID NO: 62742 - protein, 9 aa, synthetic construct
  source 1..9: note = Seed: LVVVGAVGV (KRAS G12V)
VVVAGNVGS

SEQ ID NO: 62743 - protein, 9 aa, synthetic construct
  source 1..9: note = Seed: LVVVGAVGV (KRAS G12V)
VVVAGNVGT

SEQ ID NO: 62744 - protein, 9 aa, synthetic construct
  source 1..9: note = Seed: LVVVGAVGV (KRAS G12V)
VVVAGNVGV

SEQ ID NO: 62745 - protein, 9 aa, synthetic construct
  source 1..9: note = Seed: LVVVGAVGV (KRAS G12V)
VVVAGNVGY

SEQ ID NO: 62746 - protein, 9 aa, synthetic construct
  source 1..9: note = Seed: LVVVGAVGV (KRAS G12V)
VVVAGPVGA

SEQ ID NO: 62747 - protein, 9 aa, synthetic construct
  source 1..9: note = Seed: LVVVGAVGV (KRAS G12V)
VVVAGPVGC

SEQ ID NO: 62748 - protein, 9 aa, synthetic construct
  source 1..9: note = Seed: LVVVGAVGV (KRAS G12V)
VVVAGPVGG

SEQ ID NO: 62749 - protein, 9 aa, synthetic construct
  source 1..9: note = Seed: LVVVGAVGV (KRAS G12V)
VVVAGPVGI

SEQ ID NO: 62750 - protein, 9 aa, synthetic construct
  source 1..9: note = Seed: LVVVGAVGV (KRAS G12V)
VVVAGPVGL

SEQ ID NO: 62751 - protein, 9 aa, synthetic construct
  source 1..9: note = Seed: LVVVGAVGV (KRAS G12V)
VVVAGPVGM

SEQ ID NO: 62752 - protein, 9 aa, synthetic construct
  source 1..9: note = Seed: LVVVGAVGV (KRAS G12V)
VVVAGPVGN

SEQ ID NO: 62753 - protein, 9 aa, synthetic construct
  source 1..9: note = Seed: LVVVGAVGV (KRAS G12V)
VVVAGPVGQ

SEQ ID NO: 62754 - protein, 9 aa, synthetic construct
  source 1..9: note = Seed: LVVVGAVGV (KRAS G12V)
VVVAGPVGS

SEQ ID NO: 62755 - protein, 9 aa, synthetic construct
  source 1..9: note = Seed: LVVVGAVGV (KRAS G12V)
VVVAGPVGT

SEQ ID NO: 62756 - protein, 9 aa, synthetic construct
  source 1..9: note = Seed: LVVVGAVGV (KRAS G12V)
VVVAGPVGV

SEQ ID NO: 62757 - protein, 9 aa, synthetic construct
  source 1..9: note = Seed: LVVVGAVGV (KRAS G12V)
VVVAGRVGA

SEQ ID NO: 62758 - protein, 9 aa, synthetic construct
  source 1..9: note = Seed: LVVVGAVGV (KRAS G12V)
VVVAGRVGH

SEQ ID NO: 62759 - protein, 9 aa, synthetic construct
  source 1..9: note = Seed: LVVVGAVGV (KRAS G12V)
VVVAGRVGK

SEQ ID NO: 62760 - protein, 9 aa, synthetic construct
  source 1..9: note = Seed: LVVVGAVGV (KRAS G12V)
VVVAGRVGL

SEQ ID NO: 62761 - protein, 9 aa, synthetic construct
  source 1..9: note = Seed: LVVVGAVGV (KRAS G12V)
VVVAGRVGM

SEQ ID NO: 62762 - protein, 9 aa, synthetic construct
  source 1..9: note = Seed: LVVVGAVGV (KRAS G12V)
VVVAGRVGQ

SEQ ID NO: 62763 - protein, 9 aa, synthetic construct
  source 1..9: note = Seed: LVVVGAVGV (KRAS G12V)
VVVAGRVGR

SEQ ID NO: 62764 - protein, 9 aa, synthetic construct
  source 1..9: note = Seed: LVVVGAVGV (KRAS G12V)
VVVAGRVGS

SEQ ID NO: 62765 - protein, 9 aa, synthetic construct
  source 1..9: note = Seed: LVVVGAVGV (KRAS G12V)
VVVAGRVGY

SEQ ID NO: 62766 - protein, 9 aa, synthetic construct
  source 1..9: note = Seed: LVVVGAVGV (KRAS G12V)
VVVAGSVGA

SEQ ID NO: 62767 - protein, 9 aa, synthetic construct
  source 1..9: note = Seed: LVVVGAVGV (KRAS G12V)
VVVAGSVGC

SEQ ID NO: 62768 - protein, 9 aa, synthetic construct
  source 1..9: note = Seed: LVVVGAVGV (KRAS G12V)
VVVAGSVGF

SEQ ID NO: 62769 - protein, 9 aa, synthetic construct
  source 1..9: note = Seed: LVVVGAVGV (KRAS G12V)
VVVAGSVGG

SEQ ID NO: 62770 - protein, 9 aa, synthetic construct
  source 1..9: note = Seed: LVVVGAVGV (KRAS G12V)
VVVAGSVGI

SEQ ID NO: 62771 - protein, 9 aa, synthetic construct
  source 1..9: note = Seed: LVVVGAVGV (KRAS G12V)
VVVAGSVGL

SEQ ID NO: 62772 - protein, 9 aa, synthetic construct
  source 1..9: note = Seed: LVVVGAVGV (KRAS G12V)
VVVAGSVGM

SEQ ID NO: 62773 - protein, 9 aa, synthetic construct
  source 1..9: note = Seed: LVVVGAVGV (KRAS G12V)
VVVAGSVGN

SEQ ID NO: 62774 - protein, 9 aa, synthetic construct
  source 1..9: note = Seed: LVVVGAVGV (KRAS G12V)
VVVAGSVGS

SEQ ID NO: 62775 - protein, 9 aa, synthetic construct
  source 1..9: note = Seed: LVVVGAVGV (KRAS G12V)
VVVAGSVGT

SEQ ID NO: 62776 - protein, 9 aa, synthetic construct
  source 1..9: note = Seed: LVVVGAVGV (KRAS G12V)
VVVAGSVGV

SEQ ID NO: 62777 - protein, 9 aa, synthetic construct
  source 1..9: note = Seed: LVVVGAVGV (KRAS G12V)
VVVAGSVGY

SEQ ID NO: 62778 - protein, 9 aa, synthetic construct
  source 1..9: note = Seed: LVVVGAVGV (KRAS G12V)
VVVAGTVGA

SEQ ID NO: 62779 - protein, 9 aa, synthetic construct
  source 1..9: note = Seed: LVVVGAVGV (KRAS G12V)
VVVAGTVGC

SEQ ID NO: 62780 - protein, 9 aa, synthetic construct
  source 1..9: note = Seed: LVVVGAVGV (KRAS G12V)
VVVAGTVGH

SEQ ID NO: 62781 - protein, 9 aa, synthetic construct
  source 1..9: note = Seed: LVVVGAVGV (KRAS G12V)
VVVAGTVGI

SEQ ID NO: 62782 - protein, 9 aa, synthetic construct
  source 1..9: note = Seed: LVVVGAVGV (KRAS G12V)
VVVAGTVGL

SEQ ID NO: 62783 - protein, 9 aa, synthetic construct
  source 1..9: note = Seed: LVVVGAVGV (KRAS G12V)
VVVAGTVGM

SEQ ID NO: 62784 - protein, 9 aa, synthetic construct
  source 1..9: note = Seed: LVVVGAVGV (KRAS G12V)
VVVAGTVGN

SEQ ID NO: 62785 - protein, 9 aa, synthetic construct
  source 1..9: note = Seed: LVVVGAVGV (KRAS G12V)
VVVAGTVGS

SEQ ID NO: 62786 - protein, 9 aa, synthetic construct
  source 1..9: note = Seed: LVVVGAVGV (KRAS G12V)
VVVAGTVGT

SEQ ID NO: 62787 - protein, 9 aa, synthetic construct
  source 1..9: note = Seed: LVVVGAVGV (KRAS G12V)
VVVAGTVGV

SEQ ID NO: 62788 - protein, 9 aa, synthetic construct
  source 1..9: note = Seed: LVVVGAVGV (KRAS G12V)
VVVAGVVGA

SEQ ID NO: 62789 - protein, 9 aa, synthetic construct
  source 1..9: note = Seed: LVVVGAVGV (KRAS G12V)
VVVAGVVGC

SEQ ID NO: 62790 - protein, 9 aa, synthetic construct
  source 1..9: note = Seed: LVVVGAVGV (KRAS G12V)
VVVAGVVGH

SEQ ID NO: 62791 - protein, 9 aa, synthetic construct
  source 1..9: note = Seed: LVVVGAVGV (KRAS G12V)
VVVAGVVGI

SEQ ID NO: 62792 - protein, 9 aa, synthetic construct
  source 1..9: note = Seed: LVVVGAVGV (KRAS G12V)
VVVAGVVGL

SEQ ID NO: 62793 - protein, 9 aa, synthetic construct
  source 1..9: note = Seed: LVVVGAVGV (KRAS G12V)
VVVAGVVGM

SEQ ID NO: 62794 - protein, 9 aa, synthetic construct
  source 1..9: note = Seed: LVVVGAVGV (KRAS G12V)
VVVAGVVGN

SEQ ID NO: 62795 - protein, 9 aa, synthetic construct
  source 1..9: note = Seed: LVVVGAVGV (KRAS G12V)
VVVAGVVGS

SEQ ID NO: 62796 - protein, 9 aa, synthetic construct
  source 1..9: note = Seed: LVVVGAVGV (KRAS G12V)
VVVAGVVGV

SEQ ID NO: 62797 - protein, 9 aa, synthetic construct
  source 1..9: note = Seed: LVVVGAVGV (KRAS G12V)
VVVCGAVGI

SEQ ID NO: 62798 - protein, 9 aa, synthetic construct
  source 1..9: note = Seed: LVVVGAVGV (KRAS G12V)
VVVCGAVGL

SEQ ID NO: 62799 - protein, 9 aa, synthetic construct
  source 1..9: note = Seed: LVVVGAVGV (KRAS G12V)
VVVCGAVGV

SEQ ID NO: 62800 - protein, 9 aa, synthetic construct
  source 1..9: note = Seed: LVVVGAVGV (KRAS G12V)
VVVDGAVGF

SEQ ID NO: 62801 - protein, 9 aa, synthetic construct
  source 1..9: note = Seed: LVVVGAVGV (KRAS G12V)
VVVDGAVGI

SEQ ID NO: 62802 - protein, 9 aa, synthetic construct
  source 1..9: note = Seed: LVVVGAVGV (KRAS G12V)
VVVDGAVGL

SEQ ID NO: 62803 - protein, 9 aa, synthetic construct
  source 1..9: note = Seed: LVVVGAVGV (KRAS G12V)
VVVDGAVGM

SEQ ID NO: 62804 - protein, 9 aa, synthetic construct
  source 1..9: note = Seed: LVVVGAVGV (KRAS G12V)
VVVDGAVGV

SEQ ID NO: 62805 - protein, 9 aa, synthetic construct
  source 1..9: note = Seed: LVVVGAVGV (KRAS G12V)
VVVDGAVGY

SEQ ID NO: 62806 - protein, 9 aa, synthetic construct
  source 1..9: note = Seed: LVVVGAVGV (KRAS G12V)
VVVDGGVGI

SEQ ID NO: 62807 - protein, 9 aa, synthetic construct
  source 1..9: note = Seed: LVVVGAVGV (KRAS G12V)
VVVDGNVGA

SEQ ID NO: 62808 - protein, 9 aa, synthetic construct
  source 1..9: note = Seed: LVVVGAVGV (KRAS G12V)
VVVDGNVGI

SEQ ID NO: 62809 - protein, 9 aa, synthetic construct
  source 1..9: note = Seed: LVVVGAVGV (KRAS G12V)
VVVDGNVGL

SEQ ID NO: 62810 - protein, 9 aa, synthetic construct
  source 1..9: note = Seed: LVVVGAVGV (KRAS G12V)
VVVDGNVGV

SEQ ID NO: 62811 - protein, 9 aa, synthetic construct
  source 1..9: note = Seed: LVVVGAVGV (KRAS G12V)
VVVDGPVGI

SEQ ID NO: 62812 - protein, 9 aa, synthetic construct
  source 1..9: note = Seed: LVVVGAVGV (KRAS G12V)
VVVDGSVGI

SEQ ID NO: 62813 - protein, 9 aa, synthetic construct
  source 1..9: note = Seed: LVVVGAVGV (KRAS G12V)
VVVDGSVGL

SEQ ID NO: 62814 - protein, 9 aa, synthetic construct
  source 1..9: note = Seed: LVVVGAVGV (KRAS G12V)
VVVDGSVGV

SEQ ID NO: 62815 - protein, 9 aa, synthetic construct
  source 1..9: note = Seed: LVVVGAVGV (KRAS G12V)
VVVDGTVGI

SEQ ID NO: 62816 - protein, 9 aa, synthetic construct
  source 1..9: note = Seed: LVVVGAVGV (KRAS G12V)
VVVDGTVGV

SEQ ID NO: 62817 - protein, 9 aa, synthetic construct
  source 1..9: note = Seed: LVVVGAVGV (KRAS G12V)
VVVEGAVGA

SEQ ID NO: 62818 - protein, 9 aa, synthetic construct
  source 1..9: note = Seed: LVVVGAVGV (KRAS G12V)
VVVEGAVGI

SEQ ID NO: 62819 - protein, 9 aa, synthetic construct
  source 1..9: note = Seed: LVVVGAVGV (KRAS G12V)
VVVEGAVGL

SEQ ID NO: 62820 - protein, 9 aa, synthetic construct
  source 1..9: note = Seed: LVVVGAVGV (KRAS G12V)
VVVEGAVGM

SEQ ID NO: 62821 - protein, 9 aa, synthetic construct
  source 1..9: note = Seed: LVVVGAVGV (KRAS G12V)
VVVEGAVGS

SEQ ID NO: 62822 - protein, 9 aa, synthetic construct
  source 1..9: note = Seed: LVVVGAVGV (KRAS G12V)
VVVEGAVGT

SEQ ID NO: 62823 - protein, 9 aa, synthetic construct
  source 1..9: note = Seed: LVVVGAVGV (KRAS G12V)
VVVEGAVGV

SEQ ID NO: 62824 - protein, 9 aa, synthetic construct
  source 1..9: note = Seed: LVVVGAVGV (KRAS G12V)
VVVEGGVGA

SEQ ID NO: 62825 - protein, 9 aa, synthetic construct
  source 1..9: note = Seed: LVVVGAVGV (KRAS G12V)
VVVEGGVGI

SEQ ID NO: 62826 - protein, 9 aa, synthetic construct
  source 1..9: note = Seed: LVVVGAVGV (KRAS G12V)
VVVEGGVGL

SEQ ID NO: 62827 - protein, 9 aa, synthetic construct
  source 1..9: note = Seed: LVVVGAVGV (KRAS G12V)
VVVEGGVGM

SEQ ID NO: 62828 - protein, 9 aa, synthetic construct
  source 1..9: note = Seed: LVVVGAVGV (KRAS G12V)
VVVEGGVGV

SEQ ID NO: 62829 - protein, 9 aa, synthetic construct
  source 1..9: note = Seed: LVVVGAVGV (KRAS G12V)
VVVEGNVGI

SEQ ID NO: 62830 - protein, 9 aa, synthetic construct
  source 1..9: note = Seed: LVVVGAVGV (KRAS G12V)
VVVEGPVGI

SEQ ID NO: 62831 - protein, 9 aa, synthetic construct
  source 1..9: note = Seed: LVVVGAVGV (KRAS G12V)
VVVEGPVGL

SEQ ID NO: 62832 - protein, 9 aa, synthetic construct
  source 1..9: note = Seed: LVVVGAVGV (KRAS G12V)
VVVEGPVGV

SEQ ID NO: 62833 - protein, 9 aa, synthetic construct
  source 1..9: note = Seed: LVVVGAVGV (KRAS G12V)
VVVEGSVGA

SEQ ID NO: 62834 - protein, 9 aa, synthetic construct
  source 1..9: note = Seed: LVVVGAVGV (KRAS G12V)
VVVEGSVGI

SEQ ID NO: 62835 - protein, 9 aa, synthetic construct
  source 1..9: note = Seed: LVVVGAVGV (KRAS G12V)
VVVEGSVGL

SEQ ID NO: 62836 - protein, 9 aa, synthetic construct
  source 1..9: note = Seed: LVVVGAVGV (KRAS G12V)
VVVEGSVGM

SEQ ID NO: 62837 - protein, 9 aa, synthetic construct
  source 1..9: note = Seed: LVVVGAVGV (KRAS G12V)
VVVEGSVGV

SEQ ID NO: 62838 - protein, 9 aa, synthetic construct
  source 1..9: note = Seed: LVVVGAVGV (KRAS G12V)
VVVFGAVGA

SEQ ID NO: 62839 - protein, 9 aa, synthetic construct
  source 1..9: note = Seed: LVVVGAVGV (KRAS G12V)
VVVFGAVGG

SEQ ID NO: 62840 - protein, 9 aa, synthetic construct
  source 1..9: note = Seed: LVVVGAVGV (KRAS G12V)
VVVFGAVGI

SEQ ID NO: 62841 - protein, 9 aa, synthetic construct
  source 1..9: note = Seed: LVVVGAVGV (KRAS G12V)
VVVFGAVGL

SEQ ID NO: 62842 - protein, 9 aa, synthetic construct
  source 1..9: note = Seed: LVVVGAVGV (KRAS G12V)
VVVFGAVGM

SEQ ID NO: 62843 - protein, 9 aa, synthetic construct
  source 1..9: note = Seed: LVVVGAVGV (KRAS G12V)
VVVFGAVGR

SEQ ID NO: 62844 - protein, 9 aa, synthetic construct
  source 1..9: note = Seed: LVVVGAVGV (KRAS G12V)
VVVFGAVGS

SEQ ID NO: 62845 - protein, 9 aa, synthetic construct
  source 1..9: note = Seed: LVVVGAVGV (KRAS G12V)
VVVFGAVGT

SEQ ID NO: 62846 - protein, 9 aa, synthetic construct
  source 1..9: note = Seed: LVVVGAVGV (KRAS G12V)
VVVFGAVGV

SEQ ID NO: 62847 - protein, 9 aa, synthetic construct
  source 1..9: note = Seed: LVVVGAVGV (KRAS G12V)
VVVFGDVGA

SEQ ID NO: 62848 - protein, 9 aa, synthetic construct
  source 1..9: note = Seed: LVVVGAVGV (KRAS G12V)
VVVFGDVGI

SEQ ID NO: 62849 - protein, 9 aa, synthetic construct
  source 1..9: note = Seed: LVVVGAVGV (KRAS G12V)
VVVFGDVGL

SEQ ID NO: 62850 - protein, 9 aa, synthetic construct
  source 1..9: note = Seed: LVVVGAVGV (KRAS G12V)
VVVFGDVGV

SEQ ID NO: 62851 - protein, 9 aa, synthetic construct
  source 1..9: note = Seed: LVVVGAVGV (KRAS G12V)
VVVFGGVGA

SEQ ID NO: 62852 - protein, 9 aa, synthetic construct
  source 1..9: note = Seed: LVVVGAVGV (KRAS G12V)
VVVFGGVGH

SEQ ID NO: 62853 - protein, 9 aa, synthetic construct
  source 1..9: note = Seed: LVVVGAVGV (KRAS G12V)
VVVFGGVGI

SEQ ID NO: 62854 - protein, 9 aa, synthetic construct
  source 1..9: note = Seed: LVVVGAVGV (KRAS G12V)
VVVFGGVGL

SEQ ID NO: 62855 - protein, 9 aa, synthetic construct
  source 1..9: note = Seed: LVVVGAVGV (KRAS G12V)
VVVFGGVGM

SEQ ID NO: 62856 - protein, 9 aa, synthetic construct
  source 1..9: note = Seed: LVVVGAVGV (KRAS G12V)
VVVFGGVGS

SEQ ID NO: 62857 - protein, 9 aa, synthetic construct
  source 1..9: note = Seed: LVVVGAVGV (KRAS G12V)
VVVFGGVGT

SEQ ID NO: 62858 - protein, 9 aa, synthetic construct
  source 1..9: note = Seed: LVVVGAVGV (KRAS G12V)
VVVFGGVGV

SEQ ID NO: 62859 - protein, 9 aa, synthetic construct
  source 1..9: note = Seed: LVVVGAVGV (KRAS G12V)
VVVFGHVGK

SEQ ID NO: 62860 - protein, 9 aa, synthetic construct
  source 1..9: note = Seed: LVVVGAVGV (KRAS G12V)
VVVFGHVGR

SEQ ID NO: 62861 - protein, 9 aa, synthetic construct
  source 1..9: note = Seed: LVVVGAVGV (KRAS G12V)
VVVFGIVGR

SEQ ID NO: 62862 - protein, 9 aa, synthetic construct
  source 1..9: note = Seed: LVVVGAVGV (KRAS G12V)
VVVFGKVGA

SEQ ID NO: 62863 - protein, 9 aa, synthetic construct
  source 1..9: note = Seed: LVVVGAVGV (KRAS G12V)
VVVFGKVGH

SEQ ID NO: 62864 - protein, 9 aa, synthetic construct
  source 1..9: note = Seed: LVVVGAVGV (KRAS G12V)
VVVFGKVGK

SEQ ID NO: 62865 - protein, 9 aa, synthetic construct
  source 1..9: note = Seed: LVVVGAVGV (KRAS G12V)
VVVFGKVGQ

SEQ ID NO: 62866 - protein, 9 aa, synthetic construct
  source 1..9: note = Seed: LVVVGAVGV (KRAS G12V)
VVVFGKVGR

SEQ ID NO: 62867 - protein, 9 aa, synthetic construct
  source 1..9: note = Seed: LVVVGAVGV (KRAS G12V)
VVVFGKVGS

SEQ ID NO: 62868 - protein, 9 aa, synthetic construct
  source 1..9: note = Seed: LVVVGAVGV (KRAS G12V)
VVVFGLVGR

SEQ ID NO: 62869 - protein, 9 aa, synthetic construct
  source 1..9: note = Seed: LVVVGAVGV (KRAS G12V)
VVVFGMVGR

SEQ ID NO: 62870 - protein, 9 aa, synthetic construct
  source 1..9: note = Seed: LVVVGAVGV (KRAS G12V)
VVVFGNVGA

SEQ ID NO: 62871 - protein, 9 aa, synthetic construct
  source 1..9: note = Seed: LVVVGAVGV (KRAS G12V)
VVVFGNVGF

SEQ ID NO: 62872 - protein, 9 aa, synthetic construct
  source 1..9: note = Seed: LVVVGAVGV (KRAS G12V)
VVVFGNVGG

SEQ ID NO: 62873 - protein, 9 aa, synthetic construct
  source 1..9: note = Seed: LVVVGAVGV (KRAS G12V)
VVVFGNVGH

SEQ ID NO: 62874 - protein, 9 aa, synthetic construct
  source 1..9: note = Seed: LVVVGAVGV (KRAS G12V)
VVVFGNVGI

SEQ ID NO: 62875 - protein, 9 aa, synthetic construct
  source 1..9: note = Seed: LVVVGAVGV (KRAS G12V)
VVVFGNVGL

SEQ ID NO: 62876 - protein, 9 aa, synthetic construct
  source 1..9: note = Seed: LVVVGAVGV (KRAS G12V)
VVVFGNVGM

SEQ ID NO: 62877 - protein, 9 aa, synthetic construct
  source 1..9: note = Seed: LVVVGAVGV (KRAS G12V)
VVVFGNVGP

SEQ ID NO: 62878 - protein, 9 aa, synthetic construct
  source 1..9: note = Seed: LVVVGAVGV (KRAS G12V)
VVVFGNVGQ

SEQ ID NO: 62879 - protein, 9 aa, synthetic construct
  source 1..9: note = Seed: LVVVGAVGV (KRAS G12V)
VVVFGNVGR

SEQ ID NO: 62880 - protein, 9 aa, synthetic construct
  source 1..9: note = Seed: LVVVGAVGV (KRAS G12V)
VVVFGNVGS

SEQ ID NO: 62881 - protein, 9 aa, synthetic construct
  source 1..9: note = Seed: LVVVGAVGV (KRAS G12V)
VVVFGNVGT

SEQ ID NO: 62882 - protein, 9 aa, synthetic construct
  source 1..9: note = Seed: LVVVGAVGV (KRAS G12V)
VVVFGNVGV

SEQ ID NO: 62883 - protein, 9 aa, synthetic construct
  source 1..9: note = Seed: LVVVGAVGV (KRAS G12V)
VVVFGNVGY

SEQ ID NO: 62884 - protein, 9 aa, synthetic construct
  source 1..9: note = Seed: LVVVGAVGV (KRAS G12V)
VVVFGPVGA

SEQ ID NO: 62885 - protein, 9 aa, synthetic construct
  source 1..9: note = Seed: LVVVGAVGV (KRAS G12V)
VVVFGPVGI

SEQ ID NO: 62886 - protein, 9 aa, synthetic construct
  source 1..9: note = Seed: LVVVGAVGV (KRAS G12V)
VVVFGPVGL

SEQ ID NO: 62887 - protein, 9 aa, synthetic construct
  source 1..9: note = Seed: LVVVGAVGV (KRAS G12V)
VVVFGPVGM

SEQ ID NO: 62888 - protein, 9 aa, synthetic construct
  source 1..9: note = Seed: LVVVGAVGV (KRAS G12V)
VVVFGPVGV

SEQ ID NO: 62889 - protein, 9 aa, synthetic construct
  source 1..9: note = Seed: LVVVGAVGV (KRAS G12V)
VVVFGRVGA

SEQ ID NO: 62890 - protein, 9 aa, synthetic construct
  source 1..9: note = Seed: LVVVGAVGV (KRAS G12V)
VVVFGRVGH

SEQ ID NO: 62891 - protein, 9 aa, synthetic construct
  source 1..9: note = Seed: LVVVGAVGV (KRAS G12V)
VVVFGRVGK

SEQ ID NO: 62892 - protein, 9 aa, synthetic construct
  source 1..9: note = Seed: LVVVGAVGV (KRAS G12V)
VVVFGRVGQ

SEQ ID NO: 62893 - protein, 9 aa, synthetic construct
  source 1..9: note = Seed: LVVVGAVGV (KRAS G12V)
VVVFGRVGR

SEQ ID NO: 62894 - protein, 9 aa, synthetic construct
  source 1..9: note = Seed: LVVVGAVGV (KRAS G12V)
VVVFGRVGS

SEQ ID NO: 62895 - protein, 9 aa, synthetic construct
  source 1..9: note = Seed: LVVVGAVGV (KRAS G12V)
VVVFGSVGA

SEQ ID NO: 62896 - protein, 9 aa, synthetic construct
  source 1..9: note = Seed: LVVVGAVGV (KRAS G12V)
VVVFGSVGF

SEQ ID NO: 62897 - protein, 9 aa, synthetic construct
  source 1..9: note = Seed: LVVVGAVGV (KRAS G12V)
VVVFGSVGG

SEQ ID NO: 62898 - protein, 9 aa, synthetic construct
  source 1..9: note = Seed: LVVVGAVGV (KRAS G12V)
VVVFGSVGH

SEQ ID NO: 62899 - protein, 9 aa, synthetic construct
  source 1..9: note = Seed: LVVVGAVGV (KRAS G12V)
VVVFGSVGI

SEQ ID NO: 62900 - protein, 9 aa, synthetic construct
  source 1..9: note = Seed: LVVVGAVGV (KRAS G12V)
VVVFGSVGL

SEQ ID NO: 62901 - protein, 9 aa, synthetic construct
  source 1..9: note = Seed: LVVVGAVGV (KRAS G12V)
VVVFGSVGM

SEQ ID NO: 62902 - protein, 9 aa, synthetic construct
  source 1..9: note = Seed: LVVVGAVGV (KRAS G12V)
VVVFGSVGN

SEQ ID NO: 62903 - protein, 9 aa, synthetic construct
  source 1..9: note = Seed: LVVVGAVGV (KRAS G12V)
VVVFGSVGR

SEQ ID NO: 62904 - protein, 9 aa, synthetic construct
  source 1..9: note = Seed: LVVVGAVGV (KRAS G12V)
VVVFGSVGS

SEQ ID NO: 62905 - protein, 9 aa, synthetic construct
  source 1..9: note = Seed: LVVVGAVGV (KRAS G12V)
VVVFGSVGT

SEQ ID NO: 62906 - protein, 9 aa, synthetic construct
  source 1..9: note = Seed: LVVVGAVGV (KRAS G12V)
VVVFGSVGV

SEQ ID NO: 62907 - protein, 9 aa, synthetic construct
  source 1..9: note = Seed: LVVVGAVGV (KRAS G12V)
VVVFGSVGY

SEQ ID NO: 62908 - protein, 9 aa, synthetic construct
  source 1..9: note = Seed: LVVVGAVGV (KRAS G12V)
VVVFGTVGA

SEQ ID NO: 62909 - protein, 9 aa, synthetic construct
  source 1..9: note = Seed: LVVVGAVGV (KRAS G12V)
VVVFGTVGH

SEQ ID NO: 62910 - protein, 9 aa, synthetic construct
  source 1..9: note = Seed: LVVVGAVGV (KRAS G12V)
VVVFGTVGI

SEQ ID NO: 62911 - protein, 9 aa, synthetic construct
  source 1..9: note = Seed: LVVVGAVGV (KRAS G12V)
VVVFGTVGL

SEQ ID NO: 62912 - protein, 9 aa, synthetic construct
  source 1..9: note = Seed: LVVVGAVGV (KRAS G12V)
VVVFGTVGM

SEQ ID NO: 62913 - protein, 9 aa, synthetic construct
  source 1..9: note = Seed: LVVVGAVGV (KRAS G12V)
VVVFGTVGS

SEQ ID NO: 62914 - protein, 9 aa, synthetic construct
  source 1..9: note = Seed: LVVVGAVGV (KRAS G12V)
VVVFGTVGT

SEQ ID NO: 62915 - protein, 9 aa, synthetic construct
  source 1..9: note = Seed: LVVVGAVGV (KRAS G12V)
VVVFGTVGV

SEQ ID NO: 62916 - protein, 9 aa, synthetic construct
  source 1..9: note = Seed: LVVVGAVGV (KRAS G12V)
VVVFGVVGR

SEQ ID NO: 62917 - protein, 9 aa, synthetic construct
  source 1..9: note = Seed: LVVVGAVGV (KRAS G12V)
VVVGGAVGA

SEQ ID NO: 62918 - protein, 9 aa, synthetic construct
  source 1..9: note = Seed: LVVVGAVGV (KRAS G12V)
VVVGGAVGC

SEQ ID NO: 62919 - protein, 9 aa, synthetic construct
  source 1..9: note = Seed: LVVVGAVGV (KRAS G12V)
VVVGGAVGF

SEQ ID NO: 62920 - protein, 9 aa, synthetic construct
  source 1..9: note = Seed: LVVVGAVGV (KRAS G12V)
VVVGGAVGI

SEQ ID NO: 62921 - protein, 9 aa, synthetic construct
  source 1..9: note = Seed: LVVVGAVGV (KRAS G12V)
VVVGGAVGL

SEQ ID NO: 62922 - protein, 9 aa, synthetic construct
  source 1..9: note = Seed: LVVVGAVGV (KRAS G12V)
VVVGGAVGM

SEQ ID NO: 62923 - protein, 9 aa, synthetic construct
  source 1..9: note = Seed: LVVVGAVGV (KRAS G12V)
VVVGGAVGS

SEQ ID NO: 62924 - protein, 9 aa, synthetic construct
  source 1..9: note = Seed: LVVVGAVGV (KRAS G12V)
VVVGGAVGT

SEQ ID NO: 62925 - protein, 9 aa, synthetic construct
  source 1..9: note = Seed: LVVVGAVGV (KRAS G12V)
VVVGGAVGV

SEQ ID NO: 62926 - protein, 9 aa, synthetic construct
  source 1..9: note = Seed: LVVVGAVGV (KRAS G12V)
VVVGGAVGY

SEQ ID NO: 62927 - protein, 9 aa, synthetic construct
  source 1..9: note = Seed: LVVVGAVGV (KRAS G12V)
VVVGGCVGC

SEQ ID NO: 62928 - protein, 9 aa, synthetic construct
  source 1..9: note = Seed: LVVVGAVGV (KRAS G12V)
VVVGGCVGL

SEQ ID NO: 62929 - protein, 9 aa, synthetic construct
  source 1..9: note = Seed: LVVVGAVGV (KRAS G12V)
VVVGGCVGV

SEQ ID NO: 62930 - protein, 9 aa, synthetic construct
  source 1..9: note = Seed: LVVVGAVGV (KRAS G12V)
VVVGGGVGA

SEQ ID NO: 62931 - protein, 9 aa, synthetic construct
  source 1..9: note = Seed: LVVVGAVGV (KRAS G12V)
VVVGGGVGC

SEQ ID NO: 62932 - protein, 9 aa, synthetic construct
  source 1..9: note = Seed: LVVVGAVGV (KRAS G12V)
VVVGGGVGI

SEQ ID NO: 62933 - protein, 9 aa, synthetic construct
  source 1..9: note = Seed: LVVVGAVGV (KRAS G12V)
VVVGGGVGL

SEQ ID NO: 62934 - protein, 9 aa, synthetic construct
  source 1..9: note = Seed: LVVVGAVGV (KRAS G12V)
VVVGGGVGV

SEQ ID NO: 62935 - protein, 9 aa, synthetic construct
  source 1..9: note = Seed: LVVVGAVGV (KRAS G12V)
VVVGGPVGA

SEQ ID NO: 62936 - protein, 9 aa, synthetic construct
  source 1..9: note = Seed: LVVVGAVGV (KRAS G12V)
VVVGGPVGI

SEQ ID NO: 62937 - protein, 9 aa, synthetic construct
  source 1..9: note = Seed: LVVVGAVGV (KRAS G12V)
VVVGGPVGL

SEQ ID NO: 62938 - protein, 9 aa, synthetic construct
  source 1..9: note = Seed: LVVVGAVGV (KRAS G12V)
VVVGGPVGM

SEQ ID NO: 62939 - protein, 9 aa, synthetic construct
  source 1..9: note = Seed: LVVVGAVGV (KRAS G12V)
VVVGGPVGS

SEQ ID NO: 62940 - protein, 9 aa, synthetic construct
  source 1..9: note = Seed: LVVVGAVGV (KRAS G12V)
VVVGGPVGV

SEQ ID NO: 62941 - protein, 9 aa, synthetic construct
  source 1..9: note = Seed: LVVVGAVGV (KRAS G12V)
VVVGGSVGA

SEQ ID NO: 62942 - protein, 9 aa, synthetic construct
  source 1..9: note = Seed: LVVVGAVGV (KRAS G12V)
VVVGGSVGC

SEQ ID NO: 62943 - protein, 9 aa, synthetic construct
  source 1..9: note = Seed: LVVVGAVGV (KRAS G12V)
VVVGGSVGI

SEQ ID NO: 62944 - protein, 9 aa, synthetic construct
  source 1..9: note = Seed: LVVVGAVGV (KRAS G12V)
VVVGGSVGL

SEQ ID NO: 62945 - protein, 9 aa, synthetic construct
  source 1..9: note = Seed: LVVVGAVGV (KRAS G12V)
VVVGGSVGM

SEQ ID NO: 62946 - protein, 9 aa, synthetic construct
  source 1..9: note = Seed: LVVVGAVGV (KRAS G12V)
VVVGGSVGV

SEQ ID NO: 62947 - protein, 9 aa, synthetic construct
  source 1..9: note = Seed: LVVVGAVGV (KRAS G12V)
VVVHGAVGA

SEQ ID NO: 62948 - protein, 9 aa, synthetic construct
  source 1..9: note = Seed: LVVVGAVGV (KRAS G12V)
VVVHGAVGI

SEQ ID NO: 62949 - protein, 9 aa, synthetic construct
  source 1..9: note = Seed: LVVVGAVGV (KRAS G12V)
VVVHGAVGL

SEQ ID NO: 62950 - protein, 9 aa, synthetic construct
  source 1..9: note = Seed: LVVVGAVGV (KRAS G12V)
VVVHGAVGM

SEQ ID NO: 62951 - protein, 9 aa, synthetic construct
  source 1..9: note = Seed: LVVVGAVGV (KRAS G12V)
VVVHGAVGR

SEQ ID NO: 62952 - protein, 9 aa, synthetic construct
  source 1..9: note = Seed: LVVVGAVGV (KRAS G12V)
VVVHGAVGV

SEQ ID NO: 62953 - protein, 9 aa, synthetic construct
  source 1..9: note = Seed: LVVVGAVGV (KRAS G12V)
VVVHGAVGY

SEQ ID NO: 62954 - protein, 9 aa, synthetic construct
  source 1..9: note = Seed: LVVVGAVGV (KRAS G12V)
VVVHGGVGL

SEQ ID NO: 62955 - protein, 9 aa, synthetic construct
  source 1..9: note = Seed: LVVVGAVGV (KRAS G12V)
VVVHGHVGL

SEQ ID NO: 62956 - protein, 9 aa, synthetic construct
  source 1..9: note = Seed: LVVVGAVGV (KRAS G12V)
VVVHGIVGR

SEQ ID NO: 62957 - protein, 9 aa, synthetic construct
  source 1..9: note = Seed: LVVVGAVGV (KRAS G12V)
VVVHGKVGL

SEQ ID NO: 62958 - protein, 9 aa, synthetic construct
  source 1..9: note = Seed: LVVVGAVGV (KRAS G12V)
VVVHGKVGM

SEQ ID NO: 62959 - protein, 9 aa, synthetic construct
  source 1..9: note = Seed: LVVVGAVGV (KRAS G12V)
VVVHGKVGR

SEQ ID NO: 62960 - protein, 9 aa, synthetic construct
  source 1..9: note = Seed: LVVVGAVGV (KRAS G12V)
VVVHGNVGF

SEQ ID NO: 62961 - protein, 9 aa, synthetic construct
  source 1..9: note = Seed: LVVVGAVGV (KRAS G12V)
VVVHGNVGI

SEQ ID NO: 62962 - protein, 9 aa, synthetic construct
  source 1..9: note = Seed: LVVVGAVGV (KRAS G12V)
VVVHGNVGL

SEQ ID NO: 62963 - protein, 9 aa, synthetic construct
  source 1..9: note = Seed: LVVVGAVGV (KRAS G12V)
VVVHGNVGR

SEQ ID NO: 62964 - protein, 9 aa, synthetic construct
  source 1..9: note = Seed: LVVVGAVGV (KRAS G12V)
VVVHGNVGV

SEQ ID NO: 62965 - protein, 9 aa, synthetic construct
  source 1..9: note = Seed: LVVVGAVGV (KRAS G12V)
VVVHGNVGY

SEQ ID NO: 62966 - protein, 9 aa, synthetic construct
  source 1..9: note = Seed: LVVVGAVGV (KRAS G12V)
VVVHGPVGL

SEQ ID NO: 62967 - protein, 9 aa, synthetic construct
  source 1..9: note = Seed: LVVVGAVGV (KRAS G12V)
VVVHGRVGF

SEQ ID NO: 62968 - protein, 9 aa, synthetic construct
  source 1..9: note = Seed: LVVVGAVGV (KRAS G12V)
VVVHGRVGH

SEQ ID NO: 62969 - protein, 9 aa, synthetic construct
  source 1..9: note = Seed: LVVVGAVGV (KRAS G12V)
VVVHGRVGI

SEQ ID NO: 62970 - protein, 9 aa, synthetic construct
  source 1..9: note = Seed: LVVVGAVGV (KRAS G12V)
VVVHGRVGK

SEQ ID NO: 62971 - protein, 9 aa, synthetic construct
  source 1..9: note = Seed: LVVVGAVGV (KRAS G12V)
VVVHGRVGL

SEQ ID NO: 62972 - protein, 9 aa, synthetic construct
  source 1..9: note = Seed: LVVVGAVGV (KRAS G12V)
VVVHGRVGM

SEQ ID NO: 62973 - protein, 9 aa, synthetic construct
  source 1..9: note = Seed: LVVVGAVGV (KRAS G12V)
VVVHGRVGR

SEQ ID NO: 62974 - protein, 9 aa, synthetic construct
  source 1..9: note = Seed: LVVVGAVGV (KRAS G12V)
VVVHGRVGV

SEQ ID NO: 62975 - protein, 9 aa, synthetic construct
  source 1..9: note = Seed: LVVVGAVGV (KRAS G12V)
VVVHGRVGY

SEQ ID NO: 62976 - protein, 9 aa, synthetic construct
  source 1..9: note = Seed: LVVVGAVGV (KRAS G12V)
VVVHGSVGI

SEQ ID NO: 62977 - protein, 9 aa, synthetic construct
  source 1..9: note = Seed: LVVVGAVGV (KRAS G12V)
VVVHGSVGL

SEQ ID NO: 62978 - protein, 9 aa, synthetic construct
  source 1..9: note = Seed: LVVVGAVGV (KRAS G12V)
VVVHGSVGR

SEQ ID NO: 62979 - protein, 9 aa, synthetic construct
  source 1..9: note = Seed: LVVVGAVGV (KRAS G12V)
VVVHGSVGV

SEQ ID NO: 62980 - protein, 9 aa, synthetic construct
  source 1..9: note = Seed: LVVVGAVGV (KRAS G12V)
VVVHGSVGY

SEQ ID NO: 62981 - protein, 9 aa, synthetic construct
  source 1..9: note = Seed: LVVVGAVGV (KRAS G12V)
VVVHGTVGR

SEQ ID NO: 62982 - protein, 9 aa, synthetic construct
  source 1..9: note = Seed: LVVVGAVGV (KRAS G12V)
VVVHGVVGR

SEQ ID NO: 62983 - protein, 9 aa, synthetic construct
  source 1..9: note = Seed: LVVVGAVGV (KRAS G12V)
VVVIGAVGA

SEQ ID NO: 62984 - protein, 9 aa, synthetic construct
  source 1..9: note = Seed: LVVVGAVGV (KRAS G12V)
VVVIGAVGF

SEQ ID NO: 62985 - protein, 9 aa, synthetic construct
  source 1..9: note = Seed: LVVVGAVGV (KRAS G12V)
VVVIGAVGG

SEQ ID NO: 62986 - protein, 9 aa, synthetic construct
  source 1..9: note = Seed: LVVVGAVGV (KRAS G12V)
VVVIGAVGH

SEQ ID NO: 62987 - protein, 9 aa, synthetic construct
  source 1..9: note = Seed: LVVVGAVGV (KRAS G12V)
VVVIGAVGI

SEQ ID NO: 62988 - protein, 9 aa, synthetic construct
  source 1..9: note = Seed: LVVVGAVGV (KRAS G12V)
VVVIGAVGL

SEQ ID NO: 62989 - protein, 9 aa, synthetic construct
  source 1..9: note = Seed: LVVVGAVGV (KRAS G12V)
VVVIGAVGM

SEQ ID NO: 62990 - protein, 9 aa, synthetic construct
  source 1..9: note = Seed: LVVVGAVGV (KRAS G12V)
VVVIGAVGN

SEQ ID NO: 62991 - protein, 9 aa, synthetic construct
  source 1..9: note = Seed: LVVVGAVGV (KRAS G12V)
VVVIGAVGR

SEQ ID NO: 62992 - protein, 9 aa, synthetic construct
  source 1..9: note = Seed: LVVVGAVGV (KRAS G12V)
VVVIGAVGS

SEQ ID NO: 62993 - protein, 9 aa, synthetic construct
  source 1..9: note = Seed: LVVVGAVGV (KRAS G12V)
VVVIGAVGT

SEQ ID NO: 62994 - protein, 9 aa, synthetic construct
  source 1..9: note = Seed: LVVVGAVGV (KRAS G12V)
VVVIGAVGV

SEQ ID NO: 62995 - protein, 9 aa, synthetic construct
  source 1..9: note = Seed: LVVVGAVGV (KRAS G12V)
VVVIGDVGA

SEQ ID NO: 62996 - protein, 9 aa, synthetic construct
  source 1..9: note = Seed: LVVVGAVGV (KRAS G12V)
VVVIGGVGA

SEQ ID NO: 62997 - protein, 9 aa, synthetic construct
  source 1..9: note = Seed: LVVVGAVGV (KRAS G12V)
VVVIGGVGG

SEQ ID NO: 62998 - protein, 9 aa, synthetic construct
  source 1..9: note = Seed: LVVVGAVGV (KRAS G12V)
VVVIGGVGI

SEQ ID NO: 62999 - protein, 9 aa, synthetic construct
  source 1..9: note = Seed: LVVVGAVGV (KRAS G12V)
VVVIGGVGL

SEQ ID NO: 63000 - protein, 9 aa, synthetic construct
  source 1..9: note = Seed: LVVVGAVGV (KRAS G12V)
VVVIGGVGM

SEQ ID NO: 63001 - protein, 9 aa, synthetic construct
  source 1..9: note = Seed: LVVVGAVGV (KRAS G12V)
VVVIGGVGN

SEQ ID NO: 63002 - protein, 9 aa, synthetic construct
  source 1..9: note = Seed: LVVVGAVGV (KRAS G12V)
VVVIGGVGS

SEQ ID NO: 63003 - protein, 9 aa, synthetic construct
  source 1..9: note = Seed: LVVVGAVGV (KRAS G12V)
VVVIGGVGT

SEQ ID NO: 63004 - protein, 9 aa, synthetic construct
  source 1..9: note = Seed: LVVVGAVGV (KRAS G12V)
VVVIGGVGV

SEQ ID NO: 63005 - protein, 9 aa, synthetic construct
  source 1..9: note = Seed: LVVVGAVGV (KRAS G12V)
VVVIGHVGA

SEQ ID NO: 63006 - protein, 9 aa, synthetic construct
  source 1..9: note = Seed: LVVVGAVGV (KRAS G12V)
VVVIGHVGH

SEQ ID NO: 63007 - protein, 9 aa, synthetic construct
  source 1..9: note = Seed: LVVVGAVGV (KRAS G12V)
VVVIGHVGK

SEQ ID NO: 63008 - protein, 9 aa, synthetic construct
  source 1..9: note = Seed: LVVVGAVGV (KRAS G12V)
VVVIGHVGL

SEQ ID NO: 63009 - protein, 9 aa, synthetic construct
  source 1..9: note = Seed: LVVVGAVGV (KRAS G12V)
VVVIGHVGM

SEQ ID NO: 63010 - protein, 9 aa, synthetic construct
  source 1..9: note = Seed: LVVVGAVGV (KRAS G12V)
VVVIGHVGR

SEQ ID NO: 63011 - protein, 9 aa, synthetic construct
  source 1..9: note = Seed: LVVVGAVGV (KRAS G12V)
VVVIGHVGV

SEQ ID NO: 63012 - protein, 9 aa, synthetic construct
  source 1..9: note = Seed: LVVVGAVGV (KRAS G12V)
VVVIGHVGY

SEQ ID NO: 63013 - protein, 9 aa, synthetic construct
  source 1..9: note = Seed: LVVVGAVGV (KRAS G12V)
VVVIGIVGK

SEQ ID NO: 63014 - protein, 9 aa, synthetic construct
  source 1..9: note = Seed: LVVVGAVGV (KRAS G12V)
VVVIGIVGR

SEQ ID NO: 63015 - protein, 9 aa, synthetic construct
  source 1..9: note = Seed: LVVVGAVGV (KRAS G12V)
VVVIGKVGA

SEQ ID NO: 63016 - protein, 9 aa, synthetic construct
  source 1..9: note = Seed: LVVVGAVGV (KRAS G12V)
VVVIGKVGG

SEQ ID NO: 63017 - protein, 9 aa, synthetic construct
  source 1..9: note = Seed: LVVVGAVGV (KRAS G12V)
VVVIGKVGH

SEQ ID NO: 63018 - protein, 9 aa, synthetic construct
  source 1..9: note = Seed: LVVVGAVGV (KRAS G12V)
VVVIGKVGK

SEQ ID NO: 63019 - protein, 9 aa, synthetic construct
  source 1..9: note = Seed: LVVVGAVGV (KRAS G12V)
VVVIGKVGL

SEQ ID NO: 63020 - protein, 9 aa, synthetic construct
  source 1..9: note = Seed: LVVVGAVGV (KRAS G12V)
VVVIGKVGM

SEQ ID NO: 63021 - protein, 9 aa, synthetic construct
  source 1..9: note = Seed: LVVVGAVGV (KRAS G12V)
VVVIGKVGN

SEQ ID NO: 63022 - protein, 9 aa, synthetic construct
  source 1..9: note = Seed: LVVVGAVGV (KRAS G12V)
VVVIGKVGQ

SEQ ID NO: 63023 - protein, 9 aa, synthetic construct
  source 1..9: note = Seed: LVVVGAVGV (KRAS G12V)
VVVIGKVGR

SEQ ID NO: 63024 - protein, 9 aa, synthetic construct
  source 1..9: note = Seed: LVVVGAVGV (KRAS G12V)
VVVIGKVGS

SEQ ID NO: 63025 - protein, 9 aa, synthetic construct
  source 1..9: note = Seed: LVVVGAVGV (KRAS G12V)
VVVIGKVGT

SEQ ID NO: 63026 - protein, 9 aa, synthetic construct
  source 1..9: note = Seed: LVVVGAVGV (KRAS G12V)
VVVIGKVGY

SEQ ID NO: 63027 - protein, 9 aa, synthetic construct
  source 1..9: note = Seed: LVVVGAVGV (KRAS G12V)
VVVIGLVGK

SEQ ID NO: 63028 - protein, 9 aa, synthetic construct
  source 1..9: note = Seed: LVVVGAVGV (KRAS G12V)
VVVIGLVGR

SEQ ID NO: 63029 - protein, 9 aa, synthetic construct
  source 1..9: note = Seed: LVVVGAVGV (KRAS G12V)
VVVIGMVGA

SEQ ID NO: 63030 - protein, 9 aa, synthetic construct
  source 1..9: note = Seed: LVVVGAVGV (KRAS G12V)
VVVIGMVGK

SEQ ID NO: 63031 - protein, 9 aa, synthetic construct
  source 1..9: note = Seed: LVVVGAVGV (KRAS G12V)
VVVIGMVGR

SEQ ID NO: 63032 - protein, 9 aa, synthetic construct
  source 1..9: note = Seed: LVVVGAVGV (KRAS G12V)
VVVIGNVGA

SEQ ID NO: 63033 - protein, 9 aa, synthetic construct
  source 1..9: note = Seed: LVVVGAVGV (KRAS G12V)
VVVIGNVGG

SEQ ID NO: 63034 - protein, 9 aa, synthetic construct
  source 1..9: note = Seed: LVVVGAVGV (KRAS G12V)
VVVIGNVGH

SEQ ID NO: 63035 - protein, 9 aa, synthetic construct
  source 1..9: note = Seed: LVVVGAVGV (KRAS G12V)
VVVIGNVGI

SEQ ID NO: 63036 - protein, 9 aa, synthetic construct
  source 1..9: note = Seed: LVVVGAVGV (KRAS G12V)
VVVIGNVGL

SEQ ID NO: 63037 - protein, 9 aa, synthetic construct
  source 1..9: note = Seed: LVVVGAVGV (KRAS G12V)
VVVIGNVGM

SEQ ID NO: 63038 - protein, 9 aa, synthetic construct
  source 1..9: note = Seed: LVVVGAVGV (KRAS G12V)
VVVIGNVGQ

SEQ ID NO: 63039 - protein, 9 aa, synthetic construct
  source 1..9: note = Seed: LVVVGAVGV (KRAS G12V)
VVVIGNVGR

SEQ ID NO: 63040 - protein, 9 aa, synthetic construct
  source 1..9: note = Seed: LVVVGAVGV (KRAS G12V)
VVVIGNVGS

SEQ ID NO: 63041 - protein, 9 aa, synthetic construct
  source 1..9: note = Seed: LVVVGAVGV (KRAS G12V)
VVVIGNVGT

SEQ ID NO: 63042 - protein, 9 aa, synthetic construct
  source 1..9: note = Seed: LVVVGAVGV (KRAS G12V)
VVVIGNVGV

SEQ ID NO: 63043 - protein, 9 aa, synthetic construct
  source 1..9: note = Seed: LVVVGAVGV (KRAS G12V)
VVVIGPVGA

SEQ ID NO: 63044 - protein, 9 aa, synthetic construct
  source 1..9: note = Seed: LVVVGAVGV (KRAS G12V)
VVVIGPVGC

SEQ ID NO: 63045 - protein, 9 aa, synthetic construct
  source 1..9: note = Seed: LVVVGAVGV (KRAS G12V)
VVVIGPVGD

SEQ ID NO: 63046 - protein, 9 aa, synthetic construct
  source 1..9: note = Seed: LVVVGAVGV (KRAS G12V)
VVVIGPVGF

SEQ ID NO: 63047 - protein, 9 aa, synthetic construct
  source 1..9: note = Seed: LVVVGAVGV (KRAS G12V)
VVVIGPVGG

SEQ ID NO: 63048 - protein, 9 aa, synthetic construct
  source 1..9: note = Seed: LVVVGAVGV (KRAS G12V)
VVVIGPVGH

SEQ ID NO: 63049 - protein, 9 aa, synthetic construct
  source 1..9: note = Seed: LVVVGAVGV (KRAS G12V)
VVVIGPVGI

SEQ ID NO: 63050 - protein, 9 aa, synthetic construct
  source 1..9: note = Seed: LVVVGAVGV (KRAS G12V)
VVVIGPVGK

SEQ ID NO: 63051 - protein, 9 aa, synthetic construct
  source 1..9: note = Seed: LVVVGAVGV (KRAS G12V)
VVVIGPVGL

SEQ ID NO: 63052 - protein, 9 aa, synthetic construct
  source 1..9: note = Seed: LVVVGAVGV (KRAS G12V)
VVVIGPVGM

SEQ ID NO: 63053 - protein, 9 aa, synthetic construct
  source 1..9: note = Seed: LVVVGAVGV (KRAS G12V)
VVVIGPVGN

SEQ ID NO: 63054 - protein, 9 aa, synthetic construct
  source 1..9: note = Seed: LVVVGAVGV (KRAS G12V)
VVVIGPVGQ

SEQ ID NO: 63055 - protein, 9 aa, synthetic construct
  source 1..9: note = Seed: LVVVGAVGV (KRAS G12V)
VVVIGPVGR

SEQ ID NO: 63056 - protein, 9 aa, synthetic construct
  source 1..9: note = Seed: LVVVGAVGV (KRAS G12V)
VVVIGPVGS

SEQ ID NO: 63057 - protein, 9 aa, synthetic construct
  source 1..9: note = Seed: LVVVGAVGV (KRAS G12V)
VVVIGPVGT

SEQ ID NO: 63058 - protein, 9 aa, synthetic construct
  source 1..9: note = Seed: LVVVGAVGV (KRAS G12V)
VVVIGPVGV

SEQ ID NO: 63059 - protein, 9 aa, synthetic construct
  source 1..9: note = Seed: LVVVGAVGV (KRAS G12V)
VVVIGPVGY

SEQ ID NO: 63060 - protein, 9 aa, synthetic construct
  source 1..9: note = Seed: LVVVGAVGV (KRAS G12V)
VVVIGRVGA

SEQ ID NO: 63061 - protein, 9 aa, synthetic construct
  source 1..9: note = Seed: LVVVGAVGV (KRAS G12V)
VVVIGRVGF

SEQ ID NO: 63062 - protein, 9 aa, synthetic construct
  source 1..9: note = Seed: LVVVGAVGV (KRAS G12V)
VVVIGRVGG

SEQ ID NO: 63063 - protein, 9 aa, synthetic construct
  source 1..9: note = Seed: LVVVGAVGV (KRAS G12V)
VVVIGRVGH

SEQ ID NO: 63064 - protein, 9 aa, synthetic construct
  source 1..9: note = Seed: LVVVGAVGV (KRAS G12V)
VVVIGRVGI

SEQ ID NO: 63065 - protein, 9 aa, synthetic construct
  source 1..9: note = Seed: LVVVGAVGV (KRAS G12V)
VVVIGRVGK

SEQ ID NO: 63066 - protein, 9 aa, synthetic construct
  source 1..9: note = Seed: LVVVGAVGV (KRAS G12V)
VVVIGRVGL

SEQ ID NO: 63067 - protein, 9 aa, synthetic construct
  source 1..9: note = Seed: LVVVGAVGV (KRAS G12V)
VVVIGRVGM

SEQ ID NO: 63068 - protein, 9 aa, synthetic construct
  source 1..9: note = Seed: LVVVGAVGV (KRAS G12V)
VVVIGRVGN

SEQ ID NO: 63069 - protein, 9 aa, synthetic construct
  source 1..9: note = Seed: LVVVGAVGV (KRAS G12V)
VVVIGRVGP

SEQ ID NO: 63070 - protein, 9 aa, synthetic construct
  source 1..9: note = Seed: LVVVGAVGV (KRAS G12V)
VVVIGRVGQ

SEQ ID NO: 63071 - protein, 9 aa, synthetic construct
  source 1..9: note = Seed: LVVVGAVGV (KRAS G12V)
VVVIGRVGR

SEQ ID NO: 63072 - protein, 9 aa, synthetic construct
  source 1..9: note = Seed: LVVVGAVGV (KRAS G12V)
VVVIGRVGS

SEQ ID NO: 63073 - protein, 9 aa, synthetic construct
  source 1..9: note = Seed: LVVVGAVGV (KRAS G12V)
VVVIGRVGT

SEQ ID NO: 63074 - protein, 9 aa, synthetic construct
  source 1..9: note = Seed: LVVVGAVGV (KRAS G12V)
VVVIGRVGV

SEQ ID NO: 63075 - protein, 9 aa, synthetic construct
  source 1..9: note = Seed: LVVVGAVGV (KRAS G12V)
VVVIGRVGY

SEQ ID NO: 63076 - protein, 9 aa, synthetic construct
  source 1..9: note = Seed: LVVVGAVGV (KRAS G12V)
VVVIGSVGA

SEQ ID NO: 63077 - protein, 9 aa, synthetic construct
  source 1..9: note = Seed: LVVVGAVGV (KRAS G12V)
VVVIGSVGG

SEQ ID NO: 63078 - protein, 9 aa, synthetic construct
  source 1..9: note = Seed: LVVVGAVGV (KRAS G12V)
VVVIGSVGH

SEQ ID NO: 63079 - protein, 9 aa, synthetic construct
  source 1..9: note = Seed: LVVVGAVGV (KRAS G12V)
VVVIGSVGI

SEQ ID NO: 63080 - protein, 9 aa, synthetic construct
  source 1..9: note = Seed: LVVVGAVGV (KRAS G12V)
VVVIGSVGL

SEQ ID NO: 63081 - protein, 9 aa, synthetic construct
  source 1..9: note = Seed: LVVVGAVGV (KRAS G12V)
VVVIGSVGM

SEQ ID NO: 63082 - protein, 9 aa, synthetic construct
  source 1..9: note = Seed: LVVVGAVGV (KRAS G12V)
VVVIGSVGN

SEQ ID NO: 63083 - protein, 9 aa, synthetic construct
  source 1..9: note = Seed: LVVVGAVGV (KRAS G12V)
VVVIGSVGR

SEQ ID NO: 63084 - protein, 9 aa, synthetic construct
  source 1..9: note = Seed: LVVVGAVGV (KRAS G12V)
VVVIGSVGS

SEQ ID NO: 63085 - protein, 9 aa, synthetic construct
  source 1..9: note = Seed: LVVVGAVGV (KRAS G12V)
VVVIGSVGT

SEQ ID NO: 63086 - protein, 9 aa, synthetic construct
  source 1..9: note = Seed: LVVVGAVGV (KRAS G12V)
VVVIGSVGV

SEQ ID NO: 63087 - protein, 9 aa, synthetic construct
  source 1..9: note = Seed: LVVVGAVGV (KRAS G12V)
VVVIGTVGA

SEQ ID NO: 63088 - protein, 9 aa, synthetic construct
  source 1..9: note = Seed: LVVVGAVGV (KRAS G12V)
VVVIGTVGH

SEQ ID NO: 63089 - protein, 9 aa, synthetic construct
  source 1..9: note = Seed: LVVVGAVGV (KRAS G12V)
VVVIGTVGI

SEQ ID NO: 63090 - protein, 9 aa, synthetic construct
  source 1..9: note = Seed: LVVVGAVGV (KRAS G12V)
VVVIGTVGL

SEQ ID NO: 63091 - protein, 9 aa, synthetic construct
  source 1..9: note = Seed: LVVVGAVGV (KRAS G12V)
VVVIGTVGM

SEQ ID NO: 63092 - protein, 9 aa, synthetic construct
  source 1..9: note = Seed: LVVVGAVGV (KRAS G12V)
VVVIGTVGN

SEQ ID NO: 63093 - protein, 9 aa, synthetic construct
  source 1..9: note = Seed: LVVVGAVGV (KRAS G12V)
VVVIGTVGQ

SEQ ID NO: 63094 - protein, 9 aa, synthetic construct
  source 1..9: note = Seed: LVVVGAVGV (KRAS G12V)
VVVIGTVGR

SEQ ID NO: 63095 - protein, 9 aa, synthetic construct
  source 1..9: note = Seed: LVVVGAVGV (KRAS G12V)
VVVIGTVGS

SEQ ID NO: 63096 - protein, 9 aa, synthetic construct
  source 1..9: note = Seed: LVVVGAVGV (KRAS G12V)
VVVIGTVGT

SEQ ID NO: 63097 - protein, 9 aa, synthetic construct
  source 1..9: note = Seed: LVVVGAVGV (KRAS G12V)
VVVIGTVGV

SEQ ID NO: 63098 - protein, 9 aa, synthetic construct
  source 1..9: note = Seed: LVVVGAVGV (KRAS G12V)
VVVIGVVGK

SEQ ID NO: 63099 - protein, 9 aa, synthetic construct
  source 1..9: note = Seed: LVVVGAVGV (KRAS G12V)
VVVIGVVGR

SEQ ID NO: 63100 - protein, 9 aa, synthetic construct
  source 1..9: note = Seed: LVVVGAVGV (KRAS G12V)
VVVIGYVGR

SEQ ID NO: 63101 - protein, 9 aa, synthetic construct
  source 1..9: note = Seed: LVVVGAVGV (KRAS G12V)
VVVKGIVGR

SEQ ID NO: 63102 - protein, 9 aa, synthetic construct
  source 1..9: note = Seed: LVVVGAVGV (KRAS G12V)
VVVKGKVGA

SEQ ID NO: 63103 - protein, 9 aa, synthetic construct
  source 1..9: note = Seed: LVVVGAVGV (KRAS G12V)
VVVKGKVGQ

SEQ ID NO: 63104 - protein, 9 aa, synthetic construct
  source 1..9: note = Seed: LVVVGAVGV (KRAS G12V)
VVVKGKVGR

SEQ ID NO: 63105 - protein, 9 aa, synthetic construct
  source 1..9: note = Seed: LVVVGAVGV (KRAS G12V)
VVVKGKVGS

SEQ ID NO: 63106 - protein, 9 aa, synthetic construct
  source 1..9: note = Seed: LVVVGAVGV (KRAS G12V)
VVVKGLVGR

SEQ ID NO: 63107 - protein, 9 aa, synthetic construct
  source 1..9: note = Seed: LVVVGAVGV (KRAS G12V)
VVVKGMVGK

SEQ ID NO: 63108 - protein, 9 aa, synthetic construct
  source 1..9: note = Seed: LVVVGAVGV (KRAS G12V)
VVVKGMVGR

SEQ ID NO: 63109 - protein, 9 aa, synthetic construct
  source 1..9: note = Seed: LVVVGAVGV (KRAS G12V)
VVVKGRVGA

SEQ ID NO: 63110 - protein, 9 aa, synthetic construct
  source 1..9: note = Seed: LVVVGAVGV (KRAS G12V)
VVVKGRVGC

SEQ ID NO: 63111 - protein, 9 aa, synthetic construct
  source 1..9: note = Seed: LVVVGAVGV (KRAS G12V)
VVVKGRVGF

SEQ ID NO: 63112 - protein, 9 aa, synthetic construct
  source 1..9: note = Seed: LVVVGAVGV (KRAS G12V)
VVVKGRVGG

SEQ ID NO: 63113 - protein, 9 aa, synthetic construct
  source 1..9: note = Seed: LVVVGAVGV (KRAS G12V)
VVVKGRVGH

SEQ ID NO: 63114 - protein, 9 aa, synthetic construct
  source 1..9: note = Seed: LVVVGAVGV (KRAS G12V)
VVVKGRVGI

SEQ ID NO: 63115 - protein, 9 aa, synthetic construct
  source 1..9: note = Seed: LVVVGAVGV (KRAS G12V)
VVVKGRVGK

SEQ ID NO: 63116 - protein, 9 aa, synthetic construct
  source 1..9: note = Seed: LVVVGAVGV (KRAS G12V)
VVVKGRVGL

SEQ ID NO: 63117 - protein, 9 aa, synthetic construct
  source 1..9: note = Seed: LVVVGAVGV (KRAS G12V)
VVVKGRVGM

SEQ ID NO: 63118 - protein, 9 aa, synthetic construct
  source 1..9: note = Seed: LVVVGAVGV (KRAS G12V)
VVVKGRVGQ

SEQ ID NO: 63119 - protein, 9 aa, synthetic construct
  source 1..9: note = Seed: LVVVGAVGV (KRAS G12V)
VVVKGRVGR

SEQ ID NO: 63120 - protein, 9 aa, synthetic construct
  source 1..9: note = Seed: LVVVGAVGV (KRAS G12V)
VVVKGRVGS

SEQ ID NO: 63121 - protein, 9 aa, synthetic construct
  source 1..9: note = Seed: LVVVGAVGV (KRAS G12V)
VVVKGRVGT

SEQ ID NO: 63122 - protein, 9 aa, synthetic construct
  source 1..9: note = Seed: LVVVGAVGV (KRAS G12V)
VVVKGRVGV

SEQ ID NO: 63123 - protein, 9 aa, synthetic construct
  source 1..9: note = Seed: LVVVGAVGV (KRAS G12V)
VVVKGRVGW

SEQ ID NO: 63124 - protein, 9 aa, synthetic construct
  source 1..9: note = Seed: LVVVGAVGV (KRAS G12V)
VVVKGRVGY

SEQ ID NO: 63125 - protein, 9 aa, synthetic construct
  source 1..9: note = Seed: LVVVGAVGV (KRAS G12V)
VVVLGAVGA

SEQ ID NO: 63126 - protein, 9 aa, synthetic construct
  source 1..9: note = Seed: LVVVGAVGV (KRAS G12V)
VVVLGAVGF

SEQ ID NO: 63127 - protein, 9 aa, synthetic construct
  source 1..9: note = Seed: LVVVGAVGV (KRAS G12V)
VVVLGAVGG

SEQ ID NO: 63128 - protein, 9 aa, synthetic construct
  source 1..9: note = Seed: LVVVGAVGV (KRAS G12V)
VVVLGAVGH

SEQ ID NO: 63129 - protein, 9 aa, synthetic construct
  source 1..9: note = Seed: LVVVGAVGV (KRAS G12V)
VVVLGAVGI

SEQ ID NO: 63130 - protein, 9 aa, synthetic construct
  source 1..9: note = Seed: LVVVGAVGV (KRAS G12V)
VVVLGAVGK

SEQ ID NO: 63131 - protein, 9 aa, synthetic construct
  source 1..9: note = Seed: LVVVGAVGV (KRAS G12V)
VVVLGAVGL

SEQ ID NO: 63132 - protein, 9 aa, synthetic construct
  source 1..9: note = Seed: LVVVGAVGV (KRAS G12V)
VVVLGAVGM

SEQ ID NO: 63133 - protein, 9 aa, synthetic construct
  source 1..9: note = Seed: LVVVGAVGV (KRAS G12V)
VVVLGAVGN

SEQ ID NO: 63134 - protein, 9 aa, synthetic construct
  source 1..9: note = Seed: LVVVGAVGV (KRAS G12V)
VVVLGAVGP

SEQ ID NO: 63135 - protein, 9 aa, synthetic construct
  source 1..9: note = Seed: LVVVGAVGV (KRAS G12V)
VVVLGAVGQ

SEQ ID NO: 63136 - protein, 9 aa, synthetic construct
  source 1..9: note = Seed: LVVVGAVGV (KRAS G12V)
VVVLGAVGR

SEQ ID NO: 63137 - protein, 9 aa, synthetic construct
  source 1..9: note = Seed: LVVVGAVGV (KRAS G12V)
VVVLGAVGS

SEQ ID NO: 63138 - protein, 9 aa, synthetic construct
  source 1..9: note = Seed: LVVVGAVGV (KRAS G12V)
VVVLGAVGT

SEQ ID NO: 63139 - protein, 9 aa, synthetic construct
  source 1..9: note = Seed: LVVVGAVGV (KRAS G12V)
VVVLGAVGV

SEQ ID NO: 63140 - protein, 9 aa, synthetic construct
  source 1..9: note = Seed: LVVVGAVGV (KRAS G12V)
VVVLGAVGY

SEQ ID NO: 63141 - protein, 9 aa, synthetic construct
  source 1..9: note = Seed: LVVVGAVGV (KRAS G12V)
VVVLGFVGR

SEQ ID NO: 63142 - protein, 9 aa, synthetic construct
  source 1..9: note = Seed: LVVVGAVGV (KRAS G12V)
VVVLGGVGA

SEQ ID NO: 63143 - protein, 9 aa, synthetic construct
  source 1..9: note = Seed: LVVVGAVGV (KRAS G12V)
VVVLGGVGF

SEQ ID NO: 63144 - protein, 9 aa, synthetic construct
  source 1..9: note = Seed: LVVVGAVGV (KRAS G12V)
VVVLGGVGG

SEQ ID NO: 63145 - protein, 9 aa, synthetic construct
  source 1..9: note = Seed: LVVVGAVGV (KRAS G12V)
VVVLGGVGH

SEQ ID NO: 63146 - protein, 9 aa, synthetic construct
  source 1..9: note = Seed: LVVVGAVGV (KRAS G12V)
VVVLGGVGI

SEQ ID NO: 63147 - protein, 9 aa, synthetic construct
  source 1..9: note = Seed: LVVVGAVGV (KRAS G12V)
VVVLGGVGL

SEQ ID NO: 63148 - protein, 9 aa, synthetic construct
  source 1..9: note = Seed: LVVVGAVGV (KRAS G12V)
VVVLGGVGM

SEQ ID NO: 63149 - protein, 9 aa, synthetic construct
  source 1..9: note = Seed: LVVVGAVGV (KRAS G12V)
VVVLGGVGN

SEQ ID NO: 63150 - protein, 9 aa, synthetic construct
  source 1..9: note = Seed: LVVVGAVGV (KRAS G12V)
VVVLGGVGP

SEQ ID NO: 63151 - protein, 9 aa, synthetic construct
  source 1..9: note = Seed: LVVVGAVGV (KRAS G12V)
VVVLGGVGQ

SEQ ID NO: 63152 - protein, 9 aa, synthetic construct
  source 1..9: note = Seed: LVVVGAVGV (KRAS G12V)
VVVLGGVGS

SEQ ID NO: 63153 - protein, 9 aa, synthetic construct
  source 1..9: note = Seed: LVVVGAVGV (KRAS G12V)
VVVLGGVGT

SEQ ID NO: 63154 - protein, 9 aa, synthetic construct
  source 1..9: note = Seed: LVVVGAVGV (KRAS G12V)
VVVLGGVGV

SEQ ID NO: 63155 - protein, 9 aa, synthetic construct
  source 1..9: note = Seed: LVVVGAVGV (KRAS G12V)
VVVLGHVGA

SEQ ID NO: 63156 - protein, 9 aa, synthetic construct
  source 1..9: note = Seed: LVVVGAVGV (KRAS G12V)
VVVLGHVGH

SEQ ID NO: 63157 - protein, 9 aa, synthetic construct
  source 1..9: note = Seed: LVVVGAVGV (KRAS G12V)
VVVLGHVGI

SEQ ID NO: 63158 - protein, 9 aa, synthetic construct
  source 1..9: note = Seed: LVVVGAVGV (KRAS G12V)
VVVLGHVGK

SEQ ID NO: 63159 - protein, 9 aa, synthetic construct
  source 1..9: note = Seed: LVVVGAVGV (KRAS G12V)
VVVLGHVGL

SEQ ID NO: 63160 - protein, 9 aa, synthetic construct
  source 1..9: note = Seed: LVVVGAVGV (KRAS G12V)
VVVLGHVGM

SEQ ID NO: 63161 - protein, 9 aa, synthetic construct
  source 1..9: note = Seed: LVVVGAVGV (KRAS G12V)
VVVLGHVGR

SEQ ID NO: 63162 - protein, 9 aa, synthetic construct
  source 1..9: note = Seed: LVVVGAVGV (KRAS G12V)
VVVLGHVGV

SEQ ID NO: 63163 - protein, 9 aa, synthetic construct
  source 1..9: note = Seed: LVVVGAVGV (KRAS G12V)
VVVLGIVGA

SEQ ID NO: 63164 - protein, 9 aa, synthetic construct
  source 1..9: note = Seed: LVVVGAVGV (KRAS G12V)
VVVLGIVGK

SEQ ID NO: 63165 - protein, 9 aa, synthetic construct
  source 1..9: note = Seed: LVVVGAVGV (KRAS G12V)
VVVLGIVGR

SEQ ID NO: 63166 - protein, 9 aa, synthetic construct
  source 1..9: note = Seed: LVVVGAVGV (KRAS G12V)
VVVLGKVGA

SEQ ID NO: 63167 - protein, 9 aa, synthetic construct
  source 1..9: note = Seed: LVVVGAVGV (KRAS G12V)
VVVLGKVGG

SEQ ID NO: 63168 - protein, 9 aa, synthetic construct
  source 1..9: note = Seed: LVVVGAVGV (KRAS G12V)
VVVLGKVGH

SEQ ID NO: 63169 - protein, 9 aa, synthetic construct
  source 1..9: note = Seed: LVVVGAVGV (KRAS G12V)
VVVLGKVGK

SEQ ID NO: 63170 - protein, 9 aa, synthetic construct
  source 1..9: note = Seed: LVVVGAVGV (KRAS G12V)
VVVLGKVGL

SEQ ID NO: 63171 - protein, 9 aa, synthetic construct
  source 1..9: note = Seed: LVVVGAVGV (KRAS G12V)
VVVLGKVGM

SEQ ID NO: 63172 - protein, 9 aa, synthetic construct
  source 1..9: note = Seed: LVVVGAVGV (KRAS G12V)
VVVLGKVGN

SEQ ID NO: 63173 - protein, 9 aa, synthetic construct
  source 1..9: note = Seed: LVVVGAVGV (KRAS G12V)
VVVLGKVGQ

SEQ ID NO: 63174 - protein, 9 aa, synthetic construct
  source 1..9: note = Seed: LVVVGAVGV (KRAS G12V)
VVVLGKVGR

SEQ ID NO: 63175 - protein, 9 aa, synthetic construct
  source 1..9: note = Seed: LVVVGAVGV (KRAS G12V)
VVVLGKVGS

SEQ ID NO: 63176 - protein, 9 aa, synthetic construct
  source 1..9: note = Seed: LVVVGAVGV (KRAS G12V)
VVVLGKVGT

SEQ ID NO: 63177 - protein, 9 aa, synthetic construct
  source 1..9: note = Seed: LVVVGAVGV (KRAS G12V)
VVVLGKVGY

SEQ ID NO: 63178 - protein, 9 aa, synthetic construct
  source 1..9: note = Seed: LVVVGAVGV (KRAS G12V)
VVVLGLVGA

SEQ ID NO: 63179 - protein, 9 aa, synthetic construct
  source 1..9: note = Seed: LVVVGAVGV (KRAS G12V)
VVVLGLVGK

SEQ ID NO: 63180 - protein, 9 aa, synthetic construct
  source 1..9: note = Seed: LVVVGAVGV (KRAS G12V)
VVVLGLVGR

SEQ ID NO: 63181 - protein, 9 aa, synthetic construct
  source 1..9: note = Seed: LVVVGAVGV (KRAS G12V)
VVVLGMVGA

SEQ ID NO: 63182 - protein, 9 aa, synthetic construct
  source 1..9: note = Seed: LVVVGAVGV (KRAS G12V)
VVVLGMVGL

SEQ ID NO: 63183 - protein, 9 aa, synthetic construct
  source 1..9: note = Seed: LVVVGAVGV (KRAS G12V)
VVVLGMVGM

SEQ ID NO: 63184 - protein, 9 aa, synthetic construct
  source 1..9: note = Seed: LVVVGAVGV (KRAS G12V)
VVVLGMVGR

SEQ ID NO: 63185 - protein, 9 aa, synthetic construct
  source 1..9: note = Seed: LVVVGAVGV (KRAS G12V)
VVVLGNVGA

SEQ ID NO: 63186 - protein, 9 aa, synthetic construct
  source 1..9: note = Seed: LVVVGAVGV (KRAS G12V)
VVVLGNVGG

SEQ ID NO: 63187 - protein, 9 aa, synthetic construct
  source 1..9: note = Seed: LVVVGAVGV (KRAS G12V)
VVVLGNVGH

SEQ ID NO: 63188 - protein, 9 aa, synthetic construct
  source 1..9: note = Seed: LVVVGAVGV (KRAS G12V)
VVVLGNVGI

SEQ ID NO: 63189 - protein, 9 aa, synthetic construct
  source 1..9: note = Seed: LVVVGAVGV (KRAS G12V)
VVVLGNVGL

SEQ ID NO: 63190 - protein, 9 aa, synthetic construct
  source 1..9: note = Seed: LVVVGAVGV (KRAS G12V)
VVVLGNVGM

SEQ ID NO: 63191 - protein, 9 aa, synthetic construct
  source 1..9: note = Seed: LVVVGAVGV (KRAS G12V)
VVVLGNVGN

SEQ ID NO: 63192 - protein, 9 aa, synthetic construct
  source 1..9: note = Seed: LVVVGAVGV (KRAS G12V)
VVVLGNVGQ

SEQ ID NO: 63193 - protein, 9 aa, synthetic construct
  source 1..9: note = Seed: LVVVGAVGV (KRAS G12V)
VVVLGNVGS

SEQ ID NO: 63194 - protein, 9 aa, synthetic construct
  source 1..9: note = Seed: LVVVGAVGV (KRAS G12V)
VVVLGNVGT

SEQ ID NO: 63195 - protein, 9 aa, synthetic construct
  source 1..9: note = Seed: LVVVGAVGV (KRAS G12V)
VVVLGNVGV

SEQ ID NO: 63196 - protein, 9 aa, synthetic construct
  source 1..9: note = Seed: LVVVGAVGV (KRAS G12V)
VVVLGPVGA

SEQ ID NO: 63197 - protein, 9 aa, synthetic construct
  source 1..9: note = Seed: LVVVGAVGV (KRAS G12V)
VVVLGPVGC

SEQ ID NO: 63198 - protein, 9 aa, synthetic construct
  source 1..9: note = Seed: LVVVGAVGV (KRAS G12V)
VVVLGPVGF

SEQ ID NO: 63199 - protein, 9 aa, synthetic construct
  source 1..9: note = Seed: LVVVGAVGV (KRAS G12V)
VVVLGPVGG

SEQ ID NO: 63200 - protein, 9 aa, synthetic construct
  source 1..9: note = Seed: LVVVGAVGV (KRAS G12V)
VVVLGPVGH

SEQ ID NO: 63201 - protein, 9 aa, synthetic construct
  source 1..9: note = Seed: LVVVGAVGV (KRAS G12V)
VVVLGPVGI

SEQ ID NO: 63202 - protein, 9 aa, synthetic construct
  source 1..9: note = Seed: LVVVGAVGV (KRAS G12V)
VVVLGPVGK

SEQ ID NO: 63203 - protein, 9 aa, synthetic construct
  source 1..9: note = Seed: LVVVGAVGV (KRAS G12V)
VVVLGPVGL

SEQ ID NO: 63204 - protein, 9 aa, synthetic construct
  source 1..9: note = Seed: LVVVGAVGV (KRAS G12V)
VVVLGPVGM

SEQ ID NO: 63205 - protein, 9 aa, synthetic construct
  source 1..9: note = Seed: LVVVGAVGV (KRAS G12V)
VVVLGPVGN

SEQ ID NO: 63206 - protein, 9 aa, synthetic construct
  source 1..9: note = Seed: LVVVGAVGV (KRAS G12V)
VVVLGPVGP

SEQ ID NO: 63207 - protein, 9 aa, synthetic construct
  source 1..9: note = Seed: LVVVGAVGV (KRAS G12V)
VVVLGPVGQ

SEQ ID NO: 63208 - protein, 9 aa, synthetic construct
  source 1..9: note = Seed: LVVVGAVGV (KRAS G12V)
VVVLGPVGR

SEQ ID NO: 63209 - protein, 9 aa, synthetic construct
  source 1..9: note = Seed: LVVVGAVGV (KRAS G12V)
VVVLGPVGS

SEQ ID NO: 63210 - protein, 9 aa, synthetic construct
  source 1..9: note = Seed: LVVVGAVGV (KRAS G12V)
VVVLGPVGT

SEQ ID NO: 63211 - protein, 9 aa, synthetic construct
  source 1..9: note = Seed: LVVVGAVGV (KRAS G12V)
VVVLGPVGV

SEQ ID NO: 63212 - protein, 9 aa, synthetic construct
  source 1..9: note = Seed: LVVVGAVGV (KRAS G12V)
VVVLGPVGY

SEQ ID NO: 63213 - protein, 9 aa, synthetic construct
  source 1..9: note = Seed: LVVVGAVGV (KRAS G12V)
VVVLGQVGL

SEQ ID NO: 63214 - protein, 9 aa, synthetic construct
  source 1..9: note = Seed: LVVVGAVGV (KRAS G12V)
VVVLGRVGA

SEQ ID NO: 63215 - protein, 9 aa, synthetic construct
  source 1..9: note = Seed: LVVVGAVGV (KRAS G12V)
VVVLGRVGG

SEQ ID NO: 63216 - protein, 9 aa, synthetic construct
  source 1..9: note = Seed: LVVVGAVGV (KRAS G12V)
VVVLGRVGH

SEQ ID NO: 63217 - protein, 9 aa, synthetic construct
  source 1..9: note = Seed: LVVVGAVGV (KRAS G12V)
VVVLGRVGI

SEQ ID NO: 63218 - protein, 9 aa, synthetic construct
  source 1..9: note = Seed: LVVVGAVGV (KRAS G12V)
VVVLGRVGK

SEQ ID NO: 63219 - protein, 9 aa, synthetic construct
  source 1..9: note = Seed: LVVVGAVGV (KRAS G12V)
VVVLGRVGL

SEQ ID NO: 63220 - protein, 9 aa, synthetic construct
  source 1..9: note = Seed: LVVVGAVGV (KRAS G12V)
VVVLGRVGM

SEQ ID NO: 63221 - protein, 9 aa, synthetic construct
  source 1..9: note = Seed: LVVVGAVGV (KRAS G12V)
VVVLGRVGN

SEQ ID NO: 63222 - protein, 9 aa, synthetic construct
  source 1..9: note = Seed: LVVVGAVGV (KRAS G12V)
VVVLGRVGP

SEQ ID NO: 63223 - protein, 9 aa, synthetic construct
  source 1..9: note = Seed: LVVVGAVGV (KRAS G12V)
VVVLGRVGQ

SEQ ID NO: 63224 - protein, 9 aa, synthetic construct
  source 1..9: note = Seed: LVVVGAVGV (KRAS G12V)
VVVLGRVGR

SEQ ID NO: 63225 - protein, 9 aa, synthetic construct
  source 1..9: note = Seed: LVVVGAVGV (KRAS G12V)
VVVLGRVGS

SEQ ID NO: 63226 - protein, 9 aa, synthetic construct
  source 1..9: note = Seed: LVVVGAVGV (KRAS G12V)
VVVLGRVGT

SEQ ID NO: 63227 - protein, 9 aa, synthetic construct
  source 1..9: note = Seed: LVVVGAVGV (KRAS G12V)
VVVLGRVGV

SEQ ID NO: 63228 - protein, 9 aa, synthetic construct
  source 1..9: note = Seed: LVVVGAVGV (KRAS G12V)
VVVLGRVGY

SEQ ID NO: 63229 - protein, 9 aa, synthetic construct
  source 1..9: note = Seed: LVVVGAVGV (KRAS G12V)
VVVLGSVGA

SEQ ID NO: 63230 - protein, 9 aa, synthetic construct
  source 1..9: note = Seed: LVVVGAVGV (KRAS G12V)
VVVLGSVGF

SEQ ID NO: 63231 - protein, 9 aa, synthetic construct
  source 1..9: note = Seed: LVVVGAVGV (KRAS G12V)
VVVLGSVGG

SEQ ID NO: 63232 - protein, 9 aa, synthetic construct
  source 1..9: note = Seed: LVVVGAVGV (KRAS G12V)
VVVLGSVGH

SEQ ID NO: 63233 - protein, 9 aa, synthetic construct
  source 1..9: note = Seed: LVVVGAVGV (KRAS G12V)
VVVLGSVGI

SEQ ID NO: 63234 - protein, 9 aa, synthetic construct
  source 1..9: note = Seed: LVVVGAVGV (KRAS G12V)
VVVLGSVGK

SEQ ID NO: 63235 - protein, 9 aa, synthetic construct
  source 1..9: note = Seed: LVVVGAVGV (KRAS G12V)
VVVLGSVGL

SEQ ID NO: 63236 - protein, 9 aa, synthetic construct
  source 1..9: note = Seed: LVVVGAVGV (KRAS G12V)
VVVLGSVGM

SEQ ID NO: 63237 - protein, 9 aa, synthetic construct
  source 1..9: note = Seed: LVVVGAVGV (KRAS G12V)
VVVLGSVGN

SEQ ID NO: 63238 - protein, 9 aa, synthetic construct
  source 1..9: note = Seed: LVVVGAVGV (KRAS G12V)
VVVLGSVGP

SEQ ID NO: 63239 - protein, 9 aa, synthetic construct
  source 1..9: note = Seed: LVVVGAVGV (KRAS G12V)
VVVLGSVGQ

SEQ ID NO: 63240 - protein, 9 aa, synthetic construct
  source 1..9: note = Seed: LVVVGAVGV (KRAS G12V)
VVVLGSVGR

SEQ ID NO: 63241 - protein, 9 aa, synthetic construct
  source 1..9: note = Seed: LVVVGAVGV (KRAS G12V)
VVVLGSVGS

SEQ ID NO: 63242 - protein, 9 aa, synthetic construct
  source 1..9: note = Seed: LVVVGAVGV (KRAS G12V)
VVVLGSVGT

SEQ ID NO: 63243 - protein, 9 aa, synthetic construct
  source 1..9: note = Seed: LVVVGAVGV (KRAS G12V)
VVVLGSVGV

SEQ ID NO: 63244 - protein, 9 aa, synthetic construct
  source 1..9: note = Seed: LVVVGAVGV (KRAS G12V)
VVVLGSVGY

SEQ ID NO: 63245 - protein, 9 aa, synthetic construct
  source 1..9: note = Seed: LVVVGAVGV (KRAS G12V)
VVVLGTVGA

SEQ ID NO: 63246 - protein, 9 aa, synthetic construct
  source 1..9: note = Seed: LVVVGAVGV (KRAS G12V)
VVVLGTVGH

SEQ ID NO: 63247 - protein, 9 aa, synthetic construct
  source 1..9: note = Seed: LVVVGAVGV (KRAS G12V)
VVVLGTVGI

SEQ ID NO: 63248 - protein, 9 aa, synthetic construct
  source 1..9: note = Seed: LVVVGAVGV (KRAS G12V)
VVVLGTVGL

SEQ ID NO: 63249 - protein, 9 aa, synthetic construct
  source 1..9: note = Seed: LVVVGAVGV (KRAS G12V)
VVVLGTVGM

SEQ ID NO: 63250 - protein, 9 aa, synthetic construct
  source 1..9: note = Seed: LVVVGAVGV (KRAS G12V)
VVVLGTVGN

SEQ ID NO: 63251 - protein, 9 aa, synthetic construct
  source 1..9: note = Seed: LVVVGAVGV (KRAS G12V)
VVVLGTVGR

SEQ ID NO: 63252 - protein, 9 aa, synthetic construct
  source 1..9: note = Seed: LVVVGAVGV (KRAS G12V)
VVVLGTVGS

SEQ ID NO: 63253 - protein, 9 aa, synthetic construct
  source 1..9: note = Seed: LVVVGAVGV (KRAS G12V)
VVVLGTVGT

SEQ ID NO: 63254 - protein, 9 aa, synthetic construct
  source 1..9: note = Seed: LVVVGAVGV (KRAS G12V)
VVVLGTVGV

SEQ ID NO: 63255 - protein, 9 aa, synthetic construct
  source 1..9: note = Seed: LVVVGAVGV (KRAS G12V)
VVVLGVVGA

SEQ ID NO: 63256 - protein, 9 aa, synthetic construct
  source 1..9: note = Seed: LVVVGAVGV (KRAS G12V)
VVVLGVVGM

SEQ ID NO: 63257 - protein, 9 aa, synthetic construct
  source 1..9: note = Seed: LVVVGAVGV (KRAS G12V)
VVVLGVVGR

SEQ ID NO: 63258 - protein, 9 aa, synthetic construct
  source 1..9: note = Seed: LVVVGAVGV (KRAS G12V)
VVVMGAVGA

SEQ ID NO: 63259 - protein, 9 aa, synthetic construct
  source 1..9: note = Seed: LVVVGAVGV (KRAS G12V)
VVVMGAVGF

SEQ ID NO: 63260 - protein, 9 aa, synthetic construct
  source 1..9: note = Seed: LVVVGAVGV (KRAS G12V)
VVVMGAVGG

SEQ ID NO: 63261 - protein, 9 aa, synthetic construct
  source 1..9: note = Seed: LVVVGAVGV (KRAS G12V)
VVVMGAVGH

SEQ ID NO: 63262 - protein, 9 aa, synthetic construct
  source 1..9: note = Seed: LVVVGAVGV (KRAS G12V)
VVVMGAVGI

SEQ ID NO: 63263 - protein, 9 aa, synthetic construct
  source 1..9: note = Seed: LVVVGAVGV (KRAS G12V)
VVVMGAVGK

SEQ ID NO: 63264 - protein, 9 aa, synthetic construct
  source 1..9: note = Seed: LVVVGAVGV (KRAS G12V)
VVVMGAVGL

SEQ ID NO: 63265 - protein, 9 aa, synthetic construct
  source 1..9: note = Seed: LVVVGAVGV (KRAS G12V)
VVVMGAVGM

SEQ ID NO: 63266 - protein, 9 aa, synthetic construct
  source 1..9: note = Seed: LVVVGAVGV (KRAS G12V)
VVVMGAVGN

SEQ ID NO: 63267 - protein, 9 aa, synthetic construct
  source 1..9: note = Seed: LVVVGAVGV (KRAS G12V)
VVVMGAVGP

SEQ ID NO: 63268 - protein, 9 aa, synthetic construct
  source 1..9: note = Seed: LVVVGAVGV (KRAS G12V)
VVVMGAVGQ

SEQ ID NO: 63269 - protein, 9 aa, synthetic construct
  source 1..9: note = Seed: LVVVGAVGV (KRAS G12V)
VVVMGAVGR

SEQ ID NO: 63270 - protein, 9 aa, synthetic construct
  source 1..9: note = Seed: LVVVGAVGV (KRAS G12V)
VVVMGAVGS

SEQ ID NO: 63271 - protein, 9 aa, synthetic construct
  source 1..9: note = Seed: LVVVGAVGV (KRAS G12V)
VVVMGAVGT

SEQ ID NO: 63272 - protein, 9 aa, synthetic construct
  source 1..9: note = Seed: LVVVGAVGV (KRAS G12V)
VVVMGAVGV

SEQ ID NO: 63273 - protein, 9 aa, synthetic construct
  source 1..9: note = Seed: LVVVGAVGV (KRAS G12V)
VVVMGAVGY

SEQ ID NO: 63274 - protein, 9 aa, synthetic construct
  source 1..9: note = Seed: LVVVGAVGV (KRAS G12V)
VVVMGDVGA

SEQ ID NO: 63275 - protein, 9 aa, synthetic construct
  source 1..9: note = Seed: LVVVGAVGV (KRAS G12V)
VVVMGGVGA

SEQ ID NO: 63276 - protein, 9 aa, synthetic construct
  source 1..9: note = Seed: LVVVGAVGV (KRAS G12V)
VVVMGGVGF

SEQ ID NO: 63277 - protein, 9 aa, synthetic construct
  source 1..9: note = Seed: LVVVGAVGV (KRAS G12V)
VVVMGGVGG

SEQ ID NO: 63278 - protein, 9 aa, synthetic construct
  source 1..9: note = Seed: LVVVGAVGV (KRAS G12V)
VVVMGGVGH

SEQ ID NO: 63279 - protein, 9 aa, synthetic construct
  source 1..9: note = Seed: LVVVGAVGV (KRAS G12V)
VVVMGGVGI

SEQ ID NO: 63280 - protein, 9 aa, synthetic construct
  source 1..9: note = Seed: LVVVGAVGV (KRAS G12V)
VVVMGGVGL

SEQ ID NO: 63281 - protein, 9 aa, synthetic construct
  source 1..9: note = Seed: LVVVGAVGV (KRAS G12V)
VVVMGGVGM

SEQ ID NO: 63282 - protein, 9 aa, synthetic construct
  source 1..9: note = Seed: LVVVGAVGV (KRAS G12V)
VVVMGGVGN

SEQ ID NO: 63283 - protein, 9 aa, synthetic construct
  source 1..9: note = Seed: LVVVGAVGV (KRAS G12V)
VVVMGGVGP

SEQ ID NO: 63284 - protein, 9 aa, synthetic construct
  source 1..9: note = Seed: LVVVGAVGV (KRAS G12V)
VVVMGGVGQ

SEQ ID NO: 63285 - protein, 9 aa, synthetic construct
  source 1..9: note = Seed: LVVVGAVGV (KRAS G12V)
VVVMGGVGR

SEQ ID NO: 63286 - protein, 9 aa, synthetic construct
  source 1..9: note = Seed: LVVVGAVGV (KRAS G12V)
VVVMGGVGS

SEQ ID NO: 63287 - protein, 9 aa, synthetic construct
  source 1..9: note = Seed: LVVVGAVGV (KRAS G12V)
VVVMGGVGT

SEQ ID NO: 63288 - protein, 9 aa, synthetic construct
  source 1..9: note = Seed: LVVVGAVGV (KRAS G12V)
VVVMGGVGV

SEQ ID NO: 63289 - protein, 9 aa, synthetic construct
  source 1..9: note = Seed: LVVVGAVGV (KRAS G12V)
VVVMGGVGY

SEQ ID NO: 63290 - protein, 9 aa, synthetic construct
  source 1..9: note = Seed: LVVVGAVGV (KRAS G12V)
VVVMGHVGA

SEQ ID NO: 63291 - protein, 9 aa, synthetic construct
  source 1..9: note = Seed: LVVVGAVGV (KRAS G12V)
VVVMGHVGH

SEQ ID NO: 63292 - protein, 9 aa, synthetic construct
  source 1..9: note = Seed: LVVVGAVGV (KRAS G12V)
VVVMGHVGI

SEQ ID NO: 63293 - protein, 9 aa, synthetic construct
  source 1..9: note = Seed: LVVVGAVGV (KRAS G12V)
VVVMGHVGK

SEQ ID NO: 63294 - protein, 9 aa, synthetic construct
  source 1..9: note = Seed: LVVVGAVGV (KRAS G12V)
VVVMGHVGL

SEQ ID NO: 63295 - protein, 9 aa, synthetic construct
  source 1..9: note = Seed: LVVVGAVGV (KRAS G12V)
VVVMGHVGM

SEQ ID NO: 63296 - protein, 9 aa, synthetic construct
  source 1..9: note = Seed: LVVVGAVGV (KRAS G12V)
VVVMGHVGR

SEQ ID NO: 63297 - protein, 9 aa, synthetic construct
  source 1..9: note = Seed: LVVVGAVGV (KRAS G12V)
VVVMGHVGV

SEQ ID NO: 63298 - protein, 9 aa, synthetic construct
  source 1..9: note = Seed: LVVVGAVGV (KRAS G12V)
VVVMGIVGA

SEQ ID NO: 63299 - protein, 9 aa, synthetic construct
  source 1..9: note = Seed: LVVVGAVGV (KRAS G12V)
VVVMGIVGL

SEQ ID NO: 63300 - protein, 9 aa, synthetic construct
  source 1..9: note = Seed: LVVVGAVGV (KRAS G12V)
VVVMGIVGM

SEQ ID NO: 63301 - protein, 9 aa, synthetic construct
  source 1..9: note = Seed: LVVVGAVGV (KRAS G12V)
VVVMGIVGN

SEQ ID NO: 63302 - protein, 9 aa, synthetic construct
  source 1..9: note = Seed: LVVVGAVGV (KRAS G12V)
VVVMGIVGR

SEQ ID NO: 63303 - protein, 9 aa, synthetic construct
  source 1..9: note = Seed: LVVVGAVGV (KRAS G12V)
VVVMGKVGA

SEQ ID NO: 63304 - protein, 9 aa, synthetic construct
  source 1..9: note = Seed: LVVVGAVGV (KRAS G12V)
VVVMGKVGG

SEQ ID NO: 63305 - protein, 9 aa, synthetic construct
  source 1..9: note = Seed: LVVVGAVGV (KRAS G12V)
VVVMGKVGH

SEQ ID NO: 63306 - protein, 9 aa, synthetic construct
  source 1..9: note = Seed: LVVVGAVGV (KRAS G12V)
VVVMGKVGI

SEQ ID NO: 63307 - protein, 9 aa, synthetic construct
  source 1..9: note = Seed: LVVVGAVGV (KRAS G12V)
VVVMGKVGK

SEQ ID NO: 63308 - protein, 9 aa, synthetic construct
  source 1..9: note = Seed: LVVVGAVGV (KRAS G12V)
VVVMGKVGL

SEQ ID NO: 63309 - protein, 9 aa, synthetic construct
  source 1..9: note = Seed: LVVVGAVGV (KRAS G12V)
VVVMGKVGM

SEQ ID NO: 63310 - protein, 9 aa, synthetic construct
  source 1..9: note = Seed: LVVVGAVGV (KRAS G12V)
VVVMGKVGN

SEQ ID NO: 63311 - protein, 9 aa, synthetic construct
  source 1..9: note = Seed: LVVVGAVGV (KRAS G12V)
VVVMGKVGP

SEQ ID NO: 63312 - protein, 9 aa, synthetic construct
  source 1..9: note = Seed: LVVVGAVGV (KRAS G12V)
VVVMGKVGQ

SEQ ID NO: 63313 - protein, 9 aa, synthetic construct
  source 1..9: note = Seed: LVVVGAVGV (KRAS G12V)
VVVMGKVGR

SEQ ID NO: 63314 - protein, 9 aa, synthetic construct
  source 1..9: note = Seed: LVVVGAVGV (KRAS G12V)
VVVMGKVGS

SEQ ID NO: 63315 - protein, 9 aa, synthetic construct
  source 1..9: note = Seed: LVVVGAVGV (KRAS G12V)
VVVMGKVGT

SEQ ID NO: 63316 - protein, 9 aa, synthetic construct
  source 1..9: note = Seed: LVVVGAVGV (KRAS G12V)
VVVMGKVGV

SEQ ID NO: 63317 - protein, 9 aa, synthetic construct
  source 1..9: note = Seed: LVVVGAVGV (KRAS G12V)
VVVMGKVGY

SEQ ID NO: 63318 - protein, 9 aa, synthetic construct
  source 1..9: note = Seed: LVVVGAVGV (KRAS G12V)
VVVMGLVGA

SEQ ID NO: 63319 - protein, 9 aa, synthetic construct
  source 1..9: note = Seed: LVVVGAVGV (KRAS G12V)
VVVMGLVGL

SEQ ID NO: 63320 - protein, 9 aa, synthetic construct
  source 1..9: note = Seed: LVVVGAVGV (KRAS G12V)
VVVMGLVGM

SEQ ID NO: 63321 - protein, 9 aa, synthetic construct
  source 1..9: note = Seed: LVVVGAVGV (KRAS G12V)
VVVMGLVGR

SEQ ID NO: 63322 - protein, 9 aa, synthetic construct
  source 1..9: note = Seed: LVVVGAVGV (KRAS G12V)
VVVMGLVGV

SEQ ID NO: 63323 - protein, 9 aa, synthetic construct
  source 1..9: note = Seed: LVVVGAVGV (KRAS G12V)
VVVMGMVGA

SEQ ID NO: 63324 - protein, 9 aa, synthetic construct
  source 1..9: note = Seed: LVVVGAVGV (KRAS G12V)
VVVMGMVGI

SEQ ID NO: 63325 - protein, 9 aa, synthetic construct
  source 1..9: note = Seed: LVVVGAVGV (KRAS G12V)
VVVMGMVGL

SEQ ID NO: 63326 - protein, 9 aa, synthetic construct
  source 1..9: note = Seed: LVVVGAVGV (KRAS G12V)
VVVMGMVGM

SEQ ID NO: 63327 - protein, 9 aa, synthetic construct
  source 1..9: note = Seed: LVVVGAVGV (KRAS G12V)
VVVMGMVGR

SEQ ID NO: 63328 - protein, 9 aa, synthetic construct
  source 1..9: note = Seed: LVVVGAVGV (KRAS G12V)
VVVMGMVGV

SEQ ID NO: 63329 - protein, 9 aa, synthetic construct
  source 1..9: note = Seed: LVVVGAVGV (KRAS G12V)
VVVMGMVGY

SEQ ID NO: 63330 - protein, 9 aa, synthetic construct
  source 1..9: note = Seed: LVVVGAVGV (KRAS G12V)
VVVMGNVGA

SEQ ID NO: 63331 - protein, 9 aa, synthetic construct
  source 1..9: note = Seed: LVVVGAVGV (KRAS G12V)
VVVMGNVGF

SEQ ID NO: 63332 - protein, 9 aa, synthetic construct
  source 1..9: note = Seed: LVVVGAVGV (KRAS G12V)
VVVMGNVGG

SEQ ID NO: 63333 - protein, 9 aa, synthetic construct
  source 1..9: note = Seed: LVVVGAVGV (KRAS G12V)
VVVMGNVGH

SEQ ID NO: 63334 - protein, 9 aa, synthetic construct
  source 1..9: note = Seed: LVVVGAVGV (KRAS G12V)
VVVMGNVGI

SEQ ID NO: 63335 - protein, 9 aa, synthetic construct
  source 1..9: note = Seed: LVVVGAVGV (KRAS G12V)
VVVMGNVGL

SEQ ID NO: 63336 - protein, 9 aa, synthetic construct
  source 1..9: note = Seed: LVVVGAVGV (KRAS G12V)
VVVMGNVGM

SEQ ID NO: 63337 - protein, 9 aa, synthetic construct
  source 1..9: note = Seed: LVVVGAVGV (KRAS G12V)
VVVMGNVGN

SEQ ID NO: 63338 - protein, 9 aa, synthetic construct
  source 1..9: note = Seed: LVVVGAVGV (KRAS G12V)
VVVMGNVGQ

SEQ ID NO: 63339 - protein, 9 aa, synthetic construct
  source 1..9: note = Seed: LVVVGAVGV (KRAS G12V)
VVVMGNVGR

SEQ ID NO: 63340 - protein, 9 aa, synthetic construct
  source 1..9: note = Seed: LVVVGAVGV (KRAS G12V)
VVVMGNVGS

SEQ ID NO: 63341 - protein, 9 aa, synthetic construct
  source 1..9: note = Seed: LVVVGAVGV (KRAS G12V)
VVVMGNVGT

SEQ ID NO: 63342 - protein, 9 aa, synthetic construct
  source 1..9: note = Seed: LVVVGAVGV (KRAS G12V)
VVVMGNVGV

SEQ ID NO: 63343 - protein, 9 aa, synthetic construct
  source 1..9: note = Seed: LVVVGAVGV (KRAS G12V)
VVVMGNVGY

SEQ ID NO: 63344 - protein, 9 aa, synthetic construct
  source 1..9: note = Seed: LVVVGAVGV (KRAS G12V)
VVVMGPVGA

SEQ ID NO: 63345 - protein, 9 aa, synthetic construct
  source 1..9: note = Seed: LVVVGAVGV (KRAS G12V)
VVVMGPVGC

SEQ ID NO: 63346 - protein, 9 aa, synthetic construct
  source 1..9: note = Seed: LVVVGAVGV (KRAS G12V)
VVVMGPVGF

SEQ ID NO: 63347 - protein, 9 aa, synthetic construct
  source 1..9: note = Seed: LVVVGAVGV (KRAS G12V)
VVVMGPVGG

SEQ ID NO: 63348 - protein, 9 aa, synthetic construct
  source 1..9: note = Seed: LVVVGAVGV (KRAS G12V)
VVVMGPVGH

SEQ ID NO: 63349 - protein, 9 aa, synthetic construct
  source 1..9: note = Seed: LVVVGAVGV (KRAS G12V)
VVVMGPVGI

SEQ ID NO: 63350 - protein, 9 aa, synthetic construct
  source 1..9: note = Seed: LVVVGAVGV (KRAS G12V)
VVVMGPVGK

SEQ ID NO: 63351 - protein, 9 aa, synthetic construct
  source 1..9: note = Seed: LVVVGAVGV (KRAS G12V)
VVVMGPVGL

SEQ ID NO: 63352 - protein, 9 aa, synthetic construct
  source 1..9: note = Seed: LVVVGAVGV (KRAS G12V)
VVVMGPVGM

SEQ ID NO: 63353 - protein, 9 aa, synthetic construct
  source 1..9: note = Seed: LVVVGAVGV (KRAS G12V)
VVVMGPVGN

SEQ ID NO: 63354 - protein, 9 aa, synthetic construct
  source 1..9: note = Seed: LVVVGAVGV (KRAS G12V)
VVVMGPVGQ

SEQ ID NO: 63355 - protein, 9 aa, synthetic construct
  source 1..9: note = Seed: LVVVGAVGV (KRAS G12V)
VVVMGPVGR

SEQ ID NO: 63356 - protein, 9 aa, synthetic construct
  source 1..9: note = Seed: LVVVGAVGV (KRAS G12V)
VVVMGPVGS

SEQ ID NO: 63357 - protein, 9 aa, synthetic construct
  source 1..9: note = Seed: LVVVGAVGV (KRAS G12V)
VVVMGPVGT

SEQ ID NO: 63358 - protein, 9 aa, synthetic construct
  source 1..9: note = Seed: LVVVGAVGV (KRAS G12V)
VVVMGPVGV

SEQ ID NO: 63359 - protein, 9 aa, synthetic construct
  source 1..9: note = Seed: LVVVGAVGV (KRAS G12V)
VVVMGPVGW

SEQ ID NO: 63360 - protein, 9 aa, synthetic construct
  source 1..9: note = Seed: LVVVGAVGV (KRAS G12V)
VVVMGPVGY

SEQ ID NO: 63361 - protein, 9 aa, synthetic construct
  source 1..9: note = Seed: LVVVGAVGV (KRAS G12V)
VVVMGQVGI

SEQ ID NO: 63362 - protein, 9 aa, synthetic construct
  source 1..9: note = Seed: LVVVGAVGV (KRAS G12V)
VVVMGQVGL

SEQ ID NO: 63363 - protein, 9 aa, synthetic construct
  source 1..9: note = Seed: LVVVGAVGV (KRAS G12V)
VVVMGQVGM

SEQ ID NO: 63364 - protein, 9 aa, synthetic construct
  source 1..9: note = Seed: LVVVGAVGV (KRAS G12V)
VVVMGQVGV

SEQ ID NO: 63365 - protein, 9 aa, synthetic construct
  source 1..9: note = Seed: LVVVGAVGV (KRAS G12V)
VVVMGRVGA

SEQ ID NO: 63366 - protein, 9 aa, synthetic construct
  source 1..9: note = Seed: LVVVGAVGV (KRAS G12V)
VVVMGRVGG

SEQ ID NO: 63367 - protein, 9 aa, synthetic construct
  source 1..9: note = Seed: LVVVGAVGV (KRAS G12V)
VVVMGRVGH

SEQ ID NO: 63368 - protein, 9 aa, synthetic construct
  source 1..9: note = Seed: LVVVGAVGV (KRAS G12V)
VVVMGRVGI

SEQ ID NO: 63369 - protein, 9 aa, synthetic construct
  source 1..9: note = Seed: LVVVGAVGV (KRAS G12V)
VVVMGRVGK

SEQ ID NO: 63370 - protein, 9 aa, synthetic construct
  source 1..9: note = Seed: LVVVGAVGV (KRAS G12V)
VVVMGRVGL

SEQ ID NO: 63371 - protein, 9 aa, synthetic construct
  source 1..9: note = Seed: LVVVGAVGV (KRAS G12V)
VVVMGRVGM

SEQ ID NO: 63372 - protein, 9 aa, synthetic construct
  source 1..9: note = Seed: LVVVGAVGV (KRAS G12V)
VVVMGRVGN

SEQ ID NO: 63373 - protein, 9 aa, synthetic construct
  source 1..9: note = Seed: LVVVGAVGV (KRAS G12V)
VVVMGRVGP

SEQ ID NO: 63374 - protein, 9 aa, synthetic construct
  source 1..9: note = Seed: LVVVGAVGV (KRAS G12V)
VVVMGRVGQ

SEQ ID NO: 63375 - protein, 9 aa, synthetic construct
  source 1..9: note = Seed: LVVVGAVGV (KRAS G12V)
VVVMGRVGR

SEQ ID NO: 63376 - protein, 9 aa, synthetic construct
  source 1..9: note = Seed: LVVVGAVGV (KRAS G12V)
VVVMGRVGS

SEQ ID NO: 63377 - protein, 9 aa, synthetic construct
  source 1..9: note = Seed: LVVVGAVGV (KRAS G12V)
VVVMGRVGT

SEQ ID NO: 63378 - protein, 9 aa, synthetic construct
  source 1..9: note = Seed: LVVVGAVGV (KRAS G12V)
VVVMGRVGV

SEQ ID NO: 63379 - protein, 9 aa, synthetic construct
  source 1..9: note = Seed: LVVVGAVGV (KRAS G12V)
VVVMGRVGY

SEQ ID NO: 63380 - protein, 9 aa, synthetic construct
  source 1..9: note = Seed: LVVVGAVGV (KRAS G12V)
VVVMGSVGA

SEQ ID NO: 63381 - protein, 9 aa, synthetic construct
  source 1..9: note = Seed: LVVVGAVGV (KRAS G12V)
VVVMGSVGF

SEQ ID NO: 63382 - protein, 9 aa, synthetic construct
  source 1..9: note = Seed: LVVVGAVGV (KRAS G12V)
VVVMGSVGG

SEQ ID NO: 63383 - protein, 9 aa, synthetic construct
  source 1..9: note = Seed: LVVVGAVGV (KRAS G12V)
VVVMGSVGH

SEQ ID NO: 63384 - protein, 9 aa, synthetic construct
  source 1..9: note = Seed: LVVVGAVGV (KRAS G12V)
VVVMGSVGI

SEQ ID NO: 63385 - protein, 9 aa, synthetic construct
  source 1..9: note = Seed: LVVVGAVGV (KRAS G12V)
VVVMGSVGK

SEQ ID NO: 63386 - protein, 9 aa, synthetic construct
  source 1..9: note = Seed: LVVVGAVGV (KRAS G12V)
VVVMGSVGL

SEQ ID NO: 63387 - protein, 9 aa, synthetic construct
  source 1..9: note = Seed: LVVVGAVGV (KRAS G12V)
VVVMGSVGM

SEQ ID NO: 63388 - protein, 9 aa, synthetic construct
  source 1..9: note = Seed: LVVVGAVGV (KRAS G12V)
VVVMGSVGN

SEQ ID NO: 63389 - protein, 9 aa, synthetic construct
  source 1..9: note = Seed: LVVVGAVGV (KRAS G12V)
VVVMGSVGP

SEQ ID NO: 63390 - protein, 9 aa, synthetic construct
  source 1..9: note = Seed: LVVVGAVGV (KRAS G12V)
VVVMGSVGQ

SEQ ID NO: 63391 - protein, 9 aa, synthetic construct
  source 1..9: note = Seed: LVVVGAVGV (KRAS G12V)
VVVMGSVGR

SEQ ID NO: 63392 - protein, 9 aa, synthetic construct
  source 1..9: note = Seed: LVVVGAVGV (KRAS G12V)
VVVMGSVGS

SEQ ID NO: 63393 - protein, 9 aa, synthetic construct
  source 1..9: note = Seed: LVVVGAVGV (KRAS G12V)
VVVMGSVGT

SEQ ID NO: 63394 - protein, 9 aa, synthetic construct
  source 1..9: note = Seed: LVVVGAVGV (KRAS G12V)
VVVMGSVGV

SEQ ID NO: 63395 - protein, 9 aa, synthetic construct
  source 1..9: note = Seed: LVVVGAVGV (KRAS G12V)
VVVMGSVGY

SEQ ID NO: 63396 - protein, 9 aa, synthetic construct
  source 1..9: note = Seed: LVVVGAVGV (KRAS G12V)
VVVMGTVGA

SEQ ID NO: 63397 - protein, 9 aa, synthetic construct
  source 1..9: note = Seed: LVVVGAVGV (KRAS G12V)
VVVMGTVGH

SEQ ID NO: 63398 - protein, 9 aa, synthetic construct
  source 1..9: note = Seed: LVVVGAVGV (KRAS G12V)
VVVMGTVGI

SEQ ID NO: 63399 - protein, 9 aa, synthetic construct
  source 1..9: note = Seed: LVVVGAVGV (KRAS G12V)
VVVMGTVGL

SEQ ID NO: 63400 - protein, 9 aa, synthetic construct
  source 1..9: note = Seed: LVVVGAVGV (KRAS G12V)
VVVMGTVGM

SEQ ID NO: 63401 - protein, 9 aa, synthetic construct
  source 1..9: note = Seed: LVVVGAVGV (KRAS G12V)
VVVMGTVGN

SEQ ID NO: 63402 - protein, 9 aa, synthetic construct
  source 1..9: note = Seed: LVVVGAVGV (KRAS G12V)
VVVMGTVGQ

SEQ ID NO: 63403 - protein, 9 aa, synthetic construct
  source 1..9: note = Seed: LVVVGAVGV (KRAS G12V)
VVVMGTVGR

SEQ ID NO: 63404 - protein, 9 aa, synthetic construct
  source 1..9: note = Seed: LVVVGAVGV (KRAS G12V)
VVVMGTVGS

SEQ ID NO: 63405 - protein, 9 aa, synthetic construct
  source 1..9: note = Seed: LVVVGAVGV (KRAS G12V)
VVVMGTVGT

SEQ ID NO: 63406 - protein, 9 aa, synthetic construct
  source 1..9: note = Seed: LVVVGAVGV (KRAS G12V)
VVVMGTVGV

SEQ ID NO: 63407 - protein, 9 aa, synthetic construct
  source 1..9: note = Seed: LVVVGAVGV (KRAS G12V)
VVVMGTVGY

SEQ ID NO: 63408 - protein, 9 aa, synthetic construct
  source 1..9: note = Seed: LVVVGAVGV (KRAS G12V)
VVVMGVVGA

SEQ ID NO: 63409 - protein, 9 aa, synthetic construct
  source 1..9: note = Seed: LVVVGAVGV (KRAS G12V)
VVVMGVVGH

SEQ ID NO: 63410 - protein, 9 aa, synthetic construct
  source 1..9: note = Seed: LVVVGAVGV (KRAS G12V)
VVVMGVVGI

SEQ ID NO: 63411 - protein, 9 aa, synthetic construct
  source 1..9: note = Seed: LVVVGAVGV (KRAS G12V)
VVVMGVVGL

SEQ ID NO: 63412 - protein, 9 aa, synthetic construct
  source 1..9: note = Seed: LVVVGAVGV (KRAS G12V)
VVVMGVVGM

SEQ ID NO: 63413 - protein, 9 aa, synthetic construct
  source 1..9: note = Seed: LVVVGAVGV (KRAS G12V)
VVVMGVVGN

SEQ ID NO: 63414 - protein, 9 aa, synthetic construct
  source 1..9: note = Seed: LVVVGAVGV (KRAS G12V)
VVVMGVVGR

SEQ ID NO: 63415 - protein, 9 aa, synthetic construct
  source 1..9: note = Seed: LVVVGAVGV (KRAS G12V)
VVVMGVVGS

SEQ ID NO: 63416 - protein, 9 aa, synthetic construct
  source 1..9: note = Seed: LVVVGAVGV (KRAS G12V)
VVVMGVVGT

SEQ ID NO: 63417 - protein, 9 aa, synthetic construct
  source 1..9: note = Seed: LVVVGAVGV (KRAS G12V)
VVVMGVVGV

SEQ ID NO: 63418 - protein, 9 aa, synthetic construct
  source 1..9: note = Seed: LVVVGAVGV (KRAS G12V)
VVVNGAVGA

SEQ ID NO: 63419 - protein, 9 aa, synthetic construct
  source 1..9: note = Seed: LVVVGAVGV (KRAS G12V)
VVVNGAVGC

SEQ ID NO: 63420 - protein, 9 aa, synthetic construct
  source 1..9: note = Seed: LVVVGAVGV (KRAS G12V)
VVVNGAVGF

SEQ ID NO: 63421 - protein, 9 aa, synthetic construct
  source 1..9: note = Seed: LVVVGAVGV (KRAS G12V)
VVVNGAVGG

SEQ ID NO: 63422 - protein, 9 aa, synthetic construct
  source 1..9: note = Seed: LVVVGAVGV (KRAS G12V)
VVVNGAVGH

SEQ ID NO: 63423 - protein, 9 aa, synthetic construct
  source 1..9: note = Seed: LVVVGAVGV (KRAS G12V)
VVVNGAVGI

SEQ ID NO: 63424 - protein, 9 aa, synthetic construct
  source 1..9: note = Seed: LVVVGAVGV (KRAS G12V)
VVVNGAVGL

SEQ ID NO: 63425 - protein, 9 aa, synthetic construct
  source 1..9: note = Seed: LVVVGAVGV (KRAS G12V)
VVVNGAVGM

SEQ ID NO: 63426 - protein, 9 aa, synthetic construct
  source 1..9: note = Seed: LVVVGAVGV (KRAS G12V)
VVVNGAVGN

SEQ ID NO: 63427 - protein, 9 aa, synthetic construct
  source 1..9: note = Seed: LVVVGAVGV (KRAS G12V)
VVVNGAVGQ

SEQ ID NO: 63428 - protein, 9 aa, synthetic construct
  source 1..9: note = Seed: LVVVGAVGV (KRAS G12V)
VVVNGAVGS

SEQ ID NO: 63429 - protein, 9 aa, synthetic construct
  source 1..9: note = Seed: LVVVGAVGV (KRAS G12V)
VVVNGAVGT

SEQ ID NO: 63430 - protein, 9 aa, synthetic construct
  source 1..9: note = Seed: LVVVGAVGV (KRAS G12V)
VVVNGAVGV

SEQ ID NO: 63431 - protein, 9 aa, synthetic construct
  source 1..9: note = Seed: LVVVGAVGV (KRAS G12V)
VVVNGAVGW

SEQ ID NO: 63432 - protein, 9 aa, synthetic construct
  source 1..9: note = Seed: LVVVGAVGV (KRAS G12V)
VVVNGAVGY

SEQ ID NO: 63433 - protein, 9 aa, synthetic construct
  source 1..9: note = Seed: LVVVGAVGV (KRAS G12V)
VVVNGCVGA

SEQ ID NO: 63434 - protein, 9 aa, synthetic construct
  source 1..9: note = Seed: LVVVGAVGV (KRAS G12V)
VVVNGCVGI

SEQ ID NO: 63435 - protein, 9 aa, synthetic construct
  source 1..9: note = Seed: LVVVGAVGV (KRAS G12V)
VVVNGCVGL

SEQ ID NO: 63436 - protein, 9 aa, synthetic construct
  source 1..9: note = Seed: LVVVGAVGV (KRAS G12V)
VVVNGCVGM

SEQ ID NO: 63437 - protein, 9 aa, synthetic construct
  source 1..9: note = Seed: LVVVGAVGV (KRAS G12V)
VVVNGCVGS

SEQ ID NO: 63438 - protein, 9 aa, synthetic construct
  source 1..9: note = Seed: LVVVGAVGV (KRAS G12V)
VVVNGCVGV

SEQ ID NO: 63439 - protein, 9 aa, synthetic construct
  source 1..9: note = Seed: LVVVGAVGV (KRAS G12V)
VVVNGCVGY

SEQ ID NO: 63440 - protein, 9 aa, synthetic construct
  source 1..9: note = Seed: LVVVGAVGV (KRAS G12V)
VVVNGDVGF

SEQ ID NO: 63441 - protein, 9 aa, synthetic construct
  source 1..9: note = Seed: LVVVGAVGV (KRAS G12V)
VVVNGDVGI

SEQ ID NO: 63442 - protein, 9 aa, synthetic construct
  source 1..9: note = Seed: LVVVGAVGV (KRAS G12V)
VVVNGDVGL

SEQ ID NO: 63443 - protein, 9 aa, synthetic construct
  source 1..9: note = Seed: LVVVGAVGV (KRAS G12V)
VVVNGDVGV

SEQ ID NO: 63444 - protein, 9 aa, synthetic construct
  source 1..9: note = Seed: LVVVGAVGV (KRAS G12V)
VVVNGDVGY

SEQ ID NO: 63445 - protein, 9 aa, synthetic construct
  source 1..9: note = Seed: LVVVGAVGV (KRAS G12V)
VVVNGEVGI

SEQ ID NO: 63446 - protein, 9 aa, synthetic construct
  source 1..9: note = Seed: LVVVGAVGV (KRAS G12V)
VVVNGEVGV

SEQ ID NO: 63447 - protein, 9 aa, synthetic construct
  source 1..9: note = Seed: LVVVGAVGV (KRAS G12V)
VVVNGFVGI

SEQ ID NO: 63448 - protein, 9 aa, synthetic construct
  source 1..9: note = Seed: LVVVGAVGV (KRAS G12V)
VVVNGFVGL

SEQ ID NO: 63449 - protein, 9 aa, synthetic construct
  source 1..9: note = Seed: LVVVGAVGV (KRAS G12V)
VVVNGFVGV

SEQ ID NO: 63450 - protein, 9 aa, synthetic construct
  source 1..9: note = Seed: LVVVGAVGV (KRAS G12V)
VVVNGGVGA

SEQ ID NO: 63451 - protein, 9 aa, synthetic construct
  source 1..9: note = Seed: LVVVGAVGV (KRAS G12V)
VVVNGGVGF

SEQ ID NO: 63452 - protein, 9 aa, synthetic construct
  source 1..9: note = Seed: LVVVGAVGV (KRAS G12V)
VVVNGGVGI

SEQ ID NO: 63453 - protein, 9 aa, synthetic construct
  source 1..9: note = Seed: LVVVGAVGV (KRAS G12V)
VVVNGGVGL

SEQ ID NO: 63454 - protein, 9 aa, synthetic construct
  source 1..9: note = Seed: LVVVGAVGV (KRAS G12V)
VVVNGGVGM

SEQ ID NO: 63455 - protein, 9 aa, synthetic construct
  source 1..9: note = Seed: LVVVGAVGV (KRAS G12V)
VVVNGGVGS

SEQ ID NO: 63456 - protein, 9 aa, synthetic construct
  source 1..9: note = Seed: LVVVGAVGV (KRAS G12V)
VVVNGGVGT

SEQ ID NO: 63457 - protein, 9 aa, synthetic construct
  source 1..9: note = Seed: LVVVGAVGV (KRAS G12V)
VVVNGGVGV

SEQ ID NO: 63458 - protein, 9 aa, synthetic construct
  source 1..9: note = Seed: LVVVGAVGV (KRAS G12V)
VVVNGGVGY

SEQ ID NO: 63459 - protein, 9 aa, synthetic construct
  source 1..9: note = Seed: LVVVGAVGV (KRAS G12V)
VVVNGHVGA

SEQ ID NO: 63460 - protein, 9 aa, synthetic construct
  source 1..9: note = Seed: LVVVGAVGV (KRAS G12V)
VVVNGHVGF

SEQ ID NO: 63461 - protein, 9 aa, synthetic construct
  source 1..9: note = Seed: LVVVGAVGV (KRAS G12V)
VVVNGHVGI

SEQ ID NO: 63462 - protein, 9 aa, synthetic construct
  source 1..9: note = Seed: LVVVGAVGV (KRAS G12V)
VVVNGHVGL

SEQ ID NO: 63463 - protein, 9 aa, synthetic construct
  source 1..9: note = Seed: LVVVGAVGV (KRAS G12V)
VVVNGHVGM

SEQ ID NO: 63464 - protein, 9 aa, synthetic construct
  source 1..9: note = Seed: LVVVGAVGV (KRAS G12V)
VVVNGHVGV

SEQ ID NO: 63465 - protein, 9 aa, synthetic construct
  source 1..9: note = Seed: LVVVGAVGV (KRAS G12V)
VVVNGHVGY

SEQ ID NO: 63466 - protein, 9 aa, synthetic construct
  source 1..9: note = Seed: LVVVGAVGV (KRAS G12V)
VVVNGIVGA

SEQ ID NO: 63467 - protein, 9 aa, synthetic construct
  source 1..9: note = Seed: LVVVGAVGV (KRAS G12V)
VVVNGIVGF

SEQ ID NO: 63468 - protein, 9 aa, synthetic construct
  source 1..9: note = Seed: LVVVGAVGV (KRAS G12V)
VVVNGIVGH

SEQ ID NO: 63469 - protein, 9 aa, synthetic construct
  source 1..9: note = Seed: LVVVGAVGV (KRAS G12V)
VVVNGIVGI

SEQ ID NO: 63470 - protein, 9 aa, synthetic construct
  source 1..9: note = Seed: LVVVGAVGV (KRAS G12V)
VVVNGIVGL

SEQ ID NO: 63471 - protein, 9 aa, synthetic construct
  source 1..9: note = Seed: LVVVGAVGV (KRAS G12V)
VVVNGIVGM

SEQ ID NO: 63472 - protein, 9 aa, synthetic construct
  source 1..9: note = Seed: LVVVGAVGV (KRAS G12V)
VVVNGIVGN

SEQ ID NO: 63473 - protein, 9 aa, synthetic construct
  source 1..9: note = Seed: LVVVGAVGV (KRAS G12V)
VVVNGIVGQ

SEQ ID NO: 63474 - protein, 9 aa, synthetic construct
  source 1..9: note = Seed: LVVVGAVGV (KRAS G12V)
VVVNGIVGS

SEQ ID NO: 63475 - protein, 9 aa, synthetic construct
  source 1..9: note = Seed: LVVVGAVGV (KRAS G12V)
VVVNGIVGT

SEQ ID NO: 63476 - protein, 9 aa, synthetic construct
  source 1..9: note = Seed: LVVVGAVGV (KRAS G12V)
VVVNGIVGV

SEQ ID NO: 63477 - protein, 9 aa, synthetic construct
  source 1..9: note = Seed: LVVVGAVGV (KRAS G12V)
VVVNGIVGY

SEQ ID NO: 63478 - protein, 9 aa, synthetic construct
  source 1..9: note = Seed: LVVVGAVGV (KRAS G12V)
VVVNGKVGI

SEQ ID NO: 63479 - protein, 9 aa, synthetic construct
  source 1..9: note = Seed: LVVVGAVGV (KRAS G12V)
VVVNGKVGL

SEQ ID NO: 63480 - protein, 9 aa, synthetic construct
  source 1..9: note = Seed: LVVVGAVGV (KRAS G12V)
VVVNGKVGV

SEQ ID NO: 63481 - protein, 9 aa, synthetic construct
  source 1..9: note = Seed: LVVVGAVGV (KRAS G12V)
VVVNGLVGA

SEQ ID NO: 63482 - protein, 9 aa, synthetic construct
  source 1..9: note = Seed: LVVVGAVGV (KRAS G12V)
VVVNGLVGF

SEQ ID NO: 63483 - protein, 9 aa, synthetic construct
  source 1..9: note = Seed: LVVVGAVGV (KRAS G12V)
VVVNGLVGI

SEQ ID NO: 63484 - protein, 9 aa, synthetic construct
  source 1..9: note = Seed: LVVVGAVGV (KRAS G12V)
VVVNGLVGL

SEQ ID NO: 63485 - protein, 9 aa, synthetic construct
  source 1..9: note = Seed: LVVVGAVGV (KRAS G12V)
VVVNGLVGM

SEQ ID NO: 63486 - protein, 9 aa, synthetic construct
  source 1..9: note = Seed: LVVVGAVGV (KRAS G12V)
VVVNGLVGN

SEQ ID NO: 63487 - protein, 9 aa, synthetic construct
  source 1..9: note = Seed: LVVVGAVGV (KRAS G12V)
VVVNGLVGS

SEQ ID NO: 63488 - protein, 9 aa, synthetic construct
  source 1..9: note = Seed: LVVVGAVGV (KRAS G12V)
VVVNGLVGT

SEQ ID NO: 63489 - protein, 9 aa, synthetic construct
  source 1..9: note = Seed: LVVVGAVGV (KRAS G12V)
VVVNGLVGV

SEQ ID NO: 63490 - protein, 9 aa, synthetic construct
  source 1..9: note = Seed: LVVVGAVGV (KRAS G12V)
VVVNGLVGY

SEQ ID NO: 63491 - protein, 9 aa, synthetic construct
  source 1..9: note = Seed: LVVVGAVGV (KRAS G12V)
VVVNGMVGA

SEQ ID NO: 63492 - protein, 9 aa, synthetic construct
  source 1..9: note = Seed: LVVVGAVGV (KRAS G12V)
VVVNGMVGF

SEQ ID NO: 63493 - protein, 9 aa, synthetic construct
  source 1..9: note = Seed: LVVVGAVGV (KRAS G12V)
VVVNGMVGI

SEQ ID NO: 63494 - protein, 9 aa, synthetic construct
  source 1..9: note = Seed: LVVVGAVGV (KRAS G12V)
VVVNGMVGL

SEQ ID NO: 63495 - protein, 9 aa, synthetic construct
  source 1..9: note = Seed: LVVVGAVGV (KRAS G12V)
VVVNGMVGM

SEQ ID NO: 63496 - protein, 9 aa, synthetic construct
  source 1..9: note = Seed: LVVVGAVGV (KRAS G12V)
VVVNGMVGT

SEQ ID NO: 63497 - protein, 9 aa, synthetic construct
  source 1..9: note = Seed: LVVVGAVGV (KRAS G12V)
VVVNGMVGV

SEQ ID NO: 63498 - protein, 9 aa, synthetic construct
  source 1..9: note = Seed: LVVVGAVGV (KRAS G12V)
VVVNGMVGY

SEQ ID NO: 63499 - protein, 9 aa, synthetic construct
  source 1..9: note = Seed: LVVVGAVGV (KRAS G12V)
VVVNGNVGA

SEQ ID NO: 63500 - protein, 9 aa, synthetic construct
  source 1..9: note = Seed: LVVVGAVGV (KRAS G12V)
VVVNGNVGF

SEQ ID NO: 63501 - protein, 9 aa, synthetic construct
  source 1..9: note = Seed: LVVVGAVGV (KRAS G12V)
VVVNGNVGH

SEQ ID NO: 63502 - protein, 9 aa, synthetic construct
  source 1..9: note = Seed: LVVVGAVGV (KRAS G12V)
VVVNGNVGI

SEQ ID NO: 63503 - protein, 9 aa, synthetic construct
  source 1..9: note = Seed: LVVVGAVGV (KRAS G12V)
VVVNGNVGL

SEQ ID NO: 63504 - protein, 9 aa, synthetic construct
  source 1..9: note = Seed: LVVVGAVGV (KRAS G12V)
VVVNGNVGM

SEQ ID NO: 63505 - protein, 9 aa, synthetic construct
  source 1..9: note = Seed: LVVVGAVGV (KRAS G12V)
VVVNGNVGN

SEQ ID NO: 63506 - protein, 9 aa, synthetic construct
  source 1..9: note = Seed: LVVVGAVGV (KRAS G12V)
VVVNGNVGQ

SEQ ID NO: 63507 - protein, 9 aa, synthetic construct
  source 1..9: note = Seed: LVVVGAVGV (KRAS G12V)
VVVNGNVGS

SEQ ID NO: 63508 - protein, 9 aa, synthetic construct
  source 1..9: note = Seed: LVVVGAVGV (KRAS G12V)
VVVNGNVGT

SEQ ID NO: 63509 - protein, 9 aa, synthetic construct
  source 1..9: note = Seed: LVVVGAVGV (KRAS G12V)
VVVNGNVGV

SEQ ID NO: 63510 - protein, 9 aa, synthetic construct
  source 1..9: note = Seed: LVVVGAVGV (KRAS G12V)
VVVNGNVGW

SEQ ID NO: 63511 - protein, 9 aa, synthetic construct
  source 1..9: note = Seed: LVVVGAVGV (KRAS G12V)
VVVNGNVGY

SEQ ID NO: 63512 - protein, 9 aa, synthetic construct
  source 1..9: note = Seed: LVVVGAVGV (KRAS G12V)
VVVNGPVGA

SEQ ID NO: 63513 - protein, 9 aa, synthetic construct
  source 1..9: note = Seed: LVVVGAVGV (KRAS G12V)
VVVNGPVGC

SEQ ID NO: 63514 - protein, 9 aa, synthetic construct
  source 1..9: note = Seed: LVVVGAVGV (KRAS G12V)
VVVNGPVGF

SEQ ID NO: 63515 - protein, 9 aa, synthetic construct
  source 1..9: note = Seed: LVVVGAVGV (KRAS G12V)
VVVNGPVGI

SEQ ID NO: 63516 - protein, 9 aa, synthetic construct
  source 1..9: note = Seed: LVVVGAVGV (KRAS G12V)
VVVNGPVGL

SEQ ID NO: 63517 - protein, 9 aa, synthetic construct
  source 1..9: note = Seed: LVVVGAVGV (KRAS G12V)
VVVNGPVGM

SEQ ID NO: 63518 - protein, 9 aa, synthetic construct
  source 1..9: note = Seed: LVVVGAVGV (KRAS G12V)
VVVNGPVGS

SEQ ID NO: 63519 - protein, 9 aa, synthetic construct
  source 1..9: note = Seed: LVVVGAVGV (KRAS G12V)
VVVNGPVGT

SEQ ID NO: 63520 - protein, 9 aa, synthetic construct
  source 1..9: note = Seed: LVVVGAVGV (KRAS G12V)
VVVNGPVGV

SEQ ID NO: 63521 - protein, 9 aa, synthetic construct
  source 1..9: note = Seed: LVVVGAVGV (KRAS G12V)
VVVNGPVGW

SEQ ID NO: 63522 - protein, 9 aa, synthetic construct
  source 1..9: note = Seed: LVVVGAVGV (KRAS G12V)
VVVNGPVGY

SEQ ID NO: 63523 - protein, 9 aa, synthetic construct
  source 1..9: note = Seed: LVVVGAVGV (KRAS G12V)
VVVNGQVGF

SEQ ID NO: 63524 - protein, 9 aa, synthetic construct
  source 1..9: note = Seed: LVVVGAVGV (KRAS G12V)
VVVNGQVGI

SEQ ID NO: 63525 - protein, 9 aa, synthetic construct
  source 1..9: note = Seed: LVVVGAVGV (KRAS G12V)
VVVNGQVGL

SEQ ID NO: 63526 - protein, 9 aa, synthetic construct
  source 1..9: note = Seed: LVVVGAVGV (KRAS G12V)
VVVNGQVGM

SEQ ID NO: 63527 - protein, 9 aa, synthetic construct
  source 1..9: note = Seed: LVVVGAVGV (KRAS G12V)
VVVNGQVGV

SEQ ID NO: 63528 - protein, 9 aa, synthetic construct
  source 1..9: note = Seed: LVVVGAVGV (KRAS G12V)
VVVNGRVGF

SEQ ID NO: 63529 - protein, 9 aa, synthetic construct
  source 1..9: note = Seed: LVVVGAVGV (KRAS G12V)
VVVNGRVGI

SEQ ID NO: 63530 - protein, 9 aa, synthetic construct
  source 1..9: note = Seed: LVVVGAVGV (KRAS G12V)
VVVNGRVGL

SEQ ID NO: 63531 - protein, 9 aa, synthetic construct
  source 1..9: note = Seed: LVVVGAVGV (KRAS G12V)
VVVNGRVGV

SEQ ID NO: 63532 - protein, 9 aa, synthetic construct
  source 1..9: note = Seed: LVVVGAVGV (KRAS G12V)
VVVNGSVGA

SEQ ID NO: 63533 - protein, 9 aa, synthetic construct
  source 1..9: note = Seed: LVVVGAVGV (KRAS G12V)
VVVNGSVGF

SEQ ID NO: 63534 - protein, 9 aa, synthetic construct
  source 1..9: note = Seed: LVVVGAVGV (KRAS G12V)
VVVNGSVGH

SEQ ID NO: 63535 - protein, 9 aa, synthetic construct
  source 1..9: note = Seed: LVVVGAVGV (KRAS G12V)
VVVNGSVGI

SEQ ID NO: 63536 - protein, 9 aa, synthetic construct
  source 1..9: note = Seed: LVVVGAVGV (KRAS G12V)
VVVNGSVGL

SEQ ID NO: 63537 - protein, 9 aa, synthetic construct
  source 1..9: note = Seed: LVVVGAVGV (KRAS G12V)
VVVNGSVGM

SEQ ID NO: 63538 - protein, 9 aa, synthetic construct
  source 1..9: note = Seed: LVVVGAVGV (KRAS G12V)
VVVNGSVGN

SEQ ID NO: 63539 - protein, 9 aa, synthetic construct
  source 1..9: note = Seed: LVVVGAVGV (KRAS G12V)
VVVNGSVGQ

SEQ ID NO: 63540 - protein, 9 aa, synthetic construct
  source 1..9: note = Seed: LVVVGAVGV (KRAS G12V)
VVVNGSVGS

SEQ ID NO: 63541 - protein, 9 aa, synthetic construct
  source 1..9: note = Seed: LVVVGAVGV (KRAS G12V)
VVVNGSVGT

SEQ ID NO: 63542 - protein, 9 aa, synthetic construct
  source 1..9: note = Seed: LVVVGAVGV (KRAS G12V)
VVVNGSVGV

SEQ ID NO: 63543 - protein, 9 aa, synthetic construct
  source 1..9: note = Seed: LVVVGAVGV (KRAS G12V)
VVVNGSVGW

SEQ ID NO: 63544 - protein, 9 aa, synthetic construct
  source 1..9: note = Seed: LVVVGAVGV (KRAS G12V)
VVVNGSVGY

SEQ ID NO: 63545 - protein, 9 aa, synthetic construct
  source 1..9: note = Seed: LVVVGAVGV (KRAS G12V)
VVVNGTVGA

SEQ ID NO: 63546 - protein, 9 aa, synthetic construct
  source 1..9: note = Seed: LVVVGAVGV (KRAS G12V)
VVVNGTVGF

SEQ ID NO: 63547 - protein, 9 aa, synthetic construct
  source 1..9: note = Seed: LVVVGAVGV (KRAS G12V)
VVVNGTVGI

SEQ ID NO: 63548 - protein, 9 aa, synthetic construct
  source 1..9: note = Seed: LVVVGAVGV (KRAS G12V)
VVVNGTVGL

SEQ ID NO: 63549 - protein, 9 aa, synthetic construct
  source 1..9: note = Seed: LVVVGAVGV (KRAS G12V)
VVVNGTVGM

SEQ ID NO: 63550 - protein, 9 aa, synthetic construct
  source 1..9: note = Seed: LVVVGAVGV (KRAS G12V)
VVVNGTVGS

SEQ ID NO: 63551 - protein, 9 aa, synthetic construct
  source 1..9: note = Seed: LVVVGAVGV (KRAS G12V)
VVVNGTVGT

SEQ ID NO: 63552 - protein, 9 aa, synthetic construct
  source 1..9: note = Seed: LVVVGAVGV (KRAS G12V)
VVVNGTVGV

SEQ ID NO: 63553 - protein, 9 aa, synthetic construct
  source 1..9: note = Seed: LVVVGAVGV (KRAS G12V)
VVVNGTVGW

SEQ ID NO: 63554 - protein, 9 aa, synthetic construct
  source 1..9: note = Seed: LVVVGAVGV (KRAS G12V)
VVVNGTVGY

SEQ ID NO: 63555 - protein, 9 aa, synthetic construct
  source 1..9: note = Seed: LVVVGAVGV (KRAS G12V)
VVVNGVVGA

SEQ ID NO: 63556 - protein, 9 aa, synthetic construct
  source 1..9: note = Seed: LVVVGAVGV (KRAS G12V)
VVVNGVVGF

SEQ ID NO: 63557 - protein, 9 aa, synthetic construct
  source 1..9: note = Seed: LVVVGAVGV (KRAS G12V)
VVVNGVVGH

SEQ ID NO: 63558 - protein, 9 aa, synthetic construct
  source 1..9: note = Seed: LVVVGAVGV (KRAS G12V)
VVVNGVVGI

SEQ ID NO: 63559 - protein, 9 aa, synthetic construct
  source 1..9: note = Seed: LVVVGAVGV (KRAS G12V)
VVVNGVVGL

SEQ ID NO: 63560 - protein, 9 aa, synthetic construct
  source 1..9: note = Seed: LVVVGAVGV (KRAS G12V)
VVVNGVVGM

SEQ ID NO: 63561 - protein, 9 aa, synthetic construct
  source 1..9: note = Seed: LVVVGAVGV (KRAS G12V)
VVVNGVVGN

SEQ ID NO: 63562 - protein, 9 aa, synthetic construct
  source 1..9: note = Seed: LVVVGAVGV (KRAS G12V)
VVVNGVVGS

SEQ ID NO: 63563 - protein, 9 aa, synthetic construct
  source 1..9: note = Seed: LVVVGAVGV (KRAS G12V)
VVVNGVVGT

SEQ ID NO: 63564 - protein, 9 aa, synthetic construct
  source 1..9: note = Seed: LVVVGAVGV (KRAS G12V)
VVVNGVVGV

SEQ ID NO: 63565 - protein, 9 aa, synthetic construct
  source 1..9: note = Seed: LVVVGAVGV (KRAS G12V)
VVVNGVVGW

SEQ ID NO: 63566 - protein, 9 aa, synthetic construct
  source 1..9: note = Seed: LVVVGAVGV (KRAS G12V)
VVVNGVVGY

SEQ ID NO: 63567 - protein, 9 aa, synthetic construct
  source 1..9: note = Seed: LVVVGAVGV (KRAS G12V)
VVVNGWVGI

SEQ ID NO: 63568 - protein, 9 aa, synthetic construct
  source 1..9: note = Seed: LVVVGAVGV (KRAS G12V)
VVVNGWVGL

SEQ ID NO: 63569 - protein, 9 aa, synthetic construct
  source 1..9: note = Seed: LVVVGAVGV (KRAS G12V)
VVVNGWVGV

SEQ ID NO: 63570 - protein, 9 aa, synthetic construct
  source 1..9: note = Seed: LVVVGAVGV (KRAS G12V)
VVVNGYVGA

SEQ ID NO: 63571 - protein, 9 aa, synthetic construct
  source 1..9: note = Seed: LVVVGAVGV (KRAS G12V)
VVVNGYVGF

SEQ ID NO: 63572 - protein, 9 aa, synthetic construct
  source 1..9: note = Seed: LVVVGAVGV (KRAS G12V)
VVVNGYVGI

SEQ ID NO: 63573 - protein, 9 aa, synthetic construct
  source 1..9: note = Seed: LVVVGAVGV (KRAS G12V)
VVVNGYVGL

SEQ ID NO: 63574 - protein, 9 aa, synthetic construct
  source 1..9: note = Seed: LVVVGAVGV (KRAS G12V)
VVVNGYVGM

SEQ ID NO: 63575 - protein, 9 aa, synthetic construct
  source 1..9: note = Seed: LVVVGAVGV (KRAS G12V)
VVVNGYVGV

SEQ ID NO: 63576 - protein, 9 aa, synthetic construct
  source 1..9: note = Seed: LVVVGAVGV (KRAS G12V)
VVVNGYVGY

SEQ ID NO: 63577 - protein, 9 aa, synthetic construct
  source 1..9: note = Seed: LVVVGAVGV (KRAS G12V)
VVVPGAVGC

SEQ ID NO: 63578 - protein, 9 aa, synthetic construct
  source 1..9: note = Seed: LVVVGAVGV (KRAS G12V)
VVVQGAVGA

SEQ ID NO: 63579 - protein, 9 aa, synthetic construct
  source 1..9: note = Seed: LVVVGAVGV (KRAS G12V)
VVVQGAVGF

SEQ ID NO: 63580 - protein, 9 aa, synthetic construct
  source 1..9: note = Seed: LVVVGAVGV (KRAS G12V)
VVVQGAVGI

SEQ ID NO: 63581 - protein, 9 aa, synthetic construct
  source 1..9: note = Seed: LVVVGAVGV (KRAS G12V)
VVVQGAVGL

SEQ ID NO: 63582 - protein, 9 aa, synthetic construct
  source 1..9: note = Seed: LVVVGAVGV (KRAS G12V)
VVVQGAVGM

SEQ ID NO: 63583 - protein, 9 aa, synthetic construct
  source 1..9: note = Seed: LVVVGAVGV (KRAS G12V)
VVVQGAVGS

SEQ ID NO: 63584 - protein, 9 aa, synthetic construct
  source 1..9: note = Seed: LVVVGAVGV (KRAS G12V)
VVVQGAVGT

SEQ ID NO: 63585 - protein, 9 aa, synthetic construct
  source 1..9: note = Seed: LVVVGAVGV (KRAS G12V)
VVVQGAVGV

SEQ ID NO: 63586 - protein, 9 aa, synthetic construct
  source 1..9: note = Seed: LVVVGAVGV (KRAS G12V)
VVVQGGVGA

SEQ ID NO: 63587 - protein, 9 aa, synthetic construct
  source 1..9: note = Seed: LVVVGAVGV (KRAS G12V)
VVVQGGVGI

SEQ ID NO: 63588 - protein, 9 aa, synthetic construct
  source 1..9: note = Seed: LVVVGAVGV (KRAS G12V)
VVVQGGVGL

SEQ ID NO: 63589 - protein, 9 aa, synthetic construct
  source 1..9: note = Seed: LVVVGAVGV (KRAS G12V)
VVVQGGVGM

SEQ ID NO: 63590 - protein, 9 aa, synthetic construct
  source 1..9: note = Seed: LVVVGAVGV (KRAS G12V)
VVVQGGVGS

SEQ ID NO: 63591 - protein, 9 aa, synthetic construct
  source 1..9: note = Seed: LVVVGAVGV (KRAS G12V)
VVVQGGVGT

SEQ ID NO: 63592 - protein, 9 aa, synthetic construct
  source 1..9: note = Seed: LVVVGAVGV (KRAS G12V)
VVVQGGVGV

SEQ ID NO: 63593 - protein, 9 aa, synthetic construct
  source 1..9: note = Seed: LVVVGAVGV (KRAS G12V)
VVVQGKVGL

SEQ ID NO: 63594 - protein, 9 aa, synthetic construct
  source 1..9: note = Seed: LVVVGAVGV (KRAS G12V)
VVVQGNVGA

SEQ ID NO: 63595 - protein, 9 aa, synthetic construct
  source 1..9: note = Seed: LVVVGAVGV (KRAS G12V)
VVVQGNVGI

SEQ ID NO: 63596 - protein, 9 aa, synthetic construct
  source 1..9: note = Seed: LVVVGAVGV (KRAS G12V)
VVVQGNVGL

SEQ ID NO: 63597 - protein, 9 aa, synthetic construct
  source 1..9: note = Seed: LVVVGAVGV (KRAS G12V)
VVVQGNVGM

SEQ ID NO: 63598 - protein, 9 aa, synthetic construct
  source 1..9: note = Seed: LVVVGAVGV (KRAS G12V)
VVVQGNVGS

SEQ ID NO: 63599 - protein, 9 aa, synthetic construct
  source 1..9: note = Seed: LVVVGAVGV (KRAS G12V)
VVVQGNVGV

SEQ ID NO: 63600 - protein, 9 aa, synthetic construct
  source 1..9: note = Seed: LVVVGAVGV (KRAS G12V)
VVVQGPVGA

SEQ ID NO: 63601 - protein, 9 aa, synthetic construct
  source 1..9: note = Seed: LVVVGAVGV (KRAS G12V)
VVVQGPVGI

SEQ ID NO: 63602 - protein, 9 aa, synthetic construct
  source 1..9: note = Seed: LVVVGAVGV (KRAS G12V)
VVVQGPVGL

SEQ ID NO: 63603 - protein, 9 aa, synthetic construct
  source 1..9: note = Seed: LVVVGAVGV (KRAS G12V)
VVVQGPVGM

SEQ ID NO: 63604 - protein, 9 aa, synthetic construct
  source 1..9: note = Seed: LVVVGAVGV (KRAS G12V)
VVVQGPVGV

SEQ ID NO: 63605 - protein, 9 aa, synthetic construct
  source 1..9: note = Seed: LVVVGAVGV (KRAS G12V)
VVVQGRVGA

SEQ ID NO: 63606 - protein, 9 aa, synthetic construct
  source 1..9: note = Seed: LVVVGAVGV (KRAS G12V)
VVVQGRVGH

SEQ ID NO: 63607 - protein, 9 aa, synthetic construct
  source 1..9: note = Seed: LVVVGAVGV (KRAS G12V)
VVVQGRVGI

SEQ ID NO: 63608 - protein, 9 aa, synthetic construct
  source 1..9: note = Seed: LVVVGAVGV (KRAS G12V)
VVVQGRVGL

SEQ ID NO: 63609 - protein, 9 aa, synthetic construct
  source 1..9: note = Seed: LVVVGAVGV (KRAS G12V)
VVVQGRVGM

SEQ ID NO: 63610 - protein, 9 aa, synthetic construct
  source 1..9: note = Seed: LVVVGAVGV (KRAS G12V)
VVVQGRVGQ

SEQ ID NO: 63611 - protein, 9 aa, synthetic construct
  source 1..9: note = Seed: LVVVGAVGV (KRAS G12V)
VVVQGRVGR

SEQ ID NO: 63612 - protein, 9 aa, synthetic construct
  source 1..9: note = Seed: LVVVGAVGV (KRAS G12V)
VVVQGRVGS

SEQ ID NO: 63613 - protein, 9 aa, synthetic construct
  source 1..9: note = Seed: LVVVGAVGV (KRAS G12V)
VVVQGRVGV

SEQ ID NO: 63614 - protein, 9 aa, synthetic construct
  source 1..9: note = Seed: LVVVGAVGV (KRAS G12V)
VVVQGRVGY

SEQ ID NO: 63615 - protein, 9 aa, synthetic construct
  source 1..9: note = Seed: LVVVGAVGV (KRAS G12V)
VVVQGSVGA

SEQ ID NO: 63616 - protein, 9 aa, synthetic construct
  source 1..9: note = Seed: LVVVGAVGV (KRAS G12V)
VVVQGSVGI

SEQ ID NO: 63617 - protein, 9 aa, synthetic construct
  source 1..9: note = Seed: LVVVGAVGV (KRAS G12V)
VVVQGSVGL

SEQ ID NO: 63618 - protein, 9 aa, synthetic construct
  source 1..9: note = Seed: LVVVGAVGV (KRAS G12V)
VVVQGSVGM

SEQ ID NO: 63619 - protein, 9 aa, synthetic construct
  source 1..9: note = Seed: LVVVGAVGV (KRAS G12V)
VVVQGSVGS

SEQ ID NO: 63620 - protein, 9 aa, synthetic construct
  source 1..9: note = Seed: LVVVGAVGV (KRAS G12V)
VVVQGSVGT

SEQ ID NO: 63621 - protein, 9 aa, synthetic construct
  source 1..9: note = Seed: LVVVGAVGV (KRAS G12V)
VVVQGSVGV

SEQ ID NO: 63622 - protein, 9 aa, synthetic construct
  source 1..9: note = Seed: LVVVGAVGV (KRAS G12V)
VVVQGTVGA

SEQ ID NO: 63623 - protein, 9 aa, synthetic construct
  source 1..9: note = Seed: LVVVGAVGV (KRAS G12V)
VVVQGTVGI

SEQ ID NO: 63624 - protein, 9 aa, synthetic construct
  source 1..9: note = Seed: LVVVGAVGV (KRAS G12V)
VVVQGTVGL

SEQ ID NO: 63625 - protein, 9 aa, synthetic construct
  source 1..9: note = Seed: LVVVGAVGV (KRAS G12V)
VVVQGTVGM

SEQ ID NO: 63626 - protein, 9 aa, synthetic construct
  source 1..9: note = Seed: LVVVGAVGV (KRAS G12V)
VVVQGTVGV

SEQ ID NO: 63627 - protein, 9 aa, synthetic construct
  source 1..9: note = Seed: LVVVGAVGV (KRAS G12V)
VVVQGVVGL

SEQ ID NO: 63628 - protein, 9 aa, synthetic construct
  source 1..9: note = Seed: LVVVGAVGV (KRAS G12V)
VVVQGVVGV

SEQ ID NO: 63629 - protein, 9 aa, synthetic construct
  source 1..9: note = Seed: LVVVGAVGV (KRAS G12V)
VVVRGHVGF

SEQ ID NO: 63630 - protein, 9 aa, synthetic construct
  source 1..9: note = Seed: LVVVGAVGV (KRAS G12V)
VVVRGHVGL

SEQ ID NO: 63631 - protein, 9 aa, synthetic construct
  source 1..9: note = Seed: LVVVGAVGV (KRAS G12V)
VVVRGHVGR

SEQ ID NO: 63632 - protein, 9 aa, synthetic construct
  source 1..9: note = Seed: LVVVGAVGV (KRAS G12V)
VVVRGIVGR

SEQ ID NO: 63633 - protein, 9 aa, synthetic construct
  source 1..9: note = Seed: LVVVGAVGV (KRAS G12V)
VVVRGKVGA

SEQ ID NO: 63634 - protein, 9 aa, synthetic construct
  source 1..9: note = Seed: LVVVGAVGV (KRAS G12V)
VVVRGKVGF

SEQ ID NO: 63635 - protein, 9 aa, synthetic construct
  source 1..9: note = Seed: LVVVGAVGV (KRAS G12V)
VVVRGKVGH

SEQ ID NO: 63636 - protein, 9 aa, synthetic construct
  source 1..9: note = Seed: LVVVGAVGV (KRAS G12V)
VVVRGKVGK

SEQ ID NO: 63637 - protein, 9 aa, synthetic construct
  source 1..9: note = Seed: LVVVGAVGV (KRAS G12V)
VVVRGKVGL

SEQ ID NO: 63638 - protein, 9 aa, synthetic construct
  source 1..9: note = Seed: LVVVGAVGV (KRAS G12V)
VVVRGKVGM

SEQ ID NO: 63639 - protein, 9 aa, synthetic construct
  source 1..9: note = Seed: LVVVGAVGV (KRAS G12V)
VVVRGKVGQ

SEQ ID NO: 63640 - protein, 9 aa, synthetic construct
  source 1..9: note = Seed: LVVVGAVGV (KRAS G12V)
VVVRGKVGR

SEQ ID NO: 63641 - protein, 9 aa, synthetic construct
  source 1..9: note = Seed: LVVVGAVGV (KRAS G12V)
VVVRGKVGS

SEQ ID NO: 63642 - protein, 9 aa, synthetic construct
  source 1..9: note = Seed: LVVVGAVGV (KRAS G12V)
VVVRGKVGW

SEQ ID NO: 63643 - protein, 9 aa, synthetic construct
  source 1..9: note = Seed: LVVVGAVGV (KRAS G12V)
VVVRGKVGY

SEQ ID NO: 63644 - protein, 9 aa, synthetic construct
  source 1..9: note = Seed: LVVVGAVGV (KRAS G12V)
VVVRGLVGR

SEQ ID NO: 63645 - protein, 9 aa, synthetic construct
  source 1..9: note = Seed: LVVVGAVGV (KRAS G12V)
VVVRGMVGR

SEQ ID NO: 63646 - protein, 9 aa, synthetic construct
  source 1..9: note = Seed: LVVVGAVGV (KRAS G12V)
VVVRGRVGA

SEQ ID NO: 63647 - protein, 9 aa, synthetic construct
  source 1..9: note = Seed: LVVVGAVGV (KRAS G12V)
VVVRGRVGF

SEQ ID NO: 63648 - protein, 9 aa, synthetic construct
  source 1..9: note = Seed: LVVVGAVGV (KRAS G12V)
VVVRGRVGG

SEQ ID NO: 63649 - protein, 9 aa, synthetic construct
  source 1..9: note = Seed: LVVVGAVGV (KRAS G12V)
VVVRGRVGH

SEQ ID NO: 63650 - protein, 9 aa, synthetic construct
  source 1..9: note = Seed: LVVVGAVGV (KRAS G12V)
VVVRGRVGI

SEQ ID NO: 63651 - protein, 9 aa, synthetic construct
  source 1..9: note = Seed: LVVVGAVGV (KRAS G12V)
VVVRGRVGK

SEQ ID NO: 63652 - protein, 9 aa, synthetic construct
  source 1..9: note = Seed: LVVVGAVGV (KRAS G12V)
VVVRGRVGL

SEQ ID NO: 63653 - protein, 9 aa, synthetic construct
  source 1..9: note = Seed: LVVVGAVGV (KRAS G12V)
VVVRGRVGM

SEQ ID NO: 63654 - protein, 9 aa, synthetic construct
  source 1..9: note = Seed: LVVVGAVGV (KRAS G12V)
VVVRGRVGN

SEQ ID NO: 63655 - protein, 9 aa, synthetic construct
  source 1..9: note = Seed: LVVVGAVGV (KRAS G12V)
VVVRGRVGQ

SEQ ID NO: 63656 - protein, 9 aa, synthetic construct
  source 1..9: note = Seed: LVVVGAVGV (KRAS G12V)
VVVRGRVGR

SEQ ID NO: 63657 - protein, 9 aa, synthetic construct
  source 1..9: note = Seed: LVVVGAVGV (KRAS G12V)
VVVRGRVGS

SEQ ID NO: 63658 - protein, 9 aa, synthetic construct
  source 1..9: note = Seed: LVVVGAVGV (KRAS G12V)
VVVRGRVGT

SEQ ID NO: 63659 - protein, 9 aa, synthetic construct
  source 1..9: note = Seed: LVVVGAVGV (KRAS G12V)
VVVRGRVGV

SEQ ID NO: 63660 - protein, 9 aa, synthetic construct
  source 1..9: note = Seed: LVVVGAVGV (KRAS G12V)
VVVRGRVGY

SEQ ID NO: 63661 - protein, 9 aa, synthetic construct
  source 1..9: note = Seed: LVVVGAVGV (KRAS G12V)
VVVRGVVGR

SEQ ID NO: 63662 - protein, 9 aa, synthetic construct
  source 1..9: note = Seed: LVVVGAVGV (KRAS G12V)
VVVSGAVGA

SEQ ID NO: 63663 - protein, 9 aa, synthetic construct
  source 1..9: note = Seed: LVVVGAVGV (KRAS G12V)
VVVSGAVGC

SEQ ID NO: 63664 - protein, 9 aa, synthetic construct
  source 1..9: note = Seed: LVVVGAVGV (KRAS G12V)
VVVSGAVGF

SEQ ID NO: 63665 - protein, 9 aa, synthetic construct
  source 1..9: note = Seed: LVVVGAVGV (KRAS G12V)
VVVSGAVGG

SEQ ID NO: 63666 - protein, 9 aa, synthetic construct
  source 1..9: note = Seed: LVVVGAVGV (KRAS G12V)
VVVSGAVGH

SEQ ID NO: 63667 - protein, 9 aa, synthetic construct
  source 1..9: note = Seed: LVVVGAVGV (KRAS G12V)
VVVSGAVGI

SEQ ID NO: 63668 - protein, 9 aa, synthetic construct
  source 1..9: note = Seed: LVVVGAVGV (KRAS G12V)
VVVSGAVGL

SEQ ID NO: 63669 - protein, 9 aa, synthetic construct
  source 1..9: note = Seed: LVVVGAVGV (KRAS G12V)
VVVSGAVGM

SEQ ID NO: 63670 - protein, 9 aa, synthetic construct
  source 1..9: note = Seed: LVVVGAVGV (KRAS G12V)
VVVSGAVGN

SEQ ID NO: 63671 - protein, 9 aa, synthetic construct
  source 1..9: note = Seed: LVVVGAVGV (KRAS G12V)
VVVSGAVGS

SEQ ID NO: 63672 - protein, 9 aa, synthetic construct
  source 1..9: note = Seed: LVVVGAVGV (KRAS G12V)
VVVSGAVGT

SEQ ID NO: 63673 - protein, 9 aa, synthetic construct
  source 1..9: note = Seed: LVVVGAVGV (KRAS G12V)
VVVSGAVGV

SEQ ID NO: 63674 - protein, 9 aa, synthetic construct
  source 1..9: note = Seed: LVVVGAVGV (KRAS G12V)
VVVSGAVGY

SEQ ID NO: 63675 - protein, 9 aa, synthetic construct
  source 1..9: note = Seed: LVVVGAVGV (KRAS G12V)
VVVSGCVGA

SEQ ID NO: 63676 - protein, 9 aa, synthetic construct
  source 1..9: note = Seed: LVVVGAVGV (KRAS G12V)
VVVSGCVGI

SEQ ID NO: 63677 - protein, 9 aa, synthetic construct
  source 1..9: note = Seed: LVVVGAVGV (KRAS G12V)
VVVSGCVGL

SEQ ID NO: 63678 - protein, 9 aa, synthetic construct
  source 1..9: note = Seed: LVVVGAVGV (KRAS G12V)
VVVSGCVGV

SEQ ID NO: 63679 - protein, 9 aa, synthetic construct
  source 1..9: note = Seed: LVVVGAVGV (KRAS G12V)
VVVSGDVGI

SEQ ID NO: 63680 - protein, 9 aa, synthetic construct
  source 1..9: note = Seed: LVVVGAVGV (KRAS G12V)
VVVSGDVGL

SEQ ID NO: 63681 - protein, 9 aa, synthetic construct
  source 1..9: note = Seed: LVVVGAVGV (KRAS G12V)
VVVSGGVGA

SEQ ID NO: 63682 - protein, 9 aa, synthetic construct
  source 1..9: note = Seed: LVVVGAVGV (KRAS G12V)
VVVSGGVGC

SEQ ID NO: 63683 - protein, 9 aa, synthetic construct
  source 1..9: note = Seed: LVVVGAVGV (KRAS G12V)
VVVSGGVGF

SEQ ID NO: 63684 - protein, 9 aa, synthetic construct
  source 1..9: note = Seed: LVVVGAVGV (KRAS G12V)
VVVSGGVGG

SEQ ID NO: 63685 - protein, 9 aa, synthetic construct
  source 1..9: note = Seed: LVVVGAVGV (KRAS G12V)
VVVSGGVGI

SEQ ID NO: 63686 - protein, 9 aa, synthetic construct
  source 1..9: note = Seed: LVVVGAVGV (KRAS G12V)
VVVSGGVGL

SEQ ID NO: 63687 - protein, 9 aa, synthetic construct
  source 1..9: note = Seed: LVVVGAVGV (KRAS G12V)
VVVSGGVGM

SEQ ID NO: 63688 - protein, 9 aa, synthetic construct
  source 1..9: note = Seed: LVVVGAVGV (KRAS G12V)
VVVSGGVGS

SEQ ID NO: 63689 - protein, 9 aa, synthetic construct
  source 1..9: note = Seed: LVVVGAVGV (KRAS G12V)
VVVSGGVGT

SEQ ID NO: 63690 - protein, 9 aa, synthetic construct
  source 1..9: note = Seed: LVVVGAVGV (KRAS G12V)
VVVSGGVGV

SEQ ID NO: 63691 - protein, 9 aa, synthetic construct
  source 1..9: note = Seed: LVVVGAVGV (KRAS G12V)
VVVSGIVGA

SEQ ID NO: 63692 - protein, 9 aa, synthetic construct
  source 1..9: note = Seed: LVVVGAVGV (KRAS G12V)
VVVSGIVGI

SEQ ID NO: 63693 - protein, 9 aa, synthetic construct
  source 1..9: note = Seed: LVVVGAVGV (KRAS G12V)
VVVSGIVGL

SEQ ID NO: 63694 - protein, 9 aa, synthetic construct
  source 1..9: note = Seed: LVVVGAVGV (KRAS G12V)
VVVSGIVGV

SEQ ID NO: 63695 - protein, 9 aa, synthetic construct
  source 1..9: note = Seed: LVVVGAVGV (KRAS G12V)
VVVSGKVGR

SEQ ID NO: 63696 - protein, 9 aa, synthetic construct
  source 1..9: note = Seed: LVVVGAVGV (KRAS G12V)
VVVSGKVGY

SEQ ID NO: 63697 - protein, 9 aa, synthetic construct
  source 1..9: note = Seed: LVVVGAVGV (KRAS G12V)
VVVSGNVGA

SEQ ID NO: 63698 - protein, 9 aa, synthetic construct
  source 1..9: note = Seed: LVVVGAVGV (KRAS G12V)
VVVSGNVGC

SEQ ID NO: 63699 - protein, 9 aa, synthetic construct
  source 1..9: note = Seed: LVVVGAVGV (KRAS G12V)
VVVSGNVGF

SEQ ID NO: 63700 - protein, 9 aa, synthetic construct
  source 1..9: note = Seed: LVVVGAVGV (KRAS G12V)
VVVSGNVGI

SEQ ID NO: 63701 - protein, 9 aa, synthetic construct
  source 1..9: note = Seed: LVVVGAVGV (KRAS G12V)
VVVSGNVGL

SEQ ID NO: 63702 - protein, 9 aa, synthetic construct
  source 1..9: note = Seed: LVVVGAVGV (KRAS G12V)
VVVSGNVGM

SEQ ID NO: 63703 - protein, 9 aa, synthetic construct
  source 1..9: note = Seed: LVVVGAVGV (KRAS G12V)
VVVSGNVGV

SEQ ID NO: 63704 - protein, 9 aa, synthetic construct
  source 1..9: note = Seed: LVVVGAVGV (KRAS G12V)
VVVSGNVGY

SEQ ID NO: 63705 - protein, 9 aa, synthetic construct
  source 1..9: note = Seed: LVVVGAVGV (KRAS G12V)
VVVSGPVGA

SEQ ID NO: 63706 - protein, 9 aa, synthetic construct
  source 1..9: note = Seed: LVVVGAVGV (KRAS G12V)
VVVSGPVGC

SEQ ID NO: 63707 - protein, 9 aa, synthetic construct
  source 1..9: note = Seed: LVVVGAVGV (KRAS G12V)
VVVSGPVGF

SEQ ID NO: 63708 - protein, 9 aa, synthetic construct
  source 1..9: note = Seed: LVVVGAVGV (KRAS G12V)
VVVSGPVGI

SEQ ID NO: 63709 - protein, 9 aa, synthetic construct
  source 1..9: note = Seed: LVVVGAVGV (KRAS G12V)
VVVSGPVGL

SEQ ID NO: 63710 - protein, 9 aa, synthetic construct
  source 1..9: note = Seed: LVVVGAVGV (KRAS G12V)
VVVSGPVGN

SEQ ID NO: 63711 - protein, 9 aa, synthetic construct
  source 1..9: note = Seed: LVVVGAVGV (KRAS G12V)
VVVSGPVGS

SEQ ID NO: 63712 - protein, 9 aa, synthetic construct
  source 1..9: note = Seed: LVVVGAVGV (KRAS G12V)
VVVSGPVGT

SEQ ID NO: 63713 - protein, 9 aa, synthetic construct
  source 1..9: note = Seed: LVVVGAVGV (KRAS G12V)
VVVSGPVGV

SEQ ID NO: 63714 - protein, 9 aa, synthetic construct
  source 1..9: note = Seed: LVVVGAVGV (KRAS G12V)
VVVSGPVGY

SEQ ID NO: 63715 - protein, 9 aa, synthetic construct
  source 1..9: note = Seed: LVVVGAVGV (KRAS G12V)
VVVSGQVGI

SEQ ID NO: 63716 - protein, 9 aa, synthetic construct
  source 1..9: note = Seed: LVVVGAVGV (KRAS G12V)
VVVSGRVGA

SEQ ID NO: 63717 - protein, 9 aa, synthetic construct
  source 1..9: note = Seed: LVVVGAVGV (KRAS G12V)
VVVSGRVGF

SEQ ID NO: 63718 - protein, 9 aa, synthetic construct
  source 1..9: note = Seed: LVVVGAVGV (KRAS G12V)
VVVSGRVGH

SEQ ID NO: 63719 - protein, 9 aa, synthetic construct
  source 1..9: note = Seed: LVVVGAVGV (KRAS G12V)
VVVSGRVGK

SEQ ID NO: 63720 - protein, 9 aa, synthetic construct
  source 1..9: note = Seed: LVVVGAVGV (KRAS G12V)
VVVSGRVGL

SEQ ID NO: 63721 - protein, 9 aa, synthetic construct
  source 1..9: note = Seed: LVVVGAVGV (KRAS G12V)
VVVSGRVGM

SEQ ID NO: 63722 - protein, 9 aa, synthetic construct
  source 1..9: note = Seed: LVVVGAVGV (KRAS G12V)
VVVSGRVGR

SEQ ID NO: 63723 - protein, 9 aa, synthetic construct
  source 1..9: note = Seed: LVVVGAVGV (KRAS G12V)
VVVSGRVGS

SEQ ID NO: 63724 - protein, 9 aa, synthetic construct
  source 1..9: note = Seed: LVVVGAVGV (KRAS G12V)
VVVSGRVGY

SEQ ID NO: 63725 - protein, 9 aa, synthetic construct
  source 1..9: note = Seed: LVVVGAVGV (KRAS G12V)
VVVSGSVGA

SEQ ID NO: 63726 - protein, 9 aa, synthetic construct
  source 1..9: note = Seed: LVVVGAVGV (KRAS G12V)
VVVSGSVGC

SEQ ID NO: 63727 - protein, 9 aa, synthetic construct
  source 1..9: note = Seed: LVVVGAVGV (KRAS G12V)
VVVSGSVGF

SEQ ID NO: 63728 - protein, 9 aa, synthetic construct
  source 1..9: note = Seed: LVVVGAVGV (KRAS G12V)
VVVSGSVGG

SEQ ID NO: 63729 - protein, 9 aa, synthetic construct
  source 1..9: note = Seed: LVVVGAVGV (KRAS G12V)
VVVSGSVGI

SEQ ID NO: 63730 - protein, 9 aa, synthetic construct
  source 1..9: note = Seed: LVVVGAVGV (KRAS G12V)
VVVSGSVGL

SEQ ID NO: 63731 - protein, 9 aa, synthetic construct
  source 1..9: note = Seed: LVVVGAVGV (KRAS G12V)
VVVSGSVGM

SEQ ID NO: 63732 - protein, 9 aa, synthetic construct
  source 1..9: note = Seed: LVVVGAVGV (KRAS G12V)
VVVSGSVGS

SEQ ID NO: 63733 - protein, 9 aa, synthetic construct
  source 1..9: note = Seed: LVVVGAVGV (KRAS G12V)
VVVSGSVGT

SEQ ID NO: 63734 - protein, 9 aa, synthetic construct
  source 1..9: note = Seed: LVVVGAVGV (KRAS G12V)
VVVSGSVGV

SEQ ID NO: 63735 - protein, 9 aa, synthetic construct
  source 1..9: note = Seed: LVVVGAVGV (KRAS G12V)
VVVSGSVGY

SEQ ID NO: 63736 - protein, 9 aa, synthetic construct
  source 1..9: note = Seed: LVVVGAVGV (KRAS G12V)
VVVSGTVGA

SEQ ID NO: 63737 - protein, 9 aa, synthetic construct
  source 1..9: note = Seed: LVVVGAVGV (KRAS G12V)
VVVSGTVGC

SEQ ID NO: 63738 - protein, 9 aa, synthetic construct
  source 1..9: note = Seed: LVVVGAVGV (KRAS G12V)
VVVSGTVGF

SEQ ID NO: 63739 - protein, 9 aa, synthetic construct
  source 1..9: note = Seed: LVVVGAVGV (KRAS G12V)
VVVSGTVGI

SEQ ID NO: 63740 - protein, 9 aa, synthetic construct
  source 1..9: note = Seed: LVVVGAVGV (KRAS G12V)
VVVSGTVGL

SEQ ID NO: 63741 - protein, 9 aa, synthetic construct
  source 1..9: note = Seed: LVVVGAVGV (KRAS G12V)
VVVSGTVGM

SEQ ID NO: 63742 - protein, 9 aa, synthetic construct
  source 1..9: note = Seed: LVVVGAVGV (KRAS G12V)
VVVSGTVGV

SEQ ID NO: 63743 - protein, 9 aa, synthetic construct
  source 1..9: note = Seed: LVVVGAVGV (KRAS G12V)
VVVSGTVGY

SEQ ID NO: 63744 - protein, 9 aa, synthetic construct
  source 1..9: note = Seed: LVVVGAVGV (KRAS G12V)
VVVSGVVGA

SEQ ID NO: 63745 - protein, 9 aa, synthetic construct
  source 1..9: note = Seed: LVVVGAVGV (KRAS G12V)
VVVSGVVGC

SEQ ID NO: 63746 - protein, 9 aa, synthetic construct
  source 1..9: note = Seed: LVVVGAVGV (KRAS G12V)
VVVSGVVGI

SEQ ID NO: 63747 - protein, 9 aa, synthetic construct
  source 1..9: note = Seed: LVVVGAVGV (KRAS G12V)
VVVSGVVGL

SEQ ID NO: 63748 - protein, 9 aa, synthetic construct
  source 1..9: note = Seed: LVVVGAVGV (KRAS G12V)
VVVSGVVGV

SEQ ID NO: 63749 - protein, 9 aa, synthetic construct
  source 1..9: note = Seed: LVVVGAVGV (KRAS G12V)
VVVTGAVGA

SEQ ID NO: 63750 - protein, 9 aa, synthetic construct
  source 1..9: note = Seed: LVVVGAVGV (KRAS G12V)
VVVTGAVGC

SEQ ID NO: 63751 - protein, 9 aa, synthetic construct
  source 1..9: note = Seed: LVVVGAVGV (KRAS G12V)
VVVTGAVGF

SEQ ID NO: 63752 - protein, 9 aa, synthetic construct
  source 1..9: note = Seed: LVVVGAVGV (KRAS G12V)
VVVTGAVGG

SEQ ID NO: 63753 - protein, 9 aa, synthetic construct
  source 1..9: note = Seed: LVVVGAVGV (KRAS G12V)
VVVTGAVGI

SEQ ID NO: 63754 - protein, 9 aa, synthetic construct
  source 1..9: note = Seed: LVVVGAVGV (KRAS G12V)
VVVTGAVGL

SEQ ID NO: 63755 - protein, 9 aa, synthetic construct
  source 1..9: note = Seed: LVVVGAVGV (KRAS G12V)
VVVTGAVGM

SEQ ID NO: 63756 - protein, 9 aa, synthetic construct
  source 1..9: note = Seed: LVVVGAVGV (KRAS G12V)
VVVTGAVGN

SEQ ID NO: 63757 - protein, 9 aa, synthetic construct
  source 1..9: note = Seed: LVVVGAVGV (KRAS G12V)
VVVTGAVGR

SEQ ID NO: 63758 - protein, 9 aa, synthetic construct
  source 1..9: note = Seed: LVVVGAVGV (KRAS G12V)
VVVTGAVGS

SEQ ID NO: 63759 - protein, 9 aa, synthetic construct
  source 1..9: note = Seed: LVVVGAVGV (KRAS G12V)
VVVTGAVGT

SEQ ID NO: 63760 - protein, 9 aa, synthetic construct
  source 1..9: note = Seed: LVVVGAVGV (KRAS G12V)
VVVTGAVGV

SEQ ID NO: 63761 - protein, 9 aa, synthetic construct
  source 1..9: note = Seed: LVVVGAVGV (KRAS G12V)
VVVTGAVGY

SEQ ID NO: 63762 - protein, 9 aa, synthetic construct
  source 1..9: note = Seed: LVVVGAVGV (KRAS G12V)
VVVTGCVGA

SEQ ID NO: 63763 - protein, 9 aa, synthetic construct
  source 1..9: note = Seed: LVVVGAVGV (KRAS G12V)
VVVTGGVGA

SEQ ID NO: 63764 - protein, 9 aa, synthetic construct
  source 1..9: note = Seed: LVVVGAVGV (KRAS G12V)
VVVTGGVGF

SEQ ID NO: 63765 - protein, 9 aa, synthetic construct
  source 1..9: note = Seed: LVVVGAVGV (KRAS G12V)
VVVTGGVGI

SEQ ID NO: 63766 - protein, 9 aa, synthetic construct
  source 1..9: note = Seed: LVVVGAVGV (KRAS G12V)
VVVTGGVGL

SEQ ID NO: 63767 - protein, 9 aa, synthetic construct
  source 1..9: note = Seed: LVVVGAVGV (KRAS G12V)
VVVTGGVGM

SEQ ID NO: 63768 - protein, 9 aa, synthetic construct
  source 1..9: note = Seed: LVVVGAVGV (KRAS G12V)
VVVTGGVGS

SEQ ID NO: 63769 - protein, 9 aa, synthetic construct
  source 1..9: note = Seed: LVVVGAVGV (KRAS G12V)
VVVTGGVGT

SEQ ID NO: 63770 - protein, 9 aa, synthetic construct
  source 1..9: note = Seed: LVVVGAVGV (KRAS G12V)
VVVTGGVGV

SEQ ID NO: 63771 - protein, 9 aa, synthetic construct
  source 1..9: note = Seed: LVVVGAVGV (KRAS G12V)
VVVTGIVGA

SEQ ID NO: 63772 - protein, 9 aa, synthetic construct
  source 1..9: note = Seed: LVVVGAVGV (KRAS G12V)
VVVTGIVGL

SEQ ID NO: 63773 - protein, 9 aa, synthetic construct
  source 1..9: note = Seed: LVVVGAVGV (KRAS G12V)
VVVTGIVGV

SEQ ID NO: 63774 - protein, 9 aa, synthetic construct
  source 1..9: note = Seed: LVVVGAVGV (KRAS G12V)
VVVTGNVGA

SEQ ID NO: 63775 - protein, 9 aa, synthetic construct
  source 1..9: note = Seed: LVVVGAVGV (KRAS G12V)
VVVTGNVGF

SEQ ID NO: 63776 - protein, 9 aa, synthetic construct
  source 1..9: note = Seed: LVVVGAVGV (KRAS G12V)
VVVTGNVGI

SEQ ID NO: 63777 - protein, 9 aa, synthetic construct
  source 1..9: note = Seed: LVVVGAVGV (KRAS G12V)
VVVTGNVGL

SEQ ID NO: 63778 - protein, 9 aa, synthetic construct
  source 1..9: note = Seed: LVVVGAVGV (KRAS G12V)
VVVTGNVGM

SEQ ID NO: 63779 - protein, 9 aa, synthetic construct
  source 1..9: note = Seed: LVVVGAVGV (KRAS G12V)
VVVTGNVGV

SEQ ID NO: 63780 - protein, 9 aa, synthetic construct
  source 1..9: note = Seed: LVVVGAVGV (KRAS G12V)
VVVTGPVGA

SEQ ID NO: 63781 - protein, 9 aa, synthetic construct
  source 1..9: note = Seed: LVVVGAVGV (KRAS G12V)
VVVTGPVGC

SEQ ID NO: 63782 - protein, 9 aa, synthetic construct
  source 1..9: note = Seed: LVVVGAVGV (KRAS G12V)
VVVTGPVGF

SEQ ID NO: 63783 - protein, 9 aa, synthetic construct
  source 1..9: note = Seed: LVVVGAVGV (KRAS G12V)
VVVTGPVGI

SEQ ID NO: 63784 - protein, 9 aa, synthetic construct
  source 1..9: note = Seed: LVVVGAVGV (KRAS G12V)
VVVTGPVGL

SEQ ID NO: 63785 - protein, 9 aa, synthetic construct
  source 1..9: note = Seed: LVVVGAVGV (KRAS G12V)
VVVTGPVGM

SEQ ID NO: 63786 - protein, 9 aa, synthetic construct
  source 1..9: note = Seed: LVVVGAVGV (KRAS G12V)
VVVTGPVGN

SEQ ID NO: 63787 - protein, 9 aa, synthetic construct
  source 1..9: note = Seed: LVVVGAVGV (KRAS G12V)
VVVTGPVGS

SEQ ID NO: 63788 - protein, 9 aa, synthetic construct
  source 1..9: note = Seed: LVVVGAVGV (KRAS G12V)
VVVTGPVGT

SEQ ID NO: 63789 - protein, 9 aa, synthetic construct
  source 1..9: note = Seed: LVVVGAVGV (KRAS G12V)
VVVTGPVGV

SEQ ID NO: 63790 - protein, 9 aa, synthetic construct
  source 1..9: note = Seed: LVVVGAVGV (KRAS G12V)
VVVTGQVGI

SEQ ID NO: 63791 - protein, 9 aa, synthetic construct
  source 1..9: note = Seed: LVVVGAVGV (KRAS G12V)
VVVTGQVGL

SEQ ID NO: 63792 - protein, 9 aa, synthetic construct
  source 1..9: note = Seed: LVVVGAVGV (KRAS G12V)
VVVTGQVGV

SEQ ID NO: 63793 - protein, 9 aa, synthetic construct
  source 1..9: note = Seed: LVVVGAVGV (KRAS G12V)
VVVTGRVGA

SEQ ID NO: 63794 - protein, 9 aa, synthetic construct
  source 1..9: note = Seed: LVVVGAVGV (KRAS G12V)
VVVTGRVGH

SEQ ID NO: 63795 - protein, 9 aa, synthetic construct
  source 1..9: note = Seed: LVVVGAVGV (KRAS G12V)
VVVTGRVGS

SEQ ID NO: 63796 - protein, 9 aa, synthetic construct
  source 1..9: note = Seed: LVVVGAVGV (KRAS G12V)
VVVTGSVGA

SEQ ID NO: 63797 - protein, 9 aa, synthetic construct
  source 1..9: note = Seed: LVVVGAVGV (KRAS G12V)
VVVTGSVGC

SEQ ID NO: 63798 - protein, 9 aa, synthetic construct
  source 1..9: note = Seed: LVVVGAVGV (KRAS G12V)
VVVTGSVGF

SEQ ID NO: 63799 - protein, 9 aa, synthetic construct
  source 1..9: note = Seed: LVVVGAVGV (KRAS G12V)
VVVTGSVGI

SEQ ID NO: 63800 - protein, 9 aa, synthetic construct
  source 1..9: note = Seed: LVVVGAVGV (KRAS G12V)
VVVTGSVGL

SEQ ID NO: 63801 - protein, 9 aa, synthetic construct
  source 1..9: note = Seed: LVVVGAVGV (KRAS G12V)
VVVTGSVGM

SEQ ID NO: 63802 - protein, 9 aa, synthetic construct
  source 1..9: note = Seed: LVVVGAVGV (KRAS G12V)
VVVTGSVGR

SEQ ID NO: 63803 - protein, 9 aa, synthetic construct
  source 1..9: note = Seed: LVVVGAVGV (KRAS G12V)
VVVTGSVGS

SEQ ID NO: 63804 - protein, 9 aa, synthetic construct
  source 1..9: note = Seed: LVVVGAVGV (KRAS G12V)
VVVTGSVGT

SEQ ID NO: 63805 - protein, 9 aa, synthetic construct
  source 1..9: note = Seed: LVVVGAVGV (KRAS G12V)
VVVTGSVGV

SEQ ID NO: 63806 - protein, 9 aa, synthetic construct
  source 1..9: note = Seed: LVVVGAVGV (KRAS G12V)
VVVTGSVGY

SEQ ID NO: 63807 - protein, 9 aa, synthetic construct
  source 1..9: note = Seed: LVVVGAVGV (KRAS G12V)
VVVTGTVGA

SEQ ID NO: 63808 - protein, 9 aa, synthetic construct
  source 1..9: note = Seed: LVVVGAVGV (KRAS G12V)
VVVTGTVGF

SEQ ID NO: 63809 - protein, 9 aa, synthetic construct
  source 1..9: note = Seed: LVVVGAVGV (KRAS G12V)
VVVTGTVGI

SEQ ID NO: 63810 - protein, 9 aa, synthetic construct
  source 1..9: note = Seed: LVVVGAVGV (KRAS G12V)
VVVTGTVGL

SEQ ID NO: 63811 - protein, 9 aa, synthetic construct
  source 1..9: note = Seed: LVVVGAVGV (KRAS G12V)
VVVTGTVGM

SEQ ID NO: 63812 - protein, 9 aa, synthetic construct
  source 1..9: note = Seed: LVVVGAVGV (KRAS G12V)
VVVTGTVGV

SEQ ID NO: 63813 - protein, 9 aa, synthetic construct
  source 1..9: note = Seed: LVVVGAVGV (KRAS G12V)
VVVTGVVGA

SEQ ID NO: 63814 - protein, 9 aa, synthetic construct
  source 1..9: note = Seed: LVVVGAVGV (KRAS G12V)
VVVTGVVGI

SEQ ID NO: 63815 - protein, 9 aa, synthetic construct
  source 1..9: note = Seed: LVVVGAVGV (KRAS G12V)
VVVTGVVGL

SEQ ID NO: 63816 - protein, 9 aa, synthetic construct
  source 1..9: note = Seed: LVVVGAVGV (KRAS G12V)
VVVTGVVGM

SEQ ID NO: 63817 - protein, 9 aa, synthetic construct
  source 1..9: note = Seed: LVVVGAVGV (KRAS G12V)
VVVTGVVGV

SEQ ID NO: 63818 - protein, 9 aa, synthetic construct
  source 1..9: note = Seed: LVVVGAVGV (KRAS G12V)
VVVTGYVGL

SEQ ID NO: 63819 - protein, 9 aa, synthetic construct
  source 1..9: note = Seed: LVVVGAVGV (KRAS G12V)
VVVVGAVGA

SEQ ID NO: 63820 - protein, 9 aa, synthetic construct
  source 1..9: note = Seed: LVVVGAVGV (KRAS G12V)
VVVVGAVGH

SEQ ID NO: 63821 - protein, 9 aa, synthetic construct
  source 1..9: note = Seed: LVVVGAVGV (KRAS G12V)
VVVVGAVGI

SEQ ID NO: 63822 - protein, 9 aa, synthetic construct
  source 1..9: note = Seed: LVVVGAVGV (KRAS G12V)
VVVVGAVGK

SEQ ID NO: 63823 - protein, 9 aa, synthetic construct
  source 1..9: note = Seed: LVVVGAVGV (KRAS G12V)
VVVVGAVGL

SEQ ID NO: 63824 - protein, 9 aa, synthetic construct
  source 1..9: note = Seed: LVVVGAVGV (KRAS G12V)
VVVVGAVGM

SEQ ID NO: 63825 - protein, 9 aa, synthetic construct
  source 1..9: note = Seed: LVVVGAVGV (KRAS G12V)
VVVVGAVGR

SEQ ID NO: 63826 - protein, 9 aa, synthetic construct
  source 1..9: note = Seed: LVVVGAVGV (KRAS G12V)
VVVVGAVGS

SEQ ID NO: 63827 - protein, 9 aa, synthetic construct
  source 1..9: note = Seed: LVVVGAVGV (KRAS G12V)
VVVVGAVGT

SEQ ID NO: 63828 - protein, 9 aa, synthetic construct
  source 1..9: note = Seed: LVVVGAVGV (KRAS G12V)
VVVVGAVGV

SEQ ID NO: 63829 - protein, 9 aa, synthetic construct
  source 1..9: note = Seed: LVVVGAVGV (KRAS G12V)
VVVVGGVGA

SEQ ID NO: 63830 - protein, 9 aa, synthetic construct
  source 1..9: note = Seed: LVVVGAVGV (KRAS G12V)
VVVVGGVGI

SEQ ID NO: 63831 - protein, 9 aa, synthetic construct
  source 1..9: note = Seed: LVVVGAVGV (KRAS G12V)
VVVVGGVGL

SEQ ID NO: 63832 - protein, 9 aa, synthetic construct
  source 1..9: note = Seed: LVVVGAVGV (KRAS G12V)
VVVVGGVGM

SEQ ID NO: 63833 - protein, 9 aa, synthetic construct
  source 1..9: note = Seed: LVVVGAVGV (KRAS G12V)
VVVVGGVGS

SEQ ID NO: 63834 - protein, 9 aa, synthetic construct
  source 1..9: note = Seed: LVVVGAVGV (KRAS G12V)
VVVVGGVGT

SEQ ID NO: 63835 - protein, 9 aa, synthetic construct
  source 1..9: note = Seed: LVVVGAVGV (KRAS G12V)
VVVVGGVGV

SEQ ID NO: 63836 - protein, 9 aa, synthetic construct
  source 1..9: note = Seed: LVVVGAVGV (KRAS G12V)
VVVVGHVGA

SEQ ID NO: 63837 - protein, 9 aa, synthetic construct
  source 1..9: note = Seed: LVVVGAVGV (KRAS G12V)
VVVVGHVGI

SEQ ID NO: 63838 - protein, 9 aa, synthetic construct
  source 1..9: note = Seed: LVVVGAVGV (KRAS G12V)
VVVVGHVGL

SEQ ID NO: 63839 - protein, 9 aa, synthetic construct
  source 1..9: note = Seed: LVVVGAVGV (KRAS G12V)
VVVVGHVGM

SEQ ID NO: 63840 - protein, 9 aa, synthetic construct
  source 1..9: note = Seed: LVVVGAVGV (KRAS G12V)
VVVVGHVGR

SEQ ID NO: 63841 - protein, 9 aa, synthetic construct
  source 1..9: note = Seed: LVVVGAVGV (KRAS G12V)
VVVVGHVGV

SEQ ID NO: 63842 - protein, 9 aa, synthetic construct
  source 1..9: note = Seed: LVVVGAVGV (KRAS G12V)
VVVVGIVGR

SEQ ID NO: 63843 - protein, 9 aa, synthetic construct
  source 1..9: note = Seed: LVVVGAVGV (KRAS G12V)
VVVVGKVGA

SEQ ID NO: 63844 - protein, 9 aa, synthetic construct
  source 1..9: note = Seed: LVVVGAVGV (KRAS G12V)
VVVVGKVGH

SEQ ID NO: 63845 - protein, 9 aa, synthetic construct
  source 1..9: note = Seed: LVVVGAVGV (KRAS G12V)
VVVVGKVGK

SEQ ID NO: 63846 - protein, 9 aa, synthetic construct
  source 1..9: note = Seed: LVVVGAVGV (KRAS G12V)
VVVVGKVGL

SEQ ID NO: 63847 - protein, 9 aa, synthetic construct
  source 1..9: note = Seed: LVVVGAVGV (KRAS G12V)
VVVVGKVGQ

SEQ ID NO: 63848 - protein, 9 aa, synthetic construct
  source 1..9: note = Seed: LVVVGAVGV (KRAS G12V)
VVVVGKVGR

SEQ ID NO: 63849 - protein, 9 aa, synthetic construct
  source 1..9: note = Seed: LVVVGAVGV (KRAS G12V)
VVVVGKVGS

SEQ ID NO: 63850 - protein, 9 aa, synthetic construct
  source 1..9: note = Seed: LVVVGAVGV (KRAS G12V)
VVVVGKVGV

SEQ ID NO: 63851 - protein, 9 aa, synthetic construct
  source 1..9: note = Seed: LVVVGAVGV (KRAS G12V)
VVVVGKVGY

SEQ ID NO: 63852 - protein, 9 aa, synthetic construct
  source 1..9: note = Seed: LVVVGAVGV (KRAS G12V)
VVVVGLVGR

SEQ ID NO: 63853 - protein, 9 aa, synthetic construct
  source 1..9: note = Seed: LVVVGAVGV (KRAS G12V)
VVVVGNVGA

SEQ ID NO: 63854 - protein, 9 aa, synthetic construct
  source 1..9: note = Seed: LVVVGAVGV (KRAS G12V)
VVVVGNVGI

SEQ ID NO: 63855 - protein, 9 aa, synthetic construct
  source 1..9: note = Seed: LVVVGAVGV (KRAS G12V)
VVVVGNVGL

SEQ ID NO: 63856 - protein, 9 aa, synthetic construct
  source 1..9: note = Seed: LVVVGAVGV (KRAS G12V)
VVVVGNVGM

SEQ ID NO: 63857 - protein, 9 aa, synthetic construct
  source 1..9: note = Seed: LVVVGAVGV (KRAS G12V)
VVVVGNVGS

SEQ ID NO: 63858 - protein, 9 aa, synthetic construct
  source 1..9: note = Seed: LVVVGAVGV (KRAS G12V)
VVVVGNVGT

SEQ ID NO: 63859 - protein, 9 aa, synthetic construct
  source 1..9: note = Seed: LVVVGAVGV (KRAS G12V)
VVVVGNVGV

SEQ ID NO: 63860 - protein, 9 aa, synthetic construct
  source 1..9: note = Seed: LVVVGAVGV (KRAS G12V)
VVVVGPVGA

SEQ ID NO: 63861 - protein, 9 aa, synthetic construct
  source 1..9: note = Seed: LVVVGAVGV (KRAS G12V)
VVVVGPVGC

SEQ ID NO: 63862 - protein, 9 aa, synthetic construct
  source 1..9: note = Seed: LVVVGAVGV (KRAS G12V)
VVVVGPVGE

SEQ ID NO: 63863 - protein, 9 aa, synthetic construct
  source 1..9: note = Seed: LVVVGAVGV (KRAS G12V)
VVVVGPVGF

SEQ ID NO: 63864 - protein, 9 aa, synthetic construct
  source 1..9: note = Seed: LVVVGAVGV (KRAS G12V)
VVVVGPVGG

SEQ ID NO: 63865 - protein, 9 aa, synthetic construct
  source 1..9: note = Seed: LVVVGAVGV (KRAS G12V)
VVVVGPVGH

SEQ ID NO: 63866 - protein, 9 aa, synthetic construct
  source 1..9: note = Seed: LVVVGAVGV (KRAS G12V)
VVVVGPVGI

SEQ ID NO: 63867 - protein, 9 aa, synthetic construct
  source 1..9: note = Seed: LVVVGAVGV (KRAS G12V)
VVVVGPVGL

SEQ ID NO: 63868 - protein, 9 aa, synthetic construct
  source 1..9: note = Seed: LVVVGAVGV (KRAS G12V)
VVVVGPVGM

SEQ ID NO: 63869 - protein, 9 aa, synthetic construct
  source 1..9: note = Seed: LVVVGAVGV (KRAS G12V)
VVVVGPVGN

SEQ ID NO: 63870 - protein, 9 aa, synthetic construct
  source 1..9: note = Seed: LVVVGAVGV (KRAS G12V)
VVVVGPVGQ

SEQ ID NO: 63871 - protein, 9 aa, synthetic construct
  source 1..9: note = Seed: LVVVGAVGV (KRAS G12V)
VVVVGPVGS

SEQ ID NO: 63872 - protein, 9 aa, synthetic construct
  source 1..9: note = Seed: LVVVGAVGV (KRAS G12V)
VVVVGPVGT

SEQ ID NO: 63873 - protein, 9 aa, synthetic construct
  source 1..9: note = Seed: LVVVGAVGV (KRAS G12V)
VVVVGPVGV

SEQ ID NO: 63874 - protein, 9 aa, synthetic construct
  source 1..9: note = Seed: LVVVGAVGV (KRAS G12V)
VVVVGRVGA

SEQ ID NO: 63875 - protein, 9 aa, synthetic construct
  source 1..9: note = Seed: LVVVGAVGV (KRAS G12V)
VVVVGRVGG

SEQ ID NO: 63876 - protein, 9 aa, synthetic construct
  source 1..9: note = Seed: LVVVGAVGV (KRAS G12V)
VVVVGRVGH

SEQ ID NO: 63877 - protein, 9 aa, synthetic construct
  source 1..9: note = Seed: LVVVGAVGV (KRAS G12V)
VVVVGRVGK

SEQ ID NO: 63878 - protein, 9 aa, synthetic construct
  source 1..9: note = Seed: LVVVGAVGV (KRAS G12V)
VVVVGRVGL

SEQ ID NO: 63879 - protein, 9 aa, synthetic construct
  source 1..9: note = Seed: LVVVGAVGV (KRAS G12V)
VVVVGRVGM

SEQ ID NO: 63880 - protein, 9 aa, synthetic construct
  source 1..9: note = Seed: LVVVGAVGV (KRAS G12V)
VVVVGRVGN

SEQ ID NO: 63881 - protein, 9 aa, synthetic construct
  source 1..9: note = Seed: LVVVGAVGV (KRAS G12V)
VVVVGRVGQ

SEQ ID NO: 63882 - protein, 9 aa, synthetic construct
  source 1..9: note = Seed: LVVVGAVGV (KRAS G12V)
VVVVGRVGR

SEQ ID NO: 63883 - protein, 9 aa, synthetic construct
  source 1..9: note = Seed: LVVVGAVGV (KRAS G12V)
VVVVGRVGS

SEQ ID NO: 63884 - protein, 9 aa, synthetic construct
  source 1..9: note = Seed: LVVVGAVGV (KRAS G12V)
VVVVGRVGT

SEQ ID NO: 63885 - protein, 9 aa, synthetic construct
  source 1..9: note = Seed: LVVVGAVGV (KRAS G12V)
VVVVGRVGY

SEQ ID NO: 63886 - protein, 9 aa, synthetic construct
  source 1..9: note = Seed: LVVVGAVGV (KRAS G12V)
VVVVGSVGA

SEQ ID NO: 63887 - protein, 9 aa, synthetic construct
  source 1..9: note = Seed: LVVVGAVGV (KRAS G12V)
VVVVGSVGI

SEQ ID NO: 63888 - protein, 9 aa, synthetic construct
  source 1..9: note = Seed: LVVVGAVGV (KRAS G12V)
VVVVGSVGL

SEQ ID NO: 63889 - protein, 9 aa, synthetic construct
  source 1..9: note = Seed: LVVVGAVGV (KRAS G12V)
VVVVGSVGM

SEQ ID NO: 63890 - protein, 9 aa, synthetic construct
  source 1..9: note = Seed: LVVVGAVGV (KRAS G12V)
VVVVGSVGR

SEQ ID NO: 63891 - protein, 9 aa, synthetic construct
  source 1..9: note = Seed: LVVVGAVGV (KRAS G12V)
VVVVGSVGS

SEQ ID NO: 63892 - protein, 9 aa, synthetic construct
  source 1..9: note = Seed: LVVVGAVGV (KRAS G12V)
VVVVGSVGT

SEQ ID NO: 63893 - protein, 9 aa, synthetic construct
  source 1..9: note = Seed: LVVVGAVGV (KRAS G12V)
VVVVGSVGV

SEQ ID NO: 63894 - protein, 9 aa, synthetic construct
  source 1..9: note = Seed: LVVVGAVGV (KRAS G12V)
VVVVGTVGA

SEQ ID NO: 63895 - protein, 9 aa, synthetic construct
  source 1..9: note = Seed: LVVVGAVGV (KRAS G12V)
VVVVGTVGI

SEQ ID NO: 63896 - protein, 9 aa, synthetic construct
  source 1..9: note = Seed: LVVVGAVGV (KRAS G12V)
VVVVGTVGL

SEQ ID NO: 63897 - protein, 9 aa, synthetic construct
  source 1..9: note = Seed: LVVVGAVGV (KRAS G12V)
VVVVGTVGV

SEQ ID NO: 63898 - protein, 9 aa, synthetic construct
  source 1..9: note = Seed: LVVVGAVGV (KRAS G12V)
VVVWGAVGI

SEQ ID NO: 63899 - protein, 9 aa, synthetic construct
  source 1..9: note = Seed: LVVVGAVGV (KRAS G12V)
VVVWGAVGL

SEQ ID NO: 63900 - protein, 9 aa, synthetic construct
  source 1..9: note = Seed: LVVVGAVGV (KRAS G12V)
VVVWGAVGV

SEQ ID NO: 63901 - protein, 9 aa, synthetic construct
  source 1..9: note = Seed: LVVVGAVGV (KRAS G12V)
VVVWGDVGI

SEQ ID NO: 63902 - protein, 9 aa, synthetic construct
  source 1..9: note = Seed: LVVVGAVGV (KRAS G12V)
VVVWGDVGL

SEQ ID NO: 63903 - protein, 9 aa, synthetic construct
  source 1..9: note = Seed: LVVVGAVGV (KRAS G12V)
VVVWGDVGV

SEQ ID NO: 63904 - protein, 9 aa, synthetic construct
  source 1..9: note = Seed: LVVVGAVGV (KRAS G12V)
VVVWGGVGI

SEQ ID NO: 63905 - protein, 9 aa, synthetic construct
  source 1..9: note = Seed: LVVVGAVGV (KRAS G12V)
VVVWGGVGL

SEQ ID NO: 63906 - protein, 9 aa, synthetic construct
  source 1..9: note = Seed: LVVVGAVGV (KRAS G12V)
VVVWGGVGV

SEQ ID NO: 63907 - protein, 9 aa, synthetic construct
  source 1..9: note = Seed: LVVVGAVGV (KRAS G12V)
VVVWGKVGK

SEQ ID NO: 63908 - protein, 9 aa, synthetic construct
  source 1..9: note = Seed: LVVVGAVGV (KRAS G12V)
VVVWGKVGR

SEQ ID NO: 63909 - protein, 9 aa, synthetic construct
  source 1..9: note = Seed: LVVVGAVGV (KRAS G12V)
VVVWGNVGA

SEQ ID NO: 63910 - protein, 9 aa, synthetic construct
  source 1..9: note = Seed: LVVVGAVGV (KRAS G12V)
VVVWGNVGF

SEQ ID NO: 63911 - protein, 9 aa, synthetic construct
  source 1..9: note = Seed: LVVVGAVGV (KRAS G12V)
VVVWGNVGI

SEQ ID NO: 63912 - protein, 9 aa, synthetic construct
  source 1..9: note = Seed: LVVVGAVGV (KRAS G12V)
VVVWGNVGL

SEQ ID NO: 63913 - protein, 9 aa, synthetic construct
  source 1..9: note = Seed: LVVVGAVGV (KRAS G12V)
VVVWGNVGM

SEQ ID NO: 63914 - protein, 9 aa, synthetic construct
  source 1..9: note = Seed: LVVVGAVGV (KRAS G12V)
VVVWGNVGT

SEQ ID NO: 63915 - protein, 9 aa, synthetic construct
  source 1..9: note = Seed: LVVVGAVGV (KRAS G12V)
VVVWGNVGV

SEQ ID NO: 63916 - protein, 9 aa, synthetic construct
  source 1..9: note = Seed: LVVVGAVGV (KRAS G12V)
VVVWGRVGH

SEQ ID NO: 63917 - protein, 9 aa, synthetic construct
  source 1..9: note = Seed: LVVVGAVGV (KRAS G12V)
VVVWGRVGK

SEQ ID NO: 63918 - protein, 9 aa, synthetic construct
  source 1..9: note = Seed: LVVVGAVGV (KRAS G12V)
VVVWGRVGR

SEQ ID NO: 63919 - protein, 9 aa, synthetic construct
  source 1..9: note = Seed: LVVVGAVGV (KRAS G12V)
VVVWGSVGA

SEQ ID NO: 63920 - protein, 9 aa, synthetic construct
  source 1..9: note = Seed: LVVVGAVGV (KRAS G12V)
VVVWGSVGF

SEQ ID NO: 63921 - protein, 9 aa, synthetic construct
  source 1..9: note = Seed: LVVVGAVGV (KRAS G12V)
VVVWGSVGI

SEQ ID NO: 63922 - protein, 9 aa, synthetic construct
  source 1..9: note = Seed: LVVVGAVGV (KRAS G12V)
VVVWGSVGL

SEQ ID NO: 63923 - protein, 9 aa, synthetic construct
  source 1..9: note = Seed: LVVVGAVGV (KRAS G12V)
VVVWGSVGM

SEQ ID NO: 63924 - protein, 9 aa, synthetic construct
  source 1..9: note = Seed: LVVVGAVGV (KRAS G12V)
VVVWGSVGS

SEQ ID NO: 63925 - protein, 9 aa, synthetic construct
  source 1..9: note = Seed: LVVVGAVGV (KRAS G12V)
VVVWGSVGT

SEQ ID NO: 63926 - protein, 9 aa, synthetic construct
  source 1..9: note = Seed: LVVVGAVGV (KRAS G12V)
VVVWGSVGV

SEQ ID NO: 63927 - protein, 9 aa, synthetic construct
  source 1..9: note = Seed: LVVVGAVGV (KRAS G12V)
VVVWGTVGI

SEQ ID NO: 63928 - protein, 9 aa, synthetic construct
  source 1..9: note = Seed: LVVVGAVGV (KRAS G12V)
VVVWGTVGL

SEQ ID NO: 63929 - protein, 9 aa, synthetic construct
  source 1..9: note = Seed: LVVVGAVGV (KRAS G12V)
VVVWGTVGV

SEQ ID NO: 63930 - protein, 9 aa, synthetic construct
  source 1..9: note = Seed: LVVVGAVGV (KRAS G12V)
VVVYGAVGA

SEQ ID NO: 63931 - protein, 9 aa, synthetic construct
  source 1..9: note = Seed: LVVVGAVGV (KRAS G12V)
VVVYGAVGF

SEQ ID NO: 63932 - protein, 9 aa, synthetic construct
  source 1..9: note = Seed: LVVVGAVGV (KRAS G12V)
VVVYGAVGH

SEQ ID NO: 63933 - protein, 9 aa, synthetic construct
  source 1..9: note = Seed: LVVVGAVGV (KRAS G12V)
VVVYGAVGI

SEQ ID NO: 63934 - protein, 9 aa, synthetic construct
  source 1..9: note = Seed: LVVVGAVGV (KRAS G12V)
VVVYGAVGL

SEQ ID NO: 63935 - protein, 9 aa, synthetic construct
  source 1..9: note = Seed: LVVVGAVGV (KRAS G12V)
VVVYGAVGM

SEQ ID NO: 63936 - protein, 9 aa, synthetic construct
  source 1..9: note = Seed: LVVVGAVGV (KRAS G12V)
VVVYGAVGS

SEQ ID NO: 63937 - protein, 9 aa, synthetic construct
  source 1..9: note = Seed: LVVVGAVGV (KRAS G12V)
VVVYGAVGT

SEQ ID NO: 63938 - protein, 9 aa, synthetic construct
  source 1..9: note = Seed: LVVVGAVGV (KRAS G12V)
VVVYGAVGV

SEQ ID NO: 63939 - protein, 9 aa, synthetic construct
  source 1..9: note = Seed: LVVVGAVGV (KRAS G12V)
VVVYGDVGA

SEQ ID NO: 63940 - protein, 9 aa, synthetic construct
  source 1..9: note = Seed: LVVVGAVGV (KRAS G12V)
VVVYGDVGI

SEQ ID NO: 63941 - protein, 9 aa, synthetic construct
  source 1..9: note = Seed: LVVVGAVGV (KRAS G12V)
VVVYGDVGL

SEQ ID NO: 63942 - protein, 9 aa, synthetic construct
  source 1..9: note = Seed: LVVVGAVGV (KRAS G12V)
VVVYGDVGV

SEQ ID NO: 63943 - protein, 9 aa, synthetic construct
  source 1..9: note = Seed: LVVVGAVGV (KRAS G12V)
VVVYGGVGA

SEQ ID NO: 63944 - protein, 9 aa, synthetic construct
  source 1..9: note = Seed: LVVVGAVGV (KRAS G12V)
VVVYGGVGF

SEQ ID NO: 63945 - protein, 9 aa, synthetic construct
  source 1..9: note = Seed: LVVVGAVGV (KRAS G12V)
VVVYGGVGH

SEQ ID NO: 63946 - protein, 9 aa, synthetic construct
  source 1..9: note = Seed: LVVVGAVGV (KRAS G12V)
VVVYGGVGI

SEQ ID NO: 63947 - protein, 9 aa, synthetic construct
  source 1..9: note = Seed: LVVVGAVGV (KRAS G12V)
VVVYGGVGL

SEQ ID NO: 63948 - protein, 9 aa, synthetic construct
  source 1..9: note = Seed: LVVVGAVGV (KRAS G12V)
VVVYGGVGM

SEQ ID NO: 63949 - protein, 9 aa, synthetic construct
  source 1..9: note = Seed: LVVVGAVGV (KRAS G12V)
VVVYGGVGS

SEQ ID NO: 63950 - protein, 9 aa, synthetic construct
  source 1..9: note = Seed: LVVVGAVGV (KRAS G12V)
VVVYGGVGT

SEQ ID NO: 63951 - protein, 9 aa, synthetic construct
  source 1..9: note = Seed: LVVVGAVGV (KRAS G12V)
VVVYGGVGV

SEQ ID NO: 63952 - protein, 9 aa, synthetic construct
  source 1..9: note = Seed: LVVVGAVGV (KRAS G12V)
VVVYGKVGR

SEQ ID NO: 63953 - protein, 9 aa, synthetic construct
  source 1..9: note = Seed: LVVVGAVGV (KRAS G12V)
VVVYGLVGR

SEQ ID NO: 63954 - protein, 9 aa, synthetic construct
  source 1..9: note = Seed: LVVVGAVGV (KRAS G12V)
VVVYGNVGA

SEQ ID NO: 63955 - protein, 9 aa, synthetic construct
  source 1..9: note = Seed: LVVVGAVGV (KRAS G12V)
VVVYGNVGF

SEQ ID NO: 63956 - protein, 9 aa, synthetic construct
  source 1..9: note = Seed: LVVVGAVGV (KRAS G12V)
VVVYGNVGG

SEQ ID NO: 63957 - protein, 9 aa, synthetic construct
  source 1..9: note = Seed: LVVVGAVGV (KRAS G12V)
VVVYGNVGH

SEQ ID NO: 63958 - protein, 9 aa, synthetic construct
  source 1..9: note = Seed: LVVVGAVGV (KRAS G12V)
VVVYGNVGI

SEQ ID NO: 63959 - protein, 9 aa, synthetic construct
  source 1..9: note = Seed: LVVVGAVGV (KRAS G12V)
VVVYGNVGL

SEQ ID NO: 63960 - protein, 9 aa, synthetic construct
  source 1..9: note = Seed: LVVVGAVGV (KRAS G12V)
VVVYGNVGM

SEQ ID NO: 63961 - protein, 9 aa, synthetic construct
  source 1..9: note = Seed: LVVVGAVGV (KRAS G12V)
VVVYGNVGN

SEQ ID NO: 63962 - protein, 9 aa, synthetic construct
  source 1..9: note = Seed: LVVVGAVGV (KRAS G12V)
VVVYGNVGQ

SEQ ID NO: 63963 - protein, 9 aa, synthetic construct
  source 1..9: note = Seed: LVVVGAVGV (KRAS G12V)
VVVYGNVGR

SEQ ID NO: 63964 - protein, 9 aa, synthetic construct
  source 1..9: note = Seed: LVVVGAVGV (KRAS G12V)
VVVYGNVGS

SEQ ID NO: 63965 - protein, 9 aa, synthetic construct
  source 1..9: note = Seed: LVVVGAVGV (KRAS G12V)
VVVYGNVGT

SEQ ID NO: 63966 - protein, 9 aa, synthetic construct
  source 1..9: note = Seed: LVVVGAVGV (KRAS G12V)
VVVYGNVGV

SEQ ID NO: 63967 - protein, 9 aa, synthetic construct
  source 1..9: note = Seed: LVVVGAVGV (KRAS G12V)
VVVYGNVGY

SEQ ID NO: 63968 - protein, 9 aa, synthetic construct
  source 1..9: note = Seed: LVVVGAVGV (KRAS G12V)
VVVYGPVGA

SEQ ID NO: 63969 - protein, 9 aa, synthetic construct
  source 1..9: note = Seed: LVVVGAVGV (KRAS G12V)
VVVYGPVGI

SEQ ID NO: 63970 - protein, 9 aa, synthetic construct
  source 1..9: note = Seed: LVVVGAVGV (KRAS G12V)
VVVYGPVGL

SEQ ID NO: 63971 - protein, 9 aa, synthetic construct
  source 1..9: note = Seed: LVVVGAVGV (KRAS G12V)
VVVYGPVGV

SEQ ID NO: 63972 - protein, 9 aa, synthetic construct
  source 1..9: note = Seed: LVVVGAVGV (KRAS G12V)
VVVYGRVGH

SEQ ID NO: 63973 - protein, 9 aa, synthetic construct
  source 1..9: note = Seed: LVVVGAVGV (KRAS G12V)
VVVYGRVGK

SEQ ID NO: 63974 - protein, 9 aa, synthetic construct
  source 1..9: note = Seed: LVVVGAVGV (KRAS G12V)
VVVYGRVGR

SEQ ID NO: 63975 - protein, 9 aa, synthetic construct
  source 1..9: note = Seed: LVVVGAVGV (KRAS G12V)
VVVYGSVGA

SEQ ID NO: 63976 - protein, 9 aa, synthetic construct
  source 1..9: note = Seed: LVVVGAVGV (KRAS G12V)
VVVYGSVGF

SEQ ID NO: 63977 - protein, 9 aa, synthetic construct
  source 1..9: note = Seed: LVVVGAVGV (KRAS G12V)
VVVYGSVGG

SEQ ID NO: 63978 - protein, 9 aa, synthetic construct
  source 1..9: note = Seed: LVVVGAVGV (KRAS G12V)
VVVYGSVGH

SEQ ID NO: 63979 - protein, 9 aa, synthetic construct
  source 1..9: note = Seed: LVVVGAVGV (KRAS G12V)
VVVYGSVGI

SEQ ID NO: 63980 - protein, 9 aa, synthetic construct
  source 1..9: note = Seed: LVVVGAVGV (KRAS G12V)
VVVYGSVGL

SEQ ID NO: 63981 - protein, 9 aa, synthetic construct
  source 1..9: note = Seed: LVVVGAVGV (KRAS G12V)
VVVYGSVGM

SEQ ID NO: 63982 - protein, 9 aa, synthetic construct
  source 1..9: note = Seed: LVVVGAVGV (KRAS G12V)
VVVYGSVGN

SEQ ID NO: 63983 - protein, 9 aa, synthetic construct
  source 1..9: note = Seed: LVVVGAVGV (KRAS G12V)
VVVYGSVGQ

SEQ ID NO: 63984 - protein, 9 aa, synthetic construct
  source 1..9: note = Seed: LVVVGAVGV (KRAS G12V)
VVVYGSVGR

SEQ ID NO: 63985 - protein, 9 aa, synthetic construct
  source 1..9: note = Seed: LVVVGAVGV (KRAS G12V)
VVVYGSVGS

SEQ ID NO: 63986 - protein, 9 aa, synthetic construct
  source 1..9: note = Seed: LVVVGAVGV (KRAS G12V)
VVVYGSVGT

SEQ ID NO: 63987 - protein, 9 aa, synthetic construct
  source 1..9: note = Seed: LVVVGAVGV (KRAS G12V)
VVVYGSVGV

SEQ ID NO: 63988 - protein, 9 aa, synthetic construct
  source 1..9: note = Seed: LVVVGAVGV (KRAS G12V)
VVVYGSVGY

SEQ ID NO: 63989 - protein, 9 aa, synthetic construct
  source 1..9: note = Seed: LVVVGAVGV (KRAS G12V)
VVVYGTVGA

SEQ ID NO: 63990 - protein, 9 aa, synthetic construct
  source 1..9: note = Seed: LVVVGAVGV (KRAS G12V)
VVVYGTVGI

SEQ ID NO: 63991 - protein, 9 aa, synthetic construct
  source 1..9: note = Seed: LVVVGAVGV (KRAS G12V)
VVVYGTVGL

SEQ ID NO: 63992 - protein, 9 aa, synthetic construct
  source 1..9: note = Seed: LVVVGAVGV (KRAS G12V)
VVVYGTVGM

SEQ ID NO: 63993 - protein, 9 aa, synthetic construct
  source 1..9: note = Seed: LVVVGAVGV (KRAS G12V)
VVVYGTVGS

SEQ ID NO: 63994 - protein, 9 aa, synthetic construct
  source 1..9: note = Seed: LVVVGAVGV (KRAS G12V)
VVVYGTVGT

SEQ ID NO: 63995 - protein, 9 aa, synthetic construct
  source 1..9: note = Seed: LVVVGAVGV (KRAS G12V)
VVVYGTVGV

SEQ ID NO: 63996 - protein, 9 aa, synthetic construct
  source 1..9: note = Seed: LVVVGAVGV (KRAS G12V)
WVVAGAVGA

SEQ ID NO: 63997 - protein, 9 aa, synthetic construct
  source 1..9: note = Seed: LVVVGAVGV (KRAS G12V)
WVVAGAVGC

SEQ ID NO: 63998 - protein, 9 aa, synthetic construct
  source 1..9: note = Seed: LVVVGAVGV (KRAS G12V)
WVVAGAVGD

SEQ ID NO: 63999 - protein, 9 aa, synthetic construct
  source 1..9: note = Seed: LVVVGAVGV (KRAS G12V)
WVVAGAVGE

SEQ ID NO: 64000 - protein, 9 aa, synthetic construct
  source 1..9: note = Seed: LVVVGAVGV (KRAS G12V)
WVVAGAVGF

SEQ ID NO: 64001 - protein, 9 aa, synthetic construct
  source 1..9: note = Seed: LVVVGAVGV (KRAS G12V)
WVVAGAVGG

SEQ ID NO: 64002 - protein, 9 aa, synthetic construct
  source 1..9: note = Seed: LVVVGAVGV (KRAS G12V)
WVVAGAVGH

SEQ ID NO: 64003 - protein, 9 aa, synthetic construct
  source 1..9: note = Seed: LVVVGAVGV (KRAS G12V)
WVVAGAVGI

SEQ ID NO: 64004 - protein, 9 aa, synthetic construct
  source 1..9: note = Seed: LVVVGAVGV (KRAS G12V)
WVVAGAVGK

SEQ ID NO: 64005 - protein, 9 aa, synthetic construct
  source 1..9: note = Seed: LVVVGAVGV (KRAS G12V)
WVVAGAVGL

SEQ ID NO: 64006 - protein, 9 aa, synthetic construct
  source 1..9: note = Seed: LVVVGAVGV (KRAS G12V)
WVVAGAVGM

SEQ ID NO: 64007 - protein, 9 aa, synthetic construct
  source 1..9: note = Seed: LVVVGAVGV (KRAS G12V)
WVVAGAVGN

SEQ ID NO: 64008 - protein, 9 aa, synthetic construct
  source 1..9: note = Seed: LVVVGAVGV (KRAS G12V)
WVVAGAVGP

SEQ ID NO: 64009 - protein, 9 aa, synthetic construct
  source 1..9: note = Seed: LVVVGAVGV (KRAS G12V)
WVVAGAVGQ

SEQ ID NO: 64010 - protein, 9 aa, synthetic construct
  source 1..9: note = Seed: LVVVGAVGV (KRAS G12V)
WVVAGAVGR

SEQ ID NO: 64011 - protein, 9 aa, synthetic construct
  source 1..9: note = Seed: LVVVGAVGV (KRAS G12V)
WVVAGAVGS

SEQ ID NO: 64012 - protein, 9 aa, synthetic construct
  source 1..9: note = Seed: LVVVGAVGV (KRAS G12V)
WVVAGAVGT

SEQ ID NO: 64013 - protein, 9 aa, synthetic construct
  source 1..9: note = Seed: LVVVGAVGV (KRAS G12V)
WVVAGAVGV

SEQ ID NO: 64014 - protein, 9 aa, synthetic construct
  source 1..9: note = Seed: LVVVGAVGV (KRAS G12V)
WVVAGAVGW

SEQ ID NO: 64015 - protein, 9 aa, synthetic construct
  source 1..9: note = Seed: LVVVGAVGV (KRAS G12V)
WVVAGAVGY

SEQ ID NO: 64016 - protein, 9 aa, synthetic construct
  source 1..9: note = Seed: LVVVGAVGV (KRAS G12V)
WVVAGCVGA

SEQ ID NO: 64017 - protein, 9 aa, synthetic construct
  source 1..9: note = Seed: LVVVGAVGV (KRAS G12V)
WVVAGCVGC

SEQ ID NO: 64018 - protein, 9 aa, synthetic construct
  source 1..9: note = Seed: LVVVGAVGV (KRAS G12V)
WVVAGCVGD

SEQ ID NO: 64019 - protein, 9 aa, synthetic construct
  source 1..9: note = Seed: LVVVGAVGV (KRAS G12V)
WVVAGCVGE

SEQ ID NO: 64020 - protein, 9 aa, synthetic construct
  source 1..9: note = Seed: LVVVGAVGV (KRAS G12V)
WVVAGCVGF

SEQ ID NO: 64021 - protein, 9 aa, synthetic construct
  source 1..9: note = Seed: LVVVGAVGV (KRAS G12V)
WVVAGCVGG

SEQ ID NO: 64022 - protein, 9 aa, synthetic construct
  source 1..9: note = Seed: LVVVGAVGV (KRAS G12V)
WVVAGCVGH

SEQ ID NO: 64023 - protein, 9 aa, synthetic construct
  source 1..9: note = Seed: LVVVGAVGV (KRAS G12V)
WVVAGCVGI

SEQ ID NO: 64024 - protein, 9 aa, synthetic construct
  source 1..9: note = Seed: LVVVGAVGV (KRAS G12V)
WVVAGCVGK

SEQ ID NO: 64025 - protein, 9 aa, synthetic construct
  source 1..9: note = Seed: LVVVGAVGV (KRAS G12V)
WVVAGCVGL

SEQ ID NO: 64026 - protein, 9 aa, synthetic construct
  source 1..9: note = Seed: LVVVGAVGV (KRAS G12V)
WVVAGCVGM

SEQ ID NO: 64027 - protein, 9 aa, synthetic construct
  source 1..9: note = Seed: LVVVGAVGV (KRAS G12V)
WVVAGCVGN

SEQ ID NO: 64028 - protein, 9 aa, synthetic construct
  source 1..9: note = Seed: LVVVGAVGV (KRAS G12V)
WVVAGCVGQ

SEQ ID NO: 64029 - protein, 9 aa, synthetic construct
  source 1..9: note = Seed: LVVVGAVGV (KRAS G12V)
WVVAGCVGR

SEQ ID NO: 64030 - protein, 9 aa, synthetic construct
  source 1..9: note = Seed: LVVVGAVGV (KRAS G12V)
WVVAGCVGS

SEQ ID NO: 64031 - protein, 9 aa, synthetic construct
  source 1..9: note = Seed: LVVVGAVGV (KRAS G12V)
WVVAGCVGT

SEQ ID NO: 64032 - protein, 9 aa, synthetic construct
  source 1..9: note = Seed: LVVVGAVGV (KRAS G12V)
WVVAGCVGV

SEQ ID NO: 64033 - protein, 9 aa, synthetic construct
  source 1..9: note = Seed: LVVVGAVGV (KRAS G12V)
WVVAGCVGY

SEQ ID NO: 64034 - protein, 9 aa, synthetic construct
  source 1..9: note = Seed: LVVVGAVGV (KRAS G12V)
WVVAGDVGA

SEQ ID NO: 64035 - protein, 9 aa, synthetic construct
  source 1..9: note = Seed: LVVVGAVGV (KRAS G12V)
WVVAGDVGC

SEQ ID NO: 64036 - protein, 9 aa, synthetic construct
  source 1..9: note = Seed: LVVVGAVGV (KRAS G12V)
WVVAGDVGF

SEQ ID NO: 64037 - protein, 9 aa, synthetic construct
  source 1..9: note = Seed: LVVVGAVGV (KRAS G12V)
WVVAGDVGG

SEQ ID NO: 64038 - protein, 9 aa, synthetic construct
  source 1..9: note = Seed: LVVVGAVGV (KRAS G12V)
WVVAGDVGI

SEQ ID NO: 64039 - protein, 9 aa, synthetic construct
  source 1..9: note = Seed: LVVVGAVGV (KRAS G12V)
WVVAGDVGL

SEQ ID NO: 64040 - protein, 9 aa, synthetic construct
  source 1..9: note = Seed: LVVVGAVGV (KRAS G12V)
WVVAGDVGM

SEQ ID NO: 64041 - protein, 9 aa, synthetic construct
  source 1..9: note = Seed: LVVVGAVGV (KRAS G12V)
WVVAGDVGN

SEQ ID NO: 64042 - protein, 9 aa, synthetic construct
  source 1..9: note = Seed: LVVVGAVGV (KRAS G12V)
WVVAGDVGQ

SEQ ID NO: 64043 - protein, 9 aa, synthetic construct
  source 1..9: note = Seed: LVVVGAVGV (KRAS G12V)
WVVAGDVGS

SEQ ID NO: 64044 - protein, 9 aa, synthetic construct
  source 1..9: note = Seed: LVVVGAVGV (KRAS G12V)
WVVAGDVGT

SEQ ID NO: 64045 - protein, 9 aa, synthetic construct
  source 1..9: note = Seed: LVVVGAVGV (KRAS G12V)
WVVAGDVGV

SEQ ID NO: 64046 - protein, 9 aa, synthetic construct
  source 1..9: note = Seed: LVVVGAVGV (KRAS G12V)
WVVAGDVGY

SEQ ID NO: 64047 - protein, 9 aa, synthetic construct
  source 1..9: note = Seed: LVVVGAVGV (KRAS G12V)
WVVAGEVGA

SEQ ID NO: 64048 - protein, 9 aa, synthetic construct
  source 1..9: note = Seed: LVVVGAVGV (KRAS G12V)
WVVAGEVGG

SEQ ID NO: 64049 - protein, 9 aa, synthetic construct
  source 1..9: note = Seed: LVVVGAVGV (KRAS G12V)
WVVAGEVGI

SEQ ID NO: 64050 - protein, 9 aa, synthetic construct
  source 1..9: note = Seed: LVVVGAVGV (KRAS G12V)
WVVAGEVGL

SEQ ID NO: 64051 - protein, 9 aa, synthetic construct
  source 1..9: note = Seed: LVVVGAVGV (KRAS G12V)
WVVAGEVGM

SEQ ID NO: 64052 - protein, 9 aa, synthetic construct
  source 1..9: note = Seed: LVVVGAVGV (KRAS G12V)
WVVAGEVGN

SEQ ID NO: 64053 - protein, 9 aa, synthetic construct
  source 1..9: note = Seed: LVVVGAVGV (KRAS G12V)
WVVAGEVGS

SEQ ID NO: 64054 - protein, 9 aa, synthetic construct
  source 1..9: note = Seed: LVVVGAVGV (KRAS G12V)
WVVAGEVGT

SEQ ID NO: 64055 - protein, 9 aa, synthetic construct
  source 1..9: note = Seed: LVVVGAVGV (KRAS G12V)
WVVAGEVGV

SEQ ID NO: 64056 - protein, 9 aa, synthetic construct
  source 1..9: note = Seed: LVVVGAVGV (KRAS G12V)
WVVAGGVGA

SEQ ID NO: 64057 - protein, 9 aa, synthetic construct
  source 1..9: note = Seed: LVVVGAVGV (KRAS G12V)
WVVAGGVGC

SEQ ID NO: 64058 - protein, 9 aa, synthetic construct
  source 1..9: note = Seed: LVVVGAVGV (KRAS G12V)
WVVAGGVGD

SEQ ID NO: 64059 - protein, 9 aa, synthetic construct
  source 1..9: note = Seed: LVVVGAVGV (KRAS G12V)
WVVAGGVGE

SEQ ID NO: 64060 - protein, 9 aa, synthetic construct
  source 1..9: note = Seed: LVVVGAVGV (KRAS G12V)
WVVAGGVGF

SEQ ID NO: 64061 - protein, 9 aa, synthetic construct
  source 1..9: note = Seed: LVVVGAVGV (KRAS G12V)
WVVAGGVGG

SEQ ID NO: 64062 - protein, 9 aa, synthetic construct
  source 1..9: note = Seed: LVVVGAVGV (KRAS G12V)
WVVAGGVGH

SEQ ID NO: 64063 - protein, 9 aa, synthetic construct
  source 1..9: note = Seed: LVVVGAVGV (KRAS G12V)
WVVAGGVGI

SEQ ID NO: 64064 - protein, 9 aa, synthetic construct
  source 1..9: note = Seed: LVVVGAVGV (KRAS G12V)
WVVAGGVGK

SEQ ID NO: 64065 - protein, 9 aa, synthetic construct
  source 1..9: note = Seed: LVVVGAVGV (KRAS G12V)
WVVAGGVGL

SEQ ID NO: 64066 - protein, 9 aa, synthetic construct
  source 1..9: note = Seed: LVVVGAVGV (KRAS G12V)
WVVAGGVGM

SEQ ID NO: 64067 - protein, 9 aa, synthetic construct
  source 1..9: note = Seed: LVVVGAVGV (KRAS G12V)
WVVAGGVGN

SEQ ID NO: 64068 - protein, 9 aa, synthetic construct
  source 1..9: note = Seed: LVVVGAVGV (KRAS G12V)
WVVAGGVGP

SEQ ID NO: 64069 - protein, 9 aa, synthetic construct
  source 1..9: note = Seed: LVVVGAVGV (KRAS G12V)
WVVAGGVGQ

SEQ ID NO: 64070 - protein, 9 aa, synthetic construct
  source 1..9: note = Seed: LVVVGAVGV (KRAS G12V)
WVVAGGVGR

SEQ ID NO: 64071 - protein, 9 aa, synthetic construct
  source 1..9: note = Seed: LVVVGAVGV (KRAS G12V)
WVVAGGVGS

SEQ ID NO: 64072 - protein, 9 aa, synthetic construct
  source 1..9: note = Seed: LVVVGAVGV (KRAS G12V)
WVVAGGVGT

SEQ ID NO: 64073 - protein, 9 aa, synthetic construct
  source 1..9: note = Seed: LVVVGAVGV (KRAS G12V)
WVVAGGVGV

SEQ ID NO: 64074 - protein, 9 aa, synthetic construct
  source 1..9: note = Seed: LVVVGAVGV (KRAS G12V)
WVVAGGVGW

SEQ ID NO: 64075 - protein, 9 aa, synthetic construct
  source 1..9: note = Seed: LVVVGAVGV (KRAS G12V)
WVVAGGVGY

SEQ ID NO: 64076 - protein, 9 aa, synthetic construct
  source 1..9: note = Seed: LVVVGAVGV (KRAS G12V)
WVVAGHVGA

SEQ ID NO: 64077 - protein, 9 aa, synthetic construct
  source 1..9: note = Seed: LVVVGAVGV (KRAS G12V)
WVVAGHVGC

SEQ ID NO: 64078 - protein, 9 aa, synthetic construct
  source 1..9: note = Seed: LVVVGAVGV (KRAS G12V)
WVVAGHVGF

SEQ ID NO: 64079 - protein, 9 aa, synthetic construct
  source 1..9: note = Seed: LVVVGAVGV (KRAS G12V)
WVVAGHVGG

SEQ ID NO: 64080 - protein, 9 aa, synthetic construct
  source 1..9: note = Seed: LVVVGAVGV (KRAS G12V)
WVVAGHVGI

SEQ ID NO: 64081 - protein, 9 aa, synthetic construct
  source 1..9: note = Seed: LVVVGAVGV (KRAS G12V)
WVVAGHVGL

SEQ ID NO: 64082 - protein, 9 aa, synthetic construct
  source 1..9: note = Seed: LVVVGAVGV (KRAS G12V)
WVVAGHVGM

SEQ ID NO: 64083 - protein, 9 aa, synthetic construct
  source 1..9: note = Seed: LVVVGAVGV (KRAS G12V)
WVVAGHVGN

SEQ ID NO: 64084 - protein, 9 aa, synthetic construct
  source 1..9: note = Seed: LVVVGAVGV (KRAS G12V)
WVVAGHVGQ

SEQ ID NO: 64085 - protein, 9 aa, synthetic construct
  source 1..9: note = Seed: LVVVGAVGV (KRAS G12V)
WVVAGHVGR

SEQ ID NO: 64086 - protein, 9 aa, synthetic construct
  source 1..9: note = Seed: LVVVGAVGV (KRAS G12V)
WVVAGHVGS

SEQ ID NO: 64087 - protein, 9 aa, synthetic construct
  source 1..9: note = Seed: LVVVGAVGV (KRAS G12V)
WVVAGHVGT

SEQ ID NO: 64088 - protein, 9 aa, synthetic construct
  source 1..9: note = Seed: LVVVGAVGV (KRAS G12V)
WVVAGHVGV

SEQ ID NO: 64089 - protein, 9 aa, synthetic construct
  source 1..9: note = Seed: LVVVGAVGV (KRAS G12V)
WVVAGHVGY

SEQ ID NO: 64090 - protein, 9 aa, synthetic construct
  source 1..9: note = Seed: LVVVGAVGV (KRAS G12V)
WVVAGIVGA

SEQ ID NO: 64091 - protein, 9 aa, synthetic construct
  source 1..9: note = Seed: LVVVGAVGV (KRAS G12V)
WVVAGIVGC

SEQ ID NO: 64092 - protein, 9 aa, synthetic construct
  source 1..9: note = Seed: LVVVGAVGV (KRAS G12V)
WVVAGIVGD

SEQ ID NO: 64093 - protein, 9 aa, synthetic construct
  source 1..9: note = Seed: LVVVGAVGV (KRAS G12V)
WVVAGIVGE

SEQ ID NO: 64094 - protein, 9 aa, synthetic construct
  source 1..9: note = Seed: LVVVGAVGV (KRAS G12V)
WVVAGIVGF

SEQ ID NO: 64095 - protein, 9 aa, synthetic construct
  source 1..9: note = Seed: LVVVGAVGV (KRAS G12V)
WVVAGIVGG

SEQ ID NO: 64096 - protein, 9 aa, synthetic construct
  source 1..9: note = Seed: LVVVGAVGV (KRAS G12V)
WVVAGIVGH

SEQ ID NO: 64097 - protein, 9 aa, synthetic construct
  source 1..9: note = Seed: LVVVGAVGV (KRAS G12V)
WVVAGIVGI

SEQ ID NO: 64098 - protein, 9 aa, synthetic construct
  source 1..9: note = Seed: LVVVGAVGV (KRAS G12V)
WVVAGIVGK

SEQ ID NO: 64099 - protein, 9 aa, synthetic construct
  source 1..9: note = Seed: LVVVGAVGV (KRAS G12V)
WVVAGIVGL

SEQ ID NO: 64100 - protein, 9 aa, synthetic construct
  source 1..9: note = Seed: LVVVGAVGV (KRAS G12V)
WVVAGIVGM

SEQ ID NO: 64101 - protein, 9 aa, synthetic construct
  source 1..9: note = Seed: LVVVGAVGV (KRAS G12V)
WVVAGIVGN

SEQ ID NO: 64102 - protein, 9 aa, synthetic construct
  source 1..9: note = Seed: LVVVGAVGV (KRAS G12V)
WVVAGIVGP

SEQ ID NO: 64103 - protein, 9 aa, synthetic construct
  source 1..9: note = Seed: LVVVGAVGV (KRAS G12V)
WVVAGIVGQ

SEQ ID NO: 64104 - protein, 9 aa, synthetic construct
  source 1..9: note = Seed: LVVVGAVGV (KRAS G12V)
WVVAGIVGR

SEQ ID NO: 64105 - protein, 9 aa, synthetic construct
  source 1..9: note = Seed: LVVVGAVGV (KRAS G12V)
WVVAGIVGS

SEQ ID NO: 64106 - protein, 9 aa, synthetic construct
  source 1..9: note = Seed: LVVVGAVGV (KRAS G12V)
WVVAGIVGT

SEQ ID NO: 64107 - protein, 9 aa, synthetic construct
  source 1..9: note = Seed: LVVVGAVGV (KRAS G12V)
WVVAGIVGV

SEQ ID NO: 64108 - protein, 9 aa, synthetic construct
  source 1..9: note = Seed: LVVVGAVGV (KRAS G12V)
WVVAGIVGY

SEQ ID NO: 64109 - protein, 9 aa, synthetic construct
  source 1..9: note = Seed: LVVVGAVGV (KRAS G12V)
WVVAGKVGA

SEQ ID NO: 64110 - protein, 9 aa, synthetic construct
  source 1..9: note = Seed: LVVVGAVGV (KRAS G12V)
WVVAGKVGG

SEQ ID NO: 64111 - protein, 9 aa, synthetic construct
  source 1..9: note = Seed: LVVVGAVGV (KRAS G12V)
WVVAGKVGH

SEQ ID NO: 64112 - protein, 9 aa, synthetic construct
  source 1..9: note = Seed: LVVVGAVGV (KRAS G12V)
WVVAGKVGI

SEQ ID NO: 64113 - protein, 9 aa, synthetic construct
  source 1..9: note = Seed: LVVVGAVGV (KRAS G12V)
WVVAGKVGL

SEQ ID NO: 64114 - protein, 9 aa, synthetic construct
  source 1..9: note = Seed: LVVVGAVGV (KRAS G12V)
WVVAGKVGM

SEQ ID NO: 64115 - protein, 9 aa, synthetic construct
  source 1..9: note = Seed: LVVVGAVGV (KRAS G12V)
WVVAGKVGN

SEQ ID NO: 64116 - protein, 9 aa, synthetic construct
  source 1..9: note = Seed: LVVVGAVGV (KRAS G12V)
WVVAGKVGQ

SEQ ID NO: 64117 - protein, 9 aa, synthetic construct
  source 1..9: note = Seed: LVVVGAVGV (KRAS G12V)
WVVAGKVGS

SEQ ID NO: 64118 - protein, 9 aa, synthetic construct
  source 1..9: note = Seed: LVVVGAVGV (KRAS G12V)
WVVAGKVGT

SEQ ID NO: 64119 - protein, 9 aa, synthetic construct
  source 1..9: note = Seed: LVVVGAVGV (KRAS G12V)
WVVAGKVGV

SEQ ID NO: 64120 - protein, 9 aa, synthetic construct
  source 1..9: note = Seed: LVVVGAVGV (KRAS G12V)
WVVAGLVGA

SEQ ID NO: 64121 - protein, 9 aa, synthetic construct
  source 1..9: note = Seed: LVVVGAVGV (KRAS G12V)
WVVAGLVGD

SEQ ID NO: 64122 - protein, 9 aa, synthetic construct
  source 1..9: note = Seed: LVVVGAVGV (KRAS G12V)
WVVAGLVGE

SEQ ID NO: 64123 - protein, 9 aa, synthetic construct
  source 1..9: note = Seed: LVVVGAVGV (KRAS G12V)
WVVAGLVGG

SEQ ID NO: 64124 - protein, 9 aa, synthetic construct
  source 1..9: note = Seed: LVVVGAVGV (KRAS G12V)
WVVAGLVGH

SEQ ID NO: 64125 - protein, 9 aa, synthetic construct
  source 1..9: note = Seed: LVVVGAVGV (KRAS G12V)
WVVAGLVGI

SEQ ID NO: 64126 - protein, 9 aa, synthetic construct
  source 1..9: note = Seed: LVVVGAVGV (KRAS G12V)
WVVAGLVGL

SEQ ID NO: 64127 - protein, 9 aa, synthetic construct
  source 1..9: note = Seed: LVVVGAVGV (KRAS G12V)
WVVAGLVGM

SEQ ID NO: 64128 - protein, 9 aa, synthetic construct
  source 1..9: note = Seed: LVVVGAVGV (KRAS G12V)
WVVAGLVGN

SEQ ID NO: 64129 - protein, 9 aa, synthetic construct
  source 1..9: note = Seed: LVVVGAVGV (KRAS G12V)
WVVAGLVGQ

SEQ ID NO: 64130 - protein, 9 aa, synthetic construct
  source 1..9: note = Seed: LVVVGAVGV (KRAS G12V)
WVVAGLVGS

SEQ ID NO: 64131 - protein, 9 aa, synthetic construct
  source 1..9: note = Seed: LVVVGAVGV (KRAS G12V)
WVVAGLVGT

SEQ ID NO: 64132 - protein, 9 aa, synthetic construct
  source 1..9: note = Seed: LVVVGAVGV (KRAS G12V)
WVVAGLVGV

SEQ ID NO: 64133 - protein, 9 aa, synthetic construct
  source 1..9: note = Seed: LVVVGAVGV (KRAS G12V)
WVVAGMVGA

SEQ ID NO: 64134 - protein, 9 aa, synthetic construct
  source 1..9: note = Seed: LVVVGAVGV (KRAS G12V)
WVVAGMVGC

SEQ ID NO: 64135 - protein, 9 aa, synthetic construct
  source 1..9: note = Seed: LVVVGAVGV (KRAS G12V)
WVVAGMVGD

SEQ ID NO: 64136 - protein, 9 aa, synthetic construct
  source 1..9: note = Seed: LVVVGAVGV (KRAS G12V)
WVVAGMVGE

SEQ ID NO: 64137 - protein, 9 aa, synthetic construct
  source 1..9: note = Seed: LVVVGAVGV (KRAS G12V)
WVVAGMVGG

SEQ ID NO: 64138 - protein, 9 aa, synthetic construct
  source 1..9: note = Seed: LVVVGAVGV (KRAS G12V)
WVVAGMVGH

SEQ ID NO: 64139 - protein, 9 aa, synthetic construct
  source 1..9: note = Seed: LVVVGAVGV (KRAS G12V)
WVVAGMVGI

SEQ ID NO: 64140 - protein, 9 aa, synthetic construct
  source 1..9: note = Seed: LVVVGAVGV (KRAS G12V)
WVVAGMVGL

SEQ ID NO: 64141 - protein, 9 aa, synthetic construct
  source 1..9: note = Seed: LVVVGAVGV (KRAS G12V)
WVVAGMVGM

SEQ ID NO: 64142 - protein, 9 aa, synthetic construct
  source 1..9: note = Seed: LVVVGAVGV (KRAS G12V)
WVVAGMVGN

SEQ ID NO: 64143 - protein, 9 aa, synthetic construct
  source 1..9: note = Seed: LVVVGAVGV (KRAS G12V)
WVVAGMVGQ

SEQ ID NO: 64144 - protein, 9 aa, synthetic construct
  source 1..9: note = Seed: LVVVGAVGV (KRAS G12V)
WVVAGMVGS

SEQ ID NO: 64145 - protein, 9 aa, synthetic construct
  source 1..9: note = Seed: LVVVGAVGV (KRAS G12V)
WVVAGMVGT

SEQ ID NO: 64146 - protein, 9 aa, synthetic construct
  source 1..9: note = Seed: LVVVGAVGV (KRAS G12V)
WVVAGMVGV

SEQ ID NO: 64147 - protein, 9 aa, synthetic construct
  source 1..9: note = Seed: LVVVGAVGV (KRAS G12V)
WVVAGNVGA

SEQ ID NO: 64148 - protein, 9 aa, synthetic construct
  source 1..9: note = Seed: LVVVGAVGV (KRAS G12V)
WVVAGNVGC

SEQ ID NO: 64149 - protein, 9 aa, synthetic construct
  source 1..9: note = Seed: LVVVGAVGV (KRAS G12V)
WVVAGNVGD

SEQ ID NO: 64150 - protein, 9 aa, synthetic construct
  source 1..9: note = Seed: LVVVGAVGV (KRAS G12V)
WVVAGNVGE

SEQ ID NO: 64151 - protein, 9 aa, synthetic construct
  source 1..9: note = Seed: LVVVGAVGV (KRAS G12V)
WVVAGNVGF

SEQ ID NO: 64152 - protein, 9 aa, synthetic construct
  source 1..9: note = Seed: LVVVGAVGV (KRAS G12V)
WVVAGNVGG

SEQ ID NO: 64153 - protein, 9 aa, synthetic construct
  source 1..9: note = Seed: LVVVGAVGV (KRAS G12V)
WVVAGNVGH

SEQ ID NO: 64154 - protein, 9 aa, synthetic construct
  source 1..9: note = Seed: LVVVGAVGV (KRAS G12V)
WVVAGNVGI

SEQ ID NO: 64155 - protein, 9 aa, synthetic construct
  source 1..9: note = Seed: LVVVGAVGV (KRAS G12V)
WVVAGNVGK

SEQ ID NO: 64156 - protein, 9 aa, synthetic construct
  source 1..9: note = Seed: LVVVGAVGV (KRAS G12V)
WVVAGNVGL

SEQ ID NO: 64157 - protein, 9 aa, synthetic construct
  source 1..9: note = Seed: LVVVGAVGV (KRAS G12V)
WVVAGNVGM

SEQ ID NO: 64158 - protein, 9 aa, synthetic construct
  source 1..9: note = Seed: LVVVGAVGV (KRAS G12V)
WVVAGNVGN

SEQ ID NO: 64159 - protein, 9 aa, synthetic construct
  source 1..9: note = Seed: LVVVGAVGV (KRAS G12V)
WVVAGNVGQ

SEQ ID NO: 64160 - protein, 9 aa, synthetic construct
  source 1..9: note = Seed: LVVVGAVGV (KRAS G12V)
WVVAGNVGR

SEQ ID NO: 64161 - protein, 9 aa, synthetic construct
  source 1..9: note = Seed: LVVVGAVGV (KRAS G12V)
WVVAGNVGS

SEQ ID NO: 64162 - protein, 9 aa, synthetic construct
  source 1..9: note = Seed: LVVVGAVGV (KRAS G12V)
WVVAGNVGT

SEQ ID NO: 64163 - protein, 9 aa, synthetic construct
  source 1..9: note = Seed: LVVVGAVGV (KRAS G12V)
WVVAGNVGV

SEQ ID NO: 64164 - protein, 9 aa, synthetic construct
  source 1..9: note = Seed: LVVVGAVGV (KRAS G12V)
WVVAGNVGY

SEQ ID NO: 64165 - protein, 9 aa, synthetic construct
  source 1..9: note = Seed: LVVVGAVGV (KRAS G12V)
WVVAGPVGA

SEQ ID NO: 64166 - protein, 9 aa, synthetic construct
  source 1..9: note = Seed: LVVVGAVGV (KRAS G12V)
WVVAGPVGC

SEQ ID NO: 64167 - protein, 9 aa, synthetic construct
  source 1..9: note = Seed: LVVVGAVGV (KRAS G12V)
WVVAGPVGD

SEQ ID NO: 64168 - protein, 9 aa, synthetic construct
  source 1..9: note = Seed: LVVVGAVGV (KRAS G12V)
WVVAGPVGE

SEQ ID NO: 64169 - protein, 9 aa, synthetic construct
  source 1..9: note = Seed: LVVVGAVGV (KRAS G12V)
WVVAGPVGF

SEQ ID NO: 64170 - protein, 9 aa, synthetic construct
  source 1..9: note = Seed: LVVVGAVGV (KRAS G12V)
WVVAGPVGG

SEQ ID NO: 64171 - protein, 9 aa, synthetic construct
  source 1..9: note = Seed: LVVVGAVGV (KRAS G12V)
WVVAGPVGH

SEQ ID NO: 64172 - protein, 9 aa, synthetic construct
  source 1..9: note = Seed: LVVVGAVGV (KRAS G12V)
WVVAGPVGI

SEQ ID NO: 64173 - protein, 9 aa, synthetic construct
  source 1..9: note = Seed: LVVVGAVGV (KRAS G12V)
WVVAGPVGK

SEQ ID NO: 64174 - protein, 9 aa, synthetic construct
  source 1..9: note = Seed: LVVVGAVGV (KRAS G12V)
WVVAGPVGL

SEQ ID NO: 64175 - protein, 9 aa, synthetic construct
  source 1..9: note = Seed: LVVVGAVGV (KRAS G12V)
WVVAGPVGM

SEQ ID NO: 64176 - protein, 9 aa, synthetic construct
  source 1..9: note = Seed: LVVVGAVGV (KRAS G12V)
WVVAGPVGN

SEQ ID NO: 64177 - protein, 9 aa, synthetic construct
  source 1..9: note = Seed: LVVVGAVGV (KRAS G12V)
WVVAGPVGP

SEQ ID NO: 64178 - protein, 9 aa, synthetic construct
  source 1..9: note = Seed: LVVVGAVGV (KRAS G12V)
WVVAGPVGQ

SEQ ID NO: 64179 - protein, 9 aa, synthetic construct
  source 1..9: note = Seed: LVVVGAVGV (KRAS G12V)
WVVAGPVGR

SEQ ID NO: 64180 - protein, 9 aa, synthetic construct
  source 1..9: note = Seed: LVVVGAVGV (KRAS G12V)
WVVAGPVGS

SEQ ID NO: 64181 - protein, 9 aa, synthetic construct
  source 1..9: note = Seed: LVVVGAVGV (KRAS G12V)
WVVAGPVGT

SEQ ID NO: 64182 - protein, 9 aa, synthetic construct
  source 1..9: note = Seed: LVVVGAVGV (KRAS G12V)
WVVAGPVGV

SEQ ID NO: 64183 - protein, 9 aa, synthetic construct
  source 1..9: note = Seed: LVVVGAVGV (KRAS G12V)
WVVAGPVGW

SEQ ID NO: 64184 - protein, 9 aa, synthetic construct
  source 1..9: note = Seed: LVVVGAVGV (KRAS G12V)
WVVAGPVGY

SEQ ID NO: 64185 - protein, 9 aa, synthetic construct
  source 1..9: note = Seed: LVVVGAVGV (KRAS G12V)
WVVAGQVGA

SEQ ID NO: 64186 - protein, 9 aa, synthetic construct
  source 1..9: note = Seed: LVVVGAVGV (KRAS G12V)
WVVAGQVGC

SEQ ID NO: 64187 - protein, 9 aa, synthetic construct
  source 1..9: note = Seed: LVVVGAVGV (KRAS G12V)
WVVAGQVGF

SEQ ID NO: 64188 - protein, 9 aa, synthetic construct
  source 1..9: note = Seed: LVVVGAVGV (KRAS G12V)
WVVAGQVGG

SEQ ID NO: 64189 - protein, 9 aa, synthetic construct
  source 1..9: note = Seed: LVVVGAVGV (KRAS G12V)
WVVAGQVGI

SEQ ID NO: 64190 - protein, 9 aa, synthetic construct
  source 1..9: note = Seed: LVVVGAVGV (KRAS G12V)
WVVAGQVGL

SEQ ID NO: 64191 - protein, 9 aa, synthetic construct
  source 1..9: note = Seed: LVVVGAVGV (KRAS G12V)
WVVAGQVGM

SEQ ID NO: 64192 - protein, 9 aa, synthetic construct
  source 1..9: note = Seed: LVVVGAVGV (KRAS G12V)
WVVAGQVGN

SEQ ID NO: 64193 - protein, 9 aa, synthetic construct
  source 1..9: note = Seed: LVVVGAVGV (KRAS G12V)
WVVAGQVGS

SEQ ID NO: 64194 - protein, 9 aa, synthetic construct
  source 1..9: note = Seed: LVVVGAVGV (KRAS G12V)
WVVAGQVGT

SEQ ID NO: 64195 - protein, 9 aa, synthetic construct
  source 1..9: note = Seed: LVVVGAVGV (KRAS G12V)
WVVAGQVGV

SEQ ID NO: 64196 - protein, 9 aa, synthetic construct
  source 1..9: note = Seed: LVVVGAVGV (KRAS G12V)
WVVAGRVGA

SEQ ID NO: 64197 - protein, 9 aa, synthetic construct
  source 1..9: note = Seed: LVVVGAVGV (KRAS G12V)
WVVAGRVGG

SEQ ID NO: 64198 - protein, 9 aa, synthetic construct
  source 1..9: note = Seed: LVVVGAVGV (KRAS G12V)
WVVAGRVGH

SEQ ID NO: 64199 - protein, 9 aa, synthetic construct
  source 1..9: note = Seed: LVVVGAVGV (KRAS G12V)
WVVAGRVGI

SEQ ID NO: 64200 - protein, 9 aa, synthetic construct
  source 1..9: note = Seed: LVVVGAVGV (KRAS G12V)
WVVAGRVGK

SEQ ID NO: 64201 - protein, 9 aa, synthetic construct
  source 1..9: note = Seed: LVVVGAVGV (KRAS G12V)
WVVAGRVGM

SEQ ID NO: 64202 - protein, 9 aa, synthetic construct
  source 1..9: note = Seed: LVVVGAVGV (KRAS G12V)
WVVAGRVGN

SEQ ID NO: 64203 - protein, 9 aa, synthetic construct
  source 1..9: note = Seed: LVVVGAVGV (KRAS G12V)
WVVAGRVGP

SEQ ID NO: 64204 - protein, 9 aa, synthetic construct
  source 1..9: note = Seed: LVVVGAVGV (KRAS G12V)
WVVAGRVGQ

SEQ ID NO: 64205 - protein, 9 aa, synthetic construct
  source 1..9: note = Seed: LVVVGAVGV (KRAS G12V)
WVVAGRVGS

SEQ ID NO: 64206 - protein, 9 aa, synthetic construct
  source 1..9: note = Seed: LVVVGAVGV (KRAS G12V)
WVVAGRVGT

SEQ ID NO: 64207 - protein, 9 aa, synthetic construct
  source 1..9: note = Seed: LVVVGAVGV (KRAS G12V)
WVVAGRVGV

SEQ ID NO: 64208 - protein, 9 aa, synthetic construct
  source 1..9: note = Seed: LVVVGAVGV (KRAS G12V)
WVVAGSVGA

SEQ ID NO: 64209 - protein, 9 aa, synthetic construct
  source 1..9: note = Seed: LVVVGAVGV (KRAS G12V)
WVVAGSVGC

SEQ ID NO: 64210 - protein, 9 aa, synthetic construct
  source 1..9: note = Seed: LVVVGAVGV (KRAS G12V)
WVVAGSVGD

SEQ ID NO: 64211 - protein, 9 aa, synthetic construct
  source 1..9: note = Seed: LVVVGAVGV (KRAS G12V)
WVVAGSVGE

SEQ ID NO: 64212 - protein, 9 aa, synthetic construct
  source 1..9: note = Seed: LVVVGAVGV (KRAS G12V)
WVVAGSVGF

SEQ ID NO: 64213 - protein, 9 aa, synthetic construct
  source 1..9: note = Seed: LVVVGAVGV (KRAS G12V)
WVVAGSVGG

SEQ ID NO: 64214 - protein, 9 aa, synthetic construct
  source 1..9: note = Seed: LVVVGAVGV (KRAS G12V)
WVVAGSVGH

SEQ ID NO: 64215 - protein, 9 aa, synthetic construct
  source 1..9: note = Seed: LVVVGAVGV (KRAS G12V)
WVVAGSVGI

SEQ ID NO: 64216 - protein, 9 aa, synthetic construct
  source 1..9: note = Seed: LVVVGAVGV (KRAS G12V)
WVVAGSVGK

SEQ ID NO: 64217 - protein, 9 aa, synthetic construct
  source 1..9: note = Seed: LVVVGAVGV (KRAS G12V)
WVVAGSVGL

SEQ ID NO: 64218 - protein, 9 aa, synthetic construct
  source 1..9: note = Seed: LVVVGAVGV (KRAS G12V)
WVVAGSVGM

SEQ ID NO: 64219 - protein, 9 aa, synthetic construct
  source 1..9: note = Seed: LVVVGAVGV (KRAS G12V)
WVVAGSVGN

SEQ ID NO: 64220 - protein, 9 aa, synthetic construct
  source 1..9: note = Seed: LVVVGAVGV (KRAS G12V)
WVVAGSVGP

SEQ ID NO: 64221 - protein, 9 aa, synthetic construct
  source 1..9: note = Seed: LVVVGAVGV (KRAS G12V)
WVVAGSVGQ

SEQ ID NO: 64222 - protein, 9 aa, synthetic construct
  source 1..9: note = Seed: LVVVGAVGV (KRAS G12V)
WVVAGSVGR

SEQ ID NO: 64223 - protein, 9 aa, synthetic construct
  source 1..9: note = Seed: LVVVGAVGV (KRAS G12V)
WVVAGSVGS

SEQ ID NO: 64224 - protein, 9 aa, synthetic construct
  source 1..9: note = Seed: LVVVGAVGV (KRAS G12V)
WVVAGSVGT

SEQ ID NO: 64225 - protein, 9 aa, synthetic construct
  source 1..9: note = Seed: LVVVGAVGV (KRAS G12V)
WVVAGSVGV

SEQ ID NO: 64226 - protein, 9 aa, synthetic construct
  source 1..9: note = Seed: LVVVGAVGV (KRAS G12V)
WVVAGSVGY

SEQ ID NO: 64227 - protein, 9 aa, synthetic construct
  source 1..9: note = Seed: LVVVGAVGV (KRAS G12V)
WVVAGTVGA

SEQ ID NO: 64228 - protein, 9 aa, synthetic construct
  source 1..9: note = Seed: LVVVGAVGV (KRAS G12V)
WVVAGTVGC

SEQ ID NO: 64229 - protein, 9 aa, synthetic construct
  source 1..9: note = Seed: LVVVGAVGV (KRAS G12V)
WVVAGTVGD

SEQ ID NO: 64230 - protein, 9 aa, synthetic construct
  source 1..9: note = Seed: LVVVGAVGV (KRAS G12V)
WVVAGTVGE

SEQ ID NO: 64231 - protein, 9 aa, synthetic construct
  source 1..9: note = Seed: LVVVGAVGV (KRAS G12V)
WVVAGTVGF

SEQ ID NO: 64232 - protein, 9 aa, synthetic construct
  source 1..9: note = Seed: LVVVGAVGV (KRAS G12V)
WVVAGTVGG

SEQ ID NO: 64233 - protein, 9 aa, synthetic construct
  source 1..9: note = Seed: LVVVGAVGV (KRAS G12V)
WVVAGTVGH

SEQ ID NO: 64234 - protein, 9 aa, synthetic construct
  source 1..9: note = Seed: LVVVGAVGV (KRAS G12V)
WVVAGTVGI

SEQ ID NO: 64235 - protein, 9 aa, synthetic construct
  source 1..9: note = Seed: LVVVGAVGV (KRAS G12V)
WVVAGTVGK

SEQ ID NO: 64236 - protein, 9 aa, synthetic construct
  source 1..9: note = Seed: LVVVGAVGV (KRAS G12V)
WVVAGTVGL

SEQ ID NO: 64237 - protein, 9 aa, synthetic construct
  source 1..9: note = Seed: LVVVGAVGV (KRAS G12V)
WVVAGTVGM

SEQ ID NO: 64238 - protein, 9 aa, synthetic construct
  source 1..9: note = Seed: LVVVGAVGV (KRAS G12V)
WVVAGTVGN

SEQ ID NO: 64239 - protein, 9 aa, synthetic construct
  source 1..9: note = Seed: LVVVGAVGV (KRAS G12V)
WVVAGTVGP

SEQ ID NO: 64240 - protein, 9 aa, synthetic construct
  source 1..9: note = Seed: LVVVGAVGV (KRAS G12V)
WVVAGTVGQ

SEQ ID NO: 64241 - protein, 9 aa, synthetic construct
  source 1..9: note = Seed: LVVVGAVGV (KRAS G12V)
WVVAGTVGR

SEQ ID NO: 64242 - protein, 9 aa, synthetic construct
  source 1..9: note = Seed: LVVVGAVGV (KRAS G12V)
WVVAGTVGS

SEQ ID NO: 64243 - protein, 9 aa, synthetic construct
  source 1..9: note = Seed: LVVVGAVGV (KRAS G12V)
WVVAGTVGT

SEQ ID NO: 64244 - protein, 9 aa, synthetic construct
  source 1..9: note = Seed: LVVVGAVGV (KRAS G12V)
WVVAGTVGV

SEQ ID NO: 64245 - protein, 9 aa, synthetic construct
  source 1..9: note = Seed: LVVVGAVGV (KRAS G12V)
WVVAGTVGY

SEQ ID NO: 64246 - protein, 9 aa, synthetic construct
  source 1..9: note = Seed: LVVVGAVGV (KRAS G12V)
WVVAGVVGA

SEQ ID NO: 64247 - protein, 9 aa, synthetic construct
  source 1..9: note = Seed: LVVVGAVGV (KRAS G12V)
WVVAGVVGC

SEQ ID NO: 64248 - protein, 9 aa, synthetic construct
  source 1..9: note = Seed: LVVVGAVGV (KRAS G12V)
WVVAGVVGD

SEQ ID NO: 64249 - protein, 9 aa, synthetic construct
  source 1..9: note = Seed: LVVVGAVGV (KRAS G12V)
WVVAGVVGE

SEQ ID NO: 64250 - protein, 9 aa, synthetic construct
  source 1..9: note = Seed: LVVVGAVGV (KRAS G12V)
WVVAGVVGF

SEQ ID NO: 64251 - protein, 9 aa, synthetic construct
  source 1..9: note = Seed: LVVVGAVGV (KRAS G12V)
WVVAGVVGG

SEQ ID NO: 64252 - protein, 9 aa, synthetic construct
  source 1..9: note = Seed: LVVVGAVGV (KRAS G12V)
WVVAGVVGH

SEQ ID NO: 64253 - protein, 9 aa, synthetic construct
  source 1..9: note = Seed: LVVVGAVGV (KRAS G12V)
WVVAGVVGI

SEQ ID NO: 64254 - protein, 9 aa, synthetic construct
  source 1..9: note = Seed: LVVVGAVGV (KRAS G12V)
WVVAGVVGK

SEQ ID NO: 64255 - protein, 9 aa, synthetic construct
  source 1..9: note = Seed: LVVVGAVGV (KRAS G12V)
WVVAGVVGL

SEQ ID NO: 64256 - protein, 9 aa, synthetic construct
  source 1..9: note = Seed: LVVVGAVGV (KRAS G12V)
WVVAGVVGM

SEQ ID NO: 64257 - protein, 9 aa, synthetic construct
  source 1..9: note = Seed: LVVVGAVGV (KRAS G12V)
WVVAGVVGN

SEQ ID NO: 64258 - protein, 9 aa, synthetic construct
  source 1..9: note = Seed: LVVVGAVGV (KRAS G12V)
WVVAGVVGP

SEQ ID NO: 64259 - protein, 9 aa, synthetic construct
  source 1..9: note = Seed: LVVVGAVGV (KRAS G12V)
WVVAGVVGQ

SEQ ID NO: 64260 - protein, 9 aa, synthetic construct
  source 1..9: note = Seed: LVVVGAVGV (KRAS G12V)
WVVAGVVGR

SEQ ID NO: 64261 - protein, 9 aa, synthetic construct
  source 1..9: note = Seed: LVVVGAVGV (KRAS G12V)
WVVAGVVGS

SEQ ID NO: 64262 - protein, 9 aa, synthetic construct
  source 1..9: note = Seed: LVVVGAVGV (KRAS G12V)
WVVAGVVGT

SEQ ID NO: 64263 - protein, 9 aa, synthetic construct
  source 1..9: note = Seed: LVVVGAVGV (KRAS G12V)
WVVAGVVGV

SEQ ID NO: 64264 - protein, 9 aa, synthetic construct
  source 1..9: note = Seed: LVVVGAVGV (KRAS G12V)
WVVAGVVGY

SEQ ID NO: 64265 - protein, 9 aa, synthetic construct
  source 1..9: note = Seed: LVVVGAVGV (KRAS G12V)
WVVAGWVGA

SEQ ID NO: 64266 - protein, 9 aa, synthetic construct
  source 1..9: note = Seed: LVVVGAVGV (KRAS G12V)
WVVAGWVGI

SEQ ID NO: 64267 - protein, 9 aa, synthetic construct
  source 1..9: note = Seed: LVVVGAVGV (KRAS G12V)
WVVAGWVGL

SEQ ID NO: 64268 - protein, 9 aa, synthetic construct
  source 1..9: note = Seed: LVVVGAVGV (KRAS G12V)
WVVAGWVGV

SEQ ID NO: 64269 - protein, 9 aa, synthetic construct
  source 1..9: note = Seed: LVVVGAVGV (KRAS G12V)
WVVAGYVGA

SEQ ID NO: 64270 - protein, 9 aa, synthetic construct
  source 1..9: note = Seed: LVVVGAVGV (KRAS G12V)
WVVAGYVGN

SEQ ID NO: 64271 - protein, 9 aa, synthetic construct
  source 1..9: note = Seed: LVVVGAVGV (KRAS G12V)
WVVAGYVGS

SEQ ID NO: 64272 - protein, 9 aa, synthetic construct
  source 1..9: note = Seed: LVVVGAVGV (KRAS G12V)
WVVCGAVGA

SEQ ID NO: 64273 - protein, 9 aa, synthetic construct
  source 1..9: note = Seed: LVVVGAVGV (KRAS G12V)
WVVCGAVGI

SEQ ID NO: 64274 - protein, 9 aa, synthetic construct
  source 1..9: note = Seed: LVVVGAVGV (KRAS G12V)
WVVCGAVGL

SEQ ID NO: 64275 - protein, 9 aa, synthetic construct
  source 1..9: note = Seed: LVVVGAVGV (KRAS G12V)
WVVCGAVGM

SEQ ID NO: 64276 - protein, 9 aa, synthetic construct
  source 1..9: note = Seed: LVVVGAVGV (KRAS G12V)
WVVCGAVGS

SEQ ID NO: 64277 - protein, 9 aa, synthetic construct
  source 1..9: note = Seed: LVVVGAVGV (KRAS G12V)
WVVCGAVGT

SEQ ID NO: 64278 - protein, 9 aa, synthetic construct
  source 1..9: note = Seed: LVVVGAVGV (KRAS G12V)
WVVCGAVGV

SEQ ID NO: 64279 - protein, 9 aa, synthetic construct
  source 1..9: note = Seed: LVVVGAVGV (KRAS G12V)
WVVCGGVGA

SEQ ID NO: 64280 - protein, 9 aa, synthetic construct
  source 1..9: note = Seed: LVVVGAVGV (KRAS G12V)
WVVCGGVGI

SEQ ID NO: 64281 - protein, 9 aa, synthetic construct
  source 1..9: note = Seed: LVVVGAVGV (KRAS G12V)
WVVCGGVGL

SEQ ID NO: 64282 - protein, 9 aa, synthetic construct
  source 1..9: note = Seed: LVVVGAVGV (KRAS G12V)
WVVCGGVGM

SEQ ID NO: 64283 - protein, 9 aa, synthetic construct
  source 1..9: note = Seed: LVVVGAVGV (KRAS G12V)
WVVCGGVGV

SEQ ID NO: 64284 - protein, 9 aa, synthetic construct
  source 1..9: note = Seed: LVVVGAVGV (KRAS G12V)
WVVCGNVGA

SEQ ID NO: 64285 - protein, 9 aa, synthetic construct
  source 1..9: note = Seed: LVVVGAVGV (KRAS G12V)
WVVCGNVGI

SEQ ID NO: 64286 - protein, 9 aa, synthetic construct
  source 1..9: note = Seed: LVVVGAVGV (KRAS G12V)
WVVCGNVGL

SEQ ID NO: 64287 - protein, 9 aa, synthetic construct
  source 1..9: note = Seed: LVVVGAVGV (KRAS G12V)
WVVCGNVGV

SEQ ID NO: 64288 - protein, 9 aa, synthetic construct
  source 1..9: note = Seed: LVVVGAVGV (KRAS G12V)
WVVCGPVGA

SEQ ID NO: 64289 - protein, 9 aa, synthetic construct
  source 1..9: note = Seed: LVVVGAVGV (KRAS G12V)
WVVCGPVGI

SEQ ID NO: 64290 - protein, 9 aa, synthetic construct
  source 1..9: note = Seed: LVVVGAVGV (KRAS G12V)
WVVCGPVGL

SEQ ID NO: 64291 - protein, 9 aa, synthetic construct
  source 1..9: note = Seed: LVVVGAVGV (KRAS G12V)
WVVCGPVGM

SEQ ID NO: 64292 - protein, 9 aa, synthetic construct
  source 1..9: note = Seed: LVVVGAVGV (KRAS G12V)
WVVCGPVGV

SEQ ID NO: 64293 - protein, 9 aa, synthetic construct
  source 1..9: note = Seed: LVVVGAVGV (KRAS G12V)
WVVCGSVGA

SEQ ID NO: 64294 - protein, 9 aa, synthetic construct
  source 1..9: note = Seed: LVVVGAVGV (KRAS G12V)
WVVCGSVGI

SEQ ID NO: 64295 - protein, 9 aa, synthetic construct
  source 1..9: note = Seed: LVVVGAVGV (KRAS G12V)
WVVCGSVGL

SEQ ID NO: 64296 - protein, 9 aa, synthetic construct
  source 1..9: note = Seed: LVVVGAVGV (KRAS G12V)
WVVCGSVGM

SEQ ID NO: 64297 - protein, 9 aa, synthetic construct
  source 1..9: note = Seed: LVVVGAVGV (KRAS G12V)
WVVCGSVGS

SEQ ID NO: 64298 - protein, 9 aa, synthetic construct
  source 1..9: note = Seed: LVVVGAVGV (KRAS G12V)
WVVCGSVGT

SEQ ID NO: 64299 - protein, 9 aa, synthetic construct
  source 1..9: note = Seed: LVVVGAVGV (KRAS G12V)
WVVCGSVGV

SEQ ID NO: 64300 - protein, 9 aa, synthetic construct
  source 1..9: note = Seed: LVVVGAVGV (KRAS G12V)
WVVCGTVGA

SEQ ID NO: 64301 - protein, 9 aa, synthetic construct
  source 1..9: note = Seed: LVVVGAVGV (KRAS G12V)
WVVCGTVGI

SEQ ID NO: 64302 - protein, 9 aa, synthetic construct
  source 1..9: note = Seed: LVVVGAVGV (KRAS G12V)
WVVCGTVGL

SEQ ID NO: 64303 - protein, 9 aa, synthetic construct
  source 1..9: note = Seed: LVVVGAVGV (KRAS G12V)
WVVCGTVGV

SEQ ID NO: 64304 - protein, 9 aa, synthetic construct
  source 1..9: note = Seed: LVVVGAVGV (KRAS G12V)
WVVDGAVGA

SEQ ID NO: 64305 - protein, 9 aa, synthetic construct
  source 1..9: note = Seed: LVVVGAVGV (KRAS G12V)
WVVDGAVGI

SEQ ID NO: 64306 - protein, 9 aa, synthetic construct
  source 1..9: note = Seed: LVVVGAVGV (KRAS G12V)
WVVDGAVGL

SEQ ID NO: 64307 - protein, 9 aa, synthetic construct
  source 1..9: note = Seed: LVVVGAVGV (KRAS G12V)
WVVDGAVGS

SEQ ID NO: 64308 - protein, 9 aa, synthetic construct
  source 1..9: note = Seed: LVVVGAVGV (KRAS G12V)
WVVDGAVGV

SEQ ID NO: 64309 - protein, 9 aa, synthetic construct
  source 1..9: note = Seed: LVVVGAVGV (KRAS G12V)
WVVDGDVGA

SEQ ID NO: 64310 - protein, 9 aa, synthetic construct
  source 1..9: note = Seed: LVVVGAVGV (KRAS G12V)
WVVDGDVGS

SEQ ID NO: 64311 - protein, 9 aa, synthetic construct
  source 1..9: note = Seed: LVVVGAVGV (KRAS G12V)
WVVDGIVGA

SEQ ID NO: 64312 - protein, 9 aa, synthetic construct
  source 1..9: note = Seed: LVVVGAVGV (KRAS G12V)
WVVDGNVGA

SEQ ID NO: 64313 - protein, 9 aa, synthetic construct
  source 1..9: note = Seed: LVVVGAVGV (KRAS G12V)
WVVDGNVGG

SEQ ID NO: 64314 - protein, 9 aa, synthetic construct
  source 1..9: note = Seed: LVVVGAVGV (KRAS G12V)
WVVDGNVGI

SEQ ID NO: 64315 - protein, 9 aa, synthetic construct
  source 1..9: note = Seed: LVVVGAVGV (KRAS G12V)
WVVDGNVGM

SEQ ID NO: 64316 - protein, 9 aa, synthetic construct
  source 1..9: note = Seed: LVVVGAVGV (KRAS G12V)
WVVDGNVGN

SEQ ID NO: 64317 - protein, 9 aa, synthetic construct
  source 1..9: note = Seed: LVVVGAVGV (KRAS G12V)
WVVDGNVGQ

SEQ ID NO: 64318 - protein, 9 aa, synthetic construct
  source 1..9: note = Seed: LVVVGAVGV (KRAS G12V)
WVVDGNVGS

SEQ ID NO: 64319 - protein, 9 aa, synthetic construct
  source 1..9: note = Seed: LVVVGAVGV (KRAS G12V)
WVVDGNVGT

SEQ ID NO: 64320 - protein, 9 aa, synthetic construct
  source 1..9: note = Seed: LVVVGAVGV (KRAS G12V)
WVVDGNVGV

SEQ ID NO: 64321 - protein, 9 aa, synthetic construct
  source 1..9: note = Seed: LVVVGAVGV (KRAS G12V)
WVVDGSVGA

SEQ ID NO: 64322 - protein, 9 aa, synthetic construct
  source 1..9: note = Seed: LVVVGAVGV (KRAS G12V)
WVVDGSVGI

SEQ ID NO: 64323 - protein, 9 aa, synthetic construct
  source 1..9: note = Seed: LVVVGAVGV (KRAS G12V)
WVVDGSVGQ

SEQ ID NO: 64324 - protein, 9 aa, synthetic construct
  source 1..9: note = Seed: LVVVGAVGV (KRAS G12V)
WVVDGSVGS

SEQ ID NO: 64325 - protein, 9 aa, synthetic construct
  source 1..9: note = Seed: LVVVGAVGV (KRAS G12V)
WVVDGTVGA

SEQ ID NO: 64326 - protein, 9 aa, synthetic construct
  source 1..9: note = Seed: LVVVGAVGV (KRAS G12V)
WVVDGTVGQ

SEQ ID NO: 64327 - protein, 9 aa, synthetic construct
  source 1..9: note = Seed: LVVVGAVGV (KRAS G12V)
WVVDGTVGS

SEQ ID NO: 64328 - protein, 9 aa, synthetic construct
  source 1..9: note = Seed: LVVVGAVGV (KRAS G12V)
WVVDGVVGA

SEQ ID NO: 64329 - protein, 9 aa, synthetic construct
  source 1..9: note = Seed: LVVVGAVGV (KRAS G12V)
WVVDGVVGS

SEQ ID NO: 64330 - protein, 9 aa, synthetic construct
  source 1..9: note = Seed: LVVVGAVGV (KRAS G12V)
WVVEGAVGA

SEQ ID NO: 64331 - protein, 9 aa, synthetic construct
  source 1..9: note = Seed: LVVVGAVGV (KRAS G12V)
WVVEGAVGC

SEQ ID NO: 64332 - protein, 9 aa, synthetic construct
  source 1..9: note = Seed: LVVVGAVGV (KRAS G12V)
WVVEGAVGF

SEQ ID NO: 64333 - protein, 9 aa, synthetic construct
  source 1..9: note = Seed: LVVVGAVGV (KRAS G12V)
WVVEGAVGG

SEQ ID NO: 64334 - protein, 9 aa, synthetic construct
  source 1..9: note = Seed: LVVVGAVGV (KRAS G12V)
WVVEGAVGH

SEQ ID NO: 64335 - protein, 9 aa, synthetic construct
  source 1..9: note = Seed: LVVVGAVGV (KRAS G12V)
WVVEGAVGI

SEQ ID NO: 64336 - protein, 9 aa, synthetic construct
  source 1..9: note = Seed: LVVVGAVGV (KRAS G12V)
WVVEGAVGL

SEQ ID NO: 64337 - protein, 9 aa, synthetic construct
  source 1..9: note = Seed: LVVVGAVGV (KRAS G12V)
WVVEGAVGM

SEQ ID NO: 64338 - protein, 9 aa, synthetic construct
  source 1..9: note = Seed: LVVVGAVGV (KRAS G12V)
WVVEGAVGN

SEQ ID NO: 64339 - protein, 9 aa, synthetic construct
  source 1..9: note = Seed: LVVVGAVGV (KRAS G12V)
WVVEGAVGQ

SEQ ID NO: 64340 - protein, 9 aa, synthetic construct
  source 1..9: note = Seed: LVVVGAVGV (KRAS G12V)
WVVEGAVGS

SEQ ID NO: 64341 - protein, 9 aa, synthetic construct
  source 1..9: note = Seed: LVVVGAVGV (KRAS G12V)
WVVEGAVGT

SEQ ID NO: 64342 - protein, 9 aa, synthetic construct
  source 1..9: note = Seed: LVVVGAVGV (KRAS G12V)
WVVEGAVGV

SEQ ID NO: 64343 - protein, 9 aa, synthetic construct
  source 1..9: note = Seed: LVVVGAVGV (KRAS G12V)
WVVEGFVGI

SEQ ID NO: 64344 - protein, 9 aa, synthetic construct
  source 1..9: note = Seed: LVVVGAVGV (KRAS G12V)
WVVEGFVGL

SEQ ID NO: 64345 - protein, 9 aa, synthetic construct
  source 1..9: note = Seed: LVVVGAVGV (KRAS G12V)
WVVEGFVGV

SEQ ID NO: 64346 - protein, 9 aa, synthetic construct
  source 1..9: note = Seed: LVVVGAVGV (KRAS G12V)
WVVEGGVGA

SEQ ID NO: 64347 - protein, 9 aa, synthetic construct
  source 1..9: note = Seed: LVVVGAVGV (KRAS G12V)
WVVEGGVGG

SEQ ID NO: 64348 - protein, 9 aa, synthetic construct
  source 1..9: note = Seed: LVVVGAVGV (KRAS G12V)
WVVEGGVGI

SEQ ID NO: 64349 - protein, 9 aa, synthetic construct
  source 1..9: note = Seed: LVVVGAVGV (KRAS G12V)
WVVEGGVGL

SEQ ID NO: 64350 - protein, 9 aa, synthetic construct
  source 1..9: note = Seed: LVVVGAVGV (KRAS G12V)
WVVEGGVGM

SEQ ID NO: 64351 - protein, 9 aa, synthetic construct
  source 1..9: note = Seed: LVVVGAVGV (KRAS G12V)
WVVEGGVGS

SEQ ID NO: 64352 - protein, 9 aa, synthetic construct
  source 1..9: note = Seed: LVVVGAVGV (KRAS G12V)
WVVEGGVGT

SEQ ID NO: 64353 - protein, 9 aa, synthetic construct
  source 1..9: note = Seed: LVVVGAVGV (KRAS G12V)
WVVEGGVGV

SEQ ID NO: 64354 - protein, 9 aa, synthetic construct
  source 1..9: note = Seed: LVVVGAVGV (KRAS G12V)
WVVEGIVGN

SEQ ID NO: 64355 - protein, 9 aa, synthetic construct
  source 1..9: note = Seed: LVVVGAVGV (KRAS G12V)
WVVEGNVGA

SEQ ID NO: 64356 - protein, 9 aa, synthetic construct
  source 1..9: note = Seed: LVVVGAVGV (KRAS G12V)
WVVEGNVGI

SEQ ID NO: 64357 - protein, 9 aa, synthetic construct
  source 1..9: note = Seed: LVVVGAVGV (KRAS G12V)
WVVEGNVGL

SEQ ID NO: 64358 - protein, 9 aa, synthetic construct
  source 1..9: note = Seed: LVVVGAVGV (KRAS G12V)
WVVEGNVGM

SEQ ID NO: 64359 - protein, 9 aa, synthetic construct
  source 1..9: note = Seed: LVVVGAVGV (KRAS G12V)
WVVEGNVGS

SEQ ID NO: 64360 - protein, 9 aa, synthetic construct
  source 1..9: note = Seed: LVVVGAVGV (KRAS G12V)
WVVEGNVGT

SEQ ID NO: 64361 - protein, 9 aa, synthetic construct
  source 1..9: note = Seed: LVVVGAVGV (KRAS G12V)
WVVEGNVGV

SEQ ID NO: 64362 - protein, 9 aa, synthetic construct
  source 1..9: note = Seed: LVVVGAVGV (KRAS G12V)
WVVEGPVGA

SEQ ID NO: 64363 - protein, 9 aa, synthetic construct
  source 1..9: note = Seed: LVVVGAVGV (KRAS G12V)
WVVEGPVGI

SEQ ID NO: 64364 - protein, 9 aa, synthetic construct
  source 1..9: note = Seed: LVVVGAVGV (KRAS G12V)
WVVEGPVGL

SEQ ID NO: 64365 - protein, 9 aa, synthetic construct
  source 1..9: note = Seed: LVVVGAVGV (KRAS G12V)
WVVEGPVGM

SEQ ID NO: 64366 - protein, 9 aa, synthetic construct
  source 1..9: note = Seed: LVVVGAVGV (KRAS G12V)
WVVEGPVGS

SEQ ID NO: 64367 - protein, 9 aa, synthetic construct
  source 1..9: note = Seed: LVVVGAVGV (KRAS G12V)
WVVEGPVGT

SEQ ID NO: 64368 - protein, 9 aa, synthetic construct
  source 1..9: note = Seed: LVVVGAVGV (KRAS G12V)
WVVEGPVGV

SEQ ID NO: 64369 - protein, 9 aa, synthetic construct
  source 1..9: note = Seed: LVVVGAVGV (KRAS G12V)
WVVEGSVGA

SEQ ID NO: 64370 - protein, 9 aa, synthetic construct
  source 1..9: note = Seed: LVVVGAVGV (KRAS G12V)
WVVEGSVGG

SEQ ID NO: 64371 - protein, 9 aa, synthetic construct
  source 1..9: note = Seed: LVVVGAVGV (KRAS G12V)
WVVEGSVGI

SEQ ID NO: 64372 - protein, 9 aa, synthetic construct
  source 1..9: note = Seed: LVVVGAVGV (KRAS G12V)
WVVEGSVGL

SEQ ID NO: 64373 - protein, 9 aa, synthetic construct
  source 1..9: note = Seed: LVVVGAVGV (KRAS G12V)
WVVEGSVGM

SEQ ID NO: 64374 - protein, 9 aa, synthetic construct
  source 1..9: note = Seed: LVVVGAVGV (KRAS G12V)
WVVEGSVGS

SEQ ID NO: 64375 - protein, 9 aa, synthetic construct
  source 1..9: note = Seed: LVVVGAVGV (KRAS G12V)
WVVEGSVGT

SEQ ID NO: 64376 - protein, 9 aa, synthetic construct
  source 1..9: note = Seed: LVVVGAVGV (KRAS G12V)
WVVEGSVGV

SEQ ID NO: 64377 - protein, 9 aa, synthetic construct
  source 1..9: note = Seed: LVVVGAVGV (KRAS G12V)
WVVEGTVGA

SEQ ID NO: 64378 - protein, 9 aa, synthetic construct
  source 1..9: note = Seed: LVVVGAVGV (KRAS G12V)
WVVEGTVGI

SEQ ID NO: 64379 - protein, 9 aa, synthetic construct
  source 1..9: note = Seed: LVVVGAVGV (KRAS G12V)
WVVEGTVGL

SEQ ID NO: 64380 - protein, 9 aa, synthetic construct
  source 1..9: note = Seed: LVVVGAVGV (KRAS G12V)
WVVEGTVGM

SEQ ID NO: 64381 - protein, 9 aa, synthetic construct
  source 1..9: note = Seed: LVVVGAVGV (KRAS G12V)
WVVEGTVGS

SEQ ID NO: 64382 - protein, 9 aa, synthetic construct
  source 1..9: note = Seed: LVVVGAVGV (KRAS G12V)
WVVEGTVGT

SEQ ID NO: 64383 - protein, 9 aa, synthetic construct
  source 1..9: note = Seed: LVVVGAVGV (KRAS G12V)
WVVEGTVGV

SEQ ID NO: 64384 - protein, 9 aa, synthetic construct
  source 1..9: note = Seed: LVVVGAVGV (KRAS G12V)
WVVEGVVGA

SEQ ID NO: 64385 - protein, 9 aa, synthetic construct
  source 1..9: note = Seed: LVVVGAVGV (KRAS G12V)
WVVEGVVGI

SEQ ID NO: 64386 - protein, 9 aa, synthetic construct
  source 1..9: note = Seed: LVVVGAVGV (KRAS G12V)
WVVEGVVGL

SEQ ID NO: 64387 - protein, 9 aa, synthetic construct
  source 1..9: note = Seed: LVVVGAVGV (KRAS G12V)
WVVEGVVGN

SEQ ID NO: 64388 - protein, 9 aa, synthetic construct
  source 1..9: note = Seed: LVVVGAVGV (KRAS G12V)
WVVEGVVGS

SEQ ID NO: 64389 - protein, 9 aa, synthetic construct
  source 1..9: note = Seed: LVVVGAVGV (KRAS G12V)
WVVEGVVGV

SEQ ID NO: 64390 - protein, 9 aa, synthetic construct
  source 1..9: note = Seed: LVVVGAVGV (KRAS G12V)
WVVFGAVGA

SEQ ID NO: 64391 - protein, 9 aa, synthetic construct
  source 1..9: note = Seed: LVVVGAVGV (KRAS G12V)
WVVFGAVGG

SEQ ID NO: 64392 - protein, 9 aa, synthetic construct
  source 1..9: note = Seed: LVVVGAVGV (KRAS G12V)
WVVFGAVGH

SEQ ID NO: 64393 - protein, 9 aa, synthetic construct
  source 1..9: note = Seed: LVVVGAVGV (KRAS G12V)
WVVFGAVGI

SEQ ID NO: 64394 - protein, 9 aa, synthetic construct
  source 1..9: note = Seed: LVVVGAVGV (KRAS G12V)
WVVFGAVGK

SEQ ID NO: 64395 - protein, 9 aa, synthetic construct
  source 1..9: note = Seed: LVVVGAVGV (KRAS G12V)
WVVFGAVGL

SEQ ID NO: 64396 - protein, 9 aa, synthetic construct
  source 1..9: note = Seed: LVVVGAVGV (KRAS G12V)
WVVFGAVGM

SEQ ID NO: 64397 - protein, 9 aa, synthetic construct
  source 1..9: note = Seed: LVVVGAVGV (KRAS G12V)
WVVFGAVGN

SEQ ID NO: 64398 - protein, 9 aa, synthetic construct
  source 1..9: note = Seed: LVVVGAVGV (KRAS G12V)
WVVFGAVGP

SEQ ID NO: 64399 - protein, 9 aa, synthetic construct
  source 1..9: note = Seed: LVVVGAVGV (KRAS G12V)
WVVFGAVGR

SEQ ID NO: 64400 - protein, 9 aa, synthetic construct
  source 1..9: note = Seed: LVVVGAVGV (KRAS G12V)
WVVFGAVGS

SEQ ID NO: 64401 - protein, 9 aa, synthetic construct
  source 1..9: note = Seed: LVVVGAVGV (KRAS G12V)
WVVFGAVGT

SEQ ID NO: 64402 - protein, 9 aa, synthetic construct
  source 1..9: note = Seed: LVVVGAVGV (KRAS G12V)
WVVFGAVGV

SEQ ID NO: 64403 - protein, 9 aa, synthetic construct
  source 1..9: note = Seed: LVVVGAVGV (KRAS G12V)
WVVFGGVGA

SEQ ID NO: 64404 - protein, 9 aa, synthetic construct
  source 1..9: note = Seed: LVVVGAVGV (KRAS G12V)
WVVFGGVGG

SEQ ID NO: 64405 - protein, 9 aa, synthetic construct
  source 1..9: note = Seed: LVVVGAVGV (KRAS G12V)
WVVFGGVGI

SEQ ID NO: 64406 - protein, 9 aa, synthetic construct
  source 1..9: note = Seed: LVVVGAVGV (KRAS G12V)
WVVFGGVGL

SEQ ID NO: 64407 - protein, 9 aa, synthetic construct
  source 1..9: note = Seed: LVVVGAVGV (KRAS G12V)
WVVFGGVGM

SEQ ID NO: 64408 - protein, 9 aa, synthetic construct
  source 1..9: note = Seed: LVVVGAVGV (KRAS G12V)
WVVFGGVGS

SEQ ID NO: 64409 - protein, 9 aa, synthetic construct
  source 1..9: note = Seed: LVVVGAVGV (KRAS G12V)
WVVFGGVGT

SEQ ID NO: 64410 - protein, 9 aa, synthetic construct
  source 1..9: note = Seed: LVVVGAVGV (KRAS G12V)
WVVFGGVGV

SEQ ID NO: 64411 - protein, 9 aa, synthetic construct
  source 1..9: note = Seed: LVVVGAVGV (KRAS G12V)
WVVFGHVGA

SEQ ID NO: 64412 - protein, 9 aa, synthetic construct
  source 1..9: note = Seed: LVVVGAVGV (KRAS G12V)
WVVFGIVGA

SEQ ID NO: 64413 - protein, 9 aa, synthetic construct
  source 1..9: note = Seed: LVVVGAVGV (KRAS G12V)
WVVFGIVGN

SEQ ID NO: 64414 - protein, 9 aa, synthetic construct
  source 1..9: note = Seed: LVVVGAVGV (KRAS G12V)
WVVFGIVGR

SEQ ID NO: 64415 - protein, 9 aa, synthetic construct
  source 1..9: note = Seed: LVVVGAVGV (KRAS G12V)
WVVFGIVGS

SEQ ID NO: 64416 - protein, 9 aa, synthetic construct
  source 1..9: note = Seed: LVVVGAVGV (KRAS G12V)
WVVFGKVGA

SEQ ID NO: 64417 - protein, 9 aa, synthetic construct
  source 1..9: note = Seed: LVVVGAVGV (KRAS G12V)
WVVFGKVGH

SEQ ID NO: 64418 - protein, 9 aa, synthetic construct
  source 1..9: note = Seed: LVVVGAVGV (KRAS G12V)
WVVFGKVGK

SEQ ID NO: 64419 - protein, 9 aa, synthetic construct
  source 1..9: note = Seed: LVVVGAVGV (KRAS G12V)
WVVFGKVGR

SEQ ID NO: 64420 - protein, 9 aa, synthetic construct
  source 1..9: note = Seed: LVVVGAVGV (KRAS G12V)
WVVFGKVGS

SEQ ID NO: 64421 - protein, 9 aa, synthetic construct
  source 1..9: note = Seed: LVVVGAVGV (KRAS G12V)
WVVFGLVGA

SEQ ID NO: 64422 - protein, 9 aa, synthetic construct
  source 1..9: note = Seed: LVVVGAVGV (KRAS G12V)
WVVFGLVGR

SEQ ID NO: 64423 - protein, 9 aa, synthetic construct
  source 1..9: note = Seed: LVVVGAVGV (KRAS G12V)
WVVFGLVGS

SEQ ID NO: 64424 - protein, 9 aa, synthetic construct
  source 1..9: note = Seed: LVVVGAVGV (KRAS G12V)
WVVFGMVGA

SEQ ID NO: 64425 - protein, 9 aa, synthetic construct
  source 1..9: note = Seed: LVVVGAVGV (KRAS G12V)
WVVFGMVGN

SEQ ID NO: 64426 - protein, 9 aa, synthetic construct
  source 1..9: note = Seed: LVVVGAVGV (KRAS G12V)
WVVFGMVGR

SEQ ID NO: 64427 - protein, 9 aa, synthetic construct
  source 1..9: note = Seed: LVVVGAVGV (KRAS G12V)
WVVFGNVGA

SEQ ID NO: 64428 - protein, 9 aa, synthetic construct
  source 1..9: note = Seed: LVVVGAVGV (KRAS G12V)
WVVFGNVGD

SEQ ID NO: 64429 - protein, 9 aa, synthetic construct
  source 1..9: note = Seed: LVVVGAVGV (KRAS G12V)
WVVFGNVGE

SEQ ID NO: 64430 - protein, 9 aa, synthetic construct
  source 1..9: note = Seed: LVVVGAVGV (KRAS G12V)
WVVFGNVGI

SEQ ID NO: 64431 - protein, 9 aa, synthetic construct
  source 1..9: note = Seed: LVVVGAVGV (KRAS G12V)
WVVFGNVGL

SEQ ID NO: 64432 - protein, 9 aa, synthetic construct
  source 1..9: note = Seed: LVVVGAVGV (KRAS G12V)
WVVFGNVGM

SEQ ID NO: 64433 - protein, 9 aa, synthetic construct
  source 1..9: note = Seed: LVVVGAVGV (KRAS G12V)
WVVFGNVGS

SEQ ID NO: 64434 - protein, 9 aa, synthetic construct
  source 1..9: note = Seed: LVVVGAVGV (KRAS G12V)
WVVFGNVGT

SEQ ID NO: 64435 - protein, 9 aa, synthetic construct
  source 1..9: note = Seed: LVVVGAVGV (KRAS G12V)
WVVFGNVGV

SEQ ID NO: 64436 - protein, 9 aa, synthetic construct
  source 1..9: note = Seed: LVVVGAVGV (KRAS G12V)
WVVFGPVGA

SEQ ID NO: 64437 - protein, 9 aa, synthetic construct
  source 1..9: note = Seed: LVVVGAVGV (KRAS G12V)
WVVFGPVGG

SEQ ID NO: 64438 - protein, 9 aa, synthetic construct
  source 1..9: note = Seed: LVVVGAVGV (KRAS G12V)
WVVFGPVGI

SEQ ID NO: 64439 - protein, 9 aa, synthetic construct
  source 1..9: note = Seed: LVVVGAVGV (KRAS G12V)
WVVFGPVGL

SEQ ID NO: 64440 - protein, 9 aa, synthetic construct
  source 1..9: note = Seed: LVVVGAVGV (KRAS G12V)
WVVFGPVGM

SEQ ID NO: 64441 - protein, 9 aa, synthetic construct
  source 1..9: note = Seed: LVVVGAVGV (KRAS G12V)
WVVFGPVGN

SEQ ID NO: 64442 - protein, 9 aa, synthetic construct
  source 1..9: note = Seed: LVVVGAVGV (KRAS G12V)
WVVFGPVGS

SEQ ID NO: 64443 - protein, 9 aa, synthetic construct
  source 1..9: note = Seed: LVVVGAVGV (KRAS G12V)
WVVFGPVGT

SEQ ID NO: 64444 - protein, 9 aa, synthetic construct
  source 1..9: note = Seed: LVVVGAVGV (KRAS G12V)
WVVFGPVGV

SEQ ID NO: 64445 - protein, 9 aa, synthetic construct
  source 1..9: note = Seed: LVVVGAVGV (KRAS G12V)
WVVFGRVGH

SEQ ID NO: 64446 - protein, 9 aa, synthetic construct
  source 1..9: note = Seed: LVVVGAVGV (KRAS G12V)
WVVFGRVGK

SEQ ID NO: 64447 - protein, 9 aa, synthetic construct
  source 1..9: note = Seed: LVVVGAVGV (KRAS G12V)
WVVFGRVGR

SEQ ID NO: 64448 - protein, 9 aa, synthetic construct
  source 1..9: note = Seed: LVVVGAVGV (KRAS G12V)
WVVFGRVGS

SEQ ID NO: 64449 - protein, 9 aa, synthetic construct
  source 1..9: note = Seed: LVVVGAVGV (KRAS G12V)
WVVFGSVGA

SEQ ID NO: 64450 - protein, 9 aa, synthetic construct
  source 1..9: note = Seed: LVVVGAVGV (KRAS G12V)
WVVFGSVGG

SEQ ID NO: 64451 - protein, 9 aa, synthetic construct
  source 1..9: note = Seed: LVVVGAVGV (KRAS G12V)
WVVFGSVGI

SEQ ID NO: 64452 - protein, 9 aa, synthetic construct
  source 1..9: note = Seed: LVVVGAVGV (KRAS G12V)
WVVFGSVGK

SEQ ID NO: 64453 - protein, 9 aa, synthetic construct
  source 1..9: note = Seed: LVVVGAVGV (KRAS G12V)
WVVFGSVGL

SEQ ID NO: 64454 - protein, 9 aa, synthetic construct
  source 1..9: note = Seed: LVVVGAVGV (KRAS G12V)
WVVFGSVGM

SEQ ID NO: 64455 - protein, 9 aa, synthetic construct
  source 1..9: note = Seed: LVVVGAVGV (KRAS G12V)
WVVFGSVGN

SEQ ID NO: 64456 - protein, 9 aa, synthetic construct
  source 1..9: note = Seed: LVVVGAVGV (KRAS G12V)
WVVFGSVGR

SEQ ID NO: 64457 - protein, 9 aa, synthetic construct
  source 1..9: note = Seed: LVVVGAVGV (KRAS G12V)
WVVFGSVGS

SEQ ID NO: 64458 - protein, 9 aa, synthetic construct
  source 1..9: note = Seed: LVVVGAVGV (KRAS G12V)
WVVFGSVGT

SEQ ID NO: 64459 - protein, 9 aa, synthetic construct
  source 1..9: note = Seed: LVVVGAVGV (KRAS G12V)
WVVFGSVGV

SEQ ID NO: 64460 - protein, 9 aa, synthetic construct
  source 1..9: note = Seed: LVVVGAVGV (KRAS G12V)
WVVFGTVGA

SEQ ID NO: 64461 - protein, 9 aa, synthetic construct
  source 1..9: note = Seed: LVVVGAVGV (KRAS G12V)
WVVFGTVGD

SEQ ID NO: 64462 - protein, 9 aa, synthetic construct
  source 1..9: note = Seed: LVVVGAVGV (KRAS G12V)
WVVFGTVGI

SEQ ID NO: 64463 - protein, 9 aa, synthetic construct
  source 1..9: note = Seed: LVVVGAVGV (KRAS G12V)
WVVFGTVGL

SEQ ID NO: 64464 - protein, 9 aa, synthetic construct
  source 1..9: note = Seed: LVVVGAVGV (KRAS G12V)
WVVFGTVGM

SEQ ID NO: 64465 - protein, 9 aa, synthetic construct
  source 1..9: note = Seed: LVVVGAVGV (KRAS G12V)
WVVFGTVGN

SEQ ID NO: 64466 - protein, 9 aa, synthetic construct
  source 1..9: note = Seed: LVVVGAVGV (KRAS G12V)
WVVFGTVGS

SEQ ID NO: 64467 - protein, 9 aa, synthetic construct
  source 1..9: note = Seed: LVVVGAVGV (KRAS G12V)
WVVFGTVGT

SEQ ID NO: 64468 - protein, 9 aa, synthetic construct
  source 1..9: note = Seed: LVVVGAVGV (KRAS G12V)
WVVFGTVGV

SEQ ID NO: 64469 - protein, 9 aa, synthetic construct
  source 1..9: note = Seed: LVVVGAVGV (KRAS G12V)
WVVFGVVGA

SEQ ID NO: 64470 - protein, 9 aa, synthetic construct
  source 1..9: note = Seed: LVVVGAVGV (KRAS G12V)
WVVFGVVGN

SEQ ID NO: 64471 - protein, 9 aa, synthetic construct
  source 1..9: note = Seed: LVVVGAVGV (KRAS G12V)
WVVFGVVGS

SEQ ID NO: 64472 - protein, 9 aa, synthetic construct
  source 1..9: note = Seed: LVVVGAVGV (KRAS G12V)
WVVFGYVGF

SEQ ID NO: 64473 - protein, 9 aa, synthetic construct
  source 1..9: note = Seed: LVVVGAVGV (KRAS G12V)
WVVFGYVGY

SEQ ID NO: 64474 - protein, 9 aa, synthetic construct
  source 1..9: note = Seed: LVVVGAVGV (KRAS G12V)
WVVGGAVGA

SEQ ID NO: 64475 - protein, 9 aa, synthetic construct
  source 1..9: note = Seed: LVVVGAVGV (KRAS G12V)
WVVGGAVGC

SEQ ID NO: 64476 - protein, 9 aa, synthetic construct
  source 1..9: note = Seed: LVVVGAVGV (KRAS G12V)
WVVGGAVGD

SEQ ID NO: 64477 - protein, 9 aa, synthetic construct
  source 1..9: note = Seed: LVVVGAVGV (KRAS G12V)
WVVGGAVGE

SEQ ID NO: 64478 - protein, 9 aa, synthetic construct
  source 1..9: note = Seed: LVVVGAVGV (KRAS G12V)
WVVGGAVGF

SEQ ID NO: 64479 - protein, 9 aa, synthetic construct
  source 1..9: note = Seed: LVVVGAVGV (KRAS G12V)
WVVGGAVGG

SEQ ID NO: 64480 - protein, 9 aa, synthetic construct
  source 1..9: note = Seed: LVVVGAVGV (KRAS G12V)
WVVGGAVGH

SEQ ID NO: 64481 - protein, 9 aa, synthetic construct
  source 1..9: note = Seed: LVVVGAVGV (KRAS G12V)
WVVGGAVGI

SEQ ID NO: 64482 - protein, 9 aa, synthetic construct
  source 1..9: note = Seed: LVVVGAVGV (KRAS G12V)
WVVGGAVGK

SEQ ID NO: 64483 - protein, 9 aa, synthetic construct
  source 1..9: note = Seed: LVVVGAVGV (KRAS G12V)
WVVGGAVGL

SEQ ID NO: 64484 - protein, 9 aa, synthetic construct
  source 1..9: note = Seed: LVVVGAVGV (KRAS G12V)
WVVGGAVGM

SEQ ID NO: 64485 - protein, 9 aa, synthetic construct
  source 1..9: note = Seed: LVVVGAVGV (KRAS G12V)
WVVGGAVGN

SEQ ID NO: 64486 - protein, 9 aa, synthetic construct
  source 1..9: note = Seed: LVVVGAVGV (KRAS G12V)
WVVGGAVGQ

SEQ ID NO: 64487 - protein, 9 aa, synthetic construct
  source 1..9: note = Seed: LVVVGAVGV (KRAS G12V)
WVVGGAVGR

SEQ ID NO: 64488 - protein, 9 aa, synthetic construct
  source 1..9: note = Seed: LVVVGAVGV (KRAS G12V)
WVVGGAVGS

SEQ ID NO: 64489 - protein, 9 aa, synthetic construct
  source 1..9: note = Seed: LVVVGAVGV (KRAS G12V)
WVVGGAVGT

SEQ ID NO: 64490 - protein, 9 aa, synthetic construct
  source 1..9: note = Seed: LVVVGAVGV (KRAS G12V)
WVVGGAVGV

SEQ ID NO: 64491 - protein, 9 aa, synthetic construct
  source 1..9: note = Seed: LVVVGAVGV (KRAS G12V)
WVVGGAVGY

SEQ ID NO: 64492 - protein, 9 aa, synthetic construct
  source 1..9: note = Seed: LVVVGAVGV (KRAS G12V)
WVVGGCVGA

SEQ ID NO: 64493 - protein, 9 aa, synthetic construct
  source 1..9: note = Seed: LVVVGAVGV (KRAS G12V)
WVVGGCVGF

SEQ ID NO: 64494 - protein, 9 aa, synthetic construct
  source 1..9: note = Seed: LVVVGAVGV (KRAS G12V)
WVVGGCVGG

SEQ ID NO: 64495 - protein, 9 aa, synthetic construct
  source 1..9: note = Seed: LVVVGAVGV (KRAS G12V)
WVVGGCVGI

SEQ ID NO: 64496 - protein, 9 aa, synthetic construct
  source 1..9: note = Seed: LVVVGAVGV (KRAS G12V)
WVVGGCVGL

SEQ ID NO: 64497 - protein, 9 aa, synthetic construct
  source 1..9: note = Seed: LVVVGAVGV (KRAS G12V)
WVVGGCVGM

SEQ ID NO: 64498 - protein, 9 aa, synthetic construct
  source 1..9: note = Seed: LVVVGAVGV (KRAS G12V)
WVVGGCVGN

SEQ ID NO: 64499 - protein, 9 aa, synthetic construct
  source 1..9: note = Seed: LVVVGAVGV (KRAS G12V)
WVVGGCVGQ

SEQ ID NO: 64500 - protein, 9 aa, synthetic construct
  source 1..9: note = Seed: LVVVGAVGV (KRAS G12V)
WVVGGCVGS

SEQ ID NO: 64501 - protein, 9 aa, synthetic construct
  source 1..9: note = Seed: LVVVGAVGV (KRAS G12V)
WVVGGCVGT

SEQ ID NO: 64502 - protein, 9 aa, synthetic construct
  source 1..9: note = Seed: LVVVGAVGV (KRAS G12V)
WVVGGCVGV

SEQ ID NO: 64503 - protein, 9 aa, synthetic construct
  source 1..9: note = Seed: LVVVGAVGV (KRAS G12V)
WVVGGCVGY

SEQ ID NO: 64504 - protein, 9 aa, synthetic construct
  source 1..9: note = Seed: LVVVGAVGV (KRAS G12V)
WVVGGDVGA

SEQ ID NO: 64505 - protein, 9 aa, synthetic construct
  source 1..9: note = Seed: LVVVGAVGV (KRAS G12V)
WVVGGDVGI

SEQ ID NO: 64506 - protein, 9 aa, synthetic construct
  source 1..9: note = Seed: LVVVGAVGV (KRAS G12V)
WVVGGDVGL

SEQ ID NO: 64507 - protein, 9 aa, synthetic construct
  source 1..9: note = Seed: LVVVGAVGV (KRAS G12V)
WVVGGDVGM

SEQ ID NO: 64508 - protein, 9 aa, synthetic construct
  source 1..9: note = Seed: LVVVGAVGV (KRAS G12V)
WVVGGDVGV

SEQ ID NO: 64509 - protein, 9 aa, synthetic construct
  source 1..9: note = Seed: LVVVGAVGV (KRAS G12V)
WVVGGEVGA

SEQ ID NO: 64510 - protein, 9 aa, synthetic construct
  source 1..9: note = Seed: LVVVGAVGV (KRAS G12V)
WVVGGEVGI

SEQ ID NO: 64511 - protein, 9 aa, synthetic construct
  source 1..9: note = Seed: LVVVGAVGV (KRAS G12V)
WVVGGEVGL

SEQ ID NO: 64512 - protein, 9 aa, synthetic construct
  source 1..9: note = Seed: LVVVGAVGV (KRAS G12V)
WVVGGEVGV

SEQ ID NO: 64513 - protein, 9 aa, synthetic construct
  source 1..9: note = Seed: LVVVGAVGV (KRAS G12V)
WVVGGGVGA

SEQ ID NO: 64514 - protein, 9 aa, synthetic construct
  source 1..9: note = Seed: LVVVGAVGV (KRAS G12V)
WVVGGGVGC

SEQ ID NO: 64515 - protein, 9 aa, synthetic construct
  source 1..9: note = Seed: LVVVGAVGV (KRAS G12V)
WVVGGGVGF

SEQ ID NO: 64516 - protein, 9 aa, synthetic construct
  source 1..9: note = Seed: LVVVGAVGV (KRAS G12V)
WVVGGGVGG

SEQ ID NO: 64517 - protein, 9 aa, synthetic construct
  source 1..9: note = Seed: LVVVGAVGV (KRAS G12V)
WVVGGGVGH

SEQ ID NO: 64518 - protein, 9 aa, synthetic construct
  source 1..9: note = Seed: LVVVGAVGV (KRAS G12V)
WVVGGGVGI

SEQ ID NO: 64519 - protein, 9 aa, synthetic construct
  source 1..9: note = Seed: LVVVGAVGV (KRAS G12V)
WVVGGGVGL

SEQ ID NO: 64520 - protein, 9 aa, synthetic construct
  source 1..9: note = Seed: LVVVGAVGV (KRAS G12V)
WVVGGGVGM

SEQ ID NO: 64521 - protein, 9 aa, synthetic construct
  source 1..9: note = Seed: LVVVGAVGV (KRAS G12V)
WVVGGGVGN

SEQ ID NO: 64522 - protein, 9 aa, synthetic construct
  source 1..9: note = Seed: LVVVGAVGV (KRAS G12V)
WVVGGGVGQ

SEQ ID NO: 64523 - protein, 9 aa, synthetic construct
  source 1..9: note = Seed: LVVVGAVGV (KRAS G12V)
WVVGGGVGS

SEQ ID NO: 64524 - protein, 9 aa, synthetic construct
  source 1..9: note = Seed: LVVVGAVGV (KRAS G12V)
WVVGGGVGT

SEQ ID NO: 64525 - protein, 9 aa, synthetic construct
  source 1..9: note = Seed: LVVVGAVGV (KRAS G12V)
WVVGGGVGV

SEQ ID NO: 64526 - protein, 9 aa, synthetic construct
  source 1..9: note = Seed: LVVVGAVGV (KRAS G12V)
WVVGGGVGY

SEQ ID NO: 64527 - protein, 9 aa, synthetic construct
  source 1..9: note = Seed: LVVVGAVGV (KRAS G12V)
WVVGGHVGL

SEQ ID NO: 64528 - protein, 9 aa, synthetic construct
  source 1..9: note = Seed: LVVVGAVGV (KRAS G12V)
WVVGGIVGA

SEQ ID NO: 64529 - protein, 9 aa, synthetic construct
  source 1..9: note = Seed: LVVVGAVGV (KRAS G12V)
WVVGGIVGC

SEQ ID NO: 64530 - protein, 9 aa, synthetic construct
  source 1..9: note = Seed: LVVVGAVGV (KRAS G12V)
WVVGGIVGI

SEQ ID NO: 64531 - protein, 9 aa, synthetic construct
  source 1..9: note = Seed: LVVVGAVGV (KRAS G12V)
WVVGGIVGL

SEQ ID NO: 64532 - protein, 9 aa, synthetic construct
  source 1..9: note = Seed: LVVVGAVGV (KRAS G12V)
WVVGGIVGM

SEQ ID NO: 64533 - protein, 9 aa, synthetic construct
  source 1..9: note = Seed: LVVVGAVGV (KRAS G12V)
WVVGGIVGV

SEQ ID NO: 64534 - protein, 9 aa, synthetic construct
  source 1..9: note = Seed: LVVVGAVGV (KRAS G12V)
WVVGGLVGA

SEQ ID NO: 64535 - protein, 9 aa, synthetic construct
  source 1..9: note = Seed: LVVVGAVGV (KRAS G12V)
WVVGGLVGI

SEQ ID NO: 64536 - protein, 9 aa, synthetic construct
  source 1..9: note = Seed: LVVVGAVGV (KRAS G12V)
WVVGGLVGL

SEQ ID NO: 64537 - protein, 9 aa, synthetic construct
  source 1..9: note = Seed: LVVVGAVGV (KRAS G12V)
WVVGGLVGM

SEQ ID NO: 64538 - protein, 9 aa, synthetic construct
  source 1..9: note = Seed: LVVVGAVGV (KRAS G12V)
WVVGGLVGV

SEQ ID NO: 64539 - protein, 9 aa, synthetic construct
  source 1..9: note = Seed: LVVVGAVGV (KRAS G12V)
WVVGGMVGA

SEQ ID NO: 64540 - protein, 9 aa, synthetic construct
  source 1..9: note = Seed: LVVVGAVGV (KRAS G12V)
WVVGGMVGI

SEQ ID NO: 64541 - protein, 9 aa, synthetic construct
  source 1..9: note = Seed: LVVVGAVGV (KRAS G12V)
WVVGGMVGL

SEQ ID NO: 64542 - protein, 9 aa, synthetic construct
  source 1..9: note = Seed: LVVVGAVGV (KRAS G12V)
WVVGGMVGV

SEQ ID NO: 64543 - protein, 9 aa, synthetic construct
  source 1..9: note = Seed: LVVVGAVGV (KRAS G12V)
WVVGGNVGA

SEQ ID NO: 64544 - protein, 9 aa, synthetic construct
  source 1..9: note = Seed: LVVVGAVGV (KRAS G12V)
WVVGGNVGC

SEQ ID NO: 64545 - protein, 9 aa, synthetic construct
  source 1..9: note = Seed: LVVVGAVGV (KRAS G12V)
WVVGGNVGG

SEQ ID NO: 64546 - protein, 9 aa, synthetic construct
  source 1..9: note = Seed: LVVVGAVGV (KRAS G12V)
WVVGGNVGI

SEQ ID NO: 64547 - protein, 9 aa, synthetic construct
  source 1..9: note = Seed: LVVVGAVGV (KRAS G12V)
WVVGGNVGL

SEQ ID NO: 64548 - protein, 9 aa, synthetic construct
  source 1..9: note = Seed: LVVVGAVGV (KRAS G12V)
WVVGGNVGM

SEQ ID NO: 64549 - protein, 9 aa, synthetic construct
  source 1..9: note = Seed: LVVVGAVGV (KRAS G12V)
WVVGGNVGS

SEQ ID NO: 64550 - protein, 9 aa, synthetic construct
  source 1..9: note = Seed: LVVVGAVGV (KRAS G12V)
WVVGGNVGT

SEQ ID NO: 64551 - protein, 9 aa, synthetic construct
  source 1..9: note = Seed: LVVVGAVGV (KRAS G12V)
WVVGGNVGV

SEQ ID NO: 64552 - protein, 9 aa, synthetic construct
  source 1..9: note = Seed: LVVVGAVGV (KRAS G12V)
WVVGGPVGA

SEQ ID NO: 64553 - protein, 9 aa, synthetic construct
  source 1..9: note = Seed: LVVVGAVGV (KRAS G12V)
WVVGGPVGC

SEQ ID NO: 64554 - protein, 9 aa, synthetic construct
  source 1..9: note = Seed: LVVVGAVGV (KRAS G12V)
WVVGGPVGF

SEQ ID NO: 64555 - protein, 9 aa, synthetic construct
  source 1..9: note = Seed: LVVVGAVGV (KRAS G12V)
WVVGGPVGG

SEQ ID NO: 64556 - protein, 9 aa, synthetic construct
  source 1..9: note = Seed: LVVVGAVGV (KRAS G12V)
WVVGGPVGI

SEQ ID NO: 64557 - protein, 9 aa, synthetic construct
  source 1..9: note = Seed: LVVVGAVGV (KRAS G12V)
WVVGGPVGL

SEQ ID NO: 64558 - protein, 9 aa, synthetic construct
  source 1..9: note = Seed: LVVVGAVGV (KRAS G12V)
WVVGGPVGM

SEQ ID NO: 64559 - protein, 9 aa, synthetic construct
  source 1..9: note = Seed: LVVVGAVGV (KRAS G12V)
WVVGGPVGS

SEQ ID NO: 64560 - protein, 9 aa, synthetic construct
  source 1..9: note = Seed: LVVVGAVGV (KRAS G12V)
WVVGGPVGT

SEQ ID NO: 64561 - protein, 9 aa, synthetic construct
  source 1..9: note = Seed: LVVVGAVGV (KRAS G12V)
WVVGGPVGV

SEQ ID NO: 64562 - protein, 9 aa, synthetic construct
  source 1..9: note = Seed: LVVVGAVGV (KRAS G12V)
WVVGGPVGY

SEQ ID NO: 64563 - protein, 9 aa, synthetic construct
  source 1..9: note = Seed: LVVVGAVGV (KRAS G12V)
WVVGGQVGC

SEQ ID NO: 64564 - protein, 9 aa, synthetic construct
  source 1..9: note = Seed: LVVVGAVGV (KRAS G12V)
WVVGGQVGL

SEQ ID NO: 64565 - protein, 9 aa, synthetic construct
  source 1..9: note = Seed: LVVVGAVGV (KRAS G12V)
WVVGGQVGV

SEQ ID NO: 64566 - protein, 9 aa, synthetic construct
  source 1..9: note = Seed: LVVVGAVGV (KRAS G12V)
WVVGGSVGA

SEQ ID NO: 64567 - protein, 9 aa, synthetic construct
  source 1..9: note = Seed: LVVVGAVGV (KRAS G12V)
WVVGGSVGC

SEQ ID NO: 64568 - protein, 9 aa, synthetic construct
  source 1..9: note = Seed: LVVVGAVGV (KRAS G12V)
WVVGGSVGF

SEQ ID NO: 64569 - protein, 9 aa, synthetic construct
  source 1..9: note = Seed: LVVVGAVGV (KRAS G12V)
WVVGGSVGG

SEQ ID NO: 64570 - protein, 9 aa, synthetic construct
  source 1..9: note = Seed: LVVVGAVGV (KRAS G12V)
WVVGGSVGI

SEQ ID NO: 64571 - protein, 9 aa, synthetic construct
  source 1..9: note = Seed: LVVVGAVGV (KRAS G12V)
WVVGGSVGL

SEQ ID NO: 64572 - protein, 9 aa, synthetic construct
  source 1..9: note = Seed: LVVVGAVGV (KRAS G12V)
WVVGGSVGM

SEQ ID NO: 64573 - protein, 9 aa, synthetic construct
  source 1..9: note = Seed: LVVVGAVGV (KRAS G12V)
WVVGGSVGN

SEQ ID NO: 64574 - protein, 9 aa, synthetic construct
  source 1..9: note = Seed: LVVVGAVGV (KRAS G12V)
WVVGGSVGQ

SEQ ID NO: 64575 - protein, 9 aa, synthetic construct
  source 1..9: note = Seed: LVVVGAVGV (KRAS G12V)
WVVGGSVGS

SEQ ID NO: 64576 - protein, 9 aa, synthetic construct
  source 1..9: note = Seed: LVVVGAVGV (KRAS G12V)
WVVGGSVGT

SEQ ID NO: 64577 - protein, 9 aa, synthetic construct
  source 1..9: note = Seed: LVVVGAVGV (KRAS G12V)
WVVGGSVGV

SEQ ID NO: 64578 - protein, 9 aa, synthetic construct
  source 1..9: note = Seed: LVVVGAVGV (KRAS G12V)
WVVGGSVGY

SEQ ID NO: 64579 - protein, 9 aa, synthetic construct
  source 1..9: note = Seed: LVVVGAVGV (KRAS G12V)
WVVGGTVGA

SEQ ID NO: 64580 - protein, 9 aa, synthetic construct
  source 1..9: note = Seed: LVVVGAVGV (KRAS G12V)
WVVGGTVGC

SEQ ID NO: 64581 - protein, 9 aa, synthetic construct
  source 1..9: note = Seed: LVVVGAVGV (KRAS G12V)
WVVGGTVGG

SEQ ID NO: 64582 - protein, 9 aa, synthetic construct
  source 1..9: note = Seed: LVVVGAVGV (KRAS G12V)
WVVGGTVGI

SEQ ID NO: 64583 - protein, 9 aa, synthetic construct
  source 1..9: note = Seed: LVVVGAVGV (KRAS G12V)
WVVGGTVGL

SEQ ID NO: 64584 - protein, 9 aa, synthetic construct
  source 1..9: note = Seed: LVVVGAVGV (KRAS G12V)
WVVGGTVGM

SEQ ID NO: 64585 - protein, 9 aa, synthetic construct
  source 1..9: note = Seed: LVVVGAVGV (KRAS G12V)
WVVGGTVGS

SEQ ID NO: 64586 - protein, 9 aa, synthetic construct
  source 1..9: note = Seed: LVVVGAVGV (KRAS G12V)
WVVGGTVGT

SEQ ID NO: 64587 - protein, 9 aa, synthetic construct
  source 1..9: note = Seed: LVVVGAVGV (KRAS G12V)
WVVGGTVGV

SEQ ID NO: 64588 - protein, 9 aa, synthetic construct
  source 1..9: note = Seed: LVVVGAVGV (KRAS G12V)
WVVGGVVGA

SEQ ID NO: 64589 - protein, 9 aa, synthetic construct
  source 1..9: note = Seed: LVVVGAVGV (KRAS G12V)
WVVGGVVGC

SEQ ID NO: 64590 - protein, 9 aa, synthetic construct
  source 1..9: note = Seed: LVVVGAVGV (KRAS G12V)
WVVGGVVGG

SEQ ID NO: 64591 - protein, 9 aa, synthetic construct
  source 1..9: note = Seed: LVVVGAVGV (KRAS G12V)
WVVGGVVGI

SEQ ID NO: 64592 - protein, 9 aa, synthetic construct
  source 1..9: note = Seed: LVVVGAVGV (KRAS G12V)
WVVGGVVGL

SEQ ID NO: 64593 - protein, 9 aa, synthetic construct
  source 1..9: note = Seed: LVVVGAVGV (KRAS G12V)
WVVGGVVGM

SEQ ID NO: 64594 - protein, 9 aa, synthetic construct
  source 1..9: note = Seed: LVVVGAVGV (KRAS G12V)
WVVGGVVGN

SEQ ID NO: 64595 - protein, 9 aa, synthetic construct
  source 1..9: note = Seed: LVVVGAVGV (KRAS G12V)
WVVGGVVGS

SEQ ID NO: 64596 - protein, 9 aa, synthetic construct
  source 1..9: note = Seed: LVVVGAVGV (KRAS G12V)
WVVGGVVGT

SEQ ID NO: 64597 - protein, 9 aa, synthetic construct
  source 1..9: note = Seed: LVVVGAVGV (KRAS G12V)
WVVGGVVGV

SEQ ID NO: 64598 - protein, 9 aa, synthetic construct
  source 1..9: note = Seed: LVVVGAVGV (KRAS G12V)
WVVHGAVGA

SEQ ID NO: 64599 - protein, 9 aa, synthetic construct
  source 1..9: note = Seed: LVVVGAVGV (KRAS G12V)
WVVHGAVGF

SEQ ID NO: 64600 - protein, 9 aa, synthetic construct
  source 1..9: note = Seed: LVVVGAVGV (KRAS G12V)
WVVHGAVGI

SEQ ID NO: 64601 - protein, 9 aa, synthetic construct
  source 1..9: note = Seed: LVVVGAVGV (KRAS G12V)
WVVHGAVGL

SEQ ID NO: 64602 - protein, 9 aa, synthetic construct
  source 1..9: note = Seed: LVVVGAVGV (KRAS G12V)
WVVHGAVGM

SEQ ID NO: 64603 - protein, 9 aa, synthetic construct
  source 1..9: note = Seed: LVVVGAVGV (KRAS G12V)
WVVHGAVGS

SEQ ID NO: 64604 - protein, 9 aa, synthetic construct
  source 1..9: note = Seed: LVVVGAVGV (KRAS G12V)
WVVHGAVGT

SEQ ID NO: 64605 - protein, 9 aa, synthetic construct
  source 1..9: note = Seed: LVVVGAVGV (KRAS G12V)
WVVHGAVGV

SEQ ID NO: 64606 - protein, 9 aa, synthetic construct
  source 1..9: note = Seed: LVVVGAVGV (KRAS G12V)
WVVHGFVGF

SEQ ID NO: 64607 - protein, 9 aa, synthetic construct
  source 1..9: note = Seed: LVVVGAVGV (KRAS G12V)
WVVHGFVGI

SEQ ID NO: 64608 - protein, 9 aa, synthetic construct
  source 1..9: note = Seed: LVVVGAVGV (KRAS G12V)
WVVHGFVGL

SEQ ID NO: 64609 - protein, 9 aa, synthetic construct
  source 1..9: note = Seed: LVVVGAVGV (KRAS G12V)
WVVHGFVGV

SEQ ID NO: 64610 - protein, 9 aa, synthetic construct
  source 1..9: note = Seed: LVVVGAVGV (KRAS G12V)
WVVHGGVGA

SEQ ID NO: 64611 - protein, 9 aa, synthetic construct
  source 1..9: note = Seed: LVVVGAVGV (KRAS G12V)
WVVHGGVGI

SEQ ID NO: 64612 - protein, 9 aa, synthetic construct
  source 1..9: note = Seed: LVVVGAVGV (KRAS G12V)
WVVHGGVGL

SEQ ID NO: 64613 - protein, 9 aa, synthetic construct
  source 1..9: note = Seed: LVVVGAVGV (KRAS G12V)
WVVHGGVGM

SEQ ID NO: 64614 - protein, 9 aa, synthetic construct
  source 1..9: note = Seed: LVVVGAVGV (KRAS G12V)
WVVHGGVGV

SEQ ID NO: 64615 - protein, 9 aa, synthetic construct
  source 1..9: note = Seed: LVVVGAVGV (KRAS G12V)
WVVHGNVGA

SEQ ID NO: 64616 - protein, 9 aa, synthetic construct
  source 1..9: note = Seed: LVVVGAVGV (KRAS G12V)
WVVHGNVGI

SEQ ID NO: 64617 - protein, 9 aa, synthetic construct
  source 1..9: note = Seed: LVVVGAVGV (KRAS G12V)
WVVHGNVGL

SEQ ID NO: 64618 - protein, 9 aa, synthetic construct
  source 1..9: note = Seed: LVVVGAVGV (KRAS G12V)
WVVHGNVGV

SEQ ID NO: 64619 - protein, 9 aa, synthetic construct
  source 1..9: note = Seed: LVVVGAVGV (KRAS G12V)
WVVHGPVGA

SEQ ID NO: 64620 - protein, 9 aa, synthetic construct
  source 1..9: note = Seed: LVVVGAVGV (KRAS G12V)
WVVHGPVGI

SEQ ID NO: 64621 - protein, 9 aa, synthetic construct
  source 1..9: note = Seed: LVVVGAVGV (KRAS G12V)
WVVHGPVGL

SEQ ID NO: 64622 - protein, 9 aa, synthetic construct
  source 1..9: note = Seed: LVVVGAVGV (KRAS G12V)
WVVHGPVGM

SEQ ID NO: 64623 - protein, 9 aa, synthetic construct
  source 1..9: note = Seed: LVVVGAVGV (KRAS G12V)
WVVHGPVGV

SEQ ID NO: 64624 - protein, 9 aa, synthetic construct
  source 1..9: note = Seed: LVVVGAVGV (KRAS G12V)
WVVHGSVGA

SEQ ID NO: 64625 - protein, 9 aa, synthetic construct
  source 1..9: note = Seed: LVVVGAVGV (KRAS G12V)
WVVHGSVGF

SEQ ID NO: 64626 - protein, 9 aa, synthetic construct
  source 1..9: note = Seed: LVVVGAVGV (KRAS G12V)
WVVHGSVGI

SEQ ID NO: 64627 - protein, 9 aa, synthetic construct
  source 1..9: note = Seed: LVVVGAVGV (KRAS G12V)
WVVHGSVGL

SEQ ID NO: 64628 - protein, 9 aa, synthetic construct
  source 1..9: note = Seed: LVVVGAVGV (KRAS G12V)
WVVHGSVGM

SEQ ID NO: 64629 - protein, 9 aa, synthetic construct
  source 1..9: note = Seed: LVVVGAVGV (KRAS G12V)
WVVHGSVGS

SEQ ID NO: 64630 - protein, 9 aa, synthetic construct
  source 1..9: note = Seed: LVVVGAVGV (KRAS G12V)
WVVHGSVGT

SEQ ID NO: 64631 - protein, 9 aa, synthetic construct
  source 1..9: note = Seed: LVVVGAVGV (KRAS G12V)
WVVHGSVGV

SEQ ID NO: 64632 - protein, 9 aa, synthetic construct
  source 1..9: note = Seed: LVVVGAVGV (KRAS G12V)
WVVHGTVGA

SEQ ID NO: 64633 - protein, 9 aa, synthetic construct
  source 1..9: note = Seed: LVVVGAVGV (KRAS G12V)
WVVHGTVGI

SEQ ID NO: 64634 - protein, 9 aa, synthetic construct
  source 1..9: note = Seed: LVVVGAVGV (KRAS G12V)
WVVHGTVGL

SEQ ID NO: 64635 - protein, 9 aa, synthetic construct
  source 1..9: note = Seed: LVVVGAVGV (KRAS G12V)
WVVHGTVGM

SEQ ID NO: 64636 - protein, 9 aa, synthetic construct
  source 1..9: note = Seed: LVVVGAVGV (KRAS G12V)
WVVHGTVGV

SEQ ID NO: 64637 - protein, 9 aa, synthetic construct
  source 1..9: note = Seed: LVVVGAVGV (KRAS G12V)
WVVHGVVGA

SEQ ID NO: 64638 - protein, 9 aa, synthetic construct
  source 1..9: note = Seed: LVVVGAVGV (KRAS G12V)
WVVHGVVGI

SEQ ID NO: 64639 - protein, 9 aa, synthetic construct
  source 1..9: note = Seed: LVVVGAVGV (KRAS G12V)
WVVHGVVGL

SEQ ID NO: 64640 - protein, 9 aa, synthetic construct
  source 1..9: note = Seed: LVVVGAVGV (KRAS G12V)
WVVHGVVGM

SEQ ID NO: 64641 - protein, 9 aa, synthetic construct
  source 1..9: note = Seed: LVVVGAVGV (KRAS G12V)
WVVHGVVGV

SEQ ID NO: 64642 - protein, 9 aa, synthetic construct
  source 1..9: note = Seed: LVVVGAVGV (KRAS G12V)
WVVIGAVGA

SEQ ID NO: 64643 - protein, 9 aa, synthetic construct
  source 1..9: note = Seed: LVVVGAVGV (KRAS G12V)
WVVIGAVGC

SEQ ID NO: 64644 - protein, 9 aa, synthetic construct
  source 1..9: note = Seed: LVVVGAVGV (KRAS G12V)
WVVIGAVGD

SEQ ID NO: 64645 - protein, 9 aa, synthetic construct
  source 1..9: note = Seed: LVVVGAVGV (KRAS G12V)
WVVIGAVGE

SEQ ID NO: 64646 - protein, 9 aa, synthetic construct
  source 1..9: note = Seed: LVVVGAVGV (KRAS G12V)
WVVIGAVGF

SEQ ID NO: 64647 - protein, 9 aa, synthetic construct
  source 1..9: note = Seed: LVVVGAVGV (KRAS G12V)
WVVIGAVGG

SEQ ID NO: 64648 - protein, 9 aa, synthetic construct
  source 1..9: note = Seed: LVVVGAVGV (KRAS G12V)
WVVIGAVGH

SEQ ID NO: 64649 - protein, 9 aa, synthetic construct
  source 1..9: note = Seed: LVVVGAVGV (KRAS G12V)
WVVIGAVGI

SEQ ID NO: 64650 - protein, 9 aa, synthetic construct
  source 1..9: note = Seed: LVVVGAVGV (KRAS G12V)
WVVIGAVGK

SEQ ID NO: 64651 - protein, 9 aa, synthetic construct
  source 1..9: note = Seed: LVVVGAVGV (KRAS G12V)
WVVIGAVGL

SEQ ID NO: 64652 - protein, 9 aa, synthetic construct
  source 1..9: note = Seed: LVVVGAVGV (KRAS G12V)
WVVIGAVGM

SEQ ID NO: 64653 - protein, 9 aa, synthetic construct
  source 1..9: note = Seed: LVVVGAVGV (KRAS G12V)
WVVIGAVGN

SEQ ID NO: 64654 - protein, 9 aa, synthetic construct
  source 1..9: note = Seed: LVVVGAVGV (KRAS G12V)
WVVIGAVGP

SEQ ID NO: 64655 - protein, 9 aa, synthetic construct
  source 1..9: note = Seed: LVVVGAVGV (KRAS G12V)
WVVIGAVGQ

SEQ ID NO: 64656 - protein, 9 aa, synthetic construct
  source 1..9: note = Seed: LVVVGAVGV (KRAS G12V)
WVVIGAVGR

SEQ ID NO: 64657 - protein, 9 aa, synthetic construct
  source 1..9: note = Seed: LVVVGAVGV (KRAS G12V)
WVVIGAVGS

SEQ ID NO: 64658 - protein, 9 aa, synthetic construct
  source 1..9: note = Seed: LVVVGAVGV (KRAS G12V)
WVVIGAVGT

SEQ ID NO: 64659 - protein, 9 aa, synthetic construct
  source 1..9: note = Seed: LVVVGAVGV (KRAS G12V)
WVVIGAVGV

SEQ ID NO: 64660 - protein, 9 aa, synthetic construct
  source 1..9: note = Seed: LVVVGAVGV (KRAS G12V)
WVVIGAVGY

SEQ ID NO: 64661 - protein, 9 aa, synthetic construct
  source 1..9: note = Seed: LVVVGAVGV (KRAS G12V)
WVVIGDVGA

SEQ ID NO: 64662 - protein, 9 aa, synthetic construct
  source 1..9: note = Seed: LVVVGAVGV (KRAS G12V)
WVVIGDVGI

SEQ ID NO: 64663 - protein, 9 aa, synthetic construct
  source 1..9: note = Seed: LVVVGAVGV (KRAS G12V)
WVVIGDVGL

SEQ ID NO: 64664 - protein, 9 aa, synthetic construct
  source 1..9: note = Seed: LVVVGAVGV (KRAS G12V)
WVVIGDVGS

SEQ ID NO: 64665 - protein, 9 aa, synthetic construct
  source 1..9: note = Seed: LVVVGAVGV (KRAS G12V)
WVVIGDVGV

SEQ ID NO: 64666 - protein, 9 aa, synthetic construct
  source 1..9: note = Seed: LVVVGAVGV (KRAS G12V)
WVVIGEVGA

SEQ ID NO: 64667 - protein, 9 aa, synthetic construct
  source 1..9: note = Seed: LVVVGAVGV (KRAS G12V)
WVVIGEVGI

SEQ ID NO: 64668 - protein, 9 aa, synthetic construct
  source 1..9: note = Seed: LVVVGAVGV (KRAS G12V)
WVVIGEVGL

SEQ ID NO: 64669 - protein, 9 aa, synthetic construct
  source 1..9: note = Seed: LVVVGAVGV (KRAS G12V)
WVVIGEVGV

SEQ ID NO: 64670 - protein, 9 aa, synthetic construct
  source 1..9: note = Seed: LVVVGAVGV (KRAS G12V)
WVVIGGVGA

SEQ ID NO: 64671 - protein, 9 aa, synthetic construct
  source 1..9: note = Seed: LVVVGAVGV (KRAS G12V)
WVVIGGVGC

SEQ ID NO: 64672 - protein, 9 aa, synthetic construct
  source 1..9: note = Seed: LVVVGAVGV (KRAS G12V)
WVVIGGVGF

SEQ ID NO: 64673 - protein, 9 aa, synthetic construct
  source 1..9: note = Seed: LVVVGAVGV (KRAS G12V)
WVVIGGVGG

SEQ ID NO: 64674 - protein, 9 aa, synthetic construct
  source 1..9: note = Seed: LVVVGAVGV (KRAS G12V)
WVVIGGVGH

SEQ ID NO: 64675 - protein, 9 aa, synthetic construct
  source 1..9: note = Seed: LVVVGAVGV (KRAS G12V)
WVVIGGVGI

SEQ ID NO: 64676 - protein, 9 aa, synthetic construct
  source 1..9: note = Seed: LVVVGAVGV (KRAS G12V)
WVVIGGVGK

SEQ ID NO: 64677 - protein, 9 aa, synthetic construct
  source 1..9: note = Seed: LVVVGAVGV (KRAS G12V)
WVVIGGVGL

SEQ ID NO: 64678 - protein, 9 aa, synthetic construct
  source 1..9: note = Seed: LVVVGAVGV (KRAS G12V)
WVVIGGVGM

SEQ ID NO: 64679 - protein, 9 aa, synthetic construct
  source 1..9: note = Seed: LVVVGAVGV (KRAS G12V)
WVVIGGVGN

SEQ ID NO: 64680 - protein, 9 aa, synthetic construct
  source 1..9: note = Seed: LVVVGAVGV (KRAS G12V)
WVVIGGVGP

SEQ ID NO: 64681 - protein, 9 aa, synthetic construct
  source 1..9: note = Seed: LVVVGAVGV (KRAS G12V)
WVVIGGVGQ

SEQ ID NO: 64682 - protein, 9 aa, synthetic construct
  source 1..9: note = Seed: LVVVGAVGV (KRAS G12V)
WVVIGGVGR

SEQ ID NO: 64683 - protein, 9 aa, synthetic construct
  source 1..9: note = Seed: LVVVGAVGV (KRAS G12V)
WVVIGGVGS

SEQ ID NO: 64684 - protein, 9 aa, synthetic construct
  source 1..9: note = Seed: LVVVGAVGV (KRAS G12V)
WVVIGGVGT

SEQ ID NO: 64685 - protein, 9 aa, synthetic construct
  source 1..9: note = Seed: LVVVGAVGV (KRAS G12V)
WVVIGGVGV

SEQ ID NO: 64686 - protein, 9 aa, synthetic construct
  source 1..9: note = Seed: LVVVGAVGV (KRAS G12V)
WVVIGGVGY

SEQ ID NO: 64687 - protein, 9 aa, synthetic construct
  source 1..9: note = Seed: LVVVGAVGV (KRAS G12V)
WVVIGHVGA

SEQ ID NO: 64688 - protein, 9 aa, synthetic construct
  source 1..9: note = Seed: LVVVGAVGV (KRAS G12V)
WVVIGHVGH

SEQ ID NO: 64689 - protein, 9 aa, synthetic construct
  source 1..9: note = Seed: LVVVGAVGV (KRAS G12V)
WVVIGHVGI

SEQ ID NO: 64690 - protein, 9 aa, synthetic construct
  source 1..9: note = Seed: LVVVGAVGV (KRAS G12V)
WVVIGHVGL

SEQ ID NO: 64691 - protein, 9 aa, synthetic construct
  source 1..9: note = Seed: LVVVGAVGV (KRAS G12V)
WVVIGHVGM

SEQ ID NO: 64692 - protein, 9 aa, synthetic construct
  source 1..9: note = Seed: LVVVGAVGV (KRAS G12V)
WVVIGHVGN

SEQ ID NO: 64693 - protein, 9 aa, synthetic construct
  source 1..9: note = Seed: LVVVGAVGV (KRAS G12V)
WVVIGHVGR

SEQ ID NO: 64694 - protein, 9 aa, synthetic construct
  source 1..9: note = Seed: LVVVGAVGV (KRAS G12V)
WVVIGHVGS

SEQ ID NO: 64695 - protein, 9 aa, synthetic construct
  source 1..9: note = Seed: LVVVGAVGV (KRAS G12V)
WVVIGHVGT

SEQ ID NO: 64696 - protein, 9 aa, synthetic construct
  source 1..9: note = Seed: LVVVGAVGV (KRAS G12V)
WVVIGHVGV

SEQ ID NO: 64697 - protein, 9 aa, synthetic construct
  source 1..9: note = Seed: LVVVGAVGV (KRAS G12V)
WVVIGIVGA

SEQ ID NO: 64698 - protein, 9 aa, synthetic construct
  source 1..9: note = Seed: LVVVGAVGV (KRAS G12V)
WVVIGIVGD

SEQ ID NO: 64699 - protein, 9 aa, synthetic construct
  source 1..9: note = Seed: LVVVGAVGV (KRAS G12V)
WVVIGIVGE

SEQ ID NO: 64700 - protein, 9 aa, synthetic construct
  source 1..9: note = Seed: LVVVGAVGV (KRAS G12V)
WVVIGIVGH

SEQ ID NO: 64701 - protein, 9 aa, synthetic construct
  source 1..9: note = Seed: LVVVGAVGV (KRAS G12V)
WVVIGIVGN

SEQ ID NO: 64702 - protein, 9 aa, synthetic construct
  source 1..9: note = Seed: LVVVGAVGV (KRAS G12V)
WVVIGIVGQ

SEQ ID NO: 64703 - protein, 9 aa, synthetic construct
  source 1..9: note = Seed: LVVVGAVGV (KRAS G12V)
WVVIGIVGR

SEQ ID NO: 64704 - protein, 9 aa, synthetic construct
  source 1..9: note = Seed: LVVVGAVGV (KRAS G12V)
WVVIGIVGS

SEQ ID NO: 64705 - protein, 9 aa, synthetic construct
  source 1..9: note = Seed: LVVVGAVGV (KRAS G12V)
WVVIGIVGT

SEQ ID NO: 64706 - protein, 9 aa, synthetic construct
  source 1..9: note = Seed: LVVVGAVGV (KRAS G12V)
WVVIGKVGA

SEQ ID NO: 64707 - protein, 9 aa, synthetic construct
  source 1..9: note = Seed: LVVVGAVGV (KRAS G12V)
WVVIGKVGG

SEQ ID NO: 64708 - protein, 9 aa, synthetic construct
  source 1..9: note = Seed: LVVVGAVGV (KRAS G12V)
WVVIGKVGH

SEQ ID NO: 64709 - protein, 9 aa, synthetic construct
  source 1..9: note = Seed: LVVVGAVGV (KRAS G12V)
WVVIGKVGK

SEQ ID NO: 64710 - protein, 9 aa, synthetic construct
  source 1..9: note = Seed: LVVVGAVGV (KRAS G12V)
WVVIGKVGL

SEQ ID NO: 64711 - protein, 9 aa, synthetic construct
  source 1..9: note = Seed: LVVVGAVGV (KRAS G12V)
WVVIGKVGM

SEQ ID NO: 64712 - protein, 9 aa, synthetic construct
  source 1..9: note = Seed: LVVVGAVGV (KRAS G12V)
WVVIGKVGN

SEQ ID NO: 64713 - protein, 9 aa, synthetic construct
  source 1..9: note = Seed: LVVVGAVGV (KRAS G12V)
WVVIGKVGP

SEQ ID NO: 64714 - protein, 9 aa, synthetic construct
  source 1..9: note = Seed: LVVVGAVGV (KRAS G12V)
WVVIGKVGQ

SEQ ID NO: 64715 - protein, 9 aa, synthetic construct
  source 1..9: note = Seed: LVVVGAVGV (KRAS G12V)
WVVIGKVGR

SEQ ID NO: 64716 - protein, 9 aa, synthetic construct
  source 1..9: note = Seed: LVVVGAVGV (KRAS G12V)
WVVIGKVGS

SEQ ID NO: 64717 - protein, 9 aa, synthetic construct
  source 1..9: note = Seed: LVVVGAVGV (KRAS G12V)
WVVIGKVGT

SEQ ID NO: 64718 - protein, 9 aa, synthetic construct
  source 1..9: note = Seed: LVVVGAVGV (KRAS G12V)
WVVIGLVGA

SEQ ID NO: 64719 - protein, 9 aa, synthetic construct
  source 1..9: note = Seed: LVVVGAVGV (KRAS G12V)
WVVIGLVGH

SEQ ID NO: 64720 - protein, 9 aa, synthetic construct
  source 1..9: note = Seed: LVVVGAVGV (KRAS G12V)
WVVIGLVGK

SEQ ID NO: 64721 - protein, 9 aa, synthetic construct
  source 1..9: note = Seed: LVVVGAVGV (KRAS G12V)
WVVIGLVGN

SEQ ID NO: 64722 - protein, 9 aa, synthetic construct
  source 1..9: note = Seed: LVVVGAVGV (KRAS G12V)
WVVIGLVGR

SEQ ID NO: 64723 - protein, 9 aa, synthetic construct
  source 1..9: note = Seed: LVVVGAVGV (KRAS G12V)
WVVIGMVGA

SEQ ID NO: 64724 - protein, 9 aa, synthetic construct
  source 1..9: note = Seed: LVVVGAVGV (KRAS G12V)
WVVIGMVGH

SEQ ID NO: 64725 - protein, 9 aa, synthetic construct
  source 1..9: note = Seed: LVVVGAVGV (KRAS G12V)
WVVIGMVGI

SEQ ID NO: 64726 - protein, 9 aa, synthetic construct
  source 1..9: note = Seed: LVVVGAVGV (KRAS G12V)
WVVIGMVGK

SEQ ID NO: 64727 - protein, 9 aa, synthetic construct
  source 1..9: note = Seed: LVVVGAVGV (KRAS G12V)
WVVIGMVGL

SEQ ID NO: 64728 - protein, 9 aa, synthetic construct
  source 1..9: note = Seed: LVVVGAVGV (KRAS G12V)
WVVIGMVGM

SEQ ID NO: 64729 - protein, 9 aa, synthetic construct
  source 1..9: note = Seed: LVVVGAVGV (KRAS G12V)
WVVIGMVGN

SEQ ID NO: 64730 - protein, 9 aa, synthetic construct
  source 1..9: note = Seed: LVVVGAVGV (KRAS G12V)
WVVIGMVGP

SEQ ID NO: 64731 - protein, 9 aa, synthetic construct
  source 1..9: note = Seed: LVVVGAVGV (KRAS G12V)
WVVIGMVGQ

SEQ ID NO: 64732 - protein, 9 aa, synthetic construct
  source 1..9: note = Seed: LVVVGAVGV (KRAS G12V)
WVVIGMVGR

SEQ ID NO: 64733 - protein, 9 aa, synthetic construct
  source 1..9: note = Seed: LVVVGAVGV (KRAS G12V)
WVVIGMVGS

SEQ ID NO: 64734 - protein, 9 aa, synthetic construct
  source 1..9: note = Seed: LVVVGAVGV (KRAS G12V)
WVVIGMVGT

SEQ ID NO: 64735 - protein, 9 aa, synthetic construct
  source 1..9: note = Seed: LVVVGAVGV (KRAS G12V)
WVVIGMVGV

SEQ ID NO: 64736 - protein, 9 aa, synthetic construct
  source 1..9: note = Seed: LVVVGAVGV (KRAS G12V)
WVVIGNVGA

SEQ ID NO: 64737 - protein, 9 aa, synthetic construct
  source 1..9: note = Seed: LVVVGAVGV (KRAS G12V)
WVVIGNVGD

SEQ ID NO: 64738 - protein, 9 aa, synthetic construct
  source 1..9: note = Seed: LVVVGAVGV (KRAS G12V)
WVVIGNVGE

SEQ ID NO: 64739 - protein, 9 aa, synthetic construct
  source 1..9: note = Seed: LVVVGAVGV (KRAS G12V)
WVVIGNVGF

SEQ ID NO: 64740 - protein, 9 aa, synthetic construct
  source 1..9: note = Seed: LVVVGAVGV (KRAS G12V)
WVVIGNVGG

SEQ ID NO: 64741 - protein, 9 aa, synthetic construct
  source 1..9: note = Seed: LVVVGAVGV (KRAS G12V)
WVVIGNVGH

SEQ ID NO: 64742 - protein, 9 aa, synthetic construct
  source 1..9: note = Seed: LVVVGAVGV (KRAS G12V)
WVVIGNVGI

SEQ ID NO: 64743 - protein, 9 aa, synthetic construct
  source 1..9: note = Seed: LVVVGAVGV (KRAS G12V)
WVVIGNVGK

SEQ ID NO: 64744 - protein, 9 aa, synthetic construct
  source 1..9: note = Seed: LVVVGAVGV (KRAS G12V)
WVVIGNVGL

SEQ ID NO: 64745 - protein, 9 aa, synthetic construct
  source 1..9: note = Seed: LVVVGAVGV (KRAS G12V)
WVVIGNVGM

SEQ ID NO: 64746 - protein, 9 aa, synthetic construct
  source 1..9: note = Seed: LVVVGAVGV (KRAS G12V)
WVVIGNVGN

SEQ ID NO: 64747 - protein, 9 aa, synthetic construct
  source 1..9: note = Seed: LVVVGAVGV (KRAS G12V)
WVVIGNVGP

SEQ ID NO: 64748 - protein, 9 aa, synthetic construct
  source 1..9: note = Seed: LVVVGAVGV (KRAS G12V)
WVVIGNVGQ

SEQ ID NO: 64749 - protein, 9 aa, synthetic construct
  source 1..9: note = Seed: LVVVGAVGV (KRAS G12V)
WVVIGNVGR

SEQ ID NO: 64750 - protein, 9 aa, synthetic construct
  source 1..9: note = Seed: LVVVGAVGV (KRAS G12V)
WVVIGNVGS

SEQ ID NO: 64751 - protein, 9 aa, synthetic construct
  source 1..9: note = Seed: LVVVGAVGV (KRAS G12V)
WVVIGNVGT

SEQ ID NO: 64752 - protein, 9 aa, synthetic construct
  source 1..9: note = Seed: LVVVGAVGV (KRAS G12V)
WVVIGNVGV

SEQ ID NO: 64753 - protein, 9 aa, synthetic construct
  source 1..9: note = Seed: LVVVGAVGV (KRAS G12V)
WVVIGNVGY

SEQ ID NO: 64754 - protein, 9 aa, synthetic construct
  source 1..9: note = Seed: LVVVGAVGV (KRAS G12V)
WVVIGPVGA

SEQ ID NO: 64755 - protein, 9 aa, synthetic construct
  source 1..9: note = Seed: LVVVGAVGV (KRAS G12V)
WVVIGPVGC

SEQ ID NO: 64756 - protein, 9 aa, synthetic construct
  source 1..9: note = Seed: LVVVGAVGV (KRAS G12V)
WVVIGPVGD

SEQ ID NO: 64757 - protein, 9 aa, synthetic construct
  source 1..9: note = Seed: LVVVGAVGV (KRAS G12V)
WVVIGPVGE

SEQ ID NO: 64758 - protein, 9 aa, synthetic construct
  source 1..9: note = Seed: LVVVGAVGV (KRAS G12V)
WVVIGPVGF

SEQ ID NO: 64759 - protein, 9 aa, synthetic construct
  source 1..9: note = Seed: LVVVGAVGV (KRAS G12V)
WVVIGPVGG

SEQ ID NO: 64760 - protein, 9 aa, synthetic construct
  source 1..9: note = Seed: LVVVGAVGV (KRAS G12V)
WVVIGPVGH

SEQ ID NO: 64761 - protein, 9 aa, synthetic construct
  source 1..9: note = Seed: LVVVGAVGV (KRAS G12V)
WVVIGPVGI

SEQ ID NO: 64762 - protein, 9 aa, synthetic construct
  source 1..9: note = Seed: LVVVGAVGV (KRAS G12V)
WVVIGPVGK

SEQ ID NO: 64763 - protein, 9 aa, synthetic construct
  source 1..9: note = Seed: LVVVGAVGV (KRAS G12V)
WVVIGPVGL

SEQ ID NO: 64764 - protein, 9 aa, synthetic construct
  source 1..9: note = Seed: LVVVGAVGV (KRAS G12V)
WVVIGPVGM

SEQ ID NO: 64765 - protein, 9 aa, synthetic construct
  source 1..9: note = Seed: LVVVGAVGV (KRAS G12V)
WVVIGPVGN

SEQ ID NO: 64766 - protein, 9 aa, synthetic construct
  source 1..9: note = Seed: LVVVGAVGV (KRAS G12V)
WVVIGPVGP

SEQ ID NO: 64767 - protein, 9 aa, synthetic construct
  source 1..9: note = Seed: LVVVGAVGV (KRAS G12V)
WVVIGPVGQ

SEQ ID NO: 64768 - protein, 9 aa, synthetic construct
  source 1..9: note = Seed: LVVVGAVGV (KRAS G12V)
WVVIGPVGR

SEQ ID NO: 64769 - protein, 9 aa, synthetic construct
  source 1..9: note = Seed: LVVVGAVGV (KRAS G12V)
WVVIGPVGS

SEQ ID NO: 64770 - protein, 9 aa, synthetic construct
  source 1..9: note = Seed: LVVVGAVGV (KRAS G12V)
WVVIGPVGT

SEQ ID NO: 64771 - protein, 9 aa, synthetic construct
  source 1..9: note = Seed: LVVVGAVGV (KRAS G12V)
WVVIGPVGV

SEQ ID NO: 64772 - protein, 9 aa, synthetic construct
  source 1..9: note = Seed: LVVVGAVGV (KRAS G12V)
WVVIGPVGW

SEQ ID NO: 64773 - protein, 9 aa, synthetic construct
  source 1..9: note = Seed: LVVVGAVGV (KRAS G12V)
WVVIGPVGY

SEQ ID NO: 64774 - protein, 9 aa, synthetic construct
  source 1..9: note = Seed: LVVVGAVGV (KRAS G12V)
WVVIGQVGA

SEQ ID NO: 64775 - protein, 9 aa, synthetic construct
  source 1..9: note = Seed: LVVVGAVGV (KRAS G12V)
WVVIGQVGI

SEQ ID NO: 64776 - protein, 9 aa, synthetic construct
  source 1..9: note = Seed: LVVVGAVGV (KRAS G12V)
WVVIGQVGL

SEQ ID NO: 64777 - protein, 9 aa, synthetic construct
  source 1..9: note = Seed: LVVVGAVGV (KRAS G12V)
WVVIGQVGM

SEQ ID NO: 64778 - protein, 9 aa, synthetic construct
  source 1..9: note = Seed: LVVVGAVGV (KRAS G12V)
WVVIGQVGV

SEQ ID NO: 64779 - protein, 9 aa, synthetic construct
  source 1..9: note = Seed: LVVVGAVGV (KRAS G12V)
WVVIGRVGA

SEQ ID NO: 64780 - protein, 9 aa, synthetic construct
  source 1..9: note = Seed: LVVVGAVGV (KRAS G12V)
WVVIGRVGG

SEQ ID NO: 64781 - protein, 9 aa, synthetic construct
  source 1..9: note = Seed: LVVVGAVGV (KRAS G12V)
WVVIGRVGH

SEQ ID NO: 64782 - protein, 9 aa, synthetic construct
  source 1..9: note = Seed: LVVVGAVGV (KRAS G12V)
WVVIGRVGI

SEQ ID NO: 64783 - protein, 9 aa, synthetic construct
  source 1..9: note = Seed: LVVVGAVGV (KRAS G12V)
WVVIGRVGK

SEQ ID NO: 64784 - protein, 9 aa, synthetic construct
  source 1..9: note = Seed: LVVVGAVGV (KRAS G12V)
WVVIGRVGL

SEQ ID NO: 64785 - protein, 9 aa, synthetic construct
  source 1..9: note = Seed: LVVVGAVGV (KRAS G12V)
WVVIGRVGM

SEQ ID NO: 64786 - protein, 9 aa, synthetic construct
  source 1..9: note = Seed: LVVVGAVGV (KRAS G12V)
WVVIGRVGN

SEQ ID NO: 64787 - protein, 9 aa, synthetic construct
  source 1..9: note = Seed: LVVVGAVGV (KRAS G12V)
WVVIGRVGP

SEQ ID NO: 64788 - protein, 9 aa, synthetic construct
  source 1..9: note = Seed: LVVVGAVGV (KRAS G12V)
WVVIGRVGQ

SEQ ID NO: 64789 - protein, 9 aa, synthetic construct
  source 1..9: note = Seed: LVVVGAVGV (KRAS G12V)
WVVIGRVGR

SEQ ID NO: 64790 - protein, 9 aa, synthetic construct
  source 1..9: note = Seed: LVVVGAVGV (KRAS G12V)
WVVIGRVGS

SEQ ID NO: 64791 - protein, 9 aa, synthetic construct
  source 1..9: note = Seed: LVVVGAVGV (KRAS G12V)
WVVIGRVGT

SEQ ID NO: 64792 - protein, 9 aa, synthetic construct
  source 1..9: note = Seed: LVVVGAVGV (KRAS G12V)
WVVIGRVGV

SEQ ID NO: 64793 - protein, 9 aa, synthetic construct
  source 1..9: note = Seed: LVVVGAVGV (KRAS G12V)
WVVIGSVGA

SEQ ID NO: 64794 - protein, 9 aa, synthetic construct
  source 1..9: note = Seed: LVVVGAVGV (KRAS G12V)
WVVIGSVGC

SEQ ID NO: 64795 - protein, 9 aa, synthetic construct
  source 1..9: note = Seed: LVVVGAVGV (KRAS G12V)
WVVIGSVGD

SEQ ID NO: 64796 - protein, 9 aa, synthetic construct
  source 1..9: note = Seed: LVVVGAVGV (KRAS G12V)
WVVIGSVGE

SEQ ID NO: 64797 - protein, 9 aa, synthetic construct
  source 1..9: note = Seed: LVVVGAVGV (KRAS G12V)
WVVIGSVGF

SEQ ID NO: 64798 - protein, 9 aa, synthetic construct
  source 1..9: note = Seed: LVVVGAVGV (KRAS G12V)
WVVIGSVGG

SEQ ID NO: 64799 - protein, 9 aa, synthetic construct
  source 1..9: note = Seed: LVVVGAVGV (KRAS G12V)
WVVIGSVGH

SEQ ID NO: 64800 - protein, 9 aa, synthetic construct
  source 1..9: note = Seed: LVVVGAVGV (KRAS G12V)
WVVIGSVGI

SEQ ID NO: 64801 - protein, 9 aa, synthetic construct
  source 1..9: note = Seed: LVVVGAVGV (KRAS G12V)
WVVIGSVGK

SEQ ID NO: 64802 - protein, 9 aa, synthetic construct
  source 1..9: note = Seed: LVVVGAVGV (KRAS G12V)
WVVIGSVGL

SEQ ID NO: 64803 - protein, 9 aa, synthetic construct
  source 1..9: note = Seed: LVVVGAVGV (KRAS G12V)
WVVIGSVGM

SEQ ID NO: 64804 - protein, 9 aa, synthetic construct
  source 1..9: note = Seed: LVVVGAVGV (KRAS G12V)
WVVIGSVGN

SEQ ID NO: 64805 - protein, 9 aa, synthetic construct
  source 1..9: note = Seed: LVVVGAVGV (KRAS G12V)
WVVIGSVGP

SEQ ID NO: 64806 - protein, 9 aa, synthetic construct
  source 1..9: note = Seed: LVVVGAVGV (KRAS G12V)
WVVIGSVGQ

SEQ ID NO: 64807 - protein, 9 aa, synthetic construct
  source 1..9: note = Seed: LVVVGAVGV (KRAS G12V)
WVVIGSVGR

SEQ ID NO: 64808 - protein, 9 aa, synthetic construct
  source 1..9: note = Seed: LVVVGAVGV (KRAS G12V)
WVVIGSVGS

SEQ ID NO: 64809 - protein, 9 aa, synthetic construct
  source 1..9: note = Seed: LVVVGAVGV (KRAS G12V)
WVVIGSVGT

SEQ ID NO: 64810 - protein, 9 aa, synthetic construct
  source 1..9: note = Seed: LVVVGAVGV (KRAS G12V)
WVVIGSVGV

SEQ ID NO: 64811 - protein, 9 aa, synthetic construct
  source 1..9: note = Seed: LVVVGAVGV (KRAS G12V)
WVVIGSVGY

SEQ ID NO: 64812 - protein, 9 aa, synthetic construct
  source 1..9: note = Seed: LVVVGAVGV (KRAS G12V)
WVVIGTVGA

SEQ ID NO: 64813 - protein, 9 aa, synthetic construct
  source 1..9: note = Seed: LVVVGAVGV (KRAS G12V)
WVVIGTVGD

SEQ ID NO: 64814 - protein, 9 aa, synthetic construct
  source 1..9: note = Seed: LVVVGAVGV (KRAS G12V)
WVVIGTVGE

SEQ ID NO: 64815 - protein, 9 aa, synthetic construct
  source 1..9: note = Seed: LVVVGAVGV (KRAS G12V)
WVVIGTVGG

SEQ ID NO: 64816 - protein, 9 aa, synthetic construct
  source 1..9: note = Seed: LVVVGAVGV (KRAS G12V)
WVVIGTVGH

SEQ ID NO: 64817 - protein, 9 aa, synthetic construct
  source 1..9: note = Seed: LVVVGAVGV (KRAS G12V)
WVVIGTVGI

SEQ ID NO: 64818 - protein, 9 aa, synthetic construct
  source 1..9: note = Seed: LVVVGAVGV (KRAS G12V)
WVVIGTVGK

SEQ ID NO: 64819 - protein, 9 aa, synthetic construct
  source 1..9: note = Seed: LVVVGAVGV (KRAS G12V)
WVVIGTVGL

SEQ ID NO: 64820 - protein, 9 aa, synthetic construct
  source 1..9: note = Seed: LVVVGAVGV (KRAS G12V)
WVVIGTVGM

SEQ ID NO: 64821 - protein, 9 aa, synthetic construct
  source 1..9: note = Seed: LVVVGAVGV (KRAS G12V)
WVVIGTVGN

SEQ ID NO: 64822 - protein, 9 aa, synthetic construct
  source 1..9: note = Seed: LVVVGAVGV (KRAS G12V)
WVVIGTVGP

SEQ ID NO: 64823 - protein, 9 aa, synthetic construct
  source 1..9: note = Seed: LVVVGAVGV (KRAS G12V)
WVVIGTVGQ

SEQ ID NO: 64824 - protein, 9 aa, synthetic construct
  source 1..9: note = Seed: LVVVGAVGV (KRAS G12V)
WVVIGTVGR

SEQ ID NO: 64825 - protein, 9 aa, synthetic construct
  source 1..9: note = Seed: LVVVGAVGV (KRAS G12V)
WVVIGTVGS

SEQ ID NO: 64826 - protein, 9 aa, synthetic construct
  source 1..9: note = Seed: LVVVGAVGV (KRAS G12V)
WVVIGTVGT

SEQ ID NO: 64827 - protein, 9 aa, synthetic construct
  source 1..9: note = Seed: LVVVGAVGV (KRAS G12V)
WVVIGTVGV

SEQ ID NO: 64828 - protein, 9 aa, synthetic construct
  source 1..9: note = Seed: LVVVGAVGV (KRAS G12V)
WVVIGTVGY

SEQ ID NO: 64829 - protein, 9 aa, synthetic construct
  source 1..9: note = Seed: LVVVGAVGV (KRAS G12V)
WVVIGVVGA

SEQ ID NO: 64830 - protein, 9 aa, synthetic construct
  source 1..9: note = Seed: LVVVGAVGV (KRAS G12V)
WVVIGVVGD

SEQ ID NO: 64831 - protein, 9 aa, synthetic construct
  source 1..9: note = Seed: LVVVGAVGV (KRAS G12V)
WVVIGVVGE

SEQ ID NO: 64832 - protein, 9 aa, synthetic construct
  source 1..9: note = Seed: LVVVGAVGV (KRAS G12V)
WVVIGVVGH

SEQ ID NO: 64833 - protein, 9 aa, synthetic construct
  source 1..9: note = Seed: LVVVGAVGV (KRAS G12V)
WVVIGVVGK

SEQ ID NO: 64834 - protein, 9 aa, synthetic construct
  source 1..9: note = Seed: LVVVGAVGV (KRAS G12V)
WVVIGVVGL

SEQ ID NO: 64835 - protein, 9 aa, synthetic construct
  source 1..9: note = Seed: LVVVGAVGV (KRAS G12V)
WVVIGVVGM

SEQ ID NO: 64836 - protein, 9 aa, synthetic construct
  source 1..9: note = Seed: LVVVGAVGV (KRAS G12V)
WVVIGVVGN

SEQ ID NO: 64837 - protein, 9 aa, synthetic construct
  source 1..9: note = Seed: LVVVGAVGV (KRAS G12V)
WVVIGVVGP

SEQ ID NO: 64838 - protein, 9 aa, synthetic construct
  source 1..9: note = Seed: LVVVGAVGV (KRAS G12V)
WVVIGVVGQ

SEQ ID NO: 64839 - protein, 9 aa, synthetic construct
  source 1..9: note = Seed: LVVVGAVGV (KRAS G12V)
WVVIGVVGR

SEQ ID NO: 64840 - protein, 9 aa, synthetic construct
  source 1..9: note = Seed: LVVVGAVGV (KRAS G12V)
WVVIGVVGS

SEQ ID NO: 64841 - protein, 9 aa, synthetic construct
  source 1..9: note = Seed: LVVVGAVGV (KRAS G12V)
WVVIGVVGT

SEQ ID NO: 64842 - protein, 9 aa, synthetic construct
  source 1..9: note = Seed: LVVVGAVGV (KRAS G12V)
WVVIGVVGV

SEQ ID NO: 64843 - protein, 9 aa, synthetic construct
  source 1..9: note = Seed: LVVVGAVGV (KRAS G12V)
WVVKGAVGA

SEQ ID NO: 64844 - protein, 9 aa, synthetic construct
  source 1..9: note = Seed: LVVVGAVGV (KRAS G12V)
WVVKGAVGI

SEQ ID NO: 64845 - protein, 9 aa, synthetic construct
  source 1..9: note = Seed: LVVVGAVGV (KRAS G12V)
WVVKGAVGL

SEQ ID NO: 64846 - protein, 9 aa, synthetic construct
  source 1..9: note = Seed: LVVVGAVGV (KRAS G12V)
WVVKGAVGM

SEQ ID NO: 64847 - protein, 9 aa, synthetic construct
  source 1..9: note = Seed: LVVVGAVGV (KRAS G12V)
WVVKGAVGV

SEQ ID NO: 64848 - protein, 9 aa, synthetic construct
  source 1..9: note = Seed: LVVVGAVGV (KRAS G12V)
WVVKGGVGI

SEQ ID NO: 64849 - protein, 9 aa, synthetic construct
  source 1..9: note = Seed: LVVVGAVGV (KRAS G12V)
WVVKGGVGL

SEQ ID NO: 64850 - protein, 9 aa, synthetic construct
  source 1..9: note = Seed: LVVVGAVGV (KRAS G12V)
WVVKGGVGV

SEQ ID NO: 64851 - protein, 9 aa, synthetic construct
  source 1..9: note = Seed: LVVVGAVGV (KRAS G12V)
WVVKGHVGG

SEQ ID NO: 64852 - protein, 9 aa, synthetic construct
  source 1..9: note = Seed: LVVVGAVGV (KRAS G12V)
WVVKGHVGQ

SEQ ID NO: 64853 - protein, 9 aa, synthetic construct
  source 1..9: note = Seed: LVVVGAVGV (KRAS G12V)
WVVKGKVGA

SEQ ID NO: 64854 - protein, 9 aa, synthetic construct
  source 1..9: note = Seed: LVVVGAVGV (KRAS G12V)
WVVKGKVGG

SEQ ID NO: 64855 - protein, 9 aa, synthetic construct
  source 1..9: note = Seed: LVVVGAVGV (KRAS G12V)
WVVKGKVGH

SEQ ID NO: 64856 - protein, 9 aa, synthetic construct
  source 1..9: note = Seed: LVVVGAVGV (KRAS G12V)
WVVKGKVGN

SEQ ID NO: 64857 - protein, 9 aa, synthetic construct
  source 1..9: note = Seed: LVVVGAVGV (KRAS G12V)
WVVKGKVGQ

SEQ ID NO: 64858 - protein, 9 aa, synthetic construct
  source 1..9: note = Seed: LVVVGAVGV (KRAS G12V)
WVVKGKVGS

SEQ ID NO: 64859 - protein, 9 aa, synthetic construct
  source 1..9: note = Seed: LVVVGAVGV (KRAS G12V)
WVVKGKVGT

SEQ ID NO: 64860 - protein, 9 aa, synthetic construct
  source 1..9: note = Seed: LVVVGAVGV (KRAS G12V)
WVVKGKVGV

SEQ ID NO: 64861 - protein, 9 aa, synthetic construct
  source 1..9: note = Seed: LVVVGAVGV (KRAS G12V)
WVVKGRVGA

SEQ ID NO: 64862 - protein, 9 aa, synthetic construct
  source 1..9: note = Seed: LVVVGAVGV (KRAS G12V)
WVVKGRVGC

SEQ ID NO: 64863 - protein, 9 aa, synthetic construct
  source 1..9: note = Seed: LVVVGAVGV (KRAS G12V)
WVVKGRVGG

SEQ ID NO: 64864 - protein, 9 aa, synthetic construct
  source 1..9: note = Seed: LVVVGAVGV (KRAS G12V)
WVVKGRVGH

SEQ ID NO: 64865 - protein, 9 aa, synthetic construct
  source 1..9: note = Seed: LVVVGAVGV (KRAS G12V)
WVVKGRVGI

SEQ ID NO: 64866 - protein, 9 aa, synthetic construct
  source 1..9: note = Seed: LVVVGAVGV (KRAS G12V)
WVVKGRVGK

SEQ ID NO: 64867 - protein, 9 aa, synthetic construct
  source 1..9: note = Seed: LVVVGAVGV (KRAS G12V)
WVVKGRVGL

SEQ ID NO: 64868 - protein, 9 aa, synthetic construct
  source 1..9: note = Seed: LVVVGAVGV (KRAS G12V)
WVVKGRVGM

SEQ ID NO: 64869 - protein, 9 aa, synthetic construct
  source 1..9: note = Seed: LVVVGAVGV (KRAS G12V)
WVVKGRVGQ

SEQ ID NO: 64870 - protein, 9 aa, synthetic construct
  source 1..9: note = Seed: LVVVGAVGV (KRAS G12V)
WVVKGRVGR

SEQ ID NO: 64871 - protein, 9 aa, synthetic construct
  source 1..9: note = Seed: LVVVGAVGV (KRAS G12V)
WVVKGRVGS

SEQ ID NO: 64872 - protein, 9 aa, synthetic construct
  source 1..9: note = Seed: LVVVGAVGV (KRAS G12V)
WVVKGRVGV

SEQ ID NO: 64873 - protein, 9 aa, synthetic construct
  source 1..9: note = Seed: LVVVGAVGV (KRAS G12V)
WVVKGRVGW

SEQ ID NO: 64874 - protein, 9 aa, synthetic construct
  source 1..9: note = Seed: LVVVGAVGV (KRAS G12V)
WVVKGRVGY

SEQ ID NO: 64875 - protein, 9 aa, synthetic construct
  source 1..9: note = Seed: LVVVGAVGV (KRAS G12V)
WVVKGSVGI

SEQ ID NO: 64876 - protein, 9 aa, synthetic construct
  source 1..9: note = Seed: LVVVGAVGV (KRAS G12V)
WVVKGSVGL

SEQ ID NO: 64877 - protein, 9 aa, synthetic construct
  source 1..9: note = Seed: LVVVGAVGV (KRAS G12V)
WVVKGSVGV

SEQ ID NO: 64878 - protein, 9 aa, synthetic construct
  source 1..9: note = Seed: LVVVGAVGV (KRAS G12V)
WVVLGAVGA

SEQ ID NO: 64879 - protein, 9 aa, synthetic construct
  source 1..9: note = Seed: LVVVGAVGV (KRAS G12V)
WVVLGAVGC

SEQ ID NO: 64880 - protein, 9 aa, synthetic construct
  source 1..9: note = Seed: LVVVGAVGV (KRAS G12V)
WVVLGAVGD

SEQ ID NO: 64881 - protein, 9 aa, synthetic construct
  source 1..9: note = Seed: LVVVGAVGV (KRAS G12V)
WVVLGAVGE

SEQ ID NO: 64882 - protein, 9 aa, synthetic construct
  source 1..9: note = Seed: LVVVGAVGV (KRAS G12V)
WVVLGAVGF

SEQ ID NO: 64883 - protein, 9 aa, synthetic construct
  source 1..9: note = Seed: LVVVGAVGV (KRAS G12V)
WVVLGAVGG

SEQ ID NO: 64884 - protein, 9 aa, synthetic construct
  source 1..9: note = Seed: LVVVGAVGV (KRAS G12V)
WVVLGAVGH

SEQ ID NO: 64885 - protein, 9 aa, synthetic construct
  source 1..9: note = Seed: LVVVGAVGV (KRAS G12V)
WVVLGAVGI

SEQ ID NO: 64886 - protein, 9 aa, synthetic construct
  source 1..9: note = Seed: LVVVGAVGV (KRAS G12V)
WVVLGAVGK

SEQ ID NO: 64887 - protein, 9 aa, synthetic construct
  source 1..9: note = Seed: LVVVGAVGV (KRAS G12V)
WVVLGAVGL

SEQ ID NO: 64888 - protein, 9 aa, synthetic construct
  source 1..9: note = Seed: LVVVGAVGV (KRAS G12V)
WVVLGAVGM

SEQ ID NO: 64889 - protein, 9 aa, synthetic construct
  source 1..9: note = Seed: LVVVGAVGV (KRAS G12V)
WVVLGAVGN

SEQ ID NO: 64890 - protein, 9 aa, synthetic construct
  source 1..9: note = Seed: LVVVGAVGV (KRAS G12V)
WVVLGAVGP

SEQ ID NO: 64891 - protein, 9 aa, synthetic construct
  source 1..9: note = Seed: LVVVGAVGV (KRAS G12V)
WVVLGAVGQ

SEQ ID NO: 64892 - protein, 9 aa, synthetic construct
  source 1..9: note = Seed: LVVVGAVGV (KRAS G12V)
WVVLGAVGR

SEQ ID NO: 64893 - protein, 9 aa, synthetic construct
  source 1..9: note = Seed: LVVVGAVGV (KRAS G12V)
WVVLGAVGS

SEQ ID NO: 64894 - protein, 9 aa, synthetic construct
  source 1..9: note = Seed: LVVVGAVGV (KRAS G12V)
WVVLGAVGT

SEQ ID NO: 64895 - protein, 9 aa, synthetic construct
  source 1..9: note = Seed: LVVVGAVGV (KRAS G12V)
WVVLGAVGV

SEQ ID NO: 64896 - protein, 9 aa, synthetic construct
  source 1..9: note = Seed: LVVVGAVGV (KRAS G12V)
WVVLGAVGY

SEQ ID NO: 64897 - protein, 9 aa, synthetic construct
  source 1..9: note = Seed: LVVVGAVGV (KRAS G12V)
WVVLGDVGA

SEQ ID NO: 64898 - protein, 9 aa, synthetic construct
  source 1..9: note = Seed: LVVVGAVGV (KRAS G12V)
WVVLGDVGI

SEQ ID NO: 64899 - protein, 9 aa, synthetic construct
  source 1..9: note = Seed: LVVVGAVGV (KRAS G12V)
WVVLGDVGL

SEQ ID NO: 64900 - protein, 9 aa, synthetic construct
  source 1..9: note = Seed: LVVVGAVGV (KRAS G12V)
WVVLGDVGM

SEQ ID NO: 64901 - protein, 9 aa, synthetic construct
  source 1..9: note = Seed: LVVVGAVGV (KRAS G12V)
WVVLGDVGS

SEQ ID NO: 64902 - protein, 9 aa, synthetic construct
  source 1..9: note = Seed: LVVVGAVGV (KRAS G12V)
WVVLGDVGT

SEQ ID NO: 64903 - protein, 9 aa, synthetic construct
  source 1..9: note = Seed: LVVVGAVGV (KRAS G12V)
WVVLGDVGV

SEQ ID NO: 64904 - protein, 9 aa, synthetic construct
  source 1..9: note = Seed: LVVVGAVGV (KRAS G12V)
WVVLGEVGA

SEQ ID NO: 64905 - protein, 9 aa, synthetic construct
  source 1..9: note = Seed: LVVVGAVGV (KRAS G12V)
WVVLGEVGI

SEQ ID NO: 64906 - protein, 9 aa, synthetic construct
  source 1..9: note = Seed: LVVVGAVGV (KRAS G12V)
WVVLGEVGL

SEQ ID NO: 64907 - protein, 9 aa, synthetic construct
  source 1..9: note = Seed: LVVVGAVGV (KRAS G12V)
WVVLGEVGM

SEQ ID NO: 64908 - protein, 9 aa, synthetic construct
  source 1..9: note = Seed: LVVVGAVGV (KRAS G12V)
WVVLGEVGT

SEQ ID NO: 64909 - protein, 9 aa, synthetic construct
  source 1..9: note = Seed: LVVVGAVGV (KRAS G12V)
WVVLGEVGV

SEQ ID NO: 64910 - protein, 9 aa, synthetic construct
  source 1..9: note = Seed: LVVVGAVGV (KRAS G12V)
WVVLGGVGA

SEQ ID NO: 64911 - protein, 9 aa, synthetic construct
  source 1..9: note = Seed: LVVVGAVGV (KRAS G12V)
WVVLGGVGC

SEQ ID NO: 64912 - protein, 9 aa, synthetic construct
  source 1..9: note = Seed: LVVVGAVGV (KRAS G12V)
WVVLGGVGD

SEQ ID NO: 64913 - protein, 9 aa, synthetic construct
  source 1..9: note = Seed: LVVVGAVGV (KRAS G12V)
WVVLGGVGE

SEQ ID NO: 64914 - protein, 9 aa, synthetic construct
  source 1..9: note = Seed: LVVVGAVGV (KRAS G12V)
WVVLGGVGF

SEQ ID NO: 64915 - protein, 9 aa, synthetic construct
  source 1..9: note = Seed: LVVVGAVGV (KRAS G12V)
WVVLGGVGG

SEQ ID NO: 64916 - protein, 9 aa, synthetic construct
  source 1..9: note = Seed: LVVVGAVGV (KRAS G12V)
WVVLGGVGH

SEQ ID NO: 64917 - protein, 9 aa, synthetic construct
  source 1..9: note = Seed: LVVVGAVGV (KRAS G12V)
WVVLGGVGI

SEQ ID NO: 64918 - protein, 9 aa, synthetic construct
  source 1..9: note = Seed: LVVVGAVGV (KRAS G12V)
WVVLGGVGK

SEQ ID NO: 64919 - protein, 9 aa, synthetic construct
  source 1..9: note = Seed: LVVVGAVGV (KRAS G12V)
WVVLGGVGL

SEQ ID NO: 64920 - protein, 9 aa, synthetic construct
  source 1..9: note = Seed: LVVVGAVGV (KRAS G12V)
WVVLGGVGM

SEQ ID NO: 64921 - protein, 9 aa, synthetic construct
  source 1..9: note = Seed: LVVVGAVGV (KRAS G12V)
WVVLGGVGN

SEQ ID NO: 64922 - protein, 9 aa, synthetic construct
  source 1..9: note = Seed: LVVVGAVGV (KRAS G12V)
WVVLGGVGP

SEQ ID NO: 64923 - protein, 9 aa, synthetic construct
  source 1..9: note = Seed: LVVVGAVGV (KRAS G12V)
WVVLGGVGQ

SEQ ID NO: 64924 - protein, 9 aa, synthetic construct
  source 1..9: note = Seed: LVVVGAVGV (KRAS G12V)
WVVLGGVGR

SEQ ID NO: 64925 - protein, 9 aa, synthetic construct
  source 1..9: note = Seed: LVVVGAVGV (KRAS G12V)
WVVLGGVGS

SEQ ID NO: 64926 - protein, 9 aa, synthetic construct
  source 1..9: note = Seed: LVVVGAVGV (KRAS G12V)
WVVLGGVGT

SEQ ID NO: 64927 - protein, 9 aa, synthetic construct
  source 1..9: note = Seed: LVVVGAVGV (KRAS G12V)
WVVLGGVGV

SEQ ID NO: 64928 - protein, 9 aa, synthetic construct
  source 1..9: note = Seed: LVVVGAVGV (KRAS G12V)
WVVLGGVGY

SEQ ID NO: 64929 - protein, 9 aa, synthetic construct
  source 1..9: note = Seed: LVVVGAVGV (KRAS G12V)
WVVLGHVGA

SEQ ID NO: 64930 - protein, 9 aa, synthetic construct
  source 1..9: note = Seed: LVVVGAVGV (KRAS G12V)
WVVLGHVGI

SEQ ID NO: 64931 - protein, 9 aa, synthetic construct
  source 1..9: note = Seed: LVVVGAVGV (KRAS G12V)
WVVLGHVGL

SEQ ID NO: 64932 - protein, 9 aa, synthetic construct
  source 1..9: note = Seed: LVVVGAVGV (KRAS G12V)
WVVLGHVGM

SEQ ID NO: 64933 - protein, 9 aa, synthetic construct
  source 1..9: note = Seed: LVVVGAVGV (KRAS G12V)
WVVLGHVGS

SEQ ID NO: 64934 - protein, 9 aa, synthetic construct
  source 1..9: note = Seed: LVVVGAVGV (KRAS G12V)
WVVLGHVGT

SEQ ID NO: 64935 - protein, 9 aa, synthetic construct
  source 1..9: note = Seed: LVVVGAVGV (KRAS G12V)
WVVLGHVGV

SEQ ID NO: 64936 - protein, 9 aa, synthetic construct
  source 1..9: note = Seed: LVVVGAVGV (KRAS G12V)
WVVLGIVGA

SEQ ID NO: 64937 - protein, 9 aa, synthetic construct
  source 1..9: note = Seed: LVVVGAVGV (KRAS G12V)
WVVLGIVGD

SEQ ID NO: 64938 - protein, 9 aa, synthetic construct
  source 1..9: note = Seed: LVVVGAVGV (KRAS G12V)
WVVLGIVGE

SEQ ID NO: 64939 - protein, 9 aa, synthetic construct
  source 1..9: note = Seed: LVVVGAVGV (KRAS G12V)
WVVLGIVGH

SEQ ID NO: 64940 - protein, 9 aa, synthetic construct
  source 1..9: note = Seed: LVVVGAVGV (KRAS G12V)
WVVLGIVGK

SEQ ID NO: 64941 - protein, 9 aa, synthetic construct
  source 1..9: note = Seed: LVVVGAVGV (KRAS G12V)
WVVLGIVGL

SEQ ID NO: 64942 - protein, 9 aa, synthetic construct
  source 1..9: note = Seed: LVVVGAVGV (KRAS G12V)
WVVLGIVGM

SEQ ID NO: 64943 - protein, 9 aa, synthetic construct
  source 1..9: note = Seed: LVVVGAVGV (KRAS G12V)
WVVLGIVGN

SEQ ID NO: 64944 - protein, 9 aa, synthetic construct
  source 1..9: note = Seed: LVVVGAVGV (KRAS G12V)
WVVLGIVGQ

SEQ ID NO: 64945 - protein, 9 aa, synthetic construct
  source 1..9: note = Seed: LVVVGAVGV (KRAS G12V)
WVVLGIVGR

SEQ ID NO: 64946 - protein, 9 aa, synthetic construct
  source 1..9: note = Seed: LVVVGAVGV (KRAS G12V)
WVVLGIVGS

SEQ ID NO: 64947 - protein, 9 aa, synthetic construct
  source 1..9: note = Seed: LVVVGAVGV (KRAS G12V)
WVVLGIVGT

SEQ ID NO: 64948 - protein, 9 aa, synthetic construct
  source 1..9: note = Seed: LVVVGAVGV (KRAS G12V)
WVVLGIVGV

SEQ ID NO: 64949 - protein, 9 aa, synthetic construct
  source 1..9: note = Seed: LVVVGAVGV (KRAS G12V)
WVVLGKVGA

SEQ ID NO: 64950 - protein, 9 aa, synthetic construct
  source 1..9: note = Seed: LVVVGAVGV (KRAS G12V)
WVVLGKVGG

SEQ ID NO: 64951 - protein, 9 aa, synthetic construct
  source 1..9: note = Seed: LVVVGAVGV (KRAS G12V)
WVVLGKVGH

SEQ ID NO: 64952 - protein, 9 aa, synthetic construct
  source 1..9: note = Seed: LVVVGAVGV (KRAS G12V)
WVVLGKVGK

SEQ ID NO: 64953 - protein, 9 aa, synthetic construct
  source 1..9: note = Seed: LVVVGAVGV (KRAS G12V)
WVVLGKVGL

SEQ ID NO: 64954 - protein, 9 aa, synthetic construct
  source 1..9: note = Seed: LVVVGAVGV (KRAS G12V)
WVVLGKVGM

SEQ ID NO: 64955 - protein, 9 aa, synthetic construct
  source 1..9: note = Seed: LVVVGAVGV (KRAS G12V)
WVVLGKVGN

SEQ ID NO: 64956 - protein, 9 aa, synthetic construct
  source 1..9: note = Seed: LVVVGAVGV (KRAS G12V)
WVVLGKVGP

SEQ ID NO: 64957 - protein, 9 aa, synthetic construct
  source 1..9: note = Seed: LVVVGAVGV (KRAS G12V)
WVVLGKVGQ

SEQ ID NO: 64958 - protein, 9 aa, synthetic construct
  source 1..9: note = Seed: LVVVGAVGV (KRAS G12V)
WVVLGKVGR

SEQ ID NO: 64959 - protein, 9 aa, synthetic construct
  source 1..9: note = Seed: LVVVGAVGV (KRAS G12V)
WVVLGKVGS

SEQ ID NO: 64960 - protein, 9 aa, synthetic construct
  source 1..9: note = Seed: LVVVGAVGV (KRAS G12V)
WVVLGKVGT

SEQ ID NO: 64961 - protein, 9 aa, synthetic construct
  source 1..9: note = Seed: LVVVGAVGV (KRAS G12V)
WVVLGLVGA

SEQ ID NO: 64962 - protein, 9 aa, synthetic construct
  source 1..9: note = Seed: LVVVGAVGV (KRAS G12V)
WVVLGLVGH

SEQ ID NO: 64963 - protein, 9 aa, synthetic construct
  source 1..9: note = Seed: LVVVGAVGV (KRAS G12V)
WVVLGLVGM

SEQ ID NO: 64964 - protein, 9 aa, synthetic construct
  source 1..9: note = Seed: LVVVGAVGV (KRAS G12V)
WVVLGLVGN

SEQ ID NO: 64965 - protein, 9 aa, synthetic construct
  source 1..9: note = Seed: LVVVGAVGV (KRAS G12V)
WVVLGLVGR

SEQ ID NO: 64966 - protein, 9 aa, synthetic construct
  source 1..9: note = Seed: LVVVGAVGV (KRAS G12V)
WVVLGLVGS

SEQ ID NO: 64967 - protein, 9 aa, synthetic construct
  source 1..9: note = Seed: LVVVGAVGV (KRAS G12V)
WVVLGMVGA

SEQ ID NO: 64968 - protein, 9 aa, synthetic construct
  source 1..9: note = Seed: LVVVGAVGV (KRAS G12V)
WVVLGMVGH

SEQ ID NO: 64969 - protein, 9 aa, synthetic construct
  source 1..9: note = Seed: LVVVGAVGV (KRAS G12V)
WVVLGMVGI

SEQ ID NO: 64970 - protein, 9 aa, synthetic construct
  source 1..9: note = Seed: LVVVGAVGV (KRAS G12V)
WVVLGMVGK

SEQ ID NO: 64971 - protein, 9 aa, synthetic construct
  source 1..9: note = Seed: LVVVGAVGV (KRAS G12V)
WVVLGMVGL

SEQ ID NO: 64972 - protein, 9 aa, synthetic construct
  source 1..9: note = Seed: LVVVGAVGV (KRAS G12V)
WVVLGMVGM

SEQ ID NO: 64973 - protein, 9 aa, synthetic construct
  source 1..9: note = Seed: LVVVGAVGV (KRAS G12V)
WVVLGMVGN

SEQ ID NO: 64974 - protein, 9 aa, synthetic construct
  source 1..9: note = Seed: LVVVGAVGV (KRAS G12V)
WVVLGMVGR

SEQ ID NO: 64975 - protein, 9 aa, synthetic construct
  source 1..9: note = Seed: LVVVGAVGV (KRAS G12V)
WVVLGMVGS

SEQ ID NO: 64976 - protein, 9 aa, synthetic construct
  source 1..9: note = Seed: LVVVGAVGV (KRAS G12V)
WVVLGMVGT

SEQ ID NO: 64977 - protein, 9 aa, synthetic construct
  source 1..9: note = Seed: LVVVGAVGV (KRAS G12V)
WVVLGMVGV

SEQ ID NO: 64978 - protein, 9 aa, synthetic construct
  source 1..9: note = Seed: LVVVGAVGV (KRAS G12V)
WVVLGNVGA

SEQ ID NO: 64979 - protein, 9 aa, synthetic construct
  source 1..9: note = Seed: LVVVGAVGV (KRAS G12V)
WVVLGNVGC

SEQ ID NO: 64980 - protein, 9 aa, synthetic construct
  source 1..9: note = Seed: LVVVGAVGV (KRAS G12V)
WVVLGNVGD

SEQ ID NO: 64981 - protein, 9 aa, synthetic construct
  source 1..9: note = Seed: LVVVGAVGV (KRAS G12V)
WVVLGNVGE

SEQ ID NO: 64982 - protein, 9 aa, synthetic construct
  source 1..9: note = Seed: LVVVGAVGV (KRAS G12V)
WVVLGNVGF

SEQ ID NO: 64983 - protein, 9 aa, synthetic construct
  source 1..9: note = Seed: LVVVGAVGV (KRAS G12V)
WVVLGNVGG

SEQ ID NO: 64984 - protein, 9 aa, synthetic construct
  source 1..9: note = Seed: LVVVGAVGV (KRAS G12V)
WVVLGNVGH

SEQ ID NO: 64985 - protein, 9 aa, synthetic construct
  source 1..9: note = Seed: LVVVGAVGV (KRAS G12V)
WVVLGNVGI

SEQ ID NO: 64986 - protein, 9 aa, synthetic construct
  source 1..9: note = Seed: LVVVGAVGV (KRAS G12V)
WVVLGNVGK

SEQ ID NO: 64987 - protein, 9 aa, synthetic construct
  source 1..9: note = Seed: LVVVGAVGV (KRAS G12V)
WVVLGNVGL

SEQ ID NO: 64988 - protein, 9 aa, synthetic construct
  source 1..9: note = Seed: LVVVGAVGV (KRAS G12V)
WVVLGNVGM

SEQ ID NO: 64989 - protein, 9 aa, synthetic construct
  source 1..9: note = Seed: LVVVGAVGV (KRAS G12V)
WVVLGNVGN

SEQ ID NO: 64990 - protein, 9 aa, synthetic construct
  source 1..9: note = Seed: LVVVGAVGV (KRAS G12V)
WVVLGNVGP

SEQ ID NO: 64991 - protein, 9 aa, synthetic construct
  source 1..9: note = Seed: LVVVGAVGV (KRAS G12V)
WVVLGNVGQ

SEQ ID NO: 64992 - protein, 9 aa, synthetic construct
  source 1..9: note = Seed: LVVVGAVGV (KRAS G12V)
WVVLGNVGR

SEQ ID NO: 64993 - protein, 9 aa, synthetic construct
  source 1..9: note = Seed: LVVVGAVGV (KRAS G12V)
WVVLGNVGS

SEQ ID NO: 64994 - protein, 9 aa, synthetic construct
  source 1..9: note = Seed: LVVVGAVGV (KRAS G12V)
WVVLGNVGT

SEQ ID NO: 64995 - protein, 9 aa, synthetic construct
  source 1..9: note = Seed: LVVVGAVGV (KRAS G12V)
WVVLGNVGV

SEQ ID NO: 64996 - protein, 9 aa, synthetic construct
  source 1..9: note = Seed: LVVVGAVGV (KRAS G12V)
WVVLGNVGY

SEQ ID NO: 64997 - protein, 9 aa, synthetic construct
  source 1..9: note = Seed: LVVVGAVGV (KRAS G12V)
WVVLGPVGA

SEQ ID NO: 64998 - protein, 9 aa, synthetic construct
  source 1..9: note = Seed: LVVVGAVGV (KRAS G12V)
WVVLGPVGC

SEQ ID NO: 64999 - protein, 9 aa, synthetic construct
  source 1..9: note = Seed: LVVVGAVGV (KRAS G12V)
WVVLGPVGD

SEQ ID NO: 65000 - protein, 9 aa, synthetic construct
  source 1..9: note = Seed: LVVVGAVGV (KRAS G12V)
WVVLGPVGE

SEQ ID NO: 65001 - protein, 9 aa, synthetic construct
  source 1..9: note = Seed: LVVVGAVGV (KRAS G12V)
WVVLGPVGF

SEQ ID NO: 65002 - protein, 9 aa, synthetic construct
  source 1..9: note = Seed: LVVVGAVGV (KRAS G12V)
WVVLGPVGG

SEQ ID NO: 65003 - protein, 9 aa, synthetic construct
  source 1..9: note = Seed: LVVVGAVGV (KRAS G12V)
WVVLGPVGH

SEQ ID NO: 65004 - protein, 9 aa, synthetic construct
  source 1..9: note = Seed: LVVVGAVGV (KRAS G12V)
WVVLGPVGI

SEQ ID NO: 65005 - protein, 9 aa, synthetic construct
  source 1..9: note = Seed: LVVVGAVGV (KRAS G12V)
WVVLGPVGK

SEQ ID NO: 65006 - protein, 9 aa, synthetic construct
  source 1..9: note = Seed: LVVVGAVGV (KRAS G12V)
WVVLGPVGL

SEQ ID NO: 65007 - protein, 9 aa, synthetic construct
  source 1..9: note = Seed: LVVVGAVGV (KRAS G12V)
WVVLGPVGM

SEQ ID NO: 65008 - protein, 9 aa, synthetic construct
  source 1..9: note = Seed: LVVVGAVGV (KRAS G12V)
WVVLGPVGN

SEQ ID NO: 65009 - protein, 9 aa, synthetic construct
  source 1..9: note = Seed: LVVVGAVGV (KRAS G12V)
WVVLGPVGP

SEQ ID NO: 65010 - protein, 9 aa, synthetic construct
  source 1..9: note = Seed: LVVVGAVGV (KRAS G12V)
WVVLGPVGQ

SEQ ID NO: 65011 - protein, 9 aa, synthetic construct
  source 1..9: note = Seed: LVVVGAVGV (KRAS G12V)
WVVLGPVGR

SEQ ID NO: 65012 - protein, 9 aa, synthetic construct
  source 1..9: note = Seed: LVVVGAVGV (KRAS G12V)
WVVLGPVGS

SEQ ID NO: 65013 - protein, 9 aa, synthetic construct
  source 1..9: note = Seed: LVVVGAVGV (KRAS G12V)
WVVLGPVGT

SEQ ID NO: 65014 - protein, 9 aa, synthetic construct
  source 1..9: note = Seed: LVVVGAVGV (KRAS G12V)
WVVLGPVGV

SEQ ID NO: 65015 - protein, 9 aa, synthetic construct
  source 1..9: note = Seed: LVVVGAVGV (KRAS G12V)
WVVLGPVGW

SEQ ID NO: 65016 - protein, 9 aa, synthetic construct
  source 1..9: note = Seed: LVVVGAVGV (KRAS G12V)
WVVLGPVGY

SEQ ID NO: 65017 - protein, 9 aa, synthetic construct
  source 1..9: note = Seed: LVVVGAVGV (KRAS G12V)
WVVLGQVGA

SEQ ID NO: 65018 - protein, 9 aa, synthetic construct
  source 1..9: note = Seed: LVVVGAVGV (KRAS G12V)
WVVLGQVGI

SEQ ID NO: 65019 - protein, 9 aa, synthetic construct
  source 1..9: note = Seed: LVVVGAVGV (KRAS G12V)
WVVLGQVGL

SEQ ID NO: 65020 - protein, 9 aa, synthetic construct
  source 1..9: note = Seed: LVVVGAVGV (KRAS G12V)
WVVLGQVGM

SEQ ID NO: 65021 - protein, 9 aa, synthetic construct
  source 1..9: note = Seed: LVVVGAVGV (KRAS G12V)
WVVLGQVGS

SEQ ID NO: 65022 - protein, 9 aa, synthetic construct
  source 1..9: note = Seed: LVVVGAVGV (KRAS G12V)
WVVLGQVGT

SEQ ID NO: 65023 - protein, 9 aa, synthetic construct
  source 1..9: note = Seed: LVVVGAVGV (KRAS G12V)
WVVLGQVGV

SEQ ID NO: 65024 - protein, 9 aa, synthetic construct
  source 1..9: note = Seed: LVVVGAVGV (KRAS G12V)
WVVLGRVGA

SEQ ID NO: 65025 - protein, 9 aa, synthetic construct
  source 1..9: note = Seed: LVVVGAVGV (KRAS G12V)
WVVLGRVGG

SEQ ID NO: 65026 - protein, 9 aa, synthetic construct
  source 1..9: note = Seed: LVVVGAVGV (KRAS G12V)
WVVLGRVGH

SEQ ID NO: 65027 - protein, 9 aa, synthetic construct
  source 1..9: note = Seed: LVVVGAVGV (KRAS G12V)
WVVLGRVGK

SEQ ID NO: 65028 - protein, 9 aa, synthetic construct
  source 1..9: note = Seed: LVVVGAVGV (KRAS G12V)
WVVLGRVGL

SEQ ID NO: 65029 - protein, 9 aa, synthetic construct
  source 1..9: note = Seed: LVVVGAVGV (KRAS G12V)
WVVLGRVGM

SEQ ID NO: 65030 - protein, 9 aa, synthetic construct
  source 1..9: note = Seed: LVVVGAVGV (KRAS G12V)
WVVLGRVGN

SEQ ID NO: 65031 - protein, 9 aa, synthetic construct
  source 1..9: note = Seed: LVVVGAVGV (KRAS G12V)
WVVLGRVGP

SEQ ID NO: 65032 - protein, 9 aa, synthetic construct
  source 1..9: note = Seed: LVVVGAVGV (KRAS G12V)
WVVLGRVGQ

SEQ ID NO: 65033 - protein, 9 aa, synthetic construct
  source 1..9: note = Seed: LVVVGAVGV (KRAS G12V)
WVVLGRVGR

SEQ ID NO: 65034 - protein, 9 aa, synthetic construct
  source 1..9: note = Seed: LVVVGAVGV (KRAS G12V)
WVVLGRVGS

SEQ ID NO: 65035 - protein, 9 aa, synthetic construct
  source 1..9: note = Seed: LVVVGAVGV (KRAS G12V)
WVVLGRVGT

SEQ ID NO: 65036 - protein, 9 aa, synthetic construct
  source 1..9: note = Seed: LVVVGAVGV (KRAS G12V)
WVVLGSVGA

SEQ ID NO: 65037 - protein, 9 aa, synthetic construct
  source 1..9: note = Seed: LVVVGAVGV (KRAS G12V)
WVVLGSVGC

SEQ ID NO: 65038 - protein, 9 aa, synthetic construct
  source 1..9: note = Seed: LVVVGAVGV (KRAS G12V)
WVVLGSVGD

SEQ ID NO: 65039 - protein, 9 aa, synthetic construct
  source 1..9: note = Seed: LVVVGAVGV (KRAS G12V)
WVVLGSVGE

SEQ ID NO: 65040 - protein, 9 aa, synthetic construct
  source 1..9: note = Seed: LVVVGAVGV (KRAS G12V)
WVVLGSVGF

SEQ ID NO: 65041 - protein, 9 aa, synthetic construct
  source 1..9: note = Seed: LVVVGAVGV (KRAS G12V)
WVVLGSVGG

SEQ ID NO: 65042 - protein, 9 aa, synthetic construct
  source 1..9: note = Seed: LVVVGAVGV (KRAS G12V)
WVVLGSVGH

SEQ ID NO: 65043 - protein, 9 aa, synthetic construct
  source 1..9: note = Seed: LVVVGAVGV (KRAS G12V)
WVVLGSVGI

SEQ ID NO: 65044 - protein, 9 aa, synthetic construct
  source 1..9: note = Seed: LVVVGAVGV (KRAS G12V)
WVVLGSVGK

SEQ ID NO: 65045 - protein, 9 aa, synthetic construct
  source 1..9: note = Seed: LVVVGAVGV (KRAS G12V)
WVVLGSVGL

SEQ ID NO: 65046 - protein, 9 aa, synthetic construct
  source 1..9: note = Seed: LVVVGAVGV (KRAS G12V)
WVVLGSVGM

SEQ ID NO: 65047 - protein, 9 aa, synthetic construct
  source 1..9: note = Seed: LVVVGAVGV (KRAS G12V)
WVVLGSVGN

SEQ ID NO: 65048 - protein, 9 aa, synthetic construct
  source 1..9: note = Seed: LVVVGAVGV (KRAS G12V)
WVVLGSVGP

SEQ ID NO: 65049 - protein, 9 aa, synthetic construct
  source 1..9: note = Seed: LVVVGAVGV (KRAS G12V)
WVVLGSVGQ

SEQ ID NO: 65050 - protein, 9 aa, synthetic construct
  source 1..9: note = Seed: LVVVGAVGV (KRAS G12V)
WVVLGSVGR

SEQ ID NO: 65051 - protein, 9 aa, synthetic construct
  source 1..9: note = Seed: LVVVGAVGV (KRAS G12V)
WVVLGSVGS

SEQ ID NO: 65052 - protein, 9 aa, synthetic construct
  source 1..9: note = Seed: LVVVGAVGV (KRAS G12V)
WVVLGSVGT

SEQ ID NO: 65053 - protein, 9 aa, synthetic construct
  source 1..9: note = Seed: LVVVGAVGV (KRAS G12V)
WVVLGSVGV

SEQ ID NO: 65054 - protein, 9 aa, synthetic construct
  source 1..9: note = Seed: LVVVGAVGV (KRAS G12V)
WVVLGSVGY

SEQ ID NO: 65055 - protein, 9 aa, synthetic construct
  source 1..9: note = Seed: LVVVGAVGV (KRAS G12V)
WVVLGTVGA

SEQ ID NO: 65056 - protein, 9 aa, synthetic construct
  source 1..9: note = Seed: LVVVGAVGV (KRAS G12V)
WVVLGTVGD

SEQ ID NO: 65057 - protein, 9 aa, synthetic construct
  source 1..9: note = Seed: LVVVGAVGV (KRAS G12V)
WVVLGTVGE

SEQ ID NO: 65058 - protein, 9 aa, synthetic construct
  source 1..9: note = Seed: LVVVGAVGV (KRAS G12V)
WVVLGTVGF

SEQ ID NO: 65059 - protein, 9 aa, synthetic construct
  source 1..9: note = Seed: LVVVGAVGV (KRAS G12V)
WVVLGTVGG

SEQ ID NO: 65060 - protein, 9 aa, synthetic construct
  source 1..9: note = Seed: LVVVGAVGV (KRAS G12V)
WVVLGTVGH

SEQ ID NO: 65061 - protein, 9 aa, synthetic construct
  source 1..9: note = Seed: LVVVGAVGV (KRAS G12V)
WVVLGTVGI

SEQ ID NO: 65062 - protein, 9 aa, synthetic construct
  source 1..9: note = Seed: LVVVGAVGV (KRAS G12V)
WVVLGTVGK

SEQ ID NO: 65063 - protein, 9 aa, synthetic construct
  source 1..9: note = Seed: LVVVGAVGV (KRAS G12V)
WVVLGTVGL

SEQ ID NO: 65064 - protein, 9 aa, synthetic construct
  source 1..9: note = Seed: LVVVGAVGV (KRAS G12V)
WVVLGTVGM

SEQ ID NO: 65065 - protein, 9 aa, synthetic construct
  source 1..9: note = Seed: LVVVGAVGV (KRAS G12V)
WVVLGTVGN

SEQ ID NO: 65066 - protein, 9 aa, synthetic construct
  source 1..9: note = Seed: LVVVGAVGV (KRAS G12V)
WVVLGTVGP

SEQ ID NO: 65067 - protein, 9 aa, synthetic construct
  source 1..9: note = Seed: LVVVGAVGV (KRAS G12V)
WVVLGTVGQ

SEQ ID NO: 65068 - protein, 9 aa, synthetic construct
  source 1..9: note = Seed: LVVVGAVGV (KRAS G12V)
WVVLGTVGR

SEQ ID NO: 65069 - protein, 9 aa, synthetic construct
  source 1..9: note = Seed: LVVVGAVGV (KRAS G12V)
WVVLGTVGS

SEQ ID NO: 65070 - protein, 9 aa, synthetic construct
  source 1..9: note = Seed: LVVVGAVGV (KRAS G12V)
WVVLGTVGT

SEQ ID NO: 65071 - protein, 9 aa, synthetic construct
  source 1..9: note = Seed: LVVVGAVGV (KRAS G12V)
WVVLGTVGV

SEQ ID NO: 65072 - protein, 9 aa, synthetic construct
  source 1..9: note = Seed: LVVVGAVGV (KRAS G12V)
WVVLGTVGY

SEQ ID NO: 65073 - protein, 9 aa, synthetic construct
  source 1..9: note = Seed: LVVVGAVGV (KRAS G12V)
WVVLGVVGA

SEQ ID NO: 65074 - protein, 9 aa, synthetic construct
  source 1..9: note = Seed: LVVVGAVGV (KRAS G12V)
WVVLGVVGD

SEQ ID NO: 65075 - protein, 9 aa, synthetic construct
  source 1..9: note = Seed: LVVVGAVGV (KRAS G12V)
WVVLGVVGE

SEQ ID NO: 65076 - protein, 9 aa, synthetic construct
  source 1..9: note = Seed: LVVVGAVGV (KRAS G12V)
WVVLGVVGG

SEQ ID NO: 65077 - protein, 9 aa, synthetic construct
  source 1..9: note = Seed: LVVVGAVGV (KRAS G12V)
WVVLGVVGH

SEQ ID NO: 65078 - protein, 9 aa, synthetic construct
  source 1..9: note = Seed: LVVVGAVGV (KRAS G12V)
WVVLGVVGI

SEQ ID NO: 65079 - protein, 9 aa, synthetic construct
  source 1..9: note = Seed: LVVVGAVGV (KRAS G12V)
WVVLGVVGK

SEQ ID NO: 65080 - protein, 9 aa, synthetic construct
  source 1..9: note = Seed: LVVVGAVGV (KRAS G12V)
WVVLGVVGL

SEQ ID NO: 65081 - protein, 9 aa, synthetic construct
  source 1..9: note = Seed: LVVVGAVGV (KRAS G12V)
WVVLGVVGM

SEQ ID NO: 65082 - protein, 9 aa, synthetic construct
  source 1..9: note = Seed: LVVVGAVGV (KRAS G12V)
WVVLGVVGN

SEQ ID NO: 65083 - protein, 9 aa, synthetic construct
  source 1..9: note = Seed: LVVVGAVGV (KRAS G12V)
WVVLGVVGP

SEQ ID NO: 65084 - protein, 9 aa, synthetic construct
  source 1..9: note = Seed: LVVVGAVGV (KRAS G12V)
WVVLGVVGQ

SEQ ID NO: 65085 - protein, 9 aa, synthetic construct
  source 1..9: note = Seed: LVVVGAVGV (KRAS G12V)
WVVLGVVGR

SEQ ID NO: 65086 - protein, 9 aa, synthetic construct
  source 1..9: note = Seed: LVVVGAVGV (KRAS G12V)
WVVLGVVGS

SEQ ID NO: 65087 - protein, 9 aa, synthetic construct
  source 1..9: note = Seed: LVVVGAVGV (KRAS G12V)
WVVLGVVGT

SEQ ID NO: 65088 - protein, 9 aa, synthetic construct
  source 1..9: note = Seed: LVVVGAVGV (KRAS G12V)
WVVLGVVGV

SEQ ID NO: 65089 - protein, 9 aa, synthetic construct
  source 1..9: note = Seed: LVVVGAVGV (KRAS G12V)
WVVMGAVGA

SEQ ID NO: 65090 - protein, 9 aa, synthetic construct
  source 1..9: note = Seed: LVVVGAVGV (KRAS G12V)
WVVMGAVGC

SEQ ID NO: 65091 - protein, 9 aa, synthetic construct
  source 1..9: note = Seed: LVVVGAVGV (KRAS G12V)
WVVMGAVGD

SEQ ID NO: 65092 - protein, 9 aa, synthetic construct
  source 1..9: note = Seed: LVVVGAVGV (KRAS G12V)
WVVMGAVGE

SEQ ID NO: 65093 - protein, 9 aa, synthetic construct
  source 1..9: note = Seed: LVVVGAVGV (KRAS G12V)
WVVMGAVGF

SEQ ID NO: 65094 - protein, 9 aa, synthetic construct
  source 1..9: note = Seed: LVVVGAVGV (KRAS G12V)
WVVMGAVGG

SEQ ID NO: 65095 - protein, 9 aa, synthetic construct
  source 1..9: note = Seed: LVVVGAVGV (KRAS G12V)
WVVMGAVGH

SEQ ID NO: 65096 - protein, 9 aa, synthetic construct
  source 1..9: note = Seed: LVVVGAVGV (KRAS G12V)
WVVMGAVGI

SEQ ID NO: 65097 - protein, 9 aa, synthetic construct
  source 1..9: note = Seed: LVVVGAVGV (KRAS G12V)
WVVMGAVGK

SEQ ID NO: 65098 - protein, 9 aa, synthetic construct
  source 1..9: note = Seed: LVVVGAVGV (KRAS G12V)
WVVMGAVGL

SEQ ID NO: 65099 - protein, 9 aa, synthetic construct
  source 1..9: note = Seed: LVVVGAVGV (KRAS G12V)
WVVMGAVGM

SEQ ID NO: 65100 - protein, 9 aa, synthetic construct
  source 1..9: note = Seed: LVVVGAVGV (KRAS G12V)
WVVMGAVGN

SEQ ID NO: 65101 - protein, 9 aa, synthetic construct
  source 1..9: note = Seed: LVVVGAVGV (KRAS G12V)
WVVMGAVGP

SEQ ID NO: 65102 - protein, 9 aa, synthetic construct
  source 1..9: note = Seed: LVVVGAVGV (KRAS G12V)
WVVMGAVGQ

SEQ ID NO: 65103 - protein, 9 aa, synthetic construct
  source 1..9: note = Seed: LVVVGAVGV (KRAS G12V)
WVVMGAVGR

SEQ ID NO: 65104 - protein, 9 aa, synthetic construct
  source 1..9: note = Seed: LVVVGAVGV (KRAS G12V)
WVVMGAVGS

SEQ ID NO: 65105 - protein, 9 aa, synthetic construct
  source 1..9: note = Seed: LVVVGAVGV (KRAS G12V)
WVVMGAVGT

SEQ ID NO: 65106 - protein, 9 aa, synthetic construct
  source 1..9: note = Seed: LVVVGAVGV (KRAS G12V)
WVVMGAVGV

SEQ ID NO: 65107 - protein, 9 aa, synthetic construct
  source 1..9: note = Seed: LVVVGAVGV (KRAS G12V)
WVVMGAVGY

SEQ ID NO: 65108 - protein, 9 aa, synthetic construct
  source 1..9: note = Seed: LVVVGAVGV (KRAS G12V)
WVVMGDVGA

SEQ ID NO: 65109 - protein, 9 aa, synthetic construct
  source 1..9: note = Seed: LVVVGAVGV (KRAS G12V)
WVVMGDVGI

SEQ ID NO: 65110 - protein, 9 aa, synthetic construct
  source 1..9: note = Seed: LVVVGAVGV (KRAS G12V)
WVVMGDVGL

SEQ ID NO: 65111 - protein, 9 aa, synthetic construct
  source 1..9: note = Seed: LVVVGAVGV (KRAS G12V)
WVVMGDVGM

SEQ ID NO: 65112 - protein, 9 aa, synthetic construct
  source 1..9: note = Seed: LVVVGAVGV (KRAS G12V)
WVVMGDVGS

SEQ ID NO: 65113 - protein, 9 aa, synthetic construct
  source 1..9: note = Seed: LVVVGAVGV (KRAS G12V)
WVVMGDVGT

SEQ ID NO: 65114 - protein, 9 aa, synthetic construct
  source 1..9: note = Seed: LVVVGAVGV (KRAS G12V)
WVVMGDVGV

SEQ ID NO: 65115 - protein, 9 aa, synthetic construct
  source 1..9: note = Seed: LVVVGAVGV (KRAS G12V)
WVVMGEVGA

SEQ ID NO: 65116 - protein, 9 aa, synthetic construct
  source 1..9: note = Seed: LVVVGAVGV (KRAS G12V)
WVVMGEVGI

SEQ ID NO: 65117 - protein, 9 aa, synthetic construct
  source 1..9: note = Seed: LVVVGAVGV (KRAS G12V)
WVVMGEVGL

SEQ ID NO: 65118 - protein, 9 aa, synthetic construct
  source 1..9: note = Seed: LVVVGAVGV (KRAS G12V)
WVVMGEVGM

SEQ ID NO: 65119 - protein, 9 aa, synthetic construct
  source 1..9: note = Seed: LVVVGAVGV (KRAS G12V)
WVVMGEVGS

SEQ ID NO: 65120 - protein, 9 aa, synthetic construct
  source 1..9: note = Seed: LVVVGAVGV (KRAS G12V)
WVVMGEVGT

SEQ ID NO: 65121 - protein, 9 aa, synthetic construct
  source 1..9: note = Seed: LVVVGAVGV (KRAS G12V)
WVVMGEVGV

SEQ ID NO: 65122 - protein, 9 aa, synthetic construct
  source 1..9: note = Seed: LVVVGAVGV (KRAS G12V)
WVVMGGVGA

SEQ ID NO: 65123 - protein, 9 aa, synthetic construct
  source 1..9: note = Seed: LVVVGAVGV (KRAS G12V)
WVVMGGVGC

SEQ ID NO: 65124 - protein, 9 aa, synthetic construct
  source 1..9: note = Seed: LVVVGAVGV (KRAS G12V)
WVVMGGVGD

SEQ ID NO: 65125 - protein, 9 aa, synthetic construct
  source 1..9: note = Seed: LVVVGAVGV (KRAS G12V)
WVVMGGVGE

SEQ ID NO: 65126 - protein, 9 aa, synthetic construct
  source 1..9: note = Seed: LVVVGAVGV (KRAS G12V)
WVVMGGVGF

SEQ ID NO: 65127 - protein, 9 aa, synthetic construct
  source 1..9: note = Seed: LVVVGAVGV (KRAS G12V)
WVVMGGVGG

SEQ ID NO: 65128 - protein, 9 aa, synthetic construct
  source 1..9: note = Seed: LVVVGAVGV (KRAS G12V)
WVVMGGVGH

SEQ ID NO: 65129 - protein, 9 aa, synthetic construct
  source 1..9: note = Seed: LVVVGAVGV (KRAS G12V)
WVVMGGVGI

SEQ ID NO: 65130 - protein, 9 aa, synthetic construct
  source 1..9: note = Seed: LVVVGAVGV (KRAS G12V)
WVVMGGVGK

SEQ ID NO: 65131 - protein, 9 aa, synthetic construct
  source 1..9: note = Seed: LVVVGAVGV (KRAS G12V)
WVVMGGVGL

SEQ ID NO: 65132 - protein, 9 aa, synthetic construct
  source 1..9: note = Seed: LVVVGAVGV (KRAS G12V)
WVVMGGVGM

SEQ ID NO: 65133 - protein, 9 aa, synthetic construct
  source 1..9: note = Seed: LVVVGAVGV (KRAS G12V)
WVVMGGVGN

SEQ ID NO: 65134 - protein, 9 aa, synthetic construct
  source 1..9: note = Seed: LVVVGAVGV (KRAS G12V)
WVVMGGVGP

SEQ ID NO: 65135 - protein, 9 aa, synthetic construct
  source 1..9: note = Seed: LVVVGAVGV (KRAS G12V)
WVVMGGVGQ

SEQ ID NO: 65136 - protein, 9 aa, synthetic construct
  source 1..9: note = Seed: LVVVGAVGV (KRAS G12V)
WVVMGGVGR

SEQ ID NO: 65137 - protein, 9 aa, synthetic construct
  source 1..9: note = Seed: LVVVGAVGV (KRAS G12V)
WVVMGGVGS

SEQ ID NO: 65138 - protein, 9 aa, synthetic construct
  source 1..9: note = Seed: LVVVGAVGV (KRAS G12V)
WVVMGGVGT

SEQ ID NO: 65139 - protein, 9 aa, synthetic construct
  source 1..9: note = Seed: LVVVGAVGV (KRAS G12V)
WVVMGGVGV

SEQ ID NO: 65140 - protein, 9 aa, synthetic construct
  source 1..9: note = Seed: LVVVGAVGV (KRAS G12V)
WVVMGGVGY

SEQ ID NO: 65141 - protein, 9 aa, synthetic construct
  source 1..9: note = Seed: LVVVGAVGV (KRAS G12V)
WVVMGHVGA

SEQ ID NO: 65142 - protein, 9 aa, synthetic construct
  source 1..9: note = Seed: LVVVGAVGV (KRAS G12V)
WVVMGHVGH

SEQ ID NO: 65143 - protein, 9 aa, synthetic construct
  source 1..9: note = Seed: LVVVGAVGV (KRAS G12V)
WVVMGHVGI

SEQ ID NO: 65144 - protein, 9 aa, synthetic construct
  source 1..9: note = Seed: LVVVGAVGV (KRAS G12V)
WVVMGHVGL

SEQ ID NO: 65145 - protein, 9 aa, synthetic construct
  source 1..9: note = Seed: LVVVGAVGV (KRAS G12V)
WVVMGHVGM

SEQ ID NO: 65146 - protein, 9 aa, synthetic construct
  source 1..9: note = Seed: LVVVGAVGV (KRAS G12V)
WVVMGHVGR

SEQ ID NO: 65147 - protein, 9 aa, synthetic construct
  source 1..9: note = Seed: LVVVGAVGV (KRAS G12V)
WVVMGHVGS

SEQ ID NO: 65148 - protein, 9 aa, synthetic construct
  source 1..9: note = Seed: LVVVGAVGV (KRAS G12V)
WVVMGHVGT

SEQ ID NO: 65149 - protein, 9 aa, synthetic construct
  source 1..9: note = Seed: LVVVGAVGV (KRAS G12V)
WVVMGHVGV

SEQ ID NO: 65150 - protein, 9 aa, synthetic construct
  source 1..9: note = Seed: LVVVGAVGV (KRAS G12V)
WVVMGIVGA

SEQ ID NO: 65151 - protein, 9 aa, synthetic construct
  source 1..9: note = Seed: LVVVGAVGV (KRAS G12V)
WVVMGIVGD

SEQ ID NO: 65152 - protein, 9 aa, synthetic construct
  source 1..9: note = Seed: LVVVGAVGV (KRAS G12V)
WVVMGIVGE

SEQ ID NO: 65153 - protein, 9 aa, synthetic construct
  source 1..9: note = Seed: LVVVGAVGV (KRAS G12V)
WVVMGIVGH

SEQ ID NO: 65154 - protein, 9 aa, synthetic construct
  source 1..9: note = Seed: LVVVGAVGV (KRAS G12V)
WVVMGIVGI

SEQ ID NO: 65155 - protein, 9 aa, synthetic construct
  source 1..9: note = Seed: LVVVGAVGV (KRAS G12V)
WVVMGIVGK

SEQ ID NO: 65156 - protein, 9 aa, synthetic construct
  source 1..9: note = Seed: LVVVGAVGV (KRAS G12V)
WVVMGIVGL

SEQ ID NO: 65157 - protein, 9 aa, synthetic construct
  source 1..9: note = Seed: LVVVGAVGV (KRAS G12V)
WVVMGIVGM

SEQ ID NO: 65158 - protein, 9 aa, synthetic construct
  source 1..9: note = Seed: LVVVGAVGV (KRAS G12V)
WVVMGIVGN

SEQ ID NO: 65159 - protein, 9 aa, synthetic construct
  source 1..9: note = Seed: LVVVGAVGV (KRAS G12V)
WVVMGIVGP

SEQ ID NO: 65160 - protein, 9 aa, synthetic construct
  source 1..9: note = Seed: LVVVGAVGV (KRAS G12V)
WVVMGIVGQ

SEQ ID NO: 65161 - protein, 9 aa, synthetic construct
  source 1..9: note = Seed: LVVVGAVGV (KRAS G12V)
WVVMGIVGR

SEQ ID NO: 65162 - protein, 9 aa, synthetic construct
  source 1..9: note = Seed: LVVVGAVGV (KRAS G12V)
WVVMGIVGS

SEQ ID NO: 65163 - protein, 9 aa, synthetic construct
  source 1..9: note = Seed: LVVVGAVGV (KRAS G12V)
WVVMGIVGT

SEQ ID NO: 65164 - protein, 9 aa, synthetic construct
  source 1..9: note = Seed: LVVVGAVGV (KRAS G12V)
WVVMGIVGV

SEQ ID NO: 65165 - protein, 9 aa, synthetic construct
  source 1..9: note = Seed: LVVVGAVGV (KRAS G12V)
WVVMGKVGA

SEQ ID NO: 65166 - protein, 9 aa, synthetic construct
  source 1..9: note = Seed: LVVVGAVGV (KRAS G12V)
WVVMGKVGG

SEQ ID NO: 65167 - protein, 9 aa, synthetic construct
  source 1..9: note = Seed: LVVVGAVGV (KRAS G12V)
WVVMGKVGH

SEQ ID NO: 65168 - protein, 9 aa, synthetic construct
  source 1..9: note = Seed: LVVVGAVGV (KRAS G12V)
WVVMGKVGI

SEQ ID NO: 65169 - protein, 9 aa, synthetic construct
  source 1..9: note = Seed: LVVVGAVGV (KRAS G12V)
WVVMGKVGK

SEQ ID NO: 65170 - protein, 9 aa, synthetic construct
  source 1..9: note = Seed: LVVVGAVGV (KRAS G12V)
WVVMGKVGL

SEQ ID NO: 65171 - protein, 9 aa, synthetic construct
  source 1..9: note = Seed: LVVVGAVGV (KRAS G12V)
WVVMGKVGM

SEQ ID NO: 65172 - protein, 9 aa, synthetic construct
  source 1..9: note = Seed: LVVVGAVGV (KRAS G12V)
WVVMGKVGN

SEQ ID NO: 65173 - protein, 9 aa, synthetic construct
  source 1..9: note = Seed: LVVVGAVGV (KRAS G12V)
WVVMGKVGP

SEQ ID NO: 65174 - protein, 9 aa, synthetic construct
  source 1..9: note = Seed: LVVVGAVGV (KRAS G12V)
WVVMGKVGQ

SEQ ID NO: 65175 - protein, 9 aa, synthetic construct
  source 1..9: note = Seed: LVVVGAVGV (KRAS G12V)
WVVMGKVGR

SEQ ID NO: 65176 - protein, 9 aa, synthetic construct
  source 1..9: note = Seed: LVVVGAVGV (KRAS G12V)
WVVMGKVGS

SEQ ID NO: 65177 - protein, 9 aa, synthetic construct
  source 1..9: note = Seed: LVVVGAVGV (KRAS G12V)
WVVMGKVGT

SEQ ID NO: 65178 - protein, 9 aa, synthetic construct
  source 1..9: note = Seed: LVVVGAVGV (KRAS G12V)
WVVMGKVGV

SEQ ID NO: 65179 - protein, 9 aa, synthetic construct
  source 1..9: note = Seed: LVVVGAVGV (KRAS G12V)
WVVMGLVGA

SEQ ID NO: 65180 - protein, 9 aa, synthetic construct
  source 1..9: note = Seed: LVVVGAVGV (KRAS G12V)
WVVMGLVGH

SEQ ID NO: 65181 - protein, 9 aa, synthetic construct
  source 1..9: note = Seed: LVVVGAVGV (KRAS G12V)
WVVMGLVGK

SEQ ID NO: 65182 - protein, 9 aa, synthetic construct
  source 1..9: note = Seed: LVVVGAVGV (KRAS G12V)
WVVMGLVGL

SEQ ID NO: 65183 - protein, 9 aa, synthetic construct
  source 1..9: note = Seed: LVVVGAVGV (KRAS G12V)
WVVMGLVGM

SEQ ID NO: 65184 - protein, 9 aa, synthetic construct
  source 1..9: note = Seed: LVVVGAVGV (KRAS G12V)
WVVMGLVGN

SEQ ID NO: 65185 - protein, 9 aa, synthetic construct
  source 1..9: note = Seed: LVVVGAVGV (KRAS G12V)
WVVMGLVGR

SEQ ID NO: 65186 - protein, 9 aa, synthetic construct
  source 1..9: note = Seed: LVVVGAVGV (KRAS G12V)
WVVMGLVGS

SEQ ID NO: 65187 - protein, 9 aa, synthetic construct
  source 1..9: note = Seed: LVVVGAVGV (KRAS G12V)
WVVMGLVGV

SEQ ID NO: 65188 - protein, 9 aa, synthetic construct
  source 1..9: note = Seed: LVVVGAVGV (KRAS G12V)
WVVMGMVGA

SEQ ID NO: 65189 - protein, 9 aa, synthetic construct
  source 1..9: note = Seed: LVVVGAVGV (KRAS G12V)
WVVMGMVGH

SEQ ID NO: 65190 - protein, 9 aa, synthetic construct
  source 1..9: note = Seed: LVVVGAVGV (KRAS G12V)
WVVMGMVGI

SEQ ID NO: 65191 - protein, 9 aa, synthetic construct
  source 1..9: note = Seed: LVVVGAVGV (KRAS G12V)
WVVMGMVGK

SEQ ID NO: 65192 - protein, 9 aa, synthetic construct
  source 1..9: note = Seed: LVVVGAVGV (KRAS G12V)
WVVMGMVGL

SEQ ID NO: 65193 - protein, 9 aa, synthetic construct
  source 1..9: note = Seed: LVVVGAVGV (KRAS G12V)
WVVMGMVGM

SEQ ID NO: 65194 - protein, 9 aa, synthetic construct
  source 1..9: note = Seed: LVVVGAVGV (KRAS G12V)
WVVMGMVGN

SEQ ID NO: 65195 - protein, 9 aa, synthetic construct
  source 1..9: note = Seed: LVVVGAVGV (KRAS G12V)
WVVMGMVGR

SEQ ID NO: 65196 - protein, 9 aa, synthetic construct
  source 1..9: note = Seed: LVVVGAVGV (KRAS G12V)
WVVMGMVGS

SEQ ID NO: 65197 - protein, 9 aa, synthetic construct
  source 1..9: note = Seed: LVVVGAVGV (KRAS G12V)
WVVMGMVGT

SEQ ID NO: 65198 - protein, 9 aa, synthetic construct
  source 1..9: note = Seed: LVVVGAVGV (KRAS G12V)
WVVMGMVGV

SEQ ID NO: 65199 - protein, 9 aa, synthetic construct
  source 1..9: note = Seed: LVVVGAVGV (KRAS G12V)
WVVMGMVGY

SEQ ID NO: 65200 - protein, 9 aa, synthetic construct
  source 1..9: note = Seed: LVVVGAVGV (KRAS G12V)
WVVMGNVGA

SEQ ID NO: 65201 - protein, 9 aa, synthetic construct
  source 1..9: note = Seed: LVVVGAVGV (KRAS G12V)
WVVMGNVGC

SEQ ID NO: 65202 - protein, 9 aa, synthetic construct
  source 1..9: note = Seed: LVVVGAVGV (KRAS G12V)
WVVMGNVGD

SEQ ID NO: 65203 - protein, 9 aa, synthetic construct
  source 1..9: note = Seed: LVVVGAVGV (KRAS G12V)
WVVMGNVGE

SEQ ID NO: 65204 - protein, 9 aa, synthetic construct
  source 1..9: note = Seed: LVVVGAVGV (KRAS G12V)
WVVMGNVGF

SEQ ID NO: 65205 - protein, 9 aa, synthetic construct
  source 1..9: note = Seed: LVVVGAVGV (KRAS G12V)
WVVMGNVGG

SEQ ID NO: 65206 - protein, 9 aa, synthetic construct
  source 1..9: note = Seed: LVVVGAVGV (KRAS G12V)
WVVMGNVGH

SEQ ID NO: 65207 - protein, 9 aa, synthetic construct
  source 1..9: note = Seed: LVVVGAVGV (KRAS G12V)
WVVMGNVGI

SEQ ID NO: 65208 - protein, 9 aa, synthetic construct
  source 1..9: note = Seed: LVVVGAVGV (KRAS G12V)
WVVMGNVGK

SEQ ID NO: 65209 - protein, 9 aa, synthetic construct
  source 1..9: note = Seed: LVVVGAVGV (KRAS G12V)
WVVMGNVGL

SEQ ID NO: 65210 - protein, 9 aa, synthetic construct
  source 1..9: note = Seed: LVVVGAVGV (KRAS G12V)
WVVMGNVGM

SEQ ID NO: 65211 - protein, 9 aa, synthetic construct
  source 1..9: note = Seed: LVVVGAVGV (KRAS G12V)
WVVMGNVGN

SEQ ID NO: 65212 - protein, 9 aa, synthetic construct
  source 1..9: note = Seed: LVVVGAVGV (KRAS G12V)
WVVMGNVGP

SEQ ID NO: 65213 - protein, 9 aa, synthetic construct
  source 1..9: note = Seed: LVVVGAVGV (KRAS G12V)
WVVMGNVGQ

SEQ ID NO: 65214 - protein, 9 aa, synthetic construct
  source 1..9: note = Seed: LVVVGAVGV (KRAS G12V)
WVVMGNVGR

SEQ ID NO: 65215 - protein, 9 aa, synthetic construct
  source 1..9: note = Seed: LVVVGAVGV (KRAS G12V)
WVVMGNVGS

SEQ ID NO: 65216 - protein, 9 aa, synthetic construct
  source 1..9: note = Seed: LVVVGAVGV (KRAS G12V)
WVVMGNVGT

SEQ ID NO: 65217 - protein, 9 aa, synthetic construct
  source 1..9: note = Seed: LVVVGAVGV (KRAS G12V)
WVVMGNVGV

SEQ ID NO: 65218 - protein, 9 aa, synthetic construct
  source 1..9: note = Seed: LVVVGAVGV (KRAS G12V)
WVVMGNVGY

SEQ ID NO: 65219 - protein, 9 aa, synthetic construct
  source 1..9: note = Seed: LVVVGAVGV (KRAS G12V)
WVVMGPVGA

SEQ ID NO: 65220 - protein, 9 aa, synthetic construct
  source 1..9: note = Seed: LVVVGAVGV (KRAS G12V)
WVVMGPVGC

SEQ ID NO: 65221 - protein, 9 aa, synthetic construct
  source 1..9: note = Seed: LVVVGAVGV (KRAS G12V)
WVVMGPVGD

SEQ ID NO: 65222 - protein, 9 aa, synthetic construct
  source 1..9: note = Seed: LVVVGAVGV (KRAS G12V)
WVVMGPVGE

SEQ ID NO: 65223 - protein, 9 aa, synthetic construct
  source 1..9: note = Seed: LVVVGAVGV (KRAS G12V)
WVVMGPVGF

SEQ ID NO: 65224 - protein, 9 aa, synthetic construct
  source 1..9: note = Seed: LVVVGAVGV (KRAS G12V)
WVVMGPVGG

SEQ ID NO: 65225 - protein, 9 aa, synthetic construct
  source 1..9: note = Seed: LVVVGAVGV (KRAS G12V)
WVVMGPVGH

SEQ ID NO: 65226 - protein, 9 aa, synthetic construct
  source 1..9: note = Seed: LVVVGAVGV (KRAS G12V)
WVVMGPVGI

SEQ ID NO: 65227 - protein, 9 aa, synthetic construct
  source 1..9: note = Seed: LVVVGAVGV (KRAS G12V)
WVVMGPVGK

SEQ ID NO: 65228 - protein, 9 aa, synthetic construct
  source 1..9: note = Seed: LVVVGAVGV (KRAS G12V)
WVVMGPVGL

SEQ ID NO: 65229 - protein, 9 aa, synthetic construct
  source 1..9: note = Seed: LVVVGAVGV (KRAS G12V)
WVVMGPVGM

SEQ ID NO: 65230 - protein, 9 aa, synthetic construct
  source 1..9: note = Seed: LVVVGAVGV (KRAS G12V)
WVVMGPVGN

SEQ ID NO: 65231 - protein, 9 aa, synthetic construct
  source 1..9: note = Seed: LVVVGAVGV (KRAS G12V)
WVVMGPVGP

SEQ ID NO: 65232 - protein, 9 aa, synthetic construct
  source 1..9: note = Seed: LVVVGAVGV (KRAS G12V)
WVVMGPVGQ

SEQ ID NO: 65233 - protein, 9 aa, synthetic construct
  source 1..9: note = Seed: LVVVGAVGV (KRAS G12V)
WVVMGPVGR

SEQ ID NO: 65234 - protein, 9 aa, synthetic construct
  source 1..9: note = Seed: LVVVGAVGV (KRAS G12V)
WVVMGPVGS

SEQ ID NO: 65235 - protein, 9 aa, synthetic construct
  source 1..9: note = Seed: LVVVGAVGV (KRAS G12V)
WVVMGPVGT

SEQ ID NO: 65236 - protein, 9 aa, synthetic construct
  source 1..9: note = Seed: LVVVGAVGV (KRAS G12V)
WVVMGPVGV

SEQ ID NO: 65237 - protein, 9 aa, synthetic construct
  source 1..9: note = Seed: LVVVGAVGV (KRAS G12V)
WVVMGPVGW

SEQ ID NO: 65238 - protein, 9 aa, synthetic construct
  source 1..9: note = Seed: LVVVGAVGV (KRAS G12V)
WVVMGPVGY

SEQ ID NO: 65239 - protein, 9 aa, synthetic construct
  source 1..9: note = Seed: LVVVGAVGV (KRAS G12V)
WVVMGQVGA

SEQ ID NO: 65240 - protein, 9 aa, synthetic construct
  source 1..9: note = Seed: LVVVGAVGV (KRAS G12V)
WVVMGQVGI

SEQ ID NO: 65241 - protein, 9 aa, synthetic construct
  source 1..9: note = Seed: LVVVGAVGV (KRAS G12V)
WVVMGQVGL

SEQ ID NO: 65242 - protein, 9 aa, synthetic construct
  source 1..9: note = Seed: LVVVGAVGV (KRAS G12V)
WVVMGQVGM

SEQ ID NO: 65243 - protein, 9 aa, synthetic construct
  source 1..9: note = Seed: LVVVGAVGV (KRAS G12V)
WVVMGQVGS

SEQ ID NO: 65244 - protein, 9 aa, synthetic construct
  source 1..9: note = Seed: LVVVGAVGV (KRAS G12V)
WVVMGQVGT

SEQ ID NO: 65245 - protein, 9 aa, synthetic construct
  source 1..9: note = Seed: LVVVGAVGV (KRAS G12V)
WVVMGQVGV

SEQ ID NO: 65246 - protein, 9 aa, synthetic construct
  source 1..9: note = Seed: LVVVGAVGV (KRAS G12V)
WVVMGRVGA

SEQ ID NO: 65247 - protein, 9 aa, synthetic construct
  source 1..9: note = Seed: LVVVGAVGV (KRAS G12V)
WVVMGRVGG

SEQ ID NO: 65248 - protein, 9 aa, synthetic construct
  source 1..9: note = Seed: LVVVGAVGV (KRAS G12V)
WVVMGRVGH

SEQ ID NO: 65249 - protein, 9 aa, synthetic construct
  source 1..9: note = Seed: LVVVGAVGV (KRAS G12V)
WVVMGRVGI

SEQ ID NO: 65250 - protein, 9 aa, synthetic construct
  source 1..9: note = Seed: LVVVGAVGV (KRAS G12V)
WVVMGRVGK

SEQ ID NO: 65251 - protein, 9 aa, synthetic construct
  source 1..9: note = Seed: LVVVGAVGV (KRAS G12V)
WVVMGRVGL

SEQ ID NO: 65252 - protein, 9 aa, synthetic construct
  source 1..9: note = Seed: LVVVGAVGV (KRAS G12V)
WVVMGRVGM

SEQ ID NO: 65253 - protein, 9 aa, synthetic construct
  source 1..9: note = Seed: LVVVGAVGV (KRAS G12V)
WVVMGRVGN

SEQ ID NO: 65254 - protein, 9 aa, synthetic construct
  source 1..9: note = Seed: LVVVGAVGV (KRAS G12V)
WVVMGRVGP

SEQ ID NO: 65255 - protein, 9 aa, synthetic construct
  source 1..9: note = Seed: LVVVGAVGV (KRAS G12V)
WVVMGRVGQ

SEQ ID NO: 65256 - protein, 9 aa, synthetic construct
  source 1..9: note = Seed: LVVVGAVGV (KRAS G12V)
WVVMGRVGR

SEQ ID NO: 65257 - protein, 9 aa, synthetic construct
  source 1..9: note = Seed: LVVVGAVGV (KRAS G12V)
WVVMGRVGS

SEQ ID NO: 65258 - protein, 9 aa, synthetic construct
  source 1..9: note = Seed: LVVVGAVGV (KRAS G12V)
WVVMGRVGT

SEQ ID NO: 65259 - protein, 9 aa, synthetic construct
  source 1..9: note = Seed: LVVVGAVGV (KRAS G12V)
WVVMGRVGV

SEQ ID NO: 65260 - protein, 9 aa, synthetic construct
  source 1..9: note = Seed: LVVVGAVGV (KRAS G12V)
WVVMGSVGA

SEQ ID NO: 65261 - protein, 9 aa, synthetic construct
  source 1..9: note = Seed: LVVVGAVGV (KRAS G12V)
WVVMGSVGC

SEQ ID NO: 65262 - protein, 9 aa, synthetic construct
  source 1..9: note = Seed: LVVVGAVGV (KRAS G12V)
WVVMGSVGD

SEQ ID NO: 65263 - protein, 9 aa, synthetic construct
  source 1..9: note = Seed: LVVVGAVGV (KRAS G12V)
WVVMGSVGE

SEQ ID NO: 65264 - protein, 9 aa, synthetic construct
  source 1..9: note = Seed: LVVVGAVGV (KRAS G12V)
WVVMGSVGF

SEQ ID NO: 65265 - protein, 9 aa, synthetic construct
  source 1..9: note = Seed: LVVVGAVGV (KRAS G12V)
WVVMGSVGG

SEQ ID NO: 65266 - protein, 9 aa, synthetic construct
  source 1..9: note = Seed: LVVVGAVGV (KRAS G12V)
WVVMGSVGH

SEQ ID NO: 65267 - protein, 9 aa, synthetic construct
  source 1..9: note = Seed: LVVVGAVGV (KRAS G12V)
WVVMGSVGI

SEQ ID NO: 65268 - protein, 9 aa, synthetic construct
  source 1..9: note = Seed: LVVVGAVGV (KRAS G12V)
WVVMGSVGK

SEQ ID NO: 65269 - protein, 9 aa, synthetic construct
  source 1..9: note = Seed: LVVVGAVGV (KRAS G12V)
WVVMGSVGL

SEQ ID NO: 65270 - protein, 9 aa, synthetic construct
  source 1..9: note = Seed: LVVVGAVGV (KRAS G12V)
WVVMGSVGM

SEQ ID NO: 65271 - protein, 9 aa, synthetic construct
  source 1..9: note = Seed: LVVVGAVGV (KRAS G12V)
WVVMGSVGN

SEQ ID NO: 65272 - protein, 9 aa, synthetic construct
  source 1..9: note = Seed: LVVVGAVGV (KRAS G12V)
WVVMGSVGP

SEQ ID NO: 65273 - protein, 9 aa, synthetic construct
  source 1..9: note = Seed: LVVVGAVGV (KRAS G12V)
WVVMGSVGQ

SEQ ID NO: 65274 - protein, 9 aa, synthetic construct
  source 1..9: note = Seed: LVVVGAVGV (KRAS G12V)
WVVMGSVGR

SEQ ID NO: 65275 - protein, 9 aa, synthetic construct
  source 1..9: note = Seed: LVVVGAVGV (KRAS G12V)
WVVMGSVGS

SEQ ID NO: 65276 - protein, 9 aa, synthetic construct
  source 1..9: note = Seed: LVVVGAVGV (KRAS G12V)
WVVMGSVGT

SEQ ID NO: 65277 - protein, 9 aa, synthetic construct
  source 1..9: note = Seed: LVVVGAVGV (KRAS G12V)
WVVMGSVGV

SEQ ID NO: 65278 - protein, 9 aa, synthetic construct
  source 1..9: note = Seed: LVVVGAVGV (KRAS G12V)
WVVMGSVGY

SEQ ID NO: 65279 - protein, 9 aa, synthetic construct
  source 1..9: note = Seed: LVVVGAVGV (KRAS G12V)
WVVMGTVGA

SEQ ID NO: 65280 - protein, 9 aa, synthetic construct
  source 1..9: note = Seed: LVVVGAVGV (KRAS G12V)
WVVMGTVGD

SEQ ID NO: 65281 - protein, 9 aa, synthetic construct
  source 1..9: note = Seed: LVVVGAVGV (KRAS G12V)
WVVMGTVGE

SEQ ID NO: 65282 - protein, 9 aa, synthetic construct
  source 1..9: note = Seed: LVVVGAVGV (KRAS G12V)
WVVMGTVGF

SEQ ID NO: 65283 - protein, 9 aa, synthetic construct
  source 1..9: note = Seed: LVVVGAVGV (KRAS G12V)
WVVMGTVGG

SEQ ID NO: 65284 - protein, 9 aa, synthetic construct
  source 1..9: note = Seed: LVVVGAVGV (KRAS G12V)
WVVMGTVGH

SEQ ID NO: 65285 - protein, 9 aa, synthetic construct
  source 1..9: note = Seed: LVVVGAVGV (KRAS G12V)
WVVMGTVGI

SEQ ID NO: 65286 - protein, 9 aa, synthetic construct
  source 1..9: note = Seed: LVVVGAVGV (KRAS G12V)
WVVMGTVGK

SEQ ID NO: 65287 - protein, 9 aa, synthetic construct
  source 1..9: note = Seed: LVVVGAVGV (KRAS G12V)
WVVMGTVGL

SEQ ID NO: 65288 - protein, 9 aa, synthetic construct
  source 1..9: note = Seed: LVVVGAVGV (KRAS G12V)
WVVMGTVGM

SEQ ID NO: 65289 - protein, 9 aa, synthetic construct
  source 1..9: note = Seed: LVVVGAVGV (KRAS G12V)
WVVMGTVGN

SEQ ID NO: 65290 - protein, 9 aa, synthetic construct
  source 1..9: note = Seed: LVVVGAVGV (KRAS G12V)
WVVMGTVGP

SEQ ID NO: 65291 - protein, 9 aa, synthetic construct
  source 1..9: note = Seed: LVVVGAVGV (KRAS G12V)
WVVMGTVGQ

SEQ ID NO: 65292 - protein, 9 aa, synthetic construct
  source 1..9: note = Seed: LVVVGAVGV (KRAS G12V)
WVVMGTVGR

SEQ ID NO: 65293 - protein, 9 aa, synthetic construct
  source 1..9: note = Seed: LVVVGAVGV (KRAS G12V)
WVVMGTVGS

SEQ ID NO: 65294 - protein, 9 aa, synthetic construct
  source 1..9: note = Seed: LVVVGAVGV (KRAS G12V)
WVVMGTVGT

SEQ ID NO: 65295 - protein, 9 aa, synthetic construct
  source 1..9: note = Seed: LVVVGAVGV (KRAS G12V)
WVVMGTVGV

SEQ ID NO: 65296 - protein, 9 aa, synthetic construct
  source 1..9: note = Seed: LVVVGAVGV (KRAS G12V)
WVVMGTVGY

SEQ ID NO: 65297 - protein, 9 aa, synthetic construct
  source 1..9: note = Seed: LVVVGAVGV (KRAS G12V)
WVVMGVVGA

SEQ ID NO: 65298 - protein, 9 aa, synthetic construct
  source 1..9: note = Seed: LVVVGAVGV (KRAS G12V)
WVVMGVVGD

SEQ ID NO: 65299 - protein, 9 aa, synthetic construct
  source 1..9: note = Seed: LVVVGAVGV (KRAS G12V)
WVVMGVVGE

SEQ ID NO: 65300 - protein, 9 aa, synthetic construct
  source 1..9: note = Seed: LVVVGAVGV (KRAS G12V)
WVVMGVVGG

SEQ ID NO: 65301 - protein, 9 aa, synthetic construct
  source 1..9: note = Seed: LVVVGAVGV (KRAS G12V)
WVVMGVVGH

SEQ ID NO: 65302 - protein, 9 aa, synthetic construct
  source 1..9: note = Seed: LVVVGAVGV (KRAS G12V)
WVVMGVVGI

SEQ ID NO: 65303 - protein, 9 aa, synthetic construct
  source 1..9: note = Seed: LVVVGAVGV (KRAS G12V)
WVVMGVVGK

SEQ ID NO: 65304 - protein, 9 aa, synthetic construct
  source 1..9: note = Seed: LVVVGAVGV (KRAS G12V)
WVVMGVVGL

SEQ ID NO: 65305 - protein, 9 aa, synthetic construct
  source 1..9: note = Seed: LVVVGAVGV (KRAS G12V)
WVVMGVVGM

SEQ ID NO: 65306 - protein, 9 aa, synthetic construct
  source 1..9: note = Seed: LVVVGAVGV (KRAS G12V)
WVVMGVVGN

SEQ ID NO: 65307 - protein, 9 aa, synthetic construct
  source 1..9: note = Seed: LVVVGAVGV (KRAS G12V)
WVVMGVVGP

SEQ ID NO: 65308 - protein, 9 aa, synthetic construct
  source 1..9: note = Seed: LVVVGAVGV (KRAS G12V)
WVVMGVVGQ

SEQ ID NO: 65309 - protein, 9 aa, synthetic construct
  source 1..9: note = Seed: LVVVGAVGV (KRAS G12V)
WVVMGVVGR

SEQ ID NO: 65310 - protein, 9 aa, synthetic construct
  source 1..9: note = Seed: LVVVGAVGV (KRAS G12V)
WVVMGVVGS

SEQ ID NO: 65311 - protein, 9 aa, synthetic construct
  source 1..9: note = Seed: LVVVGAVGV (KRAS G12V)
WVVMGVVGT

SEQ ID NO: 65312 - protein, 9 aa, synthetic construct
  source 1..9: note = Seed: LVVVGAVGV (KRAS G12V)
WVVMGVVGV

SEQ ID NO: 65313 - protein, 9 aa, synthetic construct
  source 1..9: note = Seed: LVVVGAVGV (KRAS G12V)
WVVMGVVGY

SEQ ID NO: 65314 - protein, 9 aa, synthetic construct
  source 1..9: note = Seed: LVVVGAVGV (KRAS G12V)
WVVMGYVGL

SEQ ID NO: 65315 - protein, 9 aa, synthetic construct
  source 1..9: note = Seed: LVVVGAVGV (KRAS G12V)
WVVMGYVGM

SEQ ID NO: 65316 - protein, 9 aa, synthetic construct
  source 1..9: note = Seed: LVVVGAVGV (KRAS G12V)
WVVNGAVGA

SEQ ID NO: 65317 - protein, 9 aa, synthetic construct
  source 1..9: note = Seed: LVVVGAVGV (KRAS G12V)
WVVNGAVGC

SEQ ID NO: 65318 - protein, 9 aa, synthetic construct
  source 1..9: note = Seed: LVVVGAVGV (KRAS G12V)
WVVNGAVGF

SEQ ID NO: 65319 - protein, 9 aa, synthetic construct
  source 1..9: note = Seed: LVVVGAVGV (KRAS G12V)
WVVNGAVGG

SEQ ID NO: 65320 - protein, 9 aa, synthetic construct
  source 1..9: note = Seed: LVVVGAVGV (KRAS G12V)
WVVNGAVGH

SEQ ID NO: 65321 - protein, 9 aa, synthetic construct
  source 1..9: note = Seed: LVVVGAVGV (KRAS G12V)
WVVNGAVGI

SEQ ID NO: 65322 - protein, 9 aa, synthetic construct
  source 1..9: note = Seed: LVVVGAVGV (KRAS G12V)
WVVNGAVGK

SEQ ID NO: 65323 - protein, 9 aa, synthetic construct
  source 1..9: note = Seed: LVVVGAVGV (KRAS G12V)
WVVNGAVGL

SEQ ID NO: 65324 - protein, 9 aa, synthetic construct
  source 1..9: note = Seed: LVVVGAVGV (KRAS G12V)
WVVNGAVGM

SEQ ID NO: 65325 - protein, 9 aa, synthetic construct
  source 1..9: note = Seed: LVVVGAVGV (KRAS G12V)
WVVNGAVGN

SEQ ID NO: 65326 - protein, 9 aa, synthetic construct
  source 1..9: note = Seed: LVVVGAVGV (KRAS G12V)
WVVNGAVGP

SEQ ID NO: 65327 - protein, 9 aa, synthetic construct
  source 1..9: note = Seed: LVVVGAVGV (KRAS G12V)
WVVNGAVGQ

SEQ ID NO: 65328 - protein, 9 aa, synthetic construct
  source 1..9: note = Seed: LVVVGAVGV (KRAS G12V)
WVVNGAVGR

SEQ ID NO: 65329 - protein, 9 aa, synthetic construct
  source 1..9: note = Seed: LVVVGAVGV (KRAS G12V)
WVVNGAVGS

SEQ ID NO: 65330 - protein, 9 aa, synthetic construct
  source 1..9: note = Seed: LVVVGAVGV (KRAS G12V)
WVVNGAVGT

SEQ ID NO: 65331 - protein, 9 aa, synthetic construct
  source 1..9: note = Seed: LVVVGAVGV (KRAS G12V)
WVVNGAVGV

SEQ ID NO: 65332 - protein, 9 aa, synthetic construct
  source 1..9: note = Seed: LVVVGAVGV (KRAS G12V)
WVVNGAVGW

SEQ ID NO: 65333 - protein, 9 aa, synthetic construct
  source 1..9: note = Seed: LVVVGAVGV (KRAS G12V)
WVVNGAVGY

SEQ ID NO: 65334 - protein, 9 aa, synthetic construct
  source 1..9: note = Seed: LVVVGAVGV (KRAS G12V)
WVVNGCVGA

SEQ ID NO: 65335 - protein, 9 aa, synthetic construct
  source 1..9: note = Seed: LVVVGAVGV (KRAS G12V)
WVVNGCVGF

SEQ ID NO: 65336 - protein, 9 aa, synthetic construct
  source 1..9: note = Seed: LVVVGAVGV (KRAS G12V)
WVVNGCVGI

SEQ ID NO: 65337 - protein, 9 aa, synthetic construct
  source 1..9: note = Seed: LVVVGAVGV (KRAS G12V)
WVVNGCVGL

SEQ ID NO: 65338 - protein, 9 aa, synthetic construct
  source 1..9: note = Seed: LVVVGAVGV (KRAS G12V)
WVVNGCVGM

SEQ ID NO: 65339 - protein, 9 aa, synthetic construct
  source 1..9: note = Seed: LVVVGAVGV (KRAS G12V)
WVVNGCVGS

SEQ ID NO: 65340 - protein, 9 aa, synthetic construct
  source 1..9: note = Seed: LVVVGAVGV (KRAS G12V)
WVVNGCVGT

SEQ ID NO: 65341 - protein, 9 aa, synthetic construct
  source 1..9: note = Seed: LVVVGAVGV (KRAS G12V)
WVVNGCVGV

SEQ ID NO: 65342 - protein, 9 aa, synthetic construct
  source 1..9: note = Seed: LVVVGAVGV (KRAS G12V)
WVVNGCVGY

SEQ ID NO: 65343 - protein, 9 aa, synthetic construct
  source 1..9: note = Seed: LVVVGAVGV (KRAS G12V)
WVVNGDVGA

SEQ ID NO: 65344 - protein, 9 aa, synthetic construct
  source 1..9: note = Seed: LVVVGAVGV (KRAS G12V)
WVVNGDVGI

SEQ ID NO: 65345 - protein, 9 aa, synthetic construct
  source 1..9: note = Seed: LVVVGAVGV (KRAS G12V)
WVVNGDVGL

SEQ ID NO: 65346 - protein, 9 aa, synthetic construct
  source 1..9: note = Seed: LVVVGAVGV (KRAS G12V)
WVVNGDVGV

SEQ ID NO: 65347 - protein, 9 aa, synthetic construct
  source 1..9: note = Seed: LVVVGAVGV (KRAS G12V)
WVVNGEVGL

SEQ ID NO: 65348 - protein, 9 aa, synthetic construct
  source 1..9: note = Seed: LVVVGAVGV (KRAS G12V)
WVVNGFVGA

SEQ ID NO: 65349 - protein, 9 aa, synthetic construct
  source 1..9: note = Seed: LVVVGAVGV (KRAS G12V)
WVVNGFVGI

SEQ ID NO: 65350 - protein, 9 aa, synthetic construct
  source 1..9: note = Seed: LVVVGAVGV (KRAS G12V)
WVVNGFVGL

SEQ ID NO: 65351 - protein, 9 aa, synthetic construct
  source 1..9: note = Seed: LVVVGAVGV (KRAS G12V)
WVVNGFVGV

SEQ ID NO: 65352 - protein, 9 aa, synthetic construct
  source 1..9: note = Seed: LVVVGAVGV (KRAS G12V)
WVVNGGVGA

SEQ ID NO: 65353 - protein, 9 aa, synthetic construct
  source 1..9: note = Seed: LVVVGAVGV (KRAS G12V)
WVVNGGVGC

SEQ ID NO: 65354 - protein, 9 aa, synthetic construct
  source 1..9: note = Seed: LVVVGAVGV (KRAS G12V)
WVVNGGVGF

SEQ ID NO: 65355 - protein, 9 aa, synthetic construct
  source 1..9: note = Seed: LVVVGAVGV (KRAS G12V)
WVVNGGVGG

SEQ ID NO: 65356 - protein, 9 aa, synthetic construct
  source 1..9: note = Seed: LVVVGAVGV (KRAS G12V)
WVVNGGVGI

SEQ ID NO: 65357 - protein, 9 aa, synthetic construct
  source 1..9: note = Seed: LVVVGAVGV (KRAS G12V)
WVVNGGVGL

SEQ ID NO: 65358 - protein, 9 aa, synthetic construct
  source 1..9: note = Seed: LVVVGAVGV (KRAS G12V)
WVVNGGVGM

SEQ ID NO: 65359 - protein, 9 aa, synthetic construct
  source 1..9: note = Seed: LVVVGAVGV (KRAS G12V)
WVVNGGVGN

SEQ ID NO: 65360 - protein, 9 aa, synthetic construct
  source 1..9: note = Seed: LVVVGAVGV (KRAS G12V)
WVVNGGVGS

SEQ ID NO: 65361 - protein, 9 aa, synthetic construct
  source 1..9: note = Seed: LVVVGAVGV (KRAS G12V)
WVVNGGVGT

SEQ ID NO: 65362 - protein, 9 aa, synthetic construct
  source 1..9: note = Seed: LVVVGAVGV (KRAS G12V)
WVVNGGVGV

SEQ ID NO: 65363 - protein, 9 aa, synthetic construct
  source 1..9: note = Seed: LVVVGAVGV (KRAS G12V)
WVVNGGVGY

SEQ ID NO: 65364 - protein, 9 aa, synthetic construct
  source 1..9: note = Seed: LVVVGAVGV (KRAS G12V)
WVVNGHVGA

SEQ ID NO: 65365 - protein, 9 aa, synthetic construct
  source 1..9: note = Seed: LVVVGAVGV (KRAS G12V)
WVVNGHVGF

SEQ ID NO: 65366 - protein, 9 aa, synthetic construct
  source 1..9: note = Seed: LVVVGAVGV (KRAS G12V)
WVVNGHVGI

SEQ ID NO: 65367 - protein, 9 aa, synthetic construct
  source 1..9: note = Seed: LVVVGAVGV (KRAS G12V)
WVVNGHVGL

SEQ ID NO: 65368 - protein, 9 aa, synthetic construct
  source 1..9: note = Seed: LVVVGAVGV (KRAS G12V)
WVVNGHVGM

SEQ ID NO: 65369 - protein, 9 aa, synthetic construct
  source 1..9: note = Seed: LVVVGAVGV (KRAS G12V)
WVVNGHVGV

SEQ ID NO: 65370 - protein, 9 aa, synthetic construct
  source 1..9: note = Seed: LVVVGAVGV (KRAS G12V)
WVVNGHVGY

SEQ ID NO: 65371 - protein, 9 aa, synthetic construct
  source 1..9: note = Seed: LVVVGAVGV (KRAS G12V)
WVVNGIVGA

SEQ ID NO: 65372 - protein, 9 aa, synthetic construct
  source 1..9: note = Seed: LVVVGAVGV (KRAS G12V)
WVVNGIVGC

SEQ ID NO: 65373 - protein, 9 aa, synthetic construct
  source 1..9: note = Seed: LVVVGAVGV (KRAS G12V)
WVVNGIVGF

SEQ ID NO: 65374 - protein, 9 aa, synthetic construct
  source 1..9: note = Seed: LVVVGAVGV (KRAS G12V)
WVVNGIVGG

SEQ ID NO: 65375 - protein, 9 aa, synthetic construct
  source 1..9: note = Seed: LVVVGAVGV (KRAS G12V)
WVVNGIVGH

SEQ ID NO: 65376 - protein, 9 aa, synthetic construct
  source 1..9: note = Seed: LVVVGAVGV (KRAS G12V)
WVVNGIVGI

SEQ ID NO: 65377 - protein, 9 aa, synthetic construct
  source 1..9: note = Seed: LVVVGAVGV (KRAS G12V)
WVVNGIVGL

SEQ ID NO: 65378 - protein, 9 aa, synthetic construct
  source 1..9: note = Seed: LVVVGAVGV (KRAS G12V)
WVVNGIVGM

SEQ ID NO: 65379 - protein, 9 aa, synthetic construct
  source 1..9: note = Seed: LVVVGAVGV (KRAS G12V)
WVVNGIVGN

SEQ ID NO: 65380 - protein, 9 aa, synthetic construct
  source 1..9: note = Seed: LVVVGAVGV (KRAS G12V)
WVVNGIVGQ

SEQ ID NO: 65381 - protein, 9 aa, synthetic construct
  source 1..9: note = Seed: LVVVGAVGV (KRAS G12V)
WVVNGIVGR

SEQ ID NO: 65382 - protein, 9 aa, synthetic construct
  source 1..9: note = Seed: LVVVGAVGV (KRAS G12V)
WVVNGIVGS

SEQ ID NO: 65383 - protein, 9 aa, synthetic construct
  source 1..9: note = Seed: LVVVGAVGV (KRAS G12V)
WVVNGIVGT

SEQ ID NO: 65384 - protein, 9 aa, synthetic construct
  source 1..9: note = Seed: LVVVGAVGV (KRAS G12V)
WVVNGIVGV

SEQ ID NO: 65385 - protein, 9 aa, synthetic construct
  source 1..9: note = Seed: LVVVGAVGV (KRAS G12V)
WVVNGIVGY

SEQ ID NO: 65386 - protein, 9 aa, synthetic construct
  source 1..9: note = Seed: LVVVGAVGV (KRAS G12V)
WVVNGKVGI

SEQ ID NO: 65387 - protein, 9 aa, synthetic construct
  source 1..9: note = Seed: LVVVGAVGV (KRAS G12V)
WVVNGKVGL

SEQ ID NO: 65388 - protein, 9 aa, synthetic construct
  source 1..9: note = Seed: LVVVGAVGV (KRAS G12V)
WVVNGKVGV

SEQ ID NO: 65389 - protein, 9 aa, synthetic construct
  source 1..9: note = Seed: LVVVGAVGV (KRAS G12V)
WVVNGLVGA

SEQ ID NO: 65390 - protein, 9 aa, synthetic construct
  source 1..9: note = Seed: LVVVGAVGV (KRAS G12V)
WVVNGLVGF

SEQ ID NO: 65391 - protein, 9 aa, synthetic construct
  source 1..9: note = Seed: LVVVGAVGV (KRAS G12V)
WVVNGLVGG

SEQ ID NO: 65392 - protein, 9 aa, synthetic construct
  source 1..9: note = Seed: LVVVGAVGV (KRAS G12V)
WVVNGLVGI

SEQ ID NO: 65393 - protein, 9 aa, synthetic construct
  source 1..9: note = Seed: LVVVGAVGV (KRAS G12V)
WVVNGLVGL

SEQ ID NO: 65394 - protein, 9 aa, synthetic construct
  source 1..9: note = Seed: LVVVGAVGV (KRAS G12V)
WVVNGLVGM

SEQ ID NO: 65395 - protein, 9 aa, synthetic construct
  source 1..9: note = Seed: LVVVGAVGV (KRAS G12V)
WVVNGLVGN

SEQ ID NO: 65396 - protein, 9 aa, synthetic construct
  source 1..9: note = Seed: LVVVGAVGV (KRAS G12V)
WVVNGLVGS

SEQ ID NO: 65397 - protein, 9 aa, synthetic construct
  source 1..9: note = Seed: LVVVGAVGV (KRAS G12V)
WVVNGLVGT

SEQ ID NO: 65398 - protein, 9 aa, synthetic construct
  source 1..9: note = Seed: LVVVGAVGV (KRAS G12V)
WVVNGLVGV

SEQ ID NO: 65399 - protein, 9 aa, synthetic construct
  source 1..9: note = Seed: LVVVGAVGV (KRAS G12V)
WVVNGLVGY

SEQ ID NO: 65400 - protein, 9 aa, synthetic construct
  source 1..9: note = Seed: LVVVGAVGV (KRAS G12V)
WVVNGMVGA

SEQ ID NO: 65401 - protein, 9 aa, synthetic construct
  source 1..9: note = Seed: LVVVGAVGV (KRAS G12V)
WVVNGMVGF

SEQ ID NO: 65402 - protein, 9 aa, synthetic construct
  source 1..9: note = Seed: LVVVGAVGV (KRAS G12V)
WVVNGMVGG

SEQ ID NO: 65403 - protein, 9 aa, synthetic construct
  source 1..9: note = Seed: LVVVGAVGV (KRAS G12V)
WVVNGMVGI

SEQ ID NO: 65404 - protein, 9 aa, synthetic construct
  source 1..9: note = Seed: LVVVGAVGV (KRAS G12V)
WVVNGMVGL

SEQ ID NO: 65405 - protein, 9 aa, synthetic construct
  source 1..9: note = Seed: LVVVGAVGV (KRAS G12V)
WVVNGMVGM

SEQ ID NO: 65406 - protein, 9 aa, synthetic construct
  source 1..9: note = Seed: LVVVGAVGV (KRAS G12V)
WVVNGMVGN

SEQ ID NO: 65407 - protein, 9 aa, synthetic construct
  source 1..9: note = Seed: LVVVGAVGV (KRAS G12V)
WVVNGMVGQ

SEQ ID NO: 65408 - protein, 9 aa, synthetic construct
  source 1..9: note = Seed: LVVVGAVGV (KRAS G12V)
WVVNGMVGS

SEQ ID NO: 65409 - protein, 9 aa, synthetic construct
  source 1..9: note = Seed: LVVVGAVGV (KRAS G12V)
WVVNGMVGT

SEQ ID NO: 65410 - protein, 9 aa, synthetic construct
  source 1..9: note = Seed: LVVVGAVGV (KRAS G12V)
WVVNGMVGV

SEQ ID NO: 65411 - protein, 9 aa, synthetic construct
  source 1..9: note = Seed: LVVVGAVGV (KRAS G12V)
WVVNGMVGY

SEQ ID NO: 65412 - protein, 9 aa, synthetic construct
  source 1..9: note = Seed: LVVVGAVGV (KRAS G12V)
WVVNGNVGA

SEQ ID NO: 65413 - protein, 9 aa, synthetic construct
  source 1..9: note = Seed: LVVVGAVGV (KRAS G12V)
WVVNGNVGF

SEQ ID NO: 65414 - protein, 9 aa, synthetic construct
  source 1..9: note = Seed: LVVVGAVGV (KRAS G12V)
WVVNGNVGI

SEQ ID NO: 65415 - protein, 9 aa, synthetic construct
  source 1..9: note = Seed: LVVVGAVGV (KRAS G12V)
WVVNGNVGL

SEQ ID NO: 65416 - protein, 9 aa, synthetic construct
  source 1..9: note = Seed: LVVVGAVGV (KRAS G12V)
WVVNGNVGM

SEQ ID NO: 65417 - protein, 9 aa, synthetic construct
  source 1..9: note = Seed: LVVVGAVGV (KRAS G12V)
WVVNGNVGN

SEQ ID NO: 65418 - protein, 9 aa, synthetic construct
  source 1..9: note = Seed: LVVVGAVGV (KRAS G12V)
WVVNGNVGS

SEQ ID NO: 65419 - protein, 9 aa, synthetic construct
  source 1..9: note = Seed: LVVVGAVGV (KRAS G12V)
WVVNGNVGT

SEQ ID NO: 65420 - protein, 9 aa, synthetic construct
  source 1..9: note = Seed: LVVVGAVGV (KRAS G12V)
WVVNGNVGV

SEQ ID NO: 65421 - protein, 9 aa, synthetic construct
  source 1..9: note = Seed: LVVVGAVGV (KRAS G12V)
WVVNGNVGW

SEQ ID NO: 65422 - protein, 9 aa, synthetic construct
  source 1..9: note = Seed: LVVVGAVGV (KRAS G12V)
WVVNGNVGY

SEQ ID NO: 65423 - protein, 9 aa, synthetic construct
  source 1..9: note = Seed: LVVVGAVGV (KRAS G12V)
WVVNGPVGA

SEQ ID NO: 65424 - protein, 9 aa, synthetic construct
  source 1..9: note = Seed: LVVVGAVGV (KRAS G12V)
WVVNGPVGC

SEQ ID NO: 65425 - protein, 9 aa, synthetic construct
  source 1..9: note = Seed: LVVVGAVGV (KRAS G12V)
WVVNGPVGF

SEQ ID NO: 65426 - protein, 9 aa, synthetic construct
  source 1..9: note = Seed: LVVVGAVGV (KRAS G12V)
WVVNGPVGG

SEQ ID NO: 65427 - protein, 9 aa, synthetic construct
  source 1..9: note = Seed: LVVVGAVGV (KRAS G12V)
WVVNGPVGH

SEQ ID NO: 65428 - protein, 9 aa, synthetic construct
  source 1..9: note = Seed: LVVVGAVGV (KRAS G12V)
WVVNGPVGI

SEQ ID NO: 65429 - protein, 9 aa, synthetic construct
  source 1..9: note = Seed: LVVVGAVGV (KRAS G12V)
WVVNGPVGK

SEQ ID NO: 65430 - protein, 9 aa, synthetic construct
  source 1..9: note = Seed: LVVVGAVGV (KRAS G12V)
WVVNGPVGL

SEQ ID NO: 65431 - protein, 9 aa, synthetic construct
  source 1..9: note = Seed: LVVVGAVGV (KRAS G12V)
WVVNGPVGM

SEQ ID NO: 65432 - protein, 9 aa, synthetic construct
  source 1..9: note = Seed: LVVVGAVGV (KRAS G12V)
WVVNGPVGN

SEQ ID NO: 65433 - protein, 9 aa, synthetic construct
  source 1..9: note = Seed: LVVVGAVGV (KRAS G12V)
WVVNGPVGQ

SEQ ID NO: 65434 - protein, 9 aa, synthetic construct
  source 1..9: note = Seed: LVVVGAVGV (KRAS G12V)
WVVNGPVGR

SEQ ID NO: 65435 - protein, 9 aa, synthetic construct
  source 1..9: note = Seed: LVVVGAVGV (KRAS G12V)
WVVNGPVGS

SEQ ID NO: 65436 - protein, 9 aa, synthetic construct
  source 1..9: note = Seed: LVVVGAVGV (KRAS G12V)
WVVNGPVGT

SEQ ID NO: 65437 - protein, 9 aa, synthetic construct
  source 1..9: note = Seed: LVVVGAVGV (KRAS G12V)
WVVNGPVGV

SEQ ID NO: 65438 - protein, 9 aa, synthetic construct
  source 1..9: note = Seed: LVVVGAVGV (KRAS G12V)
WVVNGPVGW

SEQ ID NO: 65439 - protein, 9 aa, synthetic construct
  source 1..9: note = Seed: LVVVGAVGV (KRAS G12V)
WVVNGPVGY

SEQ ID NO: 65440 - protein, 9 aa, synthetic construct
  source 1..9: note = Seed: LVVVGAVGV (KRAS G12V)
WVVNGQVGI

SEQ ID NO: 65441 - protein, 9 aa, synthetic construct
  source 1..9: note = Seed: LVVVGAVGV (KRAS G12V)
WVVNGQVGL

SEQ ID NO: 65442 - protein, 9 aa, synthetic construct
  source 1..9: note = Seed: LVVVGAVGV (KRAS G12V)
WVVNGQVGV

SEQ ID NO: 65443 - protein, 9 aa, synthetic construct
  source 1..9: note = Seed: LVVVGAVGV (KRAS G12V)
WVVNGRVGI

SEQ ID NO: 65444 - protein, 9 aa, synthetic construct
  source 1..9: note = Seed: LVVVGAVGV (KRAS G12V)
WVVNGRVGL

SEQ ID NO: 65445 - protein, 9 aa, synthetic construct
  source 1..9: note = Seed: LVVVGAVGV (KRAS G12V)
WVVNGRVGV

SEQ ID NO: 65446 - protein, 9 aa, synthetic construct
  source 1..9: note = Seed: LVVVGAVGV (KRAS G12V)
WVVNGSVGA

SEQ ID NO: 65447 - protein, 9 aa, synthetic construct
  source 1..9: note = Seed: LVVVGAVGV (KRAS G12V)
WVVNGSVGC

SEQ ID NO: 65448 - protein, 9 aa, synthetic construct
  source 1..9: note = Seed: LVVVGAVGV (KRAS G12V)
WVVNGSVGF

SEQ ID NO: 65449 - protein, 9 aa, synthetic construct
  source 1..9: note = Seed: LVVVGAVGV (KRAS G12V)
WVVNGSVGG

SEQ ID NO: 65450 - protein, 9 aa, synthetic construct
  source 1..9: note = Seed: LVVVGAVGV (KRAS G12V)
WVVNGSVGH

SEQ ID NO: 65451 - protein, 9 aa, synthetic construct
  source 1..9: note = Seed: LVVVGAVGV (KRAS G12V)
WVVNGSVGI

SEQ ID NO: 65452 - protein, 9 aa, synthetic construct
  source 1..9: note = Seed: LVVVGAVGV (KRAS G12V)
WVVNGSVGK

SEQ ID NO: 65453 - protein, 9 aa, synthetic construct
  source 1..9: note = Seed: LVVVGAVGV (KRAS G12V)
WVVNGSVGL

SEQ ID NO: 65454 - protein, 9 aa, synthetic construct
  source 1..9: note = Seed: LVVVGAVGV (KRAS G12V)
WVVNGSVGM

SEQ ID NO: 65455 - protein, 9 aa, synthetic construct
  source 1..9: note = Seed: LVVVGAVGV (KRAS G12V)
WVVNGSVGN

SEQ ID NO: 65456 - protein, 9 aa, synthetic construct
  source 1..9: note = Seed: LVVVGAVGV (KRAS G12V)
WVVNGSVGR

SEQ ID NO: 65457 - protein, 9 aa, synthetic construct
  source 1..9: note = Seed: LVVVGAVGV (KRAS G12V)
WVVNGSVGS

SEQ ID NO: 65458 - protein, 9 aa, synthetic construct
  source 1..9: note = Seed: LVVVGAVGV (KRAS G12V)
WVVNGSVGT

SEQ ID NO: 65459 - protein, 9 aa, synthetic construct
  source 1..9: note = Seed: LVVVGAVGV (KRAS G12V)
WVVNGSVGV

SEQ ID NO: 65460 - protein, 9 aa, synthetic construct
  source 1..9: note = Seed: LVVVGAVGV (KRAS G12V)
WVVNGSVGY

SEQ ID NO: 65461 - protein, 9 aa, synthetic construct
  source 1..9: note = Seed: LVVVGAVGV (KRAS G12V)
WVVNGTVGA

SEQ ID NO: 65462 - protein, 9 aa, synthetic construct
  source 1..9: note = Seed: LVVVGAVGV (KRAS G12V)
WVVNGTVGF

SEQ ID NO: 65463 - protein, 9 aa, synthetic construct
  source 1..9: note = Seed: LVVVGAVGV (KRAS G12V)
WVVNGTVGI

SEQ ID NO: 65464 - protein, 9 aa, synthetic construct
  source 1..9: note = Seed: LVVVGAVGV (KRAS G12V)
WVVNGTVGL

SEQ ID NO: 65465 - protein, 9 aa, synthetic construct
  source 1..9: note = Seed: LVVVGAVGV (KRAS G12V)
WVVNGTVGM

SEQ ID NO: 65466 - protein, 9 aa, synthetic construct
  source 1..9: note = Seed: LVVVGAVGV (KRAS G12V)
WVVNGTVGS

SEQ ID NO: 65467 - protein, 9 aa, synthetic construct
  source 1..9: note = Seed: LVVVGAVGV (KRAS G12V)
WVVNGTVGT

SEQ ID NO: 65468 - protein, 9 aa, synthetic construct
  source 1..9: note = Seed: LVVVGAVGV (KRAS G12V)
WVVNGTVGV

SEQ ID NO: 65469 - protein, 9 aa, synthetic construct
  source 1..9: note = Seed: LVVVGAVGV (KRAS G12V)
WVVNGTVGY

SEQ ID NO: 65470 - protein, 9 aa, synthetic construct
  source 1..9: note = Seed: LVVVGAVGV (KRAS G12V)
WVVNGVVGA

SEQ ID NO: 65471 - protein, 9 aa, synthetic construct
  source 1..9: note = Seed: LVVVGAVGV (KRAS G12V)
WVVNGVVGC

SEQ ID NO: 65472 - protein, 9 aa, synthetic construct
  source 1..9: note = Seed: LVVVGAVGV (KRAS G12V)
WVVNGVVGF

SEQ ID NO: 65473 - protein, 9 aa, synthetic construct
  source 1..9: note = Seed: LVVVGAVGV (KRAS G12V)
WVVNGVVGG

SEQ ID NO: 65474 - protein, 9 aa, synthetic construct
  source 1..9: note = Seed: LVVVGAVGV (KRAS G12V)
WVVNGVVGH

SEQ ID NO: 65475 - protein, 9 aa, synthetic construct
  source 1..9: note = Seed: LVVVGAVGV (KRAS G12V)
WVVNGVVGI

SEQ ID NO: 65476 - protein, 9 aa, synthetic construct
  source 1..9: note = Seed: LVVVGAVGV (KRAS G12V)
WVVNGVVGK

SEQ ID NO: 65477 - protein, 9 aa, synthetic construct
  source 1..9: note = Seed: LVVVGAVGV (KRAS G12V)
WVVNGVVGL

SEQ ID NO: 65478 - protein, 9 aa, synthetic construct
  source 1..9: note = Seed: LVVVGAVGV (KRAS G12V)
WVVNGVVGM

SEQ ID NO: 65479 - protein, 9 aa, synthetic construct
  source 1..9: note = Seed: LVVVGAVGV (KRAS G12V)
WVVNGVVGN

SEQ ID NO: 65480 - protein, 9 aa, synthetic construct
  source 1..9: note = Seed: LVVVGAVGV (KRAS G12V)
WVVNGVVGQ

SEQ ID NO: 65481 - protein, 9 aa, synthetic construct
  source 1..9: note = Seed: LVVVGAVGV (KRAS G12V)
WVVNGVVGR

SEQ ID NO: 65482 - protein, 9 aa, synthetic construct
  source 1..9: note = Seed: LVVVGAVGV (KRAS G12V)
WVVNGVVGS

SEQ ID NO: 65483 - protein, 9 aa, synthetic construct
  source 1..9: note = Seed: LVVVGAVGV (KRAS G12V)
WVVNGVVGT

SEQ ID NO: 65484 - protein, 9 aa, synthetic construct
  source 1..9: note = Seed: LVVVGAVGV (KRAS G12V)
WVVNGVVGV

SEQ ID NO: 65485 - protein, 9 aa, synthetic construct
  source 1..9: note = Seed: LVVVGAVGV (KRAS G12V)
WVVNGVVGY

SEQ ID NO: 65486 - protein, 9 aa, synthetic construct
  source 1..9: note = Seed: LVVVGAVGV (KRAS G12V)
WVVNGYVGA

SEQ ID NO: 65487 - protein, 9 aa, synthetic construct
  source 1..9: note = Seed: LVVVGAVGV (KRAS G12V)
WVVNGYVGF

SEQ ID NO: 65488 - protein, 9 aa, synthetic construct
  source 1..9: note = Seed: LVVVGAVGV (KRAS G12V)
WVVNGYVGI

SEQ ID NO: 65489 - protein, 9 aa, synthetic construct
  source 1..9: note = Seed: LVVVGAVGV (KRAS G12V)
WVVNGYVGL

SEQ ID NO: 65490 - protein, 9 aa, synthetic construct
  source 1..9: note = Seed: LVVVGAVGV (KRAS G12V)
WVVNGYVGM

SEQ ID NO: 65491 - protein, 9 aa, synthetic construct
  source 1..9: note = Seed: LVVVGAVGV (KRAS G12V)
WVVNGYVGV

SEQ ID NO: 65492 - protein, 9 aa, synthetic construct
  source 1..9: note = Seed: LVVVGAVGV (KRAS G12V)
WVVPGAVGA

SEQ ID NO: 65493 - protein, 9 aa, synthetic construct
  source 1..9: note = Seed: LVVVGAVGV (KRAS G12V)
WVVPGAVGF

SEQ ID NO: 65494 - protein, 9 aa, synthetic construct
  source 1..9: note = Seed: LVVVGAVGV (KRAS G12V)
WVVPGAVGI

SEQ ID NO: 65495 - protein, 9 aa, synthetic construct
  source 1..9: note = Seed: LVVVGAVGV (KRAS G12V)
WVVPGAVGL

SEQ ID NO: 65496 - protein, 9 aa, synthetic construct
  source 1..9: note = Seed: LVVVGAVGV (KRAS G12V)
WVVPGAVGM

SEQ ID NO: 65497 - protein, 9 aa, synthetic construct
  source 1..9: note = Seed: LVVVGAVGV (KRAS G12V)
WVVPGAVGS

SEQ ID NO: 65498 - protein, 9 aa, synthetic construct
  source 1..9: note = Seed: LVVVGAVGV (KRAS G12V)
WVVPGAVGT

SEQ ID NO: 65499 - protein, 9 aa, synthetic construct
  source 1..9: note = Seed: LVVVGAVGV (KRAS G12V)
WVVPGAVGV

SEQ ID NO: 65500 - protein, 9 aa, synthetic construct
  source 1..9: note = Seed: LVVVGAVGV (KRAS G12V)
WVVPGAVGY

SEQ ID NO: 65501 - protein, 9 aa, synthetic construct
  source 1..9: note = Seed: LVVVGAVGV (KRAS G12V)
WVVPGGVGI

SEQ ID NO: 65502 - protein, 9 aa, synthetic construct
  source 1..9: note = Seed: LVVVGAVGV (KRAS G12V)
WVVPGGVGL

SEQ ID NO: 65503 - protein, 9 aa, synthetic construct
  source 1..9: note = Seed: LVVVGAVGV (KRAS G12V)
WVVPGGVGV

SEQ ID NO: 65504 - protein, 9 aa, synthetic construct
  source 1..9: note = Seed: LVVVGAVGV (KRAS G12V)
WVVPGNVGA

SEQ ID NO: 65505 - protein, 9 aa, synthetic construct
  source 1..9: note = Seed: LVVVGAVGV (KRAS G12V)
WVVPGNVGI

SEQ ID NO: 65506 - protein, 9 aa, synthetic construct
  source 1..9: note = Seed: LVVVGAVGV (KRAS G12V)
WVVPGNVGL

SEQ ID NO: 65507 - protein, 9 aa, synthetic construct
  source 1..9: note = Seed: LVVVGAVGV (KRAS G12V)
WVVPGNVGV

SEQ ID NO: 65508 - protein, 9 aa, synthetic construct
  source 1..9: note = Seed: LVVVGAVGV (KRAS G12V)
WVVPGPVGI

SEQ ID NO: 65509 - protein, 9 aa, synthetic construct
  source 1..9: note = Seed: LVVVGAVGV (KRAS G12V)
WVVPGPVGL

SEQ ID NO: 65510 - protein, 9 aa, synthetic construct
  source 1..9: note = Seed: LVVVGAVGV (KRAS G12V)
WVVPGPVGV

SEQ ID NO: 65511 - protein, 9 aa, synthetic construct
  source 1..9: note = Seed: LVVVGAVGV (KRAS G12V)
WVVPGSVGA

SEQ ID NO: 65512 - protein, 9 aa, synthetic construct
  source 1..9: note = Seed: LVVVGAVGV (KRAS G12V)
WVVPGSVGI

SEQ ID NO: 65513 - protein, 9 aa, synthetic construct
  source 1..9: note = Seed: LVVVGAVGV (KRAS G12V)
WVVPGSVGL

SEQ ID NO: 65514 - protein, 9 aa, synthetic construct
  source 1..9: note = Seed: LVVVGAVGV (KRAS G12V)
WVVPGSVGM

SEQ ID NO: 65515 - protein, 9 aa, synthetic construct
  source 1..9: note = Seed: LVVVGAVGV (KRAS G12V)
WVVPGSVGS

SEQ ID NO: 65516 - protein, 9 aa, synthetic construct
  source 1..9: note = Seed: LVVVGAVGV (KRAS G12V)
WVVPGSVGV

SEQ ID NO: 65517 - protein, 9 aa, synthetic construct
  source 1..9: note = Seed: LVVVGAVGV (KRAS G12V)
WVVPGTVGA

SEQ ID NO: 65518 - protein, 9 aa, synthetic construct
  source 1..9: note = Seed: LVVVGAVGV (KRAS G12V)
WVVPGTVGI

SEQ ID NO: 65519 - protein, 9 aa, synthetic construct
  source 1..9: note = Seed: LVVVGAVGV (KRAS G12V)
WVVPGTVGL

SEQ ID NO: 65520 - protein, 9 aa, synthetic construct
  source 1..9: note = Seed: LVVVGAVGV (KRAS G12V)
WVVPGTVGM

SEQ ID NO: 65521 - protein, 9 aa, synthetic construct
  source 1..9: note = Seed: LVVVGAVGV (KRAS G12V)
WVVPGTVGV

SEQ ID NO: 65522 - protein, 9 aa, synthetic construct
  source 1..9: note = Seed: LVVVGAVGV (KRAS G12V)
WVVPGVVGI

SEQ ID NO: 65523 - protein, 9 aa, synthetic construct
  source 1..9: note = Seed: LVVVGAVGV (KRAS G12V)
WVVPGVVGL

SEQ ID NO: 65524 - protein, 9 aa, synthetic construct
  source 1..9: note = Seed: LVVVGAVGV (KRAS G12V)
WVVPGVVGV

SEQ ID NO: 65525 - protein, 9 aa, synthetic construct
  source 1..9: note = Seed: LVVVGAVGV (KRAS G12V)
WVVQGAVGA

SEQ ID NO: 65526 - protein, 9 aa, synthetic construct
  source 1..9: note = Seed: LVVVGAVGV (KRAS G12V)
WVVQGAVGC

SEQ ID NO: 65527 - protein, 9 aa, synthetic construct
  source 1..9: note = Seed: LVVVGAVGV (KRAS G12V)
WVVQGAVGF

SEQ ID NO: 65528 - protein, 9 aa, synthetic construct
  source 1..9: note = Seed: LVVVGAVGV (KRAS G12V)
WVVQGAVGG

SEQ ID NO: 65529 - protein, 9 aa, synthetic construct
  source 1..9: note = Seed: LVVVGAVGV (KRAS G12V)
WVVQGAVGH

SEQ ID NO: 65530 - protein, 9 aa, synthetic construct
  source 1..9: note = Seed: LVVVGAVGV (KRAS G12V)
WVVQGAVGI

SEQ ID NO: 65531 - protein, 9 aa, synthetic construct
  source 1..9: note = Seed: LVVVGAVGV (KRAS G12V)
WVVQGAVGK

SEQ ID NO: 65532 - protein, 9 aa, synthetic construct
  source 1..9: note = Seed: LVVVGAVGV (KRAS G12V)
WVVQGAVGL

SEQ ID NO: 65533 - protein, 9 aa, synthetic construct
  source 1..9: note = Seed: LVVVGAVGV (KRAS G12V)
WVVQGAVGM

SEQ ID NO: 65534 - protein, 9 aa, synthetic construct
  source 1..9: note = Seed: LVVVGAVGV (KRAS G12V)
WVVQGAVGN

SEQ ID NO: 65535 - protein, 9 aa, synthetic construct
  source 1..9: note = Seed: LVVVGAVGV (KRAS G12V)
WVVQGAVGP

SEQ ID NO: 65536 - protein, 9 aa, synthetic construct
  source 1..9: note = Seed: LVVVGAVGV (KRAS G12V)
WVVQGAVGQ

SEQ ID NO: 65537 - protein, 9 aa, synthetic construct
  source 1..9: note = Seed: LVVVGAVGV (KRAS G12V)
WVVQGAVGR

SEQ ID NO: 65538 - protein, 9 aa, synthetic construct
  source 1..9: note = Seed: LVVVGAVGV (KRAS G12V)
WVVQGAVGS

SEQ ID NO: 65539 - protein, 9 aa, synthetic construct
  source 1..9: note = Seed: LVVVGAVGV (KRAS G12V)
WVVQGAVGT

SEQ ID NO: 65540 - protein, 9 aa, synthetic construct
  source 1..9: note = Seed: LVVVGAVGV (KRAS G12V)
WVVQGAVGV

SEQ ID NO: 65541 - protein, 9 aa, synthetic construct
  source 1..9: note = Seed: LVVVGAVGV (KRAS G12V)
WVVQGAVGY

SEQ ID NO: 65542 - protein, 9 aa, synthetic construct
  source 1..9: note = Seed: LVVVGAVGV (KRAS G12V)
WVVQGDVGI

SEQ ID NO: 65543 - protein, 9 aa, synthetic construct
  source 1..9: note = Seed: LVVVGAVGV (KRAS G12V)
WVVQGDVGL

SEQ ID NO: 65544 - protein, 9 aa, synthetic construct
  source 1..9: note = Seed: LVVVGAVGV (KRAS G12V)
WVVQGDVGV

SEQ ID NO: 65545 - protein, 9 aa, synthetic construct
  source 1..9: note = Seed: LVVVGAVGV (KRAS G12V)
WVVQGEVGL

SEQ ID NO: 65546 - protein, 9 aa, synthetic construct
  source 1..9: note = Seed: LVVVGAVGV (KRAS G12V)
WVVQGGVGA

SEQ ID NO: 65547 - protein, 9 aa, synthetic construct
  source 1..9: note = Seed: LVVVGAVGV (KRAS G12V)
WVVQGGVGC

SEQ ID NO: 65548 - protein, 9 aa, synthetic construct
  source 1..9: note = Seed: LVVVGAVGV (KRAS G12V)
WVVQGGVGF

SEQ ID NO: 65549 - protein, 9 aa, synthetic construct
  source 1..9: note = Seed: LVVVGAVGV (KRAS G12V)
WVVQGGVGG

SEQ ID NO: 65550 - protein, 9 aa, synthetic construct
  source 1..9: note = Seed: LVVVGAVGV (KRAS G12V)
WVVQGGVGH

SEQ ID NO: 65551 - protein, 9 aa, synthetic construct
  source 1..9: note = Seed: LVVVGAVGV (KRAS G12V)
WVVQGGVGI

SEQ ID NO: 65552 - protein, 9 aa, synthetic construct
  source 1..9: note = Seed: LVVVGAVGV (KRAS G12V)
WVVQGGVGL

SEQ ID NO: 65553 - protein, 9 aa, synthetic construct
  source 1..9: note = Seed: LVVVGAVGV (KRAS G12V)
WVVQGGVGM

SEQ ID NO: 65554 - protein, 9 aa, synthetic construct
  source 1..9: note = Seed: LVVVGAVGV (KRAS G12V)
WVVQGGVGN

SEQ ID NO: 65555 - protein, 9 aa, synthetic construct
  source 1..9: note = Seed: LVVVGAVGV (KRAS G12V)
WVVQGGVGQ

SEQ ID NO: 65556 - protein, 9 aa, synthetic construct
  source 1..9: note = Seed: LVVVGAVGV (KRAS G12V)
WVVQGGVGS

SEQ ID NO: 65557 - protein, 9 aa, synthetic construct
  source 1..9: note = Seed: LVVVGAVGV (KRAS G12V)
WVVQGGVGT

SEQ ID NO: 65558 - protein, 9 aa, synthetic construct
  source 1..9: note = Seed: LVVVGAVGV (KRAS G12V)
WVVQGGVGV

SEQ ID NO: 65559 - protein, 9 aa, synthetic construct
  source 1..9: note = Seed: LVVVGAVGV (KRAS G12V)
WVVQGGVGY

SEQ ID NO: 65560 - protein, 9 aa, synthetic construct
  source 1..9: note = Seed: LVVVGAVGV (KRAS G12V)
WVVQGHVGA

SEQ ID NO: 65561 - protein, 9 aa, synthetic construct
  source 1..9: note = Seed: LVVVGAVGV (KRAS G12V)
WVVQGHVGI

SEQ ID NO: 65562 - protein, 9 aa, synthetic construct
  source 1..9: note = Seed: LVVVGAVGV (KRAS G12V)
WVVQGHVGL

SEQ ID NO: 65563 - protein, 9 aa, synthetic construct
  source 1..9: note = Seed: LVVVGAVGV (KRAS G12V)
WVVQGHVGV

SEQ ID NO: 65564 - protein, 9 aa, synthetic construct
  source 1..9: note = Seed: LVVVGAVGV (KRAS G12V)
WVVQGIVGA

SEQ ID NO: 65565 - protein, 9 aa, synthetic construct
  source 1..9: note = Seed: LVVVGAVGV (KRAS G12V)
WVVQGIVGI

SEQ ID NO: 65566 - protein, 9 aa, synthetic construct
  source 1..9: note = Seed: LVVVGAVGV (KRAS G12V)
WVVQGIVGL

SEQ ID NO: 65567 - protein, 9 aa, synthetic construct
  source 1..9: note = Seed: LVVVGAVGV (KRAS G12V)
WVVQGIVGM

SEQ ID NO: 65568 - protein, 9 aa, synthetic construct
  source 1..9: note = Seed: LVVVGAVGV (KRAS G12V)
WVVQGIVGN

SEQ ID NO: 65569 - protein, 9 aa, synthetic construct
  source 1..9: note = Seed: LVVVGAVGV (KRAS G12V)
WVVQGIVGS

SEQ ID NO: 65570 - protein, 9 aa, synthetic construct
  source 1..9: note = Seed: LVVVGAVGV (KRAS G12V)
WVVQGIVGT

SEQ ID NO: 65571 - protein, 9 aa, synthetic construct
  source 1..9: note = Seed: LVVVGAVGV (KRAS G12V)
WVVQGIVGV

SEQ ID NO: 65572 - protein, 9 aa, synthetic construct
  source 1..9: note = Seed: LVVVGAVGV (KRAS G12V)
WVVQGKVGA

SEQ ID NO: 65573 - protein, 9 aa, synthetic construct
  source 1..9: note = Seed: LVVVGAVGV (KRAS G12V)
WVVQGKVGS

SEQ ID NO: 65574 - protein, 9 aa, synthetic construct
  source 1..9: note = Seed: LVVVGAVGV (KRAS G12V)
WVVQGLVGA

SEQ ID NO: 65575 - protein, 9 aa, synthetic construct
  source 1..9: note = Seed: LVVVGAVGV (KRAS G12V)
WVVQGMVGA

SEQ ID NO: 65576 - protein, 9 aa, synthetic construct
  source 1..9: note = Seed: LVVVGAVGV (KRAS G12V)
WVVQGMVGI

SEQ ID NO: 65577 - protein, 9 aa, synthetic construct
  source 1..9: note = Seed: LVVVGAVGV (KRAS G12V)
WVVQGMVGL

SEQ ID NO: 65578 - protein, 9 aa, synthetic construct
  source 1..9: note = Seed: LVVVGAVGV (KRAS G12V)
WVVQGMVGM

SEQ ID NO: 65579 - protein, 9 aa, synthetic construct
  source 1..9: note = Seed: LVVVGAVGV (KRAS G12V)
WVVQGMVGV

SEQ ID NO: 65580 - protein, 9 aa, synthetic construct
  source 1..9: note = Seed: LVVVGAVGV (KRAS G12V)
WVVQGNVGA

SEQ ID NO: 65581 - protein, 9 aa, synthetic construct
  source 1..9: note = Seed: LVVVGAVGV (KRAS G12V)
WVVQGNVGC

SEQ ID NO: 65582 - protein, 9 aa, synthetic construct
  source 1..9: note = Seed: LVVVGAVGV (KRAS G12V)
WVVQGNVGF

SEQ ID NO: 65583 - protein, 9 aa, synthetic construct
  source 1..9: note = Seed: LVVVGAVGV (KRAS G12V)
WVVQGNVGG

SEQ ID NO: 65584 - protein, 9 aa, synthetic construct
  source 1..9: note = Seed: LVVVGAVGV (KRAS G12V)
WVVQGNVGI

SEQ ID NO: 65585 - protein, 9 aa, synthetic construct
  source 1..9: note = Seed: LVVVGAVGV (KRAS G12V)
WVVQGNVGL

SEQ ID NO: 65586 - protein, 9 aa, synthetic construct
  source 1..9: note = Seed: LVVVGAVGV (KRAS G12V)
WVVQGNVGM

SEQ ID NO: 65587 - protein, 9 aa, synthetic construct
  source 1..9: note = Seed: LVVVGAVGV (KRAS G12V)
WVVQGNVGN

SEQ ID NO: 65588 - protein, 9 aa, synthetic construct
  source 1..9: note = Seed: LVVVGAVGV (KRAS G12V)
WVVQGNVGS

SEQ ID NO: 65589 - protein, 9 aa, synthetic construct
  source 1..9: note = Seed: LVVVGAVGV (KRAS G12V)
WVVQGNVGT

SEQ ID NO: 65590 - protein, 9 aa, synthetic construct
  source 1..9: note = Seed: LVVVGAVGV (KRAS G12V)
WVVQGNVGV

SEQ ID NO: 65591 - protein, 9 aa, synthetic construct
  source 1..9: note = Seed: LVVVGAVGV (KRAS G12V)
WVVQGPVGA

SEQ ID NO: 65592 - protein, 9 aa, synthetic construct
  source 1..9: note = Seed: LVVVGAVGV (KRAS G12V)
WVVQGPVGC

SEQ ID NO: 65593 - protein, 9 aa, synthetic construct
  source 1..9: note = Seed: LVVVGAVGV (KRAS G12V)
WVVQGPVGF

SEQ ID NO: 65594 - protein, 9 aa, synthetic construct
  source 1..9: note = Seed: LVVVGAVGV (KRAS G12V)
WVVQGPVGG

SEQ ID NO: 65595 - protein, 9 aa, synthetic construct
  source 1..9: note = Seed: LVVVGAVGV (KRAS G12V)
WVVQGPVGH

SEQ ID NO: 65596 - protein, 9 aa, synthetic construct
  source 1..9: note = Seed: LVVVGAVGV (KRAS G12V)
WVVQGPVGI

SEQ ID NO: 65597 - protein, 9 aa, synthetic construct
  source 1..9: note = Seed: LVVVGAVGV (KRAS G12V)
WVVQGPVGL

SEQ ID NO: 65598 - protein, 9 aa, synthetic construct
  source 1..9: note = Seed: LVVVGAVGV (KRAS G12V)
WVVQGPVGM

SEQ ID NO: 65599 - protein, 9 aa, synthetic construct
  source 1..9: note = Seed: LVVVGAVGV (KRAS G12V)
WVVQGPVGN

SEQ ID NO: 65600 - protein, 9 aa, synthetic construct
  source 1..9: note = Seed: LVVVGAVGV (KRAS G12V)
WVVQGPVGS

SEQ ID NO: 65601 - protein, 9 aa, synthetic construct
  source 1..9: note = Seed: LVVVGAVGV (KRAS G12V)
WVVQGPVGT

SEQ ID NO: 65602 - protein, 9 aa, synthetic construct
  source 1..9: note = Seed: LVVVGAVGV (KRAS G12V)
WVVQGPVGV

SEQ ID NO: 65603 - protein, 9 aa, synthetic construct
  source 1..9: note = Seed: LVVVGAVGV (KRAS G12V)
WVVQGPVGY

SEQ ID NO: 65604 - protein, 9 aa, synthetic construct
  source 1..9: note = Seed: LVVVGAVGV (KRAS G12V)
WVVQGQVGA

SEQ ID NO: 65605 - protein, 9 aa, synthetic construct
  source 1..9: note = Seed: LVVVGAVGV (KRAS G12V)
WVVQGQVGL

SEQ ID NO: 65606 - protein, 9 aa, synthetic construct
  source 1..9: note = Seed: LVVVGAVGV (KRAS G12V)
WVVQGRVGA

SEQ ID NO: 65607 - protein, 9 aa, synthetic construct
  source 1..9: note = Seed: LVVVGAVGV (KRAS G12V)
WVVQGRVGS

SEQ ID NO: 65608 - protein, 9 aa, synthetic construct
  source 1..9: note = Seed: LVVVGAVGV (KRAS G12V)
WVVQGSVGA

SEQ ID NO: 65609 - protein, 9 aa, synthetic construct
  source 1..9: note = Seed: LVVVGAVGV (KRAS G12V)
WVVQGSVGC

SEQ ID NO: 65610 - protein, 9 aa, synthetic construct
  source 1..9: note = Seed: LVVVGAVGV (KRAS G12V)
WVVQGSVGF

SEQ ID NO: 65611 - protein, 9 aa, synthetic construct
  source 1..9: note = Seed: LVVVGAVGV (KRAS G12V)
WVVQGSVGG

SEQ ID NO: 65612 - protein, 9 aa, synthetic construct
  source 1..9: note = Seed: LVVVGAVGV (KRAS G12V)
WVVQGSVGH

SEQ ID NO: 65613 - protein, 9 aa, synthetic construct
  source 1..9: note = Seed: LVVVGAVGV (KRAS G12V)
WVVQGSVGI

SEQ ID NO: 65614 - protein, 9 aa, synthetic construct
  source 1..9: note = Seed: LVVVGAVGV (KRAS G12V)
WVVQGSVGK

SEQ ID NO: 65615 - protein, 9 aa, synthetic construct
  source 1..9: note = Seed: LVVVGAVGV (KRAS G12V)
WVVQGSVGL

SEQ ID NO: 65616 - protein, 9 aa, synthetic construct
  source 1..9: note = Seed: LVVVGAVGV (KRAS G12V)
WVVQGSVGM

SEQ ID NO: 65617 - protein, 9 aa, synthetic construct
  source 1..9: note = Seed: LVVVGAVGV (KRAS G12V)
WVVQGSVGN

SEQ ID NO: 65618 - protein, 9 aa, synthetic construct
  source 1..9: note = Seed: LVVVGAVGV (KRAS G12V)
WVVQGSVGP

SEQ ID NO: 65619 - protein, 9 aa, synthetic construct
  source 1..9: note = Seed: LVVVGAVGV (KRAS G12V)
WVVQGSVGQ

SEQ ID NO: 65620 - protein, 9 aa, synthetic construct
  source 1..9: note = Seed: LVVVGAVGV (KRAS G12V)
WVVQGSVGR

SEQ ID NO: 65621 - protein, 9 aa, synthetic construct
  source 1..9: note = Seed: LVVVGAVGV (KRAS G12V)
WVVQGSVGS

SEQ ID NO: 65622 - protein, 9 aa, synthetic construct
  source 1..9: note = Seed: LVVVGAVGV (KRAS G12V)
WVVQGSVGT

SEQ ID NO: 65623 - protein, 9 aa, synthetic construct
  source 1..9: note = Seed: LVVVGAVGV (KRAS G12V)
WVVQGSVGV

SEQ ID NO: 65624 - protein, 9 aa, synthetic construct
  source 1..9: note = Seed: LVVVGAVGV (KRAS G12V)
WVVQGSVGY

SEQ ID NO: 65625 - protein, 9 aa, synthetic construct
  source 1..9: note = Seed: LVVVGAVGV (KRAS G12V)
WVVQGTVGA

SEQ ID NO: 65626 - protein, 9 aa, synthetic construct
  source 1..9: note = Seed: LVVVGAVGV (KRAS G12V)
WVVQGTVGF

SEQ ID NO: 65627 - protein, 9 aa, synthetic construct
  source 1..9: note = Seed: LVVVGAVGV (KRAS G12V)
WVVQGTVGG

SEQ ID NO: 65628 - protein, 9 aa, synthetic construct
  source 1..9: note = Seed: LVVVGAVGV (KRAS G12V)
WVVQGTVGI

SEQ ID NO: 65629 - protein, 9 aa, synthetic construct
  source 1..9: note = Seed: LVVVGAVGV (KRAS G12V)
WVVQGTVGL

SEQ ID NO: 65630 - protein, 9 aa, synthetic construct
  source 1..9: note = Seed: LVVVGAVGV (KRAS G12V)
WVVQGTVGM

SEQ ID NO: 65631 - protein, 9 aa, synthetic construct
  source 1..9: note = Seed: LVVVGAVGV (KRAS G12V)
WVVQGTVGN

SEQ ID NO: 65632 - protein, 9 aa, synthetic construct
  source 1..9: note = Seed: LVVVGAVGV (KRAS G12V)
WVVQGTVGS

SEQ ID NO: 65633 - protein, 9 aa, synthetic construct
  source 1..9: note = Seed: LVVVGAVGV (KRAS G12V)
WVVQGTVGT

SEQ ID NO: 65634 - protein, 9 aa, synthetic construct
  source 1..9: note = Seed: LVVVGAVGV (KRAS G12V)
WVVQGTVGV

SEQ ID NO: 65635 - protein, 9 aa, synthetic construct
  source 1..9: note = Seed: LVVVGAVGV (KRAS G12V)
WVVQGVVGA

SEQ ID NO: 65636 - protein, 9 aa, synthetic construct
  source 1..9: note = Seed: LVVVGAVGV (KRAS G12V)
WVVQGVVGI

SEQ ID NO: 65637 - protein, 9 aa, synthetic construct
  source 1..9: note = Seed: LVVVGAVGV (KRAS G12V)
WVVQGVVGL

SEQ ID NO: 65638 - protein, 9 aa, synthetic construct
  source 1..9: note = Seed: LVVVGAVGV (KRAS G12V)
WVVQGVVGM

SEQ ID NO: 65639 - protein, 9 aa, synthetic construct
  source 1..9: note = Seed: LVVVGAVGV (KRAS G12V)
WVVQGVVGN

SEQ ID NO: 65640 - protein, 9 aa, synthetic construct
  source 1..9: note = Seed: LVVVGAVGV (KRAS G12V)
WVVQGVVGS

SEQ ID NO: 65641 - protein, 9 aa, synthetic construct
  source 1..9: note = Seed: LVVVGAVGV (KRAS G12V)
WVVQGVVGT

SEQ ID NO: 65642 - protein, 9 aa, synthetic construct
  source 1..9: note = Seed: LVVVGAVGV (KRAS G12V)
WVVQGVVGV

SEQ ID NO: 65643 - protein, 9 aa, synthetic construct
  source 1..9: note = Seed: LVVVGAVGV (KRAS G12V)
WVVRGAVGI

SEQ ID NO: 65644 - protein, 9 aa, synthetic construct
  source 1..9: note = Seed: LVVVGAVGV (KRAS G12V)
WVVRGAVGL

SEQ ID NO: 65645 - protein, 9 aa, synthetic construct
  source 1..9: note = Seed: LVVVGAVGV (KRAS G12V)
WVVRGAVGV

SEQ ID NO: 65646 - protein, 9 aa, synthetic construct
  source 1..9: note = Seed: LVVVGAVGV (KRAS G12V)
WVVRGIVGR

SEQ ID NO: 65647 - protein, 9 aa, synthetic construct
  source 1..9: note = Seed: LVVVGAVGV (KRAS G12V)
WVVRGKVGA

SEQ ID NO: 65648 - protein, 9 aa, synthetic construct
  source 1..9: note = Seed: LVVVGAVGV (KRAS G12V)
WVVRGKVGG

SEQ ID NO: 65649 - protein, 9 aa, synthetic construct
  source 1..9: note = Seed: LVVVGAVGV (KRAS G12V)
WVVRGKVGQ

SEQ ID NO: 65650 - protein, 9 aa, synthetic construct
  source 1..9: note = Seed: LVVVGAVGV (KRAS G12V)
WVVRGKVGR

SEQ ID NO: 65651 - protein, 9 aa, synthetic construct
  source 1..9: note = Seed: LVVVGAVGV (KRAS G12V)
WVVRGKVGS

SEQ ID NO: 65652 - protein, 9 aa, synthetic construct
  source 1..9: note = Seed: LVVVGAVGV (KRAS G12V)
WVVRGLVGR

SEQ ID NO: 65653 - protein, 9 aa, synthetic construct
  source 1..9: note = Seed: LVVVGAVGV (KRAS G12V)
WVVRGMVGR

SEQ ID NO: 65654 - protein, 9 aa, synthetic construct
  source 1..9: note = Seed: LVVVGAVGV (KRAS G12V)
WVVRGRVGA

SEQ ID NO: 65655 - protein, 9 aa, synthetic construct
  source 1..9: note = Seed: LVVVGAVGV (KRAS G12V)
WVVRGRVGF

SEQ ID NO: 65656 - protein, 9 aa, synthetic construct
  source 1..9: note = Seed: LVVVGAVGV (KRAS G12V)
WVVRGRVGG

SEQ ID NO: 65657 - protein, 9 aa, synthetic construct
  source 1..9: note = Seed: LVVVGAVGV (KRAS G12V)
WVVRGRVGH

SEQ ID NO: 65658 - protein, 9 aa, synthetic construct
  source 1..9: note = Seed: LVVVGAVGV (KRAS G12V)
WVVRGRVGI

SEQ ID NO: 65659 - protein, 9 aa, synthetic construct
  source 1..9: note = Seed: LVVVGAVGV (KRAS G12V)
WVVRGRVGK

SEQ ID NO: 65660 - protein, 9 aa, synthetic construct
  source 1..9: note = Seed: LVVVGAVGV (KRAS G12V)
WVVRGRVGL

SEQ ID NO: 65661 - protein, 9 aa, synthetic construct
  source 1..9: note = Seed: LVVVGAVGV (KRAS G12V)
WVVRGRVGM

SEQ ID NO: 65662 - protein, 9 aa, synthetic construct
  source 1..9: note = Seed: LVVVGAVGV (KRAS G12V)
WVVRGRVGN

SEQ ID NO: 65663 - protein, 9 aa, synthetic construct
  source 1..9: note = Seed: LVVVGAVGV (KRAS G12V)
WVVRGRVGQ

SEQ ID NO: 65664 - protein, 9 aa, synthetic construct
  source 1..9: note = Seed: LVVVGAVGV (KRAS G12V)
WVVRGRVGR

SEQ ID NO: 65665 - protein, 9 aa, synthetic construct
  source 1..9: note = Seed: LVVVGAVGV (KRAS G12V)
WVVRGRVGS

SEQ ID NO: 65666 - protein, 9 aa, synthetic construct
  source 1..9: note = Seed: LVVVGAVGV (KRAS G12V)
WVVRGRVGT

SEQ ID NO: 65667 - protein, 9 aa, synthetic construct
  source 1..9: note = Seed: LVVVGAVGV (KRAS G12V)
WVVRGRVGV

SEQ ID NO: 65668 - protein, 9 aa, synthetic construct
  source 1..9: note = Seed: LVVVGAVGV (KRAS G12V)
WVVRGRVGY

SEQ ID NO: 65669 - protein, 9 aa, synthetic construct
  source 1..9: note = Seed: LVVVGAVGV (KRAS G12V)
WVVSGAVGA

SEQ ID NO: 65670 - protein, 9 aa, synthetic construct
  source 1..9: note = Seed: LVVVGAVGV (KRAS G12V)
WVVSGAVGC

SEQ ID NO: 65671 - protein, 9 aa, synthetic construct
  source 1..9: note = Seed: LVVVGAVGV (KRAS G12V)
WVVSGAVGD

SEQ ID NO: 65672 - protein, 9 aa, synthetic construct
  source 1..9: note = Seed: LVVVGAVGV (KRAS G12V)
WVVSGAVGE

SEQ ID NO: 65673 - protein, 9 aa, synthetic construct
  source 1..9: note = Seed: LVVVGAVGV (KRAS G12V)
WVVSGAVGF

SEQ ID NO: 65674 - protein, 9 aa, synthetic construct
  source 1..9: note = Seed: LVVVGAVGV (KRAS G12V)
WVVSGAVGG

SEQ ID NO: 65675 - protein, 9 aa, synthetic construct
  source 1..9: note = Seed: LVVVGAVGV (KRAS G12V)
WVVSGAVGH

SEQ ID NO: 65676 - protein, 9 aa, synthetic construct
  source 1..9: note = Seed: LVVVGAVGV (KRAS G12V)
WVVSGAVGI

SEQ ID NO: 65677 - protein, 9 aa, synthetic construct
  source 1..9: note = Seed: LVVVGAVGV (KRAS G12V)
WVVSGAVGK

SEQ ID NO: 65678 - protein, 9 aa, synthetic construct
  source 1..9: note = Seed: LVVVGAVGV (KRAS G12V)
WVVSGAVGL

SEQ ID NO: 65679 - protein, 9 aa, synthetic construct
  source 1..9: note = Seed: LVVVGAVGV (KRAS G12V)
WVVSGAVGM

SEQ ID NO: 65680 - protein, 9 aa, synthetic construct
  source 1..9: note = Seed: LVVVGAVGV (KRAS G12V)
WVVSGAVGN

SEQ ID NO: 65681 - protein, 9 aa, synthetic construct
  source 1..9: note = Seed: LVVVGAVGV (KRAS G12V)
WVVSGAVGP

SEQ ID NO: 65682 - protein, 9 aa, synthetic construct
  source 1..9: note = Seed: LVVVGAVGV (KRAS G12V)
WVVSGAVGQ

SEQ ID NO: 65683 - protein, 9 aa, synthetic construct
  source 1..9: note = Seed: LVVVGAVGV (KRAS G12V)
WVVSGAVGR

SEQ ID NO: 65684 - protein, 9 aa, synthetic construct
  source 1..9: note = Seed: LVVVGAVGV (KRAS G12V)
WVVSGAVGS

SEQ ID NO: 65685 - protein, 9 aa, synthetic construct
  source 1..9: note = Seed: LVVVGAVGV (KRAS G12V)
WVVSGAVGT

SEQ ID NO: 65686 - protein, 9 aa, synthetic construct
  source 1..9: note = Seed: LVVVGAVGV (KRAS G12V)
WVVSGAVGV

SEQ ID NO: 65687 - protein, 9 aa, synthetic construct
  source 1..9: note = Seed: LVVVGAVGV (KRAS G12V)
WVVSGAVGW

SEQ ID NO: 65688 - protein, 9 aa, synthetic construct
  source 1..9: note = Seed: LVVVGAVGV (KRAS G12V)
WVVSGAVGY

SEQ ID NO: 65689 - protein, 9 aa, synthetic construct
  source 1..9: note = Seed: LVVVGAVGV (KRAS G12V)
WVVSGCVGA

SEQ ID NO: 65690 - protein, 9 aa, synthetic construct
  source 1..9: note = Seed: LVVVGAVGV (KRAS G12V)
WVVSGCVGC

SEQ ID NO: 65691 - protein, 9 aa, synthetic construct
  source 1..9: note = Seed: LVVVGAVGV (KRAS G12V)
WVVSGCVGF

SEQ ID NO: 65692 - protein, 9 aa, synthetic construct
  source 1..9: note = Seed: LVVVGAVGV (KRAS G12V)
WVVSGCVGG

SEQ ID NO: 65693 - protein, 9 aa, synthetic construct
  source 1..9: note = Seed: LVVVGAVGV (KRAS G12V)
WVVSGCVGH

SEQ ID NO: 65694 - protein, 9 aa, synthetic construct
  source 1..9: note = Seed: LVVVGAVGV (KRAS G12V)
WVVSGCVGI

SEQ ID NO: 65695 - protein, 9 aa, synthetic construct
  source 1..9: note = Seed: LVVVGAVGV (KRAS G12V)
WVVSGCVGK

SEQ ID NO: 65696 - protein, 9 aa, synthetic construct
  source 1..9: note = Seed: LVVVGAVGV (KRAS G12V)
WVVSGCVGL

SEQ ID NO: 65697 - protein, 9 aa, synthetic construct
  source 1..9: note = Seed: LVVVGAVGV (KRAS G12V)
WVVSGCVGM

SEQ ID NO: 65698 - protein, 9 aa, synthetic construct
  source 1..9: note = Seed: LVVVGAVGV (KRAS G12V)
WVVSGCVGN

SEQ ID NO: 65699 - protein, 9 aa, synthetic construct
  source 1..9: note = Seed: LVVVGAVGV (KRAS G12V)
WVVSGCVGQ

SEQ ID NO: 65700 - protein, 9 aa, synthetic construct
  source 1..9: note = Seed: LVVVGAVGV (KRAS G12V)
WVVSGCVGR

SEQ ID NO: 65701 - protein, 9 aa, synthetic construct
  source 1..9: note = Seed: LVVVGAVGV (KRAS G12V)
WVVSGCVGS

SEQ ID NO: 65702 - protein, 9 aa, synthetic construct
  source 1..9: note = Seed: LVVVGAVGV (KRAS G12V)
WVVSGCVGT

SEQ ID NO: 65703 - protein, 9 aa, synthetic construct
  source 1..9: note = Seed: LVVVGAVGV (KRAS G12V)
WVVSGCVGV

SEQ ID NO: 65704 - protein, 9 aa, synthetic construct
  source 1..9: note = Seed: LVVVGAVGV (KRAS G12V)
WVVSGCVGY

SEQ ID NO: 65705 - protein, 9 aa, synthetic construct
  source 1..9: note = Seed: LVVVGAVGV (KRAS G12V)
WVVSGDVGA

SEQ ID NO: 65706 - protein, 9 aa, synthetic construct
  source 1..9: note = Seed: LVVVGAVGV (KRAS G12V)
WVVSGDVGF

SEQ ID NO: 65707 - protein, 9 aa, synthetic construct
  source 1..9: note = Seed: LVVVGAVGV (KRAS G12V)
WVVSGDVGI

SEQ ID NO: 65708 - protein, 9 aa, synthetic construct
  source 1..9: note = Seed: LVVVGAVGV (KRAS G12V)
WVVSGDVGL

SEQ ID NO: 65709 - protein, 9 aa, synthetic construct
  source 1..9: note = Seed: LVVVGAVGV (KRAS G12V)
WVVSGDVGM

SEQ ID NO: 65710 - protein, 9 aa, synthetic construct
  source 1..9: note = Seed: LVVVGAVGV (KRAS G12V)
WVVSGDVGV

SEQ ID NO: 65711 - protein, 9 aa, synthetic construct
  source 1..9: note = Seed: LVVVGAVGV (KRAS G12V)
WVVSGEVGA

SEQ ID NO: 65712 - protein, 9 aa, synthetic construct
  source 1..9: note = Seed: LVVVGAVGV (KRAS G12V)
WVVSGEVGF

SEQ ID NO: 65713 - protein, 9 aa, synthetic construct
  source 1..9: note = Seed: LVVVGAVGV (KRAS G12V)
WVVSGEVGI

SEQ ID NO: 65714 - protein, 9 aa, synthetic construct
  source 1..9: note = Seed: LVVVGAVGV (KRAS G12V)
WVVSGEVGL

SEQ ID NO: 65715 - protein, 9 aa, synthetic construct
  source 1..9: note = Seed: LVVVGAVGV (KRAS G12V)
WVVSGEVGM

SEQ ID NO: 65716 - protein, 9 aa, synthetic construct
  source 1..9: note = Seed: LVVVGAVGV (KRAS G12V)
WVVSGEVGV

SEQ ID NO: 65717 - protein, 9 aa, synthetic construct
  source 1..9: note = Seed: LVVVGAVGV (KRAS G12V)
WVVSGFVGI

SEQ ID NO: 65718 - protein, 9 aa, synthetic construct
  source 1..9: note = Seed: LVVVGAVGV (KRAS G12V)
WVVSGFVGL

SEQ ID NO: 65719 - protein, 9 aa, synthetic construct
  source 1..9: note = Seed: LVVVGAVGV (KRAS G12V)
WVVSGFVGV

SEQ ID NO: 65720 - protein, 9 aa, synthetic construct
  source 1..9: note = Seed: LVVVGAVGV (KRAS G12V)
WVVSGGVGA

SEQ ID NO: 65721 - protein, 9 aa, synthetic construct
  source 1..9: note = Seed: LVVVGAVGV (KRAS G12V)
WVVSGGVGC

SEQ ID NO: 65722 - protein, 9 aa, synthetic construct
  source 1..9: note = Seed: LVVVGAVGV (KRAS G12V)
WVVSGGVGF

SEQ ID NO: 65723 - protein, 9 aa, synthetic construct
  source 1..9: note = Seed: LVVVGAVGV (KRAS G12V)
WVVSGGVGG

SEQ ID NO: 65724 - protein, 9 aa, synthetic construct
  source 1..9: note = Seed: LVVVGAVGV (KRAS G12V)
WVVSGGVGH

SEQ ID NO: 65725 - protein, 9 aa, synthetic construct
  source 1..9: note = Seed: LVVVGAVGV (KRAS G12V)
WVVSGGVGI

SEQ ID NO: 65726 - protein, 9 aa, synthetic construct
  source 1..9: note = Seed: LVVVGAVGV (KRAS G12V)
WVVSGGVGK

SEQ ID NO: 65727 - protein, 9 aa, synthetic construct
  source 1..9: note = Seed: LVVVGAVGV (KRAS G12V)
WVVSGGVGL

SEQ ID NO: 65728 - protein, 9 aa, synthetic construct
  source 1..9: note = Seed: LVVVGAVGV (KRAS G12V)
WVVSGGVGM

SEQ ID NO: 65729 - protein, 9 aa, synthetic construct
  source 1..9: note = Seed: LVVVGAVGV (KRAS G12V)
WVVSGGVGN

SEQ ID NO: 65730 - protein, 9 aa, synthetic construct
  source 1..9: note = Seed: LVVVGAVGV (KRAS G12V)
WVVSGGVGP

SEQ ID NO: 65731 - protein, 9 aa, synthetic construct
  source 1..9: note = Seed: LVVVGAVGV (KRAS G12V)
WVVSGGVGQ

SEQ ID NO: 65732 - protein, 9 aa, synthetic construct
  source 1..9: note = Seed: LVVVGAVGV (KRAS G12V)
WVVSGGVGR

SEQ ID NO: 65733 - protein, 9 aa, synthetic construct
  source 1..9: note = Seed: LVVVGAVGV (KRAS G12V)
WVVSGGVGS

SEQ ID NO: 65734 - protein, 9 aa, synthetic construct
  source 1..9: note = Seed: LVVVGAVGV (KRAS G12V)
WVVSGGVGT

SEQ ID NO: 65735 - protein, 9 aa, synthetic construct
  source 1..9: note = Seed: LVVVGAVGV (KRAS G12V)
WVVSGGVGV

SEQ ID NO: 65736 - protein, 9 aa, synthetic construct
  source 1..9: note = Seed: LVVVGAVGV (KRAS G12V)
WVVSGGVGW

SEQ ID NO: 65737 - protein, 9 aa, synthetic construct
  source 1..9: note = Seed: LVVVGAVGV (KRAS G12V)
WVVSGGVGY

SEQ ID NO: 65738 - protein, 9 aa, synthetic construct
  source 1..9: note = Seed: LVVVGAVGV (KRAS G12V)
WVVSGHVGA

SEQ ID NO: 65739 - protein, 9 aa, synthetic construct
  source 1..9: note = Seed: LVVVGAVGV (KRAS G12V)
WVVSGHVGC

SEQ ID NO: 65740 - protein, 9 aa, synthetic construct
  source 1..9: note = Seed: LVVVGAVGV (KRAS G12V)
WVVSGHVGI

SEQ ID NO: 65741 - protein, 9 aa, synthetic construct
  source 1..9: note = Seed: LVVVGAVGV (KRAS G12V)
WVVSGHVGL

SEQ ID NO: 65742 - protein, 9 aa, synthetic construct
  source 1..9: note = Seed: LVVVGAVGV (KRAS G12V)
WVVSGHVGM

SEQ ID NO: 65743 - protein, 9 aa, synthetic construct
  source 1..9: note = Seed: LVVVGAVGV (KRAS G12V)
WVVSGHVGV

SEQ ID NO: 65744 - protein, 9 aa, synthetic construct
  source 1..9: note = Seed: LVVVGAVGV (KRAS G12V)
WVVSGIVGA

SEQ ID NO: 65745 - protein, 9 aa, synthetic construct
  source 1..9: note = Seed: LVVVGAVGV (KRAS G12V)
WVVSGIVGC

SEQ ID NO: 65746 - protein, 9 aa, synthetic construct
  source 1..9: note = Seed: LVVVGAVGV (KRAS G12V)
WVVSGIVGF

SEQ ID NO: 65747 - protein, 9 aa, synthetic construct
  source 1..9: note = Seed: LVVVGAVGV (KRAS G12V)
WVVSGIVGG

SEQ ID NO: 65748 - protein, 9 aa, synthetic construct
  source 1..9: note = Seed: LVVVGAVGV (KRAS G12V)
WVVSGIVGH

SEQ ID NO: 65749 - protein, 9 aa, synthetic construct
  source 1..9: note = Seed: LVVVGAVGV (KRAS G12V)
WVVSGIVGI

SEQ ID NO: 65750 - protein, 9 aa, synthetic construct
  source 1..9: note = Seed: LVVVGAVGV (KRAS G12V)
WVVSGIVGL

SEQ ID NO: 65751 - protein, 9 aa, synthetic construct
  source 1..9: note = Seed: LVVVGAVGV (KRAS G12V)
WVVSGIVGM

SEQ ID NO: 65752 - protein, 9 aa, synthetic construct
  source 1..9: note = Seed: LVVVGAVGV (KRAS G12V)
WVVSGIVGN

SEQ ID NO: 65753 - protein, 9 aa, synthetic construct
  source 1..9: note = Seed: LVVVGAVGV (KRAS G12V)
WVVSGIVGQ

SEQ ID NO: 65754 - protein, 9 aa, synthetic construct
  source 1..9: note = Seed: LVVVGAVGV (KRAS G12V)
WVVSGIVGS

SEQ ID NO: 65755 - protein, 9 aa, synthetic construct
  source 1..9: note = Seed: LVVVGAVGV (KRAS G12V)
WVVSGIVGT

SEQ ID NO: 65756 - protein, 9 aa, synthetic construct
  source 1..9: note = Seed: LVVVGAVGV (KRAS G12V)
WVVSGIVGV

SEQ ID NO: 65757 - protein, 9 aa, synthetic construct
  source 1..9: note = Seed: LVVVGAVGV (KRAS G12V)
WVVSGIVGY

SEQ ID NO: 65758 - protein, 9 aa, synthetic construct
  source 1..9: note = Seed: LVVVGAVGV (KRAS G12V)
WVVSGKVGA

SEQ ID NO: 65759 - protein, 9 aa, synthetic construct
  source 1..9: note = Seed: LVVVGAVGV (KRAS G12V)
WVVSGKVGG

SEQ ID NO: 65760 - protein, 9 aa, synthetic construct
  source 1..9: note = Seed: LVVVGAVGV (KRAS G12V)
WVVSGKVGL

SEQ ID NO: 65761 - protein, 9 aa, synthetic construct
  source 1..9: note = Seed: LVVVGAVGV (KRAS G12V)
WVVSGKVGQ

SEQ ID NO: 65762 - protein, 9 aa, synthetic construct
  source 1..9: note = Seed: LVVVGAVGV (KRAS G12V)
WVVSGKVGS

SEQ ID NO: 65763 - protein, 9 aa, synthetic construct
  source 1..9: note = Seed: LVVVGAVGV (KRAS G12V)
WVVSGLVGA

SEQ ID NO: 65764 - protein, 9 aa, synthetic construct
  source 1..9: note = Seed: LVVVGAVGV (KRAS G12V)
WVVSGLVGH

SEQ ID NO: 65765 - protein, 9 aa, synthetic construct
  source 1..9: note = Seed: LVVVGAVGV (KRAS G12V)
WVVSGLVGI

SEQ ID NO: 65766 - protein, 9 aa, synthetic construct
  source 1..9: note = Seed: LVVVGAVGV (KRAS G12V)
WVVSGLVGM

SEQ ID NO: 65767 - protein, 9 aa, synthetic construct
  source 1..9: note = Seed: LVVVGAVGV (KRAS G12V)
WVVSGLVGN

SEQ ID NO: 65768 - protein, 9 aa, synthetic construct
  source 1..9: note = Seed: LVVVGAVGV (KRAS G12V)
WVVSGLVGQ

SEQ ID NO: 65769 - protein, 9 aa, synthetic construct
  source 1..9: note = Seed: LVVVGAVGV (KRAS G12V)
WVVSGLVGS

SEQ ID NO: 65770 - protein, 9 aa, synthetic construct
  source 1..9: note = Seed: LVVVGAVGV (KRAS G12V)
WVVSGLVGT

SEQ ID NO: 65771 - protein, 9 aa, synthetic construct
  source 1..9: note = Seed: LVVVGAVGV (KRAS G12V)
WVVSGMVGA

SEQ ID NO: 65772 - protein, 9 aa, synthetic construct
  source 1..9: note = Seed: LVVVGAVGV (KRAS G12V)
WVVSGMVGC

SEQ ID NO: 65773 - protein, 9 aa, synthetic construct
  source 1..9: note = Seed: LVVVGAVGV (KRAS G12V)
WVVSGMVGH

SEQ ID NO: 65774 - protein, 9 aa, synthetic construct
  source 1..9: note = Seed: LVVVGAVGV (KRAS G12V)
WVVSGMVGI

SEQ ID NO: 65775 - protein, 9 aa, synthetic construct
  source 1..9: note = Seed: LVVVGAVGV (KRAS G12V)
WVVSGMVGL

SEQ ID NO: 65776 - protein, 9 aa, synthetic construct
  source 1..9: note = Seed: LVVVGAVGV (KRAS G12V)
WVVSGMVGM

SEQ ID NO: 65777 - protein, 9 aa, synthetic construct
  source 1..9: note = Seed: LVVVGAVGV (KRAS G12V)
WVVSGMVGN

SEQ ID NO: 65778 - protein, 9 aa, synthetic construct
  source 1..9: note = Seed: LVVVGAVGV (KRAS G12V)
WVVSGMVGQ

SEQ ID NO: 65779 - protein, 9 aa, synthetic construct
  source 1..9: note = Seed: LVVVGAVGV (KRAS G12V)
WVVSGMVGS

SEQ ID NO: 65780 - protein, 9 aa, synthetic construct
  source 1..9: note = Seed: LVVVGAVGV (KRAS G12V)
WVVSGMVGT

SEQ ID NO: 65781 - protein, 9 aa, synthetic construct
  source 1..9: note = Seed: LVVVGAVGV (KRAS G12V)
WVVSGMVGV

SEQ ID NO: 65782 - protein, 9 aa, synthetic construct
  source 1..9: note = Seed: LVVVGAVGV (KRAS G12V)
WVVSGNVGA

SEQ ID NO: 65783 - protein, 9 aa, synthetic construct
  source 1..9: note = Seed: LVVVGAVGV (KRAS G12V)
WVVSGNVGC

SEQ ID NO: 65784 - protein, 9 aa, synthetic construct
  source 1..9: note = Seed: LVVVGAVGV (KRAS G12V)
WVVSGNVGF

SEQ ID NO: 65785 - protein, 9 aa, synthetic construct
  source 1..9: note = Seed: LVVVGAVGV (KRAS G12V)
WVVSGNVGG

SEQ ID NO: 65786 - protein, 9 aa, synthetic construct
  source 1..9: note = Seed: LVVVGAVGV (KRAS G12V)
WVVSGNVGH

SEQ ID NO: 65787 - protein, 9 aa, synthetic construct
  source 1..9: note = Seed: LVVVGAVGV (KRAS G12V)
WVVSGNVGI

SEQ ID NO: 65788 - protein, 9 aa, synthetic construct
  source 1..9: note = Seed: LVVVGAVGV (KRAS G12V)
WVVSGNVGL

SEQ ID NO: 65789 - protein, 9 aa, synthetic construct
  source 1..9: note = Seed: LVVVGAVGV (KRAS G12V)
WVVSGNVGM

SEQ ID NO: 65790 - protein, 9 aa, synthetic construct
  source 1..9: note = Seed: LVVVGAVGV (KRAS G12V)
WVVSGNVGN

SEQ ID NO: 65791 - protein, 9 aa, synthetic construct
  source 1..9: note = Seed: LVVVGAVGV (KRAS G12V)
WVVSGNVGQ

SEQ ID NO: 65792 - protein, 9 aa, synthetic construct
  source 1..9: note = Seed: LVVVGAVGV (KRAS G12V)
WVVSGNVGR

SEQ ID NO: 65793 - protein, 9 aa, synthetic construct
  source 1..9: note = Seed: LVVVGAVGV (KRAS G12V)
WVVSGNVGS

SEQ ID NO: 65794 - protein, 9 aa, synthetic construct
  source 1..9: note = Seed: LVVVGAVGV (KRAS G12V)
WVVSGNVGT

SEQ ID NO: 65795 - protein, 9 aa, synthetic construct
  source 1..9: note = Seed: LVVVGAVGV (KRAS G12V)
WVVSGNVGV

SEQ ID NO: 65796 - protein, 9 aa, synthetic construct
  source 1..9: note = Seed: LVVVGAVGV (KRAS G12V)
WVVSGNVGY

SEQ ID NO: 65797 - protein, 9 aa, synthetic construct
  source 1..9: note = Seed: LVVVGAVGV (KRAS G12V)
WVVSGPVGA

SEQ ID NO: 65798 - protein, 9 aa, synthetic construct
  source 1..9: note = Seed: LVVVGAVGV (KRAS G12V)
WVVSGPVGC

SEQ ID NO: 65799 - protein, 9 aa, synthetic construct
  source 1..9: note = Seed: LVVVGAVGV (KRAS G12V)
WVVSGPVGD

SEQ ID NO: 65800 - protein, 9 aa, synthetic construct
  source 1..9: note = Seed: LVVVGAVGV (KRAS G12V)
WVVSGPVGE

SEQ ID NO: 65801 - protein, 9 aa, synthetic construct
  source 1..9: note = Seed: LVVVGAVGV (KRAS G12V)
WVVSGPVGF

SEQ ID NO: 65802 - protein, 9 aa, synthetic construct
  source 1..9: note = Seed: LVVVGAVGV (KRAS G12V)
WVVSGPVGG

SEQ ID NO: 65803 - protein, 9 aa, synthetic construct
  source 1..9: note = Seed: LVVVGAVGV (KRAS G12V)
WVVSGPVGH

SEQ ID NO: 65804 - protein, 9 aa, synthetic construct
  source 1..9: note = Seed: LVVVGAVGV (KRAS G12V)
WVVSGPVGI

SEQ ID NO: 65805 - protein, 9 aa, synthetic construct
  source 1..9: note = Seed: LVVVGAVGV (KRAS G12V)
WVVSGPVGL

SEQ ID NO: 65806 - protein, 9 aa, synthetic construct
  source 1..9: note = Seed: LVVVGAVGV (KRAS G12V)
WVVSGPVGM

SEQ ID NO: 65807 - protein, 9 aa, synthetic construct
  source 1..9: note = Seed: LVVVGAVGV (KRAS G12V)
WVVSGPVGN

SEQ ID NO: 65808 - protein, 9 aa, synthetic construct
  source 1..9: note = Seed: LVVVGAVGV (KRAS G12V)
WVVSGPVGQ

SEQ ID NO: 65809 - protein, 9 aa, synthetic construct
  source 1..9: note = Seed: LVVVGAVGV (KRAS G12V)
WVVSGPVGR

SEQ ID NO: 65810 - protein, 9 aa, synthetic construct
  source 1..9: note = Seed: LVVVGAVGV (KRAS G12V)
WVVSGPVGS

SEQ ID NO: 65811 - protein, 9 aa, synthetic construct
  source 1..9: note = Seed: LVVVGAVGV (KRAS G12V)
WVVSGPVGT

SEQ ID NO: 65812 - protein, 9 aa, synthetic construct
  source 1..9: note = Seed: LVVVGAVGV (KRAS G12V)
WVVSGPVGV

SEQ ID NO: 65813 - protein, 9 aa, synthetic construct
  source 1..9: note = Seed: LVVVGAVGV (KRAS G12V)
WVVSGPVGW

SEQ ID NO: 65814 - protein, 9 aa, synthetic construct
  source 1..9: note = Seed: LVVVGAVGV (KRAS G12V)
WVVSGPVGY

SEQ ID NO: 65815 - protein, 9 aa, synthetic construct
  source 1..9: note = Seed: LVVVGAVGV (KRAS G12V)
WVVSGQVGA

SEQ ID NO: 65816 - protein, 9 aa, synthetic construct
  source 1..9: note = Seed: LVVVGAVGV (KRAS G12V)
WVVSGQVGC

SEQ ID NO: 65817 - protein, 9 aa, synthetic construct
  source 1..9: note = Seed: LVVVGAVGV (KRAS G12V)
WVVSGQVGG

SEQ ID NO: 65818 - protein, 9 aa, synthetic construct
  source 1..9: note = Seed: LVVVGAVGV (KRAS G12V)
WVVSGQVGI

SEQ ID NO: 65819 - protein, 9 aa, synthetic construct
  source 1..9: note = Seed: LVVVGAVGV (KRAS G12V)
WVVSGQVGL

SEQ ID NO: 65820 - protein, 9 aa, synthetic construct
  source 1..9: note = Seed: LVVVGAVGV (KRAS G12V)
WVVSGQVGM

SEQ ID NO: 65821 - protein, 9 aa, synthetic construct
  source 1..9: note = Seed: LVVVGAVGV (KRAS G12V)
WVVSGQVGS

SEQ ID NO: 65822 - protein, 9 aa, synthetic construct
  source 1..9: note = Seed: LVVVGAVGV (KRAS G12V)
WVVSGQVGT

SEQ ID NO: 65823 - protein, 9 aa, synthetic construct
  source 1..9: note = Seed: LVVVGAVGV (KRAS G12V)
WVVSGQVGV

SEQ ID NO: 65824 - protein, 9 aa, synthetic construct
  source 1..9: note = Seed: LVVVGAVGV (KRAS G12V)
WVVSGRVGA

SEQ ID NO: 65825 - protein, 9 aa, synthetic construct
  source 1..9: note = Seed: LVVVGAVGV (KRAS G12V)
WVVSGRVGG

SEQ ID NO: 65826 - protein, 9 aa, synthetic construct
  source 1..9: note = Seed: LVVVGAVGV (KRAS G12V)
WVVSGRVGH

SEQ ID NO: 65827 - protein, 9 aa, synthetic construct
  source 1..9: note = Seed: LVVVGAVGV (KRAS G12V)
WVVSGRVGL

SEQ ID NO: 65828 - protein, 9 aa, synthetic construct
  source 1..9: note = Seed: LVVVGAVGV (KRAS G12V)
WVVSGRVGQ

SEQ ID NO: 65829 - protein, 9 aa, synthetic construct
  source 1..9: note = Seed: LVVVGAVGV (KRAS G12V)
WVVSGRVGS

SEQ ID NO: 65830 - protein, 9 aa, synthetic construct
  source 1..9: note = Seed: LVVVGAVGV (KRAS G12V)
WVVSGSVGA

SEQ ID NO: 65831 - protein, 9 aa, synthetic construct
  source 1..9: note = Seed: LVVVGAVGV (KRAS G12V)
WVVSGSVGC

SEQ ID NO: 65832 - protein, 9 aa, synthetic construct
  source 1..9: note = Seed: LVVVGAVGV (KRAS G12V)
WVVSGSVGD

SEQ ID NO: 65833 - protein, 9 aa, synthetic construct
  source 1..9: note = Seed: LVVVGAVGV (KRAS G12V)
WVVSGSVGE

SEQ ID NO: 65834 - protein, 9 aa, synthetic construct
  source 1..9: note = Seed: LVVVGAVGV (KRAS G12V)
WVVSGSVGF

SEQ ID NO: 65835 - protein, 9 aa, synthetic construct
  source 1..9: note = Seed: LVVVGAVGV (KRAS G12V)
WVVSGSVGG

SEQ ID NO: 65836 - protein, 9 aa, synthetic construct
  source 1..9: note = Seed: LVVVGAVGV (KRAS G12V)
WVVSGSVGH

SEQ ID NO: 65837 - protein, 9 aa, synthetic construct
  source 1..9: note = Seed: LVVVGAVGV (KRAS G12V)
WVVSGSVGI

SEQ ID NO: 65838 - protein, 9 aa, synthetic construct
  source 1..9: note = Seed: LVVVGAVGV (KRAS G12V)
WVVSGSVGK

SEQ ID NO: 65839 - protein, 9 aa, synthetic construct
  source 1..9: note = Seed: LVVVGAVGV (KRAS G12V)
WVVSGSVGL

SEQ ID NO: 65840 - protein, 9 aa, synthetic construct
  source 1..9: note = Seed: LVVVGAVGV (KRAS G12V)
WVVSGSVGM

SEQ ID NO: 65841 - protein, 9 aa, synthetic construct
  source 1..9: note = Seed: LVVVGAVGV (KRAS G12V)
WVVSGSVGN

SEQ ID NO: 65842 - protein, 9 aa, synthetic construct
  source 1..9: note = Seed: LVVVGAVGV (KRAS G12V)
WVVSGSVGP

SEQ ID NO: 65843 - protein, 9 aa, synthetic construct
  source 1..9: note = Seed: LVVVGAVGV (KRAS G12V)
WVVSGSVGQ

SEQ ID NO: 65844 - protein, 9 aa, synthetic construct
  source 1..9: note = Seed: LVVVGAVGV (KRAS G12V)
WVVSGSVGR

SEQ ID NO: 65845 - protein, 9 aa, synthetic construct
  source 1..9: note = Seed: LVVVGAVGV (KRAS G12V)
WVVSGSVGS

SEQ ID NO: 65846 - protein, 9 aa, synthetic construct
  source 1..9: note = Seed: LVVVGAVGV (KRAS G12V)
WVVSGSVGT

SEQ ID NO: 65847 - protein, 9 aa, synthetic construct
  source 1..9: note = Seed: LVVVGAVGV (KRAS G12V)
WVVSGSVGV

SEQ ID NO: 65848 - protein, 9 aa, synthetic construct
  source 1..9: note = Seed: LVVVGAVGV (KRAS G12V)
WVVSGSVGW

SEQ ID NO: 65849 - protein, 9 aa, synthetic construct
  source 1..9: note = Seed: LVVVGAVGV (KRAS G12V)
WVVSGSVGY

SEQ ID NO: 65850 - protein, 9 aa, synthetic construct
  source 1..9: note = Seed: LVVVGAVGV (KRAS G12V)
WVVSGTVGA

SEQ ID NO: 65851 - protein, 9 aa, synthetic construct
  source 1..9: note = Seed: LVVVGAVGV (KRAS G12V)
WVVSGTVGC

SEQ ID NO: 65852 - protein, 9 aa, synthetic construct
  source 1..9: note = Seed: LVVVGAVGV (KRAS G12V)
WVVSGTVGD

SEQ ID NO: 65853 - protein, 9 aa, synthetic construct
  source 1..9: note = Seed: LVVVGAVGV (KRAS G12V)
WVVSGTVGE

SEQ ID NO: 65854 - protein, 9 aa, synthetic construct
  source 1..9: note = Seed: LVVVGAVGV (KRAS G12V)
WVVSGTVGF

SEQ ID NO: 65855 - protein, 9 aa, synthetic construct
  source 1..9: note = Seed: LVVVGAVGV (KRAS G12V)
WVVSGTVGG

SEQ ID NO: 65856 - protein, 9 aa, synthetic construct
  source 1..9: note = Seed: LVVVGAVGV (KRAS G12V)
WVVSGTVGH

SEQ ID NO: 65857 - protein, 9 aa, synthetic construct
  source 1..9: note = Seed: LVVVGAVGV (KRAS G12V)
WVVSGTVGI

SEQ ID NO: 65858 - protein, 9 aa, synthetic construct
  source 1..9: note = Seed: LVVVGAVGV (KRAS G12V)
WVVSGTVGL

SEQ ID NO: 65859 - protein, 9 aa, synthetic construct
  source 1..9: note = Seed: LVVVGAVGV (KRAS G12V)
WVVSGTVGM

SEQ ID NO: 65860 - protein, 9 aa, synthetic construct
  source 1..9: note = Seed: LVVVGAVGV (KRAS G12V)
WVVSGTVGN

SEQ ID NO: 65861 - protein, 9 aa, synthetic construct
  source 1..9: note = Seed: LVVVGAVGV (KRAS G12V)
WVVSGTVGQ

SEQ ID NO: 65862 - protein, 9 aa, synthetic construct
  source 1..9: note = Seed: LVVVGAVGV (KRAS G12V)
WVVSGTVGR

SEQ ID NO: 65863 - protein, 9 aa, synthetic construct
  source 1..9: note = Seed: LVVVGAVGV (KRAS G12V)
WVVSGTVGS

SEQ ID NO: 65864 - protein, 9 aa, synthetic construct
  source 1..9: note = Seed: LVVVGAVGV (KRAS G12V)
WVVSGTVGT

SEQ ID NO: 65865 - protein, 9 aa, synthetic construct
  source 1..9: note = Seed: LVVVGAVGV (KRAS G12V)
WVVSGTVGV

SEQ ID NO: 65866 - protein, 9 aa, synthetic construct
  source 1..9: note = Seed: LVVVGAVGV (KRAS G12V)
WVVSGTVGY

SEQ ID NO: 65867 - protein, 9 aa, synthetic construct
  source 1..9: note = Seed: LVVVGAVGV (KRAS G12V)
WVVSGVVGA

SEQ ID NO: 65868 - protein, 9 aa, synthetic construct
  source 1..9: note = Seed: LVVVGAVGV (KRAS G12V)
WVVSGVVGC

SEQ ID NO: 65869 - protein, 9 aa, synthetic construct
  source 1..9: note = Seed: LVVVGAVGV (KRAS G12V)
WVVSGVVGE

SEQ ID NO: 65870 - protein, 9 aa, synthetic construct
  source 1..9: note = Seed: LVVVGAVGV (KRAS G12V)
WVVSGVVGF

SEQ ID NO: 65871 - protein, 9 aa, synthetic construct
  source 1..9: note = Seed: LVVVGAVGV (KRAS G12V)
WVVSGVVGG

SEQ ID NO: 65872 - protein, 9 aa, synthetic construct
  source 1..9: note = Seed: LVVVGAVGV (KRAS G12V)
WVVSGVVGH

SEQ ID NO: 65873 - protein, 9 aa, synthetic construct
  source 1..9: note = Seed: LVVVGAVGV (KRAS G12V)
WVVSGVVGI

SEQ ID NO: 65874 - protein, 9 aa, synthetic construct
  source 1..9: note = Seed: LVVVGAVGV (KRAS G12V)
WVVSGVVGK

SEQ ID NO: 65875 - protein, 9 aa, synthetic construct
  source 1..9: note = Seed: LVVVGAVGV (KRAS G12V)
WVVSGVVGL

SEQ ID NO: 65876 - protein, 9 aa, synthetic construct
  source 1..9: note = Seed: LVVVGAVGV (KRAS G12V)
WVVSGVVGM

SEQ ID NO: 65877 - protein, 9 aa, synthetic construct
  source 1..9: note = Seed: LVVVGAVGV (KRAS G12V)
WVVSGVVGN

SEQ ID NO: 65878 - protein, 9 aa, synthetic construct
  source 1..9: note = Seed: LVVVGAVGV (KRAS G12V)
WVVSGVVGQ

SEQ ID NO: 65879 - protein, 9 aa, synthetic construct
  source 1..9: note = Seed: LVVVGAVGV (KRAS G12V)
WVVSGVVGR

SEQ ID NO: 65880 - protein, 9 aa, synthetic construct
  source 1..9: note = Seed: LVVVGAVGV (KRAS G12V)
WVVSGVVGS

SEQ ID NO: 65881 - protein, 9 aa, synthetic construct
  source 1..9: note = Seed: LVVVGAVGV (KRAS G12V)
WVVSGVVGT

SEQ ID NO: 65882 - protein, 9 aa, synthetic construct
  source 1..9: note = Seed: LVVVGAVGV (KRAS G12V)
WVVSGVVGV

SEQ ID NO: 65883 - protein, 9 aa, synthetic construct
  source 1..9: note = Seed: LVVVGAVGV (KRAS G12V)
WVVSGVVGY

SEQ ID NO: 65884 - protein, 9 aa, synthetic construct
  source 1..9: note = Seed: LVVVGAVGV (KRAS G12V)
WVVSGWVGA

SEQ ID NO: 65885 - protein, 9 aa, synthetic construct
  source 1..9: note = Seed: LVVVGAVGV (KRAS G12V)
WVVSGWVGI

SEQ ID NO: 65886 - protein, 9 aa, synthetic construct
  source 1..9: note = Seed: LVVVGAVGV (KRAS G12V)
WVVSGWVGL

SEQ ID NO: 65887 - protein, 9 aa, synthetic construct
  source 1..9: note = Seed: LVVVGAVGV (KRAS G12V)
WVVSGWVGM

SEQ ID NO: 65888 - protein, 9 aa, synthetic construct
  source 1..9: note = Seed: LVVVGAVGV (KRAS G12V)
WVVSGWVGV

SEQ ID NO: 65889 - protein, 9 aa, synthetic construct
  source 1..9: note = Seed: LVVVGAVGV (KRAS G12V)
WVVSGYVGL

SEQ ID NO: 65890 - protein, 9 aa, synthetic construct
  source 1..9: note = Seed: LVVVGAVGV (KRAS G12V)
WVVTGAVGA

SEQ ID NO: 65891 - protein, 9 aa, synthetic construct
  source 1..9: note = Seed: LVVVGAVGV (KRAS G12V)
WVVTGAVGC

SEQ ID NO: 65892 - protein, 9 aa, synthetic construct
  source 1..9: note = Seed: LVVVGAVGV (KRAS G12V)
WVVTGAVGD

SEQ ID NO: 65893 - protein, 9 aa, synthetic construct
  source 1..9: note = Seed: LVVVGAVGV (KRAS G12V)
WVVTGAVGE

SEQ ID NO: 65894 - protein, 9 aa, synthetic construct
  source 1..9: note = Seed: LVVVGAVGV (KRAS G12V)
WVVTGAVGF

SEQ ID NO: 65895 - protein, 9 aa, synthetic construct
  source 1..9: note = Seed: LVVVGAVGV (KRAS G12V)
WVVTGAVGG

SEQ ID NO: 65896 - protein, 9 aa, synthetic construct
  source 1..9: note = Seed: LVVVGAVGV (KRAS G12V)
WVVTGAVGH

SEQ ID NO: 65897 - protein, 9 aa, synthetic construct
  source 1..9: note = Seed: LVVVGAVGV (KRAS G12V)
WVVTGAVGI

SEQ ID NO: 65898 - protein, 9 aa, synthetic construct
  source 1..9: note = Seed: LVVVGAVGV (KRAS G12V)
WVVTGAVGK

SEQ ID NO: 65899 - protein, 9 aa, synthetic construct
  source 1..9: note = Seed: LVVVGAVGV (KRAS G12V)
WVVTGAVGL

SEQ ID NO: 65900 - protein, 9 aa, synthetic construct
  source 1..9: note = Seed: LVVVGAVGV (KRAS G12V)
WVVTGAVGM

SEQ ID NO: 65901 - protein, 9 aa, synthetic construct
  source 1..9: note = Seed: LVVVGAVGV (KRAS G12V)
WVVTGAVGN

SEQ ID NO: 65902 - protein, 9 aa, synthetic construct
  source 1..9: note = Seed: LVVVGAVGV (KRAS G12V)
WVVTGAVGQ

SEQ ID NO: 65903 - protein, 9 aa, synthetic construct
  source 1..9: note = Seed: LVVVGAVGV (KRAS G12V)
WVVTGAVGR

SEQ ID NO: 65904 - protein, 9 aa, synthetic construct
  source 1..9: note = Seed: LVVVGAVGV (KRAS G12V)
WVVTGAVGS

SEQ ID NO: 65905 - protein, 9 aa, synthetic construct
  source 1..9: note = Seed: LVVVGAVGV (KRAS G12V)
WVVTGAVGT

SEQ ID NO: 65906 - protein, 9 aa, synthetic construct
  source 1..9: note = Seed: LVVVGAVGV (KRAS G12V)
WVVTGAVGV

SEQ ID NO: 65907 - protein, 9 aa, synthetic construct
  source 1..9: note = Seed: LVVVGAVGV (KRAS G12V)
WVVTGAVGY

SEQ ID NO: 65908 - protein, 9 aa, synthetic construct
  source 1..9: note = Seed: LVVVGAVGV (KRAS G12V)
WVVTGCVGA

SEQ ID NO: 65909 - protein, 9 aa, synthetic construct
  source 1..9: note = Seed: LVVVGAVGV (KRAS G12V)
WVVTGCVGI

SEQ ID NO: 65910 - protein, 9 aa, synthetic construct
  source 1..9: note = Seed: LVVVGAVGV (KRAS G12V)
WVVTGCVGL

SEQ ID NO: 65911 - protein, 9 aa, synthetic construct
  source 1..9: note = Seed: LVVVGAVGV (KRAS G12V)
WVVTGCVGM

SEQ ID NO: 65912 - protein, 9 aa, synthetic construct
  source 1..9: note = Seed: LVVVGAVGV (KRAS G12V)
WVVTGCVGS

SEQ ID NO: 65913 - protein, 9 aa, synthetic construct
  source 1..9: note = Seed: LVVVGAVGV (KRAS G12V)
WVVTGCVGV

SEQ ID NO: 65914 - protein, 9 aa, synthetic construct
  source 1..9: note = Seed: LVVVGAVGV (KRAS G12V)
WVVTGDVGI

SEQ ID NO: 65915 - protein, 9 aa, synthetic construct
  source 1..9: note = Seed: LVVVGAVGV (KRAS G12V)
WVVTGDVGL

SEQ ID NO: 65916 - protein, 9 aa, synthetic construct
  source 1..9: note = Seed: LVVVGAVGV (KRAS G12V)
WVVTGDVGV

SEQ ID NO: 65917 - protein, 9 aa, synthetic construct
  source 1..9: note = Seed: LVVVGAVGV (KRAS G12V)
WVVTGFVGL

SEQ ID NO: 65918 - protein, 9 aa, synthetic construct
  source 1..9: note = Seed: LVVVGAVGV (KRAS G12V)
WVVTGGVGA

SEQ ID NO: 65919 - protein, 9 aa, synthetic construct
  source 1..9: note = Seed: LVVVGAVGV (KRAS G12V)
WVVTGGVGC

SEQ ID NO: 65920 - protein, 9 aa, synthetic construct
  source 1..9: note = Seed: LVVVGAVGV (KRAS G12V)
WVVTGGVGF

SEQ ID NO: 65921 - protein, 9 aa, synthetic construct
  source 1..9: note = Seed: LVVVGAVGV (KRAS G12V)
WVVTGGVGG

SEQ ID NO: 65922 - protein, 9 aa, synthetic construct
  source 1..9: note = Seed: LVVVGAVGV (KRAS G12V)
WVVTGGVGI

SEQ ID NO: 65923 - protein, 9 aa, synthetic construct
  source 1..9: note = Seed: LVVVGAVGV (KRAS G12V)
WVVTGGVGL

SEQ ID NO: 65924 - protein, 9 aa, synthetic construct
  source 1..9: note = Seed: LVVVGAVGV (KRAS G12V)
WVVTGGVGM

SEQ ID NO: 65925 - protein, 9 aa, synthetic construct
  source 1..9: note = Seed: LVVVGAVGV (KRAS G12V)
WVVTGGVGN

SEQ ID NO: 65926 - protein, 9 aa, synthetic construct
  source 1..9: note = Seed: LVVVGAVGV (KRAS G12V)
WVVTGGVGQ

SEQ ID NO: 65927 - protein, 9 aa, synthetic construct
  source 1..9: note = Seed: LVVVGAVGV (KRAS G12V)
WVVTGGVGR

SEQ ID NO: 65928 - protein, 9 aa, synthetic construct
  source 1..9: note = Seed: LVVVGAVGV (KRAS G12V)
WVVTGGVGS

SEQ ID NO: 65929 - protein, 9 aa, synthetic construct
  source 1..9: note = Seed: LVVVGAVGV (KRAS G12V)
WVVTGGVGT

SEQ ID NO: 65930 - protein, 9 aa, synthetic construct
  source 1..9: note = Seed: LVVVGAVGV (KRAS G12V)
WVVTGGVGV

SEQ ID NO: 65931 - protein, 9 aa, synthetic construct
  source 1..9: note = Seed: LVVVGAVGV (KRAS G12V)
WVVTGGVGY

SEQ ID NO: 65932 - protein, 9 aa, synthetic construct
  source 1..9: note = Seed: LVVVGAVGV (KRAS G12V)
WVVTGHVGA

SEQ ID NO: 65933 - protein, 9 aa, synthetic construct
  source 1..9: note = Seed: LVVVGAVGV (KRAS G12V)
WVVTGHVGF

SEQ ID NO: 65934 - protein, 9 aa, synthetic construct
  source 1..9: note = Seed: LVVVGAVGV (KRAS G12V)
WVVTGHVGI

SEQ ID NO: 65935 - protein, 9 aa, synthetic construct
  source 1..9: note = Seed: LVVVGAVGV (KRAS G12V)
WVVTGHVGL

SEQ ID NO: 65936 - protein, 9 aa, synthetic construct
  source 1..9: note = Seed: LVVVGAVGV (KRAS G12V)
WVVTGHVGM

SEQ ID NO: 65937 - protein, 9 aa, synthetic construct
  source 1..9: note = Seed: LVVVGAVGV (KRAS G12V)
WVVTGHVGS

SEQ ID NO: 65938 - protein, 9 aa, synthetic construct
  source 1..9: note = Seed: LVVVGAVGV (KRAS G12V)
WVVTGHVGT

SEQ ID NO: 65939 - protein, 9 aa, synthetic construct
  source 1..9: note = Seed: LVVVGAVGV (KRAS G12V)
WVVTGHVGV

SEQ ID NO: 65940 - protein, 9 aa, synthetic construct
  source 1..9: note = Seed: LVVVGAVGV (KRAS G12V)
WVVTGHVGY

SEQ ID NO: 65941 - protein, 9 aa, synthetic construct
  source 1..9: note = Seed: LVVVGAVGV (KRAS G12V)
WVVTGIVGA

SEQ ID NO: 65942 - protein, 9 aa, synthetic construct
  source 1..9: note = Seed: LVVVGAVGV (KRAS G12V)
WVVTGIVGH

SEQ ID NO: 65943 - protein, 9 aa, synthetic construct
  source 1..9: note = Seed: LVVVGAVGV (KRAS G12V)
WVVTGIVGI

SEQ ID NO: 65944 - protein, 9 aa, synthetic construct
  source 1..9: note = Seed: LVVVGAVGV (KRAS G12V)
WVVTGIVGL

SEQ ID NO: 65945 - protein, 9 aa, synthetic construct
  source 1..9: note = Seed: LVVVGAVGV (KRAS G12V)
WVVTGIVGM

SEQ ID NO: 65946 - protein, 9 aa, synthetic construct
  source 1..9: note = Seed: LVVVGAVGV (KRAS G12V)
WVVTGIVGN

SEQ ID NO: 65947 - protein, 9 aa, synthetic construct
  source 1..9: note = Seed: LVVVGAVGV (KRAS G12V)
WVVTGIVGR

SEQ ID NO: 65948 - protein, 9 aa, synthetic construct
  source 1..9: note = Seed: LVVVGAVGV (KRAS G12V)
WVVTGIVGS

SEQ ID NO: 65949 - protein, 9 aa, synthetic construct
  source 1..9: note = Seed: LVVVGAVGV (KRAS G12V)
WVVTGIVGT

SEQ ID NO: 65950 - protein, 9 aa, synthetic construct
  source 1..9: note = Seed: LVVVGAVGV (KRAS G12V)
WVVTGIVGV

SEQ ID NO: 65951 - protein, 9 aa, synthetic construct
  source 1..9: note = Seed: LVVVGAVGV (KRAS G12V)
WVVTGIVGY

SEQ ID NO: 65952 - protein, 9 aa, synthetic construct
  source 1..9: note = Seed: LVVVGAVGV (KRAS G12V)
WVVTGKVGA

SEQ ID NO: 65953 - protein, 9 aa, synthetic construct
  source 1..9: note = Seed: LVVVGAVGV (KRAS G12V)
WVVTGKVGG

SEQ ID NO: 65954 - protein, 9 aa, synthetic construct
  source 1..9: note = Seed: LVVVGAVGV (KRAS G12V)
WVVTGKVGI

SEQ ID NO: 65955 - protein, 9 aa, synthetic construct
  source 1..9: note = Seed: LVVVGAVGV (KRAS G12V)
WVVTGKVGL

SEQ ID NO: 65956 - protein, 9 aa, synthetic construct
  source 1..9: note = Seed: LVVVGAVGV (KRAS G12V)
WVVTGKVGM

SEQ ID NO: 65957 - protein, 9 aa, synthetic construct
  source 1..9: note = Seed: LVVVGAVGV (KRAS G12V)
WVVTGKVGS

SEQ ID NO: 65958 - protein, 9 aa, synthetic construct
  source 1..9: note = Seed: LVVVGAVGV (KRAS G12V)
WVVTGKVGV

SEQ ID NO: 65959 - protein, 9 aa, synthetic construct
  source 1..9: note = Seed: LVVVGAVGV (KRAS G12V)
WVVTGLVGA

SEQ ID NO: 65960 - protein, 9 aa, synthetic construct
  source 1..9: note = Seed: LVVVGAVGV (KRAS G12V)
WVVTGLVGH

SEQ ID NO: 65961 - protein, 9 aa, synthetic construct
  source 1..9: note = Seed: LVVVGAVGV (KRAS G12V)
WVVTGLVGI

SEQ ID NO: 65962 - protein, 9 aa, synthetic construct
  source 1..9: note = Seed: LVVVGAVGV (KRAS G12V)
WVVTGLVGL

SEQ ID NO: 65963 - protein, 9 aa, synthetic construct
  source 1..9: note = Seed: LVVVGAVGV (KRAS G12V)
WVVTGLVGM

SEQ ID NO: 65964 - protein, 9 aa, synthetic construct
  source 1..9: note = Seed: LVVVGAVGV (KRAS G12V)
WVVTGLVGN

SEQ ID NO: 65965 - protein, 9 aa, synthetic construct
  source 1..9: note = Seed: LVVVGAVGV (KRAS G12V)
WVVTGLVGS

SEQ ID NO: 65966 - protein, 9 aa, synthetic construct
  source 1..9: note = Seed: LVVVGAVGV (KRAS G12V)
WVVTGLVGV

SEQ ID NO: 65967 - protein, 9 aa, synthetic construct
  source 1..9: note = Seed: LVVVGAVGV (KRAS G12V)
WVVTGMVGA

SEQ ID NO: 65968 - protein, 9 aa, synthetic construct
  source 1..9: note = Seed: LVVVGAVGV (KRAS G12V)
WVVTGMVGG

SEQ ID NO: 65969 - protein, 9 aa, synthetic construct
  source 1..9: note = Seed: LVVVGAVGV (KRAS G12V)
WVVTGMVGH

SEQ ID NO: 65970 - protein, 9 aa, synthetic construct
  source 1..9: note = Seed: LVVVGAVGV (KRAS G12V)
WVVTGMVGI

SEQ ID NO: 65971 - protein, 9 aa, synthetic construct
  source 1..9: note = Seed: LVVVGAVGV (KRAS G12V)
WVVTGMVGL

SEQ ID NO: 65972 - protein, 9 aa, synthetic construct
  source 1..9: note = Seed: LVVVGAVGV (KRAS G12V)
WVVTGMVGM

SEQ ID NO: 65973 - protein, 9 aa, synthetic construct
  source 1..9: note = Seed: LVVVGAVGV (KRAS G12V)
WVVTGMVGN

SEQ ID NO: 65974 - protein, 9 aa, synthetic construct
  source 1..9: note = Seed: LVVVGAVGV (KRAS G12V)
WVVTGMVGQ

SEQ ID NO: 65975 - protein, 9 aa, synthetic construct
  source 1..9: note = Seed: LVVVGAVGV (KRAS G12V)
WVVTGMVGS

SEQ ID NO: 65976 - protein, 9 aa, synthetic construct
  source 1..9: note = Seed: LVVVGAVGV (KRAS G12V)
WVVTGMVGT

SEQ ID NO: 65977 - protein, 9 aa, synthetic construct
  source 1..9: note = Seed: LVVVGAVGV (KRAS G12V)
WVVTGMVGV

SEQ ID NO: 65978 - protein, 9 aa, synthetic construct
  source 1..9: note = Seed: LVVVGAVGV (KRAS G12V)
WVVTGMVGY

SEQ ID NO: 65979 - protein, 9 aa, synthetic construct
  source 1..9: note = Seed: LVVVGAVGV (KRAS G12V)
WVVTGNVGA

SEQ ID NO: 65980 - protein, 9 aa, synthetic construct
  source 1..9: note = Seed: LVVVGAVGV (KRAS G12V)
WVVTGNVGF

SEQ ID NO: 65981 - protein, 9 aa, synthetic construct
  source 1..9: note = Seed: LVVVGAVGV (KRAS G12V)
WVVTGNVGG

SEQ ID NO: 65982 - protein, 9 aa, synthetic construct
  source 1..9: note = Seed: LVVVGAVGV (KRAS G12V)
WVVTGNVGI

SEQ ID NO: 65983 - protein, 9 aa, synthetic construct
  source 1..9: note = Seed: LVVVGAVGV (KRAS G12V)
WVVTGNVGL

SEQ ID NO: 65984 - protein, 9 aa, synthetic construct
  source 1..9: note = Seed: LVVVGAVGV (KRAS G12V)
WVVTGNVGM

SEQ ID NO: 65985 - protein, 9 aa, synthetic construct
  source 1..9: note = Seed: LVVVGAVGV (KRAS G12V)
WVVTGNVGN

SEQ ID NO: 65986 - protein, 9 aa, synthetic construct
  source 1..9: note = Seed: LVVVGAVGV (KRAS G12V)
WVVTGNVGR

SEQ ID NO: 65987 - protein, 9 aa, synthetic construct
  source 1..9: note = Seed: LVVVGAVGV (KRAS G12V)
WVVTGNVGS

SEQ ID NO: 65988 - protein, 9 aa, synthetic construct
  source 1..9: note = Seed: LVVVGAVGV (KRAS G12V)
WVVTGNVGT

SEQ ID NO: 65989 - protein, 9 aa, synthetic construct
  source 1..9: note = Seed: LVVVGAVGV (KRAS G12V)
WVVTGNVGV

SEQ ID NO: 65990 - protein, 9 aa, synthetic construct
  source 1..9: note = Seed: LVVVGAVGV (KRAS G12V)
WVVTGNVGY

SEQ ID NO: 65991 - protein, 9 aa, synthetic construct
  source 1..9: note = Seed: LVVVGAVGV (KRAS G12V)
WVVTGPVGA

SEQ ID NO: 65992 - protein, 9 aa, synthetic construct
  source 1..9: note = Seed: LVVVGAVGV (KRAS G12V)
WVVTGPVGC

SEQ ID NO: 65993 - protein, 9 aa, synthetic construct
  source 1..9: note = Seed: LVVVGAVGV (KRAS G12V)
WVVTGPVGE

SEQ ID NO: 65994 - protein, 9 aa, synthetic construct
  source 1..9: note = Seed: LVVVGAVGV (KRAS G12V)
WVVTGPVGF

SEQ ID NO: 65995 - protein, 9 aa, synthetic construct
  source 1..9: note = Seed: LVVVGAVGV (KRAS G12V)
WVVTGPVGG

SEQ ID NO: 65996 - protein, 9 aa, synthetic construct
  source 1..9: note = Seed: LVVVGAVGV (KRAS G12V)
WVVTGPVGH

SEQ ID NO: 65997 - protein, 9 aa, synthetic construct
  source 1..9: note = Seed: LVVVGAVGV (KRAS G12V)
WVVTGPVGI

SEQ ID NO: 65998 - protein, 9 aa, synthetic construct
  source 1..9: note = Seed: LVVVGAVGV (KRAS G12V)
WVVTGPVGK

SEQ ID NO: 65999 - protein, 9 aa, synthetic construct
  source 1..9: note = Seed: LVVVGAVGV (KRAS G12V)
WVVTGPVGL

SEQ ID NO: 66000 - protein, 9 aa, synthetic construct
  source 1..9: note = Seed: LVVVGAVGV (KRAS G12V)
WVVTGPVGM

SEQ ID NO: 66001 - protein, 9 aa, synthetic construct
  source 1..9: note = Seed: LVVVGAVGV (KRAS G12V)
WVVTGPVGN

SEQ ID NO: 66002 - protein, 9 aa, synthetic construct
  source 1..9: note = Seed: LVVVGAVGV (KRAS G12V)
WVVTGPVGP

SEQ ID NO: 66003 - protein, 9 aa, synthetic construct
  source 1..9: note = Seed: LVVVGAVGV (KRAS G12V)
WVVTGPVGQ

SEQ ID NO: 66004 - protein, 9 aa, synthetic construct
  source 1..9: note = Seed: LVVVGAVGV (KRAS G12V)
WVVTGPVGR

SEQ ID NO: 66005 - protein, 9 aa, synthetic construct
  source 1..9: note = Seed: LVVVGAVGV (KRAS G12V)
WVVTGPVGS

SEQ ID NO: 66006 - protein, 9 aa, synthetic construct
  source 1..9: note = Seed: LVVVGAVGV (KRAS G12V)
WVVTGPVGT

SEQ ID NO: 66007 - protein, 9 aa, synthetic construct
  source 1..9: note = Seed: LVVVGAVGV (KRAS G12V)
WVVTGPVGV

SEQ ID NO: 66008 - protein, 9 aa, synthetic construct
  source 1..9: note = Seed: LVVVGAVGV (KRAS G12V)
WVVTGPVGW

SEQ ID NO: 66009 - protein, 9 aa, synthetic construct
  source 1..9: note = Seed: LVVVGAVGV (KRAS G12V)
WVVTGPVGY

SEQ ID NO: 66010 - protein, 9 aa, synthetic construct
  source 1..9: note = Seed: LVVVGAVGV (KRAS G12V)
WVVTGQVGA

SEQ ID NO: 66011 - protein, 9 aa, synthetic construct
  source 1..9: note = Seed: LVVVGAVGV (KRAS G12V)
WVVTGQVGI

SEQ ID NO: 66012 - protein, 9 aa, synthetic construct
  source 1..9: note = Seed: LVVVGAVGV (KRAS G12V)
WVVTGQVGL

SEQ ID NO: 66013 - protein, 9 aa, synthetic construct
  source 1..9: note = Seed: LVVVGAVGV (KRAS G12V)
WVVTGQVGM

SEQ ID NO: 66014 - protein, 9 aa, synthetic construct
  source 1..9: note = Seed: LVVVGAVGV (KRAS G12V)
WVVTGQVGV

SEQ ID NO: 66015 - protein, 9 aa, synthetic construct
  source 1..9: note = Seed: LVVVGAVGV (KRAS G12V)
WVVTGRVGA

SEQ ID NO: 66016 - protein, 9 aa, synthetic construct
  source 1..9: note = Seed: LVVVGAVGV (KRAS G12V)
WVVTGRVGG

SEQ ID NO: 66017 - protein, 9 aa, synthetic construct
  source 1..9: note = Seed: LVVVGAVGV (KRAS G12V)
WVVTGRVGH

SEQ ID NO: 66018 - protein, 9 aa, synthetic construct
  source 1..9: note = Seed: LVVVGAVGV (KRAS G12V)
WVVTGRVGI

SEQ ID NO: 66019 - protein, 9 aa, synthetic construct
  source 1..9: note = Seed: LVVVGAVGV (KRAS G12V)
WVVTGRVGL

SEQ ID NO: 66020 - protein, 9 aa, synthetic construct
  source 1..9: note = Seed: LVVVGAVGV (KRAS G12V)
WVVTGRVGM

SEQ ID NO: 66021 - protein, 9 aa, synthetic construct
  source 1..9: note = Seed: LVVVGAVGV (KRAS G12V)
WVVTGRVGQ

SEQ ID NO: 66022 - protein, 9 aa, synthetic construct
  source 1..9: note = Seed: LVVVGAVGV (KRAS G12V)
WVVTGRVGS

SEQ ID NO: 66023 - protein, 9 aa, synthetic construct
  source 1..9: note = Seed: LVVVGAVGV (KRAS G12V)
WVVTGRVGV

SEQ ID NO: 66024 - protein, 9 aa, synthetic construct
  source 1..9: note = Seed: LVVVGAVGV (KRAS G12V)
WVVTGSVGA

SEQ ID NO: 66025 - protein, 9 aa, synthetic construct
  source 1..9: note = Seed: LVVVGAVGV (KRAS G12V)
WVVTGSVGC

SEQ ID NO: 66026 - protein, 9 aa, synthetic construct
  source 1..9: note = Seed: LVVVGAVGV (KRAS G12V)
WVVTGSVGF

SEQ ID NO: 66027 - protein, 9 aa, synthetic construct
  source 1..9: note = Seed: LVVVGAVGV (KRAS G12V)
WVVTGSVGG

SEQ ID NO: 66028 - protein, 9 aa, synthetic construct
  source 1..9: note = Seed: LVVVGAVGV (KRAS G12V)
WVVTGSVGH

SEQ ID NO: 66029 - protein, 9 aa, synthetic construct
  source 1..9: note = Seed: LVVVGAVGV (KRAS G12V)
WVVTGSVGI

SEQ ID NO: 66030 - protein, 9 aa, synthetic construct
  source 1..9: note = Seed: LVVVGAVGV (KRAS G12V)
WVVTGSVGK

SEQ ID NO: 66031 - protein, 9 aa, synthetic construct
  source 1..9: note = Seed: LVVVGAVGV (KRAS G12V)
WVVTGSVGL

SEQ ID NO: 66032 - protein, 9 aa, synthetic construct
  source 1..9: note = Seed: LVVVGAVGV (KRAS G12V)
WVVTGSVGM

SEQ ID NO: 66033 - protein, 9 aa, synthetic construct
  source 1..9: note = Seed: LVVVGAVGV (KRAS G12V)
WVVTGSVGN

SEQ ID NO: 66034 - protein, 9 aa, synthetic construct
  source 1..9: note = Seed: LVVVGAVGV (KRAS G12V)
WVVTGSVGQ

SEQ ID NO: 66035 - protein, 9 aa, synthetic construct
  source 1..9: note = Seed: LVVVGAVGV (KRAS G12V)
WVVTGSVGR

SEQ ID NO: 66036 - protein, 9 aa, synthetic construct
  source 1..9: note = Seed: LVVVGAVGV (KRAS G12V)
WVVTGSVGS

SEQ ID NO: 66037 - protein, 9 aa, synthetic construct
  source 1..9: note = Seed: LVVVGAVGV (KRAS G12V)
WVVTGSVGT

SEQ ID NO: 66038 - protein, 9 aa, synthetic construct
  source 1..9: note = Seed: LVVVGAVGV (KRAS G12V)
WVVTGSVGV

SEQ ID NO: 66039 - protein, 9 aa, synthetic construct
  source 1..9: note = Seed: LVVVGAVGV (KRAS G12V)
WVVTGSVGY

SEQ ID NO: 66040 - protein, 9 aa, synthetic construct
  source 1..9: note = Seed: LVVVGAVGV (KRAS G12V)
WVVTGTVGA

SEQ ID NO: 66041 - protein, 9 aa, synthetic construct
  source 1..9: note = Seed: LVVVGAVGV (KRAS G12V)
WVVTGTVGF

SEQ ID NO: 66042 - protein, 9 aa, synthetic construct
  source 1..9: note = Seed: LVVVGAVGV (KRAS G12V)
WVVTGTVGG

SEQ ID NO: 66043 - protein, 9 aa, synthetic construct
  source 1..9: note = Seed: LVVVGAVGV (KRAS G12V)
WVVTGTVGH

SEQ ID NO: 66044 - protein, 9 aa, synthetic construct
  source 1..9: note = Seed: LVVVGAVGV (KRAS G12V)
WVVTGTVGI

SEQ ID NO: 66045 - protein, 9 aa, synthetic construct
  source 1..9: note = Seed: LVVVGAVGV (KRAS G12V)
WVVTGTVGK

SEQ ID NO: 66046 - protein, 9 aa, synthetic construct
  source 1..9: note = Seed: LVVVGAVGV (KRAS G12V)
WVVTGTVGL

SEQ ID NO: 66047 - protein, 9 aa, synthetic construct
  source 1..9: note = Seed: LVVVGAVGV (KRAS G12V)
WVVTGTVGM

SEQ ID NO: 66048 - protein, 9 aa, synthetic construct
  source 1..9: note = Seed: LVVVGAVGV (KRAS G12V)
WVVTGTVGN

SEQ ID NO: 66049 - protein, 9 aa, synthetic construct
  source 1..9: note = Seed: LVVVGAVGV (KRAS G12V)
WVVTGTVGQ

SEQ ID NO: 66050 - protein, 9 aa, synthetic construct
  source 1..9: note = Seed: LVVVGAVGV (KRAS G12V)
WVVTGTVGR

SEQ ID NO: 66051 - protein, 9 aa, synthetic construct
  source 1..9: note = Seed: LVVVGAVGV (KRAS G12V)
WVVTGTVGS

SEQ ID NO: 66052 - protein, 9 aa, synthetic construct
  source 1..9: note = Seed: LVVVGAVGV (KRAS G12V)
WVVTGTVGT

SEQ ID NO: 66053 - protein, 9 aa, synthetic construct
  source 1..9: note = Seed: LVVVGAVGV (KRAS G12V)
WVVTGTVGV

SEQ ID NO: 66054 - protein, 9 aa, synthetic construct
  source 1..9: note = Seed: LVVVGAVGV (KRAS G12V)
WVVTGTVGY

SEQ ID NO: 66055 - protein, 9 aa, synthetic construct
  source 1..9: note = Seed: LVVVGAVGV (KRAS G12V)
WVVTGVVGA

SEQ ID NO: 66056 - protein, 9 aa, synthetic construct
  source 1..9: note = Seed: LVVVGAVGV (KRAS G12V)
WVVTGVVGF

SEQ ID NO: 66057 - protein, 9 aa, synthetic construct
  source 1..9: note = Seed: LVVVGAVGV (KRAS G12V)
WVVTGVVGH

SEQ ID NO: 66058 - protein, 9 aa, synthetic construct
  source 1..9: note = Seed: LVVVGAVGV (KRAS G12V)
WVVTGVVGI

SEQ ID NO: 66059 - protein, 9 aa, synthetic construct
  source 1..9: note = Seed: LVVVGAVGV (KRAS G12V)
WVVTGVVGK

SEQ ID NO: 66060 - protein, 9 aa, synthetic construct
  source 1..9: note = Seed: LVVVGAVGV (KRAS G12V)
WVVTGVVGL

SEQ ID NO: 66061 - protein, 9 aa, synthetic construct
  source 1..9: note = Seed: LVVVGAVGV (KRAS G12V)
WVVTGVVGM

SEQ ID NO: 66062 - protein, 9 aa, synthetic construct
  source 1..9: note = Seed: LVVVGAVGV (KRAS G12V)
WVVTGVVGN

SEQ ID NO: 66063 - protein, 9 aa, synthetic construct
  source 1..9: note = Seed: LVVVGAVGV (KRAS G12V)
WVVTGVVGQ

SEQ ID NO: 66064 - protein, 9 aa, synthetic construct
  source 1..9: note = Seed: LVVVGAVGV (KRAS G12V)
WVVTGVVGR

SEQ ID NO: 66065 - protein, 9 aa, synthetic construct
  source 1..9: note = Seed: LVVVGAVGV (KRAS G12V)
WVVTGVVGS

SEQ ID NO: 66066 - protein, 9 aa, synthetic construct
  source 1..9: note = Seed: LVVVGAVGV (KRAS G12V)
WVVTGVVGT

SEQ ID NO: 66067 - protein, 9 aa, synthetic construct
  source 1..9: note = Seed: LVVVGAVGV (KRAS G12V)
WVVTGVVGV

SEQ ID NO: 66068 - protein, 9 aa, synthetic construct
  source 1..9: note = Seed: LVVVGAVGV (KRAS G12V)
WVVTGVVGY

SEQ ID NO: 66069 - protein, 9 aa, synthetic construct
  source 1..9: note = Seed: LVVVGAVGV (KRAS G12V)
WVVTGYVGA

SEQ ID NO: 66070 - protein, 9 aa, synthetic construct
  source 1..9: note = Seed: LVVVGAVGV (KRAS G12V)
WVVTGYVGF

SEQ ID NO: 66071 - protein, 9 aa, synthetic construct
  source 1..9: note = Seed: LVVVGAVGV (KRAS G12V)
WVVTGYVGI

SEQ ID NO: 66072 - protein, 9 aa, synthetic construct
  source 1..9: note = Seed: LVVVGAVGV (KRAS G12V)
WVVTGYVGL

SEQ ID NO: 66073 - protein, 9 aa, synthetic construct
  source 1..9: note = Seed: LVVVGAVGV (KRAS G12V)
WVVTGYVGM

SEQ ID NO: 66074 - protein, 9 aa, synthetic construct
  source 1..9: note = Seed: LVVVGAVGV (KRAS G12V)
WVVTGYVGV

SEQ ID NO: 66075 - protein, 9 aa, synthetic construct
  source 1..9: note = Seed: LVVVGAVGV (KRAS G12V)
WVVTGYVGY

SEQ ID NO: 66076 - protein, 9 aa, synthetic construct
  source 1..9: note = Seed: LVVVGAVGV (KRAS G12V)
WVVVGAVGA

SEQ ID NO: 66077 - protein, 9 aa, synthetic construct
  source 1..9: note = Seed: LVVVGAVGV (KRAS G12V)
WVVVGAVGD

SEQ ID NO: 66078 - protein, 9 aa, synthetic construct
  source 1..9: note = Seed: LVVVGAVGV (KRAS G12V)
WVVVGAVGE

SEQ ID NO: 66079 - protein, 9 aa, synthetic construct
  source 1..9: note = Seed: LVVVGAVGV (KRAS G12V)
WVVVGAVGF

SEQ ID NO: 66080 - protein, 9 aa, synthetic construct
  source 1..9: note = Seed: LVVVGAVGV (KRAS G12V)
WVVVGAVGG

SEQ ID NO: 66081 - protein, 9 aa, synthetic construct
  source 1..9: note = Seed: LVVVGAVGV (KRAS G12V)
WVVVGAVGH

SEQ ID NO: 66082 - protein, 9 aa, synthetic construct
  source 1..9: note = Seed: LVVVGAVGV (KRAS G12V)
WVVVGAVGI

SEQ ID NO: 66083 - protein, 9 aa, synthetic construct
  source 1..9: note = Seed: LVVVGAVGV (KRAS G12V)
WVVVGAVGK

SEQ ID NO: 66084 - protein, 9 aa, synthetic construct
  source 1..9: note = Seed: LVVVGAVGV (KRAS G12V)
WVVVGAVGL

SEQ ID NO: 66085 - protein, 9 aa, synthetic construct
  source 1..9: note = Seed: LVVVGAVGV (KRAS G12V)
WVVVGAVGM

SEQ ID NO: 66086 - protein, 9 aa, synthetic construct
  source 1..9: note = Seed: LVVVGAVGV (KRAS G12V)
WVVVGAVGN

SEQ ID NO: 66087 - protein, 9 aa, synthetic construct
  source 1..9: note = Seed: LVVVGAVGV (KRAS G12V)
WVVVGAVGP

SEQ ID NO: 66088 - protein, 9 aa, synthetic construct
  source 1..9: note = Seed: LVVVGAVGV (KRAS G12V)
WVVVGAVGQ

SEQ ID NO: 66089 - protein, 9 aa, synthetic construct
  source 1..9: note = Seed: LVVVGAVGV (KRAS G12V)
WVVVGAVGR

SEQ ID NO: 66090 - protein, 9 aa, synthetic construct
  source 1..9: note = Seed: LVVVGAVGV (KRAS G12V)
WVVVGAVGS

SEQ ID NO: 66091 - protein, 9 aa, synthetic construct
  source 1..9: note = Seed: LVVVGAVGV (KRAS G12V)
WVVVGAVGT

SEQ ID NO: 66092 - protein, 9 aa, synthetic construct
  source 1..9: note = Seed: LVVVGAVGV (KRAS G12V)
WVVVGAVGV

SEQ ID NO: 66093 - protein, 9 aa, synthetic construct
  source 1..9: note = Seed: LVVVGAVGV (KRAS G12V)
WVVVGAVGY

SEQ ID NO: 66094 - protein, 9 aa, synthetic construct
  source 1..9: note = Seed: LVVVGAVGV (KRAS G12V)
WVVVGDVGI

SEQ ID NO: 66095 - protein, 9 aa, synthetic construct
  source 1..9: note = Seed: LVVVGAVGV (KRAS G12V)
WVVVGDVGL

SEQ ID NO: 66096 - protein, 9 aa, synthetic construct
  source 1..9: note = Seed: LVVVGAVGV (KRAS G12V)
WVVVGDVGV

SEQ ID NO: 66097 - protein, 9 aa, synthetic construct
  source 1..9: note = Seed: LVVVGAVGV (KRAS G12V)
WVVVGGVGA

SEQ ID NO: 66098 - protein, 9 aa, synthetic construct
  source 1..9: note = Seed: LVVVGAVGV (KRAS G12V)
WVVVGGVGF

SEQ ID NO: 66099 - protein, 9 aa, synthetic construct
  source 1..9: note = Seed: LVVVGAVGV (KRAS G12V)
WVVVGGVGG

SEQ ID NO: 66100 - protein, 9 aa, synthetic construct
  source 1..9: note = Seed: LVVVGAVGV (KRAS G12V)
WVVVGGVGH

SEQ ID NO: 66101 - protein, 9 aa, synthetic construct
  source 1..9: note = Seed: LVVVGAVGV (KRAS G12V)
WVVVGGVGI

SEQ ID NO: 66102 - protein, 9 aa, synthetic construct
  source 1..9: note = Seed: LVVVGAVGV (KRAS G12V)
WVVVGGVGK

SEQ ID NO: 66103 - protein, 9 aa, synthetic construct
  source 1..9: note = Seed: LVVVGAVGV (KRAS G12V)
WVVVGGVGL

SEQ ID NO: 66104 - protein, 9 aa, synthetic construct
  source 1..9: note = Seed: LVVVGAVGV (KRAS G12V)
WVVVGGVGM

SEQ ID NO: 66105 - protein, 9 aa, synthetic construct
  source 1..9: note = Seed: LVVVGAVGV (KRAS G12V)
WVVVGGVGN

SEQ ID NO: 66106 - protein, 9 aa, synthetic construct
  source 1..9: note = Seed: LVVVGAVGV (KRAS G12V)
WVVVGGVGP

SEQ ID NO: 66107 - protein, 9 aa, synthetic construct
  source 1..9: note = Seed: LVVVGAVGV (KRAS G12V)
WVVVGGVGQ

SEQ ID NO: 66108 - protein, 9 aa, synthetic construct
  source 1..9: note = Seed: LVVVGAVGV (KRAS G12V)
WVVVGGVGR

SEQ ID NO: 66109 - protein, 9 aa, synthetic construct
  source 1..9: note = Seed: LVVVGAVGV (KRAS G12V)
WVVVGGVGS

SEQ ID NO: 66110 - protein, 9 aa, synthetic construct
  source 1..9: note = Seed: LVVVGAVGV (KRAS G12V)
WVVVGGVGT

SEQ ID NO: 66111 - protein, 9 aa, synthetic construct
  source 1..9: note = Seed: LVVVGAVGV (KRAS G12V)
WVVVGGVGV

SEQ ID NO: 66112 - protein, 9 aa, synthetic construct
  source 1..9: note = Seed: LVVVGAVGV (KRAS G12V)
WVVVGGVGY

SEQ ID NO: 66113 - protein, 9 aa, synthetic construct
  source 1..9: note = Seed: LVVVGAVGV (KRAS G12V)
WVVVGHVGA

SEQ ID NO: 66114 - protein, 9 aa, synthetic construct
  source 1..9: note = Seed: LVVVGAVGV (KRAS G12V)
WVVVGHVGI

SEQ ID NO: 66115 - protein, 9 aa, synthetic construct
  source 1..9: note = Seed: LVVVGAVGV (KRAS G12V)
WVVVGHVGL

SEQ ID NO: 66116 - protein, 9 aa, synthetic construct
  source 1..9: note = Seed: LVVVGAVGV (KRAS G12V)
WVVVGHVGM

SEQ ID NO: 66117 - protein, 9 aa, synthetic construct
  source 1..9: note = Seed: LVVVGAVGV (KRAS G12V)
WVVVGHVGV

SEQ ID NO: 66118 - protein, 9 aa, synthetic construct
  source 1..9: note = Seed: LVVVGAVGV (KRAS G12V)
WVVVGIVGA

SEQ ID NO: 66119 - protein, 9 aa, synthetic construct
  source 1..9: note = Seed: LVVVGAVGV (KRAS G12V)
WVVVGIVGH

SEQ ID NO: 66120 - protein, 9 aa, synthetic construct
  source 1..9: note = Seed: LVVVGAVGV (KRAS G12V)
WVVVGIVGN

SEQ ID NO: 66121 - protein, 9 aa, synthetic construct
  source 1..9: note = Seed: LVVVGAVGV (KRAS G12V)
WVVVGIVGS

SEQ ID NO: 66122 - protein, 9 aa, synthetic construct
  source 1..9: note = Seed: LVVVGAVGV (KRAS G12V)
WVVVGKVGA

SEQ ID NO: 66123 - protein, 9 aa, synthetic construct
  source 1..9: note = Seed: LVVVGAVGV (KRAS G12V)
WVVVGKVGG

SEQ ID NO: 66124 - protein, 9 aa, synthetic construct
  source 1..9: note = Seed: LVVVGAVGV (KRAS G12V)
WVVVGKVGH

SEQ ID NO: 66125 - protein, 9 aa, synthetic construct
  source 1..9: note = Seed: LVVVGAVGV (KRAS G12V)
WVVVGKVGK

SEQ ID NO: 66126 - protein, 9 aa, synthetic construct
  source 1..9: note = Seed: LVVVGAVGV (KRAS G12V)
WVVVGKVGN

SEQ ID NO: 66127 - protein, 9 aa, synthetic construct
  source 1..9: note = Seed: LVVVGAVGV (KRAS G12V)
WVVVGKVGQ

SEQ ID NO: 66128 - protein, 9 aa, synthetic construct
  source 1..9: note = Seed: LVVVGAVGV (KRAS G12V)
WVVVGKVGR

SEQ ID NO: 66129 - protein, 9 aa, synthetic construct
  source 1..9: note = Seed: LVVVGAVGV (KRAS G12V)
WVVVGKVGS

SEQ ID NO: 66130 - protein, 9 aa, synthetic construct
  source 1..9: note = Seed: LVVVGAVGV (KRAS G12V)
WVVVGKVGT

SEQ ID NO: 66131 - protein, 9 aa, synthetic construct
  source 1..9: note = Seed: LVVVGAVGV (KRAS G12V)
WVVVGLVGA

SEQ ID NO: 66132 - protein, 9 aa, synthetic construct
  source 1..9: note = Seed: LVVVGAVGV (KRAS G12V)
WVVVGLVGN

SEQ ID NO: 66133 - protein, 9 aa, synthetic construct
  source 1..9: note = Seed: LVVVGAVGV (KRAS G12V)
WVVVGLVGR

SEQ ID NO: 66134 - protein, 9 aa, synthetic construct
  source 1..9: note = Seed: LVVVGAVGV (KRAS G12V)
WVVVGMVGA

SEQ ID NO: 66135 - protein, 9 aa, synthetic construct
  source 1..9: note = Seed: LVVVGAVGV (KRAS G12V)
WVVVGMVGH

SEQ ID NO: 66136 - protein, 9 aa, synthetic construct
  source 1..9: note = Seed: LVVVGAVGV (KRAS G12V)
WVVVGMVGI

SEQ ID NO: 66137 - protein, 9 aa, synthetic construct
  source 1..9: note = Seed: LVVVGAVGV (KRAS G12V)
WVVVGMVGK

SEQ ID NO: 66138 - protein, 9 aa, synthetic construct
  source 1..9: note = Seed: LVVVGAVGV (KRAS G12V)
WVVVGMVGL

SEQ ID NO: 66139 - protein, 9 aa, synthetic construct
  source 1..9: note = Seed: LVVVGAVGV (KRAS G12V)
WVVVGMVGM

SEQ ID NO: 66140 - protein, 9 aa, synthetic construct
  source 1..9: note = Seed: LVVVGAVGV (KRAS G12V)
WVVVGMVGN

SEQ ID NO: 66141 - protein, 9 aa, synthetic construct
  source 1..9: note = Seed: LVVVGAVGV (KRAS G12V)
WVVVGMVGQ

SEQ ID NO: 66142 - protein, 9 aa, synthetic construct
  source 1..9: note = Seed: LVVVGAVGV (KRAS G12V)
WVVVGMVGR

SEQ ID NO: 66143 - protein, 9 aa, synthetic construct
  source 1..9: note = Seed: LVVVGAVGV (KRAS G12V)
WVVVGMVGS

SEQ ID NO: 66144 - protein, 9 aa, synthetic construct
  source 1..9: note = Seed: LVVVGAVGV (KRAS G12V)
WVVVGMVGV

SEQ ID NO: 66145 - protein, 9 aa, synthetic construct
  source 1..9: note = Seed: LVVVGAVGV (KRAS G12V)
WVVVGMVGY

SEQ ID NO: 66146 - protein, 9 aa, synthetic construct
  source 1..9: note = Seed: LVVVGAVGV (KRAS G12V)
WVVVGNVGA

SEQ ID NO: 66147 - protein, 9 aa, synthetic construct
  source 1..9: note = Seed: LVVVGAVGV (KRAS G12V)
WVVVGNVGD

SEQ ID NO: 66148 - protein, 9 aa, synthetic construct
  source 1..9: note = Seed: LVVVGAVGV (KRAS G12V)
WVVVGNVGE

SEQ ID NO: 66149 - protein, 9 aa, synthetic construct
  source 1..9: note = Seed: LVVVGAVGV (KRAS G12V)
WVVVGNVGF

SEQ ID NO: 66150 - protein, 9 aa, synthetic construct
  source 1..9: note = Seed: LVVVGAVGV (KRAS G12V)
WVVVGNVGG

SEQ ID NO: 66151 - protein, 9 aa, synthetic construct
  source 1..9: note = Seed: LVVVGAVGV (KRAS G12V)
WVVVGNVGH

SEQ ID NO: 66152 - protein, 9 aa, synthetic construct
  source 1..9: note = Seed: LVVVGAVGV (KRAS G12V)
WVVVGNVGI

SEQ ID NO: 66153 - protein, 9 aa, synthetic construct
  source 1..9: note = Seed: LVVVGAVGV (KRAS G12V)
WVVVGNVGK

SEQ ID NO: 66154 - protein, 9 aa, synthetic construct
  source 1..9: note = Seed: LVVVGAVGV (KRAS G12V)
WVVVGNVGL

SEQ ID NO: 66155 - protein, 9 aa, synthetic construct
  source 1..9: note = Seed: LVVVGAVGV (KRAS G12V)
WVVVGNVGM

SEQ ID NO: 66156 - protein, 9 aa, synthetic construct
  source 1..9: note = Seed: LVVVGAVGV (KRAS G12V)
WVVVGNVGN

SEQ ID NO: 66157 - protein, 9 aa, synthetic construct
  source 1..9: note = Seed: LVVVGAVGV (KRAS G12V)
WVVVGNVGQ

SEQ ID NO: 66158 - protein, 9 aa, synthetic construct
  source 1..9: note = Seed: LVVVGAVGV (KRAS G12V)
WVVVGNVGR

SEQ ID NO: 66159 - protein, 9 aa, synthetic construct
  source 1..9: note = Seed: LVVVGAVGV (KRAS G12V)
WVVVGNVGS

SEQ ID NO: 66160 - protein, 9 aa, synthetic construct
  source 1..9: note = Seed: LVVVGAVGV (KRAS G12V)
WVVVGNVGT

SEQ ID NO: 66161 - protein, 9 aa, synthetic construct
  source 1..9: note = Seed: LVVVGAVGV (KRAS G12V)
WVVVGNVGV

SEQ ID NO: 66162 - protein, 9 aa, synthetic construct
  source 1..9: note = Seed: LVVVGAVGV (KRAS G12V)
WVVVGNVGY

SEQ ID NO: 66163 - protein, 9 aa, synthetic construct
  source 1..9: note = Seed: LVVVGAVGV (KRAS G12V)
WVVVGPVGA

SEQ ID NO: 66164 - protein, 9 aa, synthetic construct
  source 1..9: note = Seed: LVVVGAVGV (KRAS G12V)
WVVVGPVGC

SEQ ID NO: 66165 - protein, 9 aa, synthetic construct
  source 1..9: note = Seed: LVVVGAVGV (KRAS G12V)
WVVVGPVGD

SEQ ID NO: 66166 - protein, 9 aa, synthetic construct
  source 1..9: note = Seed: LVVVGAVGV (KRAS G12V)
WVVVGPVGE

SEQ ID NO: 66167 - protein, 9 aa, synthetic construct
  source 1..9: note = Seed: LVVVGAVGV (KRAS G12V)
WVVVGPVGF

SEQ ID NO: 66168 - protein, 9 aa, synthetic construct
  source 1..9: note = Seed: LVVVGAVGV (KRAS G12V)
WVVVGPVGG

SEQ ID NO: 66169 - protein, 9 aa, synthetic construct
  source 1..9: note = Seed: LVVVGAVGV (KRAS G12V)
WVVVGPVGH

SEQ ID NO: 66170 - protein, 9 aa, synthetic construct
  source 1..9: note = Seed: LVVVGAVGV (KRAS G12V)
WVVVGPVGI

SEQ ID NO: 66171 - protein, 9 aa, synthetic construct
  source 1..9: note = Seed: LVVVGAVGV (KRAS G12V)
WVVVGPVGK

SEQ ID NO: 66172 - protein, 9 aa, synthetic construct
  source 1..9: note = Seed: LVVVGAVGV (KRAS G12V)
WVVVGPVGL

SEQ ID NO: 66173 - protein, 9 aa, synthetic construct
  source 1..9: note = Seed: LVVVGAVGV (KRAS G12V)
WVVVGPVGM

SEQ ID NO: 66174 - protein, 9 aa, synthetic construct
  source 1..9: note = Seed: LVVVGAVGV (KRAS G12V)
WVVVGPVGN

SEQ ID NO: 66175 - protein, 9 aa, synthetic construct
  source 1..9: note = Seed: LVVVGAVGV (KRAS G12V)
WVVVGPVGP

SEQ ID NO: 66176 - protein, 9 aa, synthetic construct
  source 1..9: note = Seed: LVVVGAVGV (KRAS G12V)
WVVVGPVGQ

SEQ ID NO: 66177 - protein, 9 aa, synthetic construct
  source 1..9: note = Seed: LVVVGAVGV (KRAS G12V)
WVVVGPVGR

SEQ ID NO: 66178 - protein, 9 aa, synthetic construct
  source 1..9: note = Seed: LVVVGAVGV (KRAS G12V)
WVVVGPVGS

SEQ ID NO: 66179 - protein, 9 aa, synthetic construct
  source 1..9: note = Seed: LVVVGAVGV (KRAS G12V)
WVVVGPVGT

SEQ ID NO: 66180 - protein, 9 aa, synthetic construct
  source 1..9: note = Seed: LVVVGAVGV (KRAS G12V)
WVVVGPVGV

SEQ ID NO: 66181 - protein, 9 aa, synthetic construct
  source 1..9: note = Seed: LVVVGAVGV (KRAS G12V)
WVVVGPVGW

SEQ ID NO: 66182 - protein, 9 aa, synthetic construct
  source 1..9: note = Seed: LVVVGAVGV (KRAS G12V)
WVVVGPVGY

SEQ ID NO: 66183 - protein, 9 aa, synthetic construct
  source 1..9: note = Seed: LVVVGAVGV (KRAS G12V)
WVVVGQVGA

SEQ ID NO: 66184 - protein, 9 aa, synthetic construct
  source 1..9: note = Seed: LVVVGAVGV (KRAS G12V)
WVVVGQVGI

SEQ ID NO: 66185 - protein, 9 aa, synthetic construct
  source 1..9: note = Seed: LVVVGAVGV (KRAS G12V)
WVVVGQVGL

SEQ ID NO: 66186 - protein, 9 aa, synthetic construct
  source 1..9: note = Seed: LVVVGAVGV (KRAS G12V)
WVVVGQVGM

SEQ ID NO: 66187 - protein, 9 aa, synthetic construct
  source 1..9: note = Seed: LVVVGAVGV (KRAS G12V)
WVVVGQVGS

SEQ ID NO: 66188 - protein, 9 aa, synthetic construct
  source 1..9: note = Seed: LVVVGAVGV (KRAS G12V)
WVVVGQVGV

SEQ ID NO: 66189 - protein, 9 aa, synthetic construct
  source 1..9: note = Seed: LVVVGAVGV (KRAS G12V)
WVVVGRVGA

SEQ ID NO: 66190 - protein, 9 aa, synthetic construct
  source 1..9: note = Seed: LVVVGAVGV (KRAS G12V)
WVVVGRVGG

SEQ ID NO: 66191 - protein, 9 aa, synthetic construct
  source 1..9: note = Seed: LVVVGAVGV (KRAS G12V)
WVVVGRVGH

SEQ ID NO: 66192 - protein, 9 aa, synthetic construct
  source 1..9: note = Seed: LVVVGAVGV (KRAS G12V)
WVVVGRVGK

SEQ ID NO: 66193 - protein, 9 aa, synthetic construct
  source 1..9: note = Seed: LVVVGAVGV (KRAS G12V)
WVVVGRVGL

SEQ ID NO: 66194 - protein, 9 aa, synthetic construct
  source 1..9: note = Seed: LVVVGAVGV (KRAS G12V)
WVVVGRVGM

SEQ ID NO: 66195 - protein, 9 aa, synthetic construct
  source 1..9: note = Seed: LVVVGAVGV (KRAS G12V)
WVVVGRVGN

SEQ ID NO: 66196 - protein, 9 aa, synthetic construct
  source 1..9: note = Seed: LVVVGAVGV (KRAS G12V)
WVVVGRVGP

SEQ ID NO: 66197 - protein, 9 aa, synthetic construct
  source 1..9: note = Seed: LVVVGAVGV (KRAS G12V)
WVVVGRVGQ

SEQ ID NO: 66198 - protein, 9 aa, synthetic construct
  source 1..9: note = Seed: LVVVGAVGV (KRAS G12V)
WVVVGRVGR

SEQ ID NO: 66199 - protein, 9 aa, synthetic construct
  source 1..9: note = Seed: LVVVGAVGV (KRAS G12V)
WVVVGRVGS

SEQ ID NO: 66200 - protein, 9 aa, synthetic construct
  source 1..9: note = Seed: LVVVGAVGV (KRAS G12V)
WVVVGRVGT

SEQ ID NO: 66201 - protein, 9 aa, synthetic construct
  source 1..9: note = Seed: LVVVGAVGV (KRAS G12V)
WVVVGSVGA

SEQ ID NO: 66202 - protein, 9 aa, synthetic construct
  source 1..9: note = Seed: LVVVGAVGV (KRAS G12V)
WVVVGSVGF

SEQ ID NO: 66203 - protein, 9 aa, synthetic construct
  source 1..9: note = Seed: LVVVGAVGV (KRAS G12V)
WVVVGSVGG

SEQ ID NO: 66204 - protein, 9 aa, synthetic construct
  source 1..9: note = Seed: LVVVGAVGV (KRAS G12V)
WVVVGSVGH

SEQ ID NO: 66205 - protein, 9 aa, synthetic construct
  source 1..9: note = Seed: LVVVGAVGV (KRAS G12V)
WVVVGSVGI

SEQ ID NO: 66206 - protein, 9 aa, synthetic construct
  source 1..9: note = Seed: LVVVGAVGV (KRAS G12V)
WVVVGSVGK

SEQ ID NO: 66207 - protein, 9 aa, synthetic construct
  source 1..9: note = Seed: LVVVGAVGV (KRAS G12V)
WVVVGSVGL

SEQ ID NO: 66208 - protein, 9 aa, synthetic construct
  source 1..9: note = Seed: LVVVGAVGV (KRAS G12V)
WVVVGSVGM

SEQ ID NO: 66209 - protein, 9 aa, synthetic construct
  source 1..9: note = Seed: LVVVGAVGV (KRAS G12V)
WVVVGSVGN

SEQ ID NO: 66210 - protein, 9 aa, synthetic construct
  source 1..9: note = Seed: LVVVGAVGV (KRAS G12V)
WVVVGSVGP

SEQ ID NO: 66211 - protein, 9 aa, synthetic construct
  source 1..9: note = Seed: LVVVGAVGV (KRAS G12V)
WVVVGSVGQ

SEQ ID NO: 66212 - protein, 9 aa, synthetic construct
  source 1..9: note = Seed: LVVVGAVGV (KRAS G12V)
WVVVGSVGR

SEQ ID NO: 66213 - protein, 9 aa, synthetic construct
  source 1..9: note = Seed: LVVVGAVGV (KRAS G12V)
WVVVGSVGS

SEQ ID NO: 66214 - protein, 9 aa, synthetic construct
  source 1..9: note = Seed: LVVVGAVGV (KRAS G12V)
WVVVGSVGT

SEQ ID NO: 66215 - protein, 9 aa, synthetic construct
  source 1..9: note = Seed: LVVVGAVGV (KRAS G12V)
WVVVGSVGV

SEQ ID NO: 66216 - protein, 9 aa, synthetic construct
  source 1..9: note = Seed: LVVVGAVGV (KRAS G12V)
WVVVGSVGY

SEQ ID NO: 66217 - protein, 9 aa, synthetic construct
  source 1..9: note = Seed: LVVVGAVGV (KRAS G12V)
WVVVGTVGA

SEQ ID NO: 66218 - protein, 9 aa, synthetic construct
  source 1..9: note = Seed: LVVVGAVGV (KRAS G12V)
WVVVGTVGG

SEQ ID NO: 66219 - protein, 9 aa, synthetic construct
  source 1..9: note = Seed: LVVVGAVGV (KRAS G12V)
WVVVGTVGH

SEQ ID NO: 66220 - protein, 9 aa, synthetic construct
  source 1..9: note = Seed: LVVVGAVGV (KRAS G12V)
WVVVGTVGI

SEQ ID NO: 66221 - protein, 9 aa, synthetic construct
  source 1..9: note = Seed: LVVVGAVGV (KRAS G12V)
WVVVGTVGK

SEQ ID NO: 66222 - protein, 9 aa, synthetic construct
  source 1..9: note = Seed: LVVVGAVGV (KRAS G12V)
WVVVGTVGL

SEQ ID NO: 66223 - protein, 9 aa, synthetic construct
  source 1..9: note = Seed: LVVVGAVGV (KRAS G12V)
WVVVGTVGM

SEQ ID NO: 66224 - protein, 9 aa, synthetic construct
  source 1..9: note = Seed: LVVVGAVGV (KRAS G12V)
WVVVGTVGN

SEQ ID NO: 66225 - protein, 9 aa, synthetic construct
  source 1..9: note = Seed: LVVVGAVGV (KRAS G12V)
WVVVGTVGQ

SEQ ID NO: 66226 - protein, 9 aa, synthetic construct
  source 1..9: note = Seed: LVVVGAVGV (KRAS G12V)
WVVVGTVGR

SEQ ID NO: 66227 - protein, 9 aa, synthetic construct
  source 1..9: note = Seed: LVVVGAVGV (KRAS G12V)
WVVVGTVGS

SEQ ID NO: 66228 - protein, 9 aa, synthetic construct
  source 1..9: note = Seed: LVVVGAVGV (KRAS G12V)
WVVVGTVGT

SEQ ID NO: 66229 - protein, 9 aa, synthetic construct
  source 1..9: note = Seed: LVVVGAVGV (KRAS G12V)
WVVVGTVGV

SEQ ID NO: 66230 - protein, 9 aa, synthetic construct
  source 1..9: note = Seed: LVVVGAVGV (KRAS G12V)
WVVVGTVGY

SEQ ID NO: 66231 - protein, 9 aa, synthetic construct
  source 1..9: note = Seed: LVVVGAVGV (KRAS G12V)
WVVVGVVGA

SEQ ID NO: 66232 - protein, 9 aa, synthetic construct
  source 1..9: note = Seed: LVVVGAVGV (KRAS G12V)
WVVVGVVGH

SEQ ID NO: 66233 - protein, 9 aa, synthetic construct
  source 1..9: note = Seed: LVVVGAVGV (KRAS G12V)
WVVVGVVGN

SEQ ID NO: 66234 - protein, 9 aa, synthetic construct
  source 1..9: note = Seed: LVVVGAVGV (KRAS G12V)
WVVVGVVGS

SEQ ID NO: 66235 - protein, 9 aa, synthetic construct
  source 1..9: note = Seed: LVVVGAVGV (KRAS G12V)
WVVVGVVGT

SEQ ID NO: 66236 - protein, 9 aa, synthetic construct
  source 1..9: note = Seed: LVVVGAVGV (KRAS G12V)
WVVVGVVGV

SEQ ID NO: 66237 - protein, 9 aa, synthetic construct
  source 1..9: note = Seed: LVVVGAVGV (KRAS G12V)
WVVWGAVGA

SEQ ID NO: 66238 - protein, 9 aa, synthetic construct
  source 1..9: note = Seed: LVVVGAVGV (KRAS G12V)
WVVWGAVGI

SEQ ID NO: 66239 - protein, 9 aa, synthetic construct
  source 1..9: note = Seed: LVVVGAVGV (KRAS G12V)
WVVWGAVGL

SEQ ID NO: 66240 - protein, 9 aa, synthetic construct
  source 1..9: note = Seed: LVVVGAVGV (KRAS G12V)
WVVWGAVGM

SEQ ID NO: 66241 - protein, 9 aa, synthetic construct
  source 1..9: note = Seed: LVVVGAVGV (KRAS G12V)
WVVWGAVGS

SEQ ID NO: 66242 - protein, 9 aa, synthetic construct
  source 1..9: note = Seed: LVVVGAVGV (KRAS G12V)
WVVWGAVGV

SEQ ID NO: 66243 - protein, 9 aa, synthetic construct
  source 1..9: note = Seed: LVVVGAVGV (KRAS G12V)
WVVWGGVGA

SEQ ID NO: 66244 - protein, 9 aa, synthetic construct
  source 1..9: note = Seed: LVVVGAVGV (KRAS G12V)
WVVWGGVGI

SEQ ID NO: 66245 - protein, 9 aa, synthetic construct
  source 1..9: note = Seed: LVVVGAVGV (KRAS G12V)
WVVWGGVGL

SEQ ID NO: 66246 - protein, 9 aa, synthetic construct
  source 1..9: note = Seed: LVVVGAVGV (KRAS G12V)
WVVWGGVGM

SEQ ID NO: 66247 - protein, 9 aa, synthetic construct
  source 1..9: note = Seed: LVVVGAVGV (KRAS G12V)
WVVWGGVGV

SEQ ID NO: 66248 - protein, 9 aa, synthetic construct
  source 1..9: note = Seed: LVVVGAVGV (KRAS G12V)
WVVWGNVGL

SEQ ID NO: 66249 - protein, 9 aa, synthetic construct
  source 1..9: note = Seed: LVVVGAVGV (KRAS G12V)
WVVWGPVGA

SEQ ID NO: 66250 - protein, 9 aa, synthetic construct
  source 1..9: note = Seed: LVVVGAVGV (KRAS G12V)
WVVWGPVGI

SEQ ID NO: 66251 - protein, 9 aa, synthetic construct
  source 1..9: note = Seed: LVVVGAVGV (KRAS G12V)
WVVWGPVGL

SEQ ID NO: 66252 - protein, 9 aa, synthetic construct
  source 1..9: note = Seed: LVVVGAVGV (KRAS G12V)
WVVWGPVGV

SEQ ID NO: 66253 - protein, 9 aa, synthetic construct
  source 1..9: note = Seed: LVVVGAVGV (KRAS G12V)
WVVWGRVGR

SEQ ID NO: 66254 - protein, 9 aa, synthetic construct
  source 1..9: note = Seed: LVVVGAVGV (KRAS G12V)
WVVWGSVGA

SEQ ID NO: 66255 - protein, 9 aa, synthetic construct
  source 1..9: note = Seed: LVVVGAVGV (KRAS G12V)
WVVWGSVGI

SEQ ID NO: 66256 - protein, 9 aa, synthetic construct
  source 1..9: note = Seed: LVVVGAVGV (KRAS G12V)
WVVWGSVGL

SEQ ID NO: 66257 - protein, 9 aa, synthetic construct
  source 1..9: note = Seed: LVVVGAVGV (KRAS G12V)
WVVWGSVGM

SEQ ID NO: 66258 - protein, 9 aa, synthetic construct
  source 1..9: note = Seed: LVVVGAVGV (KRAS G12V)
WVVWGSVGV

SEQ ID NO: 66259 - protein, 9 aa, synthetic construct
  source 1..9: note = Seed: LVVVGAVGV (KRAS G12V)
WVVWGTVGL

SEQ ID NO: 66260 - protein, 9 aa, synthetic construct
  source 1..9: note = Seed: LVVVGAVGV (KRAS G12V)
WVVYGAVGA

SEQ ID NO: 66261 - protein, 9 aa, synthetic construct
  source 1..9: note = Seed: LVVVGAVGV (KRAS G12V)
WVVYGAVGL

SEQ ID NO: 66262 - protein, 9 aa, synthetic construct
  source 1..9: note = Seed: LVVVGAVGV (KRAS G12V)
WVVYGAVGM

SEQ ID NO: 66263 - protein, 9 aa, synthetic construct
  source 1..9: note = Seed: LVVVGAVGV (KRAS G12V)
WVVYGAVGS

SEQ ID NO: 66264 - protein, 9 aa, synthetic construct
  source 1..9: note = Seed: LVVVGAVGV (KRAS G12V)
WVVYGAVGV

SEQ ID NO: 66265 - protein, 9 aa, synthetic construct
  source 1..9: note = Seed: LVVVGAVGV (KRAS G12V)
WVVYGNVGI

SEQ ID NO: 66266 - protein, 9 aa, synthetic construct
  source 1..9: note = Seed: LVVVGAVGV (KRAS G12V)
WVVYGNVGL

SEQ ID NO: 66267 - protein, 9 aa, synthetic construct
  source 1..9: note = Seed: LVVVGAVGV (KRAS G12V)
WVVYGNVGM

SEQ ID NO: 66268 - protein, 9 aa, synthetic construct
  source 1..9: note = Seed: LVVVGAVGV (KRAS G12V)
WVVYGNVGV

SEQ ID NO: 66269 - protein, 9 aa, synthetic construct
  source 1..9: note = Seed: LVVVGAVGV (KRAS G12V)
WVVYGRVGR

SEQ ID NO: 66270 - protein, 9 aa, synthetic construct
  source 1..9: note = Seed: LVVVGAVGV (KRAS G12V)
WVVYGSVGA

SEQ ID NO: 66271 - protein, 9 aa, synthetic construct
  source 1..9: note = Seed: LVVVGAVGV (KRAS G12V)
YVVAGAVGC

SEQ ID NO: 66272 - protein, 9 aa, synthetic construct
  source 1..9: note = Seed: LVVVGAVGV (KRAS G12V)
YVVAGAVGD

SEQ ID NO: 66273 - protein, 9 aa, synthetic construct
  source 1..9: note = Seed: LVVVGAVGV (KRAS G12V)
YVVAGAVGE

SEQ ID NO: 66274 - protein, 9 aa, synthetic construct
  source 1..9: note = Seed: LVVVGAVGV (KRAS G12V)
YVVAGAVGF

SEQ ID NO: 66275 - protein, 9 aa, synthetic construct
  source 1..9: note = Seed: LVVVGAVGV (KRAS G12V)
YVVAGAVGG

SEQ ID NO: 66276 - protein, 9 aa, synthetic construct
  source 1..9: note = Seed: LVVVGAVGV (KRAS G12V)
YVVAGAVGH

SEQ ID NO: 66277 - protein, 9 aa, synthetic construct
  source 1..9: note = Seed: LVVVGAVGV (KRAS G12V)
YVVAGAVGK

SEQ ID NO: 66278 - protein, 9 aa, synthetic construct
  source 1..9: note = Seed: LVVVGAVGV (KRAS G12V)
YVVAGAVGM

SEQ ID NO: 66279 - protein, 9 aa, synthetic construct
  source 1..9: note = Seed: LVVVGAVGV (KRAS G12V)
YVVAGAVGN

SEQ ID NO: 66280 - protein, 9 aa, synthetic construct
  source 1..9: note = Seed: LVVVGAVGV (KRAS G12V)
YVVAGAVGP

SEQ ID NO: 66281 - protein, 9 aa, synthetic construct
  source 1..9: note = Seed: LVVVGAVGV (KRAS G12V)
YVVAGAVGQ

SEQ ID NO: 66282 - protein, 9 aa, synthetic construct
  source 1..9: note = Seed: LVVVGAVGV (KRAS G12V)
YVVAGAVGR

SEQ ID NO: 66283 - protein, 9 aa, synthetic construct
  source 1..9: note = Seed: LVVVGAVGV (KRAS G12V)
YVVAGAVGS

SEQ ID NO: 66284 - protein, 9 aa, synthetic construct
  source 1..9: note = Seed: LVVVGAVGV (KRAS G12V)
YVVAGAVGT

SEQ ID NO: 66285 - protein, 9 aa, synthetic construct
  source 1..9: note = Seed: LVVVGAVGV (KRAS G12V)
YVVAGAVGW

SEQ ID NO: 66286 - protein, 9 aa, synthetic construct
  source 1..9: note = Seed: LVVVGAVGV (KRAS G12V)
YVVAGAVGY

SEQ ID NO: 66287 - protein, 9 aa, synthetic construct
  source 1..9: note = Seed: LVVVGAVGV (KRAS G12V)
YVVAGCVGA

SEQ ID NO: 66288 - protein, 9 aa, synthetic construct
  source 1..9: note = Seed: LVVVGAVGV (KRAS G12V)
YVVAGCVGC

SEQ ID NO: 66289 - protein, 9 aa, synthetic construct
  source 1..9: note = Seed: LVVVGAVGV (KRAS G12V)
YVVAGCVGD

SEQ ID NO: 66290 - protein, 9 aa, synthetic construct
  source 1..9: note = Seed: LVVVGAVGV (KRAS G12V)
YVVAGCVGE

SEQ ID NO: 66291 - protein, 9 aa, synthetic construct
  source 1..9: note = Seed: LVVVGAVGV (KRAS G12V)
YVVAGCVGF

SEQ ID NO: 66292 - protein, 9 aa, synthetic construct
  source 1..9: note = Seed: LVVVGAVGV (KRAS G12V)
YVVAGCVGG

SEQ ID NO: 66293 - protein, 9 aa, synthetic construct
  source 1..9: note = Seed: LVVVGAVGV (KRAS G12V)
YVVAGCVGH

SEQ ID NO: 66294 - protein, 9 aa, synthetic construct
  source 1..9: note = Seed: LVVVGAVGV (KRAS G12V)
YVVAGCVGI

SEQ ID NO: 66295 - protein, 9 aa, synthetic construct
  source 1..9: note = Seed: LVVVGAVGV (KRAS G12V)
YVVAGCVGK

SEQ ID NO: 66296 - protein, 9 aa, synthetic construct
  source 1..9: note = Seed: LVVVGAVGV (KRAS G12V)
YVVAGCVGL

SEQ ID NO: 66297 - protein, 9 aa, synthetic construct
  source 1..9: note = Seed: LVVVGAVGV (KRAS G12V)
YVVAGCVGM

SEQ ID NO: 66298 - protein, 9 aa, synthetic construct
  source 1..9: note = Seed: LVVVGAVGV (KRAS G12V)
YVVAGCVGN

SEQ ID NO: 66299 - protein, 9 aa, synthetic construct
  source 1..9: note = Seed: LVVVGAVGV (KRAS G12V)
YVVAGCVGP

SEQ ID NO: 66300 - protein, 9 aa, synthetic construct
  source 1..9: note = Seed: LVVVGAVGV (KRAS G12V)
YVVAGCVGQ

SEQ ID NO: 66301 - protein, 9 aa, synthetic construct
  source 1..9: note = Seed: LVVVGAVGV (KRAS G12V)
YVVAGCVGR

SEQ ID NO: 66302 - protein, 9 aa, synthetic construct
  source 1..9: note = Seed: LVVVGAVGV (KRAS G12V)
YVVAGCVGS

SEQ ID NO: 66303 - protein, 9 aa, synthetic construct
  source 1..9: note = Seed: LVVVGAVGV (KRAS G12V)
YVVAGCVGT

SEQ ID NO: 66304 - protein, 9 aa, synthetic construct
  source 1..9: note = Seed: LVVVGAVGV (KRAS G12V)
YVVAGCVGV

SEQ ID NO: 66305 - protein, 9 aa, synthetic construct
  source 1..9: note = Seed: LVVVGAVGV (KRAS G12V)
YVVAGCVGY

SEQ ID NO: 66306 - protein, 9 aa, synthetic construct
  source 1..9: note = Seed: LVVVGAVGV (KRAS G12V)
YVVAGDVGA

SEQ ID NO: 66307 - protein, 9 aa, synthetic construct
  source 1..9: note = Seed: LVVVGAVGV (KRAS G12V)
YVVAGDVGC

SEQ ID NO: 66308 - protein, 9 aa, synthetic construct
  source 1..9: note = Seed: LVVVGAVGV (KRAS G12V)
YVVAGDVGF

SEQ ID NO: 66309 - protein, 9 aa, synthetic construct
  source 1..9: note = Seed: LVVVGAVGV (KRAS G12V)
YVVAGDVGG

SEQ ID NO: 66310 - protein, 9 aa, synthetic construct
  source 1..9: note = Seed: LVVVGAVGV (KRAS G12V)
YVVAGDVGH

SEQ ID NO: 66311 - protein, 9 aa, synthetic construct
  source 1..9: note = Seed: LVVVGAVGV (KRAS G12V)
YVVAGDVGI

SEQ ID NO: 66312 - protein, 9 aa, synthetic construct
  source 1..9: note = Seed: LVVVGAVGV (KRAS G12V)
YVVAGDVGL

SEQ ID NO: 66313 - protein, 9 aa, synthetic construct
  source 1..9: note = Seed: LVVVGAVGV (KRAS G12V)
YVVAGDVGM

SEQ ID NO: 66314 - protein, 9 aa, synthetic construct
  source 1..9: note = Seed: LVVVGAVGV (KRAS G12V)
YVVAGDVGN

SEQ ID NO: 66315 - protein, 9 aa, synthetic construct
  source 1..9: note = Seed: LVVVGAVGV (KRAS G12V)
YVVAGDVGQ

SEQ ID NO: 66316 - protein, 9 aa, synthetic construct
  source 1..9: note = Seed: LVVVGAVGV (KRAS G12V)
YVVAGDVGS

SEQ ID NO: 66317 - protein, 9 aa, synthetic construct
  source 1..9: note = Seed: LVVVGAVGV (KRAS G12V)
YVVAGDVGT

SEQ ID NO: 66318 - protein, 9 aa, synthetic construct
  source 1..9: note = Seed: LVVVGAVGV (KRAS G12V)
YVVAGDVGV

SEQ ID NO: 66319 - protein, 9 aa, synthetic construct
  source 1..9: note = Seed: LVVVGAVGV (KRAS G12V)
YVVAGEVGA

SEQ ID NO: 66320 - protein, 9 aa, synthetic construct
  source 1..9: note = Seed: LVVVGAVGV (KRAS G12V)
YVVAGEVGC

SEQ ID NO: 66321 - protein, 9 aa, synthetic construct
  source 1..9: note = Seed: LVVVGAVGV (KRAS G12V)
YVVAGEVGG

SEQ ID NO: 66322 - protein, 9 aa, synthetic construct
  source 1..9: note = Seed: LVVVGAVGV (KRAS G12V)
YVVAGEVGH

SEQ ID NO: 66323 - protein, 9 aa, synthetic construct
  source 1..9: note = Seed: LVVVGAVGV (KRAS G12V)
YVVAGEVGI

SEQ ID NO: 66324 - protein, 9 aa, synthetic construct
  source 1..9: note = Seed: LVVVGAVGV (KRAS G12V)
YVVAGEVGL

SEQ ID NO: 66325 - protein, 9 aa, synthetic construct
  source 1..9: note = Seed: LVVVGAVGV (KRAS G12V)
YVVAGEVGM

SEQ ID NO: 66326 - protein, 9 aa, synthetic construct
  source 1..9: note = Seed: LVVVGAVGV (KRAS G12V)
YVVAGEVGN

SEQ ID NO: 66327 - protein, 9 aa, synthetic construct
  source 1..9: note = Seed: LVVVGAVGV (KRAS G12V)
YVVAGEVGQ

SEQ ID NO: 66328 - protein, 9 aa, synthetic construct
  source 1..9: note = Seed: LVVVGAVGV (KRAS G12V)
YVVAGEVGR

SEQ ID NO: 66329 - protein, 9 aa, synthetic construct
  source 1..9: note = Seed: LVVVGAVGV (KRAS G12V)
YVVAGEVGS

SEQ ID NO: 66330 - protein, 9 aa, synthetic construct
  source 1..9: note = Seed: LVVVGAVGV (KRAS G12V)
YVVAGEVGT

SEQ ID NO: 66331 - protein, 9 aa, synthetic construct
  source 1..9: note = Seed: LVVVGAVGV (KRAS G12V)
YVVAGEVGV

SEQ ID NO: 66332 - protein, 9 aa, synthetic construct
  source 1..9: note = Seed: LVVVGAVGV (KRAS G12V)
YVVAGEVGY

SEQ ID NO: 66333 - protein, 9 aa, synthetic construct
  source 1..9: note = Seed: LVVVGAVGV (KRAS G12V)
YVVAGFVGA

SEQ ID NO: 66334 - protein, 9 aa, synthetic construct
  source 1..9: note = Seed: LVVVGAVGV (KRAS G12V)
YVVAGFVGL

SEQ ID NO: 66335 - protein, 9 aa, synthetic construct
  source 1..9: note = Seed: LVVVGAVGV (KRAS G12V)
YVVAGFVGM

SEQ ID NO: 66336 - protein, 9 aa, synthetic construct
  source 1..9: note = Seed: LVVVGAVGV (KRAS G12V)
YVVAGFVGN

SEQ ID NO: 66337 - protein, 9 aa, synthetic construct
  source 1..9: note = Seed: LVVVGAVGV (KRAS G12V)
YVVAGFVGS

SEQ ID NO: 66338 - protein, 9 aa, synthetic construct
  source 1..9: note = Seed: LVVVGAVGV (KRAS G12V)
YVVAGFVGV

SEQ ID NO: 66339 - protein, 9 aa, synthetic construct
  source 1..9: note = Seed: LVVVGAVGV (KRAS G12V)
YVVAGGVGA

SEQ ID NO: 66340 - protein, 9 aa, synthetic construct
  source 1..9: note = Seed: LVVVGAVGV (KRAS G12V)
YVVAGGVGC

SEQ ID NO: 66341 - protein, 9 aa, synthetic construct
  source 1..9: note = Seed: LVVVGAVGV (KRAS G12V)
YVVAGGVGD

SEQ ID NO: 66342 - protein, 9 aa, synthetic construct
  source 1..9: note = Seed: LVVVGAVGV (KRAS G12V)
YVVAGGVGE

SEQ ID NO: 66343 - protein, 9 aa, synthetic construct
  source 1..9: note = Seed: LVVVGAVGV (KRAS G12V)
YVVAGGVGF

SEQ ID NO: 66344 - protein, 9 aa, synthetic construct
  source 1..9: note = Seed: LVVVGAVGV (KRAS G12V)
YVVAGGVGG

SEQ ID NO: 66345 - protein, 9 aa, synthetic construct
  source 1..9: note = Seed: LVVVGAVGV (KRAS G12V)
YVVAGGVGH

SEQ ID NO: 66346 - protein, 9 aa, synthetic construct
  source 1..9: note = Seed: LVVVGAVGV (KRAS G12V)
YVVAGGVGI

SEQ ID NO: 66347 - protein, 9 aa, synthetic construct
  source 1..9: note = Seed: LVVVGAVGV (KRAS G12V)
YVVAGGVGK

SEQ ID NO: 66348 - protein, 9 aa, synthetic construct
  source 1..9: note = Seed: LVVVGAVGV (KRAS G12V)
YVVAGGVGM

SEQ ID NO: 66349 - protein, 9 aa, synthetic construct
  source 1..9: note = Seed: LVVVGAVGV (KRAS G12V)
YVVAGGVGN

SEQ ID NO: 66350 - protein, 9 aa, synthetic construct
  source 1..9: note = Seed: LVVVGAVGV (KRAS G12V)
YVVAGGVGP

SEQ ID NO: 66351 - protein, 9 aa, synthetic construct
  source 1..9: note = Seed: LVVVGAVGV (KRAS G12V)
YVVAGGVGQ

SEQ ID NO: 66352 - protein, 9 aa, synthetic construct
  source 1..9: note = Seed: LVVVGAVGV (KRAS G12V)
YVVAGGVGR

SEQ ID NO: 66353 - protein, 9 aa, synthetic construct
  source 1..9: note = Seed: LVVVGAVGV (KRAS G12V)
YVVAGGVGS

SEQ ID NO: 66354 - protein, 9 aa, synthetic construct
  source 1..9: note = Seed: LVVVGAVGV (KRAS G12V)
YVVAGGVGT

SEQ ID NO: 66355 - protein, 9 aa, synthetic construct
  source 1..9: note = Seed: LVVVGAVGV (KRAS G12V)
YVVAGGVGW

SEQ ID NO: 66356 - protein, 9 aa, synthetic construct
  source 1..9: note = Seed: LVVVGAVGV (KRAS G12V)
YVVAGGVGY

SEQ ID NO: 66357 - protein, 9 aa, synthetic construct
  source 1..9: note = Seed: LVVVGAVGV (KRAS G12V)
YVVAGHVGA

SEQ ID NO: 66358 - protein, 9 aa, synthetic construct
  source 1..9: note = Seed: LVVVGAVGV (KRAS G12V)
YVVAGHVGC

SEQ ID NO: 66359 - protein, 9 aa, synthetic construct
  source 1..9: note = Seed: LVVVGAVGV (KRAS G12V)
YVVAGHVGD

SEQ ID NO: 66360 - protein, 9 aa, synthetic construct
  source 1..9: note = Seed: LVVVGAVGV (KRAS G12V)
YVVAGHVGE

SEQ ID NO: 66361 - protein, 9 aa, synthetic construct
  source 1..9: note = Seed: LVVVGAVGV (KRAS G12V)
YVVAGHVGF

SEQ ID NO: 66362 - protein, 9 aa, synthetic construct
  source 1..9: note = Seed: LVVVGAVGV (KRAS G12V)
YVVAGHVGG

SEQ ID NO: 66363 - protein, 9 aa, synthetic construct
  source 1..9: note = Seed: LVVVGAVGV (KRAS G12V)
YVVAGHVGH

SEQ ID NO: 66364 - protein, 9 aa, synthetic construct
  source 1..9: note = Seed: LVVVGAVGV (KRAS G12V)
YVVAGHVGI

SEQ ID NO: 66365 - protein, 9 aa, synthetic construct
  source 1..9: note = Seed: LVVVGAVGV (KRAS G12V)
YVVAGHVGL

SEQ ID NO: 66366 - protein, 9 aa, synthetic construct
  source 1..9: note = Seed: LVVVGAVGV (KRAS G12V)
YVVAGHVGM

SEQ ID NO: 66367 - protein, 9 aa, synthetic construct
  source 1..9: note = Seed: LVVVGAVGV (KRAS G12V)
YVVAGHVGN

SEQ ID NO: 66368 - protein, 9 aa, synthetic construct
  source 1..9: note = Seed: LVVVGAVGV (KRAS G12V)
YVVAGHVGQ

SEQ ID NO: 66369 - protein, 9 aa, synthetic construct
  source 1..9: note = Seed: LVVVGAVGV (KRAS G12V)
YVVAGHVGR

SEQ ID NO: 66370 - protein, 9 aa, synthetic construct
  source 1..9: note = Seed: LVVVGAVGV (KRAS G12V)
YVVAGHVGS

SEQ ID NO: 66371 - protein, 9 aa, synthetic construct
  source 1..9: note = Seed: LVVVGAVGV (KRAS G12V)
YVVAGHVGT

SEQ ID NO: 66372 - protein, 9 aa, synthetic construct
  source 1..9: note = Seed: LVVVGAVGV (KRAS G12V)
YVVAGHVGV

SEQ ID NO: 66373 - protein, 9 aa, synthetic construct
  source 1..9: note = Seed: LVVVGAVGV (KRAS G12V)
YVVAGHVGW

SEQ ID NO: 66374 - protein, 9 aa, synthetic construct
  source 1..9: note = Seed: LVVVGAVGV (KRAS G12V)
YVVAGHVGY

SEQ ID NO: 66375 - protein, 9 aa, synthetic construct
  source 1..9: note = Seed: LVVVGAVGV (KRAS G12V)
YVVAGIVGA

SEQ ID NO: 66376 - protein, 9 aa, synthetic construct
  source 1..9: note = Seed: LVVVGAVGV (KRAS G12V)
YVVAGIVGC

SEQ ID NO: 66377 - protein, 9 aa, synthetic construct
  source 1..9: note = Seed: LVVVGAVGV (KRAS G12V)
YVVAGIVGD

SEQ ID NO: 66378 - protein, 9 aa, synthetic construct
  source 1..9: note = Seed: LVVVGAVGV (KRAS G12V)
YVVAGIVGE

SEQ ID NO: 66379 - protein, 9 aa, synthetic construct
  source 1..9: note = Seed: LVVVGAVGV (KRAS G12V)
YVVAGIVGF

SEQ ID NO: 66380 - protein, 9 aa, synthetic construct
  source 1..9: note = Seed: LVVVGAVGV (KRAS G12V)
YVVAGIVGG

SEQ ID NO: 66381 - protein, 9 aa, synthetic construct
  source 1..9: note = Seed: LVVVGAVGV (KRAS G12V)
YVVAGIVGH

SEQ ID NO: 66382 - protein, 9 aa, synthetic construct
  source 1..9: note = Seed: LVVVGAVGV (KRAS G12V)
YVVAGIVGI

SEQ ID NO: 66383 - protein, 9 aa, synthetic construct
  source 1..9: note = Seed: LVVVGAVGV (KRAS G12V)
YVVAGIVGK

SEQ ID NO: 66384 - protein, 9 aa, synthetic construct
  source 1..9: note = Seed: LVVVGAVGV (KRAS G12V)
YVVAGIVGL

SEQ ID NO: 66385 - protein, 9 aa, synthetic construct
  source 1..9: note = Seed: LVVVGAVGV (KRAS G12V)
YVVAGIVGM

SEQ ID NO: 66386 - protein, 9 aa, synthetic construct
  source 1..9: note = Seed: LVVVGAVGV (KRAS G12V)
YVVAGIVGN

SEQ ID NO: 66387 - protein, 9 aa, synthetic construct
  source 1..9: note = Seed: LVVVGAVGV (KRAS G12V)
YVVAGIVGP

SEQ ID NO: 66388 - protein, 9 aa, synthetic construct
  source 1..9: note = Seed: LVVVGAVGV (KRAS G12V)
YVVAGIVGQ

SEQ ID NO: 66389 - protein, 9 aa, synthetic construct
  source 1..9: note = Seed: LVVVGAVGV (KRAS G12V)
YVVAGIVGR

SEQ ID NO: 66390 - protein, 9 aa, synthetic construct
  source 1..9: note = Seed: LVVVGAVGV (KRAS G12V)
YVVAGIVGS

SEQ ID NO: 66391 - protein, 9 aa, synthetic construct
  source 1..9: note = Seed: LVVVGAVGV (KRAS G12V)
YVVAGIVGT

SEQ ID NO: 66392 - protein, 9 aa, synthetic construct
  source 1..9: note = Seed: LVVVGAVGV (KRAS G12V)
YVVAGIVGV

SEQ ID NO: 66393 - protein, 9 aa, synthetic construct
  source 1..9: note = Seed: LVVVGAVGV (KRAS G12V)
YVVAGIVGY

SEQ ID NO: 66394 - protein, 9 aa, synthetic construct
  source 1..9: note = Seed: LVVVGAVGV (KRAS G12V)
YVVAGKVGA

SEQ ID NO: 66395 - protein, 9 aa, synthetic construct
  source 1..9: note = Seed: LVVVGAVGV (KRAS G12V)
YVVAGKVGC

SEQ ID NO: 66396 - protein, 9 aa, synthetic construct
  source 1..9: note = Seed: LVVVGAVGV (KRAS G12V)
YVVAGKVGD

SEQ ID NO: 66397 - protein, 9 aa, synthetic construct
  source 1..9: note = Seed: LVVVGAVGV (KRAS G12V)
YVVAGKVGE

SEQ ID NO: 66398 - protein, 9 aa, synthetic construct
  source 1..9: note = Seed: LVVVGAVGV (KRAS G12V)
YVVAGKVGF

SEQ ID NO: 66399 - protein, 9 aa, synthetic construct
  source 1..9: note = Seed: LVVVGAVGV (KRAS G12V)
YVVAGKVGG

SEQ ID NO: 66400 - protein, 9 aa, synthetic construct
  source 1..9: note = Seed: LVVVGAVGV (KRAS G12V)
YVVAGKVGH

SEQ ID NO: 66401 - protein, 9 aa, synthetic construct
  source 1..9: note = Seed: LVVVGAVGV (KRAS G12V)
YVVAGKVGI

SEQ ID NO: 66402 - protein, 9 aa, synthetic construct
  source 1..9: note = Seed: LVVVGAVGV (KRAS G12V)
YVVAGKVGK

SEQ ID NO: 66403 - protein, 9 aa, synthetic construct
  source 1..9: note = Seed: LVVVGAVGV (KRAS G12V)
YVVAGKVGL

SEQ ID NO: 66404 - protein, 9 aa, synthetic construct
  source 1..9: note = Seed: LVVVGAVGV (KRAS G12V)
YVVAGKVGM

SEQ ID NO: 66405 - protein, 9 aa, synthetic construct
  source 1..9: note = Seed: LVVVGAVGV (KRAS G12V)
YVVAGKVGN

SEQ ID NO: 66406 - protein, 9 aa, synthetic construct
  source 1..9: note = Seed: LVVVGAVGV (KRAS G12V)
YVVAGKVGP

SEQ ID NO: 66407 - protein, 9 aa, synthetic construct
  source 1..9: note = Seed: LVVVGAVGV (KRAS G12V)
YVVAGKVGQ

SEQ ID NO: 66408 - protein, 9 aa, synthetic construct
  source 1..9: note = Seed: LVVVGAVGV (KRAS G12V)
YVVAGKVGR

SEQ ID NO: 66409 - protein, 9 aa, synthetic construct
  source 1..9: note = Seed: LVVVGAVGV (KRAS G12V)
YVVAGKVGS

SEQ ID NO: 66410 - protein, 9 aa, synthetic construct
  source 1..9: note = Seed: LVVVGAVGV (KRAS G12V)
YVVAGKVGT

SEQ ID NO: 66411 - protein, 9 aa, synthetic construct
  source 1..9: note = Seed: LVVVGAVGV (KRAS G12V)
YVVAGKVGV

SEQ ID NO: 66412 - protein, 9 aa, synthetic construct
  source 1..9: note = Seed: LVVVGAVGV (KRAS G12V)
YVVAGKVGY

SEQ ID NO: 66413 - protein, 9 aa, synthetic construct
  source 1..9: note = Seed: LVVVGAVGV (KRAS G12V)
YVVAGLVGA

SEQ ID NO: 66414 - protein, 9 aa, synthetic construct
  source 1..9: note = Seed: LVVVGAVGV (KRAS G12V)
YVVAGLVGC

SEQ ID NO: 66415 - protein, 9 aa, synthetic construct
  source 1..9: note = Seed: LVVVGAVGV (KRAS G12V)
YVVAGLVGD

SEQ ID NO: 66416 - protein, 9 aa, synthetic construct
  source 1..9: note = Seed: LVVVGAVGV (KRAS G12V)
YVVAGLVGE

SEQ ID NO: 66417 - protein, 9 aa, synthetic construct
  source 1..9: note = Seed: LVVVGAVGV (KRAS G12V)
YVVAGLVGG

SEQ ID NO: 66418 - protein, 9 aa, synthetic construct
  source 1..9: note = Seed: LVVVGAVGV (KRAS G12V)
YVVAGLVGH

SEQ ID NO: 66419 - protein, 9 aa, synthetic construct
  source 1..9: note = Seed: LVVVGAVGV (KRAS G12V)
YVVAGLVGI

SEQ ID NO: 66420 - protein, 9 aa, synthetic construct
  source 1..9: note = Seed: LVVVGAVGV (KRAS G12V)
YVVAGLVGL

SEQ ID NO: 66421 - protein, 9 aa, synthetic construct
  source 1..9: note = Seed: LVVVGAVGV (KRAS G12V)
YVVAGLVGM

SEQ ID NO: 66422 - protein, 9 aa, synthetic construct
  source 1..9: note = Seed: LVVVGAVGV (KRAS G12V)
YVVAGLVGN

SEQ ID NO: 66423 - protein, 9 aa, synthetic construct
  source 1..9: note = Seed: LVVVGAVGV (KRAS G12V)
YVVAGLVGQ

SEQ ID NO: 66424 - protein, 9 aa, synthetic construct
  source 1..9: note = Seed: LVVVGAVGV (KRAS G12V)
YVVAGLVGS

SEQ ID NO: 66425 - protein, 9 aa, synthetic construct
  source 1..9: note = Seed: LVVVGAVGV (KRAS G12V)
YVVAGLVGT

SEQ ID NO: 66426 - protein, 9 aa, synthetic construct
  source 1..9: note = Seed: LVVVGAVGV (KRAS G12V)
YVVAGLVGV

SEQ ID NO: 66427 - protein, 9 aa, synthetic construct
  source 1..9: note = Seed: LVVVGAVGV (KRAS G12V)
YVVAGMVGA

SEQ ID NO: 66428 - protein, 9 aa, synthetic construct
  source 1..9: note = Seed: LVVVGAVGV (KRAS G12V)
YVVAGMVGC

SEQ ID NO: 66429 - protein, 9 aa, synthetic construct
  source 1..9: note = Seed: LVVVGAVGV (KRAS G12V)
YVVAGMVGD

SEQ ID NO: 66430 - protein, 9 aa, synthetic construct
  source 1..9: note = Seed: LVVVGAVGV (KRAS G12V)
YVVAGMVGE

SEQ ID NO: 66431 - protein, 9 aa, synthetic construct
  source 1..9: note = Seed: LVVVGAVGV (KRAS G12V)
YVVAGMVGG

SEQ ID NO: 66432 - protein, 9 aa, synthetic construct
  source 1..9: note = Seed: LVVVGAVGV (KRAS G12V)
YVVAGMVGH

SEQ ID NO: 66433 - protein, 9 aa, synthetic construct
  source 1..9: note = Seed: LVVVGAVGV (KRAS G12V)
YVVAGMVGI

SEQ ID NO: 66434 - protein, 9 aa, synthetic construct
  source 1..9: note = Seed: LVVVGAVGV (KRAS G12V)
YVVAGMVGL

SEQ ID NO: 66435 - protein, 9 aa, synthetic construct
  source 1..9: note = Seed: LVVVGAVGV (KRAS G12V)
YVVAGMVGM

SEQ ID NO: 66436 - protein, 9 aa, synthetic construct
  source 1..9: note = Seed: LVVVGAVGV (KRAS G12V)
YVVAGMVGN

SEQ ID NO: 66437 - protein, 9 aa, synthetic construct
  source 1..9: note = Seed: LVVVGAVGV (KRAS G12V)
YVVAGMVGQ

SEQ ID NO: 66438 - protein, 9 aa, synthetic construct
  source 1..9: note = Seed: LVVVGAVGV (KRAS G12V)
YVVAGMVGS

SEQ ID NO: 66439 - protein, 9 aa, synthetic construct
  source 1..9: note = Seed: LVVVGAVGV (KRAS G12V)
YVVAGMVGT

SEQ ID NO: 66440 - protein, 9 aa, synthetic construct
  source 1..9: note = Seed: LVVVGAVGV (KRAS G12V)
YVVAGMVGV

SEQ ID NO: 66441 - protein, 9 aa, synthetic construct
  source 1..9: note = Seed: LVVVGAVGV (KRAS G12V)
YVVAGNVGA

SEQ ID NO: 66442 - protein, 9 aa, synthetic construct
  source 1..9: note = Seed: LVVVGAVGV (KRAS G12V)
YVVAGNVGC

SEQ ID NO: 66443 - protein, 9 aa, synthetic construct
  source 1..9: note = Seed: LVVVGAVGV (KRAS G12V)
YVVAGNVGD

SEQ ID NO: 66444 - protein, 9 aa, synthetic construct
  source 1..9: note = Seed: LVVVGAVGV (KRAS G12V)
YVVAGNVGE

SEQ ID NO: 66445 - protein, 9 aa, synthetic construct
  source 1..9: note = Seed: LVVVGAVGV (KRAS G12V)
YVVAGNVGF

SEQ ID NO: 66446 - protein, 9 aa, synthetic construct
  source 1..9: note = Seed: LVVVGAVGV (KRAS G12V)
YVVAGNVGG

SEQ ID NO: 66447 - protein, 9 aa, synthetic construct
  source 1..9: note = Seed: LVVVGAVGV (KRAS G12V)
YVVAGNVGH

SEQ ID NO: 66448 - protein, 9 aa, synthetic construct
  source 1..9: note = Seed: LVVVGAVGV (KRAS G12V)
YVVAGNVGI

SEQ ID NO: 66449 - protein, 9 aa, synthetic construct
  source 1..9: note = Seed: LVVVGAVGV (KRAS G12V)
YVVAGNVGK

SEQ ID NO: 66450 - protein, 9 aa, synthetic construct
  source 1..9: note = Seed: LVVVGAVGV (KRAS G12V)
YVVAGNVGL

SEQ ID NO: 66451 - protein, 9 aa, synthetic construct
  source 1..9: note = Seed: LVVVGAVGV (KRAS G12V)
YVVAGNVGM

SEQ ID NO: 66452 - protein, 9 aa, synthetic construct
  source 1..9: note = Seed: LVVVGAVGV (KRAS G12V)
YVVAGNVGN

SEQ ID NO: 66453 - protein, 9 aa, synthetic construct
  source 1..9: note = Seed: LVVVGAVGV (KRAS G12V)
YVVAGNVGP

SEQ ID NO: 66454 - protein, 9 aa, synthetic construct
  source 1..9: note = Seed: LVVVGAVGV (KRAS G12V)
YVVAGNVGQ

SEQ ID NO: 66455 - protein, 9 aa, synthetic construct
  source 1..9: note = Seed: LVVVGAVGV (KRAS G12V)
YVVAGNVGR

SEQ ID NO: 66456 - protein, 9 aa, synthetic construct
  source 1..9: note = Seed: LVVVGAVGV (KRAS G12V)
YVVAGNVGS

SEQ ID NO: 66457 - protein, 9 aa, synthetic construct
  source 1..9: note = Seed: LVVVGAVGV (KRAS G12V)
YVVAGNVGT

SEQ ID NO: 66458 - protein, 9 aa, synthetic construct
  source 1..9: note = Seed: LVVVGAVGV (KRAS G12V)
YVVAGNVGV

SEQ ID NO: 66459 - protein, 9 aa, synthetic construct
  source 1..9: note = Seed: LVVVGAVGV (KRAS G12V)
YVVAGNVGW

SEQ ID NO: 66460 - protein, 9 aa, synthetic construct
  source 1..9: note = Seed: LVVVGAVGV (KRAS G12V)
YVVAGNVGY

SEQ ID NO: 66461 - protein, 9 aa, synthetic construct
  source 1..9: note = Seed: LVVVGAVGV (KRAS G12V)
YVVAGPVGA

SEQ ID NO: 66462 - protein, 9 aa, synthetic construct
  source 1..9: note = Seed: LVVVGAVGV (KRAS G12V)
YVVAGPVGC

SEQ ID NO: 66463 - protein, 9 aa, synthetic construct
  source 1..9: note = Seed: LVVVGAVGV (KRAS G12V)
YVVAGPVGD

SEQ ID NO: 66464 - protein, 9 aa, synthetic construct
  source 1..9: note = Seed: LVVVGAVGV (KRAS G12V)
YVVAGPVGE

SEQ ID NO: 66465 - protein, 9 aa, synthetic construct
  source 1..9: note = Seed: LVVVGAVGV (KRAS G12V)
YVVAGPVGF

SEQ ID NO: 66466 - protein, 9 aa, synthetic construct
  source 1..9: note = Seed: LVVVGAVGV (KRAS G12V)
YVVAGPVGG

SEQ ID NO: 66467 - protein, 9 aa, synthetic construct
  source 1..9: note = Seed: LVVVGAVGV (KRAS G12V)
YVVAGPVGH

SEQ ID NO: 66468 - protein, 9 aa, synthetic construct
  source 1..9: note = Seed: LVVVGAVGV (KRAS G12V)
YVVAGPVGK

SEQ ID NO: 66469 - protein, 9 aa, synthetic construct
  source 1..9: note = Seed: LVVVGAVGV (KRAS G12V)
YVVAGPVGM

SEQ ID NO: 66470 - protein, 9 aa, synthetic construct
  source 1..9: note = Seed: LVVVGAVGV (KRAS G12V)
YVVAGPVGN

SEQ ID NO: 66471 - protein, 9 aa, synthetic construct
  source 1..9: note = Seed: LVVVGAVGV (KRAS G12V)
YVVAGPVGP

SEQ ID NO: 66472 - protein, 9 aa, synthetic construct
  source 1..9: note = Seed: LVVVGAVGV (KRAS G12V)
YVVAGPVGQ

SEQ ID NO: 66473 - protein, 9 aa, synthetic construct
  source 1..9: note = Seed: LVVVGAVGV (KRAS G12V)
YVVAGPVGR

SEQ ID NO: 66474 - protein, 9 aa, synthetic construct
  source 1..9: note = Seed: LVVVGAVGV (KRAS G12V)
YVVAGPVGS

SEQ ID NO: 66475 - protein, 9 aa, synthetic construct
  source 1..9: note = Seed: LVVVGAVGV (KRAS G12V)
YVVAGPVGT

SEQ ID NO: 66476 - protein, 9 aa, synthetic construct
  source 1..9: note = Seed: LVVVGAVGV (KRAS G12V)
YVVAGPVGW

SEQ ID NO: 66477 - protein, 9 aa, synthetic construct
  source 1..9: note = Seed: LVVVGAVGV (KRAS G12V)
YVVAGPVGY

SEQ ID NO: 66478 - protein, 9 aa, synthetic construct
  source 1..9: note = Seed: LVVVGAVGV (KRAS G12V)
YVVAGQVGA

SEQ ID NO: 66479 - protein, 9 aa, synthetic construct
  source 1..9: note = Seed: LVVVGAVGV (KRAS G12V)
YVVAGQVGC

SEQ ID NO: 66480 - protein, 9 aa, synthetic construct
  source 1..9: note = Seed: LVVVGAVGV (KRAS G12V)
YVVAGQVGD

SEQ ID NO: 66481 - protein, 9 aa, synthetic construct
  source 1..9: note = Seed: LVVVGAVGV (KRAS G12V)
YVVAGQVGE

SEQ ID NO: 66482 - protein, 9 aa, synthetic construct
  source 1..9: note = Seed: LVVVGAVGV (KRAS G12V)
YVVAGQVGF

SEQ ID NO: 66483 - protein, 9 aa, synthetic construct
  source 1..9: note = Seed: LVVVGAVGV (KRAS G12V)
YVVAGQVGG

SEQ ID NO: 66484 - protein, 9 aa, synthetic construct
  source 1..9: note = Seed: LVVVGAVGV (KRAS G12V)
YVVAGQVGH

SEQ ID NO: 66485 - protein, 9 aa, synthetic construct
  source 1..9: note = Seed: LVVVGAVGV (KRAS G12V)
YVVAGQVGI

SEQ ID NO: 66486 - protein, 9 aa, synthetic construct
  source 1..9: note = Seed: LVVVGAVGV (KRAS G12V)
YVVAGQVGK

SEQ ID NO: 66487 - protein, 9 aa, synthetic construct
  source 1..9: note = Seed: LVVVGAVGV (KRAS G12V)
YVVAGQVGL

SEQ ID NO: 66488 - protein, 9 aa, synthetic construct
  source 1..9: note = Seed: LVVVGAVGV (KRAS G12V)
YVVAGQVGM

SEQ ID NO: 66489 - protein, 9 aa, synthetic construct
  source 1..9: note = Seed: LVVVGAVGV (KRAS G12V)
YVVAGQVGN

SEQ ID NO: 66490 - protein, 9 aa, synthetic construct
  source 1..9: note = Seed: LVVVGAVGV (KRAS G12V)
YVVAGQVGQ

SEQ ID NO: 66491 - protein, 9 aa, synthetic construct
  source 1..9: note = Seed: LVVVGAVGV (KRAS G12V)
YVVAGQVGR

SEQ ID NO: 66492 - protein, 9 aa, synthetic construct
  source 1..9: note = Seed: LVVVGAVGV (KRAS G12V)
YVVAGQVGS

SEQ ID NO: 66493 - protein, 9 aa, synthetic construct
  source 1..9: note = Seed: LVVVGAVGV (KRAS G12V)
YVVAGQVGT

SEQ ID NO: 66494 - protein, 9 aa, synthetic construct
  source 1..9: note = Seed: LVVVGAVGV (KRAS G12V)
YVVAGQVGV

SEQ ID NO: 66495 - protein, 9 aa, synthetic construct
  source 1..9: note = Seed: LVVVGAVGV (KRAS G12V)
YVVAGQVGY

SEQ ID NO: 66496 - protein, 9 aa, synthetic construct
  source 1..9: note = Seed: LVVVGAVGV (KRAS G12V)
YVVAGRVGA

SEQ ID NO: 66497 - protein, 9 aa, synthetic construct
  source 1..9: note = Seed: LVVVGAVGV (KRAS G12V)
YVVAGRVGC

SEQ ID NO: 66498 - protein, 9 aa, synthetic construct
  source 1..9: note = Seed: LVVVGAVGV (KRAS G12V)
YVVAGRVGD

SEQ ID NO: 66499 - protein, 9 aa, synthetic construct
  source 1..9: note = Seed: LVVVGAVGV (KRAS G12V)
YVVAGRVGE

SEQ ID NO: 66500 - protein, 9 aa, synthetic construct
  source 1..9: note = Seed: LVVVGAVGV (KRAS G12V)
YVVAGRVGF

SEQ ID NO: 66501 - protein, 9 aa, synthetic construct
  source 1..9: note = Seed: LVVVGAVGV (KRAS G12V)
YVVAGRVGG

SEQ ID NO: 66502 - protein, 9 aa, synthetic construct
  source 1..9: note = Seed: LVVVGAVGV (KRAS G12V)
YVVAGRVGH

SEQ ID NO: 66503 - protein, 9 aa, synthetic construct
  source 1..9: note = Seed: LVVVGAVGV (KRAS G12V)
YVVAGRVGI

SEQ ID NO: 66504 - protein, 9 aa, synthetic construct
  source 1..9: note = Seed: LVVVGAVGV (KRAS G12V)
YVVAGRVGK

SEQ ID NO: 66505 - protein, 9 aa, synthetic construct
  source 1..9: note = Seed: LVVVGAVGV (KRAS G12V)
YVVAGRVGL

SEQ ID NO: 66506 - protein, 9 aa, synthetic construct
  source 1..9: note = Seed: LVVVGAVGV (KRAS G12V)
YVVAGRVGM

SEQ ID NO: 66507 - protein, 9 aa, synthetic construct
  source 1..9: note = Seed: LVVVGAVGV (KRAS G12V)
YVVAGRVGN

SEQ ID NO: 66508 - protein, 9 aa, synthetic construct
  source 1..9: note = Seed: LVVVGAVGV (KRAS G12V)
YVVAGRVGP

SEQ ID NO: 66509 - protein, 9 aa, synthetic construct
  source 1..9: note = Seed: LVVVGAVGV (KRAS G12V)
YVVAGRVGQ

SEQ ID NO: 66510 - protein, 9 aa, synthetic construct
  source 1..9: note = Seed: LVVVGAVGV (KRAS G12V)
YVVAGRVGR

SEQ ID NO: 66511 - protein, 9 aa, synthetic construct
  source 1..9: note = Seed: LVVVGAVGV (KRAS G12V)
YVVAGRVGS

SEQ ID NO: 66512 - protein, 9 aa, synthetic construct
  source 1..9: note = Seed: LVVVGAVGV (KRAS G12V)
YVVAGRVGT

SEQ ID NO: 66513 - protein, 9 aa, synthetic construct
  source 1..9: note = Seed: LVVVGAVGV (KRAS G12V)
YVVAGRVGV

SEQ ID NO: 66514 - protein, 9 aa, synthetic construct
  source 1..9: note = Seed: LVVVGAVGV (KRAS G12V)
YVVAGRVGY

SEQ ID NO: 66515 - protein, 9 aa, synthetic construct
  source 1..9: note = Seed: LVVVGAVGV (KRAS G12V)
YVVAGSVGC

SEQ ID NO: 66516 - protein, 9 aa, synthetic construct
  source 1..9: note = Seed: LVVVGAVGV (KRAS G12V)
YVVAGSVGD

SEQ ID NO: 66517 - protein, 9 aa, synthetic construct
  source 1..9: note = Seed: LVVVGAVGV (KRAS G12V)
YVVAGSVGE

SEQ ID NO: 66518 - protein, 9 aa, synthetic construct
  source 1..9: note = Seed: LVVVGAVGV (KRAS G12V)
YVVAGSVGF

SEQ ID NO: 66519 - protein, 9 aa, synthetic construct
  source 1..9: note = Seed: LVVVGAVGV (KRAS G12V)
YVVAGSVGG

SEQ ID NO: 66520 - protein, 9 aa, synthetic construct
  source 1..9: note = Seed: LVVVGAVGV (KRAS G12V)
YVVAGSVGH

SEQ ID NO: 66521 - protein, 9 aa, synthetic construct
  source 1..9: note = Seed: LVVVGAVGV (KRAS G12V)
YVVAGSVGK

SEQ ID NO: 66522 - protein, 9 aa, synthetic construct
  source 1..9: note = Seed: LVVVGAVGV (KRAS G12V)
YVVAGSVGM

SEQ ID NO: 66523 - protein, 9 aa, synthetic construct
  source 1..9: note = Seed: LVVVGAVGV (KRAS G12V)
YVVAGSVGN

SEQ ID NO: 66524 - protein, 9 aa, synthetic construct
  source 1..9: note = Seed: LVVVGAVGV (KRAS G12V)
YVVAGSVGP

SEQ ID NO: 66525 - protein, 9 aa, synthetic construct
  source 1..9: note = Seed: LVVVGAVGV (KRAS G12V)
YVVAGSVGQ

SEQ ID NO: 66526 - protein, 9 aa, synthetic construct
  source 1..9: note = Seed: LVVVGAVGV (KRAS G12V)
YVVAGSVGR

SEQ ID NO: 66527 - protein, 9 aa, synthetic construct
  source 1..9: note = Seed: LVVVGAVGV (KRAS G12V)
YVVAGSVGS

SEQ ID NO: 66528 - protein, 9 aa, synthetic construct
  source 1..9: note = Seed: LVVVGAVGV (KRAS G12V)
YVVAGSVGT

SEQ ID NO: 66529 - protein, 9 aa, synthetic construct
  source 1..9: note = Seed: LVVVGAVGV (KRAS G12V)
YVVAGSVGW

SEQ ID NO: 66530 - protein, 9 aa, synthetic construct
  source 1..9: note = Seed: LVVVGAVGV (KRAS G12V)
YVVAGSVGY

SEQ ID NO: 66531 - protein, 9 aa, synthetic construct
  source 1..9: note = Seed: LVVVGAVGV (KRAS G12V)
YVVAGTVGA

SEQ ID NO: 66532 - protein, 9 aa, synthetic construct
  source 1..9: note = Seed: LVVVGAVGV (KRAS G12V)
YVVAGTVGC

SEQ ID NO: 66533 - protein, 9 aa, synthetic construct
  source 1..9: note = Seed: LVVVGAVGV (KRAS G12V)
YVVAGTVGD

SEQ ID NO: 66534 - protein, 9 aa, synthetic construct
  source 1..9: note = Seed: LVVVGAVGV (KRAS G12V)
YVVAGTVGE

SEQ ID NO: 66535 - protein, 9 aa, synthetic construct
  source 1..9: note = Seed: LVVVGAVGV (KRAS G12V)
YVVAGTVGF

SEQ ID NO: 66536 - protein, 9 aa, synthetic construct
  source 1..9: note = Seed: LVVVGAVGV (KRAS G12V)
YVVAGTVGG

SEQ ID NO: 66537 - protein, 9 aa, synthetic construct
  source 1..9: note = Seed: LVVVGAVGV (KRAS G12V)
YVVAGTVGH

SEQ ID NO: 66538 - protein, 9 aa, synthetic construct
  source 1..9: note = Seed: LVVVGAVGV (KRAS G12V)
YVVAGTVGI

SEQ ID NO: 66539 - protein, 9 aa, synthetic construct
  source 1..9: note = Seed: LVVVGAVGV (KRAS G12V)
YVVAGTVGK

SEQ ID NO: 66540 - protein, 9 aa, synthetic construct
  source 1..9: note = Seed: LVVVGAVGV (KRAS G12V)
YVVAGTVGL

SEQ ID NO: 66541 - protein, 9 aa, synthetic construct
  source 1..9: note = Seed: LVVVGAVGV (KRAS G12V)
YVVAGTVGM

SEQ ID NO: 66542 - protein, 9 aa, synthetic construct
  source 1..9: note = Seed: LVVVGAVGV (KRAS G12V)
YVVAGTVGN

SEQ ID NO: 66543 - protein, 9 aa, synthetic construct
  source 1..9: note = Seed: LVVVGAVGV (KRAS G12V)
YVVAGTVGP

SEQ ID NO: 66544 - protein, 9 aa, synthetic construct
  source 1..9: note = Seed: LVVVGAVGV (KRAS G12V)
YVVAGTVGQ

SEQ ID NO: 66545 - protein, 9 aa, synthetic construct
  source 1..9: note = Seed: LVVVGAVGV (KRAS G12V)
YVVAGTVGR

SEQ ID NO: 66546 - protein, 9 aa, synthetic construct
  source 1..9: note = Seed: LVVVGAVGV (KRAS G12V)
YVVAGTVGS

SEQ ID NO: 66547 - protein, 9 aa, synthetic construct
  source 1..9: note = Seed: LVVVGAVGV (KRAS G12V)
YVVAGTVGT

SEQ ID NO: 66548 - protein, 9 aa, synthetic construct
  source 1..9: note = Seed: LVVVGAVGV (KRAS G12V)
YVVAGTVGV

SEQ ID NO: 66549 - protein, 9 aa, synthetic construct
  source 1..9: note = Seed: LVVVGAVGV (KRAS G12V)
YVVAGTVGW

SEQ ID NO: 66550 - protein, 9 aa, synthetic construct
  source 1..9: note = Seed: LVVVGAVGV (KRAS G12V)
YVVAGTVGY

SEQ ID NO: 66551 - protein, 9 aa, synthetic construct
  source 1..9: note = Seed: LVVVGAVGV (KRAS G12V)
YVVAGVVGA

SEQ ID NO: 66552 - protein, 9 aa, synthetic construct
  source 1..9: note = Seed: LVVVGAVGV (KRAS G12V)
YVVAGVVGC

SEQ ID NO: 66553 - protein, 9 aa, synthetic construct
  source 1..9: note = Seed: LVVVGAVGV (KRAS G12V)
YVVAGVVGD

SEQ ID NO: 66554 - protein, 9 aa, synthetic construct
  source 1..9: note = Seed: LVVVGAVGV (KRAS G12V)
YVVAGVVGE

SEQ ID NO: 66555 - protein, 9 aa, synthetic construct
  source 1..9: note = Seed: LVVVGAVGV (KRAS G12V)
YVVAGVVGF

SEQ ID NO: 66556 - protein, 9 aa, synthetic construct
  source 1..9: note = Seed: LVVVGAVGV (KRAS G12V)
YVVAGVVGG

SEQ ID NO: 66557 - protein, 9 aa, synthetic construct
  source 1..9: note = Seed: LVVVGAVGV (KRAS G12V)
YVVAGVVGH

SEQ ID NO: 66558 - protein, 9 aa, synthetic construct
  source 1..9: note = Seed: LVVVGAVGV (KRAS G12V)
YVVAGVVGI

SEQ ID NO: 66559 - protein, 9 aa, synthetic construct
  source 1..9: note = Seed: LVVVGAVGV (KRAS G12V)
YVVAGVVGK

SEQ ID NO: 66560 - protein, 9 aa, synthetic construct
  source 1..9: note = Seed: LVVVGAVGV (KRAS G12V)
YVVAGVVGL

SEQ ID NO: 66561 - protein, 9 aa, synthetic construct
  source 1..9: note = Seed: LVVVGAVGV (KRAS G12V)
YVVAGVVGM

SEQ ID NO: 66562 - protein, 9 aa, synthetic construct
  source 1..9: note = Seed: LVVVGAVGV (KRAS G12V)
YVVAGVVGN

SEQ ID NO: 66563 - protein, 9 aa, synthetic construct
  source 1..9: note = Seed: LVVVGAVGV (KRAS G12V)
YVVAGVVGP

SEQ ID NO: 66564 - protein, 9 aa, synthetic construct
  source 1..9: note = Seed: LVVVGAVGV (KRAS G12V)
YVVAGVVGQ

SEQ ID NO: 66565 - protein, 9 aa, synthetic construct
  source 1..9: note = Seed: LVVVGAVGV (KRAS G12V)
YVVAGVVGR

SEQ ID NO: 66566 - protein, 9 aa, synthetic construct
  source 1..9: note = Seed: LVVVGAVGV (KRAS G12V)
YVVAGVVGS

SEQ ID NO: 66567 - protein, 9 aa, synthetic construct
  source 1..9: note = Seed: LVVVGAVGV (KRAS G12V)
YVVAGVVGT

SEQ ID NO: 66568 - protein, 9 aa, synthetic construct
  source 1..9: note = Seed: LVVVGAVGV (KRAS G12V)
YVVAGVVGV

SEQ ID NO: 66569 - protein, 9 aa, synthetic construct
  source 1..9: note = Seed: LVVVGAVGV (KRAS G12V)
YVVAGVVGW

SEQ ID NO: 66570 - protein, 9 aa, synthetic construct
  source 1..9: note = Seed: LVVVGAVGV (KRAS G12V)
YVVAGVVGY

SEQ ID NO: 66571 - protein, 9 aa, synthetic construct
  source 1..9: note = Seed: LVVVGAVGV (KRAS G12V)
YVVAGWVGA

SEQ ID NO: 66572 - protein, 9 aa, synthetic construct
  source 1..9: note = Seed: LVVVGAVGV (KRAS G12V)
YVVAGWVGC

SEQ ID NO: 66573 - protein, 9 aa, synthetic construct
  source 1..9: note = Seed: LVVVGAVGV (KRAS G12V)
YVVAGWVGI

SEQ ID NO: 66574 - protein, 9 aa, synthetic construct
  source 1..9: note = Seed: LVVVGAVGV (KRAS G12V)
YVVAGWVGL

SEQ ID NO: 66575 - protein, 9 aa, synthetic construct
  source 1..9: note = Seed: LVVVGAVGV (KRAS G12V)
YVVAGWVGM

SEQ ID NO: 66576 - protein, 9 aa, synthetic construct
  source 1..9: note = Seed: LVVVGAVGV (KRAS G12V)
YVVAGWVGN

SEQ ID NO: 66577 - protein, 9 aa, synthetic construct
  source 1..9: note = Seed: LVVVGAVGV (KRAS G12V)
YVVAGWVGR

SEQ ID NO: 66578 - protein, 9 aa, synthetic construct
  source 1..9: note = Seed: LVVVGAVGV (KRAS G12V)
YVVAGWVGS

SEQ ID NO: 66579 - protein, 9 aa, synthetic construct
  source 1..9: note = Seed: LVVVGAVGV (KRAS G12V)
YVVAGWVGT

SEQ ID NO: 66580 - protein, 9 aa, synthetic construct
  source 1..9: note = Seed: LVVVGAVGV (KRAS G12V)
YVVAGWVGV

SEQ ID NO: 66581 - protein, 9 aa, synthetic construct
  source 1..9: note = Seed: LVVVGAVGV (KRAS G12V)
YVVAGYVGA

SEQ ID NO: 66582 - protein, 9 aa, synthetic construct
  source 1..9: note = Seed: LVVVGAVGV (KRAS G12V)
YVVAGYVGG

SEQ ID NO: 66583 - protein, 9 aa, synthetic construct
  source 1..9: note = Seed: LVVVGAVGV (KRAS G12V)
YVVAGYVGI

SEQ ID NO: 66584 - protein, 9 aa, synthetic construct
  source 1..9: note = Seed: LVVVGAVGV (KRAS G12V)
YVVAGYVGL

SEQ ID NO: 66585 - protein, 9 aa, synthetic construct
  source 1..9: note = Seed: LVVVGAVGV (KRAS G12V)
YVVAGYVGM

SEQ ID NO: 66586 - protein, 9 aa, synthetic construct
  source 1..9: note = Seed: LVVVGAVGV (KRAS G12V)
YVVAGYVGN

SEQ ID NO: 66587 - protein, 9 aa, synthetic construct
  source 1..9: note = Seed: LVVVGAVGV (KRAS G12V)
YVVAGYVGQ

SEQ ID NO: 66588 - protein, 9 aa, synthetic construct
  source 1..9: note = Seed: LVVVGAVGV (KRAS G12V)
YVVAGYVGS

SEQ ID NO: 66589 - protein, 9 aa, synthetic construct
  source 1..9: note = Seed: LVVVGAVGV (KRAS G12V)
YVVAGYVGT

SEQ ID NO: 66590 - protein, 9 aa, synthetic construct
  source 1..9: note = Seed: LVVVGAVGV (KRAS G12V)
YVVAGYVGV

SEQ ID NO: 66591 - protein, 9 aa, synthetic construct
  source 1..9: note = Seed: LVVVGAVGV (KRAS G12V)
YVVCGAVGA

SEQ ID NO: 66592 - protein, 9 aa, synthetic construct
  source 1..9: note = Seed: LVVVGAVGV (KRAS G12V)
YVVCGAVGF

SEQ ID NO: 66593 - protein, 9 aa, synthetic construct
  source 1..9: note = Seed: LVVVGAVGV (KRAS G12V)
YVVCGAVGG

SEQ ID NO: 66594 - protein, 9 aa, synthetic construct
  source 1..9: note = Seed: LVVVGAVGV (KRAS G12V)
YVVCGAVGH

SEQ ID NO: 66595 - protein, 9 aa, synthetic construct
  source 1..9: note = Seed: LVVVGAVGV (KRAS G12V)
YVVCGAVGI

SEQ ID NO: 66596 - protein, 9 aa, synthetic construct
  source 1..9: note = Seed: LVVVGAVGV (KRAS G12V)
YVVCGAVGL

SEQ ID NO: 66597 - protein, 9 aa, synthetic construct
  source 1..9: note = Seed: LVVVGAVGV (KRAS G12V)
YVVCGAVGM

SEQ ID NO: 66598 - protein, 9 aa, synthetic construct
  source 1..9: note = Seed: LVVVGAVGV (KRAS G12V)
YVVCGAVGN

SEQ ID NO: 66599 - protein, 9 aa, synthetic construct
  source 1..9: note = Seed: LVVVGAVGV (KRAS G12V)
YVVCGAVGP

SEQ ID NO: 66600 - protein, 9 aa, synthetic construct
  source 1..9: note = Seed: LVVVGAVGV (KRAS G12V)
YVVCGAVGQ

SEQ ID NO: 66601 - protein, 9 aa, synthetic construct
  source 1..9: note = Seed: LVVVGAVGV (KRAS G12V)
YVVCGAVGR

SEQ ID NO: 66602 - protein, 9 aa, synthetic construct
  source 1..9: note = Seed: LVVVGAVGV (KRAS G12V)
YVVCGAVGS

SEQ ID NO: 66603 - protein, 9 aa, synthetic construct
  source 1..9: note = Seed: LVVVGAVGV (KRAS G12V)
YVVCGAVGT

SEQ ID NO: 66604 - protein, 9 aa, synthetic construct
  source 1..9: note = Seed: LVVVGAVGV (KRAS G12V)
YVVCGAVGV

SEQ ID NO: 66605 - protein, 9 aa, synthetic construct
  source 1..9: note = Seed: LVVVGAVGV (KRAS G12V)
YVVCGAVGY

SEQ ID NO: 66606 - protein, 9 aa, synthetic construct
  source 1..9: note = Seed: LVVVGAVGV (KRAS G12V)
YVVCGGVGA

SEQ ID NO: 66607 - protein, 9 aa, synthetic construct
  source 1..9: note = Seed: LVVVGAVGV (KRAS G12V)
YVVCGGVGF

SEQ ID NO: 66608 - protein, 9 aa, synthetic construct
  source 1..9: note = Seed: LVVVGAVGV (KRAS G12V)
YVVCGGVGI

SEQ ID NO: 66609 - protein, 9 aa, synthetic construct
  source 1..9: note = Seed: LVVVGAVGV (KRAS G12V)
YVVCGGVGL

SEQ ID NO: 66610 - protein, 9 aa, synthetic construct
  source 1..9: note = Seed: LVVVGAVGV (KRAS G12V)
YVVCGGVGM

SEQ ID NO: 66611 - protein, 9 aa, synthetic construct
  source 1..9: note = Seed: LVVVGAVGV (KRAS G12V)
YVVCGGVGS

SEQ ID NO: 66612 - protein, 9 aa, synthetic construct
  source 1..9: note = Seed: LVVVGAVGV (KRAS G12V)
YVVCGGVGT

SEQ ID NO: 66613 - protein, 9 aa, synthetic construct
  source 1..9: note = Seed: LVVVGAVGV (KRAS G12V)
YVVCGGVGV

SEQ ID NO: 66614 - protein, 9 aa, synthetic construct
  source 1..9: note = Seed: LVVVGAVGV (KRAS G12V)
YVVCGKVGA

SEQ ID NO: 66615 - protein, 9 aa, synthetic construct
  source 1..9: note = Seed: LVVVGAVGV (KRAS G12V)
YVVCGKVGS

SEQ ID NO: 66616 - protein, 9 aa, synthetic construct
  source 1..9: note = Seed: LVVVGAVGV (KRAS G12V)
YVVCGNVGA

SEQ ID NO: 66617 - protein, 9 aa, synthetic construct
  source 1..9: note = Seed: LVVVGAVGV (KRAS G12V)
YVVCGNVGI

SEQ ID NO: 66618 - protein, 9 aa, synthetic construct
  source 1..9: note = Seed: LVVVGAVGV (KRAS G12V)
YVVCGNVGL

SEQ ID NO: 66619 - protein, 9 aa, synthetic construct
  source 1..9: note = Seed: LVVVGAVGV (KRAS G12V)
YVVCGNVGM

SEQ ID NO: 66620 - protein, 9 aa, synthetic construct
  source 1..9: note = Seed: LVVVGAVGV (KRAS G12V)
YVVCGNVGS

SEQ ID NO: 66621 - protein, 9 aa, synthetic construct
  source 1..9: note = Seed: LVVVGAVGV (KRAS G12V)
YVVCGNVGT

SEQ ID NO: 66622 - protein, 9 aa, synthetic construct
  source 1..9: note = Seed: LVVVGAVGV (KRAS G12V)
YVVCGNVGV

SEQ ID NO: 66623 - protein, 9 aa, synthetic construct
  source 1..9: note = Seed: LVVVGAVGV (KRAS G12V)
YVVCGPVGA

SEQ ID NO: 66624 - protein, 9 aa, synthetic construct
  source 1..9: note = Seed: LVVVGAVGV (KRAS G12V)
YVVCGPVGF

SEQ ID NO: 66625 - protein, 9 aa, synthetic construct
  source 1..9: note = Seed: LVVVGAVGV (KRAS G12V)
YVVCGPVGG

SEQ ID NO: 66626 - protein, 9 aa, synthetic construct
  source 1..9: note = Seed: LVVVGAVGV (KRAS G12V)
YVVCGPVGI

SEQ ID NO: 66627 - protein, 9 aa, synthetic construct
  source 1..9: note = Seed: LVVVGAVGV (KRAS G12V)
YVVCGPVGL

SEQ ID NO: 66628 - protein, 9 aa, synthetic construct
  source 1..9: note = Seed: LVVVGAVGV (KRAS G12V)
YVVCGPVGM

SEQ ID NO: 66629 - protein, 9 aa, synthetic construct
  source 1..9: note = Seed: LVVVGAVGV (KRAS G12V)
YVVCGPVGN

SEQ ID NO: 66630 - protein, 9 aa, synthetic construct
  source 1..9: note = Seed: LVVVGAVGV (KRAS G12V)
YVVCGPVGS

SEQ ID NO: 66631 - protein, 9 aa, synthetic construct
  source 1..9: note = Seed: LVVVGAVGV (KRAS G12V)
YVVCGPVGT

SEQ ID NO: 66632 - protein, 9 aa, synthetic construct
  source 1..9: note = Seed: LVVVGAVGV (KRAS G12V)
YVVCGPVGV

SEQ ID NO: 66633 - protein, 9 aa, synthetic construct
  source 1..9: note = Seed: LVVVGAVGV (KRAS G12V)
YVVCGRVGA

SEQ ID NO: 66634 - protein, 9 aa, synthetic construct
  source 1..9: note = Seed: LVVVGAVGV (KRAS G12V)
YVVCGRVGQ

SEQ ID NO: 66635 - protein, 9 aa, synthetic construct
  source 1..9: note = Seed: LVVVGAVGV (KRAS G12V)
YVVCGRVGS

SEQ ID NO: 66636 - protein, 9 aa, synthetic construct
  source 1..9: note = Seed: LVVVGAVGV (KRAS G12V)
YVVCGSVGA

SEQ ID NO: 66637 - protein, 9 aa, synthetic construct
  source 1..9: note = Seed: LVVVGAVGV (KRAS G12V)
YVVCGSVGF

SEQ ID NO: 66638 - protein, 9 aa, synthetic construct
  source 1..9: note = Seed: LVVVGAVGV (KRAS G12V)
YVVCGSVGG

SEQ ID NO: 66639 - protein, 9 aa, synthetic construct
  source 1..9: note = Seed: LVVVGAVGV (KRAS G12V)
YVVCGSVGI

SEQ ID NO: 66640 - protein, 9 aa, synthetic construct
  source 1..9: note = Seed: LVVVGAVGV (KRAS G12V)
YVVCGSVGL

SEQ ID NO: 66641 - protein, 9 aa, synthetic construct
  source 1..9: note = Seed: LVVVGAVGV (KRAS G12V)
YVVCGSVGM

SEQ ID NO: 66642 - protein, 9 aa, synthetic construct
  source 1..9: note = Seed: LVVVGAVGV (KRAS G12V)
YVVCGSVGN

SEQ ID NO: 66643 - protein, 9 aa, synthetic construct
  source 1..9: note = Seed: LVVVGAVGV (KRAS G12V)
YVVCGSVGS

SEQ ID NO: 66644 - protein, 9 aa, synthetic construct
  source 1..9: note = Seed: LVVVGAVGV (KRAS G12V)
YVVCGSVGT

SEQ ID NO: 66645 - protein, 9 aa, synthetic construct
  source 1..9: note = Seed: LVVVGAVGV (KRAS G12V)
YVVCGSVGV

SEQ ID NO: 66646 - protein, 9 aa, synthetic construct
  source 1..9: note = Seed: LVVVGAVGV (KRAS G12V)
YVVCGTVGA

SEQ ID NO: 66647 - protein, 9 aa, synthetic construct
  source 1..9: note = Seed: LVVVGAVGV (KRAS G12V)
YVVCGTVGI

SEQ ID NO: 66648 - protein, 9 aa, synthetic construct
  source 1..9: note = Seed: LVVVGAVGV (KRAS G12V)
YVVCGTVGL

SEQ ID NO: 66649 - protein, 9 aa, synthetic construct
  source 1..9: note = Seed: LVVVGAVGV (KRAS G12V)
YVVCGTVGM

SEQ ID NO: 66650 - protein, 9 aa, synthetic construct
  source 1..9: note = Seed: LVVVGAVGV (KRAS G12V)
YVVCGTVGS

SEQ ID NO: 66651 - protein, 9 aa, synthetic construct
  source 1..9: note = Seed: LVVVGAVGV (KRAS G12V)
YVVCGTVGT

SEQ ID NO: 66652 - protein, 9 aa, synthetic construct
  source 1..9: note = Seed: LVVVGAVGV (KRAS G12V)
YVVCGTVGV

SEQ ID NO: 66653 - protein, 9 aa, synthetic construct
  source 1..9: note = Seed: LVVVGAVGV (KRAS G12V)
YVVCGVVGA

SEQ ID NO: 66654 - protein, 9 aa, synthetic construct
  source 1..9: note = Seed: LVVVGAVGV (KRAS G12V)
YVVCGVVGI

SEQ ID NO: 66655 - protein, 9 aa, synthetic construct
  source 1..9: note = Seed: LVVVGAVGV (KRAS G12V)
YVVCGVVGL

SEQ ID NO: 66656 - protein, 9 aa, synthetic construct
  source 1..9: note = Seed: LVVVGAVGV (KRAS G12V)
YVVCGVVGM

SEQ ID NO: 66657 - protein, 9 aa, synthetic construct
  source 1..9: note = Seed: LVVVGAVGV (KRAS G12V)
YVVCGVVGV

SEQ ID NO: 66658 - protein, 9 aa, synthetic construct
  source 1..9: note = Seed: LVVVGAVGV (KRAS G12V)
YVVDGAVGA

SEQ ID NO: 66659 - protein, 9 aa, synthetic construct
  source 1..9: note = Seed: LVVVGAVGV (KRAS G12V)
YVVDGAVGF

SEQ ID NO: 66660 - protein, 9 aa, synthetic construct
  source 1..9: note = Seed: LVVVGAVGV (KRAS G12V)
YVVDGAVGI

SEQ ID NO: 66661 - protein, 9 aa, synthetic construct
  source 1..9: note = Seed: LVVVGAVGV (KRAS G12V)
YVVDGAVGL

SEQ ID NO: 66662 - protein, 9 aa, synthetic construct
  source 1..9: note = Seed: LVVVGAVGV (KRAS G12V)
YVVDGAVGM

SEQ ID NO: 66663 - protein, 9 aa, synthetic construct
  source 1..9: note = Seed: LVVVGAVGV (KRAS G12V)
YVVDGAVGN

SEQ ID NO: 66664 - protein, 9 aa, synthetic construct
  source 1..9: note = Seed: LVVVGAVGV (KRAS G12V)
YVVDGAVGQ

SEQ ID NO: 66665 - protein, 9 aa, synthetic construct
  source 1..9: note = Seed: LVVVGAVGV (KRAS G12V)
YVVDGAVGS

SEQ ID NO: 66666 - protein, 9 aa, synthetic construct
  source 1..9: note = Seed: LVVVGAVGV (KRAS G12V)
YVVDGAVGT

SEQ ID NO: 66667 - protein, 9 aa, synthetic construct
  source 1..9: note = Seed: LVVVGAVGV (KRAS G12V)
YVVDGAVGV

SEQ ID NO: 66668 - protein, 9 aa, synthetic construct
  source 1..9: note = Seed: LVVVGAVGV (KRAS G12V)
YVVDGAVGY

SEQ ID NO: 66669 - protein, 9 aa, synthetic construct
  source 1..9: note = Seed: LVVVGAVGV (KRAS G12V)
YVVDGDVGA

SEQ ID NO: 66670 - protein, 9 aa, synthetic construct
  source 1..9: note = Seed: LVVVGAVGV (KRAS G12V)
YVVDGDVGS

SEQ ID NO: 66671 - protein, 9 aa, synthetic construct
  source 1..9: note = Seed: LVVVGAVGV (KRAS G12V)
YVVDGGVGA

SEQ ID NO: 66672 - protein, 9 aa, synthetic construct
  source 1..9: note = Seed: LVVVGAVGV (KRAS G12V)
YVVDGGVGI

SEQ ID NO: 66673 - protein, 9 aa, synthetic construct
  source 1..9: note = Seed: LVVVGAVGV (KRAS G12V)
YVVDGGVGL

SEQ ID NO: 66674 - protein, 9 aa, synthetic construct
  source 1..9: note = Seed: LVVVGAVGV (KRAS G12V)
YVVDGGVGV

SEQ ID NO: 66675 - protein, 9 aa, synthetic construct
  source 1..9: note = Seed: LVVVGAVGV (KRAS G12V)
YVVDGIVGA

SEQ ID NO: 66676 - protein, 9 aa, synthetic construct
  source 1..9: note = Seed: LVVVGAVGV (KRAS G12V)
YVVDGIVGS

SEQ ID NO: 66677 - protein, 9 aa, synthetic construct
  source 1..9: note = Seed: LVVVGAVGV (KRAS G12V)
YVVDGNVGA

SEQ ID NO: 66678 - protein, 9 aa, synthetic construct
  source 1..9: note = Seed: LVVVGAVGV (KRAS G12V)
YVVDGNVGF

SEQ ID NO: 66679 - protein, 9 aa, synthetic construct
  source 1..9: note = Seed: LVVVGAVGV (KRAS G12V)
YVVDGNVGG

SEQ ID NO: 66680 - protein, 9 aa, synthetic construct
  source 1..9: note = Seed: LVVVGAVGV (KRAS G12V)
YVVDGNVGH

SEQ ID NO: 66681 - protein, 9 aa, synthetic construct
  source 1..9: note = Seed: LVVVGAVGV (KRAS G12V)
YVVDGNVGI

SEQ ID NO: 66682 - protein, 9 aa, synthetic construct
  source 1..9: note = Seed: LVVVGAVGV (KRAS G12V)
YVVDGNVGL

SEQ ID NO: 66683 - protein, 9 aa, synthetic construct
  source 1..9: note = Seed: LVVVGAVGV (KRAS G12V)
YVVDGNVGM

SEQ ID NO: 66684 - protein, 9 aa, synthetic construct
  source 1..9: note = Seed: LVVVGAVGV (KRAS G12V)
YVVDGNVGN

SEQ ID NO: 66685 - protein, 9 aa, synthetic construct
  source 1..9: note = Seed: LVVVGAVGV (KRAS G12V)
YVVDGNVGP

SEQ ID NO: 66686 - protein, 9 aa, synthetic construct
  source 1..9: note = Seed: LVVVGAVGV (KRAS G12V)
YVVDGNVGQ

SEQ ID NO: 66687 - protein, 9 aa, synthetic construct
  source 1..9: note = Seed: LVVVGAVGV (KRAS G12V)
YVVDGNVGS

SEQ ID NO: 66688 - protein, 9 aa, synthetic construct
  source 1..9: note = Seed: LVVVGAVGV (KRAS G12V)
YVVDGNVGT

SEQ ID NO: 66689 - protein, 9 aa, synthetic construct
  source 1..9: note = Seed: LVVVGAVGV (KRAS G12V)
YVVDGNVGV

SEQ ID NO: 66690 - protein, 9 aa, synthetic construct
  source 1..9: note = Seed: LVVVGAVGV (KRAS G12V)
YVVDGNVGY

SEQ ID NO: 66691 - protein, 9 aa, synthetic construct
  source 1..9: note = Seed: LVVVGAVGV (KRAS G12V)
YVVDGPVGA

SEQ ID NO: 66692 - protein, 9 aa, synthetic construct
  source 1..9: note = Seed: LVVVGAVGV (KRAS G12V)
YVVDGPVGI

SEQ ID NO: 66693 - protein, 9 aa, synthetic construct
  source 1..9: note = Seed: LVVVGAVGV (KRAS G12V)
YVVDGPVGL

SEQ ID NO: 66694 - protein, 9 aa, synthetic construct
  source 1..9: note = Seed: LVVVGAVGV (KRAS G12V)
YVVDGPVGV

SEQ ID NO: 66695 - protein, 9 aa, synthetic construct
  source 1..9: note = Seed: LVVVGAVGV (KRAS G12V)
YVVDGSVGA

SEQ ID NO: 66696 - protein, 9 aa, synthetic construct
  source 1..9: note = Seed: LVVVGAVGV (KRAS G12V)
YVVDGSVGI

SEQ ID NO: 66697 - protein, 9 aa, synthetic construct
  source 1..9: note = Seed: LVVVGAVGV (KRAS G12V)
YVVDGSVGL

SEQ ID NO: 66698 - protein, 9 aa, synthetic construct
  source 1..9: note = Seed: LVVVGAVGV (KRAS G12V)
YVVDGSVGM

SEQ ID NO: 66699 - protein, 9 aa, synthetic construct
  source 1..9: note = Seed: LVVVGAVGV (KRAS G12V)
YVVDGSVGN

SEQ ID NO: 66700 - protein, 9 aa, synthetic construct
  source 1..9: note = Seed: LVVVGAVGV (KRAS G12V)
YVVDGSVGQ

SEQ ID NO: 66701 - protein, 9 aa, synthetic construct
  source 1..9: note = Seed: LVVVGAVGV (KRAS G12V)
YVVDGSVGS

SEQ ID NO: 66702 - protein, 9 aa, synthetic construct
  source 1..9: note = Seed: LVVVGAVGV (KRAS G12V)
YVVDGSVGT

SEQ ID NO: 66703 - protein, 9 aa, synthetic construct
  source 1..9: note = Seed: LVVVGAVGV (KRAS G12V)
YVVDGSVGV

SEQ ID NO: 66704 - protein, 9 aa, synthetic construct
  source 1..9: note = Seed: LVVVGAVGV (KRAS G12V)
YVVDGTVGA

SEQ ID NO: 66705 - protein, 9 aa, synthetic construct
  source 1..9: note = Seed: LVVVGAVGV (KRAS G12V)
YVVDGTVGG

SEQ ID NO: 66706 - protein, 9 aa, synthetic construct
  source 1..9: note = Seed: LVVVGAVGV (KRAS G12V)
YVVDGTVGH

SEQ ID NO: 66707 - protein, 9 aa, synthetic construct
  source 1..9: note = Seed: LVVVGAVGV (KRAS G12V)
YVVDGTVGI

SEQ ID NO: 66708 - protein, 9 aa, synthetic construct
  source 1..9: note = Seed: LVVVGAVGV (KRAS G12V)
YVVDGTVGL

SEQ ID NO: 66709 - protein, 9 aa, synthetic construct
  source 1..9: note = Seed: LVVVGAVGV (KRAS G12V)
YVVDGTVGM

SEQ ID NO: 66710 - protein, 9 aa, synthetic construct
  source 1..9: note = Seed: LVVVGAVGV (KRAS G12V)
YVVDGTVGN

SEQ ID NO: 66711 - protein, 9 aa, synthetic construct
  source 1..9: note = Seed: LVVVGAVGV (KRAS G12V)
YVVDGTVGQ

SEQ ID NO: 66712 - protein, 9 aa, synthetic construct
  source 1..9: note = Seed: LVVVGAVGV (KRAS G12V)
YVVDGTVGS

SEQ ID NO: 66713 - protein, 9 aa, synthetic construct
  source 1..9: note = Seed: LVVVGAVGV (KRAS G12V)
YVVDGTVGT

SEQ ID NO: 66714 - protein, 9 aa, synthetic construct
  source 1..9: note = Seed: LVVVGAVGV (KRAS G12V)
YVVDGTVGV

SEQ ID NO: 66715 - protein, 9 aa, synthetic construct
  source 1..9: note = Seed: LVVVGAVGV (KRAS G12V)
YVVDGVVGA

SEQ ID NO: 66716 - protein, 9 aa, synthetic construct
  source 1..9: note = Seed: LVVVGAVGV (KRAS G12V)
YVVDGVVGG

SEQ ID NO: 66717 - protein, 9 aa, synthetic construct
  source 1..9: note = Seed: LVVVGAVGV (KRAS G12V)
YVVDGVVGH

SEQ ID NO: 66718 - protein, 9 aa, synthetic construct
  source 1..9: note = Seed: LVVVGAVGV (KRAS G12V)
YVVDGVVGI

SEQ ID NO: 66719 - protein, 9 aa, synthetic construct
  source 1..9: note = Seed: LVVVGAVGV (KRAS G12V)
YVVDGVVGQ

SEQ ID NO: 66720 - protein, 9 aa, synthetic construct
  source 1..9: note = Seed: LVVVGAVGV (KRAS G12V)
YVVDGVVGS

SEQ ID NO: 66721 - protein, 9 aa, synthetic construct
  source 1..9: note = Seed: LVVVGAVGV (KRAS G12V)
YVVEGAVGA

SEQ ID NO: 66722 - protein, 9 aa, synthetic construct
  source 1..9: note = Seed: LVVVGAVGV (KRAS G12V)
YVVEGAVGC

SEQ ID NO: 66723 - protein, 9 aa, synthetic construct
  source 1..9: note = Seed: LVVVGAVGV (KRAS G12V)
YVVEGAVGF

SEQ ID NO: 66724 - protein, 9 aa, synthetic construct
  source 1..9: note = Seed: LVVVGAVGV (KRAS G12V)
YVVEGAVGG

SEQ ID NO: 66725 - protein, 9 aa, synthetic construct
  source 1..9: note = Seed: LVVVGAVGV (KRAS G12V)
YVVEGAVGH

SEQ ID NO: 66726 - protein, 9 aa, synthetic construct
  source 1..9: note = Seed: LVVVGAVGV (KRAS G12V)
YVVEGAVGI

SEQ ID NO: 66727 - protein, 9 aa, synthetic construct
  source 1..9: note = Seed: LVVVGAVGV (KRAS G12V)
YVVEGAVGK

SEQ ID NO: 66728 - protein, 9 aa, synthetic construct
  source 1..9: note = Seed: LVVVGAVGV (KRAS G12V)
YVVEGAVGL

SEQ ID NO: 66729 - protein, 9 aa, synthetic construct
  source 1..9: note = Seed: LVVVGAVGV (KRAS G12V)
YVVEGAVGM

SEQ ID NO: 66730 - protein, 9 aa, synthetic construct
  source 1..9: note = Seed: LVVVGAVGV (KRAS G12V)
YVVEGAVGN

SEQ ID NO: 66731 - protein, 9 aa, synthetic construct
  source 1..9: note = Seed: LVVVGAVGV (KRAS G12V)
YVVEGAVGP

SEQ ID NO: 66732 - protein, 9 aa, synthetic construct
  source 1..9: note = Seed: LVVVGAVGV (KRAS G12V)
YVVEGAVGQ

SEQ ID NO: 66733 - protein, 9 aa, synthetic construct
  source 1..9: note = Seed: LVVVGAVGV (KRAS G12V)
YVVEGAVGR

SEQ ID NO: 66734 - protein, 9 aa, synthetic construct
  source 1..9: note = Seed: LVVVGAVGV (KRAS G12V)
YVVEGAVGS

SEQ ID NO: 66735 - protein, 9 aa, synthetic construct
  source 1..9: note = Seed: LVVVGAVGV (KRAS G12V)
YVVEGAVGT

SEQ ID NO: 66736 - protein, 9 aa, synthetic construct
  source 1..9: note = Seed: LVVVGAVGV (KRAS G12V)
YVVEGAVGV

SEQ ID NO: 66737 - protein, 9 aa, synthetic construct
  source 1..9: note = Seed: LVVVGAVGV (KRAS G12V)
YVVEGAVGY

SEQ ID NO: 66738 - protein, 9 aa, synthetic construct
  source 1..9: note = Seed: LVVVGAVGV (KRAS G12V)
YVVEGFVGI

SEQ ID NO: 66739 - protein, 9 aa, synthetic construct
  source 1..9: note = Seed: LVVVGAVGV (KRAS G12V)
YVVEGFVGL

SEQ ID NO: 66740 - protein, 9 aa, synthetic construct
  source 1..9: note = Seed: LVVVGAVGV (KRAS G12V)
YVVEGFVGM

SEQ ID NO: 66741 - protein, 9 aa, synthetic construct
  source 1..9: note = Seed: LVVVGAVGV (KRAS G12V)
YVVEGFVGV

SEQ ID NO: 66742 - protein, 9 aa, synthetic construct
  source 1..9: note = Seed: LVVVGAVGV (KRAS G12V)
YVVEGGVGA

SEQ ID NO: 66743 - protein, 9 aa, synthetic construct
  source 1..9: note = Seed: LVVVGAVGV (KRAS G12V)
YVVEGGVGC

SEQ ID NO: 66744 - protein, 9 aa, synthetic construct
  source 1..9: note = Seed: LVVVGAVGV (KRAS G12V)
YVVEGGVGF

SEQ ID NO: 66745 - protein, 9 aa, synthetic construct
  source 1..9: note = Seed: LVVVGAVGV (KRAS G12V)
YVVEGGVGG

SEQ ID NO: 66746 - protein, 9 aa, synthetic construct
  source 1..9: note = Seed: LVVVGAVGV (KRAS G12V)
YVVEGGVGH

SEQ ID NO: 66747 - protein, 9 aa, synthetic construct
  source 1..9: note = Seed: LVVVGAVGV (KRAS G12V)
YVVEGGVGI

SEQ ID NO: 66748 - protein, 9 aa, synthetic construct
  source 1..9: note = Seed: LVVVGAVGV (KRAS G12V)
YVVEGGVGL

SEQ ID NO: 66749 - protein, 9 aa, synthetic construct
  source 1..9: note = Seed: LVVVGAVGV (KRAS G12V)
YVVEGGVGM

SEQ ID NO: 66750 - protein, 9 aa, synthetic construct
  source 1..9: note = Seed: LVVVGAVGV (KRAS G12V)
YVVEGGVGN

SEQ ID NO: 66751 - protein, 9 aa, synthetic construct
  source 1..9: note = Seed: LVVVGAVGV (KRAS G12V)
YVVEGGVGP

SEQ ID NO: 66752 - protein, 9 aa, synthetic construct
  source 1..9: note = Seed: LVVVGAVGV (KRAS G12V)
YVVEGGVGQ

SEQ ID NO: 66753 - protein, 9 aa, synthetic construct
  source 1..9: note = Seed: LVVVGAVGV (KRAS G12V)
YVVEGGVGS

SEQ ID NO: 66754 - protein, 9 aa, synthetic construct
  source 1..9: note = Seed: LVVVGAVGV (KRAS G12V)
YVVEGGVGT

SEQ ID NO: 66755 - protein, 9 aa, synthetic construct
  source 1..9: note = Seed: LVVVGAVGV (KRAS G12V)
YVVEGGVGV

SEQ ID NO: 66756 - protein, 9 aa, synthetic construct
  source 1..9: note = Seed: LVVVGAVGV (KRAS G12V)
YVVEGHVGI

SEQ ID NO: 66757 - protein, 9 aa, synthetic construct
  source 1..9: note = Seed: LVVVGAVGV (KRAS G12V)
YVVEGHVGL

SEQ ID NO: 66758 - protein, 9 aa, synthetic construct
  source 1..9: note = Seed: LVVVGAVGV (KRAS G12V)
YVVEGHVGV

SEQ ID NO: 66759 - protein, 9 aa, synthetic construct
  source 1..9: note = Seed: LVVVGAVGV (KRAS G12V)
YVVEGIVGA

SEQ ID NO: 66760 - protein, 9 aa, synthetic construct
  source 1..9: note = Seed: LVVVGAVGV (KRAS G12V)
YVVEGIVGH

SEQ ID NO: 66761 - protein, 9 aa, synthetic construct
  source 1..9: note = Seed: LVVVGAVGV (KRAS G12V)
YVVEGIVGI

SEQ ID NO: 66762 - protein, 9 aa, synthetic construct
  source 1..9: note = Seed: LVVVGAVGV (KRAS G12V)
YVVEGIVGL

SEQ ID NO: 66763 - protein, 9 aa, synthetic construct
  source 1..9: note = Seed: LVVVGAVGV (KRAS G12V)
YVVEGIVGM

SEQ ID NO: 66764 - protein, 9 aa, synthetic construct
  source 1..9: note = Seed: LVVVGAVGV (KRAS G12V)
YVVEGIVGN

SEQ ID NO: 66765 - protein, 9 aa, synthetic construct
  source 1..9: note = Seed: LVVVGAVGV (KRAS G12V)
YVVEGIVGS

SEQ ID NO: 66766 - protein, 9 aa, synthetic construct
  source 1..9: note = Seed: LVVVGAVGV (KRAS G12V)
YVVEGIVGT

SEQ ID NO: 66767 - protein, 9 aa, synthetic construct
  source 1..9: note = Seed: LVVVGAVGV (KRAS G12V)
YVVEGIVGV

SEQ ID NO: 66768 - protein, 9 aa, synthetic construct
  source 1..9: note = Seed: LVVVGAVGV (KRAS G12V)
YVVEGMVGA

SEQ ID NO: 66769 - protein, 9 aa, synthetic construct
  source 1..9: note = Seed: LVVVGAVGV (KRAS G12V)
YVVEGMVGI

SEQ ID NO: 66770 - protein, 9 aa, synthetic construct
  source 1..9: note = Seed: LVVVGAVGV (KRAS G12V)
YVVEGMVGL

SEQ ID NO: 66771 - protein, 9 aa, synthetic construct
  source 1..9: note = Seed: LVVVGAVGV (KRAS G12V)
YVVEGMVGV

SEQ ID NO: 66772 - protein, 9 aa, synthetic construct
  source 1..9: note = Seed: LVVVGAVGV (KRAS G12V)
YVVEGNVGA

SEQ ID NO: 66773 - protein, 9 aa, synthetic construct
  source 1..9: note = Seed: LVVVGAVGV (KRAS G12V)
YVVEGNVGF

SEQ ID NO: 66774 - protein, 9 aa, synthetic construct
  source 1..9: note = Seed: LVVVGAVGV (KRAS G12V)
YVVEGNVGG

SEQ ID NO: 66775 - protein, 9 aa, synthetic construct
  source 1..9: note = Seed: LVVVGAVGV (KRAS G12V)
YVVEGNVGI

SEQ ID NO: 66776 - protein, 9 aa, synthetic construct
  source 1..9: note = Seed: LVVVGAVGV (KRAS G12V)
YVVEGNVGL

SEQ ID NO: 66777 - protein, 9 aa, synthetic construct
  source 1..9: note = Seed: LVVVGAVGV (KRAS G12V)
YVVEGNVGM

SEQ ID NO: 66778 - protein, 9 aa, synthetic construct
  source 1..9: note = Seed: LVVVGAVGV (KRAS G12V)
YVVEGNVGN

SEQ ID NO: 66779 - protein, 9 aa, synthetic construct
  source 1..9: note = Seed: LVVVGAVGV (KRAS G12V)
YVVEGNVGQ

SEQ ID NO: 66780 - protein, 9 aa, synthetic construct
  source 1..9: note = Seed: LVVVGAVGV (KRAS G12V)
YVVEGNVGS

SEQ ID NO: 66781 - protein, 9 aa, synthetic construct
  source 1..9: note = Seed: LVVVGAVGV (KRAS G12V)
YVVEGNVGT

SEQ ID NO: 66782 - protein, 9 aa, synthetic construct
  source 1..9: note = Seed: LVVVGAVGV (KRAS G12V)
YVVEGNVGV

SEQ ID NO: 66783 - protein, 9 aa, synthetic construct
  source 1..9: note = Seed: LVVVGAVGV (KRAS G12V)
YVVEGPVGA

SEQ ID NO: 66784 - protein, 9 aa, synthetic construct
  source 1..9: note = Seed: LVVVGAVGV (KRAS G12V)
YVVEGPVGF

SEQ ID NO: 66785 - protein, 9 aa, synthetic construct
  source 1..9: note = Seed: LVVVGAVGV (KRAS G12V)
YVVEGPVGG

SEQ ID NO: 66786 - protein, 9 aa, synthetic construct
  source 1..9: note = Seed: LVVVGAVGV (KRAS G12V)
YVVEGPVGH

SEQ ID NO: 66787 - protein, 9 aa, synthetic construct
  source 1..9: note = Seed: LVVVGAVGV (KRAS G12V)
YVVEGPVGI

SEQ ID NO: 66788 - protein, 9 aa, synthetic construct
  source 1..9: note = Seed: LVVVGAVGV (KRAS G12V)
YVVEGPVGL

SEQ ID NO: 66789 - protein, 9 aa, synthetic construct
  source 1..9: note = Seed: LVVVGAVGV (KRAS G12V)
YVVEGPVGM

SEQ ID NO: 66790 - protein, 9 aa, synthetic construct
  source 1..9: note = Seed: LVVVGAVGV (KRAS G12V)
YVVEGPVGN

SEQ ID NO: 66791 - protein, 9 aa, synthetic construct
  source 1..9: note = Seed: LVVVGAVGV (KRAS G12V)
YVVEGPVGQ

SEQ ID NO: 66792 - protein, 9 aa, synthetic construct
  source 1..9: note = Seed: LVVVGAVGV (KRAS G12V)
YVVEGPVGS

SEQ ID NO: 66793 - protein, 9 aa, synthetic construct
  source 1..9: note = Seed: LVVVGAVGV (KRAS G12V)
YVVEGPVGT

SEQ ID NO: 66794 - protein, 9 aa, synthetic construct
  source 1..9: note = Seed: LVVVGAVGV (KRAS G12V)
YVVEGPVGV

SEQ ID NO: 66795 - protein, 9 aa, synthetic construct
  source 1..9: note = Seed: LVVVGAVGV (KRAS G12V)
YVVEGRVGS

SEQ ID NO: 66796 - protein, 9 aa, synthetic construct
  source 1..9: note = Seed: LVVVGAVGV (KRAS G12V)
YVVEGSVGA

SEQ ID NO: 66797 - protein, 9 aa, synthetic construct
  source 1..9: note = Seed: LVVVGAVGV (KRAS G12V)
YVVEGSVGC

SEQ ID NO: 66798 - protein, 9 aa, synthetic construct
  source 1..9: note = Seed: LVVVGAVGV (KRAS G12V)
YVVEGSVGF

SEQ ID NO: 66799 - protein, 9 aa, synthetic construct
  source 1..9: note = Seed: LVVVGAVGV (KRAS G12V)
YVVEGSVGG

SEQ ID NO: 66800 - protein, 9 aa, synthetic construct
  source 1..9: note = Seed: LVVVGAVGV (KRAS G12V)
YVVEGSVGH

SEQ ID NO: 66801 - protein, 9 aa, synthetic construct
  source 1..9: note = Seed: LVVVGAVGV (KRAS G12V)
YVVEGSVGI

SEQ ID NO: 66802 - protein, 9 aa, synthetic construct
  source 1..9: note = Seed: LVVVGAVGV (KRAS G12V)
YVVEGSVGL

SEQ ID NO: 66803 - protein, 9 aa, synthetic construct
  source 1..9: note = Seed: LVVVGAVGV (KRAS G12V)
YVVEGSVGM

SEQ ID NO: 66804 - protein, 9 aa, synthetic construct
  source 1..9: note = Seed: LVVVGAVGV (KRAS G12V)
YVVEGSVGN

SEQ ID NO: 66805 - protein, 9 aa, synthetic construct
  source 1..9: note = Seed: LVVVGAVGV (KRAS G12V)
YVVEGSVGP

SEQ ID NO: 66806 - protein, 9 aa, synthetic construct
  source 1..9: note = Seed: LVVVGAVGV (KRAS G12V)
YVVEGSVGQ

SEQ ID NO: 66807 - protein, 9 aa, synthetic construct
  source 1..9: note = Seed: LVVVGAVGV (KRAS G12V)
YVVEGSVGS

SEQ ID NO: 66808 - protein, 9 aa, synthetic construct
  source 1..9: note = Seed: LVVVGAVGV (KRAS G12V)
YVVEGSVGT

SEQ ID NO: 66809 - protein, 9 aa, synthetic construct
  source 1..9: note = Seed: LVVVGAVGV (KRAS G12V)
YVVEGSVGV

SEQ ID NO: 66810 - protein, 9 aa, synthetic construct
  source 1..9: note = Seed: LVVVGAVGV (KRAS G12V)
YVVEGSVGY

SEQ ID NO: 66811 - protein, 9 aa, synthetic construct
  source 1..9: note = Seed: LVVVGAVGV (KRAS G12V)
YVVEGTVGA

SEQ ID NO: 66812 - protein, 9 aa, synthetic construct
  source 1..9: note = Seed: LVVVGAVGV (KRAS G12V)
YVVEGTVGG

SEQ ID NO: 66813 - protein, 9 aa, synthetic construct
  source 1..9: note = Seed: LVVVGAVGV (KRAS G12V)
YVVEGTVGI

SEQ ID NO: 66814 - protein, 9 aa, synthetic construct
  source 1..9: note = Seed: LVVVGAVGV (KRAS G12V)
YVVEGTVGL

SEQ ID NO: 66815 - protein, 9 aa, synthetic construct
  source 1..9: note = Seed: LVVVGAVGV (KRAS G12V)
YVVEGTVGM

SEQ ID NO: 66816 - protein, 9 aa, synthetic construct
  source 1..9: note = Seed: LVVVGAVGV (KRAS G12V)
YVVEGTVGN

SEQ ID NO: 66817 - protein, 9 aa, synthetic construct
  source 1..9: note = Seed: LVVVGAVGV (KRAS G12V)
YVVEGTVGS

SEQ ID NO: 66818 - protein, 9 aa, synthetic construct
  source 1..9: note = Seed: LVVVGAVGV (KRAS G12V)
YVVEGTVGT

SEQ ID NO: 66819 - protein, 9 aa, synthetic construct
  source 1..9: note = Seed: LVVVGAVGV (KRAS G12V)
YVVEGTVGV

SEQ ID NO: 66820 - protein, 9 aa, synthetic construct
  source 1..9: note = Seed: LVVVGAVGV (KRAS G12V)
YVVEGVVGA

SEQ ID NO: 66821 - protein, 9 aa, synthetic construct
  source 1..9: note = Seed: LVVVGAVGV (KRAS G12V)
YVVEGVVGG

SEQ ID NO: 66822 - protein, 9 aa, synthetic construct
  source 1..9: note = Seed: LVVVGAVGV (KRAS G12V)
YVVEGVVGH

SEQ ID NO: 66823 - protein, 9 aa, synthetic construct
  source 1..9: note = Seed: LVVVGAVGV (KRAS G12V)
YVVEGVVGI

SEQ ID NO: 66824 - protein, 9 aa, synthetic construct
  source 1..9: note = Seed: LVVVGAVGV (KRAS G12V)
YVVEGVVGL

SEQ ID NO: 66825 - protein, 9 aa, synthetic construct
  source 1..9: note = Seed: LVVVGAVGV (KRAS G12V)
YVVEGVVGM

SEQ ID NO: 66826 - protein, 9 aa, synthetic construct
  source 1..9: note = Seed: LVVVGAVGV (KRAS G12V)
YVVEGVVGN

SEQ ID NO: 66827 - protein, 9 aa, synthetic construct
  source 1..9: note = Seed: LVVVGAVGV (KRAS G12V)
YVVEGVVGS

SEQ ID NO: 66828 - protein, 9 aa, synthetic construct
  source 1..9: note = Seed: LVVVGAVGV (KRAS G12V)
YVVEGVVGT

SEQ ID NO: 66829 - protein, 9 aa, synthetic construct
  source 1..9: note = Seed: LVVVGAVGV (KRAS G12V)
YVVEGVVGV

SEQ ID NO: 66830 - protein, 9 aa, synthetic construct
  source 1..9: note = Seed: LVVVGAVGV (KRAS G12V)
YVVFGAVGA

SEQ ID NO: 66831 - protein, 9 aa, synthetic construct
  source 1..9: note = Seed: LVVVGAVGV (KRAS G12V)
YVVFGAVGD

SEQ ID NO: 66832 - protein, 9 aa, synthetic construct
  source 1..9: note = Seed: LVVVGAVGV (KRAS G12V)
YVVFGAVGE

SEQ ID NO: 66833 - protein, 9 aa, synthetic construct
  source 1..9: note = Seed: LVVVGAVGV (KRAS G12V)
YVVFGAVGF

SEQ ID NO: 66834 - protein, 9 aa, synthetic construct
  source 1..9: note = Seed: LVVVGAVGV (KRAS G12V)
YVVFGAVGG

SEQ ID NO: 66835 - protein, 9 aa, synthetic construct
  source 1..9: note = Seed: LVVVGAVGV (KRAS G12V)
YVVFGAVGH

SEQ ID NO: 66836 - protein, 9 aa, synthetic construct
  source 1..9: note = Seed: LVVVGAVGV (KRAS G12V)
YVVFGAVGI

SEQ ID NO: 66837 - protein, 9 aa, synthetic construct
  source 1..9: note = Seed: LVVVGAVGV (KRAS G12V)
YVVFGAVGK

SEQ ID NO: 66838 - protein, 9 aa, synthetic construct
  source 1..9: note = Seed: LVVVGAVGV (KRAS G12V)
YVVFGAVGL

SEQ ID NO: 66839 - protein, 9 aa, synthetic construct
  source 1..9: note = Seed: LVVVGAVGV (KRAS G12V)
YVVFGAVGM

SEQ ID NO: 66840 - protein, 9 aa, synthetic construct
  source 1..9: note = Seed: LVVVGAVGV (KRAS G12V)
YVVFGAVGN

SEQ ID NO: 66841 - protein, 9 aa, synthetic construct
  source 1..9: note = Seed: LVVVGAVGV (KRAS G12V)
YVVFGAVGP

SEQ ID NO: 66842 - protein, 9 aa, synthetic construct
  source 1..9: note = Seed: LVVVGAVGV (KRAS G12V)
YVVFGAVGQ

SEQ ID NO: 66843 - protein, 9 aa, synthetic construct
  source 1..9: note = Seed: LVVVGAVGV (KRAS G12V)
YVVFGAVGR

SEQ ID NO: 66844 - protein, 9 aa, synthetic construct
  source 1..9: note = Seed: LVVVGAVGV (KRAS G12V)
YVVFGAVGS

SEQ ID NO: 66845 - protein, 9 aa, synthetic construct
  source 1..9: note = Seed: LVVVGAVGV (KRAS G12V)
YVVFGAVGT

SEQ ID NO: 66846 - protein, 9 aa, synthetic construct
  source 1..9: note = Seed: LVVVGAVGV (KRAS G12V)
YVVFGAVGV

SEQ ID NO: 66847 - protein, 9 aa, synthetic construct
  source 1..9: note = Seed: LVVVGAVGV (KRAS G12V)
YVVFGAVGY

SEQ ID NO: 66848 - protein, 9 aa, synthetic construct
  source 1..9: note = Seed: LVVVGAVGV (KRAS G12V)
YVVFGDVGA

SEQ ID NO: 66849 - protein, 9 aa, synthetic construct
  source 1..9: note = Seed: LVVVGAVGV (KRAS G12V)
YVVFGDVGI

SEQ ID NO: 66850 - protein, 9 aa, synthetic construct
  source 1..9: note = Seed: LVVVGAVGV (KRAS G12V)
YVVFGDVGL

SEQ ID NO: 66851 - protein, 9 aa, synthetic construct
  source 1..9: note = Seed: LVVVGAVGV (KRAS G12V)
YVVFGDVGV

SEQ ID NO: 66852 - protein, 9 aa, synthetic construct
  source 1..9: note = Seed: LVVVGAVGV (KRAS G12V)
YVVFGFVGF

SEQ ID NO: 66853 - protein, 9 aa, synthetic construct
  source 1..9: note = Seed: LVVVGAVGV (KRAS G12V)
YVVFGFVGY

SEQ ID NO: 66854 - protein, 9 aa, synthetic construct
  source 1..9: note = Seed: LVVVGAVGV (KRAS G12V)
YVVFGGVGA

SEQ ID NO: 66855 - protein, 9 aa, synthetic construct
  source 1..9: note = Seed: LVVVGAVGV (KRAS G12V)
YVVFGGVGF

SEQ ID NO: 66856 - protein, 9 aa, synthetic construct
  source 1..9: note = Seed: LVVVGAVGV (KRAS G12V)
YVVFGGVGG

SEQ ID NO: 66857 - protein, 9 aa, synthetic construct
  source 1..9: note = Seed: LVVVGAVGV (KRAS G12V)
YVVFGGVGH

SEQ ID NO: 66858 - protein, 9 aa, synthetic construct
  source 1..9: note = Seed: LVVVGAVGV (KRAS G12V)
YVVFGGVGI

SEQ ID NO: 66859 - protein, 9 aa, synthetic construct
  source 1..9: note = Seed: LVVVGAVGV (KRAS G12V)
YVVFGGVGK

SEQ ID NO: 66860 - protein, 9 aa, synthetic construct
  source 1..9: note = Seed: LVVVGAVGV (KRAS G12V)
YVVFGGVGL

SEQ ID NO: 66861 - protein, 9 aa, synthetic construct
  source 1..9: note = Seed: LVVVGAVGV (KRAS G12V)
YVVFGGVGM

SEQ ID NO: 66862 - protein, 9 aa, synthetic construct
  source 1..9: note = Seed: LVVVGAVGV (KRAS G12V)
YVVFGGVGN

SEQ ID NO: 66863 - protein, 9 aa, synthetic construct
  source 1..9: note = Seed: LVVVGAVGV (KRAS G12V)
YVVFGGVGP

SEQ ID NO: 66864 - protein, 9 aa, synthetic construct
  source 1..9: note = Seed: LVVVGAVGV (KRAS G12V)
YVVFGGVGQ

SEQ ID NO: 66865 - protein, 9 aa, synthetic construct
  source 1..9: note = Seed: LVVVGAVGV (KRAS G12V)
YVVFGGVGR

SEQ ID NO: 66866 - protein, 9 aa, synthetic construct
  source 1..9: note = Seed: LVVVGAVGV (KRAS G12V)
YVVFGGVGS

SEQ ID NO: 66867 - protein, 9 aa, synthetic construct
  source 1..9: note = Seed: LVVVGAVGV (KRAS G12V)
YVVFGGVGT

SEQ ID NO: 66868 - protein, 9 aa, synthetic construct
  source 1..9: note = Seed: LVVVGAVGV (KRAS G12V)
YVVFGGVGV

SEQ ID NO: 66869 - protein, 9 aa, synthetic construct
  source 1..9: note = Seed: LVVVGAVGV (KRAS G12V)
YVVFGGVGY

SEQ ID NO: 66870 - protein, 9 aa, synthetic construct
  source 1..9: note = Seed: LVVVGAVGV (KRAS G12V)
YVVFGHVGA

SEQ ID NO: 66871 - protein, 9 aa, synthetic construct
  source 1..9: note = Seed: LVVVGAVGV (KRAS G12V)
YVVFGHVGI

SEQ ID NO: 66872 - protein, 9 aa, synthetic construct
  source 1..9: note = Seed: LVVVGAVGV (KRAS G12V)
YVVFGHVGL

SEQ ID NO: 66873 - protein, 9 aa, synthetic construct
  source 1..9: note = Seed: LVVVGAVGV (KRAS G12V)
YVVFGHVGM

SEQ ID NO: 66874 - protein, 9 aa, synthetic construct
  source 1..9: note = Seed: LVVVGAVGV (KRAS G12V)
YVVFGHVGR

SEQ ID NO: 66875 - protein, 9 aa, synthetic construct
  source 1..9: note = Seed: LVVVGAVGV (KRAS G12V)
YVVFGHVGS

SEQ ID NO: 66876 - protein, 9 aa, synthetic construct
  source 1..9: note = Seed: LVVVGAVGV (KRAS G12V)
YVVFGHVGV

SEQ ID NO: 66877 - protein, 9 aa, synthetic construct
  source 1..9: note = Seed: LVVVGAVGV (KRAS G12V)
YVVFGIVGA

SEQ ID NO: 66878 - protein, 9 aa, synthetic construct
  source 1..9: note = Seed: LVVVGAVGV (KRAS G12V)
YVVFGIVGD

SEQ ID NO: 66879 - protein, 9 aa, synthetic construct
  source 1..9: note = Seed: LVVVGAVGV (KRAS G12V)
YVVFGIVGH

SEQ ID NO: 66880 - protein, 9 aa, synthetic construct
  source 1..9: note = Seed: LVVVGAVGV (KRAS G12V)
YVVFGIVGM

SEQ ID NO: 66881 - protein, 9 aa, synthetic construct
  source 1..9: note = Seed: LVVVGAVGV (KRAS G12V)
YVVFGIVGN

SEQ ID NO: 66882 - protein, 9 aa, synthetic construct
  source 1..9: note = Seed: LVVVGAVGV (KRAS G12V)
YVVFGIVGP

SEQ ID NO: 66883 - protein, 9 aa, synthetic construct
  source 1..9: note = Seed: LVVVGAVGV (KRAS G12V)
YVVFGIVGR

SEQ ID NO: 66884 - protein, 9 aa, synthetic construct
  source 1..9: note = Seed: LVVVGAVGV (KRAS G12V)
YVVFGIVGS

SEQ ID NO: 66885 - protein, 9 aa, synthetic construct
  source 1..9: note = Seed: LVVVGAVGV (KRAS G12V)
YVVFGIVGT

SEQ ID NO: 66886 - protein, 9 aa, synthetic construct
  source 1..9: note = Seed: LVVVGAVGV (KRAS G12V)
YVVFGIVGV

SEQ ID NO: 66887 - protein, 9 aa, synthetic construct
  source 1..9: note = Seed: LVVVGAVGV (KRAS G12V)
YVVFGKVGA

SEQ ID NO: 66888 - protein, 9 aa, synthetic construct
  source 1..9: note = Seed: LVVVGAVGV (KRAS G12V)
YVVFGKVGG

SEQ ID NO: 66889 - protein, 9 aa, synthetic construct
  source 1..9: note = Seed: LVVVGAVGV (KRAS G12V)
YVVFGKVGH

SEQ ID NO: 66890 - protein, 9 aa, synthetic construct
  source 1..9: note = Seed: LVVVGAVGV (KRAS G12V)
YVVFGKVGK

SEQ ID NO: 66891 - protein, 9 aa, synthetic construct
  source 1..9: note = Seed: LVVVGAVGV (KRAS G12V)
YVVFGKVGL

SEQ ID NO: 66892 - protein, 9 aa, synthetic construct
  source 1..9: note = Seed: LVVVGAVGV (KRAS G12V)
YVVFGKVGM

SEQ ID NO: 66893 - protein, 9 aa, synthetic construct
  source 1..9: note = Seed: LVVVGAVGV (KRAS G12V)
YVVFGKVGN

SEQ ID NO: 66894 - protein, 9 aa, synthetic construct
  source 1..9: note = Seed: LVVVGAVGV (KRAS G12V)
YVVFGKVGQ

SEQ ID NO: 66895 - protein, 9 aa, synthetic construct
  source 1..9: note = Seed: LVVVGAVGV (KRAS G12V)
YVVFGKVGR

SEQ ID NO: 66896 - protein, 9 aa, synthetic construct
  source 1..9: note = Seed: LVVVGAVGV (KRAS G12V)
YVVFGKVGS

SEQ ID NO: 66897 - protein, 9 aa, synthetic construct
  source 1..9: note = Seed: LVVVGAVGV (KRAS G12V)
YVVFGKVGT

SEQ ID NO: 66898 - protein, 9 aa, synthetic construct
  source 1..9: note = Seed: LVVVGAVGV (KRAS G12V)
YVVFGLVGA

SEQ ID NO: 66899 - protein, 9 aa, synthetic construct
  source 1..9: note = Seed: LVVVGAVGV (KRAS G12V)
YVVFGLVGM

SEQ ID NO: 66900 - protein, 9 aa, synthetic construct
  source 1..9: note = Seed: LVVVGAVGV (KRAS G12V)
YVVFGLVGN

SEQ ID NO: 66901 - protein, 9 aa, synthetic construct
  source 1..9: note = Seed: LVVVGAVGV (KRAS G12V)
YVVFGLVGR

SEQ ID NO: 66902 - protein, 9 aa, synthetic construct
  source 1..9: note = Seed: LVVVGAVGV (KRAS G12V)
YVVFGLVGS

SEQ ID NO: 66903 - protein, 9 aa, synthetic construct
  source 1..9: note = Seed: LVVVGAVGV (KRAS G12V)
YVVFGLVGT

SEQ ID NO: 66904 - protein, 9 aa, synthetic construct
  source 1..9: note = Seed: LVVVGAVGV (KRAS G12V)
YVVFGLVGV

SEQ ID NO: 66905 - protein, 9 aa, synthetic construct
  source 1..9: note = Seed: LVVVGAVGV (KRAS G12V)
YVVFGMVGA

SEQ ID NO: 66906 - protein, 9 aa, synthetic construct
  source 1..9: note = Seed: LVVVGAVGV (KRAS G12V)
YVVFGMVGH

SEQ ID NO: 66907 - protein, 9 aa, synthetic construct
  source 1..9: note = Seed: LVVVGAVGV (KRAS G12V)
YVVFGMVGI

SEQ ID NO: 66908 - protein, 9 aa, synthetic construct
  source 1..9: note = Seed: LVVVGAVGV (KRAS G12V)
YVVFGMVGL

SEQ ID NO: 66909 - protein, 9 aa, synthetic construct
  source 1..9: note = Seed: LVVVGAVGV (KRAS G12V)
YVVFGMVGM

SEQ ID NO: 66910 - protein, 9 aa, synthetic construct
  source 1..9: note = Seed: LVVVGAVGV (KRAS G12V)
YVVFGMVGN

SEQ ID NO: 66911 - protein, 9 aa, synthetic construct
  source 1..9: note = Seed: LVVVGAVGV (KRAS G12V)
YVVFGMVGR

SEQ ID NO: 66912 - protein, 9 aa, synthetic construct
  source 1..9: note = Seed: LVVVGAVGV (KRAS G12V)
YVVFGMVGS

SEQ ID NO: 66913 - protein, 9 aa, synthetic construct
  source 1..9: note = Seed: LVVVGAVGV (KRAS G12V)
YVVFGMVGT

SEQ ID NO: 66914 - protein, 9 aa, synthetic construct
  source 1..9: note = Seed: LVVVGAVGV (KRAS G12V)
YVVFGMVGV

SEQ ID NO: 66915 - protein, 9 aa, synthetic construct
  source 1..9: note = Seed: LVVVGAVGV (KRAS G12V)
YVVFGNVGA

SEQ ID NO: 66916 - protein, 9 aa, synthetic construct
  source 1..9: note = Seed: LVVVGAVGV (KRAS G12V)
YVVFGNVGD

SEQ ID NO: 66917 - protein, 9 aa, synthetic construct
  source 1..9: note = Seed: LVVVGAVGV (KRAS G12V)
YVVFGNVGE

SEQ ID NO: 66918 - protein, 9 aa, synthetic construct
  source 1..9: note = Seed: LVVVGAVGV (KRAS G12V)
YVVFGNVGF

SEQ ID NO: 66919 - protein, 9 aa, synthetic construct
  source 1..9: note = Seed: LVVVGAVGV (KRAS G12V)
YVVFGNVGG

SEQ ID NO: 66920 - protein, 9 aa, synthetic construct
  source 1..9: note = Seed: LVVVGAVGV (KRAS G12V)
YVVFGNVGH

SEQ ID NO: 66921 - protein, 9 aa, synthetic construct
  source 1..9: note = Seed: LVVVGAVGV (KRAS G12V)
YVVFGNVGI

SEQ ID NO: 66922 - protein, 9 aa, synthetic construct
  source 1..9: note = Seed: LVVVGAVGV (KRAS G12V)
YVVFGNVGK

SEQ ID NO: 66923 - protein, 9 aa, synthetic construct
  source 1..9: note = Seed: LVVVGAVGV (KRAS G12V)
YVVFGNVGL

SEQ ID NO: 66924 - protein, 9 aa, synthetic construct
  source 1..9: note = Seed: LVVVGAVGV (KRAS G12V)
YVVFGNVGM

SEQ ID NO: 66925 - protein, 9 aa, synthetic construct
  source 1..9: note = Seed: LVVVGAVGV (KRAS G12V)
YVVFGNVGN

SEQ ID NO: 66926 - protein, 9 aa, synthetic construct
  source 1..9: note = Seed: LVVVGAVGV (KRAS G12V)
YVVFGNVGP

SEQ ID NO: 66927 - protein, 9 aa, synthetic construct
  source 1..9: note = Seed: LVVVGAVGV (KRAS G12V)
YVVFGNVGQ

SEQ ID NO: 66928 - protein, 9 aa, synthetic construct
  source 1..9: note = Seed: LVVVGAVGV (KRAS G12V)
YVVFGNVGR

SEQ ID NO: 66929 - protein, 9 aa, synthetic construct
  source 1..9: note = Seed: LVVVGAVGV (KRAS G12V)
YVVFGNVGS

SEQ ID NO: 66930 - protein, 9 aa, synthetic construct
  source 1..9: note = Seed: LVVVGAVGV (KRAS G12V)
YVVFGNVGT

SEQ ID NO: 66931 - protein, 9 aa, synthetic construct
  source 1..9: note = Seed: LVVVGAVGV (KRAS G12V)
YVVFGNVGV

SEQ ID NO: 66932 - protein, 9 aa, synthetic construct
  source 1..9: note = Seed: LVVVGAVGV (KRAS G12V)
YVVFGNVGY

SEQ ID NO: 66933 - protein, 9 aa, synthetic construct
  source 1..9: note = Seed: LVVVGAVGV (KRAS G12V)
YVVFGPVGA

SEQ ID NO: 66934 - protein, 9 aa, synthetic construct
  source 1..9: note = Seed: LVVVGAVGV (KRAS G12V)
YVVFGPVGC

SEQ ID NO: 66935 - protein, 9 aa, synthetic construct
  source 1..9: note = Seed: LVVVGAVGV (KRAS G12V)
YVVFGPVGD

SEQ ID NO: 66936 - protein, 9 aa, synthetic construct
  source 1..9: note = Seed: LVVVGAVGV (KRAS G12V)
YVVFGPVGE

SEQ ID NO: 66937 - protein, 9 aa, synthetic construct
  source 1..9: note = Seed: LVVVGAVGV (KRAS G12V)
YVVFGPVGF

SEQ ID NO: 66938 - protein, 9 aa, synthetic construct
  source 1..9: note = Seed: LVVVGAVGV (KRAS G12V)
YVVFGPVGG

SEQ ID NO: 66939 - protein, 9 aa, synthetic construct
  source 1..9: note = Seed: LVVVGAVGV (KRAS G12V)
YVVFGPVGH

SEQ ID NO: 66940 - protein, 9 aa, synthetic construct
  source 1..9: note = Seed: LVVVGAVGV (KRAS G12V)
YVVFGPVGI

SEQ ID NO: 66941 - protein, 9 aa, synthetic construct
  source 1..9: note = Seed: LVVVGAVGV (KRAS G12V)
YVVFGPVGK

SEQ ID NO: 66942 - protein, 9 aa, synthetic construct
  source 1..9: note = Seed: LVVVGAVGV (KRAS G12V)
YVVFGPVGL

SEQ ID NO: 66943 - protein, 9 aa, synthetic construct
  source 1..9: note = Seed: LVVVGAVGV (KRAS G12V)
YVVFGPVGM

SEQ ID NO: 66944 - protein, 9 aa, synthetic construct
  source 1..9: note = Seed: LVVVGAVGV (KRAS G12V)
YVVFGPVGN

SEQ ID NO: 66945 - protein, 9 aa, synthetic construct
  source 1..9: note = Seed: LVVVGAVGV (KRAS G12V)
YVVFGPVGP

SEQ ID NO: 66946 - protein, 9 aa, synthetic construct
  source 1..9: note = Seed: LVVVGAVGV (KRAS G12V)
YVVFGPVGQ

SEQ ID NO: 66947 - protein, 9 aa, synthetic construct
  source 1..9: note = Seed: LVVVGAVGV (KRAS G12V)
YVVFGPVGR

SEQ ID NO: 66948 - protein, 9 aa, synthetic construct
  source 1..9: note = Seed: LVVVGAVGV (KRAS G12V)
YVVFGPVGS

SEQ ID NO: 66949 - protein, 9 aa, synthetic construct
  source 1..9: note = Seed: LVVVGAVGV (KRAS G12V)
YVVFGPVGT

SEQ ID NO: 66950 - protein, 9 aa, synthetic construct
  source 1..9: note = Seed: LVVVGAVGV (KRAS G12V)
YVVFGPVGV

SEQ ID NO: 66951 - protein, 9 aa, synthetic construct
  source 1..9: note = Seed: LVVVGAVGV (KRAS G12V)
YVVFGPVGY

SEQ ID NO: 66952 - protein, 9 aa, synthetic construct
  source 1..9: note = Seed: LVVVGAVGV (KRAS G12V)
YVVFGQVGA

SEQ ID NO: 66953 - protein, 9 aa, synthetic construct
  source 1..9: note = Seed: LVVVGAVGV (KRAS G12V)
YVVFGQVGL

SEQ ID NO: 66954 - protein, 9 aa, synthetic construct
  source 1..9: note = Seed: LVVVGAVGV (KRAS G12V)
YVVFGQVGM

SEQ ID NO: 66955 - protein, 9 aa, synthetic construct
  source 1..9: note = Seed: LVVVGAVGV (KRAS G12V)
YVVFGQVGV

SEQ ID NO: 66956 - protein, 9 aa, synthetic construct
  source 1..9: note = Seed: LVVVGAVGV (KRAS G12V)
YVVFGRVGA

SEQ ID NO: 66957 - protein, 9 aa, synthetic construct
  source 1..9: note = Seed: LVVVGAVGV (KRAS G12V)
YVVFGRVGG

SEQ ID NO: 66958 - protein, 9 aa, synthetic construct
  source 1..9: note = Seed: LVVVGAVGV (KRAS G12V)
YVVFGRVGH

SEQ ID NO: 66959 - protein, 9 aa, synthetic construct
  source 1..9: note = Seed: LVVVGAVGV (KRAS G12V)
YVVFGRVGK

SEQ ID NO: 66960 - protein, 9 aa, synthetic construct
  source 1..9: note = Seed: LVVVGAVGV (KRAS G12V)
YVVFGRVGL

SEQ ID NO: 66961 - protein, 9 aa, synthetic construct
  source 1..9: note = Seed: LVVVGAVGV (KRAS G12V)
YVVFGRVGM

SEQ ID NO: 66962 - protein, 9 aa, synthetic construct
  source 1..9: note = Seed: LVVVGAVGV (KRAS G12V)
YVVFGRVGN

SEQ ID NO: 66963 - protein, 9 aa, synthetic construct
  source 1..9: note = Seed: LVVVGAVGV (KRAS G12V)
YVVFGRVGQ

SEQ ID NO: 66964 - protein, 9 aa, synthetic construct
  source 1..9: note = Seed: LVVVGAVGV (KRAS G12V)
YVVFGRVGR

SEQ ID NO: 66965 - protein, 9 aa, synthetic construct
  source 1..9: note = Seed: LVVVGAVGV (KRAS G12V)
YVVFGRVGS

SEQ ID NO: 66966 - protein, 9 aa, synthetic construct
  source 1..9: note = Seed: LVVVGAVGV (KRAS G12V)
YVVFGRVGT

SEQ ID NO: 66967 - protein, 9 aa, synthetic construct
  source 1..9: note = Seed: LVVVGAVGV (KRAS G12V)
YVVFGSVGA

SEQ ID NO: 66968 - protein, 9 aa, synthetic construct
  source 1..9: note = Seed: LVVVGAVGV (KRAS G12V)
YVVFGSVGD

SEQ ID NO: 66969 - protein, 9 aa, synthetic construct
  source 1..9: note = Seed: LVVVGAVGV (KRAS G12V)
YVVFGSVGE

SEQ ID NO: 66970 - protein, 9 aa, synthetic construct
  source 1..9: note = Seed: LVVVGAVGV (KRAS G12V)
YVVFGSVGF

SEQ ID NO: 66971 - protein, 9 aa, synthetic construct
  source 1..9: note = Seed: LVVVGAVGV (KRAS G12V)
YVVFGSVGG

SEQ ID NO: 66972 - protein, 9 aa, synthetic construct
  source 1..9: note = Seed: LVVVGAVGV (KRAS G12V)
YVVFGSVGH

SEQ ID NO: 66973 - protein, 9 aa, synthetic construct
  source 1..9: note = Seed: LVVVGAVGV (KRAS G12V)
YVVFGSVGI

SEQ ID NO: 66974 - protein, 9 aa, synthetic construct
  source 1..9: note = Seed: LVVVGAVGV (KRAS G12V)
YVVFGSVGK

SEQ ID NO: 66975 - protein, 9 aa, synthetic construct
  source 1..9: note = Seed: LVVVGAVGV (KRAS G12V)
YVVFGSVGL

SEQ ID NO: 66976 - protein, 9 aa, synthetic construct
  source 1..9: note = Seed: LVVVGAVGV (KRAS G12V)
YVVFGSVGM

SEQ ID NO: 66977 - protein, 9 aa, synthetic construct
  source 1..9: note = Seed: LVVVGAVGV (KRAS G12V)
YVVFGSVGN

SEQ ID NO: 66978 - protein, 9 aa, synthetic construct
  source 1..9: note = Seed: LVVVGAVGV (KRAS G12V)
YVVFGSVGP

SEQ ID NO: 66979 - protein, 9 aa, synthetic construct
  source 1..9: note = Seed: LVVVGAVGV (KRAS G12V)
YVVFGSVGQ

SEQ ID NO: 66980 - protein, 9 aa, synthetic construct
  source 1..9: note = Seed: LVVVGAVGV (KRAS G12V)
YVVFGSVGR

SEQ ID NO: 66981 - protein, 9 aa, synthetic construct
  source 1..9: note = Seed: LVVVGAVGV (KRAS G12V)
YVVFGSVGS

SEQ ID NO: 66982 - protein, 9 aa, synthetic construct
  source 1..9: note = Seed: LVVVGAVGV (KRAS G12V)
YVVFGSVGT

SEQ ID NO: 66983 - protein, 9 aa, synthetic construct
  source 1..9: note = Seed: LVVVGAVGV (KRAS G12V)
YVVFGSVGV

SEQ ID NO: 66984 - protein, 9 aa, synthetic construct
  source 1..9: note = Seed: LVVVGAVGV (KRAS G12V)
YVVFGSVGY

SEQ ID NO: 66985 - protein, 9 aa, synthetic construct
  source 1..9: note = Seed: LVVVGAVGV (KRAS G12V)
YVVFGTVGA

SEQ ID NO: 66986 - protein, 9 aa, synthetic construct
  source 1..9: note = Seed: LVVVGAVGV (KRAS G12V)
YVVFGTVGD

SEQ ID NO: 66987 - protein, 9 aa, synthetic construct
  source 1..9: note = Seed: LVVVGAVGV (KRAS G12V)
YVVFGTVGE

SEQ ID NO: 66988 - protein, 9 aa, synthetic construct
  source 1..9: note = Seed: LVVVGAVGV (KRAS G12V)
YVVFGTVGG

SEQ ID NO: 66989 - protein, 9 aa, synthetic construct
  source 1..9: note = Seed: LVVVGAVGV (KRAS G12V)
YVVFGTVGH

SEQ ID NO: 66990 - protein, 9 aa, synthetic construct
  source 1..9: note = Seed: LVVVGAVGV (KRAS G12V)
YVVFGTVGI

SEQ ID NO: 66991 - protein, 9 aa, synthetic construct
  source 1..9: note = Seed: LVVVGAVGV (KRAS G12V)
YVVFGTVGK

SEQ ID NO: 66992 - protein, 9 aa, synthetic construct
  source 1..9: note = Seed: LVVVGAVGV (KRAS G12V)
YVVFGTVGL

SEQ ID NO: 66993 - protein, 9 aa, synthetic construct
  source 1..9: note = Seed: LVVVGAVGV (KRAS G12V)
YVVFGTVGM

SEQ ID NO: 66994 - protein, 9 aa, synthetic construct
  source 1..9: note = Seed: LVVVGAVGV (KRAS G12V)
YVVFGTVGN

SEQ ID NO: 66995 - protein, 9 aa, synthetic construct
  source 1..9: note = Seed: LVVVGAVGV (KRAS G12V)
YVVFGTVGP

SEQ ID NO: 66996 - protein, 9 aa, synthetic construct
  source 1..9: note = Seed: LVVVGAVGV (KRAS G12V)
YVVFGTVGQ

SEQ ID NO: 66997 - protein, 9 aa, synthetic construct
  source 1..9: note = Seed: LVVVGAVGV (KRAS G12V)
YVVFGTVGR

SEQ ID NO: 66998 - protein, 9 aa, synthetic construct
  source 1..9: note = Seed: LVVVGAVGV (KRAS G12V)
YVVFGTVGS

SEQ ID NO: 66999 - protein, 9 aa, synthetic construct
  source 1..9: note = Seed: LVVVGAVGV (KRAS G12V)
YVVFGTVGT

SEQ ID NO: 67000 - protein, 9 aa, synthetic construct
  source 1..9: note = Seed: LVVVGAVGV (KRAS G12V)
YVVFGTVGV

SEQ ID NO: 67001 - protein, 9 aa, synthetic construct
  source 1..9: note = Seed: LVVVGAVGV (KRAS G12V)
YVVFGTVGY

SEQ ID NO: 67002 - protein, 9 aa, synthetic construct
  source 1..9: note = Seed: LVVVGAVGV (KRAS G12V)
YVVFGVVGA

SEQ ID NO: 67003 - protein, 9 aa, synthetic construct
  source 1..9: note = Seed: LVVVGAVGV (KRAS G12V)
YVVFGVVGD

SEQ ID NO: 67004 - protein, 9 aa, synthetic construct
  source 1..9: note = Seed: LVVVGAVGV (KRAS G12V)
YVVFGVVGE

SEQ ID NO: 67005 - protein, 9 aa, synthetic construct
  source 1..9: note = Seed: LVVVGAVGV (KRAS G12V)
YVVFGVVGG

SEQ ID NO: 67006 - protein, 9 aa, synthetic construct
  source 1..9: note = Seed: LVVVGAVGV (KRAS G12V)
YVVFGVVGH

SEQ ID NO: 67007 - protein, 9 aa, synthetic construct
  source 1..9: note = Seed: LVVVGAVGV (KRAS G12V)
YVVFGVVGI

SEQ ID NO: 67008 - protein, 9 aa, synthetic construct
  source 1..9: note = Seed: LVVVGAVGV (KRAS G12V)
YVVFGVVGK

SEQ ID NO: 67009 - protein, 9 aa, synthetic construct
  source 1..9: note = Seed: LVVVGAVGV (KRAS G12V)
YVVFGVVGL

SEQ ID NO: 67010 - protein, 9 aa, synthetic construct
  source 1..9: note = Seed: LVVVGAVGV (KRAS G12V)
YVVFGVVGM

SEQ ID NO: 67011 - protein, 9 aa, synthetic construct
  source 1..9: note = Seed: LVVVGAVGV (KRAS G12V)
YVVFGVVGN

SEQ ID NO: 67012 - protein, 9 aa, synthetic construct
  source 1..9: note = Seed: LVVVGAVGV (KRAS G12V)
YVVFGVVGP

SEQ ID NO: 67013 - protein, 9 aa, synthetic construct
  source 1..9: note = Seed: LVVVGAVGV (KRAS G12V)
YVVFGVVGQ

SEQ ID NO: 67014 - protein, 9 aa, synthetic construct
  source 1..9: note = Seed: LVVVGAVGV (KRAS G12V)
YVVFGVVGR

SEQ ID NO: 67015 - protein, 9 aa, synthetic construct
  source 1..9: note = Seed: LVVVGAVGV (KRAS G12V)
YVVFGVVGS

SEQ ID NO: 67016 - protein, 9 aa, synthetic construct
  source 1..9: note = Seed: LVVVGAVGV (KRAS G12V)
YVVFGVVGT

SEQ ID NO: 67017 - protein, 9 aa, synthetic construct
  source 1..9: note = Seed: LVVVGAVGV (KRAS G12V)
YVVFGVVGV

SEQ ID NO: 67018 - protein, 9 aa, synthetic construct
  source 1..9: note = Seed: LVVVGAVGV (KRAS G12V)
YVVFGYVGI

SEQ ID NO: 67019 - protein, 9 aa, synthetic construct
  source 1..9: note = Seed: LVVVGAVGV (KRAS G12V)
YVVFGYVGL

SEQ ID NO: 67020 - protein, 9 aa, synthetic construct
  source 1..9: note = Seed: LVVVGAVGV (KRAS G12V)
YVVFGYVGM

SEQ ID NO: 67021 - protein, 9 aa, synthetic construct
  source 1..9: note = Seed: LVVVGAVGV (KRAS G12V)
YVVFGYVGV

SEQ ID NO: 67022 - protein, 9 aa, synthetic construct
  source 1..9: note = Seed: LVVVGAVGV (KRAS G12V)
YVVGGAVGA

SEQ ID NO: 67023 - protein, 9 aa, synthetic construct
  source 1..9: note = Seed: LVVVGAVGV (KRAS G12V)
YVVGGAVGC

SEQ ID NO: 67024 - protein, 9 aa, synthetic construct
  source 1..9: note = Seed: LVVVGAVGV (KRAS G12V)
YVVGGAVGD

SEQ ID NO: 67025 - protein, 9 aa, synthetic construct
  source 1..9: note = Seed: LVVVGAVGV (KRAS G12V)
YVVGGAVGE

SEQ ID NO: 67026 - protein, 9 aa, synthetic construct
  source 1..9: note = Seed: LVVVGAVGV (KRAS G12V)
YVVGGAVGF

SEQ ID NO: 67027 - protein, 9 aa, synthetic construct
  source 1..9: note = Seed: LVVVGAVGV (KRAS G12V)
YVVGGAVGG

SEQ ID NO: 67028 - protein, 9 aa, synthetic construct
  source 1..9: note = Seed: LVVVGAVGV (KRAS G12V)
YVVGGAVGH

SEQ ID NO: 67029 - protein, 9 aa, synthetic construct
  source 1..9: note = Seed: LVVVGAVGV (KRAS G12V)
YVVGGAVGI

SEQ ID NO: 67030 - protein, 9 aa, synthetic construct
  source 1..9: note = Seed: LVVVGAVGV (KRAS G12V)
YVVGGAVGK

SEQ ID NO: 67031 - protein, 9 aa, synthetic construct
  source 1..9: note = Seed: LVVVGAVGV (KRAS G12V)
YVVGGAVGL

SEQ ID NO: 67032 - protein, 9 aa, synthetic construct
  source 1..9: note = Seed: LVVVGAVGV (KRAS G12V)
YVVGGAVGM

SEQ ID NO: 67033 - protein, 9 aa, synthetic construct
  source 1..9: note = Seed: LVVVGAVGV (KRAS G12V)
YVVGGAVGN

SEQ ID NO: 67034 - protein, 9 aa, synthetic construct
  source 1..9: note = Seed: LVVVGAVGV (KRAS G12V)
YVVGGAVGP

SEQ ID NO: 67035 - protein, 9 aa, synthetic construct
  source 1..9: note = Seed: LVVVGAVGV (KRAS G12V)
YVVGGAVGQ

SEQ ID NO: 67036 - protein, 9 aa, synthetic construct
  source 1..9: note = Seed: LVVVGAVGV (KRAS G12V)
YVVGGAVGR

SEQ ID NO: 67037 - protein, 9 aa, synthetic construct
  source 1..9: note = Seed: LVVVGAVGV (KRAS G12V)
YVVGGAVGS

SEQ ID NO: 67038 - protein, 9 aa, synthetic construct
  source 1..9: note = Seed: LVVVGAVGV (KRAS G12V)
YVVGGAVGT

SEQ ID NO: 67039 - protein, 9 aa, synthetic construct
  source 1..9: note = Seed: LVVVGAVGV (KRAS G12V)
YVVGGAVGV

SEQ ID NO: 67040 - protein, 9 aa, synthetic construct
  source 1..9: note = Seed: LVVVGAVGV (KRAS G12V)
YVVGGAVGW

SEQ ID NO: 67041 - protein, 9 aa, synthetic construct
  source 1..9: note = Seed: LVVVGAVGV (KRAS G12V)
YVVGGAVGY

SEQ ID NO: 67042 - protein, 9 aa, synthetic construct
  source 1..9: note = Seed: LVVVGAVGV (KRAS G12V)
YVVGGCVGA

SEQ ID NO: 67043 - protein, 9 aa, synthetic construct
  source 1..9: note = Seed: LVVVGAVGV (KRAS G12V)
YVVGGCVGC

SEQ ID NO: 67044 - protein, 9 aa, synthetic construct
  source 1..9: note = Seed: LVVVGAVGV (KRAS G12V)
YVVGGCVGG

SEQ ID NO: 67045 - protein, 9 aa, synthetic construct
  source 1..9: note = Seed: LVVVGAVGV (KRAS G12V)
YVVGGCVGI

SEQ ID NO: 67046 - protein, 9 aa, synthetic construct
  source 1..9: note = Seed: LVVVGAVGV (KRAS G12V)
YVVGGCVGL

SEQ ID NO: 67047 - protein, 9 aa, synthetic construct
  source 1..9: note = Seed: LVVVGAVGV (KRAS G12V)
YVVGGCVGM

SEQ ID NO: 67048 - protein, 9 aa, synthetic construct
  source 1..9: note = Seed: LVVVGAVGV (KRAS G12V)
YVVGGCVGN

SEQ ID NO: 67049 - protein, 9 aa, synthetic construct
  source 1..9: note = Seed: LVVVGAVGV (KRAS G12V)
YVVGGCVGS

SEQ ID NO: 67050 - protein, 9 aa, synthetic construct
  source 1..9: note = Seed: LVVVGAVGV (KRAS G12V)
YVVGGCVGT

SEQ ID NO: 67051 - protein, 9 aa, synthetic construct
  source 1..9: note = Seed: LVVVGAVGV (KRAS G12V)
YVVGGCVGV

SEQ ID NO: 67052 - protein, 9 aa, synthetic construct
  source 1..9: note = Seed: LVVVGAVGV (KRAS G12V)
YVVGGDVGA

SEQ ID NO: 67053 - protein, 9 aa, synthetic construct
  source 1..9: note = Seed: LVVVGAVGV (KRAS G12V)
YVVGGDVGI

SEQ ID NO: 67054 - protein, 9 aa, synthetic construct
  source 1..9: note = Seed: LVVVGAVGV (KRAS G12V)
YVVGGDVGL

SEQ ID NO: 67055 - protein, 9 aa, synthetic construct
  source 1..9: note = Seed: LVVVGAVGV (KRAS G12V)
YVVGGDVGV

SEQ ID NO: 67056 - protein, 9 aa, synthetic construct
  source 1..9: note = Seed: LVVVGAVGV (KRAS G12V)
YVVGGEVGC

SEQ ID NO: 67057 - protein, 9 aa, synthetic construct
  source 1..9: note = Seed: LVVVGAVGV (KRAS G12V)
YVVGGEVGI

SEQ ID NO: 67058 - protein, 9 aa, synthetic construct
  source 1..9: note = Seed: LVVVGAVGV (KRAS G12V)
YVVGGEVGL

SEQ ID NO: 67059 - protein, 9 aa, synthetic construct
  source 1..9: note = Seed: LVVVGAVGV (KRAS G12V)
YVVGGEVGV

SEQ ID NO: 67060 - protein, 9 aa, synthetic construct
  source 1..9: note = Seed: LVVVGAVGV (KRAS G12V)
YVVGGGVGA

SEQ ID NO: 67061 - protein, 9 aa, synthetic construct
  source 1..9: note = Seed: LVVVGAVGV (KRAS G12V)
YVVGGGVGC

SEQ ID NO: 67062 - protein, 9 aa, synthetic construct
  source 1..9: note = Seed: LVVVGAVGV (KRAS G12V)
YVVGGGVGF

SEQ ID NO: 67063 - protein, 9 aa, synthetic construct
  source 1..9: note = Seed: LVVVGAVGV (KRAS G12V)
YVVGGGVGG

SEQ ID NO: 67064 - protein, 9 aa, synthetic construct
  source 1..9: note = Seed: LVVVGAVGV (KRAS G12V)
YVVGGGVGI

SEQ ID NO: 67065 - protein, 9 aa, synthetic construct
  source 1..9: note = Seed: LVVVGAVGV (KRAS G12V)
YVVGGGVGL

SEQ ID NO: 67066 - protein, 9 aa, synthetic construct
  source 1..9: note = Seed: LVVVGAVGV (KRAS G12V)
YVVGGGVGM

SEQ ID NO: 67067 - protein, 9 aa, synthetic construct
  source 1..9: note = Seed: LVVVGAVGV (KRAS G12V)
YVVGGGVGN

SEQ ID NO: 67068 - protein, 9 aa, synthetic construct
  source 1..9: note = Seed: LVVVGAVGV (KRAS G12V)
YVVGGGVGQ

SEQ ID NO: 67069 - protein, 9 aa, synthetic construct
  source 1..9: note = Seed: LVVVGAVGV (KRAS G12V)
YVVGGGVGS

SEQ ID NO: 67070 - protein, 9 aa, synthetic construct
  source 1..9: note = Seed: LVVVGAVGV (KRAS G12V)
YVVGGGVGT

SEQ ID NO: 67071 - protein, 9 aa, synthetic construct
  source 1..9: note = Seed: LVVVGAVGV (KRAS G12V)
YVVGGGVGV

SEQ ID NO: 67072 - protein, 9 aa, synthetic construct
  source 1..9: note = Seed: LVVVGAVGV (KRAS G12V)
YVVGGGVGY

SEQ ID NO: 67073 - protein, 9 aa, synthetic construct
  source 1..9: note = Seed: LVVVGAVGV (KRAS G12V)
YVVGGHVGA

SEQ ID NO: 67074 - protein, 9 aa, synthetic construct
  source 1..9: note = Seed: LVVVGAVGV (KRAS G12V)
YVVGGHVGF

SEQ ID NO: 67075 - protein, 9 aa, synthetic construct
  source 1..9: note = Seed: LVVVGAVGV (KRAS G12V)
YVVGGHVGI

SEQ ID NO: 67076 - protein, 9 aa, synthetic construct
  source 1..9: note = Seed: LVVVGAVGV (KRAS G12V)
YVVGGHVGL

SEQ ID NO: 67077 - protein, 9 aa, synthetic construct
  source 1..9: note = Seed: LVVVGAVGV (KRAS G12V)
YVVGGHVGM

SEQ ID NO: 67078 - protein, 9 aa, synthetic construct
  source 1..9: note = Seed: LVVVGAVGV (KRAS G12V)
YVVGGHVGS

SEQ ID NO: 67079 - protein, 9 aa, synthetic construct
  source 1..9: note = Seed: LVVVGAVGV (KRAS G12V)
YVVGGHVGV

SEQ ID NO: 67080 - protein, 9 aa, synthetic construct
  source 1..9: note = Seed: LVVVGAVGV (KRAS G12V)
YVVGGHVGY

SEQ ID NO: 67081 - protein, 9 aa, synthetic construct
  source 1..9: note = Seed: LVVVGAVGV (KRAS G12V)
YVVGGIVGA

SEQ ID NO: 67082 - protein, 9 aa, synthetic construct
  source 1..9: note = Seed: LVVVGAVGV (KRAS G12V)
YVVGGIVGC

SEQ ID NO: 67083 - protein, 9 aa, synthetic construct
  source 1..9: note = Seed: LVVVGAVGV (KRAS G12V)
YVVGGIVGF

SEQ ID NO: 67084 - protein, 9 aa, synthetic construct
  source 1..9: note = Seed: LVVVGAVGV (KRAS G12V)
YVVGGIVGG

SEQ ID NO: 67085 - protein, 9 aa, synthetic construct
  source 1..9: note = Seed: LVVVGAVGV (KRAS G12V)
YVVGGIVGH

SEQ ID NO: 67086 - protein, 9 aa, synthetic construct
  source 1..9: note = Seed: LVVVGAVGV (KRAS G12V)
YVVGGIVGI

SEQ ID NO: 67087 - protein, 9 aa, synthetic construct
  source 1..9: note = Seed: LVVVGAVGV (KRAS G12V)
YVVGGIVGL

SEQ ID NO: 67088 - protein, 9 aa, synthetic construct
  source 1..9: note = Seed: LVVVGAVGV (KRAS G12V)
YVVGGIVGM

SEQ ID NO: 67089 - protein, 9 aa, synthetic construct
  source 1..9: note = Seed: LVVVGAVGV (KRAS G12V)
YVVGGIVGN

SEQ ID NO: 67090 - protein, 9 aa, synthetic construct
  source 1..9: note = Seed: LVVVGAVGV (KRAS G12V)
YVVGGIVGQ

SEQ ID NO: 67091 - protein, 9 aa, synthetic construct
  source 1..9: note = Seed: LVVVGAVGV (KRAS G12V)
YVVGGIVGS

SEQ ID NO: 67092 - protein, 9 aa, synthetic construct
  source 1..9: note = Seed: LVVVGAVGV (KRAS G12V)
YVVGGIVGT

SEQ ID NO: 67093 - protein, 9 aa, synthetic construct
  source 1..9: note = Seed: LVVVGAVGV (KRAS G12V)
YVVGGIVGV

SEQ ID NO: 67094 - protein, 9 aa, synthetic construct
  source 1..9: note = Seed: LVVVGAVGV (KRAS G12V)
YVVGGIVGY

SEQ ID NO: 67095 - protein, 9 aa, synthetic construct
  source 1..9: note = Seed: LVVVGAVGV (KRAS G12V)
YVVGGKVGA

SEQ ID NO: 67096 - protein, 9 aa, synthetic construct
  source 1..9: note = Seed: LVVVGAVGV (KRAS G12V)
YVVGGKVGI

SEQ ID NO: 67097 - protein, 9 aa, synthetic construct
  source 1..9: note = Seed: LVVVGAVGV (KRAS G12V)
YVVGGKVGM

SEQ ID NO: 67098 - protein, 9 aa, synthetic construct
  source 1..9: note = Seed: LVVVGAVGV (KRAS G12V)
YVVGGKVGS

SEQ ID NO: 67099 - protein, 9 aa, synthetic construct
  source 1..9: note = Seed: LVVVGAVGV (KRAS G12V)
YVVGGKVGV

SEQ ID NO: 67100 - protein, 9 aa, synthetic construct
  source 1..9: note = Seed: LVVVGAVGV (KRAS G12V)
YVVGGLVGA

SEQ ID NO: 67101 - protein, 9 aa, synthetic construct
  source 1..9: note = Seed: LVVVGAVGV (KRAS G12V)
YVVGGLVGD

SEQ ID NO: 67102 - protein, 9 aa, synthetic construct
  source 1..9: note = Seed: LVVVGAVGV (KRAS G12V)
YVVGGLVGG

SEQ ID NO: 67103 - protein, 9 aa, synthetic construct
  source 1..9: note = Seed: LVVVGAVGV (KRAS G12V)
YVVGGLVGI

SEQ ID NO: 67104 - protein, 9 aa, synthetic construct
  source 1..9: note = Seed: LVVVGAVGV (KRAS G12V)
YVVGGLVGL

SEQ ID NO: 67105 - protein, 9 aa, synthetic construct
  source 1..9: note = Seed: LVVVGAVGV (KRAS G12V)
YVVGGLVGM

SEQ ID NO: 67106 - protein, 9 aa, synthetic construct
  source 1..9: note = Seed: LVVVGAVGV (KRAS G12V)
YVVGGLVGN

SEQ ID NO: 67107 - protein, 9 aa, synthetic construct
  source 1..9: note = Seed: LVVVGAVGV (KRAS G12V)
YVVGGLVGQ

SEQ ID NO: 67108 - protein, 9 aa, synthetic construct
  source 1..9: note = Seed: LVVVGAVGV (KRAS G12V)
YVVGGLVGS

SEQ ID NO: 67109 - protein, 9 aa, synthetic construct
  source 1..9: note = Seed: LVVVGAVGV (KRAS G12V)
YVVGGLVGT

SEQ ID NO: 67110 - protein, 9 aa, synthetic construct
  source 1..9: note = Seed: LVVVGAVGV (KRAS G12V)
YVVGGLVGV

SEQ ID NO: 67111 - protein, 9 aa, synthetic construct
  source 1..9: note = Seed: LVVVGAVGV (KRAS G12V)
YVVGGMVGA

SEQ ID NO: 67112 - protein, 9 aa, synthetic construct
  source 1..9: note = Seed: LVVVGAVGV (KRAS G12V)
YVVGGMVGD

SEQ ID NO: 67113 - protein, 9 aa, synthetic construct
  source 1..9: note = Seed: LVVVGAVGV (KRAS G12V)
YVVGGMVGE

SEQ ID NO: 67114 - protein, 9 aa, synthetic construct
  source 1..9: note = Seed: LVVVGAVGV (KRAS G12V)
YVVGGMVGG

SEQ ID NO: 67115 - protein, 9 aa, synthetic construct
  source 1..9: note = Seed: LVVVGAVGV (KRAS G12V)
YVVGGMVGI

SEQ ID NO: 67116 - protein, 9 aa, synthetic construct
  source 1..9: note = Seed: LVVVGAVGV (KRAS G12V)
YVVGGMVGL

SEQ ID NO: 67117 - protein, 9 aa, synthetic construct
  source 1..9: note = Seed: LVVVGAVGV (KRAS G12V)
YVVGGMVGM

SEQ ID NO: 67118 - protein, 9 aa, synthetic construct
  source 1..9: note = Seed: LVVVGAVGV (KRAS G12V)
YVVGGMVGN

SEQ ID NO: 67119 - protein, 9 aa, synthetic construct
  source 1..9: note = Seed: LVVVGAVGV (KRAS G12V)
YVVGGMVGQ

SEQ ID NO: 67120 - protein, 9 aa, synthetic construct
  source 1..9: note = Seed: LVVVGAVGV (KRAS G12V)
YVVGGMVGS

SEQ ID NO: 67121 - protein, 9 aa, synthetic construct
  source 1..9: note = Seed: LVVVGAVGV (KRAS G12V)
YVVGGMVGT

SEQ ID NO: 67122 - protein, 9 aa, synthetic construct
  source 1..9: note = Seed: LVVVGAVGV (KRAS G12V)
YVVGGMVGV

SEQ ID NO: 67123 - protein, 9 aa, synthetic construct
  source 1..9: note = Seed: LVVVGAVGV (KRAS G12V)
YVVGGNVGA

SEQ ID NO: 67124 - protein, 9 aa, synthetic construct
  source 1..9: note = Seed: LVVVGAVGV (KRAS G12V)
YVVGGNVGC

SEQ ID NO: 67125 - protein, 9 aa, synthetic construct
  source 1..9: note = Seed: LVVVGAVGV (KRAS G12V)
YVVGGNVGF

SEQ ID NO: 67126 - protein, 9 aa, synthetic construct
  source 1..9: note = Seed: LVVVGAVGV (KRAS G12V)
YVVGGNVGG

SEQ ID NO: 67127 - protein, 9 aa, synthetic construct
  source 1..9: note = Seed: LVVVGAVGV (KRAS G12V)
YVVGGNVGH

SEQ ID NO: 67128 - protein, 9 aa, synthetic construct
  source 1..9: note = Seed: LVVVGAVGV (KRAS G12V)
YVVGGNVGI

SEQ ID NO: 67129 - protein, 9 aa, synthetic construct
  source 1..9: note = Seed: LVVVGAVGV (KRAS G12V)
YVVGGNVGL

SEQ ID NO: 67130 - protein, 9 aa, synthetic construct
  source 1..9: note = Seed: LVVVGAVGV (KRAS G12V)
YVVGGNVGM

SEQ ID NO: 67131 - protein, 9 aa, synthetic construct
  source 1..9: note = Seed: LVVVGAVGV (KRAS G12V)
YVVGGNVGN

SEQ ID NO: 67132 - protein, 9 aa, synthetic construct
  source 1..9: note = Seed: LVVVGAVGV (KRAS G12V)
YVVGGNVGQ

SEQ ID NO: 67133 - protein, 9 aa, synthetic construct
  source 1..9: note = Seed: LVVVGAVGV (KRAS G12V)
YVVGGNVGS

SEQ ID NO: 67134 - protein, 9 aa, synthetic construct
  source 1..9: note = Seed: LVVVGAVGV (KRAS G12V)
YVVGGNVGT

SEQ ID NO: 67135 - protein, 9 aa, synthetic construct
  source 1..9: note = Seed: LVVVGAVGV (KRAS G12V)
YVVGGNVGV

SEQ ID NO: 67136 - protein, 9 aa, synthetic construct
  source 1..9: note = Seed: LVVVGAVGV (KRAS G12V)
YVVGGNVGY

SEQ ID NO: 67137 - protein, 9 aa, synthetic construct
  source 1..9: note = Seed: LVVVGAVGV (KRAS G12V)
YVVGGPVGA

SEQ ID NO: 67138 - protein, 9 aa, synthetic construct
  source 1..9: note = Seed: LVVVGAVGV (KRAS G12V)
YVVGGPVGC

SEQ ID NO: 67139 - protein, 9 aa, synthetic construct
  source 1..9: note = Seed: LVVVGAVGV (KRAS G12V)
YVVGGPVGF

SEQ ID NO: 67140 - protein, 9 aa, synthetic construct
  source 1..9: note = Seed: LVVVGAVGV (KRAS G12V)
YVVGGPVGG

SEQ ID NO: 67141 - protein, 9 aa, synthetic construct
  source 1..9: note = Seed: LVVVGAVGV (KRAS G12V)
YVVGGPVGH

SEQ ID NO: 67142 - protein, 9 aa, synthetic construct
  source 1..9: note = Seed: LVVVGAVGV (KRAS G12V)
YVVGGPVGI

SEQ ID NO: 67143 - protein, 9 aa, synthetic construct
  source 1..9: note = Seed: LVVVGAVGV (KRAS G12V)
YVVGGPVGK

SEQ ID NO: 67144 - protein, 9 aa, synthetic construct
  source 1..9: note = Seed: LVVVGAVGV (KRAS G12V)
YVVGGPVGL

SEQ ID NO: 67145 - protein, 9 aa, synthetic construct
  source 1..9: note = Seed: LVVVGAVGV (KRAS G12V)
YVVGGPVGM

SEQ ID NO: 67146 - protein, 9 aa, synthetic construct
  source 1..9: note = Seed: LVVVGAVGV (KRAS G12V)
YVVGGPVGN

SEQ ID NO: 67147 - protein, 9 aa, synthetic construct
  source 1..9: note = Seed: LVVVGAVGV (KRAS G12V)
YVVGGPVGP

SEQ ID NO: 67148 - protein, 9 aa, synthetic construct
  source 1..9: note = Seed: LVVVGAVGV (KRAS G12V)
YVVGGPVGQ

SEQ ID NO: 67149 - protein, 9 aa, synthetic construct
  source 1..9: note = Seed: LVVVGAVGV (KRAS G12V)
YVVGGPVGR

SEQ ID NO: 67150 - protein, 9 aa, synthetic construct
  source 1..9: note = Seed: LVVVGAVGV (KRAS G12V)
YVVGGPVGS

SEQ ID NO: 67151 - protein, 9 aa, synthetic construct
  source 1..9: note = Seed: LVVVGAVGV (KRAS G12V)
YVVGGPVGT

SEQ ID NO: 67152 - protein, 9 aa, synthetic construct
  source 1..9: note = Seed: LVVVGAVGV (KRAS G12V)
YVVGGPVGV

SEQ ID NO: 67153 - protein, 9 aa, synthetic construct
  source 1..9: note = Seed: LVVVGAVGV (KRAS G12V)
YVVGGPVGW

SEQ ID NO: 67154 - protein, 9 aa, synthetic construct
  source 1..9: note = Seed: LVVVGAVGV (KRAS G12V)
YVVGGPVGY

SEQ ID NO: 67155 - protein, 9 aa, synthetic construct
  source 1..9: note = Seed: LVVVGAVGV (KRAS G12V)
YVVGGQVGA

SEQ ID NO: 67156 - protein, 9 aa, synthetic construct
  source 1..9: note = Seed: LVVVGAVGV (KRAS G12V)
YVVGGQVGI

SEQ ID NO: 67157 - protein, 9 aa, synthetic construct
  source 1..9: note = Seed: LVVVGAVGV (KRAS G12V)
YVVGGQVGL

SEQ ID NO: 67158 - protein, 9 aa, synthetic construct
  source 1..9: note = Seed: LVVVGAVGV (KRAS G12V)
YVVGGQVGM

SEQ ID NO: 67159 - protein, 9 aa, synthetic construct
  source 1..9: note = Seed: LVVVGAVGV (KRAS G12V)
YVVGGQVGV

SEQ ID NO: 67160 - protein, 9 aa, synthetic construct
  source 1..9: note = Seed: LVVVGAVGV (KRAS G12V)
YVVGGRVGA

SEQ ID NO: 67161 - protein, 9 aa, synthetic construct
  source 1..9: note = Seed: LVVVGAVGV (KRAS G12V)
YVVGGRVGI

SEQ ID NO: 67162 - protein, 9 aa, synthetic construct
  source 1..9: note = Seed: LVVVGAVGV (KRAS G12V)
YVVGGRVGQ

SEQ ID NO: 67163 - protein, 9 aa, synthetic construct
  source 1..9: note = Seed: LVVVGAVGV (KRAS G12V)
YVVGGRVGS

SEQ ID NO: 67164 - protein, 9 aa, synthetic construct
  source 1..9: note = Seed: LVVVGAVGV (KRAS G12V)
YVVGGRVGT

SEQ ID NO: 67165 - protein, 9 aa, synthetic construct
  source 1..9: note = Seed: LVVVGAVGV (KRAS G12V)
YVVGGRVGV

SEQ ID NO: 67166 - protein, 9 aa, synthetic construct
  source 1..9: note = Seed: LVVVGAVGV (KRAS G12V)
YVVGGSVGA

SEQ ID NO: 67167 - protein, 9 aa, synthetic construct
  source 1..9: note = Seed: LVVVGAVGV (KRAS G12V)
YVVGGSVGC

SEQ ID NO: 67168 - protein, 9 aa, synthetic construct
  source 1..9: note = Seed: LVVVGAVGV (KRAS G12V)
YVVGGSVGF

SEQ ID NO: 67169 - protein, 9 aa, synthetic construct
  source 1..9: note = Seed: LVVVGAVGV (KRAS G12V)
YVVGGSVGG

SEQ ID NO: 67170 - protein, 9 aa, synthetic construct
  source 1..9: note = Seed: LVVVGAVGV (KRAS G12V)
YVVGGSVGH

SEQ ID NO: 67171 - protein, 9 aa, synthetic construct
  source 1..9: note = Seed: LVVVGAVGV (KRAS G12V)
YVVGGSVGI

SEQ ID NO: 67172 - protein, 9 aa, synthetic construct
  source 1..9: note = Seed: LVVVGAVGV (KRAS G12V)
YVVGGSVGL

SEQ ID NO: 67173 - protein, 9 aa, synthetic construct
  source 1..9: note = Seed: LVVVGAVGV (KRAS G12V)
YVVGGSVGM

SEQ ID NO: 67174 - protein, 9 aa, synthetic construct
  source 1..9: note = Seed: LVVVGAVGV (KRAS G12V)
YVVGGSVGN

SEQ ID NO: 67175 - protein, 9 aa, synthetic construct
  source 1..9: note = Seed: LVVVGAVGV (KRAS G12V)
YVVGGSVGP

SEQ ID NO: 67176 - protein, 9 aa, synthetic construct
  source 1..9: note = Seed: LVVVGAVGV (KRAS G12V)
YVVGGSVGQ

SEQ ID NO: 67177 - protein, 9 aa, synthetic construct
  source 1..9: note = Seed: LVVVGAVGV (KRAS G12V)
YVVGGSVGR

SEQ ID NO: 67178 - protein, 9 aa, synthetic construct
  source 1..9: note = Seed: LVVVGAVGV (KRAS G12V)
YVVGGSVGS

SEQ ID NO: 67179 - protein, 9 aa, synthetic construct
  source 1..9: note = Seed: LVVVGAVGV (KRAS G12V)
YVVGGSVGT

SEQ ID NO: 67180 - protein, 9 aa, synthetic construct
  source 1..9: note = Seed: LVVVGAVGV (KRAS G12V)
YVVGGSVGV

SEQ ID NO: 67181 - protein, 9 aa, synthetic construct
  source 1..9: note = Seed: LVVVGAVGV (KRAS G12V)
YVVGGSVGY

SEQ ID NO: 67182 - protein, 9 aa, synthetic construct
  source 1..9: note = Seed: LVVVGAVGV (KRAS G12V)
YVVGGTVGA

SEQ ID NO: 67183 - protein, 9 aa, synthetic construct
  source 1..9: note = Seed: LVVVGAVGV (KRAS G12V)
YVVGGTVGC

SEQ ID NO: 67184 - protein, 9 aa, synthetic construct
  source 1..9: note = Seed: LVVVGAVGV (KRAS G12V)
YVVGGTVGF

SEQ ID NO: 67185 - protein, 9 aa, synthetic construct
  source 1..9: note = Seed: LVVVGAVGV (KRAS G12V)
YVVGGTVGG

SEQ ID NO: 67186 - protein, 9 aa, synthetic construct
  source 1..9: note = Seed: LVVVGAVGV (KRAS G12V)
YVVGGTVGH

SEQ ID NO: 67187 - protein, 9 aa, synthetic construct
  source 1..9: note = Seed: LVVVGAVGV (KRAS G12V)
YVVGGTVGI

SEQ ID NO: 67188 - protein, 9 aa, synthetic construct
  source 1..9: note = Seed: LVVVGAVGV (KRAS G12V)
YVVGGTVGK

SEQ ID NO: 67189 - protein, 9 aa, synthetic construct
  source 1..9: note = Seed: LVVVGAVGV (KRAS G12V)
YVVGGTVGL

SEQ ID NO: 67190 - protein, 9 aa, synthetic construct
  source 1..9: note = Seed: LVVVGAVGV (KRAS G12V)
YVVGGTVGM

SEQ ID NO: 67191 - protein, 9 aa, synthetic construct
  source 1..9: note = Seed: LVVVGAVGV (KRAS G12V)
YVVGGTVGN

SEQ ID NO: 67192 - protein, 9 aa, synthetic construct
  source 1..9: note = Seed: LVVVGAVGV (KRAS G12V)
YVVGGTVGQ

SEQ ID NO: 67193 - protein, 9 aa, synthetic construct
  source 1..9: note = Seed: LVVVGAVGV (KRAS G12V)
YVVGGTVGR

SEQ ID NO: 67194 - protein, 9 aa, synthetic construct
  source 1..9: note = Seed: LVVVGAVGV (KRAS G12V)
YVVGGTVGS

SEQ ID NO: 67195 - protein, 9 aa, synthetic construct
  source 1..9: note = Seed: LVVVGAVGV (KRAS G12V)
YVVGGTVGT

SEQ ID NO: 67196 - protein, 9 aa, synthetic construct
  source 1..9: note = Seed: LVVVGAVGV (KRAS G12V)
YVVGGTVGV

SEQ ID NO: 67197 - protein, 9 aa, synthetic construct
  source 1..9: note = Seed: LVVVGAVGV (KRAS G12V)
YVVGGTVGY

SEQ ID NO: 67198 - protein, 9 aa, synthetic construct
  source 1..9: note = Seed: LVVVGAVGV (KRAS G12V)
YVVGGVVGA

SEQ ID NO: 67199 - protein, 9 aa, synthetic construct
  source 1..9: note = Seed: LVVVGAVGV (KRAS G12V)
YVVGGVVGC

SEQ ID NO: 67200 - protein, 9 aa, synthetic construct
  source 1..9: note = Seed: LVVVGAVGV (KRAS G12V)
YVVGGVVGD

SEQ ID NO: 67201 - protein, 9 aa, synthetic construct
  source 1..9: note = Seed: LVVVGAVGV (KRAS G12V)
YVVGGVVGF

SEQ ID NO: 67202 - protein, 9 aa, synthetic construct
  source 1..9: note = Seed: LVVVGAVGV (KRAS G12V)
YVVGGVVGG

SEQ ID NO: 67203 - protein, 9 aa, synthetic construct
  source 1..9: note = Seed: LVVVGAVGV (KRAS G12V)
YVVGGVVGH

SEQ ID NO: 67204 - protein, 9 aa, synthetic construct
  source 1..9: note = Seed: LVVVGAVGV (KRAS G12V)
YVVGGVVGI

SEQ ID NO: 67205 - protein, 9 aa, synthetic construct
  source 1..9: note = Seed: LVVVGAVGV (KRAS G12V)
YVVGGVVGL

SEQ ID NO: 67206 - protein, 9 aa, synthetic construct
  source 1..9: note = Seed: LVVVGAVGV (KRAS G12V)
YVVGGVVGM

SEQ ID NO: 67207 - protein, 9 aa, synthetic construct
  source 1..9: note = Seed: LVVVGAVGV (KRAS G12V)
YVVGGVVGN

SEQ ID NO: 67208 - protein, 9 aa, synthetic construct
  source 1..9: note = Seed: LVVVGAVGV (KRAS G12V)
YVVGGVVGP

SEQ ID NO: 67209 - protein, 9 aa, synthetic construct
  source 1..9: note = Seed: LVVVGAVGV (KRAS G12V)
YVVGGVVGQ

SEQ ID NO: 67210 - protein, 9 aa, synthetic construct
  source 1..9: note = Seed: LVVVGAVGV (KRAS G12V)
YVVGGVVGR

SEQ ID NO: 67211 - protein, 9 aa, synthetic construct
  source 1..9: note = Seed: LVVVGAVGV (KRAS G12V)
YVVGGVVGS

SEQ ID NO: 67212 - protein, 9 aa, synthetic construct
  source 1..9: note = Seed: LVVVGAVGV (KRAS G12V)
YVVGGVVGT

SEQ ID NO: 67213 - protein, 9 aa, synthetic construct
  source 1..9: note = Seed: LVVVGAVGV (KRAS G12V)
YVVGGVVGV

SEQ ID NO: 67214 - protein, 9 aa, synthetic construct
  source 1..9: note = Seed: LVVVGAVGV (KRAS G12V)
YVVGGVVGW

SEQ ID NO: 67215 - protein, 9 aa, synthetic construct
  source 1..9: note = Seed: LVVVGAVGV (KRAS G12V)
YVVGGVVGY

SEQ ID NO: 67216 - protein, 9 aa, synthetic construct
  source 1..9: note = Seed: LVVVGAVGV (KRAS G12V)
YVVGGYVGA

SEQ ID NO: 67217 - protein, 9 aa, synthetic construct
  source 1..9: note = Seed: LVVVGAVGV (KRAS G12V)
YVVGGYVGI

SEQ ID NO: 67218 - protein, 9 aa, synthetic construct
  source 1..9: note = Seed: LVVVGAVGV (KRAS G12V)
YVVGGYVGL

SEQ ID NO: 67219 - protein, 9 aa, synthetic construct
  source 1..9: note = Seed: LVVVGAVGV (KRAS G12V)
YVVGGYVGM

SEQ ID NO: 67220 - protein, 9 aa, synthetic construct
  source 1..9: note = Seed: LVVVGAVGV (KRAS G12V)
YVVGGYVGV

SEQ ID NO: 67221 - protein, 9 aa, synthetic construct
  source 1..9: note = Seed: LVVVGAVGV (KRAS G12V)
YVVHGAVGA

SEQ ID NO: 67222 - protein, 9 aa, synthetic construct
  source 1..9: note = Seed: LVVVGAVGV (KRAS G12V)
YVVHGAVGC

SEQ ID NO: 67223 - protein, 9 aa, synthetic construct
  source 1..9: note = Seed: LVVVGAVGV (KRAS G12V)
YVVHGAVGF

SEQ ID NO: 67224 - protein, 9 aa, synthetic construct
  source 1..9: note = Seed: LVVVGAVGV (KRAS G12V)
YVVHGAVGG

SEQ ID NO: 67225 - protein, 9 aa, synthetic construct
  source 1..9: note = Seed: LVVVGAVGV (KRAS G12V)
YVVHGAVGH

SEQ ID NO: 67226 - protein, 9 aa, synthetic construct
  source 1..9: note = Seed: LVVVGAVGV (KRAS G12V)
YVVHGAVGI

SEQ ID NO: 67227 - protein, 9 aa, synthetic construct
  source 1..9: note = Seed: LVVVGAVGV (KRAS G12V)
YVVHGAVGK

SEQ ID NO: 67228 - protein, 9 aa, synthetic construct
  source 1..9: note = Seed: LVVVGAVGV (KRAS G12V)
YVVHGAVGL

SEQ ID NO: 67229 - protein, 9 aa, synthetic construct
  source 1..9: note = Seed: LVVVGAVGV (KRAS G12V)
YVVHGAVGM

SEQ ID NO: 67230 - protein, 9 aa, synthetic construct
  source 1..9: note = Seed: LVVVGAVGV (KRAS G12V)
YVVHGAVGN

SEQ ID NO: 67231 - protein, 9 aa, synthetic construct
  source 1..9: note = Seed: LVVVGAVGV (KRAS G12V)
YVVHGAVGQ

SEQ ID NO: 67232 - protein, 9 aa, synthetic construct
  source 1..9: note = Seed: LVVVGAVGV (KRAS G12V)
YVVHGAVGR

SEQ ID NO: 67233 - protein, 9 aa, synthetic construct
  source 1..9: note = Seed: LVVVGAVGV (KRAS G12V)
YVVHGAVGS

SEQ ID NO: 67234 - protein, 9 aa, synthetic construct
  source 1..9: note = Seed: LVVVGAVGV (KRAS G12V)
YVVHGAVGT

SEQ ID NO: 67235 - protein, 9 aa, synthetic construct
  source 1..9: note = Seed: LVVVGAVGV (KRAS G12V)
YVVHGAVGV

SEQ ID NO: 67236 - protein, 9 aa, synthetic construct
  source 1..9: note = Seed: LVVVGAVGV (KRAS G12V)
YVVHGAVGW

SEQ ID NO: 67237 - protein, 9 aa, synthetic construct
  source 1..9: note = Seed: LVVVGAVGV (KRAS G12V)
YVVHGAVGY

SEQ ID NO: 67238 - protein, 9 aa, synthetic construct
  source 1..9: note = Seed: LVVVGAVGV (KRAS G12V)
YVVHGCVGL

SEQ ID NO: 67239 - protein, 9 aa, synthetic construct
  source 1..9: note = Seed: LVVVGAVGV (KRAS G12V)
YVVHGCVGV

SEQ ID NO: 67240 - protein, 9 aa, synthetic construct
  source 1..9: note = Seed: LVVVGAVGV (KRAS G12V)
YVVHGFVGF

SEQ ID NO: 67241 - protein, 9 aa, synthetic construct
  source 1..9: note = Seed: LVVVGAVGV (KRAS G12V)
YVVHGFVGI

SEQ ID NO: 67242 - protein, 9 aa, synthetic construct
  source 1..9: note = Seed: LVVVGAVGV (KRAS G12V)
YVVHGFVGL

SEQ ID NO: 67243 - protein, 9 aa, synthetic construct
  source 1..9: note = Seed: LVVVGAVGV (KRAS G12V)
YVVHGFVGM

SEQ ID NO: 67244 - protein, 9 aa, synthetic construct
  source 1..9: note = Seed: LVVVGAVGV (KRAS G12V)
YVVHGFVGV

SEQ ID NO: 67245 - protein, 9 aa, synthetic construct
  source 1..9: note = Seed: LVVVGAVGV (KRAS G12V)
YVVHGGVGA

SEQ ID NO: 67246 - protein, 9 aa, synthetic construct
  source 1..9: note = Seed: LVVVGAVGV (KRAS G12V)
YVVHGGVGF

SEQ ID NO: 67247 - protein, 9 aa, synthetic construct
  source 1..9: note = Seed: LVVVGAVGV (KRAS G12V)
YVVHGGVGG

SEQ ID NO: 67248 - protein, 9 aa, synthetic construct
  source 1..9: note = Seed: LVVVGAVGV (KRAS G12V)
YVVHGGVGI

SEQ ID NO: 67249 - protein, 9 aa, synthetic construct
  source 1..9: note = Seed: LVVVGAVGV (KRAS G12V)
YVVHGGVGL

SEQ ID NO: 67250 - protein, 9 aa, synthetic construct
  source 1..9: note = Seed: LVVVGAVGV (KRAS G12V)
YVVHGGVGM

SEQ ID NO: 67251 - protein, 9 aa, synthetic construct
  source 1..9: note = Seed: LVVVGAVGV (KRAS G12V)
YVVHGGVGS

SEQ ID NO: 67252 - protein, 9 aa, synthetic construct
  source 1..9: note = Seed: LVVVGAVGV (KRAS G12V)
YVVHGGVGT

SEQ ID NO: 67253 - protein, 9 aa, synthetic construct
  source 1..9: note = Seed: LVVVGAVGV (KRAS G12V)
YVVHGGVGV

SEQ ID NO: 67254 - protein, 9 aa, synthetic construct
  source 1..9: note = Seed: LVVVGAVGV (KRAS G12V)
YVVHGHVGL

SEQ ID NO: 67255 - protein, 9 aa, synthetic construct
  source 1..9: note = Seed: LVVVGAVGV (KRAS G12V)
YVVHGIVGA

SEQ ID NO: 67256 - protein, 9 aa, synthetic construct
  source 1..9: note = Seed: LVVVGAVGV (KRAS G12V)
YVVHGIVGI

SEQ ID NO: 67257 - protein, 9 aa, synthetic construct
  source 1..9: note = Seed: LVVVGAVGV (KRAS G12V)
YVVHGIVGL

SEQ ID NO: 67258 - protein, 9 aa, synthetic construct
  source 1..9: note = Seed: LVVVGAVGV (KRAS G12V)
YVVHGIVGM

SEQ ID NO: 67259 - protein, 9 aa, synthetic construct
  source 1..9: note = Seed: LVVVGAVGV (KRAS G12V)
YVVHGIVGN

SEQ ID NO: 67260 - protein, 9 aa, synthetic construct
  source 1..9: note = Seed: LVVVGAVGV (KRAS G12V)
YVVHGIVGV

SEQ ID NO: 67261 - protein, 9 aa, synthetic construct
  source 1..9: note = Seed: LVVVGAVGV (KRAS G12V)
YVVHGKVGA

SEQ ID NO: 67262 - protein, 9 aa, synthetic construct
  source 1..9: note = Seed: LVVVGAVGV (KRAS G12V)
YVVHGKVGG

SEQ ID NO: 67263 - protein, 9 aa, synthetic construct
  source 1..9: note = Seed: LVVVGAVGV (KRAS G12V)
YVVHGKVGH

SEQ ID NO: 67264 - protein, 9 aa, synthetic construct
  source 1..9: note = Seed: LVVVGAVGV (KRAS G12V)
YVVHGKVGQ

SEQ ID NO: 67265 - protein, 9 aa, synthetic construct
  source 1..9: note = Seed: LVVVGAVGV (KRAS G12V)
YVVHGKVGS

SEQ ID NO: 67266 - protein, 9 aa, synthetic construct
  source 1..9: note = Seed: LVVVGAVGV (KRAS G12V)
YVVHGLVGA

SEQ ID NO: 67267 - protein, 9 aa, synthetic construct
  source 1..9: note = Seed: LVVVGAVGV (KRAS G12V)
YVVHGLVGI

SEQ ID NO: 67268 - protein, 9 aa, synthetic construct
  source 1..9: note = Seed: LVVVGAVGV (KRAS G12V)
YVVHGLVGL

SEQ ID NO: 67269 - protein, 9 aa, synthetic construct
  source 1..9: note = Seed: LVVVGAVGV (KRAS G12V)
YVVHGLVGM

SEQ ID NO: 67270 - protein, 9 aa, synthetic construct
  source 1..9: note = Seed: LVVVGAVGV (KRAS G12V)
YVVHGLVGV

SEQ ID NO: 67271 - protein, 9 aa, synthetic construct
  source 1..9: note = Seed: LVVVGAVGV (KRAS G12V)
YVVHGMVGA

SEQ ID NO: 67272 - protein, 9 aa, synthetic construct
  source 1..9: note = Seed: LVVVGAVGV (KRAS G12V)
YVVHGMVGF

SEQ ID NO: 67273 - protein, 9 aa, synthetic construct
  source 1..9: note = Seed: LVVVGAVGV (KRAS G12V)
YVVHGMVGI

SEQ ID NO: 67274 - protein, 9 aa, synthetic construct
  source 1..9: note = Seed: LVVVGAVGV (KRAS G12V)
YVVHGMVGL

SEQ ID NO: 67275 - protein, 9 aa, synthetic construct
  source 1..9: note = Seed: LVVVGAVGV (KRAS G12V)
YVVHGMVGM

SEQ ID NO: 67276 - protein, 9 aa, synthetic construct
  source 1..9: note = Seed: LVVVGAVGV (KRAS G12V)
YVVHGMVGV

SEQ ID NO: 67277 - protein, 9 aa, synthetic construct
  source 1..9: note = Seed: LVVVGAVGV (KRAS G12V)
YVVHGNVGA

SEQ ID NO: 67278 - protein, 9 aa, synthetic construct
  source 1..9: note = Seed: LVVVGAVGV (KRAS G12V)
YVVHGNVGF

SEQ ID NO: 67279 - protein, 9 aa, synthetic construct
  source 1..9: note = Seed: LVVVGAVGV (KRAS G12V)
YVVHGNVGI

SEQ ID NO: 67280 - protein, 9 aa, synthetic construct
  source 1..9: note = Seed: LVVVGAVGV (KRAS G12V)
YVVHGNVGL

SEQ ID NO: 67281 - protein, 9 aa, synthetic construct
  source 1..9: note = Seed: LVVVGAVGV (KRAS G12V)
YVVHGNVGM

SEQ ID NO: 67282 - protein, 9 aa, synthetic construct
  source 1..9: note = Seed: LVVVGAVGV (KRAS G12V)
YVVHGNVGS

SEQ ID NO: 67283 - protein, 9 aa, synthetic construct
  source 1..9: note = Seed: LVVVGAVGV (KRAS G12V)
YVVHGNVGT

SEQ ID NO: 67284 - protein, 9 aa, synthetic construct
  source 1..9: note = Seed: LVVVGAVGV (KRAS G12V)
YVVHGNVGV

SEQ ID NO: 67285 - protein, 9 aa, synthetic construct
  source 1..9: note = Seed: LVVVGAVGV (KRAS G12V)
YVVHGPVGA

SEQ ID NO: 67286 - protein, 9 aa, synthetic construct
  source 1..9: note = Seed: LVVVGAVGV (KRAS G12V)
YVVHGPVGF

SEQ ID NO: 67287 - protein, 9 aa, synthetic construct
  source 1..9: note = Seed: LVVVGAVGV (KRAS G12V)
YVVHGPVGI

SEQ ID NO: 67288 - protein, 9 aa, synthetic construct
  source 1..9: note = Seed: LVVVGAVGV (KRAS G12V)
YVVHGPVGL

SEQ ID NO: 67289 - protein, 9 aa, synthetic construct
  source 1..9: note = Seed: LVVVGAVGV (KRAS G12V)
YVVHGPVGM

SEQ ID NO: 67290 - protein, 9 aa, synthetic construct
  source 1..9: note = Seed: LVVVGAVGV (KRAS G12V)
YVVHGPVGN

SEQ ID NO: 67291 - protein, 9 aa, synthetic construct
  source 1..9: note = Seed: LVVVGAVGV (KRAS G12V)
YVVHGPVGS

SEQ ID NO: 67292 - protein, 9 aa, synthetic construct
  source 1..9: note = Seed: LVVVGAVGV (KRAS G12V)
YVVHGPVGT

SEQ ID NO: 67293 - protein, 9 aa, synthetic construct
  source 1..9: note = Seed: LVVVGAVGV (KRAS G12V)
YVVHGPVGV

SEQ ID NO: 67294 - protein, 9 aa, synthetic construct
  source 1..9: note = Seed: LVVVGAVGV (KRAS G12V)
YVVHGQVGL

SEQ ID NO: 67295 - protein, 9 aa, synthetic construct
  source 1..9: note = Seed: LVVVGAVGV (KRAS G12V)
YVVHGRVGA

SEQ ID NO: 67296 - protein, 9 aa, synthetic construct
  source 1..9: note = Seed: LVVVGAVGV (KRAS G12V)
YVVHGRVGG

SEQ ID NO: 67297 - protein, 9 aa, synthetic construct
  source 1..9: note = Seed: LVVVGAVGV (KRAS G12V)
YVVHGRVGH

SEQ ID NO: 67298 - protein, 9 aa, synthetic construct
  source 1..9: note = Seed: LVVVGAVGV (KRAS G12V)
YVVHGRVGM

SEQ ID NO: 67299 - protein, 9 aa, synthetic construct
  source 1..9: note = Seed: LVVVGAVGV (KRAS G12V)
YVVHGRVGN

SEQ ID NO: 67300 - protein, 9 aa, synthetic construct
  source 1..9: note = Seed: LVVVGAVGV (KRAS G12V)
YVVHGRVGQ

SEQ ID NO: 67301 - protein, 9 aa, synthetic construct
  source 1..9: note = Seed: LVVVGAVGV (KRAS G12V)
YVVHGRVGS

SEQ ID NO: 67302 - protein, 9 aa, synthetic construct
  source 1..9: note = Seed: LVVVGAVGV (KRAS G12V)
YVVHGRVGT

SEQ ID NO: 67303 - protein, 9 aa, synthetic construct
  source 1..9: note = Seed: LVVVGAVGV (KRAS G12V)
YVVHGRVGV

SEQ ID NO: 67304 - protein, 9 aa, synthetic construct
  source 1..9: note = Seed: LVVVGAVGV (KRAS G12V)
YVVHGSVGA

SEQ ID NO: 67305 - protein, 9 aa, synthetic construct
  source 1..9: note = Seed: LVVVGAVGV (KRAS G12V)
YVVHGSVGF

SEQ ID NO: 67306 - protein, 9 aa, synthetic construct
  source 1..9: note = Seed: LVVVGAVGV (KRAS G12V)
YVVHGSVGG

SEQ ID NO: 67307 - protein, 9 aa, synthetic construct
  source 1..9: note = Seed: LVVVGAVGV (KRAS G12V)
YVVHGSVGI

SEQ ID NO: 67308 - protein, 9 aa, synthetic construct
  source 1..9: note = Seed: LVVVGAVGV (KRAS G12V)
YVVHGSVGL

SEQ ID NO: 67309 - protein, 9 aa, synthetic construct
  source 1..9: note = Seed: LVVVGAVGV (KRAS G12V)
YVVHGSVGM

SEQ ID NO: 67310 - protein, 9 aa, synthetic construct
  source 1..9: note = Seed: LVVVGAVGV (KRAS G12V)
YVVHGSVGN

SEQ ID NO: 67311 - protein, 9 aa, synthetic construct
  source 1..9: note = Seed: LVVVGAVGV (KRAS G12V)
YVVHGSVGS

SEQ ID NO: 67312 - protein, 9 aa, synthetic construct
  source 1..9: note = Seed: LVVVGAVGV (KRAS G12V)
YVVHGSVGT

SEQ ID NO: 67313 - protein, 9 aa, synthetic construct
  source 1..9: note = Seed: LVVVGAVGV (KRAS G12V)
YVVHGSVGV

SEQ ID NO: 67314 - protein, 9 aa, synthetic construct
  source 1..9: note = Seed: LVVVGAVGV (KRAS G12V)
YVVHGSVGY

SEQ ID NO: 67315 - protein, 9 aa, synthetic construct
  source 1..9: note = Seed: LVVVGAVGV (KRAS G12V)
YVVHGTVGA

SEQ ID NO: 67316 - protein, 9 aa, synthetic construct
  source 1..9: note = Seed: LVVVGAVGV (KRAS G12V)
YVVHGTVGF

SEQ ID NO: 67317 - protein, 9 aa, synthetic construct
  source 1..9: note = Seed: LVVVGAVGV (KRAS G12V)
YVVHGTVGI

SEQ ID NO: 67318 - protein, 9 aa, synthetic construct
  source 1..9: note = Seed: LVVVGAVGV (KRAS G12V)
YVVHGTVGL

SEQ ID NO: 67319 - protein, 9 aa, synthetic construct
  source 1..9: note = Seed: LVVVGAVGV (KRAS G12V)
YVVHGTVGM

SEQ ID NO: 67320 - protein, 9 aa, synthetic construct
  source 1..9: note = Seed: LVVVGAVGV (KRAS G12V)
YVVHGTVGS

SEQ ID NO: 67321 - protein, 9 aa, synthetic construct
  source 1..9: note = Seed: LVVVGAVGV (KRAS G12V)
YVVHGTVGT

SEQ ID NO: 67322 - protein, 9 aa, synthetic construct
  source 1..9: note = Seed: LVVVGAVGV (KRAS G12V)
YVVHGTVGV

SEQ ID NO: 67323 - protein, 9 aa, synthetic construct
  source 1..9: note = Seed: LVVVGAVGV (KRAS G12V)
YVVHGVVGA

SEQ ID NO: 67324 - protein, 9 aa, synthetic construct
  source 1..9: note = Seed: LVVVGAVGV (KRAS G12V)
YVVHGVVGI

SEQ ID NO: 67325 - protein, 9 aa, synthetic construct
  source 1..9: note = Seed: LVVVGAVGV (KRAS G12V)
YVVHGVVGL

SEQ ID NO: 67326 - protein, 9 aa, synthetic construct
  source 1..9: note = Seed: LVVVGAVGV (KRAS G12V)
YVVHGVVGM

SEQ ID NO: 67327 - protein, 9 aa, synthetic construct
  source 1..9: note = Seed: LVVVGAVGV (KRAS G12V)
YVVHGVVGN

SEQ ID NO: 67328 - protein, 9 aa, synthetic construct
  source 1..9: note = Seed: LVVVGAVGV (KRAS G12V)
YVVHGVVGS

SEQ ID NO: 67329 - protein, 9 aa, synthetic construct
  source 1..9: note = Seed: LVVVGAVGV (KRAS G12V)
YVVHGVVGT

SEQ ID NO: 67330 - protein, 9 aa, synthetic construct
  source 1..9: note = Seed: LVVVGAVGV (KRAS G12V)
YVVHGVVGV

SEQ ID NO: 67331 - protein, 9 aa, synthetic construct
  source 1..9: note = Seed: LVVVGAVGV (KRAS G12V)
YVVHGYVGL

SEQ ID NO: 67332 - protein, 9 aa, synthetic construct
  source 1..9: note = Seed: LVVVGAVGV (KRAS G12V)
YVVIGAVGA

SEQ ID NO: 67333 - protein, 9 aa, synthetic construct
  source 1..9: note = Seed: LVVVGAVGV (KRAS G12V)
YVVIGAVGC

SEQ ID NO: 67334 - protein, 9 aa, synthetic construct
  source 1..9: note = Seed: LVVVGAVGV (KRAS G12V)
YVVIGAVGD

SEQ ID NO: 67335 - protein, 9 aa, synthetic construct
  source 1..9: note = Seed: LVVVGAVGV (KRAS G12V)
YVVIGAVGE

SEQ ID NO: 67336 - protein, 9 aa, synthetic construct
  source 1..9: note = Seed: LVVVGAVGV (KRAS G12V)
YVVIGAVGF

SEQ ID NO: 67337 - protein, 9 aa, synthetic construct
  source 1..9: note = Seed: LVVVGAVGV (KRAS G12V)
YVVIGAVGG

SEQ ID NO: 67338 - protein, 9 aa, synthetic construct
  source 1..9: note = Seed: LVVVGAVGV (KRAS G12V)
YVVIGAVGH

SEQ ID NO: 67339 - protein, 9 aa, synthetic construct
  source 1..9: note = Seed: LVVVGAVGV (KRAS G12V)
YVVIGAVGI

SEQ ID NO: 67340 - protein, 9 aa, synthetic construct
  source 1..9: note = Seed: LVVVGAVGV (KRAS G12V)
YVVIGAVGK

SEQ ID NO: 67341 - protein, 9 aa, synthetic construct
  source 1..9: note = Seed: LVVVGAVGV (KRAS G12V)
YVVIGAVGL

SEQ ID NO: 67342 - protein, 9 aa, synthetic construct
  source 1..9: note = Seed: LVVVGAVGV (KRAS G12V)
YVVIGAVGM

SEQ ID NO: 67343 - protein, 9 aa, synthetic construct
  source 1..9: note = Seed: LVVVGAVGV (KRAS G12V)
YVVIGAVGN

SEQ ID NO: 67344 - protein, 9 aa, synthetic construct
  source 1..9: note = Seed: LVVVGAVGV (KRAS G12V)
YVVIGAVGP

SEQ ID NO: 67345 - protein, 9 aa, synthetic construct
  source 1..9: note = Seed: LVVVGAVGV (KRAS G12V)
YVVIGAVGQ

SEQ ID NO: 67346 - protein, 9 aa, synthetic construct
  source 1..9: note = Seed: LVVVGAVGV (KRAS G12V)
YVVIGAVGR

SEQ ID NO: 67347 - protein, 9 aa, synthetic construct
  source 1..9: note = Seed: LVVVGAVGV (KRAS G12V)
YVVIGAVGS

SEQ ID NO: 67348 - protein, 9 aa, synthetic construct
  source 1..9: note = Seed: LVVVGAVGV (KRAS G12V)
YVVIGAVGT

SEQ ID NO: 67349 - protein, 9 aa, synthetic construct
  source 1..9: note = Seed: LVVVGAVGV (KRAS G12V)
YVVIGAVGV

SEQ ID NO: 67350 - protein, 9 aa, synthetic construct
  source 1..9: note = Seed: LVVVGAVGV (KRAS G12V)
YVVIGAVGW

SEQ ID NO: 67351 - protein, 9 aa, synthetic construct
  source 1..9: note = Seed: LVVVGAVGV (KRAS G12V)
YVVIGAVGY

SEQ ID NO: 67352 - protein, 9 aa, synthetic construct
  source 1..9: note = Seed: LVVVGAVGV (KRAS G12V)
YVVIGCVGA

SEQ ID NO: 67353 - protein, 9 aa, synthetic construct
  source 1..9: note = Seed: LVVVGAVGV (KRAS G12V)
YVVIGCVGI

SEQ ID NO: 67354 - protein, 9 aa, synthetic construct
  source 1..9: note = Seed: LVVVGAVGV (KRAS G12V)
YVVIGCVGL

SEQ ID NO: 67355 - protein, 9 aa, synthetic construct
  source 1..9: note = Seed: LVVVGAVGV (KRAS G12V)
YVVIGCVGN

SEQ ID NO: 67356 - protein, 9 aa, synthetic construct
  source 1..9: note = Seed: LVVVGAVGV (KRAS G12V)
YVVIGCVGT

SEQ ID NO: 67357 - protein, 9 aa, synthetic construct
  source 1..9: note = Seed: LVVVGAVGV (KRAS G12V)
YVVIGCVGV

SEQ ID NO: 67358 - protein, 9 aa, synthetic construct
  source 1..9: note = Seed: LVVVGAVGV (KRAS G12V)
YVVIGDVGA

SEQ ID NO: 67359 - protein, 9 aa, synthetic construct
  source 1..9: note = Seed: LVVVGAVGV (KRAS G12V)
YVVIGDVGG

SEQ ID NO: 67360 - protein, 9 aa, synthetic construct
  source 1..9: note = Seed: LVVVGAVGV (KRAS G12V)
YVVIGDVGH

SEQ ID NO: 67361 - protein, 9 aa, synthetic construct
  source 1..9: note = Seed: LVVVGAVGV (KRAS G12V)
YVVIGDVGI

SEQ ID NO: 67362 - protein, 9 aa, synthetic construct
  source 1..9: note = Seed: LVVVGAVGV (KRAS G12V)
YVVIGDVGL

SEQ ID NO: 67363 - protein, 9 aa, synthetic construct
  source 1..9: note = Seed: LVVVGAVGV (KRAS G12V)
YVVIGDVGM

SEQ ID NO: 67364 - protein, 9 aa, synthetic construct
  source 1..9: note = Seed: LVVVGAVGV (KRAS G12V)
YVVIGDVGN

SEQ ID NO: 67365 - protein, 9 aa, synthetic construct
  source 1..9: note = Seed: LVVVGAVGV (KRAS G12V)
YVVIGDVGS

SEQ ID NO: 67366 - protein, 9 aa, synthetic construct
  source 1..9: note = Seed: LVVVGAVGV (KRAS G12V)
YVVIGDVGT

SEQ ID NO: 67367 - protein, 9 aa, synthetic construct
  source 1..9: note = Seed: LVVVGAVGV (KRAS G12V)
YVVIGDVGV

SEQ ID NO: 67368 - protein, 9 aa, synthetic construct
  source 1..9: note = Seed: LVVVGAVGV (KRAS G12V)
YVVIGEVGA

SEQ ID NO: 67369 - protein, 9 aa, synthetic construct
  source 1..9: note = Seed: LVVVGAVGV (KRAS G12V)
YVVIGEVGH

SEQ ID NO: 67370 - protein, 9 aa, synthetic construct
  source 1..9: note = Seed: LVVVGAVGV (KRAS G12V)
YVVIGEVGI

SEQ ID NO: 67371 - protein, 9 aa, synthetic construct
  source 1..9: note = Seed: LVVVGAVGV (KRAS G12V)
YVVIGEVGL

SEQ ID NO: 67372 - protein, 9 aa, synthetic construct
  source 1..9: note = Seed: LVVVGAVGV (KRAS G12V)
YVVIGEVGM

SEQ ID NO: 67373 - protein, 9 aa, synthetic construct
  source 1..9: note = Seed: LVVVGAVGV (KRAS G12V)
YVVIGEVGN

SEQ ID NO: 67374 - protein, 9 aa, synthetic construct
  source 1..9: note = Seed: LVVVGAVGV (KRAS G12V)
YVVIGEVGQ

SEQ ID NO: 67375 - protein, 9 aa, synthetic construct
  source 1..9: note = Seed: LVVVGAVGV (KRAS G12V)
YVVIGEVGS

SEQ ID NO: 67376 - protein, 9 aa, synthetic construct
  source 1..9: note = Seed: LVVVGAVGV (KRAS G12V)
YVVIGEVGT

SEQ ID NO: 67377 - protein, 9 aa, synthetic construct
  source 1..9: note = Seed: LVVVGAVGV (KRAS G12V)
YVVIGEVGV

SEQ ID NO: 67378 - protein, 9 aa, synthetic construct
  source 1..9: note = Seed: LVVVGAVGV (KRAS G12V)
YVVIGFVGA

SEQ ID NO: 67379 - protein, 9 aa, synthetic construct
  source 1..9: note = Seed: LVVVGAVGV (KRAS G12V)
YVVIGFVGN

SEQ ID NO: 67380 - protein, 9 aa, synthetic construct
  source 1..9: note = Seed: LVVVGAVGV (KRAS G12V)
YVVIGGVGA

SEQ ID NO: 67381 - protein, 9 aa, synthetic construct
  source 1..9: note = Seed: LVVVGAVGV (KRAS G12V)
YVVIGGVGC

SEQ ID NO: 67382 - protein, 9 aa, synthetic construct
  source 1..9: note = Seed: LVVVGAVGV (KRAS G12V)
YVVIGGVGD

SEQ ID NO: 67383 - protein, 9 aa, synthetic construct
  source 1..9: note = Seed: LVVVGAVGV (KRAS G12V)
YVVIGGVGE

SEQ ID NO: 67384 - protein, 9 aa, synthetic construct
  source 1..9: note = Seed: LVVVGAVGV (KRAS G12V)
YVVIGGVGF

SEQ ID NO: 67385 - protein, 9 aa, synthetic construct
  source 1..9: note = Seed: LVVVGAVGV (KRAS G12V)
YVVIGGVGG

SEQ ID NO: 67386 - protein, 9 aa, synthetic construct
  source 1..9: note = Seed: LVVVGAVGV (KRAS G12V)
YVVIGGVGH

SEQ ID NO: 67387 - protein, 9 aa, synthetic construct
  source 1..9: note = Seed: LVVVGAVGV (KRAS G12V)
YVVIGGVGI

SEQ ID NO: 67388 - protein, 9 aa, synthetic construct
  source 1..9: note = Seed: LVVVGAVGV (KRAS G12V)
YVVIGGVGK

SEQ ID NO: 67389 - protein, 9 aa, synthetic construct
  source 1..9: note = Seed: LVVVGAVGV (KRAS G12V)
YVVIGGVGL

SEQ ID NO: 67390 - protein, 9 aa, synthetic construct
  source 1..9: note = Seed: LVVVGAVGV (KRAS G12V)
YVVIGGVGM

SEQ ID NO: 67391 - protein, 9 aa, synthetic construct
  source 1..9: note = Seed: LVVVGAVGV (KRAS G12V)
YVVIGGVGN

SEQ ID NO: 67392 - protein, 9 aa, synthetic construct
  source 1..9: note = Seed: LVVVGAVGV (KRAS G12V)
YVVIGGVGP

SEQ ID NO: 67393 - protein, 9 aa, synthetic construct
  source 1..9: note = Seed: LVVVGAVGV (KRAS G12V)
YVVIGGVGQ

SEQ ID NO: 67394 - protein, 9 aa, synthetic construct
  source 1..9: note = Seed: LVVVGAVGV (KRAS G12V)
YVVIGGVGR

SEQ ID NO: 67395 - protein, 9 aa, synthetic construct
  source 1..9: note = Seed: LVVVGAVGV (KRAS G12V)
YVVIGGVGS

SEQ ID NO: 67396 - protein, 9 aa, synthetic construct
  source 1..9: note = Seed: LVVVGAVGV (KRAS G12V)
YVVIGGVGT

SEQ ID NO: 67397 - protein, 9 aa, synthetic construct
  source 1..9: note = Seed: LVVVGAVGV (KRAS G12V)
YVVIGGVGV

SEQ ID NO: 67398 - protein, 9 aa, synthetic construct
  source 1..9: note = Seed: LVVVGAVGV (KRAS G12V)
YVVIGGVGW

SEQ ID NO: 67399 - protein, 9 aa, synthetic construct
  source 1..9: note = Seed: LVVVGAVGV (KRAS G12V)
YVVIGGVGY

SEQ ID NO: 67400 - protein, 9 aa, synthetic construct
  source 1..9: note = Seed: LVVVGAVGV (KRAS G12V)
YVVIGHVGA

SEQ ID NO: 67401 - protein, 9 aa, synthetic construct
  source 1..9: note = Seed: LVVVGAVGV (KRAS G12V)
YVVIGHVGC

SEQ ID NO: 67402 - protein, 9 aa, synthetic construct
  source 1..9: note = Seed: LVVVGAVGV (KRAS G12V)
YVVIGHVGD

SEQ ID NO: 67403 - protein, 9 aa, synthetic construct
  source 1..9: note = Seed: LVVVGAVGV (KRAS G12V)
YVVIGHVGE

SEQ ID NO: 67404 - protein, 9 aa, synthetic construct
  source 1..9: note = Seed: LVVVGAVGV (KRAS G12V)
YVVIGHVGF

SEQ ID NO: 67405 - protein, 9 aa, synthetic construct
  source 1..9: note = Seed: LVVVGAVGV (KRAS G12V)
YVVIGHVGG

SEQ ID NO: 67406 - protein, 9 aa, synthetic construct
  source 1..9: note = Seed: LVVVGAVGV (KRAS G12V)
YVVIGHVGH

SEQ ID NO: 67407 - protein, 9 aa, synthetic construct
  source 1..9: note = Seed: LVVVGAVGV (KRAS G12V)
YVVIGHVGI

SEQ ID NO: 67408 - protein, 9 aa, synthetic construct
  source 1..9: note = Seed: LVVVGAVGV (KRAS G12V)
YVVIGHVGK

SEQ ID NO: 67409 - protein, 9 aa, synthetic construct
  source 1..9: note = Seed: LVVVGAVGV (KRAS G12V)
YVVIGHVGL

SEQ ID NO: 67410 - protein, 9 aa, synthetic construct
  source 1..9: note = Seed: LVVVGAVGV (KRAS G12V)
YVVIGHVGM

SEQ ID NO: 67411 - protein, 9 aa, synthetic construct
  source 1..9: note = Seed: LVVVGAVGV (KRAS G12V)
YVVIGHVGN

SEQ ID NO: 67412 - protein, 9 aa, synthetic construct
  source 1..9: note = Seed: LVVVGAVGV (KRAS G12V)
YVVIGHVGP

SEQ ID NO: 67413 - protein, 9 aa, synthetic construct
  source 1..9: note = Seed: LVVVGAVGV (KRAS G12V)
YVVIGHVGQ

SEQ ID NO: 67414 - protein, 9 aa, synthetic construct
  source 1..9: note = Seed: LVVVGAVGV (KRAS G12V)
YVVIGHVGR

SEQ ID NO: 67415 - protein, 9 aa, synthetic construct
  source 1..9: note = Seed: LVVVGAVGV (KRAS G12V)
YVVIGHVGS

SEQ ID NO: 67416 - protein, 9 aa, synthetic construct
  source 1..9: note = Seed: LVVVGAVGV (KRAS G12V)
YVVIGHVGT

SEQ ID NO: 67417 - protein, 9 aa, synthetic construct
  source 1..9: note = Seed: LVVVGAVGV (KRAS G12V)
YVVIGHVGV

SEQ ID NO: 67418 - protein, 9 aa, synthetic construct
  source 1..9: note = Seed: LVVVGAVGV (KRAS G12V)
YVVIGHVGY

SEQ ID NO: 67419 - protein, 9 aa, synthetic construct
  source 1..9: note = Seed: LVVVGAVGV (KRAS G12V)
YVVIGIVGA

SEQ ID NO: 67420 - protein, 9 aa, synthetic construct
  source 1..9: note = Seed: LVVVGAVGV (KRAS G12V)
YVVIGIVGD

SEQ ID NO: 67421 - protein, 9 aa, synthetic construct
  source 1..9: note = Seed: LVVVGAVGV (KRAS G12V)
YVVIGIVGE

SEQ ID NO: 67422 - protein, 9 aa, synthetic construct
  source 1..9: note = Seed: LVVVGAVGV (KRAS G12V)
YVVIGIVGG

SEQ ID NO: 67423 - protein, 9 aa, synthetic construct
  source 1..9: note = Seed: LVVVGAVGV (KRAS G12V)
YVVIGIVGH

SEQ ID NO: 67424 - protein, 9 aa, synthetic construct
  source 1..9: note = Seed: LVVVGAVGV (KRAS G12V)
YVVIGIVGI

SEQ ID NO: 67425 - protein, 9 aa, synthetic construct
  source 1..9: note = Seed: LVVVGAVGV (KRAS G12V)
YVVIGIVGK

SEQ ID NO: 67426 - protein, 9 aa, synthetic construct
  source 1..9: note = Seed: LVVVGAVGV (KRAS G12V)
YVVIGIVGL

SEQ ID NO: 67427 - protein, 9 aa, synthetic construct
  source 1..9: note = Seed: LVVVGAVGV (KRAS G12V)
YVVIGIVGM

SEQ ID NO: 67428 - protein, 9 aa, synthetic construct
  source 1..9: note = Seed: LVVVGAVGV (KRAS G12V)
YVVIGIVGN

SEQ ID NO: 67429 - protein, 9 aa, synthetic construct
  source 1..9: note = Seed: LVVVGAVGV (KRAS G12V)
YVVIGIVGP

SEQ ID NO: 67430 - protein, 9 aa, synthetic construct
  source 1..9: note = Seed: LVVVGAVGV (KRAS G12V)
YVVIGIVGQ

SEQ ID NO: 67431 - protein, 9 aa, synthetic construct
  source 1..9: note = Seed: LVVVGAVGV (KRAS G12V)
YVVIGIVGR

SEQ ID NO: 67432 - protein, 9 aa, synthetic construct
  source 1..9: note = Seed: LVVVGAVGV (KRAS G12V)
YVVIGIVGS

SEQ ID NO: 67433 - protein, 9 aa, synthetic construct
  source 1..9: note = Seed: LVVVGAVGV (KRAS G12V)
YVVIGIVGT

SEQ ID NO: 67434 - protein, 9 aa, synthetic construct
  source 1..9: note = Seed: LVVVGAVGV (KRAS G12V)
YVVIGIVGV

SEQ ID NO: 67435 - protein, 9 aa, synthetic construct
  source 1..9: note = Seed: LVVVGAVGV (KRAS G12V)
YVVIGIVGY

SEQ ID NO: 67436 - protein, 9 aa, synthetic construct
  source 1..9: note = Seed: LVVVGAVGV (KRAS G12V)
YVVIGKVGA

SEQ ID NO: 67437 - protein, 9 aa, synthetic construct
  source 1..9: note = Seed: LVVVGAVGV (KRAS G12V)
YVVIGKVGE

SEQ ID NO: 67438 - protein, 9 aa, synthetic construct
  source 1..9: note = Seed: LVVVGAVGV (KRAS G12V)
YVVIGKVGF

SEQ ID NO: 67439 - protein, 9 aa, synthetic construct
  source 1..9: note = Seed: LVVVGAVGV (KRAS G12V)
YVVIGKVGG

SEQ ID NO: 67440 - protein, 9 aa, synthetic construct
  source 1..9: note = Seed: LVVVGAVGV (KRAS G12V)
YVVIGKVGH

SEQ ID NO: 67441 - protein, 9 aa, synthetic construct
  source 1..9: note = Seed: LVVVGAVGV (KRAS G12V)
YVVIGKVGI

SEQ ID NO: 67442 - protein, 9 aa, synthetic construct
  source 1..9: note = Seed: LVVVGAVGV (KRAS G12V)
YVVIGKVGK

SEQ ID NO: 67443 - protein, 9 aa, synthetic construct
  source 1..9: note = Seed: LVVVGAVGV (KRAS G12V)
YVVIGKVGL

SEQ ID NO: 67444 - protein, 9 aa, synthetic construct
  source 1..9: note = Seed: LVVVGAVGV (KRAS G12V)
YVVIGKVGM

SEQ ID NO: 67445 - protein, 9 aa, synthetic construct
  source 1..9: note = Seed: LVVVGAVGV (KRAS G12V)
YVVIGKVGN

SEQ ID NO: 67446 - protein, 9 aa, synthetic construct
  source 1..9: note = Seed: LVVVGAVGV (KRAS G12V)
YVVIGKVGP

SEQ ID NO: 67447 - protein, 9 aa, synthetic construct
  source 1..9: note = Seed: LVVVGAVGV (KRAS G12V)
YVVIGKVGQ

SEQ ID NO: 67448 - protein, 9 aa, synthetic construct
  source 1..9: note = Seed: LVVVGAVGV (KRAS G12V)
YVVIGKVGR

SEQ ID NO: 67449 - protein, 9 aa, synthetic construct
  source 1..9: note = Seed: LVVVGAVGV (KRAS G12V)
YVVIGKVGS

SEQ ID NO: 67450 - protein, 9 aa, synthetic construct
  source 1..9: note = Seed: LVVVGAVGV (KRAS G12V)
YVVIGKVGT

SEQ ID NO: 67451 - protein, 9 aa, synthetic construct
  source 1..9: note = Seed: LVVVGAVGV (KRAS G12V)
YVVIGKVGV

SEQ ID NO: 67452 - protein, 9 aa, synthetic construct
  source 1..9: note = Seed: LVVVGAVGV (KRAS G12V)
YVVIGKVGY

SEQ ID NO: 67453 - protein, 9 aa, synthetic construct
  source 1..9: note = Seed: LVVVGAVGV (KRAS G12V)
YVVIGLVGA

SEQ ID NO: 67454 - protein, 9 aa, synthetic construct
  source 1..9: note = Seed: LVVVGAVGV (KRAS G12V)
YVVIGLVGD

SEQ ID NO: 67455 - protein, 9 aa, synthetic construct
  source 1..9: note = Seed: LVVVGAVGV (KRAS G12V)
YVVIGLVGE

SEQ ID NO: 67456 - protein, 9 aa, synthetic construct
  source 1..9: note = Seed: LVVVGAVGV (KRAS G12V)
YVVIGLVGG

SEQ ID NO: 67457 - protein, 9 aa, synthetic construct
  source 1..9: note = Seed: LVVVGAVGV (KRAS G12V)
YVVIGLVGH

SEQ ID NO: 67458 - protein, 9 aa, synthetic construct
  source 1..9: note = Seed: LVVVGAVGV (KRAS G12V)
YVVIGLVGI

SEQ ID NO: 67459 - protein, 9 aa, synthetic construct
  source 1..9: note = Seed: LVVVGAVGV (KRAS G12V)
YVVIGLVGK

SEQ ID NO: 67460 - protein, 9 aa, synthetic construct
  source 1..9: note = Seed: LVVVGAVGV (KRAS G12V)
YVVIGLVGL

SEQ ID NO: 67461 - protein, 9 aa, synthetic construct
  source 1..9: note = Seed: LVVVGAVGV (KRAS G12V)
YVVIGLVGM

SEQ ID NO: 67462 - protein, 9 aa, synthetic construct
  source 1..9: note = Seed: LVVVGAVGV (KRAS G12V)
YVVIGLVGN

SEQ ID NO: 67463 - protein, 9 aa, synthetic construct
  source 1..9: note = Seed: LVVVGAVGV (KRAS G12V)
YVVIGLVGP

SEQ ID NO: 67464 - protein, 9 aa, synthetic construct
  source 1..9: note = Seed: LVVVGAVGV (KRAS G12V)
YVVIGLVGQ

SEQ ID NO: 67465 - protein, 9 aa, synthetic construct
  source 1..9: note = Seed: LVVVGAVGV (KRAS G12V)
YVVIGLVGR

SEQ ID NO: 67466 - protein, 9 aa, synthetic construct
  source 1..9: note = Seed: LVVVGAVGV (KRAS G12V)
YVVIGLVGS

SEQ ID NO: 67467 - protein, 9 aa, synthetic construct
  source 1..9: note = Seed: LVVVGAVGV (KRAS G12V)
YVVIGLVGT

SEQ ID NO: 67468 - protein, 9 aa, synthetic construct
  source 1..9: note = Seed: LVVVGAVGV (KRAS G12V)
YVVIGLVGV

SEQ ID NO: 67469 - protein, 9 aa, synthetic construct
  source 1..9: note = Seed: LVVVGAVGV (KRAS G12V)
YVVIGLVGY

SEQ ID NO: 67470 - protein, 9 aa, synthetic construct
  source 1..9: note = Seed: LVVVGAVGV (KRAS G12V)
YVVIGMVGA

SEQ ID NO: 67471 - protein, 9 aa, synthetic construct
  source 1..9: note = Seed: LVVVGAVGV (KRAS G12V)
YVVIGMVGC

SEQ ID NO: 67472 - protein, 9 aa, synthetic construct
  source 1..9: note = Seed: LVVVGAVGV (KRAS G12V)
YVVIGMVGD

SEQ ID NO: 67473 - protein, 9 aa, synthetic construct
  source 1..9: note = Seed: LVVVGAVGV (KRAS G12V)
YVVIGMVGE

SEQ ID NO: 67474 - protein, 9 aa, synthetic construct
  source 1..9: note = Seed: LVVVGAVGV (KRAS G12V)
YVVIGMVGF

SEQ ID NO: 67475 - protein, 9 aa, synthetic construct
  source 1..9: note = Seed: LVVVGAVGV (KRAS G12V)
YVVIGMVGG

SEQ ID NO: 67476 - protein, 9 aa, synthetic construct
  source 1..9: note = Seed: LVVVGAVGV (KRAS G12V)
YVVIGMVGH

SEQ ID NO: 67477 - protein, 9 aa, synthetic construct
  source 1..9: note = Seed: LVVVGAVGV (KRAS G12V)
YVVIGMVGI

SEQ ID NO: 67478 - protein, 9 aa, synthetic construct
  source 1..9: note = Seed: LVVVGAVGV (KRAS G12V)
YVVIGMVGK

SEQ ID NO: 67479 - protein, 9 aa, synthetic construct
  source 1..9: note = Seed: LVVVGAVGV (KRAS G12V)
YVVIGMVGL

SEQ ID NO: 67480 - protein, 9 aa, synthetic construct
  source 1..9: note = Seed: LVVVGAVGV (KRAS G12V)
YVVIGMVGM

SEQ ID NO: 67481 - protein, 9 aa, synthetic construct
  source 1..9: note = Seed: LVVVGAVGV (KRAS G12V)
YVVIGMVGN

SEQ ID NO: 67482 - protein, 9 aa, synthetic construct
  source 1..9: note = Seed: LVVVGAVGV (KRAS G12V)
YVVIGMVGP

SEQ ID NO: 67483 - protein, 9 aa, synthetic construct
  source 1..9: note = Seed: LVVVGAVGV (KRAS G12V)
YVVIGMVGQ

SEQ ID NO: 67484 - protein, 9 aa, synthetic construct
  source 1..9: note = Seed: LVVVGAVGV (KRAS G12V)
YVVIGMVGR

SEQ ID NO: 67485 - protein, 9 aa, synthetic construct
  source 1..9: note = Seed: LVVVGAVGV (KRAS G12V)
YVVIGMVGS

SEQ ID NO: 67486 - protein, 9 aa, synthetic construct
  source 1..9: note = Seed: LVVVGAVGV (KRAS G12V)
YVVIGMVGT

SEQ ID NO: 67487 - protein, 9 aa, synthetic construct
  source 1..9: note = Seed: LVVVGAVGV (KRAS G12V)
YVVIGMVGV

SEQ ID NO: 67488 - protein, 9 aa, synthetic construct
  source 1..9: note = Seed: LVVVGAVGV (KRAS G12V)
YVVIGMVGY

SEQ ID NO: 67489 - protein, 9 aa, synthetic construct
  source 1..9: note = Seed: LVVVGAVGV (KRAS G12V)
YVVIGNVGA

SEQ ID NO: 67490 - protein, 9 aa, synthetic construct
  source 1..9: note = Seed: LVVVGAVGV (KRAS G12V)
YVVIGNVGC

SEQ ID NO: 67491 - protein, 9 aa, synthetic construct
  source 1..9: note = Seed: LVVVGAVGV (KRAS G12V)
YVVIGNVGD

SEQ ID NO: 67492 - protein, 9 aa, synthetic construct
  source 1..9: note = Seed: LVVVGAVGV (KRAS G12V)
YVVIGNVGE

SEQ ID NO: 67493 - protein, 9 aa, synthetic construct
  source 1..9: note = Seed: LVVVGAVGV (KRAS G12V)
YVVIGNVGF

SEQ ID NO: 67494 - protein, 9 aa, synthetic construct
  source 1..9: note = Seed: LVVVGAVGV (KRAS G12V)
YVVIGNVGG

SEQ ID NO: 67495 - protein, 9 aa, synthetic construct
  source 1..9: note = Seed: LVVVGAVGV (KRAS G12V)
YVVIGNVGH

SEQ ID NO: 67496 - protein, 9 aa, synthetic construct
  source 1..9: note = Seed: LVVVGAVGV (KRAS G12V)
YVVIGNVGI

SEQ ID NO: 67497 - protein, 9 aa, synthetic construct
  source 1..9: note = Seed: LVVVGAVGV (KRAS G12V)
YVVIGNVGK

SEQ ID NO: 67498 - protein, 9 aa, synthetic construct
  source 1..9: note = Seed: LVVVGAVGV (KRAS G12V)
YVVIGNVGL

SEQ ID NO: 67499 - protein, 9 aa, synthetic construct
  source 1..9: note = Seed: LVVVGAVGV (KRAS G12V)
YVVIGNVGM

SEQ ID NO: 67500 - protein, 9 aa, synthetic construct
  source 1..9: note = Seed: LVVVGAVGV (KRAS G12V)
YVVIGNVGN

SEQ ID NO: 67501 - protein, 9 aa, synthetic construct
  source 1..9: note = Seed: LVVVGAVGV (KRAS G12V)
YVVIGNVGP

SEQ ID NO: 67502 - protein, 9 aa, synthetic construct
  source 1..9: note = Seed: LVVVGAVGV (KRAS G12V)
YVVIGNVGQ

SEQ ID NO: 67503 - protein, 9 aa, synthetic construct
  source 1..9: note = Seed: LVVVGAVGV (KRAS G12V)
YVVIGNVGR

SEQ ID NO: 67504 - protein, 9 aa, synthetic construct
  source 1..9: note = Seed: LVVVGAVGV (KRAS G12V)
YVVIGNVGS

SEQ ID NO: 67505 - protein, 9 aa, synthetic construct
  source 1..9: note = Seed: LVVVGAVGV (KRAS G12V)
YVVIGNVGT

SEQ ID NO: 67506 - protein, 9 aa, synthetic construct
  source 1..9: note = Seed: LVVVGAVGV (KRAS G12V)
YVVIGNVGV

SEQ ID NO: 67507 - protein, 9 aa, synthetic construct
  source 1..9: note = Seed: LVVVGAVGV (KRAS G12V)
YVVIGNVGW

SEQ ID NO: 67508 - protein, 9 aa, synthetic construct
  source 1..9: note = Seed: LVVVGAVGV (KRAS G12V)
YVVIGNVGY

SEQ ID NO: 67509 - protein, 9 aa, synthetic construct
  source 1..9: note = Seed: LVVVGAVGV (KRAS G12V)
YVVIGPVGA

SEQ ID NO: 67510 - protein, 9 aa, synthetic construct
  source 1..9: note = Seed: LVVVGAVGV (KRAS G12V)
YVVIGPVGC

SEQ ID NO: 67511 - protein, 9 aa, synthetic construct
  source 1..9: note = Seed: LVVVGAVGV (KRAS G12V)
YVVIGPVGD

SEQ ID NO: 67512 - protein, 9 aa, synthetic construct
  source 1..9: note = Seed: LVVVGAVGV (KRAS G12V)
YVVIGPVGE

SEQ ID NO: 67513 - protein, 9 aa, synthetic construct
  source 1..9: note = Seed: LVVVGAVGV (KRAS G12V)
YVVIGPVGF

SEQ ID NO: 67514 - protein, 9 aa, synthetic construct
  source 1..9: note = Seed: LVVVGAVGV (KRAS G12V)
YVVIGPVGG

SEQ ID NO: 67515 - protein, 9 aa, synthetic construct
  source 1..9: note = Seed: LVVVGAVGV (KRAS G12V)
YVVIGPVGH

SEQ ID NO: 67516 - protein, 9 aa, synthetic construct
  source 1..9: note = Seed: LVVVGAVGV (KRAS G12V)
YVVIGPVGI

SEQ ID NO: 67517 - protein, 9 aa, synthetic construct
  source 1..9: note = Seed: LVVVGAVGV (KRAS G12V)
YVVIGPVGK

SEQ ID NO: 67518 - protein, 9 aa, synthetic construct
  source 1..9: note = Seed: LVVVGAVGV (KRAS G12V)
YVVIGPVGL

SEQ ID NO: 67519 - protein, 9 aa, synthetic construct
  source 1..9: note = Seed: LVVVGAVGV (KRAS G12V)
YVVIGPVGM

SEQ ID NO: 67520 - protein, 9 aa, synthetic construct
  source 1..9: note = Seed: LVVVGAVGV (KRAS G12V)
YVVIGPVGN

SEQ ID NO: 67521 - protein, 9 aa, synthetic construct
  source 1..9: note = Seed: LVVVGAVGV (KRAS G12V)
YVVIGPVGP

SEQ ID NO: 67522 - protein, 9 aa, synthetic construct
  source 1..9: note = Seed: LVVVGAVGV (KRAS G12V)
YVVIGPVGQ

SEQ ID NO: 67523 - protein, 9 aa, synthetic construct
  source 1..9: note = Seed: LVVVGAVGV (KRAS G12V)
YVVIGPVGR

SEQ ID NO: 67524 - protein, 9 aa, synthetic construct
  source 1..9: note = Seed: LVVVGAVGV (KRAS G12V)
YVVIGPVGS

SEQ ID NO: 67525 - protein, 9 aa, synthetic construct
  source 1..9: note = Seed: LVVVGAVGV (KRAS G12V)
YVVIGPVGT

SEQ ID NO: 67526 - protein, 9 aa, synthetic construct
  source 1..9: note = Seed: LVVVGAVGV (KRAS G12V)
YVVIGPVGV

SEQ ID NO: 67527 - protein, 9 aa, synthetic construct
  source 1..9: note = Seed: LVVVGAVGV (KRAS G12V)
YVVIGPVGW

SEQ ID NO: 67528 - protein, 9 aa, synthetic construct
  source 1..9: note = Seed: LVVVGAVGV (KRAS G12V)
YVVIGPVGY

SEQ ID NO: 67529 - protein, 9 aa, synthetic construct
  source 1..9: note = Seed: LVVVGAVGV (KRAS G12V)
YVVIGQVGA

SEQ ID NO: 67530 - protein, 9 aa, synthetic construct
  source 1..9: note = Seed: LVVVGAVGV (KRAS G12V)
YVVIGQVGD

SEQ ID NO: 67531 - protein, 9 aa, synthetic construct
  source 1..9: note = Seed: LVVVGAVGV (KRAS G12V)
YVVIGQVGE

SEQ ID NO: 67532 - protein, 9 aa, synthetic construct
  source 1..9: note = Seed: LVVVGAVGV (KRAS G12V)
YVVIGQVGF

SEQ ID NO: 67533 - protein, 9 aa, synthetic construct
  source 1..9: note = Seed: LVVVGAVGV (KRAS G12V)
YVVIGQVGG

SEQ ID NO: 67534 - protein, 9 aa, synthetic construct
  source 1..9: note = Seed: LVVVGAVGV (KRAS G12V)
YVVIGQVGH

SEQ ID NO: 67535 - protein, 9 aa, synthetic construct
  source 1..9: note = Seed: LVVVGAVGV (KRAS G12V)
YVVIGQVGI

SEQ ID NO: 67536 - protein, 9 aa, synthetic construct
  source 1..9: note = Seed: LVVVGAVGV (KRAS G12V)
YVVIGQVGK

SEQ ID NO: 67537 - protein, 9 aa, synthetic construct
  source 1..9: note = Seed: LVVVGAVGV (KRAS G12V)
YVVIGQVGL

SEQ ID NO: 67538 - protein, 9 aa, synthetic construct
  source 1..9: note = Seed: LVVVGAVGV (KRAS G12V)
YVVIGQVGM

SEQ ID NO: 67539 - protein, 9 aa, synthetic construct
  source 1..9: note = Seed: LVVVGAVGV (KRAS G12V)
YVVIGQVGN

SEQ ID NO: 67540 - protein, 9 aa, synthetic construct
  source 1..9: note = Seed: LVVVGAVGV (KRAS G12V)
YVVIGQVGP

SEQ ID NO: 67541 - protein, 9 aa, synthetic construct
  source 1..9: note = Seed: LVVVGAVGV (KRAS G12V)
YVVIGQVGQ

SEQ ID NO: 67542 - protein, 9 aa, synthetic construct
  source 1..9: note = Seed: LVVVGAVGV (KRAS G12V)
YVVIGQVGR

SEQ ID NO: 67543 - protein, 9 aa, synthetic construct
  source 1..9: note = Seed: LVVVGAVGV (KRAS G12V)
YVVIGQVGS

SEQ ID NO: 67544 - protein, 9 aa, synthetic construct
  source 1..9: note = Seed: LVVVGAVGV (KRAS G12V)
YVVIGQVGT

SEQ ID NO: 67545 - protein, 9 aa, synthetic construct
  source 1..9: note = Seed: LVVVGAVGV (KRAS G12V)
YVVIGQVGV

SEQ ID NO: 67546 - protein, 9 aa, synthetic construct
  source 1..9: note = Seed: LVVVGAVGV (KRAS G12V)
YVVIGQVGY

SEQ ID NO: 67547 - protein, 9 aa, synthetic construct
  source 1..9: note = Seed: LVVVGAVGV (KRAS G12V)
YVVIGRVGA

SEQ ID NO: 67548 - protein, 9 aa, synthetic construct
  source 1..9: note = Seed: LVVVGAVGV (KRAS G12V)
YVVIGRVGE

SEQ ID NO: 67549 - protein, 9 aa, synthetic construct
  source 1..9: note = Seed: LVVVGAVGV (KRAS G12V)
YVVIGRVGF

SEQ ID NO: 67550 - protein, 9 aa, synthetic construct
  source 1..9: note = Seed: LVVVGAVGV (KRAS G12V)
YVVIGRVGG

SEQ ID NO: 67551 - protein, 9 aa, synthetic construct
  source 1..9: note = Seed: LVVVGAVGV (KRAS G12V)
YVVIGRVGH

SEQ ID NO: 67552 - protein, 9 aa, synthetic construct
  source 1..9: note = Seed: LVVVGAVGV (KRAS G12V)
YVVIGRVGI

SEQ ID NO: 67553 - protein, 9 aa, synthetic construct
  source 1..9: note = Seed: LVVVGAVGV (KRAS G12V)
YVVIGRVGK

SEQ ID NO: 67554 - protein, 9 aa, synthetic construct
  source 1..9: note = Seed: LVVVGAVGV (KRAS G12V)
YVVIGRVGL

SEQ ID NO: 67555 - protein, 9 aa, synthetic construct
  source 1..9: note = Seed: LVVVGAVGV (KRAS G12V)
YVVIGRVGM

SEQ ID NO: 67556 - protein, 9 aa, synthetic construct
  source 1..9: note = Seed: LVVVGAVGV (KRAS G12V)
YVVIGRVGN

SEQ ID NO: 67557 - protein, 9 aa, synthetic construct
  source 1..9: note = Seed: LVVVGAVGV (KRAS G12V)
YVVIGRVGP

SEQ ID NO: 67558 - protein, 9 aa, synthetic construct
  source 1..9: note = Seed: LVVVGAVGV (KRAS G12V)
YVVIGRVGQ

SEQ ID NO: 67559 - protein, 9 aa, synthetic construct
  source 1..9: note = Seed: LVVVGAVGV (KRAS G12V)
YVVIGRVGR

SEQ ID NO: 67560 - protein, 9 aa, synthetic construct
  source 1..9: note = Seed: LVVVGAVGV (KRAS G12V)
YVVIGRVGS

SEQ ID NO: 67561 - protein, 9 aa, synthetic construct
  source 1..9: note = Seed: LVVVGAVGV (KRAS G12V)
YVVIGRVGT

SEQ ID NO: 67562 - protein, 9 aa, synthetic construct
  source 1..9: note = Seed: LVVVGAVGV (KRAS G12V)
YVVIGRVGV

SEQ ID NO: 67563 - protein, 9 aa, synthetic construct
  source 1..9: note = Seed: LVVVGAVGV (KRAS G12V)
YVVIGRVGW

SEQ ID NO: 67564 - protein, 9 aa, synthetic construct
  source 1..9: note = Seed: LVVVGAVGV (KRAS G12V)
YVVIGRVGY

SEQ ID NO: 67565 - protein, 9 aa, synthetic construct
  source 1..9: note = Seed: LVVVGAVGV (KRAS G12V)
YVVIGSVGA

SEQ ID NO: 67566 - protein, 9 aa, synthetic construct
  source 1..9: note = Seed: LVVVGAVGV (KRAS G12V)
YVVIGSVGC

SEQ ID NO: 67567 - protein, 9 aa, synthetic construct
  source 1..9: note = Seed: LVVVGAVGV (KRAS G12V)
YVVIGSVGD

SEQ ID NO: 67568 - protein, 9 aa, synthetic construct
  source 1..9: note = Seed: LVVVGAVGV (KRAS G12V)
YVVIGSVGE

SEQ ID NO: 67569 - protein, 9 aa, synthetic construct
  source 1..9: note = Seed: LVVVGAVGV (KRAS G12V)
YVVIGSVGF

SEQ ID NO: 67570 - protein, 9 aa, synthetic construct
  source 1..9: note = Seed: LVVVGAVGV (KRAS G12V)
YVVIGSVGG

SEQ ID NO: 67571 - protein, 9 aa, synthetic construct
  source 1..9: note = Seed: LVVVGAVGV (KRAS G12V)
YVVIGSVGH

SEQ ID NO: 67572 - protein, 9 aa, synthetic construct
  source 1..9: note = Seed: LVVVGAVGV (KRAS G12V)
YVVIGSVGI

SEQ ID NO: 67573 - protein, 9 aa, synthetic construct
  source 1..9: note = Seed: LVVVGAVGV (KRAS G12V)
YVVIGSVGK

SEQ ID NO: 67574 - protein, 9 aa, synthetic construct
  source 1..9: note = Seed: LVVVGAVGV (KRAS G12V)
YVVIGSVGL

SEQ ID NO: 67575 - protein, 9 aa, synthetic construct
  source 1..9: note = Seed: LVVVGAVGV (KRAS G12V)
YVVIGSVGM

SEQ ID NO: 67576 - protein, 9 aa, synthetic construct
  source 1..9: note = Seed: LVVVGAVGV (KRAS G12V)
YVVIGSVGN

SEQ ID NO: 67577 - protein, 9 aa, synthetic construct
  source 1..9: note = Seed: LVVVGAVGV (KRAS G12V)
YVVIGSVGP

SEQ ID NO: 67578 - protein, 9 aa, synthetic construct
  source 1..9: note = Seed: LVVVGAVGV (KRAS G12V)
YVVIGSVGQ

SEQ ID NO: 67579 - protein, 9 aa, synthetic construct
  source 1..9: note = Seed: LVVVGAVGV (KRAS G12V)
YVVIGSVGR

SEQ ID NO: 67580 - protein, 9 aa, synthetic construct
  source 1..9: note = Seed: LVVVGAVGV (KRAS G12V)
YVVIGSVGS

SEQ ID NO: 67581 - protein, 9 aa, synthetic construct
  source 1..9: note = Seed: LVVVGAVGV (KRAS G12V)
YVVIGSVGT

SEQ ID NO: 67582 - protein, 9 aa, synthetic construct
  source 1..9: note = Seed: LVVVGAVGV (KRAS G12V)
YVVIGSVGV

SEQ ID NO: 67583 - protein, 9 aa, synthetic construct
  source 1..9: note = Seed: LVVVGAVGV (KRAS G12V)
YVVIGSVGW

SEQ ID NO: 67584 - protein, 9 aa, synthetic construct
  source 1..9: note = Seed: LVVVGAVGV (KRAS G12V)
YVVIGSVGY

SEQ ID NO: 67585 - protein, 9 aa, synthetic construct
  source 1..9: note = Seed: LVVVGAVGV (KRAS G12V)
YVVIGTVGA

SEQ ID NO: 67586 - protein, 9 aa, synthetic construct
  source 1..9: note = Seed: LVVVGAVGV (KRAS G12V)
YVVIGTVGC

SEQ ID NO: 67587 - protein, 9 aa, synthetic construct
  source 1..9: note = Seed: LVVVGAVGV (KRAS G12V)
YVVIGTVGD

SEQ ID NO: 67588 - protein, 9 aa, synthetic construct
  source 1..9: note = Seed: LVVVGAVGV (KRAS G12V)
YVVIGTVGE

SEQ ID NO: 67589 - protein, 9 aa, synthetic construct
  source 1..9: note = Seed: LVVVGAVGV (KRAS G12V)
YVVIGTVGF

SEQ ID NO: 67590 - protein, 9 aa, synthetic construct
  source 1..9: note = Seed: LVVVGAVGV (KRAS G12V)
YVVIGTVGG

SEQ ID NO: 67591 - protein, 9 aa, synthetic construct
  source 1..9: note = Seed: LVVVGAVGV (KRAS G12V)
YVVIGTVGH

SEQ ID NO: 67592 - protein, 9 aa, synthetic construct
  source 1..9: note = Seed: LVVVGAVGV (KRAS G12V)
YVVIGTVGI

SEQ ID NO: 67593 - protein, 9 aa, synthetic construct
  source 1..9: note = Seed: LVVVGAVGV (KRAS G12V)
YVVIGTVGK

SEQ ID NO: 67594 - protein, 9 aa, synthetic construct
  source 1..9: note = Seed: LVVVGAVGV (KRAS G12V)
YVVIGTVGL

SEQ ID NO: 67595 - protein, 9 aa, synthetic construct
  source 1..9: note = Seed: LVVVGAVGV (KRAS G12V)
YVVIGTVGM

SEQ ID NO: 67596 - protein, 9 aa, synthetic construct
  source 1..9: note = Seed: LVVVGAVGV (KRAS G12V)
YVVIGTVGN

SEQ ID NO: 67597 - protein, 9 aa, synthetic construct
  source 1..9: note = Seed: LVVVGAVGV (KRAS G12V)
YVVIGTVGP

SEQ ID NO: 67598 - protein, 9 aa, synthetic construct
  source 1..9: note = Seed: LVVVGAVGV (KRAS G12V)
YVVIGTVGQ

SEQ ID NO: 67599 - protein, 9 aa, synthetic construct
  source 1..9: note = Seed: LVVVGAVGV (KRAS G12V)
YVVIGTVGR

SEQ ID NO: 67600 - protein, 9 aa, synthetic construct
  source 1..9: note = Seed: LVVVGAVGV (KRAS G12V)
YVVIGTVGS

SEQ ID NO: 67601 - protein, 9 aa, synthetic construct
  source 1..9: note = Seed: LVVVGAVGV (KRAS G12V)
YVVIGTVGT

SEQ ID NO: 67602 - protein, 9 aa, synthetic construct
  source 1..9: note = Seed: LVVVGAVGV (KRAS G12V)
YVVIGTVGV

SEQ ID NO: 67603 - protein, 9 aa, synthetic construct
  source 1..9: note = Seed: LVVVGAVGV (KRAS G12V)
YVVIGTVGW

SEQ ID NO: 67604 - protein, 9 aa, synthetic construct
  source 1..9: note = Seed: LVVVGAVGV (KRAS G12V)
YVVIGTVGY

SEQ ID NO: 67605 - protein, 9 aa, synthetic construct
  source 1..9: note = Seed: LVVVGAVGV (KRAS G12V)
YVVIGVVGA

SEQ ID NO: 67606 - protein, 9 aa, synthetic construct
  source 1..9: note = Seed: LVVVGAVGV (KRAS G12V)
YVVIGVVGD

SEQ ID NO: 67607 - protein, 9 aa, synthetic construct
  source 1..9: note = Seed: LVVVGAVGV (KRAS G12V)
YVVIGVVGE

SEQ ID NO: 67608 - protein, 9 aa, synthetic construct
  source 1..9: note = Seed: LVVVGAVGV (KRAS G12V)
YVVIGVVGF

SEQ ID NO: 67609 - protein, 9 aa, synthetic construct
  source 1..9: note = Seed: LVVVGAVGV (KRAS G12V)
YVVIGVVGG

SEQ ID NO: 67610 - protein, 9 aa, synthetic construct
  source 1..9: note = Seed: LVVVGAVGV (KRAS G12V)
YVVIGVVGH

SEQ ID NO: 67611 - protein, 9 aa, synthetic construct
  source 1..9: note = Seed: LVVVGAVGV (KRAS G12V)
YVVIGVVGI

SEQ ID NO: 67612 - protein, 9 aa, synthetic construct
  source 1..9: note = Seed: LVVVGAVGV (KRAS G12V)
YVVIGVVGK

SEQ ID NO: 67613 - protein, 9 aa, synthetic construct
  source 1..9: note = Seed: LVVVGAVGV (KRAS G12V)
YVVIGVVGL

SEQ ID NO: 67614 - protein, 9 aa, synthetic construct
  source 1..9: note = Seed: LVVVGAVGV (KRAS G12V)
YVVIGVVGM

SEQ ID NO: 67615 - protein, 9 aa, synthetic construct
  source 1..9: note = Seed: LVVVGAVGV (KRAS G12V)
YVVIGVVGN

SEQ ID NO: 67616 - protein, 9 aa, synthetic construct
  source 1..9: note = Seed: LVVVGAVGV (KRAS G12V)
YVVIGVVGP

SEQ ID NO: 67617 - protein, 9 aa, synthetic construct
  source 1..9: note = Seed: LVVVGAVGV (KRAS G12V)
YVVIGVVGQ

SEQ ID NO: 67618 - protein, 9 aa, synthetic construct
  source 1..9: note = Seed: LVVVGAVGV (KRAS G12V)
YVVIGVVGR

SEQ ID NO: 67619 - protein, 9 aa, synthetic construct
  source 1..9: note = Seed: LVVVGAVGV (KRAS G12V)
YVVIGVVGS

SEQ ID NO: 67620 - protein, 9 aa, synthetic construct
  source 1..9: note = Seed: LVVVGAVGV (KRAS G12V)
YVVIGVVGT

SEQ ID NO: 67621 - protein, 9 aa, synthetic construct
  source 1..9: note = Seed: LVVVGAVGV (KRAS G12V)
YVVIGVVGV

SEQ ID NO: 67622 - protein, 9 aa, synthetic construct
  source 1..9: note = Seed: LVVVGAVGV (KRAS G12V)
YVVIGVVGY

SEQ ID NO: 67623 - protein, 9 aa, synthetic construct
  source 1..9: note = Seed: LVVVGAVGV (KRAS G12V)
YVVIGWVGA

SEQ ID NO: 67624 - protein, 9 aa, synthetic construct
  source 1..9: note = Seed: LVVVGAVGV (KRAS G12V)
YVVIGWVGN

SEQ ID NO: 67625 - protein, 9 aa, synthetic construct
  source 1..9: note = Seed: LVVVGAVGV (KRAS G12V)
YVVIGYVGA

SEQ ID NO: 67626 - protein, 9 aa, synthetic construct
  source 1..9: note = Seed: LVVVGAVGV (KRAS G12V)
YVVIGYVGH

SEQ ID NO: 67627 - protein, 9 aa, synthetic construct
  source 1..9: note = Seed: LVVVGAVGV (KRAS G12V)
YVVIGYVGI

SEQ ID NO: 67628 - protein, 9 aa, synthetic construct
  source 1..9: note = Seed: LVVVGAVGV (KRAS G12V)
YVVIGYVGL

SEQ ID NO: 67629 - protein, 9 aa, synthetic construct
  source 1..9: note = Seed: LVVVGAVGV (KRAS G12V)
YVVIGYVGM

SEQ ID NO: 67630 - protein, 9 aa, synthetic construct
  source 1..9: note = Seed: LVVVGAVGV (KRAS G12V)
YVVIGYVGN

SEQ ID NO: 67631 - protein, 9 aa, synthetic construct
  source 1..9: note = Seed: LVVVGAVGV (KRAS G12V)
YVVIGYVGQ

SEQ ID NO: 67632 - protein, 9 aa, synthetic construct
  source 1..9: note = Seed: LVVVGAVGV (KRAS G12V)
YVVIGYVGR

SEQ ID NO: 67633 - protein, 9 aa, synthetic construct
  source 1..9: note = Seed: LVVVGAVGV (KRAS G12V)
YVVIGYVGS

SEQ ID NO: 67634 - protein, 9 aa, synthetic construct
  source 1..9: note = Seed: LVVVGAVGV (KRAS G12V)
YVVIGYVGT

SEQ ID NO: 67635 - protein, 9 aa, synthetic construct
  source 1..9: note = Seed: LVVVGAVGV (KRAS G12V)
YVVIGYVGV

SEQ ID NO: 67636 - protein, 9 aa, synthetic construct
  source 1..9: note = Seed: LVVVGAVGV (KRAS G12V)
YVVKGAVGA

SEQ ID NO: 67637 - protein, 9 aa, synthetic construct
  source 1..9: note = Seed: LVVVGAVGV (KRAS G12V)
YVVKGAVGF

SEQ ID NO: 67638 - protein, 9 aa, synthetic construct
  source 1..9: note = Seed: LVVVGAVGV (KRAS G12V)
YVVKGAVGI

SEQ ID NO: 67639 - protein, 9 aa, synthetic construct
  source 1..9: note = Seed: LVVVGAVGV (KRAS G12V)
YVVKGAVGL

SEQ ID NO: 67640 - protein, 9 aa, synthetic construct
  source 1..9: note = Seed: LVVVGAVGV (KRAS G12V)
YVVKGAVGM

SEQ ID NO: 67641 - protein, 9 aa, synthetic construct
  source 1..9: note = Seed: LVVVGAVGV (KRAS G12V)
YVVKGAVGS

SEQ ID NO: 67642 - protein, 9 aa, synthetic construct
  source 1..9: note = Seed: LVVVGAVGV (KRAS G12V)
YVVKGAVGT

SEQ ID NO: 67643 - protein, 9 aa, synthetic construct
  source 1..9: note = Seed: LVVVGAVGV (KRAS G12V)
YVVKGAVGV

SEQ ID NO: 67644 - protein, 9 aa, synthetic construct
  source 1..9: note = Seed: LVVVGAVGV (KRAS G12V)
YVVKGGVGA

SEQ ID NO: 67645 - protein, 9 aa, synthetic construct
  source 1..9: note = Seed: LVVVGAVGV (KRAS G12V)
YVVKGGVGI

SEQ ID NO: 67646 - protein, 9 aa, synthetic construct
  source 1..9: note = Seed: LVVVGAVGV (KRAS G12V)
YVVKGGVGL

SEQ ID NO: 67647 - protein, 9 aa, synthetic construct
  source 1..9: note = Seed: LVVVGAVGV (KRAS G12V)
YVVKGGVGM

SEQ ID NO: 67648 - protein, 9 aa, synthetic construct
  source 1..9: note = Seed: LVVVGAVGV (KRAS G12V)
YVVKGGVGV

SEQ ID NO: 67649 - protein, 9 aa, synthetic construct
  source 1..9: note = Seed: LVVVGAVGV (KRAS G12V)
YVVKGHVGA

SEQ ID NO: 67650 - protein, 9 aa, synthetic construct
  source 1..9: note = Seed: LVVVGAVGV (KRAS G12V)
YVVKGHVGI

SEQ ID NO: 67651 - protein, 9 aa, synthetic construct
  source 1..9: note = Seed: LVVVGAVGV (KRAS G12V)
YVVKGHVGL

SEQ ID NO: 67652 - protein, 9 aa, synthetic construct
  source 1..9: note = Seed: LVVVGAVGV (KRAS G12V)
YVVKGHVGM

SEQ ID NO: 67653 - protein, 9 aa, synthetic construct
  source 1..9: note = Seed: LVVVGAVGV (KRAS G12V)
YVVKGHVGS

SEQ ID NO: 67654 - protein, 9 aa, synthetic construct
  source 1..9: note = Seed: LVVVGAVGV (KRAS G12V)
YVVKGHVGV

SEQ ID NO: 67655 - protein, 9 aa, synthetic construct
  source 1..9: note = Seed: LVVVGAVGV (KRAS G12V)
YVVKGHVGY

SEQ ID NO: 67656 - protein, 9 aa, synthetic construct
  source 1..9: note = Seed: LVVVGAVGV (KRAS G12V)
YVVKGIVGA

SEQ ID NO: 67657 - protein, 9 aa, synthetic construct
  source 1..9: note = Seed: LVVVGAVGV (KRAS G12V)
YVVKGIVGH

SEQ ID NO: 67658 - protein, 9 aa, synthetic construct
  source 1..9: note = Seed: LVVVGAVGV (KRAS G12V)
YVVKGIVGQ

SEQ ID NO: 67659 - protein, 9 aa, synthetic construct
  source 1..9: note = Seed: LVVVGAVGV (KRAS G12V)
YVVKGIVGR

SEQ ID NO: 67660 - protein, 9 aa, synthetic construct
  source 1..9: note = Seed: LVVVGAVGV (KRAS G12V)
YVVKGIVGS

SEQ ID NO: 67661 - protein, 9 aa, synthetic construct
  source 1..9: note = Seed: LVVVGAVGV (KRAS G12V)
YVVKGIVGV

SEQ ID NO: 67662 - protein, 9 aa, synthetic construct
  source 1..9: note = Seed: LVVVGAVGV (KRAS G12V)
YVVKGKVGA

SEQ ID NO: 67663 - protein, 9 aa, synthetic construct
  source 1..9: note = Seed: LVVVGAVGV (KRAS G12V)
YVVKGKVGC

SEQ ID NO: 67664 - protein, 9 aa, synthetic construct
  source 1..9: note = Seed: LVVVGAVGV (KRAS G12V)
YVVKGKVGF

SEQ ID NO: 67665 - protein, 9 aa, synthetic construct
  source 1..9: note = Seed: LVVVGAVGV (KRAS G12V)
YVVKGKVGG

SEQ ID NO: 67666 - protein, 9 aa, synthetic construct
  source 1..9: note = Seed: LVVVGAVGV (KRAS G12V)
YVVKGKVGH

SEQ ID NO: 67667 - protein, 9 aa, synthetic construct
  source 1..9: note = Seed: LVVVGAVGV (KRAS G12V)
YVVKGKVGI

SEQ ID NO: 67668 - protein, 9 aa, synthetic construct
  source 1..9: note = Seed: LVVVGAVGV (KRAS G12V)
YVVKGKVGK

SEQ ID NO: 67669 - protein, 9 aa, synthetic construct
  source 1..9: note = Seed: LVVVGAVGV (KRAS G12V)
YVVKGKVGL

SEQ ID NO: 67670 - protein, 9 aa, synthetic construct
  source 1..9: note = Seed: LVVVGAVGV (KRAS G12V)
YVVKGKVGM

SEQ ID NO: 67671 - protein, 9 aa, synthetic construct
  source 1..9: note = Seed: LVVVGAVGV (KRAS G12V)
YVVKGKVGN

SEQ ID NO: 67672 - protein, 9 aa, synthetic construct
  source 1..9: note = Seed: LVVVGAVGV (KRAS G12V)
YVVKGKVGQ

SEQ ID NO: 67673 - protein, 9 aa, synthetic construct
  source 1..9: note = Seed: LVVVGAVGV (KRAS G12V)
YVVKGKVGR

SEQ ID NO: 67674 - protein, 9 aa, synthetic construct
  source 1..9: note = Seed: LVVVGAVGV (KRAS G12V)
YVVKGKVGS

SEQ ID NO: 67675 - protein, 9 aa, synthetic construct
  source 1..9: note = Seed: LVVVGAVGV (KRAS G12V)
YVVKGKVGT

SEQ ID NO: 67676 - protein, 9 aa, synthetic construct
  source 1..9: note = Seed: LVVVGAVGV (KRAS G12V)
YVVKGKVGV

SEQ ID NO: 67677 - protein, 9 aa, synthetic construct
  source 1..9: note = Seed: LVVVGAVGV (KRAS G12V)
YVVKGKVGW

SEQ ID NO: 67678 - protein, 9 aa, synthetic construct
  source 1..9: note = Seed: LVVVGAVGV (KRAS G12V)
YVVKGKVGY

SEQ ID NO: 67679 - protein, 9 aa, synthetic construct
  source 1..9: note = Seed: LVVVGAVGV (KRAS G12V)
YVVKGLVGG

SEQ ID NO: 67680 - protein, 9 aa, synthetic construct
  source 1..9: note = Seed: LVVVGAVGV (KRAS G12V)
YVVKGLVGL

SEQ ID NO: 67681 - protein, 9 aa, synthetic construct
  source 1..9: note = Seed: LVVVGAVGV (KRAS G12V)
YVVKGLVGQ

SEQ ID NO: 67682 - protein, 9 aa, synthetic construct
  source 1..9: note = Seed: LVVVGAVGV (KRAS G12V)
YVVKGLVGR

SEQ ID NO: 67683 - protein, 9 aa, synthetic construct
  source 1..9: note = Seed: LVVVGAVGV (KRAS G12V)
YVVKGMVGA

SEQ ID NO: 67684 - protein, 9 aa, synthetic construct
  source 1..9: note = Seed: LVVVGAVGV (KRAS G12V)
YVVKGMVGG

SEQ ID NO: 67685 - protein, 9 aa, synthetic construct
  source 1..9: note = Seed: LVVVGAVGV (KRAS G12V)
YVVKGMVGL

SEQ ID NO: 67686 - protein, 9 aa, synthetic construct
  source 1..9: note = Seed: LVVVGAVGV (KRAS G12V)
YVVKGMVGQ

SEQ ID NO: 67687 - protein, 9 aa, synthetic construct
  source 1..9: note = Seed: LVVVGAVGV (KRAS G12V)
YVVKGMVGR

SEQ ID NO: 67688 - protein, 9 aa, synthetic construct
  source 1..9: note = Seed: LVVVGAVGV (KRAS G12V)
YVVKGMVGS

SEQ ID NO: 67689 - protein, 9 aa, synthetic construct
  source 1..9: note = Seed: LVVVGAVGV (KRAS G12V)
YVVKGNVGI

SEQ ID NO: 67690 - protein, 9 aa, synthetic construct
  source 1..9: note = Seed: LVVVGAVGV (KRAS G12V)
YVVKGNVGL

SEQ ID NO: 67691 - protein, 9 aa, synthetic construct
  source 1..9: note = Seed: LVVVGAVGV (KRAS G12V)
YVVKGNVGV

SEQ ID NO: 67692 - protein, 9 aa, synthetic construct
  source 1..9: note = Seed: LVVVGAVGV (KRAS G12V)
YVVKGPVGA

SEQ ID NO: 67693 - protein, 9 aa, synthetic construct
  source 1..9: note = Seed: LVVVGAVGV (KRAS G12V)
YVVKGPVGI

SEQ ID NO: 67694 - protein, 9 aa, synthetic construct
  source 1..9: note = Seed: LVVVGAVGV (KRAS G12V)
YVVKGPVGL

SEQ ID NO: 67695 - protein, 9 aa, synthetic construct
  source 1..9: note = Seed: LVVVGAVGV (KRAS G12V)
YVVKGPVGM

SEQ ID NO: 67696 - protein, 9 aa, synthetic construct
  source 1..9: note = Seed: LVVVGAVGV (KRAS G12V)
YVVKGPVGS

SEQ ID NO: 67697 - protein, 9 aa, synthetic construct
  source 1..9: note = Seed: LVVVGAVGV (KRAS G12V)
YVVKGPVGV

SEQ ID NO: 67698 - protein, 9 aa, synthetic construct
  source 1..9: note = Seed: LVVVGAVGV (KRAS G12V)
YVVKGRVGA

SEQ ID NO: 67699 - protein, 9 aa, synthetic construct
  source 1..9: note = Seed: LVVVGAVGV (KRAS G12V)
YVVKGRVGC

SEQ ID NO: 67700 - protein, 9 aa, synthetic construct
  source 1..9: note = Seed: LVVVGAVGV (KRAS G12V)
YVVKGRVGE

SEQ ID NO: 67701 - protein, 9 aa, synthetic construct
  source 1..9: note = Seed: LVVVGAVGV (KRAS G12V)
YVVKGRVGF

SEQ ID NO: 67702 - protein, 9 aa, synthetic construct
  source 1..9: note = Seed: LVVVGAVGV (KRAS G12V)
YVVKGRVGG

SEQ ID NO: 67703 - protein, 9 aa, synthetic construct
  source 1..9: note = Seed: LVVVGAVGV (KRAS G12V)
YVVKGRVGH

SEQ ID NO: 67704 - protein, 9 aa, synthetic construct
  source 1..9: note = Seed: LVVVGAVGV (KRAS G12V)
YVVKGRVGI

SEQ ID NO: 67705 - protein, 9 aa, synthetic construct
  source 1..9: note = Seed: LVVVGAVGV (KRAS G12V)
YVVKGRVGK

SEQ ID NO: 67706 - protein, 9 aa, synthetic construct
  source 1..9: note = Seed: LVVVGAVGV (KRAS G12V)
YVVKGRVGL

SEQ ID NO: 67707 - protein, 9 aa, synthetic construct
  source 1..9: note = Seed: LVVVGAVGV (KRAS G12V)
YVVKGRVGM

SEQ ID NO: 67708 - protein, 9 aa, synthetic construct
  source 1..9: note = Seed: LVVVGAVGV (KRAS G12V)
YVVKGRVGN

SEQ ID NO: 67709 - protein, 9 aa, synthetic construct
  source 1..9: note = Seed: LVVVGAVGV (KRAS G12V)
YVVKGRVGP

SEQ ID NO: 67710 - protein, 9 aa, synthetic construct
  source 1..9: note = Seed: LVVVGAVGV (KRAS G12V)
YVVKGRVGQ

SEQ ID NO: 67711 - protein, 9 aa, synthetic construct
  source 1..9: note = Seed: LVVVGAVGV (KRAS G12V)
YVVKGRVGR

SEQ ID NO: 67712 - protein, 9 aa, synthetic construct
  source 1..9: note = Seed: LVVVGAVGV (KRAS G12V)
YVVKGRVGS

SEQ ID NO: 67713 - protein, 9 aa, synthetic construct
  source 1..9: note = Seed: LVVVGAVGV (KRAS G12V)
YVVKGRVGT

SEQ ID NO: 67714 - protein, 9 aa, synthetic construct
  source 1..9: note = Seed: LVVVGAVGV (KRAS G12V)
YVVKGRVGV

SEQ ID NO: 67715 - protein, 9 aa, synthetic construct
  source 1..9: note = Seed: LVVVGAVGV (KRAS G12V)
YVVKGRVGY

SEQ ID NO: 67716 - protein, 9 aa, synthetic construct
  source 1..9: note = Seed: LVVVGAVGV (KRAS G12V)
YVVKGSVGA

SEQ ID NO: 67717 - protein, 9 aa, synthetic construct
  source 1..9: note = Seed: LVVVGAVGV (KRAS G12V)
YVVKGSVGI

SEQ ID NO: 67718 - protein, 9 aa, synthetic construct
  source 1..9: note = Seed: LVVVGAVGV (KRAS G12V)
YVVKGSVGL

SEQ ID NO: 67719 - protein, 9 aa, synthetic construct
  source 1..9: note = Seed: LVVVGAVGV (KRAS G12V)
YVVKGSVGM

SEQ ID NO: 67720 - protein, 9 aa, synthetic construct
  source 1..9: note = Seed: LVVVGAVGV (KRAS G12V)
YVVKGSVGV

SEQ ID NO: 67721 - protein, 9 aa, synthetic construct
  source 1..9: note = Seed: LVVVGAVGV (KRAS G12V)
YVVKGTVGA

SEQ ID NO: 67722 - protein, 9 aa, synthetic construct
  source 1..9: note = Seed: LVVVGAVGV (KRAS G12V)
YVVKGTVGG

SEQ ID NO: 67723 - protein, 9 aa, synthetic construct
  source 1..9: note = Seed: LVVVGAVGV (KRAS G12V)
YVVKGTVGI

SEQ ID NO: 67724 - protein, 9 aa, synthetic construct
  source 1..9: note = Seed: LVVVGAVGV (KRAS G12V)
YVVKGTVGL

SEQ ID NO: 67725 - protein, 9 aa, synthetic construct
  source 1..9: note = Seed: LVVVGAVGV (KRAS G12V)
YVVKGTVGM

SEQ ID NO: 67726 - protein, 9 aa, synthetic construct
  source 1..9: note = Seed: LVVVGAVGV (KRAS G12V)
YVVKGTVGQ

SEQ ID NO: 67727 - protein, 9 aa, synthetic construct
  source 1..9: note = Seed: LVVVGAVGV (KRAS G12V)
YVVKGTVGS

SEQ ID NO: 67728 - protein, 9 aa, synthetic construct
  source 1..9: note = Seed: LVVVGAVGV (KRAS G12V)
YVVKGTVGV

SEQ ID NO: 67729 - protein, 9 aa, synthetic construct
  source 1..9: note = Seed: LVVVGAVGV (KRAS G12V)
YVVKGVVGA

SEQ ID NO: 67730 - protein, 9 aa, synthetic construct
  source 1..9: note = Seed: LVVVGAVGV (KRAS G12V)
YVVKGVVGH

SEQ ID NO: 67731 - protein, 9 aa, synthetic construct
  source 1..9: note = Seed: LVVVGAVGV (KRAS G12V)
YVVKGVVGI

SEQ ID NO: 67732 - protein, 9 aa, synthetic construct
  source 1..9: note = Seed: LVVVGAVGV (KRAS G12V)
YVVKGVVGL

SEQ ID NO: 67733 - protein, 9 aa, synthetic construct
  source 1..9: note = Seed: LVVVGAVGV (KRAS G12V)
YVVKGVVGM

SEQ ID NO: 67734 - protein, 9 aa, synthetic construct
  source 1..9: note = Seed: LVVVGAVGV (KRAS G12V)
YVVKGVVGR

SEQ ID NO: 67735 - protein, 9 aa, synthetic construct
  source 1..9: note = Seed: LVVVGAVGV (KRAS G12V)
YVVKGVVGS

SEQ ID NO: 67736 - protein, 9 aa, synthetic construct
  source 1..9: note = Seed: LVVVGAVGV (KRAS G12V)
YVVKGVVGV

SEQ ID NO: 67737 - protein, 9 aa, synthetic construct
  source 1..9: note = Seed: LVVVGAVGV (KRAS G12V)
YVVKGVVGY

SEQ ID NO: 67738 - protein, 9 aa, synthetic construct
  source 1..9: note = Seed: LVVVGAVGV (KRAS G12V)
YVVLGAVGA

SEQ ID NO: 67739 - protein, 9 aa, synthetic construct
  source 1..9: note = Seed: LVVVGAVGV (KRAS G12V)
YVVLGAVGC

SEQ ID NO: 67740 - protein, 9 aa, synthetic construct
  source 1..9: note = Seed: LVVVGAVGV (KRAS G12V)
YVVLGAVGD

SEQ ID NO: 67741 - protein, 9 aa, synthetic construct
  source 1..9: note = Seed: LVVVGAVGV (KRAS G12V)
YVVLGAVGE

SEQ ID NO: 67742 - protein, 9 aa, synthetic construct
  source 1..9: note = Seed: LVVVGAVGV (KRAS G12V)
YVVLGAVGF

SEQ ID NO: 67743 - protein, 9 aa, synthetic construct
  source 1..9: note = Seed: LVVVGAVGV (KRAS G12V)
YVVLGAVGG

SEQ ID NO: 67744 - protein, 9 aa, synthetic construct
  source 1..9: note = Seed: LVVVGAVGV (KRAS G12V)
YVVLGAVGH

SEQ ID NO: 67745 - protein, 9 aa, synthetic construct
  source 1..9: note = Seed: LVVVGAVGV (KRAS G12V)
YVVLGAVGI

SEQ ID NO: 67746 - protein, 9 aa, synthetic construct
  source 1..9: note = Seed: LVVVGAVGV (KRAS G12V)
YVVLGAVGK

SEQ ID NO: 67747 - protein, 9 aa, synthetic construct
  source 1..9: note = Seed: LVVVGAVGV (KRAS G12V)
YVVLGAVGL

SEQ ID NO: 67748 - protein, 9 aa, synthetic construct
  source 1..9: note = Seed: LVVVGAVGV (KRAS G12V)
YVVLGAVGM

SEQ ID NO: 67749 - protein, 9 aa, synthetic construct
  source 1..9: note = Seed: LVVVGAVGV (KRAS G12V)
YVVLGAVGN

SEQ ID NO: 67750 - protein, 9 aa, synthetic construct
  source 1..9: note = Seed: LVVVGAVGV (KRAS G12V)
YVVLGAVGP

SEQ ID NO: 67751 - protein, 9 aa, synthetic construct
  source 1..9: note = Seed: LVVVGAVGV (KRAS G12V)
YVVLGAVGQ

SEQ ID NO: 67752 - protein, 9 aa, synthetic construct
  source 1..9: note = Seed: LVVVGAVGV (KRAS G12V)
YVVLGAVGR

SEQ ID NO: 67753 - protein, 9 aa, synthetic construct
  source 1..9: note = Seed: LVVVGAVGV (KRAS G12V)
YVVLGAVGS

SEQ ID NO: 67754 - protein, 9 aa, synthetic construct
  source 1..9: note = Seed: LVVVGAVGV (KRAS G12V)
YVVLGAVGT

SEQ ID NO: 67755 - protein, 9 aa, synthetic construct
  source 1..9: note = Seed: LVVVGAVGV (KRAS G12V)
YVVLGAVGV

SEQ ID NO: 67756 - protein, 9 aa, synthetic construct
  source 1..9: note = Seed: LVVVGAVGV (KRAS G12V)
YVVLGAVGW

SEQ ID NO: 67757 - protein, 9 aa, synthetic construct
  source 1..9: note = Seed: LVVVGAVGV (KRAS G12V)
YVVLGAVGY

SEQ ID NO: 67758 - protein, 9 aa, synthetic construct
  source 1..9: note = Seed: LVVVGAVGV (KRAS G12V)
YVVLGCVGA

SEQ ID NO: 67759 - protein, 9 aa, synthetic construct
  source 1..9: note = Seed: LVVVGAVGV (KRAS G12V)
YVVLGCVGI

SEQ ID NO: 67760 - protein, 9 aa, synthetic construct
  source 1..9: note = Seed: LVVVGAVGV (KRAS G12V)
YVVLGCVGL

SEQ ID NO: 67761 - protein, 9 aa, synthetic construct
  source 1..9: note = Seed: LVVVGAVGV (KRAS G12V)
YVVLGCVGM

SEQ ID NO: 67762 - protein, 9 aa, synthetic construct
  source 1..9: note = Seed: LVVVGAVGV (KRAS G12V)
YVVLGCVGN

SEQ ID NO: 67763 - protein, 9 aa, synthetic construct
  source 1..9: note = Seed: LVVVGAVGV (KRAS G12V)
YVVLGCVGS

SEQ ID NO: 67764 - protein, 9 aa, synthetic construct
  source 1..9: note = Seed: LVVVGAVGV (KRAS G12V)
YVVLGCVGT

SEQ ID NO: 67765 - protein, 9 aa, synthetic construct
  source 1..9: note = Seed: LVVVGAVGV (KRAS G12V)
YVVLGCVGV

SEQ ID NO: 67766 - protein, 9 aa, synthetic construct
  source 1..9: note = Seed: LVVVGAVGV (KRAS G12V)
YVVLGDVGA

SEQ ID NO: 67767 - protein, 9 aa, synthetic construct
  source 1..9: note = Seed: LVVVGAVGV (KRAS G12V)
YVVLGDVGI

SEQ ID NO: 67768 - protein, 9 aa, synthetic construct
  source 1..9: note = Seed: LVVVGAVGV (KRAS G12V)
YVVLGDVGL

SEQ ID NO: 67769 - protein, 9 aa, synthetic construct
  source 1..9: note = Seed: LVVVGAVGV (KRAS G12V)
YVVLGDVGM

SEQ ID NO: 67770 - protein, 9 aa, synthetic construct
  source 1..9: note = Seed: LVVVGAVGV (KRAS G12V)
YVVLGDVGN

SEQ ID NO: 67771 - protein, 9 aa, synthetic construct
  source 1..9: note = Seed: LVVVGAVGV (KRAS G12V)
YVVLGDVGS

SEQ ID NO: 67772 - protein, 9 aa, synthetic construct
  source 1..9: note = Seed: LVVVGAVGV (KRAS G12V)
YVVLGDVGT

SEQ ID NO: 67773 - protein, 9 aa, synthetic construct
  source 1..9: note = Seed: LVVVGAVGV (KRAS G12V)
YVVLGDVGV

SEQ ID NO: 67774 - protein, 9 aa, synthetic construct
  source 1..9: note = Seed: LVVVGAVGV (KRAS G12V)
YVVLGEVGA

SEQ ID NO: 67775 - protein, 9 aa, synthetic construct
  source 1..9: note = Seed: LVVVGAVGV (KRAS G12V)
YVVLGEVGI

SEQ ID NO: 67776 - protein, 9 aa, synthetic construct
  source 1..9: note = Seed: LVVVGAVGV (KRAS G12V)
YVVLGEVGL

SEQ ID NO: 67777 - protein, 9 aa, synthetic construct
  source 1..9: note = Seed: LVVVGAVGV (KRAS G12V)
YVVLGEVGM

SEQ ID NO: 67778 - protein, 9 aa, synthetic construct
  source 1..9: note = Seed: LVVVGAVGV (KRAS G12V)
YVVLGEVGN

SEQ ID NO: 67779 - protein, 9 aa, synthetic construct
  source 1..9: note = Seed: LVVVGAVGV (KRAS G12V)
YVVLGEVGS

SEQ ID NO: 67780 - protein, 9 aa, synthetic construct
  source 1..9: note = Seed: LVVVGAVGV (KRAS G12V)
YVVLGEVGT

SEQ ID NO: 67781 - protein, 9 aa, synthetic construct
  source 1..9: note = Seed: LVVVGAVGV (KRAS G12V)
YVVLGEVGV

SEQ ID NO: 67782 - protein, 9 aa, synthetic construct
  source 1..9: note = Seed: LVVVGAVGV (KRAS G12V)
YVVLGFVGA

SEQ ID NO: 67783 - protein, 9 aa, synthetic construct
  source 1..9: note = Seed: LVVVGAVGV (KRAS G12V)
YVVLGFVGR

SEQ ID NO: 67784 - protein, 9 aa, synthetic construct
  source 1..9: note = Seed: LVVVGAVGV (KRAS G12V)
YVVLGGVGC

SEQ ID NO: 67785 - protein, 9 aa, synthetic construct
  source 1..9: note = Seed: LVVVGAVGV (KRAS G12V)
YVVLGGVGD

SEQ ID NO: 67786 - protein, 9 aa, synthetic construct
  source 1..9: note = Seed: LVVVGAVGV (KRAS G12V)
YVVLGGVGE

SEQ ID NO: 67787 - protein, 9 aa, synthetic construct
  source 1..9: note = Seed: LVVVGAVGV (KRAS G12V)
YVVLGGVGF

SEQ ID NO: 67788 - protein, 9 aa, synthetic construct
  source 1..9: note = Seed: LVVVGAVGV (KRAS G12V)
YVVLGGVGG

SEQ ID NO: 67789 - protein, 9 aa, synthetic construct
  source 1..9: note = Seed: LVVVGAVGV (KRAS G12V)
YVVLGGVGH

SEQ ID NO: 67790 - protein, 9 aa, synthetic construct
  source 1..9: note = Seed: LVVVGAVGV (KRAS G12V)
YVVLGGVGI

SEQ ID NO: 67791 - protein, 9 aa, synthetic construct
  source 1..9: note = Seed: LVVVGAVGV (KRAS G12V)
YVVLGGVGK

SEQ ID NO: 67792 - protein, 9 aa, synthetic construct
  source 1..9: note = Seed: LVVVGAVGV (KRAS G12V)
YVVLGGVGL

SEQ ID NO: 67793 - protein, 9 aa, synthetic construct
  source 1..9: note = Seed: LVVVGAVGV (KRAS G12V)
YVVLGGVGM

SEQ ID NO: 67794 - protein, 9 aa, synthetic construct
  source 1..9: note = Seed: LVVVGAVGV (KRAS G12V)
YVVLGGVGN

SEQ ID NO: 67795 - protein, 9 aa, synthetic construct
  source 1..9: note = Seed: LVVVGAVGV (KRAS G12V)
YVVLGGVGP

SEQ ID NO: 67796 - protein, 9 aa, synthetic construct
  source 1..9: note = Seed: LVVVGAVGV (KRAS G12V)
YVVLGGVGQ

SEQ ID NO: 67797 - protein, 9 aa, synthetic construct
  source 1..9: note = Seed: LVVVGAVGV (KRAS G12V)
YVVLGGVGR

SEQ ID NO: 67798 - protein, 9 aa, synthetic construct
  source 1..9: note = Seed: LVVVGAVGV (KRAS G12V)
YVVLGGVGS

SEQ ID NO: 67799 - protein, 9 aa, synthetic construct
  source 1..9: note = Seed: LVVVGAVGV (KRAS G12V)
YVVLGGVGT

SEQ ID NO: 67800 - protein, 9 aa, synthetic construct
  source 1..9: note = Seed: LVVVGAVGV (KRAS G12V)
YVVLGGVGW

SEQ ID NO: 67801 - protein, 9 aa, synthetic construct
  source 1..9: note = Seed: LVVVGAVGV (KRAS G12V)
YVVLGGVGY

SEQ ID NO: 67802 - protein, 9 aa, synthetic construct
  source 1..9: note = Seed: LVVVGAVGV (KRAS G12V)
YVVLGHVGA

SEQ ID NO: 67803 - protein, 9 aa, synthetic construct
  source 1..9: note = Seed: LVVVGAVGV (KRAS G12V)
YVVLGHVGF

SEQ ID NO: 67804 - protein, 9 aa, synthetic construct
  source 1..9: note = Seed: LVVVGAVGV (KRAS G12V)
YVVLGHVGG

SEQ ID NO: 67805 - protein, 9 aa, synthetic construct
  source 1..9: note = Seed: LVVVGAVGV (KRAS G12V)
YVVLGHVGH

SEQ ID NO: 67806 - protein, 9 aa, synthetic construct
  source 1..9: note = Seed: LVVVGAVGV (KRAS G12V)
YVVLGHVGI

SEQ ID NO: 67807 - protein, 9 aa, synthetic construct
  source 1..9: note = Seed: LVVVGAVGV (KRAS G12V)
YVVLGHVGK

SEQ ID NO: 67808 - protein, 9 aa, synthetic construct
  source 1..9: note = Seed: LVVVGAVGV (KRAS G12V)
YVVLGHVGL

SEQ ID NO: 67809 - protein, 9 aa, synthetic construct
  source 1..9: note = Seed: LVVVGAVGV (KRAS G12V)
YVVLGHVGM

SEQ ID NO: 67810 - protein, 9 aa, synthetic construct
  source 1..9: note = Seed: LVVVGAVGV (KRAS G12V)
YVVLGHVGN

SEQ ID NO: 67811 - protein, 9 aa, synthetic construct
  source 1..9: note = Seed: LVVVGAVGV (KRAS G12V)
YVVLGHVGP

SEQ ID NO: 67812 - protein, 9 aa, synthetic construct
  source 1..9: note = Seed: LVVVGAVGV (KRAS G12V)
YVVLGHVGQ

SEQ ID NO: 67813 - protein, 9 aa, synthetic construct
  source 1..9: note = Seed: LVVVGAVGV (KRAS G12V)
YVVLGHVGR

SEQ ID NO: 67814 - protein, 9 aa, synthetic construct
  source 1..9: note = Seed: LVVVGAVGV (KRAS G12V)
YVVLGHVGS

SEQ ID NO: 67815 - protein, 9 aa, synthetic construct
  source 1..9: note = Seed: LVVVGAVGV (KRAS G12V)
YVVLGHVGT

SEQ ID NO: 67816 - protein, 9 aa, synthetic construct
  source 1..9: note = Seed: LVVVGAVGV (KRAS G12V)
YVVLGHVGV

SEQ ID NO: 67817 - protein, 9 aa, synthetic construct
  source 1..9: note = Seed: LVVVGAVGV (KRAS G12V)
YVVLGHVGY

SEQ ID NO: 67818 - protein, 9 aa, synthetic construct
  source 1..9: note = Seed: LVVVGAVGV (KRAS G12V)
YVVLGIVGA

SEQ ID NO: 67819 - protein, 9 aa, synthetic construct
  source 1..9: note = Seed: LVVVGAVGV (KRAS G12V)
YVVLGIVGD

SEQ ID NO: 67820 - protein, 9 aa, synthetic construct
  source 1..9: note = Seed: LVVVGAVGV (KRAS G12V)
YVVLGIVGE

SEQ ID NO: 67821 - protein, 9 aa, synthetic construct
  source 1..9: note = Seed: LVVVGAVGV (KRAS G12V)
YVVLGIVGG

SEQ ID NO: 67822 - protein, 9 aa, synthetic construct
  source 1..9: note = Seed: LVVVGAVGV (KRAS G12V)
YVVLGIVGH

SEQ ID NO: 67823 - protein, 9 aa, synthetic construct
  source 1..9: note = Seed: LVVVGAVGV (KRAS G12V)
YVVLGIVGI

SEQ ID NO: 67824 - protein, 9 aa, synthetic construct
  source 1..9: note = Seed: LVVVGAVGV (KRAS G12V)
YVVLGIVGK

SEQ ID NO: 67825 - protein, 9 aa, synthetic construct
  source 1..9: note = Seed: LVVVGAVGV (KRAS G12V)
YVVLGIVGL

SEQ ID NO: 67826 - protein, 9 aa, synthetic construct
  source 1..9: note = Seed: LVVVGAVGV (KRAS G12V)
YVVLGIVGM

SEQ ID NO: 67827 - protein, 9 aa, synthetic construct
  source 1..9: note = Seed: LVVVGAVGV (KRAS G12V)
YVVLGIVGN

SEQ ID NO: 67828 - protein, 9 aa, synthetic construct
  source 1..9: note = Seed: LVVVGAVGV (KRAS G12V)
YVVLGIVGP

SEQ ID NO: 67829 - protein, 9 aa, synthetic construct
  source 1..9: note = Seed: LVVVGAVGV (KRAS G12V)
YVVLGIVGQ

SEQ ID NO: 67830 - protein, 9 aa, synthetic construct
  source 1..9: note = Seed: LVVVGAVGV (KRAS G12V)
YVVLGIVGR

SEQ ID NO: 67831 - protein, 9 aa, synthetic construct
  source 1..9: note = Seed: LVVVGAVGV (KRAS G12V)
YVVLGIVGS

SEQ ID NO: 67832 - protein, 9 aa, synthetic construct
  source 1..9: note = Seed: LVVVGAVGV (KRAS G12V)
YVVLGIVGT

SEQ ID NO: 67833 - protein, 9 aa, synthetic construct
  source 1..9: note = Seed: LVVVGAVGV (KRAS G12V)
YVVLGIVGV

SEQ ID NO: 67834 - protein, 9 aa, synthetic construct
  source 1..9: note = Seed: LVVVGAVGV (KRAS G12V)
YVVLGIVGY

SEQ ID NO: 67835 - protein, 9 aa, synthetic construct
  source 1..9: note = Seed: LVVVGAVGV (KRAS G12V)
YVVLGKVGA

SEQ ID NO: 67836 - protein, 9 aa, synthetic construct
  source 1..9: note = Seed: LVVVGAVGV (KRAS G12V)
YVVLGKVGF

SEQ ID NO: 67837 - protein, 9 aa, synthetic construct
  source 1..9: note = Seed: LVVVGAVGV (KRAS G12V)
YVVLGKVGG

SEQ ID NO: 67838 - protein, 9 aa, synthetic construct
  source 1..9: note = Seed: LVVVGAVGV (KRAS G12V)
YVVLGKVGH

SEQ ID NO: 67839 - protein, 9 aa, synthetic construct
  source 1..9: note = Seed: LVVVGAVGV (KRAS G12V)
YVVLGKVGI

SEQ ID NO: 67840 - protein, 9 aa, synthetic construct
  source 1..9: note = Seed: LVVVGAVGV (KRAS G12V)
YVVLGKVGK

SEQ ID NO: 67841 - protein, 9 aa, synthetic construct
  source 1..9: note = Seed: LVVVGAVGV (KRAS G12V)
YVVLGKVGL

SEQ ID NO: 67842 - protein, 9 aa, synthetic construct
  source 1..9: note = Seed: LVVVGAVGV (KRAS G12V)
YVVLGKVGM

SEQ ID NO: 67843 - protein, 9 aa, synthetic construct
  source 1..9: note = Seed: LVVVGAVGV (KRAS G12V)
YVVLGKVGN

SEQ ID NO: 67844 - protein, 9 aa, synthetic construct
  source 1..9: note = Seed: LVVVGAVGV (KRAS G12V)
YVVLGKVGP

SEQ ID NO: 67845 - protein, 9 aa, synthetic construct
  source 1..9: note = Seed: LVVVGAVGV (KRAS G12V)
YVVLGKVGQ

SEQ ID NO: 67846 - protein, 9 aa, synthetic construct
  source 1..9: note = Seed: LVVVGAVGV (KRAS G12V)
YVVLGKVGR

SEQ ID NO: 67847 - protein, 9 aa, synthetic construct
  source 1..9: note = Seed: LVVVGAVGV (KRAS G12V)
YVVLGKVGS

SEQ ID NO: 67848 - protein, 9 aa, synthetic construct
  source 1..9: note = Seed: LVVVGAVGV (KRAS G12V)
YVVLGKVGT

SEQ ID NO: 67849 - protein, 9 aa, synthetic construct
  source 1..9: note = Seed: LVVVGAVGV (KRAS G12V)
YVVLGKVGV

SEQ ID NO: 67850 - protein, 9 aa, synthetic construct
  source 1..9: note = Seed: LVVVGAVGV (KRAS G12V)
YVVLGLVGA

SEQ ID NO: 67851 - protein, 9 aa, synthetic construct
  source 1..9: note = Seed: LVVVGAVGV (KRAS G12V)
YVVLGLVGD

SEQ ID NO: 67852 - protein, 9 aa, synthetic construct
  source 1..9: note = Seed: LVVVGAVGV (KRAS G12V)
YVVLGLVGE

SEQ ID NO: 67853 - protein, 9 aa, synthetic construct
  source 1..9: note = Seed: LVVVGAVGV (KRAS G12V)
YVVLGLVGG

SEQ ID NO: 67854 - protein, 9 aa, synthetic construct
  source 1..9: note = Seed: LVVVGAVGV (KRAS G12V)
YVVLGLVGH

SEQ ID NO: 67855 - protein, 9 aa, synthetic construct
  source 1..9: note = Seed: LVVVGAVGV (KRAS G12V)
YVVLGLVGI

SEQ ID NO: 67856 - protein, 9 aa, synthetic construct
  source 1..9: note = Seed: LVVVGAVGV (KRAS G12V)
YVVLGLVGK

SEQ ID NO: 67857 - protein, 9 aa, synthetic construct
  source 1..9: note = Seed: LVVVGAVGV (KRAS G12V)
YVVLGLVGL

SEQ ID NO: 67858 - protein, 9 aa, synthetic construct
  source 1..9: note = Seed: LVVVGAVGV (KRAS G12V)
YVVLGLVGM

SEQ ID NO: 67859 - protein, 9 aa, synthetic construct
  source 1..9: note = Seed: LVVVGAVGV (KRAS G12V)
YVVLGLVGN

SEQ ID NO: 67860 - protein, 9 aa, synthetic construct
  source 1..9: note = Seed: LVVVGAVGV (KRAS G12V)
YVVLGLVGP

SEQ ID NO: 67861 - protein, 9 aa, synthetic construct
  source 1..9: note = Seed: LVVVGAVGV (KRAS G12V)
YVVLGLVGQ

SEQ ID NO: 67862 - protein, 9 aa, synthetic construct
  source 1..9: note = Seed: LVVVGAVGV (KRAS G12V)
YVVLGLVGR

SEQ ID NO: 67863 - protein, 9 aa, synthetic construct
  source 1..9: note = Seed: LVVVGAVGV (KRAS G12V)
YVVLGLVGS

SEQ ID NO: 67864 - protein, 9 aa, synthetic construct
  source 1..9: note = Seed: LVVVGAVGV (KRAS G12V)
YVVLGLVGT

SEQ ID NO: 67865 - protein, 9 aa, synthetic construct
  source 1..9: note = Seed: LVVVGAVGV (KRAS G12V)
YVVLGLVGV

SEQ ID NO: 67866 - protein, 9 aa, synthetic construct
  source 1..9: note = Seed: LVVVGAVGV (KRAS G12V)
YVVLGLVGY

SEQ ID NO: 67867 - protein, 9 aa, synthetic construct
  source 1..9: note = Seed: LVVVGAVGV (KRAS G12V)
YVVLGMVGA

SEQ ID NO: 67868 - protein, 9 aa, synthetic construct
  source 1..9: note = Seed: LVVVGAVGV (KRAS G12V)
YVVLGMVGD

SEQ ID NO: 67869 - protein, 9 aa, synthetic construct
  source 1..9: note = Seed: LVVVGAVGV (KRAS G12V)
YVVLGMVGE

SEQ ID NO: 67870 - protein, 9 aa, synthetic construct
  source 1..9: note = Seed: LVVVGAVGV (KRAS G12V)
YVVLGMVGF

SEQ ID NO: 67871 - protein, 9 aa, synthetic construct
  source 1..9: note = Seed: LVVVGAVGV (KRAS G12V)
YVVLGMVGG

SEQ ID NO: 67872 - protein, 9 aa, synthetic construct
  source 1..9: note = Seed: LVVVGAVGV (KRAS G12V)
YVVLGMVGH

SEQ ID NO: 67873 - protein, 9 aa, synthetic construct
  source 1..9: note = Seed: LVVVGAVGV (KRAS G12V)
YVVLGMVGI

SEQ ID NO: 67874 - protein, 9 aa, synthetic construct
  source 1..9: note = Seed: LVVVGAVGV (KRAS G12V)
YVVLGMVGK

SEQ ID NO: 67875 - protein, 9 aa, synthetic construct
  source 1..9: note = Seed: LVVVGAVGV (KRAS G12V)
YVVLGMVGL

SEQ ID NO: 67876 - protein, 9 aa, synthetic construct
  source 1..9: note = Seed: LVVVGAVGV (KRAS G12V)
YVVLGMVGM

SEQ ID NO: 67877 - protein, 9 aa, synthetic construct
  source 1..9: note = Seed: LVVVGAVGV (KRAS G12V)
YVVLGMVGN

SEQ ID NO: 67878 - protein, 9 aa, synthetic construct
  source 1..9: note = Seed: LVVVGAVGV (KRAS G12V)
YVVLGMVGP

SEQ ID NO: 67879 - protein, 9 aa, synthetic construct
  source 1..9: note = Seed: LVVVGAVGV (KRAS G12V)
YVVLGMVGQ

SEQ ID NO: 67880 - protein, 9 aa, synthetic construct
  source 1..9: note = Seed: LVVVGAVGV (KRAS G12V)
YVVLGMVGR

SEQ ID NO: 67881 - protein, 9 aa, synthetic construct
  source 1..9: note = Seed: LVVVGAVGV (KRAS G12V)
YVVLGMVGS

SEQ ID NO: 67882 - protein, 9 aa, synthetic construct
  source 1..9: note = Seed: LVVVGAVGV (KRAS G12V)
YVVLGMVGT

SEQ ID NO: 67883 - protein, 9 aa, synthetic construct
  source 1..9: note = Seed: LVVVGAVGV (KRAS G12V)
YVVLGMVGV

SEQ ID NO: 67884 - protein, 9 aa, synthetic construct
  source 1..9: note = Seed: LVVVGAVGV (KRAS G12V)
YVVLGMVGY

SEQ ID NO: 67885 - protein, 9 aa, synthetic construct
  source 1..9: note = Seed: LVVVGAVGV (KRAS G12V)
YVVLGNVGA

SEQ ID NO: 67886 - protein, 9 aa, synthetic construct
  source 1..9: note = Seed: LVVVGAVGV (KRAS G12V)
YVVLGNVGC

SEQ ID NO: 67887 - protein, 9 aa, synthetic construct
  source 1..9: note = Seed: LVVVGAVGV (KRAS G12V)
YVVLGNVGD

SEQ ID NO: 67888 - protein, 9 aa, synthetic construct
  source 1..9: note = Seed: LVVVGAVGV (KRAS G12V)
YVVLGNVGE

SEQ ID NO: 67889 - protein, 9 aa, synthetic construct
  source 1..9: note = Seed: LVVVGAVGV (KRAS G12V)
YVVLGNVGF

SEQ ID NO: 67890 - protein, 9 aa, synthetic construct
  source 1..9: note = Seed: LVVVGAVGV (KRAS G12V)
YVVLGNVGG

SEQ ID NO: 67891 - protein, 9 aa, synthetic construct
  source 1..9: note = Seed: LVVVGAVGV (KRAS G12V)
YVVLGNVGH

SEQ ID NO: 67892 - protein, 9 aa, synthetic construct
  source 1..9: note = Seed: LVVVGAVGV (KRAS G12V)
YVVLGNVGI

SEQ ID NO: 67893 - protein, 9 aa, synthetic construct
  source 1..9: note = Seed: LVVVGAVGV (KRAS G12V)
YVVLGNVGK

SEQ ID NO: 67894 - protein, 9 aa, synthetic construct
  source 1..9: note = Seed: LVVVGAVGV (KRAS G12V)
YVVLGNVGL

SEQ ID NO: 67895 - protein, 9 aa, synthetic construct
  source 1..9: note = Seed: LVVVGAVGV (KRAS G12V)
YVVLGNVGM

SEQ ID NO: 67896 - protein, 9 aa, synthetic construct
  source 1..9: note = Seed: LVVVGAVGV (KRAS G12V)
YVVLGNVGN

SEQ ID NO: 67897 - protein, 9 aa, synthetic construct
  source 1..9: note = Seed: LVVVGAVGV (KRAS G12V)
YVVLGNVGP

SEQ ID NO: 67898 - protein, 9 aa, synthetic construct
  source 1..9: note = Seed: LVVVGAVGV (KRAS G12V)
YVVLGNVGQ

SEQ ID NO: 67899 - protein, 9 aa, synthetic construct
  source 1..9: note = Seed: LVVVGAVGV (KRAS G12V)
YVVLGNVGR

SEQ ID NO: 67900 - protein, 9 aa, synthetic construct
  source 1..9: note = Seed: LVVVGAVGV (KRAS G12V)
YVVLGNVGS

SEQ ID NO: 67901 - protein, 9 aa, synthetic construct
  source 1..9: note = Seed: LVVVGAVGV (KRAS G12V)
YVVLGNVGT

SEQ ID NO: 67902 - protein, 9 aa, synthetic construct
  source 1..9: note = Seed: LVVVGAVGV (KRAS G12V)
YVVLGNVGV

SEQ ID NO: 67903 - protein, 9 aa, synthetic construct
  source 1..9: note = Seed: LVVVGAVGV (KRAS G12V)
YVVLGNVGW

SEQ ID NO: 67904 - protein, 9 aa, synthetic construct
  source 1..9: note = Seed: LVVVGAVGV (KRAS G12V)
YVVLGNVGY

SEQ ID NO: 67905 - protein, 9 aa, synthetic construct
  source 1..9: note = Seed: LVVVGAVGV (KRAS G12V)
YVVLGPVGA

SEQ ID NO: 67906 - protein, 9 aa, synthetic construct
  source 1..9: note = Seed: LVVVGAVGV (KRAS G12V)
YVVLGPVGC

SEQ ID NO: 67907 - protein, 9 aa, synthetic construct
  source 1..9: note = Seed: LVVVGAVGV (KRAS G12V)
YVVLGPVGD

SEQ ID NO: 67908 - protein, 9 aa, synthetic construct
  source 1..9: note = Seed: LVVVGAVGV (KRAS G12V)
YVVLGPVGE

SEQ ID NO: 67909 - protein, 9 aa, synthetic construct
  source 1..9: note = Seed: LVVVGAVGV (KRAS G12V)
YVVLGPVGF

SEQ ID NO: 67910 - protein, 9 aa, synthetic construct
  source 1..9: note = Seed: LVVVGAVGV (KRAS G12V)
YVVLGPVGG

SEQ ID NO: 67911 - protein, 9 aa, synthetic construct
  source 1..9: note = Seed: LVVVGAVGV (KRAS G12V)
YVVLGPVGH

SEQ ID NO: 67912 - protein, 9 aa, synthetic construct
  source 1..9: note = Seed: LVVVGAVGV (KRAS G12V)
YVVLGPVGI

SEQ ID NO: 67913 - protein, 9 aa, synthetic construct
  source 1..9: note = Seed: LVVVGAVGV (KRAS G12V)
YVVLGPVGK

SEQ ID NO: 67914 - protein, 9 aa, synthetic construct
  source 1..9: note = Seed: LVVVGAVGV (KRAS G12V)
YVVLGPVGL

SEQ ID NO: 67915 - protein, 9 aa, synthetic construct
  source 1..9: note = Seed: LVVVGAVGV (KRAS G12V)
YVVLGPVGM

SEQ ID NO: 67916 - protein, 9 aa, synthetic construct
  source 1..9: note = Seed: LVVVGAVGV (KRAS G12V)
YVVLGPVGN

SEQ ID NO: 67917 - protein, 9 aa, synthetic construct
  source 1..9: note = Seed: LVVVGAVGV (KRAS G12V)
YVVLGPVGP

SEQ ID NO: 67918 - protein, 9 aa, synthetic construct
  source 1..9: note = Seed: LVVVGAVGV (KRAS G12V)
YVVLGPVGQ

SEQ ID NO: 67919 - protein, 9 aa, synthetic construct
  source 1..9: note = Seed: LVVVGAVGV (KRAS G12V)
YVVLGPVGR

SEQ ID NO: 67920 - protein, 9 aa, synthetic construct
  source 1..9: note = Seed: LVVVGAVGV (KRAS G12V)
YVVLGPVGS

SEQ ID NO: 67921 - protein, 9 aa, synthetic construct
  source 1..9: note = Seed: LVVVGAVGV (KRAS G12V)
YVVLGPVGT

SEQ ID NO: 67922 - protein, 9 aa, synthetic construct
  source 1..9: note = Seed: LVVVGAVGV (KRAS G12V)
YVVLGPVGV

SEQ ID NO: 67923 - protein, 9 aa, synthetic construct
  source 1..9: note = Seed: LVVVGAVGV (KRAS G12V)
YVVLGPVGW

SEQ ID NO: 67924 - protein, 9 aa, synthetic construct
  source 1..9: note = Seed: LVVVGAVGV (KRAS G12V)
YVVLGPVGY

SEQ ID NO: 67925 - protein, 9 aa, synthetic construct
  source 1..9: note = Seed: LVVVGAVGV (KRAS G12V)
YVVLGQVGA

SEQ ID NO: 67926 - protein, 9 aa, synthetic construct
  source 1..9: note = Seed: LVVVGAVGV (KRAS G12V)
YVVLGQVGF

SEQ ID NO: 67927 - protein, 9 aa, synthetic construct
  source 1..9: note = Seed: LVVVGAVGV (KRAS G12V)
YVVLGQVGG

SEQ ID NO: 67928 - protein, 9 aa, synthetic construct
  source 1..9: note = Seed: LVVVGAVGV (KRAS G12V)
YVVLGQVGH

SEQ ID NO: 67929 - protein, 9 aa, synthetic construct
  source 1..9: note = Seed: LVVVGAVGV (KRAS G12V)
YVVLGQVGI

SEQ ID NO: 67930 - protein, 9 aa, synthetic construct
  source 1..9: note = Seed: LVVVGAVGV (KRAS G12V)
YVVLGQVGK

SEQ ID NO: 67931 - protein, 9 aa, synthetic construct
  source 1..9: note = Seed: LVVVGAVGV (KRAS G12V)
YVVLGQVGL

SEQ ID NO: 67932 - protein, 9 aa, synthetic construct
  source 1..9: note = Seed: LVVVGAVGV (KRAS G12V)
YVVLGQVGM

SEQ ID NO: 67933 - protein, 9 aa, synthetic construct
  source 1..9: note = Seed: LVVVGAVGV (KRAS G12V)
YVVLGQVGN

SEQ ID NO: 67934 - protein, 9 aa, synthetic construct
  source 1..9: note = Seed: LVVVGAVGV (KRAS G12V)
YVVLGQVGP

SEQ ID NO: 67935 - protein, 9 aa, synthetic construct
  source 1..9: note = Seed: LVVVGAVGV (KRAS G12V)
YVVLGQVGR

SEQ ID NO: 67936 - protein, 9 aa, synthetic construct
  source 1..9: note = Seed: LVVVGAVGV (KRAS G12V)
YVVLGQVGS

SEQ ID NO: 67937 - protein, 9 aa, synthetic construct
  source 1..9: note = Seed: LVVVGAVGV (KRAS G12V)
YVVLGQVGT

SEQ ID NO: 67938 - protein, 9 aa, synthetic construct
  source 1..9: note = Seed: LVVVGAVGV (KRAS G12V)
YVVLGQVGV

SEQ ID NO: 67939 - protein, 9 aa, synthetic construct
  source 1..9: note = Seed: LVVVGAVGV (KRAS G12V)
YVVLGQVGY

SEQ ID NO: 67940 - protein, 9 aa, synthetic construct
  source 1..9: note = Seed: LVVVGAVGV (KRAS G12V)
YVVLGRVGA

SEQ ID NO: 67941 - protein, 9 aa, synthetic construct
  source 1..9: note = Seed: LVVVGAVGV (KRAS G12V)
YVVLGRVGD

SEQ ID NO: 67942 - protein, 9 aa, synthetic construct
  source 1..9: note = Seed: LVVVGAVGV (KRAS G12V)
YVVLGRVGE

SEQ ID NO: 67943 - protein, 9 aa, synthetic construct
  source 1..9: note = Seed: LVVVGAVGV (KRAS G12V)
YVVLGRVGF

SEQ ID NO: 67944 - protein, 9 aa, synthetic construct
  source 1..9: note = Seed: LVVVGAVGV (KRAS G12V)
YVVLGRVGG

SEQ ID NO: 67945 - protein, 9 aa, synthetic construct
  source 1..9: note = Seed: LVVVGAVGV (KRAS G12V)
YVVLGRVGH

SEQ ID NO: 67946 - protein, 9 aa, synthetic construct
  source 1..9: note = Seed: LVVVGAVGV (KRAS G12V)
YVVLGRVGI

SEQ ID NO: 67947 - protein, 9 aa, synthetic construct
  source 1..9: note = Seed: LVVVGAVGV (KRAS G12V)
YVVLGRVGK

SEQ ID NO: 67948 - protein, 9 aa, synthetic construct
  source 1..9: note = Seed: LVVVGAVGV (KRAS G12V)
YVVLGRVGL

SEQ ID NO: 67949 - protein, 9 aa, synthetic construct
  source 1..9: note = Seed: LVVVGAVGV (KRAS G12V)
YVVLGRVGM

SEQ ID NO: 67950 - protein, 9 aa, synthetic construct
  source 1..9: note = Seed: LVVVGAVGV (KRAS G12V)
YVVLGRVGN

SEQ ID NO: 67951 - protein, 9 aa, synthetic construct
  source 1..9: note = Seed: LVVVGAVGV (KRAS G12V)
YVVLGRVGP

SEQ ID NO: 67952 - protein, 9 aa, synthetic construct
  source 1..9: note = Seed: LVVVGAVGV (KRAS G12V)
YVVLGRVGQ

SEQ ID NO: 67953 - protein, 9 aa, synthetic construct
  source 1..9: note = Seed: LVVVGAVGV (KRAS G12V)
YVVLGRVGR

SEQ ID NO: 67954 - protein, 9 aa, synthetic construct
  source 1..9: note = Seed: LVVVGAVGV (KRAS G12V)
YVVLGRVGS

SEQ ID NO: 67955 - protein, 9 aa, synthetic construct
  source 1..9: note = Seed: LVVVGAVGV (KRAS G12V)
YVVLGRVGT

SEQ ID NO: 67956 - protein, 9 aa, synthetic construct
  source 1..9: note = Seed: LVVVGAVGV (KRAS G12V)
YVVLGRVGV

SEQ ID NO: 67957 - protein, 9 aa, synthetic construct
  source 1..9: note = Seed: LVVVGAVGV (KRAS G12V)
YVVLGRVGY

SEQ ID NO: 67958 - protein, 9 aa, synthetic construct
  source 1..9: note = Seed: LVVVGAVGV (KRAS G12V)
YVVLGSVGA

SEQ ID NO: 67959 - protein, 9 aa, synthetic construct
  source 1..9: note = Seed: LVVVGAVGV (KRAS G12V)
YVVLGSVGC

SEQ ID NO: 67960 - protein, 9 aa, synthetic construct
  source 1..9: note = Seed: LVVVGAVGV (KRAS G12V)
YVVLGSVGD

SEQ ID NO: 67961 - protein, 9 aa, synthetic construct
  source 1..9: note = Seed: LVVVGAVGV (KRAS G12V)
YVVLGSVGE

SEQ ID NO: 67962 - protein, 9 aa, synthetic construct
  source 1..9: note = Seed: LVVVGAVGV (KRAS G12V)
YVVLGSVGF

SEQ ID NO: 67963 - protein, 9 aa, synthetic construct
  source 1..9: note = Seed: LVVVGAVGV (KRAS G12V)
YVVLGSVGG

SEQ ID NO: 67964 - protein, 9 aa, synthetic construct
  source 1..9: note = Seed: LVVVGAVGV (KRAS G12V)
YVVLGSVGH

SEQ ID NO: 67965 - protein, 9 aa, synthetic construct
  source 1..9: note = Seed: LVVVGAVGV (KRAS G12V)
YVVLGSVGI

SEQ ID NO: 67966 - protein, 9 aa, synthetic construct
  source 1..9: note = Seed: LVVVGAVGV (KRAS G12V)
YVVLGSVGK

SEQ ID NO: 67967 - protein, 9 aa, synthetic construct
  source 1..9: note = Seed: LVVVGAVGV (KRAS G12V)
YVVLGSVGL

SEQ ID NO: 67968 - protein, 9 aa, synthetic construct
  source 1..9: note = Seed: LVVVGAVGV (KRAS G12V)
YVVLGSVGM

SEQ ID NO: 67969 - protein, 9 aa, synthetic construct
  source 1..9: note = Seed: LVVVGAVGV (KRAS G12V)
YVVLGSVGN

SEQ ID NO: 67970 - protein, 9 aa, synthetic construct
  source 1..9: note = Seed: LVVVGAVGV (KRAS G12V)
YVVLGSVGP

SEQ ID NO: 67971 - protein, 9 aa, synthetic construct
  source 1..9: note = Seed: LVVVGAVGV (KRAS G12V)
YVVLGSVGQ

SEQ ID NO: 67972 - protein, 9 aa, synthetic construct
  source 1..9: note = Seed: LVVVGAVGV (KRAS G12V)
YVVLGSVGR

SEQ ID NO: 67973 - protein, 9 aa, synthetic construct
  source 1..9: note = Seed: LVVVGAVGV (KRAS G12V)
YVVLGSVGS

SEQ ID NO: 67974 - protein, 9 aa, synthetic construct
  source 1..9: note = Seed: LVVVGAVGV (KRAS G12V)
YVVLGSVGT

SEQ ID NO: 67975 - protein, 9 aa, synthetic construct
  source 1..9: note = Seed: LVVVGAVGV (KRAS G12V)
YVVLGSVGV

SEQ ID NO: 67976 - protein, 9 aa, synthetic construct
  source 1..9: note = Seed: LVVVGAVGV (KRAS G12V)
YVVLGSVGW

SEQ ID NO: 67977 - protein, 9 aa, synthetic construct
  source 1..9: note = Seed: LVVVGAVGV (KRAS G12V)
YVVLGSVGY

SEQ ID NO: 67978 - protein, 9 aa, synthetic construct
  source 1..9: note = Seed: LVVVGAVGV (KRAS G12V)
YVVLGTVGA

SEQ ID NO: 67979 - protein, 9 aa, synthetic construct
  source 1..9: note = Seed: LVVVGAVGV (KRAS G12V)
YVVLGTVGC

SEQ ID NO: 67980 - protein, 9 aa, synthetic construct
  source 1..9: note = Seed: LVVVGAVGV (KRAS G12V)
YVVLGTVGD

SEQ ID NO: 67981 - protein, 9 aa, synthetic construct
  source 1..9: note = Seed: LVVVGAVGV (KRAS G12V)
YVVLGTVGE

SEQ ID NO: 67982 - protein, 9 aa, synthetic construct
  source 1..9: note = Seed: LVVVGAVGV (KRAS G12V)
YVVLGTVGF

SEQ ID NO: 67983 - protein, 9 aa, synthetic construct
  source 1..9: note = Seed: LVVVGAVGV (KRAS G12V)
YVVLGTVGG

SEQ ID NO: 67984 - protein, 9 aa, synthetic construct
  source 1..9: note = Seed: LVVVGAVGV (KRAS G12V)
YVVLGTVGH

SEQ ID NO: 67985 - protein, 9 aa, synthetic construct
  source 1..9: note = Seed: LVVVGAVGV (KRAS G12V)
YVVLGTVGI

SEQ ID NO: 67986 - protein, 9 aa, synthetic construct
  source 1..9: note = Seed: LVVVGAVGV (KRAS G12V)
YVVLGTVGK

SEQ ID NO: 67987 - protein, 9 aa, synthetic construct
  source 1..9: note = Seed: LVVVGAVGV (KRAS G12V)
YVVLGTVGL

SEQ ID NO: 67988 - protein, 9 aa, synthetic construct
  source 1..9: note = Seed: LVVVGAVGV (KRAS G12V)
YVVLGTVGM

SEQ ID NO: 67989 - protein, 9 aa, synthetic construct
  source 1..9: note = Seed: LVVVGAVGV (KRAS G12V)
YVVLGTVGN

SEQ ID NO: 67990 - protein, 9 aa, synthetic construct
  source 1..9: note = Seed: LVVVGAVGV (KRAS G12V)
YVVLGTVGP

SEQ ID NO: 67991 - protein, 9 aa, synthetic construct
  source 1..9: note = Seed: LVVVGAVGV (KRAS G12V)
YVVLGTVGQ

SEQ ID NO: 67992 - protein, 9 aa, synthetic construct
  source 1..9: note = Seed: LVVVGAVGV (KRAS G12V)
YVVLGTVGR

SEQ ID NO: 67993 - protein, 9 aa, synthetic construct
  source 1..9: note = Seed: LVVVGAVGV (KRAS G12V)
YVVLGTVGS

SEQ ID NO: 67994 - protein, 9 aa, synthetic construct
  source 1..9: note = Seed: LVVVGAVGV (KRAS G12V)
YVVLGTVGT

SEQ ID NO: 67995 - protein, 9 aa, synthetic construct
  source 1..9: note = Seed: LVVVGAVGV (KRAS G12V)
YVVLGTVGV

SEQ ID NO: 67996 - protein, 9 aa, synthetic construct
  source 1..9: note = Seed: LVVVGAVGV (KRAS G12V)
YVVLGTVGY

SEQ ID NO: 67997 - protein, 9 aa, synthetic construct
  source 1..9: note = Seed: LVVVGAVGV (KRAS G12V)
YVVLGVVGA

SEQ ID NO: 67998 - protein, 9 aa, synthetic construct
  source 1..9: note = Seed: LVVVGAVGV (KRAS G12V)
YVVLGVVGD

SEQ ID NO: 67999 - protein, 9 aa, synthetic construct
  source 1..9: note = Seed: LVVVGAVGV (KRAS G12V)
YVVLGVVGE

SEQ ID NO: 68000 - protein, 9 aa, synthetic construct
  source 1..9: note = Seed: LVVVGAVGV (KRAS G12V)
YVVLGVVGF

SEQ ID NO: 68001 - protein, 9 aa, synthetic construct
  source 1..9: note = Seed: LVVVGAVGV (KRAS G12V)
YVVLGVVGG

SEQ ID NO: 68002 - protein, 9 aa, synthetic construct
  source 1..9: note = Seed: LVVVGAVGV (KRAS G12V)
YVVLGVVGH

SEQ ID NO: 68003 - protein, 9 aa, synthetic construct
  source 1..9: note = Seed: LVVVGAVGV (KRAS G12V)
YVVLGVVGI

SEQ ID NO: 68004 - protein, 9 aa, synthetic construct
  source 1..9: note = Seed: LVVVGAVGV (KRAS G12V)
YVVLGVVGK

SEQ ID NO: 68005 - protein, 9 aa, synthetic construct
  source 1..9: note = Seed: LVVVGAVGV (KRAS G12V)
YVVLGVVGL

SEQ ID NO: 68006 - protein, 9 aa, synthetic construct
  source 1..9: note = Seed: LVVVGAVGV (KRAS G12V)
YVVLGVVGM

SEQ ID NO: 68007 - protein, 9 aa, synthetic construct
  source 1..9: note = Seed: LVVVGAVGV (KRAS G12V)
YVVLGVVGN

SEQ ID NO: 68008 - protein, 9 aa, synthetic construct
  source 1..9: note = Seed: LVVVGAVGV (KRAS G12V)
YVVLGVVGP

SEQ ID NO: 68009 - protein, 9 aa, synthetic construct
  source 1..9: note = Seed: LVVVGAVGV (KRAS G12V)
YVVLGVVGQ

SEQ ID NO: 68010 - protein, 9 aa, synthetic construct
  source 1..9: note = Seed: LVVVGAVGV (KRAS G12V)
YVVLGVVGR

SEQ ID NO: 68011 - protein, 9 aa, synthetic construct
  source 1..9: note = Seed: LVVVGAVGV (KRAS G12V)
YVVLGVVGS

SEQ ID NO: 68012 - protein, 9 aa, synthetic construct
  source 1..9: note = Seed: LVVVGAVGV (KRAS G12V)
YVVLGVVGT

SEQ ID NO: 68013 - protein, 9 aa, synthetic construct
  source 1..9: note = Seed: LVVVGAVGV (KRAS G12V)
YVVLGVVGV

SEQ ID NO: 68014 - protein, 9 aa, synthetic construct
  source 1..9: note = Seed: LVVVGAVGV (KRAS G12V)
YVVLGVVGY

SEQ ID NO: 68015 - protein, 9 aa, synthetic construct
  source 1..9: note = Seed: LVVVGAVGV (KRAS G12V)
YVVLGWVGA

SEQ ID NO: 68016 - protein, 9 aa, synthetic construct
  source 1..9: note = Seed: LVVVGAVGV (KRAS G12V)
YVVLGWVGM

SEQ ID NO: 68017 - protein, 9 aa, synthetic construct
  source 1..9: note = Seed: LVVVGAVGV (KRAS G12V)
YVVLGYVGA

SEQ ID NO: 68018 - protein, 9 aa, synthetic construct
  source 1..9: note = Seed: LVVVGAVGV (KRAS G12V)
YVVLGYVGH

SEQ ID NO: 68019 - protein, 9 aa, synthetic construct
  source 1..9: note = Seed: LVVVGAVGV (KRAS G12V)
YVVLGYVGI

SEQ ID NO: 68020 - protein, 9 aa, synthetic construct
  source 1..9: note = Seed: LVVVGAVGV (KRAS G12V)
YVVLGYVGL

SEQ ID NO: 68021 - protein, 9 aa, synthetic construct
  source 1..9: note = Seed: LVVVGAVGV (KRAS G12V)
YVVLGYVGM

SEQ ID NO: 68022 - protein, 9 aa, synthetic construct
  source 1..9: note = Seed: LVVVGAVGV (KRAS G12V)
YVVLGYVGN

SEQ ID NO: 68023 - protein, 9 aa, synthetic construct
  source 1..9: note = Seed: LVVVGAVGV (KRAS G12V)
YVVLGYVGR

SEQ ID NO: 68024 - protein, 9 aa, synthetic construct
  source 1..9: note = Seed: LVVVGAVGV (KRAS G12V)
YVVLGYVGS

SEQ ID NO: 68025 - protein, 9 aa, synthetic construct
  source 1..9: note = Seed: LVVVGAVGV (KRAS G12V)
YVVLGYVGV

SEQ ID NO: 68026 - protein, 9 aa, synthetic construct
  source 1..9: note = Seed: LVVVGAVGV (KRAS G12V)
YVVMGAVGA

SEQ ID NO: 68027 - protein, 9 aa, synthetic construct
  source 1..9: note = Seed: LVVVGAVGV (KRAS G12V)
YVVMGAVGC

SEQ ID NO: 68028 - protein, 9 aa, synthetic construct
  source 1..9: note = Seed: LVVVGAVGV (KRAS G12V)
YVVMGAVGD

SEQ ID NO: 68029 - protein, 9 aa, synthetic construct
  source 1..9: note = Seed: LVVVGAVGV (KRAS G12V)
YVVMGAVGE

SEQ ID NO: 68030 - protein, 9 aa, synthetic construct
  source 1..9: note = Seed: LVVVGAVGV (KRAS G12V)
YVVMGAVGF

SEQ ID NO: 68031 - protein, 9 aa, synthetic construct
  source 1..9: note = Seed: LVVVGAVGV (KRAS G12V)
YVVMGAVGG

SEQ ID NO: 68032 - protein, 9 aa, synthetic construct
  source 1..9: note = Seed: LVVVGAVGV (KRAS G12V)
YVVMGAVGH

SEQ ID NO: 68033 - protein, 9 aa, synthetic construct
  source 1..9: note = Seed: LVVVGAVGV (KRAS G12V)
YVVMGAVGI

SEQ ID NO: 68034 - protein, 9 aa, synthetic construct
  source 1..9: note = Seed: LVVVGAVGV (KRAS G12V)
YVVMGAVGK

SEQ ID NO: 68035 - protein, 9 aa, synthetic construct
  source 1..9: note = Seed: LVVVGAVGV (KRAS G12V)
YVVMGAVGL

SEQ ID NO: 68036 - protein, 9 aa, synthetic construct
  source 1..9: note = Seed: LVVVGAVGV (KRAS G12V)
YVVMGAVGM

SEQ ID NO: 68037 - protein, 9 aa, synthetic construct
  source 1..9: note = Seed: LVVVGAVGV (KRAS G12V)
YVVMGAVGN

SEQ ID NO: 68038 - protein, 9 aa, synthetic construct
  source 1..9: note = Seed: LVVVGAVGV (KRAS G12V)
YVVMGAVGP

SEQ ID NO: 68039 - protein, 9 aa, synthetic construct
  source 1..9: note = Seed: LVVVGAVGV (KRAS G12V)
YVVMGAVGQ

SEQ ID NO: 68040 - protein, 9 aa, synthetic construct
  source 1..9: note = Seed: LVVVGAVGV (KRAS G12V)
YVVMGAVGR

SEQ ID NO: 68041 - protein, 9 aa, synthetic construct
  source 1..9: note = Seed: LVVVGAVGV (KRAS G12V)
YVVMGAVGS

SEQ ID NO: 68042 - protein, 9 aa, synthetic construct
  source 1..9: note = Seed: LVVVGAVGV (KRAS G12V)
YVVMGAVGT

SEQ ID NO: 68043 - protein, 9 aa, synthetic construct
  source 1..9: note = Seed: LVVVGAVGV (KRAS G12V)
YVVMGAVGV

SEQ ID NO: 68044 - protein, 9 aa, synthetic construct
  source 1..9: note = Seed: LVVVGAVGV (KRAS G12V)
YVVMGAVGW

SEQ ID NO: 68045 - protein, 9 aa, synthetic construct
  source 1..9: note = Seed: LVVVGAVGV (KRAS G12V)
YVVMGAVGY

SEQ ID NO: 68046 - protein, 9 aa, synthetic construct
  source 1..9: note = Seed: LVVVGAVGV (KRAS G12V)
YVVMGCVGA

SEQ ID NO: 68047 - protein, 9 aa, synthetic construct
  source 1..9: note = Seed: LVVVGAVGV (KRAS G12V)
YVVMGCVGH

SEQ ID NO: 68048 - protein, 9 aa, synthetic construct
  source 1..9: note = Seed: LVVVGAVGV (KRAS G12V)
YVVMGCVGI

SEQ ID NO: 68049 - protein, 9 aa, synthetic construct
  source 1..9: note = Seed: LVVVGAVGV (KRAS G12V)
YVVMGCVGK

SEQ ID NO: 68050 - protein, 9 aa, synthetic construct
  source 1..9: note = Seed: LVVVGAVGV (KRAS G12V)
YVVMGCVGL

SEQ ID NO: 68051 - protein, 9 aa, synthetic construct
  source 1..9: note = Seed: LVVVGAVGV (KRAS G12V)
YVVMGCVGM

SEQ ID NO: 68052 - protein, 9 aa, synthetic construct
  source 1..9: note = Seed: LVVVGAVGV (KRAS G12V)
YVVMGCVGN

SEQ ID NO: 68053 - protein, 9 aa, synthetic construct
  source 1..9: note = Seed: LVVVGAVGV (KRAS G12V)
YVVMGCVGR

SEQ ID NO: 68054 - protein, 9 aa, synthetic construct
  source 1..9: note = Seed: LVVVGAVGV (KRAS G12V)
YVVMGCVGS

SEQ ID NO: 68055 - protein, 9 aa, synthetic construct
  source 1..9: note = Seed: LVVVGAVGV (KRAS G12V)
YVVMGCVGT

SEQ ID NO: 68056 - protein, 9 aa, synthetic construct
  source 1..9: note = Seed: LVVVGAVGV (KRAS G12V)
YVVMGCVGV

SEQ ID NO: 68057 - protein, 9 aa, synthetic construct
  source 1..9: note = Seed: LVVVGAVGV (KRAS G12V)
YVVMGDVGA

SEQ ID NO: 68058 - protein, 9 aa, synthetic construct
  source 1..9: note = Seed: LVVVGAVGV (KRAS G12V)
YVVMGDVGF

SEQ ID NO: 68059 - protein, 9 aa, synthetic construct
  source 1..9: note = Seed: LVVVGAVGV (KRAS G12V)
YVVMGDVGI

SEQ ID NO: 68060 - protein, 9 aa, synthetic construct
  source 1..9: note = Seed: LVVVGAVGV (KRAS G12V)
YVVMGDVGL

SEQ ID NO: 68061 - protein, 9 aa, synthetic construct
  source 1..9: note = Seed: LVVVGAVGV (KRAS G12V)
YVVMGDVGM

SEQ ID NO: 68062 - protein, 9 aa, synthetic construct
  source 1..9: note = Seed: LVVVGAVGV (KRAS G12V)
YVVMGDVGN

SEQ ID NO: 68063 - protein, 9 aa, synthetic construct
  source 1..9: note = Seed: LVVVGAVGV (KRAS G12V)
YVVMGDVGS

SEQ ID NO: 68064 - protein, 9 aa, synthetic construct
  source 1..9: note = Seed: LVVVGAVGV (KRAS G12V)
YVVMGDVGT

SEQ ID NO: 68065 - protein, 9 aa, synthetic construct
  source 1..9: note = Seed: LVVVGAVGV (KRAS G12V)
YVVMGDVGV

SEQ ID NO: 68066 - protein, 9 aa, synthetic construct
  source 1..9: note = Seed: LVVVGAVGV (KRAS G12V)
YVVMGEVGA

SEQ ID NO: 68067 - protein, 9 aa, synthetic construct
  source 1..9: note = Seed: LVVVGAVGV (KRAS G12V)
YVVMGEVGF

SEQ ID NO: 68068 - protein, 9 aa, synthetic construct
  source 1..9: note = Seed: LVVVGAVGV (KRAS G12V)
YVVMGEVGG

SEQ ID NO: 68069 - protein, 9 aa, synthetic construct
  source 1..9: note = Seed: LVVVGAVGV (KRAS G12V)
YVVMGEVGH

SEQ ID NO: 68070 - protein, 9 aa, synthetic construct
  source 1..9: note = Seed: LVVVGAVGV (KRAS G12V)
YVVMGEVGI

SEQ ID NO: 68071 - protein, 9 aa, synthetic construct
  source 1..9: note = Seed: LVVVGAVGV (KRAS G12V)
YVVMGEVGL

SEQ ID NO: 68072 - protein, 9 aa, synthetic construct
  source 1..9: note = Seed: LVVVGAVGV (KRAS G12V)
YVVMGEVGM

SEQ ID NO: 68073 - protein, 9 aa, synthetic construct
  source 1..9: note = Seed: LVVVGAVGV (KRAS G12V)
YVVMGEVGN

SEQ ID NO: 68074 - protein, 9 aa, synthetic construct
  source 1..9: note = Seed: LVVVGAVGV (KRAS G12V)
YVVMGEVGS

SEQ ID NO: 68075 - protein, 9 aa, synthetic construct
  source 1..9: note = Seed: LVVVGAVGV (KRAS G12V)
YVVMGEVGT

SEQ ID NO: 68076 - protein, 9 aa, synthetic construct
  source 1..9: note = Seed: LVVVGAVGV (KRAS G12V)
YVVMGEVGV

SEQ ID NO: 68077 - protein, 9 aa, synthetic construct
  source 1..9: note = Seed: LVVVGAVGV (KRAS G12V)
YVVMGFVGA

SEQ ID NO: 68078 - protein, 9 aa, synthetic construct
  source 1..9: note = Seed: LVVVGAVGV (KRAS G12V)
YVVMGFVGH

SEQ ID NO: 68079 - protein, 9 aa, synthetic construct
  source 1..9: note = Seed: LVVVGAVGV (KRAS G12V)
YVVMGFVGK

SEQ ID NO: 68080 - protein, 9 aa, synthetic construct
  source 1..9: note = Seed: LVVVGAVGV (KRAS G12V)
YVVMGFVGL

SEQ ID NO: 68081 - protein, 9 aa, synthetic construct
  source 1..9: note = Seed: LVVVGAVGV (KRAS G12V)
YVVMGFVGM

SEQ ID NO: 68082 - protein, 9 aa, synthetic construct
  source 1..9: note = Seed: LVVVGAVGV (KRAS G12V)
YVVMGFVGN

SEQ ID NO: 68083 - protein, 9 aa, synthetic construct
  source 1..9: note = Seed: LVVVGAVGV (KRAS G12V)
YVVMGFVGR

SEQ ID NO: 68084 - protein, 9 aa, synthetic construct
  source 1..9: note = Seed: LVVVGAVGV (KRAS G12V)
YVVMGGVGA

SEQ ID NO: 68085 - protein, 9 aa, synthetic construct
  source 1..9: note = Seed: LVVVGAVGV (KRAS G12V)
YVVMGGVGC

SEQ ID NO: 68086 - protein, 9 aa, synthetic construct
  source 1..9: note = Seed: LVVVGAVGV (KRAS G12V)
YVVMGGVGD

SEQ ID NO: 68087 - protein, 9 aa, synthetic construct
  source 1..9: note = Seed: LVVVGAVGV (KRAS G12V)
YVVMGGVGE

SEQ ID NO: 68088 - protein, 9 aa, synthetic construct
  source 1..9: note = Seed: LVVVGAVGV (KRAS G12V)
YVVMGGVGF

SEQ ID NO: 68089 - protein, 9 aa, synthetic construct
  source 1..9: note = Seed: LVVVGAVGV (KRAS G12V)
YVVMGGVGG

SEQ ID NO: 68090 - protein, 9 aa, synthetic construct
  source 1..9: note = Seed: LVVVGAVGV (KRAS G12V)
YVVMGGVGH

SEQ ID NO: 68091 - protein, 9 aa, synthetic construct
  source 1..9: note = Seed: LVVVGAVGV (KRAS G12V)
YVVMGGVGI

SEQ ID NO: 68092 - protein, 9 aa, synthetic construct
  source 1..9: note = Seed: LVVVGAVGV (KRAS G12V)
YVVMGGVGK

SEQ ID NO: 68093 - protein, 9 aa, synthetic construct
  source 1..9: note = Seed: LVVVGAVGV (KRAS G12V)
YVVMGGVGM

SEQ ID NO: 68094 - protein, 9 aa, synthetic construct
  source 1..9: note = Seed: LVVVGAVGV (KRAS G12V)
YVVMGGVGN

SEQ ID NO: 68095 - protein, 9 aa, synthetic construct
  source 1..9: note = Seed: LVVVGAVGV (KRAS G12V)
YVVMGGVGP

SEQ ID NO: 68096 - protein, 9 aa, synthetic construct
  source 1..9: note = Seed: LVVVGAVGV (KRAS G12V)
YVVMGGVGQ

SEQ ID NO: 68097 - protein, 9 aa, synthetic construct
  source 1..9: note = Seed: LVVVGAVGV (KRAS G12V)
YVVMGGVGR

SEQ ID NO: 68098 - protein, 9 aa, synthetic construct
  source 1..9: note = Seed: LVVVGAVGV (KRAS G12V)
YVVMGGVGS

SEQ ID NO: 68099 - protein, 9 aa, synthetic construct
  source 1..9: note = Seed: LVVVGAVGV (KRAS G12V)
YVVMGGVGT

SEQ ID NO: 68100 - protein, 9 aa, synthetic construct
  source 1..9: note = Seed: LVVVGAVGV (KRAS G12V)
YVVMGGVGV

SEQ ID NO: 68101 - protein, 9 aa, synthetic construct
  source 1..9: note = Seed: LVVVGAVGV (KRAS G12V)
YVVMGGVGW

SEQ ID NO: 68102 - protein, 9 aa, synthetic construct
  source 1..9: note = Seed: LVVVGAVGV (KRAS G12V)
YVVMGGVGY

SEQ ID NO: 68103 - protein, 9 aa, synthetic construct
  source 1..9: note = Seed: LVVVGAVGV (KRAS G12V)
YVVMGHVGA

SEQ ID NO: 68104 - protein, 9 aa, synthetic construct
  source 1..9: note = Seed: LVVVGAVGV (KRAS G12V)
YVVMGHVGC

SEQ ID NO: 68105 - protein, 9 aa, synthetic construct
  source 1..9: note = Seed: LVVVGAVGV (KRAS G12V)
YVVMGHVGD

SEQ ID NO: 68106 - protein, 9 aa, synthetic construct
  source 1..9: note = Seed: LVVVGAVGV (KRAS G12V)
YVVMGHVGE

SEQ ID NO: 68107 - protein, 9 aa, synthetic construct
  source 1..9: note = Seed: LVVVGAVGV (KRAS G12V)
YVVMGHVGF

SEQ ID NO: 68108 - protein, 9 aa, synthetic construct
  source 1..9: note = Seed: LVVVGAVGV (KRAS G12V)
YVVMGHVGG

SEQ ID NO: 68109 - protein, 9 aa, synthetic construct
  source 1..9: note = Seed: LVVVGAVGV (KRAS G12V)
YVVMGHVGH

SEQ ID NO: 68110 - protein, 9 aa, synthetic construct
  source 1..9: note = Seed: LVVVGAVGV (KRAS G12V)
YVVMGHVGI

SEQ ID NO: 68111 - protein, 9 aa, synthetic construct
  source 1..9: note = Seed: LVVVGAVGV (KRAS G12V)
YVVMGHVGK

SEQ ID NO: 68112 - protein, 9 aa, synthetic construct
  source 1..9: note = Seed: LVVVGAVGV (KRAS G12V)
YVVMGHVGL

SEQ ID NO: 68113 - protein, 9 aa, synthetic construct
  source 1..9: note = Seed: LVVVGAVGV (KRAS G12V)
YVVMGHVGM

SEQ ID NO: 68114 - protein, 9 aa, synthetic construct
  source 1..9: note = Seed: LVVVGAVGV (KRAS G12V)
YVVMGHVGN

SEQ ID NO: 68115 - protein, 9 aa, synthetic construct
  source 1..9: note = Seed: LVVVGAVGV (KRAS G12V)
YVVMGHVGP

SEQ ID NO: 68116 - protein, 9 aa, synthetic construct
  source 1..9: note = Seed: LVVVGAVGV (KRAS G12V)
YVVMGHVGQ

SEQ ID NO: 68117 - protein, 9 aa, synthetic construct
  source 1..9: note = Seed: LVVVGAVGV (KRAS G12V)
YVVMGHVGR

SEQ ID NO: 68118 - protein, 9 aa, synthetic construct
  source 1..9: note = Seed: LVVVGAVGV (KRAS G12V)
YVVMGHVGS

SEQ ID NO: 68119 - protein, 9 aa, synthetic construct
  source 1..9: note = Seed: LVVVGAVGV (KRAS G12V)
YVVMGHVGT

SEQ ID NO: 68120 - protein, 9 aa, synthetic construct
  source 1..9: note = Seed: LVVVGAVGV (KRAS G12V)
YVVMGHVGV

SEQ ID NO: 68121 - protein, 9 aa, synthetic construct
  source 1..9: note = Seed: LVVVGAVGV (KRAS G12V)
YVVMGHVGW

SEQ ID NO: 68122 - protein, 9 aa, synthetic construct
  source 1..9: note = Seed: LVVVGAVGV (KRAS G12V)
YVVMGHVGY

SEQ ID NO: 68123 - protein, 9 aa, synthetic construct
  source 1..9: note = Seed: LVVVGAVGV (KRAS G12V)
YVVMGIVGA

SEQ ID NO: 68124 - protein, 9 aa, synthetic construct
  source 1..9: note = Seed: LVVVGAVGV (KRAS G12V)
YVVMGIVGD

SEQ ID NO: 68125 - protein, 9 aa, synthetic construct
  source 1..9: note = Seed: LVVVGAVGV (KRAS G12V)
YVVMGIVGE

SEQ ID NO: 68126 - protein, 9 aa, synthetic construct
  source 1..9: note = Seed: LVVVGAVGV (KRAS G12V)
YVVMGIVGF

SEQ ID NO: 68127 - protein, 9 aa, synthetic construct
  source 1..9: note = Seed: LVVVGAVGV (KRAS G12V)
YVVMGIVGG

SEQ ID NO: 68128 - protein, 9 aa, synthetic construct
  source 1..9: note = Seed: LVVVGAVGV (KRAS G12V)
YVVMGIVGH

SEQ ID NO: 68129 - protein, 9 aa, synthetic construct
  source 1..9: note = Seed: LVVVGAVGV (KRAS G12V)
YVVMGIVGI

SEQ ID NO: 68130 - protein, 9 aa, synthetic construct
  source 1..9: note = Seed: LVVVGAVGV (KRAS G12V)
YVVMGIVGK

SEQ ID NO: 68131 - protein, 9 aa, synthetic construct
  source 1..9: note = Seed: LVVVGAVGV (KRAS G12V)
YVVMGIVGL

SEQ ID NO: 68132 - protein, 9 aa, synthetic construct
  source 1..9: note = Seed: LVVVGAVGV (KRAS G12V)
YVVMGIVGM

SEQ ID NO: 68133 - protein, 9 aa, synthetic construct
  source 1..9: note = Seed: LVVVGAVGV (KRAS G12V)
YVVMGIVGN

SEQ ID NO: 68134 - protein, 9 aa, synthetic construct
  source 1..9: note = Seed: LVVVGAVGV (KRAS G12V)
YVVMGIVGP

SEQ ID NO: 68135 - protein, 9 aa, synthetic construct
  source 1..9: note = Seed: LVVVGAVGV (KRAS G12V)
YVVMGIVGQ

SEQ ID NO: 68136 - protein, 9 aa, synthetic construct
  source 1..9: note = Seed: LVVVGAVGV (KRAS G12V)
YVVMGIVGR

SEQ ID NO: 68137 - protein, 9 aa, synthetic construct
  source 1..9: note = Seed: LVVVGAVGV (KRAS G12V)
YVVMGIVGS

SEQ ID NO: 68138 - protein, 9 aa, synthetic construct
  source 1..9: note = Seed: LVVVGAVGV (KRAS G12V)
YVVMGIVGT

SEQ ID NO: 68139 - protein, 9 aa, synthetic construct
  source 1..9: note = Seed: LVVVGAVGV (KRAS G12V)
YVVMGIVGV

SEQ ID NO: 68140 - protein, 9 aa, synthetic construct
  source 1..9: note = Seed: LVVVGAVGV (KRAS G12V)
YVVMGIVGY

SEQ ID NO: 68141 - protein, 9 aa, synthetic construct
  source 1..9: note = Seed: LVVVGAVGV (KRAS G12V)
YVVMGKVGA

SEQ ID NO: 68142 - protein, 9 aa, synthetic construct
  source 1..9: note = Seed: LVVVGAVGV (KRAS G12V)
YVVMGKVGE

SEQ ID NO: 68143 - protein, 9 aa, synthetic construct
  source 1..9: note = Seed: LVVVGAVGV (KRAS G12V)
YVVMGKVGF

SEQ ID NO: 68144 - protein, 9 aa, synthetic construct
  source 1..9: note = Seed: LVVVGAVGV (KRAS G12V)
YVVMGKVGG

SEQ ID NO: 68145 - protein, 9 aa, synthetic construct
  source 1..9: note = Seed: LVVVGAVGV (KRAS G12V)
YVVMGKVGH

SEQ ID NO: 68146 - protein, 9 aa, synthetic construct
  source 1..9: note = Seed: LVVVGAVGV (KRAS G12V)
YVVMGKVGI

SEQ ID NO: 68147 - protein, 9 aa, synthetic construct
  source 1..9: note = Seed: LVVVGAVGV (KRAS G12V)
YVVMGKVGK

SEQ ID NO: 68148 - protein, 9 aa, synthetic construct
  source 1..9: note = Seed: LVVVGAVGV (KRAS G12V)
YVVMGKVGL

SEQ ID NO: 68149 - protein, 9 aa, synthetic construct
  source 1..9: note = Seed: LVVVGAVGV (KRAS G12V)
YVVMGKVGM

SEQ ID NO: 68150 - protein, 9 aa, synthetic construct
  source 1..9: note = Seed: LVVVGAVGV (KRAS G12V)
YVVMGKVGN

SEQ ID NO: 68151 - protein, 9 aa, synthetic construct
  source 1..9: note = Seed: LVVVGAVGV (KRAS G12V)
YVVMGKVGP

SEQ ID NO: 68152 - protein, 9 aa, synthetic construct
  source 1..9: note = Seed: LVVVGAVGV (KRAS G12V)
YVVMGKVGQ

SEQ ID NO: 68153 - protein, 9 aa, synthetic construct
  source 1..9: note = Seed: LVVVGAVGV (KRAS G12V)
YVVMGKVGR

SEQ ID NO: 68154 - protein, 9 aa, synthetic construct
  source 1..9: note = Seed: LVVVGAVGV (KRAS G12V)
YVVMGKVGS

SEQ ID NO: 68155 - protein, 9 aa, synthetic construct
  source 1..9: note = Seed: LVVVGAVGV (KRAS G12V)
YVVMGKVGT

SEQ ID NO: 68156 - protein, 9 aa, synthetic construct
  source 1..9: note = Seed: LVVVGAVGV (KRAS G12V)
YVVMGKVGV

SEQ ID NO: 68157 - protein, 9 aa, synthetic construct
  source 1..9: note = Seed: LVVVGAVGV (KRAS G12V)
YVVMGKVGY

SEQ ID NO: 68158 - protein, 9 aa, synthetic construct
  source 1..9: note = Seed: LVVVGAVGV (KRAS G12V)
YVVMGLVGA

SEQ ID NO: 68159 - protein, 9 aa, synthetic construct
  source 1..9: note = Seed: LVVVGAVGV (KRAS G12V)
YVVMGLVGD

SEQ ID NO: 68160 - protein, 9 aa, synthetic construct
  source 1..9: note = Seed: LVVVGAVGV (KRAS G12V)
YVVMGLVGE

SEQ ID NO: 68161 - protein, 9 aa, synthetic construct
  source 1..9: note = Seed: LVVVGAVGV (KRAS G12V)
YVVMGLVGF

SEQ ID NO: 68162 - protein, 9 aa, synthetic construct
  source 1..9: note = Seed: LVVVGAVGV (KRAS G12V)
YVVMGLVGG

SEQ ID NO: 68163 - protein, 9 aa, synthetic construct
  source 1..9: note = Seed: LVVVGAVGV (KRAS G12V)
YVVMGLVGH

SEQ ID NO: 68164 - protein, 9 aa, synthetic construct
  source 1..9: note = Seed: LVVVGAVGV (KRAS G12V)
YVVMGLVGI

SEQ ID NO: 68165 - protein, 9 aa, synthetic construct
  source 1..9: note = Seed: LVVVGAVGV (KRAS G12V)
YVVMGLVGK

SEQ ID NO: 68166 - protein, 9 aa, synthetic construct
  source 1..9: note = Seed: LVVVGAVGV (KRAS G12V)
YVVMGLVGL

SEQ ID NO: 68167 - protein, 9 aa, synthetic construct
  source 1..9: note = Seed: LVVVGAVGV (KRAS G12V)
YVVMGLVGM

SEQ ID NO: 68168 - protein, 9 aa, synthetic construct
  source 1..9: note = Seed: LVVVGAVGV (KRAS G12V)
YVVMGLVGN

SEQ ID NO: 68169 - protein, 9 aa, synthetic construct
  source 1..9: note = Seed: LVVVGAVGV (KRAS G12V)
YVVMGLVGP

SEQ ID NO: 68170 - protein, 9 aa, synthetic construct
  source 1..9: note = Seed: LVVVGAVGV (KRAS G12V)
YVVMGLVGQ

SEQ ID NO: 68171 - protein, 9 aa, synthetic construct
  source 1..9: note = Seed: LVVVGAVGV (KRAS G12V)
YVVMGLVGR

SEQ ID NO: 68172 - protein, 9 aa, synthetic construct
  source 1..9: note = Seed: LVVVGAVGV (KRAS G12V)
YVVMGLVGS

SEQ ID NO: 68173 - protein, 9 aa, synthetic construct
  source 1..9: note = Seed: LVVVGAVGV (KRAS G12V)
YVVMGLVGT

SEQ ID NO: 68174 - protein, 9 aa, synthetic construct
  source 1..9: note = Seed: LVVVGAVGV (KRAS G12V)
YVVMGLVGV

SEQ ID NO: 68175 - protein, 9 aa, synthetic construct
  source 1..9: note = Seed: LVVVGAVGV (KRAS G12V)
YVVMGLVGW

SEQ ID NO: 68176 - protein, 9 aa, synthetic construct
  source 1..9: note = Seed: LVVVGAVGV (KRAS G12V)
YVVMGLVGY

SEQ ID NO: 68177 - protein, 9 aa, synthetic construct
  source 1..9: note = Seed: LVVVGAVGV (KRAS G12V)
YVVMGMVGA

SEQ ID NO: 68178 - protein, 9 aa, synthetic construct
  source 1..9: note = Seed: LVVVGAVGV (KRAS G12V)
YVVMGMVGC

SEQ ID NO: 68179 - protein, 9 aa, synthetic construct
  source 1..9: note = Seed: LVVVGAVGV (KRAS G12V)
YVVMGMVGD

SEQ ID NO: 68180 - protein, 9 aa, synthetic construct
  source 1..9: note = Seed: LVVVGAVGV (KRAS G12V)
YVVMGMVGE

SEQ ID NO: 68181 - protein, 9 aa, synthetic construct
  source 1..9: note = Seed: LVVVGAVGV (KRAS G12V)
YVVMGMVGF

SEQ ID NO: 68182 - protein, 9 aa, synthetic construct
  source 1..9: note = Seed: LVVVGAVGV (KRAS G12V)
YVVMGMVGG

SEQ ID NO: 68183 - protein, 9 aa, synthetic construct
  source 1..9: note = Seed: LVVVGAVGV (KRAS G12V)
YVVMGMVGH

SEQ ID NO: 68184 - protein, 9 aa, synthetic construct
  source 1..9: note = Seed: LVVVGAVGV (KRAS G12V)
YVVMGMVGI

SEQ ID NO: 68185 - protein, 9 aa, synthetic construct
  source 1..9: note = Seed: LVVVGAVGV (KRAS G12V)
YVVMGMVGK

SEQ ID NO: 68186 - protein, 9 aa, synthetic construct
  source 1..9: note = Seed: LVVVGAVGV (KRAS G12V)
YVVMGMVGL

SEQ ID NO: 68187 - protein, 9 aa, synthetic construct
  source 1..9: note = Seed: LVVVGAVGV (KRAS G12V)
YVVMGMVGM

SEQ ID NO: 68188 - protein, 9 aa, synthetic construct
  source 1..9: note = Seed: LVVVGAVGV (KRAS G12V)
YVVMGMVGN

SEQ ID NO: 68189 - protein, 9 aa, synthetic construct
  source 1..9: note = Seed: LVVVGAVGV (KRAS G12V)
YVVMGMVGP

SEQ ID NO: 68190 - protein, 9 aa, synthetic construct
  source 1..9: note = Seed: LVVVGAVGV (KRAS G12V)
YVVMGMVGQ

SEQ ID NO: 68191 - protein, 9 aa, synthetic construct
  source 1..9: note = Seed: LVVVGAVGV (KRAS G12V)
YVVMGMVGR

SEQ ID NO: 68192 - protein, 9 aa, synthetic construct
  source 1..9: note = Seed: LVVVGAVGV (KRAS G12V)
YVVMGMVGS

SEQ ID NO: 68193 - protein, 9 aa, synthetic construct
  source 1..9: note = Seed: LVVVGAVGV (KRAS G12V)
YVVMGMVGT

SEQ ID NO: 68194 - protein, 9 aa, synthetic construct
  source 1..9: note = Seed: LVVVGAVGV (KRAS G12V)
YVVMGMVGV

SEQ ID NO: 68195 - protein, 9 aa, synthetic construct
  source 1..9: note = Seed: LVVVGAVGV (KRAS G12V)
YVVMGMVGW

SEQ ID NO: 68196 - protein, 9 aa, synthetic construct
  source 1..9: note = Seed: LVVVGAVGV (KRAS G12V)
YVVMGMVGY

SEQ ID NO: 68197 - protein, 9 aa, synthetic construct
  source 1..9: note = Seed: LVVVGAVGV (KRAS G12V)
YVVMGNVGA

SEQ ID NO: 68198 - protein, 9 aa, synthetic construct
  source 1..9: note = Seed: LVVVGAVGV (KRAS G12V)
YVVMGNVGC

SEQ ID NO: 68199 - protein, 9 aa, synthetic construct
  source 1..9: note = Seed: LVVVGAVGV (KRAS G12V)
YVVMGNVGD

SEQ ID NO: 68200 - protein, 9 aa, synthetic construct
  source 1..9: note = Seed: LVVVGAVGV (KRAS G12V)
YVVMGNVGE

SEQ ID NO: 68201 - protein, 9 aa, synthetic construct
  source 1..9: note = Seed: LVVVGAVGV (KRAS G12V)
YVVMGNVGF

SEQ ID NO: 68202 - protein, 9 aa, synthetic construct
  source 1..9: note = Seed: LVVVGAVGV (KRAS G12V)
YVVMGNVGG

SEQ ID NO: 68203 - protein, 9 aa, synthetic construct
  source 1..9: note = Seed: LVVVGAVGV (KRAS G12V)
YVVMGNVGH

SEQ ID NO: 68204 - protein, 9 aa, synthetic construct
  source 1..9: note = Seed: LVVVGAVGV (KRAS G12V)
YVVMGNVGI

SEQ ID NO: 68205 - protein, 9 aa, synthetic construct
  source 1..9: note = Seed: LVVVGAVGV (KRAS G12V)
YVVMGNVGK

SEQ ID NO: 68206 - protein, 9 aa, synthetic construct
  source 1..9: note = Seed: LVVVGAVGV (KRAS G12V)
YVVMGNVGL

SEQ ID NO: 68207 - protein, 9 aa, synthetic construct
  source 1..9: note = Seed: LVVVGAVGV (KRAS G12V)
YVVMGNVGM

SEQ ID NO: 68208 - protein, 9 aa, synthetic construct
  source 1..9: note = Seed: LVVVGAVGV (KRAS G12V)
YVVMGNVGN

SEQ ID NO: 68209 - protein, 9 aa, synthetic construct
  source 1..9: note = Seed: LVVVGAVGV (KRAS G12V)
YVVMGNVGP

SEQ ID NO: 68210 - protein, 9 aa, synthetic construct
  source 1..9: note = Seed: LVVVGAVGV (KRAS G12V)
YVVMGNVGQ

SEQ ID NO: 68211 - protein, 9 aa, synthetic construct
  source 1..9: note = Seed: LVVVGAVGV (KRAS G12V)
YVVMGNVGR

SEQ ID NO: 68212 - protein, 9 aa, synthetic construct
  source 1..9: note = Seed: LVVVGAVGV (KRAS G12V)
YVVMGNVGS

SEQ ID NO: 68213 - protein, 9 aa, synthetic construct
  source 1..9: note = Seed: LVVVGAVGV (KRAS G12V)
YVVMGNVGT

SEQ ID NO: 68214 - protein, 9 aa, synthetic construct
  source 1..9: note = Seed: LVVVGAVGV (KRAS G12V)
YVVMGNVGV

SEQ ID NO: 68215 - protein, 9 aa, synthetic construct
  source 1..9: note = Seed: LVVVGAVGV (KRAS G12V)
YVVMGNVGW

SEQ ID NO: 68216 - protein, 9 aa, synthetic construct
  source 1..9: note = Seed: LVVVGAVGV (KRAS G12V)
YVVMGNVGY

SEQ ID NO: 68217 - protein, 9 aa, synthetic construct
  source 1..9: note = Seed: LVVVGAVGV (KRAS G12V)
YVVMGPVGA

SEQ ID NO: 68218 - protein, 9 aa, synthetic construct
  source 1..9: note = Seed: LVVVGAVGV (KRAS G12V)
YVVMGPVGC

SEQ ID NO: 68219 - protein, 9 aa, synthetic construct
  source 1..9: note = Seed: LVVVGAVGV (KRAS G12V)
YVVMGPVGD

SEQ ID NO: 68220 - protein, 9 aa, synthetic construct
  source 1..9: note = Seed: LVVVGAVGV (KRAS G12V)
YVVMGPVGE

SEQ ID NO: 68221 - protein, 9 aa, synthetic construct
  source 1..9: note = Seed: LVVVGAVGV (KRAS G12V)
YVVMGPVGF

SEQ ID NO: 68222 - protein, 9 aa, synthetic construct
  source 1..9: note = Seed: LVVVGAVGV (KRAS G12V)
YVVMGPVGG

SEQ ID NO: 68223 - protein, 9 aa, synthetic construct
  source 1..9: note = Seed: LVVVGAVGV (KRAS G12V)
YVVMGPVGH

SEQ ID NO: 68224 - protein, 9 aa, synthetic construct
  source 1..9: note = Seed: LVVVGAVGV (KRAS G12V)
YVVMGPVGI

SEQ ID NO: 68225 - protein, 9 aa, synthetic construct
  source 1..9: note = Seed: LVVVGAVGV (KRAS G12V)
YVVMGPVGK

SEQ ID NO: 68226 - protein, 9 aa, synthetic construct
  source 1..9: note = Seed: LVVVGAVGV (KRAS G12V)
YVVMGPVGL

SEQ ID NO: 68227 - protein, 9 aa, synthetic construct
  source 1..9: note = Seed: LVVVGAVGV (KRAS G12V)
YVVMGPVGM

SEQ ID NO: 68228 - protein, 9 aa, synthetic construct
  source 1..9: note = Seed: LVVVGAVGV (KRAS G12V)
YVVMGPVGN

SEQ ID NO: 68229 - protein, 9 aa, synthetic construct
  source 1..9: note = Seed: LVVVGAVGV (KRAS G12V)
YVVMGPVGP

SEQ ID NO: 68230 - protein, 9 aa, synthetic construct
  source 1..9: note = Seed: LVVVGAVGV (KRAS G12V)
YVVMGPVGQ

SEQ ID NO: 68231 - protein, 9 aa, synthetic construct
  source 1..9: note = Seed: LVVVGAVGV (KRAS G12V)
YVVMGPVGR

SEQ ID NO: 68232 - protein, 9 aa, synthetic construct
  source 1..9: note = Seed: LVVVGAVGV (KRAS G12V)
YVVMGPVGS

SEQ ID NO: 68233 - protein, 9 aa, synthetic construct
  source 1..9: note = Seed: LVVVGAVGV (KRAS G12V)
YVVMGPVGT

SEQ ID NO: 68234 - protein, 9 aa, synthetic construct
  source 1..9: note = Seed: LVVVGAVGV (KRAS G12V)
YVVMGPVGV

SEQ ID NO: 68235 - protein, 9 aa, synthetic construct
  source 1..9: note = Seed: LVVVGAVGV (KRAS G12V)
YVVMGPVGW

SEQ ID NO: 68236 - protein, 9 aa, synthetic construct
  source 1..9: note = Seed: LVVVGAVGV (KRAS G12V)
YVVMGPVGY

SEQ ID NO: 68237 - protein, 9 aa, synthetic construct
  source 1..9: note = Seed: LVVVGAVGV (KRAS G12V)
YVVMGQVGA

SEQ ID NO: 68238 - protein, 9 aa, synthetic construct
  source 1..9: note = Seed: LVVVGAVGV (KRAS G12V)
YVVMGQVGF

SEQ ID NO: 68239 - protein, 9 aa, synthetic construct
  source 1..9: note = Seed: LVVVGAVGV (KRAS G12V)
YVVMGQVGG

SEQ ID NO: 68240 - protein, 9 aa, synthetic construct
  source 1..9: note = Seed: LVVVGAVGV (KRAS G12V)
YVVMGQVGH

SEQ ID NO: 68241 - protein, 9 aa, synthetic construct
  source 1..9: note = Seed: LVVVGAVGV (KRAS G12V)
YVVMGQVGI

SEQ ID NO: 68242 - protein, 9 aa, synthetic construct
  source 1..9: note = Seed: LVVVGAVGV (KRAS G12V)
YVVMGQVGK

SEQ ID NO: 68243 - protein, 9 aa, synthetic construct
  source 1..9: note = Seed: LVVVGAVGV (KRAS G12V)
YVVMGQVGL

SEQ ID NO: 68244 - protein, 9 aa, synthetic construct
  source 1..9: note = Seed: LVVVGAVGV (KRAS G12V)
YVVMGQVGM

SEQ ID NO: 68245 - protein, 9 aa, synthetic construct
  source 1..9: note = Seed: LVVVGAVGV (KRAS G12V)
YVVMGQVGN

SEQ ID NO: 68246 - protein, 9 aa, synthetic construct
  source 1..9: note = Seed: LVVVGAVGV (KRAS G12V)
YVVMGQVGP

SEQ ID NO: 68247 - protein, 9 aa, synthetic construct
  source 1..9: note = Seed: LVVVGAVGV (KRAS G12V)
YVVMGQVGQ

SEQ ID NO: 68248 - protein, 9 aa, synthetic construct
  source 1..9: note = Seed: LVVVGAVGV (KRAS G12V)
YVVMGQVGR

SEQ ID NO: 68249 - protein, 9 aa, synthetic construct
  source 1..9: note = Seed: LVVVGAVGV (KRAS G12V)
YVVMGQVGS

SEQ ID NO: 68250 - protein, 9 aa, synthetic construct
  source 1..9: note = Seed: LVVVGAVGV (KRAS G12V)
YVVMGQVGT

SEQ ID NO: 68251 - protein, 9 aa, synthetic construct
  source 1..9: note = Seed: LVVVGAVGV (KRAS G12V)
YVVMGQVGV

SEQ ID NO: 68252 - protein, 9 aa, synthetic construct
  source 1..9: note = Seed: LVVVGAVGV (KRAS G12V)
YVVMGQVGY

SEQ ID NO: 68253 - protein, 9 aa, synthetic construct
  source 1..9: note = Seed: LVVVGAVGV (KRAS G12V)
YVVMGRVGA

SEQ ID NO: 68254 - protein, 9 aa, synthetic construct
  source 1..9: note = Seed: LVVVGAVGV (KRAS G12V)
YVVMGRVGC

SEQ ID NO: 68255 - protein, 9 aa, synthetic construct
  source 1..9: note = Seed: LVVVGAVGV (KRAS G12V)
YVVMGRVGD

SEQ ID NO: 68256 - protein, 9 aa, synthetic construct
  source 1..9: note = Seed: LVVVGAVGV (KRAS G12V)
YVVMGRVGE

SEQ ID NO: 68257 - protein, 9 aa, synthetic construct
  source 1..9: note = Seed: LVVVGAVGV (KRAS G12V)
YVVMGRVGF

SEQ ID NO: 68258 - protein, 9 aa, synthetic construct
  source 1..9: note = Seed: LVVVGAVGV (KRAS G12V)
YVVMGRVGG

SEQ ID NO: 68259 - protein, 9 aa, synthetic construct
  source 1..9: note = Seed: LVVVGAVGV (KRAS G12V)
YVVMGRVGH

SEQ ID NO: 68260 - protein, 9 aa, synthetic construct
  source 1..9: note = Seed: LVVVGAVGV (KRAS G12V)
YVVMGRVGI

SEQ ID NO: 68261 - protein, 9 aa, synthetic construct
  source 1..9: note = Seed: LVVVGAVGV (KRAS G12V)
YVVMGRVGK

SEQ ID NO: 68262 - protein, 9 aa, synthetic construct
  source 1..9: note = Seed: LVVVGAVGV (KRAS G12V)
YVVMGRVGL

SEQ ID NO: 68263 - protein, 9 aa, synthetic construct
  source 1..9: note = Seed: LVVVGAVGV (KRAS G12V)
YVVMGRVGM

SEQ ID NO: 68264 - protein, 9 aa, synthetic construct
  source 1..9: note = Seed: LVVVGAVGV (KRAS G12V)
YVVMGRVGN

SEQ ID NO: 68265 - protein, 9 aa, synthetic construct
  source 1..9: note = Seed: LVVVGAVGV (KRAS G12V)
YVVMGRVGP

SEQ ID NO: 68266 - protein, 9 aa, synthetic construct
  source 1..9: note = Seed: LVVVGAVGV (KRAS G12V)
YVVMGRVGQ

SEQ ID NO: 68267 - protein, 9 aa, synthetic construct
  source 1..9: note = Seed: LVVVGAVGV (KRAS G12V)
YVVMGRVGR

SEQ ID NO: 68268 - protein, 9 aa, synthetic construct
  source 1..9: note = Seed: LVVVGAVGV (KRAS G12V)
YVVMGRVGS

SEQ ID NO: 68269 - protein, 9 aa, synthetic construct
  source 1..9: note = Seed: LVVVGAVGV (KRAS G12V)
YVVMGRVGT

SEQ ID NO: 68270 - protein, 9 aa, synthetic construct
  source 1..9: note = Seed: LVVVGAVGV (KRAS G12V)
YVVMGRVGV

SEQ ID NO: 68271 - protein, 9 aa, synthetic construct
  source 1..9: note = Seed: LVVVGAVGV (KRAS G12V)
YVVMGRVGW

SEQ ID NO: 68272 - protein, 9 aa, synthetic construct
  source 1..9: note = Seed: LVVVGAVGV (KRAS G12V)
YVVMGRVGY

SEQ ID NO: 68273 - protein, 9 aa, synthetic construct
  source 1..9: note = Seed: LVVVGAVGV (KRAS G12V)
YVVMGSVGA

SEQ ID NO: 68274 - protein, 9 aa, synthetic construct
  source 1..9: note = Seed: LVVVGAVGV (KRAS G12V)
YVVMGSVGC

SEQ ID NO: 68275 - protein, 9 aa, synthetic construct
  source 1..9: note = Seed: LVVVGAVGV (KRAS G12V)
YVVMGSVGD

SEQ ID NO: 68276 - protein, 9 aa, synthetic construct
  source 1..9: note = Seed: LVVVGAVGV (KRAS G12V)
YVVMGSVGE

SEQ ID NO: 68277 - protein, 9 aa, synthetic construct
  source 1..9: note = Seed: LVVVGAVGV (KRAS G12V)
YVVMGSVGF

SEQ ID NO: 68278 - protein, 9 aa, synthetic construct
  source 1..9: note = Seed: LVVVGAVGV (KRAS G12V)
YVVMGSVGG

SEQ ID NO: 68279 - protein, 9 aa, synthetic construct
  source 1..9: note = Seed: LVVVGAVGV (KRAS G12V)
YVVMGSVGH

SEQ ID NO: 68280 - protein, 9 aa, synthetic construct
  source 1..9: note = Seed: LVVVGAVGV (KRAS G12V)
YVVMGSVGI

SEQ ID NO: 68281 - protein, 9 aa, synthetic construct
  source 1..9: note = Seed: LVVVGAVGV (KRAS G12V)
YVVMGSVGK

SEQ ID NO: 68282 - protein, 9 aa, synthetic construct
  source 1..9: note = Seed: LVVVGAVGV (KRAS G12V)
YVVMGSVGM

SEQ ID NO: 68283 - protein, 9 aa, synthetic construct
  source 1..9: note = Seed: LVVVGAVGV (KRAS G12V)
YVVMGSVGN

SEQ ID NO: 68284 - protein, 9 aa, synthetic construct
  source 1..9: note = Seed: LVVVGAVGV (KRAS G12V)
YVVMGSVGP

SEQ ID NO: 68285 - protein, 9 aa, synthetic construct
  source 1..9: note = Seed: LVVVGAVGV (KRAS G12V)
YVVMGSVGQ

SEQ ID NO: 68286 - protein, 9 aa, synthetic construct
  source 1..9: note = Seed: LVVVGAVGV (KRAS G12V)
YVVMGSVGR

SEQ ID NO: 68287 - protein, 9 aa, synthetic construct
  source 1..9: note = Seed: LVVVGAVGV (KRAS G12V)
YVVMGSVGS

SEQ ID NO: 68288 - protein, 9 aa, synthetic construct
  source 1..9: note = Seed: LVVVGAVGV (KRAS G12V)
YVVMGSVGT

SEQ ID NO: 68289 - protein, 9 aa, synthetic construct
  source 1..9: note = Seed: LVVVGAVGV (KRAS G12V)
YVVMGSVGW

SEQ ID NO: 68290 - protein, 9 aa, synthetic construct
  source 1..9: note = Seed: LVVVGAVGV (KRAS G12V)
YVVMGSVGY

SEQ ID NO: 68291 - protein, 9 aa, synthetic construct
  source 1..9: note = Seed: LVVVGAVGV (KRAS G12V)
YVVMGTVGA

SEQ ID NO: 68292 - protein, 9 aa, synthetic construct
  source 1..9: note = Seed: LVVVGAVGV (KRAS G12V)
YVVMGTVGC

SEQ ID NO: 68293 - protein, 9 aa, synthetic construct
  source 1..9: note = Seed: LVVVGAVGV (KRAS G12V)
YVVMGTVGD

SEQ ID NO: 68294 - protein, 9 aa, synthetic construct
  source 1..9: note = Seed: LVVVGAVGV (KRAS G12V)
YVVMGTVGE

SEQ ID NO: 68295 - protein, 9 aa, synthetic construct
  source 1..9: note = Seed: LVVVGAVGV (KRAS G12V)
YVVMGTVGF

SEQ ID NO: 68296 - protein, 9 aa, synthetic construct
  source 1..9: note = Seed: LVVVGAVGV (KRAS G12V)
YVVMGTVGG

SEQ ID NO: 68297 - protein, 9 aa, synthetic construct
  source 1..9: note = Seed: LVVVGAVGV (KRAS G12V)
YVVMGTVGH

SEQ ID NO: 68298 - protein, 9 aa, synthetic construct
  source 1..9: note = Seed: LVVVGAVGV (KRAS G12V)
YVVMGTVGI

SEQ ID NO: 68299 - protein, 9 aa, synthetic construct
  source 1..9: note = Seed: LVVVGAVGV (KRAS G12V)
YVVMGTVGK

SEQ ID NO: 68300 - protein, 9 aa, synthetic construct
  source 1..9: note = Seed: LVVVGAVGV (KRAS G12V)
YVVMGTVGL

SEQ ID NO: 68301 - protein, 9 aa, synthetic construct
  source 1..9: note = Seed: LVVVGAVGV (KRAS G12V)
YVVMGTVGM

SEQ ID NO: 68302 - protein, 9 aa, synthetic construct
  source 1..9: note = Seed: LVVVGAVGV (KRAS G12V)
YVVMGTVGN

SEQ ID NO: 68303 - protein, 9 aa, synthetic construct
  source 1..9: note = Seed: LVVVGAVGV (KRAS G12V)
YVVMGTVGP

SEQ ID NO: 68304 - protein, 9 aa, synthetic construct
  source 1..9: note = Seed: LVVVGAVGV (KRAS G12V)
YVVMGTVGQ

SEQ ID NO: 68305 - protein, 9 aa, synthetic construct
  source 1..9: note = Seed: LVVVGAVGV (KRAS G12V)
YVVMGTVGR

SEQ ID NO: 68306 - protein, 9 aa, synthetic construct
  source 1..9: note = Seed: LVVVGAVGV (KRAS G12V)
YVVMGTVGS

SEQ ID NO: 68307 - protein, 9 aa, synthetic construct
  source 1..9: note = Seed: LVVVGAVGV (KRAS G12V)
YVVMGTVGT

SEQ ID NO: 68308 - protein, 9 aa, synthetic construct
  source 1..9: note = Seed: LVVVGAVGV (KRAS G12V)
YVVMGTVGV

SEQ ID NO: 68309 - protein, 9 aa, synthetic construct
  source 1..9: note = Seed: LVVVGAVGV (KRAS G12V)
YVVMGTVGW

SEQ ID NO: 68310 - protein, 9 aa, synthetic construct
  source 1..9: note = Seed: LVVVGAVGV (KRAS G12V)
YVVMGTVGY

SEQ ID NO: 68311 - protein, 9 aa, synthetic construct
  source 1..9: note = Seed: LVVVGAVGV (KRAS G12V)
YVVMGVVGA

SEQ ID NO: 68312 - protein, 9 aa, synthetic construct
  source 1..9: note = Seed: LVVVGAVGV (KRAS G12V)
YVVMGVVGC

SEQ ID NO: 68313 - protein, 9 aa, synthetic construct
  source 1..9: note = Seed: LVVVGAVGV (KRAS G12V)
YVVMGVVGD

SEQ ID NO: 68314 - protein, 9 aa, synthetic construct
  source 1..9: note = Seed: LVVVGAVGV (KRAS G12V)
YVVMGVVGE

SEQ ID NO: 68315 - protein, 9 aa, synthetic construct
  source 1..9: note = Seed: LVVVGAVGV (KRAS G12V)
YVVMGVVGF

SEQ ID NO: 68316 - protein, 9 aa, synthetic construct
  source 1..9: note = Seed: LVVVGAVGV (KRAS G12V)
YVVMGVVGG

SEQ ID NO: 68317 - protein, 9 aa, synthetic construct
  source 1..9: note = Seed: LVVVGAVGV (KRAS G12V)
YVVMGVVGH

SEQ ID NO: 68318 - protein, 9 aa, synthetic construct
  source 1..9: note = Seed: LVVVGAVGV (KRAS G12V)
YVVMGVVGI

SEQ ID NO: 68319 - protein, 9 aa, synthetic construct
  source 1..9: note = Seed: LVVVGAVGV (KRAS G12V)
YVVMGVVGK

SEQ ID NO: 68320 - protein, 9 aa, synthetic construct
  source 1..9: note = Seed: LVVVGAVGV (KRAS G12V)
YVVMGVVGL

SEQ ID NO: 68321 - protein, 9 aa, synthetic construct
  source 1..9: note = Seed: LVVVGAVGV (KRAS G12V)
YVVMGVVGM

SEQ ID NO: 68322 - protein, 9 aa, synthetic construct
  source 1..9: note = Seed: LVVVGAVGV (KRAS G12V)
YVVMGVVGN

SEQ ID NO: 68323 - protein, 9 aa, synthetic construct
  source 1..9: note = Seed: LVVVGAVGV (KRAS G12V)
YVVMGVVGP

SEQ ID NO: 68324 - protein, 9 aa, synthetic construct
  source 1..9: note = Seed: LVVVGAVGV (KRAS G12V)
YVVMGVVGQ

SEQ ID NO: 68325 - protein, 9 aa, synthetic construct
  source 1..9: note = Seed: LVVVGAVGV (KRAS G12V)
YVVMGVVGR

SEQ ID NO: 68326 - protein, 9 aa, synthetic construct
  source 1..9: note = Seed: LVVVGAVGV (KRAS G12V)
YVVMGVVGS

SEQ ID NO: 68327 - protein, 9 aa, synthetic construct
  source 1..9: note = Seed: LVVVGAVGV (KRAS G12V)
YVVMGVVGT

SEQ ID NO: 68328 - protein, 9 aa, synthetic construct
  source 1..9: note = Seed: LVVVGAVGV (KRAS G12V)
YVVMGVVGV

SEQ ID NO: 68329 - protein, 9 aa, synthetic construct
  source 1..9: note = Seed: LVVVGAVGV (KRAS G12V)
YVVMGVVGY

SEQ ID NO: 68330 - protein, 9 aa, synthetic construct
  source 1..9: note = Seed: LVVVGAVGV (KRAS G12V)
YVVMGWVGA

SEQ ID NO: 68331 - protein, 9 aa, synthetic construct
  source 1..9: note = Seed: LVVVGAVGV (KRAS G12V)
YVVMGWVGH

SEQ ID NO: 68332 - protein, 9 aa, synthetic construct
  source 1..9: note = Seed: LVVVGAVGV (KRAS G12V)
YVVMGWVGI

SEQ ID NO: 68333 - protein, 9 aa, synthetic construct
  source 1..9: note = Seed: LVVVGAVGV (KRAS G12V)
YVVMGWVGK

SEQ ID NO: 68334 - protein, 9 aa, synthetic construct
  source 1..9: note = Seed: LVVVGAVGV (KRAS G12V)
YVVMGWVGL

SEQ ID NO: 68335 - protein, 9 aa, synthetic construct
  source 1..9: note = Seed: LVVVGAVGV (KRAS G12V)
YVVMGWVGM

SEQ ID NO: 68336 - protein, 9 aa, synthetic construct
  source 1..9: note = Seed: LVVVGAVGV (KRAS G12V)
YVVMGWVGN

SEQ ID NO: 68337 - protein, 9 aa, synthetic construct
  source 1..9: note = Seed: LVVVGAVGV (KRAS G12V)
YVVMGWVGR

SEQ ID NO: 68338 - protein, 9 aa, synthetic construct
  source 1..9: note = Seed: LVVVGAVGV (KRAS G12V)
YVVMGWVGS

SEQ ID NO: 68339 - protein, 9 aa, synthetic construct
  source 1..9: note = Seed: LVVVGAVGV (KRAS G12V)
YVVMGWVGT

SEQ ID NO: 68340 - protein, 9 aa, synthetic construct
  source 1..9: note = Seed: LVVVGAVGV (KRAS G12V)
YVVMGWVGV

SEQ ID NO: 68341 - protein, 9 aa, synthetic construct
  source 1..9: note = Seed: LVVVGAVGV (KRAS G12V)
YVVMGYVGA

SEQ ID NO: 68342 - protein, 9 aa, synthetic construct
  source 1..9: note = Seed: LVVVGAVGV (KRAS G12V)
YVVMGYVGF

SEQ ID NO: 68343 - protein, 9 aa, synthetic construct
  source 1..9: note = Seed: LVVVGAVGV (KRAS G12V)
YVVMGYVGH

SEQ ID NO: 68344 - protein, 9 aa, synthetic construct
  source 1..9: note = Seed: LVVVGAVGV (KRAS G12V)
YVVMGYVGI

SEQ ID NO: 68345 - protein, 9 aa, synthetic construct
  source 1..9: note = Seed: LVVVGAVGV (KRAS G12V)
YVVMGYVGK

SEQ ID NO: 68346 - protein, 9 aa, synthetic construct
  source 1..9: note = Seed: LVVVGAVGV (KRAS G12V)
YVVMGYVGL

SEQ ID NO: 68347 - protein, 9 aa, synthetic construct
  source 1..9: note = Seed: LVVVGAVGV (KRAS G12V)
YVVMGYVGM

SEQ ID NO: 68348 - protein, 9 aa, synthetic construct
  source 1..9: note = Seed: LVVVGAVGV (KRAS G12V)
YVVMGYVGN

SEQ ID NO: 68349 - protein, 9 aa, synthetic construct
  source 1..9: note = Seed: LVVVGAVGV (KRAS G12V)
YVVMGYVGQ

SEQ ID NO: 68350 - protein, 9 aa, synthetic construct
  source 1..9: note = Seed: LVVVGAVGV (KRAS G12V)
YVVMGYVGR

SEQ ID NO: 68351 - protein, 9 aa, synthetic construct
  source 1..9: note = Seed: LVVVGAVGV (KRAS G12V)
YVVMGYVGS

SEQ ID NO: 68352 - protein, 9 aa, synthetic construct
  source 1..9: note = Seed: LVVVGAVGV (KRAS G12V)
YVVMGYVGT

SEQ ID NO: 68353 - protein, 9 aa, synthetic construct
  source 1..9: note = Seed: LVVVGAVGV (KRAS G12V)
YVVMGYVGV

SEQ ID NO: 68354 - protein, 9 aa, synthetic construct
  source 1..9: note = Seed: LVVVGAVGV (KRAS G12V)
YVVMGYVGY

SEQ ID NO: 68355 - protein, 9 aa, synthetic construct
  source 1..9: note = Seed: LVVVGAVGV (KRAS G12V)
YVVNGAVGA

SEQ ID NO: 68356 - protein, 9 aa, synthetic construct
  source 1..9: note = Seed: LVVVGAVGV (KRAS G12V)
YVVNGAVGC

SEQ ID NO: 68357 - protein, 9 aa, synthetic construct
  source 1..9: note = Seed: LVVVGAVGV (KRAS G12V)
YVVNGAVGD

SEQ ID NO: 68358 - protein, 9 aa, synthetic construct
  source 1..9: note = Seed: LVVVGAVGV (KRAS G12V)
YVVNGAVGE

SEQ ID NO: 68359 - protein, 9 aa, synthetic construct
  source 1..9: note = Seed: LVVVGAVGV (KRAS G12V)
YVVNGAVGF

SEQ ID NO: 68360 - protein, 9 aa, synthetic construct
  source 1..9: note = Seed: LVVVGAVGV (KRAS G12V)
YVVNGAVGG

SEQ ID NO: 68361 - protein, 9 aa, synthetic construct
  source 1..9: note = Seed: LVVVGAVGV (KRAS G12V)
YVVNGAVGH

SEQ ID NO: 68362 - protein, 9 aa, synthetic construct
  source 1..9: note = Seed: LVVVGAVGV (KRAS G12V)
YVVNGAVGI

SEQ ID NO: 68363 - protein, 9 aa, synthetic construct
  source 1..9: note = Seed: LVVVGAVGV (KRAS G12V)
YVVNGAVGK

SEQ ID NO: 68364 - protein, 9 aa, synthetic construct
  source 1..9: note = Seed: LVVVGAVGV (KRAS G12V)
YVVNGAVGL

SEQ ID NO: 68365 - protein, 9 aa, synthetic construct
  source 1..9: note = Seed: LVVVGAVGV (KRAS G12V)
YVVNGAVGM

SEQ ID NO: 68366 - protein, 9 aa, synthetic construct
  source 1..9: note = Seed: LVVVGAVGV (KRAS G12V)
YVVNGAVGN

SEQ ID NO: 68367 - protein, 9 aa, synthetic construct
  source 1..9: note = Seed: LVVVGAVGV (KRAS G12V)
YVVNGAVGP

SEQ ID NO: 68368 - protein, 9 aa, synthetic construct
  source 1..9: note = Seed: LVVVGAVGV (KRAS G12V)
YVVNGAVGQ

SEQ ID NO: 68369 - protein, 9 aa, synthetic construct
  source 1..9: note = Seed: LVVVGAVGV (KRAS G12V)
YVVNGAVGR

SEQ ID NO: 68370 - protein, 9 aa, synthetic construct
  source 1..9: note = Seed: LVVVGAVGV (KRAS G12V)
YVVNGAVGS

SEQ ID NO: 68371 - protein, 9 aa, synthetic construct
  source 1..9: note = Seed: LVVVGAVGV (KRAS G12V)
YVVNGAVGT

SEQ ID NO: 68372 - protein, 9 aa, synthetic construct
  source 1..9: note = Seed: LVVVGAVGV (KRAS G12V)
YVVNGAVGV

SEQ ID NO: 68373 - protein, 9 aa, synthetic construct
  source 1..9: note = Seed: LVVVGAVGV (KRAS G12V)
YVVNGAVGW

SEQ ID NO: 68374 - protein, 9 aa, synthetic construct
  source 1..9: note = Seed: LVVVGAVGV (KRAS G12V)
YVVNGAVGY

SEQ ID NO: 68375 - protein, 9 aa, synthetic construct
  source 1..9: note = Seed: LVVVGAVGV (KRAS G12V)
YVVNGCVGA

SEQ ID NO: 68376 - protein, 9 aa, synthetic construct
  source 1..9: note = Seed: LVVVGAVGV (KRAS G12V)
YVVNGCVGC

SEQ ID NO: 68377 - protein, 9 aa, synthetic construct
  source 1..9: note = Seed: LVVVGAVGV (KRAS G12V)
YVVNGCVGF

SEQ ID NO: 68378 - protein, 9 aa, synthetic construct
  source 1..9: note = Seed: LVVVGAVGV (KRAS G12V)
YVVNGCVGG

SEQ ID NO: 68379 - protein, 9 aa, synthetic construct
  source 1..9: note = Seed: LVVVGAVGV (KRAS G12V)
YVVNGCVGH

SEQ ID NO: 68380 - protein, 9 aa, synthetic construct
  source 1..9: note = Seed: LVVVGAVGV (KRAS G12V)
YVVNGCVGI

SEQ ID NO: 68381 - protein, 9 aa, synthetic construct
  source 1..9: note = Seed: LVVVGAVGV (KRAS G12V)
YVVNGCVGK

SEQ ID NO: 68382 - protein, 9 aa, synthetic construct
  source 1..9: note = Seed: LVVVGAVGV (KRAS G12V)
YVVNGCVGL

SEQ ID NO: 68383 - protein, 9 aa, synthetic construct
  source 1..9: note = Seed: LVVVGAVGV (KRAS G12V)
YVVNGCVGM

SEQ ID NO: 68384 - protein, 9 aa, synthetic construct
  source 1..9: note = Seed: LVVVGAVGV (KRAS G12V)
YVVNGCVGN

SEQ ID NO: 68385 - protein, 9 aa, synthetic construct
  source 1..9: note = Seed: LVVVGAVGV (KRAS G12V)
YVVNGCVGQ

SEQ ID NO: 68386 - protein, 9 aa, synthetic construct
  source 1..9: note = Seed: LVVVGAVGV (KRAS G12V)
YVVNGCVGR

SEQ ID NO: 68387 - protein, 9 aa, synthetic construct
  source 1..9: note = Seed: LVVVGAVGV (KRAS G12V)
YVVNGCVGS

SEQ ID NO: 68388 - protein, 9 aa, synthetic construct
  source 1..9: note = Seed: LVVVGAVGV (KRAS G12V)
YVVNGCVGT

SEQ ID NO: 68389 - protein, 9 aa, synthetic construct
  source 1..9: note = Seed: LVVVGAVGV (KRAS G12V)
YVVNGCVGV

SEQ ID NO: 68390 - protein, 9 aa, synthetic construct
  source 1..9: note = Seed: LVVVGAVGV (KRAS G12V)
YVVNGCVGW

SEQ ID NO: 68391 - protein, 9 aa, synthetic construct
  source 1..9: note = Seed: LVVVGAVGV (KRAS G12V)
YVVNGCVGY

SEQ ID NO: 68392 - protein, 9 aa, synthetic construct
  source 1..9: note = Seed: LVVVGAVGV (KRAS G12V)
YVVNGDVGA

SEQ ID NO: 68393 - protein, 9 aa, synthetic construct
  source 1..9: note = Seed: LVVVGAVGV (KRAS G12V)
YVVNGDVGF

SEQ ID NO: 68394 - protein, 9 aa, synthetic construct
  source 1..9: note = Seed: LVVVGAVGV (KRAS G12V)
YVVNGDVGI

SEQ ID NO: 68395 - protein, 9 aa, synthetic construct
  source 1..9: note = Seed: LVVVGAVGV (KRAS G12V)
YVVNGDVGL

SEQ ID NO: 68396 - protein, 9 aa, synthetic construct
  source 1..9: note = Seed: LVVVGAVGV (KRAS G12V)
YVVNGDVGM

SEQ ID NO: 68397 - protein, 9 aa, synthetic construct
  source 1..9: note = Seed: LVVVGAVGV (KRAS G12V)
YVVNGDVGV

SEQ ID NO: 68398 - protein, 9 aa, synthetic construct
  source 1..9: note = Seed: LVVVGAVGV (KRAS G12V)
YVVNGEVGA

SEQ ID NO: 68399 - protein, 9 aa, synthetic construct
  source 1..9: note = Seed: LVVVGAVGV (KRAS G12V)
YVVNGEVGI

SEQ ID NO: 68400 - protein, 9 aa, synthetic construct
  source 1..9: note = Seed: LVVVGAVGV (KRAS G12V)
YVVNGEVGL

SEQ ID NO: 68401 - protein, 9 aa, synthetic construct
  source 1..9: note = Seed: LVVVGAVGV (KRAS G12V)
YVVNGEVGM

SEQ ID NO: 68402 - protein, 9 aa, synthetic construct
  source 1..9: note = Seed: LVVVGAVGV (KRAS G12V)
YVVNGEVGV

SEQ ID NO: 68403 - protein, 9 aa, synthetic construct
  source 1..9: note = Seed: LVVVGAVGV (KRAS G12V)
YVVNGFVGA

SEQ ID NO: 68404 - protein, 9 aa, synthetic construct
  source 1..9: note = Seed: LVVVGAVGV (KRAS G12V)
YVVNGFVGI

SEQ ID NO: 68405 - protein, 9 aa, synthetic construct
  source 1..9: note = Seed: LVVVGAVGV (KRAS G12V)
YVVNGFVGL

SEQ ID NO: 68406 - protein, 9 aa, synthetic construct
  source 1..9: note = Seed: LVVVGAVGV (KRAS G12V)
YVVNGFVGM

SEQ ID NO: 68407 - protein, 9 aa, synthetic construct
  source 1..9: note = Seed: LVVVGAVGV (KRAS G12V)
YVVNGFVGV

SEQ ID NO: 68408 - protein, 9 aa, synthetic construct
  source 1..9: note = Seed: LVVVGAVGV (KRAS G12V)
YVVNGGVGA

SEQ ID NO: 68409 - protein, 9 aa, synthetic construct
  source 1..9: note = Seed: LVVVGAVGV (KRAS G12V)
YVVNGGVGC

SEQ ID NO: 68410 - protein, 9 aa, synthetic construct
  source 1..9: note = Seed: LVVVGAVGV (KRAS G12V)
YVVNGGVGF

SEQ ID NO: 68411 - protein, 9 aa, synthetic construct
  source 1..9: note = Seed: LVVVGAVGV (KRAS G12V)
YVVNGGVGG

SEQ ID NO: 68412 - protein, 9 aa, synthetic construct
  source 1..9: note = Seed: LVVVGAVGV (KRAS G12V)
YVVNGGVGH

SEQ ID NO: 68413 - protein, 9 aa, synthetic construct
  source 1..9: note = Seed: LVVVGAVGV (KRAS G12V)
YVVNGGVGI

SEQ ID NO: 68414 - protein, 9 aa, synthetic construct
  source 1..9: note = Seed: LVVVGAVGV (KRAS G12V)
YVVNGGVGK

SEQ ID NO: 68415 - protein, 9 aa, synthetic construct
  source 1..9: note = Seed: LVVVGAVGV (KRAS G12V)
YVVNGGVGL

SEQ ID NO: 68416 - protein, 9 aa, synthetic construct
  source 1..9: note = Seed: LVVVGAVGV (KRAS G12V)
YVVNGGVGM

SEQ ID NO: 68417 - protein, 9 aa, synthetic construct
  source 1..9: note = Seed: LVVVGAVGV (KRAS G12V)
YVVNGGVGN

SEQ ID NO: 68418 - protein, 9 aa, synthetic construct
  source 1..9: note = Seed: LVVVGAVGV (KRAS G12V)
YVVNGGVGP

SEQ ID NO: 68419 - protein, 9 aa, synthetic construct
  source 1..9: note = Seed: LVVVGAVGV (KRAS G12V)
YVVNGGVGQ

SEQ ID NO: 68420 - protein, 9 aa, synthetic construct
  source 1..9: note = Seed: LVVVGAVGV (KRAS G12V)
YVVNGGVGR

SEQ ID NO: 68421 - protein, 9 aa, synthetic construct
  source 1..9: note = Seed: LVVVGAVGV (KRAS G12V)
YVVNGGVGS

SEQ ID NO: 68422 - protein, 9 aa, synthetic construct
  source 1..9: note = Seed: LVVVGAVGV (KRAS G12V)
YVVNGGVGT

SEQ ID NO: 68423 - protein, 9 aa, synthetic construct
  source 1..9: note = Seed: LVVVGAVGV (KRAS G12V)
YVVNGGVGV

SEQ ID NO: 68424 - protein, 9 aa, synthetic construct
  source 1..9: note = Seed: LVVVGAVGV (KRAS G12V)
YVVNGGVGW

SEQ ID NO: 68425 - protein, 9 aa, synthetic construct
  source 1..9: note = Seed: LVVVGAVGV (KRAS G12V)
YVVNGGVGY

SEQ ID NO: 68426 - protein, 9 aa, synthetic construct
  source 1..9: note = Seed: LVVVGAVGV (KRAS G12V)
YVVNGHVGA

SEQ ID NO: 68427 - protein, 9 aa, synthetic construct
  source 1..9: note = Seed: LVVVGAVGV (KRAS G12V)
YVVNGHVGC

SEQ ID NO: 68428 - protein, 9 aa, synthetic construct
  source 1..9: note = Seed: LVVVGAVGV (KRAS G12V)
YVVNGHVGF

SEQ ID NO: 68429 - protein, 9 aa, synthetic construct
  source 1..9: note = Seed: LVVVGAVGV (KRAS G12V)
YVVNGHVGI

SEQ ID NO: 68430 - protein, 9 aa, synthetic construct
  source 1..9: note = Seed: LVVVGAVGV (KRAS G12V)
YVVNGHVGL

SEQ ID NO: 68431 - protein, 9 aa, synthetic construct
  source 1..9: note = Seed: LVVVGAVGV (KRAS G12V)
YVVNGHVGM

SEQ ID NO: 68432 - protein, 9 aa, synthetic construct
  source 1..9: note = Seed: LVVVGAVGV (KRAS G12V)
YVVNGHVGV

SEQ ID NO: 68433 - protein, 9 aa, synthetic construct
  source 1..9: note = Seed: LVVVGAVGV (KRAS G12V)
YVVNGHVGY

SEQ ID NO: 68434 - protein, 9 aa, synthetic construct
  source 1..9: note = Seed: LVVVGAVGV (KRAS G12V)
YVVNGIVGA

SEQ ID NO: 68435 - protein, 9 aa, synthetic construct
  source 1..9: note = Seed: LVVVGAVGV (KRAS G12V)
YVVNGIVGC

SEQ ID NO: 68436 - protein, 9 aa, synthetic construct
  source 1..9: note = Seed: LVVVGAVGV (KRAS G12V)
YVVNGIVGD

SEQ ID NO: 68437 - protein, 9 aa, synthetic construct
  source 1..9: note = Seed: LVVVGAVGV (KRAS G12V)
YVVNGIVGF

SEQ ID NO: 68438 - protein, 9 aa, synthetic construct
  source 1..9: note = Seed: LVVVGAVGV (KRAS G12V)
YVVNGIVGG

SEQ ID NO: 68439 - protein, 9 aa, synthetic construct
  source 1..9: note = Seed: LVVVGAVGV (KRAS G12V)
YVVNGIVGH

SEQ ID NO: 68440 - protein, 9 aa, synthetic construct
  source 1..9: note = Seed: LVVVGAVGV (KRAS G12V)
YVVNGIVGI

SEQ ID NO: 68441 - protein, 9 aa, synthetic construct
  source 1..9: note = Seed: LVVVGAVGV (KRAS G12V)
YVVNGIVGL

SEQ ID NO: 68442 - protein, 9 aa, synthetic construct
  source 1..9: note = Seed: LVVVGAVGV (KRAS G12V)
YVVNGIVGM

SEQ ID NO: 68443 - protein, 9 aa, synthetic construct
  source 1..9: note = Seed: LVVVGAVGV (KRAS G12V)
YVVNGIVGN

SEQ ID NO: 68444 - protein, 9 aa, synthetic construct
  source 1..9: note = Seed: LVVVGAVGV (KRAS G12V)
YVVNGIVGQ

SEQ ID NO: 68445 - protein, 9 aa, synthetic construct
  source 1..9: note = Seed: LVVVGAVGV (KRAS G12V)
YVVNGIVGR

SEQ ID NO: 68446 - protein, 9 aa, synthetic construct
  source 1..9: note = Seed: LVVVGAVGV (KRAS G12V)
YVVNGIVGS

SEQ ID NO: 68447 - protein, 9 aa, synthetic construct
  source 1..9: note = Seed: LVVVGAVGV (KRAS G12V)
YVVNGIVGT

SEQ ID NO: 68448 - protein, 9 aa, synthetic construct
  source 1..9: note = Seed: LVVVGAVGV (KRAS G12V)
YVVNGIVGV

SEQ ID NO: 68449 - protein, 9 aa, synthetic construct
  source 1..9: note = Seed: LVVVGAVGV (KRAS G12V)
YVVNGIVGY

SEQ ID NO: 68450 - protein, 9 aa, synthetic construct
  source 1..9: note = Seed: LVVVGAVGV (KRAS G12V)
YVVNGKVGA

SEQ ID NO: 68451 - protein, 9 aa, synthetic construct
  source 1..9: note = Seed: LVVVGAVGV (KRAS G12V)
YVVNGKVGC

SEQ ID NO: 68452 - protein, 9 aa, synthetic construct
  source 1..9: note = Seed: LVVVGAVGV (KRAS G12V)
YVVNGKVGF

SEQ ID NO: 68453 - protein, 9 aa, synthetic construct
  source 1..9: note = Seed: LVVVGAVGV (KRAS G12V)
YVVNGKVGI

SEQ ID NO: 68454 - protein, 9 aa, synthetic construct
  source 1..9: note = Seed: LVVVGAVGV (KRAS G12V)
YVVNGKVGL

SEQ ID NO: 68455 - protein, 9 aa, synthetic construct
  source 1..9: note = Seed: LVVVGAVGV (KRAS G12V)
YVVNGKVGS

SEQ ID NO: 68456 - protein, 9 aa, synthetic construct
  source 1..9: note = Seed: LVVVGAVGV (KRAS G12V)
YVVNGKVGV

SEQ ID NO: 68457 - protein, 9 aa, synthetic construct
  source 1..9: note = Seed: LVVVGAVGV (KRAS G12V)
YVVNGLVGA

SEQ ID NO: 68458 - protein, 9 aa, synthetic construct
  source 1..9: note = Seed: LVVVGAVGV (KRAS G12V)
YVVNGLVGC

SEQ ID NO: 68459 - protein, 9 aa, synthetic construct
  source 1..9: note = Seed: LVVVGAVGV (KRAS G12V)
YVVNGLVGE

SEQ ID NO: 68460 - protein, 9 aa, synthetic construct
  source 1..9: note = Seed: LVVVGAVGV (KRAS G12V)
YVVNGLVGF

SEQ ID NO: 68461 - protein, 9 aa, synthetic construct
  source 1..9: note = Seed: LVVVGAVGV (KRAS G12V)
YVVNGLVGH

SEQ ID NO: 68462 - protein, 9 aa, synthetic construct
  source 1..9: note = Seed: LVVVGAVGV (KRAS G12V)
YVVNGLVGI

SEQ ID NO: 68463 - protein, 9 aa, synthetic construct
  source 1..9: note = Seed: LVVVGAVGV (KRAS G12V)
YVVNGLVGL

SEQ ID NO: 68464 - protein, 9 aa, synthetic construct
  source 1..9: note = Seed: LVVVGAVGV (KRAS G12V)
YVVNGLVGM

SEQ ID NO: 68465 - protein, 9 aa, synthetic construct
  source 1..9: note = Seed: LVVVGAVGV (KRAS G12V)
YVVNGLVGN

SEQ ID NO: 68466 - protein, 9 aa, synthetic construct
  source 1..9: note = Seed: LVVVGAVGV (KRAS G12V)
YVVNGLVGQ

SEQ ID NO: 68467 - protein, 9 aa, synthetic construct
  source 1..9: note = Seed: LVVVGAVGV (KRAS G12V)
YVVNGLVGS

SEQ ID NO: 68468 - protein, 9 aa, synthetic construct
  source 1..9: note = Seed: LVVVGAVGV (KRAS G12V)
YVVNGLVGT

SEQ ID NO: 68469 - protein, 9 aa, synthetic construct
  source 1..9: note = Seed: LVVVGAVGV (KRAS G12V)
YVVNGLVGV

SEQ ID NO: 68470 - protein, 9 aa, synthetic construct
  source 1..9: note = Seed: LVVVGAVGV (KRAS G12V)
YVVNGLVGY

SEQ ID NO: 68471 - protein, 9 aa, synthetic construct
  source 1..9: note = Seed: LVVVGAVGV (KRAS G12V)
YVVNGMVGA

SEQ ID NO: 68472 - protein, 9 aa, synthetic construct
  source 1..9: note = Seed: LVVVGAVGV (KRAS G12V)
YVVNGMVGC

SEQ ID NO: 68473 - protein, 9 aa, synthetic construct
  source 1..9: note = Seed: LVVVGAVGV (KRAS G12V)
YVVNGMVGE

SEQ ID NO: 68474 - protein, 9 aa, synthetic construct
  source 1..9: note = Seed: LVVVGAVGV (KRAS G12V)
YVVNGMVGF

SEQ ID NO: 68475 - protein, 9 aa, synthetic construct
  source 1..9: note = Seed: LVVVGAVGV (KRAS G12V)
YVVNGMVGG

SEQ ID NO: 68476 - protein, 9 aa, synthetic construct
  source 1..9: note = Seed: LVVVGAVGV (KRAS G12V)
YVVNGMVGH

SEQ ID NO: 68477 - protein, 9 aa, synthetic construct
  source 1..9: note = Seed: LVVVGAVGV (KRAS G12V)
YVVNGMVGI

SEQ ID NO: 68478 - protein, 9 aa, synthetic construct
  source 1..9: note = Seed: LVVVGAVGV (KRAS G12V)
YVVNGMVGL

SEQ ID NO: 68479 - protein, 9 aa, synthetic construct
  source 1..9: note = Seed: LVVVGAVGV (KRAS G12V)
YVVNGMVGM

SEQ ID NO: 68480 - protein, 9 aa, synthetic construct
  source 1..9: note = Seed: LVVVGAVGV (KRAS G12V)
YVVNGMVGN

SEQ ID NO: 68481 - protein, 9 aa, synthetic construct
  source 1..9: note = Seed: LVVVGAVGV (KRAS G12V)
YVVNGMVGQ

SEQ ID NO: 68482 - protein, 9 aa, synthetic construct
  source 1..9: note = Seed: LVVVGAVGV (KRAS G12V)
YVVNGMVGR

SEQ ID NO: 68483 - protein, 9 aa, synthetic construct
  source 1..9: note = Seed: LVVVGAVGV (KRAS G12V)
YVVNGMVGS

SEQ ID NO: 68484 - protein, 9 aa, synthetic construct
  source 1..9: note = Seed: LVVVGAVGV (KRAS G12V)
YVVNGMVGT

SEQ ID NO: 68485 - protein, 9 aa, synthetic construct
  source 1..9: note = Seed: LVVVGAVGV (KRAS G12V)
YVVNGMVGV

SEQ ID NO: 68486 - protein, 9 aa, synthetic construct
  source 1..9: note = Seed: LVVVGAVGV (KRAS G12V)
YVVNGMVGY

SEQ ID NO: 68487 - protein, 9 aa, synthetic construct
  source 1..9: note = Seed: LVVVGAVGV (KRAS G12V)
YVVNGNVGA

SEQ ID NO: 68488 - protein, 9 aa, synthetic construct
  source 1..9: note = Seed: LVVVGAVGV (KRAS G12V)
YVVNGNVGC

SEQ ID NO: 68489 - protein, 9 aa, synthetic construct
  source 1..9: note = Seed: LVVVGAVGV (KRAS G12V)
YVVNGNVGF

SEQ ID NO: 68490 - protein, 9 aa, synthetic construct
  source 1..9: note = Seed: LVVVGAVGV (KRAS G12V)
YVVNGNVGG

SEQ ID NO: 68491 - protein, 9 aa, synthetic construct
  source 1..9: note = Seed: LVVVGAVGV (KRAS G12V)
YVVNGNVGH

SEQ ID NO: 68492 - protein, 9 aa, synthetic construct
  source 1..9: note = Seed: LVVVGAVGV (KRAS G12V)
YVVNGNVGI

SEQ ID NO: 68493 - protein, 9 aa, synthetic construct
  source 1..9: note = Seed: LVVVGAVGV (KRAS G12V)
YVVNGNVGK

SEQ ID NO: 68494 - protein, 9 aa, synthetic construct
  source 1..9: note = Seed: LVVVGAVGV (KRAS G12V)
YVVNGNVGL

SEQ ID NO: 68495 - protein, 9 aa, synthetic construct
  source 1..9: note = Seed: LVVVGAVGV (KRAS G12V)
YVVNGNVGM

SEQ ID NO: 68496 - protein, 9 aa, synthetic construct
  source 1..9: note = Seed: LVVVGAVGV (KRAS G12V)
YVVNGNVGN

SEQ ID NO: 68497 - protein, 9 aa, synthetic construct
  source 1..9: note = Seed: LVVVGAVGV (KRAS G12V)
YVVNGNVGP

SEQ ID NO: 68498 - protein, 9 aa, synthetic construct
  source 1..9: note = Seed: LVVVGAVGV (KRAS G12V)
YVVNGNVGQ

SEQ ID NO: 68499 - protein, 9 aa, synthetic construct
  source 1..9: note = Seed: LVVVGAVGV (KRAS G12V)
YVVNGNVGR

SEQ ID NO: 68500 - protein, 9 aa, synthetic construct
  source 1..9: note = Seed: LVVVGAVGV (KRAS G12V)
YVVNGNVGS

SEQ ID NO: 68501 - protein, 9 aa, synthetic construct
  source 1..9: note = Seed: LVVVGAVGV (KRAS G12V)
YVVNGNVGT

SEQ ID NO: 68502 - protein, 9 aa, synthetic construct
  source 1..9: note = Seed: LVVVGAVGV (KRAS G12V)
YVVNGNVGV

SEQ ID NO: 68503 - protein, 9 aa, synthetic construct
  source 1..9: note = Seed: LVVVGAVGV (KRAS G12V)
YVVNGNVGW

SEQ ID NO: 68504 - protein, 9 aa, synthetic construct
  source 1..9: note = Seed: LVVVGAVGV (KRAS G12V)
YVVNGNVGY

SEQ ID NO: 68505 - protein, 9 aa, synthetic construct
  source 1..9: note = Seed: LVVVGAVGV (KRAS G12V)
YVVNGPVGA

SEQ ID NO: 68506 - protein, 9 aa, synthetic construct
  source 1..9: note = Seed: LVVVGAVGV (KRAS G12V)
YVVNGPVGC

SEQ ID NO: 68507 - protein, 9 aa, synthetic construct
  source 1..9: note = Seed: LVVVGAVGV (KRAS G12V)
YVVNGPVGD

SEQ ID NO: 68508 - protein, 9 aa, synthetic construct
  source 1..9: note = Seed: LVVVGAVGV (KRAS G12V)
YVVNGPVGE

SEQ ID NO: 68509 - protein, 9 aa, synthetic construct
  source 1..9: note = Seed: LVVVGAVGV (KRAS G12V)
YVVNGPVGF

SEQ ID NO: 68510 - protein, 9 aa, synthetic construct
  source 1..9: note = Seed: LVVVGAVGV (KRAS G12V)
YVVNGPVGG

SEQ ID NO: 68511 - protein, 9 aa, synthetic construct
  source 1..9: note = Seed: LVVVGAVGV (KRAS G12V)
YVVNGPVGH

SEQ ID NO: 68512 - protein, 9 aa, synthetic construct
  source 1..9: note = Seed: LVVVGAVGV (KRAS G12V)
YVVNGPVGI

SEQ ID NO: 68513 - protein, 9 aa, synthetic construct
  source 1..9: note = Seed: LVVVGAVGV (KRAS G12V)
YVVNGPVGL

SEQ ID NO: 68514 - protein, 9 aa, synthetic construct
  source 1..9: note = Seed: LVVVGAVGV (KRAS G12V)
YVVNGPVGM

SEQ ID NO: 68515 - protein, 9 aa, synthetic construct
  source 1..9: note = Seed: LVVVGAVGV (KRAS G12V)
YVVNGPVGN

SEQ ID NO: 68516 - protein, 9 aa, synthetic construct
  source 1..9: note = Seed: LVVVGAVGV (KRAS G12V)
YVVNGPVGQ

SEQ ID NO: 68517 - protein, 9 aa, synthetic construct
  source 1..9: note = Seed: LVVVGAVGV (KRAS G12V)
YVVNGPVGR

SEQ ID NO: 68518 - protein, 9 aa, synthetic construct
  source 1..9: note = Seed: LVVVGAVGV (KRAS G12V)
YVVNGPVGS

SEQ ID NO: 68519 - protein, 9 aa, synthetic construct
  source 1..9: note = Seed: LVVVGAVGV (KRAS G12V)
YVVNGPVGT

SEQ ID NO: 68520 - protein, 9 aa, synthetic construct
  source 1..9: note = Seed: LVVVGAVGV (KRAS G12V)
YVVNGPVGV

SEQ ID NO: 68521 - protein, 9 aa, synthetic construct
  source 1..9: note = Seed: LVVVGAVGV (KRAS G12V)
YVVNGPVGW

SEQ ID NO: 68522 - protein, 9 aa, synthetic construct
  source 1..9: note = Seed: LVVVGAVGV (KRAS G12V)
YVVNGPVGY

SEQ ID NO: 68523 - protein, 9 aa, synthetic construct
  source 1..9: note = Seed: LVVVGAVGV (KRAS G12V)
YVVNGQVGA

SEQ ID NO: 68524 - protein, 9 aa, synthetic construct
  source 1..9: note = Seed: LVVVGAVGV (KRAS G12V)
YVVNGQVGF

SEQ ID NO: 68525 - protein, 9 aa, synthetic construct
  source 1..9: note = Seed: LVVVGAVGV (KRAS G12V)
YVVNGQVGG

SEQ ID NO: 68526 - protein, 9 aa, synthetic construct
  source 1..9: note = Seed: LVVVGAVGV (KRAS G12V)
YVVNGQVGI

SEQ ID NO: 68527 - protein, 9 aa, synthetic construct
  source 1..9: note = Seed: LVVVGAVGV (KRAS G12V)
YVVNGQVGL

SEQ ID NO: 68528 - protein, 9 aa, synthetic construct
  source 1..9: note = Seed: LVVVGAVGV (KRAS G12V)
YVVNGQVGM

SEQ ID NO: 68529 - protein, 9 aa, synthetic construct
  source 1..9: note = Seed: LVVVGAVGV (KRAS G12V)
YVVNGQVGN

SEQ ID NO: 68530 - protein, 9 aa, synthetic construct
  source 1..9: note = Seed: LVVVGAVGV (KRAS G12V)
YVVNGQVGQ

SEQ ID NO: 68531 - protein, 9 aa, synthetic construct
  source 1..9: note = Seed: LVVVGAVGV (KRAS G12V)
YVVNGQVGS

SEQ ID NO: 68532 - protein, 9 aa, synthetic construct
  source 1..9: note = Seed: LVVVGAVGV (KRAS G12V)
YVVNGQVGT

SEQ ID NO: 68533 - protein, 9 aa, synthetic construct
  source 1..9: note = Seed: LVVVGAVGV (KRAS G12V)
YVVNGQVGV

SEQ ID NO: 68534 - protein, 9 aa, synthetic construct
  source 1..9: note = Seed: LVVVGAVGV (KRAS G12V)
YVVNGQVGY

SEQ ID NO: 68535 - protein, 9 aa, synthetic construct
  source 1..9: note = Seed: LVVVGAVGV (KRAS G12V)
YVVNGRVGA

SEQ ID NO: 68536 - protein, 9 aa, synthetic construct
  source 1..9: note = Seed: LVVVGAVGV (KRAS G12V)
YVVNGRVGF

SEQ ID NO: 68537 - protein, 9 aa, synthetic construct
  source 1..9: note = Seed: LVVVGAVGV (KRAS G12V)
YVVNGRVGH

SEQ ID NO: 68538 - protein, 9 aa, synthetic construct
  source 1..9: note = Seed: LVVVGAVGV (KRAS G12V)
YVVNGRVGI

SEQ ID NO: 68539 - protein, 9 aa, synthetic construct
  source 1..9: note = Seed: LVVVGAVGV (KRAS G12V)
YVVNGRVGL

SEQ ID NO: 68540 - protein, 9 aa, synthetic construct
  source 1..9: note = Seed: LVVVGAVGV (KRAS G12V)
YVVNGRVGS

SEQ ID NO: 68541 - protein, 9 aa, synthetic construct
  source 1..9: note = Seed: LVVVGAVGV (KRAS G12V)
YVVNGRVGV

SEQ ID NO: 68542 - protein, 9 aa, synthetic construct
  source 1..9: note = Seed: LVVVGAVGV (KRAS G12V)
YVVNGSVGA

SEQ ID NO: 68543 - protein, 9 aa, synthetic construct
  source 1..9: note = Seed: LVVVGAVGV (KRAS G12V)
YVVNGSVGC

SEQ ID NO: 68544 - protein, 9 aa, synthetic construct
  source 1..9: note = Seed: LVVVGAVGV (KRAS G12V)
YVVNGSVGD

SEQ ID NO: 68545 - protein, 9 aa, synthetic construct
  source 1..9: note = Seed: LVVVGAVGV (KRAS G12V)
YVVNGSVGE

SEQ ID NO: 68546 - protein, 9 aa, synthetic construct
  source 1..9: note = Seed: LVVVGAVGV (KRAS G12V)
YVVNGSVGF

SEQ ID NO: 68547 - protein, 9 aa, synthetic construct
  source 1..9: note = Seed: LVVVGAVGV (KRAS G12V)
YVVNGSVGG

SEQ ID NO: 68548 - protein, 9 aa, synthetic construct
  source 1..9: note = Seed: LVVVGAVGV (KRAS G12V)
YVVNGSVGH

SEQ ID NO: 68549 - protein, 9 aa, synthetic construct
  source 1..9: note = Seed: LVVVGAVGV (KRAS G12V)
YVVNGSVGI

SEQ ID NO: 68550 - protein, 9 aa, synthetic construct
  source 1..9: note = Seed: LVVVGAVGV (KRAS G12V)
YVVNGSVGK

SEQ ID NO: 68551 - protein, 9 aa, synthetic construct
  source 1..9: note = Seed: LVVVGAVGV (KRAS G12V)
YVVNGSVGL

SEQ ID NO: 68552 - protein, 9 aa, synthetic construct
  source 1..9: note = Seed: LVVVGAVGV (KRAS G12V)
YVVNGSVGM

SEQ ID NO: 68553 - protein, 9 aa, synthetic construct
  source 1..9: note = Seed: LVVVGAVGV (KRAS G12V)
YVVNGSVGN

SEQ ID NO: 68554 - protein, 9 aa, synthetic construct
  source 1..9: note = Seed: LVVVGAVGV (KRAS G12V)
YVVNGSVGP

SEQ ID NO: 68555 - protein, 9 aa, synthetic construct
  source 1..9: note = Seed: LVVVGAVGV (KRAS G12V)
YVVNGSVGQ

SEQ ID NO: 68556 - protein, 9 aa, synthetic construct
  source 1..9: note = Seed: LVVVGAVGV (KRAS G12V)
YVVNGSVGR

SEQ ID NO: 68557 - protein, 9 aa, synthetic construct
  source 1..9: note = Seed: LVVVGAVGV (KRAS G12V)
YVVNGSVGS

SEQ ID NO: 68558 - protein, 9 aa, synthetic construct
  source 1..9: note = Seed: LVVVGAVGV (KRAS G12V)
YVVNGSVGT

SEQ ID NO: 68559 - protein, 9 aa, synthetic construct
  source 1..9: note = Seed: LVVVGAVGV (KRAS G12V)
YVVNGSVGV

SEQ ID NO: 68560 - protein, 9 aa, synthetic construct
  source 1..9: note = Seed: LVVVGAVGV (KRAS G12V)
YVVNGSVGW

SEQ ID NO: 68561 - protein, 9 aa, synthetic construct
  source 1..9: note = Seed: LVVVGAVGV (KRAS G12V)
YVVNGSVGY

SEQ ID NO: 68562 - protein, 9 aa, synthetic construct
  source 1..9: note = Seed: LVVVGAVGV (KRAS G12V)
YVVNGTVGA

SEQ ID NO: 68563 - protein, 9 aa, synthetic construct
  source 1..9: note = Seed: LVVVGAVGV (KRAS G12V)
YVVNGTVGC

SEQ ID NO: 68564 - protein, 9 aa, synthetic construct
  source 1..9: note = Seed: LVVVGAVGV (KRAS G12V)
YVVNGTVGE

SEQ ID NO: 68565 - protein, 9 aa, synthetic construct
  source 1..9: note = Seed: LVVVGAVGV (KRAS G12V)
YVVNGTVGF

SEQ ID NO: 68566 - protein, 9 aa, synthetic construct
  source 1..9: note = Seed: LVVVGAVGV (KRAS G12V)
YVVNGTVGG

SEQ ID NO: 68567 - protein, 9 aa, synthetic construct
  source 1..9: note = Seed: LVVVGAVGV (KRAS G12V)
YVVNGTVGH

SEQ ID NO: 68568 - protein, 9 aa, synthetic construct
  source 1..9: note = Seed: LVVVGAVGV (KRAS G12V)
YVVNGTVGI

SEQ ID NO: 68569 - protein, 9 aa, synthetic construct
  source 1..9: note = Seed: LVVVGAVGV (KRAS G12V)
YVVNGTVGK

SEQ ID NO: 68570 - protein, 9 aa, synthetic construct
  source 1..9: note = Seed: LVVVGAVGV (KRAS G12V)
YVVNGTVGL

SEQ ID NO: 68571 - protein, 9 aa, synthetic construct
  source 1..9: note = Seed: LVVVGAVGV (KRAS G12V)
YVVNGTVGM

SEQ ID NO: 68572 - protein, 9 aa, synthetic construct
  source 1..9: note = Seed: LVVVGAVGV (KRAS G12V)
YVVNGTVGN

SEQ ID NO: 68573 - protein, 9 aa, synthetic construct
  source 1..9: note = Seed: LVVVGAVGV (KRAS G12V)
YVVNGTVGP

SEQ ID NO: 68574 - protein, 9 aa, synthetic construct
  source 1..9: note = Seed: LVVVGAVGV (KRAS G12V)
YVVNGTVGQ

SEQ ID NO: 68575 - protein, 9 aa, synthetic construct
  source 1..9: note = Seed: LVVVGAVGV (KRAS G12V)
YVVNGTVGR

SEQ ID NO: 68576 - protein, 9 aa, synthetic construct
  source 1..9: note = Seed: LVVVGAVGV (KRAS G12V)
YVVNGTVGS

SEQ ID NO: 68577 - protein, 9 aa, synthetic construct
  source 1..9: note = Seed: LVVVGAVGV (KRAS G12V)
YVVNGTVGT

SEQ ID NO: 68578 - protein, 9 aa, synthetic construct
  source 1..9: note = Seed: LVVVGAVGV (KRAS G12V)
YVVNGTVGV

SEQ ID NO: 68579 - protein, 9 aa, synthetic construct
  source 1..9: note = Seed: LVVVGAVGV (KRAS G12V)
YVVNGTVGW

SEQ ID NO: 68580 - protein, 9 aa, synthetic construct
  source 1..9: note = Seed: LVVVGAVGV (KRAS G12V)
YVVNGTVGY

SEQ ID NO: 68581 - protein, 9 aa, synthetic construct
  source 1..9: note = Seed: LVVVGAVGV (KRAS G12V)
YVVNGVVGA

SEQ ID NO: 68582 - protein, 9 aa, synthetic construct
  source 1..9: note = Seed: LVVVGAVGV (KRAS G12V)
YVVNGVVGC

SEQ ID NO: 68583 - protein, 9 aa, synthetic construct
  source 1..9: note = Seed: LVVVGAVGV (KRAS G12V)
YVVNGVVGD

SEQ ID NO: 68584 - protein, 9 aa, synthetic construct
  source 1..9: note = Seed: LVVVGAVGV (KRAS G12V)
YVVNGVVGE

SEQ ID NO: 68585 - protein, 9 aa, synthetic construct
  source 1..9: note = Seed: LVVVGAVGV (KRAS G12V)
YVVNGVVGF

SEQ ID NO: 68586 - protein, 9 aa, synthetic construct
  source 1..9: note = Seed: LVVVGAVGV (KRAS G12V)
YVVNGVVGG

SEQ ID NO: 68587 - protein, 9 aa, synthetic construct
  source 1..9: note = Seed: LVVVGAVGV (KRAS G12V)
YVVNGVVGH

SEQ ID NO: 68588 - protein, 9 aa, synthetic construct
  source 1..9: note = Seed: LVVVGAVGV (KRAS G12V)
YVVNGVVGI

SEQ ID NO: 68589 - protein, 9 aa, synthetic construct
  source 1..9: note = Seed: LVVVGAVGV (KRAS G12V)
YVVNGVVGL

SEQ ID NO: 68590 - protein, 9 aa, synthetic construct
  source 1..9: note = Seed: LVVVGAVGV (KRAS G12V)
YVVNGVVGM

SEQ ID NO: 68591 - protein, 9 aa, synthetic construct
  source 1..9: note = Seed: LVVVGAVGV (KRAS G12V)
YVVNGVVGN

SEQ ID NO: 68592 - protein, 9 aa, synthetic construct
  source 1..9: note = Seed: LVVVGAVGV (KRAS G12V)
YVVNGVVGQ

SEQ ID NO: 68593 - protein, 9 aa, synthetic construct
  source 1..9: note = Seed: LVVVGAVGV (KRAS G12V)
YVVNGVVGR

SEQ ID NO: 68594 - protein, 9 aa, synthetic construct
  source 1..9: note = Seed: LVVVGAVGV (KRAS G12V)
YVVNGVVGS

SEQ ID NO: 68595 - protein, 9 aa, synthetic construct
  source 1..9: note = Seed: LVVVGAVGV (KRAS G12V)
YVVNGVVGT

SEQ ID NO: 68596 - protein, 9 aa, synthetic construct
  source 1..9: note = Seed: LVVVGAVGV (KRAS G12V)
YVVNGVVGV

SEQ ID NO: 68597 - protein, 9 aa, synthetic construct
  source 1..9: note = Seed: LVVVGAVGV (KRAS G12V)
YVVNGVVGW

SEQ ID NO: 68598 - protein, 9 aa, synthetic construct
  source 1..9: note = Seed: LVVVGAVGV (KRAS G12V)
YVVNGVVGY

SEQ ID NO: 68599 - protein, 9 aa, synthetic construct
  source 1..9: note = Seed: LVVVGAVGV (KRAS G12V)
YVVNGWVGA

SEQ ID NO: 68600 - protein, 9 aa, synthetic construct
  source 1..9: note = Seed: LVVVGAVGV (KRAS G12V)
YVVNGWVGF

SEQ ID NO: 68601 - protein, 9 aa, synthetic construct
  source 1..9: note = Seed: LVVVGAVGV (KRAS G12V)
YVVNGWVGI

SEQ ID NO: 68602 - protein, 9 aa, synthetic construct
  source 1..9: note = Seed: LVVVGAVGV (KRAS G12V)
YVVNGWVGL

SEQ ID NO: 68603 - protein, 9 aa, synthetic construct
  source 1..9: note = Seed: LVVVGAVGV (KRAS G12V)
YVVNGWVGM

SEQ ID NO: 68604 - protein, 9 aa, synthetic construct
  source 1..9: note = Seed: LVVVGAVGV (KRAS G12V)
YVVNGWVGS

SEQ ID NO: 68605 - protein, 9 aa, synthetic construct
  source 1..9: note = Seed: LVVVGAVGV (KRAS G12V)
YVVNGWVGT

SEQ ID NO: 68606 - protein, 9 aa, synthetic construct
  source 1..9: note = Seed: LVVVGAVGV (KRAS G12V)
YVVNGWVGV

SEQ ID NO: 68607 - protein, 9 aa, synthetic construct
  source 1..9: note = Seed: LVVVGAVGV (KRAS G12V)
YVVNGWVGY

SEQ ID NO: 68608 - protein, 9 aa, synthetic construct
  source 1..9: note = Seed: LVVVGAVGV (KRAS G12V)
YVVNGYVGC

SEQ ID NO: 68609 - protein, 9 aa, synthetic construct
  source 1..9: note = Seed: LVVVGAVGV (KRAS G12V)
YVVNGYVGI

SEQ ID NO: 68610 - protein, 9 aa, synthetic construct
  source 1..9: note = Seed: LVVVGAVGV (KRAS G12V)
YVVNGYVGL

SEQ ID NO: 68611 - protein, 9 aa, synthetic construct
  source 1..9: note = Seed: LVVVGAVGV (KRAS G12V)
YVVNGYVGM

SEQ ID NO: 68612 - protein, 9 aa, synthetic construct
  source 1..9: note = Seed: LVVVGAVGV (KRAS G12V)
YVVNGYVGV

SEQ ID NO: 68613 - protein, 9 aa, synthetic construct
  source 1..9: note = Seed: LVVVGAVGV (KRAS G12V)
YVVPGAVGA

SEQ ID NO: 68614 - protein, 9 aa, synthetic construct
  source 1..9: note = Seed: LVVVGAVGV (KRAS G12V)
YVVPGAVGC

SEQ ID NO: 68615 - protein, 9 aa, synthetic construct
  source 1..9: note = Seed: LVVVGAVGV (KRAS G12V)
YVVPGAVGF

SEQ ID NO: 68616 - protein, 9 aa, synthetic construct
  source 1..9: note = Seed: LVVVGAVGV (KRAS G12V)
YVVPGAVGI

SEQ ID NO: 68617 - protein, 9 aa, synthetic construct
  source 1..9: note = Seed: LVVVGAVGV (KRAS G12V)
YVVPGAVGL

SEQ ID NO: 68618 - protein, 9 aa, synthetic construct
  source 1..9: note = Seed: LVVVGAVGV (KRAS G12V)
YVVPGAVGM

SEQ ID NO: 68619 - protein, 9 aa, synthetic construct
  source 1..9: note = Seed: LVVVGAVGV (KRAS G12V)
YVVPGAVGV

SEQ ID NO: 68620 - protein, 9 aa, synthetic construct
  source 1..9: note = Seed: LVVVGAVGV (KRAS G12V)
YVVPGAVGY

SEQ ID NO: 68621 - protein, 9 aa, synthetic construct
  source 1..9: note = Seed: LVVVGAVGV (KRAS G12V)
YVVPGCVGI

SEQ ID NO: 68622 - protein, 9 aa, synthetic construct
  source 1..9: note = Seed: LVVVGAVGV (KRAS G12V)
YVVPGCVGL

SEQ ID NO: 68623 - protein, 9 aa, synthetic construct
  source 1..9: note = Seed: LVVVGAVGV (KRAS G12V)
YVVPGCVGV

SEQ ID NO: 68624 - protein, 9 aa, synthetic construct
  source 1..9: note = Seed: LVVVGAVGV (KRAS G12V)
YVVPGGVGA

SEQ ID NO: 68625 - protein, 9 aa, synthetic construct
  source 1..9: note = Seed: LVVVGAVGV (KRAS G12V)
YVVPGGVGI

SEQ ID NO: 68626 - protein, 9 aa, synthetic construct
  source 1..9: note = Seed: LVVVGAVGV (KRAS G12V)
YVVPGGVGL

SEQ ID NO: 68627 - protein, 9 aa, synthetic construct
  source 1..9: note = Seed: LVVVGAVGV (KRAS G12V)
YVVPGGVGM

SEQ ID NO: 68628 - protein, 9 aa, synthetic construct
  source 1..9: note = Seed: LVVVGAVGV (KRAS G12V)
YVVPGGVGV

SEQ ID NO: 68629 - protein, 9 aa, synthetic construct
  source 1..9: note = Seed: LVVVGAVGV (KRAS G12V)
YVVPGIVGI

SEQ ID NO: 68630 - protein, 9 aa, synthetic construct
  source 1..9: note = Seed: LVVVGAVGV (KRAS G12V)
YVVPGIVGV

SEQ ID NO: 68631 - protein, 9 aa, synthetic construct
  source 1..9: note = Seed: LVVVGAVGV (KRAS G12V)
YVVPGMVGV

SEQ ID NO: 68632 - protein, 9 aa, synthetic construct
  source 1..9: note = Seed: LVVVGAVGV (KRAS G12V)
YVVPGNVGC

SEQ ID NO: 68633 - protein, 9 aa, synthetic construct
  source 1..9: note = Seed: LVVVGAVGV (KRAS G12V)
YVVPGNVGI

SEQ ID NO: 68634 - protein, 9 aa, synthetic construct
  source 1..9: note = Seed: LVVVGAVGV (KRAS G12V)
YVVPGNVGL

SEQ ID NO: 68635 - protein, 9 aa, synthetic construct
  source 1..9: note = Seed: LVVVGAVGV (KRAS G12V)
YVVPGNVGV

SEQ ID NO: 68636 - protein, 9 aa, synthetic construct
  source 1..9: note = Seed: LVVVGAVGV (KRAS G12V)
YVVPGPVGI

SEQ ID NO: 68637 - protein, 9 aa, synthetic construct
  source 1..9: note = Seed: LVVVGAVGV (KRAS G12V)
YVVPGPVGL

SEQ ID NO: 68638 - protein, 9 aa, synthetic construct
  source 1..9: note = Seed: LVVVGAVGV (KRAS G12V)
YVVPGPVGM

SEQ ID NO: 68639 - protein, 9 aa, synthetic construct
  source 1..9: note = Seed: LVVVGAVGV (KRAS G12V)
YVVPGPVGV

SEQ ID NO: 68640 - protein, 9 aa, synthetic construct
  source 1..9: note = Seed: LVVVGAVGV (KRAS G12V)
YVVPGSVGA

SEQ ID NO: 68641 - protein, 9 aa, synthetic construct
  source 1..9: note = Seed: LVVVGAVGV (KRAS G12V)
YVVPGSVGC

SEQ ID NO: 68642 - protein, 9 aa, synthetic construct
  source 1..9: note = Seed: LVVVGAVGV (KRAS G12V)
YVVPGSVGI

SEQ ID NO: 68643 - protein, 9 aa, synthetic construct
  source 1..9: note = Seed: LVVVGAVGV (KRAS G12V)
YVVPGSVGL

SEQ ID NO: 68644 - protein, 9 aa, synthetic construct
  source 1..9: note = Seed: LVVVGAVGV (KRAS G12V)
YVVPGSVGM

SEQ ID NO: 68645 - protein, 9 aa, synthetic construct
  source 1..9: note = Seed: LVVVGAVGV (KRAS G12V)
YVVPGSVGV

SEQ ID NO: 68646 - protein, 9 aa, synthetic construct
  source 1..9: note = Seed: LVVVGAVGV (KRAS G12V)
YVVPGTVGC

SEQ ID NO: 68647 - protein, 9 aa, synthetic construct
  source 1..9: note = Seed: LVVVGAVGV (KRAS G12V)
YVVPGTVGL

SEQ ID NO: 68648 - protein, 9 aa, synthetic construct
  source 1..9: note = Seed: LVVVGAVGV (KRAS G12V)
YVVPGTVGV

SEQ ID NO: 68649 - protein, 9 aa, synthetic construct
  source 1..9: note = Seed: LVVVGAVGV (KRAS G12V)
YVVPGVVGI

SEQ ID NO: 68650 - protein, 9 aa, synthetic construct
  source 1..9: note = Seed: LVVVGAVGV (KRAS G12V)
YVVPGVVGL

SEQ ID NO: 68651 - protein, 9 aa, synthetic construct
  source 1..9: note = Seed: LVVVGAVGV (KRAS G12V)
YVVPGVVGM

SEQ ID NO: 68652 - protein, 9 aa, synthetic construct
  source 1..9: note = Seed: LVVVGAVGV (KRAS G12V)
YVVPGVVGV

SEQ ID NO: 68653 - protein, 9 aa, synthetic construct
  source 1..9: note = Seed: LVVVGAVGV (KRAS G12V)
YVVQGAVGA

SEQ ID NO: 68654 - protein, 9 aa, synthetic construct
  source 1..9: note = Seed: LVVVGAVGV (KRAS G12V)
YVVQGAVGC

SEQ ID NO: 68655 - protein, 9 aa, synthetic construct
  source 1..9: note = Seed: LVVVGAVGV (KRAS G12V)
YVVQGAVGD

SEQ ID NO: 68656 - protein, 9 aa, synthetic construct
  source 1..9: note = Seed: LVVVGAVGV (KRAS G12V)
YVVQGAVGE

SEQ ID NO: 68657 - protein, 9 aa, synthetic construct
  source 1..9: note = Seed: LVVVGAVGV (KRAS G12V)
YVVQGAVGF

SEQ ID NO: 68658 - protein, 9 aa, synthetic construct
  source 1..9: note = Seed: LVVVGAVGV (KRAS G12V)
YVVQGAVGG

SEQ ID NO: 68659 - protein, 9 aa, synthetic construct
  source 1..9: note = Seed: LVVVGAVGV (KRAS G12V)
YVVQGAVGH

SEQ ID NO: 68660 - protein, 9 aa, synthetic construct
  source 1..9: note = Seed: LVVVGAVGV (KRAS G12V)
YVVQGAVGI

SEQ ID NO: 68661 - protein, 9 aa, synthetic construct
  source 1..9: note = Seed: LVVVGAVGV (KRAS G12V)
YVVQGAVGK

SEQ ID NO: 68662 - protein, 9 aa, synthetic construct
  source 1..9: note = Seed: LVVVGAVGV (KRAS G12V)
YVVQGAVGL

SEQ ID NO: 68663 - protein, 9 aa, synthetic construct
  source 1..9: note = Seed: LVVVGAVGV (KRAS G12V)
YVVQGAVGM

SEQ ID NO: 68664 - protein, 9 aa, synthetic construct
  source 1..9: note = Seed: LVVVGAVGV (KRAS G12V)
YVVQGAVGN

SEQ ID NO: 68665 - protein, 9 aa, synthetic construct
  source 1..9: note = Seed: LVVVGAVGV (KRAS G12V)
YVVQGAVGP

SEQ ID NO: 68666 - protein, 9 aa, synthetic construct
  source 1..9: note = Seed: LVVVGAVGV (KRAS G12V)
YVVQGAVGQ

SEQ ID NO: 68667 - protein, 9 aa, synthetic construct
  source 1..9: note = Seed: LVVVGAVGV (KRAS G12V)
YVVQGAVGR

SEQ ID NO: 68668 - protein, 9 aa, synthetic construct
  source 1..9: note = Seed: LVVVGAVGV (KRAS G12V)
YVVQGAVGS

SEQ ID NO: 68669 - protein, 9 aa, synthetic construct
  source 1..9: note = Seed: LVVVGAVGV (KRAS G12V)
YVVQGAVGT

SEQ ID NO: 68670 - protein, 9 aa, synthetic construct
  source 1..9: note = Seed: LVVVGAVGV (KRAS G12V)
YVVQGAVGV

SEQ ID NO: 68671 - protein, 9 aa, synthetic construct
  source 1..9: note = Seed: LVVVGAVGV (KRAS G12V)
YVVQGAVGW

SEQ ID NO: 68672 - protein, 9 aa, synthetic construct
  source 1..9: note = Seed: LVVVGAVGV (KRAS G12V)
YVVQGAVGY

SEQ ID NO: 68673 - protein, 9 aa, synthetic construct
  source 1..9: note = Seed: LVVVGAVGV (KRAS G12V)
YVVQGCVGA

SEQ ID NO: 68674 - protein, 9 aa, synthetic construct
  source 1..9: note = Seed: LVVVGAVGV (KRAS G12V)
YVVQGCVGI

SEQ ID NO: 68675 - protein, 9 aa, synthetic construct
  source 1..9: note = Seed: LVVVGAVGV (KRAS G12V)
YVVQGCVGL

SEQ ID NO: 68676 - protein, 9 aa, synthetic construct
  source 1..9: note = Seed: LVVVGAVGV (KRAS G12V)
YVVQGCVGM

SEQ ID NO: 68677 - protein, 9 aa, synthetic construct
  source 1..9: note = Seed: LVVVGAVGV (KRAS G12V)
YVVQGCVGV

SEQ ID NO: 68678 - protein, 9 aa, synthetic construct
  source 1..9: note = Seed: LVVVGAVGV (KRAS G12V)
YVVQGDVGA

SEQ ID NO: 68679 - protein, 9 aa, synthetic construct
  source 1..9: note = Seed: LVVVGAVGV (KRAS G12V)
YVVQGDVGI

SEQ ID NO: 68680 - protein, 9 aa, synthetic construct
  source 1..9: note = Seed: LVVVGAVGV (KRAS G12V)
YVVQGDVGL

SEQ ID NO: 68681 - protein, 9 aa, synthetic construct
  source 1..9: note = Seed: LVVVGAVGV (KRAS G12V)
YVVQGDVGS

SEQ ID NO: 68682 - protein, 9 aa, synthetic construct
  source 1..9: note = Seed: LVVVGAVGV (KRAS G12V)
YVVQGDVGV

SEQ ID NO: 68683 - protein, 9 aa, synthetic construct
  source 1..9: note = Seed: LVVVGAVGV (KRAS G12V)
YVVQGEVGA

SEQ ID NO: 68684 - protein, 9 aa, synthetic construct
  source 1..9: note = Seed: LVVVGAVGV (KRAS G12V)
YVVQGEVGI

SEQ ID NO: 68685 - protein, 9 aa, synthetic construct
  source 1..9: note = Seed: LVVVGAVGV (KRAS G12V)
YVVQGEVGL

SEQ ID NO: 68686 - protein, 9 aa, synthetic construct
  source 1..9: note = Seed: LVVVGAVGV (KRAS G12V)
YVVQGEVGV

SEQ ID NO: 68687 - protein, 9 aa, synthetic construct
  source 1..9: note = Seed: LVVVGAVGV (KRAS G12V)
YVVQGFVGI

SEQ ID NO: 68688 - protein, 9 aa, synthetic construct
  source 1..9: note = Seed: LVVVGAVGV (KRAS G12V)
YVVQGFVGL

SEQ ID NO: 68689 - protein, 9 aa, synthetic construct
  source 1..9: note = Seed: LVVVGAVGV (KRAS G12V)
YVVQGFVGV

SEQ ID NO: 68690 - protein, 9 aa, synthetic construct
  source 1..9: note = Seed: LVVVGAVGV (KRAS G12V)
YVVQGGVGA

SEQ ID NO: 68691 - protein, 9 aa, synthetic construct
  source 1..9: note = Seed: LVVVGAVGV (KRAS G12V)
YVVQGGVGC

SEQ ID NO: 68692 - protein, 9 aa, synthetic construct
  source 1..9: note = Seed: LVVVGAVGV (KRAS G12V)
YVVQGGVGF

SEQ ID NO: 68693 - protein, 9 aa, synthetic construct
  source 1..9: note = Seed: LVVVGAVGV (KRAS G12V)
YVVQGGVGG

SEQ ID NO: 68694 - protein, 9 aa, synthetic construct
  source 1..9: note = Seed: LVVVGAVGV (KRAS G12V)
YVVQGGVGH

SEQ ID NO: 68695 - protein, 9 aa, synthetic construct
  source 1..9: note = Seed: LVVVGAVGV (KRAS G12V)
YVVQGGVGI

SEQ ID NO: 68696 - protein, 9 aa, synthetic construct
  source 1..9: note = Seed: LVVVGAVGV (KRAS G12V)
YVVQGGVGK

SEQ ID NO: 68697 - protein, 9 aa, synthetic construct
  source 1..9: note = Seed: LVVVGAVGV (KRAS G12V)
YVVQGGVGL

SEQ ID NO: 68698 - protein, 9 aa, synthetic construct
  source 1..9: note = Seed: LVVVGAVGV (KRAS G12V)
YVVQGGVGM

SEQ ID NO: 68699 - protein, 9 aa, synthetic construct
  source 1..9: note = Seed: LVVVGAVGV (KRAS G12V)
YVVQGGVGN

SEQ ID NO: 68700 - protein, 9 aa, synthetic construct
  source 1..9: note = Seed: LVVVGAVGV (KRAS G12V)
YVVQGGVGP

SEQ ID NO: 68701 - protein, 9 aa, synthetic construct
  source 1..9: note = Seed: LVVVGAVGV (KRAS G12V)
YVVQGGVGQ

SEQ ID NO: 68702 - protein, 9 aa, synthetic construct
  source 1..9: note = Seed: LVVVGAVGV (KRAS G12V)
YVVQGGVGR

SEQ ID NO: 68703 - protein, 9 aa, synthetic construct
  source 1..9: note = Seed: LVVVGAVGV (KRAS G12V)
YVVQGGVGS

SEQ ID NO: 68704 - protein, 9 aa, synthetic construct
  source 1..9: note = Seed: LVVVGAVGV (KRAS G12V)
YVVQGGVGT

SEQ ID NO: 68705 - protein, 9 aa, synthetic construct
  source 1..9: note = Seed: LVVVGAVGV (KRAS G12V)
YVVQGGVGV

SEQ ID NO: 68706 - protein, 9 aa, synthetic construct
  source 1..9: note = Seed: LVVVGAVGV (KRAS G12V)
YVVQGGVGW

SEQ ID NO: 68707 - protein, 9 aa, synthetic construct
  source 1..9: note = Seed: LVVVGAVGV (KRAS G12V)
YVVQGGVGY

SEQ ID NO: 68708 - protein, 9 aa, synthetic construct
  source 1..9: note = Seed: LVVVGAVGV (KRAS G12V)
YVVQGHVGA

SEQ ID NO: 68709 - protein, 9 aa, synthetic construct
  source 1..9: note = Seed: LVVVGAVGV (KRAS G12V)
YVVQGHVGI

SEQ ID NO: 68710 - protein, 9 aa, synthetic construct
  source 1..9: note = Seed: LVVVGAVGV (KRAS G12V)
YVVQGHVGL

SEQ ID NO: 68711 - protein, 9 aa, synthetic construct
  source 1..9: note = Seed: LVVVGAVGV (KRAS G12V)
YVVQGHVGM

SEQ ID NO: 68712 - protein, 9 aa, synthetic construct
  source 1..9: note = Seed: LVVVGAVGV (KRAS G12V)
YVVQGHVGS

SEQ ID NO: 68713 - protein, 9 aa, synthetic construct
  source 1..9: note = Seed: LVVVGAVGV (KRAS G12V)
YVVQGHVGT

SEQ ID NO: 68714 - protein, 9 aa, synthetic construct
  source 1..9: note = Seed: LVVVGAVGV (KRAS G12V)
YVVQGHVGV

SEQ ID NO: 68715 - protein, 9 aa, synthetic construct
  source 1..9: note = Seed: LVVVGAVGV (KRAS G12V)
YVVQGIVGA

SEQ ID NO: 68716 - protein, 9 aa, synthetic construct
  source 1..9: note = Seed: LVVVGAVGV (KRAS G12V)
YVVQGIVGD

SEQ ID NO: 68717 - protein, 9 aa, synthetic construct
  source 1..9: note = Seed: LVVVGAVGV (KRAS G12V)
YVVQGIVGE

SEQ ID NO: 68718 - protein, 9 aa, synthetic construct
  source 1..9: note = Seed: LVVVGAVGV (KRAS G12V)
YVVQGIVGF

SEQ ID NO: 68719 - protein, 9 aa, synthetic construct
  source 1..9: note = Seed: LVVVGAVGV (KRAS G12V)
YVVQGIVGG

SEQ ID NO: 68720 - protein, 9 aa, synthetic construct
  source 1..9: note = Seed: LVVVGAVGV (KRAS G12V)
YVVQGIVGH

SEQ ID NO: 68721 - protein, 9 aa, synthetic construct
  source 1..9: note = Seed: LVVVGAVGV (KRAS G12V)
YVVQGIVGI

SEQ ID NO: 68722 - protein, 9 aa, synthetic construct
  source 1..9: note = Seed: LVVVGAVGV (KRAS G12V)
YVVQGIVGL

SEQ ID NO: 68723 - protein, 9 aa, synthetic construct
  source 1..9: note = Seed: LVVVGAVGV (KRAS G12V)
YVVQGIVGM

SEQ ID NO: 68724 - protein, 9 aa, synthetic construct
  source 1..9: note = Seed: LVVVGAVGV (KRAS G12V)
YVVQGIVGN

SEQ ID NO: 68725 - protein, 9 aa, synthetic construct
  source 1..9: note = Seed: LVVVGAVGV (KRAS G12V)
YVVQGIVGQ

SEQ ID NO: 68726 - protein, 9 aa, synthetic construct
  source 1..9: note = Seed: LVVVGAVGV (KRAS G12V)
YVVQGIVGR

SEQ ID NO: 68727 - protein, 9 aa, synthetic construct
  source 1..9: note = Seed: LVVVGAVGV (KRAS G12V)
YVVQGIVGS

SEQ ID NO: 68728 - protein, 9 aa, synthetic construct
  source 1..9: note = Seed: LVVVGAVGV (KRAS G12V)
YVVQGIVGT

SEQ ID NO: 68729 - protein, 9 aa, synthetic construct
  source 1..9: note = Seed: LVVVGAVGV (KRAS G12V)
YVVQGIVGV

SEQ ID NO: 68730 - protein, 9 aa, synthetic construct
  source 1..9: note = Seed: LVVVGAVGV (KRAS G12V)
YVVQGIVGY

SEQ ID NO: 68731 - protein, 9 aa, synthetic construct
  source 1..9: note = Seed: LVVVGAVGV (KRAS G12V)
YVVQGKVGA

SEQ ID NO: 68732 - protein, 9 aa, synthetic construct
  source 1..9: note = Seed: LVVVGAVGV (KRAS G12V)
YVVQGKVGG

SEQ ID NO: 68733 - protein, 9 aa, synthetic construct
  source 1..9: note = Seed: LVVVGAVGV (KRAS G12V)
YVVQGKVGH

SEQ ID NO: 68734 - protein, 9 aa, synthetic construct
  source 1..9: note = Seed: LVVVGAVGV (KRAS G12V)
YVVQGKVGL

SEQ ID NO: 68735 - protein, 9 aa, synthetic construct
  source 1..9: note = Seed: LVVVGAVGV (KRAS G12V)
YVVQGKVGN

SEQ ID NO: 68736 - protein, 9 aa, synthetic construct
  source 1..9: note = Seed: LVVVGAVGV (KRAS G12V)
YVVQGKVGQ

SEQ ID NO: 68737 - protein, 9 aa, synthetic construct
  source 1..9: note = Seed: LVVVGAVGV (KRAS G12V)
YVVQGKVGS

SEQ ID NO: 68738 - protein, 9 aa, synthetic construct
  source 1..9: note = Seed: LVVVGAVGV (KRAS G12V)
YVVQGKVGT

SEQ ID NO: 68739 - protein, 9 aa, synthetic construct
  source 1..9: note = Seed: LVVVGAVGV (KRAS G12V)
YVVQGLVGA

SEQ ID NO: 68740 - protein, 9 aa, synthetic construct
  source 1..9: note = Seed: LVVVGAVGV (KRAS G12V)
YVVQGLVGF

SEQ ID NO: 68741 - protein, 9 aa, synthetic construct
  source 1..9: note = Seed: LVVVGAVGV (KRAS G12V)
YVVQGLVGH

SEQ ID NO: 68742 - protein, 9 aa, synthetic construct
  source 1..9: note = Seed: LVVVGAVGV (KRAS G12V)
YVVQGLVGI

SEQ ID NO: 68743 - protein, 9 aa, synthetic construct
  source 1..9: note = Seed: LVVVGAVGV (KRAS G12V)
YVVQGLVGL

SEQ ID NO: 68744 - protein, 9 aa, synthetic construct
  source 1..9: note = Seed: LVVVGAVGV (KRAS G12V)
YVVQGLVGM

SEQ ID NO: 68745 - protein, 9 aa, synthetic construct
  source 1..9: note = Seed: LVVVGAVGV (KRAS G12V)
YVVQGLVGN

SEQ ID NO: 68746 - protein, 9 aa, synthetic construct
  source 1..9: note = Seed: LVVVGAVGV (KRAS G12V)
YVVQGLVGR

SEQ ID NO: 68747 - protein, 9 aa, synthetic construct
  source 1..9: note = Seed: LVVVGAVGV (KRAS G12V)
YVVQGLVGS

SEQ ID NO: 68748 - protein, 9 aa, synthetic construct
  source 1..9: note = Seed: LVVVGAVGV (KRAS G12V)
YVVQGLVGT

SEQ ID NO: 68749 - protein, 9 aa, synthetic construct
  source 1..9: note = Seed: LVVVGAVGV (KRAS G12V)
YVVQGLVGV

SEQ ID NO: 68750 - protein, 9 aa, synthetic construct
  source 1..9: note = Seed: LVVVGAVGV (KRAS G12V)
YVVQGLVGY

SEQ ID NO: 68751 - protein, 9 aa, synthetic construct
  source 1..9: note = Seed: LVVVGAVGV (KRAS G12V)
YVVQGMVGA

SEQ ID NO: 68752 - protein, 9 aa, synthetic construct
  source 1..9: note = Seed: LVVVGAVGV (KRAS G12V)
YVVQGMVGF

SEQ ID NO: 68753 - protein, 9 aa, synthetic construct
  source 1..9: note = Seed: LVVVGAVGV (KRAS G12V)
YVVQGMVGG

SEQ ID NO: 68754 - protein, 9 aa, synthetic construct
  source 1..9: note = Seed: LVVVGAVGV (KRAS G12V)
YVVQGMVGH

SEQ ID NO: 68755 - protein, 9 aa, synthetic construct
  source 1..9: note = Seed: LVVVGAVGV (KRAS G12V)
YVVQGMVGI

SEQ ID NO: 68756 - protein, 9 aa, synthetic construct
  source 1..9: note = Seed: LVVVGAVGV (KRAS G12V)
YVVQGMVGL

SEQ ID NO: 68757 - protein, 9 aa, synthetic construct
  source 1..9: note = Seed: LVVVGAVGV (KRAS G12V)
YVVQGMVGM

SEQ ID NO: 68758 - protein, 9 aa, synthetic construct
  source 1..9: note = Seed: LVVVGAVGV (KRAS G12V)
YVVQGMVGN

SEQ ID NO: 68759 - protein, 9 aa, synthetic construct
  source 1..9: note = Seed: LVVVGAVGV (KRAS G12V)
YVVQGMVGR

SEQ ID NO: 68760 - protein, 9 aa, synthetic construct
  source 1..9: note = Seed: LVVVGAVGV (KRAS G12V)
YVVQGMVGS

SEQ ID NO: 68761 - protein, 9 aa, synthetic construct
  source 1..9: note = Seed: LVVVGAVGV (KRAS G12V)
YVVQGMVGT

SEQ ID NO: 68762 - protein, 9 aa, synthetic construct
  source 1..9: note = Seed: LVVVGAVGV (KRAS G12V)
YVVQGMVGV

SEQ ID NO: 68763 - protein, 9 aa, synthetic construct
  source 1..9: note = Seed: LVVVGAVGV (KRAS G12V)
YVVQGMVGY

SEQ ID NO: 68764 - protein, 9 aa, synthetic construct
  source 1..9: note = Seed: LVVVGAVGV (KRAS G12V)
YVVQGNVGA

SEQ ID NO: 68765 - protein, 9 aa, synthetic construct
  source 1..9: note = Seed: LVVVGAVGV (KRAS G12V)
YVVQGNVGC

SEQ ID NO: 68766 - protein, 9 aa, synthetic construct
  source 1..9: note = Seed: LVVVGAVGV (KRAS G12V)
YVVQGNVGE

SEQ ID NO: 68767 - protein, 9 aa, synthetic construct
  source 1..9: note = Seed: LVVVGAVGV (KRAS G12V)
YVVQGNVGF

SEQ ID NO: 68768 - protein, 9 aa, synthetic construct
  source 1..9: note = Seed: LVVVGAVGV (KRAS G12V)
YVVQGNVGG

SEQ ID NO: 68769 - protein, 9 aa, synthetic construct
  source 1..9: note = Seed: LVVVGAVGV (KRAS G12V)
YVVQGNVGH

SEQ ID NO: 68770 - protein, 9 aa, synthetic construct
  source 1..9: note = Seed: LVVVGAVGV (KRAS G12V)
YVVQGNVGI

SEQ ID NO: 68771 - protein, 9 aa, synthetic construct
  source 1..9: note = Seed: LVVVGAVGV (KRAS G12V)
YVVQGNVGK

SEQ ID NO: 68772 - protein, 9 aa, synthetic construct
  source 1..9: note = Seed: LVVVGAVGV (KRAS G12V)
YVVQGNVGL

SEQ ID NO: 68773 - protein, 9 aa, synthetic construct
  source 1..9: note = Seed: LVVVGAVGV (KRAS G12V)
YVVQGNVGM

SEQ ID NO: 68774 - protein, 9 aa, synthetic construct
  source 1..9: note = Seed: LVVVGAVGV (KRAS G12V)
YVVQGNVGN

SEQ ID NO: 68775 - protein, 9 aa, synthetic construct
  source 1..9: note = Seed: LVVVGAVGV (KRAS G12V)
YVVQGNVGP

SEQ ID NO: 68776 - protein, 9 aa, synthetic construct
  source 1..9: note = Seed: LVVVGAVGV (KRAS G12V)
YVVQGNVGQ

SEQ ID NO: 68777 - protein, 9 aa, synthetic construct
  source 1..9: note = Seed: LVVVGAVGV (KRAS G12V)
YVVQGNVGR

SEQ ID NO: 68778 - protein, 9 aa, synthetic construct
  source 1..9: note = Seed: LVVVGAVGV (KRAS G12V)
YVVQGNVGS

SEQ ID NO: 68779 - protein, 9 aa, synthetic construct
  source 1..9: note = Seed: LVVVGAVGV (KRAS G12V)
YVVQGNVGT

SEQ ID NO: 68780 - protein, 9 aa, synthetic construct
  source 1..9: note = Seed: LVVVGAVGV (KRAS G12V)
YVVQGNVGV

SEQ ID NO: 68781 - protein, 9 aa, synthetic construct
  source 1..9: note = Seed: LVVVGAVGV (KRAS G12V)
YVVQGNVGW

SEQ ID NO: 68782 - protein, 9 aa, synthetic construct
  source 1..9: note = Seed: LVVVGAVGV (KRAS G12V)
YVVQGNVGY

SEQ ID NO: 68783 - protein, 9 aa, synthetic construct
  source 1..9: note = Seed: LVVVGAVGV (KRAS G12V)
YVVQGPVGA

SEQ ID NO: 68784 - protein, 9 aa, synthetic construct
  source 1..9: note = Seed: LVVVGAVGV (KRAS G12V)
YVVQGPVGC

SEQ ID NO: 68785 - protein, 9 aa, synthetic construct
  source 1..9: note = Seed: LVVVGAVGV (KRAS G12V)
YVVQGPVGD

SEQ ID NO: 68786 - protein, 9 aa, synthetic construct
  source 1..9: note = Seed: LVVVGAVGV (KRAS G12V)
YVVQGPVGE

SEQ ID NO: 68787 - protein, 9 aa, synthetic construct
  source 1..9: note = Seed: LVVVGAVGV (KRAS G12V)
YVVQGPVGF

SEQ ID NO: 68788 - protein, 9 aa, synthetic construct
  source 1..9: note = Seed: LVVVGAVGV (KRAS G12V)
YVVQGPVGG

SEQ ID NO: 68789 - protein, 9 aa, synthetic construct
  source 1..9: note = Seed: LVVVGAVGV (KRAS G12V)
YVVQGPVGH

SEQ ID NO: 68790 - protein, 9 aa, synthetic construct
  source 1..9: note = Seed: LVVVGAVGV (KRAS G12V)
YVVQGPVGI

SEQ ID NO: 68791 - protein, 9 aa, synthetic construct
  source 1..9: note = Seed: LVVVGAVGV (KRAS G12V)
YVVQGPVGK

SEQ ID NO: 68792 - protein, 9 aa, synthetic construct
  source 1..9: note = Seed: LVVVGAVGV (KRAS G12V)
YVVQGPVGL

SEQ ID NO: 68793 - protein, 9 aa, synthetic construct
  source 1..9: note = Seed: LVVVGAVGV (KRAS G12V)
YVVQGPVGM

SEQ ID NO: 68794 - protein, 9 aa, synthetic construct
  source 1..9: note = Seed: LVVVGAVGV (KRAS G12V)
YVVQGPVGN

SEQ ID NO: 68795 - protein, 9 aa, synthetic construct
  source 1..9: note = Seed: LVVVGAVGV (KRAS G12V)
YVVQGPVGP

SEQ ID NO: 68796 - protein, 9 aa, synthetic construct
  source 1..9: note = Seed: LVVVGAVGV (KRAS G12V)
YVVQGPVGQ

SEQ ID NO: 68797 - protein, 9 aa, synthetic construct
  source 1..9: note = Seed: LVVVGAVGV (KRAS G12V)
YVVQGPVGR

SEQ ID NO: 68798 - protein, 9 aa, synthetic construct
  source 1..9: note = Seed: LVVVGAVGV (KRAS G12V)
YVVQGPVGS

SEQ ID NO: 68799 - protein, 9 aa, synthetic construct
  source 1..9: note = Seed: LVVVGAVGV (KRAS G12V)
YVVQGPVGT

SEQ ID NO: 68800 - protein, 9 aa, synthetic construct
  source 1..9: note = Seed: LVVVGAVGV (KRAS G12V)
YVVQGPVGV

SEQ ID NO: 68801 - protein, 9 aa, synthetic construct
  source 1..9: note = Seed: LVVVGAVGV (KRAS G12V)
YVVQGPVGW

SEQ ID NO: 68802 - protein, 9 aa, synthetic construct
  source 1..9: note = Seed: LVVVGAVGV (KRAS G12V)
YVVQGPVGY

SEQ ID NO: 68803 - protein, 9 aa, synthetic construct
  source 1..9: note = Seed: LVVVGAVGV (KRAS G12V)
YVVQGQVGA

SEQ ID NO: 68804 - protein, 9 aa, synthetic construct
  source 1..9: note = Seed: LVVVGAVGV (KRAS G12V)
YVVQGQVGI

SEQ ID NO: 68805 - protein, 9 aa, synthetic construct
  source 1..9: note = Seed: LVVVGAVGV (KRAS G12V)
YVVQGQVGL

SEQ ID NO: 68806 - protein, 9 aa, synthetic construct
  source 1..9: note = Seed: LVVVGAVGV (KRAS G12V)
YVVQGQVGM

SEQ ID NO: 68807 - protein, 9 aa, synthetic construct
  source 1..9: note = Seed: LVVVGAVGV (KRAS G12V)
YVVQGQVGS

SEQ ID NO: 68808 - protein, 9 aa, synthetic construct
  source 1..9: note = Seed: LVVVGAVGV (KRAS G12V)
YVVQGQVGV

SEQ ID NO: 68809 - protein, 9 aa, synthetic construct
  source 1..9: note = Seed: LVVVGAVGV (KRAS G12V)
YVVQGRVGA

SEQ ID NO: 68810 - protein, 9 aa, synthetic construct
  source 1..9: note = Seed: LVVVGAVGV (KRAS G12V)
YVVQGRVGG

SEQ ID NO: 68811 - protein, 9 aa, synthetic construct
  source 1..9: note = Seed: LVVVGAVGV (KRAS G12V)
YVVQGRVGH

SEQ ID NO: 68812 - protein, 9 aa, synthetic construct
  source 1..9: note = Seed: LVVVGAVGV (KRAS G12V)
YVVQGRVGL

SEQ ID NO: 68813 - protein, 9 aa, synthetic construct
  source 1..9: note = Seed: LVVVGAVGV (KRAS G12V)
YVVQGRVGM

SEQ ID NO: 68814 - protein, 9 aa, synthetic construct
  source 1..9: note = Seed: LVVVGAVGV (KRAS G12V)
YVVQGRVGN

SEQ ID NO: 68815 - protein, 9 aa, synthetic construct
  source 1..9: note = Seed: LVVVGAVGV (KRAS G12V)
YVVQGRVGP

SEQ ID NO: 68816 - protein, 9 aa, synthetic construct
  source 1..9: note = Seed: LVVVGAVGV (KRAS G12V)
YVVQGRVGQ

SEQ ID NO: 68817 - protein, 9 aa, synthetic construct
  source 1..9: note = Seed: LVVVGAVGV (KRAS G12V)
YVVQGRVGS

SEQ ID NO: 68818 - protein, 9 aa, synthetic construct
  source 1..9: note = Seed: LVVVGAVGV (KRAS G12V)
YVVQGRVGT

SEQ ID NO: 68819 - protein, 9 aa, synthetic construct
  source 1..9: note = Seed: LVVVGAVGV (KRAS G12V)
YVVQGRVGV

SEQ ID NO: 68820 - protein, 9 aa, synthetic construct
  source 1..9: note = Seed: LVVVGAVGV (KRAS G12V)
YVVQGSVGA

SEQ ID NO: 68821 - protein, 9 aa, synthetic construct
  source 1..9: note = Seed: LVVVGAVGV (KRAS G12V)
YVVQGSVGC

SEQ ID NO: 68822 - protein, 9 aa, synthetic construct
  source 1..9: note = Seed: LVVVGAVGV (KRAS G12V)
YVVQGSVGF

SEQ ID NO: 68823 - protein, 9 aa, synthetic construct
  source 1..9: note = Seed: LVVVGAVGV (KRAS G12V)
YVVQGSVGG

SEQ ID NO: 68824 - protein, 9 aa, synthetic construct
  source 1..9: note = Seed: LVVVGAVGV (KRAS G12V)
YVVQGSVGH

SEQ ID NO: 68825 - protein, 9 aa, synthetic construct
  source 1..9: note = Seed: LVVVGAVGV (KRAS G12V)
YVVQGSVGI

SEQ ID NO: 68826 - protein, 9 aa, synthetic construct
  source 1..9: note = Seed: LVVVGAVGV (KRAS G12V)
YVVQGSVGK

SEQ ID NO: 68827 - protein, 9 aa, synthetic construct
  source 1..9: note = Seed: LVVVGAVGV (KRAS G12V)
YVVQGSVGL

SEQ ID NO: 68828 - protein, 9 aa, synthetic construct
  source 1..9: note = Seed: LVVVGAVGV (KRAS G12V)
YVVQGSVGM

SEQ ID NO: 68829 - protein, 9 aa, synthetic construct
  source 1..9: note = Seed: LVVVGAVGV (KRAS G12V)
YVVQGSVGN

SEQ ID NO: 68830 - protein, 9 aa, synthetic construct
  source 1..9: note = Seed: LVVVGAVGV (KRAS G12V)
YVVQGSVGP

SEQ ID NO: 68831 - protein, 9 aa, synthetic construct
  source 1..9: note = Seed: LVVVGAVGV (KRAS G12V)
YVVQGSVGQ

SEQ ID NO: 68832 - protein, 9 aa, synthetic construct
  source 1..9: note = Seed: LVVVGAVGV (KRAS G12V)
YVVQGSVGR

SEQ ID NO: 68833 - protein, 9 aa, synthetic construct
  source 1..9: note = Seed: LVVVGAVGV (KRAS G12V)
YVVQGSVGS

SEQ ID NO: 68834 - protein, 9 aa, synthetic construct
  source 1..9: note = Seed: LVVVGAVGV (KRAS G12V)
YVVQGSVGT

SEQ ID NO: 68835 - protein, 9 aa, synthetic construct
  source 1..9: note = Seed: LVVVGAVGV (KRAS G12V)
YVVQGSVGV

SEQ ID NO: 68836 - protein, 9 aa, synthetic construct
  source 1..9: note = Seed: LVVVGAVGV (KRAS G12V)
YVVQGSVGW

SEQ ID NO: 68837 - protein, 9 aa, synthetic construct
  source 1..9: note = Seed: LVVVGAVGV (KRAS G12V)
YVVQGSVGY

SEQ ID NO: 68838 - protein, 9 aa, synthetic construct
  source 1..9: note = Seed: LVVVGAVGV (KRAS G12V)
YVVQGTVGA

SEQ ID NO: 68839 - protein, 9 aa, synthetic construct
  source 1..9: note = Seed: LVVVGAVGV (KRAS G12V)
YVVQGTVGC

SEQ ID NO: 68840 - protein, 9 aa, synthetic construct
  source 1..9: note = Seed: LVVVGAVGV (KRAS G12V)
YVVQGTVGF

SEQ ID NO: 68841 - protein, 9 aa, synthetic construct
  source 1..9: note = Seed: LVVVGAVGV (KRAS G12V)
YVVQGTVGG

SEQ ID NO: 68842 - protein, 9 aa, synthetic construct
  source 1..9: note = Seed: LVVVGAVGV (KRAS G12V)
YVVQGTVGH

SEQ ID NO: 68843 - protein, 9 aa, synthetic construct
  source 1..9: note = Seed: LVVVGAVGV (KRAS G12V)
YVVQGTVGI

SEQ ID NO: 68844 - protein, 9 aa, synthetic construct
  source 1..9: note = Seed: LVVVGAVGV (KRAS G12V)
YVVQGTVGK

SEQ ID NO: 68845 - protein, 9 aa, synthetic construct
  source 1..9: note = Seed: LVVVGAVGV (KRAS G12V)
YVVQGTVGL

SEQ ID NO: 68846 - protein, 9 aa, synthetic construct
  source 1..9: note = Seed: LVVVGAVGV (KRAS G12V)
YVVQGTVGM

SEQ ID NO: 68847 - protein, 9 aa, synthetic construct
  source 1..9: note = Seed: LVVVGAVGV (KRAS G12V)
YVVQGTVGN

SEQ ID NO: 68848 - protein, 9 aa, synthetic construct
  source 1..9: note = Seed: LVVVGAVGV (KRAS G12V)
YVVQGTVGP

SEQ ID NO: 68849 - protein, 9 aa, synthetic construct
  source 1..9: note = Seed: LVVVGAVGV (KRAS G12V)
YVVQGTVGQ

SEQ ID NO: 68850 - protein, 9 aa, synthetic construct
  source 1..9: note = Seed: LVVVGAVGV (KRAS G12V)
YVVQGTVGR

SEQ ID NO: 68851 - protein, 9 aa, synthetic construct
  source 1..9: note = Seed: LVVVGAVGV (KRAS G12V)
YVVQGTVGS

SEQ ID NO: 68852 - protein, 9 aa, synthetic construct
  source 1..9: note = Seed: LVVVGAVGV (KRAS G12V)
YVVQGTVGT

SEQ ID NO: 68853 - protein, 9 aa, synthetic construct
  source 1..9: note = Seed: LVVVGAVGV (KRAS G12V)
YVVQGTVGV

SEQ ID NO: 68854 - protein, 9 aa, synthetic construct
  source 1..9: note = Seed: LVVVGAVGV (KRAS G12V)
YVVQGTVGW

SEQ ID NO: 68855 - protein, 9 aa, synthetic construct
  source 1..9: note = Seed: LVVVGAVGV (KRAS G12V)
YVVQGTVGY

SEQ ID NO: 68856 - protein, 9 aa, synthetic construct
  source 1..9: note = Seed: LVVVGAVGV (KRAS G12V)
YVVQGVVGA

SEQ ID NO: 68857 - protein, 9 aa, synthetic construct
  source 1..9: note = Seed: LVVVGAVGV (KRAS G12V)
YVVQGVVGC

SEQ ID NO: 68858 - protein, 9 aa, synthetic construct
  source 1..9: note = Seed: LVVVGAVGV (KRAS G12V)
YVVQGVVGD

SEQ ID NO: 68859 - protein, 9 aa, synthetic construct
  source 1..9: note = Seed: LVVVGAVGV (KRAS G12V)
YVVQGVVGE

SEQ ID NO: 68860 - protein, 9 aa, synthetic construct
  source 1..9: note = Seed: LVVVGAVGV (KRAS G12V)
YVVQGVVGF

SEQ ID NO: 68861 - protein, 9 aa, synthetic construct
  source 1..9: note = Seed: LVVVGAVGV (KRAS G12V)
YVVQGVVGG

SEQ ID NO: 68862 - protein, 9 aa, synthetic construct
  source 1..9: note = Seed: LVVVGAVGV (KRAS G12V)
YVVQGVVGH

SEQ ID NO: 68863 - protein, 9 aa, synthetic construct
  source 1..9: note = Seed: LVVVGAVGV (KRAS G12V)
YVVQGVVGI

SEQ ID NO: 68864 - protein, 9 aa, synthetic construct
  source 1..9: note = Seed: LVVVGAVGV (KRAS G12V)
YVVQGVVGK

SEQ ID NO: 68865 - protein, 9 aa, synthetic construct
  source 1..9: note = Seed: LVVVGAVGV (KRAS G12V)
YVVQGVVGL

SEQ ID NO: 68866 - protein, 9 aa, synthetic construct
  source 1..9: note = Seed: LVVVGAVGV (KRAS G12V)
YVVQGVVGM

SEQ ID NO: 68867 - protein, 9 aa, synthetic construct
  source 1..9: note = Seed: LVVVGAVGV (KRAS G12V)
YVVQGVVGN

SEQ ID NO: 68868 - protein, 9 aa, synthetic construct
  source 1..9: note = Seed: LVVVGAVGV (KRAS G12V)
YVVQGVVGP

SEQ ID NO: 68869 - protein, 9 aa, synthetic construct
  source 1..9: note = Seed: LVVVGAVGV (KRAS G12V)
YVVQGVVGQ

SEQ ID NO: 68870 - protein, 9 aa, synthetic construct
  source 1..9: note = Seed: LVVVGAVGV (KRAS G12V)
YVVQGVVGR

SEQ ID NO: 68871 - protein, 9 aa, synthetic construct
  source 1..9: note = Seed: LVVVGAVGV (KRAS G12V)
YVVQGVVGS

SEQ ID NO: 68872 - protein, 9 aa, synthetic construct
  source 1..9: note = Seed: LVVVGAVGV (KRAS G12V)
YVVQGVVGT

SEQ ID NO: 68873 - protein, 9 aa, synthetic construct
  source 1..9: note = Seed: LVVVGAVGV (KRAS G12V)
YVVQGVVGV

SEQ ID NO: 68874 - protein, 9 aa, synthetic construct
  source 1..9: note = Seed: LVVVGAVGV (KRAS G12V)
YVVQGVVGY

SEQ ID NO: 68875 - protein, 9 aa, synthetic construct
  source 1..9: note = Seed: LVVVGAVGV (KRAS G12V)
YVVQGWVGA

SEQ ID NO: 68876 - protein, 9 aa, synthetic construct
  source 1..9: note = Seed: LVVVGAVGV (KRAS G12V)
YVVQGWVGI

SEQ ID NO: 68877 - protein, 9 aa, synthetic construct
  source 1..9: note = Seed: LVVVGAVGV (KRAS G12V)
YVVQGWVGL

SEQ ID NO: 68878 - protein, 9 aa, synthetic construct
  source 1..9: note = Seed: LVVVGAVGV (KRAS G12V)
YVVQGWVGM

SEQ ID NO: 68879 - protein, 9 aa, synthetic construct
  source 1..9: note = Seed: LVVVGAVGV (KRAS G12V)
YVVQGWVGV

SEQ ID NO: 68880 - protein, 9 aa, synthetic construct
  source 1..9: note = Seed: LVVVGAVGV (KRAS G12V)
YVVQGYVGI

SEQ ID NO: 68881 - protein, 9 aa, synthetic construct
  source 1..9: note = Seed: LVVVGAVGV (KRAS G12V)
YVVQGYVGL

SEQ ID NO: 68882 - protein, 9 aa, synthetic construct
  source 1..9: note = Seed: LVVVGAVGV (KRAS G12V)
YVVQGYVGM

SEQ ID NO: 68883 - protein, 9 aa, synthetic construct
  source 1..9: note = Seed: LVVVGAVGV (KRAS G12V)
YVVQGYVGV

SEQ ID NO: 68884 - protein, 9 aa, synthetic construct
  source 1..9: note = Seed: LVVVGAVGV (KRAS G12V)
YVVRGAVGA

SEQ ID NO: 68885 - protein, 9 aa, synthetic construct
  source 1..9: note = Seed: LVVVGAVGV (KRAS G12V)
YVVRGAVGF

SEQ ID NO: 68886 - protein, 9 aa, synthetic construct
  source 1..9: note = Seed: LVVVGAVGV (KRAS G12V)
YVVRGAVGG

SEQ ID NO: 68887 - protein, 9 aa, synthetic construct
  source 1..9: note = Seed: LVVVGAVGV (KRAS G12V)
YVVRGAVGI

SEQ ID NO: 68888 - protein, 9 aa, synthetic construct
  source 1..9: note = Seed: LVVVGAVGV (KRAS G12V)
YVVRGAVGL

SEQ ID NO: 68889 - protein, 9 aa, synthetic construct
  source 1..9: note = Seed: LVVVGAVGV (KRAS G12V)
YVVRGAVGM

SEQ ID NO: 68890 - protein, 9 aa, synthetic construct
  source 1..9: note = Seed: LVVVGAVGV (KRAS G12V)
YVVRGAVGQ

SEQ ID NO: 68891 - protein, 9 aa, synthetic construct
  source 1..9: note = Seed: LVVVGAVGV (KRAS G12V)
YVVRGAVGS

SEQ ID NO: 68892 - protein, 9 aa, synthetic construct
  source 1..9: note = Seed: LVVVGAVGV (KRAS G12V)
YVVRGAVGV

SEQ ID NO: 68893 - protein, 9 aa, synthetic construct
  source 1..9: note = Seed: LVVVGAVGV (KRAS G12V)
YVVRGGVGI

SEQ ID NO: 68894 - protein, 9 aa, synthetic construct
  source 1..9: note = Seed: LVVVGAVGV (KRAS G12V)
YVVRGGVGL

SEQ ID NO: 68895 - protein, 9 aa, synthetic construct
  source 1..9: note = Seed: LVVVGAVGV (KRAS G12V)
YVVRGGVGM

SEQ ID NO: 68896 - protein, 9 aa, synthetic construct
  source 1..9: note = Seed: LVVVGAVGV (KRAS G12V)
YVVRGGVGV

SEQ ID NO: 68897 - protein, 9 aa, synthetic construct
  source 1..9: note = Seed: LVVVGAVGV (KRAS G12V)
YVVRGHVGA

SEQ ID NO: 68898 - protein, 9 aa, synthetic construct
  source 1..9: note = Seed: LVVVGAVGV (KRAS G12V)
YVVRGHVGQ

SEQ ID NO: 68899 - protein, 9 aa, synthetic construct
  source 1..9: note = Seed: LVVVGAVGV (KRAS G12V)
YVVRGHVGS

SEQ ID NO: 68900 - protein, 9 aa, synthetic construct
  source 1..9: note = Seed: LVVVGAVGV (KRAS G12V)
YVVRGIVGA

SEQ ID NO: 68901 - protein, 9 aa, synthetic construct
  source 1..9: note = Seed: LVVVGAVGV (KRAS G12V)
YVVRGIVGG

SEQ ID NO: 68902 - protein, 9 aa, synthetic construct
  source 1..9: note = Seed: LVVVGAVGV (KRAS G12V)
YVVRGIVGQ

SEQ ID NO: 68903 - protein, 9 aa, synthetic construct
  source 1..9: note = Seed: LVVVGAVGV (KRAS G12V)
YVVRGIVGR

SEQ ID NO: 68904 - protein, 9 aa, synthetic construct
  source 1..9: note = Seed: LVVVGAVGV (KRAS G12V)
YVVRGIVGS

SEQ ID NO: 68905 - protein, 9 aa, synthetic construct
  source 1..9: note = Seed: LVVVGAVGV (KRAS G12V)
YVVRGKVGA

SEQ ID NO: 68906 - protein, 9 aa, synthetic construct
  source 1..9: note = Seed: LVVVGAVGV (KRAS G12V)
YVVRGKVGC

SEQ ID NO: 68907 - protein, 9 aa, synthetic construct
  source 1..9: note = Seed: LVVVGAVGV (KRAS G12V)
YVVRGKVGE

SEQ ID NO: 68908 - protein, 9 aa, synthetic construct
  source 1..9: note = Seed: LVVVGAVGV (KRAS G12V)
YVVRGKVGF

SEQ ID NO: 68909 - protein, 9 aa, synthetic construct
  source 1..9: note = Seed: LVVVGAVGV (KRAS G12V)
YVVRGKVGG

SEQ ID NO: 68910 - protein, 9 aa, synthetic construct
  source 1..9: note = Seed: LVVVGAVGV (KRAS G12V)
YVVRGKVGH

SEQ ID NO: 68911 - protein, 9 aa, synthetic construct
  source 1..9: note = Seed: LVVVGAVGV (KRAS G12V)
YVVRGKVGI

SEQ ID NO: 68912 - protein, 9 aa, synthetic construct
  source 1..9: note = Seed: LVVVGAVGV (KRAS G12V)
YVVRGKVGL

SEQ ID NO: 68913 - protein, 9 aa, synthetic construct
  source 1..9: note = Seed: LVVVGAVGV (KRAS G12V)
YVVRGKVGM

SEQ ID NO: 68914 - protein, 9 aa, synthetic construct
  source 1..9: note = Seed: LVVVGAVGV (KRAS G12V)
YVVRGKVGN

SEQ ID NO: 68915 - protein, 9 aa, synthetic construct
  source 1..9: note = Seed: LVVVGAVGV (KRAS G12V)
YVVRGKVGP

SEQ ID NO: 68916 - protein, 9 aa, synthetic construct
  source 1..9: note = Seed: LVVVGAVGV (KRAS G12V)
YVVRGKVGQ

SEQ ID NO: 68917 - protein, 9 aa, synthetic construct
  source 1..9: note = Seed: LVVVGAVGV (KRAS G12V)
YVVRGKVGR

SEQ ID NO: 68918 - protein, 9 aa, synthetic construct
  source 1..9: note = Seed: LVVVGAVGV (KRAS G12V)
YVVRGKVGS

SEQ ID NO: 68919 - protein, 9 aa, synthetic construct
  source 1..9: note = Seed: LVVVGAVGV (KRAS G12V)
YVVRGKVGT

SEQ ID NO: 68920 - protein, 9 aa, synthetic construct
  source 1..9: note = Seed: LVVVGAVGV (KRAS G12V)
YVVRGKVGV

SEQ ID NO: 68921 - protein, 9 aa, synthetic construct
  source 1..9: note = Seed: LVVVGAVGV (KRAS G12V)
YVVRGKVGW

SEQ ID NO: 68922 - protein, 9 aa, synthetic construct
  source 1..9: note = Seed: LVVVGAVGV (KRAS G12V)
YVVRGKVGY

SEQ ID NO: 68923 - protein, 9 aa, synthetic construct
  source 1..9: note = Seed: LVVVGAVGV (KRAS G12V)
YVVRGLVGL

SEQ ID NO: 68924 - protein, 9 aa, synthetic construct
  source 1..9: note = Seed: LVVVGAVGV (KRAS G12V)
YVVRGLVGR

SEQ ID NO: 68925 - protein, 9 aa, synthetic construct
  source 1..9: note = Seed: LVVVGAVGV (KRAS G12V)
YVVRGMVGI

SEQ ID NO: 68926 - protein, 9 aa, synthetic construct
  source 1..9: note = Seed: LVVVGAVGV (KRAS G12V)
YVVRGMVGL

SEQ ID NO: 68927 - protein, 9 aa, synthetic construct
  source 1..9: note = Seed: LVVVGAVGV (KRAS G12V)
YVVRGMVGM

SEQ ID NO: 68928 - protein, 9 aa, synthetic construct
  source 1..9: note = Seed: LVVVGAVGV (KRAS G12V)
YVVRGMVGR

SEQ ID NO: 68929 - protein, 9 aa, synthetic construct
  source 1..9: note = Seed: LVVVGAVGV (KRAS G12V)
YVVRGMVGV

SEQ ID NO: 68930 - protein, 9 aa, synthetic construct
  source 1..9: note = Seed: LVVVGAVGV (KRAS G12V)
YVVRGNVGL

SEQ ID NO: 68931 - protein, 9 aa, synthetic construct
  source 1..9: note = Seed: LVVVGAVGV (KRAS G12V)
YVVRGPVGL

SEQ ID NO: 68932 - protein, 9 aa, synthetic construct
  source 1..9: note = Seed: LVVVGAVGV (KRAS G12V)
YVVRGPVGQ

SEQ ID NO: 68933 - protein, 9 aa, synthetic construct
  source 1..9: note = Seed: LVVVGAVGV (KRAS G12V)
YVVRGQVGA

SEQ ID NO: 68934 - protein, 9 aa, synthetic construct
  source 1..9: note = Seed: LVVVGAVGV (KRAS G12V)
YVVRGQVGQ

SEQ ID NO: 68935 - protein, 9 aa, synthetic construct
  source 1..9: note = Seed: LVVVGAVGV (KRAS G12V)
YVVRGQVGS

SEQ ID NO: 68936 - protein, 9 aa, synthetic construct
  source 1..9: note = Seed: LVVVGAVGV (KRAS G12V)
YVVRGRVGA

SEQ ID NO: 68937 - protein, 9 aa, synthetic construct
  source 1..9: note = Seed: LVVVGAVGV (KRAS G12V)
YVVRGRVGC

SEQ ID NO: 68938 - protein, 9 aa, synthetic construct
  source 1..9: note = Seed: LVVVGAVGV (KRAS G12V)
YVVRGRVGD

SEQ ID NO: 68939 - protein, 9 aa, synthetic construct
  source 1..9: note = Seed: LVVVGAVGV (KRAS G12V)
YVVRGRVGE

SEQ ID NO: 68940 - protein, 9 aa, synthetic construct
  source 1..9: note = Seed: LVVVGAVGV (KRAS G12V)
YVVRGRVGF

SEQ ID NO: 68941 - protein, 9 aa, synthetic construct
  source 1..9: note = Seed: LVVVGAVGV (KRAS G12V)
YVVRGRVGG

SEQ ID NO: 68942 - protein, 9 aa, synthetic construct
  source 1..9: note = Seed: LVVVGAVGV (KRAS G12V)
YVVRGRVGH

SEQ ID NO: 68943 - protein, 9 aa, synthetic construct
  source 1..9: note = Seed: LVVVGAVGV (KRAS G12V)
YVVRGRVGI

SEQ ID NO: 68944 - protein, 9 aa, synthetic construct
  source 1..9: note = Seed: LVVVGAVGV (KRAS G12V)
YVVRGRVGK

SEQ ID NO: 68945 - protein, 9 aa, synthetic construct
  source 1..9: note = Seed: LVVVGAVGV (KRAS G12V)
YVVRGRVGL

SEQ ID NO: 68946 - protein, 9 aa, synthetic construct
  source 1..9: note = Seed: LVVVGAVGV (KRAS G12V)
YVVRGRVGM

SEQ ID NO: 68947 - protein, 9 aa, synthetic construct
  source 1..9: note = Seed: LVVVGAVGV (KRAS G12V)
YVVRGRVGN

SEQ ID NO: 68948 - protein, 9 aa, synthetic construct
  source 1..9: note = Seed: LVVVGAVGV (KRAS G12V)
YVVRGRVGQ

SEQ ID NO: 68949 - protein, 9 aa, synthetic construct
  source 1..9: note = Seed: LVVVGAVGV (KRAS G12V)
YVVRGRVGR

SEQ ID NO: 68950 - protein, 9 aa, synthetic construct
  source 1..9: note = Seed: LVVVGAVGV (KRAS G12V)
YVVRGRVGS

SEQ ID NO: 68951 - protein, 9 aa, synthetic construct
  source 1..9: note = Seed: LVVVGAVGV (KRAS G12V)
YVVRGRVGT

SEQ ID NO: 68952 - protein, 9 aa, synthetic construct
  source 1..9: note = Seed: LVVVGAVGV (KRAS G12V)
YVVRGRVGV

SEQ ID NO: 68953 - protein, 9 aa, synthetic construct
  source 1..9: note = Seed: LVVVGAVGV (KRAS G12V)
YVVRGRVGY

SEQ ID NO: 68954 - protein, 9 aa, synthetic construct
  source 1..9: note = Seed: LVVVGAVGV (KRAS G12V)
YVVRGSVGA

SEQ ID NO: 68955 - protein, 9 aa, synthetic construct
  source 1..9: note = Seed: LVVVGAVGV (KRAS G12V)
YVVRGSVGH

SEQ ID NO: 68956 - protein, 9 aa, synthetic construct
  source 1..9: note = Seed: LVVVGAVGV (KRAS G12V)
YVVRGSVGI

SEQ ID NO: 68957 - protein, 9 aa, synthetic construct
  source 1..9: note = Seed: LVVVGAVGV (KRAS G12V)
YVVRGSVGL

SEQ ID NO: 68958 - protein, 9 aa, synthetic construct
  source 1..9: note = Seed: LVVVGAVGV (KRAS G12V)
YVVRGSVGM

SEQ ID NO: 68959 - protein, 9 aa, synthetic construct
  source 1..9: note = Seed: LVVVGAVGV (KRAS G12V)
YVVRGSVGS

SEQ ID NO: 68960 - protein, 9 aa, synthetic construct
  source 1..9: note = Seed: LVVVGAVGV (KRAS G12V)
YVVRGSVGV

SEQ ID NO: 68961 - protein, 9 aa, synthetic construct
  source 1..9: note = Seed: LVVVGAVGV (KRAS G12V)
YVVRGTVGA

SEQ ID NO: 68962 - protein, 9 aa, synthetic construct
  source 1..9: note = Seed: LVVVGAVGV (KRAS G12V)
YVVRGTVGH

SEQ ID NO: 68963 - protein, 9 aa, synthetic construct
  source 1..9: note = Seed: LVVVGAVGV (KRAS G12V)
YVVRGTVGI

SEQ ID NO: 68964 - protein, 9 aa, synthetic construct
  source 1..9: note = Seed: LVVVGAVGV (KRAS G12V)
YVVRGTVGL

SEQ ID NO: 68965 - protein, 9 aa, synthetic construct
  source 1..9: note = Seed: LVVVGAVGV (KRAS G12V)
YVVRGTVGM

SEQ ID NO: 68966 - protein, 9 aa, synthetic construct
  source 1..9: note = Seed: LVVVGAVGV (KRAS G12V)
YVVRGTVGS

SEQ ID NO: 68967 - protein, 9 aa, synthetic construct
  source 1..9: note = Seed: LVVVGAVGV (KRAS G12V)
YVVRGTVGV

SEQ ID NO: 68968 - protein, 9 aa, synthetic construct
  source 1..9: note = Seed: LVVVGAVGV (KRAS G12V)
YVVRGTVGY

SEQ ID NO: 68969 - protein, 9 aa, synthetic construct
  source 1..9: note = Seed: LVVVGAVGV (KRAS G12V)
YVVRGVVGA

SEQ ID NO: 68970 - protein, 9 aa, synthetic construct
  source 1..9: note = Seed: LVVVGAVGV (KRAS G12V)
YVVRGVVGL

SEQ ID NO: 68971 - protein, 9 aa, synthetic construct
  source 1..9: note = Seed: LVVVGAVGV (KRAS G12V)
YVVRGVVGQ

SEQ ID NO: 68972 - protein, 9 aa, synthetic construct
  source 1..9: note = Seed: LVVVGAVGV (KRAS G12V)
YVVRGVVGR

SEQ ID NO: 68973 - protein, 9 aa, synthetic construct
  source 1..9: note = Seed: LVVVGAVGV (KRAS G12V)
YVVRGVVGS

SEQ ID NO: 68974 - protein, 9 aa, synthetic construct
  source 1..9: note = Seed: LVVVGAVGV (KRAS G12V)
YVVSGAVGA

SEQ ID NO: 68975 - protein, 9 aa, synthetic construct
  source 1..9: note = Seed: LVVVGAVGV (KRAS G12V)
YVVSGAVGC

SEQ ID NO: 68976 - protein, 9 aa, synthetic construct
  source 1..9: note = Seed: LVVVGAVGV (KRAS G12V)
YVVSGAVGD

SEQ ID NO: 68977 - protein, 9 aa, synthetic construct
  source 1..9: note = Seed: LVVVGAVGV (KRAS G12V)
YVVSGAVGE

SEQ ID NO: 68978 - protein, 9 aa, synthetic construct
  source 1..9: note = Seed: LVVVGAVGV (KRAS G12V)
YVVSGAVGF

SEQ ID NO: 68979 - protein, 9 aa, synthetic construct
  source 1..9: note = Seed: LVVVGAVGV (KRAS G12V)
YVVSGAVGG

SEQ ID NO: 68980 - protein, 9 aa, synthetic construct
  source 1..9: note = Seed: LVVVGAVGV (KRAS G12V)
YVVSGAVGH

SEQ ID NO: 68981 - protein, 9 aa, synthetic construct
  source 1..9: note = Seed: LVVVGAVGV (KRAS G12V)
YVVSGAVGI

SEQ ID NO: 68982 - protein, 9 aa, synthetic construct
  source 1..9: note = Seed: LVVVGAVGV (KRAS G12V)
YVVSGAVGK

SEQ ID NO: 68983 - protein, 9 aa, synthetic construct
  source 1..9: note = Seed: LVVVGAVGV (KRAS G12V)
YVVSGAVGL

SEQ ID NO: 68984 - protein, 9 aa, synthetic construct
  source 1..9: note = Seed: LVVVGAVGV (KRAS G12V)
YVVSGAVGM

SEQ ID NO: 68985 - protein, 9 aa, synthetic construct
  source 1..9: note = Seed: LVVVGAVGV (KRAS G12V)
YVVSGAVGN

SEQ ID NO: 68986 - protein, 9 aa, synthetic construct
  source 1..9: note = Seed: LVVVGAVGV (KRAS G12V)
YVVSGAVGP

SEQ ID NO: 68987 - protein, 9 aa, synthetic construct
  source 1..9: note = Seed: LVVVGAVGV (KRAS G12V)
YVVSGAVGQ

SEQ ID NO: 68988 - protein, 9 aa, synthetic construct
  source 1..9: note = Seed: LVVVGAVGV (KRAS G12V)
YVVSGAVGR

SEQ ID NO: 68989 - protein, 9 aa, synthetic construct
  source 1..9: note = Seed: LVVVGAVGV (KRAS G12V)
YVVSGAVGS

SEQ ID NO: 68990 - protein, 9 aa, synthetic construct
  source 1..9: note = Seed: LVVVGAVGV (KRAS G12V)
YVVSGAVGT

SEQ ID NO: 68991 - protein, 9 aa, synthetic construct
  source 1..9: note = Seed: LVVVGAVGV (KRAS G12V)
YVVSGAVGV

SEQ ID NO: 68992 - protein, 9 aa, synthetic construct
  source 1..9: note = Seed: LVVVGAVGV (KRAS G12V)
YVVSGAVGW

SEQ ID NO: 68993 - protein, 9 aa, synthetic construct
  source 1..9: note = Seed: LVVVGAVGV (KRAS G12V)
YVVSGAVGY

SEQ ID NO: 68994 - protein, 9 aa, synthetic construct
  source 1..9: note = Seed: LVVVGAVGV (KRAS G12V)
YVVSGCVGA

SEQ ID NO: 68995 - protein, 9 aa, synthetic construct
  source 1..9: note = Seed: LVVVGAVGV (KRAS G12V)
YVVSGCVGC

SEQ ID NO: 68996 - protein, 9 aa, synthetic construct
  source 1..9: note = Seed: LVVVGAVGV (KRAS G12V)
YVVSGCVGD

SEQ ID NO: 68997 - protein, 9 aa, synthetic construct
  source 1..9: note = Seed: LVVVGAVGV (KRAS G12V)
YVVSGCVGF

SEQ ID NO: 68998 - protein, 9 aa, synthetic construct
  source 1..9: note = Seed: LVVVGAVGV (KRAS G12V)
YVVSGCVGG

SEQ ID NO: 68999 - protein, 9 aa, synthetic construct
  source 1..9: note = Seed: LVVVGAVGV (KRAS G12V)
YVVSGCVGH

SEQ ID NO: 69000 - protein, 9 aa, synthetic construct
  source 1..9: note = Seed: LVVVGAVGV (KRAS G12V)
YVVSGCVGI

SEQ ID NO: 69001 - protein, 9 aa, synthetic construct
  source 1..9: note = Seed: LVVVGAVGV (KRAS G12V)
YVVSGCVGK

SEQ ID NO: 69002 - protein, 9 aa, synthetic construct
  source 1..9: note = Seed: LVVVGAVGV (KRAS G12V)
YVVSGCVGL

SEQ ID NO: 69003 - protein, 9 aa, synthetic construct
  source 1..9: note = Seed: LVVVGAVGV (KRAS G12V)
YVVSGCVGM

SEQ ID NO: 69004 - protein, 9 aa, synthetic construct
  source 1..9: note = Seed: LVVVGAVGV (KRAS G12V)
YVVSGCVGN

SEQ ID NO: 69005 - protein, 9 aa, synthetic construct
  source 1..9: note = Seed: LVVVGAVGV (KRAS G12V)
YVVSGCVGQ

SEQ ID NO: 69006 - protein, 9 aa, synthetic construct
  source 1..9: note = Seed: LVVVGAVGV (KRAS G12V)
YVVSGCVGR

SEQ ID NO: 69007 - protein, 9 aa, synthetic construct
  source 1..9: note = Seed: LVVVGAVGV (KRAS G12V)
YVVSGCVGS

SEQ ID NO: 69008 - protein, 9 aa, synthetic construct
  source 1..9: note = Seed: LVVVGAVGV (KRAS G12V)
YVVSGCVGT

SEQ ID NO: 69009 - protein, 9 aa, synthetic construct
  source 1..9: note = Seed: LVVVGAVGV (KRAS G12V)
YVVSGCVGV

SEQ ID NO: 69010 - protein, 9 aa, synthetic construct
  source 1..9: note = Seed: LVVVGAVGV (KRAS G12V)
YVVSGCVGY

SEQ ID NO: 69011 - protein, 9 aa, synthetic construct
  source 1..9: note = Seed: LVVVGAVGV (KRAS G12V)
YVVSGDVGA

SEQ ID NO: 69012 - protein, 9 aa, synthetic construct
  source 1..9: note = Seed: LVVVGAVGV (KRAS G12V)
YVVSGDVGF

SEQ ID NO: 69013 - protein, 9 aa, synthetic construct
  source 1..9: note = Seed: LVVVGAVGV (KRAS G12V)
YVVSGDVGG

SEQ ID NO: 69014 - protein, 9 aa, synthetic construct
  source 1..9: note = Seed: LVVVGAVGV (KRAS G12V)
YVVSGDVGI

SEQ ID NO: 69015 - protein, 9 aa, synthetic construct
  source 1..9: note = Seed: LVVVGAVGV (KRAS G12V)
YVVSGDVGL

SEQ ID NO: 69016 - protein, 9 aa, synthetic construct
  source 1..9: note = Seed: LVVVGAVGV (KRAS G12V)
YVVSGDVGM

SEQ ID NO: 69017 - protein, 9 aa, synthetic construct
  source 1..9: note = Seed: LVVVGAVGV (KRAS G12V)
YVVSGDVGN

SEQ ID NO: 69018 - protein, 9 aa, synthetic construct
  source 1..9: note = Seed: LVVVGAVGV (KRAS G12V)
YVVSGDVGQ

SEQ ID NO: 69019 - protein, 9 aa, synthetic construct
  source 1..9: note = Seed: LVVVGAVGV (KRAS G12V)
YVVSGDVGS

SEQ ID NO: 69020 - protein, 9 aa, synthetic construct
  source 1..9: note = Seed: LVVVGAVGV (KRAS G12V)
YVVSGDVGT

SEQ ID NO: 69021 - protein, 9 aa, synthetic construct
  source 1..9: note = Seed: LVVVGAVGV (KRAS G12V)
YVVSGDVGV

SEQ ID NO: 69022 - protein, 9 aa, synthetic construct
  source 1..9: note = Seed: LVVVGAVGV (KRAS G12V)
YVVSGEVGA

SEQ ID NO: 69023 - protein, 9 aa, synthetic construct
  source 1..9: note = Seed: LVVVGAVGV (KRAS G12V)
YVVSGEVGC

SEQ ID NO: 69024 - protein, 9 aa, synthetic construct
  source 1..9: note = Seed: LVVVGAVGV (KRAS G12V)
YVVSGEVGG

SEQ ID NO: 69025 - protein, 9 aa, synthetic construct
  source 1..9: note = Seed: LVVVGAVGV (KRAS G12V)
YVVSGEVGI

SEQ ID NO: 69026 - protein, 9 aa, synthetic construct
  source 1..9: note = Seed: LVVVGAVGV (KRAS G12V)
YVVSGEVGL

SEQ ID NO: 69027 - protein, 9 aa, synthetic construct
  source 1..9: note = Seed: LVVVGAVGV (KRAS G12V)
YVVSGEVGM

SEQ ID NO: 69028 - protein, 9 aa, synthetic construct
  source 1..9: note = Seed: LVVVGAVGV (KRAS G12V)
YVVSGEVGN

SEQ ID NO: 69029 - protein, 9 aa, synthetic construct
  source 1..9: note = Seed: LVVVGAVGV (KRAS G12V)
YVVSGEVGS

SEQ ID NO: 69030 - protein, 9 aa, synthetic construct
  source 1..9: note = Seed: LVVVGAVGV (KRAS G12V)
YVVSGEVGT

SEQ ID NO: 69031 - protein, 9 aa, synthetic construct
  source 1..9: note = Seed: LVVVGAVGV (KRAS G12V)
YVVSGEVGV

SEQ ID NO: 69032 - protein, 9 aa, synthetic construct
  source 1..9: note = Seed: LVVVGAVGV (KRAS G12V)
YVVSGFVGA

SEQ ID NO: 69033 - protein, 9 aa, synthetic construct
  source 1..9: note = Seed: LVVVGAVGV (KRAS G12V)
YVVSGFVGF

SEQ ID NO: 69034 - protein, 9 aa, synthetic construct
  source 1..9: note = Seed: LVVVGAVGV (KRAS G12V)
YVVSGFVGI

SEQ ID NO: 69035 - protein, 9 aa, synthetic construct
  source 1..9: note = Seed: LVVVGAVGV (KRAS G12V)
YVVSGFVGL

SEQ ID NO: 69036 - protein, 9 aa, synthetic construct
  source 1..9: note = Seed: LVVVGAVGV (KRAS G12V)
YVVSGFVGM

SEQ ID NO: 69037 - protein, 9 aa, synthetic construct
  source 1..9: note = Seed: LVVVGAVGV (KRAS G12V)
YVVSGFVGS

SEQ ID NO: 69038 - protein, 9 aa, synthetic construct
  source 1..9: note = Seed: LVVVGAVGV (KRAS G12V)
YVVSGFVGV

SEQ ID NO: 69039 - protein, 9 aa, synthetic construct
  source 1..9: note = Seed: LVVVGAVGV (KRAS G12V)
YVVSGGVGA

SEQ ID NO: 69040 - protein, 9 aa, synthetic construct
  source 1..9: note = Seed: LVVVGAVGV (KRAS G12V)
YVVSGGVGC

SEQ ID NO: 69041 - protein, 9 aa, synthetic construct
  source 1..9: note = Seed: LVVVGAVGV (KRAS G12V)
YVVSGGVGD

SEQ ID NO: 69042 - protein, 9 aa, synthetic construct
  source 1..9: note = Seed: LVVVGAVGV (KRAS G12V)
YVVSGGVGE

SEQ ID NO: 69043 - protein, 9 aa, synthetic construct
  source 1..9: note = Seed: LVVVGAVGV (KRAS G12V)
YVVSGGVGF

SEQ ID NO: 69044 - protein, 9 aa, synthetic construct
  source 1..9: note = Seed: LVVVGAVGV (KRAS G12V)
YVVSGGVGG

SEQ ID NO: 69045 - protein, 9 aa, synthetic construct
  source 1..9: note = Seed: LVVVGAVGV (KRAS G12V)
YVVSGGVGH

SEQ ID NO: 69046 - protein, 9 aa, synthetic construct
  source 1..9: note = Seed: LVVVGAVGV (KRAS G12V)
YVVSGGVGI

SEQ ID NO: 69047 - protein, 9 aa, synthetic construct
  source 1..9: note = Seed: LVVVGAVGV (KRAS G12V)
YVVSGGVGK

SEQ ID NO: 69048 - protein, 9 aa, synthetic construct
  source 1..9: note = Seed: LVVVGAVGV (KRAS G12V)
YVVSGGVGL

SEQ ID NO: 69049 - protein, 9 aa, synthetic construct
  source 1..9: note = Seed: LVVVGAVGV (KRAS G12V)
YVVSGGVGM

SEQ ID NO: 69050 - protein, 9 aa, synthetic construct
  source 1..9: note = Seed: LVVVGAVGV (KRAS G12V)
YVVSGGVGN

SEQ ID NO: 69051 - protein, 9 aa, synthetic construct
  source 1..9: note = Seed: LVVVGAVGV (KRAS G12V)
YVVSGGVGP

SEQ ID NO: 69052 - protein, 9 aa, synthetic construct
  source 1..9: note = Seed: LVVVGAVGV (KRAS G12V)
YVVSGGVGQ

SEQ ID NO: 69053 - protein, 9 aa, synthetic construct
  source 1..9: note = Seed: LVVVGAVGV (KRAS G12V)
YVVSGGVGR

SEQ ID NO: 69054 - protein, 9 aa, synthetic construct
  source 1..9: note = Seed: LVVVGAVGV (KRAS G12V)
YVVSGGVGS

SEQ ID NO: 69055 - protein, 9 aa, synthetic construct
  source 1..9: note = Seed: LVVVGAVGV (KRAS G12V)
YVVSGGVGT

SEQ ID NO: 69056 - protein, 9 aa, synthetic construct
  source 1..9: note = Seed: LVVVGAVGV (KRAS G12V)
YVVSGGVGV

SEQ ID NO: 69057 - protein, 9 aa, synthetic construct
  source 1..9: note = Seed: LVVVGAVGV (KRAS G12V)
YVVSGGVGW

SEQ ID NO: 69058 - protein, 9 aa, synthetic construct
  source 1..9: note = Seed: LVVVGAVGV (KRAS G12V)
YVVSGGVGY

SEQ ID NO: 69059 - protein, 9 aa, synthetic construct
  source 1..9: note = Seed: LVVVGAVGV (KRAS G12V)
YVVSGHVGA

SEQ ID NO: 69060 - protein, 9 aa, synthetic construct
  source 1..9: note = Seed: LVVVGAVGV (KRAS G12V)
YVVSGHVGC

SEQ ID NO: 69061 - protein, 9 aa, synthetic construct
  source 1..9: note = Seed: LVVVGAVGV (KRAS G12V)
YVVSGHVGF

SEQ ID NO: 69062 - protein, 9 aa, synthetic construct
  source 1..9: note = Seed: LVVVGAVGV (KRAS G12V)
YVVSGHVGG

SEQ ID NO: 69063 - protein, 9 aa, synthetic construct
  source 1..9: note = Seed: LVVVGAVGV (KRAS G12V)
YVVSGHVGI

SEQ ID NO: 69064 - protein, 9 aa, synthetic construct
  source 1..9: note = Seed: LVVVGAVGV (KRAS G12V)
YVVSGHVGL

SEQ ID NO: 69065 - protein, 9 aa, synthetic construct
  source 1..9: note = Seed: LVVVGAVGV (KRAS G12V)
YVVSGHVGM

SEQ ID NO: 69066 - protein, 9 aa, synthetic construct
  source 1..9: note = Seed: LVVVGAVGV (KRAS G12V)
YVVSGHVGN

SEQ ID NO: 69067 - protein, 9 aa, synthetic construct
  source 1..9: note = Seed: LVVVGAVGV (KRAS G12V)
YVVSGHVGQ

SEQ ID NO: 69068 - protein, 9 aa, synthetic construct
  source 1..9: note = Seed: LVVVGAVGV (KRAS G12V)
YVVSGHVGS

SEQ ID NO: 69069 - protein, 9 aa, synthetic construct
  source 1..9: note = Seed: LVVVGAVGV (KRAS G12V)
YVVSGHVGT

SEQ ID NO: 69070 - protein, 9 aa, synthetic construct
  source 1..9: note = Seed: LVVVGAVGV (KRAS G12V)
YVVSGHVGV

SEQ ID NO: 69071 - protein, 9 aa, synthetic construct
  source 1..9: note = Seed: LVVVGAVGV (KRAS G12V)
YVVSGHVGW

SEQ ID NO: 69072 - protein, 9 aa, synthetic construct
  source 1..9: note = Seed: LVVVGAVGV (KRAS G12V)
YVVSGIVGA

SEQ ID NO: 69073 - protein, 9 aa, synthetic construct
  source 1..9: note = Seed: LVVVGAVGV (KRAS G12V)
YVVSGIVGC

SEQ ID NO: 69074 - protein, 9 aa, synthetic construct
  source 1..9: note = Seed: LVVVGAVGV (KRAS G12V)
YVVSGIVGD

SEQ ID NO: 69075 - protein, 9 aa, synthetic construct
  source 1..9: note = Seed: LVVVGAVGV (KRAS G12V)
YVVSGIVGE

SEQ ID NO: 69076 - protein, 9 aa, synthetic construct
  source 1..9: note = Seed: LVVVGAVGV (KRAS G12V)
YVVSGIVGF

SEQ ID NO: 69077 - protein, 9 aa, synthetic construct
  source 1..9: note = Seed: LVVVGAVGV (KRAS G12V)
YVVSGIVGG

SEQ ID NO: 69078 - protein, 9 aa, synthetic construct
  source 1..9: note = Seed: LVVVGAVGV (KRAS G12V)
YVVSGIVGH

SEQ ID NO: 69079 - protein, 9 aa, synthetic construct
  source 1..9: note = Seed: LVVVGAVGV (KRAS G12V)
YVVSGIVGI

SEQ ID NO: 69080 - protein, 9 aa, synthetic construct
  source 1..9: note = Seed: LVVVGAVGV (KRAS G12V)
YVVSGIVGL

SEQ ID NO: 69081 - protein, 9 aa, synthetic construct
  source 1..9: note = Seed: LVVVGAVGV (KRAS G12V)
YVVSGIVGM

SEQ ID NO: 69082 - protein, 9 aa, synthetic construct
  source 1..9: note = Seed: LVVVGAVGV (KRAS G12V)
YVVSGIVGN

SEQ ID NO: 69083 - protein, 9 aa, synthetic construct
  source 1..9: note = Seed: LVVVGAVGV (KRAS G12V)
YVVSGIVGP

SEQ ID NO: 69084 - protein, 9 aa, synthetic construct
  source 1..9: note = Seed: LVVVGAVGV (KRAS G12V)
YVVSGIVGQ

SEQ ID NO: 69085 - protein, 9 aa, synthetic construct
  source 1..9: note = Seed: LVVVGAVGV (KRAS G12V)
YVVSGIVGS

SEQ ID NO: 69086 - protein, 9 aa, synthetic construct
  source 1..9: note = Seed: LVVVGAVGV (KRAS G12V)
YVVSGIVGT

SEQ ID NO: 69087 - protein, 9 aa, synthetic construct
  source 1..9: note = Seed: LVVVGAVGV (KRAS G12V)
YVVSGIVGV

SEQ ID NO: 69088 - protein, 9 aa, synthetic construct
  source 1..9: note = Seed: LVVVGAVGV (KRAS G12V)
YVVSGIVGY

SEQ ID NO: 69089 - protein, 9 aa, synthetic construct
  source 1..9: note = Seed: LVVVGAVGV (KRAS G12V)
YVVSGKVGA

SEQ ID NO: 69090 - protein, 9 aa, synthetic construct
  source 1..9: note = Seed: LVVVGAVGV (KRAS G12V)
YVVSGKVGG

SEQ ID NO: 69091 - protein, 9 aa, synthetic construct
  source 1..9: note = Seed: LVVVGAVGV (KRAS G12V)
YVVSGKVGH

SEQ ID NO: 69092 - protein, 9 aa, synthetic construct
  source 1..9: note = Seed: LVVVGAVGV (KRAS G12V)
YVVSGKVGI

SEQ ID NO: 69093 - protein, 9 aa, synthetic construct
  source 1..9: note = Seed: LVVVGAVGV (KRAS G12V)
YVVSGKVGK

SEQ ID NO: 69094 - protein, 9 aa, synthetic construct
  source 1..9: note = Seed: LVVVGAVGV (KRAS G12V)
YVVSGKVGL

SEQ ID NO: 69095 - protein, 9 aa, synthetic construct
  source 1..9: note = Seed: LVVVGAVGV (KRAS G12V)
YVVSGKVGM

SEQ ID NO: 69096 - protein, 9 aa, synthetic construct
  source 1..9: note = Seed: LVVVGAVGV (KRAS G12V)
YVVSGKVGN

SEQ ID NO: 69097 - protein, 9 aa, synthetic construct
  source 1..9: note = Seed: LVVVGAVGV (KRAS G12V)
YVVSGKVGP

SEQ ID NO: 69098 - protein, 9 aa, synthetic construct
  source 1..9: note = Seed: LVVVGAVGV (KRAS G12V)
YVVSGKVGQ

SEQ ID NO: 69099 - protein, 9 aa, synthetic construct
  source 1..9: note = Seed: LVVVGAVGV (KRAS G12V)
YVVSGKVGR

SEQ ID NO: 69100 - protein, 9 aa, synthetic construct
  source 1..9: note = Seed: LVVVGAVGV (KRAS G12V)
YVVSGKVGS

SEQ ID NO: 69101 - protein, 9 aa, synthetic construct
  source 1..9: note = Seed: LVVVGAVGV (KRAS G12V)
YVVSGKVGT

SEQ ID NO: 69102 - protein, 9 aa, synthetic construct
  source 1..9: note = Seed: LVVVGAVGV (KRAS G12V)
YVVSGKVGV

SEQ ID NO: 69103 - protein, 9 aa, synthetic construct
  source 1..9: note = Seed: LVVVGAVGV (KRAS G12V)
YVVSGKVGY

SEQ ID NO: 69104 - protein, 9 aa, synthetic construct
  source 1..9: note = Seed: LVVVGAVGV (KRAS G12V)
YVVSGLVGA

SEQ ID NO: 69105 - protein, 9 aa, synthetic construct
  source 1..9: note = Seed: LVVVGAVGV (KRAS G12V)
YVVSGLVGC

SEQ ID NO: 69106 - protein, 9 aa, synthetic construct
  source 1..9: note = Seed: LVVVGAVGV (KRAS G12V)
YVVSGLVGD

SEQ ID NO: 69107 - protein, 9 aa, synthetic construct
  source 1..9: note = Seed: LVVVGAVGV (KRAS G12V)
YVVSGLVGE

SEQ ID NO: 69108 - protein, 9 aa, synthetic construct
  source 1..9: note = Seed: LVVVGAVGV (KRAS G12V)
YVVSGLVGG

SEQ ID NO: 69109 - protein, 9 aa, synthetic construct
  source 1..9: note = Seed: LVVVGAVGV (KRAS G12V)
YVVSGLVGH

SEQ ID NO: 69110 - protein, 9 aa, synthetic construct
  source 1..9: note = Seed: LVVVGAVGV (KRAS G12V)
YVVSGLVGI

SEQ ID NO: 69111 - protein, 9 aa, synthetic construct
  source 1..9: note = Seed: LVVVGAVGV (KRAS G12V)
YVVSGLVGL

SEQ ID NO: 69112 - protein, 9 aa, synthetic construct
  source 1..9: note = Seed: LVVVGAVGV (KRAS G12V)
YVVSGLVGM

SEQ ID NO: 69113 - protein, 9 aa, synthetic construct
  source 1..9: note = Seed: LVVVGAVGV (KRAS G12V)
YVVSGLVGN

SEQ ID NO: 69114 - protein, 9 aa, synthetic construct
  source 1..9: note = Seed: LVVVGAVGV (KRAS G12V)
YVVSGLVGQ

SEQ ID NO: 69115 - protein, 9 aa, synthetic construct
  source 1..9: note = Seed: LVVVGAVGV (KRAS G12V)
YVVSGLVGS

SEQ ID NO: 69116 - protein, 9 aa, synthetic construct
  source 1..9: note = Seed: LVVVGAVGV (KRAS G12V)
YVVSGLVGT

SEQ ID NO: 69117 - protein, 9 aa, synthetic construct
  source 1..9: note = Seed: LVVVGAVGV (KRAS G12V)
YVVSGLVGV

SEQ ID NO: 69118 - protein, 9 aa, synthetic construct
  source 1..9: note = Seed: LVVVGAVGV (KRAS G12V)
YVVSGMVGA

SEQ ID NO: 69119 - protein, 9 aa, synthetic construct
  source 1..9: note = Seed: LVVVGAVGV (KRAS G12V)
YVVSGMVGC

SEQ ID NO: 69120 - protein, 9 aa, synthetic construct
  source 1..9: note = Seed: LVVVGAVGV (KRAS G12V)
YVVSGMVGD

SEQ ID NO: 69121 - protein, 9 aa, synthetic construct
  source 1..9: note = Seed: LVVVGAVGV (KRAS G12V)
YVVSGMVGE

SEQ ID NO: 69122 - protein, 9 aa, synthetic construct
  source 1..9: note = Seed: LVVVGAVGV (KRAS G12V)
YVVSGMVGF

SEQ ID NO: 69123 - protein, 9 aa, synthetic construct
  source 1..9: note = Seed: LVVVGAVGV (KRAS G12V)
YVVSGMVGG

SEQ ID NO: 69124 - protein, 9 aa, synthetic construct
  source 1..9: note = Seed: LVVVGAVGV (KRAS G12V)
YVVSGMVGH

SEQ ID NO: 69125 - protein, 9 aa, synthetic construct
  source 1..9: note = Seed: LVVVGAVGV (KRAS G12V)
YVVSGMVGI

SEQ ID NO: 69126 - protein, 9 aa, synthetic construct
  source 1..9: note = Seed: LVVVGAVGV (KRAS G12V)
YVVSGMVGL

SEQ ID NO: 69127 - protein, 9 aa, synthetic construct
  source 1..9: note = Seed: LVVVGAVGV (KRAS G12V)
YVVSGMVGM

SEQ ID NO: 69128 - protein, 9 aa, synthetic construct
  source 1..9: note = Seed: LVVVGAVGV (KRAS G12V)
YVVSGMVGN

SEQ ID NO: 69129 - protein, 9 aa, synthetic construct
  source 1..9: note = Seed: LVVVGAVGV (KRAS G12V)
YVVSGMVGQ

SEQ ID NO: 69130 - protein, 9 aa, synthetic construct
  source 1..9: note = Seed: LVVVGAVGV (KRAS G12V)
YVVSGMVGS

SEQ ID NO: 69131 - protein, 9 aa, synthetic construct
  source 1..9: note = Seed: LVVVGAVGV (KRAS G12V)
YVVSGMVGT

SEQ ID NO: 69132 - protein, 9 aa, synthetic construct
  source 1..9: note = Seed: LVVVGAVGV (KRAS G12V)
YVVSGMVGV

SEQ ID NO: 69133 - protein, 9 aa, synthetic construct
  source 1..9: note = Seed: LVVVGAVGV (KRAS G12V)
YVVSGMVGY

SEQ ID NO: 69134 - protein, 9 aa, synthetic construct
  source 1..9: note = Seed: LVVVGAVGV (KRAS G12V)
YVVSGNVGA

SEQ ID NO: 69135 - protein, 9 aa, synthetic construct
  source 1..9: note = Seed: LVVVGAVGV (KRAS G12V)
YVVSGNVGC

SEQ ID NO: 69136 - protein, 9 aa, synthetic construct
  source 1..9: note = Seed: LVVVGAVGV (KRAS G12V)
YVVSGNVGE

SEQ ID NO: 69137 - protein, 9 aa, synthetic construct
  source 1..9: note = Seed: LVVVGAVGV (KRAS G12V)
YVVSGNVGF

SEQ ID NO: 69138 - protein, 9 aa, synthetic construct
  source 1..9: note = Seed: LVVVGAVGV (KRAS G12V)
YVVSGNVGG

SEQ ID NO: 69139 - protein, 9 aa, synthetic construct
  source 1..9: note = Seed: LVVVGAVGV (KRAS G12V)
YVVSGNVGH

SEQ ID NO: 69140 - protein, 9 aa, synthetic construct
  source 1..9: note = Seed: LVVVGAVGV (KRAS G12V)
YVVSGNVGI

SEQ ID NO: 69141 - protein, 9 aa, synthetic construct
  source 1..9: note = Seed: LVVVGAVGV (KRAS G12V)
YVVSGNVGK

SEQ ID NO: 69142 - protein, 9 aa, synthetic construct
  source 1..9: note = Seed: LVVVGAVGV (KRAS G12V)
YVVSGNVGL

SEQ ID NO: 69143 - protein, 9 aa, synthetic construct
  source 1..9: note = Seed: LVVVGAVGV (KRAS G12V)
YVVSGNVGM

SEQ ID NO: 69144 - protein, 9 aa, synthetic construct
  source 1..9: note = Seed: LVVVGAVGV (KRAS G12V)
YVVSGNVGN

SEQ ID NO: 69145 - protein, 9 aa, synthetic construct
  source 1..9: note = Seed: LVVVGAVGV (KRAS G12V)
YVVSGNVGP

SEQ ID NO: 69146 - protein, 9 aa, synthetic construct
  source 1..9: note = Seed: LVVVGAVGV (KRAS G12V)
YVVSGNVGQ

SEQ ID NO: 69147 - protein, 9 aa, synthetic construct
  source 1..9: note = Seed: LVVVGAVGV (KRAS G12V)
YVVSGNVGR

SEQ ID NO: 69148 - protein, 9 aa, synthetic construct
  source 1..9: note = Seed: LVVVGAVGV (KRAS G12V)
YVVSGNVGS

SEQ ID NO: 69149 - protein, 9 aa, synthetic construct
  source 1..9: note = Seed: LVVVGAVGV (KRAS G12V)
YVVSGNVGT

SEQ ID NO: 69150 - protein, 9 aa, synthetic construct
  source 1..9: note = Seed: LVVVGAVGV (KRAS G12V)
YVVSGNVGV

SEQ ID NO: 69151 - protein, 9 aa, synthetic construct
  source 1..9: note = Seed: LVVVGAVGV (KRAS G12V)
YVVSGNVGW

SEQ ID NO: 69152 - protein, 9 aa, synthetic construct
  source 1..9: note = Seed: LVVVGAVGV (KRAS G12V)
YVVSGNVGY

SEQ ID NO: 69153 - protein, 9 aa, synthetic construct
  source 1..9: note = Seed: LVVVGAVGV (KRAS G12V)
YVVSGPVGA

SEQ ID NO: 69154 - protein, 9 aa, synthetic construct
  source 1..9: note = Seed: LVVVGAVGV (KRAS G12V)
YVVSGPVGC

SEQ ID NO: 69155 - protein, 9 aa, synthetic construct
  source 1..9: note = Seed: LVVVGAVGV (KRAS G12V)
YVVSGPVGD

SEQ ID NO: 69156 - protein, 9 aa, synthetic construct
  source 1..9: note = Seed: LVVVGAVGV (KRAS G12V)
YVVSGPVGE

SEQ ID NO: 69157 - protein, 9 aa, synthetic construct
  source 1..9: note = Seed: LVVVGAVGV (KRAS G12V)
YVVSGPVGF

SEQ ID NO: 69158 - protein, 9 aa, synthetic construct
  source 1..9: note = Seed: LVVVGAVGV (KRAS G12V)
YVVSGPVGG

SEQ ID NO: 69159 - protein, 9 aa, synthetic construct
  source 1..9: note = Seed: LVVVGAVGV (KRAS G12V)
YVVSGPVGH

SEQ ID NO: 69160 - protein, 9 aa, synthetic construct
  source 1..9: note = Seed: LVVVGAVGV (KRAS G12V)
YVVSGPVGI

SEQ ID NO: 69161 - protein, 9 aa, synthetic construct
  source 1..9: note = Seed: LVVVGAVGV (KRAS G12V)
YVVSGPVGK

SEQ ID NO: 69162 - protein, 9 aa, synthetic construct
  source 1..9: note = Seed: LVVVGAVGV (KRAS G12V)
YVVSGPVGL

SEQ ID NO: 69163 - protein, 9 aa, synthetic construct
  source 1..9: note = Seed: LVVVGAVGV (KRAS G12V)
YVVSGPVGM

SEQ ID NO: 69164 - protein, 9 aa, synthetic construct
  source 1..9: note = Seed: LVVVGAVGV (KRAS G12V)
YVVSGPVGN

SEQ ID NO: 69165 - protein, 9 aa, synthetic construct
  source 1..9: note = Seed: LVVVGAVGV (KRAS G12V)
YVVSGPVGP

SEQ ID NO: 69166 - protein, 9 aa, synthetic construct
  source 1..9: note = Seed: LVVVGAVGV (KRAS G12V)
YVVSGPVGQ

SEQ ID NO: 69167 - protein, 9 aa, synthetic construct
  source 1..9: note = Seed: LVVVGAVGV (KRAS G12V)
YVVSGPVGR

SEQ ID NO: 69168 - protein, 9 aa, synthetic construct
  source 1..9: note = Seed: LVVVGAVGV (KRAS G12V)
YVVSGPVGS

SEQ ID NO: 69169 - protein, 9 aa, synthetic construct
  source 1..9: note = Seed: LVVVGAVGV (KRAS G12V)
YVVSGPVGT

SEQ ID NO: 69170 - protein, 9 aa, synthetic construct
  source 1..9: note = Seed: LVVVGAVGV (KRAS G12V)
YVVSGPVGV

SEQ ID NO: 69171 - protein, 9 aa, synthetic construct
  source 1..9: note = Seed: LVVVGAVGV (KRAS G12V)
YVVSGPVGW

SEQ ID NO: 69172 - protein, 9 aa, synthetic construct
  source 1..9: note = Seed: LVVVGAVGV (KRAS G12V)
YVVSGPVGY

SEQ ID NO: 69173 - protein, 9 aa, synthetic construct
  source 1..9: note = Seed: LVVVGAVGV (KRAS G12V)
YVVSGQVGA

SEQ ID NO: 69174 - protein, 9 aa, synthetic construct
  source 1..9: note = Seed: LVVVGAVGV (KRAS G12V)
YVVSGQVGC

SEQ ID NO: 69175 - protein, 9 aa, synthetic construct
  source 1..9: note = Seed: LVVVGAVGV (KRAS G12V)
YVVSGQVGF

SEQ ID NO: 69176 - protein, 9 aa, synthetic construct
  source 1..9: note = Seed: LVVVGAVGV (KRAS G12V)
YVVSGQVGG

SEQ ID NO: 69177 - protein, 9 aa, synthetic construct
  source 1..9: note = Seed: LVVVGAVGV (KRAS G12V)
YVVSGQVGH

SEQ ID NO: 69178 - protein, 9 aa, synthetic construct
  source 1..9: note = Seed: LVVVGAVGV (KRAS G12V)
YVVSGQVGI

SEQ ID NO: 69179 - protein, 9 aa, synthetic construct
  source 1..9: note = Seed: LVVVGAVGV (KRAS G12V)
YVVSGQVGL

SEQ ID NO: 69180 - protein, 9 aa, synthetic construct
  source 1..9: note = Seed: LVVVGAVGV (KRAS G12V)
YVVSGQVGM

SEQ ID NO: 69181 - protein, 9 aa, synthetic construct
  source 1..9: note = Seed: LVVVGAVGV (KRAS G12V)
YVVSGQVGN

SEQ ID NO: 69182 - protein, 9 aa, synthetic construct
  source 1..9: note = Seed: LVVVGAVGV (KRAS G12V)
YVVSGQVGQ

SEQ ID NO: 69183 - protein, 9 aa, synthetic construct
  source 1..9: note = Seed: LVVVGAVGV (KRAS G12V)
YVVSGQVGR

SEQ ID NO: 69184 - protein, 9 aa, synthetic construct
  source 1..9: note = Seed: LVVVGAVGV (KRAS G12V)
YVVSGQVGS

SEQ ID NO: 69185 - protein, 9 aa, synthetic construct
  source 1..9: note = Seed: LVVVGAVGV (KRAS G12V)
YVVSGQVGT

SEQ ID NO: 69186 - protein, 9 aa, synthetic construct
  source 1..9: note = Seed: LVVVGAVGV (KRAS G12V)
YVVSGQVGV

SEQ ID NO: 69187 - protein, 9 aa, synthetic construct
  source 1..9: note = Seed: LVVVGAVGV (KRAS G12V)
YVVSGQVGY

SEQ ID NO: 69188 - protein, 9 aa, synthetic construct
  source 1..9: note = Seed: LVVVGAVGV (KRAS G12V)
YVVSGRVGA

SEQ ID NO: 69189 - protein, 9 aa, synthetic construct
  source 1..9: note = Seed: LVVVGAVGV (KRAS G12V)
YVVSGRVGG

SEQ ID NO: 69190 - protein, 9 aa, synthetic construct
  source 1..9: note = Seed: LVVVGAVGV (KRAS G12V)
YVVSGRVGH

SEQ ID NO: 69191 - protein, 9 aa, synthetic construct
  source 1..9: note = Seed: LVVVGAVGV (KRAS G12V)
YVVSGRVGI

SEQ ID NO: 69192 - protein, 9 aa, synthetic construct
  source 1..9: note = Seed: LVVVGAVGV (KRAS G12V)
YVVSGRVGK

SEQ ID NO: 69193 - protein, 9 aa, synthetic construct
  source 1..9: note = Seed: LVVVGAVGV (KRAS G12V)
YVVSGRVGL

SEQ ID NO: 69194 - protein, 9 aa, synthetic construct
  source 1..9: note = Seed: LVVVGAVGV (KRAS G12V)
YVVSGRVGM

SEQ ID NO: 69195 - protein, 9 aa, synthetic construct
  source 1..9: note = Seed: LVVVGAVGV (KRAS G12V)
YVVSGRVGN

SEQ ID NO: 69196 - protein, 9 aa, synthetic construct
  source 1..9: note = Seed: LVVVGAVGV (KRAS G12V)
YVVSGRVGP

SEQ ID NO: 69197 - protein, 9 aa, synthetic construct
  source 1..9: note = Seed: LVVVGAVGV (KRAS G12V)
YVVSGRVGQ

SEQ ID NO: 69198 - protein, 9 aa, synthetic construct
  source 1..9: note = Seed: LVVVGAVGV (KRAS G12V)
YVVSGRVGR

SEQ ID NO: 69199 - protein, 9 aa, synthetic construct
  source 1..9: note = Seed: LVVVGAVGV (KRAS G12V)
YVVSGRVGS

SEQ ID NO: 69200 - protein, 9 aa, synthetic construct
  source 1..9: note = Seed: LVVVGAVGV (KRAS G12V)
YVVSGRVGT

SEQ ID NO: 69201 - protein, 9 aa, synthetic construct
  source 1..9: note = Seed: LVVVGAVGV (KRAS G12V)
YVVSGRVGV

SEQ ID NO: 69202 - protein, 9 aa, synthetic construct
  source 1..9: note = Seed: LVVVGAVGV (KRAS G12V)
YVVSGRVGY

SEQ ID NO: 69203 - protein, 9 aa, synthetic construct
  source 1..9: note = Seed: LVVVGAVGV (KRAS G12V)
YVVSGSVGA

SEQ ID NO: 69204 - protein, 9 aa, synthetic construct
  source 1..9: note = Seed: LVVVGAVGV (KRAS G12V)
YVVSGSVGC

SEQ ID NO: 69205 - protein, 9 aa, synthetic construct
  source 1..9: note = Seed: LVVVGAVGV (KRAS G12V)
YVVSGSVGD

SEQ ID NO: 69206 - protein, 9 aa, synthetic construct
  source 1..9: note = Seed: LVVVGAVGV (KRAS G12V)
YVVSGSVGE

SEQ ID NO: 69207 - protein, 9 aa, synthetic construct
  source 1..9: note = Seed: LVVVGAVGV (KRAS G12V)
YVVSGSVGF

SEQ ID NO: 69208 - protein, 9 aa, synthetic construct
  source 1..9: note = Seed: LVVVGAVGV (KRAS G12V)
YVVSGSVGG

SEQ ID NO: 69209 - protein, 9 aa, synthetic construct
  source 1..9: note = Seed: LVVVGAVGV (KRAS G12V)
YVVSGSVGH

SEQ ID NO: 69210 - protein, 9 aa, synthetic construct
  source 1..9: note = Seed: LVVVGAVGV (KRAS G12V)
YVVSGSVGI

SEQ ID NO: 69211 - protein, 9 aa, synthetic construct
  source 1..9: note = Seed: LVVVGAVGV (KRAS G12V)
YVVSGSVGK

SEQ ID NO: 69212 - protein, 9 aa, synthetic construct
  source 1..9: note = Seed: LVVVGAVGV (KRAS G12V)
YVVSGSVGL

SEQ ID NO: 69213 - protein, 9 aa, synthetic construct
  source 1..9: note = Seed: LVVVGAVGV (KRAS G12V)
YVVSGSVGM

SEQ ID NO: 69214 - protein, 9 aa, synthetic construct
  source 1..9: note = Seed: LVVVGAVGV (KRAS G12V)
YVVSGSVGN

SEQ ID NO: 69215 - protein, 9 aa, synthetic construct
  source 1..9: note = Seed: LVVVGAVGV (KRAS G12V)
YVVSGSVGP

SEQ ID NO: 69216 - protein, 9 aa, synthetic construct
  source 1..9: note = Seed: LVVVGAVGV (KRAS G12V)
YVVSGSVGQ

SEQ ID NO: 69217 - protein, 9 aa, synthetic construct
  source 1..9: note = Seed: LVVVGAVGV (KRAS G12V)
YVVSGSVGR

SEQ ID NO: 69218 - protein, 9 aa, synthetic construct
  source 1..9: note = Seed: LVVVGAVGV (KRAS G12V)
YVVSGSVGS

SEQ ID NO: 69219 - protein, 9 aa, synthetic construct
  source 1..9: note = Seed: LVVVGAVGV (KRAS G12V)
YVVSGSVGT

SEQ ID NO: 69220 - protein, 9 aa, synthetic construct
  source 1..9: note = Seed: LVVVGAVGV (KRAS G12V)
YVVSGSVGV

SEQ ID NO: 69221 - protein, 9 aa, synthetic construct
  source 1..9: note = Seed: LVVVGAVGV (KRAS G12V)
YVVSGSVGW

SEQ ID NO: 69222 - protein, 9 aa, synthetic construct
  source 1..9: note = Seed: LVVVGAVGV (KRAS G12V)
YVVSGSVGY

SEQ ID NO: 69223 - protein, 9 aa, synthetic construct
  source 1..9: note = Seed: LVVVGAVGV (KRAS G12V)
YVVSGTVGA

SEQ ID NO: 69224 - protein, 9 aa, synthetic construct
  source 1..9: note = Seed: LVVVGAVGV (KRAS G12V)
YVVSGTVGC

SEQ ID NO: 69225 - protein, 9 aa, synthetic construct
  source 1..9: note = Seed: LVVVGAVGV (KRAS G12V)
YVVSGTVGD

SEQ ID NO: 69226 - protein, 9 aa, synthetic construct
  source 1..9: note = Seed: LVVVGAVGV (KRAS G12V)
YVVSGTVGE

SEQ ID NO: 69227 - protein, 9 aa, synthetic construct
  source 1..9: note = Seed: LVVVGAVGV (KRAS G12V)
YVVSGTVGF

SEQ ID NO: 69228 - protein, 9 aa, synthetic construct
  source 1..9: note = Seed: LVVVGAVGV (KRAS G12V)
YVVSGTVGG

SEQ ID NO: 69229 - protein, 9 aa, synthetic construct
  source 1..9: note = Seed: LVVVGAVGV (KRAS G12V)
YVVSGTVGH

SEQ ID NO: 69230 - protein, 9 aa, synthetic construct
  source 1..9: note = Seed: LVVVGAVGV (KRAS G12V)
YVVSGTVGI

SEQ ID NO: 69231 - protein, 9 aa, synthetic construct
  source 1..9: note = Seed: LVVVGAVGV (KRAS G12V)
YVVSGTVGK

SEQ ID NO: 69232 - protein, 9 aa, synthetic construct
  source 1..9: note = Seed: LVVVGAVGV (KRAS G12V)
YVVSGTVGL

SEQ ID NO: 69233 - protein, 9 aa, synthetic construct
  source 1..9: note = Seed: LVVVGAVGV (KRAS G12V)
YVVSGTVGM

SEQ ID NO: 69234 - protein, 9 aa, synthetic construct
  source 1..9: note = Seed: LVVVGAVGV (KRAS G12V)
YVVSGTVGN

SEQ ID NO: 69235 - protein, 9 aa, synthetic construct
  source 1..9: note = Seed: LVVVGAVGV (KRAS G12V)
YVVSGTVGP

SEQ ID NO: 69236 - protein, 9 aa, synthetic construct
  source 1..9: note = Seed: LVVVGAVGV (KRAS G12V)
YVVSGTVGQ

SEQ ID NO: 69237 - protein, 9 aa, synthetic construct
  source 1..9: note = Seed: LVVVGAVGV (KRAS G12V)
YVVSGTVGR

SEQ ID NO: 69238 - protein, 9 aa, synthetic construct
  source 1..9: note = Seed: LVVVGAVGV (KRAS G12V)
YVVSGTVGS

SEQ ID NO: 69239 - protein, 9 aa, synthetic construct
  source 1..9: note = Seed: LVVVGAVGV (KRAS G12V)
YVVSGTVGT

SEQ ID NO: 69240 - protein, 9 aa, synthetic construct
  source 1..9: note = Seed: LVVVGAVGV (KRAS G12V)
YVVSGTVGV

SEQ ID NO: 69241 - protein, 9 aa, synthetic construct
  source 1..9: note = Seed: LVVVGAVGV (KRAS G12V)
YVVSGTVGW

SEQ ID NO: 69242 - protein, 9 aa, synthetic construct
  source 1..9: note = Seed: LVVVGAVGV (KRAS G12V)
YVVSGTVGY

SEQ ID NO: 69243 - protein, 9 aa, synthetic construct
  source 1..9: note = Seed: LVVVGAVGV (KRAS G12V)
YVVSGVVGA

SEQ ID NO: 69244 - protein, 9 aa, synthetic construct
  source 1..9: note = Seed: LVVVGAVGV (KRAS G12V)
YVVSGVVGC

SEQ ID NO: 69245 - protein, 9 aa, synthetic construct
  source 1..9: note = Seed: LVVVGAVGV (KRAS G12V)
YVVSGVVGD

SEQ ID NO: 69246 - protein, 9 aa, synthetic construct
  source 1..9: note = Seed: LVVVGAVGV (KRAS G12V)
YVVSGVVGE

SEQ ID NO: 69247 - protein, 9 aa, synthetic construct
  source 1..9: note = Seed: LVVVGAVGV (KRAS G12V)
YVVSGVVGF

SEQ ID NO: 69248 - protein, 9 aa, synthetic construct
  source 1..9: note = Seed: LVVVGAVGV (KRAS G12V)
YVVSGVVGG

SEQ ID NO: 69249 - protein, 9 aa, synthetic construct
  source 1..9: note = Seed: LVVVGAVGV (KRAS G12V)
YVVSGVVGH

SEQ ID NO: 69250 - protein, 9 aa, synthetic construct
  source 1..9: note = Seed: LVVVGAVGV (KRAS G12V)
YVVSGVVGI

SEQ ID NO: 69251 - protein, 9 aa, synthetic construct
  source 1..9: note = Seed: LVVVGAVGV (KRAS G12V)
YVVSGVVGK

SEQ ID NO: 69252 - protein, 9 aa, synthetic construct
  source 1..9: note = Seed: LVVVGAVGV (KRAS G12V)
YVVSGVVGL

SEQ ID NO: 69253 - protein, 9 aa, synthetic construct
  source 1..9: note = Seed: LVVVGAVGV (KRAS G12V)
YVVSGVVGM

SEQ ID NO: 69254 - protein, 9 aa, synthetic construct
  source 1..9: note = Seed: LVVVGAVGV (KRAS G12V)
YVVSGVVGN

SEQ ID NO: 69255 - protein, 9 aa, synthetic construct
  source 1..9: note = Seed: LVVVGAVGV (KRAS G12V)
YVVSGVVGP

SEQ ID NO: 69256 - protein, 9 aa, synthetic construct
  source 1..9: note = Seed: LVVVGAVGV (KRAS G12V)
YVVSGVVGQ

SEQ ID NO: 69257 - protein, 9 aa, synthetic construct
  source 1..9: note = Seed: LVVVGAVGV (KRAS G12V)
YVVSGVVGR

SEQ ID NO: 69258 - protein, 9 aa, synthetic construct
  source 1..9: note = Seed: LVVVGAVGV (KRAS G12V)
YVVSGVVGS

SEQ ID NO: 69259 - protein, 9 aa, synthetic construct
  source 1..9: note = Seed: LVVVGAVGV (KRAS G12V)
YVVSGVVGT

SEQ ID NO: 69260 - protein, 9 aa, synthetic construct
  source 1..9: note = Seed: LVVVGAVGV (KRAS G12V)
YVVSGVVGV

SEQ ID NO: 69261 - protein, 9 aa, synthetic construct
  source 1..9: note = Seed: LVVVGAVGV (KRAS G12V)
YVVSGVVGY

SEQ ID NO: 69262 - protein, 9 aa, synthetic construct
  source 1..9: note = Seed: LVVVGAVGV (KRAS G12V)
YVVSGWVGA

SEQ ID NO: 69263 - protein, 9 aa, synthetic construct
  source 1..9: note = Seed: LVVVGAVGV (KRAS G12V)
YVVSGWVGC

SEQ ID NO: 69264 - protein, 9 aa, synthetic construct
  source 1..9: note = Seed: LVVVGAVGV (KRAS G12V)
YVVSGWVGI

SEQ ID NO: 69265 - protein, 9 aa, synthetic construct
  source 1..9: note = Seed: LVVVGAVGV (KRAS G12V)
YVVSGWVGL

SEQ ID NO: 69266 - protein, 9 aa, synthetic construct
  source 1..9: note = Seed: LVVVGAVGV (KRAS G12V)
YVVSGWVGM

SEQ ID NO: 69267 - protein, 9 aa, synthetic construct
  source 1..9: note = Seed: LVVVGAVGV (KRAS G12V)
YVVSGWVGV

SEQ ID NO: 69268 - protein, 9 aa, synthetic construct
  source 1..9: note = Seed: LVVVGAVGV (KRAS G12V)
YVVSGYVGA

SEQ ID NO: 69269 - protein, 9 aa, synthetic construct
  source 1..9: note = Seed: LVVVGAVGV (KRAS G12V)
YVVSGYVGI

SEQ ID NO: 69270 - protein, 9 aa, synthetic construct
  source 1..9: note = Seed: LVVVGAVGV (KRAS G12V)
YVVSGYVGL

SEQ ID NO: 69271 - protein, 9 aa, synthetic construct
  source 1..9: note = Seed: LVVVGAVGV (KRAS G12V)
YVVSGYVGV

SEQ ID NO: 69272 - protein, 9 aa, synthetic construct
  source 1..9: note = Seed: LVVVGAVGV (KRAS G12V)
YVVTGAVGA

SEQ ID NO: 69273 - protein, 9 aa, synthetic construct
  source 1..9: note = Seed: LVVVGAVGV (KRAS G12V)
YVVTGAVGC

SEQ ID NO: 69274 - protein, 9 aa, synthetic construct
  source 1..9: note = Seed: LVVVGAVGV (KRAS G12V)
YVVTGAVGD

SEQ ID NO: 69275 - protein, 9 aa, synthetic construct
  source 1..9: note = Seed: LVVVGAVGV (KRAS G12V)
YVVTGAVGE

SEQ ID NO: 69276 - protein, 9 aa, synthetic construct
  source 1..9: note = Seed: LVVVGAVGV (KRAS G12V)
YVVTGAVGF

SEQ ID NO: 69277 - protein, 9 aa, synthetic construct
  source 1..9: note = Seed: LVVVGAVGV (KRAS G12V)
YVVTGAVGG

SEQ ID NO: 69278 - protein, 9 aa, synthetic construct
  source 1..9: note = Seed: LVVVGAVGV (KRAS G12V)
YVVTGAVGH

SEQ ID NO: 69279 - protein, 9 aa, synthetic construct
  source 1..9: note = Seed: LVVVGAVGV (KRAS G12V)
YVVTGAVGI

SEQ ID NO: 69280 - protein, 9 aa, synthetic construct
  source 1..9: note = Seed: LVVVGAVGV (KRAS G12V)
YVVTGAVGK

SEQ ID NO: 69281 - protein, 9 aa, synthetic construct
  source 1..9: note = Seed: LVVVGAVGV (KRAS G12V)
YVVTGAVGL

SEQ ID NO: 69282 - protein, 9 aa, synthetic construct
  source 1..9: note = Seed: LVVVGAVGV (KRAS G12V)
YVVTGAVGM

SEQ ID NO: 69283 - protein, 9 aa, synthetic construct
  source 1..9: note = Seed: LVVVGAVGV (KRAS G12V)
YVVTGAVGN

SEQ ID NO: 69284 - protein, 9 aa, synthetic construct
  source 1..9: note = Seed: LVVVGAVGV (KRAS G12V)
YVVTGAVGP

SEQ ID NO: 69285 - protein, 9 aa, synthetic construct
  source 1..9: note = Seed: LVVVGAVGV (KRAS G12V)
YVVTGAVGQ

SEQ ID NO: 69286 - protein, 9 aa, synthetic construct
  source 1..9: note = Seed: LVVVGAVGV (KRAS G12V)
YVVTGAVGR

SEQ ID NO: 69287 - protein, 9 aa, synthetic construct
  source 1..9: note = Seed: LVVVGAVGV (KRAS G12V)
YVVTGAVGS

SEQ ID NO: 69288 - protein, 9 aa, synthetic construct
  source 1..9: note = Seed: LVVVGAVGV (KRAS G12V)
YVVTGAVGT

SEQ ID NO: 69289 - protein, 9 aa, synthetic construct
  source 1..9: note = Seed: LVVVGAVGV (KRAS G12V)
YVVTGAVGV

SEQ ID NO: 69290 - protein, 9 aa, synthetic construct
  source 1..9: note = Seed: LVVVGAVGV (KRAS G12V)
YVVTGAVGW

SEQ ID NO: 69291 - protein, 9 aa, synthetic construct
  source 1..9: note = Seed: LVVVGAVGV (KRAS G12V)
YVVTGAVGY

SEQ ID NO: 69292 - protein, 9 aa, synthetic construct
  source 1..9: note = Seed: LVVVGAVGV (KRAS G12V)
YVVTGCVGA

SEQ ID NO: 69293 - protein, 9 aa, synthetic construct
  source 1..9: note = Seed: LVVVGAVGV (KRAS G12V)
YVVTGCVGC

SEQ ID NO: 69294 - protein, 9 aa, synthetic construct
  source 1..9: note = Seed: LVVVGAVGV (KRAS G12V)
YVVTGCVGF

SEQ ID NO: 69295 - protein, 9 aa, synthetic construct
  source 1..9: note = Seed: LVVVGAVGV (KRAS G12V)
YVVTGCVGG

SEQ ID NO: 69296 - protein, 9 aa, synthetic construct
  source 1..9: note = Seed: LVVVGAVGV (KRAS G12V)
YVVTGCVGH

SEQ ID NO: 69297 - protein, 9 aa, synthetic construct
  source 1..9: note = Seed: LVVVGAVGV (KRAS G12V)
YVVTGCVGI

SEQ ID NO: 69298 - protein, 9 aa, synthetic construct
  source 1..9: note = Seed: LVVVGAVGV (KRAS G12V)
YVVTGCVGK

SEQ ID NO: 69299 - protein, 9 aa, synthetic construct
  source 1..9: note = Seed: LVVVGAVGV (KRAS G12V)
YVVTGCVGL

SEQ ID NO: 69300 - protein, 9 aa, synthetic construct
  source 1..9: note = Seed: LVVVGAVGV (KRAS G12V)
YVVTGCVGM

SEQ ID NO: 69301 - protein, 9 aa, synthetic construct
  source 1..9: note = Seed: LVVVGAVGV (KRAS G12V)
YVVTGCVGN

SEQ ID NO: 69302 - protein, 9 aa, synthetic construct
  source 1..9: note = Seed: LVVVGAVGV (KRAS G12V)
YVVTGCVGQ

SEQ ID NO: 69303 - protein, 9 aa, synthetic construct
  source 1..9: note = Seed: LVVVGAVGV (KRAS G12V)
YVVTGCVGR

SEQ ID NO: 69304 - protein, 9 aa, synthetic construct
  source 1..9: note = Seed: LVVVGAVGV (KRAS G12V)
YVVTGCVGS

SEQ ID NO: 69305 - protein, 9 aa, synthetic construct
  source 1..9: note = Seed: LVVVGAVGV (KRAS G12V)
YVVTGCVGT

SEQ ID NO: 69306 - protein, 9 aa, synthetic construct
  source 1..9: note = Seed: LVVVGAVGV (KRAS G12V)
YVVTGCVGV

SEQ ID NO: 69307 - protein, 9 aa, synthetic construct
  source 1..9: note = Seed: LVVVGAVGV (KRAS G12V)
YVVTGCVGW

SEQ ID NO: 69308 - protein, 9 aa, synthetic construct
  source 1..9: note = Seed: LVVVGAVGV (KRAS G12V)
YVVTGCVGY

SEQ ID NO: 69309 - protein, 9 aa, synthetic construct
  source 1..9: note = Seed: LVVVGAVGV (KRAS G12V)
YVVTGDVGA

SEQ ID NO: 69310 - protein, 9 aa, synthetic construct
  source 1..9: note = Seed: LVVVGAVGV (KRAS G12V)
YVVTGDVGF

SEQ ID NO: 69311 - protein, 9 aa, synthetic construct
  source 1..9: note = Seed: LVVVGAVGV (KRAS G12V)
YVVTGDVGI

SEQ ID NO: 69312 - protein, 9 aa, synthetic construct
  source 1..9: note = Seed: LVVVGAVGV (KRAS G12V)
YVVTGDVGL

SEQ ID NO: 69313 - protein, 9 aa, synthetic construct
  source 1..9: note = Seed: LVVVGAVGV (KRAS G12V)
YVVTGDVGN

SEQ ID NO: 69314 - protein, 9 aa, synthetic construct
  source 1..9: note = Seed: LVVVGAVGV (KRAS G12V)
YVVTGDVGQ

SEQ ID NO: 69315 - protein, 9 aa, synthetic construct
  source 1..9: note = Seed: LVVVGAVGV (KRAS G12V)
YVVTGDVGS

SEQ ID NO: 69316 - protein, 9 aa, synthetic construct
  source 1..9: note = Seed: LVVVGAVGV (KRAS G12V)
YVVTGDVGV

SEQ ID NO: 69317 - protein, 9 aa, synthetic construct
  source 1..9: note = Seed: LVVVGAVGV (KRAS G12V)
YVVTGEVGA

SEQ ID NO: 69318 - protein, 9 aa, synthetic construct
  source 1..9: note = Seed: LVVVGAVGV (KRAS G12V)
YVVTGEVGI

SEQ ID NO: 69319 - protein, 9 aa, synthetic construct
  source 1..9: note = Seed: LVVVGAVGV (KRAS G12V)
YVVTGEVGL

SEQ ID NO: 69320 - protein, 9 aa, synthetic construct
  source 1..9: note = Seed: LVVVGAVGV (KRAS G12V)
YVVTGEVGM

SEQ ID NO: 69321 - protein, 9 aa, synthetic construct
  source 1..9: note = Seed: LVVVGAVGV (KRAS G12V)
YVVTGEVGN

SEQ ID NO: 69322 - protein, 9 aa, synthetic construct
  source 1..9: note = Seed: LVVVGAVGV (KRAS G12V)
YVVTGEVGS

SEQ ID NO: 69323 - protein, 9 aa, synthetic construct
  source 1..9: note = Seed: LVVVGAVGV (KRAS G12V)
YVVTGEVGV

SEQ ID NO: 69324 - protein, 9 aa, synthetic construct
  source 1..9: note = Seed: LVVVGAVGV (KRAS G12V)
YVVTGFVGA

SEQ ID NO: 69325 - protein, 9 aa, synthetic construct
  source 1..9: note = Seed: LVVVGAVGV (KRAS G12V)
YVVTGFVGI

SEQ ID NO: 69326 - protein, 9 aa, synthetic construct
  source 1..9: note = Seed: LVVVGAVGV (KRAS G12V)
YVVTGFVGL

SEQ ID NO: 69327 - protein, 9 aa, synthetic construct
  source 1..9: note = Seed: LVVVGAVGV (KRAS G12V)
YVVTGFVGM

SEQ ID NO: 69328 - protein, 9 aa, synthetic construct
  source 1..9: note = Seed: LVVVGAVGV (KRAS G12V)
YVVTGFVGV

SEQ ID NO: 69329 - protein, 9 aa, synthetic construct
  source 1..9: note = Seed: LVVVGAVGV (KRAS G12V)
YVVTGGVGA

SEQ ID NO: 69330 - protein, 9 aa, synthetic construct
  source 1..9: note = Seed: LVVVGAVGV (KRAS G12V)
YVVTGGVGC

SEQ ID NO: 69331 - protein, 9 aa, synthetic construct
  source 1..9: note = Seed: LVVVGAVGV (KRAS G12V)
YVVTGGVGF

SEQ ID NO: 69332 - protein, 9 aa, synthetic construct
  source 1..9: note = Seed: LVVVGAVGV (KRAS G12V)
YVVTGGVGG

SEQ ID NO: 69333 - protein, 9 aa, synthetic construct
  source 1..9: note = Seed: LVVVGAVGV (KRAS G12V)
YVVTGGVGH

SEQ ID NO: 69334 - protein, 9 aa, synthetic construct
  source 1..9: note = Seed: LVVVGAVGV (KRAS G12V)
YVVTGGVGI

SEQ ID NO: 69335 - protein, 9 aa, synthetic construct
  source 1..9: note = Seed: LVVVGAVGV (KRAS G12V)
YVVTGGVGK

SEQ ID NO: 69336 - protein, 9 aa, synthetic construct
  source 1..9: note = Seed: LVVVGAVGV (KRAS G12V)
YVVTGGVGL

SEQ ID NO: 69337 - protein, 9 aa, synthetic construct
  source 1..9: note = Seed: LVVVGAVGV (KRAS G12V)
YVVTGGVGM

SEQ ID NO: 69338 - protein, 9 aa, synthetic construct
  source 1..9: note = Seed: LVVVGAVGV (KRAS G12V)
YVVTGGVGN

SEQ ID NO: 69339 - protein, 9 aa, synthetic construct
  source 1..9: note = Seed: LVVVGAVGV (KRAS G12V)
YVVTGGVGP

SEQ ID NO: 69340 - protein, 9 aa, synthetic construct
  source 1..9: note = Seed: LVVVGAVGV (KRAS G12V)
YVVTGGVGQ

SEQ ID NO: 69341 - protein, 9 aa, synthetic construct
  source 1..9: note = Seed: LVVVGAVGV (KRAS G12V)
YVVTGGVGR

SEQ ID NO: 69342 - protein, 9 aa, synthetic construct
  source 1..9: note = Seed: LVVVGAVGV (KRAS G12V)
YVVTGGVGS

SEQ ID NO: 69343 - protein, 9 aa, synthetic construct
  source 1..9: note = Seed: LVVVGAVGV (KRAS G12V)
YVVTGGVGT

SEQ ID NO: 69344 - protein, 9 aa, synthetic construct
  source 1..9: note = Seed: LVVVGAVGV (KRAS G12V)
YVVTGGVGV

SEQ ID NO: 69345 - protein, 9 aa, synthetic construct
  source 1..9: note = Seed: LVVVGAVGV (KRAS G12V)
YVVTGGVGW

SEQ ID NO: 69346 - protein, 9 aa, synthetic construct
  source 1..9: note = Seed: LVVVGAVGV (KRAS G12V)
YVVTGGVGY

SEQ ID NO: 69347 - protein, 9 aa, synthetic construct
  source 1..9: note = Seed: LVVVGAVGV (KRAS G12V)
YVVTGHVGA

SEQ ID NO: 69348 - protein, 9 aa, synthetic construct
  source 1..9: note = Seed: LVVVGAVGV (KRAS G12V)
YVVTGHVGC

SEQ ID NO: 69349 - protein, 9 aa, synthetic construct
  source 1..9: note = Seed: LVVVGAVGV (KRAS G12V)
YVVTGHVGF

SEQ ID NO: 69350 - protein, 9 aa, synthetic construct
  source 1..9: note = Seed: LVVVGAVGV (KRAS G12V)
YVVTGHVGG

SEQ ID NO: 69351 - protein, 9 aa, synthetic construct
  source 1..9: note = Seed: LVVVGAVGV (KRAS G12V)
YVVTGHVGI

SEQ ID NO: 69352 - protein, 9 aa, synthetic construct
  source 1..9: note = Seed: LVVVGAVGV (KRAS G12V)
YVVTGHVGL

SEQ ID NO: 69353 - protein, 9 aa, synthetic construct
  source 1..9: note = Seed: LVVVGAVGV (KRAS G12V)
YVVTGHVGM

SEQ ID NO: 69354 - protein, 9 aa, synthetic construct
  source 1..9: note = Seed: LVVVGAVGV (KRAS G12V)
YVVTGHVGS

SEQ ID NO: 69355 - protein, 9 aa, synthetic construct
  source 1..9: note = Seed: LVVVGAVGV (KRAS G12V)
YVVTGHVGT

SEQ ID NO: 69356 - protein, 9 aa, synthetic construct
  source 1..9: note = Seed: LVVVGAVGV (KRAS G12V)
YVVTGHVGV

SEQ ID NO: 69357 - protein, 9 aa, synthetic construct
  source 1..9: note = Seed: LVVVGAVGV (KRAS G12V)
YVVTGIVGA

SEQ ID NO: 69358 - protein, 9 aa, synthetic construct
  source 1..9: note = Seed: LVVVGAVGV (KRAS G12V)
YVVTGIVGC

SEQ ID NO: 69359 - protein, 9 aa, synthetic construct
  source 1..9: note = Seed: LVVVGAVGV (KRAS G12V)
YVVTGIVGD

SEQ ID NO: 69360 - protein, 9 aa, synthetic construct
  source 1..9: note = Seed: LVVVGAVGV (KRAS G12V)
YVVTGIVGE

SEQ ID NO: 69361 - protein, 9 aa, synthetic construct
  source 1..9: note = Seed: LVVVGAVGV (KRAS G12V)
YVVTGIVGF

SEQ ID NO: 69362 - protein, 9 aa, synthetic construct
  source 1..9: note = Seed: LVVVGAVGV (KRAS G12V)
YVVTGIVGG

SEQ ID NO: 69363 - protein, 9 aa, synthetic construct
  source 1..9: note = Seed: LVVVGAVGV (KRAS G12V)
YVVTGIVGH

SEQ ID NO: 69364 - protein, 9 aa, synthetic construct
  source 1..9: note = Seed: LVVVGAVGV (KRAS G12V)
YVVTGIVGI

SEQ ID NO: 69365 - protein, 9 aa, synthetic construct
  source 1..9: note = Seed: LVVVGAVGV (KRAS G12V)
YVVTGIVGL

SEQ ID NO: 69366 - protein, 9 aa, synthetic construct
  source 1..9: note = Seed: LVVVGAVGV (KRAS G12V)
YVVTGIVGM

SEQ ID NO: 69367 - protein, 9 aa, synthetic construct
  source 1..9: note = Seed: LVVVGAVGV (KRAS G12V)
YVVTGIVGN

SEQ ID NO: 69368 - protein, 9 aa, synthetic construct
  source 1..9: note = Seed: LVVVGAVGV (KRAS G12V)
YVVTGIVGP

SEQ ID NO: 69369 - protein, 9 aa, synthetic construct
  source 1..9: note = Seed: LVVVGAVGV (KRAS G12V)
YVVTGIVGQ

SEQ ID NO: 69370 - protein, 9 aa, synthetic construct
  source 1..9: note = Seed: LVVVGAVGV (KRAS G12V)
YVVTGIVGR

SEQ ID NO: 69371 - protein, 9 aa, synthetic construct
  source 1..9: note = Seed: LVVVGAVGV (KRAS G12V)
YVVTGIVGS

SEQ ID NO: 69372 - protein, 9 aa, synthetic construct
  source 1..9: note = Seed: LVVVGAVGV (KRAS G12V)
YVVTGIVGT

SEQ ID NO: 69373 - protein, 9 aa, synthetic construct
  source 1..9: note = Seed: LVVVGAVGV (KRAS G12V)
YVVTGIVGV

SEQ ID NO: 69374 - protein, 9 aa, synthetic construct
  source 1..9: note = Seed: LVVVGAVGV (KRAS G12V)
YVVTGIVGY

SEQ ID NO: 69375 - protein, 9 aa, synthetic construct
  source 1..9: note = Seed: LVVVGAVGV (KRAS G12V)
YVVTGKVGA

SEQ ID NO: 69376 - protein, 9 aa, synthetic construct
  source 1..9: note = Seed: LVVVGAVGV (KRAS G12V)
YVVTGKVGC

SEQ ID NO: 69377 - protein, 9 aa, synthetic construct
  source 1..9: note = Seed: LVVVGAVGV (KRAS G12V)
YVVTGKVGG

SEQ ID NO: 69378 - protein, 9 aa, synthetic construct
  source 1..9: note = Seed: LVVVGAVGV (KRAS G12V)
YVVTGKVGH

SEQ ID NO: 69379 - protein, 9 aa, synthetic construct
  source 1..9: note = Seed: LVVVGAVGV (KRAS G12V)
YVVTGKVGI

SEQ ID NO: 69380 - protein, 9 aa, synthetic construct
  source 1..9: note = Seed: LVVVGAVGV (KRAS G12V)
YVVTGKVGK

SEQ ID NO: 69381 - protein, 9 aa, synthetic construct
  source 1..9: note = Seed: LVVVGAVGV (KRAS G12V)
YVVTGKVGL

SEQ ID NO: 69382 - protein, 9 aa, synthetic construct
  source 1..9: note = Seed: LVVVGAVGV (KRAS G12V)
YVVTGKVGM

SEQ ID NO: 69383 - protein, 9 aa, synthetic construct
  source 1..9: note = Seed: LVVVGAVGV (KRAS G12V)
YVVTGKVGN

SEQ ID NO: 69384 - protein, 9 aa, synthetic construct
  source 1..9: note = Seed: LVVVGAVGV (KRAS G12V)
YVVTGKVGP

SEQ ID NO: 69385 - protein, 9 aa, synthetic construct
  source 1..9: note = Seed: LVVVGAVGV (KRAS G12V)
YVVTGKVGQ

SEQ ID NO: 69386 - protein, 9 aa, synthetic construct
  source 1..9: note = Seed: LVVVGAVGV (KRAS G12V)
YVVTGKVGR

SEQ ID NO: 69387 - protein, 9 aa, synthetic construct
  source 1..9: note = Seed: LVVVGAVGV (KRAS G12V)
YVVTGKVGS

SEQ ID NO: 69388 - protein, 9 aa, synthetic construct
  source 1..9: note = Seed: LVVVGAVGV (KRAS G12V)
YVVTGKVGT

SEQ ID NO: 69389 - protein, 9 aa, synthetic construct
  source 1..9: note = Seed: LVVVGAVGV (KRAS G12V)
YVVTGKVGV

SEQ ID NO: 69390 - protein, 9 aa, synthetic construct
  source 1..9: note = Seed: LVVVGAVGV (KRAS G12V)
YVVTGKVGY

SEQ ID NO: 69391 - protein, 9 aa, synthetic construct
  source 1..9: note = Seed: LVVVGAVGV (KRAS G12V)
YVVTGLVGA

SEQ ID NO: 69392 - protein, 9 aa, synthetic construct
  source 1..9: note = Seed: LVVVGAVGV (KRAS G12V)
YVVTGLVGC

SEQ ID NO: 69393 - protein, 9 aa, synthetic construct
  source 1..9: note = Seed: LVVVGAVGV (KRAS G12V)
YVVTGLVGD

SEQ ID NO: 69394 - protein, 9 aa, synthetic construct
  source 1..9: note = Seed: LVVVGAVGV (KRAS G12V)
YVVTGLVGG

SEQ ID NO: 69395 - protein, 9 aa, synthetic construct
  source 1..9: note = Seed: LVVVGAVGV (KRAS G12V)
YVVTGLVGH

SEQ ID NO: 69396 - protein, 9 aa, synthetic construct
  source 1..9: note = Seed: LVVVGAVGV (KRAS G12V)
YVVTGLVGI

SEQ ID NO: 69397 - protein, 9 aa, synthetic construct
  source 1..9: note = Seed: LVVVGAVGV (KRAS G12V)
YVVTGLVGL

SEQ ID NO: 69398 - protein, 9 aa, synthetic construct
  source 1..9: note = Seed: LVVVGAVGV (KRAS G12V)
YVVTGLVGM

SEQ ID NO: 69399 - protein, 9 aa, synthetic construct
  source 1..9: note = Seed: LVVVGAVGV (KRAS G12V)
YVVTGLVGN

SEQ ID NO: 69400 - protein, 9 aa, synthetic construct
  source 1..9: note = Seed: LVVVGAVGV (KRAS G12V)
YVVTGLVGQ

SEQ ID NO: 69401 - protein, 9 aa, synthetic construct
  source 1..9: note = Seed: LVVVGAVGV (KRAS G12V)
YVVTGLVGS

SEQ ID NO: 69402 - protein, 9 aa, synthetic construct
  source 1..9: note = Seed: LVVVGAVGV (KRAS G12V)
YVVTGLVGT

SEQ ID NO: 69403 - protein, 9 aa, synthetic construct
  source 1..9: note = Seed: LVVVGAVGV (KRAS G12V)
YVVTGLVGV

SEQ ID NO: 69404 - protein, 9 aa, synthetic construct
  source 1..9: note = Seed: LVVVGAVGV (KRAS G12V)
YVVTGMVGA

SEQ ID NO: 69405 - protein, 9 aa, synthetic construct
  source 1..9: note = Seed: LVVVGAVGV (KRAS G12V)
YVVTGMVGC

SEQ ID NO: 69406 - protein, 9 aa, synthetic construct
  source 1..9: note = Seed: LVVVGAVGV (KRAS G12V)
YVVTGMVGD

SEQ ID NO: 69407 - protein, 9 aa, synthetic construct
  source 1..9: note = Seed: LVVVGAVGV (KRAS G12V)
YVVTGMVGE

SEQ ID NO: 69408 - protein, 9 aa, synthetic construct
  source 1..9: note = Seed: LVVVGAVGV (KRAS G12V)
YVVTGMVGF

SEQ ID NO: 69409 - protein, 9 aa, synthetic construct
  source 1..9: note = Seed: LVVVGAVGV (KRAS G12V)
YVVTGMVGG

SEQ ID NO: 69410 - protein, 9 aa, synthetic construct
  source 1..9: note = Seed: LVVVGAVGV (KRAS G12V)
YVVTGMVGH

SEQ ID NO: 69411 - protein, 9 aa, synthetic construct
  source 1..9: note = Seed: LVVVGAVGV (KRAS G12V)
YVVTGMVGI

SEQ ID NO: 69412 - protein, 9 aa, synthetic construct
  source 1..9: note = Seed: LVVVGAVGV (KRAS G12V)
YVVTGMVGK

SEQ ID NO: 69413 - protein, 9 aa, synthetic construct
  source 1..9: note = Seed: LVVVGAVGV (KRAS G12V)
YVVTGMVGL

SEQ ID NO: 69414 - protein, 9 aa, synthetic construct
  source 1..9: note = Seed: LVVVGAVGV (KRAS G12V)
YVVTGMVGM

SEQ ID NO: 69415 - protein, 9 aa, synthetic construct
  source 1..9: note = Seed: LVVVGAVGV (KRAS G12V)
YVVTGMVGN

SEQ ID NO: 69416 - protein, 9 aa, synthetic construct
  source 1..9: note = Seed: LVVVGAVGV (KRAS G12V)
YVVTGMVGQ

SEQ ID NO: 69417 - protein, 9 aa, synthetic construct
  source 1..9: note = Seed: LVVVGAVGV (KRAS G12V)
YVVTGMVGR

SEQ ID NO: 69418 - protein, 9 aa, synthetic construct
  source 1..9: note = Seed: LVVVGAVGV (KRAS G12V)
YVVTGMVGS

SEQ ID NO: 69419 - protein, 9 aa, synthetic construct
  source 1..9: note = Seed: LVVVGAVGV (KRAS G12V)
YVVTGMVGT

SEQ ID NO: 69420 - protein, 9 aa, synthetic construct
  source 1..9: note = Seed: LVVVGAVGV (KRAS G12V)
YVVTGMVGV

SEQ ID NO: 69421 - protein, 9 aa, synthetic construct
  source 1..9: note = Seed: LVVVGAVGV (KRAS G12V)
YVVTGMVGY

SEQ ID NO: 69422 - protein, 9 aa, synthetic construct
  source 1..9: note = Seed: LVVVGAVGV (KRAS G12V)
YVVTGNVGA

SEQ ID NO: 69423 - protein, 9 aa, synthetic construct
  source 1..9: note = Seed: LVVVGAVGV (KRAS G12V)
YVVTGNVGC

SEQ ID NO: 69424 - protein, 9 aa, synthetic construct
  source 1..9: note = Seed: LVVVGAVGV (KRAS G12V)
YVVTGNVGE

SEQ ID NO: 69425 - protein, 9 aa, synthetic construct
  source 1..9: note = Seed: LVVVGAVGV (KRAS G12V)
YVVTGNVGF

SEQ ID NO: 69426 - protein, 9 aa, synthetic construct
  source 1..9: note = Seed: LVVVGAVGV (KRAS G12V)
YVVTGNVGG

SEQ ID NO: 69427 - protein, 9 aa, synthetic construct
  source 1..9: note = Seed: LVVVGAVGV (KRAS G12V)
YVVTGNVGH

SEQ ID NO: 69428 - protein, 9 aa, synthetic construct
  source 1..9: note = Seed: LVVVGAVGV (KRAS G12V)
YVVTGNVGI

SEQ ID NO: 69429 - protein, 9 aa, synthetic construct
  source 1..9: note = Seed: LVVVGAVGV (KRAS G12V)
YVVTGNVGK

SEQ ID NO: 69430 - protein, 9 aa, synthetic construct
  source 1..9: note = Seed: LVVVGAVGV (KRAS G12V)
YVVTGNVGL

SEQ ID NO: 69431 - protein, 9 aa, synthetic construct
  source 1..9: note = Seed: LVVVGAVGV (KRAS G12V)
YVVTGNVGM

SEQ ID NO: 69432 - protein, 9 aa, synthetic construct
  source 1..9: note = Seed: LVVVGAVGV (KRAS G12V)
YVVTGNVGN

SEQ ID NO: 69433 - protein, 9 aa, synthetic construct
  source 1..9: note = Seed: LVVVGAVGV (KRAS G12V)
YVVTGNVGP

SEQ ID NO: 69434 - protein, 9 aa, synthetic construct
  source 1..9: note = Seed: LVVVGAVGV (KRAS G12V)
YVVTGNVGQ

SEQ ID NO: 69435 - protein, 9 aa, synthetic construct
  source 1..9: note = Seed: LVVVGAVGV (KRAS G12V)
YVVTGNVGR

SEQ ID NO: 69436 - protein, 9 aa, synthetic construct
  source 1..9: note = Seed: LVVVGAVGV (KRAS G12V)
YVVTGNVGS

SEQ ID NO: 69437 - protein, 9 aa, synthetic construct
  source 1..9: note = Seed: LVVVGAVGV (KRAS G12V)
YVVTGNVGT

SEQ ID NO: 69438 - protein, 9 aa, synthetic construct
  source 1..9: note = Seed: LVVVGAVGV (KRAS G12V)
YVVTGNVGV

SEQ ID NO: 69439 - protein, 9 aa, synthetic construct
  source 1..9: note = Seed: LVVVGAVGV (KRAS G12V)
YVVTGNVGW

SEQ ID NO: 69440 - protein, 9 aa, synthetic construct
  source 1..9: note = Seed: LVVVGAVGV (KRAS G12V)
YVVTGNVGY

SEQ ID NO: 69441 - protein, 9 aa, synthetic construct
  source 1..9: note = Seed: LVVVGAVGV (KRAS G12V)
YVVTGPVGA

SEQ ID NO: 69442 - protein, 9 aa, synthetic construct
  source 1..9: note = Seed: LVVVGAVGV (KRAS G12V)
YVVTGPVGC

SEQ ID NO: 69443 - protein, 9 aa, synthetic construct
  source 1..9: note = Seed: LVVVGAVGV (KRAS G12V)
YVVTGPVGD

SEQ ID NO: 69444 - protein, 9 aa, synthetic construct
  source 1..9: note = Seed: LVVVGAVGV (KRAS G12V)
YVVTGPVGE

SEQ ID NO: 69445 - protein, 9 aa, synthetic construct
  source 1..9: note = Seed: LVVVGAVGV (KRAS G12V)
YVVTGPVGF

SEQ ID NO: 69446 - protein, 9 aa, synthetic construct
  source 1..9: note = Seed: LVVVGAVGV (KRAS G12V)
YVVTGPVGG

SEQ ID NO: 69447 - protein, 9 aa, synthetic construct
  source 1..9: note = Seed: LVVVGAVGV (KRAS G12V)
YVVTGPVGH

SEQ ID NO: 69448 - protein, 9 aa, synthetic construct
  source 1..9: note = Seed: LVVVGAVGV (KRAS G12V)
YVVTGPVGI

SEQ ID NO: 69449 - protein, 9 aa, synthetic construct
  source 1..9: note = Seed: LVVVGAVGV (KRAS G12V)
YVVTGPVGK

SEQ ID NO: 69450 - protein, 9 aa, synthetic construct
  source 1..9: note = Seed: LVVVGAVGV (KRAS G12V)
YVVTGPVGL

SEQ ID NO: 69451 - protein, 9 aa, synthetic construct
  source 1..9: note = Seed: LVVVGAVGV (KRAS G12V)
YVVTGPVGM

SEQ ID NO: 69452 - protein, 9 aa, synthetic construct
  source 1..9: note = Seed: LVVVGAVGV (KRAS G12V)
YVVTGPVGN

SEQ ID NO: 69453 - protein, 9 aa, synthetic construct
  source 1..9: note = Seed: LVVVGAVGV (KRAS G12V)
YVVTGPVGP

SEQ ID NO: 69454 - protein, 9 aa, synthetic construct
  source 1..9: note = Seed: LVVVGAVGV (KRAS G12V)
YVVTGPVGQ

SEQ ID NO: 69455 - protein, 9 aa, synthetic construct
  source 1..9: note = Seed: LVVVGAVGV (KRAS G12V)
YVVTGPVGR

SEQ ID NO: 69456 - protein, 9 aa, synthetic construct
  source 1..9: note = Seed: LVVVGAVGV (KRAS G12V)
YVVTGPVGS

SEQ ID NO: 69457 - protein, 9 aa, synthetic construct
  source 1..9: note = Seed: LVVVGAVGV (KRAS G12V)
YVVTGPVGT

SEQ ID NO: 69458 - protein, 9 aa, synthetic construct
  source 1..9: note = Seed: LVVVGAVGV (KRAS G12V)
YVVTGPVGV

SEQ ID NO: 69459 - protein, 9 aa, synthetic construct
  source 1..9: note = Seed: LVVVGAVGV (KRAS G12V)
YVVTGPVGW

SEQ ID NO: 69460 - protein, 9 aa, synthetic construct
  source 1..9: note = Seed: LVVVGAVGV (KRAS G12V)
YVVTGPVGY

SEQ ID NO: 69461 - protein, 9 aa, synthetic construct
  source 1..9: note = Seed: LVVVGAVGV (KRAS G12V)
YVVTGQVGA

SEQ ID NO: 69462 - protein, 9 aa, synthetic construct
  source 1..9: note = Seed: LVVVGAVGV (KRAS G12V)
YVVTGQVGF

SEQ ID NO: 69463 - protein, 9 aa, synthetic construct
  source 1..9: note = Seed: LVVVGAVGV (KRAS G12V)
YVVTGQVGG

SEQ ID NO: 69464 - protein, 9 aa, synthetic construct
  source 1..9: note = Seed: LVVVGAVGV (KRAS G12V)
YVVTGQVGI

SEQ ID NO: 69465 - protein, 9 aa, synthetic construct
  source 1..9: note = Seed: LVVVGAVGV (KRAS G12V)
YVVTGQVGL

SEQ ID NO: 69466 - protein, 9 aa, synthetic construct
  source 1..9: note = Seed: LVVVGAVGV (KRAS G12V)
YVVTGQVGM

SEQ ID NO: 69467 - protein, 9 aa, synthetic construct
  source 1..9: note = Seed: LVVVGAVGV (KRAS G12V)
YVVTGQVGN

SEQ ID NO: 69468 - protein, 9 aa, synthetic construct
  source 1..9: note = Seed: LVVVGAVGV (KRAS G12V)
YVVTGQVGQ

SEQ ID NO: 69469 - protein, 9 aa, synthetic construct
  source 1..9: note = Seed: LVVVGAVGV (KRAS G12V)
YVVTGQVGS

SEQ ID NO: 69470 - protein, 9 aa, synthetic construct
  source 1..9: note = Seed: LVVVGAVGV (KRAS G12V)
YVVTGQVGT

SEQ ID NO: 69471 - protein, 9 aa, synthetic construct
  source 1..9: note = Seed: LVVVGAVGV (KRAS G12V)
YVVTGQVGV

SEQ ID NO: 69472 - protein, 9 aa, synthetic construct
  source 1..9: note = Seed: LVVVGAVGV (KRAS G12V)
YVVTGQVGY

SEQ ID NO: 69473 - protein, 9 aa, synthetic construct
  source 1..9: note = Seed: LVVVGAVGV (KRAS G12V)
YVVTGRVGA

SEQ ID NO: 69474 - protein, 9 aa, synthetic construct
  source 1..9: note = Seed: LVVVGAVGV (KRAS G12V)
YVVTGRVGC

SEQ ID NO: 69475 - protein, 9 aa, synthetic construct
  source 1..9: note = Seed: LVVVGAVGV (KRAS G12V)
YVVTGRVGF

SEQ ID NO: 69476 - protein, 9 aa, synthetic construct
  source 1..9: note = Seed: LVVVGAVGV (KRAS G12V)
YVVTGRVGG

SEQ ID NO: 69477 - protein, 9 aa, synthetic construct
  source 1..9: note = Seed: LVVVGAVGV (KRAS G12V)
YVVTGRVGH

SEQ ID NO: 69478 - protein, 9 aa, synthetic construct
  source 1..9: note = Seed: LVVVGAVGV (KRAS G12V)
YVVTGRVGI

SEQ ID NO: 69479 - protein, 9 aa, synthetic construct
  source 1..9: note = Seed: LVVVGAVGV (KRAS G12V)
YVVTGRVGK

SEQ ID NO: 69480 - protein, 9 aa, synthetic construct
  source 1..9: note = Seed: LVVVGAVGV (KRAS G12V)
YVVTGRVGL

SEQ ID NO: 69481 - protein, 9 aa, synthetic construct
  source 1..9: note = Seed: LVVVGAVGV (KRAS G12V)
YVVTGRVGM

SEQ ID NO: 69482 - protein, 9 aa, synthetic construct
  source 1..9: note = Seed: LVVVGAVGV (KRAS G12V)
YVVTGRVGN

SEQ ID NO: 69483 - protein, 9 aa, synthetic construct
  source 1..9: note = Seed: LVVVGAVGV (KRAS G12V)
YVVTGRVGP

SEQ ID NO: 69484 - protein, 9 aa, synthetic construct
  source 1..9: note = Seed: LVVVGAVGV (KRAS G12V)
YVVTGRVGQ

SEQ ID NO: 69485 - protein, 9 aa, synthetic construct
  source 1..9: note = Seed: LVVVGAVGV (KRAS G12V)
YVVTGRVGR

SEQ ID NO: 69486 - protein, 9 aa, synthetic construct
  source 1..9: note = Seed: LVVVGAVGV (KRAS G12V)
YVVTGRVGS

SEQ ID NO: 69487 - protein, 9 aa, synthetic construct
  source 1..9: note = Seed: LVVVGAVGV (KRAS G12V)
YVVTGRVGT

SEQ ID NO: 69488 - protein, 9 aa, synthetic construct
  source 1..9: note = Seed: LVVVGAVGV (KRAS G12V)
YVVTGRVGV

SEQ ID NO: 69489 - protein, 9 aa, synthetic construct
  source 1..9: note = Seed: LVVVGAVGV (KRAS G12V)
YVVTGRVGY

SEQ ID NO: 69490 - protein, 9 aa, synthetic construct
  source 1..9: note = Seed: LVVVGAVGV (KRAS G12V)
YVVTGSVGA

SEQ ID NO: 69491 - protein, 9 aa, synthetic construct
  source 1..9: note = Seed: LVVVGAVGV (KRAS G12V)
YVVTGSVGC

SEQ ID NO: 69492 - protein, 9 aa, synthetic construct
  source 1..9: note = Seed: LVVVGAVGV (KRAS G12V)
YVVTGSVGD

SEQ ID NO: 69493 - protein, 9 aa, synthetic construct
  source 1..9: note = Seed: LVVVGAVGV (KRAS G12V)
YVVTGSVGE

SEQ ID NO: 69494 - protein, 9 aa, synthetic construct
  source 1..9: note = Seed: LVVVGAVGV (KRAS G12V)
YVVTGSVGF

SEQ ID NO: 69495 - protein, 9 aa, synthetic construct
  source 1..9: note = Seed: LVVVGAVGV (KRAS G12V)
YVVTGSVGG

SEQ ID NO: 69496 - protein, 9 aa, synthetic construct
  source 1..9: note = Seed: LVVVGAVGV (KRAS G12V)
YVVTGSVGH

SEQ ID NO: 69497 - protein, 9 aa, synthetic construct
  source 1..9: note = Seed: LVVVGAVGV (KRAS G12V)
YVVTGSVGI

SEQ ID NO: 69498 - protein, 9 aa, synthetic construct
  source 1..9: note = Seed: LVVVGAVGV (KRAS G12V)
YVVTGSVGK

SEQ ID NO: 69499 - protein, 9 aa, synthetic construct
  source 1..9: note = Seed: LVVVGAVGV (KRAS G12V)
YVVTGSVGL

SEQ ID NO: 69500 - protein, 9 aa, synthetic construct
  source 1..9: note = Seed: LVVVGAVGV (KRAS G12V)
YVVTGSVGM

SEQ ID NO: 69501 - protein, 9 aa, synthetic construct
  source 1..9: note = Seed: LVVVGAVGV (KRAS G12V)
YVVTGSVGN

SEQ ID NO: 69502 - protein, 9 aa, synthetic construct
  source 1..9: note = Seed: LVVVGAVGV (KRAS G12V)
YVVTGSVGP

SEQ ID NO: 69503 - protein, 9 aa, synthetic construct
  source 1..9: note = Seed: LVVVGAVGV (KRAS G12V)
YVVTGSVGQ

SEQ ID NO: 69504 - protein, 9 aa, synthetic construct
  source 1..9: note = Seed: LVVVGAVGV (KRAS G12V)
YVVTGSVGR

SEQ ID NO: 69505 - protein, 9 aa, synthetic construct
  source 1..9: note = Seed: LVVVGAVGV (KRAS G12V)
YVVTGSVGS

SEQ ID NO: 69506 - protein, 9 aa, synthetic construct
  source 1..9: note = Seed: LVVVGAVGV (KRAS G12V)
YVVTGSVGT

SEQ ID NO: 69507 - protein, 9 aa, synthetic construct
  source 1..9: note = Seed: LVVVGAVGV (KRAS G12V)
YVVTGSVGV

SEQ ID NO: 69508 - protein, 9 aa, synthetic construct
  source 1..9: note = Seed: LVVVGAVGV (KRAS G12V)
YVVTGSVGW

SEQ ID NO: 69509 - protein, 9 aa, synthetic construct
  source 1..9: note = Seed: LVVVGAVGV (KRAS G12V)
YVVTGSVGY

SEQ ID NO: 69510 - protein, 9 aa, synthetic construct
  source 1..9: note = Seed: LVVVGAVGV (KRAS G12V)
YVVTGTVGA

SEQ ID NO: 69511 - protein, 9 aa, synthetic construct
  source 1..9: note = Seed: LVVVGAVGV (KRAS G12V)
YVVTGTVGC

SEQ ID NO: 69512 - protein, 9 aa, synthetic construct
  source 1..9: note = Seed: LVVVGAVGV (KRAS G12V)
YVVTGTVGD

SEQ ID NO: 69513 - protein, 9 aa, synthetic construct
  source 1..9: note = Seed: LVVVGAVGV (KRAS G12V)
YVVTGTVGE

SEQ ID NO: 69514 - protein, 9 aa, synthetic construct
  source 1..9: note = Seed: LVVVGAVGV (KRAS G12V)
YVVTGTVGF

SEQ ID NO: 69515 - protein, 9 aa, synthetic construct
  source 1..9: note = Seed: LVVVGAVGV (KRAS G12V)
YVVTGTVGG

SEQ ID NO: 69516 - protein, 9 aa, synthetic construct
  source 1..9: note = Seed: LVVVGAVGV (KRAS G12V)
YVVTGTVGH

SEQ ID NO: 69517 - protein, 9 aa, synthetic construct
  source 1..9: note = Seed: LVVVGAVGV (KRAS G12V)
YVVTGTVGI

SEQ ID NO: 69518 - protein, 9 aa, synthetic construct
  source 1..9: note = Seed: LVVVGAVGV (KRAS G12V)
YVVTGTVGK

SEQ ID NO: 69519 - protein, 9 aa, synthetic construct
  source 1..9: note = Seed: LVVVGAVGV (KRAS G12V)
YVVTGTVGL

SEQ ID NO: 69520 - protein, 9 aa, synthetic construct
  source 1..9: note = Seed: LVVVGAVGV (KRAS G12V)
YVVTGTVGM

SEQ ID NO: 69521 - protein, 9 aa, synthetic construct
  source 1..9: note = Seed: LVVVGAVGV (KRAS G12V)
YVVTGTVGN

SEQ ID NO: 69522 - protein, 9 aa, synthetic construct
  source 1..9: note = Seed: LVVVGAVGV (KRAS G12V)
YVVTGTVGP

SEQ ID NO: 69523 - protein, 9 aa, synthetic construct
  source 1..9: note = Seed: LVVVGAVGV (KRAS G12V)
YVVTGTVGQ

SEQ ID NO: 69524 - protein, 9 aa, synthetic construct
  source 1..9: note = Seed: LVVVGAVGV (KRAS G12V)
YVVTGTVGR

SEQ ID NO: 69525 - protein, 9 aa, synthetic construct
  source 1..9: note = Seed: LVVVGAVGV (KRAS G12V)
YVVTGTVGS

SEQ ID NO: 69526 - protein, 9 aa, synthetic construct
  source 1..9: note = Seed: LVVVGAVGV (KRAS G12V)
YVVTGTVGT

SEQ ID NO: 69527 - protein, 9 aa, synthetic construct
  source 1..9: note = Seed: LVVVGAVGV (KRAS G12V)
YVVTGTVGV

SEQ ID NO: 69528 - protein, 9 aa, synthetic construct
  source 1..9: note = Seed: LVVVGAVGV (KRAS G12V)
YVVTGTVGW

SEQ ID NO: 69529 - protein, 9 aa, synthetic construct
  source 1..9: note = Seed: LVVVGAVGV (KRAS G12V)
YVVTGTVGY

SEQ ID NO: 69530 - protein, 9 aa, synthetic construct
  source 1..9: note = Seed: LVVVGAVGV (KRAS G12V)
YVVTGVVGA

SEQ ID NO: 69531 - protein, 9 aa, synthetic construct
  source 1..9: note = Seed: LVVVGAVGV (KRAS G12V)
YVVTGVVGC

SEQ ID NO: 69532 - protein, 9 aa, synthetic construct
  source 1..9: note = Seed: LVVVGAVGV (KRAS G12V)
YVVTGVVGD

SEQ ID NO: 69533 - protein, 9 aa, synthetic construct
  source 1..9: note = Seed: LVVVGAVGV (KRAS G12V)
YVVTGVVGE

SEQ ID NO: 69534 - protein, 9 aa, synthetic construct
  source 1..9: note = Seed: LVVVGAVGV (KRAS G12V)
YVVTGVVGF

SEQ ID NO: 69535 - protein, 9 aa, synthetic construct
  source 1..9: note = Seed: LVVVGAVGV (KRAS G12V)
YVVTGVVGG

SEQ ID NO: 69536 - protein, 9 aa, synthetic construct
  source 1..9: note = Seed: LVVVGAVGV (KRAS G12V)
YVVTGVVGH

SEQ ID NO: 69537 - protein, 9 aa, synthetic construct
  source 1..9: note = Seed: LVVVGAVGV (KRAS G12V)
YVVTGVVGI

SEQ ID NO: 69538 - protein, 9 aa, synthetic construct
  source 1..9: note = Seed: LVVVGAVGV (KRAS G12V)
YVVTGVVGK

SEQ ID NO: 69539 - protein, 9 aa, synthetic construct
  source 1..9: note = Seed: LVVVGAVGV (KRAS G12V)
YVVTGVVGL

SEQ ID NO: 69540 - protein, 9 aa, synthetic construct
  source 1..9: note = Seed: LVVVGAVGV (KRAS G12V)
YVVTGVVGM

SEQ ID NO: 69541 - protein, 9 aa, synthetic construct
  source 1..9: note = Seed: LVVVGAVGV (KRAS G12V)
YVVTGVVGN

SEQ ID NO: 69542 - protein, 9 aa, synthetic construct
  source 1..9: note = Seed: LVVVGAVGV (KRAS G12V)
YVVTGVVGP

SEQ ID NO: 69543 - protein, 9 aa, synthetic construct
  source 1..9: note = Seed: LVVVGAVGV (KRAS G12V)
YVVTGVVGQ

SEQ ID NO: 69544 - protein, 9 aa, synthetic construct
  source 1..9: note = Seed: LVVVGAVGV (KRAS G12V)
YVVTGVVGR

SEQ ID NO: 69545 - protein, 9 aa, synthetic construct
  source 1..9: note = Seed: LVVVGAVGV (KRAS G12V)
YVVTGVVGS

SEQ ID NO: 69546 - protein, 9 aa, synthetic construct
  source 1..9: note = Seed: LVVVGAVGV (KRAS G12V)
YVVTGVVGT

SEQ ID NO: 69547 - protein, 9 aa, synthetic construct
  source 1..9: note = Seed: LVVVGAVGV (KRAS G12V)
YVVTGVVGV

SEQ ID NO: 69548 - protein, 9 aa, synthetic construct
  source 1..9: note = Seed: LVVVGAVGV (KRAS G12V)
YVVTGVVGY

SEQ ID NO: 69549 - protein, 9 aa, synthetic construct
  source 1..9: note = Seed: LVVVGAVGV (KRAS G12V)
YVVTGWVGA

SEQ ID NO: 69550 - protein, 9 aa, synthetic construct
  source 1..9: note = Seed: LVVVGAVGV (KRAS G12V)
YVVTGWVGF

SEQ ID NO: 69551 - protein, 9 aa, synthetic construct
  source 1..9: note = Seed: LVVVGAVGV (KRAS G12V)
YVVTGWVGI

SEQ ID NO: 69552 - protein, 9 aa, synthetic construct
  source 1..9: note = Seed: LVVVGAVGV (KRAS G12V)
YVVTGWVGL

SEQ ID NO: 69553 - protein, 9 aa, synthetic construct
  source 1..9: note = Seed: LVVVGAVGV (KRAS G12V)
YVVTGWVGM

SEQ ID NO: 69554 - protein, 9 aa, synthetic construct
  source 1..9: note = Seed: LVVVGAVGV (KRAS G12V)
YVVTGWVGN

SEQ ID NO: 69555 - protein, 9 aa, synthetic construct
  source 1..9: note = Seed: LVVVGAVGV (KRAS G12V)
YVVTGWVGS

SEQ ID NO: 69556 - protein, 9 aa, synthetic construct
  source 1..9: note = Seed: LVVVGAVGV (KRAS G12V)
YVVTGWVGT

SEQ ID NO: 69557 - protein, 9 aa, synthetic construct
  source 1..9: note = Seed: LVVVGAVGV (KRAS G12V)
YVVTGWVGV

SEQ ID NO: 69558 - protein, 9 aa, synthetic construct
  source 1..9: note = Seed: LVVVGAVGV (KRAS G12V)
YVVTGWVGY

SEQ ID NO: 69559 - protein, 9 aa, synthetic construct
  source 1..9: note = Seed: LVVVGAVGV (KRAS G12V)
YVVTGYVGA

SEQ ID NO: 69560 - protein, 9 aa, synthetic construct
  source 1..9: note = Seed: LVVVGAVGV (KRAS G12V)
YVVTGYVGC

SEQ ID NO: 69561 - protein, 9 aa, synthetic construct
  source 1..9: note = Seed: LVVVGAVGV (KRAS G12V)
YVVTGYVGF

SEQ ID NO: 69562 - protein, 9 aa, synthetic construct
  source 1..9: note = Seed: LVVVGAVGV (KRAS G12V)
YVVTGYVGI

SEQ ID NO: 69563 - protein, 9 aa, synthetic construct
  source 1..9: note = Seed: LVVVGAVGV (KRAS G12V)
YVVTGYVGL

SEQ ID NO: 69564 - protein, 9 aa, synthetic construct
  source 1..9: note = Seed: LVVVGAVGV (KRAS G12V)
YVVTGYVGM

SEQ ID NO: 69565 - protein, 9 aa, synthetic construct
  source 1..9: note = Seed: LVVVGAVGV (KRAS G12V)
YVVTGYVGV

SEQ ID NO: 69566 - protein, 9 aa, synthetic construct
  source 1..9: note = Seed: LVVVGAVGV (KRAS G12V)
YVVVGAVGA

SEQ ID NO: 69567 - protein, 9 aa, synthetic construct
  source 1..9: note = Seed: LVVVGAVGV (KRAS G12V)
YVVVGAVGC

SEQ ID NO: 69568 - protein, 9 aa, synthetic construct
  source 1..9: note = Seed: LVVVGAVGV (KRAS G12V)
YVVVGAVGD

SEQ ID NO: 69569 - protein, 9 aa, synthetic construct
  source 1..9: note = Seed: LVVVGAVGV (KRAS G12V)
YVVVGAVGE

SEQ ID NO: 69570 - protein, 9 aa, synthetic construct
  source 1..9: note = Seed: LVVVGAVGV (KRAS G12V)
YVVVGAVGF

SEQ ID NO: 69571 - protein, 9 aa, synthetic construct
  source 1..9: note = Seed: LVVVGAVGV (KRAS G12V)
YVVVGAVGG

SEQ ID NO: 69572 - protein, 9 aa, synthetic construct
  source 1..9: note = Seed: LVVVGAVGV (KRAS G12V)
YVVVGAVGH

SEQ ID NO: 69573 - protein, 9 aa, synthetic construct
  source 1..9: note = Seed: LVVVGAVGV (KRAS G12V)
YVVVGAVGI

SEQ ID NO: 69574 - protein, 9 aa, synthetic construct
  source 1..9: note = Seed: LVVVGAVGV (KRAS G12V)
YVVVGAVGK

SEQ ID NO: 69575 - protein, 9 aa, synthetic construct
  source 1..9: note = Seed: LVVVGAVGV (KRAS G12V)
YVVVGAVGL

SEQ ID NO: 69576 - protein, 9 aa, synthetic construct
  source 1..9: note = Seed: LVVVGAVGV (KRAS G12V)
YVVVGAVGM

SEQ ID NO: 69577 - protein, 9 aa, synthetic construct
  source 1..9: note = Seed: LVVVGAVGV (KRAS G12V)
YVVVGAVGN

SEQ ID NO: 69578 - protein, 9 aa, synthetic construct
  source 1..9: note = Seed: LVVVGAVGV (KRAS G12V)
YVVVGAVGP

SEQ ID NO: 69579 - protein, 9 aa, synthetic construct
  source 1..9: note = Seed: LVVVGAVGV (KRAS G12V)
YVVVGAVGQ

SEQ ID NO: 69580 - protein, 9 aa, synthetic construct
  source 1..9: note = Seed: LVVVGAVGV (KRAS G12V)
YVVVGAVGR

SEQ ID NO: 69581 - protein, 9 aa, synthetic construct
  source 1..9: note = Seed: LVVVGAVGV (KRAS G12V)
YVVVGAVGS

SEQ ID NO: 69582 - protein, 9 aa, synthetic construct
  source 1..9: note = Seed: LVVVGAVGV (KRAS G12V)
YVVVGAVGT

SEQ ID NO: 69583 - protein, 9 aa, synthetic construct
  source 1..9: note = Seed: LVVVGAVGV (KRAS G12V)
YVVVGAVGV

SEQ ID NO: 69584 - protein, 9 aa, synthetic construct
  source 1..9: note = Seed: LVVVGAVGV (KRAS G12V)
YVVVGAVGW

SEQ ID NO: 69585 - protein, 9 aa, synthetic construct
  source 1..9: note = Seed: LVVVGAVGV (KRAS G12V)
YVVVGAVGY

SEQ ID NO: 69586 - protein, 9 aa, synthetic construct
  source 1..9: note = Seed: LVVVGAVGV (KRAS G12V)
YVVVGCVGA

SEQ ID NO: 69587 - protein, 9 aa, synthetic construct
  source 1..9: note = Seed: LVVVGAVGV (KRAS G12V)
YVVVGCVGI

SEQ ID NO: 69588 - protein, 9 aa, synthetic construct
  source 1..9: note = Seed: LVVVGAVGV (KRAS G12V)
YVVVGCVGK

SEQ ID NO: 69589 - protein, 9 aa, synthetic construct
  source 1..9: note = Seed: LVVVGAVGV (KRAS G12V)
YVVVGCVGL

SEQ ID NO: 69590 - protein, 9 aa, synthetic construct
  source 1..9: note = Seed: LVVVGAVGV (KRAS G12V)
YVVVGCVGM

SEQ ID NO: 69591 - protein, 9 aa, synthetic construct
  source 1..9: note = Seed: LVVVGAVGV (KRAS G12V)
YVVVGCVGN

SEQ ID NO: 69592 - protein, 9 aa, synthetic construct
  source 1..9: note = Seed: LVVVGAVGV (KRAS G12V)
YVVVGCVGR

SEQ ID NO: 69593 - protein, 9 aa, synthetic construct
  source 1..9: note = Seed: LVVVGAVGV (KRAS G12V)
YVVVGCVGS

SEQ ID NO: 69594 - protein, 9 aa, synthetic construct
  source 1..9: note = Seed: LVVVGAVGV (KRAS G12V)
YVVVGCVGT

SEQ ID NO: 69595 - protein, 9 aa, synthetic construct
  source 1..9: note = Seed: LVVVGAVGV (KRAS G12V)
YVVVGCVGV

SEQ ID NO: 69596 - protein, 9 aa, synthetic construct
  source 1..9: note = Seed: LVVVGAVGV (KRAS G12V)
YVVVGDVGA

SEQ ID NO: 69597 - protein, 9 aa, synthetic construct
  source 1..9: note = Seed: LVVVGAVGV (KRAS G12V)
YVVVGDVGH

SEQ ID NO: 69598 - protein, 9 aa, synthetic construct
  source 1..9: note = Seed: LVVVGAVGV (KRAS G12V)
YVVVGDVGI

SEQ ID NO: 69599 - protein, 9 aa, synthetic construct
  source 1..9: note = Seed: LVVVGAVGV (KRAS G12V)
YVVVGDVGL

SEQ ID NO: 69600 - protein, 9 aa, synthetic construct
  source 1..9: note = Seed: LVVVGAVGV (KRAS G12V)
YVVVGDVGM

SEQ ID NO: 69601 - protein, 9 aa, synthetic construct
  source 1..9: note = Seed: LVVVGAVGV (KRAS G12V)
YVVVGDVGN

SEQ ID NO: 69602 - protein, 9 aa, synthetic construct
  source 1..9: note = Seed: LVVVGAVGV (KRAS G12V)
YVVVGDVGS

SEQ ID NO: 69603 - protein, 9 aa, synthetic construct
  source 1..9: note = Seed: LVVVGAVGV (KRAS G12V)
YVVVGDVGT

SEQ ID NO: 69604 - protein, 9 aa, synthetic construct
  source 1..9: note = Seed: LVVVGAVGV (KRAS G12V)
YVVVGDVGV

SEQ ID NO: 69605 - protein, 9 aa, synthetic construct
  source 1..9: note = Seed: LVVVGAVGV (KRAS G12V)
YVVVGEVGA

SEQ ID NO: 69606 - protein, 9 aa, synthetic construct
  source 1..9: note = Seed: LVVVGAVGV (KRAS G12V)
YVVVGEVGG

SEQ ID NO: 69607 - protein, 9 aa, synthetic construct
  source 1..9: note = Seed: LVVVGAVGV (KRAS G12V)
YVVVGEVGH

SEQ ID NO: 69608 - protein, 9 aa, synthetic construct
  source 1..9: note = Seed: LVVVGAVGV (KRAS G12V)
YVVVGEVGI

SEQ ID NO: 69609 - protein, 9 aa, synthetic construct
  source 1..9: note = Seed: LVVVGAVGV (KRAS G12V)
YVVVGEVGL

SEQ ID NO: 69610 - protein, 9 aa, synthetic construct
  source 1..9: note = Seed: LVVVGAVGV (KRAS G12V)
YVVVGEVGM

SEQ ID NO: 69611 - protein, 9 aa, synthetic construct
  source 1..9: note = Seed: LVVVGAVGV (KRAS G12V)
YVVVGEVGN

SEQ ID NO: 69612 - protein, 9 aa, synthetic construct
  source 1..9: note = Seed: LVVVGAVGV (KRAS G12V)
YVVVGEVGS

SEQ ID NO: 69613 - protein, 9 aa, synthetic construct
  source 1..9: note = Seed: LVVVGAVGV (KRAS G12V)
YVVVGEVGT

SEQ ID NO: 69614 - protein, 9 aa, synthetic construct
  source 1..9: note = Seed: LVVVGAVGV (KRAS G12V)
YVVVGEVGV

SEQ ID NO: 69615 - protein, 9 aa, synthetic construct
  source 1..9: note = Seed: LVVVGAVGV (KRAS G12V)
YVVVGFVGH

SEQ ID NO: 69616 - protein, 9 aa, synthetic construct
  source 1..9: note = Seed: LVVVGAVGV (KRAS G12V)
YVVVGGVGA

SEQ ID NO: 69617 - protein, 9 aa, synthetic construct
  source 1..9: note = Seed: LVVVGAVGV (KRAS G12V)
YVVVGGVGC

SEQ ID NO: 69618 - protein, 9 aa, synthetic construct
  source 1..9: note = Seed: LVVVGAVGV (KRAS G12V)
YVVVGGVGD

SEQ ID NO: 69619 - protein, 9 aa, synthetic construct
  source 1..9: note = Seed: LVVVGAVGV (KRAS G12V)
YVVVGGVGE

SEQ ID NO: 69620 - protein, 9 aa, synthetic construct
  source 1..9: note = Seed: LVVVGAVGV (KRAS G12V)
YVVVGGVGF

SEQ ID NO: 69621 - protein, 9 aa, synthetic construct
  source 1..9: note = Seed: LVVVGAVGV (KRAS G12V)
YVVVGGVGG

SEQ ID NO: 69622 - protein, 9 aa, synthetic construct
  source 1..9: note = Seed: LVVVGAVGV (KRAS G12V)
YVVVGGVGH

SEQ ID NO: 69623 - protein, 9 aa, synthetic construct
  source 1..9: note = Seed: LVVVGAVGV (KRAS G12V)
YVVVGGVGI

SEQ ID NO: 69624 - protein, 9 aa, synthetic construct
  source 1..9: note = Seed: LVVVGAVGV (KRAS G12V)
YVVVGGVGK

SEQ ID NO: 69625 - protein, 9 aa, synthetic construct
  source 1..9: note = Seed: LVVVGAVGV (KRAS G12V)
YVVVGGVGL

SEQ ID NO: 69626 - protein, 9 aa, synthetic construct
  source 1..9: note = Seed: LVVVGAVGV (KRAS G12V)
YVVVGGVGM

SEQ ID NO: 69627 - protein, 9 aa, synthetic construct
  source 1..9: note = Seed: LVVVGAVGV (KRAS G12V)
YVVVGGVGN

SEQ ID NO: 69628 - protein, 9 aa, synthetic construct
  source 1..9: note = Seed: LVVVGAVGV (KRAS G12V)
YVVVGGVGP

SEQ ID NO: 69629 - protein, 9 aa, synthetic construct
  source 1..9: note = Seed: LVVVGAVGV (KRAS G12V)
YVVVGGVGQ

SEQ ID NO: 69630 - protein, 9 aa, synthetic construct
  source 1..9: note = Seed: LVVVGAVGV (KRAS G12V)
YVVVGGVGR

SEQ ID NO: 69631 - protein, 9 aa, synthetic construct
  source 1..9: note = Seed: LVVVGAVGV (KRAS G12V)
YVVVGGVGS

SEQ ID NO: 69632 - protein, 9 aa, synthetic construct
  source 1..9: note = Seed: LVVVGAVGV (KRAS G12V)
YVVVGGVGT

SEQ ID NO: 69633 - protein, 9 aa, synthetic construct
  source 1..9: note = Seed: LVVVGAVGV (KRAS G12V)
YVVVGGVGV

SEQ ID NO: 69634 - protein, 9 aa, synthetic construct
  source 1..9: note = Seed: LVVVGAVGV (KRAS G12V)
YVVVGGVGY

SEQ ID NO: 69635 - protein, 9 aa, synthetic construct
  source 1..9: note = Seed: LVVVGAVGV (KRAS G12V)
YVVVGHVGA

SEQ ID NO: 69636 - protein, 9 aa, synthetic construct
  source 1..9: note = Seed: LVVVGAVGV (KRAS G12V)
YVVVGHVGC

SEQ ID NO: 69637 - protein, 9 aa, synthetic construct
  source 1..9: note = Seed: LVVVGAVGV (KRAS G12V)
YVVVGHVGD

SEQ ID NO: 69638 - protein, 9 aa, synthetic construct
  source 1..9: note = Seed: LVVVGAVGV (KRAS G12V)
YVVVGHVGE

SEQ ID NO: 69639 - protein, 9 aa, synthetic construct
  source 1..9: note = Seed: LVVVGAVGV (KRAS G12V)
YVVVGHVGF

SEQ ID NO: 69640 - protein, 9 aa, synthetic construct
  source 1..9: note = Seed: LVVVGAVGV (KRAS G12V)
YVVVGHVGG

SEQ ID NO: 69641 - protein, 9 aa, synthetic construct
  source 1..9: note = Seed: LVVVGAVGV (KRAS G12V)
YVVVGHVGH

SEQ ID NO: 69642 - protein, 9 aa, synthetic construct
  source 1..9: note = Seed: LVVVGAVGV (KRAS G12V)
YVVVGHVGI

SEQ ID NO: 69643 - protein, 9 aa, synthetic construct
  source 1..9: note = Seed: LVVVGAVGV (KRAS G12V)
YVVVGHVGL

SEQ ID NO: 69644 - protein, 9 aa, synthetic construct
  source 1..9: note = Seed: LVVVGAVGV (KRAS G12V)
YVVVGHVGM

SEQ ID NO: 69645 - protein, 9 aa, synthetic construct
  source 1..9: note = Seed: LVVVGAVGV (KRAS G12V)
YVVVGHVGN

SEQ ID NO: 69646 - protein, 9 aa, synthetic construct
  source 1..9: note = Seed: LVVVGAVGV (KRAS G12V)
YVVVGHVGQ

SEQ ID NO: 69647 - protein, 9 aa, synthetic construct
  source 1..9: note = Seed: LVVVGAVGV (KRAS G12V)
YVVVGHVGR

SEQ ID NO: 69648 - protein, 9 aa, synthetic construct
  source 1..9: note = Seed: LVVVGAVGV (KRAS G12V)
YVVVGHVGS

SEQ ID NO: 69649 - protein, 9 aa, synthetic construct
  source 1..9: note = Seed: LVVVGAVGV (KRAS G12V)
YVVVGHVGT

SEQ ID NO: 69650 - protein, 9 aa, synthetic construct
  source 1..9: note = Seed: LVVVGAVGV (KRAS G12V)
YVVVGHVGV

SEQ ID NO: 69651 - protein, 9 aa, synthetic construct
  source 1..9: note = Seed: LVVVGAVGV (KRAS G12V)
YVVVGHVGY

SEQ ID NO: 69652 - protein, 9 aa, synthetic construct
  source 1..9: note = Seed: LVVVGAVGV (KRAS G12V)
YVVVGIVGA

SEQ ID NO: 69653 - protein, 9 aa, synthetic construct
  source 1..9: note = Seed: LVVVGAVGV (KRAS G12V)
YVVVGIVGD

SEQ ID NO: 69654 - protein, 9 aa, synthetic construct
  source 1..9: note = Seed: LVVVGAVGV (KRAS G12V)
YVVVGIVGE

SEQ ID NO: 69655 - protein, 9 aa, synthetic construct
  source 1..9: note = Seed: LVVVGAVGV (KRAS G12V)
YVVVGIVGG

SEQ ID NO: 69656 - protein, 9 aa, synthetic construct
  source 1..9: note = Seed: LVVVGAVGV (KRAS G12V)
YVVVGIVGH

SEQ ID NO: 69657 - protein, 9 aa, synthetic construct
  source 1..9: note = Seed: LVVVGAVGV (KRAS G12V)
YVVVGIVGI

SEQ ID NO: 69658 - protein, 9 aa, synthetic construct
  source 1..9: note = Seed: LVVVGAVGV (KRAS G12V)
YVVVGIVGK

SEQ ID NO: 69659 - protein, 9 aa, synthetic construct
  source 1..9: note = Seed: LVVVGAVGV (KRAS G12V)
YVVVGIVGL

SEQ ID NO: 69660 - protein, 9 aa, synthetic construct
  source 1..9: note = Seed: LVVVGAVGV (KRAS G12V)
YVVVGIVGM

SEQ ID NO: 69661 - protein, 9 aa, synthetic construct
  source 1..9: note = Seed: LVVVGAVGV (KRAS G12V)
YVVVGIVGN

SEQ ID NO: 69662 - protein, 9 aa, synthetic construct
  source 1..9: note = Seed: LVVVGAVGV (KRAS G12V)
YVVVGIVGP

SEQ ID NO: 69663 - protein, 9 aa, synthetic construct
  source 1..9: note = Seed: LVVVGAVGV (KRAS G12V)
YVVVGIVGQ

SEQ ID NO: 69664 - protein, 9 aa, synthetic construct
  source 1..9: note = Seed: LVVVGAVGV (KRAS G12V)
YVVVGIVGR

SEQ ID NO: 69665 - protein, 9 aa, synthetic construct
  source 1..9: note = Seed: LVVVGAVGV (KRAS G12V)
YVVVGIVGS

SEQ ID NO: 69666 - protein, 9 aa, synthetic construct
  source 1..9: note = Seed: LVVVGAVGV (KRAS G12V)
YVVVGIVGT

SEQ ID NO: 69667 - protein, 9 aa, synthetic construct
  source 1..9: note = Seed: LVVVGAVGV (KRAS G12V)
YVVVGIVGV

SEQ ID NO: 69668 - protein, 9 aa, synthetic construct
  source 1..9: note = Seed: LVVVGAVGV (KRAS G12V)
YVVVGIVGY

SEQ ID NO: 69669 - protein, 9 aa, synthetic construct
  source 1..9: note = Seed: LVVVGAVGV (KRAS G12V)
YVVVGKVGA

SEQ ID NO: 69670 - protein, 9 aa, synthetic construct
  source 1..9: note = Seed: LVVVGAVGV (KRAS G12V)
YVVVGKVGF

SEQ ID NO: 69671 - protein, 9 aa, synthetic construct
  source 1..9: note = Seed: LVVVGAVGV (KRAS G12V)
YVVVGKVGG

SEQ ID NO: 69672 - protein, 9 aa, synthetic construct
  source 1..9: note = Seed: LVVVGAVGV (KRAS G12V)
YVVVGKVGH

SEQ ID NO: 69673 - protein, 9 aa, synthetic construct
  source 1..9: note = Seed: LVVVGAVGV (KRAS G12V)
YVVVGKVGI

SEQ ID NO: 69674 - protein, 9 aa, synthetic construct
  source 1..9: note = Seed: LVVVGAVGV (KRAS G12V)
YVVVGKVGK

SEQ ID NO: 69675 - protein, 9 aa, synthetic construct
  source 1..9: note = Seed: LVVVGAVGV (KRAS G12V)
YVVVGKVGL

SEQ ID NO: 69676 - protein, 9 aa, synthetic construct
  source 1..9: note = Seed: LVVVGAVGV (KRAS G12V)
YVVVGKVGM

SEQ ID NO: 69677 - protein, 9 aa, synthetic construct
  source 1..9: note = Seed: LVVVGAVGV (KRAS G12V)
YVVVGKVGN

SEQ ID NO: 69678 - protein, 9 aa, synthetic construct
  source 1..9: note = Seed: LVVVGAVGV (KRAS G12V)
YVVVGKVGP

SEQ ID NO: 69679 - protein, 9 aa, synthetic construct
  source 1..9: note = Seed: LVVVGAVGV (KRAS G12V)
YVVVGKVGQ

SEQ ID NO: 69680 - protein, 9 aa, synthetic construct
  source 1..9: note = Seed: LVVVGAVGV (KRAS G12V)
YVVVGKVGR

SEQ ID NO: 69681 - protein, 9 aa, synthetic construct
  source 1..9: note = Seed: LVVVGAVGV (KRAS G12V)
YVVVGKVGS

SEQ ID NO: 69682 - protein, 9 aa, synthetic construct
  source 1..9: note = Seed: LVVVGAVGV (KRAS G12V)
YVVVGKVGT

SEQ ID NO: 69683 - protein, 9 aa, synthetic construct
  source 1..9: note = Seed: LVVVGAVGV (KRAS G12V)
YVVVGKVGV

SEQ ID NO: 69684 - protein, 9 aa, synthetic construct
  source 1..9: note = Seed: LVVVGAVGV (KRAS G12V)
YVVVGKVGY

SEQ ID NO: 69685 - protein, 9 aa, synthetic construct
  source 1..9: note = Seed: LVVVGAVGV (KRAS G12V)
YVVVGLVGA

SEQ ID NO: 69686 - protein, 9 aa, synthetic construct
  source 1..9: note = Seed: LVVVGAVGV (KRAS G12V)
YVVVGLVGD

SEQ ID NO: 69687 - protein, 9 aa, synthetic construct
  source 1..9: note = Seed: LVVVGAVGV (KRAS G12V)
YVVVGLVGE

SEQ ID NO: 69688 - protein, 9 aa, synthetic construct
  source 1..9: note = Seed: LVVVGAVGV (KRAS G12V)
YVVVGLVGG

SEQ ID NO: 69689 - protein, 9 aa, synthetic construct
  source 1..9: note = Seed: LVVVGAVGV (KRAS G12V)
YVVVGLVGH

SEQ ID NO: 69690 - protein, 9 aa, synthetic construct
  source 1..9: note = Seed: LVVVGAVGV (KRAS G12V)
YVVVGLVGI

SEQ ID NO: 69691 - protein, 9 aa, synthetic construct
  source 1..9: note = Seed: LVVVGAVGV (KRAS G12V)
YVVVGLVGL

SEQ ID NO: 69692 - protein, 9 aa, synthetic construct
  source 1..9: note = Seed: LVVVGAVGV (KRAS G12V)
YVVVGLVGM

SEQ ID NO: 69693 - protein, 9 aa, synthetic construct
  source 1..9: note = Seed: LVVVGAVGV (KRAS G12V)
YVVVGLVGN

SEQ ID NO: 69694 - protein, 9 aa, synthetic construct
  source 1..9: note = Seed: LVVVGAVGV (KRAS G12V)
YVVVGLVGQ

SEQ ID NO: 69695 - protein, 9 aa, synthetic construct
  source 1..9: note = Seed: LVVVGAVGV (KRAS G12V)
YVVVGLVGR

SEQ ID NO: 69696 - protein, 9 aa, synthetic construct
  source 1..9: note = Seed: LVVVGAVGV (KRAS G12V)
YVVVGLVGS

SEQ ID NO: 69697 - protein, 9 aa, synthetic construct
  source 1..9: note = Seed: LVVVGAVGV (KRAS G12V)
YVVVGLVGT

SEQ ID NO: 69698 - protein, 9 aa, synthetic construct
  source 1..9: note = Seed: LVVVGAVGV (KRAS G12V)
YVVVGLVGV

SEQ ID NO: 69699 - protein, 9 aa, synthetic construct
  source 1..9: note = Seed: LVVVGAVGV (KRAS G12V)
YVVVGMVGA

SEQ ID NO: 69700 - protein, 9 aa, synthetic construct
  source 1..9: note = Seed: LVVVGAVGV (KRAS G12V)
YVVVGMVGC

SEQ ID NO: 69701 - protein, 9 aa, synthetic construct
  source 1..9: note = Seed: LVVVGAVGV (KRAS G12V)
YVVVGMVGD

SEQ ID NO: 69702 - protein, 9 aa, synthetic construct
  source 1..9: note = Seed: LVVVGAVGV (KRAS G12V)
YVVVGMVGE

SEQ ID NO: 69703 - protein, 9 aa, synthetic construct
  source 1..9: note = Seed: LVVVGAVGV (KRAS G12V)
YVVVGMVGF

SEQ ID NO: 69704 - protein, 9 aa, synthetic construct
  source 1..9: note = Seed: LVVVGAVGV (KRAS G12V)
YVVVGMVGG

SEQ ID NO: 69705 - protein, 9 aa, synthetic construct
  source 1..9: note = Seed: LVVVGAVGV (KRAS G12V)
YVVVGMVGH

SEQ ID NO: 69706 - protein, 9 aa, synthetic construct
  source 1..9: note = Seed: LVVVGAVGV (KRAS G12V)
YVVVGMVGI

SEQ ID NO: 69707 - protein, 9 aa, synthetic construct
  source 1..9: note = Seed: LVVVGAVGV (KRAS G12V)
YVVVGMVGL

SEQ ID NO: 69708 - protein, 9 aa, synthetic construct
  source 1..9: note = Seed: LVVVGAVGV (KRAS G12V)
YVVVGMVGM

SEQ ID NO: 69709 - protein, 9 aa, synthetic construct
  source 1..9: note = Seed: LVVVGAVGV (KRAS G12V)
YVVVGMVGN

SEQ ID NO: 69710 - protein, 9 aa, synthetic construct
  source 1..9: note = Seed: LVVVGAVGV (KRAS G12V)
YVVVGMVGP

SEQ ID NO: 69711 - protein, 9 aa, synthetic construct
  source 1..9: note = Seed: LVVVGAVGV (KRAS G12V)
YVVVGMVGQ

SEQ ID NO: 69712 - protein, 9 aa, synthetic construct
  source 1..9: note = Seed: LVVVGAVGV (KRAS G12V)
YVVVGMVGR

SEQ ID NO: 69713 - protein, 9 aa, synthetic construct
  source 1..9: note = Seed: LVVVGAVGV (KRAS G12V)
YVVVGMVGS

SEQ ID NO: 69714 - protein, 9 aa, synthetic construct
  source 1..9: note = Seed: LVVVGAVGV (KRAS G12V)
YVVVGMVGT

SEQ ID NO: 69715 - protein, 9 aa, synthetic construct
  source 1..9: note = Seed: LVVVGAVGV (KRAS G12V)
YVVVGMVGV

SEQ ID NO: 69716 - protein, 9 aa, synthetic construct
  source 1..9: note = Seed: LVVVGAVGV (KRAS G12V)
YVVVGMVGY

SEQ ID NO: 69717 - protein, 9 aa, synthetic construct
  source 1..9: note = Seed: LVVVGAVGV (KRAS G12V)
YVVVGNVGA

SEQ ID NO: 69718 - protein, 9 aa, synthetic construct
  source 1..9: note = Seed: LVVVGAVGV (KRAS G12V)
YVVVGNVGC

SEQ ID NO: 69719 - protein, 9 aa, synthetic construct
  source 1..9: note = Seed: LVVVGAVGV (KRAS G12V)
YVVVGNVGD

SEQ ID NO: 69720 - protein, 9 aa, synthetic construct
  source 1..9: note = Seed: LVVVGAVGV (KRAS G12V)
YVVVGNVGE

SEQ ID NO: 69721 - protein, 9 aa, synthetic construct
  source 1..9: note = Seed: LVVVGAVGV (KRAS G12V)
YVVVGNVGF

SEQ ID NO: 69722 - protein, 9 aa, synthetic construct
  source 1..9: note = Seed: LVVVGAVGV (KRAS G12V)
YVVVGNVGG

SEQ ID NO: 69723 - protein, 9 aa, synthetic construct
  source 1..9: note = Seed: LVVVGAVGV (KRAS G12V)
YVVVGNVGH

SEQ ID NO: 69724 - protein, 9 aa, synthetic construct
  source 1..9: note = Seed: LVVVGAVGV (KRAS G12V)
YVVVGNVGI

SEQ ID NO: 69725 - protein, 9 aa, synthetic construct
  source 1..9: note = Seed: LVVVGAVGV (KRAS G12V)
YVVVGNVGK

SEQ ID NO: 69726 - protein, 9 aa, synthetic construct
  source 1..9: note = Seed: LVVVGAVGV (KRAS G12V)
YVVVGNVGL

SEQ ID NO: 69727 - protein, 9 aa, synthetic construct
  source 1..9: note = Seed: LVVVGAVGV (KRAS G12V)
YVVVGNVGM

SEQ ID NO: 69728 - protein, 9 aa, synthetic construct
  source 1..9: note = Seed: LVVVGAVGV (KRAS G12V)
YVVVGNVGN

SEQ ID NO: 69729 - protein, 9 aa, synthetic construct
  source 1..9: note = Seed: LVVVGAVGV (KRAS G12V)
YVVVGNVGP

SEQ ID NO: 69730 - protein, 9 aa, synthetic construct
  source 1..9: note = Seed: LVVVGAVGV (KRAS G12V)
YVVVGNVGQ

SEQ ID NO: 69731 - protein, 9 aa, synthetic construct
  source 1..9: note = Seed: LVVVGAVGV (KRAS G12V)
YVVVGNVGR

SEQ ID NO: 69732 - protein, 9 aa, synthetic construct
  source 1..9: note = Seed: LVVVGAVGV (KRAS G12V)
YVVVGNVGS

SEQ ID NO: 69733 - protein, 9 aa, synthetic construct
  source 1..9: note = Seed: LVVVGAVGV (KRAS G12V)
YVVVGNVGT

SEQ ID NO: 69734 - protein, 9 aa, synthetic construct
  source 1..9: note = Seed: LVVVGAVGV (KRAS G12V)
YVVVGNVGV

SEQ ID NO: 69735 - protein, 9 aa, synthetic construct
  source 1..9: note = Seed: LVVVGAVGV (KRAS G12V)
YVVVGNVGW

SEQ ID NO: 69736 - protein, 9 aa, synthetic construct
  source 1..9: note = Seed: LVVVGAVGV (KRAS G12V)
YVVVGNVGY

SEQ ID NO: 69737 - protein, 9 aa, synthetic construct
  source 1..9: note = Seed: LVVVGAVGV (KRAS G12V)
YVVVGPVGA

SEQ ID NO: 69738 - protein, 9 aa, synthetic construct
  source 1..9: note = Seed: LVVVGAVGV (KRAS G12V)
YVVVGPVGC

SEQ ID NO: 69739 - protein, 9 aa, synthetic construct
  source 1..9: note = Seed: LVVVGAVGV (KRAS G12V)
YVVVGPVGD

SEQ ID NO: 69740 - protein, 9 aa, synthetic construct
  source 1..9: note = Seed: LVVVGAVGV (KRAS G12V)
YVVVGPVGE

SEQ ID NO: 69741 - protein, 9 aa, synthetic construct
  source 1..9: note = Seed: LVVVGAVGV (KRAS G12V)
YVVVGPVGF

SEQ ID NO: 69742 - protein, 9 aa, synthetic construct
  source 1..9: note = Seed: LVVVGAVGV (KRAS G12V)
YVVVGPVGG

SEQ ID NO: 69743 - protein, 9 aa, synthetic construct
  source 1..9: note = Seed: LVVVGAVGV (KRAS G12V)
YVVVGPVGH

SEQ ID NO: 69744 - protein, 9 aa, synthetic construct
  source 1..9: note = Seed: LVVVGAVGV (KRAS G12V)
YVVVGPVGI

SEQ ID NO: 69745 - protein, 9 aa, synthetic construct
  source 1..9: note = Seed: LVVVGAVGV (KRAS G12V)
YVVVGPVGK

SEQ ID NO: 69746 - protein, 9 aa, synthetic construct
  source 1..9: note = Seed: LVVVGAVGV (KRAS G12V)
YVVVGPVGL

SEQ ID NO: 69747 - protein, 9 aa, synthetic construct
  source 1..9: note = Seed: LVVVGAVGV (KRAS G12V)
YVVVGPVGM

SEQ ID NO: 69748 - protein, 9 aa, synthetic construct
  source 1..9: note = Seed: LVVVGAVGV (KRAS G12V)
YVVVGPVGN

SEQ ID NO: 69749 - protein, 9 aa, synthetic construct
  source 1..9: note = Seed: LVVVGAVGV (KRAS G12V)
YVVVGPVGP

SEQ ID NO: 69750 - protein, 9 aa, synthetic construct
  source 1..9: note = Seed: LVVVGAVGV (KRAS G12V)
YVVVGPVGQ

SEQ ID NO: 69751 - protein, 9 aa, synthetic construct
  source 1..9: note = Seed: LVVVGAVGV (KRAS G12V)
YVVVGPVGR

SEQ ID NO: 69752 - protein, 9 aa, synthetic construct
  source 1..9: note = Seed: LVVVGAVGV (KRAS G12V)
YVVVGPVGS

SEQ ID NO: 69753 - protein, 9 aa, synthetic construct
  source 1..9: note = Seed: LVVVGAVGV (KRAS G12V)
YVVVGPVGT

SEQ ID NO: 69754 - protein, 9 aa, synthetic construct
  source 1..9: note = Seed: LVVVGAVGV (KRAS G12V)
YVVVGPVGV

SEQ ID NO: 69755 - protein, 9 aa, synthetic construct
  source 1..9: note = Seed: LVVVGAVGV (KRAS G12V)
YVVVGPVGW

SEQ ID NO: 69756 - protein, 9 aa, synthetic construct
  source 1..9: note = Seed: LVVVGAVGV (KRAS G12V)
YVVVGPVGY

SEQ ID NO: 69757 - protein, 9 aa, synthetic construct
  source 1..9: note = Seed: LVVVGAVGV (KRAS G12V)
YVVVGQVGA

SEQ ID NO: 69758 - protein, 9 aa, synthetic construct
  source 1..9: note = Seed: LVVVGAVGV (KRAS G12V)
YVVVGQVGC

SEQ ID NO: 69759 - protein, 9 aa, synthetic construct
  source 1..9: note = Seed: LVVVGAVGV (KRAS G12V)
YVVVGQVGE

SEQ ID NO: 69760 - protein, 9 aa, synthetic construct
  source 1..9: note = Seed: LVVVGAVGV (KRAS G12V)
YVVVGQVGF

SEQ ID NO: 69761 - protein, 9 aa, synthetic construct
  source 1..9: note = Seed: LVVVGAVGV (KRAS G12V)
YVVVGQVGG

SEQ ID NO: 69762 - protein, 9 aa, synthetic construct
  source 1..9: note = Seed: LVVVGAVGV (KRAS G12V)
YVVVGQVGH

SEQ ID NO: 69763 - protein, 9 aa, synthetic construct
  source 1..9: note = Seed: LVVVGAVGV (KRAS G12V)
YVVVGQVGI

SEQ ID NO: 69764 - protein, 9 aa, synthetic construct
  source 1..9: note = Seed: LVVVGAVGV (KRAS G12V)
YVVVGQVGK

SEQ ID NO: 69765 - protein, 9 aa, synthetic construct
  source 1..9: note = Seed: LVVVGAVGV (KRAS G12V)
YVVVGQVGL

SEQ ID NO: 69766 - protein, 9 aa, synthetic construct
  source 1..9: note = Seed: LVVVGAVGV (KRAS G12V)
YVVVGQVGM

SEQ ID NO: 69767 - protein, 9 aa, synthetic construct
  source 1..9: note = Seed: LVVVGAVGV (KRAS G12V)
YVVVGQVGN

SEQ ID NO: 69768 - protein, 9 aa, synthetic construct
  source 1..9: note = Seed: LVVVGAVGV (KRAS G12V)
YVVVGQVGQ

SEQ ID NO: 69769 - protein, 9 aa, synthetic construct
  source 1..9: note = Seed: LVVVGAVGV (KRAS G12V)
YVVVGQVGR

SEQ ID NO: 69770 - protein, 9 aa, synthetic construct
  source 1..9: note = Seed: LVVVGAVGV (KRAS G12V)
YVVVGQVGS

SEQ ID NO: 69771 - protein, 9 aa, synthetic construct
  source 1..9: note = Seed: LVVVGAVGV (KRAS G12V)
YVVVGQVGT

SEQ ID NO: 69772 - protein, 9 aa, synthetic construct
  source 1..9: note = Seed: LVVVGAVGV (KRAS G12V)
YVVVGQVGV

SEQ ID NO: 69773 - protein, 9 aa, synthetic construct
  source 1..9: note = Seed: LVVVGAVGV (KRAS G12V)
YVVVGQVGY

SEQ ID NO: 69774 - protein, 9 aa, synthetic construct
  source 1..9: note = Seed: LVVVGAVGV (KRAS G12V)
YVVVGRVGA

SEQ ID NO: 69775 - protein, 9 aa, synthetic construct
  source 1..9: note = Seed: LVVVGAVGV (KRAS G12V)
YVVVGRVGC

SEQ ID NO: 69776 - protein, 9 aa, synthetic construct
  source 1..9: note = Seed: LVVVGAVGV (KRAS G12V)
YVVVGRVGG

SEQ ID NO: 69777 - protein, 9 aa, synthetic construct
  source 1..9: note = Seed: LVVVGAVGV (KRAS G12V)
YVVVGRVGH

SEQ ID NO: 69778 - protein, 9 aa, synthetic construct
  source 1..9: note = Seed: LVVVGAVGV (KRAS G12V)
YVVVGRVGI

SEQ ID NO: 69779 - protein, 9 aa, synthetic construct
  source 1..9: note = Seed: LVVVGAVGV (KRAS G12V)
YVVVGRVGK

SEQ ID NO: 69780 - protein, 9 aa, synthetic construct
  source 1..9: note = Seed: LVVVGAVGV (KRAS G12V)
YVVVGRVGL

SEQ ID NO: 69781 - protein, 9 aa, synthetic construct
  source 1..9: note = Seed: LVVVGAVGV (KRAS G12V)
YVVVGRVGM

SEQ ID NO: 69782 - protein, 9 aa, synthetic construct
  source 1..9: note = Seed: LVVVGAVGV (KRAS G12V)
YVVVGRVGN

SEQ ID NO: 69783 - protein, 9 aa, synthetic construct
  source 1..9: note = Seed: LVVVGAVGV (KRAS G12V)
YVVVGRVGP

SEQ ID NO: 69784 - protein, 9 aa, synthetic construct
  source 1..9: note = Seed: LVVVGAVGV (KRAS G12V)
YVVVGRVGQ

SEQ ID NO: 69785 - protein, 9 aa, synthetic construct
  source 1..9: note = Seed: LVVVGAVGV (KRAS G12V)
YVVVGRVGR

SEQ ID NO: 69786 - protein, 9 aa, synthetic construct
  source 1..9: note = Seed: LVVVGAVGV (KRAS G12V)
YVVVGRVGS

SEQ ID NO: 69787 - protein, 9 aa, synthetic construct
  source 1..9: note = Seed: LVVVGAVGV (KRAS G12V)
YVVVGRVGT

SEQ ID NO: 69788 - protein, 9 aa, synthetic construct
  source 1..9: note = Seed: LVVVGAVGV (KRAS G12V)
YVVVGRVGV

SEQ ID NO: 69789 - protein, 9 aa, synthetic construct
  source 1..9: note = Seed: LVVVGAVGV (KRAS G12V)
YVVVGRVGY

SEQ ID NO: 69790 - protein, 9 aa, synthetic construct
  source 1..9: note = Seed: LVVVGAVGV (KRAS G12V)
YVVVGSVGA

SEQ ID NO: 69791 - protein, 9 aa, synthetic construct
  source 1..9: note = Seed: LVVVGAVGV (KRAS G12V)
YVVVGSVGC

SEQ ID NO: 69792 - protein, 9 aa, synthetic construct
  source 1..9: note = Seed: LVVVGAVGV (KRAS G12V)
YVVVGSVGD

SEQ ID NO: 69793 - protein, 9 aa, synthetic construct
  source 1..9: note = Seed: LVVVGAVGV (KRAS G12V)
YVVVGSVGE

SEQ ID NO: 69794 - protein, 9 aa, synthetic construct
  source 1..9: note = Seed: LVVVGAVGV (KRAS G12V)
YVVVGSVGF

SEQ ID NO: 69795 - protein, 9 aa, synthetic construct
  source 1..9: note = Seed: LVVVGAVGV (KRAS G12V)
YVVVGSVGG

SEQ ID NO: 69796 - protein, 9 aa, synthetic construct
  source 1..9: note = Seed: LVVVGAVGV (KRAS G12V)
YVVVGSVGH

SEQ ID NO: 69797 - protein, 9 aa, synthetic construct
  source 1..9: note = Seed: LVVVGAVGV (KRAS G12V)
YVVVGSVGI

SEQ ID NO: 69798 - protein, 9 aa, synthetic construct
  source 1..9: note = Seed: LVVVGAVGV (KRAS G12V)
YVVVGSVGK

SEQ ID NO: 69799 - protein, 9 aa, synthetic construct
  source 1..9: note = Seed: LVVVGAVGV (KRAS G12V)
YVVVGSVGL

SEQ ID NO: 69800 - protein, 9 aa, synthetic construct
  source 1..9: note = Seed: LVVVGAVGV (KRAS G12V)
YVVVGSVGM

SEQ ID NO: 69801 - protein, 9 aa, synthetic construct
  source 1..9: note = Seed: LVVVGAVGV (KRAS G12V)
YVVVGSVGN

SEQ ID NO: 69802 - protein, 9 aa, synthetic construct
  source 1..9: note = Seed: LVVVGAVGV (KRAS G12V)
YVVVGSVGP

SEQ ID NO: 69803 - protein, 9 aa, synthetic construct
  source 1..9: note = Seed: LVVVGAVGV (KRAS G12V)
YVVVGSVGQ

SEQ ID NO: 69804 - protein, 9 aa, synthetic construct
  source 1..9: note = Seed: LVVVGAVGV (KRAS G12V)
YVVVGSVGR

SEQ ID NO: 69805 - protein, 9 aa, synthetic construct
  source 1..9: note = Seed: LVVVGAVGV (KRAS G12V)
YVVVGSVGS

SEQ ID NO: 69806 - protein, 9 aa, synthetic construct
  source 1..9: note = Seed: LVVVGAVGV (KRAS G12V)
YVVVGSVGT

SEQ ID NO: 69807 - protein, 9 aa, synthetic construct
  source 1..9: note = Seed: LVVVGAVGV (KRAS G12V)
YVVVGSVGV

SEQ ID NO: 69808 - protein, 9 aa, synthetic construct
  source 1..9: note = Seed: LVVVGAVGV (KRAS G12V)
YVVVGSVGW

SEQ ID NO: 69809 - protein, 9 aa, synthetic construct
  source 1..9: note = Seed: LVVVGAVGV (KRAS G12V)
YVVVGSVGY

SEQ ID NO: 69810 - protein, 9 aa, synthetic construct
  source 1..9: note = Seed: LVVVGAVGV (KRAS G12V)
YVVVGTVGA

SEQ ID NO: 69811 - protein, 9 aa, synthetic construct
  source 1..9: note = Seed: LVVVGAVGV (KRAS G12V)
YVVVGTVGC

SEQ ID NO: 69812 - protein, 9 aa, synthetic construct
  source 1..9: note = Seed: LVVVGAVGV (KRAS G12V)
YVVVGTVGD

SEQ ID NO: 69813 - protein, 9 aa, synthetic construct
  source 1..9: note = Seed: LVVVGAVGV (KRAS G12V)
YVVVGTVGE

SEQ ID NO: 69814 - protein, 9 aa, synthetic construct
  source 1..9: note = Seed: LVVVGAVGV (KRAS G12V)
YVVVGTVGF

SEQ ID NO: 69815 - protein, 9 aa, synthetic construct
  source 1..9: note = Seed: LVVVGAVGV (KRAS G12V)
YVVVGTVGG

SEQ ID NO: 69816 - protein, 9 aa, synthetic construct
  source 1..9: note = Seed: LVVVGAVGV (KRAS G12V)
YVVVGTVGH

SEQ ID NO: 69817 - protein, 9 aa, synthetic construct
  source 1..9: note = Seed: LVVVGAVGV (KRAS G12V)
YVVVGTVGI

SEQ ID NO: 69818 - protein, 9 aa, synthetic construct
  source 1..9: note = Seed: LVVVGAVGV (KRAS G12V)
YVVVGTVGK

SEQ ID NO: 69819 - protein, 9 aa, synthetic construct
  source 1..9: note = Seed: LVVVGAVGV (KRAS G12V)
YVVVGTVGL

SEQ ID NO: 69820 - protein, 9 aa, synthetic construct
  source 1..9: note = Seed: LVVVGAVGV (KRAS G12V)
YVVVGTVGM

SEQ ID NO: 69821 - protein, 9 aa, synthetic construct
  source 1..9: note = Seed: LVVVGAVGV (KRAS G12V)
YVVVGTVGN

SEQ ID NO: 69822 - protein, 9 aa, synthetic construct
  source 1..9: note = Seed: LVVVGAVGV (KRAS G12V)
YVVVGTVGP

SEQ ID NO: 69823 - protein, 9 aa, synthetic construct
  source 1..9: note = Seed: LVVVGAVGV (KRAS G12V)
YVVVGTVGQ

SEQ ID NO: 69824 - protein, 9 aa, synthetic construct
  source 1..9: note = Seed: LVVVGAVGV (KRAS G12V)
YVVVGTVGR

SEQ ID NO: 69825 - protein, 9 aa, synthetic construct
  source 1..9: note = Seed: LVVVGAVGV (KRAS G12V)
YVVVGTVGS

SEQ ID NO: 69826 - protein, 9 aa, synthetic construct
  source 1..9: note = Seed: LVVVGAVGV (KRAS G12V)
YVVVGTVGT

SEQ ID NO: 69827 - protein, 9 aa, synthetic construct
  source 1..9: note = Seed: LVVVGAVGV (KRAS G12V)
YVVVGTVGV

SEQ ID NO: 69828 - protein, 9 aa, synthetic construct
  source 1..9: note = Seed: LVVVGAVGV (KRAS G12V)
YVVVGTVGW

SEQ ID NO: 69829 - protein, 9 aa, synthetic construct
  source 1..9: note = Seed: LVVVGAVGV (KRAS G12V)
YVVVGTVGY

SEQ ID NO: 69830 - protein, 9 aa, synthetic construct
  source 1..9: note = Seed: LVVVGAVGV (KRAS G12V)
YVVVGVVGA

SEQ ID NO: 69831 - protein, 9 aa, synthetic construct
  source 1..9: note = Seed: LVVVGAVGV (KRAS G12V)
YVVVGVVGD

SEQ ID NO: 69832 - protein, 9 aa, synthetic construct
  source 1..9: note = Seed: LVVVGAVGV (KRAS G12V)
YVVVGVVGE

SEQ ID NO: 69833 - protein, 9 aa, synthetic construct
  source 1..9: note = Seed: LVVVGAVGV (KRAS G12V)
YVVVGVVGF

SEQ ID NO: 69834 - protein, 9 aa, synthetic construct
  source 1..9: note = Seed: LVVVGAVGV (KRAS G12V)
YVVVGVVGG

SEQ ID NO: 69835 - protein, 9 aa, synthetic construct
  source 1..9: note = Seed: LVVVGAVGV (KRAS G12V)
YVVVGVVGH

SEQ ID NO: 69836 - protein, 9 aa, synthetic construct
  source 1..9: note = Seed: LVVVGAVGV (KRAS G12V)
YVVVGVVGI

SEQ ID NO: 69837 - protein, 9 aa, synthetic construct
  source 1..9: note = Seed: LVVVGAVGV (KRAS G12V)
YVVVGVVGK

SEQ ID NO: 69838 - protein, 9 aa, synthetic construct
  source 1..9: note = Seed: LVVVGAVGV (KRAS G12V)
YVVVGVVGL

SEQ ID NO: 69839 - protein, 9 aa, synthetic construct
  source 1..9: note = Seed: LVVVGAVGV (KRAS G12V)
YVVVGVVGM

SEQ ID NO: 69840 - protein, 9 aa, synthetic construct
  source 1..9: note = Seed: LVVVGAVGV (KRAS G12V)
YVVVGVVGN

SEQ ID NO: 69841 - protein, 9 aa, synthetic construct
  source 1..9: note = Seed: LVVVGAVGV (KRAS G12V)
YVVVGVVGP

SEQ ID NO: 69842 - protein, 9 aa, synthetic construct
  source 1..9: note = Seed: LVVVGAVGV (KRAS G12V)
YVVVGVVGQ

SEQ ID NO: 69843 - protein, 9 aa, synthetic construct
  source 1..9: note = Seed: LVVVGAVGV (KRAS G12V)
YVVVGVVGR

SEQ ID NO: 69844 - protein, 9 aa, synthetic construct
  source 1..9: note = Seed: LVVVGAVGV (KRAS G12V)
YVVVGVVGS

SEQ ID NO: 69845 - protein, 9 aa, synthetic construct
  source 1..9: note = Seed: LVVVGAVGV (KRAS G12V)
YVVVGVVGT

SEQ ID NO: 69846 - protein, 9 aa, synthetic construct
  source 1..9: note = Seed: LVVVGAVGV (KRAS G12V)
YVVVGVVGV

SEQ ID NO: 69847 - protein, 9 aa, synthetic construct
  source 1..9: note = Seed: LVVVGAVGV (KRAS G12V)
YVVVGVVGY

SEQ ID NO: 69848 - protein, 9 aa, synthetic construct
  source 1..9: note = Seed: LVVVGAVGV (KRAS G12V)
YVVVGWVGN

SEQ ID NO: 69849 - protein, 9 aa, synthetic construct
  source 1..9: note = Seed: LVVVGAVGV (KRAS G12V)
YVVVGYVGA

SEQ ID NO: 69850 - protein, 9 aa, synthetic construct
  source 1..9: note = Seed: LVVVGAVGV (KRAS G12V)
YVVVGYVGD

SEQ ID NO: 69851 - protein, 9 aa, synthetic construct
  source 1..9: note = Seed: LVVVGAVGV (KRAS G12V)
YVVVGYVGG

SEQ ID NO: 69852 - protein, 9 aa, synthetic construct
  source 1..9: note = Seed: LVVVGAVGV (KRAS G12V)
YVVVGYVGH

SEQ ID NO: 69853 - protein, 9 aa, synthetic construct
  source 1..9: note = Seed: LVVVGAVGV (KRAS G12V)
YVVVGYVGI

SEQ ID NO: 69854 - protein, 9 aa, synthetic construct
  source 1..9: note = Seed: LVVVGAVGV (KRAS G12V)
YVVVGYVGL

SEQ ID NO: 69855 - protein, 9 aa, synthetic construct
  source 1..9: note = Seed: LVVVGAVGV (KRAS G12V)
YVVVGYVGM

SEQ ID NO: 69856 - protein, 9 aa, synthetic construct
  source 1..9: note = Seed: LVVVGAVGV (KRAS G12V)
YVVVGYVGN

SEQ ID NO: 69857 - protein, 9 aa, synthetic construct
  source 1..9: note = Seed: LVVVGAVGV (KRAS G12V)
YVVVGYVGR

SEQ ID NO: 69858 - protein, 9 aa, synthetic construct
  source 1..9: note = Seed: LVVVGAVGV (KRAS G12V)
YVVVGYVGS

SEQ ID NO: 69859 - protein, 9 aa, synthetic construct
  source 1..9: note = Seed: LVVVGAVGV (KRAS G12V)
YVVVGYVGT

SEQ ID NO: 69860 - protein, 9 aa, synthetic construct
  source 1..9: note = Seed: LVVVGAVGV (KRAS G12V)
YVVVGYVGV

SEQ ID NO: 69861 - protein, 9 aa, synthetic construct
  source 1..9: note = Seed: LVVVGAVGV (KRAS G12V)
YVVVGYVGY

SEQ ID NO: 69862 - protein, 9 aa, synthetic construct
  source 1..9: note = Seed: LVVVGAVGV (KRAS G12V)
YVVWGAVGA

SEQ ID NO: 69863 - protein, 9 aa, synthetic construct
  source 1..9: note = Seed: LVVVGAVGV (KRAS G12V)
YVVWGAVGF

SEQ ID NO: 69864 - protein, 9 aa, synthetic construct
  source 1..9: note = Seed: LVVVGAVGV (KRAS G12V)
YVVWGAVGG

SEQ ID NO: 69865 - protein, 9 aa, synthetic construct
  source 1..9: note = Seed: LVVVGAVGV (KRAS G12V)
YVVWGAVGH

SEQ ID NO: 69866 - protein, 9 aa, synthetic construct
  source 1..9: note = Seed: LVVVGAVGV (KRAS G12V)
YVVWGAVGI

SEQ ID NO: 69867 - protein, 9 aa, synthetic construct
  source 1..9: note = Seed: LVVVGAVGV (KRAS G12V)
YVVWGAVGL

SEQ ID NO: 69868 - protein, 9 aa, synthetic construct
  source 1..9: note = Seed: LVVVGAVGV (KRAS G12V)
YVVWGAVGM

SEQ ID NO: 69869 - protein, 9 aa, synthetic construct
  source 1..9: note = Seed: LVVVGAVGV (KRAS G12V)
YVVWGAVGN

SEQ ID NO: 69870 - protein, 9 aa, synthetic construct
  source 1..9: note = Seed: LVVVGAVGV (KRAS G12V)
YVVWGAVGR

SEQ ID NO: 69871 - protein, 9 aa, synthetic construct
  source 1..9: note = Seed: LVVVGAVGV (KRAS G12V)
YVVWGAVGS

SEQ ID NO: 69872 - protein, 9 aa, synthetic construct
  source 1..9: note = Seed: LVVVGAVGV (KRAS G12V)
YVVWGAVGT

SEQ ID NO: 69873 - protein, 9 aa, synthetic construct
  source 1..9: note = Seed: LVVVGAVGV (KRAS G12V)
YVVWGAVGV

SEQ ID NO: 69874 - protein, 9 aa, synthetic construct
  source 1..9: note = Seed: LVVVGAVGV (KRAS G12V)
YVVWGAVGY

SEQ ID NO: 69875 - protein, 9 aa, synthetic construct
  source 1..9: note = Seed: LVVVGAVGV (KRAS G12V)
YVVWGGVGA

SEQ ID NO: 69876 - protein, 9 aa, synthetic construct
  source 1..9: note = Seed: LVVVGAVGV (KRAS G12V)
YVVWGGVGI

SEQ ID NO: 69877 - protein, 9 aa, synthetic construct
  source 1..9: note = Seed: LVVVGAVGV (KRAS G12V)
YVVWGGVGL

SEQ ID NO: 69878 - protein, 9 aa, synthetic construct
  source 1..9: note = Seed: LVVVGAVGV (KRAS G12V)
YVVWGGVGM

SEQ ID NO: 69879 - protein, 9 aa, synthetic construct
  source 1..9: note = Seed: LVVVGAVGV (KRAS G12V)
YVVWGGVGS

SEQ ID NO: 69880 - protein, 9 aa, synthetic construct
  source 1..9: note = Seed: LVVVGAVGV (KRAS G12V)
YVVWGGVGT

SEQ ID NO: 69881 - protein, 9 aa, synthetic construct
  source 1..9: note = Seed: LVVVGAVGV (KRAS G12V)
YVVWGGVGV

SEQ ID NO: 69882 - protein, 9 aa, synthetic construct
  source 1..9: note = Seed: LVVVGAVGV (KRAS G12V)
YVVWGIVGA

SEQ ID NO: 69883 - protein, 9 aa, synthetic construct
  source 1..9: note = Seed: LVVVGAVGV (KRAS G12V)
YVVWGKVGR

SEQ ID NO: 69884 - protein, 9 aa, synthetic construct
  source 1..9: note = Seed: LVVVGAVGV (KRAS G12V)
YVVWGNVGA

SEQ ID NO: 69885 - protein, 9 aa, synthetic construct
  source 1..9: note = Seed: LVVVGAVGV (KRAS G12V)
YVVWGNVGI

SEQ ID NO: 69886 - protein, 9 aa, synthetic construct
  source 1..9: note = Seed: LVVVGAVGV (KRAS G12V)
YVVWGNVGL

SEQ ID NO: 69887 - protein, 9 aa, synthetic construct
  source 1..9: note = Seed: LVVVGAVGV (KRAS G12V)
YVVWGNVGM

SEQ ID NO: 69888 - protein, 9 aa, synthetic construct
  source 1..9: note = Seed: LVVVGAVGV (KRAS G12V)
YVVWGNVGV

SEQ ID NO: 69889 - protein, 9 aa, synthetic construct
  source 1..9: note = Seed: LVVVGAVGV (KRAS G12V)
YVVWGPVGA

SEQ ID NO: 69890 - protein, 9 aa, synthetic construct
  source 1..9: note = Seed: LVVVGAVGV (KRAS G12V)
YVVWGPVGF

SEQ ID NO: 69891 - protein, 9 aa, synthetic construct
  source 1..9: note = Seed: LVVVGAVGV (KRAS G12V)
YVVWGPVGI

SEQ ID NO: 69892 - protein, 9 aa, synthetic construct
  source 1..9: note = Seed: LVVVGAVGV (KRAS G12V)
YVVWGPVGL

SEQ ID NO: 69893 - protein, 9 aa, synthetic construct
  source 1..9: note = Seed: LVVVGAVGV (KRAS G12V)
YVVWGPVGM

SEQ ID NO: 69894 - protein, 9 aa, synthetic construct
  source 1..9: note = Seed: LVVVGAVGV (KRAS G12V)
YVVWGPVGN

SEQ ID NO: 69895 - protein, 9 aa, synthetic construct
  source 1..9: note = Seed: LVVVGAVGV (KRAS G12V)
YVVWGPVGS

SEQ ID NO: 69896 - protein, 9 aa, synthetic construct
  source 1..9: note = Seed: LVVVGAVGV (KRAS G12V)
YVVWGPVGT

SEQ ID NO: 69897 - protein, 9 aa, synthetic construct
  source 1..9: note = Seed: LVVVGAVGV (KRAS G12V)
YVVWGPVGV

SEQ ID NO: 69898 - protein, 9 aa, synthetic construct
  source 1..9: note = Seed: LVVVGAVGV (KRAS G12V)
YVVWGRVGK

SEQ ID NO: 69899 - protein, 9 aa, synthetic construct
  source 1..9: note = Seed: LVVVGAVGV (KRAS G12V)
YVVWGRVGR

SEQ ID NO: 69900 - protein, 9 aa, synthetic construct
  source 1..9: note = Seed: LVVVGAVGV (KRAS G12V)
YVVWGSVGA

SEQ ID NO: 69901 - protein, 9 aa, synthetic construct
  source 1..9: note = Seed: LVVVGAVGV (KRAS G12V)
YVVWGSVGI

SEQ ID NO: 69902 - protein, 9 aa, synthetic construct
  source 1..9: note = Seed: LVVVGAVGV (KRAS G12V)
YVVWGSVGL

SEQ ID NO: 69903 - protein, 9 aa, synthetic construct
  source 1..9: note = Seed: LVVVGAVGV (KRAS G12V)
YVVWGSVGM

SEQ ID NO: 69904 - protein, 9 aa, synthetic construct
  source 1..9: note = Seed: LVVVGAVGV (KRAS G12V)
YVVWGSVGN

SEQ ID NO: 69905 - protein, 9 aa, synthetic construct
  source 1..9: note = Seed: LVVVGAVGV (KRAS G12V)
YVVWGSVGS

SEQ ID NO: 69906 - protein, 9 aa, synthetic construct
  source 1..9: note = Seed: LVVVGAVGV (KRAS G12V)
YVVWGSVGT

SEQ ID NO: 69907 - protein, 9 aa, synthetic construct
  source 1..9: note = Seed: LVVVGAVGV (KRAS G12V)
YVVWGSVGV

SEQ ID NO: 69908 - protein, 9 aa, synthetic construct
  source 1..9: note = Seed: LVVVGAVGV (KRAS G12V)
YVVWGTVGA

SEQ ID NO: 69909 - protein, 9 aa, synthetic construct
  source 1..9: note = Seed: LVVVGAVGV (KRAS G12V)
YVVWGTVGI

SEQ ID NO: 69910 - protein, 9 aa, synthetic construct
  source 1..9: note = Seed: LVVVGAVGV (KRAS G12V)
YVVWGTVGL

SEQ ID NO: 69911 - protein, 9 aa, synthetic construct
  source 1..9: note = Seed: LVVVGAVGV (KRAS G12V)
YVVWGTVGM

SEQ ID NO: 69912 - protein, 9 aa, synthetic construct
  source 1..9: note = Seed: LVVVGAVGV (KRAS G12V)
YVVWGTVGN

SEQ ID NO: 69913 - protein, 9 aa, synthetic construct
  source 1..9: note = Seed: LVVVGAVGV (KRAS G12V)
YVVWGTVGV

SEQ ID NO: 69914 - protein, 9 aa, synthetic construct
  source 1..9: note = Seed: LVVVGAVGV (KRAS G12V)
YVVWGVVGA

SEQ ID NO: 69915 - protein, 9 aa, synthetic construct
  source 1..9: note = Seed: LVVVGAVGV (KRAS G12V)
YVVWGVVGL

SEQ ID NO: 69916 - protein, 9 aa, synthetic construct
  source 1..9: note = Seed: LVVVGAVGV (KRAS G12V)
YVVWGVVGM

SEQ ID NO: 69917 - protein, 9 aa, synthetic construct
  source 1..9: note = Seed: LVVVGAVGV (KRAS G12V)
YVVWGVVGN

SEQ ID NO: 69918 - protein, 9 aa, synthetic construct
  source 1..9: note = Seed: LVVVGAVGV (KRAS G12V)
YVVWGVVGS

SEQ ID NO: 69919 - protein, 9 aa, synthetic construct
  source 1..9: note = Seed: LVVVGAVGV (KRAS G12V)
YVVWGVVGV

SEQ ID NO: 69920 - protein, 9 aa, synthetic construct
  source 1..9: note = Seed: LVVVGAVGV (KRAS G12V)
YVVYGAVGA

SEQ ID NO: 69921 - protein, 9 aa, synthetic construct
  source 1..9: note = Seed: LVVVGAVGV (KRAS G12V)
YVVYGAVGF

SEQ ID NO: 69922 - protein, 9 aa, synthetic construct
  source 1..9: note = Seed: LVVVGAVGV (KRAS G12V)
YVVYGAVGG

SEQ ID NO: 69923 - protein, 9 aa, synthetic construct
  source 1..9: note = Seed: LVVVGAVGV (KRAS G12V)
YVVYGAVGH

SEQ ID NO: 69924 - protein, 9 aa, synthetic construct
  source 1..9: note = Seed: LVVVGAVGV (KRAS G12V)
YVVYGAVGI

SEQ ID NO: 69925 - protein, 9 aa, synthetic construct
  source 1..9: note = Seed: LVVVGAVGV (KRAS G12V)
YVVYGAVGL

SEQ ID NO: 69926 - protein, 9 aa, synthetic construct
  source 1..9: note = Seed: LVVVGAVGV (KRAS G12V)
YVVYGAVGM

SEQ ID NO: 69927 - protein, 9 aa, synthetic construct
  source 1..9: note = Seed: LVVVGAVGV (KRAS G12V)
YVVYGAVGN

SEQ ID NO: 69928 - protein, 9 aa, synthetic construct
  source 1..9: note = Seed: LVVVGAVGV (KRAS G12V)
YVVYGAVGS

SEQ ID NO: 69929 - protein, 9 aa, synthetic construct
  source 1..9: note = Seed: LVVVGAVGV (KRAS G12V)
YVVYGAVGT

SEQ ID NO: 69930 - protein, 9 aa, synthetic construct
  source 1..9: note = Seed: LVVVGAVGV (KRAS G12V)
YVVYGAVGV

SEQ ID NO: 69931 - protein, 9 aa, synthetic construct
  source 1..9: note = Seed: LVVVGAVGV (KRAS G12V)
YVVYGGVGA

SEQ ID NO: 69932 - protein, 9 aa, synthetic construct
  source 1..9: note = Seed: LVVVGAVGV (KRAS G12V)
YVVYGGVGI

SEQ ID NO: 69933 - protein, 9 aa, synthetic construct
  source 1..9: note = Seed: LVVVGAVGV (KRAS G12V)
YVVYGGVGL

SEQ ID NO: 69934 - protein, 9 aa, synthetic construct
  source 1..9: note = Seed: LVVVGAVGV (KRAS G12V)
YVVYGGVGM

SEQ ID NO: 69935 - protein, 9 aa, synthetic construct
  source 1..9: note = Seed: LVVVGAVGV (KRAS G12V)
YVVYGGVGV

SEQ ID NO: 69936 - protein, 9 aa, synthetic construct
  source 1..9: note = Seed: LVVVGAVGV (KRAS G12V)
YVVYGHVGA

SEQ ID NO: 69937 - protein, 9 aa, synthetic construct
  source 1..9: note = Seed: LVVVGAVGV (KRAS G12V)
YVVYGIVGA

SEQ ID NO: 69938 - protein, 9 aa, synthetic construct
  source 1..9: note = Seed: LVVVGAVGV (KRAS G12V)
YVVYGIVGS

SEQ ID NO: 69939 - protein, 9 aa, synthetic construct
  source 1..9: note = Seed: LVVVGAVGV (KRAS G12V)
YVVYGIVGV

SEQ ID NO: 69940 - protein, 9 aa, synthetic construct
  source 1..9: note = Seed: LVVVGAVGV (KRAS G12V)
YVVYGKVGR

SEQ ID NO: 69941 - protein, 9 aa, synthetic construct
  source 1..9: note = Seed: LVVVGAVGV (KRAS G12V)
YVVYGLVGA

SEQ ID NO: 69942 - protein, 9 aa, synthetic construct
  source 1..9: note = Seed: LVVVGAVGV (KRAS G12V)
YVVYGLVGL

SEQ ID NO: 69943 - protein, 9 aa, synthetic construct
  source 1..9: note = Seed: LVVVGAVGV (KRAS G12V)
YVVYGLVGM

SEQ ID NO: 69944 - protein, 9 aa, synthetic construct
  source 1..9: note = Seed: LVVVGAVGV (KRAS G12V)
YVVYGLVGR

SEQ ID NO: 69945 - protein, 9 aa, synthetic construct
  source 1..9: note = Seed: LVVVGAVGV (KRAS G12V)
YVVYGLVGV

SEQ ID NO: 69946 - protein, 9 aa, synthetic construct
  source 1..9: note = Seed: LVVVGAVGV (KRAS G12V)
YVVYGMVGA

SEQ ID NO: 69947 - protein, 9 aa, synthetic construct
  source 1..9: note = Seed: LVVVGAVGV (KRAS G12V)
YVVYGMVGL

SEQ ID NO: 69948 - protein, 9 aa, synthetic construct
  source 1..9: note = Seed: LVVVGAVGV (KRAS G12V)
YVVYGMVGM

SEQ ID NO: 69949 - protein, 9 aa, synthetic construct
  source 1..9: note = Seed: LVVVGAVGV (KRAS G12V)
YVVYGMVGR

SEQ ID NO: 69950 - protein, 9 aa, synthetic construct
  source 1..9: note = Seed: LVVVGAVGV (KRAS G12V)
YVVYGMVGV

SEQ ID NO: 69951 - protein, 9 aa, synthetic construct
  source 1..9: note = Seed: LVVVGAVGV (KRAS G12V)
YVVYGNVGA

SEQ ID NO: 69952 - protein, 9 aa, synthetic construct
  source 1..9: note = Seed: LVVVGAVGV (KRAS G12V)
YVVYGNVGI

SEQ ID NO: 69953 - protein, 9 aa, synthetic construct
  source 1..9: note = Seed: LVVVGAVGV (KRAS G12V)
YVVYGNVGL

SEQ ID NO: 69954 - protein, 9 aa, synthetic construct
  source 1..9: note = Seed: LVVVGAVGV (KRAS G12V)
YVVYGNVGM

SEQ ID NO: 69955 - protein, 9 aa, synthetic construct
  source 1..9: note = Seed: LVVVGAVGV (KRAS G12V)
YVVYGNVGV

SEQ ID NO: 69956 - protein, 9 aa, synthetic construct
  source 1..9: note = Seed: LVVVGAVGV (KRAS G12V)
YVVYGPVGA

SEQ ID NO: 69957 - protein, 9 aa, synthetic construct
  source 1..9: note = Seed: LVVVGAVGV (KRAS G12V)
YVVYGPVGI

SEQ ID NO: 69958 - protein, 9 aa, synthetic construct
  source 1..9: note = Seed: LVVVGAVGV (KRAS G12V)
YVVYGPVGL

SEQ ID NO: 69959 - protein, 9 aa, synthetic construct
  source 1..9: note = Seed: LVVVGAVGV (KRAS G12V)
YVVYGPVGM

SEQ ID NO: 69960 - protein, 9 aa, synthetic construct
  source 1..9: note = Seed: LVVVGAVGV (KRAS G12V)
YVVYGPVGN

SEQ ID NO: 69961 - protein, 9 aa, synthetic construct
  source 1..9: note = Seed: LVVVGAVGV (KRAS G12V)
YVVYGPVGS

SEQ ID NO: 69962 - protein, 9 aa, synthetic construct
  source 1..9: note = Seed: LVVVGAVGV (KRAS G12V)
YVVYGPVGV

SEQ ID NO: 69963 - protein, 9 aa, synthetic construct
  source 1..9: note = Seed: LVVVGAVGV (KRAS G12V)
YVVYGRVGR

SEQ ID NO: 69964 - protein, 9 aa, synthetic construct
  source 1..9: note = Seed: LVVVGAVGV (KRAS G12V)
YVVYGSVGA

SEQ ID NO: 69965 - protein, 9 aa, synthetic construct
  source 1..9: note = Seed: LVVVGAVGV (KRAS G12V)
YVVYGSVGI

SEQ ID NO: 69966 - protein, 9 aa, synthetic construct
  source 1..9: note = Seed: LVVVGAVGV (KRAS G12V)
YVVYGSVGL

SEQ ID NO: 69967 - protein, 9 aa, synthetic construct
  source 1..9: note = Seed: LVVVGAVGV (KRAS G12V)
YVVYGSVGM

SEQ ID NO: 69968 - protein, 9 aa, synthetic construct
  source 1..9: note = Seed: LVVVGAVGV (KRAS G12V)
YVVYGSVGS

SEQ ID NO: 69969 - protein, 9 aa, synthetic construct
  source 1..9: note = Seed: LVVVGAVGV (KRAS G12V)
YVVYGSVGT

SEQ ID NO: 69970 - protein, 9 aa, synthetic construct
  source 1..9: note = Seed: LVVVGAVGV (KRAS G12V)
YVVYGSVGV

SEQ ID NO: 69971 - protein, 9 aa, synthetic construct
  source 1..9: note = Seed: LVVVGAVGV (KRAS G12V)
YVVYGTVGA

SEQ ID NO: 69972 - protein, 9 aa, synthetic construct
  source 1..9: note = Seed: LVVVGAVGV (KRAS G12V)
YVVYGTVGI

SEQ ID NO: 69973 - protein, 9 aa, synthetic construct
  source 1..9: note = Seed: LVVVGAVGV (KRAS G12V)
YVVYGTVGL

SEQ ID NO: 69974 - protein, 9 aa, synthetic construct
  source 1..9: note = Seed: LVVVGAVGV (KRAS G12V)
YVVYGTVGM

SEQ ID NO: 69975 - protein, 9 aa, synthetic construct
  source 1..9: note = Seed: LVVVGAVGV (KRAS G12V)
YVVYGTVGV

SEQ ID NO: 69976 - protein, 9 aa, synthetic construct
  source 1..9: note = Seed: LVVVGAVGV (KRAS G12V)
YVVYGVVGA

SEQ ID NO: 69977 - protein, 9 aa, synthetic construct
  source 1..9: note = Seed: LVVVGAVGV (KRAS G12V)
YVVYGVVGL

SEQ ID NO: 69978 - protein, 9 aa, synthetic construct
  source 1..9: note = Seed: LVVVGAVGV (KRAS G12V)
YVVYGVVGM

SEQ ID NO: 69979 - protein, 9 aa, synthetic construct
  source 1..9: note = Seed: LVVVGAVGV (KRAS G12V)
YVVYGVVGN

SEQ ID NO: 69980 - protein, 9 aa, synthetic construct
  source 1..9: note = Seed: LVVVGAVGV (KRAS G12V)
YVVYGVVGS

SEQ ID NO: 69981 - protein, 9 aa, synthetic construct
  source 1..9: note = Seed: LVVVGAVGV (KRAS G12V)
YVVYGVVGV

SEQ ID NO: 69982 - protein, 9 aa, synthetic construct
  source 1..9: note = Seed: VVGAVGVGK (KRAS G12V)
AVGAVPVGA

SEQ ID NO: 69983 - protein, 9 aa, synthetic construct
  source 1..9: note = Seed: VVGAVGVGK (KRAS G12V)
AVGAVRVGR

SEQ ID NO: 69984 - protein, 9 aa, synthetic construct
  source 1..9: note = Seed: VVGAVGVGK (KRAS G12V)
AVGFVKVGR

SEQ ID NO: 69985 - protein, 9 aa, synthetic construct
  source 1..9: note = Seed: VVGAVGVGK (KRAS G12V)
AVGFVRVGR

SEQ ID NO: 69986 - protein, 9 aa, synthetic construct
  source 1..9: note = Seed: VVGAVGVGK (KRAS G12V)
AVGHVKVGR

SEQ ID NO: 69987 - protein, 9 aa, synthetic construct
  source 1..9: note = Seed: VVGAVGVGK (KRAS G12V)
AVGHVRVGK

SEQ ID NO: 69988 - protein, 9 aa, synthetic construct
  source 1..9: note = Seed: VVGAVGVGK (KRAS G12V)
AVGHVRVGR

SEQ ID NO: 69989 - protein, 9 aa, synthetic construct
  source 1..9: note = Seed: VVGAVGVGK (KRAS G12V)
AVGLVKVGK

SEQ ID NO: 69990 - protein, 9 aa, synthetic construct
  source 1..9: note = Seed: VVGAVGVGK (KRAS G12V)
AVGLVKVGR

SEQ ID NO: 69991 - protein, 9 aa, synthetic construct
  source 1..9: note = Seed: VVGAVGVGK (KRAS G12V)
AVGLVRVGK

SEQ ID NO: 69992 - protein, 9 aa, synthetic construct
  source 1..9: note = Seed: VVGAVGVGK (KRAS G12V)
AVGLVRVGR

SEQ ID NO: 69993 - protein, 9 aa, synthetic construct
  source 1..9: note = Seed: VVGAVGVGK (KRAS G12V)
AVGMVKVGR

SEQ ID NO: 69994 - protein, 9 aa, synthetic construct
  source 1..9: note = Seed: VVGAVGVGK (KRAS G12V)
AVGMVRVGK

SEQ ID NO: 69995 - protein, 9 aa, synthetic construct
  source 1..9: note = Seed: VVGAVGVGK (KRAS G12V)
AVGMVRVGR

SEQ ID NO: 69996 - protein, 9 aa, synthetic construct
  source 1..9: note = Seed: VVGAVGVGK (KRAS G12V)
AVGNVRVGR

SEQ ID NO: 69997 - protein, 9 aa, synthetic construct
  source 1..9: note = Seed: VVGAVGVGK (KRAS G12V)
AVGRVRVGR

SEQ ID NO: 69998 - protein, 9 aa, synthetic construct
  source 1..9: note = Seed: VVGAVGVGK (KRAS G12V)
AVGSVRVGR

SEQ ID NO: 69999 - protein, 9 aa, synthetic construct
  source 1..9: note = Seed: VVGAVGVGK (KRAS G12V)
AVGTVRVGR

SEQ ID NO: 70000 - protein, 9 aa, synthetic construct
  source 1..9: note = Seed: VVGAVGVGK (KRAS G12V)
AVGVVKVGR

SEQ ID NO: 70001 - protein, 9 aa, synthetic construct
  source 1..9: note = Seed: VVGAVGVGK (KRAS G12V)
AVGVVRVGR

SEQ ID NO: 70002 - protein, 9 aa, synthetic construct
  source 1..9: note = Seed: VVGAVGVGK (KRAS G12V)
AVGWVRVGR

SEQ ID NO: 70003 - protein, 9 aa, synthetic construct
  source 1..9: note = Seed: VVGAVGVGK (KRAS G12V)
AVGYVRVGR

SEQ ID NO: 70004 - protein, 9 aa, synthetic construct
  source 1..9: note = Seed: VVGAVGVGK (KRAS G12V)
CVGAVAVGV

SEQ ID NO: 70005 - protein, 9 aa, synthetic construct
  source 1..9: note = Seed: VVGAVGVGK (KRAS G12V)
CVGAVRVGR

SEQ ID NO: 70006 - protein, 9 aa, synthetic construct
  source 1..9: note = Seed: VVGAVGVGK (KRAS G12V)
CVGFVKVGR

SEQ ID NO: 70007 - protein, 9 aa, synthetic construct
  source 1..9: note = Seed: VVGAVGVGK (KRAS G12V)
CVGFVRVGK

SEQ ID NO: 70008 - protein, 9 aa, synthetic construct
  source 1..9: note = Seed: VVGAVGVGK (KRAS G12V)
CVGFVRVGR

SEQ ID NO: 70009 - protein, 9 aa, synthetic construct
  source 1..9: note = Seed: VVGAVGVGK (KRAS G12V)
CVGHVRVGR

SEQ ID NO: 70010 - protein, 9 aa, synthetic construct
  source 1..9: note = Seed: VVGAVGVGK (KRAS G12V)
CVGIVRVGR

SEQ ID NO: 70011 - protein, 9 aa, synthetic construct
  source 1..9: note = Seed: VVGAVGVGK (KRAS G12V)
CVGLVAVGI

SEQ ID NO: 70012 - protein, 9 aa, synthetic construct
  source 1..9: note = Seed: VVGAVGVGK (KRAS G12V)
CVGLVAVGL

SEQ ID NO: 70013 - protein, 9 aa, synthetic construct
  source 1..9: note = Seed: VVGAVGVGK (KRAS G12V)
CVGLVAVGT

SEQ ID NO: 70014 - protein, 9 aa, synthetic construct
  source 1..9: note = Seed: VVGAVGVGK (KRAS G12V)
CVGLVAVGV

SEQ ID NO: 70015 - protein, 9 aa, synthetic construct
  source 1..9: note = Seed: VVGAVGVGK (KRAS G12V)
CVGLVGVGA

SEQ ID NO: 70016 - protein, 9 aa, synthetic construct
  source 1..9: note = Seed: VVGAVGVGK (KRAS G12V)
CVGLVGVGI

SEQ ID NO: 70017 - protein, 9 aa, synthetic construct
  source 1..9: note = Seed: VVGAVGVGK (KRAS G12V)
CVGLVGVGL

SEQ ID NO: 70018 - protein, 9 aa, synthetic construct
  source 1..9: note = Seed: VVGAVGVGK (KRAS G12V)
CVGLVGVGV

SEQ ID NO: 70019 - protein, 9 aa, synthetic construct
  source 1..9: note = Seed: VVGAVGVGK (KRAS G12V)
CVGLVKVGK

SEQ ID NO: 70020 - protein, 9 aa, synthetic construct
  source 1..9: note = Seed: VVGAVGVGK (KRAS G12V)
CVGLVKVGR

SEQ ID NO: 70021 - protein, 9 aa, synthetic construct
  source 1..9: note = Seed: VVGAVGVGK (KRAS G12V)
CVGLVPVGI

SEQ ID NO: 70022 - protein, 9 aa, synthetic construct
  source 1..9: note = Seed: VVGAVGVGK (KRAS G12V)
CVGLVPVGL

SEQ ID NO: 70023 - protein, 9 aa, synthetic construct
  source 1..9: note = Seed: VVGAVGVGK (KRAS G12V)
CVGLVPVGM

SEQ ID NO: 70024 - protein, 9 aa, synthetic construct
  source 1..9: note = Seed: VVGAVGVGK (KRAS G12V)
CVGLVPVGV

SEQ ID NO: 70025 - protein, 9 aa, synthetic construct
  source 1..9: note = Seed: VVGAVGVGK (KRAS G12V)
CVGLVRVGH

SEQ ID NO: 70026 - protein, 9 aa, synthetic construct
  source 1..9: note = Seed: VVGAVGVGK (KRAS G12V)
CVGLVRVGK

SEQ ID NO: 70027 - protein, 9 aa, synthetic construct
  source 1..9: note = Seed: VVGAVGVGK (KRAS G12V)
CVGLVRVGR

SEQ ID NO: 70028 - protein, 9 aa, synthetic construct
  source 1..9: note = Seed: VVGAVGVGK (KRAS G12V)
CVGLVSVGL

SEQ ID NO: 70029 - protein, 9 aa, synthetic construct
  source 1..9: note = Seed: VVGAVGVGK (KRAS G12V)
CVGLVSVGV

SEQ ID NO: 70030 - protein, 9 aa, synthetic construct
  source 1..9: note = Seed: VVGAVGVGK (KRAS G12V)
CVGMVAVGI

SEQ ID NO: 70031 - protein, 9 aa, synthetic construct
  source 1..9: note = Seed: VVGAVGVGK (KRAS G12V)
CVGMVAVGL

SEQ ID NO: 70032 - protein, 9 aa, synthetic construct
  source 1..9: note = Seed: VVGAVGVGK (KRAS G12V)
CVGMVAVGM

SEQ ID NO: 70033 - protein, 9 aa, synthetic construct
  source 1..9: note = Seed: VVGAVGVGK (KRAS G12V)
CVGMVAVGV

SEQ ID NO: 70034 - protein, 9 aa, synthetic construct
  source 1..9: note = Seed: VVGAVGVGK (KRAS G12V)
CVGMVGVGA

SEQ ID NO: 70035 - protein, 9 aa, synthetic construct
  source 1..9: note = Seed: VVGAVGVGK (KRAS G12V)
CVGMVGVGI

SEQ ID NO: 70036 - protein, 9 aa, synthetic construct
  source 1..9: note = Seed: VVGAVGVGK (KRAS G12V)
CVGMVGVGL

SEQ ID NO: 70037 - protein, 9 aa, synthetic construct
  source 1..9: note = Seed: VVGAVGVGK (KRAS G12V)
CVGMVGVGM

SEQ ID NO: 70038 - protein, 9 aa, synthetic construct
  source 1..9: note = Seed: VVGAVGVGK (KRAS G12V)
CVGMVGVGV

SEQ ID NO: 70039 - protein, 9 aa, synthetic construct
  source 1..9: note = Seed: VVGAVGVGK (KRAS G12V)
CVGMVKVGK

SEQ ID NO: 70040 - protein, 9 aa, synthetic construct
  source 1..9: note = Seed: VVGAVGVGK (KRAS G12V)
CVGMVKVGR

SEQ ID NO: 70041 - protein, 9 aa, synthetic construct
  source 1..9: note = Seed: VVGAVGVGK (KRAS G12V)
CVGMVPVGI

SEQ ID NO: 70042 - protein, 9 aa, synthetic construct
  source 1..9: note = Seed: VVGAVGVGK (KRAS G12V)
CVGMVPVGL

SEQ ID NO: 70043 - protein, 9 aa, synthetic construct
  source 1..9: note = Seed: VVGAVGVGK (KRAS G12V)
CVGMVPVGM

SEQ ID NO: 70044 - protein, 9 aa, synthetic construct
  source 1..9: note = Seed: VVGAVGVGK (KRAS G12V)
CVGMVPVGV

SEQ ID NO: 70045 - protein, 9 aa, synthetic construct
  source 1..9: note = Seed: VVGAVGVGK (KRAS G12V)
CVGMVRVGH

SEQ ID NO: 70046 - protein, 9 aa, synthetic construct
  source 1..9: note = Seed: VVGAVGVGK (KRAS G12V)
CVGMVRVGK

SEQ ID NO: 70047 - protein, 9 aa, synthetic construct
  source 1..9: note = Seed: VVGAVGVGK (KRAS G12V)
CVGMVRVGR

SEQ ID NO: 70048 - protein, 9 aa, synthetic construct
  source 1..9: note = Seed: VVGAVGVGK (KRAS G12V)
CVGMVSVGL

SEQ ID NO: 70049 - protein, 9 aa, synthetic construct
  source 1..9: note = Seed: VVGAVGVGK (KRAS G12V)
CVGMVSVGV

SEQ ID NO: 70050 - protein, 9 aa, synthetic construct
  source 1..9: note = Seed: VVGAVGVGK (KRAS G12V)
CVGVVKVGR

SEQ ID NO: 70051 - protein, 9 aa, synthetic construct
  source 1..9: note = Seed: VVGAVGVGK (KRAS G12V)
CVGVVRVGR

SEQ ID NO: 70052 - protein, 9 aa, synthetic construct
  source 1..9: note = Seed: VVGAVGVGK (KRAS G12V)
FVGAVAVGA

SEQ ID NO: 70053 - protein, 9 aa, synthetic construct
  source 1..9: note = Seed: VVGAVGVGK (KRAS G12V)
FVGAVAVGC

SEQ ID NO: 70054 - protein, 9 aa, synthetic construct
  source 1..9: note = Seed: VVGAVGVGK (KRAS G12V)
FVGAVAVGD

SEQ ID NO: 70055 - protein, 9 aa, synthetic construct
  source 1..9: note = Seed: VVGAVGVGK (KRAS G12V)
FVGAVAVGE

SEQ ID NO: 70056 - protein, 9 aa, synthetic construct
  source 1..9: note = Seed: VVGAVGVGK (KRAS G12V)
FVGAVAVGF

SEQ ID NO: 70057 - protein, 9 aa, synthetic construct
  source 1..9: note = Seed: VVGAVGVGK (KRAS G12V)
FVGAVAVGG

SEQ ID NO: 70058 - protein, 9 aa, synthetic construct
  source 1..9: note = Seed: VVGAVGVGK (KRAS G12V)
FVGAVAVGH

SEQ ID NO: 70059 - protein, 9 aa, synthetic construct
  source 1..9: note = Seed: VVGAVGVGK (KRAS G12V)
FVGAVAVGI

SEQ ID NO: 70060 - protein, 9 aa, synthetic construct
  source 1..9: note = Seed: VVGAVGVGK (KRAS G12V)
FVGAVAVGK

SEQ ID NO: 70061 - protein, 9 aa, synthetic construct
  source 1..9: note = Seed: VVGAVGVGK (KRAS G12V)
FVGAVAVGL

SEQ ID NO: 70062 - protein, 9 aa, synthetic construct
  source 1..9: note = Seed: VVGAVGVGK (KRAS G12V)
FVGAVAVGM

SEQ ID NO: 70063 - protein, 9 aa, synthetic construct
  source 1..9: note = Seed: VVGAVGVGK (KRAS G12V)
FVGAVAVGN

SEQ ID NO: 70064 - protein, 9 aa, synthetic construct
  source 1..9: note = Seed: VVGAVGVGK (KRAS G12V)
FVGAVAVGP

SEQ ID NO: 70065 - protein, 9 aa, synthetic construct
  source 1..9: note = Seed: VVGAVGVGK (KRAS G12V)
FVGAVAVGQ

SEQ ID NO: 70066 - protein, 9 aa, synthetic construct
  source 1..9: note = Seed: VVGAVGVGK (KRAS G12V)
FVGAVAVGR

SEQ ID NO: 70067 - protein, 9 aa, synthetic construct
  source 1..9: note = Seed: VVGAVGVGK (KRAS G12V)
FVGAVAVGS

SEQ ID NO: 70068 - protein, 9 aa, synthetic construct
  source 1..9: note = Seed: VVGAVGVGK (KRAS G12V)
FVGAVAVGT

SEQ ID NO: 70069 - protein, 9 aa, synthetic construct
  source 1..9: note = Seed: VVGAVGVGK (KRAS G12V)
FVGAVAVGV

SEQ ID NO: 70070 - protein, 9 aa, synthetic construct
  source 1..9: note = Seed: VVGAVGVGK (KRAS G12V)
FVGAVAVGY

SEQ ID NO: 70071 - protein, 9 aa, synthetic construct
  source 1..9: note = Seed: VVGAVGVGK (KRAS G12V)
FVGAVDVGA

SEQ ID NO: 70072 - protein, 9 aa, synthetic construct
  source 1..9: note = Seed: VVGAVGVGK (KRAS G12V)
FVGAVDVGI

SEQ ID NO: 70073 - protein, 9 aa, synthetic construct
  source 1..9: note = Seed: VVGAVGVGK (KRAS G12V)
FVGAVDVGV

SEQ ID NO: 70074 - protein, 9 aa, synthetic construct
  source 1..9: note = Seed: VVGAVGVGK (KRAS G12V)
FVGAVEVGA

SEQ ID NO: 70075 - protein, 9 aa, synthetic construct
  source 1..9: note = Seed: VVGAVGVGK (KRAS G12V)
FVGAVGVGA

SEQ ID NO: 70076 - protein, 9 aa, synthetic construct
  source 1..9: note = Seed: VVGAVGVGK (KRAS G12V)
FVGAVGVGD

SEQ ID NO: 70077 - protein, 9 aa, synthetic construct
  source 1..9: note = Seed: VVGAVGVGK (KRAS G12V)
FVGAVGVGF

SEQ ID NO: 70078 - protein, 9 aa, synthetic construct
  source 1..9: note = Seed: VVGAVGVGK (KRAS G12V)
FVGAVGVGG

SEQ ID NO: 70079 - protein, 9 aa, synthetic construct
  source 1..9: note = Seed: VVGAVGVGK (KRAS G12V)
FVGAVGVGH

SEQ ID NO: 70080 - protein, 9 aa, synthetic construct
  source 1..9: note = Seed: VVGAVGVGK (KRAS G12V)
FVGAVGVGI

SEQ ID NO: 70081 - protein, 9 aa, synthetic construct
  source 1..9: note = Seed: VVGAVGVGK (KRAS G12V)
FVGAVGVGK

SEQ ID NO: 70082 - protein, 9 aa, synthetic construct
  source 1..9: note = Seed: VVGAVGVGK (KRAS G12V)
FVGAVGVGL

SEQ ID NO: 70083 - protein, 9 aa, synthetic construct
  source 1..9: note = Seed: VVGAVGVGK (KRAS G12V)
FVGAVGVGM

SEQ ID NO: 70084 - protein, 9 aa, synthetic construct
  source 1..9: note = Seed: VVGAVGVGK (KRAS G12V)
FVGAVGVGN

SEQ ID NO: 70085 - protein, 9 aa, synthetic construct
  source 1..9: note = Seed: VVGAVGVGK (KRAS G12V)
FVGAVGVGP

SEQ ID NO: 70086 - protein, 9 aa, synthetic construct
  source 1..9: note = Seed: VVGAVGVGK (KRAS G12V)
FVGAVGVGQ

SEQ ID NO: 70087 - protein, 9 aa, synthetic construct
  source 1..9: note = Seed: VVGAVGVGK (KRAS G12V)
FVGAVGVGR

SEQ ID NO: 70088 - protein, 9 aa, synthetic construct
  source 1..9: note = Seed: VVGAVGVGK (KRAS G12V)
FVGAVGVGS

SEQ ID NO: 70089 - protein, 9 aa, synthetic construct
  source 1..9: note = Seed: VVGAVGVGK (KRAS G12V)
FVGAVGVGT

SEQ ID NO: 70090 - protein, 9 aa, synthetic construct
  source 1..9: note = Seed: VVGAVGVGK (KRAS G12V)
FVGAVGVGV

SEQ ID NO: 70091 - protein, 9 aa, synthetic construct
  source 1..9: note = Seed: VVGAVGVGK (KRAS G12V)
FVGAVGVGY

SEQ ID NO: 70092 - protein, 9 aa, synthetic construct
  source 1..9: note = Seed: VVGAVGVGK (KRAS G12V)
FVGAVHVGA

SEQ ID NO: 70093 - protein, 9 aa, synthetic construct
  source 1..9: note = Seed: VVGAVGVGK (KRAS G12V)
FVGAVHVGG

SEQ ID NO: 70094 - protein, 9 aa, synthetic construct
  source 1..9: note = Seed: VVGAVGVGK (KRAS G12V)
FVGAVHVGH

SEQ ID NO: 70095 - protein, 9 aa, synthetic construct
  source 1..9: note = Seed: VVGAVGVGK (KRAS G12V)
FVGAVHVGI

SEQ ID NO: 70096 - protein, 9 aa, synthetic construct
  source 1..9: note = Seed: VVGAVGVGK (KRAS G12V)
FVGAVHVGL

SEQ ID NO: 70097 - protein, 9 aa, synthetic construct
  source 1..9: note = Seed: VVGAVGVGK (KRAS G12V)
FVGAVHVGM

SEQ ID NO: 70098 - protein, 9 aa, synthetic construct
  source 1..9: note = Seed: VVGAVGVGK (KRAS G12V)
FVGAVHVGN

SEQ ID NO: 70099 - protein, 9 aa, synthetic construct
  source 1..9: note = Seed: VVGAVGVGK (KRAS G12V)
FVGAVHVGQ

SEQ ID NO: 70100 - protein, 9 aa, synthetic construct
  source 1..9: note = Seed: VVGAVGVGK (KRAS G12V)
FVGAVHVGR

SEQ ID NO: 70101 - protein, 9 aa, synthetic construct
  source 1..9: note = Seed: VVGAVGVGK (KRAS G12V)
FVGAVHVGS

SEQ ID NO: 70102 - protein, 9 aa, synthetic construct
  source 1..9: note = Seed: VVGAVGVGK (KRAS G12V)
FVGAVHVGT

SEQ ID NO: 70103 - protein, 9 aa, synthetic construct
  source 1..9: note = Seed: VVGAVGVGK (KRAS G12V)
FVGAVHVGV

SEQ ID NO: 70104 - protein, 9 aa, synthetic construct
  source 1..9: note = Seed: VVGAVGVGK (KRAS G12V)
FVGAVHVGY

SEQ ID NO: 70105 - protein, 9 aa, synthetic construct
  source 1..9: note = Seed: VVGAVGVGK (KRAS G12V)
FVGAVIVGH

SEQ ID NO: 70106 - protein, 9 aa, synthetic construct
  source 1..9: note = Seed: VVGAVGVGK (KRAS G12V)
FVGAVIVGN

SEQ ID NO: 70107 - protein, 9 aa, synthetic construct
  source 1..9: note = Seed: VVGAVGVGK (KRAS G12V)
FVGAVKVGA

SEQ ID NO: 70108 - protein, 9 aa, synthetic construct
  source 1..9: note = Seed: VVGAVGVGK (KRAS G12V)
FVGAVKVGD

SEQ ID NO: 70109 - protein, 9 aa, synthetic construct
  source 1..9: note = Seed: VVGAVGVGK (KRAS G12V)
FVGAVKVGE

SEQ ID NO: 70110 - protein, 9 aa, synthetic construct
  source 1..9: note = Seed: VVGAVGVGK (KRAS G12V)
FVGAVKVGF

SEQ ID NO: 70111 - protein, 9 aa, synthetic construct
  source 1..9: note = Seed: VVGAVGVGK (KRAS G12V)
FVGAVKVGG

SEQ ID NO: 70112 - protein, 9 aa, synthetic construct
  source 1..9: note = Seed: VVGAVGVGK (KRAS G12V)
FVGAVKVGH

SEQ ID NO: 70113 - protein, 9 aa, synthetic construct
  source 1..9: note = Seed: VVGAVGVGK (KRAS G12V)
FVGAVKVGI

SEQ ID NO: 70114 - protein, 9 aa, synthetic construct
  source 1..9: note = Seed: VVGAVGVGK (KRAS G12V)
FVGAVKVGK

SEQ ID NO: 70115 - protein, 9 aa, synthetic construct
  source 1..9: note = Seed: VVGAVGVGK (KRAS G12V)
FVGAVKVGL

SEQ ID NO: 70116 - protein, 9 aa, synthetic construct
  source 1..9: note = Seed: VVGAVGVGK (KRAS G12V)
FVGAVKVGM

SEQ ID NO: 70117 - protein, 9 aa, synthetic construct
  source 1..9: note = Seed: VVGAVGVGK (KRAS G12V)
FVGAVKVGN

SEQ ID NO: 70118 - protein, 9 aa, synthetic construct
  source 1..9: note = Seed: VVGAVGVGK (KRAS G12V)
FVGAVKVGP

SEQ ID NO: 70119 - protein, 9 aa, synthetic construct
  source 1..9: note = Seed: VVGAVGVGK (KRAS G12V)
FVGAVKVGQ

SEQ ID NO: 70120 - protein, 9 aa, synthetic construct
  source 1..9: note = Seed: VVGAVGVGK (KRAS G12V)
FVGAVKVGR

SEQ ID NO: 70121 - protein, 9 aa, synthetic construct
  source 1..9: note = Seed: VVGAVGVGK (KRAS G12V)
FVGAVKVGS

SEQ ID NO: 70122 - protein, 9 aa, synthetic construct
  source 1..9: note = Seed: VVGAVGVGK (KRAS G12V)
FVGAVKVGT

SEQ ID NO: 70123 - protein, 9 aa, synthetic construct
  source 1..9: note = Seed: VVGAVGVGK (KRAS G12V)
FVGAVKVGV

SEQ ID NO: 70124 - protein, 9 aa, synthetic construct
  source 1..9: note = Seed: VVGAVGVGK (KRAS G12V)
FVGAVKVGY

SEQ ID NO: 70125 - protein, 9 aa, synthetic construct
  source 1..9: note = Seed: VVGAVGVGK (KRAS G12V)
FVGAVMVGA

SEQ ID NO: 70126 - protein, 9 aa, synthetic construct
  source 1..9: note = Seed: VVGAVGVGK (KRAS G12V)
FVGAVMVGN

SEQ ID NO: 70127 - protein, 9 aa, synthetic construct
  source 1..9: note = Seed: VVGAVGVGK (KRAS G12V)
FVGAVNVGA

SEQ ID NO: 70128 - protein, 9 aa, synthetic construct
  source 1..9: note = Seed: VVGAVGVGK (KRAS G12V)
FVGAVNVGG

SEQ ID NO: 70129 - protein, 9 aa, synthetic construct
  source 1..9: note = Seed: VVGAVGVGK (KRAS G12V)
FVGAVNVGH

SEQ ID NO: 70130 - protein, 9 aa, synthetic construct
  source 1..9: note = Seed: VVGAVGVGK (KRAS G12V)
FVGAVNVGI

SEQ ID NO: 70131 - protein, 9 aa, synthetic construct
  source 1..9: note = Seed: VVGAVGVGK (KRAS G12V)
FVGAVNVGK

SEQ ID NO: 70132 - protein, 9 aa, synthetic construct
  source 1..9: note = Seed: VVGAVGVGK (KRAS G12V)
FVGAVNVGL

SEQ ID NO: 70133 - protein, 9 aa, synthetic construct
  source 1..9: note = Seed: VVGAVGVGK (KRAS G12V)
FVGAVNVGM

SEQ ID NO: 70134 - protein, 9 aa, synthetic construct
  source 1..9: note = Seed: VVGAVGVGK (KRAS G12V)
FVGAVNVGN

SEQ ID NO: 70135 - protein, 9 aa, synthetic construct
  source 1..9: note = Seed: VVGAVGVGK (KRAS G12V)
FVGAVNVGP

SEQ ID NO: 70136 - protein, 9 aa, synthetic construct
  source 1..9: note = Seed: VVGAVGVGK (KRAS G12V)
FVGAVNVGR

SEQ ID NO: 70137 - protein, 9 aa, synthetic construct
  source 1..9: note = Seed: VVGAVGVGK (KRAS G12V)
FVGAVNVGS

SEQ ID NO: 70138 - protein, 9 aa, synthetic construct
  source 1..9: note = Seed: VVGAVGVGK (KRAS G12V)
FVGAVNVGT

SEQ ID NO: 70139 - protein, 9 aa, synthetic construct
  source 1..9: note = Seed: VVGAVGVGK (KRAS G12V)
FVGAVNVGV

SEQ ID NO: 70140 - protein, 9 aa, synthetic construct
  source 1..9: note = Seed: VVGAVGVGK (KRAS G12V)
FVGAVNVGY

SEQ ID NO: 70141 - protein, 9 aa, synthetic construct
  source 1..9: note = Seed: VVGAVGVGK (KRAS G12V)
FVGAVPVGA

SEQ ID NO: 70142 - protein, 9 aa, synthetic construct
  source 1..9: note = Seed: VVGAVGVGK (KRAS G12V)
FVGAVPVGC

SEQ ID NO: 70143 - protein, 9 aa, synthetic construct
  source 1..9: note = Seed: VVGAVGVGK (KRAS G12V)
FVGAVPVGD

SEQ ID NO: 70144 - protein, 9 aa, synthetic construct
  source 1..9: note = Seed: VVGAVGVGK (KRAS G12V)
FVGAVPVGE

SEQ ID NO: 70145 - protein, 9 aa, synthetic construct
  source 1..9: note = Seed: VVGAVGVGK (KRAS G12V)
FVGAVPVGF

SEQ ID NO: 70146 - protein, 9 aa, synthetic construct
  source 1..9: note = Seed: VVGAVGVGK (KRAS G12V)
FVGAVPVGG

SEQ ID NO: 70147 - protein, 9 aa, synthetic construct
  source 1..9: note = Seed: VVGAVGVGK (KRAS G12V)
FVGAVPVGH

SEQ ID NO: 70148 - protein, 9 aa, synthetic construct
  source 1..9: note = Seed: VVGAVGVGK (KRAS G12V)
FVGAVPVGI

SEQ ID NO: 70149 - protein, 9 aa, synthetic construct
  source 1..9: note = Seed: VVGAVGVGK (KRAS G12V)
FVGAVPVGK

SEQ ID NO: 70150 - protein, 9 aa, synthetic construct
  source 1..9: note = Seed: VVGAVGVGK (KRAS G12V)
FVGAVPVGL

SEQ ID NO: 70151 - protein, 9 aa, synthetic construct
  source 1..9: note = Seed: VVGAVGVGK (KRAS G12V)
FVGAVPVGM

SEQ ID NO: 70152 - protein, 9 aa, synthetic construct
  source 1..9: note = Seed: VVGAVGVGK (KRAS G12V)
FVGAVPVGN

SEQ ID NO: 70153 - protein, 9 aa, synthetic construct
  source 1..9: note = Seed: VVGAVGVGK (KRAS G12V)
FVGAVPVGP

SEQ ID NO: 70154 - protein, 9 aa, synthetic construct
  source 1..9: note = Seed: VVGAVGVGK (KRAS G12V)
FVGAVPVGQ

SEQ ID NO: 70155 - protein, 9 aa, synthetic construct
  source 1..9: note = Seed: VVGAVGVGK (KRAS G12V)
FVGAVPVGR

SEQ ID NO: 70156 - protein, 9 aa, synthetic construct
  source 1..9: note = Seed: VVGAVGVGK (KRAS G12V)
FVGAVPVGS

SEQ ID NO: 70157 - protein, 9 aa, synthetic construct
  source 1..9: note = Seed: VVGAVGVGK (KRAS G12V)
FVGAVPVGT

SEQ ID NO: 70158 - protein, 9 aa, synthetic construct
  source 1..9: note = Seed: VVGAVGVGK (KRAS G12V)
FVGAVPVGV

SEQ ID NO: 70159 - protein, 9 aa, synthetic construct
  source 1..9: note = Seed: VVGAVGVGK (KRAS G12V)
FVGAVPVGW

SEQ ID NO: 70160 - protein, 9 aa, synthetic construct
  source 1..9: note = Seed: VVGAVGVGK (KRAS G12V)
FVGAVPVGY

SEQ ID NO: 70161 - protein, 9 aa, synthetic construct
  source 1..9: note = Seed: VVGAVGVGK (KRAS G12V)
FVGAVQVGA

SEQ ID NO: 70162 - protein, 9 aa, synthetic construct
  source 1..9: note = Seed: VVGAVGVGK (KRAS G12V)
FVGAVQVGL

SEQ ID NO: 70163 - protein, 9 aa, synthetic construct
  source 1..9: note = Seed: VVGAVGVGK (KRAS G12V)
FVGAVQVGM

SEQ ID NO: 70164 - protein, 9 aa, synthetic construct
  source 1..9: note = Seed: VVGAVGVGK (KRAS G12V)
FVGAVQVGN

SEQ ID NO: 70165 - protein, 9 aa, synthetic construct
  source 1..9: note = Seed: VVGAVGVGK (KRAS G12V)
FVGAVQVGR

SEQ ID NO: 70166 - protein, 9 aa, synthetic construct
  source 1..9: note = Seed: VVGAVGVGK (KRAS G12V)
FVGAVQVGS

SEQ ID NO: 70167 - protein, 9 aa, synthetic construct
  source 1..9: note = Seed: VVGAVGVGK (KRAS G12V)
FVGAVQVGT

SEQ ID NO: 70168 - protein, 9 aa, synthetic construct
  source 1..9: note = Seed: VVGAVGVGK (KRAS G12V)
FVGAVQVGV

SEQ ID NO: 70169 - protein, 9 aa, synthetic construct
  source 1..9: note = Seed: VVGAVGVGK (KRAS G12V)
FVGAVRVGA

SEQ ID NO: 70170 - protein, 9 aa, synthetic construct
  source 1..9: note = Seed: VVGAVGVGK (KRAS G12V)
FVGAVRVGD

SEQ ID NO: 70171 - protein, 9 aa, synthetic construct
  source 1..9: note = Seed: VVGAVGVGK (KRAS G12V)
FVGAVRVGE

SEQ ID NO: 70172 - protein, 9 aa, synthetic construct
  source 1..9: note = Seed: VVGAVGVGK (KRAS G12V)
FVGAVRVGG

SEQ ID NO: 70173 - protein, 9 aa, synthetic construct
  source 1..9: note = Seed: VVGAVGVGK (KRAS G12V)
FVGAVRVGH

SEQ ID NO: 70174 - protein, 9 aa, synthetic construct
  source 1..9: note = Seed: VVGAVGVGK (KRAS G12V)
FVGAVRVGI

SEQ ID NO: 70175 - protein, 9 aa, synthetic construct
  source 1..9: note = Seed: VVGAVGVGK (KRAS G12V)
FVGAVRVGK

SEQ ID NO: 70176 - protein, 9 aa, synthetic construct
  source 1..9: note = Seed: VVGAVGVGK (KRAS G12V)
FVGAVRVGL

SEQ ID NO: 70177 - protein, 9 aa, synthetic construct
  source 1..9: note = Seed: VVGAVGVGK (KRAS G12V)
FVGAVRVGM

SEQ ID NO: 70178 - protein, 9 aa, synthetic construct
  source 1..9: note = Seed: VVGAVGVGK (KRAS G12V)
FVGAVRVGN

SEQ ID NO: 70179 - protein, 9 aa, synthetic construct
  source 1..9: note = Seed: VVGAVGVGK (KRAS G12V)
FVGAVRVGP

SEQ ID NO: 70180 - protein, 9 aa, synthetic construct
  source 1..9: note = Seed: VVGAVGVGK (KRAS G12V)
FVGAVRVGQ

SEQ ID NO: 70181 - protein, 9 aa, synthetic construct
  source 1..9: note = Seed: VVGAVGVGK (KRAS G12V)
FVGAVRVGR

SEQ ID NO: 70182 - protein, 9 aa, synthetic construct
  source 1..9: note = Seed: VVGAVGVGK (KRAS G12V)
FVGAVRVGS

SEQ ID NO: 70183 - protein, 9 aa, synthetic construct
  source 1..9: note = Seed: VVGAVGVGK (KRAS G12V)
FVGAVRVGT

SEQ ID NO: 70184 - protein, 9 aa, synthetic construct
  source 1..9: note = Seed: VVGAVGVGK (KRAS G12V)
FVGAVRVGV

SEQ ID NO: 70185 - protein, 9 aa, synthetic construct
  source 1..9: note = Seed: VVGAVGVGK (KRAS G12V)
FVGAVRVGY

SEQ ID NO: 70186 - protein, 9 aa, synthetic construct
  source 1..9: note = Seed: VVGAVGVGK (KRAS G12V)
FVGAVSVGA

SEQ ID NO: 70187 - protein, 9 aa, synthetic construct
  source 1..9: note = Seed: VVGAVGVGK (KRAS G12V)
FVGAVSVGF

SEQ ID NO: 70188 - protein, 9 aa, synthetic construct
  source 1..9: note = Seed: VVGAVGVGK (KRAS G12V)
FVGAVSVGG

SEQ ID NO: 70189 - protein, 9 aa, synthetic construct
  source 1..9: note = Seed: VVGAVGVGK (KRAS G12V)
FVGAVSVGH

SEQ ID NO: 70190 - protein, 9 aa, synthetic construct
  source 1..9: note = Seed: VVGAVGVGK (KRAS G12V)
FVGAVSVGI

SEQ ID NO: 70191 - protein, 9 aa, synthetic construct
  source 1..9: note = Seed: VVGAVGVGK (KRAS G12V)
FVGAVSVGK

SEQ ID NO: 70192 - protein, 9 aa, synthetic construct
  source 1..9: note = Seed: VVGAVGVGK (KRAS G12V)
FVGAVSVGL

SEQ ID NO: 70193 - protein, 9 aa, synthetic construct
  source 1..9: note = Seed: VVGAVGVGK (KRAS G12V)
FVGAVSVGM

SEQ ID NO: 70194 - protein, 9 aa, synthetic construct
  source 1..9: note = Seed: VVGAVGVGK (KRAS G12V)
FVGAVSVGN

SEQ ID NO: 70195 - protein, 9 aa, synthetic construct
  source 1..9: note = Seed: VVGAVGVGK (KRAS G12V)
FVGAVSVGP

SEQ ID NO: 70196 - protein, 9 aa, synthetic construct
  source 1..9: note = Seed: VVGAVGVGK (KRAS G12V)
FVGAVSVGQ

SEQ ID NO: 70197 - protein, 9 aa, synthetic construct
  source 1..9: note = Seed: VVGAVGVGK (KRAS G12V)
FVGAVSVGR

SEQ ID NO: 70198 - protein, 9 aa, synthetic construct
  source 1..9: note = Seed: VVGAVGVGK (KRAS G12V)
FVGAVSVGS

SEQ ID NO: 70199 - protein, 9 aa, synthetic construct
  source 1..9: note = Seed: VVGAVGVGK (KRAS G12V)
FVGAVSVGT

SEQ ID NO: 70200 - protein, 9 aa, synthetic construct
  source 1..9: note = Seed: VVGAVGVGK (KRAS G12V)
FVGAVSVGV

SEQ ID NO: 70201 - protein, 9 aa, synthetic construct
  source 1..9: note = Seed: VVGAVGVGK (KRAS G12V)
FVGAVSVGY

SEQ ID NO: 70202 - protein, 9 aa, synthetic construct
  source 1..9: note = Seed: VVGAVGVGK (KRAS G12V)
FVGAVTVGA

SEQ ID NO: 70203 - protein, 9 aa, synthetic construct
  source 1..9: note = Seed: VVGAVGVGK (KRAS G12V)
FVGAVTVGG

SEQ ID NO: 70204 - protein, 9 aa, synthetic construct
  source 1..9: note = Seed: VVGAVGVGK (KRAS G12V)
FVGAVTVGH

SEQ ID NO: 70205 - protein, 9 aa, synthetic construct
  source 1..9: note = Seed: VVGAVGVGK (KRAS G12V)
FVGAVTVGI

SEQ ID NO: 70206 - protein, 9 aa, synthetic construct
  source 1..9: note = Seed: VVGAVGVGK (KRAS G12V)
FVGAVTVGK

SEQ ID NO: 70207 - protein, 9 aa, synthetic construct
  source 1..9: note = Seed: VVGAVGVGK (KRAS G12V)
FVGAVTVGL

SEQ ID NO: 70208 - protein, 9 aa, synthetic construct
  source 1..9: note = Seed: VVGAVGVGK (KRAS G12V)
FVGAVTVGM

SEQ ID NO: 70209 - protein, 9 aa, synthetic construct
  source 1..9: note = Seed: VVGAVGVGK (KRAS G12V)
FVGAVTVGN

SEQ ID NO: 70210 - protein, 9 aa, synthetic construct
  source 1..9: note = Seed: VVGAVGVGK (KRAS G12V)
FVGAVTVGP

SEQ ID NO: 70211 - protein, 9 aa, synthetic construct
  source 1..9: note = Seed: VVGAVGVGK (KRAS G12V)
FVGAVTVGQ

SEQ ID NO: 70212 - protein, 9 aa, synthetic construct
  source 1..9: note = Seed: VVGAVGVGK (KRAS G12V)
FVGAVTVGR

SEQ ID NO: 70213 - protein, 9 aa, synthetic construct
  source 1..9: note = Seed: VVGAVGVGK (KRAS G12V)
FVGAVTVGS

SEQ ID NO: 70214 - protein, 9 aa, synthetic construct
  source 1..9: note = Seed: VVGAVGVGK (KRAS G12V)
FVGAVTVGT

SEQ ID NO: 70215 - protein, 9 aa, synthetic construct
  source 1..9: note = Seed: VVGAVGVGK (KRAS G12V)
FVGAVTVGV

SEQ ID NO: 70216 - protein, 9 aa, synthetic construct
  source 1..9: note = Seed: VVGAVGVGK (KRAS G12V)
FVGAVTVGY

SEQ ID NO: 70217 - protein, 9 aa, synthetic construct
  source 1..9: note = Seed: VVGAVGVGK (KRAS G12V)
FVGAVVVGA

SEQ ID NO: 70218 - protein, 9 aa, synthetic construct
  source 1..9: note = Seed: VVGAVGVGK (KRAS G12V)
FVGAVVVGG

SEQ ID NO: 70219 - protein, 9 aa, synthetic construct
  source 1..9: note = Seed: VVGAVGVGK (KRAS G12V)
FVGAVVVGH

SEQ ID NO: 70220 - protein, 9 aa, synthetic construct
  source 1..9: note = Seed: VVGAVGVGK (KRAS G12V)
FVGAVVVGK

SEQ ID NO: 70221 - protein, 9 aa, synthetic construct
  source 1..9: note = Seed: VVGAVGVGK (KRAS G12V)
FVGAVVVGN

SEQ ID NO: 70222 - protein, 9 aa, synthetic construct
  source 1..9: note = Seed: VVGAVGVGK (KRAS G12V)
FVGAVVVGR

SEQ ID NO: 70223 - protein, 9 aa, synthetic construct
  source 1..9: note = Seed: VVGAVGVGK (KRAS G12V)
FVGAVVVGS

SEQ ID NO: 70224 - protein, 9 aa, synthetic construct
  source 1..9: note = Seed: VVGAVGVGK (KRAS G12V)
FVGAVVVGT

SEQ ID NO: 70225 - protein, 9 aa, synthetic construct
  source 1..9: note = Seed: VVGAVGVGK (KRAS G12V)
FVGCVAVGA

SEQ ID NO: 70226 - protein, 9 aa, synthetic construct
  source 1..9: note = Seed: VVGAVGVGK (KRAS G12V)
FVGCVAVGG

SEQ ID NO: 70227 - protein, 9 aa, synthetic construct
  source 1..9: note = Seed: VVGAVGVGK (KRAS G12V)
FVGCVAVGH

SEQ ID NO: 70228 - protein, 9 aa, synthetic construct
  source 1..9: note = Seed: VVGAVGVGK (KRAS G12V)
FVGCVAVGI

SEQ ID NO: 70229 - protein, 9 aa, synthetic construct
  source 1..9: note = Seed: VVGAVGVGK (KRAS G12V)
FVGCVAVGL

SEQ ID NO: 70230 - protein, 9 aa, synthetic construct
  source 1..9: note = Seed: VVGAVGVGK (KRAS G12V)
FVGCVAVGM

SEQ ID NO: 70231 - protein, 9 aa, synthetic construct
  source 1..9: note = Seed: VVGAVGVGK (KRAS G12V)
FVGCVAVGN

SEQ ID NO: 70232 - protein, 9 aa, synthetic construct
  source 1..9: note = Seed: VVGAVGVGK (KRAS G12V)
FVGCVAVGS

SEQ ID NO: 70233 - protein, 9 aa, synthetic construct
  source 1..9: note = Seed: VVGAVGVGK (KRAS G12V)
FVGCVAVGT

SEQ ID NO: 70234 - protein, 9 aa, synthetic construct
  source 1..9: note = Seed: VVGAVGVGK (KRAS G12V)
FVGCVAVGV

SEQ ID NO: 70235 - protein, 9 aa, synthetic construct
  source 1..9: note = Seed: VVGAVGVGK (KRAS G12V)
FVGCVGVGA

SEQ ID NO: 70236 - protein, 9 aa, synthetic construct
  source 1..9: note = Seed: VVGAVGVGK (KRAS G12V)
FVGCVGVGI

SEQ ID NO: 70237 - protein, 9 aa, synthetic construct
  source 1..9: note = Seed: VVGAVGVGK (KRAS G12V)
FVGCVGVGL

SEQ ID NO: 70238 - protein, 9 aa, synthetic construct
  source 1..9: note = Seed: VVGAVGVGK (KRAS G12V)
FVGCVGVGM

SEQ ID NO: 70239 - protein, 9 aa, synthetic construct
  source 1..9: note = Seed: VVGAVGVGK (KRAS G12V)
FVGCVGVGS

SEQ ID NO: 70240 - protein, 9 aa, synthetic construct
  source 1..9: note = Seed: VVGAVGVGK (KRAS G12V)
FVGCVGVGV

SEQ ID NO: 70241 - protein, 9 aa, synthetic construct
  source 1..9: note = Seed: VVGAVGVGK (KRAS G12V)
FVGCVIVGA

SEQ ID NO: 70242 - protein, 9 aa, synthetic construct
  source 1..9: note = Seed: VVGAVGVGK (KRAS G12V)
FVGCVKVGA

SEQ ID NO: 70243 - protein, 9 aa, synthetic construct
  source 1..9: note = Seed: VVGAVGVGK (KRAS G12V)
FVGCVKVGG

SEQ ID NO: 70244 - protein, 9 aa, synthetic construct
  source 1..9: note = Seed: VVGAVGVGK (KRAS G12V)
FVGCVKVGH

SEQ ID NO: 70245 - protein, 9 aa, synthetic construct
  source 1..9: note = Seed: VVGAVGVGK (KRAS G12V)
FVGCVKVGN

SEQ ID NO: 70246 - protein, 9 aa, synthetic construct
  source 1..9: note = Seed: VVGAVGVGK (KRAS G12V)
FVGCVKVGQ

SEQ ID NO: 70247 - protein, 9 aa, synthetic construct
  source 1..9: note = Seed: VVGAVGVGK (KRAS G12V)
FVGCVKVGR

SEQ ID NO: 70248 - protein, 9 aa, synthetic construct
  source 1..9: note = Seed: VVGAVGVGK (KRAS G12V)
FVGCVKVGS

SEQ ID NO: 70249 - protein, 9 aa, synthetic construct
  source 1..9: note = Seed: VVGAVGVGK (KRAS G12V)
FVGCVKVGT

SEQ ID NO: 70250 - protein, 9 aa, synthetic construct
  source 1..9: note = Seed: VVGAVGVGK (KRAS G12V)
FVGCVPVGA

SEQ ID NO: 70251 - protein, 9 aa, synthetic construct
  source 1..9: note = Seed: VVGAVGVGK (KRAS G12V)
FVGCVPVGG

SEQ ID NO: 70252 - protein, 9 aa, synthetic construct
  source 1..9: note = Seed: VVGAVGVGK (KRAS G12V)
FVGCVPVGI

SEQ ID NO: 70253 - protein, 9 aa, synthetic construct
  source 1..9: note = Seed: VVGAVGVGK (KRAS G12V)
FVGCVPVGL

SEQ ID NO: 70254 - protein, 9 aa, synthetic construct
  source 1..9: note = Seed: VVGAVGVGK (KRAS G12V)
FVGCVPVGM

SEQ ID NO: 70255 - protein, 9 aa, synthetic construct
  source 1..9: note = Seed: VVGAVGVGK (KRAS G12V)
FVGCVPVGN

SEQ ID NO: 70256 - protein, 9 aa, synthetic construct
  source 1..9: note = Seed: VVGAVGVGK (KRAS G12V)
FVGCVPVGS

SEQ ID NO: 70257 - protein, 9 aa, synthetic construct
  source 1..9: note = Seed: VVGAVGVGK (KRAS G12V)
FVGCVPVGT

SEQ ID NO: 70258 - protein, 9 aa, synthetic construct
  source 1..9: note = Seed: VVGAVGVGK (KRAS G12V)
FVGCVPVGV

SEQ ID NO: 70259 - protein, 9 aa, synthetic construct
  source 1..9: note = Seed: VVGAVGVGK (KRAS G12V)
FVGCVRVGA

SEQ ID NO: 70260 - protein, 9 aa, synthetic construct
  source 1..9: note = Seed: VVGAVGVGK (KRAS G12V)
FVGCVRVGG

SEQ ID NO: 70261 - protein, 9 aa, synthetic construct
  source 1..9: note = Seed: VVGAVGVGK (KRAS G12V)
FVGCVRVGH

SEQ ID NO: 70262 - protein, 9 aa, synthetic construct
  source 1..9: note = Seed: VVGAVGVGK (KRAS G12V)
FVGCVRVGN

SEQ ID NO: 70263 - protein, 9 aa, synthetic construct
  source 1..9: note = Seed: VVGAVGVGK (KRAS G12V)
FVGCVRVGQ

SEQ ID NO: 70264 - protein, 9 aa, synthetic construct
  source 1..9: note = Seed: VVGAVGVGK (KRAS G12V)
FVGCVRVGR

SEQ ID NO: 70265 - protein, 9 aa, synthetic construct
  source 1..9: note = Seed: VVGAVGVGK (KRAS G12V)
FVGCVRVGS

SEQ ID NO: 70266 - protein, 9 aa, synthetic construct
  source 1..9: note = Seed: VVGAVGVGK (KRAS G12V)
FVGCVRVGT

SEQ ID NO: 70267 - protein, 9 aa, synthetic construct
  source 1..9: note = Seed: VVGAVGVGK (KRAS G12V)
FVGCVSVGA

SEQ ID NO: 70268 - protein, 9 aa, synthetic construct
  source 1..9: note = Seed: VVGAVGVGK (KRAS G12V)
FVGCVSVGG

SEQ ID NO: 70269 - protein, 9 aa, synthetic construct
  source 1..9: note = Seed: VVGAVGVGK (KRAS G12V)
FVGCVSVGI

SEQ ID NO: 70270 - protein, 9 aa, synthetic construct
  source 1..9: note = Seed: VVGAVGVGK (KRAS G12V)
FVGCVSVGL

SEQ ID NO: 70271 - protein, 9 aa, synthetic construct
  source 1..9: note = Seed: VVGAVGVGK (KRAS G12V)
FVGCVSVGM

SEQ ID NO: 70272 - protein, 9 aa, synthetic construct
  source 1..9: note = Seed: VVGAVGVGK (KRAS G12V)
FVGCVSVGS

SEQ ID NO: 70273 - protein, 9 aa, synthetic construct
  source 1..9: note = Seed: VVGAVGVGK (KRAS G12V)
FVGCVSVGT

SEQ ID NO: 70274 - protein, 9 aa, synthetic construct
  source 1..9: note = Seed: VVGAVGVGK (KRAS G12V)
FVGCVSVGV

SEQ ID NO: 70275 - protein, 9 aa, synthetic construct
  source 1..9: note = Seed: VVGAVGVGK (KRAS G12V)
FVGCVTVGA

SEQ ID NO: 70276 - protein, 9 aa, synthetic construct
  source 1..9: note = Seed: VVGAVGVGK (KRAS G12V)
FVGDVAVGA

SEQ ID NO: 70277 - protein, 9 aa, synthetic construct
  source 1..9: note = Seed: VVGAVGVGK (KRAS G12V)
FVGDVAVGI

SEQ ID NO: 70278 - protein, 9 aa, synthetic construct
  source 1..9: note = Seed: VVGAVGVGK (KRAS G12V)
FVGDVAVGL

SEQ ID NO: 70279 - protein, 9 aa, synthetic construct
  source 1..9: note = Seed: VVGAVGVGK (KRAS G12V)
FVGDVAVGM

SEQ ID NO: 70280 - protein, 9 aa, synthetic construct
  source 1..9: note = Seed: VVGAVGVGK (KRAS G12V)
FVGDVAVGS

SEQ ID NO: 70281 - protein, 9 aa, synthetic construct
  source 1..9: note = Seed: VVGAVGVGK (KRAS G12V)
FVGDVAVGT

SEQ ID NO: 70282 - protein, 9 aa, synthetic construct
  source 1..9: note = Seed: VVGAVGVGK (KRAS G12V)
FVGDVAVGV

SEQ ID NO: 70283 - protein, 9 aa, synthetic construct
  source 1..9: note = Seed: VVGAVGVGK (KRAS G12V)
FVGDVPVGA

SEQ ID NO: 70284 - protein, 9 aa, synthetic construct
  source 1..9: note = Seed: VVGAVGVGK (KRAS G12V)
FVGDVPVGI

SEQ ID NO: 70285 - protein, 9 aa, synthetic construct
  source 1..9: note = Seed: VVGAVGVGK (KRAS G12V)
FVGDVPVGL

SEQ ID NO: 70286 - protein, 9 aa, synthetic construct
  source 1..9: note = Seed: VVGAVGVGK (KRAS G12V)
FVGDVPVGV

SEQ ID NO: 70287 - protein, 9 aa, synthetic construct
  source 1..9: note = Seed: VVGAVGVGK (KRAS G12V)
FVGEVAVGA

SEQ ID NO: 70288 - protein, 9 aa, synthetic construct
  source 1..9: note = Seed: VVGAVGVGK (KRAS G12V)
FVGEVAVGG

SEQ ID NO: 70289 - protein, 9 aa, synthetic construct
  source 1..9: note = Seed: VVGAVGVGK (KRAS G12V)
FVGEVAVGH

SEQ ID NO: 70290 - protein, 9 aa, synthetic construct
  source 1..9: note = Seed: VVGAVGVGK (KRAS G12V)
FVGEVAVGI

SEQ ID NO: 70291 - protein, 9 aa, synthetic construct
  source 1..9: note = Seed: VVGAVGVGK (KRAS G12V)
FVGEVAVGK

SEQ ID NO: 70292 - protein, 9 aa, synthetic construct
  source 1..9: note = Seed: VVGAVGVGK (KRAS G12V)
FVGEVAVGL

SEQ ID NO: 70293 - protein, 9 aa, synthetic construct
  source 1..9: note = Seed: VVGAVGVGK (KRAS G12V)
FVGEVAVGM

SEQ ID NO: 70294 - protein, 9 aa, synthetic construct
  source 1..9: note = Seed: VVGAVGVGK (KRAS G12V)
FVGEVAVGN

SEQ ID NO: 70295 - protein, 9 aa, synthetic construct
  source 1..9: note = Seed: VVGAVGVGK (KRAS G12V)
FVGEVAVGP

SEQ ID NO: 70296 - protein, 9 aa, synthetic construct
  source 1..9: note = Seed: VVGAVGVGK (KRAS G12V)
FVGEVAVGQ

SEQ ID NO: 70297 - protein, 9 aa, synthetic construct
  source 1..9: note = Seed: VVGAVGVGK (KRAS G12V)
FVGEVAVGR

SEQ ID NO: 70298 - protein, 9 aa, synthetic construct
  source 1..9: note = Seed: VVGAVGVGK (KRAS G12V)
FVGEVAVGS

SEQ ID NO: 70299 - protein, 9 aa, synthetic construct
  source 1..9: note = Seed: VVGAVGVGK (KRAS G12V)
FVGEVAVGT

SEQ ID NO: 70300 - protein, 9 aa, synthetic construct
  source 1..9: note = Seed: VVGAVGVGK (KRAS G12V)
FVGEVAVGV

SEQ ID NO: 70301 - protein, 9 aa, synthetic construct
  source 1..9: note = Seed: VVGAVGVGK (KRAS G12V)
FVGEVAVGY

SEQ ID NO: 70302 - protein, 9 aa, synthetic construct
  source 1..9: note = Seed: VVGAVGVGK (KRAS G12V)
FVGEVGVGA

SEQ ID NO: 70303 - protein, 9 aa, synthetic construct
  source 1..9: note = Seed: VVGAVGVGK (KRAS G12V)
FVGEVGVGG

SEQ ID NO: 70304 - protein, 9 aa, synthetic construct
  source 1..9: note = Seed: VVGAVGVGK (KRAS G12V)
FVGEVGVGH

SEQ ID NO: 70305 - protein, 9 aa, synthetic construct
  source 1..9: note = Seed: VVGAVGVGK (KRAS G12V)
FVGEVGVGI

SEQ ID NO: 70306 - protein, 9 aa, synthetic construct
  source 1..9: note = Seed: VVGAVGVGK (KRAS G12V)
FVGEVGVGL

SEQ ID NO: 70307 - protein, 9 aa, synthetic construct
  source 1..9: note = Seed: VVGAVGVGK (KRAS G12V)
FVGEVGVGM

SEQ ID NO: 70308 - protein, 9 aa, synthetic construct
  source 1..9: note = Seed: VVGAVGVGK (KRAS G12V)
FVGEVGVGN

SEQ ID NO: 70309 - protein, 9 aa, synthetic construct
  source 1..9: note = Seed: VVGAVGVGK (KRAS G12V)
FVGEVGVGS

SEQ ID NO: 70310 - protein, 9 aa, synthetic construct
  source 1..9: note = Seed: VVGAVGVGK (KRAS G12V)
FVGEVGVGT

SEQ ID NO: 70311 - protein, 9 aa, synthetic construct
  source 1..9: note = Seed: VVGAVGVGK (KRAS G12V)
FVGEVGVGV

SEQ ID NO: 70312 - protein, 9 aa, synthetic construct
  source 1..9: note = Seed: VVGAVGVGK (KRAS G12V)
FVGEVKVGA

SEQ ID NO: 70313 - protein, 9 aa, synthetic construct
  source 1..9: note = Seed: VVGAVGVGK (KRAS G12V)
FVGEVKVGG

SEQ ID NO: 70314 - protein, 9 aa, synthetic construct
  source 1..9: note = Seed: VVGAVGVGK (KRAS G12V)
FVGEVKVGH

SEQ ID NO: 70315 - protein, 9 aa, synthetic construct
  source 1..9: note = Seed: VVGAVGVGK (KRAS G12V)
FVGEVKVGQ

SEQ ID NO: 70316 - protein, 9 aa, synthetic construct
  source 1..9: note = Seed: VVGAVGVGK (KRAS G12V)
FVGEVKVGS

SEQ ID NO: 70317 - protein, 9 aa, synthetic construct
  source 1..9: note = Seed: VVGAVGVGK (KRAS G12V)
FVGEVNVGA

SEQ ID NO: 70318 - protein, 9 aa, synthetic construct
  source 1..9: note = Seed: VVGAVGVGK (KRAS G12V)
FVGEVNVGG

SEQ ID NO: 70319 - protein, 9 aa, synthetic construct
  source 1..9: note = Seed: VVGAVGVGK (KRAS G12V)
FVGEVNVGI

SEQ ID NO: 70320 - protein, 9 aa, synthetic construct
  source 1..9: note = Seed: VVGAVGVGK (KRAS G12V)
FVGEVNVGL

SEQ ID NO: 70321 - protein, 9 aa, synthetic construct
  source 1..9: note = Seed: VVGAVGVGK (KRAS G12V)
FVGEVNVGM

SEQ ID NO: 70322 - protein, 9 aa, synthetic construct
  source 1..9: note = Seed: VVGAVGVGK (KRAS G12V)
FVGEVNVGS

SEQ ID NO: 70323 - protein, 9 aa, synthetic construct
  source 1..9: note = Seed: VVGAVGVGK (KRAS G12V)
FVGEVNVGT

SEQ ID NO: 70324 - protein, 9 aa, synthetic construct
  source 1..9: note = Seed: VVGAVGVGK (KRAS G12V)
FVGEVNVGV

SEQ ID NO: 70325 - protein, 9 aa, synthetic construct
  source 1..9: note = Seed: VVGAVGVGK (KRAS G12V)
FVGEVPVGA

SEQ ID NO: 70326 - protein, 9 aa, synthetic construct
  source 1..9: note = Seed: VVGAVGVGK (KRAS G12V)
FVGEVPVGG

SEQ ID NO: 70327 - protein, 9 aa, synthetic construct
  source 1..9: note = Seed: VVGAVGVGK (KRAS G12V)
FVGEVPVGH

SEQ ID NO: 70328 - protein, 9 aa, synthetic construct
  source 1..9: note = Seed: VVGAVGVGK (KRAS G12V)
FVGEVPVGI

SEQ ID NO: 70329 - protein, 9 aa, synthetic construct
  source 1..9: note = Seed: VVGAVGVGK (KRAS G12V)
FVGEVPVGL

SEQ ID NO: 70330 - protein, 9 aa, synthetic construct
  source 1..9: note = Seed: VVGAVGVGK (KRAS G12V)
FVGEVPVGM

SEQ ID NO: 70331 - protein, 9 aa, synthetic construct
  source 1..9: note = Seed: VVGAVGVGK (KRAS G12V)
FVGEVPVGN

SEQ ID NO: 70332 - protein, 9 aa, synthetic construct
  source 1..9: note = Seed: VVGAVGVGK (KRAS G12V)
FVGEVPVGS

SEQ ID NO: 70333 - protein, 9 aa, synthetic construct
  source 1..9: note = Seed: VVGAVGVGK (KRAS G12V)
FVGEVPVGT

SEQ ID NO: 70334 - protein, 9 aa, synthetic construct
  source 1..9: note = Seed: VVGAVGVGK (KRAS G12V)
FVGEVPVGV

SEQ ID NO: 70335 - protein, 9 aa, synthetic construct
  source 1..9: note = Seed: VVGAVGVGK (KRAS G12V)
FVGEVPVGY

SEQ ID NO: 70336 - protein, 9 aa, synthetic construct
  source 1..9: note = Seed: VVGAVGVGK (KRAS G12V)
FVGEVRVGA

SEQ ID NO: 70337 - protein, 9 aa, synthetic construct
  source 1..9: note = Seed: VVGAVGVGK (KRAS G12V)
FVGEVRVGG

SEQ ID NO: 70338 - protein, 9 aa, synthetic construct
  source 1..9: note = Seed: VVGAVGVGK (KRAS G12V)
FVGEVRVGH

SEQ ID NO: 70339 - protein, 9 aa, synthetic construct
  source 1..9: note = Seed: VVGAVGVGK (KRAS G12V)
FVGEVRVGQ

SEQ ID NO: 70340 - protein, 9 aa, synthetic construct
  source 1..9: note = Seed: VVGAVGVGK (KRAS G12V)
FVGEVRVGS

SEQ ID NO: 70341 - protein, 9 aa, synthetic construct
  source 1..9: note = Seed: VVGAVGVGK (KRAS G12V)
FVGEVRVGT

SEQ ID NO: 70342 - protein, 9 aa, synthetic construct
  source 1..9: note = Seed: VVGAVGVGK (KRAS G12V)
FVGEVSVGA

SEQ ID NO: 70343 - protein, 9 aa, synthetic construct
  source 1..9: note = Seed: VVGAVGVGK (KRAS G12V)
FVGEVSVGG

SEQ ID NO: 70344 - protein, 9 aa, synthetic construct
  source 1..9: note = Seed: VVGAVGVGK (KRAS G12V)
FVGEVSVGH

SEQ ID NO: 70345 - protein, 9 aa, synthetic construct
  source 1..9: note = Seed: VVGAVGVGK (KRAS G12V)
FVGEVSVGI

SEQ ID NO: 70346 - protein, 9 aa, synthetic construct
  source 1..9: note = Seed: VVGAVGVGK (KRAS G12V)
FVGEVSVGL

SEQ ID NO: 70347 - protein, 9 aa, synthetic construct
  source 1..9: note = Seed: VVGAVGVGK (KRAS G12V)
FVGEVSVGM

SEQ ID NO: 70348 - protein, 9 aa, synthetic construct
  source 1..9: note = Seed: VVGAVGVGK (KRAS G12V)
FVGEVSVGN

SEQ ID NO: 70349 - protein, 9 aa, synthetic construct
  source 1..9: note = Seed: VVGAVGVGK (KRAS G12V)
FVGEVSVGS

SEQ ID NO: 70350 - protein, 9 aa, synthetic construct
  source 1..9: note = Seed: VVGAVGVGK (KRAS G12V)
FVGEVSVGT

SEQ ID NO: 70351 - protein, 9 aa, synthetic construct
  source 1..9: note = Seed: VVGAVGVGK (KRAS G12V)
FVGEVSVGV

SEQ ID NO: 70352 - protein, 9 aa, synthetic construct
  source 1..9: note = Seed: VVGAVGVGK (KRAS G12V)
FVGEVTVGA

SEQ ID NO: 70353 - protein, 9 aa, synthetic construct
  source 1..9: note = Seed: VVGAVGVGK (KRAS G12V)
FVGEVTVGG

SEQ ID NO: 70354 - protein, 9 aa, synthetic construct
  source 1..9: note = Seed: VVGAVGVGK (KRAS G12V)
FVGEVTVGI

SEQ ID NO: 70355 - protein, 9 aa, synthetic construct
  source 1..9: note = Seed: VVGAVGVGK (KRAS G12V)
FVGEVTVGL

SEQ ID NO: 70356 - protein, 9 aa, synthetic construct
  source 1..9: note = Seed: VVGAVGVGK (KRAS G12V)
FVGEVTVGM

SEQ ID NO: 70357 - protein, 9 aa, synthetic construct
  source 1..9: note = Seed: VVGAVGVGK (KRAS G12V)
FVGEVTVGS

SEQ ID NO: 70358 - protein, 9 aa, synthetic construct
  source 1..9: note = Seed: VVGAVGVGK (KRAS G12V)
FVGEVTVGT

SEQ ID NO: 70359 - protein, 9 aa, synthetic construct
  source 1..9: note = Seed: VVGAVGVGK (KRAS G12V)
FVGEVTVGV

SEQ ID NO: 70360 - protein, 9 aa, synthetic construct
  source 1..9: note = Seed: VVGAVGVGK (KRAS G12V)
FVGFVAVGA

SEQ ID NO: 70361 - protein, 9 aa, synthetic construct
  source 1..9: note = Seed: VVGAVGVGK (KRAS G12V)
FVGFVAVGG

SEQ ID NO: 70362 - protein, 9 aa, synthetic construct
  source 1..9: note = Seed: VVGAVGVGK (KRAS G12V)
FVGFVAVGH

SEQ ID NO: 70363 - protein, 9 aa, synthetic construct
  source 1..9: note = Seed: VVGAVGVGK (KRAS G12V)
FVGFVAVGI

SEQ ID NO: 70364 - protein, 9 aa, synthetic construct
  source 1..9: note = Seed: VVGAVGVGK (KRAS G12V)
FVGFVAVGK

SEQ ID NO: 70365 - protein, 9 aa, synthetic construct
  source 1..9: note = Seed: VVGAVGVGK (KRAS G12V)
FVGFVAVGL

SEQ ID NO: 70366 - protein, 9 aa, synthetic construct
  source 1..9: note = Seed: VVGAVGVGK (KRAS G12V)
FVGFVAVGM

SEQ ID NO: 70367 - protein, 9 aa, synthetic construct
  source 1..9: note = Seed: VVGAVGVGK (KRAS G12V)
FVGFVAVGN

SEQ ID NO: 70368 - protein, 9 aa, synthetic construct
  source 1..9: note = Seed: VVGAVGVGK (KRAS G12V)
FVGFVAVGR

SEQ ID NO: 70369 - protein, 9 aa, synthetic construct
  source 1..9: note = Seed: VVGAVGVGK (KRAS G12V)
FVGFVAVGS

SEQ ID NO: 70370 - protein, 9 aa, synthetic construct
  source 1..9: note = Seed: VVGAVGVGK (KRAS G12V)
FVGFVAVGV

SEQ ID NO: 70371 - protein, 9 aa, synthetic construct
  source 1..9: note = Seed: VVGAVGVGK (KRAS G12V)
FVGFVAVGY

SEQ ID NO: 70372 - protein, 9 aa, synthetic construct
  source 1..9: note = Seed: VVGAVGVGK (KRAS G12V)
FVGFVGVGA

SEQ ID NO: 70373 - protein, 9 aa, synthetic construct
  source 1..9: note = Seed: VVGAVGVGK (KRAS G12V)
FVGFVGVGH

SEQ ID NO: 70374 - protein, 9 aa, synthetic construct
  source 1..9: note = Seed: VVGAVGVGK (KRAS G12V)
FVGFVGVGK

SEQ ID NO: 70375 - protein, 9 aa, synthetic construct
  source 1..9: note = Seed: VVGAVGVGK (KRAS G12V)
FVGFVGVGM

SEQ ID NO: 70376 - protein, 9 aa, synthetic construct
  source 1..9: note = Seed: VVGAVGVGK (KRAS G12V)
FVGFVGVGR

SEQ ID NO: 70377 - protein, 9 aa, synthetic construct
  source 1..9: note = Seed: VVGAVGVGK (KRAS G12V)
FVGFVGVGT

SEQ ID NO: 70378 - protein, 9 aa, synthetic construct
  source 1..9: note = Seed: VVGAVGVGK (KRAS G12V)
FVGFVGVGV

SEQ ID NO: 70379 - protein, 9 aa, synthetic construct
  source 1..9: note = Seed: VVGAVGVGK (KRAS G12V)
FVGFVHVGL

SEQ ID NO: 70380 - protein, 9 aa, synthetic construct
  source 1..9: note = Seed: VVGAVGVGK (KRAS G12V)
FVGFVHVGR

SEQ ID NO: 70381 - protein, 9 aa, synthetic construct
  source 1..9: note = Seed: VVGAVGVGK (KRAS G12V)
FVGFVKVGA

SEQ ID NO: 70382 - protein, 9 aa, synthetic construct
  source 1..9: note = Seed: VVGAVGVGK (KRAS G12V)
FVGFVKVGG

SEQ ID NO: 70383 - protein, 9 aa, synthetic construct
  source 1..9: note = Seed: VVGAVGVGK (KRAS G12V)
FVGFVKVGH

SEQ ID NO: 70384 - protein, 9 aa, synthetic construct
  source 1..9: note = Seed: VVGAVGVGK (KRAS G12V)
FVGFVKVGK

SEQ ID NO: 70385 - protein, 9 aa, synthetic construct
  source 1..9: note = Seed: VVGAVGVGK (KRAS G12V)
FVGFVKVGL

SEQ ID NO: 70386 - protein, 9 aa, synthetic construct
  source 1..9: note = Seed: VVGAVGVGK (KRAS G12V)
FVGFVKVGN

SEQ ID NO: 70387 - protein, 9 aa, synthetic construct
  source 1..9: note = Seed: VVGAVGVGK (KRAS G12V)
FVGFVKVGQ

SEQ ID NO: 70388 - protein, 9 aa, synthetic construct
  source 1..9: note = Seed: VVGAVGVGK (KRAS G12V)
FVGFVKVGR

SEQ ID NO: 70389 - protein, 9 aa, synthetic construct
  source 1..9: note = Seed: VVGAVGVGK (KRAS G12V)
FVGFVKVGS

SEQ ID NO: 70390 - protein, 9 aa, synthetic construct
  source 1..9: note = Seed: VVGAVGVGK (KRAS G12V)
FVGFVNVGA

SEQ ID NO: 70391 - protein, 9 aa, synthetic construct
  source 1..9: note = Seed: VVGAVGVGK (KRAS G12V)
FVGFVNVGH

SEQ ID NO: 70392 - protein, 9 aa, synthetic construct
  source 1..9: note = Seed: VVGAVGVGK (KRAS G12V)
FVGFVNVGK

SEQ ID NO: 70393 - protein, 9 aa, synthetic construct
  source 1..9: note = Seed: VVGAVGVGK (KRAS G12V)
FVGFVNVGM

SEQ ID NO: 70394 - protein, 9 aa, synthetic construct
  source 1..9: note = Seed: VVGAVGVGK (KRAS G12V)
FVGFVNVGR

SEQ ID NO: 70395 - protein, 9 aa, synthetic construct
  source 1..9: note = Seed: VVGAVGVGK (KRAS G12V)
FVGFVNVGS

SEQ ID NO: 70396 - protein, 9 aa, synthetic construct
  source 1..9: note = Seed: VVGAVGVGK (KRAS G12V)
FVGFVNVGV

SEQ ID NO: 70397 - protein, 9 aa, synthetic construct
  source 1..9: note = Seed: VVGAVGVGK (KRAS G12V)
FVGFVPVGA

SEQ ID NO: 70398 - protein, 9 aa, synthetic construct
  source 1..9: note = Seed: VVGAVGVGK (KRAS G12V)
FVGFVPVGH

SEQ ID NO: 70399 - protein, 9 aa, synthetic construct
  source 1..9: note = Seed: VVGAVGVGK (KRAS G12V)
FVGFVPVGI

SEQ ID NO: 70400 - protein, 9 aa, synthetic construct
  source 1..9: note = Seed: VVGAVGVGK (KRAS G12V)
FVGFVPVGK

SEQ ID NO: 70401 - protein, 9 aa, synthetic construct
  source 1..9: note = Seed: VVGAVGVGK (KRAS G12V)
FVGFVPVGL

SEQ ID NO: 70402 - protein, 9 aa, synthetic construct
  source 1..9: note = Seed: VVGAVGVGK (KRAS G12V)
FVGFVPVGM

SEQ ID NO: 70403 - protein, 9 aa, synthetic construct
  source 1..9: note = Seed: VVGAVGVGK (KRAS G12V)
FVGFVPVGR

SEQ ID NO: 70404 - protein, 9 aa, synthetic construct
  source 1..9: note = Seed: VVGAVGVGK (KRAS G12V)
FVGFVPVGS

SEQ ID NO: 70405 - protein, 9 aa, synthetic construct
  source 1..9: note = Seed: VVGAVGVGK (KRAS G12V)
FVGFVPVGV

SEQ ID NO: 70406 - protein, 9 aa, synthetic construct
  source 1..9: note = Seed: VVGAVGVGK (KRAS G12V)
FVGFVPVGY

SEQ ID NO: 70407 - protein, 9 aa, synthetic construct
  source 1..9: note = Seed: VVGAVGVGK (KRAS G12V)
FVGFVRVGG

SEQ ID NO: 70408 - protein, 9 aa, synthetic construct
  source 1..9: note = Seed: VVGAVGVGK (KRAS G12V)
FVGFVRVGH

SEQ ID NO: 70409 - protein, 9 aa, synthetic construct
  source 1..9: note = Seed: VVGAVGVGK (KRAS G12V)
FVGFVRVGK

SEQ ID NO: 70410 - protein, 9 aa, synthetic construct
  source 1..9: note = Seed: VVGAVGVGK (KRAS G12V)
FVGFVRVGN

SEQ ID NO: 70411 - protein, 9 aa, synthetic construct
  source 1..9: note = Seed: VVGAVGVGK (KRAS G12V)
FVGFVRVGR

SEQ ID NO: 70412 - protein, 9 aa, synthetic construct
  source 1..9: note = Seed: VVGAVGVGK (KRAS G12V)
FVGFVRVGS

SEQ ID NO: 70413 - protein, 9 aa, synthetic construct
  source 1..9: note = Seed: VVGAVGVGK (KRAS G12V)
FVGFVSVGA

SEQ ID NO: 70414 - protein, 9 aa, synthetic construct
  source 1..9: note = Seed: VVGAVGVGK (KRAS G12V)
FVGFVSVGH

SEQ ID NO: 70415 - protein, 9 aa, synthetic construct
  source 1..9: note = Seed: VVGAVGVGK (KRAS G12V)
FVGFVSVGI

SEQ ID NO: 70416 - protein, 9 aa, synthetic construct
  source 1..9: note = Seed: VVGAVGVGK (KRAS G12V)
FVGFVSVGK

SEQ ID NO: 70417 - protein, 9 aa, synthetic construct
  source 1..9: note = Seed: VVGAVGVGK (KRAS G12V)
FVGFVSVGL

SEQ ID NO: 70418 - protein, 9 aa, synthetic construct
  source 1..9: note = Seed: VVGAVGVGK (KRAS G12V)
FVGFVSVGM

SEQ ID NO: 70419 - protein, 9 aa, synthetic construct
  source 1..9: note = Seed: VVGAVGVGK (KRAS G12V)
FVGFVSVGN

SEQ ID NO: 70420 - protein, 9 aa, synthetic construct
  source 1..9: note = Seed: VVGAVGVGK (KRAS G12V)
FVGFVSVGR

SEQ ID NO: 70421 - protein, 9 aa, synthetic construct
  source 1..9: note = Seed: VVGAVGVGK (KRAS G12V)
FVGFVSVGS

SEQ ID NO: 70422 - protein, 9 aa, synthetic construct
  source 1..9: note = Seed: VVGAVGVGK (KRAS G12V)
FVGFVTVGH

SEQ ID NO: 70423 - protein, 9 aa, synthetic construct
  source 1..9: note = Seed: VVGAVGVGK (KRAS G12V)
FVGFVTVGK

SEQ ID NO: 70424 - protein, 9 aa, synthetic construct
  source 1..9: note = Seed: VVGAVGVGK (KRAS G12V)
FVGFVTVGR

SEQ ID NO: 70425 - protein, 9 aa, synthetic construct
  source 1..9: note = Seed: VVGAVGVGK (KRAS G12V)
FVGFVTVGV

SEQ ID NO: 70426 - protein, 9 aa, synthetic construct
  source 1..9: note = Seed: VVGAVGVGK (KRAS G12V)
FVGGVAVGA

SEQ ID NO: 70427 - protein, 9 aa, synthetic construct
  source 1..9: note = Seed: VVGAVGVGK (KRAS G12V)
FVGGVAVGF

SEQ ID NO: 70428 - protein, 9 aa, synthetic construct
  source 1..9: note = Seed: VVGAVGVGK (KRAS G12V)
FVGGVAVGG

SEQ ID NO: 70429 - protein, 9 aa, synthetic construct
  source 1..9: note = Seed: VVGAVGVGK (KRAS G12V)
FVGGVAVGH

SEQ ID NO: 70430 - protein, 9 aa, synthetic construct
  source 1..9: note = Seed: VVGAVGVGK (KRAS G12V)
FVGGVAVGI

SEQ ID NO: 70431 - protein, 9 aa, synthetic construct
  source 1..9: note = Seed: VVGAVGVGK (KRAS G12V)
FVGGVAVGK

SEQ ID NO: 70432 - protein, 9 aa, synthetic construct
  source 1..9: note = Seed: VVGAVGVGK (KRAS G12V)
FVGGVAVGL

SEQ ID NO: 70433 - protein, 9 aa, synthetic construct
  source 1..9: note = Seed: VVGAVGVGK (KRAS G12V)
FVGGVAVGM

SEQ ID NO: 70434 - protein, 9 aa, synthetic construct
  source 1..9: note = Seed: VVGAVGVGK (KRAS G12V)
FVGGVAVGN

SEQ ID NO: 70435 - protein, 9 aa, synthetic construct
  source 1..9: note = Seed: VVGAVGVGK (KRAS G12V)
FVGGVAVGP

SEQ ID NO: 70436 - protein, 9 aa, synthetic construct
  source 1..9: note = Seed: VVGAVGVGK (KRAS G12V)
FVGGVAVGQ

SEQ ID NO: 70437 - protein, 9 aa, synthetic construct
  source 1..9: note = Seed: VVGAVGVGK (KRAS G12V)
FVGGVAVGR

SEQ ID NO: 70438 - protein, 9 aa, synthetic construct
  source 1..9: note = Seed: VVGAVGVGK (KRAS G12V)
FVGGVAVGS

SEQ ID NO: 70439 - protein, 9 aa, synthetic construct
  source 1..9: note = Seed: VVGAVGVGK (KRAS G12V)
FVGGVAVGT

SEQ ID NO: 70440 - protein, 9 aa, synthetic construct
  source 1..9: note = Seed: VVGAVGVGK (KRAS G12V)
FVGGVAVGV

SEQ ID NO: 70441 - protein, 9 aa, synthetic construct
  source 1..9: note = Seed: VVGAVGVGK (KRAS G12V)
FVGGVAVGY

SEQ ID NO: 70442 - protein, 9 aa, synthetic construct
  source 1..9: note = Seed: VVGAVGVGK (KRAS G12V)
FVGGVGVGA

SEQ ID NO: 70443 - protein, 9 aa, synthetic construct
  source 1..9: note = Seed: VVGAVGVGK (KRAS G12V)
FVGGVGVGG

SEQ ID NO: 70444 - protein, 9 aa, synthetic construct
  source 1..9: note = Seed: VVGAVGVGK (KRAS G12V)
FVGGVGVGH

SEQ ID NO: 70445 - protein, 9 aa, synthetic construct
  source 1..9: note = Seed: VVGAVGVGK (KRAS G12V)
FVGGVGVGI

SEQ ID NO: 70446 - protein, 9 aa, synthetic construct
  source 1..9: note = Seed: VVGAVGVGK (KRAS G12V)
FVGGVGVGL

SEQ ID NO: 70447 - protein, 9 aa, synthetic construct
  source 1..9: note = Seed: VVGAVGVGK (KRAS G12V)
FVGGVGVGM

SEQ ID NO: 70448 - protein, 9 aa, synthetic construct
  source 1..9: note = Seed: VVGAVGVGK (KRAS G12V)
FVGGVGVGN

SEQ ID NO: 70449 - protein, 9 aa, synthetic construct
  source 1..9: note = Seed: VVGAVGVGK (KRAS G12V)
FVGGVGVGS

SEQ ID NO: 70450 - protein, 9 aa, synthetic construct
  source 1..9: note = Seed: VVGAVGVGK (KRAS G12V)
FVGGVGVGT

SEQ ID NO: 70451 - protein, 9 aa, synthetic construct
  source 1..9: note = Seed: VVGAVGVGK (KRAS G12V)
FVGGVGVGV

SEQ ID NO: 70452 - protein, 9 aa, synthetic construct
  source 1..9: note = Seed: VVGAVGVGK (KRAS G12V)
FVGGVHVGA

SEQ ID NO: 70453 - protein, 9 aa, synthetic construct
  source 1..9: note = Seed: VVGAVGVGK (KRAS G12V)
FVGGVHVGL

SEQ ID NO: 70454 - protein, 9 aa, synthetic construct
  source 1..9: note = Seed: VVGAVGVGK (KRAS G12V)
FVGGVHVGV

SEQ ID NO: 70455 - protein, 9 aa, synthetic construct
  source 1..9: note = Seed: VVGAVGVGK (KRAS G12V)
FVGGVKVGA

SEQ ID NO: 70456 - protein, 9 aa, synthetic construct
  source 1..9: note = Seed: VVGAVGVGK (KRAS G12V)
FVGGVKVGG

SEQ ID NO: 70457 - protein, 9 aa, synthetic construct
  source 1..9: note = Seed: VVGAVGVGK (KRAS G12V)
FVGGVKVGH

SEQ ID NO: 70458 - protein, 9 aa, synthetic construct
  source 1..9: note = Seed: VVGAVGVGK (KRAS G12V)
FVGGVKVGI

SEQ ID NO: 70459 - protein, 9 aa, synthetic construct
  source 1..9: note = Seed: VVGAVGVGK (KRAS G12V)
FVGGVKVGL

SEQ ID NO: 70460 - protein, 9 aa, synthetic construct
  source 1..9: note = Seed: VVGAVGVGK (KRAS G12V)
FVGGVKVGM

SEQ ID NO: 70461 - protein, 9 aa, synthetic construct
  source 1..9: note = Seed: VVGAVGVGK (KRAS G12V)
FVGGVKVGQ

SEQ ID NO: 70462 - protein, 9 aa, synthetic construct
  source 1..9: note = Seed: VVGAVGVGK (KRAS G12V)
FVGGVKVGS

SEQ ID NO: 70463 - protein, 9 aa, synthetic construct
  source 1..9: note = Seed: VVGAVGVGK (KRAS G12V)
FVGGVKVGT

SEQ ID NO: 70464 - protein, 9 aa, synthetic construct
  source 1..9: note = Seed: VVGAVGVGK (KRAS G12V)
FVGGVKVGV

SEQ ID NO: 70465 - protein, 9 aa, synthetic construct
  source 1..9: note = Seed: VVGAVGVGK (KRAS G12V)
FVGGVNVGA

SEQ ID NO: 70466 - protein, 9 aa, synthetic construct
  source 1..9: note = Seed: VVGAVGVGK (KRAS G12V)
FVGGVNVGI

SEQ ID NO: 70467 - protein, 9 aa, synthetic construct
  source 1..9: note = Seed: VVGAVGVGK (KRAS G12V)
FVGGVNVGL

SEQ ID NO: 70468 - protein, 9 aa, synthetic construct
  source 1..9: note = Seed: VVGAVGVGK (KRAS G12V)
FVGGVNVGM

SEQ ID NO: 70469 - protein, 9 aa, synthetic construct
  source 1..9: note = Seed: VVGAVGVGK (KRAS G12V)
FVGGVNVGS

SEQ ID NO: 70470 - protein, 9 aa, synthetic construct
  source 1..9: note = Seed: VVGAVGVGK (KRAS G12V)
FVGGVNVGT

SEQ ID NO: 70471 - protein, 9 aa, synthetic construct
  source 1..9: note = Seed: VVGAVGVGK (KRAS G12V)
FVGGVNVGV

SEQ ID NO: 70472 - protein, 9 aa, synthetic construct
  source 1..9: note = Seed: VVGAVGVGK (KRAS G12V)
FVGGVPVGA

SEQ ID NO: 70473 - protein, 9 aa, synthetic construct
  source 1..9: note = Seed: VVGAVGVGK (KRAS G12V)
FVGGVPVGF

SEQ ID NO: 70474 - protein, 9 aa, synthetic construct
  source 1..9: note = Seed: VVGAVGVGK (KRAS G12V)
FVGGVPVGG

SEQ ID NO: 70475 - protein, 9 aa, synthetic construct
  source 1..9: note = Seed: VVGAVGVGK (KRAS G12V)
FVGGVPVGH

SEQ ID NO: 70476 - protein, 9 aa, synthetic construct
  source 1..9: note = Seed: VVGAVGVGK (KRAS G12V)
FVGGVPVGI

SEQ ID NO: 70477 - protein, 9 aa, synthetic construct
  source 1..9: note = Seed: VVGAVGVGK (KRAS G12V)
FVGGVPVGK

SEQ ID NO: 70478 - protein, 9 aa, synthetic construct
  source 1..9: note = Seed: VVGAVGVGK (KRAS G12V)
FVGGVPVGL

SEQ ID NO: 70479 - protein, 9 aa, synthetic construct
  source 1..9: note = Seed: VVGAVGVGK (KRAS G12V)
FVGGVPVGM

SEQ ID NO: 70480 - protein, 9 aa, synthetic construct
  source 1..9: note = Seed: VVGAVGVGK (KRAS G12V)
FVGGVPVGN

SEQ ID NO: 70481 - protein, 9 aa, synthetic construct
  source 1..9: note = Seed: VVGAVGVGK (KRAS G12V)
FVGGVPVGP

SEQ ID NO: 70482 - protein, 9 aa, synthetic construct
  source 1..9: note = Seed: VVGAVGVGK (KRAS G12V)
FVGGVPVGQ

SEQ ID NO: 70483 - protein, 9 aa, synthetic construct
  source 1..9: note = Seed: VVGAVGVGK (KRAS G12V)
FVGGVPVGR

SEQ ID NO: 70484 - protein, 9 aa, synthetic construct
  source 1..9: note = Seed: VVGAVGVGK (KRAS G12V)
FVGGVPVGS

SEQ ID NO: 70485 - protein, 9 aa, synthetic construct
  source 1..9: note = Seed: VVGAVGVGK (KRAS G12V)
FVGGVPVGT

SEQ ID NO: 70486 - protein, 9 aa, synthetic construct
  source 1..9: note = Seed: VVGAVGVGK (KRAS G12V)
FVGGVPVGV

SEQ ID NO: 70487 - protein, 9 aa, synthetic construct
  source 1..9: note = Seed: VVGAVGVGK (KRAS G12V)
FVGGVPVGY

SEQ ID NO: 70488 - protein, 9 aa, synthetic construct
  source 1..9: note = Seed: VVGAVGVGK (KRAS G12V)
FVGGVRVGA

SEQ ID NO: 70489 - protein, 9 aa, synthetic construct
  source 1..9: note = Seed: VVGAVGVGK (KRAS G12V)
FVGGVRVGG

SEQ ID NO: 70490 - protein, 9 aa, synthetic construct
  source 1..9: note = Seed: VVGAVGVGK (KRAS G12V)
FVGGVRVGH

SEQ ID NO: 70491 - protein, 9 aa, synthetic construct
  source 1..9: note = Seed: VVGAVGVGK (KRAS G12V)
FVGGVRVGQ

SEQ ID NO: 70492 - protein, 9 aa, synthetic construct
  source 1..9: note = Seed: VVGAVGVGK (KRAS G12V)
FVGGVRVGR

SEQ ID NO: 70493 - protein, 9 aa, synthetic construct
  source 1..9: note = Seed: VVGAVGVGK (KRAS G12V)
FVGGVRVGS

SEQ ID NO: 70494 - protein, 9 aa, synthetic construct
  source 1..9: note = Seed: VVGAVGVGK (KRAS G12V)
FVGGVRVGV

SEQ ID NO: 70495 - protein, 9 aa, synthetic construct
  source 1..9: note = Seed: VVGAVGVGK (KRAS G12V)
FVGGVSVGA

SEQ ID NO: 70496 - protein, 9 aa, synthetic construct
  source 1..9: note = Seed: VVGAVGVGK (KRAS G12V)
FVGGVSVGG

SEQ ID NO: 70497 - protein, 9 aa, synthetic construct
  source 1..9: note = Seed: VVGAVGVGK (KRAS G12V)
FVGGVSVGH

SEQ ID NO: 70498 - protein, 9 aa, synthetic construct
  source 1..9: note = Seed: VVGAVGVGK (KRAS G12V)
FVGGVSVGI

SEQ ID NO: 70499 - protein, 9 aa, synthetic construct
  source 1..9: note = Seed: VVGAVGVGK (KRAS G12V)
FVGGVSVGK

SEQ ID NO: 70500 - protein, 9 aa, synthetic construct
  source 1..9: note = Seed: VVGAVGVGK (KRAS G12V)
FVGGVSVGL

SEQ ID NO: 70501 - protein, 9 aa, synthetic construct
  source 1..9: note = Seed: VVGAVGVGK (KRAS G12V)
FVGGVSVGM

SEQ ID NO: 70502 - protein, 9 aa, synthetic construct
  source 1..9: note = Seed: VVGAVGVGK (KRAS G12V)
FVGGVSVGN

SEQ ID NO: 70503 - protein, 9 aa, synthetic construct
  source 1..9: note = Seed: VVGAVGVGK (KRAS G12V)
FVGGVSVGR

SEQ ID NO: 70504 - protein, 9 aa, synthetic construct
  source 1..9: note = Seed: VVGAVGVGK (KRAS G12V)
FVGGVSVGS

SEQ ID NO: 70505 - protein, 9 aa, synthetic construct
  source 1..9: note = Seed: VVGAVGVGK (KRAS G12V)
FVGGVSVGT

SEQ ID NO: 70506 - protein, 9 aa, synthetic construct
  source 1..9: note = Seed: VVGAVGVGK (KRAS G12V)
FVGGVSVGV

SEQ ID NO: 70507 - protein, 9 aa, synthetic construct
  source 1..9: note = Seed: VVGAVGVGK (KRAS G12V)
FVGGVSVGY

SEQ ID NO: 70508 - protein, 9 aa, synthetic construct
  source 1..9: note = Seed: VVGAVGVGK (KRAS G12V)
FVGGVTVGA

SEQ ID NO: 70509 - protein, 9 aa, synthetic construct
  source 1..9: note = Seed: VVGAVGVGK (KRAS G12V)
FVGGVTVGI

SEQ ID NO: 70510 - protein, 9 aa, synthetic construct
  source 1..9: note = Seed: VVGAVGVGK (KRAS G12V)
FVGGVTVGL

SEQ ID NO: 70511 - protein, 9 aa, synthetic construct
  source 1..9: note = Seed: VVGAVGVGK (KRAS G12V)
FVGGVTVGM

SEQ ID NO: 70512 - protein, 9 aa, synthetic construct
  source 1..9: note = Seed: VVGAVGVGK (KRAS G12V)
FVGGVTVGN

SEQ ID NO: 70513 - protein, 9 aa, synthetic construct
  source 1..9: note = Seed: VVGAVGVGK (KRAS G12V)
FVGGVTVGR

SEQ ID NO: 70514 - protein, 9 aa, synthetic construct
  source 1..9: note = Seed: VVGAVGVGK (KRAS G12V)
FVGGVTVGS

SEQ ID NO: 70515 - protein, 9 aa, synthetic construct
  source 1..9: note = Seed: VVGAVGVGK (KRAS G12V)
FVGGVTVGT

SEQ ID NO: 70516 - protein, 9 aa, synthetic construct
  source 1..9: note = Seed: VVGAVGVGK (KRAS G12V)
FVGGVTVGV

SEQ ID NO: 70517 - protein, 9 aa, synthetic construct
  source 1..9: note = Seed: VVGAVGVGK (KRAS G12V)
FVGGVVVGA

SEQ ID NO: 70518 - protein, 9 aa, synthetic construct
  source 1..9: note = Seed: VVGAVGVGK (KRAS G12V)
FVGGVVVGR

SEQ ID NO: 70519 - protein, 9 aa, synthetic construct
  source 1..9: note = Seed: VVGAVGVGK (KRAS G12V)
FVGHVAVGA

SEQ ID NO: 70520 - protein, 9 aa, synthetic construct
  source 1..9: note = Seed: VVGAVGVGK (KRAS G12V)
FVGHVAVGF

SEQ ID NO: 70521 - protein, 9 aa, synthetic construct
  source 1..9: note = Seed: VVGAVGVGK (KRAS G12V)
FVGHVAVGG

SEQ ID NO: 70522 - protein, 9 aa, synthetic construct
  source 1..9: note = Seed: VVGAVGVGK (KRAS G12V)
FVGHVAVGH

SEQ ID NO: 70523 - protein, 9 aa, synthetic construct
  source 1..9: note = Seed: VVGAVGVGK (KRAS G12V)
FVGHVAVGI

SEQ ID NO: 70524 - protein, 9 aa, synthetic construct
  source 1..9: note = Seed: VVGAVGVGK (KRAS G12V)
FVGHVAVGK

SEQ ID NO: 70525 - protein, 9 aa, synthetic construct
  source 1..9: note = Seed: VVGAVGVGK (KRAS G12V)
FVGHVAVGL

SEQ ID NO: 70526 - protein, 9 aa, synthetic construct
  source 1..9: note = Seed: VVGAVGVGK (KRAS G12V)
FVGHVAVGM

SEQ ID NO: 70527 - protein, 9 aa, synthetic construct
  source 1..9: note = Seed: VVGAVGVGK (KRAS G12V)
FVGHVAVGN

SEQ ID NO: 70528 - protein, 9 aa, synthetic construct
  source 1..9: note = Seed: VVGAVGVGK (KRAS G12V)
FVGHVAVGR

SEQ ID NO: 70529 - protein, 9 aa, synthetic construct
  source 1..9: note = Seed: VVGAVGVGK (KRAS G12V)
FVGHVAVGS

SEQ ID NO: 70530 - protein, 9 aa, synthetic construct
  source 1..9: note = Seed: VVGAVGVGK (KRAS G12V)
FVGHVAVGT

SEQ ID NO: 70531 - protein, 9 aa, synthetic construct
  source 1..9: note = Seed: VVGAVGVGK (KRAS G12V)
FVGHVAVGV

SEQ ID NO: 70532 - protein, 9 aa, synthetic construct
  source 1..9: note = Seed: VVGAVGVGK (KRAS G12V)
FVGHVAVGY

SEQ ID NO: 70533 - protein, 9 aa, synthetic construct
  source 1..9: note = Seed: VVGAVGVGK (KRAS G12V)
FVGHVGVGA

SEQ ID NO: 70534 - protein, 9 aa, synthetic construct
  source 1..9: note = Seed: VVGAVGVGK (KRAS G12V)
FVGHVGVGI

SEQ ID NO: 70535 - protein, 9 aa, synthetic construct
  source 1..9: note = Seed: VVGAVGVGK (KRAS G12V)
FVGHVGVGL

SEQ ID NO: 70536 - protein, 9 aa, synthetic construct
  source 1..9: note = Seed: VVGAVGVGK (KRAS G12V)
FVGHVGVGM

SEQ ID NO: 70537 - protein, 9 aa, synthetic construct
  source 1..9: note = Seed: VVGAVGVGK (KRAS G12V)
FVGHVGVGR

SEQ ID NO: 70538 - protein, 9 aa, synthetic construct
  source 1..9: note = Seed: VVGAVGVGK (KRAS G12V)
FVGHVGVGS

SEQ ID NO: 70539 - protein, 9 aa, synthetic construct
  source 1..9: note = Seed: VVGAVGVGK (KRAS G12V)
FVGHVGVGT

SEQ ID NO: 70540 - protein, 9 aa, synthetic construct
  source 1..9: note = Seed: VVGAVGVGK (KRAS G12V)
FVGHVGVGV

SEQ ID NO: 70541 - protein, 9 aa, synthetic construct
  source 1..9: note = Seed: VVGAVGVGK (KRAS G12V)
FVGHVHVGR

SEQ ID NO: 70542 - protein, 9 aa, synthetic construct
  source 1..9: note = Seed: VVGAVGVGK (KRAS G12V)
FVGHVIVGA

SEQ ID NO: 70543 - protein, 9 aa, synthetic construct
  source 1..9: note = Seed: VVGAVGVGK (KRAS G12V)
FVGHVIVGR

SEQ ID NO: 70544 - protein, 9 aa, synthetic construct
  source 1..9: note = Seed: VVGAVGVGK (KRAS G12V)
FVGHVKVGA

SEQ ID NO: 70545 - protein, 9 aa, synthetic construct
  source 1..9: note = Seed: VVGAVGVGK (KRAS G12V)
FVGHVKVGF

SEQ ID NO: 70546 - protein, 9 aa, synthetic construct
  source 1..9: note = Seed: VVGAVGVGK (KRAS G12V)
FVGHVKVGG

SEQ ID NO: 70547 - protein, 9 aa, synthetic construct
  source 1..9: note = Seed: VVGAVGVGK (KRAS G12V)
FVGHVKVGH

SEQ ID NO: 70548 - protein, 9 aa, synthetic construct
  source 1..9: note = Seed: VVGAVGVGK (KRAS G12V)
FVGHVKVGK

SEQ ID NO: 70549 - protein, 9 aa, synthetic construct
  source 1..9: note = Seed: VVGAVGVGK (KRAS G12V)
FVGHVKVGM

SEQ ID NO: 70550 - protein, 9 aa, synthetic construct
  source 1..9: note = Seed: VVGAVGVGK (KRAS G12V)
FVGHVKVGQ

SEQ ID NO: 70551 - protein, 9 aa, synthetic construct
  source 1..9: note = Seed: VVGAVGVGK (KRAS G12V)
FVGHVKVGR

SEQ ID NO: 70552 - protein, 9 aa, synthetic construct
  source 1..9: note = Seed: VVGAVGVGK (KRAS G12V)
FVGHVKVGS

SEQ ID NO: 70553 - protein, 9 aa, synthetic construct
  source 1..9: note = Seed: VVGAVGVGK (KRAS G12V)
FVGHVKVGY

SEQ ID NO: 70554 - protein, 9 aa, synthetic construct
  source 1..9: note = Seed: VVGAVGVGK (KRAS G12V)
FVGHVNVGA

SEQ ID NO: 70555 - protein, 9 aa, synthetic construct
  source 1..9: note = Seed: VVGAVGVGK (KRAS G12V)
FVGHVNVGI

SEQ ID NO: 70556 - protein, 9 aa, synthetic construct
  source 1..9: note = Seed: VVGAVGVGK (KRAS G12V)
FVGHVNVGL

SEQ ID NO: 70557 - protein, 9 aa, synthetic construct
  source 1..9: note = Seed: VVGAVGVGK (KRAS G12V)
FVGHVNVGM

SEQ ID NO: 70558 - protein, 9 aa, synthetic construct
  source 1..9: note = Seed: VVGAVGVGK (KRAS G12V)
FVGHVNVGR

SEQ ID NO: 70559 - protein, 9 aa, synthetic construct
  source 1..9: note = Seed: VVGAVGVGK (KRAS G12V)
FVGHVNVGV

SEQ ID NO: 70560 - protein, 9 aa, synthetic construct
  source 1..9: note = Seed: VVGAVGVGK (KRAS G12V)
FVGHVPVGA

SEQ ID NO: 70561 - protein, 9 aa, synthetic construct
  source 1..9: note = Seed: VVGAVGVGK (KRAS G12V)
FVGHVPVGF

SEQ ID NO: 70562 - protein, 9 aa, synthetic construct
  source 1..9: note = Seed: VVGAVGVGK (KRAS G12V)
FVGHVPVGI

SEQ ID NO: 70563 - protein, 9 aa, synthetic construct
  source 1..9: note = Seed: VVGAVGVGK (KRAS G12V)
FVGHVPVGK

SEQ ID NO: 70564 - protein, 9 aa, synthetic construct
  source 1..9: note = Seed: VVGAVGVGK (KRAS G12V)
FVGHVPVGL

SEQ ID NO: 70565 - protein, 9 aa, synthetic construct
  source 1..9: note = Seed: VVGAVGVGK (KRAS G12V)
FVGHVPVGM

SEQ ID NO: 70566 - protein, 9 aa, synthetic construct
  source 1..9: note = Seed: VVGAVGVGK (KRAS G12V)
FVGHVPVGR

SEQ ID NO: 70567 - protein, 9 aa, synthetic construct
  source 1..9: note = Seed: VVGAVGVGK (KRAS G12V)
FVGHVPVGS

SEQ ID NO: 70568 - protein, 9 aa, synthetic construct
  source 1..9: note = Seed: VVGAVGVGK (KRAS G12V)
FVGHVPVGT

SEQ ID NO: 70569 - protein, 9 aa, synthetic construct
  source 1..9: note = Seed: VVGAVGVGK (KRAS G12V)
FVGHVPVGV

SEQ ID NO: 70570 - protein, 9 aa, synthetic construct
  source 1..9: note = Seed: VVGAVGVGK (KRAS G12V)
FVGHVPVGY

SEQ ID NO: 70571 - protein, 9 aa, synthetic construct
  source 1..9: note = Seed: VVGAVGVGK (KRAS G12V)
FVGHVRVGA

SEQ ID NO: 70572 - protein, 9 aa, synthetic construct
  source 1..9: note = Seed: VVGAVGVGK (KRAS G12V)
FVGHVRVGF

SEQ ID NO: 70573 - protein, 9 aa, synthetic construct
  source 1..9: note = Seed: VVGAVGVGK (KRAS G12V)
FVGHVRVGG

SEQ ID NO: 70574 - protein, 9 aa, synthetic construct
  source 1..9: note = Seed: VVGAVGVGK (KRAS G12V)
FVGHVRVGH

SEQ ID NO: 70575 - protein, 9 aa, synthetic construct
  source 1..9: note = Seed: VVGAVGVGK (KRAS G12V)
FVGHVRVGK

SEQ ID NO: 70576 - protein, 9 aa, synthetic construct
  source 1..9: note = Seed: VVGAVGVGK (KRAS G12V)
FVGHVRVGL

SEQ ID NO: 70577 - protein, 9 aa, synthetic construct
  source 1..9: note = Seed: VVGAVGVGK (KRAS G12V)
FVGHVRVGM

SEQ ID NO: 70578 - protein, 9 aa, synthetic construct
  source 1..9: note = Seed: VVGAVGVGK (KRAS G12V)
FVGHVRVGQ

SEQ ID NO: 70579 - protein, 9 aa, synthetic construct
  source 1..9: note = Seed: VVGAVGVGK (KRAS G12V)
FVGHVRVGR

SEQ ID NO: 70580 - protein, 9 aa, synthetic construct
  source 1..9: note = Seed: VVGAVGVGK (KRAS G12V)
FVGHVRVGS

SEQ ID NO: 70581 - protein, 9 aa, synthetic construct
  source 1..9: note = Seed: VVGAVGVGK (KRAS G12V)
FVGHVRVGY

SEQ ID NO: 70582 - protein, 9 aa, synthetic construct
  source 1..9: note = Seed: VVGAVGVGK (KRAS G12V)
FVGHVSVGA

SEQ ID NO: 70583 - protein, 9 aa, synthetic construct
  source 1..9: note = Seed: VVGAVGVGK (KRAS G12V)
FVGHVSVGF

SEQ ID NO: 70584 - protein, 9 aa, synthetic construct
  source 1..9: note = Seed: VVGAVGVGK (KRAS G12V)
FVGHVSVGG

SEQ ID NO: 70585 - protein, 9 aa, synthetic construct
  source 1..9: note = Seed: VVGAVGVGK (KRAS G12V)
FVGHVSVGI

SEQ ID NO: 70586 - protein, 9 aa, synthetic construct
  source 1..9: note = Seed: VVGAVGVGK (KRAS G12V)
FVGHVSVGL

SEQ ID NO: 70587 - protein, 9 aa, synthetic construct
  source 1..9: note = Seed: VVGAVGVGK (KRAS G12V)
FVGHVSVGM

SEQ ID NO: 70588 - protein, 9 aa, synthetic construct
  source 1..9: note = Seed: VVGAVGVGK (KRAS G12V)
FVGHVSVGR

SEQ ID NO: 70589 - protein, 9 aa, synthetic construct
  source 1..9: note = Seed: VVGAVGVGK (KRAS G12V)
FVGHVSVGS

SEQ ID NO: 70590 - protein, 9 aa, synthetic construct
  source 1..9: note = Seed: VVGAVGVGK (KRAS G12V)
FVGHVSVGT

SEQ ID NO: 70591 - protein, 9 aa, synthetic construct
  source 1..9: note = Seed: VVGAVGVGK (KRAS G12V)
FVGHVSVGV

SEQ ID NO: 70592 - protein, 9 aa, synthetic construct
  source 1..9: note = Seed: VVGAVGVGK (KRAS G12V)
FVGHVTVGA

SEQ ID NO: 70593 - protein, 9 aa, synthetic construct
  source 1..9: note = Seed: VVGAVGVGK (KRAS G12V)
FVGHVTVGI

SEQ ID NO: 70594 - protein, 9 aa, synthetic construct
  source 1..9: note = Seed: VVGAVGVGK (KRAS G12V)
FVGHVTVGL

SEQ ID NO: 70595 - protein, 9 aa, synthetic construct
  source 1..9: note = Seed: VVGAVGVGK (KRAS G12V)
FVGHVTVGM

SEQ ID NO: 70596 - protein, 9 aa, synthetic construct
  source 1..9: note = Seed: VVGAVGVGK (KRAS G12V)
FVGHVTVGR

SEQ ID NO: 70597 - protein, 9 aa, synthetic construct
  source 1..9: note = Seed: VVGAVGVGK (KRAS G12V)
FVGHVTVGV

SEQ ID NO: 70598 - protein, 9 aa, synthetic construct
  source 1..9: note = Seed: VVGAVGVGK (KRAS G12V)
FVGHVVVGA

SEQ ID NO: 70599 - protein, 9 aa, synthetic construct
  source 1..9: note = Seed: VVGAVGVGK (KRAS G12V)
FVGHVVVGR

SEQ ID NO: 70600 - protein, 9 aa, synthetic construct
  source 1..9: note = Seed: VVGAVGVGK (KRAS G12V)
FVGIVAVGA

SEQ ID NO: 70601 - protein, 9 aa, synthetic construct
  source 1..9: note = Seed: VVGAVGVGK (KRAS G12V)
FVGIVAVGD

SEQ ID NO: 70602 - protein, 9 aa, synthetic construct
  source 1..9: note = Seed: VVGAVGVGK (KRAS G12V)
FVGIVAVGH

SEQ ID NO: 70603 - protein, 9 aa, synthetic construct
  source 1..9: note = Seed: VVGAVGVGK (KRAS G12V)
FVGIVAVGI

SEQ ID NO: 70604 - protein, 9 aa, synthetic construct
  source 1..9: note = Seed: VVGAVGVGK (KRAS G12V)
FVGIVAVGK

SEQ ID NO: 70605 - protein, 9 aa, synthetic construct
  source 1..9: note = Seed: VVGAVGVGK (KRAS G12V)
FVGIVAVGL

SEQ ID NO: 70606 - protein, 9 aa, synthetic construct
  source 1..9: note = Seed: VVGAVGVGK (KRAS G12V)
FVGIVAVGM

SEQ ID NO: 70607 - protein, 9 aa, synthetic construct
  source 1..9: note = Seed: VVGAVGVGK (KRAS G12V)
FVGIVAVGN

SEQ ID NO: 70608 - protein, 9 aa, synthetic construct
  source 1..9: note = Seed: VVGAVGVGK (KRAS G12V)
FVGIVAVGQ

SEQ ID NO: 70609 - protein, 9 aa, synthetic construct
  source 1..9: note = Seed: VVGAVGVGK (KRAS G12V)
FVGIVAVGR

SEQ ID NO: 70610 - protein, 9 aa, synthetic construct
  source 1..9: note = Seed: VVGAVGVGK (KRAS G12V)
FVGIVAVGS

SEQ ID NO: 70611 - protein, 9 aa, synthetic construct
  source 1..9: note = Seed: VVGAVGVGK (KRAS G12V)
FVGIVAVGT

SEQ ID NO: 70612 - protein, 9 aa, synthetic construct
  source 1..9: note = Seed: VVGAVGVGK (KRAS G12V)
FVGIVAVGV

SEQ ID NO: 70613 - protein, 9 aa, synthetic construct
  source 1..9: note = Seed: VVGAVGVGK (KRAS G12V)
FVGIVAVGY

SEQ ID NO: 70614 - protein, 9 aa, synthetic construct
  source 1..9: note = Seed: VVGAVGVGK (KRAS G12V)
FVGIVGVGA

SEQ ID NO: 70615 - protein, 9 aa, synthetic construct
  source 1..9: note = Seed: VVGAVGVGK (KRAS G12V)
FVGIVGVGG

SEQ ID NO: 70616 - protein, 9 aa, synthetic construct
  source 1..9: note = Seed: VVGAVGVGK (KRAS G12V)
FVGIVGVGH

SEQ ID NO: 70617 - protein, 9 aa, synthetic construct
  source 1..9: note = Seed: VVGAVGVGK (KRAS G12V)
FVGIVGVGI

SEQ ID NO: 70618 - protein, 9 aa, synthetic construct
  source 1..9: note = Seed: VVGAVGVGK (KRAS G12V)
FVGIVGVGK

SEQ ID NO: 70619 - protein, 9 aa, synthetic construct
  source 1..9: note = Seed: VVGAVGVGK (KRAS G12V)
FVGIVGVGL

SEQ ID NO: 70620 - protein, 9 aa, synthetic construct
  source 1..9: note = Seed: VVGAVGVGK (KRAS G12V)
FVGIVGVGM

SEQ ID NO: 70621 - protein, 9 aa, synthetic construct
  source 1..9: note = Seed: VVGAVGVGK (KRAS G12V)
FVGIVGVGN

SEQ ID NO: 70622 - protein, 9 aa, synthetic construct
  source 1..9: note = Seed: VVGAVGVGK (KRAS G12V)
FVGIVGVGP

SEQ ID NO: 70623 - protein, 9 aa, synthetic construct
  source 1..9: note = Seed: VVGAVGVGK (KRAS G12V)
FVGIVGVGR

SEQ ID NO: 70624 - protein, 9 aa, synthetic construct
  source 1..9: note = Seed: VVGAVGVGK (KRAS G12V)
FVGIVGVGS

SEQ ID NO: 70625 - protein, 9 aa, synthetic construct
  source 1..9: note = Seed: VVGAVGVGK (KRAS G12V)
FVGIVGVGT

SEQ ID NO: 70626 - protein, 9 aa, synthetic construct
  source 1..9: note = Seed: VVGAVGVGK (KRAS G12V)
FVGIVGVGV

SEQ ID NO: 70627 - protein, 9 aa, synthetic construct
  source 1..9: note = Seed: VVGAVGVGK (KRAS G12V)
FVGIVHVGG

SEQ ID NO: 70628 - protein, 9 aa, synthetic construct
  source 1..9: note = Seed: VVGAVGVGK (KRAS G12V)
FVGIVHVGH

SEQ ID NO: 70629 - protein, 9 aa, synthetic construct
  source 1..9: note = Seed: VVGAVGVGK (KRAS G12V)
FVGIVHVGK

SEQ ID NO: 70630 - protein, 9 aa, synthetic construct
  source 1..9: note = Seed: VVGAVGVGK (KRAS G12V)
FVGIVHVGM

SEQ ID NO: 70631 - protein, 9 aa, synthetic construct
  source 1..9: note = Seed: VVGAVGVGK (KRAS G12V)
FVGIVHVGN

SEQ ID NO: 70632 - protein, 9 aa, synthetic construct
  source 1..9: note = Seed: VVGAVGVGK (KRAS G12V)
FVGIVHVGR

SEQ ID NO: 70633 - protein, 9 aa, synthetic construct
  source 1..9: note = Seed: VVGAVGVGK (KRAS G12V)
FVGIVHVGS

SEQ ID NO: 70634 - protein, 9 aa, synthetic construct
  source 1..9: note = Seed: VVGAVGVGK (KRAS G12V)
FVGIVKVGA

SEQ ID NO: 70635 - protein, 9 aa, synthetic construct
  source 1..9: note = Seed: VVGAVGVGK (KRAS G12V)
FVGIVKVGD

SEQ ID NO: 70636 - protein, 9 aa, synthetic construct
  source 1..9: note = Seed: VVGAVGVGK (KRAS G12V)
FVGIVKVGE

SEQ ID NO: 70637 - protein, 9 aa, synthetic construct
  source 1..9: note = Seed: VVGAVGVGK (KRAS G12V)
FVGIVKVGG

SEQ ID NO: 70638 - protein, 9 aa, synthetic construct
  source 1..9: note = Seed: VVGAVGVGK (KRAS G12V)
FVGIVKVGH

SEQ ID NO: 70639 - protein, 9 aa, synthetic construct
  source 1..9: note = Seed: VVGAVGVGK (KRAS G12V)
FVGIVKVGK

SEQ ID NO: 70640 - protein, 9 aa, synthetic construct
  source 1..9: note = Seed: VVGAVGVGK (KRAS G12V)
FVGIVKVGM

SEQ ID NO: 70641 - protein, 9 aa, synthetic construct
  source 1..9: note = Seed: VVGAVGVGK (KRAS G12V)
FVGIVKVGN

SEQ ID NO: 70642 - protein, 9 aa, synthetic construct
  source 1..9: note = Seed: VVGAVGVGK (KRAS G12V)
FVGIVKVGP

SEQ ID NO: 70643 - protein, 9 aa, synthetic construct
  source 1..9: note = Seed: VVGAVGVGK (KRAS G12V)
FVGIVKVGQ

SEQ ID NO: 70644 - protein, 9 aa, synthetic construct
  source 1..9: note = Seed: VVGAVGVGK (KRAS G12V)
FVGIVKVGR

SEQ ID NO: 70645 - protein, 9 aa, synthetic construct
  source 1..9: note = Seed: VVGAVGVGK (KRAS G12V)
FVGIVKVGS

SEQ ID NO: 70646 - protein, 9 aa, synthetic construct
  source 1..9: note = Seed: VVGAVGVGK (KRAS G12V)
FVGIVKVGT

SEQ ID NO: 70647 - protein, 9 aa, synthetic construct
  source 1..9: note = Seed: VVGAVGVGK (KRAS G12V)
FVGIVKVGV

SEQ ID NO: 70648 - protein, 9 aa, synthetic construct
  source 1..9: note = Seed: VVGAVGVGK (KRAS G12V)
FVGIVKVGY

SEQ ID NO: 70649 - protein, 9 aa, synthetic construct
  source 1..9: note = Seed: VVGAVGVGK (KRAS G12V)
FVGIVNVGA

SEQ ID NO: 70650 - protein, 9 aa, synthetic construct
  source 1..9: note = Seed: VVGAVGVGK (KRAS G12V)
FVGIVNVGG

SEQ ID NO: 70651 - protein, 9 aa, synthetic construct
  source 1..9: note = Seed: VVGAVGVGK (KRAS G12V)
FVGIVNVGH

SEQ ID NO: 70652 - protein, 9 aa, synthetic construct
  source 1..9: note = Seed: VVGAVGVGK (KRAS G12V)
FVGIVNVGI

SEQ ID NO: 70653 - protein, 9 aa, synthetic construct
  source 1..9: note = Seed: VVGAVGVGK (KRAS G12V)
FVGIVNVGK

SEQ ID NO: 70654 - protein, 9 aa, synthetic construct
  source 1..9: note = Seed: VVGAVGVGK (KRAS G12V)
FVGIVNVGL

SEQ ID NO: 70655 - protein, 9 aa, synthetic construct
  source 1..9: note = Seed: VVGAVGVGK (KRAS G12V)
FVGIVNVGM

SEQ ID NO: 70656 - protein, 9 aa, synthetic construct
  source 1..9: note = Seed: VVGAVGVGK (KRAS G12V)
FVGIVNVGN

SEQ ID NO: 70657 - protein, 9 aa, synthetic construct
  source 1..9: note = Seed: VVGAVGVGK (KRAS G12V)
FVGIVNVGR

SEQ ID NO: 70658 - protein, 9 aa, synthetic construct
  source 1..9: note = Seed: VVGAVGVGK (KRAS G12V)
FVGIVNVGS

SEQ ID NO: 70659 - protein, 9 aa, synthetic construct
  source 1..9: note = Seed: VVGAVGVGK (KRAS G12V)
FVGIVNVGT

SEQ ID NO: 70660 - protein, 9 aa, synthetic construct
  source 1..9: note = Seed: VVGAVGVGK (KRAS G12V)
FVGIVNVGV

SEQ ID NO: 70661 - protein, 9 aa, synthetic construct
  source 1..9: note = Seed: VVGAVGVGK (KRAS G12V)
FVGIVPVGA

SEQ ID NO: 70662 - protein, 9 aa, synthetic construct
  source 1..9: note = Seed: VVGAVGVGK (KRAS G12V)
FVGIVPVGC

SEQ ID NO: 70663 - protein, 9 aa, synthetic construct
  source 1..9: note = Seed: VVGAVGVGK (KRAS G12V)
FVGIVPVGD

SEQ ID NO: 70664 - protein, 9 aa, synthetic construct
  source 1..9: note = Seed: VVGAVGVGK (KRAS G12V)
FVGIVPVGF

SEQ ID NO: 70665 - protein, 9 aa, synthetic construct
  source 1..9: note = Seed: VVGAVGVGK (KRAS G12V)
FVGIVPVGG

SEQ ID NO: 70666 - protein, 9 aa, synthetic construct
  source 1..9: note = Seed: VVGAVGVGK (KRAS G12V)
FVGIVPVGH

SEQ ID NO: 70667 - protein, 9 aa, synthetic construct
  source 1..9: note = Seed: VVGAVGVGK (KRAS G12V)
FVGIVPVGI

SEQ ID NO: 70668 - protein, 9 aa, synthetic construct
  source 1..9: note = Seed: VVGAVGVGK (KRAS G12V)
FVGIVPVGK

SEQ ID NO: 70669 - protein, 9 aa, synthetic construct
  source 1..9: note = Seed: VVGAVGVGK (KRAS G12V)
FVGIVPVGL

SEQ ID NO: 70670 - protein, 9 aa, synthetic construct
  source 1..9: note = Seed: VVGAVGVGK (KRAS G12V)
FVGIVPVGM

SEQ ID NO: 70671 - protein, 9 aa, synthetic construct
  source 1..9: note = Seed: VVGAVGVGK (KRAS G12V)
FVGIVPVGN

SEQ ID NO: 70672 - protein, 9 aa, synthetic construct
  source 1..9: note = Seed: VVGAVGVGK (KRAS G12V)
FVGIVPVGQ

SEQ ID NO: 70673 - protein, 9 aa, synthetic construct
  source 1..9: note = Seed: VVGAVGVGK (KRAS G12V)
FVGIVPVGR

SEQ ID NO: 70674 - protein, 9 aa, synthetic construct
  source 1..9: note = Seed: VVGAVGVGK (KRAS G12V)
FVGIVPVGS

SEQ ID NO: 70675 - protein, 9 aa, synthetic construct
  source 1..9: note = Seed: VVGAVGVGK (KRAS G12V)
FVGIVPVGT

SEQ ID NO: 70676 - protein, 9 aa, synthetic construct
  source 1..9: note = Seed: VVGAVGVGK (KRAS G12V)
FVGIVPVGV

SEQ ID NO: 70677 - protein, 9 aa, synthetic construct
  source 1..9: note = Seed: VVGAVGVGK (KRAS G12V)
FVGIVPVGY

SEQ ID NO: 70678 - protein, 9 aa, synthetic construct
  source 1..9: note = Seed: VVGAVGVGK (KRAS G12V)
FVGIVQVGR

SEQ ID NO: 70679 - protein, 9 aa, synthetic construct
  source 1..9: note = Seed: VVGAVGVGK (KRAS G12V)
FVGIVRVGA

SEQ ID NO: 70680 - protein, 9 aa, synthetic construct
  source 1..9: note = Seed: VVGAVGVGK (KRAS G12V)
FVGIVRVGD

SEQ ID NO: 70681 - protein, 9 aa, synthetic construct
  source 1..9: note = Seed: VVGAVGVGK (KRAS G12V)
FVGIVRVGE

SEQ ID NO: 70682 - protein, 9 aa, synthetic construct
  source 1..9: note = Seed: VVGAVGVGK (KRAS G12V)
FVGIVRVGG

SEQ ID NO: 70683 - protein, 9 aa, synthetic construct
  source 1..9: note = Seed: VVGAVGVGK (KRAS G12V)
FVGIVRVGH

SEQ ID NO: 70684 - protein, 9 aa, synthetic construct
  source 1..9: note = Seed: VVGAVGVGK (KRAS G12V)
FVGIVRVGK

SEQ ID NO: 70685 - protein, 9 aa, synthetic construct
  source 1..9: note = Seed: VVGAVGVGK (KRAS G12V)
FVGIVRVGM

SEQ ID NO: 70686 - protein, 9 aa, synthetic construct
  source 1..9: note = Seed: VVGAVGVGK (KRAS G12V)
FVGIVRVGN

SEQ ID NO: 70687 - protein, 9 aa, synthetic construct
  source 1..9: note = Seed: VVGAVGVGK (KRAS G12V)
FVGIVRVGP

SEQ ID NO: 70688 - protein, 9 aa, synthetic construct
  source 1..9: note = Seed: VVGAVGVGK (KRAS G12V)
FVGIVRVGQ

SEQ ID NO: 70689 - protein, 9 aa, synthetic construct
  source 1..9: note = Seed: VVGAVGVGK (KRAS G12V)
FVGIVRVGR

SEQ ID NO: 70690 - protein, 9 aa, synthetic construct
  source 1..9: note = Seed: VVGAVGVGK (KRAS G12V)
FVGIVRVGS

SEQ ID NO: 70691 - protein, 9 aa, synthetic construct
  source 1..9: note = Seed: VVGAVGVGK (KRAS G12V)
FVGIVRVGT

SEQ ID NO: 70692 - protein, 9 aa, synthetic construct
  source 1..9: note = Seed: VVGAVGVGK (KRAS G12V)
FVGIVRVGY

SEQ ID NO: 70693 - protein, 9 aa, synthetic construct
  source 1..9: note = Seed: VVGAVGVGK (KRAS G12V)
FVGIVSVGA

SEQ ID NO: 70694 - protein, 9 aa, synthetic construct
  source 1..9: note = Seed: VVGAVGVGK (KRAS G12V)
FVGIVSVGH

SEQ ID NO: 70695 - protein, 9 aa, synthetic construct
  source 1..9: note = Seed: VVGAVGVGK (KRAS G12V)
FVGIVSVGI

SEQ ID NO: 70696 - protein, 9 aa, synthetic construct
  source 1..9: note = Seed: VVGAVGVGK (KRAS G12V)
FVGIVSVGK

SEQ ID NO: 70697 - protein, 9 aa, synthetic construct
  source 1..9: note = Seed: VVGAVGVGK (KRAS G12V)
FVGIVSVGL

SEQ ID NO: 70698 - protein, 9 aa, synthetic construct
  source 1..9: note = Seed: VVGAVGVGK (KRAS G12V)
FVGIVSVGM

SEQ ID NO: 70699 - protein, 9 aa, synthetic construct
  source 1..9: note = Seed: VVGAVGVGK (KRAS G12V)
FVGIVSVGN

SEQ ID NO: 70700 - protein, 9 aa, synthetic construct
  source 1..9: note = Seed: VVGAVGVGK (KRAS G12V)
FVGIVSVGQ

SEQ ID NO: 70701 - protein, 9 aa, synthetic construct
  source 1..9: note = Seed: VVGAVGVGK (KRAS G12V)
FVGIVSVGR

SEQ ID NO: 70702 - protein, 9 aa, synthetic construct
  source 1..9: note = Seed: VVGAVGVGK (KRAS G12V)
FVGIVSVGS

SEQ ID NO: 70703 - protein, 9 aa, synthetic construct
  source 1..9: note = Seed: VVGAVGVGK (KRAS G12V)
FVGIVSVGT

SEQ ID NO: 70704 - protein, 9 aa, synthetic construct
  source 1..9: note = Seed: VVGAVGVGK (KRAS G12V)
FVGIVSVGV

SEQ ID NO: 70705 - protein, 9 aa, synthetic construct
  source 1..9: note = Seed: VVGAVGVGK (KRAS G12V)
FVGIVSVGY

SEQ ID NO: 70706 - protein, 9 aa, synthetic construct
  source 1..9: note = Seed: VVGAVGVGK (KRAS G12V)
FVGIVTVGA

SEQ ID NO: 70707 - protein, 9 aa, synthetic construct
  source 1..9: note = Seed: VVGAVGVGK (KRAS G12V)
FVGIVTVGG

SEQ ID NO: 70708 - protein, 9 aa, synthetic construct
  source 1..9: note = Seed: VVGAVGVGK (KRAS G12V)
FVGIVTVGH

SEQ ID NO: 70709 - protein, 9 aa, synthetic construct
  source 1..9: note = Seed: VVGAVGVGK (KRAS G12V)
FVGIVTVGK

SEQ ID NO: 70710 - protein, 9 aa, synthetic construct
  source 1..9: note = Seed: VVGAVGVGK (KRAS G12V)
FVGIVTVGL

SEQ ID NO: 70711 - protein, 9 aa, synthetic construct
  source 1..9: note = Seed: VVGAVGVGK (KRAS G12V)
FVGIVTVGM

SEQ ID NO: 70712 - protein, 9 aa, synthetic construct
  source 1..9: note = Seed: VVGAVGVGK (KRAS G12V)
FVGIVTVGN

SEQ ID NO: 70713 - protein, 9 aa, synthetic construct
  source 1..9: note = Seed: VVGAVGVGK (KRAS G12V)
FVGIVTVGR

SEQ ID NO: 70714 - protein, 9 aa, synthetic construct
  source 1..9: note = Seed: VVGAVGVGK (KRAS G12V)
FVGIVTVGS

SEQ ID NO: 70715 - protein, 9 aa, synthetic construct
  source 1..9: note = Seed: VVGAVGVGK (KRAS G12V)
FVGIVTVGT

SEQ ID NO: 70716 - protein, 9 aa, synthetic construct
  source 1..9: note = Seed: VVGAVGVGK (KRAS G12V)
FVGIVTVGV

SEQ ID NO: 70717 - protein, 9 aa, synthetic construct
  source 1..9: note = Seed: VVGAVGVGK (KRAS G12V)
FVGIVVVGR

SEQ ID NO: 70718 - protein, 9 aa, synthetic construct
  source 1..9: note = Seed: VVGAVGVGK (KRAS G12V)
FVGKVAVGA

SEQ ID NO: 70719 - protein, 9 aa, synthetic construct
  source 1..9: note = Seed: VVGAVGVGK (KRAS G12V)
FVGKVAVGF

SEQ ID NO: 70720 - protein, 9 aa, synthetic construct
  source 1..9: note = Seed: VVGAVGVGK (KRAS G12V)
FVGKVAVGG

SEQ ID NO: 70721 - protein, 9 aa, synthetic construct
  source 1..9: note = Seed: VVGAVGVGK (KRAS G12V)
FVGKVAVGH

SEQ ID NO: 70722 - protein, 9 aa, synthetic construct
  source 1..9: note = Seed: VVGAVGVGK (KRAS G12V)
FVGKVAVGI

SEQ ID NO: 70723 - protein, 9 aa, synthetic construct
  source 1..9: note = Seed: VVGAVGVGK (KRAS G12V)
FVGKVAVGL

SEQ ID NO: 70724 - protein, 9 aa, synthetic construct
  source 1..9: note = Seed: VVGAVGVGK (KRAS G12V)
FVGKVAVGM

SEQ ID NO: 70725 - protein, 9 aa, synthetic construct
  source 1..9: note = Seed: VVGAVGVGK (KRAS G12V)
FVGKVAVGN

SEQ ID NO: 70726 - protein, 9 aa, synthetic construct
  source 1..9: note = Seed: VVGAVGVGK (KRAS G12V)
FVGKVAVGR

SEQ ID NO: 70727 - protein, 9 aa, synthetic construct
  source 1..9: note = Seed: VVGAVGVGK (KRAS G12V)
FVGKVAVGS

SEQ ID NO: 70728 - protein, 9 aa, synthetic construct
  source 1..9: note = Seed: VVGAVGVGK (KRAS G12V)
FVGKVAVGT

SEQ ID NO: 70729 - protein, 9 aa, synthetic construct
  source 1..9: note = Seed: VVGAVGVGK (KRAS G12V)
FVGKVAVGV

SEQ ID NO: 70730 - protein, 9 aa, synthetic construct
  source 1..9: note = Seed: VVGAVGVGK (KRAS G12V)
FVGKVAVGY

SEQ ID NO: 70731 - protein, 9 aa, synthetic construct
  source 1..9: note = Seed: VVGAVGVGK (KRAS G12V)
FVGKVGVGA

SEQ ID NO: 70732 - protein, 9 aa, synthetic construct
  source 1..9: note = Seed: VVGAVGVGK (KRAS G12V)
FVGKVGVGI

SEQ ID NO: 70733 - protein, 9 aa, synthetic construct
  source 1..9: note = Seed: VVGAVGVGK (KRAS G12V)
FVGKVGVGL

SEQ ID NO: 70734 - protein, 9 aa, synthetic construct
  source 1..9: note = Seed: VVGAVGVGK (KRAS G12V)
FVGKVGVGM

SEQ ID NO: 70735 - protein, 9 aa, synthetic construct
  source 1..9: note = Seed: VVGAVGVGK (KRAS G12V)
FVGKVGVGR

SEQ ID NO: 70736 - protein, 9 aa, synthetic construct
  source 1..9: note = Seed: VVGAVGVGK (KRAS G12V)
FVGKVGVGV

SEQ ID NO: 70737 - protein, 9 aa, synthetic construct
  source 1..9: note = Seed: VVGAVGVGK (KRAS G12V)
FVGKVHVGA

SEQ ID NO: 70738 - protein, 9 aa, synthetic construct
  source 1..9: note = Seed: VVGAVGVGK (KRAS G12V)
FVGKVHVGR

SEQ ID NO: 70739 - protein, 9 aa, synthetic construct
  source 1..9: note = Seed: VVGAVGVGK (KRAS G12V)
FVGKVKVGA

SEQ ID NO: 70740 - protein, 9 aa, synthetic construct
  source 1..9: note = Seed: VVGAVGVGK (KRAS G12V)
FVGKVKVGE

SEQ ID NO: 70741 - protein, 9 aa, synthetic construct
  source 1..9: note = Seed: VVGAVGVGK (KRAS G12V)
FVGKVKVGF

SEQ ID NO: 70742 - protein, 9 aa, synthetic construct
  source 1..9: note = Seed: VVGAVGVGK (KRAS G12V)
FVGKVKVGG

SEQ ID NO: 70743 - protein, 9 aa, synthetic construct
  source 1..9: note = Seed: VVGAVGVGK (KRAS G12V)
FVGKVKVGH

SEQ ID NO: 70744 - protein, 9 aa, synthetic construct
  source 1..9: note = Seed: VVGAVGVGK (KRAS G12V)
FVGKVKVGI

SEQ ID NO: 70745 - protein, 9 aa, synthetic construct
  source 1..9: note = Seed: VVGAVGVGK (KRAS G12V)
FVGKVKVGK

SEQ ID NO: 70746 - protein, 9 aa, synthetic construct
  source 1..9: note = Seed: VVGAVGVGK (KRAS G12V)
FVGKVKVGL

SEQ ID NO: 70747 - protein, 9 aa, synthetic construct
  source 1..9: note = Seed: VVGAVGVGK (KRAS G12V)
FVGKVKVGM

SEQ ID NO: 70748 - protein, 9 aa, synthetic construct
  source 1..9: note = Seed: VVGAVGVGK (KRAS G12V)
FVGKVKVGN

SEQ ID NO: 70749 - protein, 9 aa, synthetic construct
  source 1..9: note = Seed: VVGAVGVGK (KRAS G12V)
FVGKVKVGP

SEQ ID NO: 70750 - protein, 9 aa, synthetic construct
  source 1..9: note = Seed: VVGAVGVGK (KRAS G12V)
FVGKVKVGQ

SEQ ID NO: 70751 - protein, 9 aa, synthetic construct
  source 1..9: note = Seed: VVGAVGVGK (KRAS G12V)
FVGKVKVGR

SEQ ID NO: 70752 - protein, 9 aa, synthetic construct
  source 1..9: note = Seed: VVGAVGVGK (KRAS G12V)
FVGKVKVGS

SEQ ID NO: 70753 - protein, 9 aa, synthetic construct
  source 1..9: note = Seed: VVGAVGVGK (KRAS G12V)
FVGKVKVGT

SEQ ID NO: 70754 - protein, 9 aa, synthetic construct
  source 1..9: note = Seed: VVGAVGVGK (KRAS G12V)
FVGKVKVGV

SEQ ID NO: 70755 - protein, 9 aa, synthetic construct
  source 1..9: note = Seed: VVGAVGVGK (KRAS G12V)
FVGKVKVGY

SEQ ID NO: 70756 - protein, 9 aa, synthetic construct
  source 1..9: note = Seed: VVGAVGVGK (KRAS G12V)
FVGKVNVGA

SEQ ID NO: 70757 - protein, 9 aa, synthetic construct
  source 1..9: note = Seed: VVGAVGVGK (KRAS G12V)
FVGKVNVGI

SEQ ID NO: 70758 - protein, 9 aa, synthetic construct
  source 1..9: note = Seed: VVGAVGVGK (KRAS G12V)
FVGKVNVGL

SEQ ID NO: 70759 - protein, 9 aa, synthetic construct
  source 1..9: note = Seed: VVGAVGVGK (KRAS G12V)
FVGKVNVGR

SEQ ID NO: 70760 - protein, 9 aa, synthetic construct
  source 1..9: note = Seed: VVGAVGVGK (KRAS G12V)
FVGKVNVGV

SEQ ID NO: 70761 - protein, 9 aa, synthetic construct
  source 1..9: note = Seed: VVGAVGVGK (KRAS G12V)
FVGKVPVGA

SEQ ID NO: 70762 - protein, 9 aa, synthetic construct
  source 1..9: note = Seed: VVGAVGVGK (KRAS G12V)
FVGKVPVGH

SEQ ID NO: 70763 - protein, 9 aa, synthetic construct
  source 1..9: note = Seed: VVGAVGVGK (KRAS G12V)
FVGKVPVGI

SEQ ID NO: 70764 - protein, 9 aa, synthetic construct
  source 1..9: note = Seed: VVGAVGVGK (KRAS G12V)
FVGKVPVGK

SEQ ID NO: 70765 - protein, 9 aa, synthetic construct
  source 1..9: note = Seed: VVGAVGVGK (KRAS G12V)
FVGKVPVGL

SEQ ID NO: 70766 - protein, 9 aa, synthetic construct
  source 1..9: note = Seed: VVGAVGVGK (KRAS G12V)
FVGKVPVGM

SEQ ID NO: 70767 - protein, 9 aa, synthetic construct
  source 1..9: note = Seed: VVGAVGVGK (KRAS G12V)
FVGKVPVGR

SEQ ID NO: 70768 - protein, 9 aa, synthetic construct
  source 1..9: note = Seed: VVGAVGVGK (KRAS G12V)
FVGKVPVGV

SEQ ID NO: 70769 - protein, 9 aa, synthetic construct
  source 1..9: note = Seed: VVGAVGVGK (KRAS G12V)
FVGKVQVGR

SEQ ID NO: 70770 - protein, 9 aa, synthetic construct
  source 1..9: note = Seed: VVGAVGVGK (KRAS G12V)
FVGKVRVGA

SEQ ID NO: 70771 - protein, 9 aa, synthetic construct
  source 1..9: note = Seed: VVGAVGVGK (KRAS G12V)
FVGKVRVGC

SEQ ID NO: 70772 - protein, 9 aa, synthetic construct
  source 1..9: note = Seed: VVGAVGVGK (KRAS G12V)
FVGKVRVGE

SEQ ID NO: 70773 - protein, 9 aa, synthetic construct
  source 1..9: note = Seed: VVGAVGVGK (KRAS G12V)
FVGKVRVGF

SEQ ID NO: 70774 - protein, 9 aa, synthetic construct
  source 1..9: note = Seed: VVGAVGVGK (KRAS G12V)
FVGKVRVGG

SEQ ID NO: 70775 - protein, 9 aa, synthetic construct
  source 1..9: note = Seed: VVGAVGVGK (KRAS G12V)
FVGKVRVGH

SEQ ID NO: 70776 - protein, 9 aa, synthetic construct
  source 1..9: note = Seed: VVGAVGVGK (KRAS G12V)
FVGKVRVGI

SEQ ID NO: 70777 - protein, 9 aa, synthetic construct
  source 1..9: note = Seed: VVGAVGVGK (KRAS G12V)
FVGKVRVGK

SEQ ID NO: 70778 - protein, 9 aa, synthetic construct
  source 1..9: note = Seed: VVGAVGVGK (KRAS G12V)
FVGKVRVGL

SEQ ID NO: 70779 - protein, 9 aa, synthetic construct
  source 1..9: note = Seed: VVGAVGVGK (KRAS G12V)
FVGKVRVGM

SEQ ID NO: 70780 - protein, 9 aa, synthetic construct
  source 1..9: note = Seed: VVGAVGVGK (KRAS G12V)
FVGKVRVGN

SEQ ID NO: 70781 - protein, 9 aa, synthetic construct
  source 1..9: note = Seed: VVGAVGVGK (KRAS G12V)
FVGKVRVGP

SEQ ID NO: 70782 - protein, 9 aa, synthetic construct
  source 1..9: note = Seed: VVGAVGVGK (KRAS G12V)
FVGKVRVGQ

SEQ ID NO: 70783 - protein, 9 aa, synthetic construct
  source 1..9: note = Seed: VVGAVGVGK (KRAS G12V)
FVGKVRVGR

SEQ ID NO: 70784 - protein, 9 aa, synthetic construct
  source 1..9: note = Seed: VVGAVGVGK (KRAS G12V)
FVGKVRVGS

SEQ ID NO: 70785 - protein, 9 aa, synthetic construct
  source 1..9: note = Seed: VVGAVGVGK (KRAS G12V)
FVGKVRVGT

SEQ ID NO: 70786 - protein, 9 aa, synthetic construct
  source 1..9: note = Seed: VVGAVGVGK (KRAS G12V)
FVGKVRVGV

SEQ ID NO: 70787 - protein, 9 aa, synthetic construct
  source 1..9: note = Seed: VVGAVGVGK (KRAS G12V)
FVGKVRVGY

SEQ ID NO: 70788 - protein, 9 aa, synthetic construct
  source 1..9: note = Seed: VVGAVGVGK (KRAS G12V)
FVGKVSVGA

SEQ ID NO: 70789 - protein, 9 aa, synthetic construct
  source 1..9: note = Seed: VVGAVGVGK (KRAS G12V)
FVGKVSVGI

SEQ ID NO: 70790 - protein, 9 aa, synthetic construct
  source 1..9: note = Seed: VVGAVGVGK (KRAS G12V)
FVGKVSVGL

SEQ ID NO: 70791 - protein, 9 aa, synthetic construct
  source 1..9: note = Seed: VVGAVGVGK (KRAS G12V)
FVGKVSVGM

SEQ ID NO: 70792 - protein, 9 aa, synthetic construct
  source 1..9: note = Seed: VVGAVGVGK (KRAS G12V)
FVGKVSVGR

SEQ ID NO: 70793 - protein, 9 aa, synthetic construct
  source 1..9: note = Seed: VVGAVGVGK (KRAS G12V)
FVGKVSVGS

SEQ ID NO: 70794 - protein, 9 aa, synthetic construct
  source 1..9: note = Seed: VVGAVGVGK (KRAS G12V)
FVGKVSVGT

SEQ ID NO: 70795 - protein, 9 aa, synthetic construct
  source 1..9: note = Seed: VVGAVGVGK (KRAS G12V)
FVGKVSVGV

SEQ ID NO: 70796 - protein, 9 aa, synthetic construct
  source 1..9: note = Seed: VVGAVGVGK (KRAS G12V)
FVGKVTVGA

SEQ ID NO: 70797 - protein, 9 aa, synthetic construct
  source 1..9: note = Seed: VVGAVGVGK (KRAS G12V)
FVGKVTVGL

SEQ ID NO: 70798 - protein, 9 aa, synthetic construct
  source 1..9: note = Seed: VVGAVGVGK (KRAS G12V)
FVGKVTVGM

SEQ ID NO: 70799 - protein, 9 aa, synthetic construct
  source 1..9: note = Seed: VVGAVGVGK (KRAS G12V)
FVGKVTVGR

SEQ ID NO: 70800 - protein, 9 aa, synthetic construct
  source 1..9: note = Seed: VVGAVGVGK (KRAS G12V)
FVGKVTVGV

SEQ ID NO: 70801 - protein, 9 aa, synthetic construct
  source 1..9: note = Seed: VVGAVGVGK (KRAS G12V)
FVGKVVVGR

SEQ ID NO: 70802 - protein, 9 aa, synthetic construct
  source 1..9: note = Seed: VVGAVGVGK (KRAS G12V)
FVGLVAVGA

SEQ ID NO: 70803 - protein, 9 aa, synthetic construct
  source 1..9: note = Seed: VVGAVGVGK (KRAS G12V)
FVGLVAVGD

SEQ ID NO: 70804 - protein, 9 aa, synthetic construct
  source 1..9: note = Seed: VVGAVGVGK (KRAS G12V)
FVGLVAVGE

SEQ ID NO: 70805 - protein, 9 aa, synthetic construct
  source 1..9: note = Seed: VVGAVGVGK (KRAS G12V)
FVGLVAVGG

SEQ ID NO: 70806 - protein, 9 aa, synthetic construct
  source 1..9: note = Seed: VVGAVGVGK (KRAS G12V)
FVGLVAVGH

SEQ ID NO: 70807 - protein, 9 aa, synthetic construct
  source 1..9: note = Seed: VVGAVGVGK (KRAS G12V)
FVGLVAVGI

SEQ ID NO: 70808 - protein, 9 aa, synthetic construct
  source 1..9: note = Seed: VVGAVGVGK (KRAS G12V)
FVGLVAVGK

SEQ ID NO: 70809 - protein, 9 aa, synthetic construct
  source 1..9: note = Seed: VVGAVGVGK (KRAS G12V)
FVGLVAVGL

SEQ ID NO: 70810 - protein, 9 aa, synthetic construct
  source 1..9: note = Seed: VVGAVGVGK (KRAS G12V)
FVGLVAVGM

SEQ ID NO: 70811 - protein, 9 aa, synthetic construct
  source 1..9: note = Seed: VVGAVGVGK (KRAS G12V)
FVGLVAVGN

SEQ ID NO: 70812 - protein, 9 aa, synthetic construct
  source 1..9: note = Seed: VVGAVGVGK (KRAS G12V)
FVGLVAVGP

SEQ ID NO: 70813 - protein, 9 aa, synthetic construct
  source 1..9: note = Seed: VVGAVGVGK (KRAS G12V)
FVGLVAVGQ

SEQ ID NO: 70814 - protein, 9 aa, synthetic construct
  source 1..9: note = Seed: VVGAVGVGK (KRAS G12V)
FVGLVAVGR

SEQ ID NO: 70815 - protein, 9 aa, synthetic construct
  source 1..9: note = Seed: VVGAVGVGK (KRAS G12V)
FVGLVAVGS

SEQ ID NO: 70816 - protein, 9 aa, synthetic construct
  source 1..9: note = Seed: VVGAVGVGK (KRAS G12V)
FVGLVAVGT

SEQ ID NO: 70817 - protein, 9 aa, synthetic construct
  source 1..9: note = Seed: VVGAVGVGK (KRAS G12V)
FVGLVAVGV

SEQ ID NO: 70818 - protein, 9 aa, synthetic construct
  source 1..9: note = Seed: VVGAVGVGK (KRAS G12V)
FVGLVAVGY

SEQ ID NO: 70819 - protein, 9 aa, synthetic construct
  source 1..9: note = Seed: VVGAVGVGK (KRAS G12V)
FVGLVDVGA

SEQ ID NO: 70820 - protein, 9 aa, synthetic construct
  source 1..9: note = Seed: VVGAVGVGK (KRAS G12V)
FVGLVDVGI

SEQ ID NO: 70821 - protein, 9 aa, synthetic construct
  source 1..9: note = Seed: VVGAVGVGK (KRAS G12V)
FVGLVDVGL

SEQ ID NO: 70822 - protein, 9 aa, synthetic construct
  source 1..9: note = Seed: VVGAVGVGK (KRAS G12V)
FVGLVDVGV

SEQ ID NO: 70823 - protein, 9 aa, synthetic construct
  source 1..9: note = Seed: VVGAVGVGK (KRAS G12V)
FVGLVEVGA

SEQ ID NO: 70824 - protein, 9 aa, synthetic construct
  source 1..9: note = Seed: VVGAVGVGK (KRAS G12V)
FVGLVEVGS

SEQ ID NO: 70825 - protein, 9 aa, synthetic construct
  source 1..9: note = Seed: VVGAVGVGK (KRAS G12V)
FVGLVGVGA

SEQ ID NO: 70826 - protein, 9 aa, synthetic construct
  source 1..9: note = Seed: VVGAVGVGK (KRAS G12V)
FVGLVGVGD

SEQ ID NO: 70827 - protein, 9 aa, synthetic construct
  source 1..9: note = Seed: VVGAVGVGK (KRAS G12V)
FVGLVGVGE

SEQ ID NO: 70828 - protein, 9 aa, synthetic construct
  source 1..9: note = Seed: VVGAVGVGK (KRAS G12V)
FVGLVGVGG

SEQ ID NO: 70829 - protein, 9 aa, synthetic construct
  source 1..9: note = Seed: VVGAVGVGK (KRAS G12V)
FVGLVGVGH

SEQ ID NO: 70830 - protein, 9 aa, synthetic construct
  source 1..9: note = Seed: VVGAVGVGK (KRAS G12V)
FVGLVGVGI

SEQ ID NO: 70831 - protein, 9 aa, synthetic construct
  source 1..9: note = Seed: VVGAVGVGK (KRAS G12V)
FVGLVGVGK

SEQ ID NO: 70832 - protein, 9 aa, synthetic construct
  source 1..9: note = Seed: VVGAVGVGK (KRAS G12V)
FVGLVGVGL

SEQ ID NO: 70833 - protein, 9 aa, synthetic construct
  source 1..9: note = Seed: VVGAVGVGK (KRAS G12V)
FVGLVGVGM

SEQ ID NO: 70834 - protein, 9 aa, synthetic construct
  source 1..9: note = Seed: VVGAVGVGK (KRAS G12V)
FVGLVGVGN

SEQ ID NO: 70835 - protein, 9 aa, synthetic construct
  source 1..9: note = Seed: VVGAVGVGK (KRAS G12V)
FVGLVGVGP

SEQ ID NO: 70836 - protein, 9 aa, synthetic construct
  source 1..9: note = Seed: VVGAVGVGK (KRAS G12V)
FVGLVGVGQ

SEQ ID NO: 70837 - protein, 9 aa, synthetic construct
  source 1..9: note = Seed: VVGAVGVGK (KRAS G12V)
FVGLVGVGR

SEQ ID NO: 70838 - protein, 9 aa, synthetic construct
  source 1..9: note = Seed: VVGAVGVGK (KRAS G12V)
FVGLVGVGS

SEQ ID NO: 70839 - protein, 9 aa, synthetic construct
  source 1..9: note = Seed: VVGAVGVGK (KRAS G12V)
FVGLVGVGT

SEQ ID NO: 70840 - protein, 9 aa, synthetic construct
  source 1..9: note = Seed: VVGAVGVGK (KRAS G12V)
FVGLVGVGV

SEQ ID NO: 70841 - protein, 9 aa, synthetic construct
  source 1..9: note = Seed: VVGAVGVGK (KRAS G12V)
FVGLVGVGY

SEQ ID NO: 70842 - protein, 9 aa, synthetic construct
  source 1..9: note = Seed: VVGAVGVGK (KRAS G12V)
FVGLVHVGG

SEQ ID NO: 70843 - protein, 9 aa, synthetic construct
  source 1..9: note = Seed: VVGAVGVGK (KRAS G12V)
FVGLVHVGH

SEQ ID NO: 70844 - protein, 9 aa, synthetic construct
  source 1..9: note = Seed: VVGAVGVGK (KRAS G12V)
FVGLVHVGK

SEQ ID NO: 70845 - protein, 9 aa, synthetic construct
  source 1..9: note = Seed: VVGAVGVGK (KRAS G12V)
FVGLVHVGL

SEQ ID NO: 70846 - protein, 9 aa, synthetic construct
  source 1..9: note = Seed: VVGAVGVGK (KRAS G12V)
FVGLVHVGM

SEQ ID NO: 70847 - protein, 9 aa, synthetic construct
  source 1..9: note = Seed: VVGAVGVGK (KRAS G12V)
FVGLVHVGN

SEQ ID NO: 70848 - protein, 9 aa, synthetic construct
  source 1..9: note = Seed: VVGAVGVGK (KRAS G12V)
FVGLVHVGR

SEQ ID NO: 70849 - protein, 9 aa, synthetic construct
  source 1..9: note = Seed: VVGAVGVGK (KRAS G12V)
FVGLVHVGS

SEQ ID NO: 70850 - protein, 9 aa, synthetic construct
  source 1..9: note = Seed: VVGAVGVGK (KRAS G12V)
FVGLVHVGT

SEQ ID NO: 70851 - protein, 9 aa, synthetic construct
  source 1..9: note = Seed: VVGAVGVGK (KRAS G12V)
FVGLVHVGV

SEQ ID NO: 70852 - protein, 9 aa, synthetic construct
  source 1..9: note = Seed: VVGAVGVGK (KRAS G12V)
FVGLVKVGA

SEQ ID NO: 70853 - protein, 9 aa, synthetic construct
  source 1..9: note = Seed: VVGAVGVGK (KRAS G12V)
FVGLVKVGD

SEQ ID NO: 70854 - protein, 9 aa, synthetic construct
  source 1..9: note = Seed: VVGAVGVGK (KRAS G12V)
FVGLVKVGE

SEQ ID NO: 70855 - protein, 9 aa, synthetic construct
  source 1..9: note = Seed: VVGAVGVGK (KRAS G12V)
FVGLVKVGG

SEQ ID NO: 70856 - protein, 9 aa, synthetic construct
  source 1..9: note = Seed: VVGAVGVGK (KRAS G12V)
FVGLVKVGH

SEQ ID NO: 70857 - protein, 9 aa, synthetic construct
  source 1..9: note = Seed: VVGAVGVGK (KRAS G12V)
FVGLVKVGK

SEQ ID NO: 70858 - protein, 9 aa, synthetic construct
  source 1..9: note = Seed: VVGAVGVGK (KRAS G12V)
FVGLVKVGL

SEQ ID NO: 70859 - protein, 9 aa, synthetic construct
  source 1..9: note = Seed: VVGAVGVGK (KRAS G12V)
FVGLVKVGM

SEQ ID NO: 70860 - protein, 9 aa, synthetic construct
  source 1..9: note = Seed: VVGAVGVGK (KRAS G12V)
FVGLVKVGN

SEQ ID NO: 70861 - protein, 9 aa, synthetic construct
  source 1..9: note = Seed: VVGAVGVGK (KRAS G12V)
FVGLVKVGP

SEQ ID NO: 70862 - protein, 9 aa, synthetic construct
  source 1..9: note = Seed: VVGAVGVGK (KRAS G12V)
FVGLVKVGQ

SEQ ID NO: 70863 - protein, 9 aa, synthetic construct
  source 1..9: note = Seed: VVGAVGVGK (KRAS G12V)
FVGLVKVGR

SEQ ID NO: 70864 - protein, 9 aa, synthetic construct
  source 1..9: note = Seed: VVGAVGVGK (KRAS G12V)
FVGLVKVGS

SEQ ID NO: 70865 - protein, 9 aa, synthetic construct
  source 1..9: note = Seed: VVGAVGVGK (KRAS G12V)
FVGLVKVGT

SEQ ID NO: 70866 - protein, 9 aa, synthetic construct
  source 1..9: note = Seed: VVGAVGVGK (KRAS G12V)
FVGLVKVGV

SEQ ID NO: 70867 - protein, 9 aa, synthetic construct
  source 1..9: note = Seed: VVGAVGVGK (KRAS G12V)
FVGLVKVGY

SEQ ID NO: 70868 - protein, 9 aa, synthetic construct
  source 1..9: note = Seed: VVGAVGVGK (KRAS G12V)
FVGLVNVGA

SEQ ID NO: 70869 - protein, 9 aa, synthetic construct
  source 1..9: note = Seed: VVGAVGVGK (KRAS G12V)
FVGLVNVGG

SEQ ID NO: 70870 - protein, 9 aa, synthetic construct
  source 1..9: note = Seed: VVGAVGVGK (KRAS G12V)
FVGLVNVGH

SEQ ID NO: 70871 - protein, 9 aa, synthetic construct
  source 1..9: note = Seed: VVGAVGVGK (KRAS G12V)
FVGLVNVGI

SEQ ID NO: 70872 - protein, 9 aa, synthetic construct
  source 1..9: note = Seed: VVGAVGVGK (KRAS G12V)
FVGLVNVGK

SEQ ID NO: 70873 - protein, 9 aa, synthetic construct
  source 1..9: note = Seed: VVGAVGVGK (KRAS G12V)
FVGLVNVGL

SEQ ID NO: 70874 - protein, 9 aa, synthetic construct
  source 1..9: note = Seed: VVGAVGVGK (KRAS G12V)
FVGLVNVGM

SEQ ID NO: 70875 - protein, 9 aa, synthetic construct
  source 1..9: note = Seed: VVGAVGVGK (KRAS G12V)
FVGLVNVGN

SEQ ID NO: 70876 - protein, 9 aa, synthetic construct
  source 1..9: note = Seed: VVGAVGVGK (KRAS G12V)
FVGLVNVGP

SEQ ID NO: 70877 - protein, 9 aa, synthetic construct
  source 1..9: note = Seed: VVGAVGVGK (KRAS G12V)
FVGLVNVGQ

SEQ ID NO: 70878 - protein, 9 aa, synthetic construct
  source 1..9: note = Seed: VVGAVGVGK (KRAS G12V)
FVGLVNVGR

SEQ ID NO: 70879 - protein, 9 aa, synthetic construct
  source 1..9: note = Seed: VVGAVGVGK (KRAS G12V)
FVGLVNVGS

SEQ ID NO: 70880 - protein, 9 aa, synthetic construct
  source 1..9: note = Seed: VVGAVGVGK (KRAS G12V)
FVGLVNVGT

SEQ ID NO: 70881 - protein, 9 aa, synthetic construct
  source 1..9: note = Seed: VVGAVGVGK (KRAS G12V)
FVGLVNVGV

SEQ ID NO: 70882 - protein, 9 aa, synthetic construct
  source 1..9: note = Seed: VVGAVGVGK (KRAS G12V)
FVGLVNVGY

SEQ ID NO: 70883 - protein, 9 aa, synthetic construct
  source 1..9: note = Seed: VVGAVGVGK (KRAS G12V)
FVGLVPVGA

SEQ ID NO: 70884 - protein, 9 aa, synthetic construct
  source 1..9: note = Seed: VVGAVGVGK (KRAS G12V)
FVGLVPVGC

SEQ ID NO: 70885 - protein, 9 aa, synthetic construct
  source 1..9: note = Seed: VVGAVGVGK (KRAS G12V)
FVGLVPVGD

SEQ ID NO: 70886 - protein, 9 aa, synthetic construct
  source 1..9: note = Seed: VVGAVGVGK (KRAS G12V)
FVGLVPVGE

SEQ ID NO: 70887 - protein, 9 aa, synthetic construct
  source 1..9: note = Seed: VVGAVGVGK (KRAS G12V)
FVGLVPVGF

SEQ ID NO: 70888 - protein, 9 aa, synthetic construct
  source 1..9: note = Seed: VVGAVGVGK (KRAS G12V)
FVGLVPVGG

SEQ ID NO: 70889 - protein, 9 aa, synthetic construct
  source 1..9: note = Seed: VVGAVGVGK (KRAS G12V)
FVGLVPVGH

SEQ ID NO: 70890 - protein, 9 aa, synthetic construct
  source 1..9: note = Seed: VVGAVGVGK (KRAS G12V)
FVGLVPVGI

SEQ ID NO: 70891 - protein, 9 aa, synthetic construct
  source 1..9: note = Seed: VVGAVGVGK (KRAS G12V)
FVGLVPVGK

SEQ ID NO: 70892 - protein, 9 aa, synthetic construct
  source 1..9: note = Seed: VVGAVGVGK (KRAS G12V)
FVGLVPVGL

SEQ ID NO: 70893 - protein, 9 aa, synthetic construct
  source 1..9: note = Seed: VVGAVGVGK (KRAS G12V)
FVGLVPVGM

SEQ ID NO: 70894 - protein, 9 aa, synthetic construct
  source 1..9: note = Seed: VVGAVGVGK (KRAS G12V)
FVGLVPVGN

SEQ ID NO: 70895 - protein, 9 aa, synthetic construct
  source 1..9: note = Seed: VVGAVGVGK (KRAS G12V)
FVGLVPVGP

SEQ ID NO: 70896 - protein, 9 aa, synthetic construct
  source 1..9: note = Seed: VVGAVGVGK (KRAS G12V)
FVGLVPVGQ

SEQ ID NO: 70897 - protein, 9 aa, synthetic construct
  source 1..9: note = Seed: VVGAVGVGK (KRAS G12V)
FVGLVPVGR

SEQ ID NO: 70898 - protein, 9 aa, synthetic construct
  source 1..9: note = Seed: VVGAVGVGK (KRAS G12V)
FVGLVPVGS

SEQ ID NO: 70899 - protein, 9 aa, synthetic construct
  source 1..9: note = Seed: VVGAVGVGK (KRAS G12V)
FVGLVPVGT

SEQ ID NO: 70900 - protein, 9 aa, synthetic construct
  source 1..9: note = Seed: VVGAVGVGK (KRAS G12V)
FVGLVPVGV

SEQ ID NO: 70901 - protein, 9 aa, synthetic construct
  source 1..9: note = Seed: VVGAVGVGK (KRAS G12V)
FVGLVPVGY

SEQ ID NO: 70902 - protein, 9 aa, synthetic construct
  source 1..9: note = Seed: VVGAVGVGK (KRAS G12V)
FVGLVQVGH

SEQ ID NO: 70903 - protein, 9 aa, synthetic construct
  source 1..9: note = Seed: VVGAVGVGK (KRAS G12V)
FVGLVQVGK

SEQ ID NO: 70904 - protein, 9 aa, synthetic construct
  source 1..9: note = Seed: VVGAVGVGK (KRAS G12V)
FVGLVQVGR

SEQ ID NO: 70905 - protein, 9 aa, synthetic construct
  source 1..9: note = Seed: VVGAVGVGK (KRAS G12V)
FVGLVRVGA

SEQ ID NO: 70906 - protein, 9 aa, synthetic construct
  source 1..9: note = Seed: VVGAVGVGK (KRAS G12V)
FVGLVRVGD

SEQ ID NO: 70907 - protein, 9 aa, synthetic construct
  source 1..9: note = Seed: VVGAVGVGK (KRAS G12V)
FVGLVRVGE

SEQ ID NO: 70908 - protein, 9 aa, synthetic construct
  source 1..9: note = Seed: VVGAVGVGK (KRAS G12V)
FVGLVRVGG

SEQ ID NO: 70909 - protein, 9 aa, synthetic construct
  source 1..9: note = Seed: VVGAVGVGK (KRAS G12V)
FVGLVRVGH

SEQ ID NO: 70910 - protein, 9 aa, synthetic construct
  source 1..9: note = Seed: VVGAVGVGK (KRAS G12V)
FVGLVRVGK

SEQ ID NO: 70911 - protein, 9 aa, synthetic construct
  source 1..9: note = Seed: VVGAVGVGK (KRAS G12V)
FVGLVRVGL

SEQ ID NO: 70912 - protein, 9 aa, synthetic construct
  source 1..9: note = Seed: VVGAVGVGK (KRAS G12V)
FVGLVRVGM

SEQ ID NO: 70913 - protein, 9 aa, synthetic construct
  source 1..9: note = Seed: VVGAVGVGK (KRAS G12V)
FVGLVRVGN

SEQ ID NO: 70914 - protein, 9 aa, synthetic construct
  source 1..9: note = Seed: VVGAVGVGK (KRAS G12V)
FVGLVRVGP

SEQ ID NO: 70915 - protein, 9 aa, synthetic construct
  source 1..9: note = Seed: VVGAVGVGK (KRAS G12V)
FVGLVRVGQ

SEQ ID NO: 70916 - protein, 9 aa, synthetic construct
  source 1..9: note = Seed: VVGAVGVGK (KRAS G12V)
FVGLVRVGR

SEQ ID NO: 70917 - protein, 9 aa, synthetic construct
  source 1..9: note = Seed: VVGAVGVGK (KRAS G12V)
FVGLVRVGS

SEQ ID NO: 70918 - protein, 9 aa, synthetic construct
  source 1..9: note = Seed: VVGAVGVGK (KRAS G12V)
FVGLVRVGT

SEQ ID NO: 70919 - protein, 9 aa, synthetic construct
  source 1..9: note = Seed: VVGAVGVGK (KRAS G12V)
FVGLVRVGV

SEQ ID NO: 70920 - protein, 9 aa, synthetic construct
  source 1..9: note = Seed: VVGAVGVGK (KRAS G12V)
FVGLVRVGY

SEQ ID NO: 70921 - protein, 9 aa, synthetic construct
  source 1..9: note = Seed: VVGAVGVGK (KRAS G12V)
FVGLVSVGA

SEQ ID NO: 70922 - protein, 9 aa, synthetic construct
  source 1..9: note = Seed: VVGAVGVGK (KRAS G12V)
FVGLVSVGD

SEQ ID NO: 70923 - protein, 9 aa, synthetic construct
  source 1..9: note = Seed: VVGAVGVGK (KRAS G12V)
FVGLVSVGE

SEQ ID NO: 70924 - protein, 9 aa, synthetic construct
  source 1..9: note = Seed: VVGAVGVGK (KRAS G12V)
FVGLVSVGG

SEQ ID NO: 70925 - protein, 9 aa, synthetic construct
  source 1..9: note = Seed: VVGAVGVGK (KRAS G12V)
FVGLVSVGH

SEQ ID NO: 70926 - protein, 9 aa, synthetic construct
  source 1..9: note = Seed: VVGAVGVGK (KRAS G12V)
FVGLVSVGI

SEQ ID NO: 70927 - protein, 9 aa, synthetic construct
  source 1..9: note = Seed: VVGAVGVGK (KRAS G12V)
FVGLVSVGK

SEQ ID NO: 70928 - protein, 9 aa, synthetic construct
  source 1..9: note = Seed: VVGAVGVGK (KRAS G12V)
FVGLVSVGL

SEQ ID NO: 70929 - protein, 9 aa, synthetic construct
  source 1..9: note = Seed: VVGAVGVGK (KRAS G12V)
FVGLVSVGM

SEQ ID NO: 70930 - protein, 9 aa, synthetic construct
  source 1..9: note = Seed: VVGAVGVGK (KRAS G12V)
FVGLVSVGN

SEQ ID NO: 70931 - protein, 9 aa, synthetic construct
  source 1..9: note = Seed: VVGAVGVGK (KRAS G12V)
FVGLVSVGP

SEQ ID NO: 70932 - protein, 9 aa, synthetic construct
  source 1..9: note = Seed: VVGAVGVGK (KRAS G12V)
FVGLVSVGQ

SEQ ID NO: 70933 - protein, 9 aa, synthetic construct
  source 1..9: note = Seed: VVGAVGVGK (KRAS G12V)
FVGLVSVGR

SEQ ID NO: 70934 - protein, 9 aa, synthetic construct
  source 1..9: note = Seed: VVGAVGVGK (KRAS G12V)
FVGLVSVGS

SEQ ID NO: 70935 - protein, 9 aa, synthetic construct
  source 1..9: note = Seed: VVGAVGVGK (KRAS G12V)
FVGLVSVGT

SEQ ID NO: 70936 - protein, 9 aa, synthetic construct
  source 1..9: note = Seed: VVGAVGVGK (KRAS G12V)
FVGLVSVGV

SEQ ID NO: 70937 - protein, 9 aa, synthetic construct
  source 1..9: note = Seed: VVGAVGVGK (KRAS G12V)
FVGLVSVGY

SEQ ID NO: 70938 - protein, 9 aa, synthetic construct
  source 1..9: note = Seed: VVGAVGVGK (KRAS G12V)
FVGLVTVGA

SEQ ID NO: 70939 - protein, 9 aa, synthetic construct
  source 1..9: note = Seed: VVGAVGVGK (KRAS G12V)
FVGLVTVGG

SEQ ID NO: 70940 - protein, 9 aa, synthetic construct
  source 1..9: note = Seed: VVGAVGVGK (KRAS G12V)
FVGLVTVGH

SEQ ID NO: 70941 - protein, 9 aa, synthetic construct
  source 1..9: note = Seed: VVGAVGVGK (KRAS G12V)
FVGLVTVGI

SEQ ID NO: 70942 - protein, 9 aa, synthetic construct
  source 1..9: note = Seed: VVGAVGVGK (KRAS G12V)
FVGLVTVGK

SEQ ID NO: 70943 - protein, 9 aa, synthetic construct
  source 1..9: note = Seed: VVGAVGVGK (KRAS G12V)
FVGLVTVGL

SEQ ID NO: 70944 - protein, 9 aa, synthetic construct
  source 1..9: note = Seed: VVGAVGVGK (KRAS G12V)
FVGLVTVGM

SEQ ID NO: 70945 - protein, 9 aa, synthetic construct
  source 1..9: note = Seed: VVGAVGVGK (KRAS G12V)
FVGLVTVGN

SEQ ID NO: 70946 - protein, 9 aa, synthetic construct
  source 1..9: note = Seed: VVGAVGVGK (KRAS G12V)
FVGLVTVGP

SEQ ID NO: 70947 - protein, 9 aa, synthetic construct
  source 1..9: note = Seed: VVGAVGVGK (KRAS G12V)
FVGLVTVGR

SEQ ID NO: 70948 - protein, 9 aa, synthetic construct
  source 1..9: note = Seed: VVGAVGVGK (KRAS G12V)
FVGLVTVGS

SEQ ID NO: 70949 - protein, 9 aa, synthetic construct
  source 1..9: note = Seed: VVGAVGVGK (KRAS G12V)
FVGLVTVGT

SEQ ID NO: 70950 - protein, 9 aa, synthetic construct
  source 1..9: note = Seed: VVGAVGVGK (KRAS G12V)
FVGLVTVGV

SEQ ID NO: 70951 - protein, 9 aa, synthetic construct
  source 1..9: note = Seed: VVGAVGVGK (KRAS G12V)
FVGLVTVGY

SEQ ID NO: 70952 - protein, 9 aa, synthetic construct
  source 1..9: note = Seed: VVGAVGVGK (KRAS G12V)
FVGLVVVGH

SEQ ID NO: 70953 - protein, 9 aa, synthetic construct
  source 1..9: note = Seed: VVGAVGVGK (KRAS G12V)
FVGLVVVGK

SEQ ID NO: 70954 - protein, 9 aa, synthetic construct
  source 1..9: note = Seed: VVGAVGVGK (KRAS G12V)
FVGLVVVGN

SEQ ID NO: 70955 - protein, 9 aa, synthetic construct
  source 1..9: note = Seed: VVGAVGVGK (KRAS G12V)
FVGLVVVGR

SEQ ID NO: 70956 - protein, 9 aa, synthetic construct
  source 1..9: note = Seed: VVGAVGVGK (KRAS G12V)
FVGLVVVGS

SEQ ID NO: 70957 - protein, 9 aa, synthetic construct
  source 1..9: note = Seed: VVGAVGVGK (KRAS G12V)
FVGMVAVGA

SEQ ID NO: 70958 - protein, 9 aa, synthetic construct
  source 1..9: note = Seed: VVGAVGVGK (KRAS G12V)
FVGMVAVGD

SEQ ID NO: 70959 - protein, 9 aa, synthetic construct
  source 1..9: note = Seed: VVGAVGVGK (KRAS G12V)
FVGMVAVGE

SEQ ID NO: 70960 - protein, 9 aa, synthetic construct
  source 1..9: note = Seed: VVGAVGVGK (KRAS G12V)
FVGMVAVGG

SEQ ID NO: 70961 - protein, 9 aa, synthetic construct
  source 1..9: note = Seed: VVGAVGVGK (KRAS G12V)
FVGMVAVGH

SEQ ID NO: 70962 - protein, 9 aa, synthetic construct
  source 1..9: note = Seed: VVGAVGVGK (KRAS G12V)
FVGMVAVGI

SEQ ID NO: 70963 - protein, 9 aa, synthetic construct
  source 1..9: note = Seed: VVGAVGVGK (KRAS G12V)
FVGMVAVGK

SEQ ID NO: 70964 - protein, 9 aa, synthetic construct
  source 1..9: note = Seed: VVGAVGVGK (KRAS G12V)
FVGMVAVGL

SEQ ID NO: 70965 - protein, 9 aa, synthetic construct
  source 1..9: note = Seed: VVGAVGVGK (KRAS G12V)
FVGMVAVGM

SEQ ID NO: 70966 - protein, 9 aa, synthetic construct
  source 1..9: note = Seed: VVGAVGVGK (KRAS G12V)
FVGMVAVGN

SEQ ID NO: 70967 - protein, 9 aa, synthetic construct
  source 1..9: note = Seed: VVGAVGVGK (KRAS G12V)
FVGMVAVGP

SEQ ID NO: 70968 - protein, 9 aa, synthetic construct
  source 1..9: note = Seed: VVGAVGVGK (KRAS G12V)
FVGMVAVGQ

SEQ ID NO: 70969 - protein, 9 aa, synthetic construct
  source 1..9: note = Seed: VVGAVGVGK (KRAS G12V)
FVGMVAVGR

SEQ ID NO: 70970 - protein, 9 aa, synthetic construct
  source 1..9: note = Seed: VVGAVGVGK (KRAS G12V)
FVGMVAVGS

SEQ ID NO: 70971 - protein, 9 aa, synthetic construct
  source 1..9: note = Seed: VVGAVGVGK (KRAS G12V)
FVGMVAVGT

SEQ ID NO: 70972 - protein, 9 aa, synthetic construct
  source 1..9: note = Seed: VVGAVGVGK (KRAS G12V)
FVGMVAVGV

SEQ ID NO: 70973 - protein, 9 aa, synthetic construct
  source 1..9: note = Seed: VVGAVGVGK (KRAS G12V)
FVGMVAVGY

SEQ ID NO: 70974 - protein, 9 aa, synthetic construct
  source 1..9: note = Seed: VVGAVGVGK (KRAS G12V)
FVGMVDVGA

SEQ ID NO: 70975 - protein, 9 aa, synthetic construct
  source 1..9: note = Seed: VVGAVGVGK (KRAS G12V)
FVGMVDVGI

SEQ ID NO: 70976 - protein, 9 aa, synthetic construct
  source 1..9: note = Seed: VVGAVGVGK (KRAS G12V)
FVGMVDVGL

SEQ ID NO: 70977 - protein, 9 aa, synthetic construct
  source 1..9: note = Seed: VVGAVGVGK (KRAS G12V)
FVGMVDVGV

SEQ ID NO: 70978 - protein, 9 aa, synthetic construct
  source 1..9: note = Seed: VVGAVGVGK (KRAS G12V)
FVGMVEVGA

SEQ ID NO: 70979 - protein, 9 aa, synthetic construct
  source 1..9: note = Seed: VVGAVGVGK (KRAS G12V)
FVGMVGVGA

SEQ ID NO: 70980 - protein, 9 aa, synthetic construct
  source 1..9: note = Seed: VVGAVGVGK (KRAS G12V)
FVGMVGVGD

SEQ ID NO: 70981 - protein, 9 aa, synthetic construct
  source 1..9: note = Seed: VVGAVGVGK (KRAS G12V)
FVGMVGVGE

SEQ ID NO: 70982 - protein, 9 aa, synthetic construct
  source 1..9: note = Seed: VVGAVGVGK (KRAS G12V)
FVGMVGVGG

SEQ ID NO: 70983 - protein, 9 aa, synthetic construct
  source 1..9: note = Seed: VVGAVGVGK (KRAS G12V)
FVGMVGVGH

SEQ ID NO: 70984 - protein, 9 aa, synthetic construct
  source 1..9: note = Seed: VVGAVGVGK (KRAS G12V)
FVGMVGVGI

SEQ ID NO: 70985 - protein, 9 aa, synthetic construct
  source 1..9: note = Seed: VVGAVGVGK (KRAS G12V)
FVGMVGVGK

SEQ ID NO: 70986 - protein, 9 aa, synthetic construct
  source 1..9: note = Seed: VVGAVGVGK (KRAS G12V)
FVGMVGVGL

SEQ ID NO: 70987 - protein, 9 aa, synthetic construct
  source 1..9: note = Seed: VVGAVGVGK (KRAS G12V)
FVGMVGVGM

SEQ ID NO: 70988 - protein, 9 aa, synthetic construct
  source 1..9: note = Seed: VVGAVGVGK (KRAS G12V)
FVGMVGVGN

SEQ ID NO: 70989 - protein, 9 aa, synthetic construct
  source 1..9: note = Seed: VVGAVGVGK (KRAS G12V)
FVGMVGVGP

SEQ ID NO: 70990 - protein, 9 aa, synthetic construct
  source 1..9: note = Seed: VVGAVGVGK (KRAS G12V)
FVGMVGVGQ

SEQ ID NO: 70991 - protein, 9 aa, synthetic construct
  source 1..9: note = Seed: VVGAVGVGK (KRAS G12V)
FVGMVGVGR

SEQ ID NO: 70992 - protein, 9 aa, synthetic construct
  source 1..9: note = Seed: VVGAVGVGK (KRAS G12V)
FVGMVGVGS

SEQ ID NO: 70993 - protein, 9 aa, synthetic construct
  source 1..9: note = Seed: VVGAVGVGK (KRAS G12V)
FVGMVGVGT

SEQ ID NO: 70994 - protein, 9 aa, synthetic construct
  source 1..9: note = Seed: VVGAVGVGK (KRAS G12V)
FVGMVGVGV

SEQ ID NO: 70995 - protein, 9 aa, synthetic construct
  source 1..9: note = Seed: VVGAVGVGK (KRAS G12V)
FVGMVGVGY

SEQ ID NO: 70996 - protein, 9 aa, synthetic construct
  source 1..9: note = Seed: VVGAVGVGK (KRAS G12V)
FVGMVHVGG

SEQ ID NO: 70997 - protein, 9 aa, synthetic construct
  source 1..9: note = Seed: VVGAVGVGK (KRAS G12V)
FVGMVHVGH

SEQ ID NO: 70998 - protein, 9 aa, synthetic construct
  source 1..9: note = Seed: VVGAVGVGK (KRAS G12V)
FVGMVHVGK

SEQ ID NO: 70999 - protein, 9 aa, synthetic construct
  source 1..9: note = Seed: VVGAVGVGK (KRAS G12V)
FVGMVHVGL

SEQ ID NO: 71000 - protein, 9 aa, synthetic construct
  source 1..9: note = Seed: VVGAVGVGK (KRAS G12V)
FVGMVHVGM

SEQ ID NO: 71001 - protein, 9 aa, synthetic construct
  source 1..9: note = Seed: VVGAVGVGK (KRAS G12V)
FVGMVHVGN

SEQ ID NO: 71002 - protein, 9 aa, synthetic construct
  source 1..9: note = Seed: VVGAVGVGK (KRAS G12V)
FVGMVHVGR

SEQ ID NO: 71003 - protein, 9 aa, synthetic construct
  source 1..9: note = Seed: VVGAVGVGK (KRAS G12V)
FVGMVHVGS

SEQ ID NO: 71004 - protein, 9 aa, synthetic construct
  source 1..9: note = Seed: VVGAVGVGK (KRAS G12V)
FVGMVHVGT

SEQ ID NO: 71005 - protein, 9 aa, synthetic construct
  source 1..9: note = Seed: VVGAVGVGK (KRAS G12V)
FVGMVHVGV

SEQ ID NO: 71006 - protein, 9 aa, synthetic construct
  source 1..9: note = Seed: VVGAVGVGK (KRAS G12V)
FVGMVIVGH

SEQ ID NO: 71007 - protein, 9 aa, synthetic construct
  source 1..9: note = Seed: VVGAVGVGK (KRAS G12V)
FVGMVKVGA

SEQ ID NO: 71008 - protein, 9 aa, synthetic construct
  source 1..9: note = Seed: VVGAVGVGK (KRAS G12V)
FVGMVKVGD

SEQ ID NO: 71009 - protein, 9 aa, synthetic construct
  source 1..9: note = Seed: VVGAVGVGK (KRAS G12V)
FVGMVKVGE

SEQ ID NO: 71010 - protein, 9 aa, synthetic construct
  source 1..9: note = Seed: VVGAVGVGK (KRAS G12V)
FVGMVKVGG

SEQ ID NO: 71011 - protein, 9 aa, synthetic construct
  source 1..9: note = Seed: VVGAVGVGK (KRAS G12V)
FVGMVKVGH

SEQ ID NO: 71012 - protein, 9 aa, synthetic construct
  source 1..9: note = Seed: VVGAVGVGK (KRAS G12V)
FVGMVKVGI

SEQ ID NO: 71013 - protein, 9 aa, synthetic construct
  source 1..9: note = Seed: VVGAVGVGK (KRAS G12V)
FVGMVKVGK

SEQ ID NO: 71014 - protein, 9 aa, synthetic construct
  source 1..9: note = Seed: VVGAVGVGK (KRAS G12V)
FVGMVKVGL

SEQ ID NO: 71015 - protein, 9 aa, synthetic construct
  source 1..9: note = Seed: VVGAVGVGK (KRAS G12V)
FVGMVKVGM

SEQ ID NO: 71016 - protein, 9 aa, synthetic construct
  source 1..9: note = Seed: VVGAVGVGK (KRAS G12V)
FVGMVKVGN

SEQ ID NO: 71017 - protein, 9 aa, synthetic construct
  source 1..9: note = Seed: VVGAVGVGK (KRAS G12V)
FVGMVKVGP

SEQ ID NO: 71018 - protein, 9 aa, synthetic construct
  source 1..9: note = Seed: VVGAVGVGK (KRAS G12V)
FVGMVKVGQ

SEQ ID NO: 71019 - protein, 9 aa, synthetic construct
  source 1..9: note = Seed: VVGAVGVGK (KRAS G12V)
FVGMVKVGR

SEQ ID NO: 71020 - protein, 9 aa, synthetic construct
  source 1..9: note = Seed: VVGAVGVGK (KRAS G12V)
FVGMVKVGS

SEQ ID NO: 71021 - protein, 9 aa, synthetic construct
  source 1..9: note = Seed: VVGAVGVGK (KRAS G12V)
FVGMVKVGT

SEQ ID NO: 71022 - protein, 9 aa, synthetic construct
  source 1..9: note = Seed: VVGAVGVGK (KRAS G12V)
FVGMVKVGV

SEQ ID NO: 71023 - protein, 9 aa, synthetic construct
  source 1..9: note = Seed: VVGAVGVGK (KRAS G12V)
FVGMVKVGY

SEQ ID NO: 71024 - protein, 9 aa, synthetic construct
  source 1..9: note = Seed: VVGAVGVGK (KRAS G12V)
FVGMVNVGA

SEQ ID NO: 71025 - protein, 9 aa, synthetic construct
  source 1..9: note = Seed: VVGAVGVGK (KRAS G12V)
FVGMVNVGG

SEQ ID NO: 71026 - protein, 9 aa, synthetic construct
  source 1..9: note = Seed: VVGAVGVGK (KRAS G12V)
FVGMVNVGH

SEQ ID NO: 71027 - protein, 9 aa, synthetic construct
  source 1..9: note = Seed: VVGAVGVGK (KRAS G12V)
FVGMVNVGI

SEQ ID NO: 71028 - protein, 9 aa, synthetic construct
  source 1..9: note = Seed: VVGAVGVGK (KRAS G12V)
FVGMVNVGK

SEQ ID NO: 71029 - protein, 9 aa, synthetic construct
  source 1..9: note = Seed: VVGAVGVGK (KRAS G12V)
FVGMVNVGL

SEQ ID NO: 71030 - protein, 9 aa, synthetic construct
  source 1..9: note = Seed: VVGAVGVGK (KRAS G12V)
FVGMVNVGM

SEQ ID NO: 71031 - protein, 9 aa, synthetic construct
  source 1..9: note = Seed: VVGAVGVGK (KRAS G12V)
FVGMVNVGN

SEQ ID NO: 71032 - protein, 9 aa, synthetic construct
  source 1..9: note = Seed: VVGAVGVGK (KRAS G12V)
FVGMVNVGP

SEQ ID NO: 71033 - protein, 9 aa, synthetic construct
  source 1..9: note = Seed: VVGAVGVGK (KRAS G12V)
FVGMVNVGQ

SEQ ID NO: 71034 - protein, 9 aa, synthetic construct
  source 1..9: note = Seed: VVGAVGVGK (KRAS G12V)
FVGMVNVGR

SEQ ID NO: 71035 - protein, 9 aa, synthetic construct
  source 1..9: note = Seed: VVGAVGVGK (KRAS G12V)
FVGMVNVGS

SEQ ID NO: 71036 - protein, 9 aa, synthetic construct
  source 1..9: note = Seed: VVGAVGVGK (KRAS G12V)
FVGMVNVGT

SEQ ID NO: 71037 - protein, 9 aa, synthetic construct
  source 1..9: note = Seed: VVGAVGVGK (KRAS G12V)
FVGMVNVGV

SEQ ID NO: 71038 - protein, 9 aa, synthetic construct
  source 1..9: note = Seed: VVGAVGVGK (KRAS G12V)
FVGMVNVGY

SEQ ID NO: 71039 - protein, 9 aa, synthetic construct
  source 1..9: note = Seed: VVGAVGVGK (KRAS G12V)
FVGMVPVGA

SEQ ID NO: 71040 - protein, 9 aa, synthetic construct
  source 1..9: note = Seed: VVGAVGVGK (KRAS G12V)
FVGMVPVGC

SEQ ID NO: 71041 - protein, 9 aa, synthetic construct
  source 1..9: note = Seed: VVGAVGVGK (KRAS G12V)
FVGMVPVGD

SEQ ID NO: 71042 - protein, 9 aa, synthetic construct
  source 1..9: note = Seed: VVGAVGVGK (KRAS G12V)
FVGMVPVGE

SEQ ID NO: 71043 - protein, 9 aa, synthetic construct
  source 1..9: note = Seed: VVGAVGVGK (KRAS G12V)
FVGMVPVGF

SEQ ID NO: 71044 - protein, 9 aa, synthetic construct
  source 1..9: note = Seed: VVGAVGVGK (KRAS G12V)
FVGMVPVGG

SEQ ID NO: 71045 - protein, 9 aa, synthetic construct
  source 1..9: note = Seed: VVGAVGVGK (KRAS G12V)
FVGMVPVGH

SEQ ID NO: 71046 - protein, 9 aa, synthetic construct
  source 1..9: note = Seed: VVGAVGVGK (KRAS G12V)
FVGMVPVGI

SEQ ID NO: 71047 - protein, 9 aa, synthetic construct
  source 1..9: note = Seed: VVGAVGVGK (KRAS G12V)
FVGMVPVGK

SEQ ID NO: 71048 - protein, 9 aa, synthetic construct
  source 1..9: note = Seed: VVGAVGVGK (KRAS G12V)
FVGMVPVGL

SEQ ID NO: 71049 - protein, 9 aa, synthetic construct
  source 1..9: note = Seed: VVGAVGVGK (KRAS G12V)
FVGMVPVGM

SEQ ID NO: 71050 - protein, 9 aa, synthetic construct
  source 1..9: note = Seed: VVGAVGVGK (KRAS G12V)
FVGMVPVGN

SEQ ID NO: 71051 - protein, 9 aa, synthetic construct
  source 1..9: note = Seed: VVGAVGVGK (KRAS G12V)
FVGMVPVGP

SEQ ID NO: 71052 - protein, 9 aa, synthetic construct
  source 1..9: note = Seed: VVGAVGVGK (KRAS G12V)
FVGMVPVGQ

SEQ ID NO: 71053 - protein, 9 aa, synthetic construct
  source 1..9: note = Seed: VVGAVGVGK (KRAS G12V)
FVGMVPVGR

SEQ ID NO: 71054 - protein, 9 aa, synthetic construct
  source 1..9: note = Seed: VVGAVGVGK (KRAS G12V)
FVGMVPVGS

SEQ ID NO: 71055 - protein, 9 aa, synthetic construct
  source 1..9: note = Seed: VVGAVGVGK (KRAS G12V)
FVGMVPVGT

SEQ ID NO: 71056 - protein, 9 aa, synthetic construct
  source 1..9: note = Seed: VVGAVGVGK (KRAS G12V)
FVGMVPVGV

SEQ ID NO: 71057 - protein, 9 aa, synthetic construct
  source 1..9: note = Seed: VVGAVGVGK (KRAS G12V)
FVGMVPVGY

SEQ ID NO: 71058 - protein, 9 aa, synthetic construct
  source 1..9: note = Seed: VVGAVGVGK (KRAS G12V)
FVGMVQVGH

SEQ ID NO: 71059 - protein, 9 aa, synthetic construct
  source 1..9: note = Seed: VVGAVGVGK (KRAS G12V)
FVGMVQVGK

SEQ ID NO: 71060 - protein, 9 aa, synthetic construct
  source 1..9: note = Seed: VVGAVGVGK (KRAS G12V)
FVGMVQVGM

SEQ ID NO: 71061 - protein, 9 aa, synthetic construct
  source 1..9: note = Seed: VVGAVGVGK (KRAS G12V)
FVGMVQVGN

SEQ ID NO: 71062 - protein, 9 aa, synthetic construct
  source 1..9: note = Seed: VVGAVGVGK (KRAS G12V)
FVGMVQVGR

SEQ ID NO: 71063 - protein, 9 aa, synthetic construct
  source 1..9: note = Seed: VVGAVGVGK (KRAS G12V)
FVGMVRVGA

SEQ ID NO: 71064 - protein, 9 aa, synthetic construct
  source 1..9: note = Seed: VVGAVGVGK (KRAS G12V)
FVGMVRVGD

SEQ ID NO: 71065 - protein, 9 aa, synthetic construct
  source 1..9: note = Seed: VVGAVGVGK (KRAS G12V)
FVGMVRVGE

SEQ ID NO: 71066 - protein, 9 aa, synthetic construct
  source 1..9: note = Seed: VVGAVGVGK (KRAS G12V)
FVGMVRVGG

SEQ ID NO: 71067 - protein, 9 aa, synthetic construct
  source 1..9: note = Seed: VVGAVGVGK (KRAS G12V)
FVGMVRVGH

SEQ ID NO: 71068 - protein, 9 aa, synthetic construct
  source 1..9: note = Seed: VVGAVGVGK (KRAS G12V)
FVGMVRVGI

SEQ ID NO: 71069 - protein, 9 aa, synthetic construct
  source 1..9: note = Seed: VVGAVGVGK (KRAS G12V)
FVGMVRVGK

SEQ ID NO: 71070 - protein, 9 aa, synthetic construct
  source 1..9: note = Seed: VVGAVGVGK (KRAS G12V)
FVGMVRVGL

SEQ ID NO: 71071 - protein, 9 aa, synthetic construct
  source 1..9: note = Seed: VVGAVGVGK (KRAS G12V)
FVGMVRVGM

SEQ ID NO: 71072 - protein, 9 aa, synthetic construct
  source 1..9: note = Seed: VVGAVGVGK (KRAS G12V)
FVGMVRVGN

SEQ ID NO: 71073 - protein, 9 aa, synthetic construct
  source 1..9: note = Seed: VVGAVGVGK (KRAS G12V)
FVGMVRVGP

SEQ ID NO: 71074 - protein, 9 aa, synthetic construct
  source 1..9: note = Seed: VVGAVGVGK (KRAS G12V)
FVGMVRVGQ

SEQ ID NO: 71075 - protein, 9 aa, synthetic construct
  source 1..9: note = Seed: VVGAVGVGK (KRAS G12V)
FVGMVRVGR

SEQ ID NO: 71076 - protein, 9 aa, synthetic construct
  source 1..9: note = Seed: VVGAVGVGK (KRAS G12V)
FVGMVRVGS

SEQ ID NO: 71077 - protein, 9 aa, synthetic construct
  source 1..9: note = Seed: VVGAVGVGK (KRAS G12V)
FVGMVRVGT

SEQ ID NO: 71078 - protein, 9 aa, synthetic construct
  source 1..9: note = Seed: VVGAVGVGK (KRAS G12V)
FVGMVRVGV

SEQ ID NO: 71079 - protein, 9 aa, synthetic construct
  source 1..9: note = Seed: VVGAVGVGK (KRAS G12V)
FVGMVRVGY

SEQ ID NO: 71080 - protein, 9 aa, synthetic construct
  source 1..9: note = Seed: VVGAVGVGK (KRAS G12V)
FVGMVSVGA

SEQ ID NO: 71081 - protein, 9 aa, synthetic construct
  source 1..9: note = Seed: VVGAVGVGK (KRAS G12V)
FVGMVSVGD

SEQ ID NO: 71082 - protein, 9 aa, synthetic construct
  source 1..9: note = Seed: VVGAVGVGK (KRAS G12V)
FVGMVSVGE

SEQ ID NO: 71083 - protein, 9 aa, synthetic construct
  source 1..9: note = Seed: VVGAVGVGK (KRAS G12V)
FVGMVSVGG

SEQ ID NO: 71084 - protein, 9 aa, synthetic construct
  source 1..9: note = Seed: VVGAVGVGK (KRAS G12V)
FVGMVSVGH

SEQ ID NO: 71085 - protein, 9 aa, synthetic construct
  source 1..9: note = Seed: VVGAVGVGK (KRAS G12V)
FVGMVSVGI

SEQ ID NO: 71086 - protein, 9 aa, synthetic construct
  source 1..9: note = Seed: VVGAVGVGK (KRAS G12V)
FVGMVSVGK

SEQ ID NO: 71087 - protein, 9 aa, synthetic construct
  source 1..9: note = Seed: VVGAVGVGK (KRAS G12V)
FVGMVSVGL

SEQ ID NO: 71088 - protein, 9 aa, synthetic construct
  source 1..9: note = Seed: VVGAVGVGK (KRAS G12V)
FVGMVSVGM

SEQ ID NO: 71089 - protein, 9 aa, synthetic construct
  source 1..9: note = Seed: VVGAVGVGK (KRAS G12V)
FVGMVSVGN

SEQ ID NO: 71090 - protein, 9 aa, synthetic construct
  source 1..9: note = Seed: VVGAVGVGK (KRAS G12V)
FVGMVSVGP

SEQ ID NO: 71091 - protein, 9 aa, synthetic construct
  source 1..9: note = Seed: VVGAVGVGK (KRAS G12V)
FVGMVSVGQ

SEQ ID NO: 71092 - protein, 9 aa, synthetic construct
  source 1..9: note = Seed: VVGAVGVGK (KRAS G12V)
FVGMVSVGR

SEQ ID NO: 71093 - protein, 9 aa, synthetic construct
  source 1..9: note = Seed: VVGAVGVGK (KRAS G12V)
FVGMVSVGS

SEQ ID NO: 71094 - protein, 9 aa, synthetic construct
  source 1..9: note = Seed: VVGAVGVGK (KRAS G12V)
FVGMVSVGT

SEQ ID NO: 71095 - protein, 9 aa, synthetic construct
  source 1..9: note = Seed: VVGAVGVGK (KRAS G12V)
FVGMVSVGV

SEQ ID NO: 71096 - protein, 9 aa, synthetic construct
  source 1..9: note = Seed: VVGAVGVGK (KRAS G12V)
FVGMVSVGY

SEQ ID NO: 71097 - protein, 9 aa, synthetic construct
  source 1..9: note = Seed: VVGAVGVGK (KRAS G12V)
FVGMVTVGA

SEQ ID NO: 71098 - protein, 9 aa, synthetic construct
  source 1..9: note = Seed: VVGAVGVGK (KRAS G12V)
FVGMVTVGG

SEQ ID NO: 71099 - protein, 9 aa, synthetic construct
  source 1..9: note = Seed: VVGAVGVGK (KRAS G12V)
FVGMVTVGH

SEQ ID NO: 71100 - protein, 9 aa, synthetic construct
  source 1..9: note = Seed: VVGAVGVGK (KRAS G12V)
FVGMVTVGI

SEQ ID NO: 71101 - protein, 9 aa, synthetic construct
  source 1..9: note = Seed: VVGAVGVGK (KRAS G12V)
FVGMVTVGK

SEQ ID NO: 71102 - protein, 9 aa, synthetic construct
  source 1..9: note = Seed: VVGAVGVGK (KRAS G12V)
FVGMVTVGL

SEQ ID NO: 71103 - protein, 9 aa, synthetic construct
  source 1..9: note = Seed: VVGAVGVGK (KRAS G12V)
FVGMVTVGM

SEQ ID NO: 71104 - protein, 9 aa, synthetic construct
  source 1..9: note = Seed: VVGAVGVGK (KRAS G12V)
FVGMVTVGN

SEQ ID NO: 71105 - protein, 9 aa, synthetic construct
  source 1..9: note = Seed: VVGAVGVGK (KRAS G12V)
FVGMVTVGP

SEQ ID NO: 71106 - protein, 9 aa, synthetic construct
  source 1..9: note = Seed: VVGAVGVGK (KRAS G12V)
FVGMVTVGQ

SEQ ID NO: 71107 - protein, 9 aa, synthetic construct
  source 1..9: note = Seed: VVGAVGVGK (KRAS G12V)
FVGMVTVGR

SEQ ID NO: 71108 - protein, 9 aa, synthetic construct
  source 1..9: note = Seed: VVGAVGVGK (KRAS G12V)
FVGMVTVGS

SEQ ID NO: 71109 - protein, 9 aa, synthetic construct
  source 1..9: note = Seed: VVGAVGVGK (KRAS G12V)
FVGMVTVGT

SEQ ID NO: 71110 - protein, 9 aa, synthetic construct
  source 1..9: note = Seed: VVGAVGVGK (KRAS G12V)
FVGMVTVGV

SEQ ID NO: 71111 - protein, 9 aa, synthetic construct
  source 1..9: note = Seed: VVGAVGVGK (KRAS G12V)
FVGMVTVGY

SEQ ID NO: 71112 - protein, 9 aa, synthetic construct
  source 1..9: note = Seed: VVGAVGVGK (KRAS G12V)
FVGMVVVGA

SEQ ID NO: 71113 - protein, 9 aa, synthetic construct
  source 1..9: note = Seed: VVGAVGVGK (KRAS G12V)
FVGMVVVGG

SEQ ID NO: 71114 - protein, 9 aa, synthetic construct
  source 1..9: note = Seed: VVGAVGVGK (KRAS G12V)
FVGMVVVGH

SEQ ID NO: 71115 - protein, 9 aa, synthetic construct
  source 1..9: note = Seed: VVGAVGVGK (KRAS G12V)
FVGMVVVGK

SEQ ID NO: 71116 - protein, 9 aa, synthetic construct
  source 1..9: note = Seed: VVGAVGVGK (KRAS G12V)
FVGMVVVGN

SEQ ID NO: 71117 - protein, 9 aa, synthetic construct
  source 1..9: note = Seed: VVGAVGVGK (KRAS G12V)
FVGMVVVGR

SEQ ID NO: 71118 - protein, 9 aa, synthetic construct
  source 1..9: note = Seed: VVGAVGVGK (KRAS G12V)
FVGMVVVGS

SEQ ID NO: 71119 - protein, 9 aa, synthetic construct
  source 1..9: note = Seed: VVGAVGVGK (KRAS G12V)
FVGNVAVGA

SEQ ID NO: 71120 - protein, 9 aa, synthetic construct
  source 1..9: note = Seed: VVGAVGVGK (KRAS G12V)
FVGNVAVGC

SEQ ID NO: 71121 - protein, 9 aa, synthetic construct
  source 1..9: note = Seed: VVGAVGVGK (KRAS G12V)
FVGNVAVGF

SEQ ID NO: 71122 - protein, 9 aa, synthetic construct
  source 1..9: note = Seed: VVGAVGVGK (KRAS G12V)
FVGNVAVGG

SEQ ID NO: 71123 - protein, 9 aa, synthetic construct
  source 1..9: note = Seed: VVGAVGVGK (KRAS G12V)
FVGNVAVGH

SEQ ID NO: 71124 - protein, 9 aa, synthetic construct
  source 1..9: note = Seed: VVGAVGVGK (KRAS G12V)
FVGNVAVGI

SEQ ID NO: 71125 - protein, 9 aa, synthetic construct
  source 1..9: note = Seed: VVGAVGVGK (KRAS G12V)
FVGNVAVGK

SEQ ID NO: 71126 - protein, 9 aa, synthetic construct
  source 1..9: note = Seed: VVGAVGVGK (KRAS G12V)
FVGNVAVGL

SEQ ID NO: 71127 - protein, 9 aa, synthetic construct
  source 1..9: note = Seed: VVGAVGVGK (KRAS G12V)
FVGNVAVGM

SEQ ID NO: 71128 - protein, 9 aa, synthetic construct
  source 1..9: note = Seed: VVGAVGVGK (KRAS G12V)
FVGNVAVGN

SEQ ID NO: 71129 - protein, 9 aa, synthetic construct
  source 1..9: note = Seed: VVGAVGVGK (KRAS G12V)
FVGNVAVGP

SEQ ID NO: 71130 - protein, 9 aa, synthetic construct
  source 1..9: note = Seed: VVGAVGVGK (KRAS G12V)
FVGNVAVGQ

SEQ ID NO: 71131 - protein, 9 aa, synthetic construct
  source 1..9: note = Seed: VVGAVGVGK (KRAS G12V)
FVGNVAVGR

SEQ ID NO: 71132 - protein, 9 aa, synthetic construct
  source 1..9: note = Seed: VVGAVGVGK (KRAS G12V)
FVGNVAVGS

SEQ ID NO: 71133 - protein, 9 aa, synthetic construct
  source 1..9: note = Seed: VVGAVGVGK (KRAS G12V)
FVGNVAVGT

SEQ ID NO: 71134 - protein, 9 aa, synthetic construct
  source 1..9: note = Seed: VVGAVGVGK (KRAS G12V)
FVGNVAVGV

SEQ ID NO: 71135 - protein, 9 aa, synthetic construct
  source 1..9: note = Seed: VVGAVGVGK (KRAS G12V)
FVGNVAVGY

SEQ ID NO: 71136 - protein, 9 aa, synthetic construct
  source 1..9: note = Seed: VVGAVGVGK (KRAS G12V)
FVGNVGVGA

SEQ ID NO: 71137 - protein, 9 aa, synthetic construct
  source 1..9: note = Seed: VVGAVGVGK (KRAS G12V)
FVGNVGVGG

SEQ ID NO: 71138 - protein, 9 aa, synthetic construct
  source 1..9: note = Seed: VVGAVGVGK (KRAS G12V)
FVGNVGVGH

SEQ ID NO: 71139 - protein, 9 aa, synthetic construct
  source 1..9: note = Seed: VVGAVGVGK (KRAS G12V)
FVGNVGVGI

SEQ ID NO: 71140 - protein, 9 aa, synthetic construct
  source 1..9: note = Seed: VVGAVGVGK (KRAS G12V)
FVGNVGVGL

SEQ ID NO: 71141 - protein, 9 aa, synthetic construct
  source 1..9: note = Seed: VVGAVGVGK (KRAS G12V)
FVGNVGVGM

SEQ ID NO: 71142 - protein, 9 aa, synthetic construct
  source 1..9: note = Seed: VVGAVGVGK (KRAS G12V)
FVGNVGVGN

SEQ ID NO: 71143 - protein, 9 aa, synthetic construct
  source 1..9: note = Seed: VVGAVGVGK (KRAS G12V)
FVGNVGVGS

SEQ ID NO: 71144 - protein, 9 aa, synthetic construct
  source 1..9: note = Seed: VVGAVGVGK (KRAS G12V)
FVGNVGVGT

SEQ ID NO: 71145 - protein, 9 aa, synthetic construct
  source 1..9: note = Seed: VVGAVGVGK (KRAS G12V)
FVGNVGVGV

SEQ ID NO: 71146 - protein, 9 aa, synthetic construct
  source 1..9: note = Seed: VVGAVGVGK (KRAS G12V)
FVGNVIVGA

SEQ ID NO: 71147 - protein, 9 aa, synthetic construct
  source 1..9: note = Seed: VVGAVGVGK (KRAS G12V)
FVGNVKVGA

SEQ ID NO: 71148 - protein, 9 aa, synthetic construct
  source 1..9: note = Seed: VVGAVGVGK (KRAS G12V)
FVGNVKVGG

SEQ ID NO: 71149 - protein, 9 aa, synthetic construct
  source 1..9: note = Seed: VVGAVGVGK (KRAS G12V)
FVGNVKVGH

SEQ ID NO: 71150 - protein, 9 aa, synthetic construct
  source 1..9: note = Seed: VVGAVGVGK (KRAS G12V)
FVGNVKVGQ

SEQ ID NO: 71151 - protein, 9 aa, synthetic construct
  source 1..9: note = Seed: VVGAVGVGK (KRAS G12V)
FVGNVKVGR

SEQ ID NO: 71152 - protein, 9 aa, synthetic construct
  source 1..9: note = Seed: VVGAVGVGK (KRAS G12V)
FVGNVKVGS

SEQ ID NO: 71153 - protein, 9 aa, synthetic construct
  source 1..9: note = Seed: VVGAVGVGK (KRAS G12V)
FVGNVKVGY

SEQ ID NO: 71154 - protein, 9 aa, synthetic construct
  source 1..9: note = Seed: VVGAVGVGK (KRAS G12V)
FVGNVMVGA

SEQ ID NO: 71155 - protein, 9 aa, synthetic construct
  source 1..9: note = Seed: VVGAVGVGK (KRAS G12V)
FVGNVNVGA

SEQ ID NO: 71156 - protein, 9 aa, synthetic construct
  source 1..9: note = Seed: VVGAVGVGK (KRAS G12V)
FVGNVNVGI

SEQ ID NO: 71157 - protein, 9 aa, synthetic construct
  source 1..9: note = Seed: VVGAVGVGK (KRAS G12V)
FVGNVNVGL

SEQ ID NO: 71158 - protein, 9 aa, synthetic construct
  source 1..9: note = Seed: VVGAVGVGK (KRAS G12V)
FVGNVNVGM

SEQ ID NO: 71159 - protein, 9 aa, synthetic construct
  source 1..9: note = Seed: VVGAVGVGK (KRAS G12V)
FVGNVNVGV

SEQ ID NO: 71160 - protein, 9 aa, synthetic construct
  source 1..9: note = Seed: VVGAVGVGK (KRAS G12V)
FVGNVPVGA

SEQ ID NO: 71161 - protein, 9 aa, synthetic construct
  source 1..9: note = Seed: VVGAVGVGK (KRAS G12V)
FVGNVPVGF

SEQ ID NO: 71162 - protein, 9 aa, synthetic construct
  source 1..9: note = Seed: VVGAVGVGK (KRAS G12V)
FVGNVPVGG

SEQ ID NO: 71163 - protein, 9 aa, synthetic construct
  source 1..9: note = Seed: VVGAVGVGK (KRAS G12V)
FVGNVPVGH

SEQ ID NO: 71164 - protein, 9 aa, synthetic construct
  source 1..9: note = Seed: VVGAVGVGK (KRAS G12V)
FVGNVPVGI

SEQ ID NO: 71165 - protein, 9 aa, synthetic construct
  source 1..9: note = Seed: VVGAVGVGK (KRAS G12V)
FVGNVPVGK

SEQ ID NO: 71166 - protein, 9 aa, synthetic construct
  source 1..9: note = Seed: VVGAVGVGK (KRAS G12V)
FVGNVPVGL

SEQ ID NO: 71167 - protein, 9 aa, synthetic construct
  source 1..9: note = Seed: VVGAVGVGK (KRAS G12V)
FVGNVPVGM

SEQ ID NO: 71168 - protein, 9 aa, synthetic construct
  source 1..9: note = Seed: VVGAVGVGK (KRAS G12V)
FVGNVPVGN

SEQ ID NO: 71169 - protein, 9 aa, synthetic construct
  source 1..9: note = Seed: VVGAVGVGK (KRAS G12V)
FVGNVPVGQ

SEQ ID NO: 71170 - protein, 9 aa, synthetic construct
  source 1..9: note = Seed: VVGAVGVGK (KRAS G12V)
FVGNVPVGR

SEQ ID NO: 71171 - protein, 9 aa, synthetic construct
  source 1..9: note = Seed: VVGAVGVGK (KRAS G12V)
FVGNVPVGS

SEQ ID NO: 71172 - protein, 9 aa, synthetic construct
  source 1..9: note = Seed: VVGAVGVGK (KRAS G12V)
FVGNVPVGT

SEQ ID NO: 71173 - protein, 9 aa, synthetic construct
  source 1..9: note = Seed: VVGAVGVGK (KRAS G12V)
FVGNVPVGV

SEQ ID NO: 71174 - protein, 9 aa, synthetic construct
  source 1..9: note = Seed: VVGAVGVGK (KRAS G12V)
FVGNVPVGY

SEQ ID NO: 71175 - protein, 9 aa, synthetic construct
  source 1..9: note = Seed: VVGAVGVGK (KRAS G12V)
FVGNVRVGA

SEQ ID NO: 71176 - protein, 9 aa, synthetic construct
  source 1..9: note = Seed: VVGAVGVGK (KRAS G12V)
FVGNVRVGG

SEQ ID NO: 71177 - protein, 9 aa, synthetic construct
  source 1..9: note = Seed: VVGAVGVGK (KRAS G12V)
FVGNVRVGH

SEQ ID NO: 71178 - protein, 9 aa, synthetic construct
  source 1..9: note = Seed: VVGAVGVGK (KRAS G12V)
FVGNVRVGK

SEQ ID NO: 71179 - protein, 9 aa, synthetic construct
  source 1..9: note = Seed: VVGAVGVGK (KRAS G12V)
FVGNVRVGQ

SEQ ID NO: 71180 - protein, 9 aa, synthetic construct
  source 1..9: note = Seed: VVGAVGVGK (KRAS G12V)
FVGNVRVGR

SEQ ID NO: 71181 - protein, 9 aa, synthetic construct
  source 1..9: note = Seed: VVGAVGVGK (KRAS G12V)
FVGNVRVGS

SEQ ID NO: 71182 - protein, 9 aa, synthetic construct
  source 1..9: note = Seed: VVGAVGVGK (KRAS G12V)
FVGNVRVGY

SEQ ID NO: 71183 - protein, 9 aa, synthetic construct
  source 1..9: note = Seed: VVGAVGVGK (KRAS G12V)
FVGNVSVGA

SEQ ID NO: 71184 - protein, 9 aa, synthetic construct
  source 1..9: note = Seed: VVGAVGVGK (KRAS G12V)
FVGNVSVGG

SEQ ID NO: 71185 - protein, 9 aa, synthetic construct
  source 1..9: note = Seed: VVGAVGVGK (KRAS G12V)
FVGNVSVGH

SEQ ID NO: 71186 - protein, 9 aa, synthetic construct
  source 1..9: note = Seed: VVGAVGVGK (KRAS G12V)
FVGNVSVGI

SEQ ID NO: 71187 - protein, 9 aa, synthetic construct
  source 1..9: note = Seed: VVGAVGVGK (KRAS G12V)
FVGNVSVGL

SEQ ID NO: 71188 - protein, 9 aa, synthetic construct
  source 1..9: note = Seed: VVGAVGVGK (KRAS G12V)
FVGNVSVGM

SEQ ID NO: 71189 - protein, 9 aa, synthetic construct
  source 1..9: note = Seed: VVGAVGVGK (KRAS G12V)
FVGNVSVGN

SEQ ID NO: 71190 - protein, 9 aa, synthetic construct
  source 1..9: note = Seed: VVGAVGVGK (KRAS G12V)
FVGNVSVGR

SEQ ID NO: 71191 - protein, 9 aa, synthetic construct
  source 1..9: note = Seed: VVGAVGVGK (KRAS G12V)
FVGNVSVGS

SEQ ID NO: 71192 - protein, 9 aa, synthetic construct
  source 1..9: note = Seed: VVGAVGVGK (KRAS G12V)
FVGNVSVGT

SEQ ID NO: 71193 - protein, 9 aa, synthetic construct
  source 1..9: note = Seed: VVGAVGVGK (KRAS G12V)
FVGNVSVGV

SEQ ID NO: 71194 - protein, 9 aa, synthetic construct
  source 1..9: note = Seed: VVGAVGVGK (KRAS G12V)
FVGNVSVGY

SEQ ID NO: 71195 - protein, 9 aa, synthetic construct
  source 1..9: note = Seed: VVGAVGVGK (KRAS G12V)
FVGNVTVGA

SEQ ID NO: 71196 - protein, 9 aa, synthetic construct
  source 1..9: note = Seed: VVGAVGVGK (KRAS G12V)
FVGNVTVGI

SEQ ID NO: 71197 - protein, 9 aa, synthetic construct
  source 1..9: note = Seed: VVGAVGVGK (KRAS G12V)
FVGNVTVGL

SEQ ID NO: 71198 - protein, 9 aa, synthetic construct
  source 1..9: note = Seed: VVGAVGVGK (KRAS G12V)
FVGNVTVGM

SEQ ID NO: 71199 - protein, 9 aa, synthetic construct
  source 1..9: note = Seed: VVGAVGVGK (KRAS G12V)
FVGNVTVGS

SEQ ID NO: 71200 - protein, 9 aa, synthetic construct
  source 1..9: note = Seed: VVGAVGVGK (KRAS G12V)
FVGNVTVGT

SEQ ID NO: 71201 - protein, 9 aa, synthetic construct
  source 1..9: note = Seed: VVGAVGVGK (KRAS G12V)
FVGNVTVGV

SEQ ID NO: 71202 - protein, 9 aa, synthetic construct
  source 1..9: note = Seed: VVGAVGVGK (KRAS G12V)
FVGNVVVGA

SEQ ID NO: 71203 - protein, 9 aa, synthetic construct
  source 1..9: note = Seed: VVGAVGVGK (KRAS G12V)
FVGNVVVGL

SEQ ID NO: 71204 - protein, 9 aa, synthetic construct
  source 1..9: note = Seed: VVGAVGVGK (KRAS G12V)
FVGNVVVGM

SEQ ID NO: 71205 - protein, 9 aa, synthetic construct
  source 1..9: note = Seed: VVGAVGVGK (KRAS G12V)
FVGNVVVGS

SEQ ID NO: 71206 - protein, 9 aa, synthetic construct
  source 1..9: note = Seed: VVGAVGVGK (KRAS G12V)
FVGNVVVGV

SEQ ID NO: 71207 - protein, 9 aa, synthetic construct
  source 1..9: note = Seed: VVGAVGVGK (KRAS G12V)
FVGPVAVGA

SEQ ID NO: 71208 - protein, 9 aa, synthetic construct
  source 1..9: note = Seed: VVGAVGVGK (KRAS G12V)
FVGPVAVGI

SEQ ID NO: 71209 - protein, 9 aa, synthetic construct
  source 1..9: note = Seed: VVGAVGVGK (KRAS G12V)
FVGPVAVGL

SEQ ID NO: 71210 - protein, 9 aa, synthetic construct
  source 1..9: note = Seed: VVGAVGVGK (KRAS G12V)
FVGPVAVGM

SEQ ID NO: 71211 - protein, 9 aa, synthetic construct
  source 1..9: note = Seed: VVGAVGVGK (KRAS G12V)
FVGPVAVGV

SEQ ID NO: 71212 - protein, 9 aa, synthetic construct
  source 1..9: note = Seed: VVGAVGVGK (KRAS G12V)
FVGPVPVGA

SEQ ID NO: 71213 - protein, 9 aa, synthetic construct
  source 1..9: note = Seed: VVGAVGVGK (KRAS G12V)
FVGPVPVGI

SEQ ID NO: 71214 - protein, 9 aa, synthetic construct
  source 1..9: note = Seed: VVGAVGVGK (KRAS G12V)
FVGPVPVGL

SEQ ID NO: 71215 - protein, 9 aa, synthetic construct
  source 1..9: note = Seed: VVGAVGVGK (KRAS G12V)
FVGPVPVGM

SEQ ID NO: 71216 - protein, 9 aa, synthetic construct
  source 1..9: note = Seed: VVGAVGVGK (KRAS G12V)
FVGPVPVGV

SEQ ID NO: 71217 - protein, 9 aa, synthetic construct
  source 1..9: note = Seed: VVGAVGVGK (KRAS G12V)
FVGPVSVGI

SEQ ID NO: 71218 - protein, 9 aa, synthetic construct
  source 1..9: note = Seed: VVGAVGVGK (KRAS G12V)
FVGPVSVGL

SEQ ID NO: 71219 - protein, 9 aa, synthetic construct
  source 1..9: note = Seed: VVGAVGVGK (KRAS G12V)
FVGPVSVGM

SEQ ID NO: 71220 - protein, 9 aa, synthetic construct
  source 1..9: note = Seed: VVGAVGVGK (KRAS G12V)
FVGPVSVGV

SEQ ID NO: 71221 - protein, 9 aa, synthetic construct
  source 1..9: note = Seed: VVGAVGVGK (KRAS G12V)
FVGQVAVGA

SEQ ID NO: 71222 - protein, 9 aa, synthetic construct
  source 1..9: note = Seed: VVGAVGVGK (KRAS G12V)
FVGQVAVGC

SEQ ID NO: 71223 - protein, 9 aa, synthetic construct
  source 1..9: note = Seed: VVGAVGVGK (KRAS G12V)
FVGQVAVGD

SEQ ID NO: 71224 - protein, 9 aa, synthetic construct
  source 1..9: note = Seed: VVGAVGVGK (KRAS G12V)
FVGQVAVGE

SEQ ID NO: 71225 - protein, 9 aa, synthetic construct
  source 1..9: note = Seed: VVGAVGVGK (KRAS G12V)
FVGQVAVGF

SEQ ID NO: 71226 - protein, 9 aa, synthetic construct
  source 1..9: note = Seed: VVGAVGVGK (KRAS G12V)
FVGQVAVGG

SEQ ID NO: 71227 - protein, 9 aa, synthetic construct
  source 1..9: note = Seed: VVGAVGVGK (KRAS G12V)
FVGQVAVGH

SEQ ID NO: 71228 - protein, 9 aa, synthetic construct
  source 1..9: note = Seed: VVGAVGVGK (KRAS G12V)
FVGQVAVGI

SEQ ID NO: 71229 - protein, 9 aa, synthetic construct
  source 1..9: note = Seed: VVGAVGVGK (KRAS G12V)
FVGQVAVGK

SEQ ID NO: 71230 - protein, 9 aa, synthetic construct
  source 1..9: note = Seed: VVGAVGVGK (KRAS G12V)
FVGQVAVGL

SEQ ID NO: 71231 - protein, 9 aa, synthetic construct
  source 1..9: note = Seed: VVGAVGVGK (KRAS G12V)
FVGQVAVGM

SEQ ID NO: 71232 - protein, 9 aa, synthetic construct
  source 1..9: note = Seed: VVGAVGVGK (KRAS G12V)
FVGQVAVGN

SEQ ID NO: 71233 - protein, 9 aa, synthetic construct
  source 1..9: note = Seed: VVGAVGVGK (KRAS G12V)
FVGQVAVGP

SEQ ID NO: 71234 - protein, 9 aa, synthetic construct
  source 1..9: note = Seed: VVGAVGVGK (KRAS G12V)
FVGQVAVGQ

SEQ ID NO: 71235 - protein, 9 aa, synthetic construct
  source 1..9: note = Seed: VVGAVGVGK (KRAS G12V)
FVGQVAVGR

SEQ ID NO: 71236 - protein, 9 aa, synthetic construct
  source 1..9: note = Seed: VVGAVGVGK (KRAS G12V)
FVGQVAVGS

SEQ ID NO: 71237 - protein, 9 aa, synthetic construct
  source 1..9: note = Seed: VVGAVGVGK (KRAS G12V)
FVGQVAVGT

SEQ ID NO: 71238 - protein, 9 aa, synthetic construct
  source 1..9: note = Seed: VVGAVGVGK (KRAS G12V)
FVGQVAVGV

SEQ ID NO: 71239 - protein, 9 aa, synthetic construct
  source 1..9: note = Seed: VVGAVGVGK (KRAS G12V)
FVGQVAVGY

SEQ ID NO: 71240 - protein, 9 aa, synthetic construct
  source 1..9: note = Seed: VVGAVGVGK (KRAS G12V)
FVGQVGVGA

SEQ ID NO: 71241 - protein, 9 aa, synthetic construct
  source 1..9: note = Seed: VVGAVGVGK (KRAS G12V)
FVGQVGVGF

SEQ ID NO: 71242 - protein, 9 aa, synthetic construct
  source 1..9: note = Seed: VVGAVGVGK (KRAS G12V)
FVGQVGVGG

SEQ ID NO: 71243 - protein, 9 aa, synthetic construct
  source 1..9: note = Seed: VVGAVGVGK (KRAS G12V)
FVGQVGVGH

SEQ ID NO: 71244 - protein, 9 aa, synthetic construct
  source 1..9: note = Seed: VVGAVGVGK (KRAS G12V)
FVGQVGVGI

SEQ ID NO: 71245 - protein, 9 aa, synthetic construct
  source 1..9: note = Seed: VVGAVGVGK (KRAS G12V)
FVGQVGVGK

SEQ ID NO: 71246 - protein, 9 aa, synthetic construct
  source 1..9: note = Seed: VVGAVGVGK (KRAS G12V)
FVGQVGVGL

SEQ ID NO: 71247 - protein, 9 aa, synthetic construct
  source 1..9: note = Seed: VVGAVGVGK (KRAS G12V)
FVGQVGVGM

SEQ ID NO: 71248 - protein, 9 aa, synthetic construct
  source 1..9: note = Seed: VVGAVGVGK (KRAS G12V)
FVGQVGVGN

SEQ ID NO: 71249 - protein, 9 aa, synthetic construct
  source 1..9: note = Seed: VVGAVGVGK (KRAS G12V)
FVGQVGVGP

SEQ ID NO: 71250 - protein, 9 aa, synthetic construct
  source 1..9: note = Seed: VVGAVGVGK (KRAS G12V)
FVGQVGVGQ

SEQ ID NO: 71251 - protein, 9 aa, synthetic construct
  source 1..9: note = Seed: VVGAVGVGK (KRAS G12V)
FVGQVGVGR

SEQ ID NO: 71252 - protein, 9 aa, synthetic construct
  source 1..9: note = Seed: VVGAVGVGK (KRAS G12V)
FVGQVGVGS

SEQ ID NO: 71253 - protein, 9 aa, synthetic construct
  source 1..9: note = Seed: VVGAVGVGK (KRAS G12V)
FVGQVGVGT

SEQ ID NO: 71254 - protein, 9 aa, synthetic construct
  source 1..9: note = Seed: VVGAVGVGK (KRAS G12V)
FVGQVGVGV

SEQ ID NO: 71255 - protein, 9 aa, synthetic construct
  source 1..9: note = Seed: VVGAVGVGK (KRAS G12V)
FVGQVGVGY

SEQ ID NO: 71256 - protein, 9 aa, synthetic construct
  source 1..9: note = Seed: VVGAVGVGK (KRAS G12V)
FVGQVIVGH

SEQ ID NO: 71257 - protein, 9 aa, synthetic construct
  source 1..9: note = Seed: VVGAVGVGK (KRAS G12V)
FVGQVKVGA

SEQ ID NO: 71258 - protein, 9 aa, synthetic construct
  source 1..9: note = Seed: VVGAVGVGK (KRAS G12V)
FVGQVKVGG

SEQ ID NO: 71259 - protein, 9 aa, synthetic construct
  source 1..9: note = Seed: VVGAVGVGK (KRAS G12V)
FVGQVKVGH

SEQ ID NO: 71260 - protein, 9 aa, synthetic construct
  source 1..9: note = Seed: VVGAVGVGK (KRAS G12V)
FVGQVKVGK

SEQ ID NO: 71261 - protein, 9 aa, synthetic construct
  source 1..9: note = Seed: VVGAVGVGK (KRAS G12V)
FVGQVKVGM

SEQ ID NO: 71262 - protein, 9 aa, synthetic construct
  source 1..9: note = Seed: VVGAVGVGK (KRAS G12V)
FVGQVKVGN

SEQ ID NO: 71263 - protein, 9 aa, synthetic construct
  source 1..9: note = Seed: VVGAVGVGK (KRAS G12V)
FVGQVKVGP

SEQ ID NO: 71264 - protein, 9 aa, synthetic construct
  source 1..9: note = Seed: VVGAVGVGK (KRAS G12V)
FVGQVKVGQ

SEQ ID NO: 71265 - protein, 9 aa, synthetic construct
  source 1..9: note = Seed: VVGAVGVGK (KRAS G12V)
FVGQVKVGR

SEQ ID NO: 71266 - protein, 9 aa, synthetic construct
  source 1..9: note = Seed: VVGAVGVGK (KRAS G12V)
FVGQVKVGS

SEQ ID NO: 71267 - protein, 9 aa, synthetic construct
  source 1..9: note = Seed: VVGAVGVGK (KRAS G12V)
FVGQVKVGT

SEQ ID NO: 71268 - protein, 9 aa, synthetic construct
  source 1..9: note = Seed: VVGAVGVGK (KRAS G12V)
FVGQVKVGV

SEQ ID NO: 71269 - protein, 9 aa, synthetic construct
  source 1..9: note = Seed: VVGAVGVGK (KRAS G12V)
FVGQVKVGY

SEQ ID NO: 71270 - protein, 9 aa, synthetic construct
  source 1..9: note = Seed: VVGAVGVGK (KRAS G12V)
FVGQVNVGA

SEQ ID NO: 71271 - protein, 9 aa, synthetic construct
  source 1..9: note = Seed: VVGAVGVGK (KRAS G12V)
FVGQVNVGG

SEQ ID NO: 71272 - protein, 9 aa, synthetic construct
  source 1..9: note = Seed: VVGAVGVGK (KRAS G12V)
FVGQVNVGH

SEQ ID NO: 71273 - protein, 9 aa, synthetic construct
  source 1..9: note = Seed: VVGAVGVGK (KRAS G12V)
FVGQVNVGI

SEQ ID NO: 71274 - protein, 9 aa, synthetic construct
  source 1..9: note = Seed: VVGAVGVGK (KRAS G12V)
FVGQVNVGL

SEQ ID NO: 71275 - protein, 9 aa, synthetic construct
  source 1..9: note = Seed: VVGAVGVGK (KRAS G12V)
FVGQVNVGM

SEQ ID NO: 71276 - protein, 9 aa, synthetic construct
  source 1..9: note = Seed: VVGAVGVGK (KRAS G12V)
FVGQVNVGN

SEQ ID NO: 71277 - protein, 9 aa, synthetic construct
  source 1..9: note = Seed: VVGAVGVGK (KRAS G12V)
FVGQVNVGR

SEQ ID NO: 71278 - protein, 9 aa, synthetic construct
  source 1..9: note = Seed: VVGAVGVGK (KRAS G12V)
FVGQVNVGS

SEQ ID NO: 71279 - protein, 9 aa, synthetic construct
  source 1..9: note = Seed: VVGAVGVGK (KRAS G12V)
FVGQVNVGT

SEQ ID NO: 71280 - protein, 9 aa, synthetic construct
  source 1..9: note = Seed: VVGAVGVGK (KRAS G12V)
FVGQVNVGV

SEQ ID NO: 71281 - protein, 9 aa, synthetic construct
  source 1..9: note = Seed: VVGAVGVGK (KRAS G12V)
FVGQVPVGA

SEQ ID NO: 71282 - protein, 9 aa, synthetic construct
  source 1..9: note = Seed: VVGAVGVGK (KRAS G12V)
FVGQVPVGC

SEQ ID NO: 71283 - protein, 9 aa, synthetic construct
  source 1..9: note = Seed: VVGAVGVGK (KRAS G12V)
FVGQVPVGF

SEQ ID NO: 71284 - protein, 9 aa, synthetic construct
  source 1..9: note = Seed: VVGAVGVGK (KRAS G12V)
FVGQVPVGG

SEQ ID NO: 71285 - protein, 9 aa, synthetic construct
  source 1..9: note = Seed: VVGAVGVGK (KRAS G12V)
FVGQVPVGH

SEQ ID NO: 71286 - protein, 9 aa, synthetic construct
  source 1..9: note = Seed: VVGAVGVGK (KRAS G12V)
FVGQVPVGI

SEQ ID NO: 71287 - protein, 9 aa, synthetic construct
  source 1..9: note = Seed: VVGAVGVGK (KRAS G12V)
FVGQVPVGK

SEQ ID NO: 71288 - protein, 9 aa, synthetic construct
  source 1..9: note = Seed: VVGAVGVGK (KRAS G12V)
FVGQVPVGL

SEQ ID NO: 71289 - protein, 9 aa, synthetic construct
  source 1..9: note = Seed: VVGAVGVGK (KRAS G12V)
FVGQVPVGM

SEQ ID NO: 71290 - protein, 9 aa, synthetic construct
  source 1..9: note = Seed: VVGAVGVGK (KRAS G12V)
FVGQVPVGN

SEQ ID NO: 71291 - protein, 9 aa, synthetic construct
  source 1..9: note = Seed: VVGAVGVGK (KRAS G12V)
FVGQVPVGP

SEQ ID NO: 71292 - protein, 9 aa, synthetic construct
  source 1..9: note = Seed: VVGAVGVGK (KRAS G12V)
FVGQVPVGQ

SEQ ID NO: 71293 - protein, 9 aa, synthetic construct
  source 1..9: note = Seed: VVGAVGVGK (KRAS G12V)
FVGQVPVGR

SEQ ID NO: 71294 - protein, 9 aa, synthetic construct
  source 1..9: note = Seed: VVGAVGVGK (KRAS G12V)
FVGQVPVGS

SEQ ID NO: 71295 - protein, 9 aa, synthetic construct
  source 1..9: note = Seed: VVGAVGVGK (KRAS G12V)
FVGQVPVGT

SEQ ID NO: 71296 - protein, 9 aa, synthetic construct
  source 1..9: note = Seed: VVGAVGVGK (KRAS G12V)
FVGQVPVGV

SEQ ID NO: 71297 - protein, 9 aa, synthetic construct
  source 1..9: note = Seed: VVGAVGVGK (KRAS G12V)
FVGQVPVGY

SEQ ID NO: 71298 - protein, 9 aa, synthetic construct
  source 1..9: note = Seed: VVGAVGVGK (KRAS G12V)
FVGQVRVGA

SEQ ID NO: 71299 - protein, 9 aa, synthetic construct
  source 1..9: note = Seed: VVGAVGVGK (KRAS G12V)
FVGQVRVGG

SEQ ID NO: 71300 - protein, 9 aa, synthetic construct
  source 1..9: note = Seed: VVGAVGVGK (KRAS G12V)
FVGQVRVGH

SEQ ID NO: 71301 - protein, 9 aa, synthetic construct
  source 1..9: note = Seed: VVGAVGVGK (KRAS G12V)
FVGQVRVGK

SEQ ID NO: 71302 - protein, 9 aa, synthetic construct
  source 1..9: note = Seed: VVGAVGVGK (KRAS G12V)
FVGQVRVGM

SEQ ID NO: 71303 - protein, 9 aa, synthetic construct
  source 1..9: note = Seed: VVGAVGVGK (KRAS G12V)
FVGQVRVGN

SEQ ID NO: 71304 - protein, 9 aa, synthetic construct
  source 1..9: note = Seed: VVGAVGVGK (KRAS G12V)
FVGQVRVGP

SEQ ID NO: 71305 - protein, 9 aa, synthetic construct
  source 1..9: note = Seed: VVGAVGVGK (KRAS G12V)
FVGQVRVGQ

SEQ ID NO: 71306 - protein, 9 aa, synthetic construct
  source 1..9: note = Seed: VVGAVGVGK (KRAS G12V)
FVGQVRVGR

SEQ ID NO: 71307 - protein, 9 aa, synthetic construct
  source 1..9: note = Seed: VVGAVGVGK (KRAS G12V)
FVGQVRVGS

SEQ ID NO: 71308 - protein, 9 aa, synthetic construct
  source 1..9: note = Seed: VVGAVGVGK (KRAS G12V)
FVGQVRVGT

SEQ ID NO: 71309 - protein, 9 aa, synthetic construct
  source 1..9: note = Seed: VVGAVGVGK (KRAS G12V)
FVGQVRVGV

SEQ ID NO: 71310 - protein, 9 aa, synthetic construct
  source 1..9: note = Seed: VVGAVGVGK (KRAS G12V)
FVGQVRVGY

SEQ ID NO: 71311 - protein, 9 aa, synthetic construct
  source 1..9: note = Seed: VVGAVGVGK (KRAS G12V)
FVGQVSVGA

SEQ ID NO: 71312 - protein, 9 aa, synthetic construct
  source 1..9: note = Seed: VVGAVGVGK (KRAS G12V)
FVGQVSVGG

SEQ ID NO: 71313 - protein, 9 aa, synthetic construct
  source 1..9: note = Seed: VVGAVGVGK (KRAS G12V)
FVGQVSVGH

SEQ ID NO: 71314 - protein, 9 aa, synthetic construct
  source 1..9: note = Seed: VVGAVGVGK (KRAS G12V)
FVGQVSVGI

SEQ ID NO: 71315 - protein, 9 aa, synthetic construct
  source 1..9: note = Seed: VVGAVGVGK (KRAS G12V)
FVGQVSVGK

SEQ ID NO: 71316 - protein, 9 aa, synthetic construct
  source 1..9: note = Seed: VVGAVGVGK (KRAS G12V)
FVGQVSVGL

SEQ ID NO: 71317 - protein, 9 aa, synthetic construct
  source 1..9: note = Seed: VVGAVGVGK (KRAS G12V)
FVGQVSVGM

SEQ ID NO: 71318 - protein, 9 aa, synthetic construct
  source 1..9: note = Seed: VVGAVGVGK (KRAS G12V)
FVGQVSVGN

SEQ ID NO: 71319 - protein, 9 aa, synthetic construct
  source 1..9: note = Seed: VVGAVGVGK (KRAS G12V)
FVGQVSVGP

SEQ ID NO: 71320 - protein, 9 aa, synthetic construct
  source 1..9: note = Seed: VVGAVGVGK (KRAS G12V)
FVGQVSVGQ

SEQ ID NO: 71321 - protein, 9 aa, synthetic construct
  source 1..9: note = Seed: VVGAVGVGK (KRAS G12V)
FVGQVSVGR

SEQ ID NO: 71322 - protein, 9 aa, synthetic construct
  source 1..9: note = Seed: VVGAVGVGK (KRAS G12V)
FVGQVSVGS

SEQ ID NO: 71323 - protein, 9 aa, synthetic construct
  source 1..9: note = Seed: VVGAVGVGK (KRAS G12V)
FVGQVSVGT

SEQ ID NO: 71324 - protein, 9 aa, synthetic construct
  source 1..9: note = Seed: VVGAVGVGK (KRAS G12V)
FVGQVSVGV

SEQ ID NO: 71325 - protein, 9 aa, synthetic construct
  source 1..9: note = Seed: VVGAVGVGK (KRAS G12V)
FVGQVSVGY

SEQ ID NO: 71326 - protein, 9 aa, synthetic construct
  source 1..9: note = Seed: VVGAVGVGK (KRAS G12V)
FVGQVTVGA

SEQ ID NO: 71327 - protein, 9 aa, synthetic construct
  source 1..9: note = Seed: VVGAVGVGK (KRAS G12V)
FVGQVTVGG

SEQ ID NO: 71328 - protein, 9 aa, synthetic construct
  source 1..9: note = Seed: VVGAVGVGK (KRAS G12V)
FVGQVTVGH

SEQ ID NO: 71329 - protein, 9 aa, synthetic construct
  source 1..9: note = Seed: VVGAVGVGK (KRAS G12V)
FVGQVTVGI

SEQ ID NO: 71330 - protein, 9 aa, synthetic construct
  source 1..9: note = Seed: VVGAVGVGK (KRAS G12V)
FVGQVTVGK

SEQ ID NO: 71331 - protein, 9 aa, synthetic construct
  source 1..9: note = Seed: VVGAVGVGK (KRAS G12V)
FVGQVTVGL

SEQ ID NO: 71332 - protein, 9 aa, synthetic construct
  source 1..9: note = Seed: VVGAVGVGK (KRAS G12V)
FVGQVTVGM

SEQ ID NO: 71333 - protein, 9 aa, synthetic construct
  source 1..9: note = Seed: VVGAVGVGK (KRAS G12V)
FVGQVTVGN

SEQ ID NO: 71334 - protein, 9 aa, synthetic construct
  source 1..9: note = Seed: VVGAVGVGK (KRAS G12V)
FVGQVTVGR

SEQ ID NO: 71335 - protein, 9 aa, synthetic construct
  source 1..9: note = Seed: VVGAVGVGK (KRAS G12V)
FVGQVTVGS

SEQ ID NO: 71336 - protein, 9 aa, synthetic construct
  source 1..9: note = Seed: VVGAVGVGK (KRAS G12V)
FVGQVTVGT

SEQ ID NO: 71337 - protein, 9 aa, synthetic construct
  source 1..9: note = Seed: VVGAVGVGK (KRAS G12V)
FVGQVTVGV

SEQ ID NO: 71338 - protein, 9 aa, synthetic construct
  source 1..9: note = Seed: VVGAVGVGK (KRAS G12V)
FVGQVVVGA

SEQ ID NO: 71339 - protein, 9 aa, synthetic construct
  source 1..9: note = Seed: VVGAVGVGK (KRAS G12V)
FVGQVVVGH

SEQ ID NO: 71340 - protein, 9 aa, synthetic construct
  source 1..9: note = Seed: VVGAVGVGK (KRAS G12V)
FVGQVVVGN

SEQ ID NO: 71341 - protein, 9 aa, synthetic construct
  source 1..9: note = Seed: VVGAVGVGK (KRAS G12V)
FVGQVVVGR

SEQ ID NO: 71342 - protein, 9 aa, synthetic construct
  source 1..9: note = Seed: VVGAVGVGK (KRAS G12V)
FVGQVVVGS

SEQ ID NO: 71343 - protein, 9 aa, synthetic construct
  source 1..9: note = Seed: VVGAVGVGK (KRAS G12V)
FVGRVAVGA

SEQ ID NO: 71344 - protein, 9 aa, synthetic construct
  source 1..9: note = Seed: VVGAVGVGK (KRAS G12V)
FVGRVAVGF

SEQ ID NO: 71345 - protein, 9 aa, synthetic construct
  source 1..9: note = Seed: VVGAVGVGK (KRAS G12V)
FVGRVAVGI

SEQ ID NO: 71346 - protein, 9 aa, synthetic construct
  source 1..9: note = Seed: VVGAVGVGK (KRAS G12V)
FVGRVAVGL

SEQ ID NO: 71347 - protein, 9 aa, synthetic construct
  source 1..9: note = Seed: VVGAVGVGK (KRAS G12V)
FVGRVAVGM

SEQ ID NO: 71348 - protein, 9 aa, synthetic construct
  source 1..9: note = Seed: VVGAVGVGK (KRAS G12V)
FVGRVAVGR

SEQ ID NO: 71349 - protein, 9 aa, synthetic construct
  source 1..9: note = Seed: VVGAVGVGK (KRAS G12V)
FVGRVAVGT

SEQ ID NO: 71350 - protein, 9 aa, synthetic construct
  source 1..9: note = Seed: VVGAVGVGK (KRAS G12V)
FVGRVAVGV

SEQ ID NO: 71351 - protein, 9 aa, synthetic construct
  source 1..9: note = Seed: VVGAVGVGK (KRAS G12V)
FVGRVAVGY

SEQ ID NO: 71352 - protein, 9 aa, synthetic construct
  source 1..9: note = Seed: VVGAVGVGK (KRAS G12V)
FVGRVGVGL

SEQ ID NO: 71353 - protein, 9 aa, synthetic construct
  source 1..9: note = Seed: VVGAVGVGK (KRAS G12V)
FVGRVGVGR

SEQ ID NO: 71354 - protein, 9 aa, synthetic construct
  source 1..9: note = Seed: VVGAVGVGK (KRAS G12V)
FVGRVGVGV

SEQ ID NO: 71355 - protein, 9 aa, synthetic construct
  source 1..9: note = Seed: VVGAVGVGK (KRAS G12V)
FVGRVHVGR

SEQ ID NO: 71356 - protein, 9 aa, synthetic construct
  source 1..9: note = Seed: VVGAVGVGK (KRAS G12V)
FVGRVKVGA

SEQ ID NO: 71357 - protein, 9 aa, synthetic construct
  source 1..9: note = Seed: VVGAVGVGK (KRAS G12V)
FVGRVKVGF

SEQ ID NO: 71358 - protein, 9 aa, synthetic construct
  source 1..9: note = Seed: VVGAVGVGK (KRAS G12V)
FVGRVKVGG

SEQ ID NO: 71359 - protein, 9 aa, synthetic construct
  source 1..9: note = Seed: VVGAVGVGK (KRAS G12V)
FVGRVKVGH

SEQ ID NO: 71360 - protein, 9 aa, synthetic construct
  source 1..9: note = Seed: VVGAVGVGK (KRAS G12V)
FVGRVKVGK

SEQ ID NO: 71361 - protein, 9 aa, synthetic construct
  source 1..9: note = Seed: VVGAVGVGK (KRAS G12V)
FVGRVKVGL

SEQ ID NO: 71362 - protein, 9 aa, synthetic construct
  source 1..9: note = Seed: VVGAVGVGK (KRAS G12V)
FVGRVKVGM

SEQ ID NO: 71363 - protein, 9 aa, synthetic construct
  source 1..9: note = Seed: VVGAVGVGK (KRAS G12V)
FVGRVKVGN

SEQ ID NO: 71364 - protein, 9 aa, synthetic construct
  source 1..9: note = Seed: VVGAVGVGK (KRAS G12V)
FVGRVKVGQ

SEQ ID NO: 71365 - protein, 9 aa, synthetic construct
  source 1..9: note = Seed: VVGAVGVGK (KRAS G12V)
FVGRVKVGR

SEQ ID NO: 71366 - protein, 9 aa, synthetic construct
  source 1..9: note = Seed: VVGAVGVGK (KRAS G12V)
FVGRVKVGS

SEQ ID NO: 71367 - protein, 9 aa, synthetic construct
  source 1..9: note = Seed: VVGAVGVGK (KRAS G12V)
FVGRVKVGT

SEQ ID NO: 71368 - protein, 9 aa, synthetic construct
  source 1..9: note = Seed: VVGAVGVGK (KRAS G12V)
FVGRVKVGV

SEQ ID NO: 71369 - protein, 9 aa, synthetic construct
  source 1..9: note = Seed: VVGAVGVGK (KRAS G12V)
FVGRVKVGY

SEQ ID NO: 71370 - protein, 9 aa, synthetic construct
  source 1..9: note = Seed: VVGAVGVGK (KRAS G12V)
FVGRVNVGL

SEQ ID NO: 71371 - protein, 9 aa, synthetic construct
  source 1..9: note = Seed: VVGAVGVGK (KRAS G12V)
FVGRVNVGR

SEQ ID NO: 71372 - protein, 9 aa, synthetic construct
  source 1..9: note = Seed: VVGAVGVGK (KRAS G12V)
FVGRVPVGL

SEQ ID NO: 71373 - protein, 9 aa, synthetic construct
  source 1..9: note = Seed: VVGAVGVGK (KRAS G12V)
FVGRVPVGV

SEQ ID NO: 71374 - protein, 9 aa, synthetic construct
  source 1..9: note = Seed: VVGAVGVGK (KRAS G12V)
FVGRVQVGR

SEQ ID NO: 71375 - protein, 9 aa, synthetic construct
  source 1..9: note = Seed: VVGAVGVGK (KRAS G12V)
FVGRVRVGA

SEQ ID NO: 71376 - protein, 9 aa, synthetic construct
  source 1..9: note = Seed: VVGAVGVGK (KRAS G12V)
FVGRVRVGE

SEQ ID NO: 71377 - protein, 9 aa, synthetic construct
  source 1..9: note = Seed: VVGAVGVGK (KRAS G12V)
FVGRVRVGF

SEQ ID NO: 71378 - protein, 9 aa, synthetic construct
  source 1..9: note = Seed: VVGAVGVGK (KRAS G12V)
FVGRVRVGG

SEQ ID NO: 71379 - protein, 9 aa, synthetic construct
  source 1..9: note = Seed: VVGAVGVGK (KRAS G12V)
FVGRVRVGH

SEQ ID NO: 71380 - protein, 9 aa, synthetic construct
  source 1..9: note = Seed: VVGAVGVGK (KRAS G12V)
FVGRVRVGI

SEQ ID NO: 71381 - protein, 9 aa, synthetic construct
  source 1..9: note = Seed: VVGAVGVGK (KRAS G12V)
FVGRVRVGK

SEQ ID NO: 71382 - protein, 9 aa, synthetic construct
  source 1..9: note = Seed: VVGAVGVGK (KRAS G12V)
FVGRVRVGL

SEQ ID NO: 71383 - protein, 9 aa, synthetic construct
  source 1..9: note = Seed: VVGAVGVGK (KRAS G12V)
FVGRVRVGM

SEQ ID NO: 71384 - protein, 9 aa, synthetic construct
  source 1..9: note = Seed: VVGAVGVGK (KRAS G12V)
FVGRVRVGN

SEQ ID NO: 71385 - protein, 9 aa, synthetic construct
  source 1..9: note = Seed: VVGAVGVGK (KRAS G12V)
FVGRVRVGP

SEQ ID NO: 71386 - protein, 9 aa, synthetic construct
  source 1..9: note = Seed: VVGAVGVGK (KRAS G12V)
FVGRVRVGQ

SEQ ID NO: 71387 - protein, 9 aa, synthetic construct
  source 1..9: note = Seed: VVGAVGVGK (KRAS G12V)
FVGRVRVGR

SEQ ID NO: 71388 - protein, 9 aa, synthetic construct
  source 1..9: note = Seed: VVGAVGVGK (KRAS G12V)
FVGRVRVGS

SEQ ID NO: 71389 - protein, 9 aa, synthetic construct
  source 1..9: note = Seed: VVGAVGVGK (KRAS G12V)
FVGRVRVGT

SEQ ID NO: 71390 - protein, 9 aa, synthetic construct
  source 1..9: note = Seed: VVGAVGVGK (KRAS G12V)
FVGRVRVGV

SEQ ID NO: 71391 - protein, 9 aa, synthetic construct
  source 1..9: note = Seed: VVGAVGVGK (KRAS G12V)
FVGRVRVGY

SEQ ID NO: 71392 - protein, 9 aa, synthetic construct
  source 1..9: note = Seed: VVGAVGVGK (KRAS G12V)
FVGRVSVGA

SEQ ID NO: 71393 - protein, 9 aa, synthetic construct
  source 1..9: note = Seed: VVGAVGVGK (KRAS G12V)
FVGRVSVGI

SEQ ID NO: 71394 - protein, 9 aa, synthetic construct
  source 1..9: note = Seed: VVGAVGVGK (KRAS G12V)
FVGRVSVGL

SEQ ID NO: 71395 - protein, 9 aa, synthetic construct
  source 1..9: note = Seed: VVGAVGVGK (KRAS G12V)
FVGRVSVGM

SEQ ID NO: 71396 - protein, 9 aa, synthetic construct
  source 1..9: note = Seed: VVGAVGVGK (KRAS G12V)
FVGRVSVGR

SEQ ID NO: 71397 - protein, 9 aa, synthetic construct
  source 1..9: note = Seed: VVGAVGVGK (KRAS G12V)
FVGRVSVGV

SEQ ID NO: 71398 - protein, 9 aa, synthetic construct
  source 1..9: note = Seed: VVGAVGVGK (KRAS G12V)
FVGRVTVGR

SEQ ID NO: 71399 - protein, 9 aa, synthetic construct
  source 1..9: note = Seed: VVGAVGVGK (KRAS G12V)
FVGSVAVGA

SEQ ID NO: 71400 - protein, 9 aa, synthetic construct
  source 1..9: note = Seed: VVGAVGVGK (KRAS G12V)
FVGSVAVGF

SEQ ID NO: 71401 - protein, 9 aa, synthetic construct
  source 1..9: note = Seed: VVGAVGVGK (KRAS G12V)
FVGSVAVGG

SEQ ID NO: 71402 - protein, 9 aa, synthetic construct
  source 1..9: note = Seed: VVGAVGVGK (KRAS G12V)
FVGSVAVGH

SEQ ID NO: 71403 - protein, 9 aa, synthetic construct
  source 1..9: note = Seed: VVGAVGVGK (KRAS G12V)
FVGSVAVGI

SEQ ID NO: 71404 - protein, 9 aa, synthetic construct
  source 1..9: note = Seed: VVGAVGVGK (KRAS G12V)
FVGSVAVGK

SEQ ID NO: 71405 - protein, 9 aa, synthetic construct
  source 1..9: note = Seed: VVGAVGVGK (KRAS G12V)
FVGSVAVGL

SEQ ID NO: 71406 - protein, 9 aa, synthetic construct
  source 1..9: note = Seed: VVGAVGVGK (KRAS G12V)
FVGSVAVGM

SEQ ID NO: 71407 - protein, 9 aa, synthetic construct
  source 1..9: note = Seed: VVGAVGVGK (KRAS G12V)
FVGSVAVGN

SEQ ID NO: 71408 - protein, 9 aa, synthetic construct
  source 1..9: note = Seed: VVGAVGVGK (KRAS G12V)
FVGSVAVGP

SEQ ID NO: 71409 - protein, 9 aa, synthetic construct
  source 1..9: note = Seed: VVGAVGVGK (KRAS G12V)
FVGSVAVGQ

SEQ ID NO: 71410 - protein, 9 aa, synthetic construct
  source 1..9: note = Seed: VVGAVGVGK (KRAS G12V)
FVGSVAVGR

SEQ ID NO: 71411 - protein, 9 aa, synthetic construct
  source 1..9: note = Seed: VVGAVGVGK (KRAS G12V)
FVGSVAVGS

SEQ ID NO: 71412 - protein, 9 aa, synthetic construct
  source 1..9: note = Seed: VVGAVGVGK (KRAS G12V)
FVGSVAVGT

SEQ ID NO: 71413 - protein, 9 aa, synthetic construct
  source 1..9: note = Seed: VVGAVGVGK (KRAS G12V)
FVGSVAVGV

SEQ ID NO: 71414 - protein, 9 aa, synthetic construct
  source 1..9: note = Seed: VVGAVGVGK (KRAS G12V)
FVGSVAVGY

SEQ ID NO: 71415 - protein, 9 aa, synthetic construct
  source 1..9: note = Seed: VVGAVGVGK (KRAS G12V)
FVGSVDVGI

SEQ ID NO: 71416 - protein, 9 aa, synthetic construct
  source 1..9: note = Seed: VVGAVGVGK (KRAS G12V)
FVGSVGVGA

SEQ ID NO: 71417 - protein, 9 aa, synthetic construct
  source 1..9: note = Seed: VVGAVGVGK (KRAS G12V)
FVGSVGVGF

SEQ ID NO: 71418 - protein, 9 aa, synthetic construct
  source 1..9: note = Seed: VVGAVGVGK (KRAS G12V)
FVGSVGVGG

SEQ ID NO: 71419 - protein, 9 aa, synthetic construct
  source 1..9: note = Seed: VVGAVGVGK (KRAS G12V)
FVGSVGVGH

SEQ ID NO: 71420 - protein, 9 aa, synthetic construct
  source 1..9: note = Seed: VVGAVGVGK (KRAS G12V)
FVGSVGVGI

SEQ ID NO: 71421 - protein, 9 aa, synthetic construct
  source 1..9: note = Seed: VVGAVGVGK (KRAS G12V)
FVGSVGVGK

SEQ ID NO: 71422 - protein, 9 aa, synthetic construct
  source 1..9: note = Seed: VVGAVGVGK (KRAS G12V)
FVGSVGVGL

SEQ ID NO: 71423 - protein, 9 aa, synthetic construct
  source 1..9: note = Seed: VVGAVGVGK (KRAS G12V)
FVGSVGVGM

SEQ ID NO: 71424 - protein, 9 aa, synthetic construct
  source 1..9: note = Seed: VVGAVGVGK (KRAS G12V)
FVGSVGVGN

SEQ ID NO: 71425 - protein, 9 aa, synthetic construct
  source 1..9: note = Seed: VVGAVGVGK (KRAS G12V)
FVGSVGVGR

SEQ ID NO: 71426 - protein, 9 aa, synthetic construct
  source 1..9: note = Seed: VVGAVGVGK (KRAS G12V)
FVGSVGVGS

SEQ ID NO: 71427 - protein, 9 aa, synthetic construct
  source 1..9: note = Seed: VVGAVGVGK (KRAS G12V)
FVGSVGVGT

SEQ ID NO: 71428 - protein, 9 aa, synthetic construct
  source 1..9: note = Seed: VVGAVGVGK (KRAS G12V)
FVGSVGVGV

SEQ ID NO: 71429 - protein, 9 aa, synthetic construct
  source 1..9: note = Seed: VVGAVGVGK (KRAS G12V)
FVGSVGVGY

SEQ ID NO: 71430 - protein, 9 aa, synthetic construct
  source 1..9: note = Seed: VVGAVGVGK (KRAS G12V)
FVGSVHVGA

SEQ ID NO: 71431 - protein, 9 aa, synthetic construct
  source 1..9: note = Seed: VVGAVGVGK (KRAS G12V)
FVGSVKVGA

SEQ ID NO: 71432 - protein, 9 aa, synthetic construct
  source 1..9: note = Seed: VVGAVGVGK (KRAS G12V)
FVGSVKVGG

SEQ ID NO: 71433 - protein, 9 aa, synthetic construct
  source 1..9: note = Seed: VVGAVGVGK (KRAS G12V)
FVGSVKVGH

SEQ ID NO: 71434 - protein, 9 aa, synthetic construct
  source 1..9: note = Seed: VVGAVGVGK (KRAS G12V)
FVGSVKVGK

SEQ ID NO: 71435 - protein, 9 aa, synthetic construct
  source 1..9: note = Seed: VVGAVGVGK (KRAS G12V)
FVGSVKVGL

SEQ ID NO: 71436 - protein, 9 aa, synthetic construct
  source 1..9: note = Seed: VVGAVGVGK (KRAS G12V)
FVGSVKVGM

SEQ ID NO: 71437 - protein, 9 aa, synthetic construct
  source 1..9: note = Seed: VVGAVGVGK (KRAS G12V)
FVGSVKVGN

SEQ ID NO: 71438 - protein, 9 aa, synthetic construct
  source 1..9: note = Seed: VVGAVGVGK (KRAS G12V)
FVGSVKVGP

SEQ ID NO: 71439 - protein, 9 aa, synthetic construct
  source 1..9: note = Seed: VVGAVGVGK (KRAS G12V)
FVGSVKVGQ

SEQ ID NO: 71440 - protein, 9 aa, synthetic construct
  source 1..9: note = Seed: VVGAVGVGK (KRAS G12V)
FVGSVKVGR

SEQ ID NO: 71441 - protein, 9 aa, synthetic construct
  source 1..9: note = Seed: VVGAVGVGK (KRAS G12V)
FVGSVKVGS

SEQ ID NO: 71442 - protein, 9 aa, synthetic construct
  source 1..9: note = Seed: VVGAVGVGK (KRAS G12V)
FVGSVKVGT

SEQ ID NO: 71443 - protein, 9 aa, synthetic construct
  source 1..9: note = Seed: VVGAVGVGK (KRAS G12V)
FVGSVKVGV

SEQ ID NO: 71444 - protein, 9 aa, synthetic construct
  source 1..9: note = Seed: VVGAVGVGK (KRAS G12V)
FVGSVKVGY

SEQ ID NO: 71445 - protein, 9 aa, synthetic construct
  source 1..9: note = Seed: VVGAVGVGK (KRAS G12V)
FVGSVMVGA

SEQ ID NO: 71446 - protein, 9 aa, synthetic construct
  source 1..9: note = Seed: VVGAVGVGK (KRAS G12V)
FVGSVNVGA

SEQ ID NO: 71447 - protein, 9 aa, synthetic construct
  source 1..9: note = Seed: VVGAVGVGK (KRAS G12V)
FVGSVNVGG

SEQ ID NO: 71448 - protein, 9 aa, synthetic construct
  source 1..9: note = Seed: VVGAVGVGK (KRAS G12V)
FVGSVNVGI

SEQ ID NO: 71449 - protein, 9 aa, synthetic construct
  source 1..9: note = Seed: VVGAVGVGK (KRAS G12V)
FVGSVNVGL

SEQ ID NO: 71450 - protein, 9 aa, synthetic construct
  source 1..9: note = Seed: VVGAVGVGK (KRAS G12V)
FVGSVNVGM

SEQ ID NO: 71451 - protein, 9 aa, synthetic construct
  source 1..9: note = Seed: VVGAVGVGK (KRAS G12V)
FVGSVNVGN

SEQ ID NO: 71452 - protein, 9 aa, synthetic construct
  source 1..9: note = Seed: VVGAVGVGK (KRAS G12V)
FVGSVNVGS

SEQ ID NO: 71453 - protein, 9 aa, synthetic construct
  source 1..9: note = Seed: VVGAVGVGK (KRAS G12V)
FVGSVNVGT

SEQ ID NO: 71454 - protein, 9 aa, synthetic construct
  source 1..9: note = Seed: VVGAVGVGK (KRAS G12V)
FVGSVNVGV

SEQ ID NO: 71455 - protein, 9 aa, synthetic construct
  source 1..9: note = Seed: VVGAVGVGK (KRAS G12V)
FVGSVPVGA

SEQ ID NO: 71456 - protein, 9 aa, synthetic construct
  source 1..9: note = Seed: VVGAVGVGK (KRAS G12V)
FVGSVPVGC

SEQ ID NO: 71457 - protein, 9 aa, synthetic construct
  source 1..9: note = Seed: VVGAVGVGK (KRAS G12V)
FVGSVPVGD

SEQ ID NO: 71458 - protein, 9 aa, synthetic construct
  source 1..9: note = Seed: VVGAVGVGK (KRAS G12V)
FVGSVPVGE

SEQ ID NO: 71459 - protein, 9 aa, synthetic construct
  source 1..9: note = Seed: VVGAVGVGK (KRAS G12V)
FVGSVPVGF

SEQ ID NO: 71460 - protein, 9 aa, synthetic construct
  source 1..9: note = Seed: VVGAVGVGK (KRAS G12V)
FVGSVPVGG

SEQ ID NO: 71461 - protein, 9 aa, synthetic construct
  source 1..9: note = Seed: VVGAVGVGK (KRAS G12V)
FVGSVPVGH

SEQ ID NO: 71462 - protein, 9 aa, synthetic construct
  source 1..9: note = Seed: VVGAVGVGK (KRAS G12V)
FVGSVPVGI

SEQ ID NO: 71463 - protein, 9 aa, synthetic construct
  source 1..9: note = Seed: VVGAVGVGK (KRAS G12V)
FVGSVPVGK

SEQ ID NO: 71464 - protein, 9 aa, synthetic construct
  source 1..9: note = Seed: VVGAVGVGK (KRAS G12V)
FVGSVPVGL

SEQ ID NO: 71465 - protein, 9 aa, synthetic construct
  source 1..9: note = Seed: VVGAVGVGK (KRAS G12V)
FVGSVPVGM

SEQ ID NO: 71466 - protein, 9 aa, synthetic construct
  source 1..9: note = Seed: VVGAVGVGK (KRAS G12V)
FVGSVPVGN

SEQ ID NO: 71467 - protein, 9 aa, synthetic construct
  source 1..9: note = Seed: VVGAVGVGK (KRAS G12V)
FVGSVPVGP

SEQ ID NO: 71468 - protein, 9 aa, synthetic construct
  source 1..9: note = Seed: VVGAVGVGK (KRAS G12V)
FVGSVPVGQ

SEQ ID NO: 71469 - protein, 9 aa, synthetic construct
  source 1..9: note = Seed: VVGAVGVGK (KRAS G12V)
FVGSVPVGR

SEQ ID NO: 71470 - protein, 9 aa, synthetic construct
  source 1..9: note = Seed: VVGAVGVGK (KRAS G12V)
FVGSVPVGS

SEQ ID NO: 71471 - protein, 9 aa, synthetic construct
  source 1..9: note = Seed: VVGAVGVGK (KRAS G12V)
FVGSVPVGT

SEQ ID NO: 71472 - protein, 9 aa, synthetic construct
  source 1..9: note = Seed: VVGAVGVGK (KRAS G12V)
FVGSVPVGV

SEQ ID NO: 71473 - protein, 9 aa, synthetic construct
  source 1..9: note = Seed: VVGAVGVGK (KRAS G12V)
FVGSVPVGW

SEQ ID NO: 71474 - protein, 9 aa, synthetic construct
  source 1..9: note = Seed: VVGAVGVGK (KRAS G12V)
FVGSVPVGY

SEQ ID NO: 71475 - protein, 9 aa, synthetic construct
  source 1..9: note = Seed: VVGAVGVGK (KRAS G12V)
FVGSVRVGA

SEQ ID NO: 71476 - protein, 9 aa, synthetic construct
  source 1..9: note = Seed: VVGAVGVGK (KRAS G12V)
FVGSVRVGG

SEQ ID NO: 71477 - protein, 9 aa, synthetic construct
  source 1..9: note = Seed: VVGAVGVGK (KRAS G12V)
FVGSVRVGH

SEQ ID NO: 71478 - protein, 9 aa, synthetic construct
  source 1..9: note = Seed: VVGAVGVGK (KRAS G12V)
FVGSVRVGK

SEQ ID NO: 71479 - protein, 9 aa, synthetic construct
  source 1..9: note = Seed: VVGAVGVGK (KRAS G12V)
FVGSVRVGM

SEQ ID NO: 71480 - protein, 9 aa, synthetic construct
  source 1..9: note = Seed: VVGAVGVGK (KRAS G12V)
FVGSVRVGN

SEQ ID NO: 71481 - protein, 9 aa, synthetic construct
  source 1..9: note = Seed: VVGAVGVGK (KRAS G12V)
FVGSVRVGP

SEQ ID NO: 71482 - protein, 9 aa, synthetic construct
  source 1..9: note = Seed: VVGAVGVGK (KRAS G12V)
FVGSVRVGQ

SEQ ID NO: 71483 - protein, 9 aa, synthetic construct
  source 1..9: note = Seed: VVGAVGVGK (KRAS G12V)
FVGSVRVGR

SEQ ID NO: 71484 - protein, 9 aa, synthetic construct
  source 1..9: note = Seed: VVGAVGVGK (KRAS G12V)
FVGSVRVGS

SEQ ID NO: 71485 - protein, 9 aa, synthetic construct
  source 1..9: note = Seed: VVGAVGVGK (KRAS G12V)
FVGSVRVGT

SEQ ID NO: 71486 - protein, 9 aa, synthetic construct
  source 1..9: note = Seed: VVGAVGVGK (KRAS G12V)
FVGSVRVGV

SEQ ID NO: 71487 - protein, 9 aa, synthetic construct
  source 1..9: note = Seed: VVGAVGVGK (KRAS G12V)
FVGSVRVGY

SEQ ID NO: 71488 - protein, 9 aa, synthetic construct
  source 1..9: note = Seed: VVGAVGVGK (KRAS G12V)
FVGSVSVGA

SEQ ID NO: 71489 - protein, 9 aa, synthetic construct
  source 1..9: note = Seed: VVGAVGVGK (KRAS G12V)
FVGSVSVGF

SEQ ID NO: 71490 - protein, 9 aa, synthetic construct
  source 1..9: note = Seed: VVGAVGVGK (KRAS G12V)
FVGSVSVGG

SEQ ID NO: 71491 - protein, 9 aa, synthetic construct
  source 1..9: note = Seed: VVGAVGVGK (KRAS G12V)
FVGSVSVGH

SEQ ID NO: 71492 - protein, 9 aa, synthetic construct
  source 1..9: note = Seed: VVGAVGVGK (KRAS G12V)
FVGSVSVGI

SEQ ID NO: 71493 - protein, 9 aa, synthetic construct
  source 1..9: note = Seed: VVGAVGVGK (KRAS G12V)
FVGSVSVGK

SEQ ID NO: 71494 - protein, 9 aa, synthetic construct
  source 1..9: note = Seed: VVGAVGVGK (KRAS G12V)
FVGSVSVGL

SEQ ID NO: 71495 - protein, 9 aa, synthetic construct
  source 1..9: note = Seed: VVGAVGVGK (KRAS G12V)
FVGSVSVGM

SEQ ID NO: 71496 - protein, 9 aa, synthetic construct
  source 1..9: note = Seed: VVGAVGVGK (KRAS G12V)
FVGSVSVGN

SEQ ID NO: 71497 - protein, 9 aa, synthetic construct
  source 1..9: note = Seed: VVGAVGVGK (KRAS G12V)
FVGSVSVGR

SEQ ID NO: 71498 - protein, 9 aa, synthetic construct
  source 1..9: note = Seed: VVGAVGVGK (KRAS G12V)
FVGSVSVGS

SEQ ID NO: 71499 - protein, 9 aa, synthetic construct
  source 1..9: note = Seed: VVGAVGVGK (KRAS G12V)
FVGSVSVGT

SEQ ID NO: 71500 - protein, 9 aa, synthetic construct
  source 1..9: note = Seed: VVGAVGVGK (KRAS G12V)
FVGSVSVGV

SEQ ID NO: 71501 - protein, 9 aa, synthetic construct
  source 1..9: note = Seed: VVGAVGVGK (KRAS G12V)
FVGSVSVGY

SEQ ID NO: 71502 - protein, 9 aa, synthetic construct
  source 1..9: note = Seed: VVGAVGVGK (KRAS G12V)
FVGSVTVGA

SEQ ID NO: 71503 - protein, 9 aa, synthetic construct
  source 1..9: note = Seed: VVGAVGVGK (KRAS G12V)
FVGSVTVGF

SEQ ID NO: 71504 - protein, 9 aa, synthetic construct
  source 1..9: note = Seed: VVGAVGVGK (KRAS G12V)
FVGSVTVGG

SEQ ID NO: 71505 - protein, 9 aa, synthetic construct
  source 1..9: note = Seed: VVGAVGVGK (KRAS G12V)
FVGSVTVGH

SEQ ID NO: 71506 - protein, 9 aa, synthetic construct
  source 1..9: note = Seed: VVGAVGVGK (KRAS G12V)
FVGSVTVGI

SEQ ID NO: 71507 - protein, 9 aa, synthetic construct
  source 1..9: note = Seed: VVGAVGVGK (KRAS G12V)
FVGSVTVGK

SEQ ID NO: 71508 - protein, 9 aa, synthetic construct
  source 1..9: note = Seed: VVGAVGVGK (KRAS G12V)
FVGSVTVGL

SEQ ID NO: 71509 - protein, 9 aa, synthetic construct
  source 1..9: note = Seed: VVGAVGVGK (KRAS G12V)
FVGSVTVGM

SEQ ID NO: 71510 - protein, 9 aa, synthetic construct
  source 1..9: note = Seed: VVGAVGVGK (KRAS G12V)
FVGSVTVGN

SEQ ID NO: 71511 - protein, 9 aa, synthetic construct
  source 1..9: note = Seed: VVGAVGVGK (KRAS G12V)
FVGSVTVGR

SEQ ID NO: 71512 - protein, 9 aa, synthetic construct
  source 1..9: note = Seed: VVGAVGVGK (KRAS G12V)
FVGSVTVGS

SEQ ID NO: 71513 - protein, 9 aa, synthetic construct
  source 1..9: note = Seed: VVGAVGVGK (KRAS G12V)
FVGSVTVGT

SEQ ID NO: 71514 - protein, 9 aa, synthetic construct
  source 1..9: note = Seed: VVGAVGVGK (KRAS G12V)
FVGSVTVGV

SEQ ID NO: 71515 - protein, 9 aa, synthetic construct
  source 1..9: note = Seed: VVGAVGVGK (KRAS G12V)
FVGSVTVGY

SEQ ID NO: 71516 - protein, 9 aa, synthetic construct
  source 1..9: note = Seed: VVGAVGVGK (KRAS G12V)
FVGSVVVGA

SEQ ID NO: 71517 - protein, 9 aa, synthetic construct
  source 1..9: note = Seed: VVGAVGVGK (KRAS G12V)
FVGSVVVGH

SEQ ID NO: 71518 - protein, 9 aa, synthetic construct
  source 1..9: note = Seed: VVGAVGVGK (KRAS G12V)
FVGSVVVGN

SEQ ID NO: 71519 - protein, 9 aa, synthetic construct
  source 1..9: note = Seed: VVGAVGVGK (KRAS G12V)
FVGSVVVGS

SEQ ID NO: 71520 - protein, 9 aa, synthetic construct
  source 1..9: note = Seed: VVGAVGVGK (KRAS G12V)
FVGTVAVGA

SEQ ID NO: 71521 - protein, 9 aa, synthetic construct
  source 1..9: note = Seed: VVGAVGVGK (KRAS G12V)
FVGTVAVGF

SEQ ID NO: 71522 - protein, 9 aa, synthetic construct
  source 1..9: note = Seed: VVGAVGVGK (KRAS G12V)
FVGTVAVGG

SEQ ID NO: 71523 - protein, 9 aa, synthetic construct
  source 1..9: note = Seed: VVGAVGVGK (KRAS G12V)
FVGTVAVGH

SEQ ID NO: 71524 - protein, 9 aa, synthetic construct
  source 1..9: note = Seed: VVGAVGVGK (KRAS G12V)
FVGTVAVGI

SEQ ID NO: 71525 - protein, 9 aa, synthetic construct
  source 1..9: note = Seed: VVGAVGVGK (KRAS G12V)
FVGTVAVGK

SEQ ID NO: 71526 - protein, 9 aa, synthetic construct
  source 1..9: note = Seed: VVGAVGVGK (KRAS G12V)
FVGTVAVGL

SEQ ID NO: 71527 - protein, 9 aa, synthetic construct
  source 1..9: note = Seed: VVGAVGVGK (KRAS G12V)
FVGTVAVGM

SEQ ID NO: 71528 - protein, 9 aa, synthetic construct
  source 1..9: note = Seed: VVGAVGVGK (KRAS G12V)
FVGTVAVGN

SEQ ID NO: 71529 - protein, 9 aa, synthetic construct
  source 1..9: note = Seed: VVGAVGVGK (KRAS G12V)
FVGTVAVGR

SEQ ID NO: 71530 - protein, 9 aa, synthetic construct
  source 1..9: note = Seed: VVGAVGVGK (KRAS G12V)
FVGTVAVGS

SEQ ID NO: 71531 - protein, 9 aa, synthetic construct
  source 1..9: note = Seed: VVGAVGVGK (KRAS G12V)
FVGTVAVGT

SEQ ID NO: 71532 - protein, 9 aa, synthetic construct
  source 1..9: note = Seed: VVGAVGVGK (KRAS G12V)
FVGTVAVGV

SEQ ID NO: 71533 - protein, 9 aa, synthetic construct
  source 1..9: note = Seed: VVGAVGVGK (KRAS G12V)
FVGTVAVGY

SEQ ID NO: 71534 - protein, 9 aa, synthetic construct
  source 1..9: note = Seed: VVGAVGVGK (KRAS G12V)
FVGTVDVGI

SEQ ID NO: 71535 - protein, 9 aa, synthetic construct
  source 1..9: note = Seed: VVGAVGVGK (KRAS G12V)
FVGTVGVGA

SEQ ID NO: 71536 - protein, 9 aa, synthetic construct
  source 1..9: note = Seed: VVGAVGVGK (KRAS G12V)
FVGTVGVGF

SEQ ID NO: 71537 - protein, 9 aa, synthetic construct
  source 1..9: note = Seed: VVGAVGVGK (KRAS G12V)
FVGTVGVGG

SEQ ID NO: 71538 - protein, 9 aa, synthetic construct
  source 1..9: note = Seed: VVGAVGVGK (KRAS G12V)
FVGTVGVGH

SEQ ID NO: 71539 - protein, 9 aa, synthetic construct
  source 1..9: note = Seed: VVGAVGVGK (KRAS G12V)
FVGTVGVGI

SEQ ID NO: 71540 - protein, 9 aa, synthetic construct
  source 1..9: note = Seed: VVGAVGVGK (KRAS G12V)
FVGTVGVGL

SEQ ID NO: 71541 - protein, 9 aa, synthetic construct
  source 1..9: note = Seed: VVGAVGVGK (KRAS G12V)
FVGTVGVGM

SEQ ID NO: 71542 - protein, 9 aa, synthetic construct
  source 1..9: note = Seed: VVGAVGVGK (KRAS G12V)
FVGTVGVGN

SEQ ID NO: 71543 - protein, 9 aa, synthetic construct
  source 1..9: note = Seed: VVGAVGVGK (KRAS G12V)
FVGTVGVGR

SEQ ID NO: 71544 - protein, 9 aa, synthetic construct
  source 1..9: note = Seed: VVGAVGVGK (KRAS G12V)
FVGTVGVGS

SEQ ID NO: 71545 - protein, 9 aa, synthetic construct
  source 1..9: note = Seed: VVGAVGVGK (KRAS G12V)
FVGTVGVGT

SEQ ID NO: 71546 - protein, 9 aa, synthetic construct
  source 1..9: note = Seed: VVGAVGVGK (KRAS G12V)
FVGTVGVGV

SEQ ID NO: 71547 - protein, 9 aa, synthetic construct
  source 1..9: note = Seed: VVGAVGVGK (KRAS G12V)
FVGTVGVGY

SEQ ID NO: 71548 - protein, 9 aa, synthetic construct
  source 1..9: note = Seed: VVGAVGVGK (KRAS G12V)
FVGTVKVGA

SEQ ID NO: 71549 - protein, 9 aa, synthetic construct
  source 1..9: note = Seed: VVGAVGVGK (KRAS G12V)
FVGTVKVGG

SEQ ID NO: 71550 - protein, 9 aa, synthetic construct
  source 1..9: note = Seed: VVGAVGVGK (KRAS G12V)
FVGTVKVGH

SEQ ID NO: 71551 - protein, 9 aa, synthetic construct
  source 1..9: note = Seed: VVGAVGVGK (KRAS G12V)
FVGTVKVGK

SEQ ID NO: 71552 - protein, 9 aa, synthetic construct
  source 1..9: note = Seed: VVGAVGVGK (KRAS G12V)
FVGTVKVGM

SEQ ID NO: 71553 - protein, 9 aa, synthetic construct
  source 1..9: note = Seed: VVGAVGVGK (KRAS G12V)
FVGTVKVGN

SEQ ID NO: 71554 - protein, 9 aa, synthetic construct
  source 1..9: note = Seed: VVGAVGVGK (KRAS G12V)
FVGTVKVGP

SEQ ID NO: 71555 - protein, 9 aa, synthetic construct
  source 1..9: note = Seed: VVGAVGVGK (KRAS G12V)
FVGTVKVGQ

SEQ ID NO: 71556 - protein, 9 aa, synthetic construct
  source 1..9: note = Seed: VVGAVGVGK (KRAS G12V)
FVGTVKVGR

SEQ ID NO: 71557 - protein, 9 aa, synthetic construct
  source 1..9: note = Seed: VVGAVGVGK (KRAS G12V)
FVGTVKVGS

SEQ ID NO: 71558 - protein, 9 aa, synthetic construct
  source 1..9: note = Seed: VVGAVGVGK (KRAS G12V)
FVGTVKVGT

SEQ ID NO: 71559 - protein, 9 aa, synthetic construct
  source 1..9: note = Seed: VVGAVGVGK (KRAS G12V)
FVGTVKVGV

SEQ ID NO: 71560 - protein, 9 aa, synthetic construct
  source 1..9: note = Seed: VVGAVGVGK (KRAS G12V)
FVGTVNVGA

SEQ ID NO: 71561 - protein, 9 aa, synthetic construct
  source 1..9: note = Seed: VVGAVGVGK (KRAS G12V)
FVGTVNVGI

SEQ ID NO: 71562 - protein, 9 aa, synthetic construct
  source 1..9: note = Seed: VVGAVGVGK (KRAS G12V)
FVGTVNVGL

SEQ ID NO: 71563 - protein, 9 aa, synthetic construct
  source 1..9: note = Seed: VVGAVGVGK (KRAS G12V)
FVGTVNVGM

SEQ ID NO: 71564 - protein, 9 aa, synthetic construct
  source 1..9: note = Seed: VVGAVGVGK (KRAS G12V)
FVGTVNVGV

SEQ ID NO: 71565 - protein, 9 aa, synthetic construct
  source 1..9: note = Seed: VVGAVGVGK (KRAS G12V)
FVGTVPVGA

SEQ ID NO: 71566 - protein, 9 aa, synthetic construct
  source 1..9: note = Seed: VVGAVGVGK (KRAS G12V)
FVGTVPVGF

SEQ ID NO: 71567 - protein, 9 aa, synthetic construct
  source 1..9: note = Seed: VVGAVGVGK (KRAS G12V)
FVGTVPVGG

SEQ ID NO: 71568 - protein, 9 aa, synthetic construct
  source 1..9: note = Seed: VVGAVGVGK (KRAS G12V)
FVGTVPVGH

SEQ ID NO: 71569 - protein, 9 aa, synthetic construct
  source 1..9: note = Seed: VVGAVGVGK (KRAS G12V)
FVGTVPVGI

SEQ ID NO: 71570 - protein, 9 aa, synthetic construct
  source 1..9: note = Seed: VVGAVGVGK (KRAS G12V)
FVGTVPVGK

SEQ ID NO: 71571 - protein, 9 aa, synthetic construct
  source 1..9: note = Seed: VVGAVGVGK (KRAS G12V)
FVGTVPVGL

SEQ ID NO: 71572 - protein, 9 aa, synthetic construct
  source 1..9: note = Seed: VVGAVGVGK (KRAS G12V)
FVGTVPVGM

SEQ ID NO: 71573 - protein, 9 aa, synthetic construct
  source 1..9: note = Seed: VVGAVGVGK (KRAS G12V)
FVGTVPVGN

SEQ ID NO: 71574 - protein, 9 aa, synthetic construct
  source 1..9: note = Seed: VVGAVGVGK (KRAS G12V)
FVGTVPVGQ

SEQ ID NO: 71575 - protein, 9 aa, synthetic construct
  source 1..9: note = Seed: VVGAVGVGK (KRAS G12V)
FVGTVPVGR

SEQ ID NO: 71576 - protein, 9 aa, synthetic construct
  source 1..9: note = Seed: VVGAVGVGK (KRAS G12V)
FVGTVPVGS

SEQ ID NO: 71577 - protein, 9 aa, synthetic construct
  source 1..9: note = Seed: VVGAVGVGK (KRAS G12V)
FVGTVPVGT

SEQ ID NO: 71578 - protein, 9 aa, synthetic construct
  source 1..9: note = Seed: VVGAVGVGK (KRAS G12V)
FVGTVPVGV

SEQ ID NO: 71579 - protein, 9 aa, synthetic construct
  source 1..9: note = Seed: VVGAVGVGK (KRAS G12V)
FVGTVPVGY

SEQ ID NO: 71580 - protein, 9 aa, synthetic construct
  source 1..9: note = Seed: VVGAVGVGK (KRAS G12V)
FVGTVRVGA

SEQ ID NO: 71581 - protein, 9 aa, synthetic construct
  source 1..9: note = Seed: VVGAVGVGK (KRAS G12V)
FVGTVRVGG

SEQ ID NO: 71582 - protein, 9 aa, synthetic construct
  source 1..9: note = Seed: VVGAVGVGK (KRAS G12V)
FVGTVRVGH

SEQ ID NO: 71583 - protein, 9 aa, synthetic construct
  source 1..9: note = Seed: VVGAVGVGK (KRAS G12V)
FVGTVRVGK

SEQ ID NO: 71584 - protein, 9 aa, synthetic construct
  source 1..9: note = Seed: VVGAVGVGK (KRAS G12V)
FVGTVRVGM

SEQ ID NO: 71585 - protein, 9 aa, synthetic construct
  source 1..9: note = Seed: VVGAVGVGK (KRAS G12V)
FVGTVRVGN

SEQ ID NO: 71586 - protein, 9 aa, synthetic construct
  source 1..9: note = Seed: VVGAVGVGK (KRAS G12V)
FVGTVRVGP

SEQ ID NO: 71587 - protein, 9 aa, synthetic construct
  source 1..9: note = Seed: VVGAVGVGK (KRAS G12V)
FVGTVRVGQ

SEQ ID NO: 71588 - protein, 9 aa, synthetic construct
  source 1..9: note = Seed: VVGAVGVGK (KRAS G12V)
FVGTVRVGR

SEQ ID NO: 71589 - protein, 9 aa, synthetic construct
  source 1..9: note = Seed: VVGAVGVGK (KRAS G12V)
FVGTVRVGS

SEQ ID NO: 71590 - protein, 9 aa, synthetic construct
  source 1..9: note = Seed: VVGAVGVGK (KRAS G12V)
FVGTVRVGT

SEQ ID NO: 71591 - protein, 9 aa, synthetic construct
  source 1..9: note = Seed: VVGAVGVGK (KRAS G12V)
FVGTVRVGY

SEQ ID NO: 71592 - protein, 9 aa, synthetic construct
  source 1..9: note = Seed: VVGAVGVGK (KRAS G12V)
FVGTVSVGA

SEQ ID NO: 71593 - protein, 9 aa, synthetic construct
  source 1..9: note = Seed: VVGAVGVGK (KRAS G12V)
FVGTVSVGF

SEQ ID NO: 71594 - protein, 9 aa, synthetic construct
  source 1..9: note = Seed: VVGAVGVGK (KRAS G12V)
FVGTVSVGG

SEQ ID NO: 71595 - protein, 9 aa, synthetic construct
  source 1..9: note = Seed: VVGAVGVGK (KRAS G12V)
FVGTVSVGH

SEQ ID NO: 71596 - protein, 9 aa, synthetic construct
  source 1..9: note = Seed: VVGAVGVGK (KRAS G12V)
FVGTVSVGI

SEQ ID NO: 71597 - protein, 9 aa, synthetic construct
  source 1..9: note = Seed: VVGAVGVGK (KRAS G12V)
FVGTVSVGK

SEQ ID NO: 71598 - protein, 9 aa, synthetic construct
  source 1..9: note = Seed: VVGAVGVGK (KRAS G12V)
FVGTVSVGL

SEQ ID NO: 71599 - protein, 9 aa, synthetic construct
  source 1..9: note = Seed: VVGAVGVGK (KRAS G12V)
FVGTVSVGM

SEQ ID NO: 71600 - protein, 9 aa, synthetic construct
  source 1..9: note = Seed: VVGAVGVGK (KRAS G12V)
FVGTVSVGN

SEQ ID NO: 71601 - protein, 9 aa, synthetic construct
  source 1..9: note = Seed: VVGAVGVGK (KRAS G12V)
FVGTVSVGR

SEQ ID NO: 71602 - protein, 9 aa, synthetic construct
  source 1..9: note = Seed: VVGAVGVGK (KRAS G12V)
FVGTVSVGS

SEQ ID NO: 71603 - protein, 9 aa, synthetic construct
  source 1..9: note = Seed: VVGAVGVGK (KRAS G12V)
FVGTVSVGT

SEQ ID NO: 71604 - protein, 9 aa, synthetic construct
  source 1..9: note = Seed: VVGAVGVGK (KRAS G12V)
FVGTVSVGV

SEQ ID NO: 71605 - protein, 9 aa, synthetic construct
  source 1..9: note = Seed: VVGAVGVGK (KRAS G12V)
FVGTVSVGY

SEQ ID NO: 71606 - protein, 9 aa, synthetic construct
  source 1..9: note = Seed: VVGAVGVGK (KRAS G12V)
FVGTVTVGA

SEQ ID NO: 71607 - protein, 9 aa, synthetic construct
  source 1..9: note = Seed: VVGAVGVGK (KRAS G12V)
FVGTVTVGI

SEQ ID NO: 71608 - protein, 9 aa, synthetic construct
  source 1..9: note = Seed: VVGAVGVGK (KRAS G12V)
FVGTVTVGL

SEQ ID NO: 71609 - protein, 9 aa, synthetic construct
  source 1..9: note = Seed: VVGAVGVGK (KRAS G12V)
FVGTVTVGM

SEQ ID NO: 71610 - protein, 9 aa, synthetic construct
  source 1..9: note = Seed: VVGAVGVGK (KRAS G12V)
FVGTVTVGV

SEQ ID NO: 71611 - protein, 9 aa, synthetic construct
  source 1..9: note = Seed: VVGAVGVGK (KRAS G12V)
FVGTVTVGY

SEQ ID NO: 71612 - protein, 9 aa, synthetic construct
  source 1..9: note = Seed: VVGAVGVGK (KRAS G12V)
FVGVVAVGA

SEQ ID NO: 71613 - protein, 9 aa, synthetic construct
  source 1..9: note = Seed: VVGAVGVGK (KRAS G12V)
FVGVVAVGG

SEQ ID NO: 71614 - protein, 9 aa, synthetic construct
  source 1..9: note = Seed: VVGAVGVGK (KRAS G12V)
FVGVVAVGH

SEQ ID NO: 71615 - protein, 9 aa, synthetic construct
  source 1..9: note = Seed: VVGAVGVGK (KRAS G12V)
FVGVVAVGI

SEQ ID NO: 71616 - protein, 9 aa, synthetic construct
  source 1..9: note = Seed: VVGAVGVGK (KRAS G12V)
FVGVVAVGK

SEQ ID NO: 71617 - protein, 9 aa, synthetic construct
  source 1..9: note = Seed: VVGAVGVGK (KRAS G12V)
FVGVVAVGL

SEQ ID NO: 71618 - protein, 9 aa, synthetic construct
  source 1..9: note = Seed: VVGAVGVGK (KRAS G12V)
FVGVVAVGM

SEQ ID NO: 71619 - protein, 9 aa, synthetic construct
  source 1..9: note = Seed: VVGAVGVGK (KRAS G12V)
FVGVVAVGN

SEQ ID NO: 71620 - protein, 9 aa, synthetic construct
  source 1..9: note = Seed: VVGAVGVGK (KRAS G12V)
FVGVVAVGR

SEQ ID NO: 71621 - protein, 9 aa, synthetic construct
  source 1..9: note = Seed: VVGAVGVGK (KRAS G12V)
FVGVVAVGS

SEQ ID NO: 71622 - protein, 9 aa, synthetic construct
  source 1..9: note = Seed: VVGAVGVGK (KRAS G12V)
FVGVVAVGT

SEQ ID NO: 71623 - protein, 9 aa, synthetic construct
  source 1..9: note = Seed: VVGAVGVGK (KRAS G12V)
FVGVVAVGV

SEQ ID NO: 71624 - protein, 9 aa, synthetic construct
  source 1..9: note = Seed: VVGAVGVGK (KRAS G12V)
FVGVVGVGA

SEQ ID NO: 71625 - protein, 9 aa, synthetic construct
  source 1..9: note = Seed: VVGAVGVGK (KRAS G12V)
FVGVVGVGG

SEQ ID NO: 71626 - protein, 9 aa, synthetic construct
  source 1..9: note = Seed: VVGAVGVGK (KRAS G12V)
FVGVVGVGH

SEQ ID NO: 71627 - protein, 9 aa, synthetic construct
  source 1..9: note = Seed: VVGAVGVGK (KRAS G12V)
FVGVVGVGI

SEQ ID NO: 71628 - protein, 9 aa, synthetic construct
  source 1..9: note = Seed: VVGAVGVGK (KRAS G12V)
FVGVVGVGK

SEQ ID NO: 71629 - protein, 9 aa, synthetic construct
  source 1..9: note = Seed: VVGAVGVGK (KRAS G12V)
FVGVVGVGL

SEQ ID NO: 71630 - protein, 9 aa, synthetic construct
  source 1..9: note = Seed: VVGAVGVGK (KRAS G12V)
FVGVVGVGM

SEQ ID NO: 71631 - protein, 9 aa, synthetic construct
  source 1..9: note = Seed: VVGAVGVGK (KRAS G12V)
FVGVVGVGN

SEQ ID NO: 71632 - protein, 9 aa, synthetic construct
  source 1..9: note = Seed: VVGAVGVGK (KRAS G12V)
FVGVVGVGR

SEQ ID NO: 71633 - protein, 9 aa, synthetic construct
  source 1..9: note = Seed: VVGAVGVGK (KRAS G12V)
FVGVVGVGS

SEQ ID NO: 71634 - protein, 9 aa, synthetic construct
  source 1..9: note = Seed: VVGAVGVGK (KRAS G12V)
FVGVVGVGT

SEQ ID NO: 71635 - protein, 9 aa, synthetic construct
  source 1..9: note = Seed: VVGAVGVGK (KRAS G12V)
FVGVVGVGV

SEQ ID NO: 71636 - protein, 9 aa, synthetic construct
  source 1..9: note = Seed: VVGAVGVGK (KRAS G12V)
FVGVVHVGH

SEQ ID NO: 71637 - protein, 9 aa, synthetic construct
  source 1..9: note = Seed: VVGAVGVGK (KRAS G12V)
FVGVVKVGA

SEQ ID NO: 71638 - protein, 9 aa, synthetic construct
  source 1..9: note = Seed: VVGAVGVGK (KRAS G12V)
FVGVVKVGD

SEQ ID NO: 71639 - protein, 9 aa, synthetic construct
  source 1..9: note = Seed: VVGAVGVGK (KRAS G12V)
FVGVVKVGE

SEQ ID NO: 71640 - protein, 9 aa, synthetic construct
  source 1..9: note = Seed: VVGAVGVGK (KRAS G12V)
FVGVVKVGG

SEQ ID NO: 71641 - protein, 9 aa, synthetic construct
  source 1..9: note = Seed: VVGAVGVGK (KRAS G12V)
FVGVVKVGH

SEQ ID NO: 71642 - protein, 9 aa, synthetic construct
  source 1..9: note = Seed: VVGAVGVGK (KRAS G12V)
FVGVVKVGK

SEQ ID NO: 71643 - protein, 9 aa, synthetic construct
  source 1..9: note = Seed: VVGAVGVGK (KRAS G12V)
FVGVVKVGM

SEQ ID NO: 71644 - protein, 9 aa, synthetic construct
  source 1..9: note = Seed: VVGAVGVGK (KRAS G12V)
FVGVVKVGN

SEQ ID NO: 71645 - protein, 9 aa, synthetic construct
  source 1..9: note = Seed: VVGAVGVGK (KRAS G12V)
FVGVVKVGP

SEQ ID NO: 71646 - protein, 9 aa, synthetic construct
  source 1..9: note = Seed: VVGAVGVGK (KRAS G12V)
FVGVVKVGQ

SEQ ID NO: 71647 - protein, 9 aa, synthetic construct
  source 1..9: note = Seed: VVGAVGVGK (KRAS G12V)
FVGVVKVGR

SEQ ID NO: 71648 - protein, 9 aa, synthetic construct
  source 1..9: note = Seed: VVGAVGVGK (KRAS G12V)
FVGVVKVGS

SEQ ID NO: 71649 - protein, 9 aa, synthetic construct
  source 1..9: note = Seed: VVGAVGVGK (KRAS G12V)
FVGVVKVGT

SEQ ID NO: 71650 - protein, 9 aa, synthetic construct
  source 1..9: note = Seed: VVGAVGVGK (KRAS G12V)
FVGVVKVGY

SEQ ID NO: 71651 - protein, 9 aa, synthetic construct
  source 1..9: note = Seed: VVGAVGVGK (KRAS G12V)
FVGVVNVGA

SEQ ID NO: 71652 - protein, 9 aa, synthetic construct
  source 1..9: note = Seed: VVGAVGVGK (KRAS G12V)
FVGVVNVGG

SEQ ID NO: 71653 - protein, 9 aa, synthetic construct
  source 1..9: note = Seed: VVGAVGVGK (KRAS G12V)
FVGVVNVGH

SEQ ID NO: 71654 - protein, 9 aa, synthetic construct
  source 1..9: note = Seed: VVGAVGVGK (KRAS G12V)
FVGVVNVGN

SEQ ID NO: 71655 - protein, 9 aa, synthetic construct
  source 1..9: note = Seed: VVGAVGVGK (KRAS G12V)
FVGVVNVGR

SEQ ID NO: 71656 - protein, 9 aa, synthetic construct
  source 1..9: note = Seed: VVGAVGVGK (KRAS G12V)
FVGVVNVGS

SEQ ID NO: 71657 - protein, 9 aa, synthetic construct
  source 1..9: note = Seed: VVGAVGVGK (KRAS G12V)
FVGVVNVGT

SEQ ID NO: 71658 - protein, 9 aa, synthetic construct
  source 1..9: note = Seed: VVGAVGVGK (KRAS G12V)
FVGVVNVGV

SEQ ID NO: 71659 - protein, 9 aa, synthetic construct
  source 1..9: note = Seed: VVGAVGVGK (KRAS G12V)
FVGVVPVGA

SEQ ID NO: 71660 - protein, 9 aa, synthetic construct
  source 1..9: note = Seed: VVGAVGVGK (KRAS G12V)
FVGVVPVGG

SEQ ID NO: 71661 - protein, 9 aa, synthetic construct
  source 1..9: note = Seed: VVGAVGVGK (KRAS G12V)
FVGVVPVGH

SEQ ID NO: 71662 - protein, 9 aa, synthetic construct
  source 1..9: note = Seed: VVGAVGVGK (KRAS G12V)
FVGVVPVGI

SEQ ID NO: 71663 - protein, 9 aa, synthetic construct
  source 1..9: note = Seed: VVGAVGVGK (KRAS G12V)
FVGVVPVGK

SEQ ID NO: 71664 - protein, 9 aa, synthetic construct
  source 1..9: note = Seed: VVGAVGVGK (KRAS G12V)
FVGVVPVGL

SEQ ID NO: 71665 - protein, 9 aa, synthetic construct
  source 1..9: note = Seed: VVGAVGVGK (KRAS G12V)
FVGVVPVGM

SEQ ID NO: 71666 - protein, 9 aa, synthetic construct
  source 1..9: note = Seed: VVGAVGVGK (KRAS G12V)
FVGVVPVGN

SEQ ID NO: 71667 - protein, 9 aa, synthetic construct
  source 1..9: note = Seed: VVGAVGVGK (KRAS G12V)
FVGVVPVGP

SEQ ID NO: 71668 - protein, 9 aa, synthetic construct
  source 1..9: note = Seed: VVGAVGVGK (KRAS G12V)
FVGVVPVGQ

SEQ ID NO: 71669 - protein, 9 aa, synthetic construct
  source 1..9: note = Seed: VVGAVGVGK (KRAS G12V)
FVGVVPVGR

SEQ ID NO: 71670 - protein, 9 aa, synthetic construct
  source 1..9: note = Seed: VVGAVGVGK (KRAS G12V)
FVGVVPVGS

SEQ ID NO: 71671 - protein, 9 aa, synthetic construct
  source 1..9: note = Seed: VVGAVGVGK (KRAS G12V)
FVGVVPVGT

SEQ ID NO: 71672 - protein, 9 aa, synthetic construct
  source 1..9: note = Seed: VVGAVGVGK (KRAS G12V)
FVGVVPVGV

SEQ ID NO: 71673 - protein, 9 aa, synthetic construct
  source 1..9: note = Seed: VVGAVGVGK (KRAS G12V)
FVGVVPVGY

SEQ ID NO: 71674 - protein, 9 aa, synthetic construct
  source 1..9: note = Seed: VVGAVGVGK (KRAS G12V)
FVGVVRVGA

SEQ ID NO: 71675 - protein, 9 aa, synthetic construct
  source 1..9: note = Seed: VVGAVGVGK (KRAS G12V)
FVGVVRVGD

SEQ ID NO: 71676 - protein, 9 aa, synthetic construct
  source 1..9: note = Seed: VVGAVGVGK (KRAS G12V)
FVGVVRVGE

SEQ ID NO: 71677 - protein, 9 aa, synthetic construct
  source 1..9: note = Seed: VVGAVGVGK (KRAS G12V)
FVGVVRVGG

SEQ ID NO: 71678 - protein, 9 aa, synthetic construct
  source 1..9: note = Seed: VVGAVGVGK (KRAS G12V)
FVGVVRVGH

SEQ ID NO: 71679 - protein, 9 aa, synthetic construct
  source 1..9: note = Seed: VVGAVGVGK (KRAS G12V)
FVGVVRVGK

SEQ ID NO: 71680 - protein, 9 aa, synthetic construct
  source 1..9: note = Seed: VVGAVGVGK (KRAS G12V)
FVGVVRVGM

SEQ ID NO: 71681 - protein, 9 aa, synthetic construct
  source 1..9: note = Seed: VVGAVGVGK (KRAS G12V)
FVGVVRVGN

SEQ ID NO: 71682 - protein, 9 aa, synthetic construct
  source 1..9: note = Seed: VVGAVGVGK (KRAS G12V)
FVGVVRVGP

SEQ ID NO: 71683 - protein, 9 aa, synthetic construct
  source 1..9: note = Seed: VVGAVGVGK (KRAS G12V)
FVGVVRVGQ

SEQ ID NO: 71684 - protein, 9 aa, synthetic construct
  source 1..9: note = Seed: VVGAVGVGK (KRAS G12V)
FVGVVRVGR

SEQ ID NO: 71685 - protein, 9 aa, synthetic construct
  source 1..9: note = Seed: VVGAVGVGK (KRAS G12V)
FVGVVRVGS

SEQ ID NO: 71686 - protein, 9 aa, synthetic construct
  source 1..9: note = Seed: VVGAVGVGK (KRAS G12V)
FVGVVRVGT

SEQ ID NO: 71687 - protein, 9 aa, synthetic construct
  source 1..9: note = Seed: VVGAVGVGK (KRAS G12V)
FVGVVRVGY

SEQ ID NO: 71688 - protein, 9 aa, synthetic construct
  source 1..9: note = Seed: VVGAVGVGK (KRAS G12V)
FVGVVSVGA

SEQ ID NO: 71689 - protein, 9 aa, synthetic construct
  source 1..9: note = Seed: VVGAVGVGK (KRAS G12V)
FVGVVSVGG

SEQ ID NO: 71690 - protein, 9 aa, synthetic construct
  source 1..9: note = Seed: VVGAVGVGK (KRAS G12V)
FVGVVSVGH

SEQ ID NO: 71691 - protein, 9 aa, synthetic construct
  source 1..9: note = Seed: VVGAVGVGK (KRAS G12V)
FVGVVSVGK

SEQ ID NO: 71692 - protein, 9 aa, synthetic construct
  source 1..9: note = Seed: VVGAVGVGK (KRAS G12V)
FVGVVSVGL

SEQ ID NO: 71693 - protein, 9 aa, synthetic construct
  source 1..9: note = Seed: VVGAVGVGK (KRAS G12V)
FVGVVSVGM

SEQ ID NO: 71694 - protein, 9 aa, synthetic construct
  source 1..9: note = Seed: VVGAVGVGK (KRAS G12V)
FVGVVSVGN

SEQ ID NO: 71695 - protein, 9 aa, synthetic construct
  source 1..9: note = Seed: VVGAVGVGK (KRAS G12V)
FVGVVSVGR

SEQ ID NO: 71696 - protein, 9 aa, synthetic construct
  source 1..9: note = Seed: VVGAVGVGK (KRAS G12V)
FVGVVSVGS

SEQ ID NO: 71697 - protein, 9 aa, synthetic construct
  source 1..9: note = Seed: VVGAVGVGK (KRAS G12V)
FVGVVSVGT

SEQ ID NO: 71698 - protein, 9 aa, synthetic construct
  source 1..9: note = Seed: VVGAVGVGK (KRAS G12V)
FVGVVSVGV

SEQ ID NO: 71699 - protein, 9 aa, synthetic construct
  source 1..9: note = Seed: VVGAVGVGK (KRAS G12V)
FVGVVTVGA

SEQ ID NO: 71700 - protein, 9 aa, synthetic construct
  source 1..9: note = Seed: VVGAVGVGK (KRAS G12V)
FVGVVTVGG

SEQ ID NO: 71701 - protein, 9 aa, synthetic construct
  source 1..9: note = Seed: VVGAVGVGK (KRAS G12V)
FVGVVTVGH

SEQ ID NO: 71702 - protein, 9 aa, synthetic construct
  source 1..9: note = Seed: VVGAVGVGK (KRAS G12V)
FVGVVTVGK

SEQ ID NO: 71703 - protein, 9 aa, synthetic construct
  source 1..9: note = Seed: VVGAVGVGK (KRAS G12V)
FVGVVTVGN

SEQ ID NO: 71704 - protein, 9 aa, synthetic construct
  source 1..9: note = Seed: VVGAVGVGK (KRAS G12V)
FVGVVTVGR

SEQ ID NO: 71705 - protein, 9 aa, synthetic construct
  source 1..9: note = Seed: VVGAVGVGK (KRAS G12V)
FVGVVTVGS

SEQ ID NO: 71706 - protein, 9 aa, synthetic construct
  source 1..9: note = Seed: VVGAVGVGK (KRAS G12V)
FVGVVTVGT

SEQ ID NO: 71707 - protein, 9 aa, synthetic construct
  source 1..9: note = Seed: VVGAVGVGK (KRAS G12V)
FVGWVAVGI

SEQ ID NO: 71708 - protein, 9 aa, synthetic construct
  source 1..9: note = Seed: VVGAVGVGK (KRAS G12V)
FVGWVAVGK

SEQ ID NO: 71709 - protein, 9 aa, synthetic construct
  source 1..9: note = Seed: VVGAVGVGK (KRAS G12V)
FVGWVAVGM

SEQ ID NO: 71710 - protein, 9 aa, synthetic construct
  source 1..9: note = Seed: VVGAVGVGK (KRAS G12V)
FVGWVAVGR

SEQ ID NO: 71711 - protein, 9 aa, synthetic construct
  source 1..9: note = Seed: VVGAVGVGK (KRAS G12V)
FVGWVAVGV

SEQ ID NO: 71712 - protein, 9 aa, synthetic construct
  source 1..9: note = Seed: VVGAVGVGK (KRAS G12V)
FVGWVGVGK

SEQ ID NO: 71713 - protein, 9 aa, synthetic construct
  source 1..9: note = Seed: VVGAVGVGK (KRAS G12V)
FVGWVGVGR

SEQ ID NO: 71714 - protein, 9 aa, synthetic construct
  source 1..9: note = Seed: VVGAVGVGK (KRAS G12V)
FVGWVKVGA

SEQ ID NO: 71715 - protein, 9 aa, synthetic construct
  source 1..9: note = Seed: VVGAVGVGK (KRAS G12V)
FVGWVKVGH

SEQ ID NO: 71716 - protein, 9 aa, synthetic construct
  source 1..9: note = Seed: VVGAVGVGK (KRAS G12V)
FVGWVKVGK

SEQ ID NO: 71717 - protein, 9 aa, synthetic construct
  source 1..9: note = Seed: VVGAVGVGK (KRAS G12V)
FVGWVKVGR

SEQ ID NO: 71718 - protein, 9 aa, synthetic construct
  source 1..9: note = Seed: VVGAVGVGK (KRAS G12V)
FVGWVKVGS

SEQ ID NO: 71719 - protein, 9 aa, synthetic construct
  source 1..9: note = Seed: VVGAVGVGK (KRAS G12V)
FVGWVNVGA

SEQ ID NO: 71720 - protein, 9 aa, synthetic construct
  source 1..9: note = Seed: VVGAVGVGK (KRAS G12V)
FVGWVNVGK

SEQ ID NO: 71721 - protein, 9 aa, synthetic construct
  source 1..9: note = Seed: VVGAVGVGK (KRAS G12V)
FVGWVNVGR

SEQ ID NO: 71722 - protein, 9 aa, synthetic construct
  source 1..9: note = Seed: VVGAVGVGK (KRAS G12V)
FVGWVPVGI

SEQ ID NO: 71723 - protein, 9 aa, synthetic construct
  source 1..9: note = Seed: VVGAVGVGK (KRAS G12V)
FVGWVPVGL

SEQ ID NO: 71724 - protein, 9 aa, synthetic construct
  source 1..9: note = Seed: VVGAVGVGK (KRAS G12V)
FVGWVPVGM

SEQ ID NO: 71725 - protein, 9 aa, synthetic construct
  source 1..9: note = Seed: VVGAVGVGK (KRAS G12V)
FVGWVPVGR

SEQ ID NO: 71726 - protein, 9 aa, synthetic construct
  source 1..9: note = Seed: VVGAVGVGK (KRAS G12V)
FVGWVPVGV

SEQ ID NO: 71727 - protein, 9 aa, synthetic construct
  source 1..9: note = Seed: VVGAVGVGK (KRAS G12V)
FVGWVRVGA

SEQ ID NO: 71728 - protein, 9 aa, synthetic construct
  source 1..9: note = Seed: VVGAVGVGK (KRAS G12V)
FVGWVRVGH

SEQ ID NO: 71729 - protein, 9 aa, synthetic construct
  source 1..9: note = Seed: VVGAVGVGK (KRAS G12V)
FVGWVRVGK

SEQ ID NO: 71730 - protein, 9 aa, synthetic construct
  source 1..9: note = Seed: VVGAVGVGK (KRAS G12V)
FVGWVRVGQ

SEQ ID NO: 71731 - protein, 9 aa, synthetic construct
  source 1..9: note = Seed: VVGAVGVGK (KRAS G12V)
FVGWVRVGR

SEQ ID NO: 71732 - protein, 9 aa, synthetic construct
  source 1..9: note = Seed: VVGAVGVGK (KRAS G12V)
FVGWVRVGS

SEQ ID NO: 71733 - protein, 9 aa, synthetic construct
  source 1..9: note = Seed: VVGAVGVGK (KRAS G12V)
FVGWVRVGY

SEQ ID NO: 71734 - protein, 9 aa, synthetic construct
  source 1..9: note = Seed: VVGAVGVGK (KRAS G12V)
FVGWVSVGA

SEQ ID NO: 71735 - protein, 9 aa, synthetic construct
  source 1..9: note = Seed: VVGAVGVGK (KRAS G12V)
FVGWVSVGH

SEQ ID NO: 71736 - protein, 9 aa, synthetic construct
  source 1..9: note = Seed: VVGAVGVGK (KRAS G12V)
FVGWVSVGK

SEQ ID NO: 71737 - protein, 9 aa, synthetic construct
  source 1..9: note = Seed: VVGAVGVGK (KRAS G12V)
FVGWVSVGR

SEQ ID NO: 71738 - protein, 9 aa, synthetic construct
  source 1..9: note = Seed: VVGAVGVGK (KRAS G12V)
FVGWVSVGV

SEQ ID NO: 71739 - protein, 9 aa, synthetic construct
  source 1..9: note = Seed: VVGAVGVGK (KRAS G12V)
FVGWVTVGR

SEQ ID NO: 71740 - protein, 9 aa, synthetic construct
  source 1..9: note = Seed: VVGAVGVGK (KRAS G12V)
FVGYVAVGH

SEQ ID NO: 71741 - protein, 9 aa, synthetic construct
  source 1..9: note = Seed: VVGAVGVGK (KRAS G12V)
FVGYVAVGI

SEQ ID NO: 71742 - protein, 9 aa, synthetic construct
  source 1..9: note = Seed: VVGAVGVGK (KRAS G12V)
FVGYVAVGK

SEQ ID NO: 71743 - protein, 9 aa, synthetic construct
  source 1..9: note = Seed: VVGAVGVGK (KRAS G12V)
FVGYVAVGL

SEQ ID NO: 71744 - protein, 9 aa, synthetic construct
  source 1..9: note = Seed: VVGAVGVGK (KRAS G12V)
FVGYVAVGR

SEQ ID NO: 71745 - protein, 9 aa, synthetic construct
  source 1..9: note = Seed: VVGAVGVGK (KRAS G12V)
FVGYVGVGK

SEQ ID NO: 71746 - protein, 9 aa, synthetic construct
  source 1..9: note = Seed: VVGAVGVGK (KRAS G12V)
FVGYVGVGR

SEQ ID NO: 71747 - protein, 9 aa, synthetic construct
  source 1..9: note = Seed: VVGAVGVGK (KRAS G12V)
FVGYVKVGH

SEQ ID NO: 71748 - protein, 9 aa, synthetic construct
  source 1..9: note = Seed: VVGAVGVGK (KRAS G12V)
FVGYVKVGK

SEQ ID NO: 71749 - protein, 9 aa, synthetic construct
  source 1..9: note = Seed: VVGAVGVGK (KRAS G12V)
FVGYVKVGR

SEQ ID NO: 71750 - protein, 9 aa, synthetic construct
  source 1..9: note = Seed: VVGAVGVGK (KRAS G12V)
FVGYVNVGK

SEQ ID NO: 71751 - protein, 9 aa, synthetic construct
  source 1..9: note = Seed: VVGAVGVGK (KRAS G12V)
FVGYVNVGR

SEQ ID NO: 71752 - protein, 9 aa, synthetic construct
  source 1..9: note = Seed: VVGAVGVGK (KRAS G12V)
FVGYVPVGI

SEQ ID NO: 71753 - protein, 9 aa, synthetic construct
  source 1..9: note = Seed: VVGAVGVGK (KRAS G12V)
FVGYVPVGK

SEQ ID NO: 71754 - protein, 9 aa, synthetic construct
  source 1..9: note = Seed: VVGAVGVGK (KRAS G12V)
FVGYVPVGL

SEQ ID NO: 71755 - protein, 9 aa, synthetic construct
  source 1..9: note = Seed: VVGAVGVGK (KRAS G12V)
FVGYVPVGM

SEQ ID NO: 71756 - protein, 9 aa, synthetic construct
  source 1..9: note = Seed: VVGAVGVGK (KRAS G12V)
FVGYVPVGR

SEQ ID NO: 71757 - protein, 9 aa, synthetic construct
  source 1..9: note = Seed: VVGAVGVGK (KRAS G12V)
FVGYVRVGH

SEQ ID NO: 71758 - protein, 9 aa, synthetic construct
  source 1..9: note = Seed: VVGAVGVGK (KRAS G12V)
FVGYVRVGK

SEQ ID NO: 71759 - protein, 9 aa, synthetic construct
  source 1..9: note = Seed: VVGAVGVGK (KRAS G12V)
FVGYVRVGR

SEQ ID NO: 71760 - protein, 9 aa, synthetic construct
  source 1..9: note = Seed: VVGAVGVGK (KRAS G12V)
FVGYVSVGH

SEQ ID NO: 71761 - protein, 9 aa, synthetic construct
  source 1..9: note = Seed: VVGAVGVGK (KRAS G12V)
FVGYVSVGK

SEQ ID NO: 71762 - protein, 9 aa, synthetic construct
  source 1..9: note = Seed: VVGAVGVGK (KRAS G12V)
FVGYVSVGR

SEQ ID NO: 71763 - protein, 9 aa, synthetic construct
  source 1..9: note = Seed: VVGAVGVGK (KRAS G12V)
FVGYVTVGK

SEQ ID NO: 71764 - protein, 9 aa, synthetic construct
  source 1..9: note = Seed: VVGAVGVGK (KRAS G12V)
FVGYVTVGR

SEQ ID NO: 71765 - protein, 9 aa, synthetic construct
  source 1..9: note = Seed: VVGAVGVGK (KRAS G12V)
GVGFVRVGR

SEQ ID NO: 71766 - protein, 9 aa, synthetic construct
  source 1..9: note = Seed: VVGAVGVGK (KRAS G12V)
GVGMVRVGR

SEQ ID NO: 71767 - protein, 9 aa, synthetic construct
  source 1..9: note = Seed: VVGAVGVGK (KRAS G12V)
HVGAVAVGA

SEQ ID NO: 71768 - protein, 9 aa, synthetic construct
  source 1..9: note = Seed: VVGAVGVGK (KRAS G12V)
HVGAVAVGI

SEQ ID NO: 71769 - protein, 9 aa, synthetic construct
  source 1..9: note = Seed: VVGAVGVGK (KRAS G12V)
HVGAVAVGL

SEQ ID NO: 71770 - protein, 9 aa, synthetic construct
  source 1..9: note = Seed: VVGAVGVGK (KRAS G12V)
HVGAVAVGV

SEQ ID NO: 71771 - protein, 9 aa, synthetic construct
  source 1..9: note = Seed: VVGAVGVGK (KRAS G12V)
HVGAVPVGA

SEQ ID NO: 71772 - protein, 9 aa, synthetic construct
  source 1..9: note = Seed: VVGAVGVGK (KRAS G12V)
HVGAVPVGI

SEQ ID NO: 71773 - protein, 9 aa, synthetic construct
  source 1..9: note = Seed: VVGAVGVGK (KRAS G12V)
HVGAVPVGL

SEQ ID NO: 71774 - protein, 9 aa, synthetic construct
  source 1..9: note = Seed: VVGAVGVGK (KRAS G12V)
HVGAVPVGM

SEQ ID NO: 71775 - protein, 9 aa, synthetic construct
  source 1..9: note = Seed: VVGAVGVGK (KRAS G12V)
HVGAVPVGS

SEQ ID NO: 71776 - protein, 9 aa, synthetic construct
  source 1..9: note = Seed: VVGAVGVGK (KRAS G12V)
HVGAVPVGV

SEQ ID NO: 71777 - protein, 9 aa, synthetic construct
  source 1..9: note = Seed: VVGAVGVGK (KRAS G12V)
HVGAVRVGR

SEQ ID NO: 71778 - protein, 9 aa, synthetic construct
  source 1..9: note = Seed: VVGAVGVGK (KRAS G12V)
HVGFVKVGR

SEQ ID NO: 71779 - protein, 9 aa, synthetic construct
  source 1..9: note = Seed: VVGAVGVGK (KRAS G12V)
HVGFVRVGR

SEQ ID NO: 71780 - protein, 9 aa, synthetic construct
  source 1..9: note = Seed: VVGAVGVGK (KRAS G12V)
HVGHVRVGR

SEQ ID NO: 71781 - protein, 9 aa, synthetic construct
  source 1..9: note = Seed: VVGAVGVGK (KRAS G12V)
HVGLVAVGI

SEQ ID NO: 71782 - protein, 9 aa, synthetic construct
  source 1..9: note = Seed: VVGAVGVGK (KRAS G12V)
HVGLVAVGL

SEQ ID NO: 71783 - protein, 9 aa, synthetic construct
  source 1..9: note = Seed: VVGAVGVGK (KRAS G12V)
HVGLVAVGM

SEQ ID NO: 71784 - protein, 9 aa, synthetic construct
  source 1..9: note = Seed: VVGAVGVGK (KRAS G12V)
HVGLVAVGV

SEQ ID NO: 71785 - protein, 9 aa, synthetic construct
  source 1..9: note = Seed: VVGAVGVGK (KRAS G12V)
HVGLVGVGI

SEQ ID NO: 71786 - protein, 9 aa, synthetic construct
  source 1..9: note = Seed: VVGAVGVGK (KRAS G12V)
HVGLVGVGL

SEQ ID NO: 71787 - protein, 9 aa, synthetic construct
  source 1..9: note = Seed: VVGAVGVGK (KRAS G12V)
HVGLVGVGM

SEQ ID NO: 71788 - protein, 9 aa, synthetic construct
  source 1..9: note = Seed: VVGAVGVGK (KRAS G12V)
HVGLVGVGV

SEQ ID NO: 71789 - protein, 9 aa, synthetic construct
  source 1..9: note = Seed: VVGAVGVGK (KRAS G12V)
HVGLVKVGR

SEQ ID NO: 71790 - protein, 9 aa, synthetic construct
  source 1..9: note = Seed: VVGAVGVGK (KRAS G12V)
HVGLVPVGI

SEQ ID NO: 71791 - protein, 9 aa, synthetic construct
  source 1..9: note = Seed: VVGAVGVGK (KRAS G12V)
HVGLVPVGL

SEQ ID NO: 71792 - protein, 9 aa, synthetic construct
  source 1..9: note = Seed: VVGAVGVGK (KRAS G12V)
HVGLVPVGM

SEQ ID NO: 71793 - protein, 9 aa, synthetic construct
  source 1..9: note = Seed: VVGAVGVGK (KRAS G12V)
HVGLVPVGV

SEQ ID NO: 71794 - protein, 9 aa, synthetic construct
  source 1..9: note = Seed: VVGAVGVGK (KRAS G12V)
HVGLVRVGK

SEQ ID NO: 71795 - protein, 9 aa, synthetic construct
  source 1..9: note = Seed: VVGAVGVGK (KRAS G12V)
HVGLVRVGR

SEQ ID NO: 71796 - protein, 9 aa, synthetic construct
  source 1..9: note = Seed: VVGAVGVGK (KRAS G12V)
HVGLVSVGI

SEQ ID NO: 71797 - protein, 9 aa, synthetic construct
  source 1..9: note = Seed: VVGAVGVGK (KRAS G12V)
HVGLVSVGL

SEQ ID NO: 71798 - protein, 9 aa, synthetic construct
  source 1..9: note = Seed: VVGAVGVGK (KRAS G12V)
HVGLVSVGV

SEQ ID NO: 71799 - protein, 9 aa, synthetic construct
  source 1..9: note = Seed: VVGAVGVGK (KRAS G12V)
HVGMVAVGI

SEQ ID NO: 71800 - protein, 9 aa, synthetic construct
  source 1..9: note = Seed: VVGAVGVGK (KRAS G12V)
HVGMVAVGL

SEQ ID NO: 71801 - protein, 9 aa, synthetic construct
  source 1..9: note = Seed: VVGAVGVGK (KRAS G12V)
HVGMVAVGM

SEQ ID NO: 71802 - protein, 9 aa, synthetic construct
  source 1..9: note = Seed: VVGAVGVGK (KRAS G12V)
HVGMVAVGV

SEQ ID NO: 71803 - protein, 9 aa, synthetic construct
  source 1..9: note = Seed: VVGAVGVGK (KRAS G12V)
HVGMVGVGI

SEQ ID NO: 71804 - protein, 9 aa, synthetic construct
  source 1..9: note = Seed: VVGAVGVGK (KRAS G12V)
HVGMVGVGL

SEQ ID NO: 71805 - protein, 9 aa, synthetic construct
  source 1..9: note = Seed: VVGAVGVGK (KRAS G12V)
HVGMVGVGV

SEQ ID NO: 71806 - protein, 9 aa, synthetic construct
  source 1..9: note = Seed: VVGAVGVGK (KRAS G12V)
HVGMVKVGR

SEQ ID NO: 71807 - protein, 9 aa, synthetic construct
  source 1..9: note = Seed: VVGAVGVGK (KRAS G12V)
HVGMVPVGI

SEQ ID NO: 71808 - protein, 9 aa, synthetic construct
  source 1..9: note = Seed: VVGAVGVGK (KRAS G12V)
HVGMVPVGL

SEQ ID NO: 71809 - protein, 9 aa, synthetic construct
  source 1..9: note = Seed: VVGAVGVGK (KRAS G12V)
HVGMVPVGM

SEQ ID NO: 71810 - protein, 9 aa, synthetic construct
  source 1..9: note = Seed: VVGAVGVGK (KRAS G12V)
HVGMVRVGK

SEQ ID NO: 71811 - protein, 9 aa, synthetic construct
  source 1..9: note = Seed: VVGAVGVGK (KRAS G12V)
HVGMVRVGR

SEQ ID NO: 71812 - protein, 9 aa, synthetic construct
  source 1..9: note = Seed: VVGAVGVGK (KRAS G12V)
HVGMVSVGI

SEQ ID NO: 71813 - protein, 9 aa, synthetic construct
  source 1..9: note = Seed: VVGAVGVGK (KRAS G12V)
HVGMVSVGL

SEQ ID NO: 71814 - protein, 9 aa, synthetic construct
  source 1..9: note = Seed: VVGAVGVGK (KRAS G12V)
HVGMVSVGV

SEQ ID NO: 71815 - protein, 9 aa, synthetic construct
  source 1..9: note = Seed: VVGAVGVGK (KRAS G12V)
HVGRVRVGR

SEQ ID NO: 71816 - protein, 9 aa, synthetic construct
  source 1..9: note = Seed: VVGAVGVGK (KRAS G12V)
HVGTVRVGR

SEQ ID NO: 71817 - protein, 9 aa, synthetic construct
  source 1..9: note = Seed: VVGAVGVGK (KRAS G12V)
HVGVVRVGR

SEQ ID NO: 71818 - protein, 9 aa, synthetic construct
  source 1..9: note = Seed: VVGAVGVGK (KRAS G12V)
HVGWVRVGR

SEQ ID NO: 71819 - protein, 9 aa, synthetic construct
  source 1..9: note = Seed: VVGAVGVGK (KRAS G12V)
HVGYVRVGR

SEQ ID NO: 71820 - protein, 9 aa, synthetic construct
  source 1..9: note = Seed: VVGAVGVGK (KRAS G12V)
IVGAVAVGA

SEQ ID NO: 71821 - protein, 9 aa, synthetic construct
  source 1..9: note = Seed: VVGAVGVGK (KRAS G12V)
IVGAVAVGG

SEQ ID NO: 71822 - protein, 9 aa, synthetic construct
  source 1..9: note = Seed: VVGAVGVGK (KRAS G12V)
IVGAVAVGH

SEQ ID NO: 71823 - protein, 9 aa, synthetic construct
  source 1..9: note = Seed: VVGAVGVGK (KRAS G12V)
IVGAVAVGI

SEQ ID NO: 71824 - protein, 9 aa, synthetic construct
  source 1..9: note = Seed: VVGAVGVGK (KRAS G12V)
IVGAVAVGK

SEQ ID NO: 71825 - protein, 9 aa, synthetic construct
  source 1..9: note = Seed: VVGAVGVGK (KRAS G12V)
IVGAVAVGL

SEQ ID NO: 71826 - protein, 9 aa, synthetic construct
  source 1..9: note = Seed: VVGAVGVGK (KRAS G12V)
IVGAVAVGM

SEQ ID NO: 71827 - protein, 9 aa, synthetic construct
  source 1..9: note = Seed: VVGAVGVGK (KRAS G12V)
IVGAVAVGN

SEQ ID NO: 71828 - protein, 9 aa, synthetic construct
  source 1..9: note = Seed: VVGAVGVGK (KRAS G12V)
IVGAVAVGR

SEQ ID NO: 71829 - protein, 9 aa, synthetic construct
  source 1..9: note = Seed: VVGAVGVGK (KRAS G12V)
IVGAVAVGS

SEQ ID NO: 71830 - protein, 9 aa, synthetic construct
  source 1..9: note = Seed: VVGAVGVGK (KRAS G12V)
IVGAVAVGT

SEQ ID NO: 71831 - protein, 9 aa, synthetic construct
  source 1..9: note = Seed: VVGAVGVGK (KRAS G12V)
IVGAVAVGV

SEQ ID NO: 71832 - protein, 9 aa, synthetic construct
  source 1..9: note = Seed: VVGAVGVGK (KRAS G12V)
IVGAVAVGY

SEQ ID NO: 71833 - protein, 9 aa, synthetic construct
  source 1..9: note = Seed: VVGAVGVGK (KRAS G12V)
IVGAVGVGA

SEQ ID NO: 71834 - protein, 9 aa, synthetic construct
  source 1..9: note = Seed: VVGAVGVGK (KRAS G12V)
IVGAVGVGG

SEQ ID NO: 71835 - protein, 9 aa, synthetic construct
  source 1..9: note = Seed: VVGAVGVGK (KRAS G12V)
IVGAVGVGH

SEQ ID NO: 71836 - protein, 9 aa, synthetic construct
  source 1..9: note = Seed: VVGAVGVGK (KRAS G12V)
IVGAVGVGI

SEQ ID NO: 71837 - protein, 9 aa, synthetic construct
  source 1..9: note = Seed: VVGAVGVGK (KRAS G12V)
IVGAVGVGL

SEQ ID NO: 71838 - protein, 9 aa, synthetic construct
  source 1..9: note = Seed: VVGAVGVGK (KRAS G12V)
IVGAVGVGM

SEQ ID NO: 71839 - protein, 9 aa, synthetic construct
  source 1..9: note = Seed: VVGAVGVGK (KRAS G12V)
IVGAVGVGN

SEQ ID NO: 71840 - protein, 9 aa, synthetic construct
  source 1..9: note = Seed: VVGAVGVGK (KRAS G12V)
IVGAVGVGR

SEQ ID NO: 71841 - protein, 9 aa, synthetic construct
  source 1..9: note = Seed: VVGAVGVGK (KRAS G12V)
IVGAVGVGS

SEQ ID NO: 71842 - protein, 9 aa, synthetic construct
  source 1..9: note = Seed: VVGAVGVGK (KRAS G12V)
IVGAVGVGT

SEQ ID NO: 71843 - protein, 9 aa, synthetic construct
  source 1..9: note = Seed: VVGAVGVGK (KRAS G12V)
IVGAVGVGV

SEQ ID NO: 71844 - protein, 9 aa, synthetic construct
  source 1..9: note = Seed: VVGAVGVGK (KRAS G12V)
IVGAVHVGA

SEQ ID NO: 71845 - protein, 9 aa, synthetic construct
  source 1..9: note = Seed: VVGAVGVGK (KRAS G12V)
IVGAVHVGK

SEQ ID NO: 71846 - protein, 9 aa, synthetic construct
  source 1..9: note = Seed: VVGAVGVGK (KRAS G12V)
IVGAVHVGR

SEQ ID NO: 71847 - protein, 9 aa, synthetic construct
  source 1..9: note = Seed: VVGAVGVGK (KRAS G12V)
IVGAVKVGA

SEQ ID NO: 71848 - protein, 9 aa, synthetic construct
  source 1..9: note = Seed: VVGAVGVGK (KRAS G12V)
IVGAVKVGF

SEQ ID NO: 71849 - protein, 9 aa, synthetic construct
  source 1..9: note = Seed: VVGAVGVGK (KRAS G12V)
IVGAVKVGG

SEQ ID NO: 71850 - protein, 9 aa, synthetic construct
  source 1..9: note = Seed: VVGAVGVGK (KRAS G12V)
IVGAVKVGH

SEQ ID NO: 71851 - protein, 9 aa, synthetic construct
  source 1..9: note = Seed: VVGAVGVGK (KRAS G12V)
IVGAVKVGI

SEQ ID NO: 71852 - protein, 9 aa, synthetic construct
  source 1..9: note = Seed: VVGAVGVGK (KRAS G12V)
IVGAVKVGK

SEQ ID NO: 71853 - protein, 9 aa, synthetic construct
  source 1..9: note = Seed: VVGAVGVGK (KRAS G12V)
IVGAVKVGL

SEQ ID NO: 71854 - protein, 9 aa, synthetic construct
  source 1..9: note = Seed: VVGAVGVGK (KRAS G12V)
IVGAVKVGM

SEQ ID NO: 71855 - protein, 9 aa, synthetic construct
  source 1..9: note = Seed: VVGAVGVGK (KRAS G12V)
IVGAVKVGN

SEQ ID NO: 71856 - protein, 9 aa, synthetic construct
  source 1..9: note = Seed: VVGAVGVGK (KRAS G12V)
IVGAVKVGP

SEQ ID NO: 71857 - protein, 9 aa, synthetic construct
  source 1..9: note = Seed: VVGAVGVGK (KRAS G12V)
IVGAVKVGQ

SEQ ID NO: 71858 - protein, 9 aa, synthetic construct
  source 1..9: note = Seed: VVGAVGVGK (KRAS G12V)
IVGAVKVGR

SEQ ID NO: 71859 - protein, 9 aa, synthetic construct
  source 1..9: note = Seed: VVGAVGVGK (KRAS G12V)
IVGAVKVGS

SEQ ID NO: 71860 - protein, 9 aa, synthetic construct
  source 1..9: note = Seed: VVGAVGVGK (KRAS G12V)
IVGAVKVGT

SEQ ID NO: 71861 - protein, 9 aa, synthetic construct
  source 1..9: note = Seed: VVGAVGVGK (KRAS G12V)
IVGAVKVGV

SEQ ID NO: 71862 - protein, 9 aa, synthetic construct
  source 1..9: note = Seed: VVGAVGVGK (KRAS G12V)
IVGAVKVGY

SEQ ID NO: 71863 - protein, 9 aa, synthetic construct
  source 1..9: note = Seed: VVGAVGVGK (KRAS G12V)
IVGAVNVGA

SEQ ID NO: 71864 - protein, 9 aa, synthetic construct
  source 1..9: note = Seed: VVGAVGVGK (KRAS G12V)
IVGAVNVGL

SEQ ID NO: 71865 - protein, 9 aa, synthetic construct
  source 1..9: note = Seed: VVGAVGVGK (KRAS G12V)
IVGAVNVGR

SEQ ID NO: 71866 - protein, 9 aa, synthetic construct
  source 1..9: note = Seed: VVGAVGVGK (KRAS G12V)
IVGAVNVGS

SEQ ID NO: 71867 - protein, 9 aa, synthetic construct
  source 1..9: note = Seed: VVGAVGVGK (KRAS G12V)
IVGAVNVGV

SEQ ID NO: 71868 - protein, 9 aa, synthetic construct
  source 1..9: note = Seed: VVGAVGVGK (KRAS G12V)
IVGAVPVGA

SEQ ID NO: 71869 - protein, 9 aa, synthetic construct
  source 1..9: note = Seed: VVGAVGVGK (KRAS G12V)
IVGAVPVGC

SEQ ID NO: 71870 - protein, 9 aa, synthetic construct
  source 1..9: note = Seed: VVGAVGVGK (KRAS G12V)
IVGAVPVGF

SEQ ID NO: 71871 - protein, 9 aa, synthetic construct
  source 1..9: note = Seed: VVGAVGVGK (KRAS G12V)
IVGAVPVGG

SEQ ID NO: 71872 - protein, 9 aa, synthetic construct
  source 1..9: note = Seed: VVGAVGVGK (KRAS G12V)
IVGAVPVGH

SEQ ID NO: 71873 - protein, 9 aa, synthetic construct
  source 1..9: note = Seed: VVGAVGVGK (KRAS G12V)
IVGAVPVGI

SEQ ID NO: 71874 - protein, 9 aa, synthetic construct
  source 1..9: note = Seed: VVGAVGVGK (KRAS G12V)
IVGAVPVGK

SEQ ID NO: 71875 - protein, 9 aa, synthetic construct
  source 1..9: note = Seed: VVGAVGVGK (KRAS G12V)
IVGAVPVGL

SEQ ID NO: 71876 - protein, 9 aa, synthetic construct
  source 1..9: note = Seed: VVGAVGVGK (KRAS G12V)
IVGAVPVGM

SEQ ID NO: 71877 - protein, 9 aa, synthetic construct
  source 1..9: note = Seed: VVGAVGVGK (KRAS G12V)
IVGAVPVGN

SEQ ID NO: 71878 - protein, 9 aa, synthetic construct
  source 1..9: note = Seed: VVGAVGVGK (KRAS G12V)
IVGAVPVGP

SEQ ID NO: 71879 - protein, 9 aa, synthetic construct
  source 1..9: note = Seed: VVGAVGVGK (KRAS G12V)
IVGAVPVGQ

SEQ ID NO: 71880 - protein, 9 aa, synthetic construct
  source 1..9: note = Seed: VVGAVGVGK (KRAS G12V)
IVGAVPVGR

SEQ ID NO: 71881 - protein, 9 aa, synthetic construct
  source 1..9: note = Seed: VVGAVGVGK (KRAS G12V)
IVGAVPVGS

SEQ ID NO: 71882 - protein, 9 aa, synthetic construct
  source 1..9: note = Seed: VVGAVGVGK (KRAS G12V)
IVGAVPVGT

SEQ ID NO: 71883 - protein, 9 aa, synthetic construct
  source 1..9: note = Seed: VVGAVGVGK (KRAS G12V)
IVGAVPVGV

SEQ ID NO: 71884 - protein, 9 aa, synthetic construct
  source 1..9: note = Seed: VVGAVGVGK (KRAS G12V)
IVGAVPVGW

SEQ ID NO: 71885 - protein, 9 aa, synthetic construct
  source 1..9: note = Seed: VVGAVGVGK (KRAS G12V)
IVGAVPVGY

SEQ ID NO: 71886 - protein, 9 aa, synthetic construct
  source 1..9: note = Seed: VVGAVGVGK (KRAS G12V)
IVGAVQVGR

SEQ ID NO: 71887 - protein, 9 aa, synthetic construct
  source 1..9: note = Seed: VVGAVGVGK (KRAS G12V)
IVGAVRVGA

SEQ ID NO: 71888 - protein, 9 aa, synthetic construct
  source 1..9: note = Seed: VVGAVGVGK (KRAS G12V)
IVGAVRVGE

SEQ ID NO: 71889 - protein, 9 aa, synthetic construct
  source 1..9: note = Seed: VVGAVGVGK (KRAS G12V)
IVGAVRVGF

SEQ ID NO: 71890 - protein, 9 aa, synthetic construct
  source 1..9: note = Seed: VVGAVGVGK (KRAS G12V)
IVGAVRVGG

SEQ ID NO: 71891 - protein, 9 aa, synthetic construct
  source 1..9: note = Seed: VVGAVGVGK (KRAS G12V)
IVGAVRVGH

SEQ ID NO: 71892 - protein, 9 aa, synthetic construct
  source 1..9: note = Seed: VVGAVGVGK (KRAS G12V)
IVGAVRVGI

SEQ ID NO: 71893 - protein, 9 aa, synthetic construct
  source 1..9: note = Seed: VVGAVGVGK (KRAS G12V)
IVGAVRVGK

SEQ ID NO: 71894 - protein, 9 aa, synthetic construct
  source 1..9: note = Seed: VVGAVGVGK (KRAS G12V)
IVGAVRVGL

SEQ ID NO: 71895 - protein, 9 aa, synthetic construct
  source 1..9: note = Seed: VVGAVGVGK (KRAS G12V)
IVGAVRVGM

SEQ ID NO: 71896 - protein, 9 aa, synthetic construct
  source 1..9: note = Seed: VVGAVGVGK (KRAS G12V)
IVGAVRVGN

SEQ ID NO: 71897 - protein, 9 aa, synthetic construct
  source 1..9: note = Seed: VVGAVGVGK (KRAS G12V)
IVGAVRVGP

SEQ ID NO: 71898 - protein, 9 aa, synthetic construct
  source 1..9: note = Seed: VVGAVGVGK (KRAS G12V)
IVGAVRVGQ

SEQ ID NO: 71899 - protein, 9 aa, synthetic construct
  source 1..9: note = Seed: VVGAVGVGK (KRAS G12V)
IVGAVRVGR

SEQ ID NO: 71900 - protein, 9 aa, synthetic construct
  source 1..9: note = Seed: VVGAVGVGK (KRAS G12V)
IVGAVRVGS

SEQ ID NO: 71901 - protein, 9 aa, synthetic construct
  source 1..9: note = Seed: VVGAVGVGK (KRAS G12V)
IVGAVRVGT

SEQ ID NO: 71902 - protein, 9 aa, synthetic construct
  source 1..9: note = Seed: VVGAVGVGK (KRAS G12V)
IVGAVRVGV

SEQ ID NO: 71903 - protein, 9 aa, synthetic construct
  source 1..9: note = Seed: VVGAVGVGK (KRAS G12V)
IVGAVRVGY

SEQ ID NO: 71904 - protein, 9 aa, synthetic construct
  source 1..9: note = Seed: VVGAVGVGK (KRAS G12V)
IVGAVSVGA

SEQ ID NO: 71905 - protein, 9 aa, synthetic construct
  source 1..9: note = Seed: VVGAVGVGK (KRAS G12V)
IVGAVSVGH

SEQ ID NO: 71906 - protein, 9 aa, synthetic construct
  source 1..9: note = Seed: VVGAVGVGK (KRAS G12V)
IVGAVSVGI

SEQ ID NO: 71907 - protein, 9 aa, synthetic construct
  source 1..9: note = Seed: VVGAVGVGK (KRAS G12V)
IVGAVSVGK

SEQ ID NO: 71908 - protein, 9 aa, synthetic construct
  source 1..9: note = Seed: VVGAVGVGK (KRAS G12V)
IVGAVSVGL

SEQ ID NO: 71909 - protein, 9 aa, synthetic construct
  source 1..9: note = Seed: VVGAVGVGK (KRAS G12V)
IVGAVSVGM

SEQ ID NO: 71910 - protein, 9 aa, synthetic construct
  source 1..9: note = Seed: VVGAVGVGK (KRAS G12V)
IVGAVSVGR

SEQ ID NO: 71911 - protein, 9 aa, synthetic construct
  source 1..9: note = Seed: VVGAVGVGK (KRAS G12V)
IVGAVSVGS

SEQ ID NO: 71912 - protein, 9 aa, synthetic construct
  source 1..9: note = Seed: VVGAVGVGK (KRAS G12V)
IVGAVSVGT

SEQ ID NO: 71913 - protein, 9 aa, synthetic construct
  source 1..9: note = Seed: VVGAVGVGK (KRAS G12V)
IVGAVSVGV

SEQ ID NO: 71914 - protein, 9 aa, synthetic construct
  source 1..9: note = Seed: VVGAVGVGK (KRAS G12V)
IVGAVTVGA

SEQ ID NO: 71915 - protein, 9 aa, synthetic construct
  source 1..9: note = Seed: VVGAVGVGK (KRAS G12V)
IVGAVTVGR

SEQ ID NO: 71916 - protein, 9 aa, synthetic construct
  source 1..9: note = Seed: VVGAVGVGK (KRAS G12V)
IVGAVVVGR

SEQ ID NO: 71917 - protein, 9 aa, synthetic construct
  source 1..9: note = Seed: VVGAVGVGK (KRAS G12V)
IVGCVAVGA

SEQ ID NO: 71918 - protein, 9 aa, synthetic construct
  source 1..9: note = Seed: VVGAVGVGK (KRAS G12V)
IVGCVAVGS

SEQ ID NO: 71919 - protein, 9 aa, synthetic construct
  source 1..9: note = Seed: VVGAVGVGK (KRAS G12V)
IVGCVKVGA

SEQ ID NO: 71920 - protein, 9 aa, synthetic construct
  source 1..9: note = Seed: VVGAVGVGK (KRAS G12V)
IVGCVKVGG

SEQ ID NO: 71921 - protein, 9 aa, synthetic construct
  source 1..9: note = Seed: VVGAVGVGK (KRAS G12V)
IVGCVKVGH

SEQ ID NO: 71922 - protein, 9 aa, synthetic construct
  source 1..9: note = Seed: VVGAVGVGK (KRAS G12V)
IVGCVKVGK

SEQ ID NO: 71923 - protein, 9 aa, synthetic construct
  source 1..9: note = Seed: VVGAVGVGK (KRAS G12V)
IVGCVKVGQ

SEQ ID NO: 71924 - protein, 9 aa, synthetic construct
  source 1..9: note = Seed: VVGAVGVGK (KRAS G12V)
IVGCVKVGR

SEQ ID NO: 71925 - protein, 9 aa, synthetic construct
  source 1..9: note = Seed: VVGAVGVGK (KRAS G12V)
IVGCVKVGS

SEQ ID NO: 71926 - protein, 9 aa, synthetic construct
  source 1..9: note = Seed: VVGAVGVGK (KRAS G12V)
IVGCVKVGY

SEQ ID NO: 71927 - protein, 9 aa, synthetic construct
  source 1..9: note = Seed: VVGAVGVGK (KRAS G12V)
IVGCVPVGA

SEQ ID NO: 71928 - protein, 9 aa, synthetic construct
  source 1..9: note = Seed: VVGAVGVGK (KRAS G12V)
IVGCVRVGA

SEQ ID NO: 71929 - protein, 9 aa, synthetic construct
  source 1..9: note = Seed: VVGAVGVGK (KRAS G12V)
IVGCVRVGG

SEQ ID NO: 71930 - protein, 9 aa, synthetic construct
  source 1..9: note = Seed: VVGAVGVGK (KRAS G12V)
IVGCVRVGH

SEQ ID NO: 71931 - protein, 9 aa, synthetic construct
  source 1..9: note = Seed: VVGAVGVGK (KRAS G12V)
IVGCVRVGK

SEQ ID NO: 71932 - protein, 9 aa, synthetic construct
  source 1..9: note = Seed: VVGAVGVGK (KRAS G12V)
IVGCVRVGN

SEQ ID NO: 71933 - protein, 9 aa, synthetic construct
  source 1..9: note = Seed: VVGAVGVGK (KRAS G12V)
IVGCVRVGQ

SEQ ID NO: 71934 - protein, 9 aa, synthetic construct
  source 1..9: note = Seed: VVGAVGVGK (KRAS G12V)
IVGCVRVGR

SEQ ID NO: 71935 - protein, 9 aa, synthetic construct
  source 1..9: note = Seed: VVGAVGVGK (KRAS G12V)
IVGCVRVGS

SEQ ID NO: 71936 - protein, 9 aa, synthetic construct
  source 1..9: note = Seed: VVGAVGVGK (KRAS G12V)
IVGCVRVGT

SEQ ID NO: 71937 - protein, 9 aa, synthetic construct
  source 1..9: note = Seed: VVGAVGVGK (KRAS G12V)
IVGCVRVGY

SEQ ID NO: 71938 - protein, 9 aa, synthetic construct
  source 1..9: note = Seed: VVGAVGVGK (KRAS G12V)
IVGCVSVGA

SEQ ID NO: 71939 - protein, 9 aa, synthetic construct
  source 1..9: note = Seed: VVGAVGVGK (KRAS G12V)
IVGDVAVGR

SEQ ID NO: 71940 - protein, 9 aa, synthetic construct
  source 1..9: note = Seed: VVGAVGVGK (KRAS G12V)
IVGDVRVGR

SEQ ID NO: 71941 - protein, 9 aa, synthetic construct
  source 1..9: note = Seed: VVGAVGVGK (KRAS G12V)
IVGEVAVGA

SEQ ID NO: 71942 - protein, 9 aa, synthetic construct
  source 1..9: note = Seed: VVGAVGVGK (KRAS G12V)
IVGEVAVGI

SEQ ID NO: 71943 - protein, 9 aa, synthetic construct
  source 1..9: note = Seed: VVGAVGVGK (KRAS G12V)
IVGEVAVGL

SEQ ID NO: 71944 - protein, 9 aa, synthetic construct
  source 1..9: note = Seed: VVGAVGVGK (KRAS G12V)
IVGEVAVGM

SEQ ID NO: 71945 - protein, 9 aa, synthetic construct
  source 1..9: note = Seed: VVGAVGVGK (KRAS G12V)
IVGEVAVGS

SEQ ID NO: 71946 - protein, 9 aa, synthetic construct
  source 1..9: note = Seed: VVGAVGVGK (KRAS G12V)
IVGEVAVGT

SEQ ID NO: 71947 - protein, 9 aa, synthetic construct
  source 1..9: note = Seed: VVGAVGVGK (KRAS G12V)
IVGEVAVGV

SEQ ID NO: 71948 - protein, 9 aa, synthetic construct
  source 1..9: note = Seed: VVGAVGVGK (KRAS G12V)
IVGEVGVGA

SEQ ID NO: 71949 - protein, 9 aa, synthetic construct
  source 1..9: note = Seed: VVGAVGVGK (KRAS G12V)
IVGEVGVGL

SEQ ID NO: 71950 - protein, 9 aa, synthetic construct
  source 1..9: note = Seed: VVGAVGVGK (KRAS G12V)
IVGEVGVGV

SEQ ID NO: 71951 - protein, 9 aa, synthetic construct
  source 1..9: note = Seed: VVGAVGVGK (KRAS G12V)
IVGEVKVGH

SEQ ID NO: 71952 - protein, 9 aa, synthetic construct
  source 1..9: note = Seed: VVGAVGVGK (KRAS G12V)
IVGEVKVGR

SEQ ID NO: 71953 - protein, 9 aa, synthetic construct
  source 1..9: note = Seed: VVGAVGVGK (KRAS G12V)
IVGEVKVGY

SEQ ID NO: 71954 - protein, 9 aa, synthetic construct
  source 1..9: note = Seed: VVGAVGVGK (KRAS G12V)
IVGEVPVGA

SEQ ID NO: 71955 - protein, 9 aa, synthetic construct
  source 1..9: note = Seed: VVGAVGVGK (KRAS G12V)
IVGEVPVGI

SEQ ID NO: 71956 - protein, 9 aa, synthetic construct
  source 1..9: note = Seed: VVGAVGVGK (KRAS G12V)
IVGEVPVGL

SEQ ID NO: 71957 - protein, 9 aa, synthetic construct
  source 1..9: note = Seed: VVGAVGVGK (KRAS G12V)
IVGEVPVGV

SEQ ID NO: 71958 - protein, 9 aa, synthetic construct
  source 1..9: note = Seed: VVGAVGVGK (KRAS G12V)
IVGEVRVGH

SEQ ID NO: 71959 - protein, 9 aa, synthetic construct
  source 1..9: note = Seed: VVGAVGVGK (KRAS G12V)
IVGEVRVGK

SEQ ID NO: 71960 - protein, 9 aa, synthetic construct
  source 1..9: note = Seed: VVGAVGVGK (KRAS G12V)
IVGEVRVGR

SEQ ID NO: 71961 - protein, 9 aa, synthetic construct
  source 1..9: note = Seed: VVGAVGVGK (KRAS G12V)
IVGEVRVGS

SEQ ID NO: 71962 - protein, 9 aa, synthetic construct
  source 1..9: note = Seed: VVGAVGVGK (KRAS G12V)
IVGEVRVGY

SEQ ID NO: 71963 - protein, 9 aa, synthetic construct
  source 1..9: note = Seed: VVGAVGVGK (KRAS G12V)
IVGFVAVGK

SEQ ID NO: 71964 - protein, 9 aa, synthetic construct
  source 1..9: note = Seed: VVGAVGVGK (KRAS G12V)
IVGFVAVGR

SEQ ID NO: 71965 - protein, 9 aa, synthetic construct
  source 1..9: note = Seed: VVGAVGVGK (KRAS G12V)
IVGFVGVGK

SEQ ID NO: 71966 - protein, 9 aa, synthetic construct
  source 1..9: note = Seed: VVGAVGVGK (KRAS G12V)
IVGFVGVGR

SEQ ID NO: 71967 - protein, 9 aa, synthetic construct
  source 1..9: note = Seed: VVGAVGVGK (KRAS G12V)
IVGFVHVGK

SEQ ID NO: 71968 - protein, 9 aa, synthetic construct
  source 1..9: note = Seed: VVGAVGVGK (KRAS G12V)
IVGFVHVGR

SEQ ID NO: 71969 - protein, 9 aa, synthetic construct
  source 1..9: note = Seed: VVGAVGVGK (KRAS G12V)
IVGFVKVGA

SEQ ID NO: 71970 - protein, 9 aa, synthetic construct
  source 1..9: note = Seed: VVGAVGVGK (KRAS G12V)
IVGFVKVGG

SEQ ID NO: 71971 - protein, 9 aa, synthetic construct
  source 1..9: note = Seed: VVGAVGVGK (KRAS G12V)
IVGFVKVGH

SEQ ID NO: 71972 - protein, 9 aa, synthetic construct
  source 1..9: note = Seed: VVGAVGVGK (KRAS G12V)
IVGFVKVGK

SEQ ID NO: 71973 - protein, 9 aa, synthetic construct
  source 1..9: note = Seed: VVGAVGVGK (KRAS G12V)
IVGFVKVGN

SEQ ID NO: 71974 - protein, 9 aa, synthetic construct
  source 1..9: note = Seed: VVGAVGVGK (KRAS G12V)
IVGFVKVGQ

SEQ ID NO: 71975 - protein, 9 aa, synthetic construct
  source 1..9: note = Seed: VVGAVGVGK (KRAS G12V)
IVGFVKVGR

SEQ ID NO: 71976 - protein, 9 aa, synthetic construct
  source 1..9: note = Seed: VVGAVGVGK (KRAS G12V)
IVGFVKVGS

SEQ ID NO: 71977 - protein, 9 aa, synthetic construct
  source 1..9: note = Seed: VVGAVGVGK (KRAS G12V)
IVGFVKVGY

SEQ ID NO: 71978 - protein, 9 aa, synthetic construct
  source 1..9: note = Seed: VVGAVGVGK (KRAS G12V)
IVGFVNVGK

SEQ ID NO: 71979 - protein, 9 aa, synthetic construct
  source 1..9: note = Seed: VVGAVGVGK (KRAS G12V)
IVGFVNVGR

SEQ ID NO: 71980 - protein, 9 aa, synthetic construct
  source 1..9: note = Seed: VVGAVGVGK (KRAS G12V)
IVGFVPVGI

SEQ ID NO: 71981 - protein, 9 aa, synthetic construct
  source 1..9: note = Seed: VVGAVGVGK (KRAS G12V)
IVGFVPVGK

SEQ ID NO: 71982 - protein, 9 aa, synthetic construct
  source 1..9: note = Seed: VVGAVGVGK (KRAS G12V)
IVGFVPVGL

SEQ ID NO: 71983 - protein, 9 aa, synthetic construct
  source 1..9: note = Seed: VVGAVGVGK (KRAS G12V)
IVGFVPVGM

SEQ ID NO: 71984 - protein, 9 aa, synthetic construct
  source 1..9: note = Seed: VVGAVGVGK (KRAS G12V)
IVGFVPVGR

SEQ ID NO: 71985 - protein, 9 aa, synthetic construct
  source 1..9: note = Seed: VVGAVGVGK (KRAS G12V)
IVGFVPVGY

SEQ ID NO: 71986 - protein, 9 aa, synthetic construct
  source 1..9: note = Seed: VVGAVGVGK (KRAS G12V)
IVGFVRVGG

SEQ ID NO: 71987 - protein, 9 aa, synthetic construct
  source 1..9: note = Seed: VVGAVGVGK (KRAS G12V)
IVGFVRVGH

SEQ ID NO: 71988 - protein, 9 aa, synthetic construct
  source 1..9: note = Seed: VVGAVGVGK (KRAS G12V)
IVGFVRVGK

SEQ ID NO: 71989 - protein, 9 aa, synthetic construct
  source 1..9: note = Seed: VVGAVGVGK (KRAS G12V)
IVGFVRVGN

SEQ ID NO: 71990 - protein, 9 aa, synthetic construct
  source 1..9: note = Seed: VVGAVGVGK (KRAS G12V)
IVGFVRVGQ

SEQ ID NO: 71991 - protein, 9 aa, synthetic construct
  source 1..9: note = Seed: VVGAVGVGK (KRAS G12V)
IVGFVRVGR

SEQ ID NO: 71992 - protein, 9 aa, synthetic construct
  source 1..9: note = Seed: VVGAVGVGK (KRAS G12V)
IVGFVRVGS

SEQ ID NO: 71993 - protein, 9 aa, synthetic construct
  source 1..9: note = Seed: VVGAVGVGK (KRAS G12V)
IVGFVSVGK

SEQ ID NO: 71994 - protein, 9 aa, synthetic construct
  source 1..9: note = Seed: VVGAVGVGK (KRAS G12V)
IVGFVSVGR

SEQ ID NO: 71995 - protein, 9 aa, synthetic construct
  source 1..9: note = Seed: VVGAVGVGK (KRAS G12V)
IVGFVTVGR

SEQ ID NO: 71996 - protein, 9 aa, synthetic construct
  source 1..9: note = Seed: VVGAVGVGK (KRAS G12V)
IVGGVAVGA

SEQ ID NO: 71997 - protein, 9 aa, synthetic construct
  source 1..9: note = Seed: VVGAVGVGK (KRAS G12V)
IVGGVAVGI

SEQ ID NO: 71998 - protein, 9 aa, synthetic construct
  source 1..9: note = Seed: VVGAVGVGK (KRAS G12V)
IVGGVAVGL

SEQ ID NO: 71999 - protein, 9 aa, synthetic construct
  source 1..9: note = Seed: VVGAVGVGK (KRAS G12V)
IVGGVAVGM

SEQ ID NO: 72000 - protein, 9 aa, synthetic construct
  source 1..9: note = Seed: VVGAVGVGK (KRAS G12V)
IVGGVAVGR

SEQ ID NO: 72001 - protein, 9 aa, synthetic construct
  source 1..9: note = Seed: VVGAVGVGK (KRAS G12V)
IVGGVAVGS

SEQ ID NO: 72002 - protein, 9 aa, synthetic construct
  source 1..9: note = Seed: VVGAVGVGK (KRAS G12V)
IVGGVAVGT

SEQ ID NO: 72003 - protein, 9 aa, synthetic construct
  source 1..9: note = Seed: VVGAVGVGK (KRAS G12V)
IVGGVAVGV

SEQ ID NO: 72004 - protein, 9 aa, synthetic construct
  source 1..9: note = Seed: VVGAVGVGK (KRAS G12V)
IVGGVKVGK

SEQ ID NO: 72005 - protein, 9 aa, synthetic construct
  source 1..9: note = Seed: VVGAVGVGK (KRAS G12V)
IVGGVKVGR

SEQ ID NO: 72006 - protein, 9 aa, synthetic construct
  source 1..9: note = Seed: VVGAVGVGK (KRAS G12V)
IVGGVKVGY

SEQ ID NO: 72007 - protein, 9 aa, synthetic construct
  source 1..9: note = Seed: VVGAVGVGK (KRAS G12V)
IVGGVPVGA

SEQ ID NO: 72008 - protein, 9 aa, synthetic construct
  source 1..9: note = Seed: VVGAVGVGK (KRAS G12V)
IVGGVPVGF

SEQ ID NO: 72009 - protein, 9 aa, synthetic construct
  source 1..9: note = Seed: VVGAVGVGK (KRAS G12V)
IVGGVPVGH

SEQ ID NO: 72010 - protein, 9 aa, synthetic construct
  source 1..9: note = Seed: VVGAVGVGK (KRAS G12V)
IVGGVPVGI

SEQ ID NO: 72011 - protein, 9 aa, synthetic construct
  source 1..9: note = Seed: VVGAVGVGK (KRAS G12V)
IVGGVPVGK

SEQ ID NO: 72012 - protein, 9 aa, synthetic construct
  source 1..9: note = Seed: VVGAVGVGK (KRAS G12V)
IVGGVPVGL

SEQ ID NO: 72013 - protein, 9 aa, synthetic construct
  source 1..9: note = Seed: VVGAVGVGK (KRAS G12V)
IVGGVPVGM

SEQ ID NO: 72014 - protein, 9 aa, synthetic construct
  source 1..9: note = Seed: VVGAVGVGK (KRAS G12V)
IVGGVPVGN

SEQ ID NO: 72015 - protein, 9 aa, synthetic construct
  source 1..9: note = Seed: VVGAVGVGK (KRAS G12V)
IVGGVPVGQ

SEQ ID NO: 72016 - protein, 9 aa, synthetic construct
  source 1..9: note = Seed: VVGAVGVGK (KRAS G12V)
IVGGVPVGR

SEQ ID NO: 72017 - protein, 9 aa, synthetic construct
  source 1..9: note = Seed: VVGAVGVGK (KRAS G12V)
IVGGVPVGS

SEQ ID NO: 72018 - protein, 9 aa, synthetic construct
  source 1..9: note = Seed: VVGAVGVGK (KRAS G12V)
IVGGVPVGT

SEQ ID NO: 72019 - protein, 9 aa, synthetic construct
  source 1..9: note = Seed: VVGAVGVGK (KRAS G12V)
IVGGVPVGV

SEQ ID NO: 72020 - protein, 9 aa, synthetic construct
  source 1..9: note = Seed: VVGAVGVGK (KRAS G12V)
IVGGVPVGY

SEQ ID NO: 72021 - protein, 9 aa, synthetic construct
  source 1..9: note = Seed: VVGAVGVGK (KRAS G12V)
IVGGVRVGH

SEQ ID NO: 72022 - protein, 9 aa, synthetic construct
  source 1..9: note = Seed: VVGAVGVGK (KRAS G12V)
IVGGVRVGK

SEQ ID NO: 72023 - protein, 9 aa, synthetic construct
  source 1..9: note = Seed: VVGAVGVGK (KRAS G12V)
IVGGVRVGM

SEQ ID NO: 72024 - protein, 9 aa, synthetic construct
  source 1..9: note = Seed: VVGAVGVGK (KRAS G12V)
IVGGVRVGQ

SEQ ID NO: 72025 - protein, 9 aa, synthetic construct
  source 1..9: note = Seed: VVGAVGVGK (KRAS G12V)
IVGGVRVGR

SEQ ID NO: 72026 - protein, 9 aa, synthetic construct
  source 1..9: note = Seed: VVGAVGVGK (KRAS G12V)
IVGGVRVGY

SEQ ID NO: 72027 - protein, 9 aa, synthetic construct
  source 1..9: note = Seed: VVGAVGVGK (KRAS G12V)
IVGGVSVGA

SEQ ID NO: 72028 - protein, 9 aa, synthetic construct
  source 1..9: note = Seed: VVGAVGVGK (KRAS G12V)
IVGHVAVGA

SEQ ID NO: 72029 - protein, 9 aa, synthetic construct
  source 1..9: note = Seed: VVGAVGVGK (KRAS G12V)
IVGHVAVGF

SEQ ID NO: 72030 - protein, 9 aa, synthetic construct
  source 1..9: note = Seed: VVGAVGVGK (KRAS G12V)
IVGHVAVGH

SEQ ID NO: 72031 - protein, 9 aa, synthetic construct
  source 1..9: note = Seed: VVGAVGVGK (KRAS G12V)
IVGHVAVGI

SEQ ID NO: 72032 - protein, 9 aa, synthetic construct
  source 1..9: note = Seed: VVGAVGVGK (KRAS G12V)
IVGHVAVGK

SEQ ID NO: 72033 - protein, 9 aa, synthetic construct
  source 1..9: note = Seed: VVGAVGVGK (KRAS G12V)
IVGHVAVGL

SEQ ID NO: 72034 - protein, 9 aa, synthetic construct
  source 1..9: note = Seed: VVGAVGVGK (KRAS G12V)
IVGHVAVGM

SEQ ID NO: 72035 - protein, 9 aa, synthetic construct
  source 1..9: note = Seed: VVGAVGVGK (KRAS G12V)
IVGHVAVGR

SEQ ID NO: 72036 - protein, 9 aa, synthetic construct
  source 1..9: note = Seed: VVGAVGVGK (KRAS G12V)
IVGHVAVGV

SEQ ID NO: 72037 - protein, 9 aa, synthetic construct
  source 1..9: note = Seed: VVGAVGVGK (KRAS G12V)
IVGHVAVGY

SEQ ID NO: 72038 - protein, 9 aa, synthetic construct
  source 1..9: note = Seed: VVGAVGVGK (KRAS G12V)
IVGHVDVGR

SEQ ID NO: 72039 - protein, 9 aa, synthetic construct
  source 1..9: note = Seed: VVGAVGVGK (KRAS G12V)
IVGHVEVGR

SEQ ID NO: 72040 - protein, 9 aa, synthetic construct
  source 1..9: note = Seed: VVGAVGVGK (KRAS G12V)
IVGHVGVGH

SEQ ID NO: 72041 - protein, 9 aa, synthetic construct
  source 1..9: note = Seed: VVGAVGVGK (KRAS G12V)
IVGHVGVGK

SEQ ID NO: 72042 - protein, 9 aa, synthetic construct
  source 1..9: note = Seed: VVGAVGVGK (KRAS G12V)
IVGHVGVGL

SEQ ID NO: 72043 - protein, 9 aa, synthetic construct
  source 1..9: note = Seed: VVGAVGVGK (KRAS G12V)
IVGHVGVGM

SEQ ID NO: 72044 - protein, 9 aa, synthetic construct
  source 1..9: note = Seed: VVGAVGVGK (KRAS G12V)
IVGHVGVGR

SEQ ID NO: 72045 - protein, 9 aa, synthetic construct
  source 1..9: note = Seed: VVGAVGVGK (KRAS G12V)
IVGHVGVGY

SEQ ID NO: 72046 - protein, 9 aa, synthetic construct
  source 1..9: note = Seed: VVGAVGVGK (KRAS G12V)
IVGHVHVGA

SEQ ID NO: 72047 - protein, 9 aa, synthetic construct
  source 1..9: note = Seed: VVGAVGVGK (KRAS G12V)
IVGHVHVGF

SEQ ID NO: 72048 - protein, 9 aa, synthetic construct
  source 1..9: note = Seed: VVGAVGVGK (KRAS G12V)
IVGHVHVGH

SEQ ID NO: 72049 - protein, 9 aa, synthetic construct
  source 1..9: note = Seed: VVGAVGVGK (KRAS G12V)
IVGHVHVGI

SEQ ID NO: 72050 - protein, 9 aa, synthetic construct
  source 1..9: note = Seed: VVGAVGVGK (KRAS G12V)
IVGHVHVGK

SEQ ID NO: 72051 - protein, 9 aa, synthetic construct
  source 1..9: note = Seed: VVGAVGVGK (KRAS G12V)
IVGHVHVGL

SEQ ID NO: 72052 - protein, 9 aa, synthetic construct
  source 1..9: note = Seed: VVGAVGVGK (KRAS G12V)
IVGHVHVGM

SEQ ID NO: 72053 - protein, 9 aa, synthetic construct
  source 1..9: note = Seed: VVGAVGVGK (KRAS G12V)
IVGHVHVGR

SEQ ID NO: 72054 - protein, 9 aa, synthetic construct
  source 1..9: note = Seed: VVGAVGVGK (KRAS G12V)
IVGHVHVGS

SEQ ID NO: 72055 - protein, 9 aa, synthetic construct
  source 1..9: note = Seed: VVGAVGVGK (KRAS G12V)
IVGHVHVGV

SEQ ID NO: 72056 - protein, 9 aa, synthetic construct
  source 1..9: note = Seed: VVGAVGVGK (KRAS G12V)
IVGHVHVGY

SEQ ID NO: 72057 - protein, 9 aa, synthetic construct
  source 1..9: note = Seed: VVGAVGVGK (KRAS G12V)
IVGHVIVGK

SEQ ID NO: 72058 - protein, 9 aa, synthetic construct
  source 1..9: note = Seed: VVGAVGVGK (KRAS G12V)
IVGHVIVGR

SEQ ID NO: 72059 - protein, 9 aa, synthetic construct
  source 1..9: note = Seed: VVGAVGVGK (KRAS G12V)
IVGHVIVGY

SEQ ID NO: 72060 - protein, 9 aa, synthetic construct
  source 1..9: note = Seed: VVGAVGVGK (KRAS G12V)
IVGHVKVGA

SEQ ID NO: 72061 - protein, 9 aa, synthetic construct
  source 1..9: note = Seed: VVGAVGVGK (KRAS G12V)
IVGHVKVGF

SEQ ID NO: 72062 - protein, 9 aa, synthetic construct
  source 1..9: note = Seed: VVGAVGVGK (KRAS G12V)
IVGHVKVGG

SEQ ID NO: 72063 - protein, 9 aa, synthetic construct
  source 1..9: note = Seed: VVGAVGVGK (KRAS G12V)
IVGHVKVGH

SEQ ID NO: 72064 - protein, 9 aa, synthetic construct
  source 1..9: note = Seed: VVGAVGVGK (KRAS G12V)
IVGHVKVGI

SEQ ID NO: 72065 - protein, 9 aa, synthetic construct
  source 1..9: note = Seed: VVGAVGVGK (KRAS G12V)
IVGHVKVGK

SEQ ID NO: 72066 - protein, 9 aa, synthetic construct
  source 1..9: note = Seed: VVGAVGVGK (KRAS G12V)
IVGHVKVGL

SEQ ID NO: 72067 - protein, 9 aa, synthetic construct
  source 1..9: note = Seed: VVGAVGVGK (KRAS G12V)
IVGHVKVGM

SEQ ID NO: 72068 - protein, 9 aa, synthetic construct
  source 1..9: note = Seed: VVGAVGVGK (KRAS G12V)
IVGHVKVGN

SEQ ID NO: 72069 - protein, 9 aa, synthetic construct
  source 1..9: note = Seed: VVGAVGVGK (KRAS G12V)
IVGHVKVGP

SEQ ID NO: 72070 - protein, 9 aa, synthetic construct
  source 1..9: note = Seed: VVGAVGVGK (KRAS G12V)
IVGHVKVGQ

SEQ ID NO: 72071 - protein, 9 aa, synthetic construct
  source 1..9: note = Seed: VVGAVGVGK (KRAS G12V)
IVGHVKVGR

SEQ ID NO: 72072 - protein, 9 aa, synthetic construct
  source 1..9: note = Seed: VVGAVGVGK (KRAS G12V)
IVGHVKVGS

SEQ ID NO: 72073 - protein, 9 aa, synthetic construct
  source 1..9: note = Seed: VVGAVGVGK (KRAS G12V)
IVGHVKVGT

SEQ ID NO: 72074 - protein, 9 aa, synthetic construct
  source 1..9: note = Seed: VVGAVGVGK (KRAS G12V)
IVGHVKVGV

SEQ ID NO: 72075 - protein, 9 aa, synthetic construct
  source 1..9: note = Seed: VVGAVGVGK (KRAS G12V)
IVGHVKVGW

SEQ ID NO: 72076 - protein, 9 aa, synthetic construct
  source 1..9: note = Seed: VVGAVGVGK (KRAS G12V)
IVGHVKVGY

SEQ ID NO: 72077 - protein, 9 aa, synthetic construct
  source 1..9: note = Seed: VVGAVGVGK (KRAS G12V)
IVGHVLVGR

SEQ ID NO: 72078 - protein, 9 aa, synthetic construct
  source 1..9: note = Seed: VVGAVGVGK (KRAS G12V)
IVGHVMVGK

SEQ ID NO: 72079 - protein, 9 aa, synthetic construct
  source 1..9: note = Seed: VVGAVGVGK (KRAS G12V)
IVGHVMVGR

SEQ ID NO: 72080 - protein, 9 aa, synthetic construct
  source 1..9: note = Seed: VVGAVGVGK (KRAS G12V)
IVGHVNVGA

SEQ ID NO: 72081 - protein, 9 aa, synthetic construct
  source 1..9: note = Seed: VVGAVGVGK (KRAS G12V)
IVGHVNVGF

SEQ ID NO: 72082 - protein, 9 aa, synthetic construct
  source 1..9: note = Seed: VVGAVGVGK (KRAS G12V)
IVGHVNVGH

SEQ ID NO: 72083 - protein, 9 aa, synthetic construct
  source 1..9: note = Seed: VVGAVGVGK (KRAS G12V)
IVGHVNVGI

SEQ ID NO: 72084 - protein, 9 aa, synthetic construct
  source 1..9: note = Seed: VVGAVGVGK (KRAS G12V)
IVGHVNVGK

SEQ ID NO: 72085 - protein, 9 aa, synthetic construct
  source 1..9: note = Seed: VVGAVGVGK (KRAS G12V)
IVGHVNVGL

SEQ ID NO: 72086 - protein, 9 aa, synthetic construct
  source 1..9: note = Seed: VVGAVGVGK (KRAS G12V)
IVGHVNVGM

SEQ ID NO: 72087 - protein, 9 aa, synthetic construct
  source 1..9: note = Seed: VVGAVGVGK (KRAS G12V)
IVGHVNVGR

SEQ ID NO: 72088 - protein, 9 aa, synthetic construct
  source 1..9: note = Seed: VVGAVGVGK (KRAS G12V)
IVGHVNVGV

SEQ ID NO: 72089 - protein, 9 aa, synthetic construct
  source 1..9: note = Seed: VVGAVGVGK (KRAS G12V)
IVGHVNVGY

SEQ ID NO: 72090 - protein, 9 aa, synthetic construct
  source 1..9: note = Seed: VVGAVGVGK (KRAS G12V)
IVGHVPVGA

SEQ ID NO: 72091 - protein, 9 aa, synthetic construct
  source 1..9: note = Seed: VVGAVGVGK (KRAS G12V)
IVGHVPVGF

SEQ ID NO: 72092 - protein, 9 aa, synthetic construct
  source 1..9: note = Seed: VVGAVGVGK (KRAS G12V)
IVGHVPVGH

SEQ ID NO: 72093 - protein, 9 aa, synthetic construct
  source 1..9: note = Seed: VVGAVGVGK (KRAS G12V)
IVGHVPVGI

SEQ ID NO: 72094 - protein, 9 aa, synthetic construct
  source 1..9: note = Seed: VVGAVGVGK (KRAS G12V)
IVGHVPVGK

SEQ ID NO: 72095 - protein, 9 aa, synthetic construct
  source 1..9: note = Seed: VVGAVGVGK (KRAS G12V)
IVGHVPVGL

SEQ ID NO: 72096 - protein, 9 aa, synthetic construct
  source 1..9: note = Seed: VVGAVGVGK (KRAS G12V)
IVGHVPVGM

SEQ ID NO: 72097 - protein, 9 aa, synthetic construct
  source 1..9: note = Seed: VVGAVGVGK (KRAS G12V)
IVGHVPVGQ

SEQ ID NO: 72098 - protein, 9 aa, synthetic construct
  source 1..9: note = Seed: VVGAVGVGK (KRAS G12V)
IVGHVPVGR

SEQ ID NO: 72099 - protein, 9 aa, synthetic construct
  source 1..9: note = Seed: VVGAVGVGK (KRAS G12V)
IVGHVPVGS

SEQ ID NO: 72100 - protein, 9 aa, synthetic construct
  source 1..9: note = Seed: VVGAVGVGK (KRAS G12V)
IVGHVPVGT

SEQ ID NO: 72101 - protein, 9 aa, synthetic construct
  source 1..9: note = Seed: VVGAVGVGK (KRAS G12V)
IVGHVPVGV

SEQ ID NO: 72102 - protein, 9 aa, synthetic construct
  source 1..9: note = Seed: VVGAVGVGK (KRAS G12V)
IVGHVPVGW

SEQ ID NO: 72103 - protein, 9 aa, synthetic construct
  source 1..9: note = Seed: VVGAVGVGK (KRAS G12V)
IVGHVPVGY

SEQ ID NO: 72104 - protein, 9 aa, synthetic construct
  source 1..9: note = Seed: VVGAVGVGK (KRAS G12V)
IVGHVQVGK

SEQ ID NO: 72105 - protein, 9 aa, synthetic construct
  source 1..9: note = Seed: VVGAVGVGK (KRAS G12V)
IVGHVQVGR

SEQ ID NO: 72106 - protein, 9 aa, synthetic construct
  source 1..9: note = Seed: VVGAVGVGK (KRAS G12V)
IVGHVQVGY

SEQ ID NO: 72107 - protein, 9 aa, synthetic construct
  source 1..9: note = Seed: VVGAVGVGK (KRAS G12V)
IVGHVRVGA

SEQ ID NO: 72108 - protein, 9 aa, synthetic construct
  source 1..9: note = Seed: VVGAVGVGK (KRAS G12V)
IVGHVRVGE

SEQ ID NO: 72109 - protein, 9 aa, synthetic construct
  source 1..9: note = Seed: VVGAVGVGK (KRAS G12V)
IVGHVRVGF

SEQ ID NO: 72110 - protein, 9 aa, synthetic construct
  source 1..9: note = Seed: VVGAVGVGK (KRAS G12V)
IVGHVRVGG

SEQ ID NO: 72111 - protein, 9 aa, synthetic construct
  source 1..9: note = Seed: VVGAVGVGK (KRAS G12V)
IVGHVRVGH

SEQ ID NO: 72112 - protein, 9 aa, synthetic construct
  source 1..9: note = Seed: VVGAVGVGK (KRAS G12V)
IVGHVRVGI

SEQ ID NO: 72113 - protein, 9 aa, synthetic construct
  source 1..9: note = Seed: VVGAVGVGK (KRAS G12V)
IVGHVRVGK

SEQ ID NO: 72114 - protein, 9 aa, synthetic construct
  source 1..9: note = Seed: VVGAVGVGK (KRAS G12V)
IVGHVRVGL

SEQ ID NO: 72115 - protein, 9 aa, synthetic construct
  source 1..9: note = Seed: VVGAVGVGK (KRAS G12V)
IVGHVRVGM

SEQ ID NO: 72116 - protein, 9 aa, synthetic construct
  source 1..9: note = Seed: VVGAVGVGK (KRAS G12V)
IVGHVRVGN

SEQ ID NO: 72117 - protein, 9 aa, synthetic construct
  source 1..9: note = Seed: VVGAVGVGK (KRAS G12V)
IVGHVRVGP

SEQ ID NO: 72118 - protein, 9 aa, synthetic construct
  source 1..9: note = Seed: VVGAVGVGK (KRAS G12V)
IVGHVRVGQ

SEQ ID NO: 72119 - protein, 9 aa, synthetic construct
  source 1..9: note = Seed: VVGAVGVGK (KRAS G12V)
IVGHVRVGR

SEQ ID NO: 72120 - protein, 9 aa, synthetic construct
  source 1..9: note = Seed: VVGAVGVGK (KRAS G12V)
IVGHVRVGS

SEQ ID NO: 72121 - protein, 9 aa, synthetic construct
  source 1..9: note = Seed: VVGAVGVGK (KRAS G12V)
IVGHVRVGT

SEQ ID NO: 72122 - protein, 9 aa, synthetic construct
  source 1..9: note = Seed: VVGAVGVGK (KRAS G12V)
IVGHVRVGV

SEQ ID NO: 72123 - protein, 9 aa, synthetic construct
  source 1..9: note = Seed: VVGAVGVGK (KRAS G12V)
IVGHVRVGW

SEQ ID NO: 72124 - protein, 9 aa, synthetic construct
  source 1..9: note = Seed: VVGAVGVGK (KRAS G12V)
IVGHVRVGY

SEQ ID NO: 72125 - protein, 9 aa, synthetic construct
  source 1..9: note = Seed: VVGAVGVGK (KRAS G12V)
IVGHVSVGF

SEQ ID NO: 72126 - protein, 9 aa, synthetic construct
  source 1..9: note = Seed: VVGAVGVGK (KRAS G12V)
IVGHVSVGH

SEQ ID NO: 72127 - protein, 9 aa, synthetic construct
  source 1..9: note = Seed: VVGAVGVGK (KRAS G12V)
IVGHVSVGI

SEQ ID NO: 72128 - protein, 9 aa, synthetic construct
  source 1..9: note = Seed: VVGAVGVGK (KRAS G12V)
IVGHVSVGK

SEQ ID NO: 72129 - protein, 9 aa, synthetic construct
  source 1..9: note = Seed: VVGAVGVGK (KRAS G12V)
IVGHVSVGL

SEQ ID NO: 72130 - protein, 9 aa, synthetic construct
  source 1..9: note = Seed: VVGAVGVGK (KRAS G12V)
IVGHVSVGM

SEQ ID NO: 72131 - protein, 9 aa, synthetic construct
  source 1..9: note = Seed: VVGAVGVGK (KRAS G12V)
IVGHVSVGR

SEQ ID NO: 72132 - protein, 9 aa, synthetic construct
  source 1..9: note = Seed: VVGAVGVGK (KRAS G12V)
IVGHVSVGV

SEQ ID NO: 72133 - protein, 9 aa, synthetic construct
  source 1..9: note = Seed: VVGAVGVGK (KRAS G12V)
IVGHVSVGY

SEQ ID NO: 72134 - protein, 9 aa, synthetic construct
  source 1..9: note = Seed: VVGAVGVGK (KRAS G12V)
IVGHVTVGF

SEQ ID NO: 72135 - protein, 9 aa, synthetic construct
  source 1..9: note = Seed: VVGAVGVGK (KRAS G12V)
IVGHVTVGH

SEQ ID NO: 72136 - protein, 9 aa, synthetic construct
  source 1..9: note = Seed: VVGAVGVGK (KRAS G12V)
IVGHVTVGK

SEQ ID NO: 72137 - protein, 9 aa, synthetic construct
  source 1..9: note = Seed: VVGAVGVGK (KRAS G12V)
IVGHVTVGM

SEQ ID NO: 72138 - protein, 9 aa, synthetic construct
  source 1..9: note = Seed: VVGAVGVGK (KRAS G12V)
IVGHVTVGR

SEQ ID NO: 72139 - protein, 9 aa, synthetic construct
  source 1..9: note = Seed: VVGAVGVGK (KRAS G12V)
IVGHVTVGY

SEQ ID NO: 72140 - protein, 9 aa, synthetic construct
  source 1..9: note = Seed: VVGAVGVGK (KRAS G12V)
IVGHVVVGK

SEQ ID NO: 72141 - protein, 9 aa, synthetic construct
  source 1..9: note = Seed: VVGAVGVGK (KRAS G12V)
IVGHVVVGR

SEQ ID NO: 72142 - protein, 9 aa, synthetic construct
  source 1..9: note = Seed: VVGAVGVGK (KRAS G12V)
IVGHVVVGY

SEQ ID NO: 72143 - protein, 9 aa, synthetic construct
  source 1..9: note = Seed: VVGAVGVGK (KRAS G12V)
IVGIVAVGH

SEQ ID NO: 72144 - protein, 9 aa, synthetic construct
  source 1..9: note = Seed: VVGAVGVGK (KRAS G12V)
IVGIVAVGK

SEQ ID NO: 72145 - protein, 9 aa, synthetic construct
  source 1..9: note = Seed: VVGAVGVGK (KRAS G12V)
IVGIVAVGR

SEQ ID NO: 72146 - protein, 9 aa, synthetic construct
  source 1..9: note = Seed: VVGAVGVGK (KRAS G12V)
IVGIVGVGA

SEQ ID NO: 72147 - protein, 9 aa, synthetic construct
  source 1..9: note = Seed: VVGAVGVGK (KRAS G12V)
IVGIVGVGN

SEQ ID NO: 72148 - protein, 9 aa, synthetic construct
  source 1..9: note = Seed: VVGAVGVGK (KRAS G12V)
IVGIVGVGR

SEQ ID NO: 72149 - protein, 9 aa, synthetic construct
  source 1..9: note = Seed: VVGAVGVGK (KRAS G12V)
IVGIVGVGS

SEQ ID NO: 72150 - protein, 9 aa, synthetic construct
  source 1..9: note = Seed: VVGAVGVGK (KRAS G12V)
IVGIVHVGH

SEQ ID NO: 72151 - protein, 9 aa, synthetic construct
  source 1..9: note = Seed: VVGAVGVGK (KRAS G12V)
IVGIVHVGK

SEQ ID NO: 72152 - protein, 9 aa, synthetic construct
  source 1..9: note = Seed: VVGAVGVGK (KRAS G12V)
IVGIVHVGR

SEQ ID NO: 72153 - protein, 9 aa, synthetic construct
  source 1..9: note = Seed: VVGAVGVGK (KRAS G12V)
IVGIVIVGR

SEQ ID NO: 72154 - protein, 9 aa, synthetic construct
  source 1..9: note = Seed: VVGAVGVGK (KRAS G12V)
IVGIVKVGA

SEQ ID NO: 72155 - protein, 9 aa, synthetic construct
  source 1..9: note = Seed: VVGAVGVGK (KRAS G12V)
IVGIVKVGE

SEQ ID NO: 72156 - protein, 9 aa, synthetic construct
  source 1..9: note = Seed: VVGAVGVGK (KRAS G12V)
IVGIVKVGG

SEQ ID NO: 72157 - protein, 9 aa, synthetic construct
  source 1..9: note = Seed: VVGAVGVGK (KRAS G12V)
IVGIVKVGH

SEQ ID NO: 72158 - protein, 9 aa, synthetic construct
  source 1..9: note = Seed: VVGAVGVGK (KRAS G12V)
IVGIVKVGK

SEQ ID NO: 72159 - protein, 9 aa, synthetic construct
  source 1..9: note = Seed: VVGAVGVGK (KRAS G12V)
IVGIVKVGM

SEQ ID NO: 72160 - protein, 9 aa, synthetic construct
  source 1..9: note = Seed: VVGAVGVGK (KRAS G12V)
IVGIVKVGN

SEQ ID NO: 72161 - protein, 9 aa, synthetic construct
  source 1..9: note = Seed: VVGAVGVGK (KRAS G12V)
IVGIVKVGP

SEQ ID NO: 72162 - protein, 9 aa, synthetic construct
  source 1..9: note = Seed: VVGAVGVGK (KRAS G12V)
IVGIVKVGQ

SEQ ID NO: 72163 - protein, 9 aa, synthetic construct
  source 1..9: note = Seed: VVGAVGVGK (KRAS G12V)
IVGIVKVGR

SEQ ID NO: 72164 - protein, 9 aa, synthetic construct
  source 1..9: note = Seed: VVGAVGVGK (KRAS G12V)
IVGIVKVGS

SEQ ID NO: 72165 - protein, 9 aa, synthetic construct
  source 1..9: note = Seed: VVGAVGVGK (KRAS G12V)
IVGIVKVGT

SEQ ID NO: 72166 - protein, 9 aa, synthetic construct
  source 1..9: note = Seed: VVGAVGVGK (KRAS G12V)
IVGIVKVGV

SEQ ID NO: 72167 - protein, 9 aa, synthetic construct
  source 1..9: note = Seed: VVGAVGVGK (KRAS G12V)
IVGIVKVGY

SEQ ID NO: 72168 - protein, 9 aa, synthetic construct
  source 1..9: note = Seed: VVGAVGVGK (KRAS G12V)
IVGIVLVGR

SEQ ID NO: 72169 - protein, 9 aa, synthetic construct
  source 1..9: note = Seed: VVGAVGVGK (KRAS G12V)
IVGIVNVGK

SEQ ID NO: 72170 - protein, 9 aa, synthetic construct
  source 1..9: note = Seed: VVGAVGVGK (KRAS G12V)
IVGIVNVGR

SEQ ID NO: 72171 - protein, 9 aa, synthetic construct
  source 1..9: note = Seed: VVGAVGVGK (KRAS G12V)
IVGIVPVGH

SEQ ID NO: 72172 - protein, 9 aa, synthetic construct
  source 1..9: note = Seed: VVGAVGVGK (KRAS G12V)
IVGIVPVGI

SEQ ID NO: 72173 - protein, 9 aa, synthetic construct
  source 1..9: note = Seed: VVGAVGVGK (KRAS G12V)
IVGIVPVGK

SEQ ID NO: 72174 - protein, 9 aa, synthetic construct
  source 1..9: note = Seed: VVGAVGVGK (KRAS G12V)
IVGIVPVGL

SEQ ID NO: 72175 - protein, 9 aa, synthetic construct
  source 1..9: note = Seed: VVGAVGVGK (KRAS G12V)
IVGIVPVGM

SEQ ID NO: 72176 - protein, 9 aa, synthetic construct
  source 1..9: note = Seed: VVGAVGVGK (KRAS G12V)
IVGIVPVGR

SEQ ID NO: 72177 - protein, 9 aa, synthetic construct
  source 1..9: note = Seed: VVGAVGVGK (KRAS G12V)
IVGIVPVGT

SEQ ID NO: 72178 - protein, 9 aa, synthetic construct
  source 1..9: note = Seed: VVGAVGVGK (KRAS G12V)
IVGIVPVGV

SEQ ID NO: 72179 - protein, 9 aa, synthetic construct
  source 1..9: note = Seed: VVGAVGVGK (KRAS G12V)
IVGIVPVGY

SEQ ID NO: 72180 - protein, 9 aa, synthetic construct
  source 1..9: note = Seed: VVGAVGVGK (KRAS G12V)
IVGIVQVGR

SEQ ID NO: 72181 - protein, 9 aa, synthetic construct
  source 1..9: note = Seed: VVGAVGVGK (KRAS G12V)
IVGIVRVGA

SEQ ID NO: 72182 - protein, 9 aa, synthetic construct
  source 1..9: note = Seed: VVGAVGVGK (KRAS G12V)
IVGIVRVGE

SEQ ID NO: 72183 - protein, 9 aa, synthetic construct
  source 1..9: note = Seed: VVGAVGVGK (KRAS G12V)
IVGIVRVGG

SEQ ID NO: 72184 - protein, 9 aa, synthetic construct
  source 1..9: note = Seed: VVGAVGVGK (KRAS G12V)
IVGIVRVGH

SEQ ID NO: 72185 - protein, 9 aa, synthetic construct
  source 1..9: note = Seed: VVGAVGVGK (KRAS G12V)
IVGIVRVGK

SEQ ID NO: 72186 - protein, 9 aa, synthetic construct
  source 1..9: note = Seed: VVGAVGVGK (KRAS G12V)
IVGIVRVGM

SEQ ID NO: 72187 - protein, 9 aa, synthetic construct
  source 1..9: note = Seed: VVGAVGVGK (KRAS G12V)
IVGIVRVGN

SEQ ID NO: 72188 - protein, 9 aa, synthetic construct
  source 1..9: note = Seed: VVGAVGVGK (KRAS G12V)
IVGIVRVGP

SEQ ID NO: 72189 - protein, 9 aa, synthetic construct
  source 1..9: note = Seed: VVGAVGVGK (KRAS G12V)
IVGIVRVGQ

SEQ ID NO: 72190 - protein, 9 aa, synthetic construct
  source 1..9: note = Seed: VVGAVGVGK (KRAS G12V)
IVGIVRVGR

SEQ ID NO: 72191 - protein, 9 aa, synthetic construct
  source 1..9: note = Seed: VVGAVGVGK (KRAS G12V)
IVGIVRVGS

SEQ ID NO: 72192 - protein, 9 aa, synthetic construct
  source 1..9: note = Seed: VVGAVGVGK (KRAS G12V)
IVGIVRVGT

SEQ ID NO: 72193 - protein, 9 aa, synthetic construct
  source 1..9: note = Seed: VVGAVGVGK (KRAS G12V)
IVGIVRVGY

SEQ ID NO: 72194 - protein, 9 aa, synthetic construct
  source 1..9: note = Seed: VVGAVGVGK (KRAS G12V)
IVGIVSVGK

SEQ ID NO: 72195 - protein, 9 aa, synthetic construct
  source 1..9: note = Seed: VVGAVGVGK (KRAS G12V)
IVGIVSVGR

SEQ ID NO: 72196 - protein, 9 aa, synthetic construct
  source 1..9: note = Seed: VVGAVGVGK (KRAS G12V)
IVGIVTVGK

SEQ ID NO: 72197 - protein, 9 aa, synthetic construct
  source 1..9: note = Seed: VVGAVGVGK (KRAS G12V)
IVGIVTVGR

SEQ ID NO: 72198 - protein, 9 aa, synthetic construct
  source 1..9: note = Seed: VVGAVGVGK (KRAS G12V)
IVGIVVVGR

SEQ ID NO: 72199 - protein, 9 aa, synthetic construct
  source 1..9: note = Seed: VVGAVGVGK (KRAS G12V)
IVGKVAVGH

SEQ ID NO: 72200 - protein, 9 aa, synthetic construct
  source 1..9: note = Seed: VVGAVGVGK (KRAS G12V)
IVGKVAVGK

SEQ ID NO: 72201 - protein, 9 aa, synthetic construct
  source 1..9: note = Seed: VVGAVGVGK (KRAS G12V)
IVGKVAVGR

SEQ ID NO: 72202 - protein, 9 aa, synthetic construct
  source 1..9: note = Seed: VVGAVGVGK (KRAS G12V)
IVGKVAVGY

SEQ ID NO: 72203 - protein, 9 aa, synthetic construct
  source 1..9: note = Seed: VVGAVGVGK (KRAS G12V)
IVGKVDVGR

SEQ ID NO: 72204 - protein, 9 aa, synthetic construct
  source 1..9: note = Seed: VVGAVGVGK (KRAS G12V)
IVGKVEVGR

SEQ ID NO: 72205 - protein, 9 aa, synthetic construct
  source 1..9: note = Seed: VVGAVGVGK (KRAS G12V)
IVGKVGVGR

SEQ ID NO: 72206 - protein, 9 aa, synthetic construct
  source 1..9: note = Seed: VVGAVGVGK (KRAS G12V)
IVGKVGVGY

SEQ ID NO: 72207 - protein, 9 aa, synthetic construct
  source 1..9: note = Seed: VVGAVGVGK (KRAS G12V)
IVGKVHVGA

SEQ ID NO: 72208 - protein, 9 aa, synthetic construct
  source 1..9: note = Seed: VVGAVGVGK (KRAS G12V)
IVGKVHVGF

SEQ ID NO: 72209 - protein, 9 aa, synthetic construct
  source 1..9: note = Seed: VVGAVGVGK (KRAS G12V)
IVGKVHVGK

SEQ ID NO: 72210 - protein, 9 aa, synthetic construct
  source 1..9: note = Seed: VVGAVGVGK (KRAS G12V)
IVGKVHVGL

SEQ ID NO: 72211 - protein, 9 aa, synthetic construct
  source 1..9: note = Seed: VVGAVGVGK (KRAS G12V)
IVGKVHVGM

SEQ ID NO: 72212 - protein, 9 aa, synthetic construct
  source 1..9: note = Seed: VVGAVGVGK (KRAS G12V)
IVGKVHVGQ

SEQ ID NO: 72213 - protein, 9 aa, synthetic construct
  source 1..9: note = Seed: VVGAVGVGK (KRAS G12V)
IVGKVHVGR

SEQ ID NO: 72214 - protein, 9 aa, synthetic construct
  source 1..9: note = Seed: VVGAVGVGK (KRAS G12V)
IVGKVHVGS

SEQ ID NO: 72215 - protein, 9 aa, synthetic construct
  source 1..9: note = Seed: VVGAVGVGK (KRAS G12V)
IVGKVHVGY

SEQ ID NO: 72216 - protein, 9 aa, synthetic construct
  source 1..9: note = Seed: VVGAVGVGK (KRAS G12V)
IVGKVIVGR

SEQ ID NO: 72217 - protein, 9 aa, synthetic construct
  source 1..9: note = Seed: VVGAVGVGK (KRAS G12V)
IVGKVKVGA

SEQ ID NO: 72218 - protein, 9 aa, synthetic construct
  source 1..9: note = Seed: VVGAVGVGK (KRAS G12V)
IVGKVKVGC

SEQ ID NO: 72219 - protein, 9 aa, synthetic construct
  source 1..9: note = Seed: VVGAVGVGK (KRAS G12V)
IVGKVKVGD

SEQ ID NO: 72220 - protein, 9 aa, synthetic construct
  source 1..9: note = Seed: VVGAVGVGK (KRAS G12V)
IVGKVKVGE

SEQ ID NO: 72221 - protein, 9 aa, synthetic construct
  source 1..9: note = Seed: VVGAVGVGK (KRAS G12V)
IVGKVKVGF

SEQ ID NO: 72222 - protein, 9 aa, synthetic construct
  source 1..9: note = Seed: VVGAVGVGK (KRAS G12V)
IVGKVKVGG

SEQ ID NO: 72223 - protein, 9 aa, synthetic construct
  source 1..9: note = Seed: VVGAVGVGK (KRAS G12V)
IVGKVKVGH

SEQ ID NO: 72224 - protein, 9 aa, synthetic construct
  source 1..9: note = Seed: VVGAVGVGK (KRAS G12V)
IVGKVKVGI

SEQ ID NO: 72225 - protein, 9 aa, synthetic construct
  source 1..9: note = Seed: VVGAVGVGK (KRAS G12V)
IVGKVKVGK

SEQ ID NO: 72226 - protein, 9 aa, synthetic construct
  source 1..9: note = Seed: VVGAVGVGK (KRAS G12V)
IVGKVKVGL

SEQ ID NO: 72227 - protein, 9 aa, synthetic construct
  source 1..9: note = Seed: VVGAVGVGK (KRAS G12V)
IVGKVKVGM

SEQ ID NO: 72228 - protein, 9 aa, synthetic construct
  source 1..9: note = Seed: VVGAVGVGK (KRAS G12V)
IVGKVKVGN

SEQ ID NO: 72229 - protein, 9 aa, synthetic construct
  source 1..9: note = Seed: VVGAVGVGK (KRAS G12V)
IVGKVKVGP

SEQ ID NO: 72230 - protein, 9 aa, synthetic construct
  source 1..9: note = Seed: VVGAVGVGK (KRAS G12V)
IVGKVKVGQ

SEQ ID NO: 72231 - protein, 9 aa, synthetic construct
  source 1..9: note = Seed: VVGAVGVGK (KRAS G12V)
IVGKVKVGR

SEQ ID NO: 72232 - protein, 9 aa, synthetic construct
  source 1..9: note = Seed: VVGAVGVGK (KRAS G12V)
IVGKVKVGS

SEQ ID NO: 72233 - protein, 9 aa, synthetic construct
  source 1..9: note = Seed: VVGAVGVGK (KRAS G12V)
IVGKVKVGT

SEQ ID NO: 72234 - protein, 9 aa, synthetic construct
  source 1..9: note = Seed: VVGAVGVGK (KRAS G12V)
IVGKVKVGV

SEQ ID NO: 72235 - protein, 9 aa, synthetic construct
  source 1..9: note = Seed: VVGAVGVGK (KRAS G12V)
IVGKVKVGY

SEQ ID NO: 72236 - protein, 9 aa, synthetic construct
  source 1..9: note = Seed: VVGAVGVGK (KRAS G12V)
IVGKVLVGR

SEQ ID NO: 72237 - protein, 9 aa, synthetic construct
  source 1..9: note = Seed: VVGAVGVGK (KRAS G12V)
IVGKVMVGR

SEQ ID NO: 72238 - protein, 9 aa, synthetic construct
  source 1..9: note = Seed: VVGAVGVGK (KRAS G12V)
IVGKVNVGF

SEQ ID NO: 72239 - protein, 9 aa, synthetic construct
  source 1..9: note = Seed: VVGAVGVGK (KRAS G12V)
IVGKVNVGH

SEQ ID NO: 72240 - protein, 9 aa, synthetic construct
  source 1..9: note = Seed: VVGAVGVGK (KRAS G12V)
IVGKVNVGK

SEQ ID NO: 72241 - protein, 9 aa, synthetic construct
  source 1..9: note = Seed: VVGAVGVGK (KRAS G12V)
IVGKVNVGR

SEQ ID NO: 72242 - protein, 9 aa, synthetic construct
  source 1..9: note = Seed: VVGAVGVGK (KRAS G12V)
IVGKVNVGY

SEQ ID NO: 72243 - protein, 9 aa, synthetic construct
  source 1..9: note = Seed: VVGAVGVGK (KRAS G12V)
IVGKVPVGR

SEQ ID NO: 72244 - protein, 9 aa, synthetic construct
  source 1..9: note = Seed: VVGAVGVGK (KRAS G12V)
IVGKVPVGY

SEQ ID NO: 72245 - protein, 9 aa, synthetic construct
  source 1..9: note = Seed: VVGAVGVGK (KRAS G12V)
IVGKVQVGH

SEQ ID NO: 72246 - protein, 9 aa, synthetic construct
  source 1..9: note = Seed: VVGAVGVGK (KRAS G12V)
IVGKVQVGK

SEQ ID NO: 72247 - protein, 9 aa, synthetic construct
  source 1..9: note = Seed: VVGAVGVGK (KRAS G12V)
IVGKVQVGR

SEQ ID NO: 72248 - protein, 9 aa, synthetic construct
  source 1..9: note = Seed: VVGAVGVGK (KRAS G12V)
IVGKVRVGA

SEQ ID NO: 72249 - protein, 9 aa, synthetic construct
  source 1..9: note = Seed: VVGAVGVGK (KRAS G12V)
IVGKVRVGC

SEQ ID NO: 72250 - protein, 9 aa, synthetic construct
  source 1..9: note = Seed: VVGAVGVGK (KRAS G12V)
IVGKVRVGD

SEQ ID NO: 72251 - protein, 9 aa, synthetic construct
  source 1..9: note = Seed: VVGAVGVGK (KRAS G12V)
IVGKVRVGE

SEQ ID NO: 72252 - protein, 9 aa, synthetic construct
  source 1..9: note = Seed: VVGAVGVGK (KRAS G12V)
IVGKVRVGF

SEQ ID NO: 72253 - protein, 9 aa, synthetic construct
  source 1..9: note = Seed: VVGAVGVGK (KRAS G12V)
IVGKVRVGG

SEQ ID NO: 72254 - protein, 9 aa, synthetic construct
  source 1..9: note = Seed: VVGAVGVGK (KRAS G12V)
IVGKVRVGH

SEQ ID NO: 72255 - protein, 9 aa, synthetic construct
  source 1..9: note = Seed: VVGAVGVGK (KRAS G12V)
IVGKVRVGI

SEQ ID NO: 72256 - protein, 9 aa, synthetic construct
  source 1..9: note = Seed: VVGAVGVGK (KRAS G12V)
IVGKVRVGK

SEQ ID NO: 72257 - protein, 9 aa, synthetic construct
  source 1..9: note = Seed: VVGAVGVGK (KRAS G12V)
IVGKVRVGL

SEQ ID NO: 72258 - protein, 9 aa, synthetic construct
  source 1..9: note = Seed: VVGAVGVGK (KRAS G12V)
IVGKVRVGM

SEQ ID NO: 72259 - protein, 9 aa, synthetic construct
  source 1..9: note = Seed: VVGAVGVGK (KRAS G12V)
IVGKVRVGN

SEQ ID NO: 72260 - protein, 9 aa, synthetic construct
  source 1..9: note = Seed: VVGAVGVGK (KRAS G12V)
IVGKVRVGP

SEQ ID NO: 72261 - protein, 9 aa, synthetic construct
  source 1..9: note = Seed: VVGAVGVGK (KRAS G12V)
IVGKVRVGQ

SEQ ID NO: 72262 - protein, 9 aa, synthetic construct
  source 1..9: note = Seed: VVGAVGVGK (KRAS G12V)
IVGKVRVGR

SEQ ID NO: 72263 - protein, 9 aa, synthetic construct
  source 1..9: note = Seed: VVGAVGVGK (KRAS G12V)
IVGKVRVGS

SEQ ID NO: 72264 - protein, 9 aa, synthetic construct
  source 1..9: note = Seed: VVGAVGVGK (KRAS G12V)
IVGKVRVGT

SEQ ID NO: 72265 - protein, 9 aa, synthetic construct
  source 1..9: note = Seed: VVGAVGVGK (KRAS G12V)
IVGKVRVGV

SEQ ID NO: 72266 - protein, 9 aa, synthetic construct
  source 1..9: note = Seed: VVGAVGVGK (KRAS G12V)
IVGKVRVGY

SEQ ID NO: 72267 - protein, 9 aa, synthetic construct
  source 1..9: note = Seed: VVGAVGVGK (KRAS G12V)
IVGKVSVGH

SEQ ID NO: 72268 - protein, 9 aa, synthetic construct
  source 1..9: note = Seed: VVGAVGVGK (KRAS G12V)
IVGKVSVGK

SEQ ID NO: 72269 - protein, 9 aa, synthetic construct
  source 1..9: note = Seed: VVGAVGVGK (KRAS G12V)
IVGKVSVGR

SEQ ID NO: 72270 - protein, 9 aa, synthetic construct
  source 1..9: note = Seed: VVGAVGVGK (KRAS G12V)
IVGKVSVGY

SEQ ID NO: 72271 - protein, 9 aa, synthetic construct
  source 1..9: note = Seed: VVGAVGVGK (KRAS G12V)
IVGKVTVGH

SEQ ID NO: 72272 - protein, 9 aa, synthetic construct
  source 1..9: note = Seed: VVGAVGVGK (KRAS G12V)
IVGKVTVGK

SEQ ID NO: 72273 - protein, 9 aa, synthetic construct
  source 1..9: note = Seed: VVGAVGVGK (KRAS G12V)
IVGKVTVGR

SEQ ID NO: 72274 - protein, 9 aa, synthetic construct
  source 1..9: note = Seed: VVGAVGVGK (KRAS G12V)
IVGKVTVGY

SEQ ID NO: 72275 - protein, 9 aa, synthetic construct
  source 1..9: note = Seed: VVGAVGVGK (KRAS G12V)
IVGKVVVGK

SEQ ID NO: 72276 - protein, 9 aa, synthetic construct
  source 1..9: note = Seed: VVGAVGVGK (KRAS G12V)
IVGKVVVGR

SEQ ID NO: 72277 - protein, 9 aa, synthetic construct
  source 1..9: note = Seed: VVGAVGVGK (KRAS G12V)
IVGLVAVGA

SEQ ID NO: 72278 - protein, 9 aa, synthetic construct
  source 1..9: note = Seed: VVGAVGVGK (KRAS G12V)
IVGLVAVGH

SEQ ID NO: 72279 - protein, 9 aa, synthetic construct
  source 1..9: note = Seed: VVGAVGVGK (KRAS G12V)
IVGLVAVGK

SEQ ID NO: 72280 - protein, 9 aa, synthetic construct
  source 1..9: note = Seed: VVGAVGVGK (KRAS G12V)
IVGLVAVGM

SEQ ID NO: 72281 - protein, 9 aa, synthetic construct
  source 1..9: note = Seed: VVGAVGVGK (KRAS G12V)
IVGLVAVGN

SEQ ID NO: 72282 - protein, 9 aa, synthetic construct
  source 1..9: note = Seed: VVGAVGVGK (KRAS G12V)
IVGLVAVGR

SEQ ID NO: 72283 - protein, 9 aa, synthetic construct
  source 1..9: note = Seed: VVGAVGVGK (KRAS G12V)
IVGLVAVGS

SEQ ID NO: 72284 - protein, 9 aa, synthetic construct
  source 1..9: note = Seed: VVGAVGVGK (KRAS G12V)
IVGLVAVGT

SEQ ID NO: 72285 - protein, 9 aa, synthetic construct
  source 1..9: note = Seed: VVGAVGVGK (KRAS G12V)
IVGLVAVGV

SEQ ID NO: 72286 - protein, 9 aa, synthetic construct
  source 1..9: note = Seed: VVGAVGVGK (KRAS G12V)
IVGLVGVGA

SEQ ID NO: 72287 - protein, 9 aa, synthetic construct
  source 1..9: note = Seed: VVGAVGVGK (KRAS G12V)
IVGLVGVGG

SEQ ID NO: 72288 - protein, 9 aa, synthetic construct
  source 1..9: note = Seed: VVGAVGVGK (KRAS G12V)
IVGLVGVGH

SEQ ID NO: 72289 - protein, 9 aa, synthetic construct
  source 1..9: note = Seed: VVGAVGVGK (KRAS G12V)
IVGLVGVGK

SEQ ID NO: 72290 - protein, 9 aa, synthetic construct
  source 1..9: note = Seed: VVGAVGVGK (KRAS G12V)
IVGLVGVGL

SEQ ID NO: 72291 - protein, 9 aa, synthetic construct
  source 1..9: note = Seed: VVGAVGVGK (KRAS G12V)
IVGLVGVGM

SEQ ID NO: 72292 - protein, 9 aa, synthetic construct
  source 1..9: note = Seed: VVGAVGVGK (KRAS G12V)
IVGLVGVGN

SEQ ID NO: 72293 - protein, 9 aa, synthetic construct
  source 1..9: note = Seed: VVGAVGVGK (KRAS G12V)
IVGLVGVGP

SEQ ID NO: 72294 - protein, 9 aa, synthetic construct
  source 1..9: note = Seed: VVGAVGVGK (KRAS G12V)
IVGLVGVGR

SEQ ID NO: 72295 - protein, 9 aa, synthetic construct
  source 1..9: note = Seed: VVGAVGVGK (KRAS G12V)
IVGLVGVGS

SEQ ID NO: 72296 - protein, 9 aa, synthetic construct
  source 1..9: note = Seed: VVGAVGVGK (KRAS G12V)
IVGLVGVGT

SEQ ID NO: 72297 - protein, 9 aa, synthetic construct
  source 1..9: note = Seed: VVGAVGVGK (KRAS G12V)
IVGLVGVGV

SEQ ID NO: 72298 - protein, 9 aa, synthetic construct
  source 1..9: note = Seed: VVGAVGVGK (KRAS G12V)
IVGLVHVGH

SEQ ID NO: 72299 - protein, 9 aa, synthetic construct
  source 1..9: note = Seed: VVGAVGVGK (KRAS G12V)
IVGLVHVGK

SEQ ID NO: 72300 - protein, 9 aa, synthetic construct
  source 1..9: note = Seed: VVGAVGVGK (KRAS G12V)
IVGLVHVGR

SEQ ID NO: 72301 - protein, 9 aa, synthetic construct
  source 1..9: note = Seed: VVGAVGVGK (KRAS G12V)
IVGLVIVGR

SEQ ID NO: 72302 - protein, 9 aa, synthetic construct
  source 1..9: note = Seed: VVGAVGVGK (KRAS G12V)
IVGLVKVGA

SEQ ID NO: 72303 - protein, 9 aa, synthetic construct
  source 1..9: note = Seed: VVGAVGVGK (KRAS G12V)
IVGLVKVGE

SEQ ID NO: 72304 - protein, 9 aa, synthetic construct
  source 1..9: note = Seed: VVGAVGVGK (KRAS G12V)
IVGLVKVGG

SEQ ID NO: 72305 - protein, 9 aa, synthetic construct
  source 1..9: note = Seed: VVGAVGVGK (KRAS G12V)
IVGLVKVGH

SEQ ID NO: 72306 - protein, 9 aa, synthetic construct
  source 1..9: note = Seed: VVGAVGVGK (KRAS G12V)
IVGLVKVGK

SEQ ID NO: 72307 - protein, 9 aa, synthetic construct
  source 1..9: note = Seed: VVGAVGVGK (KRAS G12V)
IVGLVKVGM

SEQ ID NO: 72308 - protein, 9 aa, synthetic construct
  source 1..9: note = Seed: VVGAVGVGK (KRAS G12V)
IVGLVKVGN

SEQ ID NO: 72309 - protein, 9 aa, synthetic construct
  source 1..9: note = Seed: VVGAVGVGK (KRAS G12V)
IVGLVKVGP

SEQ ID NO: 72310 - protein, 9 aa, synthetic construct
  source 1..9: note = Seed: VVGAVGVGK (KRAS G12V)
IVGLVKVGQ

SEQ ID NO: 72311 - protein, 9 aa, synthetic construct
  source 1..9: note = Seed: VVGAVGVGK (KRAS G12V)
IVGLVKVGR

SEQ ID NO: 72312 - protein, 9 aa, synthetic construct
  source 1..9: note = Seed: VVGAVGVGK (KRAS G12V)
IVGLVKVGS

SEQ ID NO: 72313 - protein, 9 aa, synthetic construct
  source 1..9: note = Seed: VVGAVGVGK (KRAS G12V)
IVGLVKVGT

SEQ ID NO: 72314 - protein, 9 aa, synthetic construct
  source 1..9: note = Seed: VVGAVGVGK (KRAS G12V)
IVGLVKVGY

SEQ ID NO: 72315 - protein, 9 aa, synthetic construct
  source 1..9: note = Seed: VVGAVGVGK (KRAS G12V)
IVGLVMVGR

SEQ ID NO: 72316 - protein, 9 aa, synthetic construct
  source 1..9: note = Seed: VVGAVGVGK (KRAS G12V)
IVGLVNVGA

SEQ ID NO: 72317 - protein, 9 aa, synthetic construct
  source 1..9: note = Seed: VVGAVGVGK (KRAS G12V)
IVGLVNVGG

SEQ ID NO: 72318 - protein, 9 aa, synthetic construct
  source 1..9: note = Seed: VVGAVGVGK (KRAS G12V)
IVGLVNVGH

SEQ ID NO: 72319 - protein, 9 aa, synthetic construct
  source 1..9: note = Seed: VVGAVGVGK (KRAS G12V)
IVGLVNVGK

SEQ ID NO: 72320 - protein, 9 aa, synthetic construct
  source 1..9: note = Seed: VVGAVGVGK (KRAS G12V)
IVGLVNVGN

SEQ ID NO: 72321 - protein, 9 aa, synthetic construct
  source 1..9: note = Seed: VVGAVGVGK (KRAS G12V)
IVGLVNVGR

SEQ ID NO: 72322 - protein, 9 aa, synthetic construct
  source 1..9: note = Seed: VVGAVGVGK (KRAS G12V)
IVGLVNVGS

SEQ ID NO: 72323 - protein, 9 aa, synthetic construct
  source 1..9: note = Seed: VVGAVGVGK (KRAS G12V)
IVGLVNVGT

SEQ ID NO: 72324 - protein, 9 aa, synthetic construct
  source 1..9: note = Seed: VVGAVGVGK (KRAS G12V)
IVGLVNVGV

SEQ ID NO: 72325 - protein, 9 aa, synthetic construct
  source 1..9: note = Seed: VVGAVGVGK (KRAS G12V)
IVGLVPVGA

SEQ ID NO: 72326 - protein, 9 aa, synthetic construct
  source 1..9: note = Seed: VVGAVGVGK (KRAS G12V)
IVGLVPVGG

SEQ ID NO: 72327 - protein, 9 aa, synthetic construct
  source 1..9: note = Seed: VVGAVGVGK (KRAS G12V)
IVGLVPVGH

SEQ ID NO: 72328 - protein, 9 aa, synthetic construct
  source 1..9: note = Seed: VVGAVGVGK (KRAS G12V)
IVGLVPVGI

SEQ ID NO: 72329 - protein, 9 aa, synthetic construct
  source 1..9: note = Seed: VVGAVGVGK (KRAS G12V)
IVGLVPVGK

SEQ ID NO: 72330 - protein, 9 aa, synthetic construct
  source 1..9: note = Seed: VVGAVGVGK (KRAS G12V)
IVGLVPVGL

SEQ ID NO: 72331 - protein, 9 aa, synthetic construct
  source 1..9: note = Seed: VVGAVGVGK (KRAS G12V)
IVGLVPVGM

SEQ ID NO: 72332 - protein, 9 aa, synthetic construct
  source 1..9: note = Seed: VVGAVGVGK (KRAS G12V)
IVGLVPVGN

SEQ ID NO: 72333 - protein, 9 aa, synthetic construct
  source 1..9: note = Seed: VVGAVGVGK (KRAS G12V)
IVGLVPVGR

SEQ ID NO: 72334 - protein, 9 aa, synthetic construct
  source 1..9: note = Seed: VVGAVGVGK (KRAS G12V)
IVGLVPVGS

SEQ ID NO: 72335 - protein, 9 aa, synthetic construct
  source 1..9: note = Seed: VVGAVGVGK (KRAS G12V)
IVGLVPVGT

SEQ ID NO: 72336 - protein, 9 aa, synthetic construct
  source 1..9: note = Seed: VVGAVGVGK (KRAS G12V)
IVGLVPVGV

SEQ ID NO: 72337 - protein, 9 aa, synthetic construct
  source 1..9: note = Seed: VVGAVGVGK (KRAS G12V)
IVGLVPVGY

SEQ ID NO: 72338 - protein, 9 aa, synthetic construct
  source 1..9: note = Seed: VVGAVGVGK (KRAS G12V)
IVGLVRVGA

SEQ ID NO: 72339 - protein, 9 aa, synthetic construct
  source 1..9: note = Seed: VVGAVGVGK (KRAS G12V)
IVGLVRVGD

SEQ ID NO: 72340 - protein, 9 aa, synthetic construct
  source 1..9: note = Seed: VVGAVGVGK (KRAS G12V)
IVGLVRVGE

SEQ ID NO: 72341 - protein, 9 aa, synthetic construct
  source 1..9: note = Seed: VVGAVGVGK (KRAS G12V)
IVGLVRVGG

SEQ ID NO: 72342 - protein, 9 aa, synthetic construct
  source 1..9: note = Seed: VVGAVGVGK (KRAS G12V)
IVGLVRVGH

SEQ ID NO: 72343 - protein, 9 aa, synthetic construct
  source 1..9: note = Seed: VVGAVGVGK (KRAS G12V)
IVGLVRVGK

SEQ ID NO: 72344 - protein, 9 aa, synthetic construct
  source 1..9: note = Seed: VVGAVGVGK (KRAS G12V)
IVGLVRVGM

SEQ ID NO: 72345 - protein, 9 aa, synthetic construct
  source 1..9: note = Seed: VVGAVGVGK (KRAS G12V)
IVGLVRVGN

SEQ ID NO: 72346 - protein, 9 aa, synthetic construct
  source 1..9: note = Seed: VVGAVGVGK (KRAS G12V)
IVGLVRVGP

SEQ ID NO: 72347 - protein, 9 aa, synthetic construct
  source 1..9: note = Seed: VVGAVGVGK (KRAS G12V)
IVGLVRVGQ

SEQ ID NO: 72348 - protein, 9 aa, synthetic construct
  source 1..9: note = Seed: VVGAVGVGK (KRAS G12V)
IVGLVRVGR

SEQ ID NO: 72349 - protein, 9 aa, synthetic construct
  source 1..9: note = Seed: VVGAVGVGK (KRAS G12V)
IVGLVRVGS

SEQ ID NO: 72350 - protein, 9 aa, synthetic construct
  source 1..9: note = Seed: VVGAVGVGK (KRAS G12V)
IVGLVRVGT

SEQ ID NO: 72351 - protein, 9 aa, synthetic construct
  source 1..9: note = Seed: VVGAVGVGK (KRAS G12V)
IVGLVRVGY

SEQ ID NO: 72352 - protein, 9 aa, synthetic construct
  source 1..9: note = Seed: VVGAVGVGK (KRAS G12V)
IVGLVSVGH

SEQ ID NO: 72353 - protein, 9 aa, synthetic construct
  source 1..9: note = Seed: VVGAVGVGK (KRAS G12V)
IVGLVSVGK

SEQ ID NO: 72354 - protein, 9 aa, synthetic construct
  source 1..9: note = Seed: VVGAVGVGK (KRAS G12V)
IVGLVSVGM

SEQ ID NO: 72355 - protein, 9 aa, synthetic construct
  source 1..9: note = Seed: VVGAVGVGK (KRAS G12V)
IVGLVSVGN

SEQ ID NO: 72356 - protein, 9 aa, synthetic construct
  source 1..9: note = Seed: VVGAVGVGK (KRAS G12V)
IVGLVSVGR

SEQ ID NO: 72357 - protein, 9 aa, synthetic construct
  source 1..9: note = Seed: VVGAVGVGK (KRAS G12V)
IVGLVSVGS

SEQ ID NO: 72358 - protein, 9 aa, synthetic construct
  source 1..9: note = Seed: VVGAVGVGK (KRAS G12V)
IVGLVSVGT

SEQ ID NO: 72359 - protein, 9 aa, synthetic construct
  source 1..9: note = Seed: VVGAVGVGK (KRAS G12V)
IVGLVSVGV

SEQ ID NO: 72360 - protein, 9 aa, synthetic construct
  source 1..9: note = Seed: VVGAVGVGK (KRAS G12V)
IVGLVTVGA

SEQ ID NO: 72361 - protein, 9 aa, synthetic construct
  source 1..9: note = Seed: VVGAVGVGK (KRAS G12V)
IVGLVTVGH

SEQ ID NO: 72362 - protein, 9 aa, synthetic construct
  source 1..9: note = Seed: VVGAVGVGK (KRAS G12V)
IVGLVTVGK

SEQ ID NO: 72363 - protein, 9 aa, synthetic construct
  source 1..9: note = Seed: VVGAVGVGK (KRAS G12V)
IVGLVTVGN

SEQ ID NO: 72364 - protein, 9 aa, synthetic construct
  source 1..9: note = Seed: VVGAVGVGK (KRAS G12V)
IVGLVTVGR

SEQ ID NO: 72365 - protein, 9 aa, synthetic construct
  source 1..9: note = Seed: VVGAVGVGK (KRAS G12V)
IVGLVTVGS

SEQ ID NO: 72366 - protein, 9 aa, synthetic construct
  source 1..9: note = Seed: VVGAVGVGK (KRAS G12V)
IVGLVVVGR

SEQ ID NO: 72367 - protein, 9 aa, synthetic construct
  source 1..9: note = Seed: VVGAVGVGK (KRAS G12V)
IVGMVAVGA

SEQ ID NO: 72368 - protein, 9 aa, synthetic construct
  source 1..9: note = Seed: VVGAVGVGK (KRAS G12V)
IVGMVAVGG

SEQ ID NO: 72369 - protein, 9 aa, synthetic construct
  source 1..9: note = Seed: VVGAVGVGK (KRAS G12V)
IVGMVAVGH

SEQ ID NO: 72370 - protein, 9 aa, synthetic construct
  source 1..9: note = Seed: VVGAVGVGK (KRAS G12V)
IVGMVAVGK

SEQ ID NO: 72371 - protein, 9 aa, synthetic construct
  source 1..9: note = Seed: VVGAVGVGK (KRAS G12V)
IVGMVAVGL

SEQ ID NO: 72372 - protein, 9 aa, synthetic construct
  source 1..9: note = Seed: VVGAVGVGK (KRAS G12V)
IVGMVAVGM

SEQ ID NO: 72373 - protein, 9 aa, synthetic construct
  source 1..9: note = Seed: VVGAVGVGK (KRAS G12V)
IVGMVAVGN

SEQ ID NO: 72374 - protein, 9 aa, synthetic construct
  source 1..9: note = Seed: VVGAVGVGK (KRAS G12V)
IVGMVAVGR

SEQ ID NO: 72375 - protein, 9 aa, synthetic construct
  source 1..9: note = Seed: VVGAVGVGK (KRAS G12V)
IVGMVAVGS

SEQ ID NO: 72376 - protein, 9 aa, synthetic construct
  source 1..9: note = Seed: VVGAVGVGK (KRAS G12V)
IVGMVAVGT

SEQ ID NO: 72377 - protein, 9 aa, synthetic construct
  source 1..9: note = Seed: VVGAVGVGK (KRAS G12V)
IVGMVAVGV

SEQ ID NO: 72378 - protein, 9 aa, synthetic construct
  source 1..9: note = Seed: VVGAVGVGK (KRAS G12V)
IVGMVGVGA

SEQ ID NO: 72379 - protein, 9 aa, synthetic construct
  source 1..9: note = Seed: VVGAVGVGK (KRAS G12V)
IVGMVGVGG

SEQ ID NO: 72380 - protein, 9 aa, synthetic construct
  source 1..9: note = Seed: VVGAVGVGK (KRAS G12V)
IVGMVGVGH

SEQ ID NO: 72381 - protein, 9 aa, synthetic construct
  source 1..9: note = Seed: VVGAVGVGK (KRAS G12V)
IVGMVGVGI

SEQ ID NO: 72382 - protein, 9 aa, synthetic construct
  source 1..9: note = Seed: VVGAVGVGK (KRAS G12V)
IVGMVGVGK

SEQ ID NO: 72383 - protein, 9 aa, synthetic construct
  source 1..9: note = Seed: VVGAVGVGK (KRAS G12V)
IVGMVGVGL

SEQ ID NO: 72384 - protein, 9 aa, synthetic construct
  source 1..9: note = Seed: VVGAVGVGK (KRAS G12V)
IVGMVGVGM

SEQ ID NO: 72385 - protein, 9 aa, synthetic construct
  source 1..9: note = Seed: VVGAVGVGK (KRAS G12V)
IVGMVGVGN

SEQ ID NO: 72386 - protein, 9 aa, synthetic construct
  source 1..9: note = Seed: VVGAVGVGK (KRAS G12V)
IVGMVGVGR

SEQ ID NO: 72387 - protein, 9 aa, synthetic construct
  source 1..9: note = Seed: VVGAVGVGK (KRAS G12V)
IVGMVGVGS

SEQ ID NO: 72388 - protein, 9 aa, synthetic construct
  source 1..9: note = Seed: VVGAVGVGK (KRAS G12V)
IVGMVGVGT

SEQ ID NO: 72389 - protein, 9 aa, synthetic construct
  source 1..9: note = Seed: VVGAVGVGK (KRAS G12V)
IVGMVGVGV

SEQ ID NO: 72390 - protein, 9 aa, synthetic construct
  source 1..9: note = Seed: VVGAVGVGK (KRAS G12V)
IVGMVHVGH

SEQ ID NO: 72391 - protein, 9 aa, synthetic construct
  source 1..9: note = Seed: VVGAVGVGK (KRAS G12V)
IVGMVHVGK

SEQ ID NO: 72392 - protein, 9 aa, synthetic construct
  source 1..9: note = Seed: VVGAVGVGK (KRAS G12V)
IVGMVHVGR

SEQ ID NO: 72393 - protein, 9 aa, synthetic construct
  source 1..9: note = Seed: VVGAVGVGK (KRAS G12V)
IVGMVIVGR

SEQ ID NO: 72394 - protein, 9 aa, synthetic construct
  source 1..9: note = Seed: VVGAVGVGK (KRAS G12V)
IVGMVKVGA

SEQ ID NO: 72395 - protein, 9 aa, synthetic construct
  source 1..9: note = Seed: VVGAVGVGK (KRAS G12V)
IVGMVKVGE

SEQ ID NO: 72396 - protein, 9 aa, synthetic construct
  source 1..9: note = Seed: VVGAVGVGK (KRAS G12V)
IVGMVKVGG

SEQ ID NO: 72397 - protein, 9 aa, synthetic construct
  source 1..9: note = Seed: VVGAVGVGK (KRAS G12V)
IVGMVKVGH

SEQ ID NO: 72398 - protein, 9 aa, synthetic construct
  source 1..9: note = Seed: VVGAVGVGK (KRAS G12V)
IVGMVKVGK

SEQ ID NO: 72399 - protein, 9 aa, synthetic construct
  source 1..9: note = Seed: VVGAVGVGK (KRAS G12V)
IVGMVKVGM

SEQ ID NO: 72400 - protein, 9 aa, synthetic construct
  source 1..9: note = Seed: VVGAVGVGK (KRAS G12V)
IVGMVKVGN

SEQ ID NO: 72401 - protein, 9 aa, synthetic construct
  source 1..9: note = Seed: VVGAVGVGK (KRAS G12V)
IVGMVKVGP

SEQ ID NO: 72402 - protein, 9 aa, synthetic construct
  source 1..9: note = Seed: VVGAVGVGK (KRAS G12V)
IVGMVKVGQ

SEQ ID NO: 72403 - protein, 9 aa, synthetic construct
  source 1..9: note = Seed: VVGAVGVGK (KRAS G12V)
IVGMVKVGR

SEQ ID NO: 72404 - protein, 9 aa, synthetic construct
  source 1..9: note = Seed: VVGAVGVGK (KRAS G12V)
IVGMVKVGS

SEQ ID NO: 72405 - protein, 9 aa, synthetic construct
  source 1..9: note = Seed: VVGAVGVGK (KRAS G12V)
IVGMVKVGT

SEQ ID NO: 72406 - protein, 9 aa, synthetic construct
  source 1..9: note = Seed: VVGAVGVGK (KRAS G12V)
IVGMVKVGV

SEQ ID NO: 72407 - protein, 9 aa, synthetic construct
  source 1..9: note = Seed: VVGAVGVGK (KRAS G12V)
IVGMVKVGY

SEQ ID NO: 72408 - protein, 9 aa, synthetic construct
  source 1..9: note = Seed: VVGAVGVGK (KRAS G12V)
IVGMVMVGR

SEQ ID NO: 72409 - protein, 9 aa, synthetic construct
  source 1..9: note = Seed: VVGAVGVGK (KRAS G12V)
IVGMVNVGA

SEQ ID NO: 72410 - protein, 9 aa, synthetic construct
  source 1..9: note = Seed: VVGAVGVGK (KRAS G12V)
IVGMVNVGG

SEQ ID NO: 72411 - protein, 9 aa, synthetic construct
  source 1..9: note = Seed: VVGAVGVGK (KRAS G12V)
IVGMVNVGH

SEQ ID NO: 72412 - protein, 9 aa, synthetic construct
  source 1..9: note = Seed: VVGAVGVGK (KRAS G12V)
IVGMVNVGK

SEQ ID NO: 72413 - protein, 9 aa, synthetic construct
  source 1..9: note = Seed: VVGAVGVGK (KRAS G12V)
IVGMVNVGL

SEQ ID NO: 72414 - protein, 9 aa, synthetic construct
  source 1..9: note = Seed: VVGAVGVGK (KRAS G12V)
IVGMVNVGM

SEQ ID NO: 72415 - protein, 9 aa, synthetic construct
  source 1..9: note = Seed: VVGAVGVGK (KRAS G12V)
IVGMVNVGR

SEQ ID NO: 72416 - protein, 9 aa, synthetic construct
  source 1..9: note = Seed: VVGAVGVGK (KRAS G12V)
IVGMVNVGS

SEQ ID NO: 72417 - protein, 9 aa, synthetic construct
  source 1..9: note = Seed: VVGAVGVGK (KRAS G12V)
IVGMVNVGT

SEQ ID NO: 72418 - protein, 9 aa, synthetic construct
  source 1..9: note = Seed: VVGAVGVGK (KRAS G12V)
IVGMVNVGV

SEQ ID NO: 72419 - protein, 9 aa, synthetic construct
  source 1..9: note = Seed: VVGAVGVGK (KRAS G12V)
IVGMVPVGA

SEQ ID NO: 72420 - protein, 9 aa, synthetic construct
  source 1..9: note = Seed: VVGAVGVGK (KRAS G12V)
IVGMVPVGG

SEQ ID NO: 72421 - protein, 9 aa, synthetic construct
  source 1..9: note = Seed: VVGAVGVGK (KRAS G12V)
IVGMVPVGH

SEQ ID NO: 72422 - protein, 9 aa, synthetic construct
  source 1..9: note = Seed: VVGAVGVGK (KRAS G12V)
IVGMVPVGI

SEQ ID NO: 72423 - protein, 9 aa, synthetic construct
  source 1..9: note = Seed: VVGAVGVGK (KRAS G12V)
IVGMVPVGK

SEQ ID NO: 72424 - protein, 9 aa, synthetic construct
  source 1..9: note = Seed: VVGAVGVGK (KRAS G12V)
IVGMVPVGL

SEQ ID NO: 72425 - protein, 9 aa, synthetic construct
  source 1..9: note = Seed: VVGAVGVGK (KRAS G12V)
IVGMVPVGM

SEQ ID NO: 72426 - protein, 9 aa, synthetic construct
  source 1..9: note = Seed: VVGAVGVGK (KRAS G12V)
IVGMVPVGN

SEQ ID NO: 72427 - protein, 9 aa, synthetic construct
  source 1..9: note = Seed: VVGAVGVGK (KRAS G12V)
IVGMVPVGR

SEQ ID NO: 72428 - protein, 9 aa, synthetic construct
  source 1..9: note = Seed: VVGAVGVGK (KRAS G12V)
IVGMVPVGS

SEQ ID NO: 72429 - protein, 9 aa, synthetic construct
  source 1..9: note = Seed: VVGAVGVGK (KRAS G12V)
IVGMVPVGT

SEQ ID NO: 72430 - protein, 9 aa, synthetic construct
  source 1..9: note = Seed: VVGAVGVGK (KRAS G12V)
IVGMVPVGV

SEQ ID NO: 72431 - protein, 9 aa, synthetic construct
  source 1..9: note = Seed: VVGAVGVGK (KRAS G12V)
IVGMVPVGY

SEQ ID NO: 72432 - protein, 9 aa, synthetic construct
  source 1..9: note = Seed: VVGAVGVGK (KRAS G12V)
IVGMVRVGA

SEQ ID NO: 72433 - protein, 9 aa, synthetic construct
  source 1..9: note = Seed: VVGAVGVGK (KRAS G12V)
IVGMVRVGD

SEQ ID NO: 72434 - protein, 9 aa, synthetic construct
  source 1..9: note = Seed: VVGAVGVGK (KRAS G12V)
IVGMVRVGE

SEQ ID NO: 72435 - protein, 9 aa, synthetic construct
  source 1..9: note = Seed: VVGAVGVGK (KRAS G12V)
IVGMVRVGG

SEQ ID NO: 72436 - protein, 9 aa, synthetic construct
  source 1..9: note = Seed: VVGAVGVGK (KRAS G12V)
IVGMVRVGH

SEQ ID NO: 72437 - protein, 9 aa, synthetic construct
  source 1..9: note = Seed: VVGAVGVGK (KRAS G12V)
IVGMVRVGK

SEQ ID NO: 72438 - protein, 9 aa, synthetic construct
  source 1..9: note = Seed: VVGAVGVGK (KRAS G12V)
IVGMVRVGM

SEQ ID NO: 72439 - protein, 9 aa, synthetic construct
  source 1..9: note = Seed: VVGAVGVGK (KRAS G12V)
IVGMVRVGN

SEQ ID NO: 72440 - protein, 9 aa, synthetic construct
  source 1..9: note = Seed: VVGAVGVGK (KRAS G12V)
IVGMVRVGP

SEQ ID NO: 72441 - protein, 9 aa, synthetic construct
  source 1..9: note = Seed: VVGAVGVGK (KRAS G12V)
IVGMVRVGQ

SEQ ID NO: 72442 - protein, 9 aa, synthetic construct
  source 1..9: note = Seed: VVGAVGVGK (KRAS G12V)
IVGMVRVGR

SEQ ID NO: 72443 - protein, 9 aa, synthetic construct
  source 1..9: note = Seed: VVGAVGVGK (KRAS G12V)
IVGMVRVGS

SEQ ID NO: 72444 - protein, 9 aa, synthetic construct
  source 1..9: note = Seed: VVGAVGVGK (KRAS G12V)
IVGMVRVGT

SEQ ID NO: 72445 - protein, 9 aa, synthetic construct
  source 1..9: note = Seed: VVGAVGVGK (KRAS G12V)
IVGMVRVGY

SEQ ID NO: 72446 - protein, 9 aa, synthetic construct
  source 1..9: note = Seed: VVGAVGVGK (KRAS G12V)
IVGMVSVGA

SEQ ID NO: 72447 - protein, 9 aa, synthetic construct
  source 1..9: note = Seed: VVGAVGVGK (KRAS G12V)
IVGMVSVGG

SEQ ID NO: 72448 - protein, 9 aa, synthetic construct
  source 1..9: note = Seed: VVGAVGVGK (KRAS G12V)
IVGMVSVGH

SEQ ID NO: 72449 - protein, 9 aa, synthetic construct
  source 1..9: note = Seed: VVGAVGVGK (KRAS G12V)
IVGMVSVGK

SEQ ID NO: 72450 - protein, 9 aa, synthetic construct
  source 1..9: note = Seed: VVGAVGVGK (KRAS G12V)
IVGMVSVGL

SEQ ID NO: 72451 - protein, 9 aa, synthetic construct
  source 1..9: note = Seed: VVGAVGVGK (KRAS G12V)
IVGMVSVGM

SEQ ID NO: 72452 - protein, 9 aa, synthetic construct
  source 1..9: note = Seed: VVGAVGVGK (KRAS G12V)
IVGMVSVGN

SEQ ID NO: 72453 - protein, 9 aa, synthetic construct
  source 1..9: note = Seed: VVGAVGVGK (KRAS G12V)
IVGMVSVGR

SEQ ID NO: 72454 - protein, 9 aa, synthetic construct
  source 1..9: note = Seed: VVGAVGVGK (KRAS G12V)
IVGMVSVGS

SEQ ID NO: 72455 - protein, 9 aa, synthetic construct
  source 1..9: note = Seed: VVGAVGVGK (KRAS G12V)
IVGMVSVGT

SEQ ID NO: 72456 - protein, 9 aa, synthetic construct
  source 1..9: note = Seed: VVGAVGVGK (KRAS G12V)
IVGMVSVGV

SEQ ID NO: 72457 - protein, 9 aa, synthetic construct
  source 1..9: note = Seed: VVGAVGVGK (KRAS G12V)
IVGMVTVGA

SEQ ID NO: 72458 - protein, 9 aa, synthetic construct
  source 1..9: note = Seed: VVGAVGVGK (KRAS G12V)
IVGMVTVGH

SEQ ID NO: 72459 - protein, 9 aa, synthetic construct
  source 1..9: note = Seed: VVGAVGVGK (KRAS G12V)
IVGMVTVGK

SEQ ID NO: 72460 - protein, 9 aa, synthetic construct
  source 1..9: note = Seed: VVGAVGVGK (KRAS G12V)
IVGMVTVGR

SEQ ID NO: 72461 - protein, 9 aa, synthetic construct
  source 1..9: note = Seed: VVGAVGVGK (KRAS G12V)
IVGMVTVGS

SEQ ID NO: 72462 - protein, 9 aa, synthetic construct
  source 1..9: note = Seed: VVGAVGVGK (KRAS G12V)
IVGMVVVGR

SEQ ID NO: 72463 - protein, 9 aa, synthetic construct
  source 1..9: note = Seed: VVGAVGVGK (KRAS G12V)
IVGNVAVGA

SEQ ID NO: 72464 - protein, 9 aa, synthetic construct
  source 1..9: note = Seed: VVGAVGVGK (KRAS G12V)
IVGNVAVGF

SEQ ID NO: 72465 - protein, 9 aa, synthetic construct
  source 1..9: note = Seed: VVGAVGVGK (KRAS G12V)
IVGNVAVGI

SEQ ID NO: 72466 - protein, 9 aa, synthetic construct
  source 1..9: note = Seed: VVGAVGVGK (KRAS G12V)
IVGNVAVGK

SEQ ID NO: 72467 - protein, 9 aa, synthetic construct
  source 1..9: note = Seed: VVGAVGVGK (KRAS G12V)
IVGNVAVGL

SEQ ID NO: 72468 - protein, 9 aa, synthetic construct
  source 1..9: note = Seed: VVGAVGVGK (KRAS G12V)
IVGNVAVGM

SEQ ID NO: 72469 - protein, 9 aa, synthetic construct
  source 1..9: note = Seed: VVGAVGVGK (KRAS G12V)
IVGNVAVGR

SEQ ID NO: 72470 - protein, 9 aa, synthetic construct
  source 1..9: note = Seed: VVGAVGVGK (KRAS G12V)
IVGNVAVGV

SEQ ID NO: 72471 - protein, 9 aa, synthetic construct
  source 1..9: note = Seed: VVGAVGVGK (KRAS G12V)
IVGNVAVGY

SEQ ID NO: 72472 - protein, 9 aa, synthetic construct
  source 1..9: note = Seed: VVGAVGVGK (KRAS G12V)
IVGNVGVGI

SEQ ID NO: 72473 - protein, 9 aa, synthetic construct
  source 1..9: note = Seed: VVGAVGVGK (KRAS G12V)
IVGNVGVGR

SEQ ID NO: 72474 - protein, 9 aa, synthetic construct
  source 1..9: note = Seed: VVGAVGVGK (KRAS G12V)
IVGNVGVGV

SEQ ID NO: 72475 - protein, 9 aa, synthetic construct
  source 1..9: note = Seed: VVGAVGVGK (KRAS G12V)
IVGNVGVGY

SEQ ID NO: 72476 - protein, 9 aa, synthetic construct
  source 1..9: note = Seed: VVGAVGVGK (KRAS G12V)
IVGNVHVGF

SEQ ID NO: 72477 - protein, 9 aa, synthetic construct
  source 1..9: note = Seed: VVGAVGVGK (KRAS G12V)
IVGNVHVGI

SEQ ID NO: 72478 - protein, 9 aa, synthetic construct
  source 1..9: note = Seed: VVGAVGVGK (KRAS G12V)
IVGNVHVGK

SEQ ID NO: 72479 - protein, 9 aa, synthetic construct
  source 1..9: note = Seed: VVGAVGVGK (KRAS G12V)
IVGNVHVGR

SEQ ID NO: 72480 - protein, 9 aa, synthetic construct
  source 1..9: note = Seed: VVGAVGVGK (KRAS G12V)
IVGNVHVGV

SEQ ID NO: 72481 - protein, 9 aa, synthetic construct
  source 1..9: note = Seed: VVGAVGVGK (KRAS G12V)
IVGNVHVGY

SEQ ID NO: 72482 - protein, 9 aa, synthetic construct
  source 1..9: note = Seed: VVGAVGVGK (KRAS G12V)
IVGNVIVGR

SEQ ID NO: 72483 - protein, 9 aa, synthetic construct
  source 1..9: note = Seed: VVGAVGVGK (KRAS G12V)
IVGNVKVGA

SEQ ID NO: 72484 - protein, 9 aa, synthetic construct
  source 1..9: note = Seed: VVGAVGVGK (KRAS G12V)
IVGNVKVGF

SEQ ID NO: 72485 - protein, 9 aa, synthetic construct
  source 1..9: note = Seed: VVGAVGVGK (KRAS G12V)
IVGNVKVGG

SEQ ID NO: 72486 - protein, 9 aa, synthetic construct
  source 1..9: note = Seed: VVGAVGVGK (KRAS G12V)
IVGNVKVGH

SEQ ID NO: 72487 - protein, 9 aa, synthetic construct
  source 1..9: note = Seed: VVGAVGVGK (KRAS G12V)
IVGNVKVGI

SEQ ID NO: 72488 - protein, 9 aa, synthetic construct
  source 1..9: note = Seed: VVGAVGVGK (KRAS G12V)
IVGNVKVGK

SEQ ID NO: 72489 - protein, 9 aa, synthetic construct
  source 1..9: note = Seed: VVGAVGVGK (KRAS G12V)
IVGNVKVGL

SEQ ID NO: 72490 - protein, 9 aa, synthetic construct
  source 1..9: note = Seed: VVGAVGVGK (KRAS G12V)
IVGNVKVGM

SEQ ID NO: 72491 - protein, 9 aa, synthetic construct
  source 1..9: note = Seed: VVGAVGVGK (KRAS G12V)
IVGNVKVGQ

SEQ ID NO: 72492 - protein, 9 aa, synthetic construct
  source 1..9: note = Seed: VVGAVGVGK (KRAS G12V)
IVGNVKVGR

SEQ ID NO: 72493 - protein, 9 aa, synthetic construct
  source 1..9: note = Seed: VVGAVGVGK (KRAS G12V)
IVGNVKVGS

SEQ ID NO: 72494 - protein, 9 aa, synthetic construct
  source 1..9: note = Seed: VVGAVGVGK (KRAS G12V)
IVGNVKVGT

SEQ ID NO: 72495 - protein, 9 aa, synthetic construct
  source 1..9: note = Seed: VVGAVGVGK (KRAS G12V)
IVGNVKVGV

SEQ ID NO: 72496 - protein, 9 aa, synthetic construct
  source 1..9: note = Seed: VVGAVGVGK (KRAS G12V)
IVGNVKVGY

SEQ ID NO: 72497 - protein, 9 aa, synthetic construct
  source 1..9: note = Seed: VVGAVGVGK (KRAS G12V)
IVGNVMVGR

SEQ ID NO: 72498 - protein, 9 aa, synthetic construct
  source 1..9: note = Seed: VVGAVGVGK (KRAS G12V)
IVGNVNVGF

SEQ ID NO: 72499 - protein, 9 aa, synthetic construct
  source 1..9: note = Seed: VVGAVGVGK (KRAS G12V)
IVGNVNVGI

SEQ ID NO: 72500 - protein, 9 aa, synthetic construct
  source 1..9: note = Seed: VVGAVGVGK (KRAS G12V)
IVGNVNVGM

SEQ ID NO: 72501 - protein, 9 aa, synthetic construct
  source 1..9: note = Seed: VVGAVGVGK (KRAS G12V)
IVGNVNVGR

SEQ ID NO: 72502 - protein, 9 aa, synthetic construct
  source 1..9: note = Seed: VVGAVGVGK (KRAS G12V)
IVGNVNVGV

SEQ ID NO: 72503 - protein, 9 aa, synthetic construct
  source 1..9: note = Seed: VVGAVGVGK (KRAS G12V)
IVGNVNVGY

SEQ ID NO: 72504 - protein, 9 aa, synthetic construct
  source 1..9: note = Seed: VVGAVGVGK (KRAS G12V)
IVGNVPVGA

SEQ ID NO: 72505 - protein, 9 aa, synthetic construct
  source 1..9: note = Seed: VVGAVGVGK (KRAS G12V)
IVGNVPVGF

SEQ ID NO: 72506 - protein, 9 aa, synthetic construct
  source 1..9: note = Seed: VVGAVGVGK (KRAS G12V)
IVGNVPVGI

SEQ ID NO: 72507 - protein, 9 aa, synthetic construct
  source 1..9: note = Seed: VVGAVGVGK (KRAS G12V)
IVGNVPVGK

SEQ ID NO: 72508 - protein, 9 aa, synthetic construct
  source 1..9: note = Seed: VVGAVGVGK (KRAS G12V)
IVGNVPVGL

SEQ ID NO: 72509 - protein, 9 aa, synthetic construct
  source 1..9: note = Seed: VVGAVGVGK (KRAS G12V)
IVGNVPVGM

SEQ ID NO: 72510 - protein, 9 aa, synthetic construct
  source 1..9: note = Seed: VVGAVGVGK (KRAS G12V)
IVGNVPVGQ

SEQ ID NO: 72511 - protein, 9 aa, synthetic construct
  source 1..9: note = Seed: VVGAVGVGK (KRAS G12V)
IVGNVPVGR

SEQ ID NO: 72512 - protein, 9 aa, synthetic construct
  source 1..9: note = Seed: VVGAVGVGK (KRAS G12V)
IVGNVPVGS

SEQ ID NO: 72513 - protein, 9 aa, synthetic construct
  source 1..9: note = Seed: VVGAVGVGK (KRAS G12V)
IVGNVPVGT

SEQ ID NO: 72514 - protein, 9 aa, synthetic construct
  source 1..9: note = Seed: VVGAVGVGK (KRAS G12V)
IVGNVPVGV

SEQ ID NO: 72515 - protein, 9 aa, synthetic construct
  source 1..9: note = Seed: VVGAVGVGK (KRAS G12V)
IVGNVPVGY

SEQ ID NO: 72516 - protein, 9 aa, synthetic construct
  source 1..9: note = Seed: VVGAVGVGK (KRAS G12V)
IVGNVQVGR

SEQ ID NO: 72517 - protein, 9 aa, synthetic construct
  source 1..9: note = Seed: VVGAVGVGK (KRAS G12V)
IVGNVRVGA

SEQ ID NO: 72518 - protein, 9 aa, synthetic construct
  source 1..9: note = Seed: VVGAVGVGK (KRAS G12V)
IVGNVRVGE

SEQ ID NO: 72519 - protein, 9 aa, synthetic construct
  source 1..9: note = Seed: VVGAVGVGK (KRAS G12V)
IVGNVRVGF

SEQ ID NO: 72520 - protein, 9 aa, synthetic construct
  source 1..9: note = Seed: VVGAVGVGK (KRAS G12V)
IVGNVRVGG

SEQ ID NO: 72521 - protein, 9 aa, synthetic construct
  source 1..9: note = Seed: VVGAVGVGK (KRAS G12V)
IVGNVRVGH

SEQ ID NO: 72522 - protein, 9 aa, synthetic construct
  source 1..9: note = Seed: VVGAVGVGK (KRAS G12V)
IVGNVRVGI

SEQ ID NO: 72523 - protein, 9 aa, synthetic construct
  source 1..9: note = Seed: VVGAVGVGK (KRAS G12V)
IVGNVRVGK

SEQ ID NO: 72524 - protein, 9 aa, synthetic construct
  source 1..9: note = Seed: VVGAVGVGK (KRAS G12V)
IVGNVRVGL

SEQ ID NO: 72525 - protein, 9 aa, synthetic construct
  source 1..9: note = Seed: VVGAVGVGK (KRAS G12V)
IVGNVRVGM

SEQ ID NO: 72526 - protein, 9 aa, synthetic construct
  source 1..9: note = Seed: VVGAVGVGK (KRAS G12V)
IVGNVRVGN

SEQ ID NO: 72527 - protein, 9 aa, synthetic construct
  source 1..9: note = Seed: VVGAVGVGK (KRAS G12V)
IVGNVRVGP

SEQ ID NO: 72528 - protein, 9 aa, synthetic construct
  source 1..9: note = Seed: VVGAVGVGK (KRAS G12V)
IVGNVRVGQ

SEQ ID NO: 72529 - protein, 9 aa, synthetic construct
  source 1..9: note = Seed: VVGAVGVGK (KRAS G12V)
IVGNVRVGR

SEQ ID NO: 72530 - protein, 9 aa, synthetic construct
  source 1..9: note = Seed: VVGAVGVGK (KRAS G12V)
IVGNVRVGS

SEQ ID NO: 72531 - protein, 9 aa, synthetic construct
  source 1..9: note = Seed: VVGAVGVGK (KRAS G12V)
IVGNVRVGT

SEQ ID NO: 72532 - protein, 9 aa, synthetic construct
  source 1..9: note = Seed: VVGAVGVGK (KRAS G12V)
IVGNVRVGV

SEQ ID NO: 72533 - protein, 9 aa, synthetic construct
  source 1..9: note = Seed: VVGAVGVGK (KRAS G12V)
IVGNVRVGW

SEQ ID NO: 72534 - protein, 9 aa, synthetic construct
  source 1..9: note = Seed: VVGAVGVGK (KRAS G12V)
IVGNVRVGY

SEQ ID NO: 72535 - protein, 9 aa, synthetic construct
  source 1..9: note = Seed: VVGAVGVGK (KRAS G12V)
IVGNVSVGI

SEQ ID NO: 72536 - protein, 9 aa, synthetic construct
  source 1..9: note = Seed: VVGAVGVGK (KRAS G12V)
IVGNVSVGR

SEQ ID NO: 72537 - protein, 9 aa, synthetic construct
  source 1..9: note = Seed: VVGAVGVGK (KRAS G12V)
IVGNVSVGV

SEQ ID NO: 72538 - protein, 9 aa, synthetic construct
  source 1..9: note = Seed: VVGAVGVGK (KRAS G12V)
IVGNVSVGY

SEQ ID NO: 72539 - protein, 9 aa, synthetic construct
  source 1..9: note = Seed: VVGAVGVGK (KRAS G12V)
IVGNVTVGR

SEQ ID NO: 72540 - protein, 9 aa, synthetic construct
  source 1..9: note = Seed: VVGAVGVGK (KRAS G12V)
IVGNVTVGY

SEQ ID NO: 72541 - protein, 9 aa, synthetic construct
  source 1..9: note = Seed: VVGAVGVGK (KRAS G12V)
IVGNVVVGR

SEQ ID NO: 72542 - protein, 9 aa, synthetic construct
  source 1..9: note = Seed: VVGAVGVGK (KRAS G12V)
IVGNVVVGY

SEQ ID NO: 72543 - protein, 9 aa, synthetic construct
  source 1..9: note = Seed: VVGAVGVGK (KRAS G12V)
IVGPVRVGR

SEQ ID NO: 72544 - protein, 9 aa, synthetic construct
  source 1..9: note = Seed: VVGAVGVGK (KRAS G12V)
IVGPVRVGY

SEQ ID NO: 72545 - protein, 9 aa, synthetic construct
  source 1..9: note = Seed: VVGAVGVGK (KRAS G12V)
IVGQVAVGA

SEQ ID NO: 72546 - protein, 9 aa, synthetic construct
  source 1..9: note = Seed: VVGAVGVGK (KRAS G12V)
IVGQVAVGG

SEQ ID NO: 72547 - protein, 9 aa, synthetic construct
  source 1..9: note = Seed: VVGAVGVGK (KRAS G12V)
IVGQVAVGH

SEQ ID NO: 72548 - protein, 9 aa, synthetic construct
  source 1..9: note = Seed: VVGAVGVGK (KRAS G12V)
IVGQVAVGI

SEQ ID NO: 72549 - protein, 9 aa, synthetic construct
  source 1..9: note = Seed: VVGAVGVGK (KRAS G12V)
IVGQVAVGK

SEQ ID NO: 72550 - protein, 9 aa, synthetic construct
  source 1..9: note = Seed: VVGAVGVGK (KRAS G12V)
IVGQVAVGL

SEQ ID NO: 72551 - protein, 9 aa, synthetic construct
  source 1..9: note = Seed: VVGAVGVGK (KRAS G12V)
IVGQVAVGM

SEQ ID NO: 72552 - protein, 9 aa, synthetic construct
  source 1..9: note = Seed: VVGAVGVGK (KRAS G12V)
IVGQVAVGN

SEQ ID NO: 72553 - protein, 9 aa, synthetic construct
  source 1..9: note = Seed: VVGAVGVGK (KRAS G12V)
IVGQVAVGR

SEQ ID NO: 72554 - protein, 9 aa, synthetic construct
  source 1..9: note = Seed: VVGAVGVGK (KRAS G12V)
IVGQVAVGS

SEQ ID NO: 72555 - protein, 9 aa, synthetic construct
  source 1..9: note = Seed: VVGAVGVGK (KRAS G12V)
IVGQVAVGT

SEQ ID NO: 72556 - protein, 9 aa, synthetic construct
  source 1..9: note = Seed: VVGAVGVGK (KRAS G12V)
IVGQVAVGV

SEQ ID NO: 72557 - protein, 9 aa, synthetic construct
  source 1..9: note = Seed: VVGAVGVGK (KRAS G12V)
IVGQVGVGA

SEQ ID NO: 72558 - protein, 9 aa, synthetic construct
  source 1..9: note = Seed: VVGAVGVGK (KRAS G12V)
IVGQVGVGI

SEQ ID NO: 72559 - protein, 9 aa, synthetic construct
  source 1..9: note = Seed: VVGAVGVGK (KRAS G12V)
IVGQVGVGL

SEQ ID NO: 72560 - protein, 9 aa, synthetic construct
  source 1..9: note = Seed: VVGAVGVGK (KRAS G12V)
IVGQVGVGM

SEQ ID NO: 72561 - protein, 9 aa, synthetic construct
  source 1..9: note = Seed: VVGAVGVGK (KRAS G12V)
IVGQVGVGR

SEQ ID NO: 72562 - protein, 9 aa, synthetic construct
  source 1..9: note = Seed: VVGAVGVGK (KRAS G12V)
IVGQVGVGS

SEQ ID NO: 72563 - protein, 9 aa, synthetic construct
  source 1..9: note = Seed: VVGAVGVGK (KRAS G12V)
IVGQVGVGT

SEQ ID NO: 72564 - protein, 9 aa, synthetic construct
  source 1..9: note = Seed: VVGAVGVGK (KRAS G12V)
IVGQVGVGV

SEQ ID NO: 72565 - protein, 9 aa, synthetic construct
  source 1..9: note = Seed: VVGAVGVGK (KRAS G12V)
IVGQVHVGR

SEQ ID NO: 72566 - protein, 9 aa, synthetic construct
  source 1..9: note = Seed: VVGAVGVGK (KRAS G12V)
IVGQVKVGA

SEQ ID NO: 72567 - protein, 9 aa, synthetic construct
  source 1..9: note = Seed: VVGAVGVGK (KRAS G12V)
IVGQVKVGF

SEQ ID NO: 72568 - protein, 9 aa, synthetic construct
  source 1..9: note = Seed: VVGAVGVGK (KRAS G12V)
IVGQVKVGG

SEQ ID NO: 72569 - protein, 9 aa, synthetic construct
  source 1..9: note = Seed: VVGAVGVGK (KRAS G12V)
IVGQVKVGH

SEQ ID NO: 72570 - protein, 9 aa, synthetic construct
  source 1..9: note = Seed: VVGAVGVGK (KRAS G12V)
IVGQVKVGK

SEQ ID NO: 72571 - protein, 9 aa, synthetic construct
  source 1..9: note = Seed: VVGAVGVGK (KRAS G12V)
IVGQVKVGL

SEQ ID NO: 72572 - protein, 9 aa, synthetic construct
  source 1..9: note = Seed: VVGAVGVGK (KRAS G12V)
IVGQVKVGM

SEQ ID NO: 72573 - protein, 9 aa, synthetic construct
  source 1..9: note = Seed: VVGAVGVGK (KRAS G12V)
IVGQVKVGN

SEQ ID NO: 72574 - protein, 9 aa, synthetic construct
  source 1..9: note = Seed: VVGAVGVGK (KRAS G12V)
IVGQVKVGQ

SEQ ID NO: 72575 - protein, 9 aa, synthetic construct
  source 1..9: note = Seed: VVGAVGVGK (KRAS G12V)
IVGQVKVGR

SEQ ID NO: 72576 - protein, 9 aa, synthetic construct
  source 1..9: note = Seed: VVGAVGVGK (KRAS G12V)
IVGQVKVGS

SEQ ID NO: 72577 - protein, 9 aa, synthetic construct
  source 1..9: note = Seed: VVGAVGVGK (KRAS G12V)
IVGQVKVGT

SEQ ID NO: 72578 - protein, 9 aa, synthetic construct
  source 1..9: note = Seed: VVGAVGVGK (KRAS G12V)
IVGQVKVGV

SEQ ID NO: 72579 - protein, 9 aa, synthetic construct
  source 1..9: note = Seed: VVGAVGVGK (KRAS G12V)
IVGQVKVGY

SEQ ID NO: 72580 - protein, 9 aa, synthetic construct
  source 1..9: note = Seed: VVGAVGVGK (KRAS G12V)
IVGQVNVGA

SEQ ID NO: 72581 - protein, 9 aa, synthetic construct
  source 1..9: note = Seed: VVGAVGVGK (KRAS G12V)
IVGQVNVGL

SEQ ID NO: 72582 - protein, 9 aa, synthetic construct
  source 1..9: note = Seed: VVGAVGVGK (KRAS G12V)
IVGQVNVGR

SEQ ID NO: 72583 - protein, 9 aa, synthetic construct
  source 1..9: note = Seed: VVGAVGVGK (KRAS G12V)
IVGQVNVGV

SEQ ID NO: 72584 - protein, 9 aa, synthetic construct
  source 1..9: note = Seed: VVGAVGVGK (KRAS G12V)
IVGQVNVGY

SEQ ID NO: 72585 - protein, 9 aa, synthetic construct
  source 1..9: note = Seed: VVGAVGVGK (KRAS G12V)
IVGQVPVGA

SEQ ID NO: 72586 - protein, 9 aa, synthetic construct
  source 1..9: note = Seed: VVGAVGVGK (KRAS G12V)
IVGQVPVGI

SEQ ID NO: 72587 - protein, 9 aa, synthetic construct
  source 1..9: note = Seed: VVGAVGVGK (KRAS G12V)
IVGQVPVGK

SEQ ID NO: 72588 - protein, 9 aa, synthetic construct
  source 1..9: note = Seed: VVGAVGVGK (KRAS G12V)
IVGQVPVGL

SEQ ID NO: 72589 - protein, 9 aa, synthetic construct
  source 1..9: note = Seed: VVGAVGVGK (KRAS G12V)
IVGQVPVGM

SEQ ID NO: 72590 - protein, 9 aa, synthetic construct
  source 1..9: note = Seed: VVGAVGVGK (KRAS G12V)
IVGQVPVGR

SEQ ID NO: 72591 - protein, 9 aa, synthetic construct
  source 1..9: note = Seed: VVGAVGVGK (KRAS G12V)
IVGQVPVGS

SEQ ID NO: 72592 - protein, 9 aa, synthetic construct
  source 1..9: note = Seed: VVGAVGVGK (KRAS G12V)
IVGQVPVGT

SEQ ID NO: 72593 - protein, 9 aa, synthetic construct
  source 1..9: note = Seed: VVGAVGVGK (KRAS G12V)
IVGQVPVGV

SEQ ID NO: 72594 - protein, 9 aa, synthetic construct
  source 1..9: note = Seed: VVGAVGVGK (KRAS G12V)
IVGQVPVGY

SEQ ID NO: 72595 - protein, 9 aa, synthetic construct
  source 1..9: note = Seed: VVGAVGVGK (KRAS G12V)
IVGQVRVGA

SEQ ID NO: 72596 - protein, 9 aa, synthetic construct
  source 1..9: note = Seed: VVGAVGVGK (KRAS G12V)
IVGQVRVGF

SEQ ID NO: 72597 - protein, 9 aa, synthetic construct
  source 1..9: note = Seed: VVGAVGVGK (KRAS G12V)
IVGQVRVGG

SEQ ID NO: 72598 - protein, 9 aa, synthetic construct
  source 1..9: note = Seed: VVGAVGVGK (KRAS G12V)
IVGQVRVGH

SEQ ID NO: 72599 - protein, 9 aa, synthetic construct
  source 1..9: note = Seed: VVGAVGVGK (KRAS G12V)
IVGQVRVGI

SEQ ID NO: 72600 - protein, 9 aa, synthetic construct
  source 1..9: note = Seed: VVGAVGVGK (KRAS G12V)
IVGQVRVGK

SEQ ID NO: 72601 - protein, 9 aa, synthetic construct
  source 1..9: note = Seed: VVGAVGVGK (KRAS G12V)
IVGQVRVGL

SEQ ID NO: 72602 - protein, 9 aa, synthetic construct
  source 1..9: note = Seed: VVGAVGVGK (KRAS G12V)
IVGQVRVGM

SEQ ID NO: 72603 - protein, 9 aa, synthetic construct
  source 1..9: note = Seed: VVGAVGVGK (KRAS G12V)
IVGQVRVGN

SEQ ID NO: 72604 - protein, 9 aa, synthetic construct
  source 1..9: note = Seed: VVGAVGVGK (KRAS G12V)
IVGQVRVGP

SEQ ID NO: 72605 - protein, 9 aa, synthetic construct
  source 1..9: note = Seed: VVGAVGVGK (KRAS G12V)
IVGQVRVGQ

SEQ ID NO: 72606 - protein, 9 aa, synthetic construct
  source 1..9: note = Seed: VVGAVGVGK (KRAS G12V)
IVGQVRVGR

SEQ ID NO: 72607 - protein, 9 aa, synthetic construct
  source 1..9: note = Seed: VVGAVGVGK (KRAS G12V)
IVGQVRVGS

SEQ ID NO: 72608 - protein, 9 aa, synthetic construct
  source 1..9: note = Seed: VVGAVGVGK (KRAS G12V)
IVGQVRVGT

SEQ ID NO: 72609 - protein, 9 aa, synthetic construct
  source 1..9: note = Seed: VVGAVGVGK (KRAS G12V)
IVGQVRVGV

SEQ ID NO: 72610 - protein, 9 aa, synthetic construct
  source 1..9: note = Seed: VVGAVGVGK (KRAS G12V)
IVGQVRVGY

SEQ ID NO: 72611 - protein, 9 aa, synthetic construct
  source 1..9: note = Seed: VVGAVGVGK (KRAS G12V)
IVGQVSVGA

SEQ ID NO: 72612 - protein, 9 aa, synthetic construct
  source 1..9: note = Seed: VVGAVGVGK (KRAS G12V)
IVGQVSVGI

SEQ ID NO: 72613 - protein, 9 aa, synthetic construct
  source 1..9: note = Seed: VVGAVGVGK (KRAS G12V)
IVGQVSVGL

SEQ ID NO: 72614 - protein, 9 aa, synthetic construct
  source 1..9: note = Seed: VVGAVGVGK (KRAS G12V)
IVGQVSVGM

SEQ ID NO: 72615 - protein, 9 aa, synthetic construct
  source 1..9: note = Seed: VVGAVGVGK (KRAS G12V)
IVGQVSVGR

SEQ ID NO: 72616 - protein, 9 aa, synthetic construct
  source 1..9: note = Seed: VVGAVGVGK (KRAS G12V)
IVGQVSVGS

SEQ ID NO: 72617 - protein, 9 aa, synthetic construct
  source 1..9: note = Seed: VVGAVGVGK (KRAS G12V)
IVGQVSVGT

SEQ ID NO: 72618 - protein, 9 aa, synthetic construct
  source 1..9: note = Seed: VVGAVGVGK (KRAS G12V)
IVGQVSVGV

SEQ ID NO: 72619 - protein, 9 aa, synthetic construct
  source 1..9: note = Seed: VVGAVGVGK (KRAS G12V)
IVGQVTVGR

SEQ ID NO: 72620 - protein, 9 aa, synthetic construct
  source 1..9: note = Seed: VVGAVGVGK (KRAS G12V)
IVGQVVVGR

SEQ ID NO: 72621 - protein, 9 aa, synthetic construct
  source 1..9: note = Seed: VVGAVGVGK (KRAS G12V)
IVGRVAVGH

SEQ ID NO: 72622 - protein, 9 aa, synthetic construct
  source 1..9: note = Seed: VVGAVGVGK (KRAS G12V)
IVGRVAVGK

SEQ ID NO: 72623 - protein, 9 aa, synthetic construct
  source 1..9: note = Seed: VVGAVGVGK (KRAS G12V)
IVGRVAVGR

SEQ ID NO: 72624 - protein, 9 aa, synthetic construct
  source 1..9: note = Seed: VVGAVGVGK (KRAS G12V)
IVGRVAVGY

SEQ ID NO: 72625 - protein, 9 aa, synthetic construct
  source 1..9: note = Seed: VVGAVGVGK (KRAS G12V)
IVGRVDVGR

SEQ ID NO: 72626 - protein, 9 aa, synthetic construct
  source 1..9: note = Seed: VVGAVGVGK (KRAS G12V)
IVGRVEVGR

SEQ ID NO: 72627 - protein, 9 aa, synthetic construct
  source 1..9: note = Seed: VVGAVGVGK (KRAS G12V)
IVGRVGVGR

SEQ ID NO: 72628 - protein, 9 aa, synthetic construct
  source 1..9: note = Seed: VVGAVGVGK (KRAS G12V)
IVGRVGVGY

SEQ ID NO: 72629 - protein, 9 aa, synthetic construct
  source 1..9: note = Seed: VVGAVGVGK (KRAS G12V)
IVGRVHVGA

SEQ ID NO: 72630 - protein, 9 aa, synthetic construct
  source 1..9: note = Seed: VVGAVGVGK (KRAS G12V)
IVGRVHVGF

SEQ ID NO: 72631 - protein, 9 aa, synthetic construct
  source 1..9: note = Seed: VVGAVGVGK (KRAS G12V)
IVGRVHVGK

SEQ ID NO: 72632 - protein, 9 aa, synthetic construct
  source 1..9: note = Seed: VVGAVGVGK (KRAS G12V)
IVGRVHVGM

SEQ ID NO: 72633 - protein, 9 aa, synthetic construct
  source 1..9: note = Seed: VVGAVGVGK (KRAS G12V)
IVGRVHVGR

SEQ ID NO: 72634 - protein, 9 aa, synthetic construct
  source 1..9: note = Seed: VVGAVGVGK (KRAS G12V)
IVGRVHVGY

SEQ ID NO: 72635 - protein, 9 aa, synthetic construct
  source 1..9: note = Seed: VVGAVGVGK (KRAS G12V)
IVGRVIVGR

SEQ ID NO: 72636 - protein, 9 aa, synthetic construct
  source 1..9: note = Seed: VVGAVGVGK (KRAS G12V)
IVGRVKVGA

SEQ ID NO: 72637 - protein, 9 aa, synthetic construct
  source 1..9: note = Seed: VVGAVGVGK (KRAS G12V)
IVGRVKVGC

SEQ ID NO: 72638 - protein, 9 aa, synthetic construct
  source 1..9: note = Seed: VVGAVGVGK (KRAS G12V)
IVGRVKVGE

SEQ ID NO: 72639 - protein, 9 aa, synthetic construct
  source 1..9: note = Seed: VVGAVGVGK (KRAS G12V)
IVGRVKVGF

SEQ ID NO: 72640 - protein, 9 aa, synthetic construct
  source 1..9: note = Seed: VVGAVGVGK (KRAS G12V)
IVGRVKVGG

SEQ ID NO: 72641 - protein, 9 aa, synthetic construct
  source 1..9: note = Seed: VVGAVGVGK (KRAS G12V)
IVGRVKVGH

SEQ ID NO: 72642 - protein, 9 aa, synthetic construct
  source 1..9: note = Seed: VVGAVGVGK (KRAS G12V)
IVGRVKVGI

SEQ ID NO: 72643 - protein, 9 aa, synthetic construct
  source 1..9: note = Seed: VVGAVGVGK (KRAS G12V)
IVGRVKVGK

SEQ ID NO: 72644 - protein, 9 aa, synthetic construct
  source 1..9: note = Seed: VVGAVGVGK (KRAS G12V)
IVGRVKVGL

SEQ ID NO: 72645 - protein, 9 aa, synthetic construct
  source 1..9: note = Seed: VVGAVGVGK (KRAS G12V)
IVGRVKVGM

SEQ ID NO: 72646 - protein, 9 aa, synthetic construct
  source 1..9: note = Seed: VVGAVGVGK (KRAS G12V)
IVGRVKVGN

SEQ ID NO: 72647 - protein, 9 aa, synthetic construct
  source 1..9: note = Seed: VVGAVGVGK (KRAS G12V)
IVGRVKVGP

SEQ ID NO: 72648 - protein, 9 aa, synthetic construct
  source 1..9: note = Seed: VVGAVGVGK (KRAS G12V)
IVGRVKVGQ

SEQ ID NO: 72649 - protein, 9 aa, synthetic construct
  source 1..9: note = Seed: VVGAVGVGK (KRAS G12V)
IVGRVKVGR

SEQ ID NO: 72650 - protein, 9 aa, synthetic construct
  source 1..9: note = Seed: VVGAVGVGK (KRAS G12V)
IVGRVKVGS

SEQ ID NO: 72651 - protein, 9 aa, synthetic construct
  source 1..9: note = Seed: VVGAVGVGK (KRAS G12V)
IVGRVKVGT

SEQ ID NO: 72652 - protein, 9 aa, synthetic construct
  source 1..9: note = Seed: VVGAVGVGK (KRAS G12V)
IVGRVKVGV

SEQ ID NO: 72653 - protein, 9 aa, synthetic construct
  source 1..9: note = Seed: VVGAVGVGK (KRAS G12V)
IVGRVKVGY

SEQ ID NO: 72654 - protein, 9 aa, synthetic construct
  source 1..9: note = Seed: VVGAVGVGK (KRAS G12V)
IVGRVLVGR

SEQ ID NO: 72655 - protein, 9 aa, synthetic construct
  source 1..9: note = Seed: VVGAVGVGK (KRAS G12V)
IVGRVMVGR

SEQ ID NO: 72656 - protein, 9 aa, synthetic construct
  source 1..9: note = Seed: VVGAVGVGK (KRAS G12V)
IVGRVNVGF

SEQ ID NO: 72657 - protein, 9 aa, synthetic construct
  source 1..9: note = Seed: VVGAVGVGK (KRAS G12V)
IVGRVNVGH

SEQ ID NO: 72658 - protein, 9 aa, synthetic construct
  source 1..9: note = Seed: VVGAVGVGK (KRAS G12V)
IVGRVNVGK

SEQ ID NO: 72659 - protein, 9 aa, synthetic construct
  source 1..9: note = Seed: VVGAVGVGK (KRAS G12V)
IVGRVNVGM

SEQ ID NO: 72660 - protein, 9 aa, synthetic construct
  source 1..9: note = Seed: VVGAVGVGK (KRAS G12V)
IVGRVNVGR

SEQ ID NO: 72661 - protein, 9 aa, synthetic construct
  source 1..9: note = Seed: VVGAVGVGK (KRAS G12V)
IVGRVNVGV

SEQ ID NO: 72662 - protein, 9 aa, synthetic construct
  source 1..9: note = Seed: VVGAVGVGK (KRAS G12V)
IVGRVNVGY

SEQ ID NO: 72663 - protein, 9 aa, synthetic construct
  source 1..9: note = Seed: VVGAVGVGK (KRAS G12V)
IVGRVPVGK

SEQ ID NO: 72664 - protein, 9 aa, synthetic construct
  source 1..9: note = Seed: VVGAVGVGK (KRAS G12V)
IVGRVPVGR

SEQ ID NO: 72665 - protein, 9 aa, synthetic construct
  source 1..9: note = Seed: VVGAVGVGK (KRAS G12V)
IVGRVPVGY

SEQ ID NO: 72666 - protein, 9 aa, synthetic construct
  source 1..9: note = Seed: VVGAVGVGK (KRAS G12V)
IVGRVQVGK

SEQ ID NO: 72667 - protein, 9 aa, synthetic construct
  source 1..9: note = Seed: VVGAVGVGK (KRAS G12V)
IVGRVQVGR

SEQ ID NO: 72668 - protein, 9 aa, synthetic construct
  source 1..9: note = Seed: VVGAVGVGK (KRAS G12V)
IVGRVRVGA

SEQ ID NO: 72669 - protein, 9 aa, synthetic construct
  source 1..9: note = Seed: VVGAVGVGK (KRAS G12V)
IVGRVRVGC

SEQ ID NO: 72670 - protein, 9 aa, synthetic construct
  source 1..9: note = Seed: VVGAVGVGK (KRAS G12V)
IVGRVRVGD

SEQ ID NO: 72671 - protein, 9 aa, synthetic construct
  source 1..9: note = Seed: VVGAVGVGK (KRAS G12V)
IVGRVRVGE

SEQ ID NO: 72672 - protein, 9 aa, synthetic construct
  source 1..9: note = Seed: VVGAVGVGK (KRAS G12V)
IVGRVRVGF

SEQ ID NO: 72673 - protein, 9 aa, synthetic construct
  source 1..9: note = Seed: VVGAVGVGK (KRAS G12V)
IVGRVRVGG

SEQ ID NO: 72674 - protein, 9 aa, synthetic construct
  source 1..9: note = Seed: VVGAVGVGK (KRAS G12V)
IVGRVRVGH

SEQ ID NO: 72675 - protein, 9 aa, synthetic construct
  source 1..9: note = Seed: VVGAVGVGK (KRAS G12V)
IVGRVRVGI

SEQ ID NO: 72676 - protein, 9 aa, synthetic construct
  source 1..9: note = Seed: VVGAVGVGK (KRAS G12V)
IVGRVRVGK

SEQ ID NO: 72677 - protein, 9 aa, synthetic construct
  source 1..9: note = Seed: VVGAVGVGK (KRAS G12V)
IVGRVRVGL

SEQ ID NO: 72678 - protein, 9 aa, synthetic construct
  source 1..9: note = Seed: VVGAVGVGK (KRAS G12V)
IVGRVRVGM

SEQ ID NO: 72679 - protein, 9 aa, synthetic construct
  source 1..9: note = Seed: VVGAVGVGK (KRAS G12V)
IVGRVRVGN

SEQ ID NO: 72680 - protein, 9 aa, synthetic construct
  source 1..9: note = Seed: VVGAVGVGK (KRAS G12V)
IVGRVRVGP

SEQ ID NO: 72681 - protein, 9 aa, synthetic construct
  source 1..9: note = Seed: VVGAVGVGK (KRAS G12V)
IVGRVRVGQ

SEQ ID NO: 72682 - protein, 9 aa, synthetic construct
  source 1..9: note = Seed: VVGAVGVGK (KRAS G12V)
IVGRVRVGR

SEQ ID NO: 72683 - protein, 9 aa, synthetic construct
  source 1..9: note = Seed: VVGAVGVGK (KRAS G12V)
IVGRVRVGS

SEQ ID NO: 72684 - protein, 9 aa, synthetic construct
  source 1..9: note = Seed: VVGAVGVGK (KRAS G12V)
IVGRVRVGT

SEQ ID NO: 72685 - protein, 9 aa, synthetic construct
  source 1..9: note = Seed: VVGAVGVGK (KRAS G12V)
IVGRVRVGV

SEQ ID NO: 72686 - protein, 9 aa, synthetic construct
  source 1..9: note = Seed: VVGAVGVGK (KRAS G12V)
IVGRVRVGY

SEQ ID NO: 72687 - protein, 9 aa, synthetic construct
  source 1..9: note = Seed: VVGAVGVGK (KRAS G12V)
IVGRVSVGH

SEQ ID NO: 72688 - protein, 9 aa, synthetic construct
  source 1..9: note = Seed: VVGAVGVGK (KRAS G12V)
IVGRVSVGK

SEQ ID NO: 72689 - protein, 9 aa, synthetic construct
  source 1..9: note = Seed: VVGAVGVGK (KRAS G12V)
IVGRVSVGR

SEQ ID NO: 72690 - protein, 9 aa, synthetic construct
  source 1..9: note = Seed: VVGAVGVGK (KRAS G12V)
IVGRVSVGY

SEQ ID NO: 72691 - protein, 9 aa, synthetic construct
  source 1..9: note = Seed: VVGAVGVGK (KRAS G12V)
IVGRVTVGH

SEQ ID NO: 72692 - protein, 9 aa, synthetic construct
  source 1..9: note = Seed: VVGAVGVGK (KRAS G12V)
IVGRVTVGK

SEQ ID NO: 72693 - protein, 9 aa, synthetic construct
  source 1..9: note = Seed: VVGAVGVGK (KRAS G12V)
IVGRVTVGR

SEQ ID NO: 72694 - protein, 9 aa, synthetic construct
  source 1..9: note = Seed: VVGAVGVGK (KRAS G12V)
IVGRVTVGY

SEQ ID NO: 72695 - protein, 9 aa, synthetic construct
  source 1..9: note = Seed: VVGAVGVGK (KRAS G12V)
IVGRVVVGK

SEQ ID NO: 72696 - protein, 9 aa, synthetic construct
  source 1..9: note = Seed: VVGAVGVGK (KRAS G12V)
IVGRVVVGR

SEQ ID NO: 72697 - protein, 9 aa, synthetic construct
  source 1..9: note = Seed: VVGAVGVGK (KRAS G12V)
IVGSVAVGA

SEQ ID NO: 72698 - protein, 9 aa, synthetic construct
  source 1..9: note = Seed: VVGAVGVGK (KRAS G12V)
IVGSVAVGH

SEQ ID NO: 72699 - protein, 9 aa, synthetic construct
  source 1..9: note = Seed: VVGAVGVGK (KRAS G12V)
IVGSVAVGI

SEQ ID NO: 72700 - protein, 9 aa, synthetic construct
  source 1..9: note = Seed: VVGAVGVGK (KRAS G12V)
IVGSVAVGK

SEQ ID NO: 72701 - protein, 9 aa, synthetic construct
  source 1..9: note = Seed: VVGAVGVGK (KRAS G12V)
IVGSVAVGL

SEQ ID NO: 72702 - protein, 9 aa, synthetic construct
  source 1..9: note = Seed: VVGAVGVGK (KRAS G12V)
IVGSVAVGM

SEQ ID NO: 72703 - protein, 9 aa, synthetic construct
  source 1..9: note = Seed: VVGAVGVGK (KRAS G12V)
IVGSVAVGN

SEQ ID NO: 72704 - protein, 9 aa, synthetic construct
  source 1..9: note = Seed: VVGAVGVGK (KRAS G12V)
IVGSVAVGR

SEQ ID NO: 72705 - protein, 9 aa, synthetic construct
  source 1..9: note = Seed: VVGAVGVGK (KRAS G12V)
IVGSVAVGS

SEQ ID NO: 72706 - protein, 9 aa, synthetic construct
  source 1..9: note = Seed: VVGAVGVGK (KRAS G12V)
IVGSVAVGT

SEQ ID NO: 72707 - protein, 9 aa, synthetic construct
  source 1..9: note = Seed: VVGAVGVGK (KRAS G12V)
IVGSVAVGV

SEQ ID NO: 72708 - protein, 9 aa, synthetic construct
  source 1..9: note = Seed: VVGAVGVGK (KRAS G12V)
IVGSVAVGY

SEQ ID NO: 72709 - protein, 9 aa, synthetic construct
  source 1..9: note = Seed: VVGAVGVGK (KRAS G12V)
IVGSVGVGA

SEQ ID NO: 72710 - protein, 9 aa, synthetic construct
  source 1..9: note = Seed: VVGAVGVGK (KRAS G12V)
IVGSVGVGL

SEQ ID NO: 72711 - protein, 9 aa, synthetic construct
  source 1..9: note = Seed: VVGAVGVGK (KRAS G12V)
IVGSVGVGR

SEQ ID NO: 72712 - protein, 9 aa, synthetic construct
  source 1..9: note = Seed: VVGAVGVGK (KRAS G12V)
IVGSVGVGV

SEQ ID NO: 72713 - protein, 9 aa, synthetic construct
  source 1..9: note = Seed: VVGAVGVGK (KRAS G12V)
IVGSVHVGK

SEQ ID NO: 72714 - protein, 9 aa, synthetic construct
  source 1..9: note = Seed: VVGAVGVGK (KRAS G12V)
IVGSVHVGR

SEQ ID NO: 72715 - protein, 9 aa, synthetic construct
  source 1..9: note = Seed: VVGAVGVGK (KRAS G12V)
IVGSVHVGY

SEQ ID NO: 72716 - protein, 9 aa, synthetic construct
  source 1..9: note = Seed: VVGAVGVGK (KRAS G12V)
IVGSVIVGR

SEQ ID NO: 72717 - protein, 9 aa, synthetic construct
  source 1..9: note = Seed: VVGAVGVGK (KRAS G12V)
IVGSVKVGA

SEQ ID NO: 72718 - protein, 9 aa, synthetic construct
  source 1..9: note = Seed: VVGAVGVGK (KRAS G12V)
IVGSVKVGF

SEQ ID NO: 72719 - protein, 9 aa, synthetic construct
  source 1..9: note = Seed: VVGAVGVGK (KRAS G12V)
IVGSVKVGG

SEQ ID NO: 72720 - protein, 9 aa, synthetic construct
  source 1..9: note = Seed: VVGAVGVGK (KRAS G12V)
IVGSVKVGH

SEQ ID NO: 72721 - protein, 9 aa, synthetic construct
  source 1..9: note = Seed: VVGAVGVGK (KRAS G12V)
IVGSVKVGI

SEQ ID NO: 72722 - protein, 9 aa, synthetic construct
  source 1..9: note = Seed: VVGAVGVGK (KRAS G12V)
IVGSVKVGK

SEQ ID NO: 72723 - protein, 9 aa, synthetic construct
  source 1..9: note = Seed: VVGAVGVGK (KRAS G12V)
IVGSVKVGL

SEQ ID NO: 72724 - protein, 9 aa, synthetic construct
  source 1..9: note = Seed: VVGAVGVGK (KRAS G12V)
IVGSVKVGM

SEQ ID NO: 72725 - protein, 9 aa, synthetic construct
  source 1..9: note = Seed: VVGAVGVGK (KRAS G12V)
IVGSVKVGN

SEQ ID NO: 72726 - protein, 9 aa, synthetic construct
  source 1..9: note = Seed: VVGAVGVGK (KRAS G12V)
IVGSVKVGQ

SEQ ID NO: 72727 - protein, 9 aa, synthetic construct
  source 1..9: note = Seed: VVGAVGVGK (KRAS G12V)
IVGSVKVGR

SEQ ID NO: 72728 - protein, 9 aa, synthetic construct
  source 1..9: note = Seed: VVGAVGVGK (KRAS G12V)
IVGSVKVGS

SEQ ID NO: 72729 - protein, 9 aa, synthetic construct
  source 1..9: note = Seed: VVGAVGVGK (KRAS G12V)
IVGSVKVGT

SEQ ID NO: 72730 - protein, 9 aa, synthetic construct
  source 1..9: note = Seed: VVGAVGVGK (KRAS G12V)
IVGSVKVGV

SEQ ID NO: 72731 - protein, 9 aa, synthetic construct
  source 1..9: note = Seed: VVGAVGVGK (KRAS G12V)
IVGSVKVGY

SEQ ID NO: 72732 - protein, 9 aa, synthetic construct
  source 1..9: note = Seed: VVGAVGVGK (KRAS G12V)
IVGSVMVGR

SEQ ID NO: 72733 - protein, 9 aa, synthetic construct
  source 1..9: note = Seed: VVGAVGVGK (KRAS G12V)
IVGSVNVGR

SEQ ID NO: 72734 - protein, 9 aa, synthetic construct
  source 1..9: note = Seed: VVGAVGVGK (KRAS G12V)
IVGSVNVGY

SEQ ID NO: 72735 - protein, 9 aa, synthetic construct
  source 1..9: note = Seed: VVGAVGVGK (KRAS G12V)
IVGSVPVGA

SEQ ID NO: 72736 - protein, 9 aa, synthetic construct
  source 1..9: note = Seed: VVGAVGVGK (KRAS G12V)
IVGSVPVGF

SEQ ID NO: 72737 - protein, 9 aa, synthetic construct
  source 1..9: note = Seed: VVGAVGVGK (KRAS G12V)
IVGSVPVGG

SEQ ID NO: 72738 - protein, 9 aa, synthetic construct
  source 1..9: note = Seed: VVGAVGVGK (KRAS G12V)
IVGSVPVGH

SEQ ID NO: 72739 - protein, 9 aa, synthetic construct
  source 1..9: note = Seed: VVGAVGVGK (KRAS G12V)
IVGSVPVGI

SEQ ID NO: 72740 - protein, 9 aa, synthetic construct
  source 1..9: note = Seed: VVGAVGVGK (KRAS G12V)
IVGSVPVGK

SEQ ID NO: 72741 - protein, 9 aa, synthetic construct
  source 1..9: note = Seed: VVGAVGVGK (KRAS G12V)
IVGSVPVGL

SEQ ID NO: 72742 - protein, 9 aa, synthetic construct
  source 1..9: note = Seed: VVGAVGVGK (KRAS G12V)
IVGSVPVGM

SEQ ID NO: 72743 - protein, 9 aa, synthetic construct
  source 1..9: note = Seed: VVGAVGVGK (KRAS G12V)
IVGSVPVGN

SEQ ID NO: 72744 - protein, 9 aa, synthetic construct
  source 1..9: note = Seed: VVGAVGVGK (KRAS G12V)
IVGSVPVGQ

SEQ ID NO: 72745 - protein, 9 aa, synthetic construct
  source 1..9: note = Seed: VVGAVGVGK (KRAS G12V)
IVGSVPVGR

SEQ ID NO: 72746 - protein, 9 aa, synthetic construct
  source 1..9: note = Seed: VVGAVGVGK (KRAS G12V)
IVGSVPVGS

SEQ ID NO: 72747 - protein, 9 aa, synthetic construct
  source 1..9: note = Seed: VVGAVGVGK (KRAS G12V)
IVGSVPVGT

SEQ ID NO: 72748 - protein, 9 aa, synthetic construct
  source 1..9: note = Seed: VVGAVGVGK (KRAS G12V)
IVGSVPVGV

SEQ ID NO: 72749 - protein, 9 aa, synthetic construct
  source 1..9: note = Seed: VVGAVGVGK (KRAS G12V)
IVGSVPVGY

SEQ ID NO: 72750 - protein, 9 aa, synthetic construct
  source 1..9: note = Seed: VVGAVGVGK (KRAS G12V)
IVGSVQVGR

SEQ ID NO: 72751 - protein, 9 aa, synthetic construct
  source 1..9: note = Seed: VVGAVGVGK (KRAS G12V)
IVGSVRVGA

SEQ ID NO: 72752 - protein, 9 aa, synthetic construct
  source 1..9: note = Seed: VVGAVGVGK (KRAS G12V)
IVGSVRVGF

SEQ ID NO: 72753 - protein, 9 aa, synthetic construct
  source 1..9: note = Seed: VVGAVGVGK (KRAS G12V)
IVGSVRVGG

SEQ ID NO: 72754 - protein, 9 aa, synthetic construct
  source 1..9: note = Seed: VVGAVGVGK (KRAS G12V)
IVGSVRVGH

SEQ ID NO: 72755 - protein, 9 aa, synthetic construct
  source 1..9: note = Seed: VVGAVGVGK (KRAS G12V)
IVGSVRVGI

SEQ ID NO: 72756 - protein, 9 aa, synthetic construct
  source 1..9: note = Seed: VVGAVGVGK (KRAS G12V)
IVGSVRVGK

SEQ ID NO: 72757 - protein, 9 aa, synthetic construct
  source 1..9: note = Seed: VVGAVGVGK (KRAS G12V)
IVGSVRVGL

SEQ ID NO: 72758 - protein, 9 aa, synthetic construct
  source 1..9: note = Seed: VVGAVGVGK (KRAS G12V)
IVGSVRVGM

SEQ ID NO: 72759 - protein, 9 aa, synthetic construct
  source 1..9: note = Seed: VVGAVGVGK (KRAS G12V)
IVGSVRVGN

SEQ ID NO: 72760 - protein, 9 aa, synthetic construct
  source 1..9: note = Seed: VVGAVGVGK (KRAS G12V)
IVGSVRVGP

SEQ ID NO: 72761 - protein, 9 aa, synthetic construct
  source 1..9: note = Seed: VVGAVGVGK (KRAS G12V)
IVGSVRVGQ

SEQ ID NO: 72762 - protein, 9 aa, synthetic construct
  source 1..9: note = Seed: VVGAVGVGK (KRAS G12V)
IVGSVRVGR

SEQ ID NO: 72763 - protein, 9 aa, synthetic construct
  source 1..9: note = Seed: VVGAVGVGK (KRAS G12V)
IVGSVRVGS

SEQ ID NO: 72764 - protein, 9 aa, synthetic construct
  source 1..9: note = Seed: VVGAVGVGK (KRAS G12V)
IVGSVRVGT

SEQ ID NO: 72765 - protein, 9 aa, synthetic construct
  source 1..9: note = Seed: VVGAVGVGK (KRAS G12V)
IVGSVRVGV

SEQ ID NO: 72766 - protein, 9 aa, synthetic construct
  source 1..9: note = Seed: VVGAVGVGK (KRAS G12V)
IVGSVRVGY

SEQ ID NO: 72767 - protein, 9 aa, synthetic construct
  source 1..9: note = Seed: VVGAVGVGK (KRAS G12V)
IVGSVSVGA

SEQ ID NO: 72768 - protein, 9 aa, synthetic construct
  source 1..9: note = Seed: VVGAVGVGK (KRAS G12V)
IVGSVSVGI

SEQ ID NO: 72769 - protein, 9 aa, synthetic construct
  source 1..9: note = Seed: VVGAVGVGK (KRAS G12V)
IVGSVSVGK

SEQ ID NO: 72770 - protein, 9 aa, synthetic construct
  source 1..9: note = Seed: VVGAVGVGK (KRAS G12V)
IVGSVSVGR

SEQ ID NO: 72771 - protein, 9 aa, synthetic construct
  source 1..9: note = Seed: VVGAVGVGK (KRAS G12V)
IVGSVSVGV

SEQ ID NO: 72772 - protein, 9 aa, synthetic construct
  source 1..9: note = Seed: VVGAVGVGK (KRAS G12V)
IVGSVTVGR

SEQ ID NO: 72773 - protein, 9 aa, synthetic construct
  source 1..9: note = Seed: VVGAVGVGK (KRAS G12V)
IVGSVVVGR

SEQ ID NO: 72774 - protein, 9 aa, synthetic construct
  source 1..9: note = Seed: VVGAVGVGK (KRAS G12V)
IVGTVAVGR

SEQ ID NO: 72775 - protein, 9 aa, synthetic construct
  source 1..9: note = Seed: VVGAVGVGK (KRAS G12V)
IVGTVGVGR

SEQ ID NO: 72776 - protein, 9 aa, synthetic construct
  source 1..9: note = Seed: VVGAVGVGK (KRAS G12V)
IVGTVHVGR

SEQ ID NO: 72777 - protein, 9 aa, synthetic construct
  source 1..9: note = Seed: VVGAVGVGK (KRAS G12V)
IVGTVKVGA

SEQ ID NO: 72778 - protein, 9 aa, synthetic construct
  source 1..9: note = Seed: VVGAVGVGK (KRAS G12V)
IVGTVKVGF

SEQ ID NO: 72779 - protein, 9 aa, synthetic construct
  source 1..9: note = Seed: VVGAVGVGK (KRAS G12V)
IVGTVKVGG

SEQ ID NO: 72780 - protein, 9 aa, synthetic construct
  source 1..9: note = Seed: VVGAVGVGK (KRAS G12V)
IVGTVKVGH

SEQ ID NO: 72781 - protein, 9 aa, synthetic construct
  source 1..9: note = Seed: VVGAVGVGK (KRAS G12V)
IVGTVKVGK

SEQ ID NO: 72782 - protein, 9 aa, synthetic construct
  source 1..9: note = Seed: VVGAVGVGK (KRAS G12V)
IVGTVKVGL

SEQ ID NO: 72783 - protein, 9 aa, synthetic construct
  source 1..9: note = Seed: VVGAVGVGK (KRAS G12V)
IVGTVKVGM

SEQ ID NO: 72784 - protein, 9 aa, synthetic construct
  source 1..9: note = Seed: VVGAVGVGK (KRAS G12V)
IVGTVKVGQ

SEQ ID NO: 72785 - protein, 9 aa, synthetic construct
  source 1..9: note = Seed: VVGAVGVGK (KRAS G12V)
IVGTVKVGR

SEQ ID NO: 72786 - protein, 9 aa, synthetic construct
  source 1..9: note = Seed: VVGAVGVGK (KRAS G12V)
IVGTVKVGS

SEQ ID NO: 72787 - protein, 9 aa, synthetic construct
  source 1..9: note = Seed: VVGAVGVGK (KRAS G12V)
IVGTVKVGT

SEQ ID NO: 72788 - protein, 9 aa, synthetic construct
  source 1..9: note = Seed: VVGAVGVGK (KRAS G12V)
IVGTVKVGV

SEQ ID NO: 72789 - protein, 9 aa, synthetic construct
  source 1..9: note = Seed: VVGAVGVGK (KRAS G12V)
IVGTVKVGY

SEQ ID NO: 72790 - protein, 9 aa, synthetic construct
  source 1..9: note = Seed: VVGAVGVGK (KRAS G12V)
IVGTVNVGR

SEQ ID NO: 72791 - protein, 9 aa, synthetic construct
  source 1..9: note = Seed: VVGAVGVGK (KRAS G12V)
IVGTVPVGA

SEQ ID NO: 72792 - protein, 9 aa, synthetic construct
  source 1..9: note = Seed: VVGAVGVGK (KRAS G12V)
IVGTVPVGF

SEQ ID NO: 72793 - protein, 9 aa, synthetic construct
  source 1..9: note = Seed: VVGAVGVGK (KRAS G12V)
IVGTVPVGI

SEQ ID NO: 72794 - protein, 9 aa, synthetic construct
  source 1..9: note = Seed: VVGAVGVGK (KRAS G12V)
IVGTVPVGK

SEQ ID NO: 72795 - protein, 9 aa, synthetic construct
  source 1..9: note = Seed: VVGAVGVGK (KRAS G12V)
IVGTVPVGL

SEQ ID NO: 72796 - protein, 9 aa, synthetic construct
  source 1..9: note = Seed: VVGAVGVGK (KRAS G12V)
IVGTVPVGM

SEQ ID NO: 72797 - protein, 9 aa, synthetic construct
  source 1..9: note = Seed: VVGAVGVGK (KRAS G12V)
IVGTVPVGR

SEQ ID NO: 72798 - protein, 9 aa, synthetic construct
  source 1..9: note = Seed: VVGAVGVGK (KRAS G12V)
IVGTVPVGS

SEQ ID NO: 72799 - protein, 9 aa, synthetic construct
  source 1..9: note = Seed: VVGAVGVGK (KRAS G12V)
IVGTVPVGT

SEQ ID NO: 72800 - protein, 9 aa, synthetic construct
  source 1..9: note = Seed: VVGAVGVGK (KRAS G12V)
IVGTVPVGV

SEQ ID NO: 72801 - protein, 9 aa, synthetic construct
  source 1..9: note = Seed: VVGAVGVGK (KRAS G12V)
IVGTVPVGY

SEQ ID NO: 72802 - protein, 9 aa, synthetic construct
  source 1..9: note = Seed: VVGAVGVGK (KRAS G12V)
IVGTVRVGA

SEQ ID NO: 72803 - protein, 9 aa, synthetic construct
  source 1..9: note = Seed: VVGAVGVGK (KRAS G12V)
IVGTVRVGF

SEQ ID NO: 72804 - protein, 9 aa, synthetic construct
  source 1..9: note = Seed: VVGAVGVGK (KRAS G12V)
IVGTVRVGG

SEQ ID NO: 72805 - protein, 9 aa, synthetic construct
  source 1..9: note = Seed: VVGAVGVGK (KRAS G12V)
IVGTVRVGH

SEQ ID NO: 72806 - protein, 9 aa, synthetic construct
  source 1..9: note = Seed: VVGAVGVGK (KRAS G12V)
IVGTVRVGI

SEQ ID NO: 72807 - protein, 9 aa, synthetic construct
  source 1..9: note = Seed: VVGAVGVGK (KRAS G12V)
IVGTVRVGK

SEQ ID NO: 72808 - protein, 9 aa, synthetic construct
  source 1..9: note = Seed: VVGAVGVGK (KRAS G12V)
IVGTVRVGL

SEQ ID NO: 72809 - protein, 9 aa, synthetic construct
  source 1..9: note = Seed: VVGAVGVGK (KRAS G12V)
IVGTVRVGM

SEQ ID NO: 72810 - protein, 9 aa, synthetic construct
  source 1..9: note = Seed: VVGAVGVGK (KRAS G12V)
IVGTVRVGN

SEQ ID NO: 72811 - protein, 9 aa, synthetic construct
  source 1..9: note = Seed: VVGAVGVGK (KRAS G12V)
IVGTVRVGQ

SEQ ID NO: 72812 - protein, 9 aa, synthetic construct
  source 1..9: note = Seed: VVGAVGVGK (KRAS G12V)
IVGTVRVGR

SEQ ID NO: 72813 - protein, 9 aa, synthetic construct
  source 1..9: note = Seed: VVGAVGVGK (KRAS G12V)
IVGTVRVGS

SEQ ID NO: 72814 - protein, 9 aa, synthetic construct
  source 1..9: note = Seed: VVGAVGVGK (KRAS G12V)
IVGTVRVGT

SEQ ID NO: 72815 - protein, 9 aa, synthetic construct
  source 1..9: note = Seed: VVGAVGVGK (KRAS G12V)
IVGTVRVGV

SEQ ID NO: 72816 - protein, 9 aa, synthetic construct
  source 1..9: note = Seed: VVGAVGVGK (KRAS G12V)
IVGTVRVGY

SEQ ID NO: 72817 - protein, 9 aa, synthetic construct
  source 1..9: note = Seed: VVGAVGVGK (KRAS G12V)
IVGTVSVGI

SEQ ID NO: 72818 - protein, 9 aa, synthetic construct
  source 1..9: note = Seed: VVGAVGVGK (KRAS G12V)
IVGTVSVGR

SEQ ID NO: 72819 - protein, 9 aa, synthetic construct
  source 1..9: note = Seed: VVGAVGVGK (KRAS G12V)
IVGTVTVGR

SEQ ID NO: 72820 - protein, 9 aa, synthetic construct
  source 1..9: note = Seed: VVGAVGVGK (KRAS G12V)
IVGTVVVGR

SEQ ID NO: 72821 - protein, 9 aa, synthetic construct
  source 1..9: note = Seed: VVGAVGVGK (KRAS G12V)
IVGVVAVGH

SEQ ID NO: 72822 - protein, 9 aa, synthetic construct
  source 1..9: note = Seed: VVGAVGVGK (KRAS G12V)
IVGVVAVGR

SEQ ID NO: 72823 - protein, 9 aa, synthetic construct
  source 1..9: note = Seed: VVGAVGVGK (KRAS G12V)
IVGVVGVGR

SEQ ID NO: 72824 - protein, 9 aa, synthetic construct
  source 1..9: note = Seed: VVGAVGVGK (KRAS G12V)
IVGVVHVGK

SEQ ID NO: 72825 - protein, 9 aa, synthetic construct
  source 1..9: note = Seed: VVGAVGVGK (KRAS G12V)
IVGVVHVGR

SEQ ID NO: 72826 - protein, 9 aa, synthetic construct
  source 1..9: note = Seed: VVGAVGVGK (KRAS G12V)
IVGVVKVGA

SEQ ID NO: 72827 - protein, 9 aa, synthetic construct
  source 1..9: note = Seed: VVGAVGVGK (KRAS G12V)
IVGVVKVGG

SEQ ID NO: 72828 - protein, 9 aa, synthetic construct
  source 1..9: note = Seed: VVGAVGVGK (KRAS G12V)
IVGVVKVGH

SEQ ID NO: 72829 - protein, 9 aa, synthetic construct
  source 1..9: note = Seed: VVGAVGVGK (KRAS G12V)
IVGVVKVGK

SEQ ID NO: 72830 - protein, 9 aa, synthetic construct
  source 1..9: note = Seed: VVGAVGVGK (KRAS G12V)
IVGVVKVGM

SEQ ID NO: 72831 - protein, 9 aa, synthetic construct
  source 1..9: note = Seed: VVGAVGVGK (KRAS G12V)
IVGVVKVGN

SEQ ID NO: 72832 - protein, 9 aa, synthetic construct
  source 1..9: note = Seed: VVGAVGVGK (KRAS G12V)
IVGVVKVGP

SEQ ID NO: 72833 - protein, 9 aa, synthetic construct
  source 1..9: note = Seed: VVGAVGVGK (KRAS G12V)
IVGVVKVGQ

SEQ ID NO: 72834 - protein, 9 aa, synthetic construct
  source 1..9: note = Seed: VVGAVGVGK (KRAS G12V)
IVGVVKVGR

SEQ ID NO: 72835 - protein, 9 aa, synthetic construct
  source 1..9: note = Seed: VVGAVGVGK (KRAS G12V)
IVGVVKVGS

SEQ ID NO: 72836 - protein, 9 aa, synthetic construct
  source 1..9: note = Seed: VVGAVGVGK (KRAS G12V)
IVGVVKVGT

SEQ ID NO: 72837 - protein, 9 aa, synthetic construct
  source 1..9: note = Seed: VVGAVGVGK (KRAS G12V)
IVGVVKVGY

SEQ ID NO: 72838 - protein, 9 aa, synthetic construct
  source 1..9: note = Seed: VVGAVGVGK (KRAS G12V)
IVGVVMVGR

SEQ ID NO: 72839 - protein, 9 aa, synthetic construct
  source 1..9: note = Seed: VVGAVGVGK (KRAS G12V)
IVGVVNVGR

SEQ ID NO: 72840 - protein, 9 aa, synthetic construct
  source 1..9: note = Seed: VVGAVGVGK (KRAS G12V)
IVGVVPVGA

SEQ ID NO: 72841 - protein, 9 aa, synthetic construct
  source 1..9: note = Seed: VVGAVGVGK (KRAS G12V)
IVGVVPVGI

SEQ ID NO: 72842 - protein, 9 aa, synthetic construct
  source 1..9: note = Seed: VVGAVGVGK (KRAS G12V)
IVGVVPVGK

SEQ ID NO: 72843 - protein, 9 aa, synthetic construct
  source 1..9: note = Seed: VVGAVGVGK (KRAS G12V)
IVGVVPVGL

SEQ ID NO: 72844 - protein, 9 aa, synthetic construct
  source 1..9: note = Seed: VVGAVGVGK (KRAS G12V)
IVGVVPVGM

SEQ ID NO: 72845 - protein, 9 aa, synthetic construct
  source 1..9: note = Seed: VVGAVGVGK (KRAS G12V)
IVGVVPVGR

SEQ ID NO: 72846 - protein, 9 aa, synthetic construct
  source 1..9: note = Seed: VVGAVGVGK (KRAS G12V)
IVGVVPVGS

SEQ ID NO: 72847 - protein, 9 aa, synthetic construct
  source 1..9: note = Seed: VVGAVGVGK (KRAS G12V)
IVGVVPVGT

SEQ ID NO: 72848 - protein, 9 aa, synthetic construct
  source 1..9: note = Seed: VVGAVGVGK (KRAS G12V)
IVGVVPVGV

SEQ ID NO: 72849 - protein, 9 aa, synthetic construct
  source 1..9: note = Seed: VVGAVGVGK (KRAS G12V)
IVGVVPVGY

SEQ ID NO: 72850 - protein, 9 aa, synthetic construct
  source 1..9: note = Seed: VVGAVGVGK (KRAS G12V)
IVGVVRVGA

SEQ ID NO: 72851 - protein, 9 aa, synthetic construct
  source 1..9: note = Seed: VVGAVGVGK (KRAS G12V)
IVGVVRVGG

SEQ ID NO: 72852 - protein, 9 aa, synthetic construct
  source 1..9: note = Seed: VVGAVGVGK (KRAS G12V)
IVGVVRVGH

SEQ ID NO: 72853 - protein, 9 aa, synthetic construct
  source 1..9: note = Seed: VVGAVGVGK (KRAS G12V)
IVGVVRVGK

SEQ ID NO: 72854 - protein, 9 aa, synthetic construct
  source 1..9: note = Seed: VVGAVGVGK (KRAS G12V)
IVGVVRVGN

SEQ ID NO: 72855 - protein, 9 aa, synthetic construct
  source 1..9: note = Seed: VVGAVGVGK (KRAS G12V)
IVGVVRVGP

SEQ ID NO: 72856 - protein, 9 aa, synthetic construct
  source 1..9: note = Seed: VVGAVGVGK (KRAS G12V)
IVGVVRVGQ

SEQ ID NO: 72857 - protein, 9 aa, synthetic construct
  source 1..9: note = Seed: VVGAVGVGK (KRAS G12V)
IVGVVRVGR

SEQ ID NO: 72858 - protein, 9 aa, synthetic construct
  source 1..9: note = Seed: VVGAVGVGK (KRAS G12V)
IVGVVRVGS

SEQ ID NO: 72859 - protein, 9 aa, synthetic construct
  source 1..9: note = Seed: VVGAVGVGK (KRAS G12V)
IVGVVRVGT

SEQ ID NO: 72860 - protein, 9 aa, synthetic construct
  source 1..9: note = Seed: VVGAVGVGK (KRAS G12V)
IVGVVRVGY

SEQ ID NO: 72861 - protein, 9 aa, synthetic construct
  source 1..9: note = Seed: VVGAVGVGK (KRAS G12V)
IVGVVSVGR

SEQ ID NO: 72862 - protein, 9 aa, synthetic construct
  source 1..9: note = Seed: VVGAVGVGK (KRAS G12V)
IVGVVTVGR

SEQ ID NO: 72863 - protein, 9 aa, synthetic construct
  source 1..9: note = Seed: VVGAVGVGK (KRAS G12V)
IVGWVAVGR

SEQ ID NO: 72864 - protein, 9 aa, synthetic construct
  source 1..9: note = Seed: VVGAVGVGK (KRAS G12V)
IVGWVGVGR

SEQ ID NO: 72865 - protein, 9 aa, synthetic construct
  source 1..9: note = Seed: VVGAVGVGK (KRAS G12V)
IVGWVHVGR

SEQ ID NO: 72866 - protein, 9 aa, synthetic construct
  source 1..9: note = Seed: VVGAVGVGK (KRAS G12V)
IVGWVKVGA

SEQ ID NO: 72867 - protein, 9 aa, synthetic construct
  source 1..9: note = Seed: VVGAVGVGK (KRAS G12V)
IVGWVKVGG

SEQ ID NO: 72868 - protein, 9 aa, synthetic construct
  source 1..9: note = Seed: VVGAVGVGK (KRAS G12V)
IVGWVKVGH

SEQ ID NO: 72869 - protein, 9 aa, synthetic construct
  source 1..9: note = Seed: VVGAVGVGK (KRAS G12V)
IVGWVKVGK

SEQ ID NO: 72870 - protein, 9 aa, synthetic construct
  source 1..9: note = Seed: VVGAVGVGK (KRAS G12V)
IVGWVKVGQ

SEQ ID NO: 72871 - protein, 9 aa, synthetic construct
  source 1..9: note = Seed: VVGAVGVGK (KRAS G12V)
IVGWVKVGR

SEQ ID NO: 72872 - protein, 9 aa, synthetic construct
  source 1..9: note = Seed: VVGAVGVGK (KRAS G12V)
IVGWVKVGS

SEQ ID NO: 72873 - protein, 9 aa, synthetic construct
  source 1..9: note = Seed: VVGAVGVGK (KRAS G12V)
IVGWVKVGY

SEQ ID NO: 72874 - protein, 9 aa, synthetic construct
  source 1..9: note = Seed: VVGAVGVGK (KRAS G12V)
IVGWVNVGR

SEQ ID NO: 72875 - protein, 9 aa, synthetic construct
  source 1..9: note = Seed: VVGAVGVGK (KRAS G12V)
IVGWVPVGK

SEQ ID NO: 72876 - protein, 9 aa, synthetic construct
  source 1..9: note = Seed: VVGAVGVGK (KRAS G12V)
IVGWVPVGR

SEQ ID NO: 72877 - protein, 9 aa, synthetic construct
  source 1..9: note = Seed: VVGAVGVGK (KRAS G12V)
IVGWVPVGY

SEQ ID NO: 72878 - protein, 9 aa, synthetic construct
  source 1..9: note = Seed: VVGAVGVGK (KRAS G12V)
IVGWVRVGA

SEQ ID NO: 72879 - protein, 9 aa, synthetic construct
  source 1..9: note = Seed: VVGAVGVGK (KRAS G12V)
IVGWVRVGG

SEQ ID NO: 72880 - protein, 9 aa, synthetic construct
  source 1..9: note = Seed: VVGAVGVGK (KRAS G12V)
IVGWVRVGH

SEQ ID NO: 72881 - protein, 9 aa, synthetic construct
  source 1..9: note = Seed: VVGAVGVGK (KRAS G12V)
IVGWVRVGK

SEQ ID NO: 72882 - protein, 9 aa, synthetic construct
  source 1..9: note = Seed: VVGAVGVGK (KRAS G12V)
IVGWVRVGQ

SEQ ID NO: 72883 - protein, 9 aa, synthetic construct
  source 1..9: note = Seed: VVGAVGVGK (KRAS G12V)
IVGWVRVGR

SEQ ID NO: 72884 - protein, 9 aa, synthetic construct
  source 1..9: note = Seed: VVGAVGVGK (KRAS G12V)
IVGWVRVGS

SEQ ID NO: 72885 - protein, 9 aa, synthetic construct
  source 1..9: note = Seed: VVGAVGVGK (KRAS G12V)
IVGWVRVGY

SEQ ID NO: 72886 - protein, 9 aa, synthetic construct
  source 1..9: note = Seed: VVGAVGVGK (KRAS G12V)
IVGWVSVGR

SEQ ID NO: 72887 - protein, 9 aa, synthetic construct
  source 1..9: note = Seed: VVGAVGVGK (KRAS G12V)
IVGWVTVGR

SEQ ID NO: 72888 - protein, 9 aa, synthetic construct
  source 1..9: note = Seed: VVGAVGVGK (KRAS G12V)
IVGYVAVGK

SEQ ID NO: 72889 - protein, 9 aa, synthetic construct
  source 1..9: note = Seed: VVGAVGVGK (KRAS G12V)
IVGYVAVGR

SEQ ID NO: 72890 - protein, 9 aa, synthetic construct
  source 1..9: note = Seed: VVGAVGVGK (KRAS G12V)
IVGYVHVGR

SEQ ID NO: 72891 - protein, 9 aa, synthetic construct
  source 1..9: note = Seed: VVGAVGVGK (KRAS G12V)
IVGYVKVGH

SEQ ID NO: 72892 - protein, 9 aa, synthetic construct
  source 1..9: note = Seed: VVGAVGVGK (KRAS G12V)
IVGYVKVGK

SEQ ID NO: 72893 - protein, 9 aa, synthetic construct
  source 1..9: note = Seed: VVGAVGVGK (KRAS G12V)
IVGYVKVGR

SEQ ID NO: 72894 - protein, 9 aa, synthetic construct
  source 1..9: note = Seed: VVGAVGVGK (KRAS G12V)
IVGYVNVGR

SEQ ID NO: 72895 - protein, 9 aa, synthetic construct
  source 1..9: note = Seed: VVGAVGVGK (KRAS G12V)
IVGYVPVGR

SEQ ID NO: 72896 - protein, 9 aa, synthetic construct
  source 1..9: note = Seed: VVGAVGVGK (KRAS G12V)
IVGYVRVGH

SEQ ID NO: 72897 - protein, 9 aa, synthetic construct
  source 1..9: note = Seed: VVGAVGVGK (KRAS G12V)
IVGYVRVGK

SEQ ID NO: 72898 - protein, 9 aa, synthetic construct
  source 1..9: note = Seed: VVGAVGVGK (KRAS G12V)
IVGYVRVGR

SEQ ID NO: 72899 - protein, 9 aa, synthetic construct
  source 1..9: note = Seed: VVGAVGVGK (KRAS G12V)
IVGYVSVGK

SEQ ID NO: 72900 - protein, 9 aa, synthetic construct
  source 1..9: note = Seed: VVGAVGVGK (KRAS G12V)
IVGYVSVGR

SEQ ID NO: 72901 - protein, 9 aa, synthetic construct
  source 1..9: note = Seed: VVGAVGVGK (KRAS G12V)
KVGAVPVGA

SEQ ID NO: 72902 - protein, 9 aa, synthetic construct
  source 1..9: note = Seed: VVGAVGVGK (KRAS G12V)
KVGAVPVGV

SEQ ID NO: 72903 - protein, 9 aa, synthetic construct
  source 1..9: note = Seed: VVGAVGVGK (KRAS G12V)
KVGFVKVGR

SEQ ID NO: 72904 - protein, 9 aa, synthetic construct
  source 1..9: note = Seed: VVGAVGVGK (KRAS G12V)
KVGFVRVGR

SEQ ID NO: 72905 - protein, 9 aa, synthetic construct
  source 1..9: note = Seed: VVGAVGVGK (KRAS G12V)
KVGLVAVGM

SEQ ID NO: 72906 - protein, 9 aa, synthetic construct
  source 1..9: note = Seed: VVGAVGVGK (KRAS G12V)
KVGLVPVGL

SEQ ID NO: 72907 - protein, 9 aa, synthetic construct
  source 1..9: note = Seed: VVGAVGVGK (KRAS G12V)
KVGLVPVGM

SEQ ID NO: 72908 - protein, 9 aa, synthetic construct
  source 1..9: note = Seed: VVGAVGVGK (KRAS G12V)
KVGMVAVGM

SEQ ID NO: 72909 - protein, 9 aa, synthetic construct
  source 1..9: note = Seed: VVGAVGVGK (KRAS G12V)
KVGMVRVGR

SEQ ID NO: 72910 - protein, 9 aa, synthetic construct
  source 1..9: note = Seed: VVGAVGVGK (KRAS G12V)
KVGWVRVGR

SEQ ID NO: 72911 - protein, 9 aa, synthetic construct
  source 1..9: note = Seed: VVGAVGVGK (KRAS G12V)
KVGYVRVGR

SEQ ID NO: 72912 - protein, 9 aa, synthetic construct
  source 1..9: note = Seed: VVGAVGVGK (KRAS G12V)
LVGAVAVGA

SEQ ID NO: 72913 - protein, 9 aa, synthetic construct
  source 1..9: note = Seed: VVGAVGVGK (KRAS G12V)
LVGAVAVGG

SEQ ID NO: 72914 - protein, 9 aa, synthetic construct
  source 1..9: note = Seed: VVGAVGVGK (KRAS G12V)
LVGAVAVGH

SEQ ID NO: 72915 - protein, 9 aa, synthetic construct
  source 1..9: note = Seed: VVGAVGVGK (KRAS G12V)
LVGAVAVGI

SEQ ID NO: 72916 - protein, 9 aa, synthetic construct
  source 1..9: note = Seed: VVGAVGVGK (KRAS G12V)
LVGAVAVGK

SEQ ID NO: 72917 - protein, 9 aa, synthetic construct
  source 1..9: note = Seed: VVGAVGVGK (KRAS G12V)
LVGAVAVGL

SEQ ID NO: 72918 - protein, 9 aa, synthetic construct
  source 1..9: note = Seed: VVGAVGVGK (KRAS G12V)
LVGAVAVGM

SEQ ID NO: 72919 - protein, 9 aa, synthetic construct
  source 1..9: note = Seed: VVGAVGVGK (KRAS G12V)
LVGAVAVGN

SEQ ID NO: 72920 - protein, 9 aa, synthetic construct
  source 1..9: note = Seed: VVGAVGVGK (KRAS G12V)
LVGAVAVGR

SEQ ID NO: 72921 - protein, 9 aa, synthetic construct
  source 1..9: note = Seed: VVGAVGVGK (KRAS G12V)
LVGAVAVGS

SEQ ID NO: 72922 - protein, 9 aa, synthetic construct
  source 1..9: note = Seed: VVGAVGVGK (KRAS G12V)
LVGAVAVGT

SEQ ID NO: 72923 - protein, 9 aa, synthetic construct
  source 1..9: note = Seed: VVGAVGVGK (KRAS G12V)
LVGAVAVGV

SEQ ID NO: 72924 - protein, 9 aa, synthetic construct
  source 1..9: note = Seed: VVGAVGVGK (KRAS G12V)
LVGAVAVGY

SEQ ID NO: 72925 - protein, 9 aa, synthetic construct
  source 1..9: note = Seed: VVGAVGVGK (KRAS G12V)
LVGAVGVGA

SEQ ID NO: 72926 - protein, 9 aa, synthetic construct
  source 1..9: note = Seed: VVGAVGVGK (KRAS G12V)
LVGAVGVGG

SEQ ID NO: 72927 - protein, 9 aa, synthetic construct
  source 1..9: note = Seed: VVGAVGVGK (KRAS G12V)
LVGAVGVGH

SEQ ID NO: 72928 - protein, 9 aa, synthetic construct
  source 1..9: note = Seed: VVGAVGVGK (KRAS G12V)
LVGAVGVGI

SEQ ID NO: 72929 - protein, 9 aa, synthetic construct
  source 1..9: note = Seed: VVGAVGVGK (KRAS G12V)
LVGAVGVGL

SEQ ID NO: 72930 - protein, 9 aa, synthetic construct
  source 1..9: note = Seed: VVGAVGVGK (KRAS G12V)
LVGAVGVGM

SEQ ID NO: 72931 - protein, 9 aa, synthetic construct
  source 1..9: note = Seed: VVGAVGVGK (KRAS G12V)
LVGAVGVGN

SEQ ID NO: 72932 - protein, 9 aa, synthetic construct
  source 1..9: note = Seed: VVGAVGVGK (KRAS G12V)
LVGAVGVGS

SEQ ID NO: 72933 - protein, 9 aa, synthetic construct
  source 1..9: note = Seed: VVGAVGVGK (KRAS G12V)
LVGAVGVGT

SEQ ID NO: 72934 - protein, 9 aa, synthetic construct
  source 1..9: note = Seed: VVGAVGVGK (KRAS G12V)
LVGAVGVGV

SEQ ID NO: 72935 - protein, 9 aa, synthetic construct
  source 1..9: note = Seed: VVGAVGVGK (KRAS G12V)
LVGAVHVGA

SEQ ID NO: 72936 - protein, 9 aa, synthetic construct
  source 1..9: note = Seed: VVGAVGVGK (KRAS G12V)
LVGAVHVGR

SEQ ID NO: 72937 - protein, 9 aa, synthetic construct
  source 1..9: note = Seed: VVGAVGVGK (KRAS G12V)
LVGAVKVGA

SEQ ID NO: 72938 - protein, 9 aa, synthetic construct
  source 1..9: note = Seed: VVGAVGVGK (KRAS G12V)
LVGAVKVGF

SEQ ID NO: 72939 - protein, 9 aa, synthetic construct
  source 1..9: note = Seed: VVGAVGVGK (KRAS G12V)
LVGAVKVGG

SEQ ID NO: 72940 - protein, 9 aa, synthetic construct
  source 1..9: note = Seed: VVGAVGVGK (KRAS G12V)
LVGAVKVGH

SEQ ID NO: 72941 - protein, 9 aa, synthetic construct
  source 1..9: note = Seed: VVGAVGVGK (KRAS G12V)
LVGAVKVGI

SEQ ID NO: 72942 - protein, 9 aa, synthetic construct
  source 1..9: note = Seed: VVGAVGVGK (KRAS G12V)
LVGAVKVGK

SEQ ID NO: 72943 - protein, 9 aa, synthetic construct
  source 1..9: note = Seed: VVGAVGVGK (KRAS G12V)
LVGAVKVGL

SEQ ID NO: 72944 - protein, 9 aa, synthetic construct
  source 1..9: note = Seed: VVGAVGVGK (KRAS G12V)
LVGAVKVGM

SEQ ID NO: 72945 - protein, 9 aa, synthetic construct
  source 1..9: note = Seed: VVGAVGVGK (KRAS G12V)
LVGAVKVGN

SEQ ID NO: 72946 - protein, 9 aa, synthetic construct
  source 1..9: note = Seed: VVGAVGVGK (KRAS G12V)
LVGAVKVGQ

SEQ ID NO: 72947 - protein, 9 aa, synthetic construct
  source 1..9: note = Seed: VVGAVGVGK (KRAS G12V)
LVGAVKVGR

SEQ ID NO: 72948 - protein, 9 aa, synthetic construct
  source 1..9: note = Seed: VVGAVGVGK (KRAS G12V)
LVGAVKVGS

SEQ ID NO: 72949 - protein, 9 aa, synthetic construct
  source 1..9: note = Seed: VVGAVGVGK (KRAS G12V)
LVGAVKVGT

SEQ ID NO: 72950 - protein, 9 aa, synthetic construct
  source 1..9: note = Seed: VVGAVGVGK (KRAS G12V)
LVGAVKVGV

SEQ ID NO: 72951 - protein, 9 aa, synthetic construct
  source 1..9: note = Seed: VVGAVGVGK (KRAS G12V)
LVGAVKVGY

SEQ ID NO: 72952 - protein, 9 aa, synthetic construct
  source 1..9: note = Seed: VVGAVGVGK (KRAS G12V)
LVGAVNVGA

SEQ ID NO: 72953 - protein, 9 aa, synthetic construct
  source 1..9: note = Seed: VVGAVGVGK (KRAS G12V)
LVGAVNVGR

SEQ ID NO: 72954 - protein, 9 aa, synthetic construct
  source 1..9: note = Seed: VVGAVGVGK (KRAS G12V)
LVGAVNVGV

SEQ ID NO: 72955 - protein, 9 aa, synthetic construct
  source 1..9: note = Seed: VVGAVGVGK (KRAS G12V)
LVGAVPVGA

SEQ ID NO: 72956 - protein, 9 aa, synthetic construct
  source 1..9: note = Seed: VVGAVGVGK (KRAS G12V)
LVGAVPVGC

SEQ ID NO: 72957 - protein, 9 aa, synthetic construct
  source 1..9: note = Seed: VVGAVGVGK (KRAS G12V)
LVGAVPVGD

SEQ ID NO: 72958 - protein, 9 aa, synthetic construct
  source 1..9: note = Seed: VVGAVGVGK (KRAS G12V)
LVGAVPVGE

SEQ ID NO: 72959 - protein, 9 aa, synthetic construct
  source 1..9: note = Seed: VVGAVGVGK (KRAS G12V)
LVGAVPVGF

SEQ ID NO: 72960 - protein, 9 aa, synthetic construct
  source 1..9: note = Seed: VVGAVGVGK (KRAS G12V)
LVGAVPVGG

SEQ ID NO: 72961 - protein, 9 aa, synthetic construct
  source 1..9: note = Seed: VVGAVGVGK (KRAS G12V)
LVGAVPVGH

SEQ ID NO: 72962 - protein, 9 aa, synthetic construct
  source 1..9: note = Seed: VVGAVGVGK (KRAS G12V)
LVGAVPVGI

SEQ ID NO: 72963 - protein, 9 aa, synthetic construct
  source 1..9: note = Seed: VVGAVGVGK (KRAS G12V)
LVGAVPVGK

SEQ ID NO: 72964 - protein, 9 aa, synthetic construct
  source 1..9: note = Seed: VVGAVGVGK (KRAS G12V)
LVGAVPVGL

SEQ ID NO: 72965 - protein, 9 aa, synthetic construct
  source 1..9: note = Seed: VVGAVGVGK (KRAS G12V)
LVGAVPVGM

SEQ ID NO: 72966 - protein, 9 aa, synthetic construct
  source 1..9: note = Seed: VVGAVGVGK (KRAS G12V)
LVGAVPVGN

SEQ ID NO: 72967 - protein, 9 aa, synthetic construct
  source 1..9: note = Seed: VVGAVGVGK (KRAS G12V)
LVGAVPVGP

SEQ ID NO: 72968 - protein, 9 aa, synthetic construct
  source 1..9: note = Seed: VVGAVGVGK (KRAS G12V)
LVGAVPVGQ

SEQ ID NO: 72969 - protein, 9 aa, synthetic construct
  source 1..9: note = Seed: VVGAVGVGK (KRAS G12V)
LVGAVPVGR

SEQ ID NO: 72970 - protein, 9 aa, synthetic construct
  source 1..9: note = Seed: VVGAVGVGK (KRAS G12V)
LVGAVPVGS

SEQ ID NO: 72971 - protein, 9 aa, synthetic construct
  source 1..9: note = Seed: VVGAVGVGK (KRAS G12V)
LVGAVPVGT

SEQ ID NO: 72972 - protein, 9 aa, synthetic construct
  source 1..9: note = Seed: VVGAVGVGK (KRAS G12V)
LVGAVPVGV

SEQ ID NO: 72973 - protein, 9 aa, synthetic construct
  source 1..9: note = Seed: VVGAVGVGK (KRAS G12V)
LVGAVPVGY

SEQ ID NO: 72974 - protein, 9 aa, synthetic construct
  source 1..9: note = Seed: VVGAVGVGK (KRAS G12V)
LVGAVRVGA

SEQ ID NO: 72975 - protein, 9 aa, synthetic construct
  source 1..9: note = Seed: VVGAVGVGK (KRAS G12V)
LVGAVRVGF

SEQ ID NO: 72976 - protein, 9 aa, synthetic construct
  source 1..9: note = Seed: VVGAVGVGK (KRAS G12V)
LVGAVRVGG

SEQ ID NO: 72977 - protein, 9 aa, synthetic construct
  source 1..9: note = Seed: VVGAVGVGK (KRAS G12V)
LVGAVRVGH

SEQ ID NO: 72978 - protein, 9 aa, synthetic construct
  source 1..9: note = Seed: VVGAVGVGK (KRAS G12V)
LVGAVRVGI

SEQ ID NO: 72979 - protein, 9 aa, synthetic construct
  source 1..9: note = Seed: VVGAVGVGK (KRAS G12V)
LVGAVRVGK

SEQ ID NO: 72980 - protein, 9 aa, synthetic construct
  source 1..9: note = Seed: VVGAVGVGK (KRAS G12V)
LVGAVRVGL

SEQ ID NO: 72981 - protein, 9 aa, synthetic construct
  source 1..9: note = Seed: VVGAVGVGK (KRAS G12V)
LVGAVRVGM

SEQ ID NO: 72982 - protein, 9 aa, synthetic construct
  source 1..9: note = Seed: VVGAVGVGK (KRAS G12V)
LVGAVRVGN

SEQ ID NO: 72983 - protein, 9 aa, synthetic construct
  source 1..9: note = Seed: VVGAVGVGK (KRAS G12V)
LVGAVRVGP

SEQ ID NO: 72984 - protein, 9 aa, synthetic construct
  source 1..9: note = Seed: VVGAVGVGK (KRAS G12V)
LVGAVRVGQ

SEQ ID NO: 72985 - protein, 9 aa, synthetic construct
  source 1..9: note = Seed: VVGAVGVGK (KRAS G12V)
LVGAVRVGR

SEQ ID NO: 72986 - protein, 9 aa, synthetic construct
  source 1..9: note = Seed: VVGAVGVGK (KRAS G12V)
LVGAVRVGS

SEQ ID NO: 72987 - protein, 9 aa, synthetic construct
  source 1..9: note = Seed: VVGAVGVGK (KRAS G12V)
LVGAVRVGT

SEQ ID NO: 72988 - protein, 9 aa, synthetic construct
  source 1..9: note = Seed: VVGAVGVGK (KRAS G12V)
LVGAVRVGV

SEQ ID NO: 72989 - protein, 9 aa, synthetic construct
  source 1..9: note = Seed: VVGAVGVGK (KRAS G12V)
LVGAVRVGY

SEQ ID NO: 72990 - protein, 9 aa, synthetic construct
  source 1..9: note = Seed: VVGAVGVGK (KRAS G12V)
LVGAVSVGA

SEQ ID NO: 72991 - protein, 9 aa, synthetic construct
  source 1..9: note = Seed: VVGAVGVGK (KRAS G12V)
LVGAVSVGH

SEQ ID NO: 72992 - protein, 9 aa, synthetic construct
  source 1..9: note = Seed: VVGAVGVGK (KRAS G12V)
LVGAVSVGI

SEQ ID NO: 72993 - protein, 9 aa, synthetic construct
  source 1..9: note = Seed: VVGAVGVGK (KRAS G12V)
LVGAVSVGK

SEQ ID NO: 72994 - protein, 9 aa, synthetic construct
  source 1..9: note = Seed: VVGAVGVGK (KRAS G12V)
LVGAVSVGL

SEQ ID NO: 72995 - protein, 9 aa, synthetic construct
  source 1..9: note = Seed: VVGAVGVGK (KRAS G12V)
LVGAVSVGM

SEQ ID NO: 72996 - protein, 9 aa, synthetic construct
  source 1..9: note = Seed: VVGAVGVGK (KRAS G12V)
LVGAVSVGR

SEQ ID NO: 72997 - protein, 9 aa, synthetic construct
  source 1..9: note = Seed: VVGAVGVGK (KRAS G12V)
LVGAVSVGS

SEQ ID NO: 72998 - protein, 9 aa, synthetic construct
  source 1..9: note = Seed: VVGAVGVGK (KRAS G12V)
LVGAVSVGT

SEQ ID NO: 72999 - protein, 9 aa, synthetic construct
  source 1..9: note = Seed: VVGAVGVGK (KRAS G12V)
LVGAVSVGV

SEQ ID NO: 73000 - protein, 9 aa, synthetic construct
  source 1..9: note = Seed: VVGAVGVGK (KRAS G12V)
LVGAVTVGA

SEQ ID NO: 73001 - protein, 9 aa, synthetic construct
  source 1..9: note = Seed: VVGAVGVGK (KRAS G12V)
LVGAVTVGR

SEQ ID NO: 73002 - protein, 9 aa, synthetic construct
  source 1..9: note = Seed: VVGAVGVGK (KRAS G12V)
LVGCVAVGA

SEQ ID NO: 73003 - protein, 9 aa, synthetic construct
  source 1..9: note = Seed: VVGAVGVGK (KRAS G12V)
LVGCVKVGA

SEQ ID NO: 73004 - protein, 9 aa, synthetic construct
  source 1..9: note = Seed: VVGAVGVGK (KRAS G12V)
LVGCVKVGG

SEQ ID NO: 73005 - protein, 9 aa, synthetic construct
  source 1..9: note = Seed: VVGAVGVGK (KRAS G12V)
LVGCVKVGH

SEQ ID NO: 73006 - protein, 9 aa, synthetic construct
  source 1..9: note = Seed: VVGAVGVGK (KRAS G12V)
LVGCVKVGK

SEQ ID NO: 73007 - protein, 9 aa, synthetic construct
  source 1..9: note = Seed: VVGAVGVGK (KRAS G12V)
LVGCVKVGQ

SEQ ID NO: 73008 - protein, 9 aa, synthetic construct
  source 1..9: note = Seed: VVGAVGVGK (KRAS G12V)
LVGCVKVGR

SEQ ID NO: 73009 - protein, 9 aa, synthetic construct
  source 1..9: note = Seed: VVGAVGVGK (KRAS G12V)
LVGCVKVGS

SEQ ID NO: 73010 - protein, 9 aa, synthetic construct
  source 1..9: note = Seed: VVGAVGVGK (KRAS G12V)
LVGCVRVGA

SEQ ID NO: 73011 - protein, 9 aa, synthetic construct
  source 1..9: note = Seed: VVGAVGVGK (KRAS G12V)
LVGCVRVGG

SEQ ID NO: 73012 - protein, 9 aa, synthetic construct
  source 1..9: note = Seed: VVGAVGVGK (KRAS G12V)
LVGCVRVGH

SEQ ID NO: 73013 - protein, 9 aa, synthetic construct
  source 1..9: note = Seed: VVGAVGVGK (KRAS G12V)
LVGCVRVGK

SEQ ID NO: 73014 - protein, 9 aa, synthetic construct
  source 1..9: note = Seed: VVGAVGVGK (KRAS G12V)
LVGCVRVGQ

SEQ ID NO: 73015 - protein, 9 aa, synthetic construct
  source 1..9: note = Seed: VVGAVGVGK (KRAS G12V)
LVGCVRVGR

SEQ ID NO: 73016 - protein, 9 aa, synthetic construct
  source 1..9: note = Seed: VVGAVGVGK (KRAS G12V)
LVGCVRVGS

SEQ ID NO: 73017 - protein, 9 aa, synthetic construct
  source 1..9: note = Seed: VVGAVGVGK (KRAS G12V)
LVGEVAVGA

SEQ ID NO: 73018 - protein, 9 aa, synthetic construct
  source 1..9: note = Seed: VVGAVGVGK (KRAS G12V)
LVGEVAVGL

SEQ ID NO: 73019 - protein, 9 aa, synthetic construct
  source 1..9: note = Seed: VVGAVGVGK (KRAS G12V)
LVGEVAVGV

SEQ ID NO: 73020 - protein, 9 aa, synthetic construct
  source 1..9: note = Seed: VVGAVGVGK (KRAS G12V)
LVGEVGVGA

SEQ ID NO: 73021 - protein, 9 aa, synthetic construct
  source 1..9: note = Seed: VVGAVGVGK (KRAS G12V)
LVGEVGVGV

SEQ ID NO: 73022 - protein, 9 aa, synthetic construct
  source 1..9: note = Seed: VVGAVGVGK (KRAS G12V)
LVGEVPVGV

SEQ ID NO: 73023 - protein, 9 aa, synthetic construct
  source 1..9: note = Seed: VVGAVGVGK (KRAS G12V)
LVGEVRVGH

SEQ ID NO: 73024 - protein, 9 aa, synthetic construct
  source 1..9: note = Seed: VVGAVGVGK (KRAS G12V)
LVGEVRVGK

SEQ ID NO: 73025 - protein, 9 aa, synthetic construct
  source 1..9: note = Seed: VVGAVGVGK (KRAS G12V)
LVGEVRVGR

SEQ ID NO: 73026 - protein, 9 aa, synthetic construct
  source 1..9: note = Seed: VVGAVGVGK (KRAS G12V)
LVGEVRVGS

SEQ ID NO: 73027 - protein, 9 aa, synthetic construct
  source 1..9: note = Seed: VVGAVGVGK (KRAS G12V)
LVGFVAVGK

SEQ ID NO: 73028 - protein, 9 aa, synthetic construct
  source 1..9: note = Seed: VVGAVGVGK (KRAS G12V)
LVGFVAVGR

SEQ ID NO: 73029 - protein, 9 aa, synthetic construct
  source 1..9: note = Seed: VVGAVGVGK (KRAS G12V)
LVGFVGVGR

SEQ ID NO: 73030 - protein, 9 aa, synthetic construct
  source 1..9: note = Seed: VVGAVGVGK (KRAS G12V)
LVGFVHVGR

SEQ ID NO: 73031 - protein, 9 aa, synthetic construct
  source 1..9: note = Seed: VVGAVGVGK (KRAS G12V)
LVGFVKVGA

SEQ ID NO: 73032 - protein, 9 aa, synthetic construct
  source 1..9: note = Seed: VVGAVGVGK (KRAS G12V)
LVGFVKVGG

SEQ ID NO: 73033 - protein, 9 aa, synthetic construct
  source 1..9: note = Seed: VVGAVGVGK (KRAS G12V)
LVGFVKVGH

SEQ ID NO: 73034 - protein, 9 aa, synthetic construct
  source 1..9: note = Seed: VVGAVGVGK (KRAS G12V)
LVGFVKVGK

SEQ ID NO: 73035 - protein, 9 aa, synthetic construct
  source 1..9: note = Seed: VVGAVGVGK (KRAS G12V)
LVGFVKVGQ

SEQ ID NO: 73036 - protein, 9 aa, synthetic construct
  source 1..9: note = Seed: VVGAVGVGK (KRAS G12V)
LVGFVKVGR

SEQ ID NO: 73037 - protein, 9 aa, synthetic construct
  source 1..9: note = Seed: VVGAVGVGK (KRAS G12V)
LVGFVKVGS

SEQ ID NO: 73038 - protein, 9 aa, synthetic construct
  source 1..9: note = Seed: VVGAVGVGK (KRAS G12V)
LVGFVKVGY

SEQ ID NO: 73039 - protein, 9 aa, synthetic construct
  source 1..9: note = Seed: VVGAVGVGK (KRAS G12V)
LVGFVNVGR

SEQ ID NO: 73040 - protein, 9 aa, synthetic construct
  source 1..9: note = Seed: VVGAVGVGK (KRAS G12V)
LVGFVPVGK

SEQ ID NO: 73041 - protein, 9 aa, synthetic construct
  source 1..9: note = Seed: VVGAVGVGK (KRAS G12V)
LVGFVPVGL

SEQ ID NO: 73042 - protein, 9 aa, synthetic construct
  source 1..9: note = Seed: VVGAVGVGK (KRAS G12V)
LVGFVPVGM

SEQ ID NO: 73043 - protein, 9 aa, synthetic construct
  source 1..9: note = Seed: VVGAVGVGK (KRAS G12V)
LVGFVPVGR

SEQ ID NO: 73044 - protein, 9 aa, synthetic construct
  source 1..9: note = Seed: VVGAVGVGK (KRAS G12V)
LVGFVRVGG

SEQ ID NO: 73045 - protein, 9 aa, synthetic construct
  source 1..9: note = Seed: VVGAVGVGK (KRAS G12V)
LVGFVRVGH

SEQ ID NO: 73046 - protein, 9 aa, synthetic construct
  source 1..9: note = Seed: VVGAVGVGK (KRAS G12V)
LVGFVRVGK

SEQ ID NO: 73047 - protein, 9 aa, synthetic construct
  source 1..9: note = Seed: VVGAVGVGK (KRAS G12V)
LVGFVRVGQ

SEQ ID NO: 73048 - protein, 9 aa, synthetic construct
  source 1..9: note = Seed: VVGAVGVGK (KRAS G12V)
LVGFVRVGR

SEQ ID NO: 73049 - protein, 9 aa, synthetic construct
  source 1..9: note = Seed: VVGAVGVGK (KRAS G12V)
LVGFVRVGS

SEQ ID NO: 73050 - protein, 9 aa, synthetic construct
  source 1..9: note = Seed: VVGAVGVGK (KRAS G12V)
LVGFVSVGK

SEQ ID NO: 73051 - protein, 9 aa, synthetic construct
  source 1..9: note = Seed: VVGAVGVGK (KRAS G12V)
LVGFVSVGR

SEQ ID NO: 73052 - protein, 9 aa, synthetic construct
  source 1..9: note = Seed: VVGAVGVGK (KRAS G12V)
LVGFVTVGR

SEQ ID NO: 73053 - protein, 9 aa, synthetic construct
  source 1..9: note = Seed: VVGAVGVGK (KRAS G12V)
LVGGVAVGA

SEQ ID NO: 73054 - protein, 9 aa, synthetic construct
  source 1..9: note = Seed: VVGAVGVGK (KRAS G12V)
LVGGVAVGI

SEQ ID NO: 73055 - protein, 9 aa, synthetic construct
  source 1..9: note = Seed: VVGAVGVGK (KRAS G12V)
LVGGVAVGK

SEQ ID NO: 73056 - protein, 9 aa, synthetic construct
  source 1..9: note = Seed: VVGAVGVGK (KRAS G12V)
LVGGVAVGL

SEQ ID NO: 73057 - protein, 9 aa, synthetic construct
  source 1..9: note = Seed: VVGAVGVGK (KRAS G12V)
LVGGVAVGM

SEQ ID NO: 73058 - protein, 9 aa, synthetic construct
  source 1..9: note = Seed: VVGAVGVGK (KRAS G12V)
LVGGVAVGR

SEQ ID NO: 73059 - protein, 9 aa, synthetic construct
  source 1..9: note = Seed: VVGAVGVGK (KRAS G12V)
LVGGVAVGS

SEQ ID NO: 73060 - protein, 9 aa, synthetic construct
  source 1..9: note = Seed: VVGAVGVGK (KRAS G12V)
LVGGVAVGT

SEQ ID NO: 73061 - protein, 9 aa, synthetic construct
  source 1..9: note = Seed: VVGAVGVGK (KRAS G12V)
LVGGVAVGV

SEQ ID NO: 73062 - protein, 9 aa, synthetic construct
  source 1..9: note = Seed: VVGAVGVGK (KRAS G12V)
LVGGVKVGR

SEQ ID NO: 73063 - protein, 9 aa, synthetic construct
  source 1..9: note = Seed: VVGAVGVGK (KRAS G12V)
LVGGVPVGA

SEQ ID NO: 73064 - protein, 9 aa, synthetic construct
  source 1..9: note = Seed: VVGAVGVGK (KRAS G12V)
LVGGVPVGF

SEQ ID NO: 73065 - protein, 9 aa, synthetic construct
  source 1..9: note = Seed: VVGAVGVGK (KRAS G12V)
LVGGVPVGG

SEQ ID NO: 73066 - protein, 9 aa, synthetic construct
  source 1..9: note = Seed: VVGAVGVGK (KRAS G12V)
LVGGVPVGH

SEQ ID NO: 73067 - protein, 9 aa, synthetic construct
  source 1..9: note = Seed: VVGAVGVGK (KRAS G12V)
LVGGVPVGI

SEQ ID NO: 73068 - protein, 9 aa, synthetic construct
  source 1..9: note = Seed: VVGAVGVGK (KRAS G12V)
LVGGVPVGK

SEQ ID NO: 73069 - protein, 9 aa, synthetic construct
  source 1..9: note = Seed: VVGAVGVGK (KRAS G12V)
LVGGVPVGL

SEQ ID NO: 73070 - protein, 9 aa, synthetic construct
  source 1..9: note = Seed: VVGAVGVGK (KRAS G12V)
LVGGVPVGM

SEQ ID NO: 73071 - protein, 9 aa, synthetic construct
  source 1..9: note = Seed: VVGAVGVGK (KRAS G12V)
LVGGVPVGN

SEQ ID NO: 73072 - protein, 9 aa, synthetic construct
  source 1..9: note = Seed: VVGAVGVGK (KRAS G12V)
LVGGVPVGP

SEQ ID NO: 73073 - protein, 9 aa, synthetic construct
  source 1..9: note = Seed: VVGAVGVGK (KRAS G12V)
LVGGVPVGQ

SEQ ID NO: 73074 - protein, 9 aa, synthetic construct
  source 1..9: note = Seed: VVGAVGVGK (KRAS G12V)
LVGGVPVGR

SEQ ID NO: 73075 - protein, 9 aa, synthetic construct
  source 1..9: note = Seed: VVGAVGVGK (KRAS G12V)
LVGGVPVGS

SEQ ID NO: 73076 - protein, 9 aa, synthetic construct
  source 1..9: note = Seed: VVGAVGVGK (KRAS G12V)
LVGGVPVGT

SEQ ID NO: 73077 - protein, 9 aa, synthetic construct
  source 1..9: note = Seed: VVGAVGVGK (KRAS G12V)
LVGGVPVGV

SEQ ID NO: 73078 - protein, 9 aa, synthetic construct
  source 1..9: note = Seed: VVGAVGVGK (KRAS G12V)
LVGGVPVGY

SEQ ID NO: 73079 - protein, 9 aa, synthetic construct
  source 1..9: note = Seed: VVGAVGVGK (KRAS G12V)
LVGGVRVGH

SEQ ID NO: 73080 - protein, 9 aa, synthetic construct
  source 1..9: note = Seed: VVGAVGVGK (KRAS G12V)
LVGGVRVGK

SEQ ID NO: 73081 - protein, 9 aa, synthetic construct
  source 1..9: note = Seed: VVGAVGVGK (KRAS G12V)
LVGGVRVGR

SEQ ID NO: 73082 - protein, 9 aa, synthetic construct
  source 1..9: note = Seed: VVGAVGVGK (KRAS G12V)
LVGGVRVGY

SEQ ID NO: 73083 - protein, 9 aa, synthetic construct
  source 1..9: note = Seed: VVGAVGVGK (KRAS G12V)
LVGHVAVGA

SEQ ID NO: 73084 - protein, 9 aa, synthetic construct
  source 1..9: note = Seed: VVGAVGVGK (KRAS G12V)
LVGHVAVGI

SEQ ID NO: 73085 - protein, 9 aa, synthetic construct
  source 1..9: note = Seed: VVGAVGVGK (KRAS G12V)
LVGHVAVGK

SEQ ID NO: 73086 - protein, 9 aa, synthetic construct
  source 1..9: note = Seed: VVGAVGVGK (KRAS G12V)
LVGHVAVGL

SEQ ID NO: 73087 - protein, 9 aa, synthetic construct
  source 1..9: note = Seed: VVGAVGVGK (KRAS G12V)
LVGHVAVGM

SEQ ID NO: 73088 - protein, 9 aa, synthetic construct
  source 1..9: note = Seed: VVGAVGVGK (KRAS G12V)
LVGHVAVGR

SEQ ID NO: 73089 - protein, 9 aa, synthetic construct
  source 1..9: note = Seed: VVGAVGVGK (KRAS G12V)
LVGHVAVGV

SEQ ID NO: 73090 - protein, 9 aa, synthetic construct
  source 1..9: note = Seed: VVGAVGVGK (KRAS G12V)
LVGHVAVGY

SEQ ID NO: 73091 - protein, 9 aa, synthetic construct
  source 1..9: note = Seed: VVGAVGVGK (KRAS G12V)
LVGHVGVGK

SEQ ID NO: 73092 - protein, 9 aa, synthetic construct
  source 1..9: note = Seed: VVGAVGVGK (KRAS G12V)
LVGHVGVGR

SEQ ID NO: 73093 - protein, 9 aa, synthetic construct
  source 1..9: note = Seed: VVGAVGVGK (KRAS G12V)
LVGHVGVGY

SEQ ID NO: 73094 - protein, 9 aa, synthetic construct
  source 1..9: note = Seed: VVGAVGVGK (KRAS G12V)
LVGHVHVGK

SEQ ID NO: 73095 - protein, 9 aa, synthetic construct
  source 1..9: note = Seed: VVGAVGVGK (KRAS G12V)
LVGHVHVGR

SEQ ID NO: 73096 - protein, 9 aa, synthetic construct
  source 1..9: note = Seed: VVGAVGVGK (KRAS G12V)
LVGHVHVGY

SEQ ID NO: 73097 - protein, 9 aa, synthetic construct
  source 1..9: note = Seed: VVGAVGVGK (KRAS G12V)
LVGHVIVGR

SEQ ID NO: 73098 - protein, 9 aa, synthetic construct
  source 1..9: note = Seed: VVGAVGVGK (KRAS G12V)
LVGHVKVGA

SEQ ID NO: 73099 - protein, 9 aa, synthetic construct
  source 1..9: note = Seed: VVGAVGVGK (KRAS G12V)
LVGHVKVGF

SEQ ID NO: 73100 - protein, 9 aa, synthetic construct
  source 1..9: note = Seed: VVGAVGVGK (KRAS G12V)
LVGHVKVGG

SEQ ID NO: 73101 - protein, 9 aa, synthetic construct
  source 1..9: note = Seed: VVGAVGVGK (KRAS G12V)
LVGHVKVGH

SEQ ID NO: 73102 - protein, 9 aa, synthetic construct
  source 1..9: note = Seed: VVGAVGVGK (KRAS G12V)
LVGHVKVGI

SEQ ID NO: 73103 - protein, 9 aa, synthetic construct
  source 1..9: note = Seed: VVGAVGVGK (KRAS G12V)
LVGHVKVGK

SEQ ID NO: 73104 - protein, 9 aa, synthetic construct
  source 1..9: note = Seed: VVGAVGVGK (KRAS G12V)
LVGHVKVGL

SEQ ID NO: 73105 - protein, 9 aa, synthetic construct
  source 1..9: note = Seed: VVGAVGVGK (KRAS G12V)
LVGHVKVGM

SEQ ID NO: 73106 - protein, 9 aa, synthetic construct
  source 1..9: note = Seed: VVGAVGVGK (KRAS G12V)
LVGHVKVGQ

SEQ ID NO: 73107 - protein, 9 aa, synthetic construct
  source 1..9: note = Seed: VVGAVGVGK (KRAS G12V)
LVGHVKVGR

SEQ ID NO: 73108 - protein, 9 aa, synthetic construct
  source 1..9: note = Seed: VVGAVGVGK (KRAS G12V)
LVGHVKVGS

SEQ ID NO: 73109 - protein, 9 aa, synthetic construct
  source 1..9: note = Seed: VVGAVGVGK (KRAS G12V)
LVGHVKVGT

SEQ ID NO: 73110 - protein, 9 aa, synthetic construct
  source 1..9: note = Seed: VVGAVGVGK (KRAS G12V)
LVGHVKVGV

SEQ ID NO: 73111 - protein, 9 aa, synthetic construct
  source 1..9: note = Seed: VVGAVGVGK (KRAS G12V)
LVGHVKVGW

SEQ ID NO: 73112 - protein, 9 aa, synthetic construct
  source 1..9: note = Seed: VVGAVGVGK (KRAS G12V)
LVGHVKVGY

SEQ ID NO: 73113 - protein, 9 aa, synthetic construct
  source 1..9: note = Seed: VVGAVGVGK (KRAS G12V)
LVGHVLVGR

SEQ ID NO: 73114 - protein, 9 aa, synthetic construct
  source 1..9: note = Seed: VVGAVGVGK (KRAS G12V)
LVGHVMVGR

SEQ ID NO: 73115 - protein, 9 aa, synthetic construct
  source 1..9: note = Seed: VVGAVGVGK (KRAS G12V)
LVGHVNVGK

SEQ ID NO: 73116 - protein, 9 aa, synthetic construct
  source 1..9: note = Seed: VVGAVGVGK (KRAS G12V)
LVGHVNVGR

SEQ ID NO: 73117 - protein, 9 aa, synthetic construct
  source 1..9: note = Seed: VVGAVGVGK (KRAS G12V)
LVGHVNVGY

SEQ ID NO: 73118 - protein, 9 aa, synthetic construct
  source 1..9: note = Seed: VVGAVGVGK (KRAS G12V)
LVGHVPVGA

SEQ ID NO: 73119 - protein, 9 aa, synthetic construct
  source 1..9: note = Seed: VVGAVGVGK (KRAS G12V)
LVGHVPVGF

SEQ ID NO: 73120 - protein, 9 aa, synthetic construct
  source 1..9: note = Seed: VVGAVGVGK (KRAS G12V)
LVGHVPVGH

SEQ ID NO: 73121 - protein, 9 aa, synthetic construct
  source 1..9: note = Seed: VVGAVGVGK (KRAS G12V)
LVGHVPVGI

SEQ ID NO: 73122 - protein, 9 aa, synthetic construct
  source 1..9: note = Seed: VVGAVGVGK (KRAS G12V)
LVGHVPVGK

SEQ ID NO: 73123 - protein, 9 aa, synthetic construct
  source 1..9: note = Seed: VVGAVGVGK (KRAS G12V)
LVGHVPVGL

SEQ ID NO: 73124 - protein, 9 aa, synthetic construct
  source 1..9: note = Seed: VVGAVGVGK (KRAS G12V)
LVGHVPVGM

SEQ ID NO: 73125 - protein, 9 aa, synthetic construct
  source 1..9: note = Seed: VVGAVGVGK (KRAS G12V)
LVGHVPVGR

SEQ ID NO: 73126 - protein, 9 aa, synthetic construct
  source 1..9: note = Seed: VVGAVGVGK (KRAS G12V)
LVGHVPVGS

SEQ ID NO: 73127 - protein, 9 aa, synthetic construct
  source 1..9: note = Seed: VVGAVGVGK (KRAS G12V)
LVGHVPVGV

SEQ ID NO: 73128 - protein, 9 aa, synthetic construct
  source 1..9: note = Seed: VVGAVGVGK (KRAS G12V)
LVGHVPVGY

SEQ ID NO: 73129 - protein, 9 aa, synthetic construct
  source 1..9: note = Seed: VVGAVGVGK (KRAS G12V)
LVGHVQVGR

SEQ ID NO: 73130 - protein, 9 aa, synthetic construct
  source 1..9: note = Seed: VVGAVGVGK (KRAS G12V)
LVGHVRVGA

SEQ ID NO: 73131 - protein, 9 aa, synthetic construct
  source 1..9: note = Seed: VVGAVGVGK (KRAS G12V)
LVGHVRVGE

SEQ ID NO: 73132 - protein, 9 aa, synthetic construct
  source 1..9: note = Seed: VVGAVGVGK (KRAS G12V)
LVGHVRVGF

SEQ ID NO: 73133 - protein, 9 aa, synthetic construct
  source 1..9: note = Seed: VVGAVGVGK (KRAS G12V)
LVGHVRVGG

SEQ ID NO: 73134 - protein, 9 aa, synthetic construct
  source 1..9: note = Seed: VVGAVGVGK (KRAS G12V)
LVGHVRVGH

SEQ ID NO: 73135 - protein, 9 aa, synthetic construct
  source 1..9: note = Seed: VVGAVGVGK (KRAS G12V)
LVGHVRVGI

SEQ ID NO: 73136 - protein, 9 aa, synthetic construct
  source 1..9: note = Seed: VVGAVGVGK (KRAS G12V)
LVGHVRVGK

SEQ ID NO: 73137 - protein, 9 aa, synthetic construct
  source 1..9: note = Seed: VVGAVGVGK (KRAS G12V)
LVGHVRVGL

SEQ ID NO: 73138 - protein, 9 aa, synthetic construct
  source 1..9: note = Seed: VVGAVGVGK (KRAS G12V)
LVGHVRVGM

SEQ ID NO: 73139 - protein, 9 aa, synthetic construct
  source 1..9: note = Seed: VVGAVGVGK (KRAS G12V)
LVGHVRVGN

SEQ ID NO: 73140 - protein, 9 aa, synthetic construct
  source 1..9: note = Seed: VVGAVGVGK (KRAS G12V)
LVGHVRVGP

SEQ ID NO: 73141 - protein, 9 aa, synthetic construct
  source 1..9: note = Seed: VVGAVGVGK (KRAS G12V)
LVGHVRVGQ

SEQ ID NO: 73142 - protein, 9 aa, synthetic construct
  source 1..9: note = Seed: VVGAVGVGK (KRAS G12V)
LVGHVRVGR

SEQ ID NO: 73143 - protein, 9 aa, synthetic construct
  source 1..9: note = Seed: VVGAVGVGK (KRAS G12V)
LVGHVRVGS

SEQ ID NO: 73144 - protein, 9 aa, synthetic construct
  source 1..9: note = Seed: VVGAVGVGK (KRAS G12V)
LVGHVRVGT

SEQ ID NO: 73145 - protein, 9 aa, synthetic construct
  source 1..9: note = Seed: VVGAVGVGK (KRAS G12V)
LVGHVRVGV

SEQ ID NO: 73146 - protein, 9 aa, synthetic construct
  source 1..9: note = Seed: VVGAVGVGK (KRAS G12V)
LVGHVRVGW

SEQ ID NO: 73147 - protein, 9 aa, synthetic construct
  source 1..9: note = Seed: VVGAVGVGK (KRAS G12V)
LVGHVRVGY

SEQ ID NO: 73148 - protein, 9 aa, synthetic construct
  source 1..9: note = Seed: VVGAVGVGK (KRAS G12V)
LVGHVSVGK

SEQ ID NO: 73149 - protein, 9 aa, synthetic construct
  source 1..9: note = Seed: VVGAVGVGK (KRAS G12V)
LVGHVSVGR

SEQ ID NO: 73150 - protein, 9 aa, synthetic construct
  source 1..9: note = Seed: VVGAVGVGK (KRAS G12V)
LVGHVSVGY

SEQ ID NO: 73151 - protein, 9 aa, synthetic construct
  source 1..9: note = Seed: VVGAVGVGK (KRAS G12V)
LVGHVTVGK

SEQ ID NO: 73152 - protein, 9 aa, synthetic construct
  source 1..9: note = Seed: VVGAVGVGK (KRAS G12V)
LVGHVTVGR

SEQ ID NO: 73153 - protein, 9 aa, synthetic construct
  source 1..9: note = Seed: VVGAVGVGK (KRAS G12V)
LVGHVTVGY

SEQ ID NO: 73154 - protein, 9 aa, synthetic construct
  source 1..9: note = Seed: VVGAVGVGK (KRAS G12V)
LVGHVVVGK

SEQ ID NO: 73155 - protein, 9 aa, synthetic construct
  source 1..9: note = Seed: VVGAVGVGK (KRAS G12V)
LVGHVVVGR

SEQ ID NO: 73156 - protein, 9 aa, synthetic construct
  source 1..9: note = Seed: VVGAVGVGK (KRAS G12V)
LVGHVVVGY

SEQ ID NO: 73157 - protein, 9 aa, synthetic construct
  source 1..9: note = Seed: VVGAVGVGK (KRAS G12V)
LVGIVAVGK

SEQ ID NO: 73158 - protein, 9 aa, synthetic construct
  source 1..9: note = Seed: VVGAVGVGK (KRAS G12V)
LVGIVAVGR

SEQ ID NO: 73159 - protein, 9 aa, synthetic construct
  source 1..9: note = Seed: VVGAVGVGK (KRAS G12V)
LVGIVGVGA

SEQ ID NO: 73160 - protein, 9 aa, synthetic construct
  source 1..9: note = Seed: VVGAVGVGK (KRAS G12V)
LVGIVGVGN

SEQ ID NO: 73161 - protein, 9 aa, synthetic construct
  source 1..9: note = Seed: VVGAVGVGK (KRAS G12V)
LVGIVGVGR

SEQ ID NO: 73162 - protein, 9 aa, synthetic construct
  source 1..9: note = Seed: VVGAVGVGK (KRAS G12V)
LVGIVGVGS

SEQ ID NO: 73163 - protein, 9 aa, synthetic construct
  source 1..9: note = Seed: VVGAVGVGK (KRAS G12V)
LVGIVHVGK

SEQ ID NO: 73164 - protein, 9 aa, synthetic construct
  source 1..9: note = Seed: VVGAVGVGK (KRAS G12V)
LVGIVHVGR

SEQ ID NO: 73165 - protein, 9 aa, synthetic construct
  source 1..9: note = Seed: VVGAVGVGK (KRAS G12V)
LVGIVKVGA

SEQ ID NO: 73166 - protein, 9 aa, synthetic construct
  source 1..9: note = Seed: VVGAVGVGK (KRAS G12V)
LVGIVKVGG

SEQ ID NO: 73167 - protein, 9 aa, synthetic construct
  source 1..9: note = Seed: VVGAVGVGK (KRAS G12V)
LVGIVKVGH

SEQ ID NO: 73168 - protein, 9 aa, synthetic construct
  source 1..9: note = Seed: VVGAVGVGK (KRAS G12V)
LVGIVKVGK

SEQ ID NO: 73169 - protein, 9 aa, synthetic construct
  source 1..9: note = Seed: VVGAVGVGK (KRAS G12V)
LVGIVKVGM

SEQ ID NO: 73170 - protein, 9 aa, synthetic construct
  source 1..9: note = Seed: VVGAVGVGK (KRAS G12V)
LVGIVKVGN

SEQ ID NO: 73171 - protein, 9 aa, synthetic construct
  source 1..9: note = Seed: VVGAVGVGK (KRAS G12V)
LVGIVKVGP

SEQ ID NO: 73172 - protein, 9 aa, synthetic construct
  source 1..9: note = Seed: VVGAVGVGK (KRAS G12V)
LVGIVKVGQ

SEQ ID NO: 73173 - protein, 9 aa, synthetic construct
  source 1..9: note = Seed: VVGAVGVGK (KRAS G12V)
LVGIVKVGR

SEQ ID NO: 73174 - protein, 9 aa, synthetic construct
  source 1..9: note = Seed: VVGAVGVGK (KRAS G12V)
LVGIVKVGS

SEQ ID NO: 73175 - protein, 9 aa, synthetic construct
  source 1..9: note = Seed: VVGAVGVGK (KRAS G12V)
LVGIVKVGT

SEQ ID NO: 73176 - protein, 9 aa, synthetic construct
  source 1..9: note = Seed: VVGAVGVGK (KRAS G12V)
LVGIVKVGV

SEQ ID NO: 73177 - protein, 9 aa, synthetic construct
  source 1..9: note = Seed: VVGAVGVGK (KRAS G12V)
LVGIVKVGY

SEQ ID NO: 73178 - protein, 9 aa, synthetic construct
  source 1..9: note = Seed: VVGAVGVGK (KRAS G12V)
LVGIVNVGR

SEQ ID NO: 73179 - protein, 9 aa, synthetic construct
  source 1..9: note = Seed: VVGAVGVGK (KRAS G12V)
LVGIVPVGI

SEQ ID NO: 73180 - protein, 9 aa, synthetic construct
  source 1..9: note = Seed: VVGAVGVGK (KRAS G12V)
LVGIVPVGL

SEQ ID NO: 73181 - protein, 9 aa, synthetic construct
  source 1..9: note = Seed: VVGAVGVGK (KRAS G12V)
LVGIVPVGM

SEQ ID NO: 73182 - protein, 9 aa, synthetic construct
  source 1..9: note = Seed: VVGAVGVGK (KRAS G12V)
LVGIVPVGR

SEQ ID NO: 73183 - protein, 9 aa, synthetic construct
  source 1..9: note = Seed: VVGAVGVGK (KRAS G12V)
LVGIVPVGT

SEQ ID NO: 73184 - protein, 9 aa, synthetic construct
  source 1..9: note = Seed: VVGAVGVGK (KRAS G12V)
LVGIVPVGV

SEQ ID NO: 73185 - protein, 9 aa, synthetic construct
  source 1..9: note = Seed: VVGAVGVGK (KRAS G12V)
LVGIVQVGR

SEQ ID NO: 73186 - protein, 9 aa, synthetic construct
  source 1..9: note = Seed: VVGAVGVGK (KRAS G12V)
LVGIVRVGA

SEQ ID NO: 73187 - protein, 9 aa, synthetic construct
  source 1..9: note = Seed: VVGAVGVGK (KRAS G12V)
LVGIVRVGE

SEQ ID NO: 73188 - protein, 9 aa, synthetic construct
  source 1..9: note = Seed: VVGAVGVGK (KRAS G12V)
LVGIVRVGG

SEQ ID NO: 73189 - protein, 9 aa, synthetic construct
  source 1..9: note = Seed: VVGAVGVGK (KRAS G12V)
LVGIVRVGH

SEQ ID NO: 73190 - protein, 9 aa, synthetic construct
  source 1..9: note = Seed: VVGAVGVGK (KRAS G12V)
LVGIVRVGK

SEQ ID NO: 73191 - protein, 9 aa, synthetic construct
  source 1..9: note = Seed: VVGAVGVGK (KRAS G12V)
LVGIVRVGM

SEQ ID NO: 73192 - protein, 9 aa, synthetic construct
  source 1..9: note = Seed: VVGAVGVGK (KRAS G12V)
LVGIVRVGN

SEQ ID NO: 73193 - protein, 9 aa, synthetic construct
  source 1..9: note = Seed: VVGAVGVGK (KRAS G12V)
LVGIVRVGP

SEQ ID NO: 73194 - protein, 9 aa, synthetic construct
  source 1..9: note = Seed: VVGAVGVGK (KRAS G12V)
LVGIVRVGQ

SEQ ID NO: 73195 - protein, 9 aa, synthetic construct
  source 1..9: note = Seed: VVGAVGVGK (KRAS G12V)
LVGIVRVGR

SEQ ID NO: 73196 - protein, 9 aa, synthetic construct
  source 1..9: note = Seed: VVGAVGVGK (KRAS G12V)
LVGIVRVGS

SEQ ID NO: 73197 - protein, 9 aa, synthetic construct
  source 1..9: note = Seed: VVGAVGVGK (KRAS G12V)
LVGIVRVGT

SEQ ID NO: 73198 - protein, 9 aa, synthetic construct
  source 1..9: note = Seed: VVGAVGVGK (KRAS G12V)
LVGIVRVGY

SEQ ID NO: 73199 - protein, 9 aa, synthetic construct
  source 1..9: note = Seed: VVGAVGVGK (KRAS G12V)
LVGIVSVGR

SEQ ID NO: 73200 - protein, 9 aa, synthetic construct
  source 1..9: note = Seed: VVGAVGVGK (KRAS G12V)
LVGIVTVGR

SEQ ID NO: 73201 - protein, 9 aa, synthetic construct
  source 1..9: note = Seed: VVGAVGVGK (KRAS G12V)
LVGIVVVGR

SEQ ID NO: 73202 - protein, 9 aa, synthetic construct
  source 1..9: note = Seed: VVGAVGVGK (KRAS G12V)
LVGKVAVGK

SEQ ID NO: 73203 - protein, 9 aa, synthetic construct
  source 1..9: note = Seed: VVGAVGVGK (KRAS G12V)
LVGKVAVGR

SEQ ID NO: 73204 - protein, 9 aa, synthetic construct
  source 1..9: note = Seed: VVGAVGVGK (KRAS G12V)
LVGKVAVGY

SEQ ID NO: 73205 - protein, 9 aa, synthetic construct
  source 1..9: note = Seed: VVGAVGVGK (KRAS G12V)
LVGKVGVGR

SEQ ID NO: 73206 - protein, 9 aa, synthetic construct
  source 1..9: note = Seed: VVGAVGVGK (KRAS G12V)
LVGKVHVGA

SEQ ID NO: 73207 - protein, 9 aa, synthetic construct
  source 1..9: note = Seed: VVGAVGVGK (KRAS G12V)
LVGKVHVGF

SEQ ID NO: 73208 - protein, 9 aa, synthetic construct
  source 1..9: note = Seed: VVGAVGVGK (KRAS G12V)
LVGKVHVGG

SEQ ID NO: 73209 - protein, 9 aa, synthetic construct
  source 1..9: note = Seed: VVGAVGVGK (KRAS G12V)
LVGKVHVGK

SEQ ID NO: 73210 - protein, 9 aa, synthetic construct
  source 1..9: note = Seed: VVGAVGVGK (KRAS G12V)
LVGKVHVGM

SEQ ID NO: 73211 - protein, 9 aa, synthetic construct
  source 1..9: note = Seed: VVGAVGVGK (KRAS G12V)
LVGKVHVGQ

SEQ ID NO: 73212 - protein, 9 aa, synthetic construct
  source 1..9: note = Seed: VVGAVGVGK (KRAS G12V)
LVGKVHVGR

SEQ ID NO: 73213 - protein, 9 aa, synthetic construct
  source 1..9: note = Seed: VVGAVGVGK (KRAS G12V)
LVGKVHVGS

SEQ ID NO: 73214 - protein, 9 aa, synthetic construct
  source 1..9: note = Seed: VVGAVGVGK (KRAS G12V)
LVGKVHVGY

SEQ ID NO: 73215 - protein, 9 aa, synthetic construct
  source 1..9: note = Seed: VVGAVGVGK (KRAS G12V)
LVGKVIVGR

SEQ ID NO: 73216 - protein, 9 aa, synthetic construct
  source 1..9: note = Seed: VVGAVGVGK (KRAS G12V)
LVGKVKVGA

SEQ ID NO: 73217 - protein, 9 aa, synthetic construct
  source 1..9: note = Seed: VVGAVGVGK (KRAS G12V)
LVGKVKVGC

SEQ ID NO: 73218 - protein, 9 aa, synthetic construct
  source 1..9: note = Seed: VVGAVGVGK (KRAS G12V)
LVGKVKVGD

SEQ ID NO: 73219 - protein, 9 aa, synthetic construct
  source 1..9: note = Seed: VVGAVGVGK (KRAS G12V)
LVGKVKVGE

SEQ ID NO: 73220 - protein, 9 aa, synthetic construct
  source 1..9: note = Seed: VVGAVGVGK (KRAS G12V)
LVGKVKVGF

SEQ ID NO: 73221 - protein, 9 aa, synthetic construct
  source 1..9: note = Seed: VVGAVGVGK (KRAS G12V)
LVGKVKVGG

SEQ ID NO: 73222 - protein, 9 aa, synthetic construct
  source 1..9: note = Seed: VVGAVGVGK (KRAS G12V)
LVGKVKVGH

SEQ ID NO: 73223 - protein, 9 aa, synthetic construct
  source 1..9: note = Seed: VVGAVGVGK (KRAS G12V)
LVGKVKVGI

SEQ ID NO: 73224 - protein, 9 aa, synthetic construct
  source 1..9: note = Seed: VVGAVGVGK (KRAS G12V)
LVGKVKVGK

SEQ ID NO: 73225 - protein, 9 aa, synthetic construct
  source 1..9: note = Seed: VVGAVGVGK (KRAS G12V)
LVGKVKVGL

SEQ ID NO: 73226 - protein, 9 aa, synthetic construct
  source 1..9: note = Seed: VVGAVGVGK (KRAS G12V)
LVGKVKVGM

SEQ ID NO: 73227 - protein, 9 aa, synthetic construct
  source 1..9: note = Seed: VVGAVGVGK (KRAS G12V)
LVGKVKVGN

SEQ ID NO: 73228 - protein, 9 aa, synthetic construct
  source 1..9: note = Seed: VVGAVGVGK (KRAS G12V)
LVGKVKVGP

SEQ ID NO: 73229 - protein, 9 aa, synthetic construct
  source 1..9: note = Seed: VVGAVGVGK (KRAS G12V)
LVGKVKVGQ

SEQ ID NO: 73230 - protein, 9 aa, synthetic construct
  source 1..9: note = Seed: VVGAVGVGK (KRAS G12V)
LVGKVKVGR

SEQ ID NO: 73231 - protein, 9 aa, synthetic construct
  source 1..9: note = Seed: VVGAVGVGK (KRAS G12V)
LVGKVKVGS

SEQ ID NO: 73232 - protein, 9 aa, synthetic construct
  source 1..9: note = Seed: VVGAVGVGK (KRAS G12V)
LVGKVKVGT

SEQ ID NO: 73233 - protein, 9 aa, synthetic construct
  source 1..9: note = Seed: VVGAVGVGK (KRAS G12V)
LVGKVKVGV

SEQ ID NO: 73234 - protein, 9 aa, synthetic construct
  source 1..9: note = Seed: VVGAVGVGK (KRAS G12V)
LVGKVKVGY

SEQ ID NO: 73235 - protein, 9 aa, synthetic construct
  source 1..9: note = Seed: VVGAVGVGK (KRAS G12V)
LVGKVMVGR

SEQ ID NO: 73236 - protein, 9 aa, synthetic construct
  source 1..9: note = Seed: VVGAVGVGK (KRAS G12V)
LVGKVNVGK

SEQ ID NO: 73237 - protein, 9 aa, synthetic construct
  source 1..9: note = Seed: VVGAVGVGK (KRAS G12V)
LVGKVNVGR

SEQ ID NO: 73238 - protein, 9 aa, synthetic construct
  source 1..9: note = Seed: VVGAVGVGK (KRAS G12V)
LVGKVNVGY

SEQ ID NO: 73239 - protein, 9 aa, synthetic construct
  source 1..9: note = Seed: VVGAVGVGK (KRAS G12V)
LVGKVPVGR

SEQ ID NO: 73240 - protein, 9 aa, synthetic construct
  source 1..9: note = Seed: VVGAVGVGK (KRAS G12V)
LVGKVPVGY

SEQ ID NO: 73241 - protein, 9 aa, synthetic construct
  source 1..9: note = Seed: VVGAVGVGK (KRAS G12V)
LVGKVQVGK

SEQ ID NO: 73242 - protein, 9 aa, synthetic construct
  source 1..9: note = Seed: VVGAVGVGK (KRAS G12V)
LVGKVQVGR

SEQ ID NO: 73243 - protein, 9 aa, synthetic construct
  source 1..9: note = Seed: VVGAVGVGK (KRAS G12V)
LVGKVRVGA

SEQ ID NO: 73244 - protein, 9 aa, synthetic construct
  source 1..9: note = Seed: VVGAVGVGK (KRAS G12V)
LVGKVRVGC

SEQ ID NO: 73245 - protein, 9 aa, synthetic construct
  source 1..9: note = Seed: VVGAVGVGK (KRAS G12V)
LVGKVRVGD

SEQ ID NO: 73246 - protein, 9 aa, synthetic construct
  source 1..9: note = Seed: VVGAVGVGK (KRAS G12V)
LVGKVRVGE

SEQ ID NO: 73247 - protein, 9 aa, synthetic construct
  source 1..9: note = Seed: VVGAVGVGK (KRAS G12V)
LVGKVRVGF

SEQ ID NO: 73248 - protein, 9 aa, synthetic construct
  source 1..9: note = Seed: VVGAVGVGK (KRAS G12V)
LVGKVRVGG

SEQ ID NO: 73249 - protein, 9 aa, synthetic construct
  source 1..9: note = Seed: VVGAVGVGK (KRAS G12V)
LVGKVRVGH

SEQ ID NO: 73250 - protein, 9 aa, synthetic construct
  source 1..9: note = Seed: VVGAVGVGK (KRAS G12V)
LVGKVRVGI

SEQ ID NO: 73251 - protein, 9 aa, synthetic construct
  source 1..9: note = Seed: VVGAVGVGK (KRAS G12V)
LVGKVRVGK

SEQ ID NO: 73252 - protein, 9 aa, synthetic construct
  source 1..9: note = Seed: VVGAVGVGK (KRAS G12V)
LVGKVRVGL

SEQ ID NO: 73253 - protein, 9 aa, synthetic construct
  source 1..9: note = Seed: VVGAVGVGK (KRAS G12V)
LVGKVRVGM

SEQ ID NO: 73254 - protein, 9 aa, synthetic construct
  source 1..9: note = Seed: VVGAVGVGK (KRAS G12V)
LVGKVRVGN

SEQ ID NO: 73255 - protein, 9 aa, synthetic construct
  source 1..9: note = Seed: VVGAVGVGK (KRAS G12V)
LVGKVRVGP

SEQ ID NO: 73256 - protein, 9 aa, synthetic construct
  source 1..9: note = Seed: VVGAVGVGK (KRAS G12V)
LVGKVRVGQ

SEQ ID NO: 73257 - protein, 9 aa, synthetic construct
  source 1..9: note = Seed: VVGAVGVGK (KRAS G12V)
LVGKVRVGR

SEQ ID NO: 73258 - protein, 9 aa, synthetic construct
  source 1..9: note = Seed: VVGAVGVGK (KRAS G12V)
LVGKVRVGS

SEQ ID NO: 73259 - protein, 9 aa, synthetic construct
  source 1..9: note = Seed: VVGAVGVGK (KRAS G12V)
LVGKVRVGT

SEQ ID NO: 73260 - protein, 9 aa, synthetic construct
  source 1..9: note = Seed: VVGAVGVGK (KRAS G12V)
LVGKVRVGV

SEQ ID NO: 73261 - protein, 9 aa, synthetic construct
  source 1..9: note = Seed: VVGAVGVGK (KRAS G12V)
LVGKVRVGY

SEQ ID NO: 73262 - protein, 9 aa, synthetic construct
  source 1..9: note = Seed: VVGAVGVGK (KRAS G12V)
LVGKVSVGK

SEQ ID NO: 73263 - protein, 9 aa, synthetic construct
  source 1..9: note = Seed: VVGAVGVGK (KRAS G12V)
LVGKVSVGR

SEQ ID NO: 73264 - protein, 9 aa, synthetic construct
  source 1..9: note = Seed: VVGAVGVGK (KRAS G12V)
LVGKVSVGY

SEQ ID NO: 73265 - protein, 9 aa, synthetic construct
  source 1..9: note = Seed: VVGAVGVGK (KRAS G12V)
LVGKVTVGK

SEQ ID NO: 73266 - protein, 9 aa, synthetic construct
  source 1..9: note = Seed: VVGAVGVGK (KRAS G12V)
LVGKVTVGR

SEQ ID NO: 73267 - protein, 9 aa, synthetic construct
  source 1..9: note = Seed: VVGAVGVGK (KRAS G12V)
LVGKVTVGY

SEQ ID NO: 73268 - protein, 9 aa, synthetic construct
  source 1..9: note = Seed: VVGAVGVGK (KRAS G12V)
LVGKVVVGK

SEQ ID NO: 73269 - protein, 9 aa, synthetic construct
  source 1..9: note = Seed: VVGAVGVGK (KRAS G12V)
LVGKVVVGR

SEQ ID NO: 73270 - protein, 9 aa, synthetic construct
  source 1..9: note = Seed: VVGAVGVGK (KRAS G12V)
LVGLVAVGA

SEQ ID NO: 73271 - protein, 9 aa, synthetic construct
  source 1..9: note = Seed: VVGAVGVGK (KRAS G12V)
LVGLVAVGH

SEQ ID NO: 73272 - protein, 9 aa, synthetic construct
  source 1..9: note = Seed: VVGAVGVGK (KRAS G12V)
LVGLVAVGK

SEQ ID NO: 73273 - protein, 9 aa, synthetic construct
  source 1..9: note = Seed: VVGAVGVGK (KRAS G12V)
LVGLVAVGM

SEQ ID NO: 73274 - protein, 9 aa, synthetic construct
  source 1..9: note = Seed: VVGAVGVGK (KRAS G12V)
LVGLVAVGN

SEQ ID NO: 73275 - protein, 9 aa, synthetic construct
  source 1..9: note = Seed: VVGAVGVGK (KRAS G12V)
LVGLVAVGR

SEQ ID NO: 73276 - protein, 9 aa, synthetic construct
  source 1..9: note = Seed: VVGAVGVGK (KRAS G12V)
LVGLVAVGS

SEQ ID NO: 73277 - protein, 9 aa, synthetic construct
  source 1..9: note = Seed: VVGAVGVGK (KRAS G12V)
LVGLVAVGT

SEQ ID NO: 73278 - protein, 9 aa, synthetic construct
  source 1..9: note = Seed: VVGAVGVGK (KRAS G12V)
LVGLVAVGV

SEQ ID NO: 73279 - protein, 9 aa, synthetic construct
  source 1..9: note = Seed: VVGAVGVGK (KRAS G12V)
LVGLVGVGA

SEQ ID NO: 73280 - protein, 9 aa, synthetic construct
  source 1..9: note = Seed: VVGAVGVGK (KRAS G12V)
LVGLVGVGG

SEQ ID NO: 73281 - protein, 9 aa, synthetic construct
  source 1..9: note = Seed: VVGAVGVGK (KRAS G12V)
LVGLVGVGH

SEQ ID NO: 73282 - protein, 9 aa, synthetic construct
  source 1..9: note = Seed: VVGAVGVGK (KRAS G12V)
LVGLVGVGL

SEQ ID NO: 73283 - protein, 9 aa, synthetic construct
  source 1..9: note = Seed: VVGAVGVGK (KRAS G12V)
LVGLVGVGM

SEQ ID NO: 73284 - protein, 9 aa, synthetic construct
  source 1..9: note = Seed: VVGAVGVGK (KRAS G12V)
LVGLVGVGN

SEQ ID NO: 73285 - protein, 9 aa, synthetic construct
  source 1..9: note = Seed: VVGAVGVGK (KRAS G12V)
LVGLVGVGR

SEQ ID NO: 73286 - protein, 9 aa, synthetic construct
  source 1..9: note = Seed: VVGAVGVGK (KRAS G12V)
LVGLVGVGS

SEQ ID NO: 73287 - protein, 9 aa, synthetic construct
  source 1..9: note = Seed: VVGAVGVGK (KRAS G12V)
LVGLVGVGT

SEQ ID NO: 73288 - protein, 9 aa, synthetic construct
  source 1..9: note = Seed: VVGAVGVGK (KRAS G12V)
LVGLVGVGV

SEQ ID NO: 73289 - protein, 9 aa, synthetic construct
  source 1..9: note = Seed: VVGAVGVGK (KRAS G12V)
LVGLVHVGH

SEQ ID NO: 73290 - protein, 9 aa, synthetic construct
  source 1..9: note = Seed: VVGAVGVGK (KRAS G12V)
LVGLVHVGK

SEQ ID NO: 73291 - protein, 9 aa, synthetic construct
  source 1..9: note = Seed: VVGAVGVGK (KRAS G12V)
LVGLVHVGR

SEQ ID NO: 73292 - protein, 9 aa, synthetic construct
  source 1..9: note = Seed: VVGAVGVGK (KRAS G12V)
LVGLVKVGA

SEQ ID NO: 73293 - protein, 9 aa, synthetic construct
  source 1..9: note = Seed: VVGAVGVGK (KRAS G12V)
LVGLVKVGE

SEQ ID NO: 73294 - protein, 9 aa, synthetic construct
  source 1..9: note = Seed: VVGAVGVGK (KRAS G12V)
LVGLVKVGG

SEQ ID NO: 73295 - protein, 9 aa, synthetic construct
  source 1..9: note = Seed: VVGAVGVGK (KRAS G12V)
LVGLVKVGH

SEQ ID NO: 73296 - protein, 9 aa, synthetic construct
  source 1..9: note = Seed: VVGAVGVGK (KRAS G12V)
LVGLVKVGK

SEQ ID NO: 73297 - protein, 9 aa, synthetic construct
  source 1..9: note = Seed: VVGAVGVGK (KRAS G12V)
LVGLVKVGM

SEQ ID NO: 73298 - protein, 9 aa, synthetic construct
  source 1..9: note = Seed: VVGAVGVGK (KRAS G12V)
LVGLVKVGN

SEQ ID NO: 73299 - protein, 9 aa, synthetic construct
  source 1..9: note = Seed: VVGAVGVGK (KRAS G12V)
LVGLVKVGP

SEQ ID NO: 73300 - protein, 9 aa, synthetic construct
  source 1..9: note = Seed: VVGAVGVGK (KRAS G12V)
LVGLVKVGQ

SEQ ID NO: 73301 - protein, 9 aa, synthetic construct
  source 1..9: note = Seed: VVGAVGVGK (KRAS G12V)
LVGLVKVGR

SEQ ID NO: 73302 - protein, 9 aa, synthetic construct
  source 1..9: note = Seed: VVGAVGVGK (KRAS G12V)
LVGLVKVGS

SEQ ID NO: 73303 - protein, 9 aa, synthetic construct
  source 1..9: note = Seed: VVGAVGVGK (KRAS G12V)
LVGLVKVGT

SEQ ID NO: 73304 - protein, 9 aa, synthetic construct
  source 1..9: note = Seed: VVGAVGVGK (KRAS G12V)
LVGLVKVGY

SEQ ID NO: 73305 - protein, 9 aa, synthetic construct
  source 1..9: note = Seed: VVGAVGVGK (KRAS G12V)
LVGLVNVGA

SEQ ID NO: 73306 - protein, 9 aa, synthetic construct
  source 1..9: note = Seed: VVGAVGVGK (KRAS G12V)
LVGLVNVGH

SEQ ID NO: 73307 - protein, 9 aa, synthetic construct
  source 1..9: note = Seed: VVGAVGVGK (KRAS G12V)
LVGLVNVGN

SEQ ID NO: 73308 - protein, 9 aa, synthetic construct
  source 1..9: note = Seed: VVGAVGVGK (KRAS G12V)
LVGLVNVGR

SEQ ID NO: 73309 - protein, 9 aa, synthetic construct
  source 1..9: note = Seed: VVGAVGVGK (KRAS G12V)
LVGLVNVGS

SEQ ID NO: 73310 - protein, 9 aa, synthetic construct
  source 1..9: note = Seed: VVGAVGVGK (KRAS G12V)
LVGLVNVGT

SEQ ID NO: 73311 - protein, 9 aa, synthetic construct
  source 1..9: note = Seed: VVGAVGVGK (KRAS G12V)
LVGLVNVGV

SEQ ID NO: 73312 - protein, 9 aa, synthetic construct
  source 1..9: note = Seed: VVGAVGVGK (KRAS G12V)
LVGLVPVGA

SEQ ID NO: 73313 - protein, 9 aa, synthetic construct
  source 1..9: note = Seed: VVGAVGVGK (KRAS G12V)
LVGLVPVGG

SEQ ID NO: 73314 - protein, 9 aa, synthetic construct
  source 1..9: note = Seed: VVGAVGVGK (KRAS G12V)
LVGLVPVGH

SEQ ID NO: 73315 - protein, 9 aa, synthetic construct
  source 1..9: note = Seed: VVGAVGVGK (KRAS G12V)
LVGLVPVGI

SEQ ID NO: 73316 - protein, 9 aa, synthetic construct
  source 1..9: note = Seed: VVGAVGVGK (KRAS G12V)
LVGLVPVGK

SEQ ID NO: 73317 - protein, 9 aa, synthetic construct
  source 1..9: note = Seed: VVGAVGVGK (KRAS G12V)
LVGLVPVGL

SEQ ID NO: 73318 - protein, 9 aa, synthetic construct
  source 1..9: note = Seed: VVGAVGVGK (KRAS G12V)
LVGLVPVGM

SEQ ID NO: 73319 - protein, 9 aa, synthetic construct
  source 1..9: note = Seed: VVGAVGVGK (KRAS G12V)
LVGLVPVGN

SEQ ID NO: 73320 - protein, 9 aa, synthetic construct
  source 1..9: note = Seed: VVGAVGVGK (KRAS G12V)
LVGLVPVGR

SEQ ID NO: 73321 - protein, 9 aa, synthetic construct
  source 1..9: note = Seed: VVGAVGVGK (KRAS G12V)
LVGLVPVGS

SEQ ID NO: 73322 - protein, 9 aa, synthetic construct
  source 1..9: note = Seed: VVGAVGVGK (KRAS G12V)
LVGLVPVGT

SEQ ID NO: 73323 - protein, 9 aa, synthetic construct
  source 1..9: note = Seed: VVGAVGVGK (KRAS G12V)
LVGLVPVGV

SEQ ID NO: 73324 - protein, 9 aa, synthetic construct
  source 1..9: note = Seed: VVGAVGVGK (KRAS G12V)
LVGLVPVGY

SEQ ID NO: 73325 - protein, 9 aa, synthetic construct
  source 1..9: note = Seed: VVGAVGVGK (KRAS G12V)
LVGLVRVGA

SEQ ID NO: 73326 - protein, 9 aa, synthetic construct
  source 1..9: note = Seed: VVGAVGVGK (KRAS G12V)
LVGLVRVGD

SEQ ID NO: 73327 - protein, 9 aa, synthetic construct
  source 1..9: note = Seed: VVGAVGVGK (KRAS G12V)
LVGLVRVGE

SEQ ID NO: 73328 - protein, 9 aa, synthetic construct
  source 1..9: note = Seed: VVGAVGVGK (KRAS G12V)
LVGLVRVGG

SEQ ID NO: 73329 - protein, 9 aa, synthetic construct
  source 1..9: note = Seed: VVGAVGVGK (KRAS G12V)
LVGLVRVGH

SEQ ID NO: 73330 - protein, 9 aa, synthetic construct
  source 1..9: note = Seed: VVGAVGVGK (KRAS G12V)
LVGLVRVGK

SEQ ID NO: 73331 - protein, 9 aa, synthetic construct
  source 1..9: note = Seed: VVGAVGVGK (KRAS G12V)
LVGLVRVGM

SEQ ID NO: 73332 - protein, 9 aa, synthetic construct
  source 1..9: note = Seed: VVGAVGVGK (KRAS G12V)
LVGLVRVGN

SEQ ID NO: 73333 - protein, 9 aa, synthetic construct
  source 1..9: note = Seed: VVGAVGVGK (KRAS G12V)
LVGLVRVGP

SEQ ID NO: 73334 - protein, 9 aa, synthetic construct
  source 1..9: note = Seed: VVGAVGVGK (KRAS G12V)
LVGLVRVGQ

SEQ ID NO: 73335 - protein, 9 aa, synthetic construct
  source 1..9: note = Seed: VVGAVGVGK (KRAS G12V)
LVGLVRVGR

SEQ ID NO: 73336 - protein, 9 aa, synthetic construct
  source 1..9: note = Seed: VVGAVGVGK (KRAS G12V)
LVGLVRVGS

SEQ ID NO: 73337 - protein, 9 aa, synthetic construct
  source 1..9: note = Seed: VVGAVGVGK (KRAS G12V)
LVGLVRVGT

SEQ ID NO: 73338 - protein, 9 aa, synthetic construct
  source 1..9: note = Seed: VVGAVGVGK (KRAS G12V)
LVGLVRVGY

SEQ ID NO: 73339 - protein, 9 aa, synthetic construct
  source 1..9: note = Seed: VVGAVGVGK (KRAS G12V)
LVGLVSVGH

SEQ ID NO: 73340 - protein, 9 aa, synthetic construct
  source 1..9: note = Seed: VVGAVGVGK (KRAS G12V)
LVGLVSVGM

SEQ ID NO: 73341 - protein, 9 aa, synthetic construct
  source 1..9: note = Seed: VVGAVGVGK (KRAS G12V)
LVGLVSVGR

SEQ ID NO: 73342 - protein, 9 aa, synthetic construct
  source 1..9: note = Seed: VVGAVGVGK (KRAS G12V)
LVGLVSVGS

SEQ ID NO: 73343 - protein, 9 aa, synthetic construct
  source 1..9: note = Seed: VVGAVGVGK (KRAS G12V)
LVGLVSVGT

SEQ ID NO: 73344 - protein, 9 aa, synthetic construct
  source 1..9: note = Seed: VVGAVGVGK (KRAS G12V)
LVGLVSVGV

SEQ ID NO: 73345 - protein, 9 aa, synthetic construct
  source 1..9: note = Seed: VVGAVGVGK (KRAS G12V)
LVGLVTVGH

SEQ ID NO: 73346 - protein, 9 aa, synthetic construct
  source 1..9: note = Seed: VVGAVGVGK (KRAS G12V)
LVGLVTVGK

SEQ ID NO: 73347 - protein, 9 aa, synthetic construct
  source 1..9: note = Seed: VVGAVGVGK (KRAS G12V)
LVGLVTVGR

SEQ ID NO: 73348 - protein, 9 aa, synthetic construct
  source 1..9: note = Seed: VVGAVGVGK (KRAS G12V)
LVGLVTVGS

SEQ ID NO: 73349 - protein, 9 aa, synthetic construct
  source 1..9: note = Seed: VVGAVGVGK (KRAS G12V)
LVGMVAVGA

SEQ ID NO: 73350 - protein, 9 aa, synthetic construct
  source 1..9: note = Seed: VVGAVGVGK (KRAS G12V)
LVGMVAVGG

SEQ ID NO: 73351 - protein, 9 aa, synthetic construct
  source 1..9: note = Seed: VVGAVGVGK (KRAS G12V)
LVGMVAVGH

SEQ ID NO: 73352 - protein, 9 aa, synthetic construct
  source 1..9: note = Seed: VVGAVGVGK (KRAS G12V)
LVGMVAVGK

SEQ ID NO: 73353 - protein, 9 aa, synthetic construct
  source 1..9: note = Seed: VVGAVGVGK (KRAS G12V)
LVGMVAVGL

SEQ ID NO: 73354 - protein, 9 aa, synthetic construct
  source 1..9: note = Seed: VVGAVGVGK (KRAS G12V)
LVGMVAVGM

SEQ ID NO: 73355 - protein, 9 aa, synthetic construct
  source 1..9: note = Seed: VVGAVGVGK (KRAS G12V)
LVGMVAVGN

SEQ ID NO: 73356 - protein, 9 aa, synthetic construct
  source 1..9: note = Seed: VVGAVGVGK (KRAS G12V)
LVGMVAVGR

SEQ ID NO: 73357 - protein, 9 aa, synthetic construct
  source 1..9: note = Seed: VVGAVGVGK (KRAS G12V)
LVGMVAVGS

SEQ ID NO: 73358 - protein, 9 aa, synthetic construct
  source 1..9: note = Seed: VVGAVGVGK (KRAS G12V)
LVGMVAVGT

SEQ ID NO: 73359 - protein, 9 aa, synthetic construct
  source 1..9: note = Seed: VVGAVGVGK (KRAS G12V)
LVGMVAVGV

SEQ ID NO: 73360 - protein, 9 aa, synthetic construct
  source 1..9: note = Seed: VVGAVGVGK (KRAS G12V)
LVGMVGVGA

SEQ ID NO: 73361 - protein, 9 aa, synthetic construct
  source 1..9: note = Seed: VVGAVGVGK (KRAS G12V)
LVGMVGVGG

SEQ ID NO: 73362 - protein, 9 aa, synthetic construct
  source 1..9: note = Seed: VVGAVGVGK (KRAS G12V)
LVGMVGVGH

SEQ ID NO: 73363 - protein, 9 aa, synthetic construct
  source 1..9: note = Seed: VVGAVGVGK (KRAS G12V)
LVGMVGVGI

SEQ ID NO: 73364 - protein, 9 aa, synthetic construct
  source 1..9: note = Seed: VVGAVGVGK (KRAS G12V)
LVGMVGVGK

SEQ ID NO: 73365 - protein, 9 aa, synthetic construct
  source 1..9: note = Seed: VVGAVGVGK (KRAS G12V)
LVGMVGVGL

SEQ ID NO: 73366 - protein, 9 aa, synthetic construct
  source 1..9: note = Seed: VVGAVGVGK (KRAS G12V)
LVGMVGVGM

SEQ ID NO: 73367 - protein, 9 aa, synthetic construct
  source 1..9: note = Seed: VVGAVGVGK (KRAS G12V)
LVGMVGVGN

SEQ ID NO: 73368 - protein, 9 aa, synthetic construct
  source 1..9: note = Seed: VVGAVGVGK (KRAS G12V)
LVGMVGVGR

SEQ ID NO: 73369 - protein, 9 aa, synthetic construct
  source 1..9: note = Seed: VVGAVGVGK (KRAS G12V)
LVGMVGVGS

SEQ ID NO: 73370 - protein, 9 aa, synthetic construct
  source 1..9: note = Seed: VVGAVGVGK (KRAS G12V)
LVGMVGVGT

SEQ ID NO: 73371 - protein, 9 aa, synthetic construct
  source 1..9: note = Seed: VVGAVGVGK (KRAS G12V)
LVGMVGVGV

SEQ ID NO: 73372 - protein, 9 aa, synthetic construct
  source 1..9: note = Seed: VVGAVGVGK (KRAS G12V)
LVGMVHVGH

SEQ ID NO: 73373 - protein, 9 aa, synthetic construct
  source 1..9: note = Seed: VVGAVGVGK (KRAS G12V)
LVGMVHVGK

SEQ ID NO: 73374 - protein, 9 aa, synthetic construct
  source 1..9: note = Seed: VVGAVGVGK (KRAS G12V)
LVGMVHVGR

SEQ ID NO: 73375 - protein, 9 aa, synthetic construct
  source 1..9: note = Seed: VVGAVGVGK (KRAS G12V)
LVGMVIVGR

SEQ ID NO: 73376 - protein, 9 aa, synthetic construct
  source 1..9: note = Seed: VVGAVGVGK (KRAS G12V)
LVGMVKVGA

SEQ ID NO: 73377 - protein, 9 aa, synthetic construct
  source 1..9: note = Seed: VVGAVGVGK (KRAS G12V)
LVGMVKVGE

SEQ ID NO: 73378 - protein, 9 aa, synthetic construct
  source 1..9: note = Seed: VVGAVGVGK (KRAS G12V)
LVGMVKVGG

SEQ ID NO: 73379 - protein, 9 aa, synthetic construct
  source 1..9: note = Seed: VVGAVGVGK (KRAS G12V)
LVGMVKVGH

SEQ ID NO: 73380 - protein, 9 aa, synthetic construct
  source 1..9: note = Seed: VVGAVGVGK (KRAS G12V)
LVGMVKVGK

SEQ ID NO: 73381 - protein, 9 aa, synthetic construct
  source 1..9: note = Seed: VVGAVGVGK (KRAS G12V)
LVGMVKVGL

SEQ ID NO: 73382 - protein, 9 aa, synthetic construct
  source 1..9: note = Seed: VVGAVGVGK (KRAS G12V)
LVGMVKVGM

SEQ ID NO: 73383 - protein, 9 aa, synthetic construct
  source 1..9: note = Seed: VVGAVGVGK (KRAS G12V)
LVGMVKVGN

SEQ ID NO: 73384 - protein, 9 aa, synthetic construct
  source 1..9: note = Seed: VVGAVGVGK (KRAS G12V)
LVGMVKVGP

SEQ ID NO: 73385 - protein, 9 aa, synthetic construct
  source 1..9: note = Seed: VVGAVGVGK (KRAS G12V)
LVGMVKVGQ

SEQ ID NO: 73386 - protein, 9 aa, synthetic construct
  source 1..9: note = Seed: VVGAVGVGK (KRAS G12V)
LVGMVKVGR

SEQ ID NO: 73387 - protein, 9 aa, synthetic construct
  source 1..9: note = Seed: VVGAVGVGK (KRAS G12V)
LVGMVKVGS

SEQ ID NO: 73388 - protein, 9 aa, synthetic construct
  source 1..9: note = Seed: VVGAVGVGK (KRAS G12V)
LVGMVKVGT

SEQ ID NO: 73389 - protein, 9 aa, synthetic construct
  source 1..9: note = Seed: VVGAVGVGK (KRAS G12V)
LVGMVKVGV

SEQ ID NO: 73390 - protein, 9 aa, synthetic construct
  source 1..9: note = Seed: VVGAVGVGK (KRAS G12V)
LVGMVKVGY

SEQ ID NO: 73391 - protein, 9 aa, synthetic construct
  source 1..9: note = Seed: VVGAVGVGK (KRAS G12V)
LVGMVNVGA

SEQ ID NO: 73392 - protein, 9 aa, synthetic construct
  source 1..9: note = Seed: VVGAVGVGK (KRAS G12V)
LVGMVNVGG

SEQ ID NO: 73393 - protein, 9 aa, synthetic construct
  source 1..9: note = Seed: VVGAVGVGK (KRAS G12V)
LVGMVNVGL

SEQ ID NO: 73394 - protein, 9 aa, synthetic construct
  source 1..9: note = Seed: VVGAVGVGK (KRAS G12V)
LVGMVNVGM

SEQ ID NO: 73395 - protein, 9 aa, synthetic construct
  source 1..9: note = Seed: VVGAVGVGK (KRAS G12V)
LVGMVNVGR

SEQ ID NO: 73396 - protein, 9 aa, synthetic construct
  source 1..9: note = Seed: VVGAVGVGK (KRAS G12V)
LVGMVNVGS

SEQ ID NO: 73397 - protein, 9 aa, synthetic construct
  source 1..9: note = Seed: VVGAVGVGK (KRAS G12V)
LVGMVNVGT

SEQ ID NO: 73398 - protein, 9 aa, synthetic construct
  source 1..9: note = Seed: VVGAVGVGK (KRAS G12V)
LVGMVNVGV

SEQ ID NO: 73399 - protein, 9 aa, synthetic construct
  source 1..9: note = Seed: VVGAVGVGK (KRAS G12V)
LVGMVPVGA

SEQ ID NO: 73400 - protein, 9 aa, synthetic construct
  source 1..9: note = Seed: VVGAVGVGK (KRAS G12V)
LVGMVPVGG

SEQ ID NO: 73401 - protein, 9 aa, synthetic construct
  source 1..9: note = Seed: VVGAVGVGK (KRAS G12V)
LVGMVPVGH

SEQ ID NO: 73402 - protein, 9 aa, synthetic construct
  source 1..9: note = Seed: VVGAVGVGK (KRAS G12V)
LVGMVPVGI

SEQ ID NO: 73403 - protein, 9 aa, synthetic construct
  source 1..9: note = Seed: VVGAVGVGK (KRAS G12V)
LVGMVPVGK

SEQ ID NO: 73404 - protein, 9 aa, synthetic construct
  source 1..9: note = Seed: VVGAVGVGK (KRAS G12V)
LVGMVPVGL

SEQ ID NO: 73405 - protein, 9 aa, synthetic construct
  source 1..9: note = Seed: VVGAVGVGK (KRAS G12V)
LVGMVPVGM

SEQ ID NO: 73406 - protein, 9 aa, synthetic construct
  source 1..9: note = Seed: VVGAVGVGK (KRAS G12V)
LVGMVPVGN

SEQ ID NO: 73407 - protein, 9 aa, synthetic construct
  source 1..9: note = Seed: VVGAVGVGK (KRAS G12V)
LVGMVPVGR

SEQ ID NO: 73408 - protein, 9 aa, synthetic construct
  source 1..9: note = Seed: VVGAVGVGK (KRAS G12V)
LVGMVPVGS

SEQ ID NO: 73409 - protein, 9 aa, synthetic construct
  source 1..9: note = Seed: VVGAVGVGK (KRAS G12V)
LVGMVPVGT

SEQ ID NO: 73410 - protein, 9 aa, synthetic construct
  source 1..9: note = Seed: VVGAVGVGK (KRAS G12V)
LVGMVPVGV

SEQ ID NO: 73411 - protein, 9 aa, synthetic construct
  source 1..9: note = Seed: VVGAVGVGK (KRAS G12V)
LVGMVPVGY

SEQ ID NO: 73412 - protein, 9 aa, synthetic construct
  source 1..9: note = Seed: VVGAVGVGK (KRAS G12V)
LVGMVRVGA

SEQ ID NO: 73413 - protein, 9 aa, synthetic construct
  source 1..9: note = Seed: VVGAVGVGK (KRAS G12V)
LVGMVRVGD

SEQ ID NO: 73414 - protein, 9 aa, synthetic construct
  source 1..9: note = Seed: VVGAVGVGK (KRAS G12V)
LVGMVRVGE

SEQ ID NO: 73415 - protein, 9 aa, synthetic construct
  source 1..9: note = Seed: VVGAVGVGK (KRAS G12V)
LVGMVRVGG

SEQ ID NO: 73416 - protein, 9 aa, synthetic construct
  source 1..9: note = Seed: VVGAVGVGK (KRAS G12V)
LVGMVRVGH

SEQ ID NO: 73417 - protein, 9 aa, synthetic construct
  source 1..9: note = Seed: VVGAVGVGK (KRAS G12V)
LVGMVRVGK

SEQ ID NO: 73418 - protein, 9 aa, synthetic construct
  source 1..9: note = Seed: VVGAVGVGK (KRAS G12V)
LVGMVRVGM

SEQ ID NO: 73419 - protein, 9 aa, synthetic construct
  source 1..9: note = Seed: VVGAVGVGK (KRAS G12V)
LVGMVRVGN

SEQ ID NO: 73420 - protein, 9 aa, synthetic construct
  source 1..9: note = Seed: VVGAVGVGK (KRAS G12V)
LVGMVRVGP

SEQ ID NO: 73421 - protein, 9 aa, synthetic construct
  source 1..9: note = Seed: VVGAVGVGK (KRAS G12V)
LVGMVRVGQ

SEQ ID NO: 73422 - protein, 9 aa, synthetic construct
  source 1..9: note = Seed: VVGAVGVGK (KRAS G12V)
LVGMVRVGR

SEQ ID NO: 73423 - protein, 9 aa, synthetic construct
  source 1..9: note = Seed: VVGAVGVGK (KRAS G12V)
LVGMVRVGS

SEQ ID NO: 73424 - protein, 9 aa, synthetic construct
  source 1..9: note = Seed: VVGAVGVGK (KRAS G12V)
LVGMVRVGT

SEQ ID NO: 73425 - protein, 9 aa, synthetic construct
  source 1..9: note = Seed: VVGAVGVGK (KRAS G12V)
LVGMVRVGV

SEQ ID NO: 73426 - protein, 9 aa, synthetic construct
  source 1..9: note = Seed: VVGAVGVGK (KRAS G12V)
LVGMVRVGY

SEQ ID NO: 73427 - protein, 9 aa, synthetic construct
  source 1..9: note = Seed: VVGAVGVGK (KRAS G12V)
LVGMVSVGA

SEQ ID NO: 73428 - protein, 9 aa, synthetic construct
  source 1..9: note = Seed: VVGAVGVGK (KRAS G12V)
LVGMVSVGH

SEQ ID NO: 73429 - protein, 9 aa, synthetic construct
  source 1..9: note = Seed: VVGAVGVGK (KRAS G12V)
LVGMVSVGK

SEQ ID NO: 73430 - protein, 9 aa, synthetic construct
  source 1..9: note = Seed: VVGAVGVGK (KRAS G12V)
LVGMVSVGL

SEQ ID NO: 73431 - protein, 9 aa, synthetic construct
  source 1..9: note = Seed: VVGAVGVGK (KRAS G12V)
LVGMVSVGM

SEQ ID NO: 73432 - protein, 9 aa, synthetic construct
  source 1..9: note = Seed: VVGAVGVGK (KRAS G12V)
LVGMVSVGN

SEQ ID NO: 73433 - protein, 9 aa, synthetic construct
  source 1..9: note = Seed: VVGAVGVGK (KRAS G12V)
LVGMVSVGR

SEQ ID NO: 73434 - protein, 9 aa, synthetic construct
  source 1..9: note = Seed: VVGAVGVGK (KRAS G12V)
LVGMVSVGS

SEQ ID NO: 73435 - protein, 9 aa, synthetic construct
  source 1..9: note = Seed: VVGAVGVGK (KRAS G12V)
LVGMVSVGT

SEQ ID NO: 73436 - protein, 9 aa, synthetic construct
  source 1..9: note = Seed: VVGAVGVGK (KRAS G12V)
LVGMVSVGV

SEQ ID NO: 73437 - protein, 9 aa, synthetic construct
  source 1..9: note = Seed: VVGAVGVGK (KRAS G12V)
LVGMVTVGA

SEQ ID NO: 73438 - protein, 9 aa, synthetic construct
  source 1..9: note = Seed: VVGAVGVGK (KRAS G12V)
LVGMVTVGH

SEQ ID NO: 73439 - protein, 9 aa, synthetic construct
  source 1..9: note = Seed: VVGAVGVGK (KRAS G12V)
LVGMVTVGK

SEQ ID NO: 73440 - protein, 9 aa, synthetic construct
  source 1..9: note = Seed: VVGAVGVGK (KRAS G12V)
LVGMVTVGR

SEQ ID NO: 73441 - protein, 9 aa, synthetic construct
  source 1..9: note = Seed: VVGAVGVGK (KRAS G12V)
LVGMVTVGS

SEQ ID NO: 73442 - protein, 9 aa, synthetic construct
  source 1..9: note = Seed: VVGAVGVGK (KRAS G12V)
LVGMVVVGR

SEQ ID NO: 73443 - protein, 9 aa, synthetic construct
  source 1..9: note = Seed: VVGAVGVGK (KRAS G12V)
LVGNVAVGA

SEQ ID NO: 73444 - protein, 9 aa, synthetic construct
  source 1..9: note = Seed: VVGAVGVGK (KRAS G12V)
LVGNVAVGI

SEQ ID NO: 73445 - protein, 9 aa, synthetic construct
  source 1..9: note = Seed: VVGAVGVGK (KRAS G12V)
LVGNVAVGL

SEQ ID NO: 73446 - protein, 9 aa, synthetic construct
  source 1..9: note = Seed: VVGAVGVGK (KRAS G12V)
LVGNVAVGM

SEQ ID NO: 73447 - protein, 9 aa, synthetic construct
  source 1..9: note = Seed: VVGAVGVGK (KRAS G12V)
LVGNVAVGR

SEQ ID NO: 73448 - protein, 9 aa, synthetic construct
  source 1..9: note = Seed: VVGAVGVGK (KRAS G12V)
LVGNVAVGV

SEQ ID NO: 73449 - protein, 9 aa, synthetic construct
  source 1..9: note = Seed: VVGAVGVGK (KRAS G12V)
LVGNVAVGY

SEQ ID NO: 73450 - protein, 9 aa, synthetic construct
  source 1..9: note = Seed: VVGAVGVGK (KRAS G12V)
LVGNVHVGR

SEQ ID NO: 73451 - protein, 9 aa, synthetic construct
  source 1..9: note = Seed: VVGAVGVGK (KRAS G12V)
LVGNVHVGY

SEQ ID NO: 73452 - protein, 9 aa, synthetic construct
  source 1..9: note = Seed: VVGAVGVGK (KRAS G12V)
LVGNVIVGR

SEQ ID NO: 73453 - protein, 9 aa, synthetic construct
  source 1..9: note = Seed: VVGAVGVGK (KRAS G12V)
LVGNVKVGA

SEQ ID NO: 73454 - protein, 9 aa, synthetic construct
  source 1..9: note = Seed: VVGAVGVGK (KRAS G12V)
LVGNVKVGF

SEQ ID NO: 73455 - protein, 9 aa, synthetic construct
  source 1..9: note = Seed: VVGAVGVGK (KRAS G12V)
LVGNVKVGH

SEQ ID NO: 73456 - protein, 9 aa, synthetic construct
  source 1..9: note = Seed: VVGAVGVGK (KRAS G12V)
LVGNVKVGI

SEQ ID NO: 73457 - protein, 9 aa, synthetic construct
  source 1..9: note = Seed: VVGAVGVGK (KRAS G12V)
LVGNVKVGK

SEQ ID NO: 73458 - protein, 9 aa, synthetic construct
  source 1..9: note = Seed: VVGAVGVGK (KRAS G12V)
LVGNVKVGL

SEQ ID NO: 73459 - protein, 9 aa, synthetic construct
  source 1..9: note = Seed: VVGAVGVGK (KRAS G12V)
LVGNVKVGM

SEQ ID NO: 73460 - protein, 9 aa, synthetic construct
  source 1..9: note = Seed: VVGAVGVGK (KRAS G12V)
LVGNVKVGR

SEQ ID NO: 73461 - protein, 9 aa, synthetic construct
  source 1..9: note = Seed: VVGAVGVGK (KRAS G12V)
LVGNVKVGS

SEQ ID NO: 73462 - protein, 9 aa, synthetic construct
  source 1..9: note = Seed: VVGAVGVGK (KRAS G12V)
LVGNVKVGV

SEQ ID NO: 73463 - protein, 9 aa, synthetic construct
  source 1..9: note = Seed: VVGAVGVGK (KRAS G12V)
LVGNVKVGY

SEQ ID NO: 73464 - protein, 9 aa, synthetic construct
  source 1..9: note = Seed: VVGAVGVGK (KRAS G12V)
LVGNVMVGR

SEQ ID NO: 73465 - protein, 9 aa, synthetic construct
  source 1..9: note = Seed: VVGAVGVGK (KRAS G12V)
LVGNVNVGR

SEQ ID NO: 73466 - protein, 9 aa, synthetic construct
  source 1..9: note = Seed: VVGAVGVGK (KRAS G12V)
LVGNVNVGY

SEQ ID NO: 73467 - protein, 9 aa, synthetic construct
  source 1..9: note = Seed: VVGAVGVGK (KRAS G12V)
LVGNVPVGA

SEQ ID NO: 73468 - protein, 9 aa, synthetic construct
  source 1..9: note = Seed: VVGAVGVGK (KRAS G12V)
LVGNVPVGF

SEQ ID NO: 73469 - protein, 9 aa, synthetic construct
  source 1..9: note = Seed: VVGAVGVGK (KRAS G12V)
LVGNVPVGI

SEQ ID NO: 73470 - protein, 9 aa, synthetic construct
  source 1..9: note = Seed: VVGAVGVGK (KRAS G12V)
LVGNVPVGK

SEQ ID NO: 73471 - protein, 9 aa, synthetic construct
  source 1..9: note = Seed: VVGAVGVGK (KRAS G12V)
LVGNVPVGL

SEQ ID NO: 73472 - protein, 9 aa, synthetic construct
  source 1..9: note = Seed: VVGAVGVGK (KRAS G12V)
LVGNVPVGM

SEQ ID NO: 73473 - protein, 9 aa, synthetic construct
  source 1..9: note = Seed: VVGAVGVGK (KRAS G12V)
LVGNVPVGR

SEQ ID NO: 73474 - protein, 9 aa, synthetic construct
  source 1..9: note = Seed: VVGAVGVGK (KRAS G12V)
LVGNVPVGV

SEQ ID NO: 73475 - protein, 9 aa, synthetic construct
  source 1..9: note = Seed: VVGAVGVGK (KRAS G12V)
LVGNVPVGY

SEQ ID NO: 73476 - protein, 9 aa, synthetic construct
  source 1..9: note = Seed: VVGAVGVGK (KRAS G12V)
LVGNVRVGA

SEQ ID NO: 73477 - protein, 9 aa, synthetic construct
  source 1..9: note = Seed: VVGAVGVGK (KRAS G12V)
LVGNVRVGF

SEQ ID NO: 73478 - protein, 9 aa, synthetic construct
  source 1..9: note = Seed: VVGAVGVGK (KRAS G12V)
LVGNVRVGG

SEQ ID NO: 73479 - protein, 9 aa, synthetic construct
  source 1..9: note = Seed: VVGAVGVGK (KRAS G12V)
LVGNVRVGH

SEQ ID NO: 73480 - protein, 9 aa, synthetic construct
  source 1..9: note = Seed: VVGAVGVGK (KRAS G12V)
LVGNVRVGI

SEQ ID NO: 73481 - protein, 9 aa, synthetic construct
  source 1..9: note = Seed: VVGAVGVGK (KRAS G12V)
LVGNVRVGK

SEQ ID NO: 73482 - protein, 9 aa, synthetic construct
  source 1..9: note = Seed: VVGAVGVGK (KRAS G12V)
LVGNVRVGL

SEQ ID NO: 73483 - protein, 9 aa, synthetic construct
  source 1..9: note = Seed: VVGAVGVGK (KRAS G12V)
LVGNVRVGM

SEQ ID NO: 73484 - protein, 9 aa, synthetic construct
  source 1..9: note = Seed: VVGAVGVGK (KRAS G12V)
LVGNVRVGN

SEQ ID NO: 73485 - protein, 9 aa, synthetic construct
  source 1..9: note = Seed: VVGAVGVGK (KRAS G12V)
LVGNVRVGP

SEQ ID NO: 73486 - protein, 9 aa, synthetic construct
  source 1..9: note = Seed: VVGAVGVGK (KRAS G12V)
LVGNVRVGQ

SEQ ID NO: 73487 - protein, 9 aa, synthetic construct
  source 1..9: note = Seed: VVGAVGVGK (KRAS G12V)
LVGNVRVGR

SEQ ID NO: 73488 - protein, 9 aa, synthetic construct
  source 1..9: note = Seed: VVGAVGVGK (KRAS G12V)
LVGNVRVGS

SEQ ID NO: 73489 - protein, 9 aa, synthetic construct
  source 1..9: note = Seed: VVGAVGVGK (KRAS G12V)
LVGNVRVGT

SEQ ID NO: 73490 - protein, 9 aa, synthetic construct
  source 1..9: note = Seed: VVGAVGVGK (KRAS G12V)
LVGNVRVGV

SEQ ID NO: 73491 - protein, 9 aa, synthetic construct
  source 1..9: note = Seed: VVGAVGVGK (KRAS G12V)
LVGNVRVGW

SEQ ID NO: 73492 - protein, 9 aa, synthetic construct
  source 1..9: note = Seed: VVGAVGVGK (KRAS G12V)
LVGNVRVGY

SEQ ID NO: 73493 - protein, 9 aa, synthetic construct
  source 1..9: note = Seed: VVGAVGVGK (KRAS G12V)
LVGNVSVGR

SEQ ID NO: 73494 - protein, 9 aa, synthetic construct
  source 1..9: note = Seed: VVGAVGVGK (KRAS G12V)
LVGNVSVGY

SEQ ID NO: 73495 - protein, 9 aa, synthetic construct
  source 1..9: note = Seed: VVGAVGVGK (KRAS G12V)
LVGNVTVGR

SEQ ID NO: 73496 - protein, 9 aa, synthetic construct
  source 1..9: note = Seed: VVGAVGVGK (KRAS G12V)
LVGNVVVGR

SEQ ID NO: 73497 - protein, 9 aa, synthetic construct
  source 1..9: note = Seed: VVGAVGVGK (KRAS G12V)
LVGPVRVGR

SEQ ID NO: 73498 - protein, 9 aa, synthetic construct
  source 1..9: note = Seed: VVGAVGVGK (KRAS G12V)
LVGPVRVGY

SEQ ID NO: 73499 - protein, 9 aa, synthetic construct
  source 1..9: note = Seed: VVGAVGVGK (KRAS G12V)
LVGQVAVGA

SEQ ID NO: 73500 - protein, 9 aa, synthetic construct
  source 1..9: note = Seed: VVGAVGVGK (KRAS G12V)
LVGQVAVGG

SEQ ID NO: 73501 - protein, 9 aa, synthetic construct
  source 1..9: note = Seed: VVGAVGVGK (KRAS G12V)
LVGQVAVGH

SEQ ID NO: 73502 - protein, 9 aa, synthetic construct
  source 1..9: note = Seed: VVGAVGVGK (KRAS G12V)
LVGQVAVGI

SEQ ID NO: 73503 - protein, 9 aa, synthetic construct
  source 1..9: note = Seed: VVGAVGVGK (KRAS G12V)
LVGQVAVGL

SEQ ID NO: 73504 - protein, 9 aa, synthetic construct
  source 1..9: note = Seed: VVGAVGVGK (KRAS G12V)
LVGQVAVGM

SEQ ID NO: 73505 - protein, 9 aa, synthetic construct
  source 1..9: note = Seed: VVGAVGVGK (KRAS G12V)
LVGQVAVGN

SEQ ID NO: 73506 - protein, 9 aa, synthetic construct
  source 1..9: note = Seed: VVGAVGVGK (KRAS G12V)
LVGQVAVGR

SEQ ID NO: 73507 - protein, 9 aa, synthetic construct
  source 1..9: note = Seed: VVGAVGVGK (KRAS G12V)
LVGQVAVGS

SEQ ID NO: 73508 - protein, 9 aa, synthetic construct
  source 1..9: note = Seed: VVGAVGVGK (KRAS G12V)
LVGQVAVGT

SEQ ID NO: 73509 - protein, 9 aa, synthetic construct
  source 1..9: note = Seed: VVGAVGVGK (KRAS G12V)
LVGQVAVGV

SEQ ID NO: 73510 - protein, 9 aa, synthetic construct
  source 1..9: note = Seed: VVGAVGVGK (KRAS G12V)
LVGQVGVGA

SEQ ID NO: 73511 - protein, 9 aa, synthetic construct
  source 1..9: note = Seed: VVGAVGVGK (KRAS G12V)
LVGQVGVGI

SEQ ID NO: 73512 - protein, 9 aa, synthetic construct
  source 1..9: note = Seed: VVGAVGVGK (KRAS G12V)
LVGQVGVGL

SEQ ID NO: 73513 - protein, 9 aa, synthetic construct
  source 1..9: note = Seed: VVGAVGVGK (KRAS G12V)
LVGQVGVGM

SEQ ID NO: 73514 - protein, 9 aa, synthetic construct
  source 1..9: note = Seed: VVGAVGVGK (KRAS G12V)
LVGQVGVGS

SEQ ID NO: 73515 - protein, 9 aa, synthetic construct
  source 1..9: note = Seed: VVGAVGVGK (KRAS G12V)
LVGQVGVGT

SEQ ID NO: 73516 - protein, 9 aa, synthetic construct
  source 1..9: note = Seed: VVGAVGVGK (KRAS G12V)
LVGQVGVGV

SEQ ID NO: 73517 - protein, 9 aa, synthetic construct
  source 1..9: note = Seed: VVGAVGVGK (KRAS G12V)
LVGQVKVGA

SEQ ID NO: 73518 - protein, 9 aa, synthetic construct
  source 1..9: note = Seed: VVGAVGVGK (KRAS G12V)
LVGQVKVGG

SEQ ID NO: 73519 - protein, 9 aa, synthetic construct
  source 1..9: note = Seed: VVGAVGVGK (KRAS G12V)
LVGQVKVGH

SEQ ID NO: 73520 - protein, 9 aa, synthetic construct
  source 1..9: note = Seed: VVGAVGVGK (KRAS G12V)
LVGQVKVGK

SEQ ID NO: 73521 - protein, 9 aa, synthetic construct
  source 1..9: note = Seed: VVGAVGVGK (KRAS G12V)
LVGQVKVGQ

SEQ ID NO: 73522 - protein, 9 aa, synthetic construct
  source 1..9: note = Seed: VVGAVGVGK (KRAS G12V)
LVGQVKVGR

SEQ ID NO: 73523 - protein, 9 aa, synthetic construct
  source 1..9: note = Seed: VVGAVGVGK (KRAS G12V)
LVGQVKVGS

SEQ ID NO: 73524 - protein, 9 aa, synthetic construct
  source 1..9: note = Seed: VVGAVGVGK (KRAS G12V)
LVGQVKVGT

SEQ ID NO: 73525 - protein, 9 aa, synthetic construct
  source 1..9: note = Seed: VVGAVGVGK (KRAS G12V)
LVGQVKVGY

SEQ ID NO: 73526 - protein, 9 aa, synthetic construct
  source 1..9: note = Seed: VVGAVGVGK (KRAS G12V)
LVGQVNVGA

SEQ ID NO: 73527 - protein, 9 aa, synthetic construct
  source 1..9: note = Seed: VVGAVGVGK (KRAS G12V)
LVGQVPVGA

SEQ ID NO: 73528 - protein, 9 aa, synthetic construct
  source 1..9: note = Seed: VVGAVGVGK (KRAS G12V)
LVGQVPVGI

SEQ ID NO: 73529 - protein, 9 aa, synthetic construct
  source 1..9: note = Seed: VVGAVGVGK (KRAS G12V)
LVGQVPVGL

SEQ ID NO: 73530 - protein, 9 aa, synthetic construct
  source 1..9: note = Seed: VVGAVGVGK (KRAS G12V)
LVGQVPVGM

SEQ ID NO: 73531 - protein, 9 aa, synthetic construct
  source 1..9: note = Seed: VVGAVGVGK (KRAS G12V)
LVGQVPVGR

SEQ ID NO: 73532 - protein, 9 aa, synthetic construct
  source 1..9: note = Seed: VVGAVGVGK (KRAS G12V)
LVGQVPVGS

SEQ ID NO: 73533 - protein, 9 aa, synthetic construct
  source 1..9: note = Seed: VVGAVGVGK (KRAS G12V)
LVGQVPVGT

SEQ ID NO: 73534 - protein, 9 aa, synthetic construct
  source 1..9: note = Seed: VVGAVGVGK (KRAS G12V)
LVGQVPVGV

SEQ ID NO: 73535 - protein, 9 aa, synthetic construct
  source 1..9: note = Seed: VVGAVGVGK (KRAS G12V)
LVGQVRVGA

SEQ ID NO: 73536 - protein, 9 aa, synthetic construct
  source 1..9: note = Seed: VVGAVGVGK (KRAS G12V)
LVGQVRVGF

SEQ ID NO: 73537 - protein, 9 aa, synthetic construct
  source 1..9: note = Seed: VVGAVGVGK (KRAS G12V)
LVGQVRVGG

SEQ ID NO: 73538 - protein, 9 aa, synthetic construct
  source 1..9: note = Seed: VVGAVGVGK (KRAS G12V)
LVGQVRVGH

SEQ ID NO: 73539 - protein, 9 aa, synthetic construct
  source 1..9: note = Seed: VVGAVGVGK (KRAS G12V)
LVGQVRVGK

SEQ ID NO: 73540 - protein, 9 aa, synthetic construct
  source 1..9: note = Seed: VVGAVGVGK (KRAS G12V)
LVGQVRVGM

SEQ ID NO: 73541 - protein, 9 aa, synthetic construct
  source 1..9: note = Seed: VVGAVGVGK (KRAS G12V)
LVGQVRVGN

SEQ ID NO: 73542 - protein, 9 aa, synthetic construct
  source 1..9: note = Seed: VVGAVGVGK (KRAS G12V)
LVGQVRVGQ

SEQ ID NO: 73543 - protein, 9 aa, synthetic construct
  source 1..9: note = Seed: VVGAVGVGK (KRAS G12V)
LVGQVRVGR

SEQ ID NO: 73544 - protein, 9 aa, synthetic construct
  source 1..9: note = Seed: VVGAVGVGK (KRAS G12V)
LVGQVRVGS

SEQ ID NO: 73545 - protein, 9 aa, synthetic construct
  source 1..9: note = Seed: VVGAVGVGK (KRAS G12V)
LVGQVRVGT

SEQ ID NO: 73546 - protein, 9 aa, synthetic construct
  source 1..9: note = Seed: VVGAVGVGK (KRAS G12V)
LVGQVRVGV

SEQ ID NO: 73547 - protein, 9 aa, synthetic construct
  source 1..9: note = Seed: VVGAVGVGK (KRAS G12V)
LVGQVRVGY

SEQ ID NO: 73548 - protein, 9 aa, synthetic construct
  source 1..9: note = Seed: VVGAVGVGK (KRAS G12V)
LVGQVSVGA

SEQ ID NO: 73549 - protein, 9 aa, synthetic construct
  source 1..9: note = Seed: VVGAVGVGK (KRAS G12V)
LVGQVSVGI

SEQ ID NO: 73550 - protein, 9 aa, synthetic construct
  source 1..9: note = Seed: VVGAVGVGK (KRAS G12V)
LVGQVSVGL

SEQ ID NO: 73551 - protein, 9 aa, synthetic construct
  source 1..9: note = Seed: VVGAVGVGK (KRAS G12V)
LVGQVSVGR

SEQ ID NO: 73552 - protein, 9 aa, synthetic construct
  source 1..9: note = Seed: VVGAVGVGK (KRAS G12V)
LVGQVSVGT

SEQ ID NO: 73553 - protein, 9 aa, synthetic construct
  source 1..9: note = Seed: VVGAVGVGK (KRAS G12V)
LVGQVSVGV

SEQ ID NO: 73554 - protein, 9 aa, synthetic construct
  source 1..9: note = Seed: VVGAVGVGK (KRAS G12V)
LVGQVTVGR

SEQ ID NO: 73555 - protein, 9 aa, synthetic construct
  source 1..9: note = Seed: VVGAVGVGK (KRAS G12V)
LVGRVAVGK

SEQ ID NO: 73556 - protein, 9 aa, synthetic construct
  source 1..9: note = Seed: VVGAVGVGK (KRAS G12V)
LVGRVAVGR

SEQ ID NO: 73557 - protein, 9 aa, synthetic construct
  source 1..9: note = Seed: VVGAVGVGK (KRAS G12V)
LVGRVAVGY

SEQ ID NO: 73558 - protein, 9 aa, synthetic construct
  source 1..9: note = Seed: VVGAVGVGK (KRAS G12V)
LVGRVGVGR

SEQ ID NO: 73559 - protein, 9 aa, synthetic construct
  source 1..9: note = Seed: VVGAVGVGK (KRAS G12V)
LVGRVHVGF

SEQ ID NO: 73560 - protein, 9 aa, synthetic construct
  source 1..9: note = Seed: VVGAVGVGK (KRAS G12V)
LVGRVHVGR

SEQ ID NO: 73561 - protein, 9 aa, synthetic construct
  source 1..9: note = Seed: VVGAVGVGK (KRAS G12V)
LVGRVHVGY

SEQ ID NO: 73562 - protein, 9 aa, synthetic construct
  source 1..9: note = Seed: VVGAVGVGK (KRAS G12V)
LVGRVIVGR

SEQ ID NO: 73563 - protein, 9 aa, synthetic construct
  source 1..9: note = Seed: VVGAVGVGK (KRAS G12V)
LVGRVKVGA

SEQ ID NO: 73564 - protein, 9 aa, synthetic construct
  source 1..9: note = Seed: VVGAVGVGK (KRAS G12V)
LVGRVKVGC

SEQ ID NO: 73565 - protein, 9 aa, synthetic construct
  source 1..9: note = Seed: VVGAVGVGK (KRAS G12V)
LVGRVKVGE

SEQ ID NO: 73566 - protein, 9 aa, synthetic construct
  source 1..9: note = Seed: VVGAVGVGK (KRAS G12V)
LVGRVKVGF

SEQ ID NO: 73567 - protein, 9 aa, synthetic construct
  source 1..9: note = Seed: VVGAVGVGK (KRAS G12V)
LVGRVKVGG

SEQ ID NO: 73568 - protein, 9 aa, synthetic construct
  source 1..9: note = Seed: VVGAVGVGK (KRAS G12V)
LVGRVKVGH

SEQ ID NO: 73569 - protein, 9 aa, synthetic construct
  source 1..9: note = Seed: VVGAVGVGK (KRAS G12V)
LVGRVKVGI

SEQ ID NO: 73570 - protein, 9 aa, synthetic construct
  source 1..9: note = Seed: VVGAVGVGK (KRAS G12V)
LVGRVKVGK

SEQ ID NO: 73571 - protein, 9 aa, synthetic construct
  source 1..9: note = Seed: VVGAVGVGK (KRAS G12V)
LVGRVKVGL

SEQ ID NO: 73572 - protein, 9 aa, synthetic construct
  source 1..9: note = Seed: VVGAVGVGK (KRAS G12V)
LVGRVKVGM

SEQ ID NO: 73573 - protein, 9 aa, synthetic construct
  source 1..9: note = Seed: VVGAVGVGK (KRAS G12V)
LVGRVKVGN

SEQ ID NO: 73574 - protein, 9 aa, synthetic construct
  source 1..9: note = Seed: VVGAVGVGK (KRAS G12V)
LVGRVKVGP

SEQ ID NO: 73575 - protein, 9 aa, synthetic construct
  source 1..9: note = Seed: VVGAVGVGK (KRAS G12V)
LVGRVKVGQ

SEQ ID NO: 73576 - protein, 9 aa, synthetic construct
  source 1..9: note = Seed: VVGAVGVGK (KRAS G12V)
LVGRVKVGR

SEQ ID NO: 73577 - protein, 9 aa, synthetic construct
  source 1..9: note = Seed: VVGAVGVGK (KRAS G12V)
LVGRVKVGS

SEQ ID NO: 73578 - protein, 9 aa, synthetic construct
  source 1..9: note = Seed: VVGAVGVGK (KRAS G12V)
LVGRVKVGT

SEQ ID NO: 73579 - protein, 9 aa, synthetic construct
  source 1..9: note = Seed: VVGAVGVGK (KRAS G12V)
LVGRVKVGV

SEQ ID NO: 73580 - protein, 9 aa, synthetic construct
  source 1..9: note = Seed: VVGAVGVGK (KRAS G12V)
LVGRVKVGY

SEQ ID NO: 73581 - protein, 9 aa, synthetic construct
  source 1..9: note = Seed: VVGAVGVGK (KRAS G12V)
LVGRVMVGR

SEQ ID NO: 73582 - protein, 9 aa, synthetic construct
  source 1..9: note = Seed: VVGAVGVGK (KRAS G12V)
LVGRVNVGK

SEQ ID NO: 73583 - protein, 9 aa, synthetic construct
  source 1..9: note = Seed: VVGAVGVGK (KRAS G12V)
LVGRVNVGR

SEQ ID NO: 73584 - protein, 9 aa, synthetic construct
  source 1..9: note = Seed: VVGAVGVGK (KRAS G12V)
LVGRVNVGY

SEQ ID NO: 73585 - protein, 9 aa, synthetic construct
  source 1..9: note = Seed: VVGAVGVGK (KRAS G12V)
LVGRVPVGR

SEQ ID NO: 73586 - protein, 9 aa, synthetic construct
  source 1..9: note = Seed: VVGAVGVGK (KRAS G12V)
LVGRVPVGY

SEQ ID NO: 73587 - protein, 9 aa, synthetic construct
  source 1..9: note = Seed: VVGAVGVGK (KRAS G12V)
LVGRVQVGK

SEQ ID NO: 73588 - protein, 9 aa, synthetic construct
  source 1..9: note = Seed: VVGAVGVGK (KRAS G12V)
LVGRVQVGR

SEQ ID NO: 73589 - protein, 9 aa, synthetic construct
  source 1..9: note = Seed: VVGAVGVGK (KRAS G12V)
LVGRVRVGA

SEQ ID NO: 73590 - protein, 9 aa, synthetic construct
  source 1..9: note = Seed: VVGAVGVGK (KRAS G12V)
LVGRVRVGC

SEQ ID NO: 73591 - protein, 9 aa, synthetic construct
  source 1..9: note = Seed: VVGAVGVGK (KRAS G12V)
LVGRVRVGD

SEQ ID NO: 73592 - protein, 9 aa, synthetic construct
  source 1..9: note = Seed: VVGAVGVGK (KRAS G12V)
LVGRVRVGE

SEQ ID NO: 73593 - protein, 9 aa, synthetic construct
  source 1..9: note = Seed: VVGAVGVGK (KRAS G12V)
LVGRVRVGF

SEQ ID NO: 73594 - protein, 9 aa, synthetic construct
  source 1..9: note = Seed: VVGAVGVGK (KRAS G12V)
LVGRVRVGG

SEQ ID NO: 73595 - protein, 9 aa, synthetic construct
  source 1..9: note = Seed: VVGAVGVGK (KRAS G12V)
LVGRVRVGH

SEQ ID NO: 73596 - protein, 9 aa, synthetic construct
  source 1..9: note = Seed: VVGAVGVGK (KRAS G12V)
LVGRVRVGI

SEQ ID NO: 73597 - protein, 9 aa, synthetic construct
  source 1..9: note = Seed: VVGAVGVGK (KRAS G12V)
LVGRVRVGK

SEQ ID NO: 73598 - protein, 9 aa, synthetic construct
  source 1..9: note = Seed: VVGAVGVGK (KRAS G12V)
LVGRVRVGL

SEQ ID NO: 73599 - protein, 9 aa, synthetic construct
  source 1..9: note = Seed: VVGAVGVGK (KRAS G12V)
LVGRVRVGM

SEQ ID NO: 73600 - protein, 9 aa, synthetic construct
  source 1..9: note = Seed: VVGAVGVGK (KRAS G12V)
LVGRVRVGN

SEQ ID NO: 73601 - protein, 9 aa, synthetic construct
  source 1..9: note = Seed: VVGAVGVGK (KRAS G12V)
LVGRVRVGQ

SEQ ID NO: 73602 - protein, 9 aa, synthetic construct
  source 1..9: note = Seed: VVGAVGVGK (KRAS G12V)
LVGRVRVGR

SEQ ID NO: 73603 - protein, 9 aa, synthetic construct
  source 1..9: note = Seed: VVGAVGVGK (KRAS G12V)
LVGRVRVGS

SEQ ID NO: 73604 - protein, 9 aa, synthetic construct
  source 1..9: note = Seed: VVGAVGVGK (KRAS G12V)
LVGRVRVGT

SEQ ID NO: 73605 - protein, 9 aa, synthetic construct
  source 1..9: note = Seed: VVGAVGVGK (KRAS G12V)
LVGRVRVGV

SEQ ID NO: 73606 - protein, 9 aa, synthetic construct
  source 1..9: note = Seed: VVGAVGVGK (KRAS G12V)
LVGRVRVGY

SEQ ID NO: 73607 - protein, 9 aa, synthetic construct
  source 1..9: note = Seed: VVGAVGVGK (KRAS G12V)
LVGRVSVGK

SEQ ID NO: 73608 - protein, 9 aa, synthetic construct
  source 1..9: note = Seed: VVGAVGVGK (KRAS G12V)
LVGRVSVGR

SEQ ID NO: 73609 - protein, 9 aa, synthetic construct
  source 1..9: note = Seed: VVGAVGVGK (KRAS G12V)
LVGRVSVGY

SEQ ID NO: 73610 - protein, 9 aa, synthetic construct
  source 1..9: note = Seed: VVGAVGVGK (KRAS G12V)
LVGRVTVGK

SEQ ID NO: 73611 - protein, 9 aa, synthetic construct
  source 1..9: note = Seed: VVGAVGVGK (KRAS G12V)
LVGRVTVGR

SEQ ID NO: 73612 - protein, 9 aa, synthetic construct
  source 1..9: note = Seed: VVGAVGVGK (KRAS G12V)
LVGRVTVGY

SEQ ID NO: 73613 - protein, 9 aa, synthetic construct
  source 1..9: note = Seed: VVGAVGVGK (KRAS G12V)
LVGRVVVGR

SEQ ID NO: 73614 - protein, 9 aa, synthetic construct
  source 1..9: note = Seed: VVGAVGVGK (KRAS G12V)
LVGSVAVGA

SEQ ID NO: 73615 - protein, 9 aa, synthetic construct
  source 1..9: note = Seed: VVGAVGVGK (KRAS G12V)
LVGSVAVGH

SEQ ID NO: 73616 - protein, 9 aa, synthetic construct
  source 1..9: note = Seed: VVGAVGVGK (KRAS G12V)
LVGSVAVGI

SEQ ID NO: 73617 - protein, 9 aa, synthetic construct
  source 1..9: note = Seed: VVGAVGVGK (KRAS G12V)
LVGSVAVGK

SEQ ID NO: 73618 - protein, 9 aa, synthetic construct
  source 1..9: note = Seed: VVGAVGVGK (KRAS G12V)
LVGSVAVGL

SEQ ID NO: 73619 - protein, 9 aa, synthetic construct
  source 1..9: note = Seed: VVGAVGVGK (KRAS G12V)
LVGSVAVGM

SEQ ID NO: 73620 - protein, 9 aa, synthetic construct
  source 1..9: note = Seed: VVGAVGVGK (KRAS G12V)
LVGSVAVGR

SEQ ID NO: 73621 - protein, 9 aa, synthetic construct
  source 1..9: note = Seed: VVGAVGVGK (KRAS G12V)
LVGSVAVGS

SEQ ID NO: 73622 - protein, 9 aa, synthetic construct
  source 1..9: note = Seed: VVGAVGVGK (KRAS G12V)
LVGSVAVGT

SEQ ID NO: 73623 - protein, 9 aa, synthetic construct
  source 1..9: note = Seed: VVGAVGVGK (KRAS G12V)
LVGSVAVGV

SEQ ID NO: 73624 - protein, 9 aa, synthetic construct
  source 1..9: note = Seed: VVGAVGVGK (KRAS G12V)
LVGSVGVGA

SEQ ID NO: 73625 - protein, 9 aa, synthetic construct
  source 1..9: note = Seed: VVGAVGVGK (KRAS G12V)
LVGSVGVGR

SEQ ID NO: 73626 - protein, 9 aa, synthetic construct
  source 1..9: note = Seed: VVGAVGVGK (KRAS G12V)
LVGSVGVGV

SEQ ID NO: 73627 - protein, 9 aa, synthetic construct
  source 1..9: note = Seed: VVGAVGVGK (KRAS G12V)
LVGSVHVGR

SEQ ID NO: 73628 - protein, 9 aa, synthetic construct
  source 1..9: note = Seed: VVGAVGVGK (KRAS G12V)
LVGSVKVGA

SEQ ID NO: 73629 - protein, 9 aa, synthetic construct
  source 1..9: note = Seed: VVGAVGVGK (KRAS G12V)
LVGSVKVGF

SEQ ID NO: 73630 - protein, 9 aa, synthetic construct
  source 1..9: note = Seed: VVGAVGVGK (KRAS G12V)
LVGSVKVGG

SEQ ID NO: 73631 - protein, 9 aa, synthetic construct
  source 1..9: note = Seed: VVGAVGVGK (KRAS G12V)
LVGSVKVGH

SEQ ID NO: 73632 - protein, 9 aa, synthetic construct
  source 1..9: note = Seed: VVGAVGVGK (KRAS G12V)
LVGSVKVGI

SEQ ID NO: 73633 - protein, 9 aa, synthetic construct
  source 1..9: note = Seed: VVGAVGVGK (KRAS G12V)
LVGSVKVGK

SEQ ID NO: 73634 - protein, 9 aa, synthetic construct
  source 1..9: note = Seed: VVGAVGVGK (KRAS G12V)
LVGSVKVGL

SEQ ID NO: 73635 - protein, 9 aa, synthetic construct
  source 1..9: note = Seed: VVGAVGVGK (KRAS G12V)
LVGSVKVGM

SEQ ID NO: 73636 - protein, 9 aa, synthetic construct
  source 1..9: note = Seed: VVGAVGVGK (KRAS G12V)
LVGSVKVGQ

SEQ ID NO: 73637 - protein, 9 aa, synthetic construct
  source 1..9: note = Seed: VVGAVGVGK (KRAS G12V)
LVGSVKVGR

SEQ ID NO: 73638 - protein, 9 aa, synthetic construct
  source 1..9: note = Seed: VVGAVGVGK (KRAS G12V)
LVGSVKVGS

SEQ ID NO: 73639 - protein, 9 aa, synthetic construct
  source 1..9: note = Seed: VVGAVGVGK (KRAS G12V)
LVGSVKVGV

SEQ ID NO: 73640 - protein, 9 aa, synthetic construct
  source 1..9: note = Seed: VVGAVGVGK (KRAS G12V)
LVGSVKVGY

SEQ ID NO: 73641 - protein, 9 aa, synthetic construct
  source 1..9: note = Seed: VVGAVGVGK (KRAS G12V)
LVGSVNVGR

SEQ ID NO: 73642 - protein, 9 aa, synthetic construct
  source 1..9: note = Seed: VVGAVGVGK (KRAS G12V)
LVGSVPVGA

SEQ ID NO: 73643 - protein, 9 aa, synthetic construct
  source 1..9: note = Seed: VVGAVGVGK (KRAS G12V)
LVGSVPVGF

SEQ ID NO: 73644 - protein, 9 aa, synthetic construct
  source 1..9: note = Seed: VVGAVGVGK (KRAS G12V)
LVGSVPVGG

SEQ ID NO: 73645 - protein, 9 aa, synthetic construct
  source 1..9: note = Seed: VVGAVGVGK (KRAS G12V)
LVGSVPVGH

SEQ ID NO: 73646 - protein, 9 aa, synthetic construct
  source 1..9: note = Seed: VVGAVGVGK (KRAS G12V)
LVGSVPVGI

SEQ ID NO: 73647 - protein, 9 aa, synthetic construct
  source 1..9: note = Seed: VVGAVGVGK (KRAS G12V)
LVGSVPVGK

SEQ ID NO: 73648 - protein, 9 aa, synthetic construct
  source 1..9: note = Seed: VVGAVGVGK (KRAS G12V)
LVGSVPVGL

SEQ ID NO: 73649 - protein, 9 aa, synthetic construct
  source 1..9: note = Seed: VVGAVGVGK (KRAS G12V)
LVGSVPVGM

SEQ ID NO: 73650 - protein, 9 aa, synthetic construct
  source 1..9: note = Seed: VVGAVGVGK (KRAS G12V)
LVGSVPVGN

SEQ ID NO: 73651 - protein, 9 aa, synthetic construct
  source 1..9: note = Seed: VVGAVGVGK (KRAS G12V)
LVGSVPVGQ

SEQ ID NO: 73652 - protein, 9 aa, synthetic construct
  source 1..9: note = Seed: VVGAVGVGK (KRAS G12V)
LVGSVPVGR

SEQ ID NO: 73653 - protein, 9 aa, synthetic construct
  source 1..9: note = Seed: VVGAVGVGK (KRAS G12V)
LVGSVPVGS

SEQ ID NO: 73654 - protein, 9 aa, synthetic construct
  source 1..9: note = Seed: VVGAVGVGK (KRAS G12V)
LVGSVPVGT

SEQ ID NO: 73655 - protein, 9 aa, synthetic construct
  source 1..9: note = Seed: VVGAVGVGK (KRAS G12V)
LVGSVPVGV

SEQ ID NO: 73656 - protein, 9 aa, synthetic construct
  source 1..9: note = Seed: VVGAVGVGK (KRAS G12V)
LVGSVPVGY

SEQ ID NO: 73657 - protein, 9 aa, synthetic construct
  source 1..9: note = Seed: VVGAVGVGK (KRAS G12V)
LVGSVRVGA

SEQ ID NO: 73658 - protein, 9 aa, synthetic construct
  source 1..9: note = Seed: VVGAVGVGK (KRAS G12V)
LVGSVRVGF

SEQ ID NO: 73659 - protein, 9 aa, synthetic construct
  source 1..9: note = Seed: VVGAVGVGK (KRAS G12V)
LVGSVRVGG

SEQ ID NO: 73660 - protein, 9 aa, synthetic construct
  source 1..9: note = Seed: VVGAVGVGK (KRAS G12V)
LVGSVRVGH

SEQ ID NO: 73661 - protein, 9 aa, synthetic construct
  source 1..9: note = Seed: VVGAVGVGK (KRAS G12V)
LVGSVRVGI

SEQ ID NO: 73662 - protein, 9 aa, synthetic construct
  source 1..9: note = Seed: VVGAVGVGK (KRAS G12V)
LVGSVRVGK

SEQ ID NO: 73663 - protein, 9 aa, synthetic construct
  source 1..9: note = Seed: VVGAVGVGK (KRAS G12V)
LVGSVRVGL

SEQ ID NO: 73664 - protein, 9 aa, synthetic construct
  source 1..9: note = Seed: VVGAVGVGK (KRAS G12V)
LVGSVRVGM

SEQ ID NO: 73665 - protein, 9 aa, synthetic construct
  source 1..9: note = Seed: VVGAVGVGK (KRAS G12V)
LVGSVRVGN

SEQ ID NO: 73666 - protein, 9 aa, synthetic construct
  source 1..9: note = Seed: VVGAVGVGK (KRAS G12V)
LVGSVRVGP

SEQ ID NO: 73667 - protein, 9 aa, synthetic construct
  source 1..9: note = Seed: VVGAVGVGK (KRAS G12V)
LVGSVRVGQ

SEQ ID NO: 73668 - protein, 9 aa, synthetic construct
  source 1..9: note = Seed: VVGAVGVGK (KRAS G12V)
LVGSVRVGR

SEQ ID NO: 73669 - protein, 9 aa, synthetic construct
  source 1..9: note = Seed: VVGAVGVGK (KRAS G12V)
LVGSVRVGS

SEQ ID NO: 73670 - protein, 9 aa, synthetic construct
  source 1..9: note = Seed: VVGAVGVGK (KRAS G12V)
LVGSVRVGT

SEQ ID NO: 73671 - protein, 9 aa, synthetic construct
  source 1..9: note = Seed: VVGAVGVGK (KRAS G12V)
LVGSVRVGV

SEQ ID NO: 73672 - protein, 9 aa, synthetic construct
  source 1..9: note = Seed: VVGAVGVGK (KRAS G12V)
LVGSVRVGY

SEQ ID NO: 73673 - protein, 9 aa, synthetic construct
  source 1..9: note = Seed: VVGAVGVGK (KRAS G12V)
LVGSVSVGI

SEQ ID NO: 73674 - protein, 9 aa, synthetic construct
  source 1..9: note = Seed: VVGAVGVGK (KRAS G12V)
LVGSVSVGR

SEQ ID NO: 73675 - protein, 9 aa, synthetic construct
  source 1..9: note = Seed: VVGAVGVGK (KRAS G12V)
LVGSVSVGV

SEQ ID NO: 73676 - protein, 9 aa, synthetic construct
  source 1..9: note = Seed: VVGAVGVGK (KRAS G12V)
LVGSVTVGR

SEQ ID NO: 73677 - protein, 9 aa, synthetic construct
  source 1..9: note = Seed: VVGAVGVGK (KRAS G12V)
LVGSVVVGR

SEQ ID NO: 73678 - protein, 9 aa, synthetic construct
  source 1..9: note = Seed: VVGAVGVGK (KRAS G12V)
LVGTVAVGR

SEQ ID NO: 73679 - protein, 9 aa, synthetic construct
  source 1..9: note = Seed: VVGAVGVGK (KRAS G12V)
LVGTVKVGA

SEQ ID NO: 73680 - protein, 9 aa, synthetic construct
  source 1..9: note = Seed: VVGAVGVGK (KRAS G12V)
LVGTVKVGG

SEQ ID NO: 73681 - protein, 9 aa, synthetic construct
  source 1..9: note = Seed: VVGAVGVGK (KRAS G12V)
LVGTVKVGH

SEQ ID NO: 73682 - protein, 9 aa, synthetic construct
  source 1..9: note = Seed: VVGAVGVGK (KRAS G12V)
LVGTVKVGK

SEQ ID NO: 73683 - protein, 9 aa, synthetic construct
  source 1..9: note = Seed: VVGAVGVGK (KRAS G12V)
LVGTVKVGM

SEQ ID NO: 73684 - protein, 9 aa, synthetic construct
  source 1..9: note = Seed: VVGAVGVGK (KRAS G12V)
LVGTVKVGQ

SEQ ID NO: 73685 - protein, 9 aa, synthetic construct
  source 1..9: note = Seed: VVGAVGVGK (KRAS G12V)
LVGTVKVGR

SEQ ID NO: 73686 - protein, 9 aa, synthetic construct
  source 1..9: note = Seed: VVGAVGVGK (KRAS G12V)
LVGTVKVGS

SEQ ID NO: 73687 - protein, 9 aa, synthetic construct
  source 1..9: note = Seed: VVGAVGVGK (KRAS G12V)
LVGTVKVGV

SEQ ID NO: 73688 - protein, 9 aa, synthetic construct
  source 1..9: note = Seed: VVGAVGVGK (KRAS G12V)
LVGTVKVGY

SEQ ID NO: 73689 - protein, 9 aa, synthetic construct
  source 1..9: note = Seed: VVGAVGVGK (KRAS G12V)
LVGTVPVGA

SEQ ID NO: 73690 - protein, 9 aa, synthetic construct
  source 1..9: note = Seed: VVGAVGVGK (KRAS G12V)
LVGTVPVGF

SEQ ID NO: 73691 - protein, 9 aa, synthetic construct
  source 1..9: note = Seed: VVGAVGVGK (KRAS G12V)
LVGTVPVGI

SEQ ID NO: 73692 - protein, 9 aa, synthetic construct
  source 1..9: note = Seed: VVGAVGVGK (KRAS G12V)
LVGTVPVGK

SEQ ID NO: 73693 - protein, 9 aa, synthetic construct
  source 1..9: note = Seed: VVGAVGVGK (KRAS G12V)
LVGTVPVGL

SEQ ID NO: 73694 - protein, 9 aa, synthetic construct
  source 1..9: note = Seed: VVGAVGVGK (KRAS G12V)
LVGTVPVGM

SEQ ID NO: 73695 - protein, 9 aa, synthetic construct
  source 1..9: note = Seed: VVGAVGVGK (KRAS G12V)
LVGTVPVGR

SEQ ID NO: 73696 - protein, 9 aa, synthetic construct
  source 1..9: note = Seed: VVGAVGVGK (KRAS G12V)
LVGTVPVGS

SEQ ID NO: 73697 - protein, 9 aa, synthetic construct
  source 1..9: note = Seed: VVGAVGVGK (KRAS G12V)
LVGTVPVGV

SEQ ID NO: 73698 - protein, 9 aa, synthetic construct
  source 1..9: note = Seed: VVGAVGVGK (KRAS G12V)
LVGTVPVGY

SEQ ID NO: 73699 - protein, 9 aa, synthetic construct
  source 1..9: note = Seed: VVGAVGVGK (KRAS G12V)
LVGTVRVGA

SEQ ID NO: 73700 - protein, 9 aa, synthetic construct
  source 1..9: note = Seed: VVGAVGVGK (KRAS G12V)
LVGTVRVGF

SEQ ID NO: 73701 - protein, 9 aa, synthetic construct
  source 1..9: note = Seed: VVGAVGVGK (KRAS G12V)
LVGTVRVGG

SEQ ID NO: 73702 - protein, 9 aa, synthetic construct
  source 1..9: note = Seed: VVGAVGVGK (KRAS G12V)
LVGTVRVGH

SEQ ID NO: 73703 - protein, 9 aa, synthetic construct
  source 1..9: note = Seed: VVGAVGVGK (KRAS G12V)
LVGTVRVGK

SEQ ID NO: 73704 - protein, 9 aa, synthetic construct
  source 1..9: note = Seed: VVGAVGVGK (KRAS G12V)
LVGTVRVGM

SEQ ID NO: 73705 - protein, 9 aa, synthetic construct
  source 1..9: note = Seed: VVGAVGVGK (KRAS G12V)
LVGTVRVGN

SEQ ID NO: 73706 - protein, 9 aa, synthetic construct
  source 1..9: note = Seed: VVGAVGVGK (KRAS G12V)
LVGTVRVGQ

SEQ ID NO: 73707 - protein, 9 aa, synthetic construct
  source 1..9: note = Seed: VVGAVGVGK (KRAS G12V)
LVGTVRVGR

SEQ ID NO: 73708 - protein, 9 aa, synthetic construct
  source 1..9: note = Seed: VVGAVGVGK (KRAS G12V)
LVGTVRVGS

SEQ ID NO: 73709 - protein, 9 aa, synthetic construct
  source 1..9: note = Seed: VVGAVGVGK (KRAS G12V)
LVGTVRVGT

SEQ ID NO: 73710 - protein, 9 aa, synthetic construct
  source 1..9: note = Seed: VVGAVGVGK (KRAS G12V)
LVGTVRVGV

SEQ ID NO: 73711 - protein, 9 aa, synthetic construct
  source 1..9: note = Seed: VVGAVGVGK (KRAS G12V)
LVGTVRVGY

SEQ ID NO: 73712 - protein, 9 aa, synthetic construct
  source 1..9: note = Seed: VVGAVGVGK (KRAS G12V)
LVGTVSVGI

SEQ ID NO: 73713 - protein, 9 aa, synthetic construct
  source 1..9: note = Seed: VVGAVGVGK (KRAS G12V)
LVGTVSVGV

SEQ ID NO: 73714 - protein, 9 aa, synthetic construct
  source 1..9: note = Seed: VVGAVGVGK (KRAS G12V)
LVGVVAVGH

SEQ ID NO: 73715 - protein, 9 aa, synthetic construct
  source 1..9: note = Seed: VVGAVGVGK (KRAS G12V)
LVGVVAVGR

SEQ ID NO: 73716 - protein, 9 aa, synthetic construct
  source 1..9: note = Seed: VVGAVGVGK (KRAS G12V)
LVGVVHVGR

SEQ ID NO: 73717 - protein, 9 aa, synthetic construct
  source 1..9: note = Seed: VVGAVGVGK (KRAS G12V)
LVGVVKVGA

SEQ ID NO: 73718 - protein, 9 aa, synthetic construct
  source 1..9: note = Seed: VVGAVGVGK (KRAS G12V)
LVGVVKVGG

SEQ ID NO: 73719 - protein, 9 aa, synthetic construct
  source 1..9: note = Seed: VVGAVGVGK (KRAS G12V)
LVGVVKVGH

SEQ ID NO: 73720 - protein, 9 aa, synthetic construct
  source 1..9: note = Seed: VVGAVGVGK (KRAS G12V)
LVGVVKVGK

SEQ ID NO: 73721 - protein, 9 aa, synthetic construct
  source 1..9: note = Seed: VVGAVGVGK (KRAS G12V)
LVGVVKVGN

SEQ ID NO: 73722 - protein, 9 aa, synthetic construct
  source 1..9: note = Seed: VVGAVGVGK (KRAS G12V)
LVGVVKVGQ

SEQ ID NO: 73723 - protein, 9 aa, synthetic construct
  source 1..9: note = Seed: VVGAVGVGK (KRAS G12V)
LVGVVKVGR

SEQ ID NO: 73724 - protein, 9 aa, synthetic construct
  source 1..9: note = Seed: VVGAVGVGK (KRAS G12V)
LVGVVKVGS

SEQ ID NO: 73725 - protein, 9 aa, synthetic construct
  source 1..9: note = Seed: VVGAVGVGK (KRAS G12V)
LVGVVKVGT

SEQ ID NO: 73726 - protein, 9 aa, synthetic construct
  source 1..9: note = Seed: VVGAVGVGK (KRAS G12V)
LVGVVKVGY

SEQ ID NO: 73727 - protein, 9 aa, synthetic construct
  source 1..9: note = Seed: VVGAVGVGK (KRAS G12V)
LVGVVNVGR

SEQ ID NO: 73728 - protein, 9 aa, synthetic construct
  source 1..9: note = Seed: VVGAVGVGK (KRAS G12V)
LVGVVPVGA

SEQ ID NO: 73729 - protein, 9 aa, synthetic construct
  source 1..9: note = Seed: VVGAVGVGK (KRAS G12V)
LVGVVPVGI

SEQ ID NO: 73730 - protein, 9 aa, synthetic construct
  source 1..9: note = Seed: VVGAVGVGK (KRAS G12V)
LVGVVPVGK

SEQ ID NO: 73731 - protein, 9 aa, synthetic construct
  source 1..9: note = Seed: VVGAVGVGK (KRAS G12V)
LVGVVPVGL

SEQ ID NO: 73732 - protein, 9 aa, synthetic construct
  source 1..9: note = Seed: VVGAVGVGK (KRAS G12V)
LVGVVPVGM

SEQ ID NO: 73733 - protein, 9 aa, synthetic construct
  source 1..9: note = Seed: VVGAVGVGK (KRAS G12V)
LVGVVPVGR

SEQ ID NO: 73734 - protein, 9 aa, synthetic construct
  source 1..9: note = Seed: VVGAVGVGK (KRAS G12V)
LVGVVPVGS

SEQ ID NO: 73735 - protein, 9 aa, synthetic construct
  source 1..9: note = Seed: VVGAVGVGK (KRAS G12V)
LVGVVPVGT

SEQ ID NO: 73736 - protein, 9 aa, synthetic construct
  source 1..9: note = Seed: VVGAVGVGK (KRAS G12V)
LVGVVPVGV

SEQ ID NO: 73737 - protein, 9 aa, synthetic construct
  source 1..9: note = Seed: VVGAVGVGK (KRAS G12V)
LVGVVRVGA

SEQ ID NO: 73738 - protein, 9 aa, synthetic construct
  source 1..9: note = Seed: VVGAVGVGK (KRAS G12V)
LVGVVRVGG

SEQ ID NO: 73739 - protein, 9 aa, synthetic construct
  source 1..9: note = Seed: VVGAVGVGK (KRAS G12V)
LVGVVRVGH

SEQ ID NO: 73740 - protein, 9 aa, synthetic construct
  source 1..9: note = Seed: VVGAVGVGK (KRAS G12V)
LVGVVRVGK

SEQ ID NO: 73741 - protein, 9 aa, synthetic construct
  source 1..9: note = Seed: VVGAVGVGK (KRAS G12V)
LVGVVRVGN

SEQ ID NO: 73742 - protein, 9 aa, synthetic construct
  source 1..9: note = Seed: VVGAVGVGK (KRAS G12V)
LVGVVRVGP

SEQ ID NO: 73743 - protein, 9 aa, synthetic construct
  source 1..9: note = Seed: VVGAVGVGK (KRAS G12V)
LVGVVRVGQ

SEQ ID NO: 73744 - protein, 9 aa, synthetic construct
  source 1..9: note = Seed: VVGAVGVGK (KRAS G12V)
LVGVVRVGR

SEQ ID NO: 73745 - protein, 9 aa, synthetic construct
  source 1..9: note = Seed: VVGAVGVGK (KRAS G12V)
LVGVVRVGS

SEQ ID NO: 73746 - protein, 9 aa, synthetic construct
  source 1..9: note = Seed: VVGAVGVGK (KRAS G12V)
LVGVVRVGT

SEQ ID NO: 73747 - protein, 9 aa, synthetic construct
  source 1..9: note = Seed: VVGAVGVGK (KRAS G12V)
LVGVVRVGY

SEQ ID NO: 73748 - protein, 9 aa, synthetic construct
  source 1..9: note = Seed: VVGAVGVGK (KRAS G12V)
LVGVVSVGR

SEQ ID NO: 73749 - protein, 9 aa, synthetic construct
  source 1..9: note = Seed: VVGAVGVGK (KRAS G12V)
LVGVVTVGR

SEQ ID NO: 73750 - protein, 9 aa, synthetic construct
  source 1..9: note = Seed: VVGAVGVGK (KRAS G12V)
LVGWVAVGR

SEQ ID NO: 73751 - protein, 9 aa, synthetic construct
  source 1..9: note = Seed: VVGAVGVGK (KRAS G12V)
LVGWVHVGR

SEQ ID NO: 73752 - protein, 9 aa, synthetic construct
  source 1..9: note = Seed: VVGAVGVGK (KRAS G12V)
LVGWVKVGA

SEQ ID NO: 73753 - protein, 9 aa, synthetic construct
  source 1..9: note = Seed: VVGAVGVGK (KRAS G12V)
LVGWVKVGG

SEQ ID NO: 73754 - protein, 9 aa, synthetic construct
  source 1..9: note = Seed: VVGAVGVGK (KRAS G12V)
LVGWVKVGH

SEQ ID NO: 73755 - protein, 9 aa, synthetic construct
  source 1..9: note = Seed: VVGAVGVGK (KRAS G12V)
LVGWVKVGK

SEQ ID NO: 73756 - protein, 9 aa, synthetic construct
  source 1..9: note = Seed: VVGAVGVGK (KRAS G12V)
LVGWVKVGQ

SEQ ID NO: 73757 - protein, 9 aa, synthetic construct
  source 1..9: note = Seed: VVGAVGVGK (KRAS G12V)
LVGWVKVGR

SEQ ID NO: 73758 - protein, 9 aa, synthetic construct
  source 1..9: note = Seed: VVGAVGVGK (KRAS G12V)
LVGWVKVGS

SEQ ID NO: 73759 - protein, 9 aa, synthetic construct
  source 1..9: note = Seed: VVGAVGVGK (KRAS G12V)
LVGWVKVGY

SEQ ID NO: 73760 - protein, 9 aa, synthetic construct
  source 1..9: note = Seed: VVGAVGVGK (KRAS G12V)
LVGWVNVGR

SEQ ID NO: 73761 - protein, 9 aa, synthetic construct
  source 1..9: note = Seed: VVGAVGVGK (KRAS G12V)
LVGWVPVGR

SEQ ID NO: 73762 - protein, 9 aa, synthetic construct
  source 1..9: note = Seed: VVGAVGVGK (KRAS G12V)
LVGWVPVGY

SEQ ID NO: 73763 - protein, 9 aa, synthetic construct
  source 1..9: note = Seed: VVGAVGVGK (KRAS G12V)
LVGWVRVGA

SEQ ID NO: 73764 - protein, 9 aa, synthetic construct
  source 1..9: note = Seed: VVGAVGVGK (KRAS G12V)
LVGWVRVGG

SEQ ID NO: 73765 - protein, 9 aa, synthetic construct
  source 1..9: note = Seed: VVGAVGVGK (KRAS G12V)
LVGWVRVGH

SEQ ID NO: 73766 - protein, 9 aa, synthetic construct
  source 1..9: note = Seed: VVGAVGVGK (KRAS G12V)
LVGWVRVGK

SEQ ID NO: 73767 - protein, 9 aa, synthetic construct
  source 1..9: note = Seed: VVGAVGVGK (KRAS G12V)
LVGWVRVGQ

SEQ ID NO: 73768 - protein, 9 aa, synthetic construct
  source 1..9: note = Seed: VVGAVGVGK (KRAS G12V)
LVGWVRVGR

SEQ ID NO: 73769 - protein, 9 aa, synthetic construct
  source 1..9: note = Seed: VVGAVGVGK (KRAS G12V)
LVGWVRVGS

SEQ ID NO: 73770 - protein, 9 aa, synthetic construct
  source 1..9: note = Seed: VVGAVGVGK (KRAS G12V)
LVGWVRVGY

SEQ ID NO: 73771 - protein, 9 aa, synthetic construct
  source 1..9: note = Seed: VVGAVGVGK (KRAS G12V)
LVGWVSVGR

SEQ ID NO: 73772 - protein, 9 aa, synthetic construct
  source 1..9: note = Seed: VVGAVGVGK (KRAS G12V)
LVGWVTVGR

SEQ ID NO: 73773 - protein, 9 aa, synthetic construct
  source 1..9: note = Seed: VVGAVGVGK (KRAS G12V)
LVGYVAVGR

SEQ ID NO: 73774 - protein, 9 aa, synthetic construct
  source 1..9: note = Seed: VVGAVGVGK (KRAS G12V)
LVGYVKVGH

SEQ ID NO: 73775 - protein, 9 aa, synthetic construct
  source 1..9: note = Seed: VVGAVGVGK (KRAS G12V)
LVGYVKVGK

SEQ ID NO: 73776 - protein, 9 aa, synthetic construct
  source 1..9: note = Seed: VVGAVGVGK (KRAS G12V)
LVGYVKVGR

SEQ ID NO: 73777 - protein, 9 aa, synthetic construct
  source 1..9: note = Seed: VVGAVGVGK (KRAS G12V)
LVGYVPVGR

SEQ ID NO: 73778 - protein, 9 aa, synthetic construct
  source 1..9: note = Seed: VVGAVGVGK (KRAS G12V)
LVGYVRVGH

SEQ ID NO: 73779 - protein, 9 aa, synthetic construct
  source 1..9: note = Seed: VVGAVGVGK (KRAS G12V)
LVGYVRVGK

SEQ ID NO: 73780 - protein, 9 aa, synthetic construct
  source 1..9: note = Seed: VVGAVGVGK (KRAS G12V)
LVGYVRVGR

SEQ ID NO: 73781 - protein, 9 aa, synthetic construct
  source 1..9: note = Seed: VVGAVGVGK (KRAS G12V)
LVGYVSVGR

SEQ ID NO: 73782 - protein, 9 aa, synthetic construct
  source 1..9: note = Seed: VVGAVGVGK (KRAS G12V)
MVGAVAVGA

SEQ ID NO: 73783 - protein, 9 aa, synthetic construct
  source 1..9: note = Seed: VVGAVGVGK (KRAS G12V)
MVGAVAVGG

SEQ ID NO: 73784 - protein, 9 aa, synthetic construct
  source 1..9: note = Seed: VVGAVGVGK (KRAS G12V)
MVGAVAVGH

SEQ ID NO: 73785 - protein, 9 aa, synthetic construct
  source 1..9: note = Seed: VVGAVGVGK (KRAS G12V)
MVGAVAVGI

SEQ ID NO: 73786 - protein, 9 aa, synthetic construct
  source 1..9: note = Seed: VVGAVGVGK (KRAS G12V)
MVGAVAVGK

SEQ ID NO: 73787 - protein, 9 aa, synthetic construct
  source 1..9: note = Seed: VVGAVGVGK (KRAS G12V)
MVGAVAVGL

SEQ ID NO: 73788 - protein, 9 aa, synthetic construct
  source 1..9: note = Seed: VVGAVGVGK (KRAS G12V)
MVGAVAVGM

SEQ ID NO: 73789 - protein, 9 aa, synthetic construct
  source 1..9: note = Seed: VVGAVGVGK (KRAS G12V)
MVGAVAVGN

SEQ ID NO: 73790 - protein, 9 aa, synthetic construct
  source 1..9: note = Seed: VVGAVGVGK (KRAS G12V)
MVGAVAVGQ

SEQ ID NO: 73791 - protein, 9 aa, synthetic construct
  source 1..9: note = Seed: VVGAVGVGK (KRAS G12V)
MVGAVAVGR

SEQ ID NO: 73792 - protein, 9 aa, synthetic construct
  source 1..9: note = Seed: VVGAVGVGK (KRAS G12V)
MVGAVAVGS

SEQ ID NO: 73793 - protein, 9 aa, synthetic construct
  source 1..9: note = Seed: VVGAVGVGK (KRAS G12V)
MVGAVAVGT

SEQ ID NO: 73794 - protein, 9 aa, synthetic construct
  source 1..9: note = Seed: VVGAVGVGK (KRAS G12V)
MVGAVAVGV

SEQ ID NO: 73795 - protein, 9 aa, synthetic construct
  source 1..9: note = Seed: VVGAVGVGK (KRAS G12V)
MVGAVAVGY

SEQ ID NO: 73796 - protein, 9 aa, synthetic construct
  source 1..9: note = Seed: VVGAVGVGK (KRAS G12V)
MVGAVGVGA

SEQ ID NO: 73797 - protein, 9 aa, synthetic construct
  source 1..9: note = Seed: VVGAVGVGK (KRAS G12V)
MVGAVGVGI

SEQ ID NO: 73798 - protein, 9 aa, synthetic construct
  source 1..9: note = Seed: VVGAVGVGK (KRAS G12V)
MVGAVGVGK

SEQ ID NO: 73799 - protein, 9 aa, synthetic construct
  source 1..9: note = Seed: VVGAVGVGK (KRAS G12V)
MVGAVGVGL

SEQ ID NO: 73800 - protein, 9 aa, synthetic construct
  source 1..9: note = Seed: VVGAVGVGK (KRAS G12V)
MVGAVGVGM

SEQ ID NO: 73801 - protein, 9 aa, synthetic construct
  source 1..9: note = Seed: VVGAVGVGK (KRAS G12V)
MVGAVGVGR

SEQ ID NO: 73802 - protein, 9 aa, synthetic construct
  source 1..9: note = Seed: VVGAVGVGK (KRAS G12V)
MVGAVGVGS

SEQ ID NO: 73803 - protein, 9 aa, synthetic construct
  source 1..9: note = Seed: VVGAVGVGK (KRAS G12V)
MVGAVGVGT

SEQ ID NO: 73804 - protein, 9 aa, synthetic construct
  source 1..9: note = Seed: VVGAVGVGK (KRAS G12V)
MVGAVGVGV

SEQ ID NO: 73805 - protein, 9 aa, synthetic construct
  source 1..9: note = Seed: VVGAVGVGK (KRAS G12V)
MVGAVHVGR

SEQ ID NO: 73806 - protein, 9 aa, synthetic construct
  source 1..9: note = Seed: VVGAVGVGK (KRAS G12V)
MVGAVKVGA

SEQ ID NO: 73807 - protein, 9 aa, synthetic construct
  source 1..9: note = Seed: VVGAVGVGK (KRAS G12V)
MVGAVKVGF

SEQ ID NO: 73808 - protein, 9 aa, synthetic construct
  source 1..9: note = Seed: VVGAVGVGK (KRAS G12V)
MVGAVKVGG

SEQ ID NO: 73809 - protein, 9 aa, synthetic construct
  source 1..9: note = Seed: VVGAVGVGK (KRAS G12V)
MVGAVKVGH

SEQ ID NO: 73810 - protein, 9 aa, synthetic construct
  source 1..9: note = Seed: VVGAVGVGK (KRAS G12V)
MVGAVKVGI

SEQ ID NO: 73811 - protein, 9 aa, synthetic construct
  source 1..9: note = Seed: VVGAVGVGK (KRAS G12V)
MVGAVKVGK

SEQ ID NO: 73812 - protein, 9 aa, synthetic construct
  source 1..9: note = Seed: VVGAVGVGK (KRAS G12V)
MVGAVKVGL

SEQ ID NO: 73813 - protein, 9 aa, synthetic construct
  source 1..9: note = Seed: VVGAVGVGK (KRAS G12V)
MVGAVKVGM

SEQ ID NO: 73814 - protein, 9 aa, synthetic construct
  source 1..9: note = Seed: VVGAVGVGK (KRAS G12V)
MVGAVKVGQ

SEQ ID NO: 73815 - protein, 9 aa, synthetic construct
  source 1..9: note = Seed: VVGAVGVGK (KRAS G12V)
MVGAVKVGR

SEQ ID NO: 73816 - protein, 9 aa, synthetic construct
  source 1..9: note = Seed: VVGAVGVGK (KRAS G12V)
MVGAVKVGS

SEQ ID NO: 73817 - protein, 9 aa, synthetic construct
  source 1..9: note = Seed: VVGAVGVGK (KRAS G12V)
MVGAVKVGT

SEQ ID NO: 73818 - protein, 9 aa, synthetic construct
  source 1..9: note = Seed: VVGAVGVGK (KRAS G12V)
MVGAVKVGV

SEQ ID NO: 73819 - protein, 9 aa, synthetic construct
  source 1..9: note = Seed: VVGAVGVGK (KRAS G12V)
MVGAVKVGY

SEQ ID NO: 73820 - protein, 9 aa, synthetic construct
  source 1..9: note = Seed: VVGAVGVGK (KRAS G12V)
MVGAVNVGA

SEQ ID NO: 73821 - protein, 9 aa, synthetic construct
  source 1..9: note = Seed: VVGAVGVGK (KRAS G12V)
MVGAVPVGA

SEQ ID NO: 73822 - protein, 9 aa, synthetic construct
  source 1..9: note = Seed: VVGAVGVGK (KRAS G12V)
MVGAVPVGC

SEQ ID NO: 73823 - protein, 9 aa, synthetic construct
  source 1..9: note = Seed: VVGAVGVGK (KRAS G12V)
MVGAVPVGD

SEQ ID NO: 73824 - protein, 9 aa, synthetic construct
  source 1..9: note = Seed: VVGAVGVGK (KRAS G12V)
MVGAVPVGF

SEQ ID NO: 73825 - protein, 9 aa, synthetic construct
  source 1..9: note = Seed: VVGAVGVGK (KRAS G12V)
MVGAVPVGG

SEQ ID NO: 73826 - protein, 9 aa, synthetic construct
  source 1..9: note = Seed: VVGAVGVGK (KRAS G12V)
MVGAVPVGH

SEQ ID NO: 73827 - protein, 9 aa, synthetic construct
  source 1..9: note = Seed: VVGAVGVGK (KRAS G12V)
MVGAVPVGI

SEQ ID NO: 73828 - protein, 9 aa, synthetic construct
  source 1..9: note = Seed: VVGAVGVGK (KRAS G12V)
MVGAVPVGK

SEQ ID NO: 73829 - protein, 9 aa, synthetic construct
  source 1..9: note = Seed: VVGAVGVGK (KRAS G12V)
MVGAVPVGL

SEQ ID NO: 73830 - protein, 9 aa, synthetic construct
  source 1..9: note = Seed: VVGAVGVGK (KRAS G12V)
MVGAVPVGM

SEQ ID NO: 73831 - protein, 9 aa, synthetic construct
  source 1..9: note = Seed: VVGAVGVGK (KRAS G12V)
MVGAVPVGN

SEQ ID NO: 73832 - protein, 9 aa, synthetic construct
  source 1..9: note = Seed: VVGAVGVGK (KRAS G12V)
MVGAVPVGQ

SEQ ID NO: 73833 - protein, 9 aa, synthetic construct
  source 1..9: note = Seed: VVGAVGVGK (KRAS G12V)
MVGAVPVGR

SEQ ID NO: 73834 - protein, 9 aa, synthetic construct
  source 1..9: note = Seed: VVGAVGVGK (KRAS G12V)
MVGAVPVGS

SEQ ID NO: 73835 - protein, 9 aa, synthetic construct
  source 1..9: note = Seed: VVGAVGVGK (KRAS G12V)
MVGAVPVGT

SEQ ID NO: 73836 - protein, 9 aa, synthetic construct
  source 1..9: note = Seed: VVGAVGVGK (KRAS G12V)
MVGAVPVGV

SEQ ID NO: 73837 - protein, 9 aa, synthetic construct
  source 1..9: note = Seed: VVGAVGVGK (KRAS G12V)
MVGAVPVGY

SEQ ID NO: 73838 - protein, 9 aa, synthetic construct
  source 1..9: note = Seed: VVGAVGVGK (KRAS G12V)
MVGAVRVGA

SEQ ID NO: 73839 - protein, 9 aa, synthetic construct
  source 1..9: note = Seed: VVGAVGVGK (KRAS G12V)
MVGAVRVGF

SEQ ID NO: 73840 - protein, 9 aa, synthetic construct
  source 1..9: note = Seed: VVGAVGVGK (KRAS G12V)
MVGAVRVGG

SEQ ID NO: 73841 - protein, 9 aa, synthetic construct
  source 1..9: note = Seed: VVGAVGVGK (KRAS G12V)
MVGAVRVGH

SEQ ID NO: 73842 - protein, 9 aa, synthetic construct
  source 1..9: note = Seed: VVGAVGVGK (KRAS G12V)
MVGAVRVGI

SEQ ID NO: 73843 - protein, 9 aa, synthetic construct
  source 1..9: note = Seed: VVGAVGVGK (KRAS G12V)
MVGAVRVGK

SEQ ID NO: 73844 - protein, 9 aa, synthetic construct
  source 1..9: note = Seed: VVGAVGVGK (KRAS G12V)
MVGAVRVGL

SEQ ID NO: 73845 - protein, 9 aa, synthetic construct
  source 1..9: note = Seed: VVGAVGVGK (KRAS G12V)
MVGAVRVGM

SEQ ID NO: 73846 - protein, 9 aa, synthetic construct
  source 1..9: note = Seed: VVGAVGVGK (KRAS G12V)
MVGAVRVGN

SEQ ID NO: 73847 - protein, 9 aa, synthetic construct
  source 1..9: note = Seed: VVGAVGVGK (KRAS G12V)
MVGAVRVGP

SEQ ID NO: 73848 - protein, 9 aa, synthetic construct
  source 1..9: note = Seed: VVGAVGVGK (KRAS G12V)
MVGAVRVGQ

SEQ ID NO: 73849 - protein, 9 aa, synthetic construct
  source 1..9: note = Seed: VVGAVGVGK (KRAS G12V)
MVGAVRVGR

SEQ ID NO: 73850 - protein, 9 aa, synthetic construct
  source 1..9: note = Seed: VVGAVGVGK (KRAS G12V)
MVGAVRVGS

SEQ ID NO: 73851 - protein, 9 aa, synthetic construct
  source 1..9: note = Seed: VVGAVGVGK (KRAS G12V)
MVGAVRVGT

SEQ ID NO: 73852 - protein, 9 aa, synthetic construct
  source 1..9: note = Seed: VVGAVGVGK (KRAS G12V)
MVGAVRVGV

SEQ ID NO: 73853 - protein, 9 aa, synthetic construct
  source 1..9: note = Seed: VVGAVGVGK (KRAS G12V)
MVGAVRVGY

SEQ ID NO: 73854 - protein, 9 aa, synthetic construct
  source 1..9: note = Seed: VVGAVGVGK (KRAS G12V)
MVGAVSVGA

SEQ ID NO: 73855 - protein, 9 aa, synthetic construct
  source 1..9: note = Seed: VVGAVGVGK (KRAS G12V)
MVGAVSVGI

SEQ ID NO: 73856 - protein, 9 aa, synthetic construct
  source 1..9: note = Seed: VVGAVGVGK (KRAS G12V)
MVGAVSVGK

SEQ ID NO: 73857 - protein, 9 aa, synthetic construct
  source 1..9: note = Seed: VVGAVGVGK (KRAS G12V)
MVGAVSVGL

SEQ ID NO: 73858 - protein, 9 aa, synthetic construct
  source 1..9: note = Seed: VVGAVGVGK (KRAS G12V)
MVGAVSVGM

SEQ ID NO: 73859 - protein, 9 aa, synthetic construct
  source 1..9: note = Seed: VVGAVGVGK (KRAS G12V)
MVGAVSVGR

SEQ ID NO: 73860 - protein, 9 aa, synthetic construct
  source 1..9: note = Seed: VVGAVGVGK (KRAS G12V)
MVGAVSVGS

SEQ ID NO: 73861 - protein, 9 aa, synthetic construct
  source 1..9: note = Seed: VVGAVGVGK (KRAS G12V)
MVGAVSVGT

SEQ ID NO: 73862 - protein, 9 aa, synthetic construct
  source 1..9: note = Seed: VVGAVGVGK (KRAS G12V)
MVGAVSVGV

SEQ ID NO: 73863 - protein, 9 aa, synthetic construct
  source 1..9: note = Seed: VVGAVGVGK (KRAS G12V)
MVGAVTVGA

SEQ ID NO: 73864 - protein, 9 aa, synthetic construct
  source 1..9: note = Seed: VVGAVGVGK (KRAS G12V)
MVGAVTVGR

SEQ ID NO: 73865 - protein, 9 aa, synthetic construct
  source 1..9: note = Seed: VVGAVGVGK (KRAS G12V)
MVGAVVVGR

SEQ ID NO: 73866 - protein, 9 aa, synthetic construct
  source 1..9: note = Seed: VVGAVGVGK (KRAS G12V)
MVGCVAVGA

SEQ ID NO: 73867 - protein, 9 aa, synthetic construct
  source 1..9: note = Seed: VVGAVGVGK (KRAS G12V)
MVGCVKVGR

SEQ ID NO: 73868 - protein, 9 aa, synthetic construct
  source 1..9: note = Seed: VVGAVGVGK (KRAS G12V)
MVGCVRVGA

SEQ ID NO: 73869 - protein, 9 aa, synthetic construct
  source 1..9: note = Seed: VVGAVGVGK (KRAS G12V)
MVGCVRVGH

SEQ ID NO: 73870 - protein, 9 aa, synthetic construct
  source 1..9: note = Seed: VVGAVGVGK (KRAS G12V)
MVGCVRVGK

SEQ ID NO: 73871 - protein, 9 aa, synthetic construct
  source 1..9: note = Seed: VVGAVGVGK (KRAS G12V)
MVGCVRVGR

SEQ ID NO: 73872 - protein, 9 aa, synthetic construct
  source 1..9: note = Seed: VVGAVGVGK (KRAS G12V)
MVGCVRVGS

SEQ ID NO: 73873 - protein, 9 aa, synthetic construct
  source 1..9: note = Seed: VVGAVGVGK (KRAS G12V)
MVGEVAVGA

SEQ ID NO: 73874 - protein, 9 aa, synthetic construct
  source 1..9: note = Seed: VVGAVGVGK (KRAS G12V)
MVGEVAVGL

SEQ ID NO: 73875 - protein, 9 aa, synthetic construct
  source 1..9: note = Seed: VVGAVGVGK (KRAS G12V)
MVGEVAVGV

SEQ ID NO: 73876 - protein, 9 aa, synthetic construct
  source 1..9: note = Seed: VVGAVGVGK (KRAS G12V)
MVGEVRVGR

SEQ ID NO: 73877 - protein, 9 aa, synthetic construct
  source 1..9: note = Seed: VVGAVGVGK (KRAS G12V)
MVGFVAVGR

SEQ ID NO: 73878 - protein, 9 aa, synthetic construct
  source 1..9: note = Seed: VVGAVGVGK (KRAS G12V)
MVGFVHVGR

SEQ ID NO: 73879 - protein, 9 aa, synthetic construct
  source 1..9: note = Seed: VVGAVGVGK (KRAS G12V)
MVGFVKVGA

SEQ ID NO: 73880 - protein, 9 aa, synthetic construct
  source 1..9: note = Seed: VVGAVGVGK (KRAS G12V)
MVGFVKVGG

SEQ ID NO: 73881 - protein, 9 aa, synthetic construct
  source 1..9: note = Seed: VVGAVGVGK (KRAS G12V)
MVGFVKVGH

SEQ ID NO: 73882 - protein, 9 aa, synthetic construct
  source 1..9: note = Seed: VVGAVGVGK (KRAS G12V)
MVGFVKVGK

SEQ ID NO: 73883 - protein, 9 aa, synthetic construct
  source 1..9: note = Seed: VVGAVGVGK (KRAS G12V)
MVGFVKVGQ

SEQ ID NO: 73884 - protein, 9 aa, synthetic construct
  source 1..9: note = Seed: VVGAVGVGK (KRAS G12V)
MVGFVKVGR

SEQ ID NO: 73885 - protein, 9 aa, synthetic construct
  source 1..9: note = Seed: VVGAVGVGK (KRAS G12V)
MVGFVKVGS

SEQ ID NO: 73886 - protein, 9 aa, synthetic construct
  source 1..9: note = Seed: VVGAVGVGK (KRAS G12V)
MVGFVKVGY

SEQ ID NO: 73887 - protein, 9 aa, synthetic construct
  source 1..9: note = Seed: VVGAVGVGK (KRAS G12V)
MVGFVPVGL

SEQ ID NO: 73888 - protein, 9 aa, synthetic construct
  source 1..9: note = Seed: VVGAVGVGK (KRAS G12V)
MVGFVPVGM

SEQ ID NO: 73889 - protein, 9 aa, synthetic construct
  source 1..9: note = Seed: VVGAVGVGK (KRAS G12V)
MVGFVPVGR

SEQ ID NO: 73890 - protein, 9 aa, synthetic construct
  source 1..9: note = Seed: VVGAVGVGK (KRAS G12V)
MVGFVRVGA

SEQ ID NO: 73891 - protein, 9 aa, synthetic construct
  source 1..9: note = Seed: VVGAVGVGK (KRAS G12V)
MVGFVRVGG

SEQ ID NO: 73892 - protein, 9 aa, synthetic construct
  source 1..9: note = Seed: VVGAVGVGK (KRAS G12V)
MVGFVRVGH

SEQ ID NO: 73893 - protein, 9 aa, synthetic construct
  source 1..9: note = Seed: VVGAVGVGK (KRAS G12V)
MVGFVRVGK

SEQ ID NO: 73894 - protein, 9 aa, synthetic construct
  source 1..9: note = Seed: VVGAVGVGK (KRAS G12V)
MVGFVRVGQ

SEQ ID NO: 73895 - protein, 9 aa, synthetic construct
  source 1..9: note = Seed: VVGAVGVGK (KRAS G12V)
MVGFVRVGR

SEQ ID NO: 73896 - protein, 9 aa, synthetic construct
  source 1..9: note = Seed: VVGAVGVGK (KRAS G12V)
MVGFVRVGS

SEQ ID NO: 73897 - protein, 9 aa, synthetic construct
  source 1..9: note = Seed: VVGAVGVGK (KRAS G12V)
MVGFVRVGY

SEQ ID NO: 73898 - protein, 9 aa, synthetic construct
  source 1..9: note = Seed: VVGAVGVGK (KRAS G12V)
MVGFVSVGR

SEQ ID NO: 73899 - protein, 9 aa, synthetic construct
  source 1..9: note = Seed: VVGAVGVGK (KRAS G12V)
MVGFVTVGR

SEQ ID NO: 73900 - protein, 9 aa, synthetic construct
  source 1..9: note = Seed: VVGAVGVGK (KRAS G12V)
MVGGVAVGA

SEQ ID NO: 73901 - protein, 9 aa, synthetic construct
  source 1..9: note = Seed: VVGAVGVGK (KRAS G12V)
MVGGVAVGH

SEQ ID NO: 73902 - protein, 9 aa, synthetic construct
  source 1..9: note = Seed: VVGAVGVGK (KRAS G12V)
MVGGVAVGI

SEQ ID NO: 73903 - protein, 9 aa, synthetic construct
  source 1..9: note = Seed: VVGAVGVGK (KRAS G12V)
MVGGVAVGL

SEQ ID NO: 73904 - protein, 9 aa, synthetic construct
  source 1..9: note = Seed: VVGAVGVGK (KRAS G12V)
MVGGVAVGM

SEQ ID NO: 73905 - protein, 9 aa, synthetic construct
  source 1..9: note = Seed: VVGAVGVGK (KRAS G12V)
MVGGVAVGR

SEQ ID NO: 73906 - protein, 9 aa, synthetic construct
  source 1..9: note = Seed: VVGAVGVGK (KRAS G12V)
MVGGVAVGS

SEQ ID NO: 73907 - protein, 9 aa, synthetic construct
  source 1..9: note = Seed: VVGAVGVGK (KRAS G12V)
MVGGVAVGT

SEQ ID NO: 73908 - protein, 9 aa, synthetic construct
  source 1..9: note = Seed: VVGAVGVGK (KRAS G12V)
MVGGVAVGV

SEQ ID NO: 73909 - protein, 9 aa, synthetic construct
  source 1..9: note = Seed: VVGAVGVGK (KRAS G12V)
MVGGVAVGY

SEQ ID NO: 73910 - protein, 9 aa, synthetic construct
  source 1..9: note = Seed: VVGAVGVGK (KRAS G12V)
MVGGVKVGK

SEQ ID NO: 73911 - protein, 9 aa, synthetic construct
  source 1..9: note = Seed: VVGAVGVGK (KRAS G12V)
MVGGVKVGR

SEQ ID NO: 73912 - protein, 9 aa, synthetic construct
  source 1..9: note = Seed: VVGAVGVGK (KRAS G12V)
MVGGVKVGY

SEQ ID NO: 73913 - protein, 9 aa, synthetic construct
  source 1..9: note = Seed: VVGAVGVGK (KRAS G12V)
MVGGVPVGA

SEQ ID NO: 73914 - protein, 9 aa, synthetic construct
  source 1..9: note = Seed: VVGAVGVGK (KRAS G12V)
MVGGVPVGF

SEQ ID NO: 73915 - protein, 9 aa, synthetic construct
  source 1..9: note = Seed: VVGAVGVGK (KRAS G12V)
MVGGVPVGG

SEQ ID NO: 73916 - protein, 9 aa, synthetic construct
  source 1..9: note = Seed: VVGAVGVGK (KRAS G12V)
MVGGVPVGH

SEQ ID NO: 73917 - protein, 9 aa, synthetic construct
  source 1..9: note = Seed: VVGAVGVGK (KRAS G12V)
MVGGVPVGI

SEQ ID NO: 73918 - protein, 9 aa, synthetic construct
  source 1..9: note = Seed: VVGAVGVGK (KRAS G12V)
MVGGVPVGL

SEQ ID NO: 73919 - protein, 9 aa, synthetic construct
  source 1..9: note = Seed: VVGAVGVGK (KRAS G12V)
MVGGVPVGM

SEQ ID NO: 73920 - protein, 9 aa, synthetic construct
  source 1..9: note = Seed: VVGAVGVGK (KRAS G12V)
MVGGVPVGN

SEQ ID NO: 73921 - protein, 9 aa, synthetic construct
  source 1..9: note = Seed: VVGAVGVGK (KRAS G12V)
MVGGVPVGQ

SEQ ID NO: 73922 - protein, 9 aa, synthetic construct
  source 1..9: note = Seed: VVGAVGVGK (KRAS G12V)
MVGGVPVGS

SEQ ID NO: 73923 - protein, 9 aa, synthetic construct
  source 1..9: note = Seed: VVGAVGVGK (KRAS G12V)
MVGGVPVGT

SEQ ID NO: 73924 - protein, 9 aa, synthetic construct
  source 1..9: note = Seed: VVGAVGVGK (KRAS G12V)
MVGGVPVGV

SEQ ID NO: 73925 - protein, 9 aa, synthetic construct
  source 1..9: note = Seed: VVGAVGVGK (KRAS G12V)
MVGGVPVGY

SEQ ID NO: 73926 - protein, 9 aa, synthetic construct
  source 1..9: note = Seed: VVGAVGVGK (KRAS G12V)
MVGGVRVGI

SEQ ID NO: 73927 - protein, 9 aa, synthetic construct
  source 1..9: note = Seed: VVGAVGVGK (KRAS G12V)
MVGGVRVGK

SEQ ID NO: 73928 - protein, 9 aa, synthetic construct
  source 1..9: note = Seed: VVGAVGVGK (KRAS G12V)
MVGGVRVGM

SEQ ID NO: 73929 - protein, 9 aa, synthetic construct
  source 1..9: note = Seed: VVGAVGVGK (KRAS G12V)
MVGGVRVGR

SEQ ID NO: 73930 - protein, 9 aa, synthetic construct
  source 1..9: note = Seed: VVGAVGVGK (KRAS G12V)
MVGGVRVGV

SEQ ID NO: 73931 - protein, 9 aa, synthetic construct
  source 1..9: note = Seed: VVGAVGVGK (KRAS G12V)
MVGGVRVGY

SEQ ID NO: 73932 - protein, 9 aa, synthetic construct
  source 1..9: note = Seed: VVGAVGVGK (KRAS G12V)
MVGHVAVGI

SEQ ID NO: 73933 - protein, 9 aa, synthetic construct
  source 1..9: note = Seed: VVGAVGVGK (KRAS G12V)
MVGHVAVGK

SEQ ID NO: 73934 - protein, 9 aa, synthetic construct
  source 1..9: note = Seed: VVGAVGVGK (KRAS G12V)
MVGHVAVGL

SEQ ID NO: 73935 - protein, 9 aa, synthetic construct
  source 1..9: note = Seed: VVGAVGVGK (KRAS G12V)
MVGHVAVGM

SEQ ID NO: 73936 - protein, 9 aa, synthetic construct
  source 1..9: note = Seed: VVGAVGVGK (KRAS G12V)
MVGHVAVGR

SEQ ID NO: 73937 - protein, 9 aa, synthetic construct
  source 1..9: note = Seed: VVGAVGVGK (KRAS G12V)
MVGHVAVGV

SEQ ID NO: 73938 - protein, 9 aa, synthetic construct
  source 1..9: note = Seed: VVGAVGVGK (KRAS G12V)
MVGHVAVGY

SEQ ID NO: 73939 - protein, 9 aa, synthetic construct
  source 1..9: note = Seed: VVGAVGVGK (KRAS G12V)
MVGHVGVGR

SEQ ID NO: 73940 - protein, 9 aa, synthetic construct
  source 1..9: note = Seed: VVGAVGVGK (KRAS G12V)
MVGHVHVGK

SEQ ID NO: 73941 - protein, 9 aa, synthetic construct
  source 1..9: note = Seed: VVGAVGVGK (KRAS G12V)
MVGHVHVGR

SEQ ID NO: 73942 - protein, 9 aa, synthetic construct
  source 1..9: note = Seed: VVGAVGVGK (KRAS G12V)
MVGHVHVGY

SEQ ID NO: 73943 - protein, 9 aa, synthetic construct
  source 1..9: note = Seed: VVGAVGVGK (KRAS G12V)
MVGHVIVGR

SEQ ID NO: 73944 - protein, 9 aa, synthetic construct
  source 1..9: note = Seed: VVGAVGVGK (KRAS G12V)
MVGHVKVGA

SEQ ID NO: 73945 - protein, 9 aa, synthetic construct
  source 1..9: note = Seed: VVGAVGVGK (KRAS G12V)
MVGHVKVGF

SEQ ID NO: 73946 - protein, 9 aa, synthetic construct
  source 1..9: note = Seed: VVGAVGVGK (KRAS G12V)
MVGHVKVGG

SEQ ID NO: 73947 - protein, 9 aa, synthetic construct
  source 1..9: note = Seed: VVGAVGVGK (KRAS G12V)
MVGHVKVGH

SEQ ID NO: 73948 - protein, 9 aa, synthetic construct
  source 1..9: note = Seed: VVGAVGVGK (KRAS G12V)
MVGHVKVGI

SEQ ID NO: 73949 - protein, 9 aa, synthetic construct
  source 1..9: note = Seed: VVGAVGVGK (KRAS G12V)
MVGHVKVGK

SEQ ID NO: 73950 - protein, 9 aa, synthetic construct
  source 1..9: note = Seed: VVGAVGVGK (KRAS G12V)
MVGHVKVGL

SEQ ID NO: 73951 - protein, 9 aa, synthetic construct
  source 1..9: note = Seed: VVGAVGVGK (KRAS G12V)
MVGHVKVGM

SEQ ID NO: 73952 - protein, 9 aa, synthetic construct
  source 1..9: note = Seed: VVGAVGVGK (KRAS G12V)
MVGHVKVGQ

SEQ ID NO: 73953 - protein, 9 aa, synthetic construct
  source 1..9: note = Seed: VVGAVGVGK (KRAS G12V)
MVGHVKVGR

SEQ ID NO: 73954 - protein, 9 aa, synthetic construct
  source 1..9: note = Seed: VVGAVGVGK (KRAS G12V)
MVGHVKVGS

SEQ ID NO: 73955 - protein, 9 aa, synthetic construct
  source 1..9: note = Seed: VVGAVGVGK (KRAS G12V)
MVGHVKVGV

SEQ ID NO: 73956 - protein, 9 aa, synthetic construct
  source 1..9: note = Seed: VVGAVGVGK (KRAS G12V)
MVGHVKVGW

SEQ ID NO: 73957 - protein, 9 aa, synthetic construct
  source 1..9: note = Seed: VVGAVGVGK (KRAS G12V)
MVGHVKVGY

SEQ ID NO: 73958 - protein, 9 aa, synthetic construct
  source 1..9: note = Seed: VVGAVGVGK (KRAS G12V)
MVGHVLVGR

SEQ ID NO: 73959 - protein, 9 aa, synthetic construct
  source 1..9: note = Seed: VVGAVGVGK (KRAS G12V)
MVGHVMVGR

SEQ ID NO: 73960 - protein, 9 aa, synthetic construct
  source 1..9: note = Seed: VVGAVGVGK (KRAS G12V)
MVGHVNVGR

SEQ ID NO: 73961 - protein, 9 aa, synthetic construct
  source 1..9: note = Seed: VVGAVGVGK (KRAS G12V)
MVGHVNVGY

SEQ ID NO: 73962 - protein, 9 aa, synthetic construct
  source 1..9: note = Seed: VVGAVGVGK (KRAS G12V)
MVGHVPVGF

SEQ ID NO: 73963 - protein, 9 aa, synthetic construct
  source 1..9: note = Seed: VVGAVGVGK (KRAS G12V)
MVGHVPVGI

SEQ ID NO: 73964 - protein, 9 aa, synthetic construct
  source 1..9: note = Seed: VVGAVGVGK (KRAS G12V)
MVGHVPVGK

SEQ ID NO: 73965 - protein, 9 aa, synthetic construct
  source 1..9: note = Seed: VVGAVGVGK (KRAS G12V)
MVGHVPVGL

SEQ ID NO: 73966 - protein, 9 aa, synthetic construct
  source 1..9: note = Seed: VVGAVGVGK (KRAS G12V)
MVGHVPVGM

SEQ ID NO: 73967 - protein, 9 aa, synthetic construct
  source 1..9: note = Seed: VVGAVGVGK (KRAS G12V)
MVGHVPVGR

SEQ ID NO: 73968 - protein, 9 aa, synthetic construct
  source 1..9: note = Seed: VVGAVGVGK (KRAS G12V)
MVGHVPVGV

SEQ ID NO: 73969 - protein, 9 aa, synthetic construct
  source 1..9: note = Seed: VVGAVGVGK (KRAS G12V)
MVGHVPVGY

SEQ ID NO: 73970 - protein, 9 aa, synthetic construct
  source 1..9: note = Seed: VVGAVGVGK (KRAS G12V)
MVGHVQVGR

SEQ ID NO: 73971 - protein, 9 aa, synthetic construct
  source 1..9: note = Seed: VVGAVGVGK (KRAS G12V)
MVGHVRVGA

SEQ ID NO: 73972 - protein, 9 aa, synthetic construct
  source 1..9: note = Seed: VVGAVGVGK (KRAS G12V)
MVGHVRVGE

SEQ ID NO: 73973 - protein, 9 aa, synthetic construct
  source 1..9: note = Seed: VVGAVGVGK (KRAS G12V)
MVGHVRVGF

SEQ ID NO: 73974 - protein, 9 aa, synthetic construct
  source 1..9: note = Seed: VVGAVGVGK (KRAS G12V)
MVGHVRVGG

SEQ ID NO: 73975 - protein, 9 aa, synthetic construct
  source 1..9: note = Seed: VVGAVGVGK (KRAS G12V)
MVGHVRVGH

SEQ ID NO: 73976 - protein, 9 aa, synthetic construct
  source 1..9: note = Seed: VVGAVGVGK (KRAS G12V)
MVGHVRVGI

SEQ ID NO: 73977 - protein, 9 aa, synthetic construct
  source 1..9: note = Seed: VVGAVGVGK (KRAS G12V)
MVGHVRVGK

SEQ ID NO: 73978 - protein, 9 aa, synthetic construct
  source 1..9: note = Seed: VVGAVGVGK (KRAS G12V)
MVGHVRVGL

SEQ ID NO: 73979 - protein, 9 aa, synthetic construct
  source 1..9: note = Seed: VVGAVGVGK (KRAS G12V)
MVGHVRVGM

SEQ ID NO: 73980 - protein, 9 aa, synthetic construct
  source 1..9: note = Seed: VVGAVGVGK (KRAS G12V)
MVGHVRVGN

SEQ ID NO: 73981 - protein, 9 aa, synthetic construct
  source 1..9: note = Seed: VVGAVGVGK (KRAS G12V)
MVGHVRVGP

SEQ ID NO: 73982 - protein, 9 aa, synthetic construct
  source 1..9: note = Seed: VVGAVGVGK (KRAS G12V)
MVGHVRVGQ

SEQ ID NO: 73983 - protein, 9 aa, synthetic construct
  source 1..9: note = Seed: VVGAVGVGK (KRAS G12V)
MVGHVRVGR

SEQ ID NO: 73984 - protein, 9 aa, synthetic construct
  source 1..9: note = Seed: VVGAVGVGK (KRAS G12V)
MVGHVRVGS

SEQ ID NO: 73985 - protein, 9 aa, synthetic construct
  source 1..9: note = Seed: VVGAVGVGK (KRAS G12V)
MVGHVRVGT

SEQ ID NO: 73986 - protein, 9 aa, synthetic construct
  source 1..9: note = Seed: VVGAVGVGK (KRAS G12V)
MVGHVRVGV

SEQ ID NO: 73987 - protein, 9 aa, synthetic construct
  source 1..9: note = Seed: VVGAVGVGK (KRAS G12V)
MVGHVRVGW

SEQ ID NO: 73988 - protein, 9 aa, synthetic construct
  source 1..9: note = Seed: VVGAVGVGK (KRAS G12V)
MVGHVRVGY

SEQ ID NO: 73989 - protein, 9 aa, synthetic construct
  source 1..9: note = Seed: VVGAVGVGK (KRAS G12V)
MVGHVSVGK

SEQ ID NO: 73990 - protein, 9 aa, synthetic construct
  source 1..9: note = Seed: VVGAVGVGK (KRAS G12V)
MVGHVSVGR

SEQ ID NO: 73991 - protein, 9 aa, synthetic construct
  source 1..9: note = Seed: VVGAVGVGK (KRAS G12V)
MVGHVSVGY

SEQ ID NO: 73992 - protein, 9 aa, synthetic construct
  source 1..9: note = Seed: VVGAVGVGK (KRAS G12V)
MVGHVTVGR

SEQ ID NO: 73993 - protein, 9 aa, synthetic construct
  source 1..9: note = Seed: VVGAVGVGK (KRAS G12V)
MVGHVVVGR

SEQ ID NO: 73994 - protein, 9 aa, synthetic construct
  source 1..9: note = Seed: VVGAVGVGK (KRAS G12V)
MVGIVAVGR

SEQ ID NO: 73995 - protein, 9 aa, synthetic construct
  source 1..9: note = Seed: VVGAVGVGK (KRAS G12V)
MVGIVGVGR

SEQ ID NO: 73996 - protein, 9 aa, synthetic construct
  source 1..9: note = Seed: VVGAVGVGK (KRAS G12V)
MVGIVHVGK

SEQ ID NO: 73997 - protein, 9 aa, synthetic construct
  source 1..9: note = Seed: VVGAVGVGK (KRAS G12V)
MVGIVHVGR

SEQ ID NO: 73998 - protein, 9 aa, synthetic construct
  source 1..9: note = Seed: VVGAVGVGK (KRAS G12V)
MVGIVKVGA

SEQ ID NO: 73999 - protein, 9 aa, synthetic construct
  source 1..9: note = Seed: VVGAVGVGK (KRAS G12V)
MVGIVKVGG

SEQ ID NO: 74000 - protein, 9 aa, synthetic construct
  source 1..9: note = Seed: VVGAVGVGK (KRAS G12V)
MVGIVKVGH

SEQ ID NO: 74001 - protein, 9 aa, synthetic construct
  source 1..9: note = Seed: VVGAVGVGK (KRAS G12V)
MVGIVKVGK

SEQ ID NO: 74002 - protein, 9 aa, synthetic construct
  source 1..9: note = Seed: VVGAVGVGK (KRAS G12V)
MVGIVKVGM

SEQ ID NO: 74003 - protein, 9 aa, synthetic construct
  source 1..9: note = Seed: VVGAVGVGK (KRAS G12V)
MVGIVKVGN

SEQ ID NO: 74004 - protein, 9 aa, synthetic construct
  source 1..9: note = Seed: VVGAVGVGK (KRAS G12V)
MVGIVKVGP

SEQ ID NO: 74005 - protein, 9 aa, synthetic construct
  source 1..9: note = Seed: VVGAVGVGK (KRAS G12V)
MVGIVKVGQ

SEQ ID NO: 74006 - protein, 9 aa, synthetic construct
  source 1..9: note = Seed: VVGAVGVGK (KRAS G12V)
MVGIVKVGR

SEQ ID NO: 74007 - protein, 9 aa, synthetic construct
  source 1..9: note = Seed: VVGAVGVGK (KRAS G12V)
MVGIVKVGS

SEQ ID NO: 74008 - protein, 9 aa, synthetic construct
  source 1..9: note = Seed: VVGAVGVGK (KRAS G12V)
MVGIVKVGT

SEQ ID NO: 74009 - protein, 9 aa, synthetic construct
  source 1..9: note = Seed: VVGAVGVGK (KRAS G12V)
MVGIVKVGV

SEQ ID NO: 74010 - protein, 9 aa, synthetic construct
  source 1..9: note = Seed: VVGAVGVGK (KRAS G12V)
MVGIVKVGY

SEQ ID NO: 74011 - protein, 9 aa, synthetic construct
  source 1..9: note = Seed: VVGAVGVGK (KRAS G12V)
MVGIVNVGR

SEQ ID NO: 74012 - protein, 9 aa, synthetic construct
  source 1..9: note = Seed: VVGAVGVGK (KRAS G12V)
MVGIVPVGI

SEQ ID NO: 74013 - protein, 9 aa, synthetic construct
  source 1..9: note = Seed: VVGAVGVGK (KRAS G12V)
MVGIVPVGL

SEQ ID NO: 74014 - protein, 9 aa, synthetic construct
  source 1..9: note = Seed: VVGAVGVGK (KRAS G12V)
MVGIVPVGM

SEQ ID NO: 74015 - protein, 9 aa, synthetic construct
  source 1..9: note = Seed: VVGAVGVGK (KRAS G12V)
MVGIVPVGR

SEQ ID NO: 74016 - protein, 9 aa, synthetic construct
  source 1..9: note = Seed: VVGAVGVGK (KRAS G12V)
MVGIVPVGV

SEQ ID NO: 74017 - protein, 9 aa, synthetic construct
  source 1..9: note = Seed: VVGAVGVGK (KRAS G12V)
MVGIVQVGR

SEQ ID NO: 74018 - protein, 9 aa, synthetic construct
  source 1..9: note = Seed: VVGAVGVGK (KRAS G12V)
MVGIVRVGA

SEQ ID NO: 74019 - protein, 9 aa, synthetic construct
  source 1..9: note = Seed: VVGAVGVGK (KRAS G12V)
MVGIVRVGG

SEQ ID NO: 74020 - protein, 9 aa, synthetic construct
  source 1..9: note = Seed: VVGAVGVGK (KRAS G12V)
MVGIVRVGH

SEQ ID NO: 74021 - protein, 9 aa, synthetic construct
  source 1..9: note = Seed: VVGAVGVGK (KRAS G12V)
MVGIVRVGK

SEQ ID NO: 74022 - protein, 9 aa, synthetic construct
  source 1..9: note = Seed: VVGAVGVGK (KRAS G12V)
MVGIVRVGL

SEQ ID NO: 74023 - protein, 9 aa, synthetic construct
  source 1..9: note = Seed: VVGAVGVGK (KRAS G12V)
MVGIVRVGM

SEQ ID NO: 74024 - protein, 9 aa, synthetic construct
  source 1..9: note = Seed: VVGAVGVGK (KRAS G12V)
MVGIVRVGN

SEQ ID NO: 74025 - protein, 9 aa, synthetic construct
  source 1..9: note = Seed: VVGAVGVGK (KRAS G12V)
MVGIVRVGP

SEQ ID NO: 74026 - protein, 9 aa, synthetic construct
  source 1..9: note = Seed: VVGAVGVGK (KRAS G12V)
MVGIVRVGQ

SEQ ID NO: 74027 - protein, 9 aa, synthetic construct
  source 1..9: note = Seed: VVGAVGVGK (KRAS G12V)
MVGIVRVGR

SEQ ID NO: 74028 - protein, 9 aa, synthetic construct
  source 1..9: note = Seed: VVGAVGVGK (KRAS G12V)
MVGIVRVGS

SEQ ID NO: 74029 - protein, 9 aa, synthetic construct
  source 1..9: note = Seed: VVGAVGVGK (KRAS G12V)
MVGIVRVGT

SEQ ID NO: 74030 - protein, 9 aa, synthetic construct
  source 1..9: note = Seed: VVGAVGVGK (KRAS G12V)
MVGIVRVGV

SEQ ID NO: 74031 - protein, 9 aa, synthetic construct
  source 1..9: note = Seed: VVGAVGVGK (KRAS G12V)
MVGIVRVGY

SEQ ID NO: 74032 - protein, 9 aa, synthetic construct
  source 1..9: note = Seed: VVGAVGVGK (KRAS G12V)
MVGIVSVGR

SEQ ID NO: 74033 - protein, 9 aa, synthetic construct
  source 1..9: note = Seed: VVGAVGVGK (KRAS G12V)
MVGIVTVGR

SEQ ID NO: 74034 - protein, 9 aa, synthetic construct
  source 1..9: note = Seed: VVGAVGVGK (KRAS G12V)
MVGIVVVGR

SEQ ID NO: 74035 - protein, 9 aa, synthetic construct
  source 1..9: note = Seed: VVGAVGVGK (KRAS G12V)
MVGKVAVGR

SEQ ID NO: 74036 - protein, 9 aa, synthetic construct
  source 1..9: note = Seed: VVGAVGVGK (KRAS G12V)
MVGKVAVGY

SEQ ID NO: 74037 - protein, 9 aa, synthetic construct
  source 1..9: note = Seed: VVGAVGVGK (KRAS G12V)
MVGKVGVGR

SEQ ID NO: 74038 - protein, 9 aa, synthetic construct
  source 1..9: note = Seed: VVGAVGVGK (KRAS G12V)
MVGKVHVGR

SEQ ID NO: 74039 - protein, 9 aa, synthetic construct
  source 1..9: note = Seed: VVGAVGVGK (KRAS G12V)
MVGKVHVGY

SEQ ID NO: 74040 - protein, 9 aa, synthetic construct
  source 1..9: note = Seed: VVGAVGVGK (KRAS G12V)
MVGKVIVGR

SEQ ID NO: 74041 - protein, 9 aa, synthetic construct
  source 1..9: note = Seed: VVGAVGVGK (KRAS G12V)
MVGKVKVGA

SEQ ID NO: 74042 - protein, 9 aa, synthetic construct
  source 1..9: note = Seed: VVGAVGVGK (KRAS G12V)
MVGKVKVGC

SEQ ID NO: 74043 - protein, 9 aa, synthetic construct
  source 1..9: note = Seed: VVGAVGVGK (KRAS G12V)
MVGKVKVGD

SEQ ID NO: 74044 - protein, 9 aa, synthetic construct
  source 1..9: note = Seed: VVGAVGVGK (KRAS G12V)
MVGKVKVGE

SEQ ID NO: 74045 - protein, 9 aa, synthetic construct
  source 1..9: note = Seed: VVGAVGVGK (KRAS G12V)
MVGKVKVGF

SEQ ID NO: 74046 - protein, 9 aa, synthetic construct
  source 1..9: note = Seed: VVGAVGVGK (KRAS G12V)
MVGKVKVGG

SEQ ID NO: 74047 - protein, 9 aa, synthetic construct
  source 1..9: note = Seed: VVGAVGVGK (KRAS G12V)
MVGKVKVGH

SEQ ID NO: 74048 - protein, 9 aa, synthetic construct
  source 1..9: note = Seed: VVGAVGVGK (KRAS G12V)
MVGKVKVGI

SEQ ID NO: 74049 - protein, 9 aa, synthetic construct
  source 1..9: note = Seed: VVGAVGVGK (KRAS G12V)
MVGKVKVGK

SEQ ID NO: 74050 - protein, 9 aa, synthetic construct
  source 1..9: note = Seed: VVGAVGVGK (KRAS G12V)
MVGKVKVGL

SEQ ID NO: 74051 - protein, 9 aa, synthetic construct
  source 1..9: note = Seed: VVGAVGVGK (KRAS G12V)
MVGKVKVGM

SEQ ID NO: 74052 - protein, 9 aa, synthetic construct
  source 1..9: note = Seed: VVGAVGVGK (KRAS G12V)
MVGKVKVGN

SEQ ID NO: 74053 - protein, 9 aa, synthetic construct
  source 1..9: note = Seed: VVGAVGVGK (KRAS G12V)
MVGKVKVGQ

SEQ ID NO: 74054 - protein, 9 aa, synthetic construct
  source 1..9: note = Seed: VVGAVGVGK (KRAS G12V)
MVGKVKVGR

SEQ ID NO: 74055 - protein, 9 aa, synthetic construct
  source 1..9: note = Seed: VVGAVGVGK (KRAS G12V)
MVGKVKVGS

SEQ ID NO: 74056 - protein, 9 aa, synthetic construct
  source 1..9: note = Seed: VVGAVGVGK (KRAS G12V)
MVGKVKVGT

SEQ ID NO: 74057 - protein, 9 aa, synthetic construct
  source 1..9: note = Seed: VVGAVGVGK (KRAS G12V)
MVGKVKVGV

SEQ ID NO: 74058 - protein, 9 aa, synthetic construct
  source 1..9: note = Seed: VVGAVGVGK (KRAS G12V)
MVGKVKVGY

SEQ ID NO: 74059 - protein, 9 aa, synthetic construct
  source 1..9: note = Seed: VVGAVGVGK (KRAS G12V)
MVGKVNVGR

SEQ ID NO: 74060 - protein, 9 aa, synthetic construct
  source 1..9: note = Seed: VVGAVGVGK (KRAS G12V)
MVGKVNVGY

SEQ ID NO: 74061 - protein, 9 aa, synthetic construct
  source 1..9: note = Seed: VVGAVGVGK (KRAS G12V)
MVGKVPVGR

SEQ ID NO: 74062 - protein, 9 aa, synthetic construct
  source 1..9: note = Seed: VVGAVGVGK (KRAS G12V)
MVGKVQVGR

SEQ ID NO: 74063 - protein, 9 aa, synthetic construct
  source 1..9: note = Seed: VVGAVGVGK (KRAS G12V)
MVGKVQVGY

SEQ ID NO: 74064 - protein, 9 aa, synthetic construct
  source 1..9: note = Seed: VVGAVGVGK (KRAS G12V)
MVGKVRVGA

SEQ ID NO: 74065 - protein, 9 aa, synthetic construct
  source 1..9: note = Seed: VVGAVGVGK (KRAS G12V)
MVGKVRVGC

SEQ ID NO: 74066 - protein, 9 aa, synthetic construct
  source 1..9: note = Seed: VVGAVGVGK (KRAS G12V)
MVGKVRVGD

SEQ ID NO: 74067 - protein, 9 aa, synthetic construct
  source 1..9: note = Seed: VVGAVGVGK (KRAS G12V)
MVGKVRVGE

SEQ ID NO: 74068 - protein, 9 aa, synthetic construct
  source 1..9: note = Seed: VVGAVGVGK (KRAS G12V)
MVGKVRVGF

SEQ ID NO: 74069 - protein, 9 aa, synthetic construct
  source 1..9: note = Seed: VVGAVGVGK (KRAS G12V)
MVGKVRVGG

SEQ ID NO: 74070 - protein, 9 aa, synthetic construct
  source 1..9: note = Seed: VVGAVGVGK (KRAS G12V)
MVGKVRVGH

SEQ ID NO: 74071 - protein, 9 aa, synthetic construct
  source 1..9: note = Seed: VVGAVGVGK (KRAS G12V)
MVGKVRVGI

SEQ ID NO: 74072 - protein, 9 aa, synthetic construct
  source 1..9: note = Seed: VVGAVGVGK (KRAS G12V)
MVGKVRVGK

SEQ ID NO: 74073 - protein, 9 aa, synthetic construct
  source 1..9: note = Seed: VVGAVGVGK (KRAS G12V)
MVGKVRVGL

SEQ ID NO: 74074 - protein, 9 aa, synthetic construct
  source 1..9: note = Seed: VVGAVGVGK (KRAS G12V)
MVGKVRVGM

SEQ ID NO: 74075 - protein, 9 aa, synthetic construct
  source 1..9: note = Seed: VVGAVGVGK (KRAS G12V)
MVGKVRVGN

SEQ ID NO: 74076 - protein, 9 aa, synthetic construct
  source 1..9: note = Seed: VVGAVGVGK (KRAS G12V)
MVGKVRVGQ

SEQ ID NO: 74077 - protein, 9 aa, synthetic construct
  source 1..9: note = Seed: VVGAVGVGK (KRAS G12V)
MVGKVRVGR

SEQ ID NO: 74078 - protein, 9 aa, synthetic construct
  source 1..9: note = Seed: VVGAVGVGK (KRAS G12V)
MVGKVRVGS

SEQ ID NO: 74079 - protein, 9 aa, synthetic construct
  source 1..9: note = Seed: VVGAVGVGK (KRAS G12V)
MVGKVRVGT

SEQ ID NO: 74080 - protein, 9 aa, synthetic construct
  source 1..9: note = Seed: VVGAVGVGK (KRAS G12V)
MVGKVRVGV

SEQ ID NO: 74081 - protein, 9 aa, synthetic construct
  source 1..9: note = Seed: VVGAVGVGK (KRAS G12V)
MVGKVRVGY

SEQ ID NO: 74082 - protein, 9 aa, synthetic construct
  source 1..9: note = Seed: VVGAVGVGK (KRAS G12V)
MVGKVSVGR

SEQ ID NO: 74083 - protein, 9 aa, synthetic construct
  source 1..9: note = Seed: VVGAVGVGK (KRAS G12V)
MVGKVSVGY

SEQ ID NO: 74084 - protein, 9 aa, synthetic construct
  source 1..9: note = Seed: VVGAVGVGK (KRAS G12V)
MVGKVTVGK

SEQ ID NO: 74085 - protein, 9 aa, synthetic construct
  source 1..9: note = Seed: VVGAVGVGK (KRAS G12V)
MVGKVTVGR

SEQ ID NO: 74086 - protein, 9 aa, synthetic construct
  source 1..9: note = Seed: VVGAVGVGK (KRAS G12V)
MVGKVTVGY

SEQ ID NO: 74087 - protein, 9 aa, synthetic construct
  source 1..9: note = Seed: VVGAVGVGK (KRAS G12V)
MVGKVVVGR

SEQ ID NO: 74088 - protein, 9 aa, synthetic construct
  source 1..9: note = Seed: VVGAVGVGK (KRAS G12V)
MVGLVAVGH

SEQ ID NO: 74089 - protein, 9 aa, synthetic construct
  source 1..9: note = Seed: VVGAVGVGK (KRAS G12V)
MVGLVAVGK

SEQ ID NO: 74090 - protein, 9 aa, synthetic construct
  source 1..9: note = Seed: VVGAVGVGK (KRAS G12V)
MVGLVAVGL

SEQ ID NO: 74091 - protein, 9 aa, synthetic construct
  source 1..9: note = Seed: VVGAVGVGK (KRAS G12V)
MVGLVAVGM

SEQ ID NO: 74092 - protein, 9 aa, synthetic construct
  source 1..9: note = Seed: VVGAVGVGK (KRAS G12V)
MVGLVAVGR

SEQ ID NO: 74093 - protein, 9 aa, synthetic construct
  source 1..9: note = Seed: VVGAVGVGK (KRAS G12V)
MVGLVAVGT

SEQ ID NO: 74094 - protein, 9 aa, synthetic construct
  source 1..9: note = Seed: VVGAVGVGK (KRAS G12V)
MVGLVAVGV

SEQ ID NO: 74095 - protein, 9 aa, synthetic construct
  source 1..9: note = Seed: VVGAVGVGK (KRAS G12V)
MVGLVGVGA

SEQ ID NO: 74096 - protein, 9 aa, synthetic construct
  source 1..9: note = Seed: VVGAVGVGK (KRAS G12V)
MVGLVGVGG

SEQ ID NO: 74097 - protein, 9 aa, synthetic construct
  source 1..9: note = Seed: VVGAVGVGK (KRAS G12V)
MVGLVGVGH

SEQ ID NO: 74098 - protein, 9 aa, synthetic construct
  source 1..9: note = Seed: VVGAVGVGK (KRAS G12V)
MVGLVGVGI

SEQ ID NO: 74099 - protein, 9 aa, synthetic construct
  source 1..9: note = Seed: VVGAVGVGK (KRAS G12V)
MVGLVGVGL

SEQ ID NO: 74100 - protein, 9 aa, synthetic construct
  source 1..9: note = Seed: VVGAVGVGK (KRAS G12V)
MVGLVGVGM

SEQ ID NO: 74101 - protein, 9 aa, synthetic construct
  source 1..9: note = Seed: VVGAVGVGK (KRAS G12V)
MVGLVGVGN

SEQ ID NO: 74102 - protein, 9 aa, synthetic construct
  source 1..9: note = Seed: VVGAVGVGK (KRAS G12V)
MVGLVGVGS

SEQ ID NO: 74103 - protein, 9 aa, synthetic construct
  source 1..9: note = Seed: VVGAVGVGK (KRAS G12V)
MVGLVGVGT

SEQ ID NO: 74104 - protein, 9 aa, synthetic construct
  source 1..9: note = Seed: VVGAVGVGK (KRAS G12V)
MVGLVGVGV

SEQ ID NO: 74105 - protein, 9 aa, synthetic construct
  source 1..9: note = Seed: VVGAVGVGK (KRAS G12V)
MVGLVHVGK

SEQ ID NO: 74106 - protein, 9 aa, synthetic construct
  source 1..9: note = Seed: VVGAVGVGK (KRAS G12V)
MVGLVHVGR

SEQ ID NO: 74107 - protein, 9 aa, synthetic construct
  source 1..9: note = Seed: VVGAVGVGK (KRAS G12V)
MVGLVKVGA

SEQ ID NO: 74108 - protein, 9 aa, synthetic construct
  source 1..9: note = Seed: VVGAVGVGK (KRAS G12V)
MVGLVKVGG

SEQ ID NO: 74109 - protein, 9 aa, synthetic construct
  source 1..9: note = Seed: VVGAVGVGK (KRAS G12V)
MVGLVKVGH

SEQ ID NO: 74110 - protein, 9 aa, synthetic construct
  source 1..9: note = Seed: VVGAVGVGK (KRAS G12V)
MVGLVKVGK

SEQ ID NO: 74111 - protein, 9 aa, synthetic construct
  source 1..9: note = Seed: VVGAVGVGK (KRAS G12V)
MVGLVKVGM

SEQ ID NO: 74112 - protein, 9 aa, synthetic construct
  source 1..9: note = Seed: VVGAVGVGK (KRAS G12V)
MVGLVKVGN

SEQ ID NO: 74113 - protein, 9 aa, synthetic construct
  source 1..9: note = Seed: VVGAVGVGK (KRAS G12V)
MVGLVKVGP

SEQ ID NO: 74114 - protein, 9 aa, synthetic construct
  source 1..9: note = Seed: VVGAVGVGK (KRAS G12V)
MVGLVKVGQ

SEQ ID NO: 74115 - protein, 9 aa, synthetic construct
  source 1..9: note = Seed: VVGAVGVGK (KRAS G12V)
MVGLVKVGR

SEQ ID NO: 74116 - protein, 9 aa, synthetic construct
  source 1..9: note = Seed: VVGAVGVGK (KRAS G12V)
MVGLVKVGS

SEQ ID NO: 74117 - protein, 9 aa, synthetic construct
  source 1..9: note = Seed: VVGAVGVGK (KRAS G12V)
MVGLVKVGT

SEQ ID NO: 74118 - protein, 9 aa, synthetic construct
  source 1..9: note = Seed: VVGAVGVGK (KRAS G12V)
MVGLVKVGY

SEQ ID NO: 74119 - protein, 9 aa, synthetic construct
  source 1..9: note = Seed: VVGAVGVGK (KRAS G12V)
MVGLVNVGT

SEQ ID NO: 74120 - protein, 9 aa, synthetic construct
  source 1..9: note = Seed: VVGAVGVGK (KRAS G12V)
MVGLVNVGV

SEQ ID NO: 74121 - protein, 9 aa, synthetic construct
  source 1..9: note = Seed: VVGAVGVGK (KRAS G12V)
MVGLVPVGA

SEQ ID NO: 74122 - protein, 9 aa, synthetic construct
  source 1..9: note = Seed: VVGAVGVGK (KRAS G12V)
MVGLVPVGH

SEQ ID NO: 74123 - protein, 9 aa, synthetic construct
  source 1..9: note = Seed: VVGAVGVGK (KRAS G12V)
MVGLVPVGI

SEQ ID NO: 74124 - protein, 9 aa, synthetic construct
  source 1..9: note = Seed: VVGAVGVGK (KRAS G12V)
MVGLVPVGK

SEQ ID NO: 74125 - protein, 9 aa, synthetic construct
  source 1..9: note = Seed: VVGAVGVGK (KRAS G12V)
MVGLVPVGL

SEQ ID NO: 74126 - protein, 9 aa, synthetic construct
  source 1..9: note = Seed: VVGAVGVGK (KRAS G12V)
MVGLVPVGM

SEQ ID NO: 74127 - protein, 9 aa, synthetic construct
  source 1..9: note = Seed: VVGAVGVGK (KRAS G12V)
MVGLVPVGN

SEQ ID NO: 74128 - protein, 9 aa, synthetic construct
  source 1..9: note = Seed: VVGAVGVGK (KRAS G12V)
MVGLVPVGR

SEQ ID NO: 74129 - protein, 9 aa, synthetic construct
  source 1..9: note = Seed: VVGAVGVGK (KRAS G12V)
MVGLVPVGS

SEQ ID NO: 74130 - protein, 9 aa, synthetic construct
  source 1..9: note = Seed: VVGAVGVGK (KRAS G12V)
MVGLVPVGT

SEQ ID NO: 74131 - protein, 9 aa, synthetic construct
  source 1..9: note = Seed: VVGAVGVGK (KRAS G12V)
MVGLVPVGV

SEQ ID NO: 74132 - protein, 9 aa, synthetic construct
  source 1..9: note = Seed: VVGAVGVGK (KRAS G12V)
MVGLVPVGY

SEQ ID NO: 74133 - protein, 9 aa, synthetic construct
  source 1..9: note = Seed: VVGAVGVGK (KRAS G12V)
MVGLVRVGA

SEQ ID NO: 74134 - protein, 9 aa, synthetic construct
  source 1..9: note = Seed: VVGAVGVGK (KRAS G12V)
MVGLVRVGE

SEQ ID NO: 74135 - protein, 9 aa, synthetic construct
  source 1..9: note = Seed: VVGAVGVGK (KRAS G12V)
MVGLVRVGG

SEQ ID NO: 74136 - protein, 9 aa, synthetic construct
  source 1..9: note = Seed: VVGAVGVGK (KRAS G12V)
MVGLVRVGH

SEQ ID NO: 74137 - protein, 9 aa, synthetic construct
  source 1..9: note = Seed: VVGAVGVGK (KRAS G12V)
MVGLVRVGK

SEQ ID NO: 74138 - protein, 9 aa, synthetic construct
  source 1..9: note = Seed: VVGAVGVGK (KRAS G12V)
MVGLVRVGM

SEQ ID NO: 74139 - protein, 9 aa, synthetic construct
  source 1..9: note = Seed: VVGAVGVGK (KRAS G12V)
MVGLVRVGN

SEQ ID NO: 74140 - protein, 9 aa, synthetic construct
  source 1..9: note = Seed: VVGAVGVGK (KRAS G12V)
MVGLVRVGP

SEQ ID NO: 74141 - protein, 9 aa, synthetic construct
  source 1..9: note = Seed: VVGAVGVGK (KRAS G12V)
MVGLVRVGQ

SEQ ID NO: 74142 - protein, 9 aa, synthetic construct
  source 1..9: note = Seed: VVGAVGVGK (KRAS G12V)
MVGLVRVGR

SEQ ID NO: 74143 - protein, 9 aa, synthetic construct
  source 1..9: note = Seed: VVGAVGVGK (KRAS G12V)
MVGLVRVGS

SEQ ID NO: 74144 - protein, 9 aa, synthetic construct
  source 1..9: note = Seed: VVGAVGVGK (KRAS G12V)
MVGLVRVGT

SEQ ID NO: 74145 - protein, 9 aa, synthetic construct
  source 1..9: note = Seed: VVGAVGVGK (KRAS G12V)
MVGLVRVGY

SEQ ID NO: 74146 - protein, 9 aa, synthetic construct
  source 1..9: note = Seed: VVGAVGVGK (KRAS G12V)
MVGLVSVGL

SEQ ID NO: 74147 - protein, 9 aa, synthetic construct
  source 1..9: note = Seed: VVGAVGVGK (KRAS G12V)
MVGLVSVGM

SEQ ID NO: 74148 - protein, 9 aa, synthetic construct
  source 1..9: note = Seed: VVGAVGVGK (KRAS G12V)
MVGLVSVGR

SEQ ID NO: 74149 - protein, 9 aa, synthetic construct
  source 1..9: note = Seed: VVGAVGVGK (KRAS G12V)
MVGLVSVGT

SEQ ID NO: 74150 - protein, 9 aa, synthetic construct
  source 1..9: note = Seed: VVGAVGVGK (KRAS G12V)
MVGLVSVGV

SEQ ID NO: 74151 - protein, 9 aa, synthetic construct
  source 1..9: note = Seed: VVGAVGVGK (KRAS G12V)
MVGLVTVGR

SEQ ID NO: 74152 - protein, 9 aa, synthetic construct
  source 1..9: note = Seed: VVGAVGVGK (KRAS G12V)
MVGLVVVGR

SEQ ID NO: 74153 - protein, 9 aa, synthetic construct
  source 1..9: note = Seed: VVGAVGVGK (KRAS G12V)
MVGMVAVGA

SEQ ID NO: 74154 - protein, 9 aa, synthetic construct
  source 1..9: note = Seed: VVGAVGVGK (KRAS G12V)
MVGMVAVGH

SEQ ID NO: 74155 - protein, 9 aa, synthetic construct
  source 1..9: note = Seed: VVGAVGVGK (KRAS G12V)
MVGMVAVGI

SEQ ID NO: 74156 - protein, 9 aa, synthetic construct
  source 1..9: note = Seed: VVGAVGVGK (KRAS G12V)
MVGMVAVGK

SEQ ID NO: 74157 - protein, 9 aa, synthetic construct
  source 1..9: note = Seed: VVGAVGVGK (KRAS G12V)
MVGMVAVGL

SEQ ID NO: 74158 - protein, 9 aa, synthetic construct
  source 1..9: note = Seed: VVGAVGVGK (KRAS G12V)
MVGMVAVGM

SEQ ID NO: 74159 - protein, 9 aa, synthetic construct
  source 1..9: note = Seed: VVGAVGVGK (KRAS G12V)
MVGMVAVGN

SEQ ID NO: 74160 - protein, 9 aa, synthetic construct
  source 1..9: note = Seed: VVGAVGVGK (KRAS G12V)
MVGMVAVGR

SEQ ID NO: 74161 - protein, 9 aa, synthetic construct
  source 1..9: note = Seed: VVGAVGVGK (KRAS G12V)
MVGMVAVGS

SEQ ID NO: 74162 - protein, 9 aa, synthetic construct
  source 1..9: note = Seed: VVGAVGVGK (KRAS G12V)
MVGMVAVGT

SEQ ID NO: 74163 - protein, 9 aa, synthetic construct
  source 1..9: note = Seed: VVGAVGVGK (KRAS G12V)
MVGMVAVGV

SEQ ID NO: 74164 - protein, 9 aa, synthetic construct
  source 1..9: note = Seed: VVGAVGVGK (KRAS G12V)
MVGMVGVGA

SEQ ID NO: 74165 - protein, 9 aa, synthetic construct
  source 1..9: note = Seed: VVGAVGVGK (KRAS G12V)
MVGMVGVGG

SEQ ID NO: 74166 - protein, 9 aa, synthetic construct
  source 1..9: note = Seed: VVGAVGVGK (KRAS G12V)
MVGMVGVGH

SEQ ID NO: 74167 - protein, 9 aa, synthetic construct
  source 1..9: note = Seed: VVGAVGVGK (KRAS G12V)
MVGMVGVGI

SEQ ID NO: 74168 - protein, 9 aa, synthetic construct
  source 1..9: note = Seed: VVGAVGVGK (KRAS G12V)
MVGMVGVGL

SEQ ID NO: 74169 - protein, 9 aa, synthetic construct
  source 1..9: note = Seed: VVGAVGVGK (KRAS G12V)
MVGMVGVGM

SEQ ID NO: 74170 - protein, 9 aa, synthetic construct
  source 1..9: note = Seed: VVGAVGVGK (KRAS G12V)
MVGMVGVGN

SEQ ID NO: 74171 - protein, 9 aa, synthetic construct
  source 1..9: note = Seed: VVGAVGVGK (KRAS G12V)
MVGMVGVGS

SEQ ID NO: 74172 - protein, 9 aa, synthetic construct
  source 1..9: note = Seed: VVGAVGVGK (KRAS G12V)
MVGMVGVGT

SEQ ID NO: 74173 - protein, 9 aa, synthetic construct
  source 1..9: note = Seed: VVGAVGVGK (KRAS G12V)
MVGMVGVGV

SEQ ID NO: 74174 - protein, 9 aa, synthetic construct
  source 1..9: note = Seed: VVGAVGVGK (KRAS G12V)
MVGMVHVGK

SEQ ID NO: 74175 - protein, 9 aa, synthetic construct
  source 1..9: note = Seed: VVGAVGVGK (KRAS G12V)
MVGMVHVGR

SEQ ID NO: 74176 - protein, 9 aa, synthetic construct
  source 1..9: note = Seed: VVGAVGVGK (KRAS G12V)
MVGMVIVGR

SEQ ID NO: 74177 - protein, 9 aa, synthetic construct
  source 1..9: note = Seed: VVGAVGVGK (KRAS G12V)
MVGMVKVGA

SEQ ID NO: 74178 - protein, 9 aa, synthetic construct
  source 1..9: note = Seed: VVGAVGVGK (KRAS G12V)
MVGMVKVGG

SEQ ID NO: 74179 - protein, 9 aa, synthetic construct
  source 1..9: note = Seed: VVGAVGVGK (KRAS G12V)
MVGMVKVGH

SEQ ID NO: 74180 - protein, 9 aa, synthetic construct
  source 1..9: note = Seed: VVGAVGVGK (KRAS G12V)
MVGMVKVGK

SEQ ID NO: 74181 - protein, 9 aa, synthetic construct
  source 1..9: note = Seed: VVGAVGVGK (KRAS G12V)
MVGMVKVGL

SEQ ID NO: 74182 - protein, 9 aa, synthetic construct
  source 1..9: note = Seed: VVGAVGVGK (KRAS G12V)
MVGMVKVGM

SEQ ID NO: 74183 - protein, 9 aa, synthetic construct
  source 1..9: note = Seed: VVGAVGVGK (KRAS G12V)
MVGMVKVGN

SEQ ID NO: 74184 - protein, 9 aa, synthetic construct
  source 1..9: note = Seed: VVGAVGVGK (KRAS G12V)
MVGMVKVGP

SEQ ID NO: 74185 - protein, 9 aa, synthetic construct
  source 1..9: note = Seed: VVGAVGVGK (KRAS G12V)
MVGMVKVGQ

SEQ ID NO: 74186 - protein, 9 aa, synthetic construct
  source 1..9: note = Seed: VVGAVGVGK (KRAS G12V)
MVGMVKVGR

SEQ ID NO: 74187 - protein, 9 aa, synthetic construct
  source 1..9: note = Seed: VVGAVGVGK (KRAS G12V)
MVGMVKVGS

SEQ ID NO: 74188 - protein, 9 aa, synthetic construct
  source 1..9: note = Seed: VVGAVGVGK (KRAS G12V)
MVGMVKVGT

SEQ ID NO: 74189 - protein, 9 aa, synthetic construct
  source 1..9: note = Seed: VVGAVGVGK (KRAS G12V)
MVGMVKVGV

SEQ ID NO: 74190 - protein, 9 aa, synthetic construct
  source 1..9: note = Seed: VVGAVGVGK (KRAS G12V)
MVGMVKVGY

SEQ ID NO: 74191 - protein, 9 aa, synthetic construct
  source 1..9: note = Seed: VVGAVGVGK (KRAS G12V)
MVGMVMVGR

SEQ ID NO: 74192 - protein, 9 aa, synthetic construct
  source 1..9: note = Seed: VVGAVGVGK (KRAS G12V)
MVGMVNVGA

SEQ ID NO: 74193 - protein, 9 aa, synthetic construct
  source 1..9: note = Seed: VVGAVGVGK (KRAS G12V)
MVGMVNVGL

SEQ ID NO: 74194 - protein, 9 aa, synthetic construct
  source 1..9: note = Seed: VVGAVGVGK (KRAS G12V)
MVGMVNVGS

SEQ ID NO: 74195 - protein, 9 aa, synthetic construct
  source 1..9: note = Seed: VVGAVGVGK (KRAS G12V)
MVGMVNVGT

SEQ ID NO: 74196 - protein, 9 aa, synthetic construct
  source 1..9: note = Seed: VVGAVGVGK (KRAS G12V)
MVGMVNVGV

SEQ ID NO: 74197 - protein, 9 aa, synthetic construct
  source 1..9: note = Seed: VVGAVGVGK (KRAS G12V)
MVGMVPVGA

SEQ ID NO: 74198 - protein, 9 aa, synthetic construct
  source 1..9: note = Seed: VVGAVGVGK (KRAS G12V)
MVGMVPVGG

SEQ ID NO: 74199 - protein, 9 aa, synthetic construct
  source 1..9: note = Seed: VVGAVGVGK (KRAS G12V)
MVGMVPVGH

SEQ ID NO: 74200 - protein, 9 aa, synthetic construct
  source 1..9: note = Seed: VVGAVGVGK (KRAS G12V)
MVGMVPVGI

SEQ ID NO: 74201 - protein, 9 aa, synthetic construct
  source 1..9: note = Seed: VVGAVGVGK (KRAS G12V)
MVGMVPVGK

SEQ ID NO: 74202 - protein, 9 aa, synthetic construct
  source 1..9: note = Seed: VVGAVGVGK (KRAS G12V)
MVGMVPVGL

SEQ ID NO: 74203 - protein, 9 aa, synthetic construct
  source 1..9: note = Seed: VVGAVGVGK (KRAS G12V)
MVGMVPVGM

SEQ ID NO: 74204 - protein, 9 aa, synthetic construct
  source 1..9: note = Seed: VVGAVGVGK (KRAS G12V)
MVGMVPVGN

SEQ ID NO: 74205 - protein, 9 aa, synthetic construct
  source 1..9: note = Seed: VVGAVGVGK (KRAS G12V)
MVGMVPVGR

SEQ ID NO: 74206 - protein, 9 aa, synthetic construct
  source 1..9: note = Seed: VVGAVGVGK (KRAS G12V)
MVGMVPVGS

SEQ ID NO: 74207 - protein, 9 aa, synthetic construct
  source 1..9: note = Seed: VVGAVGVGK (KRAS G12V)
MVGMVPVGT

SEQ ID NO: 74208 - protein, 9 aa, synthetic construct
  source 1..9: note = Seed: VVGAVGVGK (KRAS G12V)
MVGMVPVGV

SEQ ID NO: 74209 - protein, 9 aa, synthetic construct
  source 1..9: note = Seed: VVGAVGVGK (KRAS G12V)
MVGMVPVGY

SEQ ID NO: 74210 - protein, 9 aa, synthetic construct
  source 1..9: note = Seed: VVGAVGVGK (KRAS G12V)
MVGMVRVGA

SEQ ID NO: 74211 - protein, 9 aa, synthetic construct
  source 1..9: note = Seed: VVGAVGVGK (KRAS G12V)
MVGMVRVGE

SEQ ID NO: 74212 - protein, 9 aa, synthetic construct
  source 1..9: note = Seed: VVGAVGVGK (KRAS G12V)
MVGMVRVGG

SEQ ID NO: 74213 - protein, 9 aa, synthetic construct
  source 1..9: note = Seed: VVGAVGVGK (KRAS G12V)
MVGMVRVGH

SEQ ID NO: 74214 - protein, 9 aa, synthetic construct
  source 1..9: note = Seed: VVGAVGVGK (KRAS G12V)
MVGMVRVGK

SEQ ID NO: 74215 - protein, 9 aa, synthetic construct
  source 1..9: note = Seed: VVGAVGVGK (KRAS G12V)
MVGMVRVGM

SEQ ID NO: 74216 - protein, 9 aa, synthetic construct
  source 1..9: note = Seed: VVGAVGVGK (KRAS G12V)
MVGMVRVGN

SEQ ID NO: 74217 - protein, 9 aa, synthetic construct
  source 1..9: note = Seed: VVGAVGVGK (KRAS G12V)
MVGMVRVGP

SEQ ID NO: 74218 - protein, 9 aa, synthetic construct
  source 1..9: note = Seed: VVGAVGVGK (KRAS G12V)
MVGMVRVGQ

SEQ ID NO: 74219 - protein, 9 aa, synthetic construct
  source 1..9: note = Seed: VVGAVGVGK (KRAS G12V)
MVGMVRVGR

SEQ ID NO: 74220 - protein, 9 aa, synthetic construct
  source 1..9: note = Seed: VVGAVGVGK (KRAS G12V)
MVGMVRVGS

SEQ ID NO: 74221 - protein, 9 aa, synthetic construct
  source 1..9: note = Seed: VVGAVGVGK (KRAS G12V)
MVGMVRVGT

SEQ ID NO: 74222 - protein, 9 aa, synthetic construct
  source 1..9: note = Seed: VVGAVGVGK (KRAS G12V)
MVGMVRVGV

SEQ ID NO: 74223 - protein, 9 aa, synthetic construct
  source 1..9: note = Seed: VVGAVGVGK (KRAS G12V)
MVGMVRVGY

SEQ ID NO: 74224 - protein, 9 aa, synthetic construct
  source 1..9: note = Seed: VVGAVGVGK (KRAS G12V)
MVGMVSVGI

SEQ ID NO: 74225 - protein, 9 aa, synthetic construct
  source 1..9: note = Seed: VVGAVGVGK (KRAS G12V)
MVGMVSVGK

SEQ ID NO: 74226 - protein, 9 aa, synthetic construct
  source 1..9: note = Seed: VVGAVGVGK (KRAS G12V)
MVGMVSVGL

SEQ ID NO: 74227 - protein, 9 aa, synthetic construct
  source 1..9: note = Seed: VVGAVGVGK (KRAS G12V)
MVGMVSVGM

SEQ ID NO: 74228 - protein, 9 aa, synthetic construct
  source 1..9: note = Seed: VVGAVGVGK (KRAS G12V)
MVGMVSVGR

SEQ ID NO: 74229 - protein, 9 aa, synthetic construct
  source 1..9: note = Seed: VVGAVGVGK (KRAS G12V)
MVGMVSVGT

SEQ ID NO: 74230 - protein, 9 aa, synthetic construct
  source 1..9: note = Seed: VVGAVGVGK (KRAS G12V)
MVGMVSVGV

SEQ ID NO: 74231 - protein, 9 aa, synthetic construct
  source 1..9: note = Seed: VVGAVGVGK (KRAS G12V)
MVGMVTVGR

SEQ ID NO: 74232 - protein, 9 aa, synthetic construct
  source 1..9: note = Seed: VVGAVGVGK (KRAS G12V)
MVGMVVVGR

SEQ ID NO: 74233 - protein, 9 aa, synthetic construct
  source 1..9: note = Seed: VVGAVGVGK (KRAS G12V)
MVGNVAVGL

SEQ ID NO: 74234 - protein, 9 aa, synthetic construct
  source 1..9: note = Seed: VVGAVGVGK (KRAS G12V)
MVGNVAVGR

SEQ ID NO: 74235 - protein, 9 aa, synthetic construct
  source 1..9: note = Seed: VVGAVGVGK (KRAS G12V)
MVGNVAVGV

SEQ ID NO: 74236 - protein, 9 aa, synthetic construct
  source 1..9: note = Seed: VVGAVGVGK (KRAS G12V)
MVGNVAVGY

SEQ ID NO: 74237 - protein, 9 aa, synthetic construct
  source 1..9: note = Seed: VVGAVGVGK (KRAS G12V)
MVGNVHVGR

SEQ ID NO: 74238 - protein, 9 aa, synthetic construct
  source 1..9: note = Seed: VVGAVGVGK (KRAS G12V)
MVGNVIVGR

SEQ ID NO: 74239 - protein, 9 aa, synthetic construct
  source 1..9: note = Seed: VVGAVGVGK (KRAS G12V)
MVGNVKVGA

SEQ ID NO: 74240 - protein, 9 aa, synthetic construct
  source 1..9: note = Seed: VVGAVGVGK (KRAS G12V)
MVGNVKVGF

SEQ ID NO: 74241 - protein, 9 aa, synthetic construct
  source 1..9: note = Seed: VVGAVGVGK (KRAS G12V)
MVGNVKVGH

SEQ ID NO: 74242 - protein, 9 aa, synthetic construct
  source 1..9: note = Seed: VVGAVGVGK (KRAS G12V)
MVGNVKVGI

SEQ ID NO: 74243 - protein, 9 aa, synthetic construct
  source 1..9: note = Seed: VVGAVGVGK (KRAS G12V)
MVGNVKVGK

SEQ ID NO: 74244 - protein, 9 aa, synthetic construct
  source 1..9: note = Seed: VVGAVGVGK (KRAS G12V)
MVGNVKVGL

SEQ ID NO: 74245 - protein, 9 aa, synthetic construct
  source 1..9: note = Seed: VVGAVGVGK (KRAS G12V)
MVGNVKVGM

SEQ ID NO: 74246 - protein, 9 aa, synthetic construct
  source 1..9: note = Seed: VVGAVGVGK (KRAS G12V)
MVGNVKVGR

SEQ ID NO: 74247 - protein, 9 aa, synthetic construct
  source 1..9: note = Seed: VVGAVGVGK (KRAS G12V)
MVGNVKVGV

SEQ ID NO: 74248 - protein, 9 aa, synthetic construct
  source 1..9: note = Seed: VVGAVGVGK (KRAS G12V)
MVGNVKVGY

SEQ ID NO: 74249 - protein, 9 aa, synthetic construct
  source 1..9: note = Seed: VVGAVGVGK (KRAS G12V)
MVGNVMVGR

SEQ ID NO: 74250 - protein, 9 aa, synthetic construct
  source 1..9: note = Seed: VVGAVGVGK (KRAS G12V)
MVGNVPVGI

SEQ ID NO: 74251 - protein, 9 aa, synthetic construct
  source 1..9: note = Seed: VVGAVGVGK (KRAS G12V)
MVGNVPVGL

SEQ ID NO: 74252 - protein, 9 aa, synthetic construct
  source 1..9: note = Seed: VVGAVGVGK (KRAS G12V)
MVGNVPVGR

SEQ ID NO: 74253 - protein, 9 aa, synthetic construct
  source 1..9: note = Seed: VVGAVGVGK (KRAS G12V)
MVGNVPVGV

SEQ ID NO: 74254 - protein, 9 aa, synthetic construct
  source 1..9: note = Seed: VVGAVGVGK (KRAS G12V)
MVGNVPVGY

SEQ ID NO: 74255 - protein, 9 aa, synthetic construct
  source 1..9: note = Seed: VVGAVGVGK (KRAS G12V)
MVGNVRVGA

SEQ ID NO: 74256 - protein, 9 aa, synthetic construct
  source 1..9: note = Seed: VVGAVGVGK (KRAS G12V)
MVGNVRVGF

SEQ ID NO: 74257 - protein, 9 aa, synthetic construct
  source 1..9: note = Seed: VVGAVGVGK (KRAS G12V)
MVGNVRVGG

SEQ ID NO: 74258 - protein, 9 aa, synthetic construct
  source 1..9: note = Seed: VVGAVGVGK (KRAS G12V)
MVGNVRVGH

SEQ ID NO: 74259 - protein, 9 aa, synthetic construct
  source 1..9: note = Seed: VVGAVGVGK (KRAS G12V)
MVGNVRVGI

SEQ ID NO: 74260 - protein, 9 aa, synthetic construct
  source 1..9: note = Seed: VVGAVGVGK (KRAS G12V)
MVGNVRVGK

SEQ ID NO: 74261 - protein, 9 aa, synthetic construct
  source 1..9: note = Seed: VVGAVGVGK (KRAS G12V)
MVGNVRVGL

SEQ ID NO: 74262 - protein, 9 aa, synthetic construct
  source 1..9: note = Seed: VVGAVGVGK (KRAS G12V)
MVGNVRVGM

SEQ ID NO: 74263 - protein, 9 aa, synthetic construct
  source 1..9: note = Seed: VVGAVGVGK (KRAS G12V)
MVGNVRVGN

SEQ ID NO: 74264 - protein, 9 aa, synthetic construct
  source 1..9: note = Seed: VVGAVGVGK (KRAS G12V)
MVGNVRVGQ

SEQ ID NO: 74265 - protein, 9 aa, synthetic construct
  source 1..9: note = Seed: VVGAVGVGK (KRAS G12V)
MVGNVRVGR

SEQ ID NO: 74266 - protein, 9 aa, synthetic construct
  source 1..9: note = Seed: VVGAVGVGK (KRAS G12V)
MVGNVRVGS

SEQ ID NO: 74267 - protein, 9 aa, synthetic construct
  source 1..9: note = Seed: VVGAVGVGK (KRAS G12V)
MVGNVRVGT

SEQ ID NO: 74268 - protein, 9 aa, synthetic construct
  source 1..9: note = Seed: VVGAVGVGK (KRAS G12V)
MVGNVRVGV

SEQ ID NO: 74269 - protein, 9 aa, synthetic construct
  source 1..9: note = Seed: VVGAVGVGK (KRAS G12V)
MVGNVRVGW

SEQ ID NO: 74270 - protein, 9 aa, synthetic construct
  source 1..9: note = Seed: VVGAVGVGK (KRAS G12V)
MVGNVRVGY

SEQ ID NO: 74271 - protein, 9 aa, synthetic construct
  source 1..9: note = Seed: VVGAVGVGK (KRAS G12V)
MVGNVVVGR

SEQ ID NO: 74272 - protein, 9 aa, synthetic construct
  source 1..9: note = Seed: VVGAVGVGK (KRAS G12V)
MVGPVRVGR

SEQ ID NO: 74273 - protein, 9 aa, synthetic construct
  source 1..9: note = Seed: VVGAVGVGK (KRAS G12V)
MVGPVRVGY

SEQ ID NO: 74274 - protein, 9 aa, synthetic construct
  source 1..9: note = Seed: VVGAVGVGK (KRAS G12V)
MVGQVAVGA

SEQ ID NO: 74275 - protein, 9 aa, synthetic construct
  source 1..9: note = Seed: VVGAVGVGK (KRAS G12V)
MVGQVAVGI

SEQ ID NO: 74276 - protein, 9 aa, synthetic construct
  source 1..9: note = Seed: VVGAVGVGK (KRAS G12V)
MVGQVAVGL

SEQ ID NO: 74277 - protein, 9 aa, synthetic construct
  source 1..9: note = Seed: VVGAVGVGK (KRAS G12V)
MVGQVAVGM

SEQ ID NO: 74278 - protein, 9 aa, synthetic construct
  source 1..9: note = Seed: VVGAVGVGK (KRAS G12V)
MVGQVAVGS

SEQ ID NO: 74279 - protein, 9 aa, synthetic construct
  source 1..9: note = Seed: VVGAVGVGK (KRAS G12V)
MVGQVAVGT

SEQ ID NO: 74280 - protein, 9 aa, synthetic construct
  source 1..9: note = Seed: VVGAVGVGK (KRAS G12V)
MVGQVAVGV

SEQ ID NO: 74281 - protein, 9 aa, synthetic construct
  source 1..9: note = Seed: VVGAVGVGK (KRAS G12V)
MVGQVGVGA

SEQ ID NO: 74282 - protein, 9 aa, synthetic construct
  source 1..9: note = Seed: VVGAVGVGK (KRAS G12V)
MVGQVGVGI

SEQ ID NO: 74283 - protein, 9 aa, synthetic construct
  source 1..9: note = Seed: VVGAVGVGK (KRAS G12V)
MVGQVGVGL

SEQ ID NO: 74284 - protein, 9 aa, synthetic construct
  source 1..9: note = Seed: VVGAVGVGK (KRAS G12V)
MVGQVGVGM

SEQ ID NO: 74285 - protein, 9 aa, synthetic construct
  source 1..9: note = Seed: VVGAVGVGK (KRAS G12V)
MVGQVGVGV

SEQ ID NO: 74286 - protein, 9 aa, synthetic construct
  source 1..9: note = Seed: VVGAVGVGK (KRAS G12V)
MVGQVKVGA

SEQ ID NO: 74287 - protein, 9 aa, synthetic construct
  source 1..9: note = Seed: VVGAVGVGK (KRAS G12V)
MVGQVKVGG

SEQ ID NO: 74288 - protein, 9 aa, synthetic construct
  source 1..9: note = Seed: VVGAVGVGK (KRAS G12V)
MVGQVKVGH

SEQ ID NO: 74289 - protein, 9 aa, synthetic construct
  source 1..9: note = Seed: VVGAVGVGK (KRAS G12V)
MVGQVKVGK

SEQ ID NO: 74290 - protein, 9 aa, synthetic construct
  source 1..9: note = Seed: VVGAVGVGK (KRAS G12V)
MVGQVKVGQ

SEQ ID NO: 74291 - protein, 9 aa, synthetic construct
  source 1..9: note = Seed: VVGAVGVGK (KRAS G12V)
MVGQVKVGR

SEQ ID NO: 74292 - protein, 9 aa, synthetic construct
  source 1..9: note = Seed: VVGAVGVGK (KRAS G12V)
MVGQVKVGS

SEQ ID NO: 74293 - protein, 9 aa, synthetic construct
  source 1..9: note = Seed: VVGAVGVGK (KRAS G12V)
MVGQVKVGY

SEQ ID NO: 74294 - protein, 9 aa, synthetic construct
  source 1..9: note = Seed: VVGAVGVGK (KRAS G12V)
MVGQVPVGA

SEQ ID NO: 74295 - protein, 9 aa, synthetic construct
  source 1..9: note = Seed: VVGAVGVGK (KRAS G12V)
MVGQVPVGI

SEQ ID NO: 74296 - protein, 9 aa, synthetic construct
  source 1..9: note = Seed: VVGAVGVGK (KRAS G12V)
MVGQVPVGL

SEQ ID NO: 74297 - protein, 9 aa, synthetic construct
  source 1..9: note = Seed: VVGAVGVGK (KRAS G12V)
MVGQVPVGM

SEQ ID NO: 74298 - protein, 9 aa, synthetic construct
  source 1..9: note = Seed: VVGAVGVGK (KRAS G12V)
MVGQVPVGV

SEQ ID NO: 74299 - protein, 9 aa, synthetic construct
  source 1..9: note = Seed: VVGAVGVGK (KRAS G12V)
MVGQVRVGA

SEQ ID NO: 74300 - protein, 9 aa, synthetic construct
  source 1..9: note = Seed: VVGAVGVGK (KRAS G12V)
MVGQVRVGF

SEQ ID NO: 74301 - protein, 9 aa, synthetic construct
  source 1..9: note = Seed: VVGAVGVGK (KRAS G12V)
MVGQVRVGG

SEQ ID NO: 74302 - protein, 9 aa, synthetic construct
  source 1..9: note = Seed: VVGAVGVGK (KRAS G12V)
MVGQVRVGH

SEQ ID NO: 74303 - protein, 9 aa, synthetic construct
  source 1..9: note = Seed: VVGAVGVGK (KRAS G12V)
MVGQVRVGI

SEQ ID NO: 74304 - protein, 9 aa, synthetic construct
  source 1..9: note = Seed: VVGAVGVGK (KRAS G12V)
MVGQVRVGK

SEQ ID NO: 74305 - protein, 9 aa, synthetic construct
  source 1..9: note = Seed: VVGAVGVGK (KRAS G12V)
MVGQVRVGL

SEQ ID NO: 74306 - protein, 9 aa, synthetic construct
  source 1..9: note = Seed: VVGAVGVGK (KRAS G12V)
MVGQVRVGM

SEQ ID NO: 74307 - protein, 9 aa, synthetic construct
  source 1..9: note = Seed: VVGAVGVGK (KRAS G12V)
MVGQVRVGQ

SEQ ID NO: 74308 - protein, 9 aa, synthetic construct
  source 1..9: note = Seed: VVGAVGVGK (KRAS G12V)
MVGQVRVGR

SEQ ID NO: 74309 - protein, 9 aa, synthetic construct
  source 1..9: note = Seed: VVGAVGVGK (KRAS G12V)
MVGQVRVGS

SEQ ID NO: 74310 - protein, 9 aa, synthetic construct
  source 1..9: note = Seed: VVGAVGVGK (KRAS G12V)
MVGQVRVGT

SEQ ID NO: 74311 - protein, 9 aa, synthetic construct
  source 1..9: note = Seed: VVGAVGVGK (KRAS G12V)
MVGQVRVGV

SEQ ID NO: 74312 - protein, 9 aa, synthetic construct
  source 1..9: note = Seed: VVGAVGVGK (KRAS G12V)
MVGQVRVGY

SEQ ID NO: 74313 - protein, 9 aa, synthetic construct
  source 1..9: note = Seed: VVGAVGVGK (KRAS G12V)
MVGQVSVGA

SEQ ID NO: 74314 - protein, 9 aa, synthetic construct
  source 1..9: note = Seed: VVGAVGVGK (KRAS G12V)
MVGQVSVGL

SEQ ID NO: 74315 - protein, 9 aa, synthetic construct
  source 1..9: note = Seed: VVGAVGVGK (KRAS G12V)
MVGQVSVGV

SEQ ID NO: 74316 - protein, 9 aa, synthetic construct
  source 1..9: note = Seed: VVGAVGVGK (KRAS G12V)
MVGRVAVGR

SEQ ID NO: 74317 - protein, 9 aa, synthetic construct
  source 1..9: note = Seed: VVGAVGVGK (KRAS G12V)
MVGRVAVGY

SEQ ID NO: 74318 - protein, 9 aa, synthetic construct
  source 1..9: note = Seed: VVGAVGVGK (KRAS G12V)
MVGRVGVGR

SEQ ID NO: 74319 - protein, 9 aa, synthetic construct
  source 1..9: note = Seed: VVGAVGVGK (KRAS G12V)
MVGRVHVGR

SEQ ID NO: 74320 - protein, 9 aa, synthetic construct
  source 1..9: note = Seed: VVGAVGVGK (KRAS G12V)
MVGRVHVGY

SEQ ID NO: 74321 - protein, 9 aa, synthetic construct
  source 1..9: note = Seed: VVGAVGVGK (KRAS G12V)
MVGRVIVGR

SEQ ID NO: 74322 - protein, 9 aa, synthetic construct
  source 1..9: note = Seed: VVGAVGVGK (KRAS G12V)
MVGRVKVGA

SEQ ID NO: 74323 - protein, 9 aa, synthetic construct
  source 1..9: note = Seed: VVGAVGVGK (KRAS G12V)
MVGRVKVGC

SEQ ID NO: 74324 - protein, 9 aa, synthetic construct
  source 1..9: note = Seed: VVGAVGVGK (KRAS G12V)
MVGRVKVGD

SEQ ID NO: 74325 - protein, 9 aa, synthetic construct
  source 1..9: note = Seed: VVGAVGVGK (KRAS G12V)
MVGRVKVGE

SEQ ID NO: 74326 - protein, 9 aa, synthetic construct
  source 1..9: note = Seed: VVGAVGVGK (KRAS G12V)
MVGRVKVGF

SEQ ID NO: 74327 - protein, 9 aa, synthetic construct
  source 1..9: note = Seed: VVGAVGVGK (KRAS G12V)
MVGRVKVGG

SEQ ID NO: 74328 - protein, 9 aa, synthetic construct
  source 1..9: note = Seed: VVGAVGVGK (KRAS G12V)
MVGRVKVGH

SEQ ID NO: 74329 - protein, 9 aa, synthetic construct
  source 1..9: note = Seed: VVGAVGVGK (KRAS G12V)
MVGRVKVGI

SEQ ID NO: 74330 - protein, 9 aa, synthetic construct
  source 1..9: note = Seed: VVGAVGVGK (KRAS G12V)
MVGRVKVGK

SEQ ID NO: 74331 - protein, 9 aa, synthetic construct
  source 1..9: note = Seed: VVGAVGVGK (KRAS G12V)
MVGRVKVGL

SEQ ID NO: 74332 - protein, 9 aa, synthetic construct
  source 1..9: note = Seed: VVGAVGVGK (KRAS G12V)
MVGRVKVGM

SEQ ID NO: 74333 - protein, 9 aa, synthetic construct
  source 1..9: note = Seed: VVGAVGVGK (KRAS G12V)
MVGRVKVGQ

SEQ ID NO: 74334 - protein, 9 aa, synthetic construct
  source 1..9: note = Seed: VVGAVGVGK (KRAS G12V)
MVGRVKVGR

SEQ ID NO: 74335 - protein, 9 aa, synthetic construct
  source 1..9: note = Seed: VVGAVGVGK (KRAS G12V)
MVGRVKVGS

SEQ ID NO: 74336 - protein, 9 aa, synthetic construct
  source 1..9: note = Seed: VVGAVGVGK (KRAS G12V)
MVGRVKVGV

SEQ ID NO: 74337 - protein, 9 aa, synthetic construct
  source 1..9: note = Seed: VVGAVGVGK (KRAS G12V)
MVGRVKVGY

SEQ ID NO: 74338 - protein, 9 aa, synthetic construct
  source 1..9: note = Seed: VVGAVGVGK (KRAS G12V)
MVGRVNVGR

SEQ ID NO: 74339 - protein, 9 aa, synthetic construct
  source 1..9: note = Seed: VVGAVGVGK (KRAS G12V)
MVGRVNVGY

SEQ ID NO: 74340 - protein, 9 aa, synthetic construct
  source 1..9: note = Seed: VVGAVGVGK (KRAS G12V)
MVGRVPVGR

SEQ ID NO: 74341 - protein, 9 aa, synthetic construct
  source 1..9: note = Seed: VVGAVGVGK (KRAS G12V)
MVGRVQVGR

SEQ ID NO: 74342 - protein, 9 aa, synthetic construct
  source 1..9: note = Seed: VVGAVGVGK (KRAS G12V)
MVGRVQVGY

SEQ ID NO: 74343 - protein, 9 aa, synthetic construct
  source 1..9: note = Seed: VVGAVGVGK (KRAS G12V)
MVGRVRVGA

SEQ ID NO: 74344 - protein, 9 aa, synthetic construct
  source 1..9: note = Seed: VVGAVGVGK (KRAS G12V)
MVGRVRVGD

SEQ ID NO: 74345 - protein, 9 aa, synthetic construct
  source 1..9: note = Seed: VVGAVGVGK (KRAS G12V)
MVGRVRVGE

SEQ ID NO: 74346 - protein, 9 aa, synthetic construct
  source 1..9: note = Seed: VVGAVGVGK (KRAS G12V)
MVGRVRVGF

SEQ ID NO: 74347 - protein, 9 aa, synthetic construct
  source 1..9: note = Seed: VVGAVGVGK (KRAS G12V)
MVGRVRVGG

SEQ ID NO: 74348 - protein, 9 aa, synthetic construct
  source 1..9: note = Seed: VVGAVGVGK (KRAS G12V)
MVGRVRVGH

SEQ ID NO: 74349 - protein, 9 aa, synthetic construct
  source 1..9: note = Seed: VVGAVGVGK (KRAS G12V)
MVGRVRVGI

SEQ ID NO: 74350 - protein, 9 aa, synthetic construct
  source 1..9: note = Seed: VVGAVGVGK (KRAS G12V)
MVGRVRVGK

SEQ ID NO: 74351 - protein, 9 aa, synthetic construct
  source 1..9: note = Seed: VVGAVGVGK (KRAS G12V)
MVGRVRVGL

SEQ ID NO: 74352 - protein, 9 aa, synthetic construct
  source 1..9: note = Seed: VVGAVGVGK (KRAS G12V)
MVGRVRVGM

SEQ ID NO: 74353 - protein, 9 aa, synthetic construct
  source 1..9: note = Seed: VVGAVGVGK (KRAS G12V)
MVGRVRVGQ

SEQ ID NO: 74354 - protein, 9 aa, synthetic construct
  source 1..9: note = Seed: VVGAVGVGK (KRAS G12V)
MVGRVRVGR

SEQ ID NO: 74355 - protein, 9 aa, synthetic construct
  source 1..9: note = Seed: VVGAVGVGK (KRAS G12V)
MVGRVRVGS

SEQ ID NO: 74356 - protein, 9 aa, synthetic construct
  source 1..9: note = Seed: VVGAVGVGK (KRAS G12V)
MVGRVRVGV

SEQ ID NO: 74357 - protein, 9 aa, synthetic construct
  source 1..9: note = Seed: VVGAVGVGK (KRAS G12V)
MVGRVRVGY

SEQ ID NO: 74358 - protein, 9 aa, synthetic construct
  source 1..9: note = Seed: VVGAVGVGK (KRAS G12V)
MVGRVSVGR

SEQ ID NO: 74359 - protein, 9 aa, synthetic construct
  source 1..9: note = Seed: VVGAVGVGK (KRAS G12V)
MVGRVSVGY

SEQ ID NO: 74360 - protein, 9 aa, synthetic construct
  source 1..9: note = Seed: VVGAVGVGK (KRAS G12V)
MVGRVTVGK

SEQ ID NO: 74361 - protein, 9 aa, synthetic construct
  source 1..9: note = Seed: VVGAVGVGK (KRAS G12V)
MVGRVTVGR

SEQ ID NO: 74362 - protein, 9 aa, synthetic construct
  source 1..9: note = Seed: VVGAVGVGK (KRAS G12V)
MVGRVTVGY

SEQ ID NO: 74363 - protein, 9 aa, synthetic construct
  source 1..9: note = Seed: VVGAVGVGK (KRAS G12V)
MVGRVVVGR

SEQ ID NO: 74364 - protein, 9 aa, synthetic construct
  source 1..9: note = Seed: VVGAVGVGK (KRAS G12V)
MVGSVAVGA

SEQ ID NO: 74365 - protein, 9 aa, synthetic construct
  source 1..9: note = Seed: VVGAVGVGK (KRAS G12V)
MVGSVAVGH

SEQ ID NO: 74366 - protein, 9 aa, synthetic construct
  source 1..9: note = Seed: VVGAVGVGK (KRAS G12V)
MVGSVAVGI

SEQ ID NO: 74367 - protein, 9 aa, synthetic construct
  source 1..9: note = Seed: VVGAVGVGK (KRAS G12V)
MVGSVAVGK

SEQ ID NO: 74368 - protein, 9 aa, synthetic construct
  source 1..9: note = Seed: VVGAVGVGK (KRAS G12V)
MVGSVAVGL

SEQ ID NO: 74369 - protein, 9 aa, synthetic construct
  source 1..9: note = Seed: VVGAVGVGK (KRAS G12V)
MVGSVAVGM

SEQ ID NO: 74370 - protein, 9 aa, synthetic construct
  source 1..9: note = Seed: VVGAVGVGK (KRAS G12V)
MVGSVAVGR

SEQ ID NO: 74371 - protein, 9 aa, synthetic construct
  source 1..9: note = Seed: VVGAVGVGK (KRAS G12V)
MVGSVAVGS

SEQ ID NO: 74372 - protein, 9 aa, synthetic construct
  source 1..9: note = Seed: VVGAVGVGK (KRAS G12V)
MVGSVAVGT

SEQ ID NO: 74373 - protein, 9 aa, synthetic construct
  source 1..9: note = Seed: VVGAVGVGK (KRAS G12V)
MVGSVAVGV

SEQ ID NO: 74374 - protein, 9 aa, synthetic construct
  source 1..9: note = Seed: VVGAVGVGK (KRAS G12V)
MVGSVGVGA

SEQ ID NO: 74375 - protein, 9 aa, synthetic construct
  source 1..9: note = Seed: VVGAVGVGK (KRAS G12V)
MVGSVHVGR

SEQ ID NO: 74376 - protein, 9 aa, synthetic construct
  source 1..9: note = Seed: VVGAVGVGK (KRAS G12V)
MVGSVKVGA

SEQ ID NO: 74377 - protein, 9 aa, synthetic construct
  source 1..9: note = Seed: VVGAVGVGK (KRAS G12V)
MVGSVKVGF

SEQ ID NO: 74378 - protein, 9 aa, synthetic construct
  source 1..9: note = Seed: VVGAVGVGK (KRAS G12V)
MVGSVKVGH

SEQ ID NO: 74379 - protein, 9 aa, synthetic construct
  source 1..9: note = Seed: VVGAVGVGK (KRAS G12V)
MVGSVKVGI

SEQ ID NO: 74380 - protein, 9 aa, synthetic construct
  source 1..9: note = Seed: VVGAVGVGK (KRAS G12V)
MVGSVKVGK

SEQ ID NO: 74381 - protein, 9 aa, synthetic construct
  source 1..9: note = Seed: VVGAVGVGK (KRAS G12V)
MVGSVKVGL

SEQ ID NO: 74382 - protein, 9 aa, synthetic construct
  source 1..9: note = Seed: VVGAVGVGK (KRAS G12V)
MVGSVKVGM

SEQ ID NO: 74383 - protein, 9 aa, synthetic construct
  source 1..9: note = Seed: VVGAVGVGK (KRAS G12V)
MVGSVKVGQ

SEQ ID NO: 74384 - protein, 9 aa, synthetic construct
  source 1..9: note = Seed: VVGAVGVGK (KRAS G12V)
MVGSVKVGR

SEQ ID NO: 74385 - protein, 9 aa, synthetic construct
  source 1..9: note = Seed: VVGAVGVGK (KRAS G12V)
MVGSVKVGS

SEQ ID NO: 74386 - protein, 9 aa, synthetic construct
  source 1..9: note = Seed: VVGAVGVGK (KRAS G12V)
MVGSVKVGT

SEQ ID NO: 74387 - protein, 9 aa, synthetic construct
  source 1..9: note = Seed: VVGAVGVGK (KRAS G12V)
MVGSVKVGV

SEQ ID NO: 74388 - protein, 9 aa, synthetic construct
  source 1..9: note = Seed: VVGAVGVGK (KRAS G12V)
MVGSVKVGY

SEQ ID NO: 74389 - protein, 9 aa, synthetic construct
  source 1..9: note = Seed: VVGAVGVGK (KRAS G12V)
MVGSVPVGA

SEQ ID NO: 74390 - protein, 9 aa, synthetic construct
  source 1..9: note = Seed: VVGAVGVGK (KRAS G12V)
MVGSVPVGF

SEQ ID NO: 74391 - protein, 9 aa, synthetic construct
  source 1..9: note = Seed: VVGAVGVGK (KRAS G12V)
MVGSVPVGG

SEQ ID NO: 74392 - protein, 9 aa, synthetic construct
  source 1..9: note = Seed: VVGAVGVGK (KRAS G12V)
MVGSVPVGH

SEQ ID NO: 74393 - protein, 9 aa, synthetic construct
  source 1..9: note = Seed: VVGAVGVGK (KRAS G12V)
MVGSVPVGI

SEQ ID NO: 74394 - protein, 9 aa, synthetic construct
  source 1..9: note = Seed: VVGAVGVGK (KRAS G12V)
MVGSVPVGL

SEQ ID NO: 74395 - protein, 9 aa, synthetic construct
  source 1..9: note = Seed: VVGAVGVGK (KRAS G12V)
MVGSVPVGM

SEQ ID NO: 74396 - protein, 9 aa, synthetic construct
  source 1..9: note = Seed: VVGAVGVGK (KRAS G12V)
MVGSVPVGN

SEQ ID NO: 74397 - protein, 9 aa, synthetic construct
  source 1..9: note = Seed: VVGAVGVGK (KRAS G12V)
MVGSVPVGQ

SEQ ID NO: 74398 - protein, 9 aa, synthetic construct
  source 1..9: note = Seed: VVGAVGVGK (KRAS G12V)
MVGSVPVGR

SEQ ID NO: 74399 - protein, 9 aa, synthetic construct
  source 1..9: note = Seed: VVGAVGVGK (KRAS G12V)
MVGSVPVGS

SEQ ID NO: 74400 - protein, 9 aa, synthetic construct
  source 1..9: note = Seed: VVGAVGVGK (KRAS G12V)
MVGSVPVGT

SEQ ID NO: 74401 - protein, 9 aa, synthetic construct
  source 1..9: note = Seed: VVGAVGVGK (KRAS G12V)
MVGSVPVGV

SEQ ID NO: 74402 - protein, 9 aa, synthetic construct
  source 1..9: note = Seed: VVGAVGVGK (KRAS G12V)
MVGSVPVGY

SEQ ID NO: 74403 - protein, 9 aa, synthetic construct
  source 1..9: note = Seed: VVGAVGVGK (KRAS G12V)
MVGSVRVGA

SEQ ID NO: 74404 - protein, 9 aa, synthetic construct
  source 1..9: note = Seed: VVGAVGVGK (KRAS G12V)
MVGSVRVGE

SEQ ID NO: 74405 - protein, 9 aa, synthetic construct
  source 1..9: note = Seed: VVGAVGVGK (KRAS G12V)
MVGSVRVGF

SEQ ID NO: 74406 - protein, 9 aa, synthetic construct
  source 1..9: note = Seed: VVGAVGVGK (KRAS G12V)
MVGSVRVGG

SEQ ID NO: 74407 - protein, 9 aa, synthetic construct
  source 1..9: note = Seed: VVGAVGVGK (KRAS G12V)
MVGSVRVGH

SEQ ID NO: 74408 - protein, 9 aa, synthetic construct
  source 1..9: note = Seed: VVGAVGVGK (KRAS G12V)
MVGSVRVGI

SEQ ID NO: 74409 - protein, 9 aa, synthetic construct
  source 1..9: note = Seed: VVGAVGVGK (KRAS G12V)
MVGSVRVGK

SEQ ID NO: 74410 - protein, 9 aa, synthetic construct
  source 1..9: note = Seed: VVGAVGVGK (KRAS G12V)
MVGSVRVGL

SEQ ID NO: 74411 - protein, 9 aa, synthetic construct
  source 1..9: note = Seed: VVGAVGVGK (KRAS G12V)
MVGSVRVGM

SEQ ID NO: 74412 - protein, 9 aa, synthetic construct
  source 1..9: note = Seed: VVGAVGVGK (KRAS G12V)
MVGSVRVGN

SEQ ID NO: 74413 - protein, 9 aa, synthetic construct
  source 1..9: note = Seed: VVGAVGVGK (KRAS G12V)
MVGSVRVGQ

SEQ ID NO: 74414 - protein, 9 aa, synthetic construct
  source 1..9: note = Seed: VVGAVGVGK (KRAS G12V)
MVGSVRVGR

SEQ ID NO: 74415 - protein, 9 aa, synthetic construct
  source 1..9: note = Seed: VVGAVGVGK (KRAS G12V)
MVGSVRVGS

SEQ ID NO: 74416 - protein, 9 aa, synthetic construct
  source 1..9: note = Seed: VVGAVGVGK (KRAS G12V)
MVGSVRVGT

SEQ ID NO: 74417 - protein, 9 aa, synthetic construct
  source 1..9: note = Seed: VVGAVGVGK (KRAS G12V)
MVGSVRVGV

SEQ ID NO: 74418 - protein, 9 aa, synthetic construct
  source 1..9: note = Seed: VVGAVGVGK (KRAS G12V)
MVGSVRVGW

SEQ ID NO: 74419 - protein, 9 aa, synthetic construct
  source 1..9: note = Seed: VVGAVGVGK (KRAS G12V)
MVGSVRVGY

SEQ ID NO: 74420 - protein, 9 aa, synthetic construct
  source 1..9: note = Seed: VVGAVGVGK (KRAS G12V)
MVGSVSVGA

SEQ ID NO: 74421 - protein, 9 aa, synthetic construct
  source 1..9: note = Seed: VVGAVGVGK (KRAS G12V)
MVGSVSVGI

SEQ ID NO: 74422 - protein, 9 aa, synthetic construct
  source 1..9: note = Seed: VVGAVGVGK (KRAS G12V)
MVGSVSVGR

SEQ ID NO: 74423 - protein, 9 aa, synthetic construct
  source 1..9: note = Seed: VVGAVGVGK (KRAS G12V)
MVGSVSVGV

SEQ ID NO: 74424 - protein, 9 aa, synthetic construct
  source 1..9: note = Seed: VVGAVGVGK (KRAS G12V)
MVGSVTVGR

SEQ ID NO: 74425 - protein, 9 aa, synthetic construct
  source 1..9: note = Seed: VVGAVGVGK (KRAS G12V)
MVGSVVVGR

SEQ ID NO: 74426 - protein, 9 aa, synthetic construct
  source 1..9: note = Seed: VVGAVGVGK (KRAS G12V)
MVGTVAVGI

SEQ ID NO: 74427 - protein, 9 aa, synthetic construct
  source 1..9: note = Seed: VVGAVGVGK (KRAS G12V)
MVGTVAVGR

SEQ ID NO: 74428 - protein, 9 aa, synthetic construct
  source 1..9: note = Seed: VVGAVGVGK (KRAS G12V)
MVGTVHVGR

SEQ ID NO: 74429 - protein, 9 aa, synthetic construct
  source 1..9: note = Seed: VVGAVGVGK (KRAS G12V)
MVGTVKVGA

SEQ ID NO: 74430 - protein, 9 aa, synthetic construct
  source 1..9: note = Seed: VVGAVGVGK (KRAS G12V)
MVGTVKVGH

SEQ ID NO: 74431 - protein, 9 aa, synthetic construct
  source 1..9: note = Seed: VVGAVGVGK (KRAS G12V)
MVGTVKVGK

SEQ ID NO: 74432 - protein, 9 aa, synthetic construct
  source 1..9: note = Seed: VVGAVGVGK (KRAS G12V)
MVGTVKVGR

SEQ ID NO: 74433 - protein, 9 aa, synthetic construct
  source 1..9: note = Seed: VVGAVGVGK (KRAS G12V)
MVGTVKVGS

SEQ ID NO: 74434 - protein, 9 aa, synthetic construct
  source 1..9: note = Seed: VVGAVGVGK (KRAS G12V)
MVGTVKVGY

SEQ ID NO: 74435 - protein, 9 aa, synthetic construct
  source 1..9: note = Seed: VVGAVGVGK (KRAS G12V)
MVGTVPVGA

SEQ ID NO: 74436 - protein, 9 aa, synthetic construct
  source 1..9: note = Seed: VVGAVGVGK (KRAS G12V)
MVGTVPVGI

SEQ ID NO: 74437 - protein, 9 aa, synthetic construct
  source 1..9: note = Seed: VVGAVGVGK (KRAS G12V)
MVGTVPVGL

SEQ ID NO: 74438 - protein, 9 aa, synthetic construct
  source 1..9: note = Seed: VVGAVGVGK (KRAS G12V)
MVGTVPVGM

SEQ ID NO: 74439 - protein, 9 aa, synthetic construct
  source 1..9: note = Seed: VVGAVGVGK (KRAS G12V)
MVGTVPVGR

SEQ ID NO: 74440 - protein, 9 aa, synthetic construct
  source 1..9: note = Seed: VVGAVGVGK (KRAS G12V)
MVGTVPVGV

SEQ ID NO: 74441 - protein, 9 aa, synthetic construct
  source 1..9: note = Seed: VVGAVGVGK (KRAS G12V)
MVGTVRVGA

SEQ ID NO: 74442 - protein, 9 aa, synthetic construct
  source 1..9: note = Seed: VVGAVGVGK (KRAS G12V)
MVGTVRVGF

SEQ ID NO: 74443 - protein, 9 aa, synthetic construct
  source 1..9: note = Seed: VVGAVGVGK (KRAS G12V)
MVGTVRVGG

SEQ ID NO: 74444 - protein, 9 aa, synthetic construct
  source 1..9: note = Seed: VVGAVGVGK (KRAS G12V)
MVGTVRVGH

SEQ ID NO: 74445 - protein, 9 aa, synthetic construct
  source 1..9: note = Seed: VVGAVGVGK (KRAS G12V)
MVGTVRVGI

SEQ ID NO: 74446 - protein, 9 aa, synthetic construct
  source 1..9: note = Seed: VVGAVGVGK (KRAS G12V)
MVGTVRVGK

SEQ ID NO: 74447 - protein, 9 aa, synthetic construct
  source 1..9: note = Seed: VVGAVGVGK (KRAS G12V)
MVGTVRVGL

SEQ ID NO: 74448 - protein, 9 aa, synthetic construct
  source 1..9: note = Seed: VVGAVGVGK (KRAS G12V)
MVGTVRVGM

SEQ ID NO: 74449 - protein, 9 aa, synthetic construct
  source 1..9: note = Seed: VVGAVGVGK (KRAS G12V)
MVGTVRVGN

SEQ ID NO: 74450 - protein, 9 aa, synthetic construct
  source 1..9: note = Seed: VVGAVGVGK (KRAS G12V)
MVGTVRVGQ

SEQ ID NO: 74451 - protein, 9 aa, synthetic construct
  source 1..9: note = Seed: VVGAVGVGK (KRAS G12V)
MVGTVRVGR

SEQ ID NO: 74452 - protein, 9 aa, synthetic construct
  source 1..9: note = Seed: VVGAVGVGK (KRAS G12V)
MVGTVRVGS

SEQ ID NO: 74453 - protein, 9 aa, synthetic construct
  source 1..9: note = Seed: VVGAVGVGK (KRAS G12V)
MVGTVRVGT

SEQ ID NO: 74454 - protein, 9 aa, synthetic construct
  source 1..9: note = Seed: VVGAVGVGK (KRAS G12V)
MVGTVRVGV

SEQ ID NO: 74455 - protein, 9 aa, synthetic construct
  source 1..9: note = Seed: VVGAVGVGK (KRAS G12V)
MVGTVRVGY

SEQ ID NO: 74456 - protein, 9 aa, synthetic construct
  source 1..9: note = Seed: VVGAVGVGK (KRAS G12V)
MVGTVSVGI

SEQ ID NO: 74457 - protein, 9 aa, synthetic construct
  source 1..9: note = Seed: VVGAVGVGK (KRAS G12V)
MVGTVSVGL

SEQ ID NO: 74458 - protein, 9 aa, synthetic construct
  source 1..9: note = Seed: VVGAVGVGK (KRAS G12V)
MVGTVSVGV

SEQ ID NO: 74459 - protein, 9 aa, synthetic construct
  source 1..9: note = Seed: VVGAVGVGK (KRAS G12V)
MVGVVAVGR

SEQ ID NO: 74460 - protein, 9 aa, synthetic construct
  source 1..9: note = Seed: VVGAVGVGK (KRAS G12V)
MVGVVHVGR

SEQ ID NO: 74461 - protein, 9 aa, synthetic construct
  source 1..9: note = Seed: VVGAVGVGK (KRAS G12V)
MVGVVKVGA

SEQ ID NO: 74462 - protein, 9 aa, synthetic construct
  source 1..9: note = Seed: VVGAVGVGK (KRAS G12V)
MVGVVKVGG

SEQ ID NO: 74463 - protein, 9 aa, synthetic construct
  source 1..9: note = Seed: VVGAVGVGK (KRAS G12V)
MVGVVKVGH

SEQ ID NO: 74464 - protein, 9 aa, synthetic construct
  source 1..9: note = Seed: VVGAVGVGK (KRAS G12V)
MVGVVKVGK

SEQ ID NO: 74465 - protein, 9 aa, synthetic construct
  source 1..9: note = Seed: VVGAVGVGK (KRAS G12V)
MVGVVKVGN

SEQ ID NO: 74466 - protein, 9 aa, synthetic construct
  source 1..9: note = Seed: VVGAVGVGK (KRAS G12V)
MVGVVKVGQ

SEQ ID NO: 74467 - protein, 9 aa, synthetic construct
  source 1..9: note = Seed: VVGAVGVGK (KRAS G12V)
MVGVVKVGR

SEQ ID NO: 74468 - protein, 9 aa, synthetic construct
  source 1..9: note = Seed: VVGAVGVGK (KRAS G12V)
MVGVVKVGS

SEQ ID NO: 74469 - protein, 9 aa, synthetic construct
  source 1..9: note = Seed: VVGAVGVGK (KRAS G12V)
MVGVVKVGT

SEQ ID NO: 74470 - protein, 9 aa, synthetic construct
  source 1..9: note = Seed: VVGAVGVGK (KRAS G12V)
MVGVVKVGY

SEQ ID NO: 74471 - protein, 9 aa, synthetic construct
  source 1..9: note = Seed: VVGAVGVGK (KRAS G12V)
MVGVVPVGI

SEQ ID NO: 74472 - protein, 9 aa, synthetic construct
  source 1..9: note = Seed: VVGAVGVGK (KRAS G12V)
MVGVVPVGL

SEQ ID NO: 74473 - protein, 9 aa, synthetic construct
  source 1..9: note = Seed: VVGAVGVGK (KRAS G12V)
MVGVVPVGR

SEQ ID NO: 74474 - protein, 9 aa, synthetic construct
  source 1..9: note = Seed: VVGAVGVGK (KRAS G12V)
MVGVVPVGV

SEQ ID NO: 74475 - protein, 9 aa, synthetic construct
  source 1..9: note = Seed: VVGAVGVGK (KRAS G12V)
MVGVVRVGA

SEQ ID NO: 74476 - protein, 9 aa, synthetic construct
  source 1..9: note = Seed: VVGAVGVGK (KRAS G12V)
MVGVVRVGG

SEQ ID NO: 74477 - protein, 9 aa, synthetic construct
  source 1..9: note = Seed: VVGAVGVGK (KRAS G12V)
MVGVVRVGH

SEQ ID NO: 74478 - protein, 9 aa, synthetic construct
  source 1..9: note = Seed: VVGAVGVGK (KRAS G12V)
MVGVVRVGK

SEQ ID NO: 74479 - protein, 9 aa, synthetic construct
  source 1..9: note = Seed: VVGAVGVGK (KRAS G12V)
MVGVVRVGM

SEQ ID NO: 74480 - protein, 9 aa, synthetic construct
  source 1..9: note = Seed: VVGAVGVGK (KRAS G12V)
MVGVVRVGN

SEQ ID NO: 74481 - protein, 9 aa, synthetic construct
  source 1..9: note = Seed: VVGAVGVGK (KRAS G12V)
MVGVVRVGP

SEQ ID NO: 74482 - protein, 9 aa, synthetic construct
  source 1..9: note = Seed: VVGAVGVGK (KRAS G12V)
MVGVVRVGQ

SEQ ID NO: 74483 - protein, 9 aa, synthetic construct
  source 1..9: note = Seed: VVGAVGVGK (KRAS G12V)
MVGVVRVGR

SEQ ID NO: 74484 - protein, 9 aa, synthetic construct
  source 1..9: note = Seed: VVGAVGVGK (KRAS G12V)
MVGVVRVGS

SEQ ID NO: 74485 - protein, 9 aa, synthetic construct
  source 1..9: note = Seed: VVGAVGVGK (KRAS G12V)
MVGVVRVGT

SEQ ID NO: 74486 - protein, 9 aa, synthetic construct
  source 1..9: note = Seed: VVGAVGVGK (KRAS G12V)
MVGVVRVGY

SEQ ID NO: 74487 - protein, 9 aa, synthetic construct
  source 1..9: note = Seed: VVGAVGVGK (KRAS G12V)
MVGVVSVGR

SEQ ID NO: 74488 - protein, 9 aa, synthetic construct
  source 1..9: note = Seed: VVGAVGVGK (KRAS G12V)
MVGVVTVGR

SEQ ID NO: 74489 - protein, 9 aa, synthetic construct
  source 1..9: note = Seed: VVGAVGVGK (KRAS G12V)
MVGWVAVGR

SEQ ID NO: 74490 - protein, 9 aa, synthetic construct
  source 1..9: note = Seed: VVGAVGVGK (KRAS G12V)
MVGWVHVGR

SEQ ID NO: 74491 - protein, 9 aa, synthetic construct
  source 1..9: note = Seed: VVGAVGVGK (KRAS G12V)
MVGWVKVGA

SEQ ID NO: 74492 - protein, 9 aa, synthetic construct
  source 1..9: note = Seed: VVGAVGVGK (KRAS G12V)
MVGWVKVGG

SEQ ID NO: 74493 - protein, 9 aa, synthetic construct
  source 1..9: note = Seed: VVGAVGVGK (KRAS G12V)
MVGWVKVGH

SEQ ID NO: 74494 - protein, 9 aa, synthetic construct
  source 1..9: note = Seed: VVGAVGVGK (KRAS G12V)
MVGWVKVGK

SEQ ID NO: 74495 - protein, 9 aa, synthetic construct
  source 1..9: note = Seed: VVGAVGVGK (KRAS G12V)
MVGWVKVGQ

SEQ ID NO: 74496 - protein, 9 aa, synthetic construct
  source 1..9: note = Seed: VVGAVGVGK (KRAS G12V)
MVGWVKVGR

SEQ ID NO: 74497 - protein, 9 aa, synthetic construct
  source 1..9: note = Seed: VVGAVGVGK (KRAS G12V)
MVGWVKVGS

SEQ ID NO: 74498 - protein, 9 aa, synthetic construct
  source 1..9: note = Seed: VVGAVGVGK (KRAS G12V)
MVGWVKVGY

SEQ ID NO: 74499 - protein, 9 aa, synthetic construct
  source 1..9: note = Seed: VVGAVGVGK (KRAS G12V)
MVGWVPVGR

SEQ ID NO: 74500 - protein, 9 aa, synthetic construct
  source 1..9: note = Seed: VVGAVGVGK (KRAS G12V)
MVGWVRVGA

SEQ ID NO: 74501 - protein, 9 aa, synthetic construct
  source 1..9: note = Seed: VVGAVGVGK (KRAS G12V)
MVGWVRVGG

SEQ ID NO: 74502 - protein, 9 aa, synthetic construct
  source 1..9: note = Seed: VVGAVGVGK (KRAS G12V)
MVGWVRVGH

SEQ ID NO: 74503 - protein, 9 aa, synthetic construct
  source 1..9: note = Seed: VVGAVGVGK (KRAS G12V)
MVGWVRVGK

SEQ ID NO: 74504 - protein, 9 aa, synthetic construct
  source 1..9: note = Seed: VVGAVGVGK (KRAS G12V)
MVGWVRVGQ

SEQ ID NO: 74505 - protein, 9 aa, synthetic construct
  source 1..9: note = Seed: VVGAVGVGK (KRAS G12V)
MVGWVRVGR

SEQ ID NO: 74506 - protein, 9 aa, synthetic construct
  source 1..9: note = Seed: VVGAVGVGK (KRAS G12V)
MVGWVRVGS

SEQ ID NO: 74507 - protein, 9 aa, synthetic construct
  source 1..9: note = Seed: VVGAVGVGK (KRAS G12V)
MVGWVRVGY

SEQ ID NO: 74508 - protein, 9 aa, synthetic construct
  source 1..9: note = Seed: VVGAVGVGK (KRAS G12V)
MVGWVSVGR

SEQ ID NO: 74509 - protein, 9 aa, synthetic construct
  source 1..9: note = Seed: VVGAVGVGK (KRAS G12V)
MVGWVTVGR

SEQ ID NO: 74510 - protein, 9 aa, synthetic construct
  source 1..9: note = Seed: VVGAVGVGK (KRAS G12V)
MVGYVKVGH

SEQ ID NO: 74511 - protein, 9 aa, synthetic construct
  source 1..9: note = Seed: VVGAVGVGK (KRAS G12V)
MVGYVKVGK

SEQ ID NO: 74512 - protein, 9 aa, synthetic construct
  source 1..9: note = Seed: VVGAVGVGK (KRAS G12V)
MVGYVKVGR

SEQ ID NO: 74513 - protein, 9 aa, synthetic construct
  source 1..9: note = Seed: VVGAVGVGK (KRAS G12V)
MVGYVPVGR

SEQ ID NO: 74514 - protein, 9 aa, synthetic construct
  source 1..9: note = Seed: VVGAVGVGK (KRAS G12V)
MVGYVRVGH

SEQ ID NO: 74515 - protein, 9 aa, synthetic construct
  source 1..9: note = Seed: VVGAVGVGK (KRAS G12V)
MVGYVRVGK

SEQ ID NO: 74516 - protein, 9 aa, synthetic construct
  source 1..9: note = Seed: VVGAVGVGK (KRAS G12V)
MVGYVRVGR

SEQ ID NO: 74517 - protein, 9 aa, synthetic construct
  source 1..9: note = Seed: VVGAVGVGK (KRAS G12V)
MVGYVRVGY

SEQ ID NO: 74518 - protein, 9 aa, synthetic construct
  source 1..9: note = Seed: VVGAVGVGK (KRAS G12V)
NVGFVRVGR

SEQ ID NO: 74519 - protein, 9 aa, synthetic construct
  source 1..9: note = Seed: VVGAVGVGK (KRAS G12V)
NVGMVKVGR

SEQ ID NO: 74520 - protein, 9 aa, synthetic construct
  source 1..9: note = Seed: VVGAVGVGK (KRAS G12V)
NVGMVRVGK

SEQ ID NO: 74521 - protein, 9 aa, synthetic construct
  source 1..9: note = Seed: VVGAVGVGK (KRAS G12V)
NVGMVRVGR

SEQ ID NO: 74522 - protein, 9 aa, synthetic construct
  source 1..9: note = Seed: VVGAVGVGK (KRAS G12V)
PVGFVRVGR

SEQ ID NO: 74523 - protein, 9 aa, synthetic construct
  source 1..9: note = Seed: VVGAVGVGK (KRAS G12V)
PVGHVRVGR

SEQ ID NO: 74524 - protein, 9 aa, synthetic construct
  source 1..9: note = Seed: VVGAVGVGK (KRAS G12V)
PVGLVRVGR

SEQ ID NO: 74525 - protein, 9 aa, synthetic construct
  source 1..9: note = Seed: VVGAVGVGK (KRAS G12V)
PVGMVRVGR

SEQ ID NO: 74526 - protein, 9 aa, synthetic construct
  source 1..9: note = Seed: VVGAVGVGK (KRAS G12V)
PVGRVRVGR

SEQ ID NO: 74527 - protein, 9 aa, synthetic construct
  source 1..9: note = Seed: VVGAVGVGK (KRAS G12V)
QVGFVKVGR

SEQ ID NO: 74528 - protein, 9 aa, synthetic construct
  source 1..9: note = Seed: VVGAVGVGK (KRAS G12V)
QVGFVRVGR

SEQ ID NO: 74529 - protein, 9 aa, synthetic construct
  source 1..9: note = Seed: VVGAVGVGK (KRAS G12V)
QVGLVAVGV

SEQ ID NO: 74530 - protein, 9 aa, synthetic construct
  source 1..9: note = Seed: VVGAVGVGK (KRAS G12V)
QVGLVGVGL

SEQ ID NO: 74531 - protein, 9 aa, synthetic construct
  source 1..9: note = Seed: VVGAVGVGK (KRAS G12V)
QVGLVGVGV

SEQ ID NO: 74532 - protein, 9 aa, synthetic construct
  source 1..9: note = Seed: VVGAVGVGK (KRAS G12V)
QVGLVKVGR

SEQ ID NO: 74533 - protein, 9 aa, synthetic construct
  source 1..9: note = Seed: VVGAVGVGK (KRAS G12V)
QVGLVRVGK

SEQ ID NO: 74534 - protein, 9 aa, synthetic construct
  source 1..9: note = Seed: VVGAVGVGK (KRAS G12V)
QVGLVRVGR

SEQ ID NO: 74535 - protein, 9 aa, synthetic construct
  source 1..9: note = Seed: VVGAVGVGK (KRAS G12V)
QVGMVAVGL

SEQ ID NO: 74536 - protein, 9 aa, synthetic construct
  source 1..9: note = Seed: VVGAVGVGK (KRAS G12V)
QVGMVAVGV

SEQ ID NO: 74537 - protein, 9 aa, synthetic construct
  source 1..9: note = Seed: VVGAVGVGK (KRAS G12V)
QVGMVKVGR

SEQ ID NO: 74538 - protein, 9 aa, synthetic construct
  source 1..9: note = Seed: VVGAVGVGK (KRAS G12V)
QVGMVRVGK

SEQ ID NO: 74539 - protein, 9 aa, synthetic construct
  source 1..9: note = Seed: VVGAVGVGK (KRAS G12V)
QVGMVRVGR

SEQ ID NO: 74540 - protein, 9 aa, synthetic construct
  source 1..9: note = Seed: VVGAVGVGK (KRAS G12V)
QVGWVRVGR

SEQ ID NO: 74541 - protein, 9 aa, synthetic construct
  source 1..9: note = Seed: VVGAVGVGK (KRAS G12V)
RVGFVKVGR

SEQ ID NO: 74542 - protein, 9 aa, synthetic construct
  source 1..9: note = Seed: VVGAVGVGK (KRAS G12V)
RVGFVRVGR

SEQ ID NO: 74543 - protein, 9 aa, synthetic construct
  source 1..9: note = Seed: VVGAVGVGK (KRAS G12V)
RVGLVAVGI

SEQ ID NO: 74544 - protein, 9 aa, synthetic construct
  source 1..9: note = Seed: VVGAVGVGK (KRAS G12V)
RVGLVAVGM

SEQ ID NO: 74545 - protein, 9 aa, synthetic construct
  source 1..9: note = Seed: VVGAVGVGK (KRAS G12V)
RVGLVPVGM

SEQ ID NO: 74546 - protein, 9 aa, synthetic construct
  source 1..9: note = Seed: VVGAVGVGK (KRAS G12V)
RVGLVSVGL

SEQ ID NO: 74547 - protein, 9 aa, synthetic construct
  source 1..9: note = Seed: VVGAVGVGK (KRAS G12V)
RVGMVAVGL

SEQ ID NO: 74548 - protein, 9 aa, synthetic construct
  source 1..9: note = Seed: VVGAVGVGK (KRAS G12V)
RVGMVAVGM

SEQ ID NO: 74549 - protein, 9 aa, synthetic construct
  source 1..9: note = Seed: VVGAVGVGK (KRAS G12V)
SVGFVRVGR

SEQ ID NO: 74550 - protein, 9 aa, synthetic construct
  source 1..9: note = Seed: VVGAVGVGK (KRAS G12V)
SVGHVRVGR

SEQ ID NO: 74551 - protein, 9 aa, synthetic construct
  source 1..9: note = Seed: VVGAVGVGK (KRAS G12V)
SVGMVRVGR

SEQ ID NO: 74552 - protein, 9 aa, synthetic construct
  source 1..9: note = Seed: VVGAVGVGK (KRAS G12V)
SVGWVRVGR

SEQ ID NO: 74553 - protein, 9 aa, synthetic construct
  source 1..9: note = Seed: VVGAVGVGK (KRAS G12V)
TVGFVKVGR

SEQ ID NO: 74554 - protein, 9 aa, synthetic construct
  source 1..9: note = Seed: VVGAVGVGK (KRAS G12V)
TVGFVRVGR

SEQ ID NO: 74555 - protein, 9 aa, synthetic construct
  source 1..9: note = Seed: VVGAVGVGK (KRAS G12V)
TVGHVRVGR

SEQ ID NO: 74556 - protein, 9 aa, synthetic construct
  source 1..9: note = Seed: VVGAVGVGK (KRAS G12V)
TVGLVKVGK

SEQ ID NO: 74557 - protein, 9 aa, synthetic construct
  source 1..9: note = Seed: VVGAVGVGK (KRAS G12V)
TVGLVKVGR

SEQ ID NO: 74558 - protein, 9 aa, synthetic construct
  source 1..9: note = Seed: VVGAVGVGK (KRAS G12V)
TVGLVRVGH

SEQ ID NO: 74559 - protein, 9 aa, synthetic construct
  source 1..9: note = Seed: VVGAVGVGK (KRAS G12V)
TVGLVRVGK

SEQ ID NO: 74560 - protein, 9 aa, synthetic construct
  source 1..9: note = Seed: VVGAVGVGK (KRAS G12V)
TVGLVRVGR

SEQ ID NO: 74561 - protein, 9 aa, synthetic construct
  source 1..9: note = Seed: VVGAVGVGK (KRAS G12V)
TVGMVKVGR

SEQ ID NO: 74562 - protein, 9 aa, synthetic construct
  source 1..9: note = Seed: VVGAVGVGK (KRAS G12V)
TVGMVRVGH

SEQ ID NO: 74563 - protein, 9 aa, synthetic construct
  source 1..9: note = Seed: VVGAVGVGK (KRAS G12V)
TVGMVRVGK

SEQ ID NO: 74564 - protein, 9 aa, synthetic construct
  source 1..9: note = Seed: VVGAVGVGK (KRAS G12V)
TVGMVRVGR

SEQ ID NO: 74565 - protein, 9 aa, synthetic construct
  source 1..9: note = Seed: VVGAVGVGK (KRAS G12V)
TVGSVRVGR

SEQ ID NO: 74566 - protein, 9 aa, synthetic construct
  source 1..9: note = Seed: VVGAVGVGK (KRAS G12V)
TVGVVKVGR

SEQ ID NO: 74567 - protein, 9 aa, synthetic construct
  source 1..9: note = Seed: VVGAVGVGK (KRAS G12V)
TVGVVRVGR

SEQ ID NO: 74568 - protein, 9 aa, synthetic construct
  source 1..9: note = Seed: VVGAVGVGK (KRAS G12V)
TVGWVRVGR

SEQ ID NO: 74569 - protein, 9 aa, synthetic construct
  source 1..9: note = Seed: VVGAVGVGK (KRAS G12V)
TVGYVRVGR

SEQ ID NO: 74570 - protein, 9 aa, synthetic construct
  source 1..9: note = Seed: VVGAVGVGK (KRAS G12V)
VVGAVAVGA

SEQ ID NO: 74571 - protein, 9 aa, synthetic construct
  source 1..9: note = Seed: VVGAVGVGK (KRAS G12V)
VVGAVAVGH

SEQ ID NO: 74572 - protein, 9 aa, synthetic construct
  source 1..9: note = Seed: VVGAVGVGK (KRAS G12V)
VVGAVAVGL

SEQ ID NO: 74573 - protein, 9 aa, synthetic construct
  source 1..9: note = Seed: VVGAVGVGK (KRAS G12V)
VVGAVAVGM

SEQ ID NO: 74574 - protein, 9 aa, synthetic construct
  source 1..9: note = Seed: VVGAVGVGK (KRAS G12V)
VVGAVAVGR

SEQ ID NO: 74575 - protein, 9 aa, synthetic construct
  source 1..9: note = Seed: VVGAVGVGK (KRAS G12V)
VVGAVAVGS

SEQ ID NO: 74576 - protein, 9 aa, synthetic construct
  source 1..9: note = Seed: VVGAVGVGK (KRAS G12V)
VVGAVAVGT

SEQ ID NO: 74577 - protein, 9 aa, synthetic construct
  source 1..9: note = Seed: VVGAVGVGK (KRAS G12V)
VVGAVAVGV

SEQ ID NO: 74578 - protein, 9 aa, synthetic construct
  source 1..9: note = Seed: VVGAVGVGK (KRAS G12V)
VVGAVGVGA

SEQ ID NO: 74579 - protein, 9 aa, synthetic construct
  source 1..9: note = Seed: VVGAVGVGK (KRAS G12V)
VVGAVGVGV

SEQ ID NO: 74580 - protein, 9 aa, synthetic construct
  source 1..9: note = Seed: VVGAVGVGK (KRAS G12V)
VVGAVKVGA

SEQ ID NO: 74581 - protein, 9 aa, synthetic construct
  source 1..9: note = Seed: VVGAVGVGK (KRAS G12V)
VVGAVKVGG

SEQ ID NO: 74582 - protein, 9 aa, synthetic construct
  source 1..9: note = Seed: VVGAVGVGK (KRAS G12V)
VVGAVKVGH

SEQ ID NO: 74583 - protein, 9 aa, synthetic construct
  source 1..9: note = Seed: VVGAVGVGK (KRAS G12V)
VVGAVKVGK

SEQ ID NO: 74584 - protein, 9 aa, synthetic construct
  source 1..9: note = Seed: VVGAVGVGK (KRAS G12V)
VVGAVKVGM

SEQ ID NO: 74585 - protein, 9 aa, synthetic construct
  source 1..9: note = Seed: VVGAVGVGK (KRAS G12V)
VVGAVKVGQ

SEQ ID NO: 74586 - protein, 9 aa, synthetic construct
  source 1..9: note = Seed: VVGAVGVGK (KRAS G12V)
VVGAVKVGR

SEQ ID NO: 74587 - protein, 9 aa, synthetic construct
  source 1..9: note = Seed: VVGAVGVGK (KRAS G12V)
VVGAVKVGS

SEQ ID NO: 74588 - protein, 9 aa, synthetic construct
  source 1..9: note = Seed: VVGAVGVGK (KRAS G12V)
VVGAVKVGY

SEQ ID NO: 74589 - protein, 9 aa, synthetic construct
  source 1..9: note = Seed: VVGAVGVGK (KRAS G12V)
VVGAVPVGA

SEQ ID NO: 74590 - protein, 9 aa, synthetic construct
  source 1..9: note = Seed: VVGAVGVGK (KRAS G12V)
VVGAVPVGG

SEQ ID NO: 74591 - protein, 9 aa, synthetic construct
  source 1..9: note = Seed: VVGAVGVGK (KRAS G12V)
VVGAVPVGH

SEQ ID NO: 74592 - protein, 9 aa, synthetic construct
  source 1..9: note = Seed: VVGAVGVGK (KRAS G12V)
VVGAVPVGI

SEQ ID NO: 74593 - protein, 9 aa, synthetic construct
  source 1..9: note = Seed: VVGAVGVGK (KRAS G12V)
VVGAVPVGK

SEQ ID NO: 74594 - protein, 9 aa, synthetic construct
  source 1..9: note = Seed: VVGAVGVGK (KRAS G12V)
VVGAVPVGL

SEQ ID NO: 74595 - protein, 9 aa, synthetic construct
  source 1..9: note = Seed: VVGAVGVGK (KRAS G12V)
VVGAVPVGM

SEQ ID NO: 74596 - protein, 9 aa, synthetic construct
  source 1..9: note = Seed: VVGAVGVGK (KRAS G12V)
VVGAVPVGN

SEQ ID NO: 74597 - protein, 9 aa, synthetic construct
  source 1..9: note = Seed: VVGAVGVGK (KRAS G12V)
VVGAVPVGR

SEQ ID NO: 74598 - protein, 9 aa, synthetic construct
  source 1..9: note = Seed: VVGAVGVGK (KRAS G12V)
VVGAVPVGS

SEQ ID NO: 74599 - protein, 9 aa, synthetic construct
  source 1..9: note = Seed: VVGAVGVGK (KRAS G12V)
VVGAVPVGT

SEQ ID NO: 74600 - protein, 9 aa, synthetic construct
  source 1..9: note = Seed: VVGAVGVGK (KRAS G12V)
VVGAVPVGV

SEQ ID NO: 74601 - protein, 9 aa, synthetic construct
  source 1..9: note = Seed: VVGAVGVGK (KRAS G12V)
VVGAVPVGY

SEQ ID NO: 74602 - protein, 9 aa, synthetic construct
  source 1..9: note = Seed: VVGAVGVGK (KRAS G12V)
VVGAVRVGA

SEQ ID NO: 74603 - protein, 9 aa, synthetic construct
  source 1..9: note = Seed: VVGAVGVGK (KRAS G12V)
VVGAVRVGF

SEQ ID NO: 74604 - protein, 9 aa, synthetic construct
  source 1..9: note = Seed: VVGAVGVGK (KRAS G12V)
VVGAVRVGG

SEQ ID NO: 74605 - protein, 9 aa, synthetic construct
  source 1..9: note = Seed: VVGAVGVGK (KRAS G12V)
VVGAVRVGH

SEQ ID NO: 74606 - protein, 9 aa, synthetic construct
  source 1..9: note = Seed: VVGAVGVGK (KRAS G12V)
VVGAVRVGK

SEQ ID NO: 74607 - protein, 9 aa, synthetic construct
  source 1..9: note = Seed: VVGAVGVGK (KRAS G12V)
VVGAVRVGL

SEQ ID NO: 74608 - protein, 9 aa, synthetic construct
  source 1..9: note = Seed: VVGAVGVGK (KRAS G12V)
VVGAVRVGM

SEQ ID NO: 74609 - protein, 9 aa, synthetic construct
  source 1..9: note = Seed: VVGAVGVGK (KRAS G12V)
VVGAVRVGQ

SEQ ID NO: 74610 - protein, 9 aa, synthetic construct
  source 1..9: note = Seed: VVGAVGVGK (KRAS G12V)
VVGAVRVGR

SEQ ID NO: 74611 - protein, 9 aa, synthetic construct
  source 1..9: note = Seed: VVGAVGVGK (KRAS G12V)
VVGAVRVGS

SEQ ID NO: 74612 - protein, 9 aa, synthetic construct
  source 1..9: note = Seed: VVGAVGVGK (KRAS G12V)
VVGAVRVGT

SEQ ID NO: 74613 - protein, 9 aa, synthetic construct
  source 1..9: note = Seed: VVGAVGVGK (KRAS G12V)
VVGAVRVGV

SEQ ID NO: 74614 - protein, 9 aa, synthetic construct
  source 1..9: note = Seed: VVGAVGVGK (KRAS G12V)
VVGAVRVGY

SEQ ID NO: 74615 - protein, 9 aa, synthetic construct
  source 1..9: note = Seed: VVGAVGVGK (KRAS G12V)
VVGAVSVGA

SEQ ID NO: 74616 - protein, 9 aa, synthetic construct
  source 1..9: note = Seed: VVGAVGVGK (KRAS G12V)
VVGCVAVGA

SEQ ID NO: 74617 - protein, 9 aa, synthetic construct
  source 1..9: note = Seed: VVGAVGVGK (KRAS G12V)
VVGCVKVGR

SEQ ID NO: 74618 - protein, 9 aa, synthetic construct
  source 1..9: note = Seed: VVGAVGVGK (KRAS G12V)
VVGCVRVGH

SEQ ID NO: 74619 - protein, 9 aa, synthetic construct
  source 1..9: note = Seed: VVGAVGVGK (KRAS G12V)
VVGCVRVGK

SEQ ID NO: 74620 - protein, 9 aa, synthetic construct
  source 1..9: note = Seed: VVGAVGVGK (KRAS G12V)
VVGCVRVGQ

SEQ ID NO: 74621 - protein, 9 aa, synthetic construct
  source 1..9: note = Seed: VVGAVGVGK (KRAS G12V)
VVGCVRVGR

SEQ ID NO: 74622 - protein, 9 aa, synthetic construct
  source 1..9: note = Seed: VVGAVGVGK (KRAS G12V)
VVGCVRVGS

SEQ ID NO: 74623 - protein, 9 aa, synthetic construct
  source 1..9: note = Seed: VVGAVGVGK (KRAS G12V)
VVGFVAVGR

SEQ ID NO: 74624 - protein, 9 aa, synthetic construct
  source 1..9: note = Seed: VVGAVGVGK (KRAS G12V)
VVGFVHVGR

SEQ ID NO: 74625 - protein, 9 aa, synthetic construct
  source 1..9: note = Seed: VVGAVGVGK (KRAS G12V)
VVGFVKVGH

SEQ ID NO: 74626 - protein, 9 aa, synthetic construct
  source 1..9: note = Seed: VVGAVGVGK (KRAS G12V)
VVGFVKVGK

SEQ ID NO: 74627 - protein, 9 aa, synthetic construct
  source 1..9: note = Seed: VVGAVGVGK (KRAS G12V)
VVGFVKVGR

SEQ ID NO: 74628 - protein, 9 aa, synthetic construct
  source 1..9: note = Seed: VVGAVGVGK (KRAS G12V)
VVGFVKVGS

SEQ ID NO: 74629 - protein, 9 aa, synthetic construct
  source 1..9: note = Seed: VVGAVGVGK (KRAS G12V)
VVGFVPVGL

SEQ ID NO: 74630 - protein, 9 aa, synthetic construct
  source 1..9: note = Seed: VVGAVGVGK (KRAS G12V)
VVGFVPVGR

SEQ ID NO: 74631 - protein, 9 aa, synthetic construct
  source 1..9: note = Seed: VVGAVGVGK (KRAS G12V)
VVGFVRVGH

SEQ ID NO: 74632 - protein, 9 aa, synthetic construct
  source 1..9: note = Seed: VVGAVGVGK (KRAS G12V)
VVGFVRVGK

SEQ ID NO: 74633 - protein, 9 aa, synthetic construct
  source 1..9: note = Seed: VVGAVGVGK (KRAS G12V)
VVGFVRVGR

SEQ ID NO: 74634 - protein, 9 aa, synthetic construct
  source 1..9: note = Seed: VVGAVGVGK (KRAS G12V)
VVGFVSVGR

SEQ ID NO: 74635 - protein, 9 aa, synthetic construct
  source 1..9: note = Seed: VVGAVGVGK (KRAS G12V)
VVGGVRVGK

SEQ ID NO: 74636 - protein, 9 aa, synthetic construct
  source 1..9: note = Seed: VVGAVGVGK (KRAS G12V)
VVGGVRVGR

SEQ ID NO: 74637 - protein, 9 aa, synthetic construct
  source 1..9: note = Seed: VVGAVGVGK (KRAS G12V)
VVGHVAVGK

SEQ ID NO: 74638 - protein, 9 aa, synthetic construct
  source 1..9: note = Seed: VVGAVGVGK (KRAS G12V)
VVGHVAVGL

SEQ ID NO: 74639 - protein, 9 aa, synthetic construct
  source 1..9: note = Seed: VVGAVGVGK (KRAS G12V)
VVGHVAVGR

SEQ ID NO: 74640 - protein, 9 aa, synthetic construct
  source 1..9: note = Seed: VVGAVGVGK (KRAS G12V)
VVGHVAVGY

SEQ ID NO: 74641 - protein, 9 aa, synthetic construct
  source 1..9: note = Seed: VVGAVGVGK (KRAS G12V)
VVGHVGVGR

SEQ ID NO: 74642 - protein, 9 aa, synthetic construct
  source 1..9: note = Seed: VVGAVGVGK (KRAS G12V)
VVGHVHVGR

SEQ ID NO: 74643 - protein, 9 aa, synthetic construct
  source 1..9: note = Seed: VVGAVGVGK (KRAS G12V)
VVGHVHVGY

SEQ ID NO: 74644 - protein, 9 aa, synthetic construct
  source 1..9: note = Seed: VVGAVGVGK (KRAS G12V)
VVGHVIVGR

SEQ ID NO: 74645 - protein, 9 aa, synthetic construct
  source 1..9: note = Seed: VVGAVGVGK (KRAS G12V)
VVGHVKVGF

SEQ ID NO: 74646 - protein, 9 aa, synthetic construct
  source 1..9: note = Seed: VVGAVGVGK (KRAS G12V)
VVGHVKVGH

SEQ ID NO: 74647 - protein, 9 aa, synthetic construct
  source 1..9: note = Seed: VVGAVGVGK (KRAS G12V)
VVGHVKVGI

SEQ ID NO: 74648 - protein, 9 aa, synthetic construct
  source 1..9: note = Seed: VVGAVGVGK (KRAS G12V)
VVGHVKVGK

SEQ ID NO: 74649 - protein, 9 aa, synthetic construct
  source 1..9: note = Seed: VVGAVGVGK (KRAS G12V)
VVGHVKVGL

SEQ ID NO: 74650 - protein, 9 aa, synthetic construct
  source 1..9: note = Seed: VVGAVGVGK (KRAS G12V)
VVGHVKVGM

SEQ ID NO: 74651 - protein, 9 aa, synthetic construct
  source 1..9: note = Seed: VVGAVGVGK (KRAS G12V)
VVGHVKVGR

SEQ ID NO: 74652 - protein, 9 aa, synthetic construct
  source 1..9: note = Seed: VVGAVGVGK (KRAS G12V)
VVGHVKVGV

SEQ ID NO: 74653 - protein, 9 aa, synthetic construct
  source 1..9: note = Seed: VVGAVGVGK (KRAS G12V)
VVGHVKVGY

SEQ ID NO: 74654 - protein, 9 aa, synthetic construct
  source 1..9: note = Seed: VVGAVGVGK (KRAS G12V)
VVGHVMVGR

SEQ ID NO: 74655 - protein, 9 aa, synthetic construct
  source 1..9: note = Seed: VVGAVGVGK (KRAS G12V)
VVGHVNVGR

SEQ ID NO: 74656 - protein, 9 aa, synthetic construct
  source 1..9: note = Seed: VVGAVGVGK (KRAS G12V)
VVGHVNVGY

SEQ ID NO: 74657 - protein, 9 aa, synthetic construct
  source 1..9: note = Seed: VVGAVGVGK (KRAS G12V)
VVGHVPVGH

SEQ ID NO: 74658 - protein, 9 aa, synthetic construct
  source 1..9: note = Seed: VVGAVGVGK (KRAS G12V)
VVGHVPVGK

SEQ ID NO: 74659 - protein, 9 aa, synthetic construct
  source 1..9: note = Seed: VVGAVGVGK (KRAS G12V)
VVGHVPVGR

SEQ ID NO: 74660 - protein, 9 aa, synthetic construct
  source 1..9: note = Seed: VVGAVGVGK (KRAS G12V)
VVGHVPVGY

SEQ ID NO: 74661 - protein, 9 aa, synthetic construct
  source 1..9: note = Seed: VVGAVGVGK (KRAS G12V)
VVGHVQVGR

SEQ ID NO: 74662 - protein, 9 aa, synthetic construct
  source 1..9: note = Seed: VVGAVGVGK (KRAS G12V)
VVGHVRVGA

SEQ ID NO: 74663 - protein, 9 aa, synthetic construct
  source 1..9: note = Seed: VVGAVGVGK (KRAS G12V)
VVGHVRVGF

SEQ ID NO: 74664 - protein, 9 aa, synthetic construct
  source 1..9: note = Seed: VVGAVGVGK (KRAS G12V)
VVGHVRVGH

SEQ ID NO: 74665 - protein, 9 aa, synthetic construct
  source 1..9: note = Seed: VVGAVGVGK (KRAS G12V)
VVGHVRVGI

SEQ ID NO: 74666 - protein, 9 aa, synthetic construct
  source 1..9: note = Seed: VVGAVGVGK (KRAS G12V)
VVGHVRVGK

SEQ ID NO: 74667 - protein, 9 aa, synthetic construct
  source 1..9: note = Seed: VVGAVGVGK (KRAS G12V)
VVGHVRVGL

SEQ ID NO: 74668 - protein, 9 aa, synthetic construct
  source 1..9: note = Seed: VVGAVGVGK (KRAS G12V)
VVGHVRVGM

SEQ ID NO: 74669 - protein, 9 aa, synthetic construct
  source 1..9: note = Seed: VVGAVGVGK (KRAS G12V)
VVGHVRVGQ

SEQ ID NO: 74670 - protein, 9 aa, synthetic construct
  source 1..9: note = Seed: VVGAVGVGK (KRAS G12V)
VVGHVRVGR

SEQ ID NO: 74671 - protein, 9 aa, synthetic construct
  source 1..9: note = Seed: VVGAVGVGK (KRAS G12V)
VVGHVRVGS

SEQ ID NO: 74672 - protein, 9 aa, synthetic construct
  source 1..9: note = Seed: VVGAVGVGK (KRAS G12V)
VVGHVRVGT

SEQ ID NO: 74673 - protein, 9 aa, synthetic construct
  source 1..9: note = Seed: VVGAVGVGK (KRAS G12V)
VVGHVRVGV

SEQ ID NO: 74674 - protein, 9 aa, synthetic construct
  source 1..9: note = Seed: VVGAVGVGK (KRAS G12V)
VVGHVRVGW

SEQ ID NO: 74675 - protein, 9 aa, synthetic construct
  source 1..9: note = Seed: VVGAVGVGK (KRAS G12V)
VVGHVRVGY

SEQ ID NO: 74676 - protein, 9 aa, synthetic construct
  source 1..9: note = Seed: VVGAVGVGK (KRAS G12V)
VVGHVSVGK

SEQ ID NO: 74677 - protein, 9 aa, synthetic construct
  source 1..9: note = Seed: VVGAVGVGK (KRAS G12V)
VVGHVSVGR

SEQ ID NO: 74678 - protein, 9 aa, synthetic construct
  source 1..9: note = Seed: VVGAVGVGK (KRAS G12V)
VVGHVSVGY

SEQ ID NO: 74679 - protein, 9 aa, synthetic construct
  source 1..9: note = Seed: VVGAVGVGK (KRAS G12V)
VVGHVTVGR

SEQ ID NO: 74680 - protein, 9 aa, synthetic construct
  source 1..9: note = Seed: VVGAVGVGK (KRAS G12V)
VVGHVVVGR

SEQ ID NO: 74681 - protein, 9 aa, synthetic construct
  source 1..9: note = Seed: VVGAVGVGK (KRAS G12V)
VVGIVAVGR

SEQ ID NO: 74682 - protein, 9 aa, synthetic construct
  source 1..9: note = Seed: VVGAVGVGK (KRAS G12V)
VVGIVGVGR

SEQ ID NO: 74683 - protein, 9 aa, synthetic construct
  source 1..9: note = Seed: VVGAVGVGK (KRAS G12V)
VVGIVHVGK

SEQ ID NO: 74684 - protein, 9 aa, synthetic construct
  source 1..9: note = Seed: VVGAVGVGK (KRAS G12V)
VVGIVHVGR

SEQ ID NO: 74685 - protein, 9 aa, synthetic construct
  source 1..9: note = Seed: VVGAVGVGK (KRAS G12V)
VVGIVKVGA

SEQ ID NO: 74686 - protein, 9 aa, synthetic construct
  source 1..9: note = Seed: VVGAVGVGK (KRAS G12V)
VVGIVKVGG

SEQ ID NO: 74687 - protein, 9 aa, synthetic construct
  source 1..9: note = Seed: VVGAVGVGK (KRAS G12V)
VVGIVKVGH

SEQ ID NO: 74688 - protein, 9 aa, synthetic construct
  source 1..9: note = Seed: VVGAVGVGK (KRAS G12V)
VVGIVKVGK

SEQ ID NO: 74689 - protein, 9 aa, synthetic construct
  source 1..9: note = Seed: VVGAVGVGK (KRAS G12V)
VVGIVKVGN

SEQ ID NO: 74690 - protein, 9 aa, synthetic construct
  source 1..9: note = Seed: VVGAVGVGK (KRAS G12V)
VVGIVKVGQ

SEQ ID NO: 74691 - protein, 9 aa, synthetic construct
  source 1..9: note = Seed: VVGAVGVGK (KRAS G12V)
VVGIVKVGR

SEQ ID NO: 74692 - protein, 9 aa, synthetic construct
  source 1..9: note = Seed: VVGAVGVGK (KRAS G12V)
VVGIVKVGS

SEQ ID NO: 74693 - protein, 9 aa, synthetic construct
  source 1..9: note = Seed: VVGAVGVGK (KRAS G12V)
VVGIVKVGT

SEQ ID NO: 74694 - protein, 9 aa, synthetic construct
  source 1..9: note = Seed: VVGAVGVGK (KRAS G12V)
VVGIVKVGY

SEQ ID NO: 74695 - protein, 9 aa, synthetic construct
  source 1..9: note = Seed: VVGAVGVGK (KRAS G12V)
VVGIVNVGR

SEQ ID NO: 74696 - protein, 9 aa, synthetic construct
  source 1..9: note = Seed: VVGAVGVGK (KRAS G12V)
VVGIVPVGI

SEQ ID NO: 74697 - protein, 9 aa, synthetic construct
  source 1..9: note = Seed: VVGAVGVGK (KRAS G12V)
VVGIVPVGL

SEQ ID NO: 74698 - protein, 9 aa, synthetic construct
  source 1..9: note = Seed: VVGAVGVGK (KRAS G12V)
VVGIVPVGM

SEQ ID NO: 74699 - protein, 9 aa, synthetic construct
  source 1..9: note = Seed: VVGAVGVGK (KRAS G12V)
VVGIVPVGR

SEQ ID NO: 74700 - protein, 9 aa, synthetic construct
  source 1..9: note = Seed: VVGAVGVGK (KRAS G12V)
VVGIVPVGV

SEQ ID NO: 74701 - protein, 9 aa, synthetic construct
  source 1..9: note = Seed: VVGAVGVGK (KRAS G12V)
VVGIVQVGR

SEQ ID NO: 74702 - protein, 9 aa, synthetic construct
  source 1..9: note = Seed: VVGAVGVGK (KRAS G12V)
VVGIVRVGA

SEQ ID NO: 74703 - protein, 9 aa, synthetic construct
  source 1..9: note = Seed: VVGAVGVGK (KRAS G12V)
VVGIVRVGG

SEQ ID NO: 74704 - protein, 9 aa, synthetic construct
  source 1..9: note = Seed: VVGAVGVGK (KRAS G12V)
VVGIVRVGH

SEQ ID NO: 74705 - protein, 9 aa, synthetic construct
  source 1..9: note = Seed: VVGAVGVGK (KRAS G12V)
VVGIVRVGK

SEQ ID NO: 74706 - protein, 9 aa, synthetic construct
  source 1..9: note = Seed: VVGAVGVGK (KRAS G12V)
VVGIVRVGN

SEQ ID NO: 74707 - protein, 9 aa, synthetic construct
  source 1..9: note = Seed: VVGAVGVGK (KRAS G12V)
VVGIVRVGP

SEQ ID NO: 74708 - protein, 9 aa, synthetic construct
  source 1..9: note = Seed: VVGAVGVGK (KRAS G12V)
VVGIVRVGQ

SEQ ID NO: 74709 - protein, 9 aa, synthetic construct
  source 1..9: note = Seed: VVGAVGVGK (KRAS G12V)
VVGIVRVGR

SEQ ID NO: 74710 - protein, 9 aa, synthetic construct
  source 1..9: note = Seed: VVGAVGVGK (KRAS G12V)
VVGIVRVGS

SEQ ID NO: 74711 - protein, 9 aa, synthetic construct
  source 1..9: note = Seed: VVGAVGVGK (KRAS G12V)
VVGIVRVGT

SEQ ID NO: 74712 - protein, 9 aa, synthetic construct
  source 1..9: note = Seed: VVGAVGVGK (KRAS G12V)
VVGIVRVGY

SEQ ID NO: 74713 - protein, 9 aa, synthetic construct
  source 1..9: note = Seed: VVGAVGVGK (KRAS G12V)
VVGIVSVGR

SEQ ID NO: 74714 - protein, 9 aa, synthetic construct
  source 1..9: note = Seed: VVGAVGVGK (KRAS G12V)
VVGIVTVGR

SEQ ID NO: 74715 - protein, 9 aa, synthetic construct
  source 1..9: note = Seed: VVGAVGVGK (KRAS G12V)
VVGIVVVGR

SEQ ID NO: 74716 - protein, 9 aa, synthetic construct
  source 1..9: note = Seed: VVGAVGVGK (KRAS G12V)
VVGKVAVGK

SEQ ID NO: 74717 - protein, 9 aa, synthetic construct
  source 1..9: note = Seed: VVGAVGVGK (KRAS G12V)
VVGKVAVGR

SEQ ID NO: 74718 - protein, 9 aa, synthetic construct
  source 1..9: note = Seed: VVGAVGVGK (KRAS G12V)
VVGKVGVGR

SEQ ID NO: 74719 - protein, 9 aa, synthetic construct
  source 1..9: note = Seed: VVGAVGVGK (KRAS G12V)
VVGKVHVGR

SEQ ID NO: 74720 - protein, 9 aa, synthetic construct
  source 1..9: note = Seed: VVGAVGVGK (KRAS G12V)
VVGKVHVGY

SEQ ID NO: 74721 - protein, 9 aa, synthetic construct
  source 1..9: note = Seed: VVGAVGVGK (KRAS G12V)
VVGKVKVGA

SEQ ID NO: 74722 - protein, 9 aa, synthetic construct
  source 1..9: note = Seed: VVGAVGVGK (KRAS G12V)
VVGKVKVGE

SEQ ID NO: 74723 - protein, 9 aa, synthetic construct
  source 1..9: note = Seed: VVGAVGVGK (KRAS G12V)
VVGKVKVGF

SEQ ID NO: 74724 - protein, 9 aa, synthetic construct
  source 1..9: note = Seed: VVGAVGVGK (KRAS G12V)
VVGKVKVGG

SEQ ID NO: 74725 - protein, 9 aa, synthetic construct
  source 1..9: note = Seed: VVGAVGVGK (KRAS G12V)
VVGKVKVGH

SEQ ID NO: 74726 - protein, 9 aa, synthetic construct
  source 1..9: note = Seed: VVGAVGVGK (KRAS G12V)
VVGKVKVGI

SEQ ID NO: 74727 - protein, 9 aa, synthetic construct
  source 1..9: note = Seed: VVGAVGVGK (KRAS G12V)
VVGKVKVGK

SEQ ID NO: 74728 - protein, 9 aa, synthetic construct
  source 1..9: note = Seed: VVGAVGVGK (KRAS G12V)
VVGKVKVGL

SEQ ID NO: 74729 - protein, 9 aa, synthetic construct
  source 1..9: note = Seed: VVGAVGVGK (KRAS G12V)
VVGKVKVGM

SEQ ID NO: 74730 - protein, 9 aa, synthetic construct
  source 1..9: note = Seed: VVGAVGVGK (KRAS G12V)
VVGKVKVGQ

SEQ ID NO: 74731 - protein, 9 aa, synthetic construct
  source 1..9: note = Seed: VVGAVGVGK (KRAS G12V)
VVGKVKVGR

SEQ ID NO: 74732 - protein, 9 aa, synthetic construct
  source 1..9: note = Seed: VVGAVGVGK (KRAS G12V)
VVGKVKVGS

SEQ ID NO: 74733 - protein, 9 aa, synthetic construct
  source 1..9: note = Seed: VVGAVGVGK (KRAS G12V)
VVGKVKVGT

SEQ ID NO: 74734 - protein, 9 aa, synthetic construct
  source 1..9: note = Seed: VVGAVGVGK (KRAS G12V)
VVGKVKVGV

SEQ ID NO: 74735 - protein, 9 aa, synthetic construct
  source 1..9: note = Seed: VVGAVGVGK (KRAS G12V)
VVGKVKVGY

SEQ ID NO: 74736 - protein, 9 aa, synthetic construct
  source 1..9: note = Seed: VVGAVGVGK (KRAS G12V)
VVGKVMVGR

SEQ ID NO: 74737 - protein, 9 aa, synthetic construct
  source 1..9: note = Seed: VVGAVGVGK (KRAS G12V)
VVGKVNVGR

SEQ ID NO: 74738 - protein, 9 aa, synthetic construct
  source 1..9: note = Seed: VVGAVGVGK (KRAS G12V)
VVGKVPVGR

SEQ ID NO: 74739 - protein, 9 aa, synthetic construct
  source 1..9: note = Seed: VVGAVGVGK (KRAS G12V)
VVGKVPVGY

SEQ ID NO: 74740 - protein, 9 aa, synthetic construct
  source 1..9: note = Seed: VVGAVGVGK (KRAS G12V)
VVGKVQVGR

SEQ ID NO: 74741 - protein, 9 aa, synthetic construct
  source 1..9: note = Seed: VVGAVGVGK (KRAS G12V)
VVGKVRVGA

SEQ ID NO: 74742 - protein, 9 aa, synthetic construct
  source 1..9: note = Seed: VVGAVGVGK (KRAS G12V)
VVGKVRVGD

SEQ ID NO: 74743 - protein, 9 aa, synthetic construct
  source 1..9: note = Seed: VVGAVGVGK (KRAS G12V)
VVGKVRVGE

SEQ ID NO: 74744 - protein, 9 aa, synthetic construct
  source 1..9: note = Seed: VVGAVGVGK (KRAS G12V)
VVGKVRVGF

SEQ ID NO: 74745 - protein, 9 aa, synthetic construct
  source 1..9: note = Seed: VVGAVGVGK (KRAS G12V)
VVGKVRVGG

SEQ ID NO: 74746 - protein, 9 aa, synthetic construct
  source 1..9: note = Seed: VVGAVGVGK (KRAS G12V)
VVGKVRVGH

SEQ ID NO: 74747 - protein, 9 aa, synthetic construct
  source 1..9: note = Seed: VVGAVGVGK (KRAS G12V)
VVGKVRVGI

SEQ ID NO: 74748 - protein, 9 aa, synthetic construct
  source 1..9: note = Seed: VVGAVGVGK (KRAS G12V)
VVGKVRVGK

SEQ ID NO: 74749 - protein, 9 aa, synthetic construct
  source 1..9: note = Seed: VVGAVGVGK (KRAS G12V)
VVGKVRVGL

SEQ ID NO: 74750 - protein, 9 aa, synthetic construct
  source 1..9: note = Seed: VVGAVGVGK (KRAS G12V)
VVGKVRVGM

SEQ ID NO: 74751 - protein, 9 aa, synthetic construct
  source 1..9: note = Seed: VVGAVGVGK (KRAS G12V)
VVGKVRVGN

SEQ ID NO: 74752 - protein, 9 aa, synthetic construct
  source 1..9: note = Seed: VVGAVGVGK (KRAS G12V)
VVGKVRVGP

SEQ ID NO: 74753 - protein, 9 aa, synthetic construct
  source 1..9: note = Seed: VVGAVGVGK (KRAS G12V)
VVGKVRVGQ

SEQ ID NO: 74754 - protein, 9 aa, synthetic construct
  source 1..9: note = Seed: VVGAVGVGK (KRAS G12V)
VVGKVRVGR

SEQ ID NO: 74755 - protein, 9 aa, synthetic construct
  source 1..9: note = Seed: VVGAVGVGK (KRAS G12V)
VVGKVRVGS

SEQ ID NO: 74756 - protein, 9 aa, synthetic construct
  source 1..9: note = Seed: VVGAVGVGK (KRAS G12V)
VVGKVRVGT

SEQ ID NO: 74757 - protein, 9 aa, synthetic construct
  source 1..9: note = Seed: VVGAVGVGK (KRAS G12V)
VVGKVRVGV

SEQ ID NO: 74758 - protein, 9 aa, synthetic construct
  source 1..9: note = Seed: VVGAVGVGK (KRAS G12V)
VVGKVRVGY

SEQ ID NO: 74759 - protein, 9 aa, synthetic construct
  source 1..9: note = Seed: VVGAVGVGK (KRAS G12V)
VVGKVSVGR

SEQ ID NO: 74760 - protein, 9 aa, synthetic construct
  source 1..9: note = Seed: VVGAVGVGK (KRAS G12V)
VVGKVTVGR

SEQ ID NO: 74761 - protein, 9 aa, synthetic construct
  source 1..9: note = Seed: VVGAVGVGK (KRAS G12V)
VVGKVVVGR

SEQ ID NO: 74762 - protein, 9 aa, synthetic construct
  source 1..9: note = Seed: VVGAVGVGK (KRAS G12V)
VVGLVAVGH

SEQ ID NO: 74763 - protein, 9 aa, synthetic construct
  source 1..9: note = Seed: VVGAVGVGK (KRAS G12V)
VVGLVAVGK

SEQ ID NO: 74764 - protein, 9 aa, synthetic construct
  source 1..9: note = Seed: VVGAVGVGK (KRAS G12V)
VVGLVAVGR

SEQ ID NO: 74765 - protein, 9 aa, synthetic construct
  source 1..9: note = Seed: VVGAVGVGK (KRAS G12V)
VVGLVAVGT

SEQ ID NO: 74766 - protein, 9 aa, synthetic construct
  source 1..9: note = Seed: VVGAVGVGK (KRAS G12V)
VVGLVGVGA

SEQ ID NO: 74767 - protein, 9 aa, synthetic construct
  source 1..9: note = Seed: VVGAVGVGK (KRAS G12V)
VVGLVGVGG

SEQ ID NO: 74768 - protein, 9 aa, synthetic construct
  source 1..9: note = Seed: VVGAVGVGK (KRAS G12V)
VVGLVGVGH

SEQ ID NO: 74769 - protein, 9 aa, synthetic construct
  source 1..9: note = Seed: VVGAVGVGK (KRAS G12V)
VVGLVGVGN

SEQ ID NO: 74770 - protein, 9 aa, synthetic construct
  source 1..9: note = Seed: VVGAVGVGK (KRAS G12V)
VVGLVGVGS

SEQ ID NO: 74771 - protein, 9 aa, synthetic construct
  source 1..9: note = Seed: VVGAVGVGK (KRAS G12V)
VVGLVGVGT

SEQ ID NO: 74772 - protein, 9 aa, synthetic construct
  source 1..9: note = Seed: VVGAVGVGK (KRAS G12V)
VVGLVGVGV

SEQ ID NO: 74773 - protein, 9 aa, synthetic construct
  source 1..9: note = Seed: VVGAVGVGK (KRAS G12V)
VVGLVHVGK

SEQ ID NO: 74774 - protein, 9 aa, synthetic construct
  source 1..9: note = Seed: VVGAVGVGK (KRAS G12V)
VVGLVHVGR

SEQ ID NO: 74775 - protein, 9 aa, synthetic construct
  source 1..9: note = Seed: VVGAVGVGK (KRAS G12V)
VVGLVKVGA

SEQ ID NO: 74776 - protein, 9 aa, synthetic construct
  source 1..9: note = Seed: VVGAVGVGK (KRAS G12V)
VVGLVKVGG

SEQ ID NO: 74777 - protein, 9 aa, synthetic construct
  source 1..9: note = Seed: VVGAVGVGK (KRAS G12V)
VVGLVKVGH

SEQ ID NO: 74778 - protein, 9 aa, synthetic construct
  source 1..9: note = Seed: VVGAVGVGK (KRAS G12V)
VVGLVKVGK

SEQ ID NO: 74779 - protein, 9 aa, synthetic construct
  source 1..9: note = Seed: VVGAVGVGK (KRAS G12V)
VVGLVKVGN

SEQ ID NO: 74780 - protein, 9 aa, synthetic construct
  source 1..9: note = Seed: VVGAVGVGK (KRAS G12V)
VVGLVKVGP

SEQ ID NO: 74781 - protein, 9 aa, synthetic construct
  source 1..9: note = Seed: VVGAVGVGK (KRAS G12V)
VVGLVKVGQ

SEQ ID NO: 74782 - protein, 9 aa, synthetic construct
  source 1..9: note = Seed: VVGAVGVGK (KRAS G12V)
VVGLVKVGR

SEQ ID NO: 74783 - protein, 9 aa, synthetic construct
  source 1..9: note = Seed: VVGAVGVGK (KRAS G12V)
VVGLVKVGS

SEQ ID NO: 74784 - protein, 9 aa, synthetic construct
  source 1..9: note = Seed: VVGAVGVGK (KRAS G12V)
VVGLVKVGT

SEQ ID NO: 74785 - protein, 9 aa, synthetic construct
  source 1..9: note = Seed: VVGAVGVGK (KRAS G12V)
VVGLVKVGY

SEQ ID NO: 74786 - protein, 9 aa, synthetic construct
  source 1..9: note = Seed: VVGAVGVGK (KRAS G12V)
VVGLVPVGA

SEQ ID NO: 74787 - protein, 9 aa, synthetic construct
  source 1..9: note = Seed: VVGAVGVGK (KRAS G12V)
VVGLVPVGH

SEQ ID NO: 74788 - protein, 9 aa, synthetic construct
  source 1..9: note = Seed: VVGAVGVGK (KRAS G12V)
VVGLVPVGI

SEQ ID NO: 74789 - protein, 9 aa, synthetic construct
  source 1..9: note = Seed: VVGAVGVGK (KRAS G12V)
VVGLVPVGL

SEQ ID NO: 74790 - protein, 9 aa, synthetic construct
  source 1..9: note = Seed: VVGAVGVGK (KRAS G12V)
VVGLVPVGM

SEQ ID NO: 74791 - protein, 9 aa, synthetic construct
  source 1..9: note = Seed: VVGAVGVGK (KRAS G12V)
VVGLVPVGR

SEQ ID NO: 74792 - protein, 9 aa, synthetic construct
  source 1..9: note = Seed: VVGAVGVGK (KRAS G12V)
VVGLVPVGS

SEQ ID NO: 74793 - protein, 9 aa, synthetic construct
  source 1..9: note = Seed: VVGAVGVGK (KRAS G12V)
VVGLVPVGT

SEQ ID NO: 74794 - protein, 9 aa, synthetic construct
  source 1..9: note = Seed: VVGAVGVGK (KRAS G12V)
VVGLVPVGV

SEQ ID NO: 74795 - protein, 9 aa, synthetic construct
  source 1..9: note = Seed: VVGAVGVGK (KRAS G12V)
VVGLVRVGA

SEQ ID NO: 74796 - protein, 9 aa, synthetic construct
  source 1..9: note = Seed: VVGAVGVGK (KRAS G12V)
VVGLVRVGG

SEQ ID NO: 74797 - protein, 9 aa, synthetic construct
  source 1..9: note = Seed: VVGAVGVGK (KRAS G12V)
VVGLVRVGH

SEQ ID NO: 74798 - protein, 9 aa, synthetic construct
  source 1..9: note = Seed: VVGAVGVGK (KRAS G12V)
VVGLVRVGK

SEQ ID NO: 74799 - protein, 9 aa, synthetic construct
  source 1..9: note = Seed: VVGAVGVGK (KRAS G12V)
VVGLVRVGN

SEQ ID NO: 74800 - protein, 9 aa, synthetic construct
  source 1..9: note = Seed: VVGAVGVGK (KRAS G12V)
VVGLVRVGP

SEQ ID NO: 74801 - protein, 9 aa, synthetic construct
  source 1..9: note = Seed: VVGAVGVGK (KRAS G12V)
VVGLVRVGQ

SEQ ID NO: 74802 - protein, 9 aa, synthetic construct
  source 1..9: note = Seed: VVGAVGVGK (KRAS G12V)
VVGLVRVGR

SEQ ID NO: 74803 - protein, 9 aa, synthetic construct
  source 1..9: note = Seed: VVGAVGVGK (KRAS G12V)
VVGLVRVGS

SEQ ID NO: 74804 - protein, 9 aa, synthetic construct
  source 1..9: note = Seed: VVGAVGVGK (KRAS G12V)
VVGLVRVGT

SEQ ID NO: 74805 - protein, 9 aa, synthetic construct
  source 1..9: note = Seed: VVGAVGVGK (KRAS G12V)
VVGLVRVGY

SEQ ID NO: 74806 - protein, 9 aa, synthetic construct
  source 1..9: note = Seed: VVGAVGVGK (KRAS G12V)
VVGLVSVGR

SEQ ID NO: 74807 - protein, 9 aa, synthetic construct
  source 1..9: note = Seed: VVGAVGVGK (KRAS G12V)
VVGLVSVGT

SEQ ID NO: 74808 - protein, 9 aa, synthetic construct
  source 1..9: note = Seed: VVGAVGVGK (KRAS G12V)
VVGLVTVGR

SEQ ID NO: 74809 - protein, 9 aa, synthetic construct
  source 1..9: note = Seed: VVGAVGVGK (KRAS G12V)
VVGMVAVGH

SEQ ID NO: 74810 - protein, 9 aa, synthetic construct
  source 1..9: note = Seed: VVGAVGVGK (KRAS G12V)
VVGMVAVGK

SEQ ID NO: 74811 - protein, 9 aa, synthetic construct
  source 1..9: note = Seed: VVGAVGVGK (KRAS G12V)
VVGMVAVGM

SEQ ID NO: 74812 - protein, 9 aa, synthetic construct
  source 1..9: note = Seed: VVGAVGVGK (KRAS G12V)
VVGMVAVGN

SEQ ID NO: 74813 - protein, 9 aa, synthetic construct
  source 1..9: note = Seed: VVGAVGVGK (KRAS G12V)
VVGMVAVGR

SEQ ID NO: 74814 - protein, 9 aa, synthetic construct
  source 1..9: note = Seed: VVGAVGVGK (KRAS G12V)
VVGMVAVGS

SEQ ID NO: 74815 - protein, 9 aa, synthetic construct
  source 1..9: note = Seed: VVGAVGVGK (KRAS G12V)
VVGMVAVGT

SEQ ID NO: 74816 - protein, 9 aa, synthetic construct
  source 1..9: note = Seed: VVGAVGVGK (KRAS G12V)
VVGMVGVGA

SEQ ID NO: 74817 - protein, 9 aa, synthetic construct
  source 1..9: note = Seed: VVGAVGVGK (KRAS G12V)
VVGMVGVGL

SEQ ID NO: 74818 - protein, 9 aa, synthetic construct
  source 1..9: note = Seed: VVGAVGVGK (KRAS G12V)
VVGMVGVGM

SEQ ID NO: 74819 - protein, 9 aa, synthetic construct
  source 1..9: note = Seed: VVGAVGVGK (KRAS G12V)
VVGMVGVGS

SEQ ID NO: 74820 - protein, 9 aa, synthetic construct
  source 1..9: note = Seed: VVGAVGVGK (KRAS G12V)
VVGMVGVGT

SEQ ID NO: 74821 - protein, 9 aa, synthetic construct
  source 1..9: note = Seed: VVGAVGVGK (KRAS G12V)
VVGMVGVGV

SEQ ID NO: 74822 - protein, 9 aa, synthetic construct
  source 1..9: note = Seed: VVGAVGVGK (KRAS G12V)
VVGMVHVGK

SEQ ID NO: 74823 - protein, 9 aa, synthetic construct
  source 1..9: note = Seed: VVGAVGVGK (KRAS G12V)
VVGMVHVGR

SEQ ID NO: 74824 - protein, 9 aa, synthetic construct
  source 1..9: note = Seed: VVGAVGVGK (KRAS G12V)
VVGMVKVGA

SEQ ID NO: 74825 - protein, 9 aa, synthetic construct
  source 1..9: note = Seed: VVGAVGVGK (KRAS G12V)
VVGMVKVGG

SEQ ID NO: 74826 - protein, 9 aa, synthetic construct
  source 1..9: note = Seed: VVGAVGVGK (KRAS G12V)
VVGMVKVGH

SEQ ID NO: 74827 - protein, 9 aa, synthetic construct
  source 1..9: note = Seed: VVGAVGVGK (KRAS G12V)
VVGMVKVGK

SEQ ID NO: 74828 - protein, 9 aa, synthetic construct
  source 1..9: note = Seed: VVGAVGVGK (KRAS G12V)
VVGMVKVGM

SEQ ID NO: 74829 - protein, 9 aa, synthetic construct
  source 1..9: note = Seed: VVGAVGVGK (KRAS G12V)
VVGMVKVGN

SEQ ID NO: 74830 - protein, 9 aa, synthetic construct
  source 1..9: note = Seed: VVGAVGVGK (KRAS G12V)
VVGMVKVGP

SEQ ID NO: 74831 - protein, 9 aa, synthetic construct
  source 1..9: note = Seed: VVGAVGVGK (KRAS G12V)
VVGMVKVGQ

SEQ ID NO: 74832 - protein, 9 aa, synthetic construct
  source 1..9: note = Seed: VVGAVGVGK (KRAS G12V)
VVGMVKVGR

SEQ ID NO: 74833 - protein, 9 aa, synthetic construct
  source 1..9: note = Seed: VVGAVGVGK (KRAS G12V)
VVGMVKVGS

SEQ ID NO: 74834 - protein, 9 aa, synthetic construct
  source 1..9: note = Seed: VVGAVGVGK (KRAS G12V)
VVGMVKVGT

SEQ ID NO: 74835 - protein, 9 aa, synthetic construct
  source 1..9: note = Seed: VVGAVGVGK (KRAS G12V)
VVGMVKVGY

SEQ ID NO: 74836 - protein, 9 aa, synthetic construct
  source 1..9: note = Seed: VVGAVGVGK (KRAS G12V)
VVGMVNVGA

SEQ ID NO: 74837 - protein, 9 aa, synthetic construct
  source 1..9: note = Seed: VVGAVGVGK (KRAS G12V)
VVGMVPVGA

SEQ ID NO: 74838 - protein, 9 aa, synthetic construct
  source 1..9: note = Seed: VVGAVGVGK (KRAS G12V)
VVGMVPVGH

SEQ ID NO: 74839 - protein, 9 aa, synthetic construct
  source 1..9: note = Seed: VVGAVGVGK (KRAS G12V)
VVGMVPVGI

SEQ ID NO: 74840 - protein, 9 aa, synthetic construct
  source 1..9: note = Seed: VVGAVGVGK (KRAS G12V)
VVGMVPVGL

SEQ ID NO: 74841 - protein, 9 aa, synthetic construct
  source 1..9: note = Seed: VVGAVGVGK (KRAS G12V)
VVGMVPVGM

SEQ ID NO: 74842 - protein, 9 aa, synthetic construct
  source 1..9: note = Seed: VVGAVGVGK (KRAS G12V)
VVGMVPVGN

SEQ ID NO: 74843 - protein, 9 aa, synthetic construct
  source 1..9: note = Seed: VVGAVGVGK (KRAS G12V)
VVGMVPVGR

SEQ ID NO: 74844 - protein, 9 aa, synthetic construct
  source 1..9: note = Seed: VVGAVGVGK (KRAS G12V)
VVGMVPVGS

SEQ ID NO: 74845 - protein, 9 aa, synthetic construct
  source 1..9: note = Seed: VVGAVGVGK (KRAS G12V)
VVGMVPVGT

SEQ ID NO: 74846 - protein, 9 aa, synthetic construct
  source 1..9: note = Seed: VVGAVGVGK (KRAS G12V)
VVGMVPVGV

SEQ ID NO: 74847 - protein, 9 aa, synthetic construct
  source 1..9: note = Seed: VVGAVGVGK (KRAS G12V)
VVGMVRVGA

SEQ ID NO: 74848 - protein, 9 aa, synthetic construct
  source 1..9: note = Seed: VVGAVGVGK (KRAS G12V)
VVGMVRVGE

SEQ ID NO: 74849 - protein, 9 aa, synthetic construct
  source 1..9: note = Seed: VVGAVGVGK (KRAS G12V)
VVGMVRVGG

SEQ ID NO: 74850 - protein, 9 aa, synthetic construct
  source 1..9: note = Seed: VVGAVGVGK (KRAS G12V)
VVGMVRVGH

SEQ ID NO: 74851 - protein, 9 aa, synthetic construct
  source 1..9: note = Seed: VVGAVGVGK (KRAS G12V)
VVGMVRVGK

SEQ ID NO: 74852 - protein, 9 aa, synthetic construct
  source 1..9: note = Seed: VVGAVGVGK (KRAS G12V)
VVGMVRVGM

SEQ ID NO: 74853 - protein, 9 aa, synthetic construct
  source 1..9: note = Seed: VVGAVGVGK (KRAS G12V)
VVGMVRVGN

SEQ ID NO: 74854 - protein, 9 aa, synthetic construct
  source 1..9: note = Seed: VVGAVGVGK (KRAS G12V)
VVGMVRVGP

SEQ ID NO: 74855 - protein, 9 aa, synthetic construct
  source 1..9: note = Seed: VVGAVGVGK (KRAS G12V)
VVGMVRVGQ

SEQ ID NO: 74856 - protein, 9 aa, synthetic construct
  source 1..9: note = Seed: VVGAVGVGK (KRAS G12V)
VVGMVRVGR

SEQ ID NO: 74857 - protein, 9 aa, synthetic construct
  source 1..9: note = Seed: VVGAVGVGK (KRAS G12V)
VVGMVRVGS

SEQ ID NO: 74858 - protein, 9 aa, synthetic construct
  source 1..9: note = Seed: VVGAVGVGK (KRAS G12V)
VVGMVRVGT

SEQ ID NO: 74859 - protein, 9 aa, synthetic construct
  source 1..9: note = Seed: VVGAVGVGK (KRAS G12V)
VVGMVRVGY

SEQ ID NO: 74860 - protein, 9 aa, synthetic construct
  source 1..9: note = Seed: VVGAVGVGK (KRAS G12V)
VVGMVSVGR

SEQ ID NO: 74861 - protein, 9 aa, synthetic construct
  source 1..9: note = Seed: VVGAVGVGK (KRAS G12V)
VVGMVSVGT

SEQ ID NO: 74862 - protein, 9 aa, synthetic construct
  source 1..9: note = Seed: VVGAVGVGK (KRAS G12V)
VVGNVAVGR

SEQ ID NO: 74863 - protein, 9 aa, synthetic construct
  source 1..9: note = Seed: VVGAVGVGK (KRAS G12V)
VVGNVAVGY

SEQ ID NO: 74864 - protein, 9 aa, synthetic construct
  source 1..9: note = Seed: VVGAVGVGK (KRAS G12V)
VVGNVKVGK

SEQ ID NO: 74865 - protein, 9 aa, synthetic construct
  source 1..9: note = Seed: VVGAVGVGK (KRAS G12V)
VVGNVKVGR

SEQ ID NO: 74866 - protein, 9 aa, synthetic construct
  source 1..9: note = Seed: VVGAVGVGK (KRAS G12V)
VVGNVKVGY

SEQ ID NO: 74867 - protein, 9 aa, synthetic construct
  source 1..9: note = Seed: VVGAVGVGK (KRAS G12V)
VVGNVPVGR

SEQ ID NO: 74868 - protein, 9 aa, synthetic construct
  source 1..9: note = Seed: VVGAVGVGK (KRAS G12V)
VVGNVPVGY

SEQ ID NO: 74869 - protein, 9 aa, synthetic construct
  source 1..9: note = Seed: VVGAVGVGK (KRAS G12V)
VVGNVRVGA

SEQ ID NO: 74870 - protein, 9 aa, synthetic construct
  source 1..9: note = Seed: VVGAVGVGK (KRAS G12V)
VVGNVRVGF

SEQ ID NO: 74871 - protein, 9 aa, synthetic construct
  source 1..9: note = Seed: VVGAVGVGK (KRAS G12V)
VVGNVRVGH

SEQ ID NO: 74872 - protein, 9 aa, synthetic construct
  source 1..9: note = Seed: VVGAVGVGK (KRAS G12V)
VVGNVRVGI

SEQ ID NO: 74873 - protein, 9 aa, synthetic construct
  source 1..9: note = Seed: VVGAVGVGK (KRAS G12V)
VVGNVRVGK

SEQ ID NO: 74874 - protein, 9 aa, synthetic construct
  source 1..9: note = Seed: VVGAVGVGK (KRAS G12V)
VVGNVRVGL

SEQ ID NO: 74875 - protein, 9 aa, synthetic construct
  source 1..9: note = Seed: VVGAVGVGK (KRAS G12V)
VVGNVRVGM

SEQ ID NO: 74876 - protein, 9 aa, synthetic construct
  source 1..9: note = Seed: VVGAVGVGK (KRAS G12V)
VVGNVRVGR

SEQ ID NO: 74877 - protein, 9 aa, synthetic construct
  source 1..9: note = Seed: VVGAVGVGK (KRAS G12V)
VVGNVRVGS

SEQ ID NO: 74878 - protein, 9 aa, synthetic construct
  source 1..9: note = Seed: VVGAVGVGK (KRAS G12V)
VVGNVRVGV

SEQ ID NO: 74879 - protein, 9 aa, synthetic construct
  source 1..9: note = Seed: VVGAVGVGK (KRAS G12V)
VVGNVRVGY

SEQ ID NO: 74880 - protein, 9 aa, synthetic construct
  source 1..9: note = Seed: VVGAVGVGK (KRAS G12V)
VVGPVRVGR

SEQ ID NO: 74881 - protein, 9 aa, synthetic construct
  source 1..9: note = Seed: VVGAVGVGK (KRAS G12V)
VVGQVAVGA

SEQ ID NO: 74882 - protein, 9 aa, synthetic construct
  source 1..9: note = Seed: VVGAVGVGK (KRAS G12V)
VVGQVAVGI

SEQ ID NO: 74883 - protein, 9 aa, synthetic construct
  source 1..9: note = Seed: VVGAVGVGK (KRAS G12V)
VVGQVAVGL

SEQ ID NO: 74884 - protein, 9 aa, synthetic construct
  source 1..9: note = Seed: VVGAVGVGK (KRAS G12V)
VVGQVAVGM

SEQ ID NO: 74885 - protein, 9 aa, synthetic construct
  source 1..9: note = Seed: VVGAVGVGK (KRAS G12V)
VVGQVAVGT

SEQ ID NO: 74886 - protein, 9 aa, synthetic construct
  source 1..9: note = Seed: VVGAVGVGK (KRAS G12V)
VVGQVAVGV

SEQ ID NO: 74887 - protein, 9 aa, synthetic construct
  source 1..9: note = Seed: VVGAVGVGK (KRAS G12V)
VVGQVGVGA

SEQ ID NO: 74888 - protein, 9 aa, synthetic construct
  source 1..9: note = Seed: VVGAVGVGK (KRAS G12V)
VVGQVGVGI

SEQ ID NO: 74889 - protein, 9 aa, synthetic construct
  source 1..9: note = Seed: VVGAVGVGK (KRAS G12V)
VVGQVGVGL

SEQ ID NO: 74890 - protein, 9 aa, synthetic construct
  source 1..9: note = Seed: VVGAVGVGK (KRAS G12V)
VVGQVGVGV

SEQ ID NO: 74891 - protein, 9 aa, synthetic construct
  source 1..9: note = Seed: VVGAVGVGK (KRAS G12V)
VVGQVKVGA

SEQ ID NO: 74892 - protein, 9 aa, synthetic construct
  source 1..9: note = Seed: VVGAVGVGK (KRAS G12V)
VVGQVKVGH

SEQ ID NO: 74893 - protein, 9 aa, synthetic construct
  source 1..9: note = Seed: VVGAVGVGK (KRAS G12V)
VVGQVKVGK

SEQ ID NO: 74894 - protein, 9 aa, synthetic construct
  source 1..9: note = Seed: VVGAVGVGK (KRAS G12V)
VVGQVKVGQ

SEQ ID NO: 74895 - protein, 9 aa, synthetic construct
  source 1..9: note = Seed: VVGAVGVGK (KRAS G12V)
VVGQVKVGR

SEQ ID NO: 74896 - protein, 9 aa, synthetic construct
  source 1..9: note = Seed: VVGAVGVGK (KRAS G12V)
VVGQVKVGS

SEQ ID NO: 74897 - protein, 9 aa, synthetic construct
  source 1..9: note = Seed: VVGAVGVGK (KRAS G12V)
VVGQVKVGY

SEQ ID NO: 74898 - protein, 9 aa, synthetic construct
  source 1..9: note = Seed: VVGAVGVGK (KRAS G12V)
VVGQVPVGA

SEQ ID NO: 74899 - protein, 9 aa, synthetic construct
  source 1..9: note = Seed: VVGAVGVGK (KRAS G12V)
VVGQVPVGI

SEQ ID NO: 74900 - protein, 9 aa, synthetic construct
  source 1..9: note = Seed: VVGAVGVGK (KRAS G12V)
VVGQVPVGL

SEQ ID NO: 74901 - protein, 9 aa, synthetic construct
  source 1..9: note = Seed: VVGAVGVGK (KRAS G12V)
VVGQVPVGV

SEQ ID NO: 74902 - protein, 9 aa, synthetic construct
  source 1..9: note = Seed: VVGAVGVGK (KRAS G12V)
VVGQVRVGA

SEQ ID NO: 74903 - protein, 9 aa, synthetic construct
  source 1..9: note = Seed: VVGAVGVGK (KRAS G12V)
VVGQVRVGG

SEQ ID NO: 74904 - protein, 9 aa, synthetic construct
  source 1..9: note = Seed: VVGAVGVGK (KRAS G12V)
VVGQVRVGH

SEQ ID NO: 74905 - protein, 9 aa, synthetic construct
  source 1..9: note = Seed: VVGAVGVGK (KRAS G12V)
VVGQVRVGK

SEQ ID NO: 74906 - protein, 9 aa, synthetic construct
  source 1..9: note = Seed: VVGAVGVGK (KRAS G12V)
VVGQVRVGQ

SEQ ID NO: 74907 - protein, 9 aa, synthetic construct
  source 1..9: note = Seed: VVGAVGVGK (KRAS G12V)
VVGQVRVGR

SEQ ID NO: 74908 - protein, 9 aa, synthetic construct
  source 1..9: note = Seed: VVGAVGVGK (KRAS G12V)
VVGQVRVGS

SEQ ID NO: 74909 - protein, 9 aa, synthetic construct
  source 1..9: note = Seed: VVGAVGVGK (KRAS G12V)
VVGQVRVGY

SEQ ID NO: 74910 - protein, 9 aa, synthetic construct
  source 1..9: note = Seed: VVGAVGVGK (KRAS G12V)
VVGRVAVGK

SEQ ID NO: 74911 - protein, 9 aa, synthetic construct
  source 1..9: note = Seed: VVGAVGVGK (KRAS G12V)
VVGRVAVGR

SEQ ID NO: 74912 - protein, 9 aa, synthetic construct
  source 1..9: note = Seed: VVGAVGVGK (KRAS G12V)
VVGRVGVGR

SEQ ID NO: 74913 - protein, 9 aa, synthetic construct
  source 1..9: note = Seed: VVGAVGVGK (KRAS G12V)
VVGRVHVGR

SEQ ID NO: 74914 - protein, 9 aa, synthetic construct
  source 1..9: note = Seed: VVGAVGVGK (KRAS G12V)
VVGRVHVGY

SEQ ID NO: 74915 - protein, 9 aa, synthetic construct
  source 1..9: note = Seed: VVGAVGVGK (KRAS G12V)
VVGRVKVGA

SEQ ID NO: 74916 - protein, 9 aa, synthetic construct
  source 1..9: note = Seed: VVGAVGVGK (KRAS G12V)
VVGRVKVGF

SEQ ID NO: 74917 - protein, 9 aa, synthetic construct
  source 1..9: note = Seed: VVGAVGVGK (KRAS G12V)
VVGRVKVGG

SEQ ID NO: 74918 - protein, 9 aa, synthetic construct
  source 1..9: note = Seed: VVGAVGVGK (KRAS G12V)
VVGRVKVGH

SEQ ID NO: 74919 - protein, 9 aa, synthetic construct
  source 1..9: note = Seed: VVGAVGVGK (KRAS G12V)
VVGRVKVGI

SEQ ID NO: 74920 - protein, 9 aa, synthetic construct
  source 1..9: note = Seed: VVGAVGVGK (KRAS G12V)
VVGRVKVGK

SEQ ID NO: 74921 - protein, 9 aa, synthetic construct
  source 1..9: note = Seed: VVGAVGVGK (KRAS G12V)
VVGRVKVGL

SEQ ID NO: 74922 - protein, 9 aa, synthetic construct
  source 1..9: note = Seed: VVGAVGVGK (KRAS G12V)
VVGRVKVGM

SEQ ID NO: 74923 - protein, 9 aa, synthetic construct
  source 1..9: note = Seed: VVGAVGVGK (KRAS G12V)
VVGRVKVGQ

SEQ ID NO: 74924 - protein, 9 aa, synthetic construct
  source 1..9: note = Seed: VVGAVGVGK (KRAS G12V)
VVGRVKVGR

SEQ ID NO: 74925 - protein, 9 aa, synthetic construct
  source 1..9: note = Seed: VVGAVGVGK (KRAS G12V)
VVGRVKVGS

SEQ ID NO: 74926 - protein, 9 aa, synthetic construct
  source 1..9: note = Seed: VVGAVGVGK (KRAS G12V)
VVGRVKVGT

SEQ ID NO: 74927 - protein, 9 aa, synthetic construct
  source 1..9: note = Seed: VVGAVGVGK (KRAS G12V)
VVGRVKVGV

SEQ ID NO: 74928 - protein, 9 aa, synthetic construct
  source 1..9: note = Seed: VVGAVGVGK (KRAS G12V)
VVGRVKVGY

SEQ ID NO: 74929 - protein, 9 aa, synthetic construct
  source 1..9: note = Seed: VVGAVGVGK (KRAS G12V)
VVGRVMVGR

SEQ ID NO: 74930 - protein, 9 aa, synthetic construct
  source 1..9: note = Seed: VVGAVGVGK (KRAS G12V)
VVGRVNVGK

SEQ ID NO: 74931 - protein, 9 aa, synthetic construct
  source 1..9: note = Seed: VVGAVGVGK (KRAS G12V)
VVGRVNVGR

SEQ ID NO: 74932 - protein, 9 aa, synthetic construct
  source 1..9: note = Seed: VVGAVGVGK (KRAS G12V)
VVGRVNVGY

SEQ ID NO: 74933 - protein, 9 aa, synthetic construct
  source 1..9: note = Seed: VVGAVGVGK (KRAS G12V)
VVGRVPVGR

SEQ ID NO: 74934 - protein, 9 aa, synthetic construct
  source 1..9: note = Seed: VVGAVGVGK (KRAS G12V)
VVGRVQVGR

SEQ ID NO: 74935 - protein, 9 aa, synthetic construct
  source 1..9: note = Seed: VVGAVGVGK (KRAS G12V)
VVGRVRVGA

SEQ ID NO: 74936 - protein, 9 aa, synthetic construct
  source 1..9: note = Seed: VVGAVGVGK (KRAS G12V)
VVGRVRVGD

SEQ ID NO: 74937 - protein, 9 aa, synthetic construct
  source 1..9: note = Seed: VVGAVGVGK (KRAS G12V)
VVGRVRVGE

SEQ ID NO: 74938 - protein, 9 aa, synthetic construct
  source 1..9: note = Seed: VVGAVGVGK (KRAS G12V)
VVGRVRVGF

SEQ ID NO: 74939 - protein, 9 aa, synthetic construct
  source 1..9: note = Seed: VVGAVGVGK (KRAS G12V)
VVGRVRVGG

SEQ ID NO: 74940 - protein, 9 aa, synthetic construct
  source 1..9: note = Seed: VVGAVGVGK (KRAS G12V)
VVGRVRVGH

SEQ ID NO: 74941 - protein, 9 aa, synthetic construct
  source 1..9: note = Seed: VVGAVGVGK (KRAS G12V)
VVGRVRVGI

SEQ ID NO: 74942 - protein, 9 aa, synthetic construct
  source 1..9: note = Seed: VVGAVGVGK (KRAS G12V)
VVGRVRVGK

SEQ ID NO: 74943 - protein, 9 aa, synthetic construct
  source 1..9: note = Seed: VVGAVGVGK (KRAS G12V)
VVGRVRVGL

SEQ ID NO: 74944 - protein, 9 aa, synthetic construct
  source 1..9: note = Seed: VVGAVGVGK (KRAS G12V)
VVGRVRVGM

SEQ ID NO: 74945 - protein, 9 aa, synthetic construct
  source 1..9: note = Seed: VVGAVGVGK (KRAS G12V)
VVGRVRVGN

SEQ ID NO: 74946 - protein, 9 aa, synthetic construct
  source 1..9: note = Seed: VVGAVGVGK (KRAS G12V)
VVGRVRVGQ

SEQ ID NO: 74947 - protein, 9 aa, synthetic construct
  source 1..9: note = Seed: VVGAVGVGK (KRAS G12V)
VVGRVRVGR

SEQ ID NO: 74948 - protein, 9 aa, synthetic construct
  source 1..9: note = Seed: VVGAVGVGK (KRAS G12V)
VVGRVRVGS

SEQ ID NO: 74949 - protein, 9 aa, synthetic construct
  source 1..9: note = Seed: VVGAVGVGK (KRAS G12V)
VVGRVRVGT

SEQ ID NO: 74950 - protein, 9 aa, synthetic construct
  source 1..9: note = Seed: VVGAVGVGK (KRAS G12V)
VVGRVRVGV

SEQ ID NO: 74951 - protein, 9 aa, synthetic construct
  source 1..9: note = Seed: VVGAVGVGK (KRAS G12V)
VVGRVRVGY

SEQ ID NO: 74952 - protein, 9 aa, synthetic construct
  source 1..9: note = Seed: VVGAVGVGK (KRAS G12V)
VVGRVSVGK

SEQ ID NO: 74953 - protein, 9 aa, synthetic construct
  source 1..9: note = Seed: VVGAVGVGK (KRAS G12V)
VVGRVSVGR

SEQ ID NO: 74954 - protein, 9 aa, synthetic construct
  source 1..9: note = Seed: VVGAVGVGK (KRAS G12V)
VVGRVTVGR

SEQ ID NO: 74955 - protein, 9 aa, synthetic construct
  source 1..9: note = Seed: VVGAVGVGK (KRAS G12V)
VVGRVVVGR

SEQ ID NO: 74956 - protein, 9 aa, synthetic construct
  source 1..9: note = Seed: VVGAVGVGK (KRAS G12V)
VVGSVAVGA

SEQ ID NO: 74957 - protein, 9 aa, synthetic construct
  source 1..9: note = Seed: VVGAVGVGK (KRAS G12V)
VVGSVAVGL

SEQ ID NO: 74958 - protein, 9 aa, synthetic construct
  source 1..9: note = Seed: VVGAVGVGK (KRAS G12V)
VVGSVAVGR

SEQ ID NO: 74959 - protein, 9 aa, synthetic construct
  source 1..9: note = Seed: VVGAVGVGK (KRAS G12V)
VVGSVAVGV

SEQ ID NO: 74960 - protein, 9 aa, synthetic construct
  source 1..9: note = Seed: VVGAVGVGK (KRAS G12V)
VVGSVKVGA

SEQ ID NO: 74961 - protein, 9 aa, synthetic construct
  source 1..9: note = Seed: VVGAVGVGK (KRAS G12V)
VVGSVKVGH

SEQ ID NO: 74962 - protein, 9 aa, synthetic construct
  source 1..9: note = Seed: VVGAVGVGK (KRAS G12V)
VVGSVKVGK

SEQ ID NO: 74963 - protein, 9 aa, synthetic construct
  source 1..9: note = Seed: VVGAVGVGK (KRAS G12V)
VVGSVKVGL

SEQ ID NO: 74964 - protein, 9 aa, synthetic construct
  source 1..9: note = Seed: VVGAVGVGK (KRAS G12V)
VVGSVKVGM

SEQ ID NO: 74965 - protein, 9 aa, synthetic construct
  source 1..9: note = Seed: VVGAVGVGK (KRAS G12V)
VVGSVKVGR

SEQ ID NO: 74966 - protein, 9 aa, synthetic construct
  source 1..9: note = Seed: VVGAVGVGK (KRAS G12V)
VVGSVKVGS

SEQ ID NO: 74967 - protein, 9 aa, synthetic construct
  source 1..9: note = Seed: VVGAVGVGK (KRAS G12V)
VVGSVKVGV

SEQ ID NO: 74968 - protein, 9 aa, synthetic construct
  source 1..9: note = Seed: VVGAVGVGK (KRAS G12V)
VVGSVKVGY

SEQ ID NO: 74969 - protein, 9 aa, synthetic construct
  source 1..9: note = Seed: VVGAVGVGK (KRAS G12V)
VVGSVPVGA

SEQ ID NO: 74970 - protein, 9 aa, synthetic construct
  source 1..9: note = Seed: VVGAVGVGK (KRAS G12V)
VVGSVPVGI

SEQ ID NO: 74971 - protein, 9 aa, synthetic construct
  source 1..9: note = Seed: VVGAVGVGK (KRAS G12V)
VVGSVPVGL

SEQ ID NO: 74972 - protein, 9 aa, synthetic construct
  source 1..9: note = Seed: VVGAVGVGK (KRAS G12V)
VVGSVPVGM

SEQ ID NO: 74973 - protein, 9 aa, synthetic construct
  source 1..9: note = Seed: VVGAVGVGK (KRAS G12V)
VVGSVPVGR

SEQ ID NO: 74974 - protein, 9 aa, synthetic construct
  source 1..9: note = Seed: VVGAVGVGK (KRAS G12V)
VVGSVPVGV

SEQ ID NO: 74975 - protein, 9 aa, synthetic construct
  source 1..9: note = Seed: VVGAVGVGK (KRAS G12V)
VVGSVPVGY

SEQ ID NO: 74976 - protein, 9 aa, synthetic construct
  source 1..9: note = Seed: VVGAVGVGK (KRAS G12V)
VVGSVRVGA

SEQ ID NO: 74977 - protein, 9 aa, synthetic construct
  source 1..9: note = Seed: VVGAVGVGK (KRAS G12V)
VVGSVRVGF

SEQ ID NO: 74978 - protein, 9 aa, synthetic construct
  source 1..9: note = Seed: VVGAVGVGK (KRAS G12V)
VVGSVRVGH

SEQ ID NO: 74979 - protein, 9 aa, synthetic construct
  source 1..9: note = Seed: VVGAVGVGK (KRAS G12V)
VVGSVRVGK

SEQ ID NO: 74980 - protein, 9 aa, synthetic construct
  source 1..9: note = Seed: VVGAVGVGK (KRAS G12V)
VVGSVRVGL

SEQ ID NO: 74981 - protein, 9 aa, synthetic construct
  source 1..9: note = Seed: VVGAVGVGK (KRAS G12V)
VVGSVRVGM

SEQ ID NO: 74982 - protein, 9 aa, synthetic construct
  source 1..9: note = Seed: VVGAVGVGK (KRAS G12V)
VVGSVRVGQ

SEQ ID NO: 74983 - protein, 9 aa, synthetic construct
  source 1..9: note = Seed: VVGAVGVGK (KRAS G12V)
VVGSVRVGR

SEQ ID NO: 74984 - protein, 9 aa, synthetic construct
  source 1..9: note = Seed: VVGAVGVGK (KRAS G12V)
VVGSVRVGS

SEQ ID NO: 74985 - protein, 9 aa, synthetic construct
  source 1..9: note = Seed: VVGAVGVGK (KRAS G12V)
VVGSVRVGV

SEQ ID NO: 74986 - protein, 9 aa, synthetic construct
  source 1..9: note = Seed: VVGAVGVGK (KRAS G12V)
VVGSVRVGY

SEQ ID NO: 74987 - protein, 9 aa, synthetic construct
  source 1..9: note = Seed: VVGAVGVGK (KRAS G12V)
VVGTVKVGH

SEQ ID NO: 74988 - protein, 9 aa, synthetic construct
  source 1..9: note = Seed: VVGAVGVGK (KRAS G12V)
VVGTVKVGK

SEQ ID NO: 74989 - protein, 9 aa, synthetic construct
  source 1..9: note = Seed: VVGAVGVGK (KRAS G12V)
VVGTVKVGR

SEQ ID NO: 74990 - protein, 9 aa, synthetic construct
  source 1..9: note = Seed: VVGAVGVGK (KRAS G12V)
VVGTVKVGY

SEQ ID NO: 74991 - protein, 9 aa, synthetic construct
  source 1..9: note = Seed: VVGAVGVGK (KRAS G12V)
VVGTVPVGI

SEQ ID NO: 74992 - protein, 9 aa, synthetic construct
  source 1..9: note = Seed: VVGAVGVGK (KRAS G12V)
VVGTVPVGR

SEQ ID NO: 74993 - protein, 9 aa, synthetic construct
  source 1..9: note = Seed: VVGAVGVGK (KRAS G12V)
VVGTVPVGV

SEQ ID NO: 74994 - protein, 9 aa, synthetic construct
  source 1..9: note = Seed: VVGAVGVGK (KRAS G12V)
VVGTVRVGA

SEQ ID NO: 74995 - protein, 9 aa, synthetic construct
  source 1..9: note = Seed: VVGAVGVGK (KRAS G12V)
VVGTVRVGH

SEQ ID NO: 74996 - protein, 9 aa, synthetic construct
  source 1..9: note = Seed: VVGAVGVGK (KRAS G12V)
VVGTVRVGK

SEQ ID NO: 74997 - protein, 9 aa, synthetic construct
  source 1..9: note = Seed: VVGAVGVGK (KRAS G12V)
VVGTVRVGR

SEQ ID NO: 74998 - protein, 9 aa, synthetic construct
  source 1..9: note = Seed: VVGAVGVGK (KRAS G12V)
VVGTVRVGS

SEQ ID NO: 74999 - protein, 9 aa, synthetic construct
  source 1..9: note = Seed: VVGAVGVGK (KRAS G12V)
VVGTVRVGY

SEQ ID NO: 75000 - protein, 9 aa, synthetic construct
  source 1..9: note = Seed: VVGAVGVGK (KRAS G12V)
VVGVVHVGR

SEQ ID NO: 75001 - protein, 9 aa, synthetic construct
  source 1..9: note = Seed: VVGAVGVGK (KRAS G12V)
VVGVVKVGA

SEQ ID NO: 75002 - protein, 9 aa, synthetic construct
  source 1..9: note = Seed: VVGAVGVGK (KRAS G12V)
VVGVVKVGG

SEQ ID NO: 75003 - protein, 9 aa, synthetic construct
  source 1..9: note = Seed: VVGAVGVGK (KRAS G12V)
VVGVVKVGH

SEQ ID NO: 75004 - protein, 9 aa, synthetic construct
  source 1..9: note = Seed: VVGAVGVGK (KRAS G12V)
VVGVVKVGK

SEQ ID NO: 75005 - protein, 9 aa, synthetic construct
  source 1..9: note = Seed: VVGAVGVGK (KRAS G12V)
VVGVVKVGQ

SEQ ID NO: 75006 - protein, 9 aa, synthetic construct
  source 1..9: note = Seed: VVGAVGVGK (KRAS G12V)
VVGVVKVGR

SEQ ID NO: 75007 - protein, 9 aa, synthetic construct
  source 1..9: note = Seed: VVGAVGVGK (KRAS G12V)
VVGVVKVGS

SEQ ID NO: 75008 - protein, 9 aa, synthetic construct
  source 1..9: note = Seed: VVGAVGVGK (KRAS G12V)
VVGVVPVGR

SEQ ID NO: 75009 - protein, 9 aa, synthetic construct
  source 1..9: note = Seed: VVGAVGVGK (KRAS G12V)
VVGVVRVGG

SEQ ID NO: 75010 - protein, 9 aa, synthetic construct
  source 1..9: note = Seed: VVGAVGVGK (KRAS G12V)
VVGVVRVGH

SEQ ID NO: 75011 - protein, 9 aa, synthetic construct
  source 1..9: note = Seed: VVGAVGVGK (KRAS G12V)
VVGVVRVGK

SEQ ID NO: 75012 - protein, 9 aa, synthetic construct
  source 1..9: note = Seed: VVGAVGVGK (KRAS G12V)
VVGVVRVGN

SEQ ID NO: 75013 - protein, 9 aa, synthetic construct
  source 1..9: note = Seed: VVGAVGVGK (KRAS G12V)
VVGVVRVGQ

SEQ ID NO: 75014 - protein, 9 aa, synthetic construct
  source 1..9: note = Seed: VVGAVGVGK (KRAS G12V)
VVGVVRVGR

SEQ ID NO: 75015 - protein, 9 aa, synthetic construct
  source 1..9: note = Seed: VVGAVGVGK (KRAS G12V)
VVGVVRVGS

SEQ ID NO: 75016 - protein, 9 aa, synthetic construct
  source 1..9: note = Seed: VVGAVGVGK (KRAS G12V)
VVGVVRVGY

SEQ ID NO: 75017 - protein, 9 aa, synthetic construct
  source 1..9: note = Seed: VVGAVGVGK (KRAS G12V)
VVGWVAVGR

SEQ ID NO: 75018 - protein, 9 aa, synthetic construct
  source 1..9: note = Seed: VVGAVGVGK (KRAS G12V)
VVGWVHVGR

SEQ ID NO: 75019 - protein, 9 aa, synthetic construct
  source 1..9: note = Seed: VVGAVGVGK (KRAS G12V)
VVGWVKVGH

SEQ ID NO: 75020 - protein, 9 aa, synthetic construct
  source 1..9: note = Seed: VVGAVGVGK (KRAS G12V)
VVGWVKVGK

SEQ ID NO: 75021 - protein, 9 aa, synthetic construct
  source 1..9: note = Seed: VVGAVGVGK (KRAS G12V)
VVGWVKVGR

SEQ ID NO: 75022 - protein, 9 aa, synthetic construct
  source 1..9: note = Seed: VVGAVGVGK (KRAS G12V)
VVGWVKVGY

SEQ ID NO: 75023 - protein, 9 aa, synthetic construct
  source 1..9: note = Seed: VVGAVGVGK (KRAS G12V)
VVGWVPVGR

SEQ ID NO: 75024 - protein, 9 aa, synthetic construct
  source 1..9: note = Seed: VVGAVGVGK (KRAS G12V)
VVGWVRVGH

SEQ ID NO: 75025 - protein, 9 aa, synthetic construct
  source 1..9: note = Seed: VVGAVGVGK (KRAS G12V)
VVGWVRVGK

SEQ ID NO: 75026 - protein, 9 aa, synthetic construct
  source 1..9: note = Seed: VVGAVGVGK (KRAS G12V)
VVGWVRVGR

SEQ ID NO: 75027 - protein, 9 aa, synthetic construct
  source 1..9: note = Seed: VVGAVGVGK (KRAS G12V)
VVGWVRVGS

SEQ ID NO: 75028 - protein, 9 aa, synthetic construct
  source 1..9: note = Seed: VVGAVGVGK (KRAS G12V)
VVGWVRVGY

SEQ ID NO: 75029 - protein, 9 aa, synthetic construct
  source 1..9: note = Seed: VVGAVGVGK (KRAS G12V)
VVGWVSVGR

SEQ ID NO: 75030 - protein, 9 aa, synthetic construct
  source 1..9: note = Seed: VVGAVGVGK (KRAS G12V)
VVGYVKVGH

SEQ ID NO: 75031 - protein, 9 aa, synthetic construct
  source 1..9: note = Seed: VVGAVGVGK (KRAS G12V)
VVGYVKVGK

SEQ ID NO: 75032 - protein, 9 aa, synthetic construct
  source 1..9: note = Seed: VVGAVGVGK (KRAS G12V)
VVGYVKVGR

SEQ ID NO: 75033 - protein, 9 aa, synthetic construct
  source 1..9: note = Seed: VVGAVGVGK (KRAS G12V)
VVGYVPVGR

SEQ ID NO: 75034 - protein, 9 aa, synthetic construct
  source 1..9: note = Seed: VVGAVGVGK (KRAS G12V)
VVGYVRVGH

SEQ ID NO: 75035 - protein, 9 aa, synthetic construct
  source 1..9: note = Seed: VVGAVGVGK (KRAS G12V)
VVGYVRVGK

SEQ ID NO: 75036 - protein, 9 aa, synthetic construct
  source 1..9: note = Seed: VVGAVGVGK (KRAS G12V)
VVGYVRVGR

SEQ ID NO: 75037 - protein, 9 aa, synthetic construct
  source 1..9: note = Seed: VVGAVGVGK (KRAS G12V)
WVGAVAVGA

SEQ ID NO: 75038 - protein, 9 aa, synthetic construct
  source 1..9: note = Seed: VVGAVGVGK (KRAS G12V)
WVGAVAVGG

SEQ ID NO: 75039 - protein, 9 aa, synthetic construct
  source 1..9: note = Seed: VVGAVGVGK (KRAS G12V)
WVGAVAVGH

SEQ ID NO: 75040 - protein, 9 aa, synthetic construct
  source 1..9: note = Seed: VVGAVGVGK (KRAS G12V)
WVGAVAVGI

SEQ ID NO: 75041 - protein, 9 aa, synthetic construct
  source 1..9: note = Seed: VVGAVGVGK (KRAS G12V)
WVGAVAVGK

SEQ ID NO: 75042 - protein, 9 aa, synthetic construct
  source 1..9: note = Seed: VVGAVGVGK (KRAS G12V)
WVGAVAVGL

SEQ ID NO: 75043 - protein, 9 aa, synthetic construct
  source 1..9: note = Seed: VVGAVGVGK (KRAS G12V)
WVGAVAVGM

SEQ ID NO: 75044 - protein, 9 aa, synthetic construct
  source 1..9: note = Seed: VVGAVGVGK (KRAS G12V)
WVGAVAVGN

SEQ ID NO: 75045 - protein, 9 aa, synthetic construct
  source 1..9: note = Seed: VVGAVGVGK (KRAS G12V)
WVGAVAVGR

SEQ ID NO: 75046 - protein, 9 aa, synthetic construct
  source 1..9: note = Seed: VVGAVGVGK (KRAS G12V)
WVGAVAVGS

SEQ ID NO: 75047 - protein, 9 aa, synthetic construct
  source 1..9: note = Seed: VVGAVGVGK (KRAS G12V)
WVGAVAVGT

SEQ ID NO: 75048 - protein, 9 aa, synthetic construct
  source 1..9: note = Seed: VVGAVGVGK (KRAS G12V)
WVGAVAVGV

SEQ ID NO: 75049 - protein, 9 aa, synthetic construct
  source 1..9: note = Seed: VVGAVGVGK (KRAS G12V)
WVGAVAVGY

SEQ ID NO: 75050 - protein, 9 aa, synthetic construct
  source 1..9: note = Seed: VVGAVGVGK (KRAS G12V)
WVGAVGVGA

SEQ ID NO: 75051 - protein, 9 aa, synthetic construct
  source 1..9: note = Seed: VVGAVGVGK (KRAS G12V)
WVGAVGVGG

SEQ ID NO: 75052 - protein, 9 aa, synthetic construct
  source 1..9: note = Seed: VVGAVGVGK (KRAS G12V)
WVGAVGVGH

SEQ ID NO: 75053 - protein, 9 aa, synthetic construct
  source 1..9: note = Seed: VVGAVGVGK (KRAS G12V)
WVGAVGVGI

SEQ ID NO: 75054 - protein, 9 aa, synthetic construct
  source 1..9: note = Seed: VVGAVGVGK (KRAS G12V)
WVGAVGVGL

SEQ ID NO: 75055 - protein, 9 aa, synthetic construct
  source 1..9: note = Seed: VVGAVGVGK (KRAS G12V)
WVGAVGVGM

SEQ ID NO: 75056 - protein, 9 aa, synthetic construct
  source 1..9: note = Seed: VVGAVGVGK (KRAS G12V)
WVGAVGVGN

SEQ ID NO: 75057 - protein, 9 aa, synthetic construct
  source 1..9: note = Seed: VVGAVGVGK (KRAS G12V)
WVGAVGVGS

SEQ ID NO: 75058 - protein, 9 aa, synthetic construct
  source 1..9: note = Seed: VVGAVGVGK (KRAS G12V)
WVGAVGVGT

SEQ ID NO: 75059 - protein, 9 aa, synthetic construct
  source 1..9: note = Seed: VVGAVGVGK (KRAS G12V)
WVGAVGVGV

SEQ ID NO: 75060 - protein, 9 aa, synthetic construct
  source 1..9: note = Seed: VVGAVGVGK (KRAS G12V)
WVGAVKVGA

SEQ ID NO: 75061 - protein, 9 aa, synthetic construct
  source 1..9: note = Seed: VVGAVGVGK (KRAS G12V)
WVGAVKVGG

SEQ ID NO: 75062 - protein, 9 aa, synthetic construct
  source 1..9: note = Seed: VVGAVGVGK (KRAS G12V)
WVGAVKVGH

SEQ ID NO: 75063 - protein, 9 aa, synthetic construct
  source 1..9: note = Seed: VVGAVGVGK (KRAS G12V)
WVGAVKVGL

SEQ ID NO: 75064 - protein, 9 aa, synthetic construct
  source 1..9: note = Seed: VVGAVGVGK (KRAS G12V)
WVGAVKVGM

SEQ ID NO: 75065 - protein, 9 aa, synthetic construct
  source 1..9: note = Seed: VVGAVGVGK (KRAS G12V)
WVGAVKVGQ

SEQ ID NO: 75066 - protein, 9 aa, synthetic construct
  source 1..9: note = Seed: VVGAVGVGK (KRAS G12V)
WVGAVKVGR

SEQ ID NO: 75067 - protein, 9 aa, synthetic construct
  source 1..9: note = Seed: VVGAVGVGK (KRAS G12V)
WVGAVKVGS

SEQ ID NO: 75068 - protein, 9 aa, synthetic construct
  source 1..9: note = Seed: VVGAVGVGK (KRAS G12V)
WVGAVNVGA

SEQ ID NO: 75069 - protein, 9 aa, synthetic construct
  source 1..9: note = Seed: VVGAVGVGK (KRAS G12V)
WVGAVNVGL

SEQ ID NO: 75070 - protein, 9 aa, synthetic construct
  source 1..9: note = Seed: VVGAVGVGK (KRAS G12V)
WVGAVNVGV

SEQ ID NO: 75071 - protein, 9 aa, synthetic construct
  source 1..9: note = Seed: VVGAVGVGK (KRAS G12V)
WVGAVPVGA

SEQ ID NO: 75072 - protein, 9 aa, synthetic construct
  source 1..9: note = Seed: VVGAVGVGK (KRAS G12V)
WVGAVPVGF

SEQ ID NO: 75073 - protein, 9 aa, synthetic construct
  source 1..9: note = Seed: VVGAVGVGK (KRAS G12V)
WVGAVPVGG

SEQ ID NO: 75074 - protein, 9 aa, synthetic construct
  source 1..9: note = Seed: VVGAVGVGK (KRAS G12V)
WVGAVPVGH

SEQ ID NO: 75075 - protein, 9 aa, synthetic construct
  source 1..9: note = Seed: VVGAVGVGK (KRAS G12V)
WVGAVPVGI

SEQ ID NO: 75076 - protein, 9 aa, synthetic construct
  source 1..9: note = Seed: VVGAVGVGK (KRAS G12V)
WVGAVPVGK

SEQ ID NO: 75077 - protein, 9 aa, synthetic construct
  source 1..9: note = Seed: VVGAVGVGK (KRAS G12V)
WVGAVPVGL

SEQ ID NO: 75078 - protein, 9 aa, synthetic construct
  source 1..9: note = Seed: VVGAVGVGK (KRAS G12V)
WVGAVPVGM

SEQ ID NO: 75079 - protein, 9 aa, synthetic construct
  source 1..9: note = Seed: VVGAVGVGK (KRAS G12V)
WVGAVPVGN

SEQ ID NO: 75080 - protein, 9 aa, synthetic construct
  source 1..9: note = Seed: VVGAVGVGK (KRAS G12V)
WVGAVPVGP

SEQ ID NO: 75081 - protein, 9 aa, synthetic construct
  source 1..9: note = Seed: VVGAVGVGK (KRAS G12V)
WVGAVPVGQ

SEQ ID NO: 75082 - protein, 9 aa, synthetic construct
  source 1..9: note = Seed: VVGAVGVGK (KRAS G12V)
WVGAVPVGR

SEQ ID NO: 75083 - protein, 9 aa, synthetic construct
  source 1..9: note = Seed: VVGAVGVGK (KRAS G12V)
WVGAVPVGS

SEQ ID NO: 75084 - protein, 9 aa, synthetic construct
  source 1..9: note = Seed: VVGAVGVGK (KRAS G12V)
WVGAVPVGT

SEQ ID NO: 75085 - protein, 9 aa, synthetic construct
  source 1..9: note = Seed: VVGAVGVGK (KRAS G12V)
WVGAVPVGV

SEQ ID NO: 75086 - protein, 9 aa, synthetic construct
  source 1..9: note = Seed: VVGAVGVGK (KRAS G12V)
WVGAVPVGY

SEQ ID NO: 75087 - protein, 9 aa, synthetic construct
  source 1..9: note = Seed: VVGAVGVGK (KRAS G12V)
WVGAVRVGA

SEQ ID NO: 75088 - protein, 9 aa, synthetic construct
  source 1..9: note = Seed: VVGAVGVGK (KRAS G12V)
WVGAVRVGG

SEQ ID NO: 75089 - protein, 9 aa, synthetic construct
  source 1..9: note = Seed: VVGAVGVGK (KRAS G12V)
WVGAVRVGH

SEQ ID NO: 75090 - protein, 9 aa, synthetic construct
  source 1..9: note = Seed: VVGAVGVGK (KRAS G12V)
WVGAVRVGQ

SEQ ID NO: 75091 - protein, 9 aa, synthetic construct
  source 1..9: note = Seed: VVGAVGVGK (KRAS G12V)
WVGAVRVGR

SEQ ID NO: 75092 - protein, 9 aa, synthetic construct
  source 1..9: note = Seed: VVGAVGVGK (KRAS G12V)
WVGAVRVGS

SEQ ID NO: 75093 - protein, 9 aa, synthetic construct
  source 1..9: note = Seed: VVGAVGVGK (KRAS G12V)
WVGAVSVGA

SEQ ID NO: 75094 - protein, 9 aa, synthetic construct
  source 1..9: note = Seed: VVGAVGVGK (KRAS G12V)
WVGAVSVGG

SEQ ID NO: 75095 - protein, 9 aa, synthetic construct
  source 1..9: note = Seed: VVGAVGVGK (KRAS G12V)
WVGAVSVGH

SEQ ID NO: 75096 - protein, 9 aa, synthetic construct
  source 1..9: note = Seed: VVGAVGVGK (KRAS G12V)
WVGAVSVGI

SEQ ID NO: 75097 - protein, 9 aa, synthetic construct
  source 1..9: note = Seed: VVGAVGVGK (KRAS G12V)
WVGAVSVGK

SEQ ID NO: 75098 - protein, 9 aa, synthetic construct
  source 1..9: note = Seed: VVGAVGVGK (KRAS G12V)
WVGAVSVGL

SEQ ID NO: 75099 - protein, 9 aa, synthetic construct
  source 1..9: note = Seed: VVGAVGVGK (KRAS G12V)
WVGAVSVGM

SEQ ID NO: 75100 - protein, 9 aa, synthetic construct
  source 1..9: note = Seed: VVGAVGVGK (KRAS G12V)
WVGAVSVGN

SEQ ID NO: 75101 - protein, 9 aa, synthetic construct
  source 1..9: note = Seed: VVGAVGVGK (KRAS G12V)
WVGAVSVGR

SEQ ID NO: 75102 - protein, 9 aa, synthetic construct
  source 1..9: note = Seed: VVGAVGVGK (KRAS G12V)
WVGAVSVGS

SEQ ID NO: 75103 - protein, 9 aa, synthetic construct
  source 1..9: note = Seed: VVGAVGVGK (KRAS G12V)
WVGAVSVGT

SEQ ID NO: 75104 - protein, 9 aa, synthetic construct
  source 1..9: note = Seed: VVGAVGVGK (KRAS G12V)
WVGAVSVGV

SEQ ID NO: 75105 - protein, 9 aa, synthetic construct
  source 1..9: note = Seed: VVGAVGVGK (KRAS G12V)
WVGAVTVGA

SEQ ID NO: 75106 - protein, 9 aa, synthetic construct
  source 1..9: note = Seed: VVGAVGVGK (KRAS G12V)
WVGAVTVGL

SEQ ID NO: 75107 - protein, 9 aa, synthetic construct
  source 1..9: note = Seed: VVGAVGVGK (KRAS G12V)
WVGAVTVGM

SEQ ID NO: 75108 - protein, 9 aa, synthetic construct
  source 1..9: note = Seed: VVGAVGVGK (KRAS G12V)
WVGAVTVGV

SEQ ID NO: 75109 - protein, 9 aa, synthetic construct
  source 1..9: note = Seed: VVGAVGVGK (KRAS G12V)
WVGAVVVGR

SEQ ID NO: 75110 - protein, 9 aa, synthetic construct
  source 1..9: note = Seed: VVGAVGVGK (KRAS G12V)
WVGCVAVGA

SEQ ID NO: 75111 - protein, 9 aa, synthetic construct
  source 1..9: note = Seed: VVGAVGVGK (KRAS G12V)
WVGEVAVGA

SEQ ID NO: 75112 - protein, 9 aa, synthetic construct
  source 1..9: note = Seed: VVGAVGVGK (KRAS G12V)
WVGEVAVGI

SEQ ID NO: 75113 - protein, 9 aa, synthetic construct
  source 1..9: note = Seed: VVGAVGVGK (KRAS G12V)
WVGEVAVGL

SEQ ID NO: 75114 - protein, 9 aa, synthetic construct
  source 1..9: note = Seed: VVGAVGVGK (KRAS G12V)
WVGEVAVGT

SEQ ID NO: 75115 - protein, 9 aa, synthetic construct
  source 1..9: note = Seed: VVGAVGVGK (KRAS G12V)
WVGEVAVGV

SEQ ID NO: 75116 - protein, 9 aa, synthetic construct
  source 1..9: note = Seed: VVGAVGVGK (KRAS G12V)
WVGEVGVGA

SEQ ID NO: 75117 - protein, 9 aa, synthetic construct
  source 1..9: note = Seed: VVGAVGVGK (KRAS G12V)
WVGEVGVGI

SEQ ID NO: 75118 - protein, 9 aa, synthetic construct
  source 1..9: note = Seed: VVGAVGVGK (KRAS G12V)
WVGEVGVGL

SEQ ID NO: 75119 - protein, 9 aa, synthetic construct
  source 1..9: note = Seed: VVGAVGVGK (KRAS G12V)
WVGEVGVGV

SEQ ID NO: 75120 - protein, 9 aa, synthetic construct
  source 1..9: note = Seed: VVGAVGVGK (KRAS G12V)
WVGEVPVGA

SEQ ID NO: 75121 - protein, 9 aa, synthetic construct
  source 1..9: note = Seed: VVGAVGVGK (KRAS G12V)
WVGEVPVGL

SEQ ID NO: 75122 - protein, 9 aa, synthetic construct
  source 1..9: note = Seed: VVGAVGVGK (KRAS G12V)
WVGEVPVGV

SEQ ID NO: 75123 - protein, 9 aa, synthetic construct
  source 1..9: note = Seed: VVGAVGVGK (KRAS G12V)
WVGEVSVGA

SEQ ID NO: 75124 - protein, 9 aa, synthetic construct
  source 1..9: note = Seed: VVGAVGVGK (KRAS G12V)
WVGEVSVGV

SEQ ID NO: 75125 - protein, 9 aa, synthetic construct
  source 1..9: note = Seed: VVGAVGVGK (KRAS G12V)
WVGFVAVGI

SEQ ID NO: 75126 - protein, 9 aa, synthetic construct
  source 1..9: note = Seed: VVGAVGVGK (KRAS G12V)
WVGFVAVGM

SEQ ID NO: 75127 - protein, 9 aa, synthetic construct
  source 1..9: note = Seed: VVGAVGVGK (KRAS G12V)
WVGFVAVGR

SEQ ID NO: 75128 - protein, 9 aa, synthetic construct
  source 1..9: note = Seed: VVGAVGVGK (KRAS G12V)
WVGFVAVGV

SEQ ID NO: 75129 - protein, 9 aa, synthetic construct
  source 1..9: note = Seed: VVGAVGVGK (KRAS G12V)
WVGFVKVGK

SEQ ID NO: 75130 - protein, 9 aa, synthetic construct
  source 1..9: note = Seed: VVGAVGVGK (KRAS G12V)
WVGFVKVGR

SEQ ID NO: 75131 - protein, 9 aa, synthetic construct
  source 1..9: note = Seed: VVGAVGVGK (KRAS G12V)
WVGFVPVGI

SEQ ID NO: 75132 - protein, 9 aa, synthetic construct
  source 1..9: note = Seed: VVGAVGVGK (KRAS G12V)
WVGFVPVGL

SEQ ID NO: 75133 - protein, 9 aa, synthetic construct
  source 1..9: note = Seed: VVGAVGVGK (KRAS G12V)
WVGFVPVGM

SEQ ID NO: 75134 - protein, 9 aa, synthetic construct
  source 1..9: note = Seed: VVGAVGVGK (KRAS G12V)
WVGFVPVGR

SEQ ID NO: 75135 - protein, 9 aa, synthetic construct
  source 1..9: note = Seed: VVGAVGVGK (KRAS G12V)
WVGFVPVGV

SEQ ID NO: 75136 - protein, 9 aa, synthetic construct
  source 1..9: note = Seed: VVGAVGVGK (KRAS G12V)
WVGFVRVGH

SEQ ID NO: 75137 - protein, 9 aa, synthetic construct
  source 1..9: note = Seed: VVGAVGVGK (KRAS G12V)
WVGFVRVGK

SEQ ID NO: 75138 - protein, 9 aa, synthetic construct
  source 1..9: note = Seed: VVGAVGVGK (KRAS G12V)
WVGFVRVGR

SEQ ID NO: 75139 - protein, 9 aa, synthetic construct
  source 1..9: note = Seed: VVGAVGVGK (KRAS G12V)
WVGFVSVGI

SEQ ID NO: 75140 - protein, 9 aa, synthetic construct
  source 1..9: note = Seed: VVGAVGVGK (KRAS G12V)
WVGFVSVGK

SEQ ID NO: 75141 - protein, 9 aa, synthetic construct
  source 1..9: note = Seed: VVGAVGVGK (KRAS G12V)
WVGFVSVGR

SEQ ID NO: 75142 - protein, 9 aa, synthetic construct
  source 1..9: note = Seed: VVGAVGVGK (KRAS G12V)
WVGGVAVGA

SEQ ID NO: 75143 - protein, 9 aa, synthetic construct
  source 1..9: note = Seed: VVGAVGVGK (KRAS G12V)
WVGGVAVGI

SEQ ID NO: 75144 - protein, 9 aa, synthetic construct
  source 1..9: note = Seed: VVGAVGVGK (KRAS G12V)
WVGGVAVGL

SEQ ID NO: 75145 - protein, 9 aa, synthetic construct
  source 1..9: note = Seed: VVGAVGVGK (KRAS G12V)
WVGGVAVGM

SEQ ID NO: 75146 - protein, 9 aa, synthetic construct
  source 1..9: note = Seed: VVGAVGVGK (KRAS G12V)
WVGGVAVGS

SEQ ID NO: 75147 - protein, 9 aa, synthetic construct
  source 1..9: note = Seed: VVGAVGVGK (KRAS G12V)
WVGGVAVGV

SEQ ID NO: 75148 - protein, 9 aa, synthetic construct
  source 1..9: note = Seed: VVGAVGVGK (KRAS G12V)
WVGGVPVGA

SEQ ID NO: 75149 - protein, 9 aa, synthetic construct
  source 1..9: note = Seed: VVGAVGVGK (KRAS G12V)
WVGGVPVGI

SEQ ID NO: 75150 - protein, 9 aa, synthetic construct
  source 1..9: note = Seed: VVGAVGVGK (KRAS G12V)
WVGGVPVGL

SEQ ID NO: 75151 - protein, 9 aa, synthetic construct
  source 1..9: note = Seed: VVGAVGVGK (KRAS G12V)
WVGGVPVGM

SEQ ID NO: 75152 - protein, 9 aa, synthetic construct
  source 1..9: note = Seed: VVGAVGVGK (KRAS G12V)
WVGGVPVGS

SEQ ID NO: 75153 - protein, 9 aa, synthetic construct
  source 1..9: note = Seed: VVGAVGVGK (KRAS G12V)
WVGGVPVGV

SEQ ID NO: 75154 - protein, 9 aa, synthetic construct
  source 1..9: note = Seed: VVGAVGVGK (KRAS G12V)
WVGHVAVGA

SEQ ID NO: 75155 - protein, 9 aa, synthetic construct
  source 1..9: note = Seed: VVGAVGVGK (KRAS G12V)
WVGHVAVGI

SEQ ID NO: 75156 - protein, 9 aa, synthetic construct
  source 1..9: note = Seed: VVGAVGVGK (KRAS G12V)
WVGHVAVGL

SEQ ID NO: 75157 - protein, 9 aa, synthetic construct
  source 1..9: note = Seed: VVGAVGVGK (KRAS G12V)
WVGHVAVGM

SEQ ID NO: 75158 - protein, 9 aa, synthetic construct
  source 1..9: note = Seed: VVGAVGVGK (KRAS G12V)
WVGHVAVGV

SEQ ID NO: 75159 - protein, 9 aa, synthetic construct
  source 1..9: note = Seed: VVGAVGVGK (KRAS G12V)
WVGHVGVGL

SEQ ID NO: 75160 - protein, 9 aa, synthetic construct
  source 1..9: note = Seed: VVGAVGVGK (KRAS G12V)
WVGHVGVGV

SEQ ID NO: 75161 - protein, 9 aa, synthetic construct
  source 1..9: note = Seed: VVGAVGVGK (KRAS G12V)
WVGHVKVGR

SEQ ID NO: 75162 - protein, 9 aa, synthetic construct
  source 1..9: note = Seed: VVGAVGVGK (KRAS G12V)
WVGHVRVGK

SEQ ID NO: 75163 - protein, 9 aa, synthetic construct
  source 1..9: note = Seed: VVGAVGVGK (KRAS G12V)
WVGHVRVGR

SEQ ID NO: 75164 - protein, 9 aa, synthetic construct
  source 1..9: note = Seed: VVGAVGVGK (KRAS G12V)
WVGHVRVGY

SEQ ID NO: 75165 - protein, 9 aa, synthetic construct
  source 1..9: note = Seed: VVGAVGVGK (KRAS G12V)
WVGHVSVGI

SEQ ID NO: 75166 - protein, 9 aa, synthetic construct
  source 1..9: note = Seed: VVGAVGVGK (KRAS G12V)
WVGHVSVGL

SEQ ID NO: 75167 - protein, 9 aa, synthetic construct
  source 1..9: note = Seed: VVGAVGVGK (KRAS G12V)
WVGHVSVGV

SEQ ID NO: 75168 - protein, 9 aa, synthetic construct
  source 1..9: note = Seed: VVGAVGVGK (KRAS G12V)
WVGIVAVGH

SEQ ID NO: 75169 - protein, 9 aa, synthetic construct
  source 1..9: note = Seed: VVGAVGVGK (KRAS G12V)
WVGIVAVGK

SEQ ID NO: 75170 - protein, 9 aa, synthetic construct
  source 1..9: note = Seed: VVGAVGVGK (KRAS G12V)
WVGIVAVGR

SEQ ID NO: 75171 - protein, 9 aa, synthetic construct
  source 1..9: note = Seed: VVGAVGVGK (KRAS G12V)
WVGIVAVGT

SEQ ID NO: 75172 - protein, 9 aa, synthetic construct
  source 1..9: note = Seed: VVGAVGVGK (KRAS G12V)
WVGIVGVGA

SEQ ID NO: 75173 - protein, 9 aa, synthetic construct
  source 1..9: note = Seed: VVGAVGVGK (KRAS G12V)
WVGIVGVGG

SEQ ID NO: 75174 - protein, 9 aa, synthetic construct
  source 1..9: note = Seed: VVGAVGVGK (KRAS G12V)
WVGIVGVGN

SEQ ID NO: 75175 - protein, 9 aa, synthetic construct
  source 1..9: note = Seed: VVGAVGVGK (KRAS G12V)
WVGIVGVGS

SEQ ID NO: 75176 - protein, 9 aa, synthetic construct
  source 1..9: note = Seed: VVGAVGVGK (KRAS G12V)
WVGIVGVGT

SEQ ID NO: 75177 - protein, 9 aa, synthetic construct
  source 1..9: note = Seed: VVGAVGVGK (KRAS G12V)
WVGIVGVGV

SEQ ID NO: 75178 - protein, 9 aa, synthetic construct
  source 1..9: note = Seed: VVGAVGVGK (KRAS G12V)
WVGIVKVGA

SEQ ID NO: 75179 - protein, 9 aa, synthetic construct
  source 1..9: note = Seed: VVGAVGVGK (KRAS G12V)
WVGIVKVGG

SEQ ID NO: 75180 - protein, 9 aa, synthetic construct
  source 1..9: note = Seed: VVGAVGVGK (KRAS G12V)
WVGIVKVGH

SEQ ID NO: 75181 - protein, 9 aa, synthetic construct
  source 1..9: note = Seed: VVGAVGVGK (KRAS G12V)
WVGIVKVGK

SEQ ID NO: 75182 - protein, 9 aa, synthetic construct
  source 1..9: note = Seed: VVGAVGVGK (KRAS G12V)
WVGIVKVGN

SEQ ID NO: 75183 - protein, 9 aa, synthetic construct
  source 1..9: note = Seed: VVGAVGVGK (KRAS G12V)
WVGIVKVGQ

SEQ ID NO: 75184 - protein, 9 aa, synthetic construct
  source 1..9: note = Seed: VVGAVGVGK (KRAS G12V)
WVGIVKVGR

SEQ ID NO: 75185 - protein, 9 aa, synthetic construct
  source 1..9: note = Seed: VVGAVGVGK (KRAS G12V)
WVGIVKVGS

SEQ ID NO: 75186 - protein, 9 aa, synthetic construct
  source 1..9: note = Seed: VVGAVGVGK (KRAS G12V)
WVGIVKVGT

SEQ ID NO: 75187 - protein, 9 aa, synthetic construct
  source 1..9: note = Seed: VVGAVGVGK (KRAS G12V)
WVGIVNVGS

SEQ ID NO: 75188 - protein, 9 aa, synthetic construct
  source 1..9: note = Seed: VVGAVGVGK (KRAS G12V)
WVGIVPVGA

SEQ ID NO: 75189 - protein, 9 aa, synthetic construct
  source 1..9: note = Seed: VVGAVGVGK (KRAS G12V)
WVGIVPVGH

SEQ ID NO: 75190 - protein, 9 aa, synthetic construct
  source 1..9: note = Seed: VVGAVGVGK (KRAS G12V)
WVGIVPVGI

SEQ ID NO: 75191 - protein, 9 aa, synthetic construct
  source 1..9: note = Seed: VVGAVGVGK (KRAS G12V)
WVGIVPVGL

SEQ ID NO: 75192 - protein, 9 aa, synthetic construct
  source 1..9: note = Seed: VVGAVGVGK (KRAS G12V)
WVGIVPVGM

SEQ ID NO: 75193 - protein, 9 aa, synthetic construct
  source 1..9: note = Seed: VVGAVGVGK (KRAS G12V)
WVGIVPVGN

SEQ ID NO: 75194 - protein, 9 aa, synthetic construct
  source 1..9: note = Seed: VVGAVGVGK (KRAS G12V)
WVGIVPVGS

SEQ ID NO: 75195 - protein, 9 aa, synthetic construct
  source 1..9: note = Seed: VVGAVGVGK (KRAS G12V)
WVGIVPVGT

SEQ ID NO: 75196 - protein, 9 aa, synthetic construct
  source 1..9: note = Seed: VVGAVGVGK (KRAS G12V)
WVGIVPVGV

SEQ ID NO: 75197 - protein, 9 aa, synthetic construct
  source 1..9: note = Seed: VVGAVGVGK (KRAS G12V)
WVGIVRVGG

SEQ ID NO: 75198 - protein, 9 aa, synthetic construct
  source 1..9: note = Seed: VVGAVGVGK (KRAS G12V)
WVGIVRVGH

SEQ ID NO: 75199 - protein, 9 aa, synthetic construct
  source 1..9: note = Seed: VVGAVGVGK (KRAS G12V)
WVGIVRVGK

SEQ ID NO: 75200 - protein, 9 aa, synthetic construct
  source 1..9: note = Seed: VVGAVGVGK (KRAS G12V)
WVGIVRVGN

SEQ ID NO: 75201 - protein, 9 aa, synthetic construct
  source 1..9: note = Seed: VVGAVGVGK (KRAS G12V)
WVGIVRVGR

SEQ ID NO: 75202 - protein, 9 aa, synthetic construct
  source 1..9: note = Seed: VVGAVGVGK (KRAS G12V)
WVGIVRVGS

SEQ ID NO: 75203 - protein, 9 aa, synthetic construct
  source 1..9: note = Seed: VVGAVGVGK (KRAS G12V)
WVGIVSVGH

SEQ ID NO: 75204 - protein, 9 aa, synthetic construct
  source 1..9: note = Seed: VVGAVGVGK (KRAS G12V)
WVGIVSVGT

SEQ ID NO: 75205 - protein, 9 aa, synthetic construct
  source 1..9: note = Seed: VVGAVGVGK (KRAS G12V)
WVGIVSVGV

SEQ ID NO: 75206 - protein, 9 aa, synthetic construct
  source 1..9: note = Seed: VVGAVGVGK (KRAS G12V)
WVGIVTVGS

SEQ ID NO: 75207 - protein, 9 aa, synthetic construct
  source 1..9: note = Seed: VVGAVGVGK (KRAS G12V)
WVGKVAVGL

SEQ ID NO: 75208 - protein, 9 aa, synthetic construct
  source 1..9: note = Seed: VVGAVGVGK (KRAS G12V)
WVGKVKVGA

SEQ ID NO: 75209 - protein, 9 aa, synthetic construct
  source 1..9: note = Seed: VVGAVGVGK (KRAS G12V)
WVGKVKVGG

SEQ ID NO: 75210 - protein, 9 aa, synthetic construct
  source 1..9: note = Seed: VVGAVGVGK (KRAS G12V)
WVGKVKVGH

SEQ ID NO: 75211 - protein, 9 aa, synthetic construct
  source 1..9: note = Seed: VVGAVGVGK (KRAS G12V)
WVGKVKVGQ

SEQ ID NO: 75212 - protein, 9 aa, synthetic construct
  source 1..9: note = Seed: VVGAVGVGK (KRAS G12V)
WVGKVKVGR

SEQ ID NO: 75213 - protein, 9 aa, synthetic construct
  source 1..9: note = Seed: VVGAVGVGK (KRAS G12V)
WVGKVKVGS

SEQ ID NO: 75214 - protein, 9 aa, synthetic construct
  source 1..9: note = Seed: VVGAVGVGK (KRAS G12V)
WVGKVKVGY

SEQ ID NO: 75215 - protein, 9 aa, synthetic construct
  source 1..9: note = Seed: VVGAVGVGK (KRAS G12V)
WVGKVRVGA

SEQ ID NO: 75216 - protein, 9 aa, synthetic construct
  source 1..9: note = Seed: VVGAVGVGK (KRAS G12V)
WVGKVRVGG

SEQ ID NO: 75217 - protein, 9 aa, synthetic construct
  source 1..9: note = Seed: VVGAVGVGK (KRAS G12V)
WVGKVRVGH

SEQ ID NO: 75218 - protein, 9 aa, synthetic construct
  source 1..9: note = Seed: VVGAVGVGK (KRAS G12V)
WVGKVRVGL

SEQ ID NO: 75219 - protein, 9 aa, synthetic construct
  source 1..9: note = Seed: VVGAVGVGK (KRAS G12V)
WVGKVRVGQ

SEQ ID NO: 75220 - protein, 9 aa, synthetic construct
  source 1..9: note = Seed: VVGAVGVGK (KRAS G12V)
WVGKVRVGR

SEQ ID NO: 75221 - protein, 9 aa, synthetic construct
  source 1..9: note = Seed: VVGAVGVGK (KRAS G12V)
WVGKVRVGS

SEQ ID NO: 75222 - protein, 9 aa, synthetic construct
  source 1..9: note = Seed: VVGAVGVGK (KRAS G12V)
WVGKVRVGV

SEQ ID NO: 75223 - protein, 9 aa, synthetic construct
  source 1..9: note = Seed: VVGAVGVGK (KRAS G12V)
WVGKVRVGY

SEQ ID NO: 75224 - protein, 9 aa, synthetic construct
  source 1..9: note = Seed: VVGAVGVGK (KRAS G12V)
WVGLVAVGA

SEQ ID NO: 75225 - protein, 9 aa, synthetic construct
  source 1..9: note = Seed: VVGAVGVGK (KRAS G12V)
WVGLVAVGG

SEQ ID NO: 75226 - protein, 9 aa, synthetic construct
  source 1..9: note = Seed: VVGAVGVGK (KRAS G12V)
WVGLVAVGH

SEQ ID NO: 75227 - protein, 9 aa, synthetic construct
  source 1..9: note = Seed: VVGAVGVGK (KRAS G12V)
WVGLVAVGK

SEQ ID NO: 75228 - protein, 9 aa, synthetic construct
  source 1..9: note = Seed: VVGAVGVGK (KRAS G12V)
WVGLVAVGL

SEQ ID NO: 75229 - protein, 9 aa, synthetic construct
  source 1..9: note = Seed: VVGAVGVGK (KRAS G12V)
WVGLVAVGM

SEQ ID NO: 75230 - protein, 9 aa, synthetic construct
  source 1..9: note = Seed: VVGAVGVGK (KRAS G12V)
WVGLVAVGN

SEQ ID NO: 75231 - protein, 9 aa, synthetic construct
  source 1..9: note = Seed: VVGAVGVGK (KRAS G12V)
WVGLVAVGR

SEQ ID NO: 75232 - protein, 9 aa, synthetic construct
  source 1..9: note = Seed: VVGAVGVGK (KRAS G12V)
WVGLVAVGS

SEQ ID NO: 75233 - protein, 9 aa, synthetic construct
  source 1..9: note = Seed: VVGAVGVGK (KRAS G12V)
WVGLVAVGT

SEQ ID NO: 75234 - protein, 9 aa, synthetic construct
  source 1..9: note = Seed: VVGAVGVGK (KRAS G12V)
WVGLVAVGV

SEQ ID NO: 75235 - protein, 9 aa, synthetic construct
  source 1..9: note = Seed: VVGAVGVGK (KRAS G12V)
WVGLVGVGA

SEQ ID NO: 75236 - protein, 9 aa, synthetic construct
  source 1..9: note = Seed: VVGAVGVGK (KRAS G12V)
WVGLVGVGG

SEQ ID NO: 75237 - protein, 9 aa, synthetic construct
  source 1..9: note = Seed: VVGAVGVGK (KRAS G12V)
WVGLVGVGH

SEQ ID NO: 75238 - protein, 9 aa, synthetic construct
  source 1..9: note = Seed: VVGAVGVGK (KRAS G12V)
WVGLVGVGI

SEQ ID NO: 75239 - protein, 9 aa, synthetic construct
  source 1..9: note = Seed: VVGAVGVGK (KRAS G12V)
WVGLVGVGK

SEQ ID NO: 75240 - protein, 9 aa, synthetic construct
  source 1..9: note = Seed: VVGAVGVGK (KRAS G12V)
WVGLVGVGL

SEQ ID NO: 75241 - protein, 9 aa, synthetic construct
  source 1..9: note = Seed: VVGAVGVGK (KRAS G12V)
WVGLVGVGM

SEQ ID NO: 75242 - protein, 9 aa, synthetic construct
  source 1..9: note = Seed: VVGAVGVGK (KRAS G12V)
WVGLVGVGN

SEQ ID NO: 75243 - protein, 9 aa, synthetic construct
  source 1..9: note = Seed: VVGAVGVGK (KRAS G12V)
WVGLVGVGR

SEQ ID NO: 75244 - protein, 9 aa, synthetic construct
  source 1..9: note = Seed: VVGAVGVGK (KRAS G12V)
WVGLVGVGS

SEQ ID NO: 75245 - protein, 9 aa, synthetic construct
  source 1..9: note = Seed: VVGAVGVGK (KRAS G12V)
WVGLVGVGT

SEQ ID NO: 75246 - protein, 9 aa, synthetic construct
  source 1..9: note = Seed: VVGAVGVGK (KRAS G12V)
WVGLVGVGV

SEQ ID NO: 75247 - protein, 9 aa, synthetic construct
  source 1..9: note = Seed: VVGAVGVGK (KRAS G12V)
WVGLVKVGA

SEQ ID NO: 75248 - protein, 9 aa, synthetic construct
  source 1..9: note = Seed: VVGAVGVGK (KRAS G12V)
WVGLVKVGG

SEQ ID NO: 75249 - protein, 9 aa, synthetic construct
  source 1..9: note = Seed: VVGAVGVGK (KRAS G12V)
WVGLVKVGH

SEQ ID NO: 75250 - protein, 9 aa, synthetic construct
  source 1..9: note = Seed: VVGAVGVGK (KRAS G12V)
WVGLVKVGK

SEQ ID NO: 75251 - protein, 9 aa, synthetic construct
  source 1..9: note = Seed: VVGAVGVGK (KRAS G12V)
WVGLVKVGN

SEQ ID NO: 75252 - protein, 9 aa, synthetic construct
  source 1..9: note = Seed: VVGAVGVGK (KRAS G12V)
WVGLVKVGQ

SEQ ID NO: 75253 - protein, 9 aa, synthetic construct
  source 1..9: note = Seed: VVGAVGVGK (KRAS G12V)
WVGLVKVGR

SEQ ID NO: 75254 - protein, 9 aa, synthetic construct
  source 1..9: note = Seed: VVGAVGVGK (KRAS G12V)
WVGLVKVGS

SEQ ID NO: 75255 - protein, 9 aa, synthetic construct
  source 1..9: note = Seed: VVGAVGVGK (KRAS G12V)
WVGLVKVGT

SEQ ID NO: 75256 - protein, 9 aa, synthetic construct
  source 1..9: note = Seed: VVGAVGVGK (KRAS G12V)
WVGLVNVGA

SEQ ID NO: 75257 - protein, 9 aa, synthetic construct
  source 1..9: note = Seed: VVGAVGVGK (KRAS G12V)
WVGLVNVGG

SEQ ID NO: 75258 - protein, 9 aa, synthetic construct
  source 1..9: note = Seed: VVGAVGVGK (KRAS G12V)
WVGLVNVGL

SEQ ID NO: 75259 - protein, 9 aa, synthetic construct
  source 1..9: note = Seed: VVGAVGVGK (KRAS G12V)
WVGLVNVGM

SEQ ID NO: 75260 - protein, 9 aa, synthetic construct
  source 1..9: note = Seed: VVGAVGVGK (KRAS G12V)
WVGLVNVGN

SEQ ID NO: 75261 - protein, 9 aa, synthetic construct
  source 1..9: note = Seed: VVGAVGVGK (KRAS G12V)
WVGLVNVGS

SEQ ID NO: 75262 - protein, 9 aa, synthetic construct
  source 1..9: note = Seed: VVGAVGVGK (KRAS G12V)
WVGLVNVGT

SEQ ID NO: 75263 - protein, 9 aa, synthetic construct
  source 1..9: note = Seed: VVGAVGVGK (KRAS G12V)
WVGLVNVGV

SEQ ID NO: 75264 - protein, 9 aa, synthetic construct
  source 1..9: note = Seed: VVGAVGVGK (KRAS G12V)
WVGLVPVGA

SEQ ID NO: 75265 - protein, 9 aa, synthetic construct
  source 1..9: note = Seed: VVGAVGVGK (KRAS G12V)
WVGLVPVGG

SEQ ID NO: 75266 - protein, 9 aa, synthetic construct
  source 1..9: note = Seed: VVGAVGVGK (KRAS G12V)
WVGLVPVGH

SEQ ID NO: 75267 - protein, 9 aa, synthetic construct
  source 1..9: note = Seed: VVGAVGVGK (KRAS G12V)
WVGLVPVGI

SEQ ID NO: 75268 - protein, 9 aa, synthetic construct
  source 1..9: note = Seed: VVGAVGVGK (KRAS G12V)
WVGLVPVGK

SEQ ID NO: 75269 - protein, 9 aa, synthetic construct
  source 1..9: note = Seed: VVGAVGVGK (KRAS G12V)
WVGLVPVGL

SEQ ID NO: 75270 - protein, 9 aa, synthetic construct
  source 1..9: note = Seed: VVGAVGVGK (KRAS G12V)
WVGLVPVGM

SEQ ID NO: 75271 - protein, 9 aa, synthetic construct
  source 1..9: note = Seed: VVGAVGVGK (KRAS G12V)
WVGLVPVGN

SEQ ID NO: 75272 - protein, 9 aa, synthetic construct
  source 1..9: note = Seed: VVGAVGVGK (KRAS G12V)
WVGLVPVGP

SEQ ID NO: 75273 - protein, 9 aa, synthetic construct
  source 1..9: note = Seed: VVGAVGVGK (KRAS G12V)
WVGLVPVGR

SEQ ID NO: 75274 - protein, 9 aa, synthetic construct
  source 1..9: note = Seed: VVGAVGVGK (KRAS G12V)
WVGLVPVGS

SEQ ID NO: 75275 - protein, 9 aa, synthetic construct
  source 1..9: note = Seed: VVGAVGVGK (KRAS G12V)
WVGLVPVGT

SEQ ID NO: 75276 - protein, 9 aa, synthetic construct
  source 1..9: note = Seed: VVGAVGVGK (KRAS G12V)
WVGLVPVGV

SEQ ID NO: 75277 - protein, 9 aa, synthetic construct
  source 1..9: note = Seed: VVGAVGVGK (KRAS G12V)
WVGLVPVGY

SEQ ID NO: 75278 - protein, 9 aa, synthetic construct
  source 1..9: note = Seed: VVGAVGVGK (KRAS G12V)
WVGLVRVGG

SEQ ID NO: 75279 - protein, 9 aa, synthetic construct
  source 1..9: note = Seed: VVGAVGVGK (KRAS G12V)
WVGLVRVGH

SEQ ID NO: 75280 - protein, 9 aa, synthetic construct
  source 1..9: note = Seed: VVGAVGVGK (KRAS G12V)
WVGLVRVGK

SEQ ID NO: 75281 - protein, 9 aa, synthetic construct
  source 1..9: note = Seed: VVGAVGVGK (KRAS G12V)
WVGLVRVGN

SEQ ID NO: 75282 - protein, 9 aa, synthetic construct
  source 1..9: note = Seed: VVGAVGVGK (KRAS G12V)
WVGLVRVGR

SEQ ID NO: 75283 - protein, 9 aa, synthetic construct
  source 1..9: note = Seed: VVGAVGVGK (KRAS G12V)
WVGLVRVGS

SEQ ID NO: 75284 - protein, 9 aa, synthetic construct
  source 1..9: note = Seed: VVGAVGVGK (KRAS G12V)
WVGLVSVGA

SEQ ID NO: 75285 - protein, 9 aa, synthetic construct
  source 1..9: note = Seed: VVGAVGVGK (KRAS G12V)
WVGLVSVGG

SEQ ID NO: 75286 - protein, 9 aa, synthetic construct
  source 1..9: note = Seed: VVGAVGVGK (KRAS G12V)
WVGLVSVGH

SEQ ID NO: 75287 - protein, 9 aa, synthetic construct
  source 1..9: note = Seed: VVGAVGVGK (KRAS G12V)
WVGLVSVGK

SEQ ID NO: 75288 - protein, 9 aa, synthetic construct
  source 1..9: note = Seed: VVGAVGVGK (KRAS G12V)
WVGLVSVGL

SEQ ID NO: 75289 - protein, 9 aa, synthetic construct
  source 1..9: note = Seed: VVGAVGVGK (KRAS G12V)
WVGLVSVGM

SEQ ID NO: 75290 - protein, 9 aa, synthetic construct
  source 1..9: note = Seed: VVGAVGVGK (KRAS G12V)
WVGLVSVGN

SEQ ID NO: 75291 - protein, 9 aa, synthetic construct
  source 1..9: note = Seed: VVGAVGVGK (KRAS G12V)
WVGLVSVGR

SEQ ID NO: 75292 - protein, 9 aa, synthetic construct
  source 1..9: note = Seed: VVGAVGVGK (KRAS G12V)
WVGLVSVGS

SEQ ID NO: 75293 - protein, 9 aa, synthetic construct
  source 1..9: note = Seed: VVGAVGVGK (KRAS G12V)
WVGLVSVGT

SEQ ID NO: 75294 - protein, 9 aa, synthetic construct
  source 1..9: note = Seed: VVGAVGVGK (KRAS G12V)
WVGLVSVGV

SEQ ID NO: 75295 - protein, 9 aa, synthetic construct
  source 1..9: note = Seed: VVGAVGVGK (KRAS G12V)
WVGLVTVGA

SEQ ID NO: 75296 - protein, 9 aa, synthetic construct
  source 1..9: note = Seed: VVGAVGVGK (KRAS G12V)
WVGLVTVGG

SEQ ID NO: 75297 - protein, 9 aa, synthetic construct
  source 1..9: note = Seed: VVGAVGVGK (KRAS G12V)
WVGLVTVGH

SEQ ID NO: 75298 - protein, 9 aa, synthetic construct
  source 1..9: note = Seed: VVGAVGVGK (KRAS G12V)
WVGLVTVGN

SEQ ID NO: 75299 - protein, 9 aa, synthetic construct
  source 1..9: note = Seed: VVGAVGVGK (KRAS G12V)
WVGLVTVGR

SEQ ID NO: 75300 - protein, 9 aa, synthetic construct
  source 1..9: note = Seed: VVGAVGVGK (KRAS G12V)
WVGLVTVGS

SEQ ID NO: 75301 - protein, 9 aa, synthetic construct
  source 1..9: note = Seed: VVGAVGVGK (KRAS G12V)
WVGLVTVGT

SEQ ID NO: 75302 - protein, 9 aa, synthetic construct
  source 1..9: note = Seed: VVGAVGVGK (KRAS G12V)
WVGMVAVGA

SEQ ID NO: 75303 - protein, 9 aa, synthetic construct
  source 1..9: note = Seed: VVGAVGVGK (KRAS G12V)
WVGMVAVGG

SEQ ID NO: 75304 - protein, 9 aa, synthetic construct
  source 1..9: note = Seed: VVGAVGVGK (KRAS G12V)
WVGMVAVGH

SEQ ID NO: 75305 - protein, 9 aa, synthetic construct
  source 1..9: note = Seed: VVGAVGVGK (KRAS G12V)
WVGMVAVGI

SEQ ID NO: 75306 - protein, 9 aa, synthetic construct
  source 1..9: note = Seed: VVGAVGVGK (KRAS G12V)
WVGMVAVGK

SEQ ID NO: 75307 - protein, 9 aa, synthetic construct
  source 1..9: note = Seed: VVGAVGVGK (KRAS G12V)
WVGMVAVGL

SEQ ID NO: 75308 - protein, 9 aa, synthetic construct
  source 1..9: note = Seed: VVGAVGVGK (KRAS G12V)
WVGMVAVGM

SEQ ID NO: 75309 - protein, 9 aa, synthetic construct
  source 1..9: note = Seed: VVGAVGVGK (KRAS G12V)
WVGMVAVGN

SEQ ID NO: 75310 - protein, 9 aa, synthetic construct
  source 1..9: note = Seed: VVGAVGVGK (KRAS G12V)
WVGMVAVGP

SEQ ID NO: 75311 - protein, 9 aa, synthetic construct
  source 1..9: note = Seed: VVGAVGVGK (KRAS G12V)
WVGMVAVGR

SEQ ID NO: 75312 - protein, 9 aa, synthetic construct
  source 1..9: note = Seed: VVGAVGVGK (KRAS G12V)
WVGMVAVGS

SEQ ID NO: 75313 - protein, 9 aa, synthetic construct
  source 1..9: note = Seed: VVGAVGVGK (KRAS G12V)
WVGMVAVGT

SEQ ID NO: 75314 - protein, 9 aa, synthetic construct
  source 1..9: note = Seed: VVGAVGVGK (KRAS G12V)
WVGMVAVGV

SEQ ID NO: 75315 - protein, 9 aa, synthetic construct
  source 1..9: note = Seed: VVGAVGVGK (KRAS G12V)
WVGMVGVGA

SEQ ID NO: 75316 - protein, 9 aa, synthetic construct
  source 1..9: note = Seed: VVGAVGVGK (KRAS G12V)
WVGMVGVGG

SEQ ID NO: 75317 - protein, 9 aa, synthetic construct
  source 1..9: note = Seed: VVGAVGVGK (KRAS G12V)
WVGMVGVGH

SEQ ID NO: 75318 - protein, 9 aa, synthetic construct
  source 1..9: note = Seed: VVGAVGVGK (KRAS G12V)
WVGMVGVGI

SEQ ID NO: 75319 - protein, 9 aa, synthetic construct
  source 1..9: note = Seed: VVGAVGVGK (KRAS G12V)
WVGMVGVGK

SEQ ID NO: 75320 - protein, 9 aa, synthetic construct
  source 1..9: note = Seed: VVGAVGVGK (KRAS G12V)
WVGMVGVGL

SEQ ID NO: 75321 - protein, 9 aa, synthetic construct
  source 1..9: note = Seed: VVGAVGVGK (KRAS G12V)
WVGMVGVGM

SEQ ID NO: 75322 - protein, 9 aa, synthetic construct
  source 1..9: note = Seed: VVGAVGVGK (KRAS G12V)
WVGMVGVGN

SEQ ID NO: 75323 - protein, 9 aa, synthetic construct
  source 1..9: note = Seed: VVGAVGVGK (KRAS G12V)
WVGMVGVGR

SEQ ID NO: 75324 - protein, 9 aa, synthetic construct
  source 1..9: note = Seed: VVGAVGVGK (KRAS G12V)
WVGMVGVGS

SEQ ID NO: 75325 - protein, 9 aa, synthetic construct
  source 1..9: note = Seed: VVGAVGVGK (KRAS G12V)
WVGMVGVGT

SEQ ID NO: 75326 - protein, 9 aa, synthetic construct
  source 1..9: note = Seed: VVGAVGVGK (KRAS G12V)
WVGMVGVGV

SEQ ID NO: 75327 - protein, 9 aa, synthetic construct
  source 1..9: note = Seed: VVGAVGVGK (KRAS G12V)
WVGMVKVGA

SEQ ID NO: 75328 - protein, 9 aa, synthetic construct
  source 1..9: note = Seed: VVGAVGVGK (KRAS G12V)
WVGMVKVGG

SEQ ID NO: 75329 - protein, 9 aa, synthetic construct
  source 1..9: note = Seed: VVGAVGVGK (KRAS G12V)
WVGMVKVGH

SEQ ID NO: 75330 - protein, 9 aa, synthetic construct
  source 1..9: note = Seed: VVGAVGVGK (KRAS G12V)
WVGMVKVGK

SEQ ID NO: 75331 - protein, 9 aa, synthetic construct
  source 1..9: note = Seed: VVGAVGVGK (KRAS G12V)
WVGMVKVGM

SEQ ID NO: 75332 - protein, 9 aa, synthetic construct
  source 1..9: note = Seed: VVGAVGVGK (KRAS G12V)
WVGMVKVGN

SEQ ID NO: 75333 - protein, 9 aa, synthetic construct
  source 1..9: note = Seed: VVGAVGVGK (KRAS G12V)
WVGMVKVGP

SEQ ID NO: 75334 - protein, 9 aa, synthetic construct
  source 1..9: note = Seed: VVGAVGVGK (KRAS G12V)
WVGMVKVGQ

SEQ ID NO: 75335 - protein, 9 aa, synthetic construct
  source 1..9: note = Seed: VVGAVGVGK (KRAS G12V)
WVGMVKVGR

SEQ ID NO: 75336 - protein, 9 aa, synthetic construct
  source 1..9: note = Seed: VVGAVGVGK (KRAS G12V)
WVGMVKVGS

SEQ ID NO: 75337 - protein, 9 aa, synthetic construct
  source 1..9: note = Seed: VVGAVGVGK (KRAS G12V)
WVGMVKVGT

SEQ ID NO: 75338 - protein, 9 aa, synthetic construct
  source 1..9: note = Seed: VVGAVGVGK (KRAS G12V)
WVGMVNVGA

SEQ ID NO: 75339 - protein, 9 aa, synthetic construct
  source 1..9: note = Seed: VVGAVGVGK (KRAS G12V)
WVGMVNVGL

SEQ ID NO: 75340 - protein, 9 aa, synthetic construct
  source 1..9: note = Seed: VVGAVGVGK (KRAS G12V)
WVGMVNVGM

SEQ ID NO: 75341 - protein, 9 aa, synthetic construct
  source 1..9: note = Seed: VVGAVGVGK (KRAS G12V)
WVGMVNVGS

SEQ ID NO: 75342 - protein, 9 aa, synthetic construct
  source 1..9: note = Seed: VVGAVGVGK (KRAS G12V)
WVGMVNVGT

SEQ ID NO: 75343 - protein, 9 aa, synthetic construct
  source 1..9: note = Seed: VVGAVGVGK (KRAS G12V)
WVGMVNVGV

SEQ ID NO: 75344 - protein, 9 aa, synthetic construct
  source 1..9: note = Seed: VVGAVGVGK (KRAS G12V)
WVGMVPVGA

SEQ ID NO: 75345 - protein, 9 aa, synthetic construct
  source 1..9: note = Seed: VVGAVGVGK (KRAS G12V)
WVGMVPVGG

SEQ ID NO: 75346 - protein, 9 aa, synthetic construct
  source 1..9: note = Seed: VVGAVGVGK (KRAS G12V)
WVGMVPVGH

SEQ ID NO: 75347 - protein, 9 aa, synthetic construct
  source 1..9: note = Seed: VVGAVGVGK (KRAS G12V)
WVGMVPVGI

SEQ ID NO: 75348 - protein, 9 aa, synthetic construct
  source 1..9: note = Seed: VVGAVGVGK (KRAS G12V)
WVGMVPVGK

SEQ ID NO: 75349 - protein, 9 aa, synthetic construct
  source 1..9: note = Seed: VVGAVGVGK (KRAS G12V)
WVGMVPVGL

SEQ ID NO: 75350 - protein, 9 aa, synthetic construct
  source 1..9: note = Seed: VVGAVGVGK (KRAS G12V)
WVGMVPVGM

SEQ ID NO: 75351 - protein, 9 aa, synthetic construct
  source 1..9: note = Seed: VVGAVGVGK (KRAS G12V)
WVGMVPVGN

SEQ ID NO: 75352 - protein, 9 aa, synthetic construct
  source 1..9: note = Seed: VVGAVGVGK (KRAS G12V)
WVGMVPVGP

SEQ ID NO: 75353 - protein, 9 aa, synthetic construct
  source 1..9: note = Seed: VVGAVGVGK (KRAS G12V)
WVGMVPVGR

SEQ ID NO: 75354 - protein, 9 aa, synthetic construct
  source 1..9: note = Seed: VVGAVGVGK (KRAS G12V)
WVGMVPVGS

SEQ ID NO: 75355 - protein, 9 aa, synthetic construct
  source 1..9: note = Seed: VVGAVGVGK (KRAS G12V)
WVGMVPVGT

SEQ ID NO: 75356 - protein, 9 aa, synthetic construct
  source 1..9: note = Seed: VVGAVGVGK (KRAS G12V)
WVGMVPVGV

SEQ ID NO: 75357 - protein, 9 aa, synthetic construct
  source 1..9: note = Seed: VVGAVGVGK (KRAS G12V)
WVGMVPVGY

SEQ ID NO: 75358 - protein, 9 aa, synthetic construct
  source 1..9: note = Seed: VVGAVGVGK (KRAS G12V)
WVGMVRVGA

SEQ ID NO: 75359 - protein, 9 aa, synthetic construct
  source 1..9: note = Seed: VVGAVGVGK (KRAS G12V)
WVGMVRVGG

SEQ ID NO: 75360 - protein, 9 aa, synthetic construct
  source 1..9: note = Seed: VVGAVGVGK (KRAS G12V)
WVGMVRVGH

SEQ ID NO: 75361 - protein, 9 aa, synthetic construct
  source 1..9: note = Seed: VVGAVGVGK (KRAS G12V)
WVGMVRVGK

SEQ ID NO: 75362 - protein, 9 aa, synthetic construct
  source 1..9: note = Seed: VVGAVGVGK (KRAS G12V)
WVGMVRVGL

SEQ ID NO: 75363 - protein, 9 aa, synthetic construct
  source 1..9: note = Seed: VVGAVGVGK (KRAS G12V)
WVGMVRVGM

SEQ ID NO: 75364 - protein, 9 aa, synthetic construct
  source 1..9: note = Seed: VVGAVGVGK (KRAS G12V)
WVGMVRVGN

SEQ ID NO: 75365 - protein, 9 aa, synthetic construct
  source 1..9: note = Seed: VVGAVGVGK (KRAS G12V)
WVGMVRVGP

SEQ ID NO: 75366 - protein, 9 aa, synthetic construct
  source 1..9: note = Seed: VVGAVGVGK (KRAS G12V)
WVGMVRVGQ

SEQ ID NO: 75367 - protein, 9 aa, synthetic construct
  source 1..9: note = Seed: VVGAVGVGK (KRAS G12V)
WVGMVRVGR

SEQ ID NO: 75368 - protein, 9 aa, synthetic construct
  source 1..9: note = Seed: VVGAVGVGK (KRAS G12V)
WVGMVRVGS

SEQ ID NO: 75369 - protein, 9 aa, synthetic construct
  source 1..9: note = Seed: VVGAVGVGK (KRAS G12V)
WVGMVSVGA

SEQ ID NO: 75370 - protein, 9 aa, synthetic construct
  source 1..9: note = Seed: VVGAVGVGK (KRAS G12V)
WVGMVSVGG

SEQ ID NO: 75371 - protein, 9 aa, synthetic construct
  source 1..9: note = Seed: VVGAVGVGK (KRAS G12V)
WVGMVSVGH

SEQ ID NO: 75372 - protein, 9 aa, synthetic construct
  source 1..9: note = Seed: VVGAVGVGK (KRAS G12V)
WVGMVSVGI

SEQ ID NO: 75373 - protein, 9 aa, synthetic construct
  source 1..9: note = Seed: VVGAVGVGK (KRAS G12V)
WVGMVSVGK

SEQ ID NO: 75374 - protein, 9 aa, synthetic construct
  source 1..9: note = Seed: VVGAVGVGK (KRAS G12V)
WVGMVSVGL

SEQ ID NO: 75375 - protein, 9 aa, synthetic construct
  source 1..9: note = Seed: VVGAVGVGK (KRAS G12V)
WVGMVSVGM

SEQ ID NO: 75376 - protein, 9 aa, synthetic construct
  source 1..9: note = Seed: VVGAVGVGK (KRAS G12V)
WVGMVSVGN

SEQ ID NO: 75377 - protein, 9 aa, synthetic construct
  source 1..9: note = Seed: VVGAVGVGK (KRAS G12V)
WVGMVSVGR

SEQ ID NO: 75378 - protein, 9 aa, synthetic construct
  source 1..9: note = Seed: VVGAVGVGK (KRAS G12V)
WVGMVSVGS

SEQ ID NO: 75379 - protein, 9 aa, synthetic construct
  source 1..9: note = Seed: VVGAVGVGK (KRAS G12V)
WVGMVSVGT

SEQ ID NO: 75380 - protein, 9 aa, synthetic construct
  source 1..9: note = Seed: VVGAVGVGK (KRAS G12V)
WVGMVSVGV

SEQ ID NO: 75381 - protein, 9 aa, synthetic construct
  source 1..9: note = Seed: VVGAVGVGK (KRAS G12V)
WVGMVTVGA

SEQ ID NO: 75382 - protein, 9 aa, synthetic construct
  source 1..9: note = Seed: VVGAVGVGK (KRAS G12V)
WVGMVTVGH

SEQ ID NO: 75383 - protein, 9 aa, synthetic construct
  source 1..9: note = Seed: VVGAVGVGK (KRAS G12V)
WVGMVTVGR

SEQ ID NO: 75384 - protein, 9 aa, synthetic construct
  source 1..9: note = Seed: VVGAVGVGK (KRAS G12V)
WVGMVTVGS

SEQ ID NO: 75385 - protein, 9 aa, synthetic construct
  source 1..9: note = Seed: VVGAVGVGK (KRAS G12V)
WVGMVVVGR

SEQ ID NO: 75386 - protein, 9 aa, synthetic construct
  source 1..9: note = Seed: VVGAVGVGK (KRAS G12V)
WVGNVAVGA

SEQ ID NO: 75387 - protein, 9 aa, synthetic construct
  source 1..9: note = Seed: VVGAVGVGK (KRAS G12V)
WVGNVAVGI

SEQ ID NO: 75388 - protein, 9 aa, synthetic construct
  source 1..9: note = Seed: VVGAVGVGK (KRAS G12V)
WVGNVAVGL

SEQ ID NO: 75389 - protein, 9 aa, synthetic construct
  source 1..9: note = Seed: VVGAVGVGK (KRAS G12V)
WVGNVAVGM

SEQ ID NO: 75390 - protein, 9 aa, synthetic construct
  source 1..9: note = Seed: VVGAVGVGK (KRAS G12V)
WVGNVAVGS

SEQ ID NO: 75391 - protein, 9 aa, synthetic construct
  source 1..9: note = Seed: VVGAVGVGK (KRAS G12V)
WVGNVAVGV

SEQ ID NO: 75392 - protein, 9 aa, synthetic construct
  source 1..9: note = Seed: VVGAVGVGK (KRAS G12V)
WVGNVGVGL

SEQ ID NO: 75393 - protein, 9 aa, synthetic construct
  source 1..9: note = Seed: VVGAVGVGK (KRAS G12V)
WVGNVGVGV

SEQ ID NO: 75394 - protein, 9 aa, synthetic construct
  source 1..9: note = Seed: VVGAVGVGK (KRAS G12V)
WVGNVPVGA

SEQ ID NO: 75395 - protein, 9 aa, synthetic construct
  source 1..9: note = Seed: VVGAVGVGK (KRAS G12V)
WVGNVPVGI

SEQ ID NO: 75396 - protein, 9 aa, synthetic construct
  source 1..9: note = Seed: VVGAVGVGK (KRAS G12V)
WVGNVPVGL

SEQ ID NO: 75397 - protein, 9 aa, synthetic construct
  source 1..9: note = Seed: VVGAVGVGK (KRAS G12V)
WVGNVPVGM

SEQ ID NO: 75398 - protein, 9 aa, synthetic construct
  source 1..9: note = Seed: VVGAVGVGK (KRAS G12V)
WVGNVPVGV

SEQ ID NO: 75399 - protein, 9 aa, synthetic construct
  source 1..9: note = Seed: VVGAVGVGK (KRAS G12V)
WVGNVRVGR

SEQ ID NO: 75400 - protein, 9 aa, synthetic construct
  source 1..9: note = Seed: VVGAVGVGK (KRAS G12V)
WVGNVSVGL

SEQ ID NO: 75401 - protein, 9 aa, synthetic construct
  source 1..9: note = Seed: VVGAVGVGK (KRAS G12V)
WVGNVSVGV

SEQ ID NO: 75402 - protein, 9 aa, synthetic construct
  source 1..9: note = Seed: VVGAVGVGK (KRAS G12V)
WVGQVAVGA

SEQ ID NO: 75403 - protein, 9 aa, synthetic construct
  source 1..9: note = Seed: VVGAVGVGK (KRAS G12V)
WVGQVAVGG

SEQ ID NO: 75404 - protein, 9 aa, synthetic construct
  source 1..9: note = Seed: VVGAVGVGK (KRAS G12V)
WVGQVAVGH

SEQ ID NO: 75405 - protein, 9 aa, synthetic construct
  source 1..9: note = Seed: VVGAVGVGK (KRAS G12V)
WVGQVAVGI

SEQ ID NO: 75406 - protein, 9 aa, synthetic construct
  source 1..9: note = Seed: VVGAVGVGK (KRAS G12V)
WVGQVAVGK

SEQ ID NO: 75407 - protein, 9 aa, synthetic construct
  source 1..9: note = Seed: VVGAVGVGK (KRAS G12V)
WVGQVAVGL

SEQ ID NO: 75408 - protein, 9 aa, synthetic construct
  source 1..9: note = Seed: VVGAVGVGK (KRAS G12V)
WVGQVAVGM

SEQ ID NO: 75409 - protein, 9 aa, synthetic construct
  source 1..9: note = Seed: VVGAVGVGK (KRAS G12V)
WVGQVAVGN

SEQ ID NO: 75410 - protein, 9 aa, synthetic construct
  source 1..9: note = Seed: VVGAVGVGK (KRAS G12V)
WVGQVAVGR

SEQ ID NO: 75411 - protein, 9 aa, synthetic construct
  source 1..9: note = Seed: VVGAVGVGK (KRAS G12V)
WVGQVAVGS

SEQ ID NO: 75412 - protein, 9 aa, synthetic construct
  source 1..9: note = Seed: VVGAVGVGK (KRAS G12V)
WVGQVAVGT

SEQ ID NO: 75413 - protein, 9 aa, synthetic construct
  source 1..9: note = Seed: VVGAVGVGK (KRAS G12V)
WVGQVAVGV

SEQ ID NO: 75414 - protein, 9 aa, synthetic construct
  source 1..9: note = Seed: VVGAVGVGK (KRAS G12V)
WVGQVGVGA

SEQ ID NO: 75415 - protein, 9 aa, synthetic construct
  source 1..9: note = Seed: VVGAVGVGK (KRAS G12V)
WVGQVGVGI

SEQ ID NO: 75416 - protein, 9 aa, synthetic construct
  source 1..9: note = Seed: VVGAVGVGK (KRAS G12V)
WVGQVGVGL

SEQ ID NO: 75417 - protein, 9 aa, synthetic construct
  source 1..9: note = Seed: VVGAVGVGK (KRAS G12V)
WVGQVGVGM

SEQ ID NO: 75418 - protein, 9 aa, synthetic construct
  source 1..9: note = Seed: VVGAVGVGK (KRAS G12V)
WVGQVGVGS

SEQ ID NO: 75419 - protein, 9 aa, synthetic construct
  source 1..9: note = Seed: VVGAVGVGK (KRAS G12V)
WVGQVGVGT

SEQ ID NO: 75420 - protein, 9 aa, synthetic construct
  source 1..9: note = Seed: VVGAVGVGK (KRAS G12V)
WVGQVGVGV

SEQ ID NO: 75421 - protein, 9 aa, synthetic construct
  source 1..9: note = Seed: VVGAVGVGK (KRAS G12V)
WVGQVKVGS

SEQ ID NO: 75422 - protein, 9 aa, synthetic construct
  source 1..9: note = Seed: VVGAVGVGK (KRAS G12V)
WVGQVNVGA

SEQ ID NO: 75423 - protein, 9 aa, synthetic construct
  source 1..9: note = Seed: VVGAVGVGK (KRAS G12V)
WVGQVNVGL

SEQ ID NO: 75424 - protein, 9 aa, synthetic construct
  source 1..9: note = Seed: VVGAVGVGK (KRAS G12V)
WVGQVNVGV

SEQ ID NO: 75425 - protein, 9 aa, synthetic construct
  source 1..9: note = Seed: VVGAVGVGK (KRAS G12V)
WVGQVPVGA

SEQ ID NO: 75426 - protein, 9 aa, synthetic construct
  source 1..9: note = Seed: VVGAVGVGK (KRAS G12V)
WVGQVPVGI

SEQ ID NO: 75427 - protein, 9 aa, synthetic construct
  source 1..9: note = Seed: VVGAVGVGK (KRAS G12V)
WVGQVPVGL

SEQ ID NO: 75428 - protein, 9 aa, synthetic construct
  source 1..9: note = Seed: VVGAVGVGK (KRAS G12V)
WVGQVPVGM

SEQ ID NO: 75429 - protein, 9 aa, synthetic construct
  source 1..9: note = Seed: VVGAVGVGK (KRAS G12V)
WVGQVPVGS

SEQ ID NO: 75430 - protein, 9 aa, synthetic construct
  source 1..9: note = Seed: VVGAVGVGK (KRAS G12V)
WVGQVPVGT

SEQ ID NO: 75431 - protein, 9 aa, synthetic construct
  source 1..9: note = Seed: VVGAVGVGK (KRAS G12V)
WVGQVPVGV

SEQ ID NO: 75432 - protein, 9 aa, synthetic construct
  source 1..9: note = Seed: VVGAVGVGK (KRAS G12V)
WVGQVRVGS

SEQ ID NO: 75433 - protein, 9 aa, synthetic construct
  source 1..9: note = Seed: VVGAVGVGK (KRAS G12V)
WVGQVSVGA

SEQ ID NO: 75434 - protein, 9 aa, synthetic construct
  source 1..9: note = Seed: VVGAVGVGK (KRAS G12V)
WVGQVSVGI

SEQ ID NO: 75435 - protein, 9 aa, synthetic construct
  source 1..9: note = Seed: VVGAVGVGK (KRAS G12V)
WVGQVSVGL

SEQ ID NO: 75436 - protein, 9 aa, synthetic construct
  source 1..9: note = Seed: VVGAVGVGK (KRAS G12V)
WVGQVSVGM

SEQ ID NO: 75437 - protein, 9 aa, synthetic construct
  source 1..9: note = Seed: VVGAVGVGK (KRAS G12V)
WVGQVSVGS

SEQ ID NO: 75438 - protein, 9 aa, synthetic construct
  source 1..9: note = Seed: VVGAVGVGK (KRAS G12V)
WVGQVSVGT

SEQ ID NO: 75439 - protein, 9 aa, synthetic construct
  source 1..9: note = Seed: VVGAVGVGK (KRAS G12V)
WVGQVSVGV

SEQ ID NO: 75440 - protein, 9 aa, synthetic construct
  source 1..9: note = Seed: VVGAVGVGK (KRAS G12V)
WVGRVKVGG

SEQ ID NO: 75441 - protein, 9 aa, synthetic construct
  source 1..9: note = Seed: VVGAVGVGK (KRAS G12V)
WVGRVKVGQ

SEQ ID NO: 75442 - protein, 9 aa, synthetic construct
  source 1..9: note = Seed: VVGAVGVGK (KRAS G12V)
WVGRVKVGR

SEQ ID NO: 75443 - protein, 9 aa, synthetic construct
  source 1..9: note = Seed: VVGAVGVGK (KRAS G12V)
WVGRVKVGY

SEQ ID NO: 75444 - protein, 9 aa, synthetic construct
  source 1..9: note = Seed: VVGAVGVGK (KRAS G12V)
WVGRVRVGG

SEQ ID NO: 75445 - protein, 9 aa, synthetic construct
  source 1..9: note = Seed: VVGAVGVGK (KRAS G12V)
WVGRVRVGQ

SEQ ID NO: 75446 - protein, 9 aa, synthetic construct
  source 1..9: note = Seed: VVGAVGVGK (KRAS G12V)
WVGRVRVGR

SEQ ID NO: 75447 - protein, 9 aa, synthetic construct
  source 1..9: note = Seed: VVGAVGVGK (KRAS G12V)
WVGRVRVGY

SEQ ID NO: 75448 - protein, 9 aa, synthetic construct
  source 1..9: note = Seed: VVGAVGVGK (KRAS G12V)
WVGSVAVGA

SEQ ID NO: 75449 - protein, 9 aa, synthetic construct
  source 1..9: note = Seed: VVGAVGVGK (KRAS G12V)
WVGSVAVGG

SEQ ID NO: 75450 - protein, 9 aa, synthetic construct
  source 1..9: note = Seed: VVGAVGVGK (KRAS G12V)
WVGSVAVGH

SEQ ID NO: 75451 - protein, 9 aa, synthetic construct
  source 1..9: note = Seed: VVGAVGVGK (KRAS G12V)
WVGSVAVGI

SEQ ID NO: 75452 - protein, 9 aa, synthetic construct
  source 1..9: note = Seed: VVGAVGVGK (KRAS G12V)
WVGSVAVGK

SEQ ID NO: 75453 - protein, 9 aa, synthetic construct
  source 1..9: note = Seed: VVGAVGVGK (KRAS G12V)
WVGSVAVGL

SEQ ID NO: 75454 - protein, 9 aa, synthetic construct
  source 1..9: note = Seed: VVGAVGVGK (KRAS G12V)
WVGSVAVGM

SEQ ID NO: 75455 - protein, 9 aa, synthetic construct
  source 1..9: note = Seed: VVGAVGVGK (KRAS G12V)
WVGSVAVGN

SEQ ID NO: 75456 - protein, 9 aa, synthetic construct
  source 1..9: note = Seed: VVGAVGVGK (KRAS G12V)
WVGSVAVGR

SEQ ID NO: 75457 - protein, 9 aa, synthetic construct
  source 1..9: note = Seed: VVGAVGVGK (KRAS G12V)
WVGSVAVGS

SEQ ID NO: 75458 - protein, 9 aa, synthetic construct
  source 1..9: note = Seed: VVGAVGVGK (KRAS G12V)
WVGSVAVGT

SEQ ID NO: 75459 - protein, 9 aa, synthetic construct
  source 1..9: note = Seed: VVGAVGVGK (KRAS G12V)
WVGSVAVGV

SEQ ID NO: 75460 - protein, 9 aa, synthetic construct
  source 1..9: note = Seed: VVGAVGVGK (KRAS G12V)
WVGSVGVGA

SEQ ID NO: 75461 - protein, 9 aa, synthetic construct
  source 1..9: note = Seed: VVGAVGVGK (KRAS G12V)
WVGSVGVGI

SEQ ID NO: 75462 - protein, 9 aa, synthetic construct
  source 1..9: note = Seed: VVGAVGVGK (KRAS G12V)
WVGSVGVGL

SEQ ID NO: 75463 - protein, 9 aa, synthetic construct
  source 1..9: note = Seed: VVGAVGVGK (KRAS G12V)
WVGSVGVGM

SEQ ID NO: 75464 - protein, 9 aa, synthetic construct
  source 1..9: note = Seed: VVGAVGVGK (KRAS G12V)
WVGSVGVGV

SEQ ID NO: 75465 - protein, 9 aa, synthetic construct
  source 1..9: note = Seed: VVGAVGVGK (KRAS G12V)
WVGSVKVGR

SEQ ID NO: 75466 - protein, 9 aa, synthetic construct
  source 1..9: note = Seed: VVGAVGVGK (KRAS G12V)
WVGSVKVGS

SEQ ID NO: 75467 - protein, 9 aa, synthetic construct
  source 1..9: note = Seed: VVGAVGVGK (KRAS G12V)
WVGSVPVGA

SEQ ID NO: 75468 - protein, 9 aa, synthetic construct
  source 1..9: note = Seed: VVGAVGVGK (KRAS G12V)
WVGSVPVGF

SEQ ID NO: 75469 - protein, 9 aa, synthetic construct
  source 1..9: note = Seed: VVGAVGVGK (KRAS G12V)
WVGSVPVGG

SEQ ID NO: 75470 - protein, 9 aa, synthetic construct
  source 1..9: note = Seed: VVGAVGVGK (KRAS G12V)
WVGSVPVGI

SEQ ID NO: 75471 - protein, 9 aa, synthetic construct
  source 1..9: note = Seed: VVGAVGVGK (KRAS G12V)
WVGSVPVGK

SEQ ID NO: 75472 - protein, 9 aa, synthetic construct
  source 1..9: note = Seed: VVGAVGVGK (KRAS G12V)
WVGSVPVGL

SEQ ID NO: 75473 - protein, 9 aa, synthetic construct
  source 1..9: note = Seed: VVGAVGVGK (KRAS G12V)
WVGSVPVGM

SEQ ID NO: 75474 - protein, 9 aa, synthetic construct
  source 1..9: note = Seed: VVGAVGVGK (KRAS G12V)
WVGSVPVGN

SEQ ID NO: 75475 - protein, 9 aa, synthetic construct
  source 1..9: note = Seed: VVGAVGVGK (KRAS G12V)
WVGSVPVGR

SEQ ID NO: 75476 - protein, 9 aa, synthetic construct
  source 1..9: note = Seed: VVGAVGVGK (KRAS G12V)
WVGSVPVGS

SEQ ID NO: 75477 - protein, 9 aa, synthetic construct
  source 1..9: note = Seed: VVGAVGVGK (KRAS G12V)
WVGSVPVGT

SEQ ID NO: 75478 - protein, 9 aa, synthetic construct
  source 1..9: note = Seed: VVGAVGVGK (KRAS G12V)
WVGSVPVGV

SEQ ID NO: 75479 - protein, 9 aa, synthetic construct
  source 1..9: note = Seed: VVGAVGVGK (KRAS G12V)
WVGSVRVGK

SEQ ID NO: 75480 - protein, 9 aa, synthetic construct
  source 1..9: note = Seed: VVGAVGVGK (KRAS G12V)
WVGSVRVGR

SEQ ID NO: 75481 - protein, 9 aa, synthetic construct
  source 1..9: note = Seed: VVGAVGVGK (KRAS G12V)
WVGSVRVGS

SEQ ID NO: 75482 - protein, 9 aa, synthetic construct
  source 1..9: note = Seed: VVGAVGVGK (KRAS G12V)
WVGSVSVGA

SEQ ID NO: 75483 - protein, 9 aa, synthetic construct
  source 1..9: note = Seed: VVGAVGVGK (KRAS G12V)
WVGSVSVGI

SEQ ID NO: 75484 - protein, 9 aa, synthetic construct
  source 1..9: note = Seed: VVGAVGVGK (KRAS G12V)
WVGSVSVGL

SEQ ID NO: 75485 - protein, 9 aa, synthetic construct
  source 1..9: note = Seed: VVGAVGVGK (KRAS G12V)
WVGSVSVGV

SEQ ID NO: 75486 - protein, 9 aa, synthetic construct
  source 1..9: note = Seed: VVGAVGVGK (KRAS G12V)
WVGTVAVGA

SEQ ID NO: 75487 - protein, 9 aa, synthetic construct
  source 1..9: note = Seed: VVGAVGVGK (KRAS G12V)
WVGTVAVGV

SEQ ID NO: 75488 - protein, 9 aa, synthetic construct
  source 1..9: note = Seed: VVGAVGVGK (KRAS G12V)
WVGTVKVGS

SEQ ID NO: 75489 - protein, 9 aa, synthetic construct
  source 1..9: note = Seed: VVGAVGVGK (KRAS G12V)
WVGTVPVGA

SEQ ID NO: 75490 - protein, 9 aa, synthetic construct
  source 1..9: note = Seed: VVGAVGVGK (KRAS G12V)
WVGTVPVGI

SEQ ID NO: 75491 - protein, 9 aa, synthetic construct
  source 1..9: note = Seed: VVGAVGVGK (KRAS G12V)
WVGTVPVGL

SEQ ID NO: 75492 - protein, 9 aa, synthetic construct
  source 1..9: note = Seed: VVGAVGVGK (KRAS G12V)
WVGTVPVGM

SEQ ID NO: 75493 - protein, 9 aa, synthetic construct
  source 1..9: note = Seed: VVGAVGVGK (KRAS G12V)
WVGTVPVGV

SEQ ID NO: 75494 - protein, 9 aa, synthetic construct
  source 1..9: note = Seed: VVGAVGVGK (KRAS G12V)
WVGTVRVGH

SEQ ID NO: 75495 - protein, 9 aa, synthetic construct
  source 1..9: note = Seed: VVGAVGVGK (KRAS G12V)
WVGTVRVGR

SEQ ID NO: 75496 - protein, 9 aa, synthetic construct
  source 1..9: note = Seed: VVGAVGVGK (KRAS G12V)
WVGTVRVGS

SEQ ID NO: 75497 - protein, 9 aa, synthetic construct
  source 1..9: note = Seed: VVGAVGVGK (KRAS G12V)
WVGTVSVGI

SEQ ID NO: 75498 - protein, 9 aa, synthetic construct
  source 1..9: note = Seed: VVGAVGVGK (KRAS G12V)
WVGTVSVGV

SEQ ID NO: 75499 - protein, 9 aa, synthetic construct
  source 1..9: note = Seed: VVGAVGVGK (KRAS G12V)
WVGVVAVGA

SEQ ID NO: 75500 - protein, 9 aa, synthetic construct
  source 1..9: note = Seed: VVGAVGVGK (KRAS G12V)
WVGVVAVGG

SEQ ID NO: 75501 - protein, 9 aa, synthetic construct
  source 1..9: note = Seed: VVGAVGVGK (KRAS G12V)
WVGVVAVGH

SEQ ID NO: 75502 - protein, 9 aa, synthetic construct
  source 1..9: note = Seed: VVGAVGVGK (KRAS G12V)
WVGVVAVGN

SEQ ID NO: 75503 - protein, 9 aa, synthetic construct
  source 1..9: note = Seed: VVGAVGVGK (KRAS G12V)
WVGVVAVGR

SEQ ID NO: 75504 - protein, 9 aa, synthetic construct
  source 1..9: note = Seed: VVGAVGVGK (KRAS G12V)
WVGVVAVGS

SEQ ID NO: 75505 - protein, 9 aa, synthetic construct
  source 1..9: note = Seed: VVGAVGVGK (KRAS G12V)
WVGVVGVGA

SEQ ID NO: 75506 - protein, 9 aa, synthetic construct
  source 1..9: note = Seed: VVGAVGVGK (KRAS G12V)
WVGVVKVGG

SEQ ID NO: 75507 - protein, 9 aa, synthetic construct
  source 1..9: note = Seed: VVGAVGVGK (KRAS G12V)
WVGVVKVGH

SEQ ID NO: 75508 - protein, 9 aa, synthetic construct
  source 1..9: note = Seed: VVGAVGVGK (KRAS G12V)
WVGVVKVGR

SEQ ID NO: 75509 - protein, 9 aa, synthetic construct
  source 1..9: note = Seed: VVGAVGVGK (KRAS G12V)
WVGVVKVGS

SEQ ID NO: 75510 - protein, 9 aa, synthetic construct
  source 1..9: note = Seed: VVGAVGVGK (KRAS G12V)
WVGVVPVGA

SEQ ID NO: 75511 - protein, 9 aa, synthetic construct
  source 1..9: note = Seed: VVGAVGVGK (KRAS G12V)
WVGVVPVGI

SEQ ID NO: 75512 - protein, 9 aa, synthetic construct
  source 1..9: note = Seed: VVGAVGVGK (KRAS G12V)
WVGVVPVGL

SEQ ID NO: 75513 - protein, 9 aa, synthetic construct
  source 1..9: note = Seed: VVGAVGVGK (KRAS G12V)
WVGVVPVGS

SEQ ID NO: 75514 - protein, 9 aa, synthetic construct
  source 1..9: note = Seed: VVGAVGVGK (KRAS G12V)
WVGVVPVGT

SEQ ID NO: 75515 - protein, 9 aa, synthetic construct
  source 1..9: note = Seed: VVGAVGVGK (KRAS G12V)
WVGVVPVGV

SEQ ID NO: 75516 - protein, 9 aa, synthetic construct
  source 1..9: note = Seed: VVGAVGVGK (KRAS G12V)
WVGVVRVGH

SEQ ID NO: 75517 - protein, 9 aa, synthetic construct
  source 1..9: note = Seed: VVGAVGVGK (KRAS G12V)
WVGVVRVGK

SEQ ID NO: 75518 - protein, 9 aa, synthetic construct
  source 1..9: note = Seed: VVGAVGVGK (KRAS G12V)
WVGVVRVGR

SEQ ID NO: 75519 - protein, 9 aa, synthetic construct
  source 1..9: note = Seed: VVGAVGVGK (KRAS G12V)
WVGWVKVGR

SEQ ID NO: 75520 - protein, 9 aa, synthetic construct
  source 1..9: note = Seed: VVGAVGVGK (KRAS G12V)
WVGWVRVGR

SEQ ID NO: 75521 - protein, 9 aa, synthetic construct
  source 1..9: note = Seed: VVGAVGVGK (KRAS G12V)
WVGYVRVGR

SEQ ID NO: 75522 - protein, 9 aa, synthetic construct
  source 1..9: note = Seed: VVGAVGVGK (KRAS G12V)
YVGAVAVGA

SEQ ID NO: 75523 - protein, 9 aa, synthetic construct
  source 1..9: note = Seed: VVGAVGVGK (KRAS G12V)
YVGAVAVGD

SEQ ID NO: 75524 - protein, 9 aa, synthetic construct
  source 1..9: note = Seed: VVGAVGVGK (KRAS G12V)
YVGAVAVGE

SEQ ID NO: 75525 - protein, 9 aa, synthetic construct
  source 1..9: note = Seed: VVGAVGVGK (KRAS G12V)
YVGAVAVGF

SEQ ID NO: 75526 - protein, 9 aa, synthetic construct
  source 1..9: note = Seed: VVGAVGVGK (KRAS G12V)
YVGAVAVGG

SEQ ID NO: 75527 - protein, 9 aa, synthetic construct
  source 1..9: note = Seed: VVGAVGVGK (KRAS G12V)
YVGAVAVGH

SEQ ID NO: 75528 - protein, 9 aa, synthetic construct
  source 1..9: note = Seed: VVGAVGVGK (KRAS G12V)
YVGAVAVGI

SEQ ID NO: 75529 - protein, 9 aa, synthetic construct
  source 1..9: note = Seed: VVGAVGVGK (KRAS G12V)
YVGAVAVGK

SEQ ID NO: 75530 - protein, 9 aa, synthetic construct
  source 1..9: note = Seed: VVGAVGVGK (KRAS G12V)
YVGAVAVGL

SEQ ID NO: 75531 - protein, 9 aa, synthetic construct
  source 1..9: note = Seed: VVGAVGVGK (KRAS G12V)
YVGAVAVGM

SEQ ID NO: 75532 - protein, 9 aa, synthetic construct
  source 1..9: note = Seed: VVGAVGVGK (KRAS G12V)
YVGAVAVGN

SEQ ID NO: 75533 - protein, 9 aa, synthetic construct
  source 1..9: note = Seed: VVGAVGVGK (KRAS G12V)
YVGAVAVGP

SEQ ID NO: 75534 - protein, 9 aa, synthetic construct
  source 1..9: note = Seed: VVGAVGVGK (KRAS G12V)
YVGAVAVGQ

SEQ ID NO: 75535 - protein, 9 aa, synthetic construct
  source 1..9: note = Seed: VVGAVGVGK (KRAS G12V)
YVGAVAVGR

SEQ ID NO: 75536 - protein, 9 aa, synthetic construct
  source 1..9: note = Seed: VVGAVGVGK (KRAS G12V)
YVGAVAVGS

SEQ ID NO: 75537 - protein, 9 aa, synthetic construct
  source 1..9: note = Seed: VVGAVGVGK (KRAS G12V)
YVGAVAVGT

SEQ ID NO: 75538 - protein, 9 aa, synthetic construct
  source 1..9: note = Seed: VVGAVGVGK (KRAS G12V)
YVGAVAVGV

SEQ ID NO: 75539 - protein, 9 aa, synthetic construct
  source 1..9: note = Seed: VVGAVGVGK (KRAS G12V)
YVGAVAVGY

SEQ ID NO: 75540 - protein, 9 aa, synthetic construct
  source 1..9: note = Seed: VVGAVGVGK (KRAS G12V)
YVGAVGVGA

SEQ ID NO: 75541 - protein, 9 aa, synthetic construct
  source 1..9: note = Seed: VVGAVGVGK (KRAS G12V)
YVGAVGVGF

SEQ ID NO: 75542 - protein, 9 aa, synthetic construct
  source 1..9: note = Seed: VVGAVGVGK (KRAS G12V)
YVGAVGVGG

SEQ ID NO: 75543 - protein, 9 aa, synthetic construct
  source 1..9: note = Seed: VVGAVGVGK (KRAS G12V)
YVGAVGVGH

SEQ ID NO: 75544 - protein, 9 aa, synthetic construct
  source 1..9: note = Seed: VVGAVGVGK (KRAS G12V)
YVGAVGVGI

SEQ ID NO: 75545 - protein, 9 aa, synthetic construct
  source 1..9: note = Seed: VVGAVGVGK (KRAS G12V)
YVGAVGVGK

SEQ ID NO: 75546 - protein, 9 aa, synthetic construct
  source 1..9: note = Seed: VVGAVGVGK (KRAS G12V)
YVGAVGVGL

SEQ ID NO: 75547 - protein, 9 aa, synthetic construct
  source 1..9: note = Seed: VVGAVGVGK (KRAS G12V)
YVGAVGVGM

SEQ ID NO: 75548 - protein, 9 aa, synthetic construct
  source 1..9: note = Seed: VVGAVGVGK (KRAS G12V)
YVGAVGVGN

SEQ ID NO: 75549 - protein, 9 aa, synthetic construct
  source 1..9: note = Seed: VVGAVGVGK (KRAS G12V)
YVGAVGVGP

SEQ ID NO: 75550 - protein, 9 aa, synthetic construct
  source 1..9: note = Seed: VVGAVGVGK (KRAS G12V)
YVGAVGVGQ

SEQ ID NO: 75551 - protein, 9 aa, synthetic construct
  source 1..9: note = Seed: VVGAVGVGK (KRAS G12V)
YVGAVGVGR

SEQ ID NO: 75552 - protein, 9 aa, synthetic construct
  source 1..9: note = Seed: VVGAVGVGK (KRAS G12V)
YVGAVGVGS

SEQ ID NO: 75553 - protein, 9 aa, synthetic construct
  source 1..9: note = Seed: VVGAVGVGK (KRAS G12V)
YVGAVGVGT

SEQ ID NO: 75554 - protein, 9 aa, synthetic construct
  source 1..9: note = Seed: VVGAVGVGK (KRAS G12V)
YVGAVGVGV

SEQ ID NO: 75555 - protein, 9 aa, synthetic construct
  source 1..9: note = Seed: VVGAVGVGK (KRAS G12V)
YVGAVGVGY

SEQ ID NO: 75556 - protein, 9 aa, synthetic construct
  source 1..9: note = Seed: VVGAVGVGK (KRAS G12V)
YVGAVHVGA

SEQ ID NO: 75557 - protein, 9 aa, synthetic construct
  source 1..9: note = Seed: VVGAVGVGK (KRAS G12V)
YVGAVHVGF

SEQ ID NO: 75558 - protein, 9 aa, synthetic construct
  source 1..9: note = Seed: VVGAVGVGK (KRAS G12V)
YVGAVHVGG

SEQ ID NO: 75559 - protein, 9 aa, synthetic construct
  source 1..9: note = Seed: VVGAVGVGK (KRAS G12V)
YVGAVHVGH

SEQ ID NO: 75560 - protein, 9 aa, synthetic construct
  source 1..9: note = Seed: VVGAVGVGK (KRAS G12V)
YVGAVHVGI

SEQ ID NO: 75561 - protein, 9 aa, synthetic construct
  source 1..9: note = Seed: VVGAVGVGK (KRAS G12V)
YVGAVHVGL

SEQ ID NO: 75562 - protein, 9 aa, synthetic construct
  source 1..9: note = Seed: VVGAVGVGK (KRAS G12V)
YVGAVHVGM

SEQ ID NO: 75563 - protein, 9 aa, synthetic construct
  source 1..9: note = Seed: VVGAVGVGK (KRAS G12V)
YVGAVHVGN

SEQ ID NO: 75564 - protein, 9 aa, synthetic construct
  source 1..9: note = Seed: VVGAVGVGK (KRAS G12V)
YVGAVHVGQ

SEQ ID NO: 75565 - protein, 9 aa, synthetic construct
  source 1..9: note = Seed: VVGAVGVGK (KRAS G12V)
YVGAVHVGR

SEQ ID NO: 75566 - protein, 9 aa, synthetic construct
  source 1..9: note = Seed: VVGAVGVGK (KRAS G12V)
YVGAVHVGS

SEQ ID NO: 75567 - protein, 9 aa, synthetic construct
  source 1..9: note = Seed: VVGAVGVGK (KRAS G12V)
YVGAVHVGT

SEQ ID NO: 75568 - protein, 9 aa, synthetic construct
  source 1..9: note = Seed: VVGAVGVGK (KRAS G12V)
YVGAVHVGV

SEQ ID NO: 75569 - protein, 9 aa, synthetic construct
  source 1..9: note = Seed: VVGAVGVGK (KRAS G12V)
YVGAVHVGY

SEQ ID NO: 75570 - protein, 9 aa, synthetic construct
  source 1..9: note = Seed: VVGAVGVGK (KRAS G12V)
YVGAVIVGA

SEQ ID NO: 75571 - protein, 9 aa, synthetic construct
  source 1..9: note = Seed: VVGAVGVGK (KRAS G12V)
YVGAVIVGH

SEQ ID NO: 75572 - protein, 9 aa, synthetic construct
  source 1..9: note = Seed: VVGAVGVGK (KRAS G12V)
YVGAVIVGN

SEQ ID NO: 75573 - protein, 9 aa, synthetic construct
  source 1..9: note = Seed: VVGAVGVGK (KRAS G12V)
YVGAVIVGR

SEQ ID NO: 75574 - protein, 9 aa, synthetic construct
  source 1..9: note = Seed: VVGAVGVGK (KRAS G12V)
YVGAVKVGA

SEQ ID NO: 75575 - protein, 9 aa, synthetic construct
  source 1..9: note = Seed: VVGAVGVGK (KRAS G12V)
YVGAVKVGF

SEQ ID NO: 75576 - protein, 9 aa, synthetic construct
  source 1..9: note = Seed: VVGAVGVGK (KRAS G12V)
YVGAVKVGG

SEQ ID NO: 75577 - protein, 9 aa, synthetic construct
  source 1..9: note = Seed: VVGAVGVGK (KRAS G12V)
YVGAVKVGH

SEQ ID NO: 75578 - protein, 9 aa, synthetic construct
  source 1..9: note = Seed: VVGAVGVGK (KRAS G12V)
YVGAVKVGI

SEQ ID NO: 75579 - protein, 9 aa, synthetic construct
  source 1..9: note = Seed: VVGAVGVGK (KRAS G12V)
YVGAVKVGK

SEQ ID NO: 75580 - protein, 9 aa, synthetic construct
  source 1..9: note = Seed: VVGAVGVGK (KRAS G12V)
YVGAVKVGL

SEQ ID NO: 75581 - protein, 9 aa, synthetic construct
  source 1..9: note = Seed: VVGAVGVGK (KRAS G12V)
YVGAVKVGM

SEQ ID NO: 75582 - protein, 9 aa, synthetic construct
  source 1..9: note = Seed: VVGAVGVGK (KRAS G12V)
YVGAVKVGN

SEQ ID NO: 75583 - protein, 9 aa, synthetic construct
  source 1..9: note = Seed: VVGAVGVGK (KRAS G12V)
YVGAVKVGP

SEQ ID NO: 75584 - protein, 9 aa, synthetic construct
  source 1..9: note = Seed: VVGAVGVGK (KRAS G12V)
YVGAVKVGQ

SEQ ID NO: 75585 - protein, 9 aa, synthetic construct
  source 1..9: note = Seed: VVGAVGVGK (KRAS G12V)
YVGAVKVGR

SEQ ID NO: 75586 - protein, 9 aa, synthetic construct
  source 1..9: note = Seed: VVGAVGVGK (KRAS G12V)
YVGAVKVGS

SEQ ID NO: 75587 - protein, 9 aa, synthetic construct
  source 1..9: note = Seed: VVGAVGVGK (KRAS G12V)
YVGAVKVGT

SEQ ID NO: 75588 - protein, 9 aa, synthetic construct
  source 1..9: note = Seed: VVGAVGVGK (KRAS G12V)
YVGAVKVGV

SEQ ID NO: 75589 - protein, 9 aa, synthetic construct
  source 1..9: note = Seed: VVGAVGVGK (KRAS G12V)
YVGAVKVGW

SEQ ID NO: 75590 - protein, 9 aa, synthetic construct
  source 1..9: note = Seed: VVGAVGVGK (KRAS G12V)
YVGAVKVGY

SEQ ID NO: 75591 - protein, 9 aa, synthetic construct
  source 1..9: note = Seed: VVGAVGVGK (KRAS G12V)
YVGAVMVGA

SEQ ID NO: 75592 - protein, 9 aa, synthetic construct
  source 1..9: note = Seed: VVGAVGVGK (KRAS G12V)
YVGAVMVGN

SEQ ID NO: 75593 - protein, 9 aa, synthetic construct
  source 1..9: note = Seed: VVGAVGVGK (KRAS G12V)
YVGAVMVGS

SEQ ID NO: 75594 - protein, 9 aa, synthetic construct
  source 1..9: note = Seed: VVGAVGVGK (KRAS G12V)
YVGAVMVGT

SEQ ID NO: 75595 - protein, 9 aa, synthetic construct
  source 1..9: note = Seed: VVGAVGVGK (KRAS G12V)
YVGAVNVGA

SEQ ID NO: 75596 - protein, 9 aa, synthetic construct
  source 1..9: note = Seed: VVGAVGVGK (KRAS G12V)
YVGAVNVGG

SEQ ID NO: 75597 - protein, 9 aa, synthetic construct
  source 1..9: note = Seed: VVGAVGVGK (KRAS G12V)
YVGAVNVGH

SEQ ID NO: 75598 - protein, 9 aa, synthetic construct
  source 1..9: note = Seed: VVGAVGVGK (KRAS G12V)
YVGAVNVGI

SEQ ID NO: 75599 - protein, 9 aa, synthetic construct
  source 1..9: note = Seed: VVGAVGVGK (KRAS G12V)
YVGAVNVGK

SEQ ID NO: 75600 - protein, 9 aa, synthetic construct
  source 1..9: note = Seed: VVGAVGVGK (KRAS G12V)
YVGAVNVGL

SEQ ID NO: 75601 - protein, 9 aa, synthetic construct
  source 1..9: note = Seed: VVGAVGVGK (KRAS G12V)
YVGAVNVGM

SEQ ID NO: 75602 - protein, 9 aa, synthetic construct
  source 1..9: note = Seed: VVGAVGVGK (KRAS G12V)
YVGAVNVGN

SEQ ID NO: 75603 - protein, 9 aa, synthetic construct
  source 1..9: note = Seed: VVGAVGVGK (KRAS G12V)
YVGAVNVGP

SEQ ID NO: 75604 - protein, 9 aa, synthetic construct
  source 1..9: note = Seed: VVGAVGVGK (KRAS G12V)
YVGAVNVGR

SEQ ID NO: 75605 - protein, 9 aa, synthetic construct
  source 1..9: note = Seed: VVGAVGVGK (KRAS G12V)
YVGAVNVGS

SEQ ID NO: 75606 - protein, 9 aa, synthetic construct
  source 1..9: note = Seed: VVGAVGVGK (KRAS G12V)
YVGAVNVGT

SEQ ID NO: 75607 - protein, 9 aa, synthetic construct
  source 1..9: note = Seed: VVGAVGVGK (KRAS G12V)
YVGAVNVGV

SEQ ID NO: 75608 - protein, 9 aa, synthetic construct
  source 1..9: note = Seed: VVGAVGVGK (KRAS G12V)
YVGAVNVGY

SEQ ID NO: 75609 - protein, 9 aa, synthetic construct
  source 1..9: note = Seed: VVGAVGVGK (KRAS G12V)
YVGAVPVGA

SEQ ID NO: 75610 - protein, 9 aa, synthetic construct
  source 1..9: note = Seed: VVGAVGVGK (KRAS G12V)
YVGAVPVGC

SEQ ID NO: 75611 - protein, 9 aa, synthetic construct
  source 1..9: note = Seed: VVGAVGVGK (KRAS G12V)
YVGAVPVGD

SEQ ID NO: 75612 - protein, 9 aa, synthetic construct
  source 1..9: note = Seed: VVGAVGVGK (KRAS G12V)
YVGAVPVGE

SEQ ID NO: 75613 - protein, 9 aa, synthetic construct
  source 1..9: note = Seed: VVGAVGVGK (KRAS G12V)
YVGAVPVGF

SEQ ID NO: 75614 - protein, 9 aa, synthetic construct
  source 1..9: note = Seed: VVGAVGVGK (KRAS G12V)
YVGAVPVGG

SEQ ID NO: 75615 - protein, 9 aa, synthetic construct
  source 1..9: note = Seed: VVGAVGVGK (KRAS G12V)
YVGAVPVGH

SEQ ID NO: 75616 - protein, 9 aa, synthetic construct
  source 1..9: note = Seed: VVGAVGVGK (KRAS G12V)
YVGAVPVGI

SEQ ID NO: 75617 - protein, 9 aa, synthetic construct
  source 1..9: note = Seed: VVGAVGVGK (KRAS G12V)
YVGAVPVGK

SEQ ID NO: 75618 - protein, 9 aa, synthetic construct
  source 1..9: note = Seed: VVGAVGVGK (KRAS G12V)
YVGAVPVGL

SEQ ID NO: 75619 - protein, 9 aa, synthetic construct
  source 1..9: note = Seed: VVGAVGVGK (KRAS G12V)
YVGAVPVGM

SEQ ID NO: 75620 - protein, 9 aa, synthetic construct
  source 1..9: note = Seed: VVGAVGVGK (KRAS G12V)
YVGAVPVGN

SEQ ID NO: 75621 - protein, 9 aa, synthetic construct
  source 1..9: note = Seed: VVGAVGVGK (KRAS G12V)
YVGAVPVGP

SEQ ID NO: 75622 - protein, 9 aa, synthetic construct
  source 1..9: note = Seed: VVGAVGVGK (KRAS G12V)
YVGAVPVGQ

SEQ ID NO: 75623 - protein, 9 aa, synthetic construct
  source 1..9: note = Seed: VVGAVGVGK (KRAS G12V)
YVGAVPVGR

SEQ ID NO: 75624 - protein, 9 aa, synthetic construct
  source 1..9: note = Seed: VVGAVGVGK (KRAS G12V)
YVGAVPVGS

SEQ ID NO: 75625 - protein, 9 aa, synthetic construct
  source 1..9: note = Seed: VVGAVGVGK (KRAS G12V)
YVGAVPVGT

SEQ ID NO: 75626 - protein, 9 aa, synthetic construct
  source 1..9: note = Seed: VVGAVGVGK (KRAS G12V)
YVGAVPVGV

SEQ ID NO: 75627 - protein, 9 aa, synthetic construct
  source 1..9: note = Seed: VVGAVGVGK (KRAS G12V)
YVGAVPVGW

SEQ ID NO: 75628 - protein, 9 aa, synthetic construct
  source 1..9: note = Seed: VVGAVGVGK (KRAS G12V)
YVGAVPVGY

SEQ ID NO: 75629 - protein, 9 aa, synthetic construct
  source 1..9: note = Seed: VVGAVGVGK (KRAS G12V)
YVGAVQVGA

SEQ ID NO: 75630 - protein, 9 aa, synthetic construct
  source 1..9: note = Seed: VVGAVGVGK (KRAS G12V)
YVGAVQVGH

SEQ ID NO: 75631 - protein, 9 aa, synthetic construct
  source 1..9: note = Seed: VVGAVGVGK (KRAS G12V)
YVGAVQVGI

SEQ ID NO: 75632 - protein, 9 aa, synthetic construct
  source 1..9: note = Seed: VVGAVGVGK (KRAS G12V)
YVGAVQVGL

SEQ ID NO: 75633 - protein, 9 aa, synthetic construct
  source 1..9: note = Seed: VVGAVGVGK (KRAS G12V)
YVGAVQVGM

SEQ ID NO: 75634 - protein, 9 aa, synthetic construct
  source 1..9: note = Seed: VVGAVGVGK (KRAS G12V)
YVGAVQVGN

SEQ ID NO: 75635 - protein, 9 aa, synthetic construct
  source 1..9: note = Seed: VVGAVGVGK (KRAS G12V)
YVGAVQVGR

SEQ ID NO: 75636 - protein, 9 aa, synthetic construct
  source 1..9: note = Seed: VVGAVGVGK (KRAS G12V)
YVGAVQVGS

SEQ ID NO: 75637 - protein, 9 aa, synthetic construct
  source 1..9: note = Seed: VVGAVGVGK (KRAS G12V)
YVGAVQVGT

SEQ ID NO: 75638 - protein, 9 aa, synthetic construct
  source 1..9: note = Seed: VVGAVGVGK (KRAS G12V)
YVGAVQVGV

SEQ ID NO: 75639 - protein, 9 aa, synthetic construct
  source 1..9: note = Seed: VVGAVGVGK (KRAS G12V)
YVGAVRVGA

SEQ ID NO: 75640 - protein, 9 aa, synthetic construct
  source 1..9: note = Seed: VVGAVGVGK (KRAS G12V)
YVGAVRVGD

SEQ ID NO: 75641 - protein, 9 aa, synthetic construct
  source 1..9: note = Seed: VVGAVGVGK (KRAS G12V)
YVGAVRVGE

SEQ ID NO: 75642 - protein, 9 aa, synthetic construct
  source 1..9: note = Seed: VVGAVGVGK (KRAS G12V)
YVGAVRVGG

SEQ ID NO: 75643 - protein, 9 aa, synthetic construct
  source 1..9: note = Seed: VVGAVGVGK (KRAS G12V)
YVGAVRVGH

SEQ ID NO: 75644 - protein, 9 aa, synthetic construct
  source 1..9: note = Seed: VVGAVGVGK (KRAS G12V)
YVGAVRVGI

SEQ ID NO: 75645 - protein, 9 aa, synthetic construct
  source 1..9: note = Seed: VVGAVGVGK (KRAS G12V)
YVGAVRVGK

SEQ ID NO: 75646 - protein, 9 aa, synthetic construct
  source 1..9: note = Seed: VVGAVGVGK (KRAS G12V)
YVGAVRVGL

SEQ ID NO: 75647 - protein, 9 aa, synthetic construct
  source 1..9: note = Seed: VVGAVGVGK (KRAS G12V)
YVGAVRVGM

SEQ ID NO: 75648 - protein, 9 aa, synthetic construct
  source 1..9: note = Seed: VVGAVGVGK (KRAS G12V)
YVGAVRVGN

SEQ ID NO: 75649 - protein, 9 aa, synthetic construct
  source 1..9: note = Seed: VVGAVGVGK (KRAS G12V)
YVGAVRVGP

SEQ ID NO: 75650 - protein, 9 aa, synthetic construct
  source 1..9: note = Seed: VVGAVGVGK (KRAS G12V)
YVGAVRVGQ

SEQ ID NO: 75651 - protein, 9 aa, synthetic construct
  source 1..9: note = Seed: VVGAVGVGK (KRAS G12V)
YVGAVRVGR

SEQ ID NO: 75652 - protein, 9 aa, synthetic construct
  source 1..9: note = Seed: VVGAVGVGK (KRAS G12V)
YVGAVRVGS

SEQ ID NO: 75653 - protein, 9 aa, synthetic construct
  source 1..9: note = Seed: VVGAVGVGK (KRAS G12V)
YVGAVRVGT

SEQ ID NO: 75654 - protein, 9 aa, synthetic construct
  source 1..9: note = Seed: VVGAVGVGK (KRAS G12V)
YVGAVRVGV

SEQ ID NO: 75655 - protein, 9 aa, synthetic construct
  source 1..9: note = Seed: VVGAVGVGK (KRAS G12V)
YVGAVRVGY

SEQ ID NO: 75656 - protein, 9 aa, synthetic construct
  source 1..9: note = Seed: VVGAVGVGK (KRAS G12V)
YVGAVSVGA

SEQ ID NO: 75657 - protein, 9 aa, synthetic construct
  source 1..9: note = Seed: VVGAVGVGK (KRAS G12V)
YVGAVSVGF

SEQ ID NO: 75658 - protein, 9 aa, synthetic construct
  source 1..9: note = Seed: VVGAVGVGK (KRAS G12V)
YVGAVSVGG

SEQ ID NO: 75659 - protein, 9 aa, synthetic construct
  source 1..9: note = Seed: VVGAVGVGK (KRAS G12V)
YVGAVSVGH

SEQ ID NO: 75660 - protein, 9 aa, synthetic construct
  source 1..9: note = Seed: VVGAVGVGK (KRAS G12V)
YVGAVSVGI

SEQ ID NO: 75661 - protein, 9 aa, synthetic construct
  source 1..9: note = Seed: VVGAVGVGK (KRAS G12V)
YVGAVSVGK

SEQ ID NO: 75662 - protein, 9 aa, synthetic construct
  source 1..9: note = Seed: VVGAVGVGK (KRAS G12V)
YVGAVSVGL

SEQ ID NO: 75663 - protein, 9 aa, synthetic construct
  source 1..9: note = Seed: VVGAVGVGK (KRAS G12V)
YVGAVSVGM

SEQ ID NO: 75664 - protein, 9 aa, synthetic construct
  source 1..9: note = Seed: VVGAVGVGK (KRAS G12V)
YVGAVSVGN

SEQ ID NO: 75665 - protein, 9 aa, synthetic construct
  source 1..9: note = Seed: VVGAVGVGK (KRAS G12V)
YVGAVSVGP

SEQ ID NO: 75666 - protein, 9 aa, synthetic construct
  source 1..9: note = Seed: VVGAVGVGK (KRAS G12V)
YVGAVSVGQ

SEQ ID NO: 75667 - protein, 9 aa, synthetic construct
  source 1..9: note = Seed: VVGAVGVGK (KRAS G12V)
YVGAVSVGR

SEQ ID NO: 75668 - protein, 9 aa, synthetic construct
  source 1..9: note = Seed: VVGAVGVGK (KRAS G12V)
YVGAVSVGS

SEQ ID NO: 75669 - protein, 9 aa, synthetic construct
  source 1..9: note = Seed: VVGAVGVGK (KRAS G12V)
YVGAVSVGT

SEQ ID NO: 75670 - protein, 9 aa, synthetic construct
  source 1..9: note = Seed: VVGAVGVGK (KRAS G12V)
YVGAVSVGV

SEQ ID NO: 75671 - protein, 9 aa, synthetic construct
  source 1..9: note = Seed: VVGAVGVGK (KRAS G12V)
YVGAVSVGY

SEQ ID NO: 75672 - protein, 9 aa, synthetic construct
  source 1..9: note = Seed: VVGAVGVGK (KRAS G12V)
YVGAVTVGA

SEQ ID NO: 75673 - protein, 9 aa, synthetic construct
  source 1..9: note = Seed: VVGAVGVGK (KRAS G12V)
YVGAVTVGG

SEQ ID NO: 75674 - protein, 9 aa, synthetic construct
  source 1..9: note = Seed: VVGAVGVGK (KRAS G12V)
YVGAVTVGH

SEQ ID NO: 75675 - protein, 9 aa, synthetic construct
  source 1..9: note = Seed: VVGAVGVGK (KRAS G12V)
YVGAVTVGI

SEQ ID NO: 75676 - protein, 9 aa, synthetic construct
  source 1..9: note = Seed: VVGAVGVGK (KRAS G12V)
YVGAVTVGK

SEQ ID NO: 75677 - protein, 9 aa, synthetic construct
  source 1..9: note = Seed: VVGAVGVGK (KRAS G12V)
YVGAVTVGL

SEQ ID NO: 75678 - protein, 9 aa, synthetic construct
  source 1..9: note = Seed: VVGAVGVGK (KRAS G12V)
YVGAVTVGM

SEQ ID NO: 75679 - protein, 9 aa, synthetic construct
  source 1..9: note = Seed: VVGAVGVGK (KRAS G12V)
YVGAVTVGN

SEQ ID NO: 75680 - protein, 9 aa, synthetic construct
  source 1..9: note = Seed: VVGAVGVGK (KRAS G12V)
YVGAVTVGP

SEQ ID NO: 75681 - protein, 9 aa, synthetic construct
  source 1..9: note = Seed: VVGAVGVGK (KRAS G12V)
YVGAVTVGQ

SEQ ID NO: 75682 - protein, 9 aa, synthetic construct
  source 1..9: note = Seed: VVGAVGVGK (KRAS G12V)
YVGAVTVGR

SEQ ID NO: 75683 - protein, 9 aa, synthetic construct
  source 1..9: note = Seed: VVGAVGVGK (KRAS G12V)
YVGAVTVGS

SEQ ID NO: 75684 - protein, 9 aa, synthetic construct
  source 1..9: note = Seed: VVGAVGVGK (KRAS G12V)
YVGAVTVGT

SEQ ID NO: 75685 - protein, 9 aa, synthetic construct
  source 1..9: note = Seed: VVGAVGVGK (KRAS G12V)
YVGAVTVGV

SEQ ID NO: 75686 - protein, 9 aa, synthetic construct
  source 1..9: note = Seed: VVGAVGVGK (KRAS G12V)
YVGAVTVGY

SEQ ID NO: 75687 - protein, 9 aa, synthetic construct
  source 1..9: note = Seed: VVGAVGVGK (KRAS G12V)
YVGAVVVGA

SEQ ID NO: 75688 - protein, 9 aa, synthetic construct
  source 1..9: note = Seed: VVGAVGVGK (KRAS G12V)
YVGAVVVGG

SEQ ID NO: 75689 - protein, 9 aa, synthetic construct
  source 1..9: note = Seed: VVGAVGVGK (KRAS G12V)
YVGAVVVGH

SEQ ID NO: 75690 - protein, 9 aa, synthetic construct
  source 1..9: note = Seed: VVGAVGVGK (KRAS G12V)
YVGAVVVGK

SEQ ID NO: 75691 - protein, 9 aa, synthetic construct
  source 1..9: note = Seed: VVGAVGVGK (KRAS G12V)
YVGAVVVGM

SEQ ID NO: 75692 - protein, 9 aa, synthetic construct
  source 1..9: note = Seed: VVGAVGVGK (KRAS G12V)
YVGAVVVGN

SEQ ID NO: 75693 - protein, 9 aa, synthetic construct
  source 1..9: note = Seed: VVGAVGVGK (KRAS G12V)
YVGAVVVGR

SEQ ID NO: 75694 - protein, 9 aa, synthetic construct
  source 1..9: note = Seed: VVGAVGVGK (KRAS G12V)
YVGAVVVGS

SEQ ID NO: 75695 - protein, 9 aa, synthetic construct
  source 1..9: note = Seed: VVGAVGVGK (KRAS G12V)
YVGAVVVGT

SEQ ID NO: 75696 - protein, 9 aa, synthetic construct
  source 1..9: note = Seed: VVGAVGVGK (KRAS G12V)
YVGCVAVGA

SEQ ID NO: 75697 - protein, 9 aa, synthetic construct
  source 1..9: note = Seed: VVGAVGVGK (KRAS G12V)
YVGCVAVGG

SEQ ID NO: 75698 - protein, 9 aa, synthetic construct
  source 1..9: note = Seed: VVGAVGVGK (KRAS G12V)
YVGCVAVGI

SEQ ID NO: 75699 - protein, 9 aa, synthetic construct
  source 1..9: note = Seed: VVGAVGVGK (KRAS G12V)
YVGCVAVGL

SEQ ID NO: 75700 - protein, 9 aa, synthetic construct
  source 1..9: note = Seed: VVGAVGVGK (KRAS G12V)
YVGCVAVGM

SEQ ID NO: 75701 - protein, 9 aa, synthetic construct
  source 1..9: note = Seed: VVGAVGVGK (KRAS G12V)
YVGCVAVGN

SEQ ID NO: 75702 - protein, 9 aa, synthetic construct
  source 1..9: note = Seed: VVGAVGVGK (KRAS G12V)
YVGCVAVGS

SEQ ID NO: 75703 - protein, 9 aa, synthetic construct
  source 1..9: note = Seed: VVGAVGVGK (KRAS G12V)
YVGCVAVGT

SEQ ID NO: 75704 - protein, 9 aa, synthetic construct
  source 1..9: note = Seed: VVGAVGVGK (KRAS G12V)
YVGCVAVGV

SEQ ID NO: 75705 - protein, 9 aa, synthetic construct
  source 1..9: note = Seed: VVGAVGVGK (KRAS G12V)
YVGCVGVGA

SEQ ID NO: 75706 - protein, 9 aa, synthetic construct
  source 1..9: note = Seed: VVGAVGVGK (KRAS G12V)
YVGCVGVGI

SEQ ID NO: 75707 - protein, 9 aa, synthetic construct
  source 1..9: note = Seed: VVGAVGVGK (KRAS G12V)
YVGCVGVGL

SEQ ID NO: 75708 - protein, 9 aa, synthetic construct
  source 1..9: note = Seed: VVGAVGVGK (KRAS G12V)
YVGCVGVGV

SEQ ID NO: 75709 - protein, 9 aa, synthetic construct
  source 1..9: note = Seed: VVGAVGVGK (KRAS G12V)
YVGCVIVGA

SEQ ID NO: 75710 - protein, 9 aa, synthetic construct
  source 1..9: note = Seed: VVGAVGVGK (KRAS G12V)
YVGCVKVGA

SEQ ID NO: 75711 - protein, 9 aa, synthetic construct
  source 1..9: note = Seed: VVGAVGVGK (KRAS G12V)
YVGCVKVGG

SEQ ID NO: 75712 - protein, 9 aa, synthetic construct
  source 1..9: note = Seed: VVGAVGVGK (KRAS G12V)
YVGCVKVGH

SEQ ID NO: 75713 - protein, 9 aa, synthetic construct
  source 1..9: note = Seed: VVGAVGVGK (KRAS G12V)
YVGCVKVGQ

SEQ ID NO: 75714 - protein, 9 aa, synthetic construct
  source 1..9: note = Seed: VVGAVGVGK (KRAS G12V)
YVGCVKVGS

SEQ ID NO: 75715 - protein, 9 aa, synthetic construct
  source 1..9: note = Seed: VVGAVGVGK (KRAS G12V)
YVGCVLVGS

SEQ ID NO: 75716 - protein, 9 aa, synthetic construct
  source 1..9: note = Seed: VVGAVGVGK (KRAS G12V)
YVGCVMVGA

SEQ ID NO: 75717 - protein, 9 aa, synthetic construct
  source 1..9: note = Seed: VVGAVGVGK (KRAS G12V)
YVGCVPVGA

SEQ ID NO: 75718 - protein, 9 aa, synthetic construct
  source 1..9: note = Seed: VVGAVGVGK (KRAS G12V)
YVGCVPVGI

SEQ ID NO: 75719 - protein, 9 aa, synthetic construct
  source 1..9: note = Seed: VVGAVGVGK (KRAS G12V)
YVGCVPVGL

SEQ ID NO: 75720 - protein, 9 aa, synthetic construct
  source 1..9: note = Seed: VVGAVGVGK (KRAS G12V)
YVGCVPVGM

SEQ ID NO: 75721 - protein, 9 aa, synthetic construct
  source 1..9: note = Seed: VVGAVGVGK (KRAS G12V)
YVGCVPVGS

SEQ ID NO: 75722 - protein, 9 aa, synthetic construct
  source 1..9: note = Seed: VVGAVGVGK (KRAS G12V)
YVGCVPVGT

SEQ ID NO: 75723 - protein, 9 aa, synthetic construct
  source 1..9: note = Seed: VVGAVGVGK (KRAS G12V)
YVGCVPVGV

SEQ ID NO: 75724 - protein, 9 aa, synthetic construct
  source 1..9: note = Seed: VVGAVGVGK (KRAS G12V)
YVGCVRVGA

SEQ ID NO: 75725 - protein, 9 aa, synthetic construct
  source 1..9: note = Seed: VVGAVGVGK (KRAS G12V)
YVGCVRVGG

SEQ ID NO: 75726 - protein, 9 aa, synthetic construct
  source 1..9: note = Seed: VVGAVGVGK (KRAS G12V)
YVGCVRVGH

SEQ ID NO: 75727 - protein, 9 aa, synthetic construct
  source 1..9: note = Seed: VVGAVGVGK (KRAS G12V)
YVGCVRVGQ

SEQ ID NO: 75728 - protein, 9 aa, synthetic construct
  source 1..9: note = Seed: VVGAVGVGK (KRAS G12V)
YVGCVRVGS

SEQ ID NO: 75729 - protein, 9 aa, synthetic construct
  source 1..9: note = Seed: VVGAVGVGK (KRAS G12V)
YVGCVSVGA

SEQ ID NO: 75730 - protein, 9 aa, synthetic construct
  source 1..9: note = Seed: VVGAVGVGK (KRAS G12V)
YVGCVSVGG

SEQ ID NO: 75731 - protein, 9 aa, synthetic construct
  source 1..9: note = Seed: VVGAVGVGK (KRAS G12V)
YVGCVSVGI

SEQ ID NO: 75732 - protein, 9 aa, synthetic construct
  source 1..9: note = Seed: VVGAVGVGK (KRAS G12V)
YVGCVSVGL

SEQ ID NO: 75733 - protein, 9 aa, synthetic construct
  source 1..9: note = Seed: VVGAVGVGK (KRAS G12V)
YVGCVSVGS

SEQ ID NO: 75734 - protein, 9 aa, synthetic construct
  source 1..9: note = Seed: VVGAVGVGK (KRAS G12V)
YVGCVSVGV

SEQ ID NO: 75735 - protein, 9 aa, synthetic construct
  source 1..9: note = Seed: VVGAVGVGK (KRAS G12V)
YVGCVTVGA

SEQ ID NO: 75736 - protein, 9 aa, synthetic construct
  source 1..9: note = Seed: VVGAVGVGK (KRAS G12V)
YVGDVAVGA

SEQ ID NO: 75737 - protein, 9 aa, synthetic construct
  source 1..9: note = Seed: VVGAVGVGK (KRAS G12V)
YVGDVAVGI

SEQ ID NO: 75738 - protein, 9 aa, synthetic construct
  source 1..9: note = Seed: VVGAVGVGK (KRAS G12V)
YVGDVAVGL

SEQ ID NO: 75739 - protein, 9 aa, synthetic construct
  source 1..9: note = Seed: VVGAVGVGK (KRAS G12V)
YVGDVAVGV

SEQ ID NO: 75740 - protein, 9 aa, synthetic construct
  source 1..9: note = Seed: VVGAVGVGK (KRAS G12V)
YVGEVAVGA

SEQ ID NO: 75741 - protein, 9 aa, synthetic construct
  source 1..9: note = Seed: VVGAVGVGK (KRAS G12V)
YVGEVAVGG

SEQ ID NO: 75742 - protein, 9 aa, synthetic construct
  source 1..9: note = Seed: VVGAVGVGK (KRAS G12V)
YVGEVAVGH

SEQ ID NO: 75743 - protein, 9 aa, synthetic construct
  source 1..9: note = Seed: VVGAVGVGK (KRAS G12V)
YVGEVAVGI

SEQ ID NO: 75744 - protein, 9 aa, synthetic construct
  source 1..9: note = Seed: VVGAVGVGK (KRAS G12V)
YVGEVAVGK

SEQ ID NO: 75745 - protein, 9 aa, synthetic construct
  source 1..9: note = Seed: VVGAVGVGK (KRAS G12V)
YVGEVAVGL

SEQ ID NO: 75746 - protein, 9 aa, synthetic construct
  source 1..9: note = Seed: VVGAVGVGK (KRAS G12V)
YVGEVAVGM

SEQ ID NO: 75747 - protein, 9 aa, synthetic construct
  source 1..9: note = Seed: VVGAVGVGK (KRAS G12V)
YVGEVAVGN

SEQ ID NO: 75748 - protein, 9 aa, synthetic construct
  source 1..9: note = Seed: VVGAVGVGK (KRAS G12V)
YVGEVAVGR

SEQ ID NO: 75749 - protein, 9 aa, synthetic construct
  source 1..9: note = Seed: VVGAVGVGK (KRAS G12V)
YVGEVAVGS

SEQ ID NO: 75750 - protein, 9 aa, synthetic construct
  source 1..9: note = Seed: VVGAVGVGK (KRAS G12V)
YVGEVAVGT

SEQ ID NO: 75751 - protein, 9 aa, synthetic construct
  source 1..9: note = Seed: VVGAVGVGK (KRAS G12V)
YVGEVAVGV

SEQ ID NO: 75752 - protein, 9 aa, synthetic construct
  source 1..9: note = Seed: VVGAVGVGK (KRAS G12V)
YVGEVAVGY

SEQ ID NO: 75753 - protein, 9 aa, synthetic construct
  source 1..9: note = Seed: VVGAVGVGK (KRAS G12V)
YVGEVGVGA

SEQ ID NO: 75754 - protein, 9 aa, synthetic construct
  source 1..9: note = Seed: VVGAVGVGK (KRAS G12V)
YVGEVGVGG

SEQ ID NO: 75755 - protein, 9 aa, synthetic construct
  source 1..9: note = Seed: VVGAVGVGK (KRAS G12V)
YVGEVGVGI

SEQ ID NO: 75756 - protein, 9 aa, synthetic construct
  source 1..9: note = Seed: VVGAVGVGK (KRAS G12V)
YVGEVGVGL

SEQ ID NO: 75757 - protein, 9 aa, synthetic construct
  source 1..9: note = Seed: VVGAVGVGK (KRAS G12V)
YVGEVGVGM

SEQ ID NO: 75758 - protein, 9 aa, synthetic construct
  source 1..9: note = Seed: VVGAVGVGK (KRAS G12V)
YVGEVGVGN

SEQ ID NO: 75759 - protein, 9 aa, synthetic construct
  source 1..9: note = Seed: VVGAVGVGK (KRAS G12V)
YVGEVGVGS

SEQ ID NO: 75760 - protein, 9 aa, synthetic construct
  source 1..9: note = Seed: VVGAVGVGK (KRAS G12V)
YVGEVGVGT

SEQ ID NO: 75761 - protein, 9 aa, synthetic construct
  source 1..9: note = Seed: VVGAVGVGK (KRAS G12V)
YVGEVGVGV

SEQ ID NO: 75762 - protein, 9 aa, synthetic construct
  source 1..9: note = Seed: VVGAVGVGK (KRAS G12V)
YVGEVKVGA

SEQ ID NO: 75763 - protein, 9 aa, synthetic construct
  source 1..9: note = Seed: VVGAVGVGK (KRAS G12V)
YVGEVKVGG

SEQ ID NO: 75764 - protein, 9 aa, synthetic construct
  source 1..9: note = Seed: VVGAVGVGK (KRAS G12V)
YVGEVKVGS

SEQ ID NO: 75765 - protein, 9 aa, synthetic construct
  source 1..9: note = Seed: VVGAVGVGK (KRAS G12V)
YVGEVNVGA

SEQ ID NO: 75766 - protein, 9 aa, synthetic construct
  source 1..9: note = Seed: VVGAVGVGK (KRAS G12V)
YVGEVNVGI

SEQ ID NO: 75767 - protein, 9 aa, synthetic construct
  source 1..9: note = Seed: VVGAVGVGK (KRAS G12V)
YVGEVNVGL

SEQ ID NO: 75768 - protein, 9 aa, synthetic construct
  source 1..9: note = Seed: VVGAVGVGK (KRAS G12V)
YVGEVNVGM

SEQ ID NO: 75769 - protein, 9 aa, synthetic construct
  source 1..9: note = Seed: VVGAVGVGK (KRAS G12V)
YVGEVNVGS

SEQ ID NO: 75770 - protein, 9 aa, synthetic construct
  source 1..9: note = Seed: VVGAVGVGK (KRAS G12V)
YVGEVNVGT

SEQ ID NO: 75771 - protein, 9 aa, synthetic construct
  source 1..9: note = Seed: VVGAVGVGK (KRAS G12V)
YVGEVNVGV

SEQ ID NO: 75772 - protein, 9 aa, synthetic construct
  source 1..9: note = Seed: VVGAVGVGK (KRAS G12V)
YVGEVPVGA

SEQ ID NO: 75773 - protein, 9 aa, synthetic construct
  source 1..9: note = Seed: VVGAVGVGK (KRAS G12V)
YVGEVPVGG

SEQ ID NO: 75774 - protein, 9 aa, synthetic construct
  source 1..9: note = Seed: VVGAVGVGK (KRAS G12V)
YVGEVPVGI

SEQ ID NO: 75775 - protein, 9 aa, synthetic construct
  source 1..9: note = Seed: VVGAVGVGK (KRAS G12V)
YVGEVPVGL

SEQ ID NO: 75776 - protein, 9 aa, synthetic construct
  source 1..9: note = Seed: VVGAVGVGK (KRAS G12V)
YVGEVPVGM

SEQ ID NO: 75777 - protein, 9 aa, synthetic construct
  source 1..9: note = Seed: VVGAVGVGK (KRAS G12V)
YVGEVPVGS

SEQ ID NO: 75778 - protein, 9 aa, synthetic construct
  source 1..9: note = Seed: VVGAVGVGK (KRAS G12V)
YVGEVPVGT

SEQ ID NO: 75779 - protein, 9 aa, synthetic construct
  source 1..9: note = Seed: VVGAVGVGK (KRAS G12V)
YVGEVPVGV

SEQ ID NO: 75780 - protein, 9 aa, synthetic construct
  source 1..9: note = Seed: VVGAVGVGK (KRAS G12V)
YVGEVRVGA

SEQ ID NO: 75781 - protein, 9 aa, synthetic construct
  source 1..9: note = Seed: VVGAVGVGK (KRAS G12V)
YVGEVRVGG

SEQ ID NO: 75782 - protein, 9 aa, synthetic construct
  source 1..9: note = Seed: VVGAVGVGK (KRAS G12V)
YVGEVRVGH

SEQ ID NO: 75783 - protein, 9 aa, synthetic construct
  source 1..9: note = Seed: VVGAVGVGK (KRAS G12V)
YVGEVRVGS

SEQ ID NO: 75784 - protein, 9 aa, synthetic construct
  source 1..9: note = Seed: VVGAVGVGK (KRAS G12V)
YVGEVSVGA

SEQ ID NO: 75785 - protein, 9 aa, synthetic construct
  source 1..9: note = Seed: VVGAVGVGK (KRAS G12V)
YVGEVSVGG

SEQ ID NO: 75786 - protein, 9 aa, synthetic construct
  source 1..9: note = Seed: VVGAVGVGK (KRAS G12V)
YVGEVSVGI

SEQ ID NO: 75787 - protein, 9 aa, synthetic construct
  source 1..9: note = Seed: VVGAVGVGK (KRAS G12V)
YVGEVSVGL

SEQ ID NO: 75788 - protein, 9 aa, synthetic construct
  source 1..9: note = Seed: VVGAVGVGK (KRAS G12V)
YVGEVSVGM

SEQ ID NO: 75789 - protein, 9 aa, synthetic construct
  source 1..9: note = Seed: VVGAVGVGK (KRAS G12V)
YVGEVSVGN

SEQ ID NO: 75790 - protein, 9 aa, synthetic construct
  source 1..9: note = Seed: VVGAVGVGK (KRAS G12V)
YVGEVSVGS

SEQ ID NO: 75791 - protein, 9 aa, synthetic construct
  source 1..9: note = Seed: VVGAVGVGK (KRAS G12V)
YVGEVSVGT

SEQ ID NO: 75792 - protein, 9 aa, synthetic construct
  source 1..9: note = Seed: VVGAVGVGK (KRAS G12V)
YVGEVSVGV

SEQ ID NO: 75793 - protein, 9 aa, synthetic construct
  source 1..9: note = Seed: VVGAVGVGK (KRAS G12V)
YVGEVTVGA

SEQ ID NO: 75794 - protein, 9 aa, synthetic construct
  source 1..9: note = Seed: VVGAVGVGK (KRAS G12V)
YVGEVTVGI

SEQ ID NO: 75795 - protein, 9 aa, synthetic construct
  source 1..9: note = Seed: VVGAVGVGK (KRAS G12V)
YVGEVTVGL

SEQ ID NO: 75796 - protein, 9 aa, synthetic construct
  source 1..9: note = Seed: VVGAVGVGK (KRAS G12V)
YVGEVTVGM

SEQ ID NO: 75797 - protein, 9 aa, synthetic construct
  source 1..9: note = Seed: VVGAVGVGK (KRAS G12V)
YVGEVTVGV

SEQ ID NO: 75798 - protein, 9 aa, synthetic construct
  source 1..9: note = Seed: VVGAVGVGK (KRAS G12V)
YVGFVAVGA

SEQ ID NO: 75799 - protein, 9 aa, synthetic construct
  source 1..9: note = Seed: VVGAVGVGK (KRAS G12V)
YVGFVAVGG

SEQ ID NO: 75800 - protein, 9 aa, synthetic construct
  source 1..9: note = Seed: VVGAVGVGK (KRAS G12V)
YVGFVAVGH

SEQ ID NO: 75801 - protein, 9 aa, synthetic construct
  source 1..9: note = Seed: VVGAVGVGK (KRAS G12V)
YVGFVAVGI

SEQ ID NO: 75802 - protein, 9 aa, synthetic construct
  source 1..9: note = Seed: VVGAVGVGK (KRAS G12V)
YVGFVAVGK

SEQ ID NO: 75803 - protein, 9 aa, synthetic construct
  source 1..9: note = Seed: VVGAVGVGK (KRAS G12V)
YVGFVAVGL

SEQ ID NO: 75804 - protein, 9 aa, synthetic construct
  source 1..9: note = Seed: VVGAVGVGK (KRAS G12V)
YVGFVAVGM

SEQ ID NO: 75805 - protein, 9 aa, synthetic construct
  source 1..9: note = Seed: VVGAVGVGK (KRAS G12V)
YVGFVAVGR

SEQ ID NO: 75806 - protein, 9 aa, synthetic construct
  source 1..9: note = Seed: VVGAVGVGK (KRAS G12V)
YVGFVAVGS

SEQ ID NO: 75807 - protein, 9 aa, synthetic construct
  source 1..9: note = Seed: VVGAVGVGK (KRAS G12V)
YVGFVAVGV

SEQ ID NO: 75808 - protein, 9 aa, synthetic construct
  source 1..9: note = Seed: VVGAVGVGK (KRAS G12V)
YVGFVAVGY

SEQ ID NO: 75809 - protein, 9 aa, synthetic construct
  source 1..9: note = Seed: VVGAVGVGK (KRAS G12V)
YVGFVGVGH

SEQ ID NO: 75810 - protein, 9 aa, synthetic construct
  source 1..9: note = Seed: VVGAVGVGK (KRAS G12V)
YVGFVGVGI

SEQ ID NO: 75811 - protein, 9 aa, synthetic construct
  source 1..9: note = Seed: VVGAVGVGK (KRAS G12V)
YVGFVGVGK

SEQ ID NO: 75812 - protein, 9 aa, synthetic construct
  source 1..9: note = Seed: VVGAVGVGK (KRAS G12V)
YVGFVGVGL

SEQ ID NO: 75813 - protein, 9 aa, synthetic construct
  source 1..9: note = Seed: VVGAVGVGK (KRAS G12V)
YVGFVGVGM

SEQ ID NO: 75814 - protein, 9 aa, synthetic construct
  source 1..9: note = Seed: VVGAVGVGK (KRAS G12V)
YVGFVGVGR

SEQ ID NO: 75815 - protein, 9 aa, synthetic construct
  source 1..9: note = Seed: VVGAVGVGK (KRAS G12V)
YVGFVGVGT

SEQ ID NO: 75816 - protein, 9 aa, synthetic construct
  source 1..9: note = Seed: VVGAVGVGK (KRAS G12V)
YVGFVGVGV

SEQ ID NO: 75817 - protein, 9 aa, synthetic construct
  source 1..9: note = Seed: VVGAVGVGK (KRAS G12V)
YVGFVHVGR

SEQ ID NO: 75818 - protein, 9 aa, synthetic construct
  source 1..9: note = Seed: VVGAVGVGK (KRAS G12V)
YVGFVKVGA

SEQ ID NO: 75819 - protein, 9 aa, synthetic construct
  source 1..9: note = Seed: VVGAVGVGK (KRAS G12V)
YVGFVKVGG

SEQ ID NO: 75820 - protein, 9 aa, synthetic construct
  source 1..9: note = Seed: VVGAVGVGK (KRAS G12V)
YVGFVKVGH

SEQ ID NO: 75821 - protein, 9 aa, synthetic construct
  source 1..9: note = Seed: VVGAVGVGK (KRAS G12V)
YVGFVKVGK

SEQ ID NO: 75822 - protein, 9 aa, synthetic construct
  source 1..9: note = Seed: VVGAVGVGK (KRAS G12V)
YVGFVKVGL

SEQ ID NO: 75823 - protein, 9 aa, synthetic construct
  source 1..9: note = Seed: VVGAVGVGK (KRAS G12V)
YVGFVKVGN

SEQ ID NO: 75824 - protein, 9 aa, synthetic construct
  source 1..9: note = Seed: VVGAVGVGK (KRAS G12V)
YVGFVKVGR

SEQ ID NO: 75825 - protein, 9 aa, synthetic construct
  source 1..9: note = Seed: VVGAVGVGK (KRAS G12V)
YVGFVKVGS

SEQ ID NO: 75826 - protein, 9 aa, synthetic construct
  source 1..9: note = Seed: VVGAVGVGK (KRAS G12V)
YVGFVNVGA

SEQ ID NO: 75827 - protein, 9 aa, synthetic construct
  source 1..9: note = Seed: VVGAVGVGK (KRAS G12V)
YVGFVNVGK

SEQ ID NO: 75828 - protein, 9 aa, synthetic construct
  source 1..9: note = Seed: VVGAVGVGK (KRAS G12V)
YVGFVNVGM

SEQ ID NO: 75829 - protein, 9 aa, synthetic construct
  source 1..9: note = Seed: VVGAVGVGK (KRAS G12V)
YVGFVNVGR

SEQ ID NO: 75830 - protein, 9 aa, synthetic construct
  source 1..9: note = Seed: VVGAVGVGK (KRAS G12V)
YVGFVNVGS

SEQ ID NO: 75831 - protein, 9 aa, synthetic construct
  source 1..9: note = Seed: VVGAVGVGK (KRAS G12V)
YVGFVNVGV

SEQ ID NO: 75832 - protein, 9 aa, synthetic construct
  source 1..9: note = Seed: VVGAVGVGK (KRAS G12V)
YVGFVPVGA

SEQ ID NO: 75833 - protein, 9 aa, synthetic construct
  source 1..9: note = Seed: VVGAVGVGK (KRAS G12V)
YVGFVPVGI

SEQ ID NO: 75834 - protein, 9 aa, synthetic construct
  source 1..9: note = Seed: VVGAVGVGK (KRAS G12V)
YVGFVPVGK

SEQ ID NO: 75835 - protein, 9 aa, synthetic construct
  source 1..9: note = Seed: VVGAVGVGK (KRAS G12V)
YVGFVPVGL

SEQ ID NO: 75836 - protein, 9 aa, synthetic construct
  source 1..9: note = Seed: VVGAVGVGK (KRAS G12V)
YVGFVPVGM

SEQ ID NO: 75837 - protein, 9 aa, synthetic construct
  source 1..9: note = Seed: VVGAVGVGK (KRAS G12V)
YVGFVPVGR

SEQ ID NO: 75838 - protein, 9 aa, synthetic construct
  source 1..9: note = Seed: VVGAVGVGK (KRAS G12V)
YVGFVPVGV

SEQ ID NO: 75839 - protein, 9 aa, synthetic construct
  source 1..9: note = Seed: VVGAVGVGK (KRAS G12V)
YVGFVPVGY

SEQ ID NO: 75840 - protein, 9 aa, synthetic construct
  source 1..9: note = Seed: VVGAVGVGK (KRAS G12V)
YVGFVRVGG

SEQ ID NO: 75841 - protein, 9 aa, synthetic construct
  source 1..9: note = Seed: VVGAVGVGK (KRAS G12V)
YVGFVRVGH

SEQ ID NO: 75842 - protein, 9 aa, synthetic construct
  source 1..9: note = Seed: VVGAVGVGK (KRAS G12V)
YVGFVRVGK

SEQ ID NO: 75843 - protein, 9 aa, synthetic construct
  source 1..9: note = Seed: VVGAVGVGK (KRAS G12V)
YVGFVRVGN

SEQ ID NO: 75844 - protein, 9 aa, synthetic construct
  source 1..9: note = Seed: VVGAVGVGK (KRAS G12V)
YVGFVRVGR

SEQ ID NO: 75845 - protein, 9 aa, synthetic construct
  source 1..9: note = Seed: VVGAVGVGK (KRAS G12V)
YVGFVRVGS

SEQ ID NO: 75846 - protein, 9 aa, synthetic construct
  source 1..9: note = Seed: VVGAVGVGK (KRAS G12V)
YVGFVSVGA

SEQ ID NO: 75847 - protein, 9 aa, synthetic construct
  source 1..9: note = Seed: VVGAVGVGK (KRAS G12V)
YVGFVSVGH

SEQ ID NO: 75848 - protein, 9 aa, synthetic construct
  source 1..9: note = Seed: VVGAVGVGK (KRAS G12V)
YVGFVSVGI

SEQ ID NO: 75849 - protein, 9 aa, synthetic construct
  source 1..9: note = Seed: VVGAVGVGK (KRAS G12V)
YVGFVSVGK

SEQ ID NO: 75850 - protein, 9 aa, synthetic construct
  source 1..9: note = Seed: VVGAVGVGK (KRAS G12V)
YVGFVSVGL

SEQ ID NO: 75851 - protein, 9 aa, synthetic construct
  source 1..9: note = Seed: VVGAVGVGK (KRAS G12V)
YVGFVSVGM

SEQ ID NO: 75852 - protein, 9 aa, synthetic construct
  source 1..9: note = Seed: VVGAVGVGK (KRAS G12V)
YVGFVSVGN

SEQ ID NO: 75853 - protein, 9 aa, synthetic construct
  source 1..9: note = Seed: VVGAVGVGK (KRAS G12V)
YVGFVSVGR

SEQ ID NO: 75854 - protein, 9 aa, synthetic construct
  source 1..9: note = Seed: VVGAVGVGK (KRAS G12V)
YVGFVSVGS

SEQ ID NO: 75855 - protein, 9 aa, synthetic construct
  source 1..9: note = Seed: VVGAVGVGK (KRAS G12V)
YVGFVSVGV

SEQ ID NO: 75856 - protein, 9 aa, synthetic construct
  source 1..9: note = Seed: VVGAVGVGK (KRAS G12V)
YVGFVSVGY

SEQ ID NO: 75857 - protein, 9 aa, synthetic construct
  source 1..9: note = Seed: VVGAVGVGK (KRAS G12V)
YVGFVTVGK

SEQ ID NO: 75858 - protein, 9 aa, synthetic construct
  source 1..9: note = Seed: VVGAVGVGK (KRAS G12V)
YVGFVTVGM

SEQ ID NO: 75859 - protein, 9 aa, synthetic construct
  source 1..9: note = Seed: VVGAVGVGK (KRAS G12V)
YVGFVTVGR

SEQ ID NO: 75860 - protein, 9 aa, synthetic construct
  source 1..9: note = Seed: VVGAVGVGK (KRAS G12V)
YVGGVAVGA

SEQ ID NO: 75861 - protein, 9 aa, synthetic construct
  source 1..9: note = Seed: VVGAVGVGK (KRAS G12V)
YVGGVAVGF

SEQ ID NO: 75862 - protein, 9 aa, synthetic construct
  source 1..9: note = Seed: VVGAVGVGK (KRAS G12V)
YVGGVAVGG

SEQ ID NO: 75863 - protein, 9 aa, synthetic construct
  source 1..9: note = Seed: VVGAVGVGK (KRAS G12V)
YVGGVAVGH

SEQ ID NO: 75864 - protein, 9 aa, synthetic construct
  source 1..9: note = Seed: VVGAVGVGK (KRAS G12V)
YVGGVAVGI

SEQ ID NO: 75865 - protein, 9 aa, synthetic construct
  source 1..9: note = Seed: VVGAVGVGK (KRAS G12V)
YVGGVAVGK

SEQ ID NO: 75866 - protein, 9 aa, synthetic construct
  source 1..9: note = Seed: VVGAVGVGK (KRAS G12V)
YVGGVAVGL

SEQ ID NO: 75867 - protein, 9 aa, synthetic construct
  source 1..9: note = Seed: VVGAVGVGK (KRAS G12V)
YVGGVAVGM

SEQ ID NO: 75868 - protein, 9 aa, synthetic construct
  source 1..9: note = Seed: VVGAVGVGK (KRAS G12V)
YVGGVAVGN

SEQ ID NO: 75869 - protein, 9 aa, synthetic construct
  source 1..9: note = Seed: VVGAVGVGK (KRAS G12V)
YVGGVAVGP

SEQ ID NO: 75870 - protein, 9 aa, synthetic construct
  source 1..9: note = Seed: VVGAVGVGK (KRAS G12V)
YVGGVAVGQ

SEQ ID NO: 75871 - protein, 9 aa, synthetic construct
  source 1..9: note = Seed: VVGAVGVGK (KRAS G12V)
YVGGVAVGR

SEQ ID NO: 75872 - protein, 9 aa, synthetic construct
  source 1..9: note = Seed: VVGAVGVGK (KRAS G12V)
YVGGVAVGS

SEQ ID NO: 75873 - protein, 9 aa, synthetic construct
  source 1..9: note = Seed: VVGAVGVGK (KRAS G12V)
YVGGVAVGT

SEQ ID NO: 75874 - protein, 9 aa, synthetic construct
  source 1..9: note = Seed: VVGAVGVGK (KRAS G12V)
YVGGVAVGV

SEQ ID NO: 75875 - protein, 9 aa, synthetic construct
  source 1..9: note = Seed: VVGAVGVGK (KRAS G12V)
YVGGVAVGY

SEQ ID NO: 75876 - protein, 9 aa, synthetic construct
  source 1..9: note = Seed: VVGAVGVGK (KRAS G12V)
YVGGVGVGA

SEQ ID NO: 75877 - protein, 9 aa, synthetic construct
  source 1..9: note = Seed: VVGAVGVGK (KRAS G12V)
YVGGVGVGG

SEQ ID NO: 75878 - protein, 9 aa, synthetic construct
  source 1..9: note = Seed: VVGAVGVGK (KRAS G12V)
YVGGVGVGI

SEQ ID NO: 75879 - protein, 9 aa, synthetic construct
  source 1..9: note = Seed: VVGAVGVGK (KRAS G12V)
YVGGVGVGL

SEQ ID NO: 75880 - protein, 9 aa, synthetic construct
  source 1..9: note = Seed: VVGAVGVGK (KRAS G12V)
YVGGVGVGM

SEQ ID NO: 75881 - protein, 9 aa, synthetic construct
  source 1..9: note = Seed: VVGAVGVGK (KRAS G12V)
YVGGVGVGS

SEQ ID NO: 75882 - protein, 9 aa, synthetic construct
  source 1..9: note = Seed: VVGAVGVGK (KRAS G12V)
YVGGVGVGT

SEQ ID NO: 75883 - protein, 9 aa, synthetic construct
  source 1..9: note = Seed: VVGAVGVGK (KRAS G12V)
YVGGVGVGV

SEQ ID NO: 75884 - protein, 9 aa, synthetic construct
  source 1..9: note = Seed: VVGAVGVGK (KRAS G12V)
YVGGVHVGA

SEQ ID NO: 75885 - protein, 9 aa, synthetic construct
  source 1..9: note = Seed: VVGAVGVGK (KRAS G12V)
YVGGVHVGI

SEQ ID NO: 75886 - protein, 9 aa, synthetic construct
  source 1..9: note = Seed: VVGAVGVGK (KRAS G12V)
YVGGVHVGL

SEQ ID NO: 75887 - protein, 9 aa, synthetic construct
  source 1..9: note = Seed: VVGAVGVGK (KRAS G12V)
YVGGVHVGM

SEQ ID NO: 75888 - protein, 9 aa, synthetic construct
  source 1..9: note = Seed: VVGAVGVGK (KRAS G12V)
YVGGVHVGS

SEQ ID NO: 75889 - protein, 9 aa, synthetic construct
  source 1..9: note = Seed: VVGAVGVGK (KRAS G12V)
YVGGVHVGV

SEQ ID NO: 75890 - protein, 9 aa, synthetic construct
  source 1..9: note = Seed: VVGAVGVGK (KRAS G12V)
YVGGVKVGA

SEQ ID NO: 75891 - protein, 9 aa, synthetic construct
  source 1..9: note = Seed: VVGAVGVGK (KRAS G12V)
YVGGVKVGI

SEQ ID NO: 75892 - protein, 9 aa, synthetic construct
  source 1..9: note = Seed: VVGAVGVGK (KRAS G12V)
YVGGVKVGL

SEQ ID NO: 75893 - protein, 9 aa, synthetic construct
  source 1..9: note = Seed: VVGAVGVGK (KRAS G12V)
YVGGVKVGM

SEQ ID NO: 75894 - protein, 9 aa, synthetic construct
  source 1..9: note = Seed: VVGAVGVGK (KRAS G12V)
YVGGVKVGN

SEQ ID NO: 75895 - protein, 9 aa, synthetic construct
  source 1..9: note = Seed: VVGAVGVGK (KRAS G12V)
YVGGVKVGS

SEQ ID NO: 75896 - protein, 9 aa, synthetic construct
  source 1..9: note = Seed: VVGAVGVGK (KRAS G12V)
YVGGVKVGT

SEQ ID NO: 75897 - protein, 9 aa, synthetic construct
  source 1..9: note = Seed: VVGAVGVGK (KRAS G12V)
YVGGVKVGV

SEQ ID NO: 75898 - protein, 9 aa, synthetic construct
  source 1..9: note = Seed: VVGAVGVGK (KRAS G12V)
YVGGVMVGA

SEQ ID NO: 75899 - protein, 9 aa, synthetic construct
  source 1..9: note = Seed: VVGAVGVGK (KRAS G12V)
YVGGVNVGA

SEQ ID NO: 75900 - protein, 9 aa, synthetic construct
  source 1..9: note = Seed: VVGAVGVGK (KRAS G12V)
YVGGVNVGI

SEQ ID NO: 75901 - protein, 9 aa, synthetic construct
  source 1..9: note = Seed: VVGAVGVGK (KRAS G12V)
YVGGVNVGL

SEQ ID NO: 75902 - protein, 9 aa, synthetic construct
  source 1..9: note = Seed: VVGAVGVGK (KRAS G12V)
YVGGVNVGM

SEQ ID NO: 75903 - protein, 9 aa, synthetic construct
  source 1..9: note = Seed: VVGAVGVGK (KRAS G12V)
YVGGVNVGS

SEQ ID NO: 75904 - protein, 9 aa, synthetic construct
  source 1..9: note = Seed: VVGAVGVGK (KRAS G12V)
YVGGVNVGV

SEQ ID NO: 75905 - protein, 9 aa, synthetic construct
  source 1..9: note = Seed: VVGAVGVGK (KRAS G12V)
YVGGVPVGA

SEQ ID NO: 75906 - protein, 9 aa, synthetic construct
  source 1..9: note = Seed: VVGAVGVGK (KRAS G12V)
YVGGVPVGF

SEQ ID NO: 75907 - protein, 9 aa, synthetic construct
  source 1..9: note = Seed: VVGAVGVGK (KRAS G12V)
YVGGVPVGG

SEQ ID NO: 75908 - protein, 9 aa, synthetic construct
  source 1..9: note = Seed: VVGAVGVGK (KRAS G12V)
YVGGVPVGH

SEQ ID NO: 75909 - protein, 9 aa, synthetic construct
  source 1..9: note = Seed: VVGAVGVGK (KRAS G12V)
YVGGVPVGI

SEQ ID NO: 75910 - protein, 9 aa, synthetic construct
  source 1..9: note = Seed: VVGAVGVGK (KRAS G12V)
YVGGVPVGK

SEQ ID NO: 75911 - protein, 9 aa, synthetic construct
  source 1..9: note = Seed: VVGAVGVGK (KRAS G12V)
YVGGVPVGL

SEQ ID NO: 75912 - protein, 9 aa, synthetic construct
  source 1..9: note = Seed: VVGAVGVGK (KRAS G12V)
YVGGVPVGM

SEQ ID NO: 75913 - protein, 9 aa, synthetic construct
  source 1..9: note = Seed: VVGAVGVGK (KRAS G12V)
YVGGVPVGN

SEQ ID NO: 75914 - protein, 9 aa, synthetic construct
  source 1..9: note = Seed: VVGAVGVGK (KRAS G12V)
YVGGVPVGP

SEQ ID NO: 75915 - protein, 9 aa, synthetic construct
  source 1..9: note = Seed: VVGAVGVGK (KRAS G12V)
YVGGVPVGQ

SEQ ID NO: 75916 - protein, 9 aa, synthetic construct
  source 1..9: note = Seed: VVGAVGVGK (KRAS G12V)
YVGGVPVGR

SEQ ID NO: 75917 - protein, 9 aa, synthetic construct
  source 1..9: note = Seed: VVGAVGVGK (KRAS G12V)
YVGGVPVGS

SEQ ID NO: 75918 - protein, 9 aa, synthetic construct
  source 1..9: note = Seed: VVGAVGVGK (KRAS G12V)
YVGGVPVGT

SEQ ID NO: 75919 - protein, 9 aa, synthetic construct
  source 1..9: note = Seed: VVGAVGVGK (KRAS G12V)
YVGGVPVGV

SEQ ID NO: 75920 - protein, 9 aa, synthetic construct
  source 1..9: note = Seed: VVGAVGVGK (KRAS G12V)
YVGGVPVGY

SEQ ID NO: 75921 - protein, 9 aa, synthetic construct
  source 1..9: note = Seed: VVGAVGVGK (KRAS G12V)
YVGGVRVGA

SEQ ID NO: 75922 - protein, 9 aa, synthetic construct
  source 1..9: note = Seed: VVGAVGVGK (KRAS G12V)
YVGGVRVGG

SEQ ID NO: 75923 - protein, 9 aa, synthetic construct
  source 1..9: note = Seed: VVGAVGVGK (KRAS G12V)
YVGGVRVGI

SEQ ID NO: 75924 - protein, 9 aa, synthetic construct
  source 1..9: note = Seed: VVGAVGVGK (KRAS G12V)
YVGGVRVGL

SEQ ID NO: 75925 - protein, 9 aa, synthetic construct
  source 1..9: note = Seed: VVGAVGVGK (KRAS G12V)
YVGGVRVGS

SEQ ID NO: 75926 - protein, 9 aa, synthetic construct
  source 1..9: note = Seed: VVGAVGVGK (KRAS G12V)
YVGGVRVGV

SEQ ID NO: 75927 - protein, 9 aa, synthetic construct
  source 1..9: note = Seed: VVGAVGVGK (KRAS G12V)
YVGGVSVGA

SEQ ID NO: 75928 - protein, 9 aa, synthetic construct
  source 1..9: note = Seed: VVGAVGVGK (KRAS G12V)
YVGGVSVGG

SEQ ID NO: 75929 - protein, 9 aa, synthetic construct
  source 1..9: note = Seed: VVGAVGVGK (KRAS G12V)
YVGGVSVGH

SEQ ID NO: 75930 - protein, 9 aa, synthetic construct
  source 1..9: note = Seed: VVGAVGVGK (KRAS G12V)
YVGGVSVGI

SEQ ID NO: 75931 - protein, 9 aa, synthetic construct
  source 1..9: note = Seed: VVGAVGVGK (KRAS G12V)
YVGGVSVGK

SEQ ID NO: 75932 - protein, 9 aa, synthetic construct
  source 1..9: note = Seed: VVGAVGVGK (KRAS G12V)
YVGGVSVGL

SEQ ID NO: 75933 - protein, 9 aa, synthetic construct
  source 1..9: note = Seed: VVGAVGVGK (KRAS G12V)
YVGGVSVGM

SEQ ID NO: 75934 - protein, 9 aa, synthetic construct
  source 1..9: note = Seed: VVGAVGVGK (KRAS G12V)
YVGGVSVGN

SEQ ID NO: 75935 - protein, 9 aa, synthetic construct
  source 1..9: note = Seed: VVGAVGVGK (KRAS G12V)
YVGGVSVGR

SEQ ID NO: 75936 - protein, 9 aa, synthetic construct
  source 1..9: note = Seed: VVGAVGVGK (KRAS G12V)
YVGGVSVGS

SEQ ID NO: 75937 - protein, 9 aa, synthetic construct
  source 1..9: note = Seed: VVGAVGVGK (KRAS G12V)
YVGGVSVGT

SEQ ID NO: 75938 - protein, 9 aa, synthetic construct
  source 1..9: note = Seed: VVGAVGVGK (KRAS G12V)
YVGGVSVGV

SEQ ID NO: 75939 - protein, 9 aa, synthetic construct
  source 1..9: note = Seed: VVGAVGVGK (KRAS G12V)
YVGGVSVGY

SEQ ID NO: 75940 - protein, 9 aa, synthetic construct
  source 1..9: note = Seed: VVGAVGVGK (KRAS G12V)
YVGGVTVGA

SEQ ID NO: 75941 - protein, 9 aa, synthetic construct
  source 1..9: note = Seed: VVGAVGVGK (KRAS G12V)
YVGGVTVGI

SEQ ID NO: 75942 - protein, 9 aa, synthetic construct
  source 1..9: note = Seed: VVGAVGVGK (KRAS G12V)
YVGGVTVGL

SEQ ID NO: 75943 - protein, 9 aa, synthetic construct
  source 1..9: note = Seed: VVGAVGVGK (KRAS G12V)
YVGGVTVGM

SEQ ID NO: 75944 - protein, 9 aa, synthetic construct
  source 1..9: note = Seed: VVGAVGVGK (KRAS G12V)
YVGGVTVGR

SEQ ID NO: 75945 - protein, 9 aa, synthetic construct
  source 1..9: note = Seed: VVGAVGVGK (KRAS G12V)
YVGGVTVGS

SEQ ID NO: 75946 - protein, 9 aa, synthetic construct
  source 1..9: note = Seed: VVGAVGVGK (KRAS G12V)
YVGGVTVGT

SEQ ID NO: 75947 - protein, 9 aa, synthetic construct
  source 1..9: note = Seed: VVGAVGVGK (KRAS G12V)
YVGGVTVGV

SEQ ID NO: 75948 - protein, 9 aa, synthetic construct
  source 1..9: note = Seed: VVGAVGVGK (KRAS G12V)
YVGGVVVGA

SEQ ID NO: 75949 - protein, 9 aa, synthetic construct
  source 1..9: note = Seed: VVGAVGVGK (KRAS G12V)
YVGGVVVGH

SEQ ID NO: 75950 - protein, 9 aa, synthetic construct
  source 1..9: note = Seed: VVGAVGVGK (KRAS G12V)
YVGGVVVGR

SEQ ID NO: 75951 - protein, 9 aa, synthetic construct
  source 1..9: note = Seed: VVGAVGVGK (KRAS G12V)
YVGHVAVGA

SEQ ID NO: 75952 - protein, 9 aa, synthetic construct
  source 1..9: note = Seed: VVGAVGVGK (KRAS G12V)
YVGHVAVGF

SEQ ID NO: 75953 - protein, 9 aa, synthetic construct
  source 1..9: note = Seed: VVGAVGVGK (KRAS G12V)
YVGHVAVGG

SEQ ID NO: 75954 - protein, 9 aa, synthetic construct
  source 1..9: note = Seed: VVGAVGVGK (KRAS G12V)
YVGHVAVGH

SEQ ID NO: 75955 - protein, 9 aa, synthetic construct
  source 1..9: note = Seed: VVGAVGVGK (KRAS G12V)
YVGHVAVGI

SEQ ID NO: 75956 - protein, 9 aa, synthetic construct
  source 1..9: note = Seed: VVGAVGVGK (KRAS G12V)
YVGHVAVGK

SEQ ID NO: 75957 - protein, 9 aa, synthetic construct
  source 1..9: note = Seed: VVGAVGVGK (KRAS G12V)
YVGHVAVGL

SEQ ID NO: 75958 - protein, 9 aa, synthetic construct
  source 1..9: note = Seed: VVGAVGVGK (KRAS G12V)
YVGHVAVGM

SEQ ID NO: 75959 - protein, 9 aa, synthetic construct
  source 1..9: note = Seed: VVGAVGVGK (KRAS G12V)
YVGHVAVGN

SEQ ID NO: 75960 - protein, 9 aa, synthetic construct
  source 1..9: note = Seed: VVGAVGVGK (KRAS G12V)
YVGHVAVGR

SEQ ID NO: 75961 - protein, 9 aa, synthetic construct
  source 1..9: note = Seed: VVGAVGVGK (KRAS G12V)
YVGHVAVGS

SEQ ID NO: 75962 - protein, 9 aa, synthetic construct
  source 1..9: note = Seed: VVGAVGVGK (KRAS G12V)
YVGHVAVGT

SEQ ID NO: 75963 - protein, 9 aa, synthetic construct
  source 1..9: note = Seed: VVGAVGVGK (KRAS G12V)
YVGHVAVGV

SEQ ID NO: 75964 - protein, 9 aa, synthetic construct
  source 1..9: note = Seed: VVGAVGVGK (KRAS G12V)
YVGHVAVGY

SEQ ID NO: 75965 - protein, 9 aa, synthetic construct
  source 1..9: note = Seed: VVGAVGVGK (KRAS G12V)
YVGHVGVGA

SEQ ID NO: 75966 - protein, 9 aa, synthetic construct
  source 1..9: note = Seed: VVGAVGVGK (KRAS G12V)
YVGHVGVGI

SEQ ID NO: 75967 - protein, 9 aa, synthetic construct
  source 1..9: note = Seed: VVGAVGVGK (KRAS G12V)
YVGHVGVGL

SEQ ID NO: 75968 - protein, 9 aa, synthetic construct
  source 1..9: note = Seed: VVGAVGVGK (KRAS G12V)
YVGHVGVGM

SEQ ID NO: 75969 - protein, 9 aa, synthetic construct
  source 1..9: note = Seed: VVGAVGVGK (KRAS G12V)
YVGHVGVGT

SEQ ID NO: 75970 - protein, 9 aa, synthetic construct
  source 1..9: note = Seed: VVGAVGVGK (KRAS G12V)
YVGHVGVGV

SEQ ID NO: 75971 - protein, 9 aa, synthetic construct
  source 1..9: note = Seed: VVGAVGVGK (KRAS G12V)
YVGHVIVGA

SEQ ID NO: 75972 - protein, 9 aa, synthetic construct
  source 1..9: note = Seed: VVGAVGVGK (KRAS G12V)
YVGHVKVGR

SEQ ID NO: 75973 - protein, 9 aa, synthetic construct
  source 1..9: note = Seed: VVGAVGVGK (KRAS G12V)
YVGHVNVGA

SEQ ID NO: 75974 - protein, 9 aa, synthetic construct
  source 1..9: note = Seed: VVGAVGVGK (KRAS G12V)
YVGHVNVGI

SEQ ID NO: 75975 - protein, 9 aa, synthetic construct
  source 1..9: note = Seed: VVGAVGVGK (KRAS G12V)
YVGHVNVGL

SEQ ID NO: 75976 - protein, 9 aa, synthetic construct
  source 1..9: note = Seed: VVGAVGVGK (KRAS G12V)
YVGHVNVGV

SEQ ID NO: 75977 - protein, 9 aa, synthetic construct
  source 1..9: note = Seed: VVGAVGVGK (KRAS G12V)
YVGHVPVGA

SEQ ID NO: 75978 - protein, 9 aa, synthetic construct
  source 1..9: note = Seed: VVGAVGVGK (KRAS G12V)
YVGHVPVGI

SEQ ID NO: 75979 - protein, 9 aa, synthetic construct
  source 1..9: note = Seed: VVGAVGVGK (KRAS G12V)
YVGHVPVGL

SEQ ID NO: 75980 - protein, 9 aa, synthetic construct
  source 1..9: note = Seed: VVGAVGVGK (KRAS G12V)
YVGHVPVGM

SEQ ID NO: 75981 - protein, 9 aa, synthetic construct
  source 1..9: note = Seed: VVGAVGVGK (KRAS G12V)
YVGHVPVGR

SEQ ID NO: 75982 - protein, 9 aa, synthetic construct
  source 1..9: note = Seed: VVGAVGVGK (KRAS G12V)
YVGHVPVGS

SEQ ID NO: 75983 - protein, 9 aa, synthetic construct
  source 1..9: note = Seed: VVGAVGVGK (KRAS G12V)
YVGHVPVGT

SEQ ID NO: 75984 - protein, 9 aa, synthetic construct
  source 1..9: note = Seed: VVGAVGVGK (KRAS G12V)
YVGHVPVGV

SEQ ID NO: 75985 - protein, 9 aa, synthetic construct
  source 1..9: note = Seed: VVGAVGVGK (KRAS G12V)
YVGHVRVGA

SEQ ID NO: 75986 - protein, 9 aa, synthetic construct
  source 1..9: note = Seed: VVGAVGVGK (KRAS G12V)
YVGHVRVGH

SEQ ID NO: 75987 - protein, 9 aa, synthetic construct
  source 1..9: note = Seed: VVGAVGVGK (KRAS G12V)
YVGHVRVGK

SEQ ID NO: 75988 - protein, 9 aa, synthetic construct
  source 1..9: note = Seed: VVGAVGVGK (KRAS G12V)
YVGHVRVGR

SEQ ID NO: 75989 - protein, 9 aa, synthetic construct
  source 1..9: note = Seed: VVGAVGVGK (KRAS G12V)
YVGHVRVGS

SEQ ID NO: 75990 - protein, 9 aa, synthetic construct
  source 1..9: note = Seed: VVGAVGVGK (KRAS G12V)
YVGHVSVGA

SEQ ID NO: 75991 - protein, 9 aa, synthetic construct
  source 1..9: note = Seed: VVGAVGVGK (KRAS G12V)
YVGHVSVGF

SEQ ID NO: 75992 - protein, 9 aa, synthetic construct
  source 1..9: note = Seed: VVGAVGVGK (KRAS G12V)
YVGHVSVGI

SEQ ID NO: 75993 - protein, 9 aa, synthetic construct
  source 1..9: note = Seed: VVGAVGVGK (KRAS G12V)
YVGHVSVGL

SEQ ID NO: 75994 - protein, 9 aa, synthetic construct
  source 1..9: note = Seed: VVGAVGVGK (KRAS G12V)
YVGHVSVGM

SEQ ID NO: 75995 - protein, 9 aa, synthetic construct
  source 1..9: note = Seed: VVGAVGVGK (KRAS G12V)
YVGHVSVGS

SEQ ID NO: 75996 - protein, 9 aa, synthetic construct
  source 1..9: note = Seed: VVGAVGVGK (KRAS G12V)
YVGHVSVGT

SEQ ID NO: 75997 - protein, 9 aa, synthetic construct
  source 1..9: note = Seed: VVGAVGVGK (KRAS G12V)
YVGHVSVGV

SEQ ID NO: 75998 - protein, 9 aa, synthetic construct
  source 1..9: note = Seed: VVGAVGVGK (KRAS G12V)
YVGHVTVGA

SEQ ID NO: 75999 - protein, 9 aa, synthetic construct
  source 1..9: note = Seed: VVGAVGVGK (KRAS G12V)
YVGHVTVGI

SEQ ID NO: 76000 - protein, 9 aa, synthetic construct
  source 1..9: note = Seed: VVGAVGVGK (KRAS G12V)
YVGHVTVGL

SEQ ID NO: 76001 - protein, 9 aa, synthetic construct
  source 1..9: note = Seed: VVGAVGVGK (KRAS G12V)
YVGHVTVGM

SEQ ID NO: 76002 - protein, 9 aa, synthetic construct
  source 1..9: note = Seed: VVGAVGVGK (KRAS G12V)
YVGHVTVGV

SEQ ID NO: 76003 - protein, 9 aa, synthetic construct
  source 1..9: note = Seed: VVGAVGVGK (KRAS G12V)
YVGHVVVGA

SEQ ID NO: 76004 - protein, 9 aa, synthetic construct
  source 1..9: note = Seed: VVGAVGVGK (KRAS G12V)
YVGIVAVGA

SEQ ID NO: 76005 - protein, 9 aa, synthetic construct
  source 1..9: note = Seed: VVGAVGVGK (KRAS G12V)
YVGIVAVGH

SEQ ID NO: 76006 - protein, 9 aa, synthetic construct
  source 1..9: note = Seed: VVGAVGVGK (KRAS G12V)
YVGIVAVGI

SEQ ID NO: 76007 - protein, 9 aa, synthetic construct
  source 1..9: note = Seed: VVGAVGVGK (KRAS G12V)
YVGIVAVGK

SEQ ID NO: 76008 - protein, 9 aa, synthetic construct
  source 1..9: note = Seed: VVGAVGVGK (KRAS G12V)
YVGIVAVGL

SEQ ID NO: 76009 - protein, 9 aa, synthetic construct
  source 1..9: note = Seed: VVGAVGVGK (KRAS G12V)
YVGIVAVGM

SEQ ID NO: 76010 - protein, 9 aa, synthetic construct
  source 1..9: note = Seed: VVGAVGVGK (KRAS G12V)
YVGIVAVGN

SEQ ID NO: 76011 - protein, 9 aa, synthetic construct
  source 1..9: note = Seed: VVGAVGVGK (KRAS G12V)
YVGIVAVGQ

SEQ ID NO: 76012 - protein, 9 aa, synthetic construct
  source 1..9: note = Seed: VVGAVGVGK (KRAS G12V)
YVGIVAVGR

SEQ ID NO: 76013 - protein, 9 aa, synthetic construct
  source 1..9: note = Seed: VVGAVGVGK (KRAS G12V)
YVGIVAVGS

SEQ ID NO: 76014 - protein, 9 aa, synthetic construct
  source 1..9: note = Seed: VVGAVGVGK (KRAS G12V)
YVGIVAVGT

SEQ ID NO: 76015 - protein, 9 aa, synthetic construct
  source 1..9: note = Seed: VVGAVGVGK (KRAS G12V)
YVGIVAVGV

SEQ ID NO: 76016 - protein, 9 aa, synthetic construct
  source 1..9: note = Seed: VVGAVGVGK (KRAS G12V)
YVGIVAVGY

SEQ ID NO: 76017 - protein, 9 aa, synthetic construct
  source 1..9: note = Seed: VVGAVGVGK (KRAS G12V)
YVGIVGVGA

SEQ ID NO: 76018 - protein, 9 aa, synthetic construct
  source 1..9: note = Seed: VVGAVGVGK (KRAS G12V)
YVGIVGVGG

SEQ ID NO: 76019 - protein, 9 aa, synthetic construct
  source 1..9: note = Seed: VVGAVGVGK (KRAS G12V)
YVGIVGVGH

SEQ ID NO: 76020 - protein, 9 aa, synthetic construct
  source 1..9: note = Seed: VVGAVGVGK (KRAS G12V)
YVGIVGVGI

SEQ ID NO: 76021 - protein, 9 aa, synthetic construct
  source 1..9: note = Seed: VVGAVGVGK (KRAS G12V)
YVGIVGVGK

SEQ ID NO: 76022 - protein, 9 aa, synthetic construct
  source 1..9: note = Seed: VVGAVGVGK (KRAS G12V)
YVGIVGVGL

SEQ ID NO: 76023 - protein, 9 aa, synthetic construct
  source 1..9: note = Seed: VVGAVGVGK (KRAS G12V)
YVGIVGVGM

SEQ ID NO: 76024 - protein, 9 aa, synthetic construct
  source 1..9: note = Seed: VVGAVGVGK (KRAS G12V)
YVGIVGVGN

SEQ ID NO: 76025 - protein, 9 aa, synthetic construct
  source 1..9: note = Seed: VVGAVGVGK (KRAS G12V)
YVGIVGVGP

SEQ ID NO: 76026 - protein, 9 aa, synthetic construct
  source 1..9: note = Seed: VVGAVGVGK (KRAS G12V)
YVGIVGVGR

SEQ ID NO: 76027 - protein, 9 aa, synthetic construct
  source 1..9: note = Seed: VVGAVGVGK (KRAS G12V)
YVGIVGVGS

SEQ ID NO: 76028 - protein, 9 aa, synthetic construct
  source 1..9: note = Seed: VVGAVGVGK (KRAS G12V)
YVGIVGVGT

SEQ ID NO: 76029 - protein, 9 aa, synthetic construct
  source 1..9: note = Seed: VVGAVGVGK (KRAS G12V)
YVGIVGVGV

SEQ ID NO: 76030 - protein, 9 aa, synthetic construct
  source 1..9: note = Seed: VVGAVGVGK (KRAS G12V)
YVGIVGVGY

SEQ ID NO: 76031 - protein, 9 aa, synthetic construct
  source 1..9: note = Seed: VVGAVGVGK (KRAS G12V)
YVGIVHVGG

SEQ ID NO: 76032 - protein, 9 aa, synthetic construct
  source 1..9: note = Seed: VVGAVGVGK (KRAS G12V)
YVGIVHVGH

SEQ ID NO: 76033 - protein, 9 aa, synthetic construct
  source 1..9: note = Seed: VVGAVGVGK (KRAS G12V)
YVGIVHVGK

SEQ ID NO: 76034 - protein, 9 aa, synthetic construct
  source 1..9: note = Seed: VVGAVGVGK (KRAS G12V)
YVGIVHVGL

SEQ ID NO: 76035 - protein, 9 aa, synthetic construct
  source 1..9: note = Seed: VVGAVGVGK (KRAS G12V)
YVGIVHVGM

SEQ ID NO: 76036 - protein, 9 aa, synthetic construct
  source 1..9: note = Seed: VVGAVGVGK (KRAS G12V)
YVGIVHVGR

SEQ ID NO: 76037 - protein, 9 aa, synthetic construct
  source 1..9: note = Seed: VVGAVGVGK (KRAS G12V)
YVGIVHVGS

SEQ ID NO: 76038 - protein, 9 aa, synthetic construct
  source 1..9: note = Seed: VVGAVGVGK (KRAS G12V)
YVGIVKVGA

SEQ ID NO: 76039 - protein, 9 aa, synthetic construct
  source 1..9: note = Seed: VVGAVGVGK (KRAS G12V)
YVGIVKVGD

SEQ ID NO: 76040 - protein, 9 aa, synthetic construct
  source 1..9: note = Seed: VVGAVGVGK (KRAS G12V)
YVGIVKVGE

SEQ ID NO: 76041 - protein, 9 aa, synthetic construct
  source 1..9: note = Seed: VVGAVGVGK (KRAS G12V)
YVGIVKVGG

SEQ ID NO: 76042 - protein, 9 aa, synthetic construct
  source 1..9: note = Seed: VVGAVGVGK (KRAS G12V)
YVGIVKVGH

SEQ ID NO: 76043 - protein, 9 aa, synthetic construct
  source 1..9: note = Seed: VVGAVGVGK (KRAS G12V)
YVGIVKVGK

SEQ ID NO: 76044 - protein, 9 aa, synthetic construct
  source 1..9: note = Seed: VVGAVGVGK (KRAS G12V)
YVGIVKVGL

SEQ ID NO: 76045 - protein, 9 aa, synthetic construct
  source 1..9: note = Seed: VVGAVGVGK (KRAS G12V)
YVGIVKVGM

SEQ ID NO: 76046 - protein, 9 aa, synthetic construct
  source 1..9: note = Seed: VVGAVGVGK (KRAS G12V)
YVGIVKVGN

SEQ ID NO: 76047 - protein, 9 aa, synthetic construct
  source 1..9: note = Seed: VVGAVGVGK (KRAS G12V)
YVGIVKVGP

SEQ ID NO: 76048 - protein, 9 aa, synthetic construct
  source 1..9: note = Seed: VVGAVGVGK (KRAS G12V)
YVGIVKVGQ

SEQ ID NO: 76049 - protein, 9 aa, synthetic construct
  source 1..9: note = Seed: VVGAVGVGK (KRAS G12V)
YVGIVKVGR

SEQ ID NO: 76050 - protein, 9 aa, synthetic construct
  source 1..9: note = Seed: VVGAVGVGK (KRAS G12V)
YVGIVKVGS

SEQ ID NO: 76051 - protein, 9 aa, synthetic construct
  source 1..9: note = Seed: VVGAVGVGK (KRAS G12V)
YVGIVKVGT

SEQ ID NO: 76052 - protein, 9 aa, synthetic construct
  source 1..9: note = Seed: VVGAVGVGK (KRAS G12V)
YVGIVKVGV

SEQ ID NO: 76053 - protein, 9 aa, synthetic construct
  source 1..9: note = Seed: VVGAVGVGK (KRAS G12V)
YVGIVKVGY

SEQ ID NO: 76054 - protein, 9 aa, synthetic construct
  source 1..9: note = Seed: VVGAVGVGK (KRAS G12V)
YVGIVNVGA

SEQ ID NO: 76055 - protein, 9 aa, synthetic construct
  source 1..9: note = Seed: VVGAVGVGK (KRAS G12V)
YVGIVNVGG

SEQ ID NO: 76056 - protein, 9 aa, synthetic construct
  source 1..9: note = Seed: VVGAVGVGK (KRAS G12V)
YVGIVNVGH

SEQ ID NO: 76057 - protein, 9 aa, synthetic construct
  source 1..9: note = Seed: VVGAVGVGK (KRAS G12V)
YVGIVNVGI

SEQ ID NO: 76058 - protein, 9 aa, synthetic construct
  source 1..9: note = Seed: VVGAVGVGK (KRAS G12V)
YVGIVNVGK

SEQ ID NO: 76059 - protein, 9 aa, synthetic construct
  source 1..9: note = Seed: VVGAVGVGK (KRAS G12V)
YVGIVNVGL

SEQ ID NO: 76060 - protein, 9 aa, synthetic construct
  source 1..9: note = Seed: VVGAVGVGK (KRAS G12V)
YVGIVNVGM

SEQ ID NO: 76061 - protein, 9 aa, synthetic construct
  source 1..9: note = Seed: VVGAVGVGK (KRAS G12V)
YVGIVNVGN

SEQ ID NO: 76062 - protein, 9 aa, synthetic construct
  source 1..9: note = Seed: VVGAVGVGK (KRAS G12V)
YVGIVNVGR

SEQ ID NO: 76063 - protein, 9 aa, synthetic construct
  source 1..9: note = Seed: VVGAVGVGK (KRAS G12V)
YVGIVNVGS

SEQ ID NO: 76064 - protein, 9 aa, synthetic construct
  source 1..9: note = Seed: VVGAVGVGK (KRAS G12V)
YVGIVNVGT

SEQ ID NO: 76065 - protein, 9 aa, synthetic construct
  source 1..9: note = Seed: VVGAVGVGK (KRAS G12V)
YVGIVNVGV

SEQ ID NO: 76066 - protein, 9 aa, synthetic construct
  source 1..9: note = Seed: VVGAVGVGK (KRAS G12V)
YVGIVPVGA

SEQ ID NO: 76067 - protein, 9 aa, synthetic construct
  source 1..9: note = Seed: VVGAVGVGK (KRAS G12V)
YVGIVPVGC

SEQ ID NO: 76068 - protein, 9 aa, synthetic construct
  source 1..9: note = Seed: VVGAVGVGK (KRAS G12V)
YVGIVPVGF

SEQ ID NO: 76069 - protein, 9 aa, synthetic construct
  source 1..9: note = Seed: VVGAVGVGK (KRAS G12V)
YVGIVPVGG

SEQ ID NO: 76070 - protein, 9 aa, synthetic construct
  source 1..9: note = Seed: VVGAVGVGK (KRAS G12V)
YVGIVPVGH

SEQ ID NO: 76071 - protein, 9 aa, synthetic construct
  source 1..9: note = Seed: VVGAVGVGK (KRAS G12V)
YVGIVPVGI

SEQ ID NO: 76072 - protein, 9 aa, synthetic construct
  source 1..9: note = Seed: VVGAVGVGK (KRAS G12V)
YVGIVPVGK

SEQ ID NO: 76073 - protein, 9 aa, synthetic construct
  source 1..9: note = Seed: VVGAVGVGK (KRAS G12V)
YVGIVPVGL

SEQ ID NO: 76074 - protein, 9 aa, synthetic construct
  source 1..9: note = Seed: VVGAVGVGK (KRAS G12V)
YVGIVPVGM

SEQ ID NO: 76075 - protein, 9 aa, synthetic construct
  source 1..9: note = Seed: VVGAVGVGK (KRAS G12V)
YVGIVPVGN

SEQ ID NO: 76076 - protein, 9 aa, synthetic construct
  source 1..9: note = Seed: VVGAVGVGK (KRAS G12V)
YVGIVPVGQ

SEQ ID NO: 76077 - protein, 9 aa, synthetic construct
  source 1..9: note = Seed: VVGAVGVGK (KRAS G12V)
YVGIVPVGR

SEQ ID NO: 76078 - protein, 9 aa, synthetic construct
  source 1..9: note = Seed: VVGAVGVGK (KRAS G12V)
YVGIVPVGS

SEQ ID NO: 76079 - protein, 9 aa, synthetic construct
  source 1..9: note = Seed: VVGAVGVGK (KRAS G12V)
YVGIVPVGT

SEQ ID NO: 76080 - protein, 9 aa, synthetic construct
  source 1..9: note = Seed: VVGAVGVGK (KRAS G12V)
YVGIVPVGV

SEQ ID NO: 76081 - protein, 9 aa, synthetic construct
  source 1..9: note = Seed: VVGAVGVGK (KRAS G12V)
YVGIVPVGY

SEQ ID NO: 76082 - protein, 9 aa, synthetic construct
  source 1..9: note = Seed: VVGAVGVGK (KRAS G12V)
YVGIVQVGR

SEQ ID NO: 76083 - protein, 9 aa, synthetic construct
  source 1..9: note = Seed: VVGAVGVGK (KRAS G12V)
YVGIVRVGA

SEQ ID NO: 76084 - protein, 9 aa, synthetic construct
  source 1..9: note = Seed: VVGAVGVGK (KRAS G12V)
YVGIVRVGD

SEQ ID NO: 76085 - protein, 9 aa, synthetic construct
  source 1..9: note = Seed: VVGAVGVGK (KRAS G12V)
YVGIVRVGE

SEQ ID NO: 76086 - protein, 9 aa, synthetic construct
  source 1..9: note = Seed: VVGAVGVGK (KRAS G12V)
YVGIVRVGG

SEQ ID NO: 76087 - protein, 9 aa, synthetic construct
  source 1..9: note = Seed: VVGAVGVGK (KRAS G12V)
YVGIVRVGH

SEQ ID NO: 76088 - protein, 9 aa, synthetic construct
  source 1..9: note = Seed: VVGAVGVGK (KRAS G12V)
YVGIVRVGK

SEQ ID NO: 76089 - protein, 9 aa, synthetic construct
  source 1..9: note = Seed: VVGAVGVGK (KRAS G12V)
YVGIVRVGL

SEQ ID NO: 76090 - protein, 9 aa, synthetic construct
  source 1..9: note = Seed: VVGAVGVGK (KRAS G12V)
YVGIVRVGM

SEQ ID NO: 76091 - protein, 9 aa, synthetic construct
  source 1..9: note = Seed: VVGAVGVGK (KRAS G12V)
YVGIVRVGN

SEQ ID NO: 76092 - protein, 9 aa, synthetic construct
  source 1..9: note = Seed: VVGAVGVGK (KRAS G12V)
YVGIVRVGP

SEQ ID NO: 76093 - protein, 9 aa, synthetic construct
  source 1..9: note = Seed: VVGAVGVGK (KRAS G12V)
YVGIVRVGQ

SEQ ID NO: 76094 - protein, 9 aa, synthetic construct
  source 1..9: note = Seed: VVGAVGVGK (KRAS G12V)
YVGIVRVGR

SEQ ID NO: 76095 - protein, 9 aa, synthetic construct
  source 1..9: note = Seed: VVGAVGVGK (KRAS G12V)
YVGIVRVGS

SEQ ID NO: 76096 - protein, 9 aa, synthetic construct
  source 1..9: note = Seed: VVGAVGVGK (KRAS G12V)
YVGIVRVGT

SEQ ID NO: 76097 - protein, 9 aa, synthetic construct
  source 1..9: note = Seed: VVGAVGVGK (KRAS G12V)
YVGIVRVGY

SEQ ID NO: 76098 - protein, 9 aa, synthetic construct
  source 1..9: note = Seed: VVGAVGVGK (KRAS G12V)
YVGIVSVGA

SEQ ID NO: 76099 - protein, 9 aa, synthetic construct
  source 1..9: note = Seed: VVGAVGVGK (KRAS G12V)
YVGIVSVGH

SEQ ID NO: 76100 - protein, 9 aa, synthetic construct
  source 1..9: note = Seed: VVGAVGVGK (KRAS G12V)
YVGIVSVGI

SEQ ID NO: 76101 - protein, 9 aa, synthetic construct
  source 1..9: note = Seed: VVGAVGVGK (KRAS G12V)
YVGIVSVGK

SEQ ID NO: 76102 - protein, 9 aa, synthetic construct
  source 1..9: note = Seed: VVGAVGVGK (KRAS G12V)
YVGIVSVGL

SEQ ID NO: 76103 - protein, 9 aa, synthetic construct
  source 1..9: note = Seed: VVGAVGVGK (KRAS G12V)
YVGIVSVGM

SEQ ID NO: 76104 - protein, 9 aa, synthetic construct
  source 1..9: note = Seed: VVGAVGVGK (KRAS G12V)
YVGIVSVGN

SEQ ID NO: 76105 - protein, 9 aa, synthetic construct
  source 1..9: note = Seed: VVGAVGVGK (KRAS G12V)
YVGIVSVGQ

SEQ ID NO: 76106 - protein, 9 aa, synthetic construct
  source 1..9: note = Seed: VVGAVGVGK (KRAS G12V)
YVGIVSVGR

SEQ ID NO: 76107 - protein, 9 aa, synthetic construct
  source 1..9: note = Seed: VVGAVGVGK (KRAS G12V)
YVGIVSVGS

SEQ ID NO: 76108 - protein, 9 aa, synthetic construct
  source 1..9: note = Seed: VVGAVGVGK (KRAS G12V)
YVGIVSVGT

SEQ ID NO: 76109 - protein, 9 aa, synthetic construct
  source 1..9: note = Seed: VVGAVGVGK (KRAS G12V)
YVGIVSVGV

SEQ ID NO: 76110 - protein, 9 aa, synthetic construct
  source 1..9: note = Seed: VVGAVGVGK (KRAS G12V)
YVGIVSVGY

SEQ ID NO: 76111 - protein, 9 aa, synthetic construct
  source 1..9: note = Seed: VVGAVGVGK (KRAS G12V)
YVGIVTVGA

SEQ ID NO: 76112 - protein, 9 aa, synthetic construct
  source 1..9: note = Seed: VVGAVGVGK (KRAS G12V)
YVGIVTVGG

SEQ ID NO: 76113 - protein, 9 aa, synthetic construct
  source 1..9: note = Seed: VVGAVGVGK (KRAS G12V)
YVGIVTVGH

SEQ ID NO: 76114 - protein, 9 aa, synthetic construct
  source 1..9: note = Seed: VVGAVGVGK (KRAS G12V)
YVGIVTVGK

SEQ ID NO: 76115 - protein, 9 aa, synthetic construct
  source 1..9: note = Seed: VVGAVGVGK (KRAS G12V)
YVGIVTVGL

SEQ ID NO: 76116 - protein, 9 aa, synthetic construct
  source 1..9: note = Seed: VVGAVGVGK (KRAS G12V)
YVGIVTVGM

SEQ ID NO: 76117 - protein, 9 aa, synthetic construct
  source 1..9: note = Seed: VVGAVGVGK (KRAS G12V)
YVGIVTVGN

SEQ ID NO: 76118 - protein, 9 aa, synthetic construct
  source 1..9: note = Seed: VVGAVGVGK (KRAS G12V)
YVGIVTVGR

SEQ ID NO: 76119 - protein, 9 aa, synthetic construct
  source 1..9: note = Seed: VVGAVGVGK (KRAS G12V)
YVGIVTVGS

SEQ ID NO: 76120 - protein, 9 aa, synthetic construct
  source 1..9: note = Seed: VVGAVGVGK (KRAS G12V)
YVGIVTVGT

SEQ ID NO: 76121 - protein, 9 aa, synthetic construct
  source 1..9: note = Seed: VVGAVGVGK (KRAS G12V)
YVGIVTVGV

SEQ ID NO: 76122 - protein, 9 aa, synthetic construct
  source 1..9: note = Seed: VVGAVGVGK (KRAS G12V)
YVGIVVVGR

SEQ ID NO: 76123 - protein, 9 aa, synthetic construct
  source 1..9: note = Seed: VVGAVGVGK (KRAS G12V)
YVGKVAVGA

SEQ ID NO: 76124 - protein, 9 aa, synthetic construct
  source 1..9: note = Seed: VVGAVGVGK (KRAS G12V)
YVGKVAVGH

SEQ ID NO: 76125 - protein, 9 aa, synthetic construct
  source 1..9: note = Seed: VVGAVGVGK (KRAS G12V)
YVGKVAVGI

SEQ ID NO: 76126 - protein, 9 aa, synthetic construct
  source 1..9: note = Seed: VVGAVGVGK (KRAS G12V)
YVGKVAVGL

SEQ ID NO: 76127 - protein, 9 aa, synthetic construct
  source 1..9: note = Seed: VVGAVGVGK (KRAS G12V)
YVGKVAVGM

SEQ ID NO: 76128 - protein, 9 aa, synthetic construct
  source 1..9: note = Seed: VVGAVGVGK (KRAS G12V)
YVGKVAVGR

SEQ ID NO: 76129 - protein, 9 aa, synthetic construct
  source 1..9: note = Seed: VVGAVGVGK (KRAS G12V)
YVGKVAVGS

SEQ ID NO: 76130 - protein, 9 aa, synthetic construct
  source 1..9: note = Seed: VVGAVGVGK (KRAS G12V)
YVGKVAVGT

SEQ ID NO: 76131 - protein, 9 aa, synthetic construct
  source 1..9: note = Seed: VVGAVGVGK (KRAS G12V)
YVGKVAVGV

SEQ ID NO: 76132 - protein, 9 aa, synthetic construct
  source 1..9: note = Seed: VVGAVGVGK (KRAS G12V)
YVGKVAVGY

SEQ ID NO: 76133 - protein, 9 aa, synthetic construct
  source 1..9: note = Seed: VVGAVGVGK (KRAS G12V)
YVGKVGVGA

SEQ ID NO: 76134 - protein, 9 aa, synthetic construct
  source 1..9: note = Seed: VVGAVGVGK (KRAS G12V)
YVGKVGVGI

SEQ ID NO: 76135 - protein, 9 aa, synthetic construct
  source 1..9: note = Seed: VVGAVGVGK (KRAS G12V)
YVGKVGVGL

SEQ ID NO: 76136 - protein, 9 aa, synthetic construct
  source 1..9: note = Seed: VVGAVGVGK (KRAS G12V)
YVGKVGVGM

SEQ ID NO: 76137 - protein, 9 aa, synthetic construct
  source 1..9: note = Seed: VVGAVGVGK (KRAS G12V)
YVGKVGVGV

SEQ ID NO: 76138 - protein, 9 aa, synthetic construct
  source 1..9: note = Seed: VVGAVGVGK (KRAS G12V)
YVGKVKVGA

SEQ ID NO: 76139 - protein, 9 aa, synthetic construct
  source 1..9: note = Seed: VVGAVGVGK (KRAS G12V)
YVGKVKVGF

SEQ ID NO: 76140 - protein, 9 aa, synthetic construct
  source 1..9: note = Seed: VVGAVGVGK (KRAS G12V)
YVGKVKVGG

SEQ ID NO: 76141 - protein, 9 aa, synthetic construct
  source 1..9: note = Seed: VVGAVGVGK (KRAS G12V)
YVGKVKVGH

SEQ ID NO: 76142 - protein, 9 aa, synthetic construct
  source 1..9: note = Seed: VVGAVGVGK (KRAS G12V)
YVGKVKVGK

SEQ ID NO: 76143 - protein, 9 aa, synthetic construct
  source 1..9: note = Seed: VVGAVGVGK (KRAS G12V)
YVGKVKVGM

SEQ ID NO: 76144 - protein, 9 aa, synthetic construct
  source 1..9: note = Seed: VVGAVGVGK (KRAS G12V)
YVGKVKVGQ

SEQ ID NO: 76145 - protein, 9 aa, synthetic construct
  source 1..9: note = Seed: VVGAVGVGK (KRAS G12V)
YVGKVKVGR

SEQ ID NO: 76146 - protein, 9 aa, synthetic construct
  source 1..9: note = Seed: VVGAVGVGK (KRAS G12V)
YVGKVKVGS

SEQ ID NO: 76147 - protein, 9 aa, synthetic construct
  source 1..9: note = Seed: VVGAVGVGK (KRAS G12V)
YVGKVKVGT

SEQ ID NO: 76148 - protein, 9 aa, synthetic construct
  source 1..9: note = Seed: VVGAVGVGK (KRAS G12V)
YVGKVKVGY

SEQ ID NO: 76149 - protein, 9 aa, synthetic construct
  source 1..9: note = Seed: VVGAVGVGK (KRAS G12V)
YVGKVNVGL

SEQ ID NO: 76150 - protein, 9 aa, synthetic construct
  source 1..9: note = Seed: VVGAVGVGK (KRAS G12V)
YVGKVPVGA

SEQ ID NO: 76151 - protein, 9 aa, synthetic construct
  source 1..9: note = Seed: VVGAVGVGK (KRAS G12V)
YVGKVPVGI

SEQ ID NO: 76152 - protein, 9 aa, synthetic construct
  source 1..9: note = Seed: VVGAVGVGK (KRAS G12V)
YVGKVPVGL

SEQ ID NO: 76153 - protein, 9 aa, synthetic construct
  source 1..9: note = Seed: VVGAVGVGK (KRAS G12V)
YVGKVPVGM

SEQ ID NO: 76154 - protein, 9 aa, synthetic construct
  source 1..9: note = Seed: VVGAVGVGK (KRAS G12V)
YVGKVPVGV

SEQ ID NO: 76155 - protein, 9 aa, synthetic construct
  source 1..9: note = Seed: VVGAVGVGK (KRAS G12V)
YVGKVRVGA

SEQ ID NO: 76156 - protein, 9 aa, synthetic construct
  source 1..9: note = Seed: VVGAVGVGK (KRAS G12V)
YVGKVRVGG

SEQ ID NO: 76157 - protein, 9 aa, synthetic construct
  source 1..9: note = Seed: VVGAVGVGK (KRAS G12V)
YVGKVRVGH

SEQ ID NO: 76158 - protein, 9 aa, synthetic construct
  source 1..9: note = Seed: VVGAVGVGK (KRAS G12V)
YVGKVRVGI

SEQ ID NO: 76159 - protein, 9 aa, synthetic construct
  source 1..9: note = Seed: VVGAVGVGK (KRAS G12V)
YVGKVRVGK

SEQ ID NO: 76160 - protein, 9 aa, synthetic construct
  source 1..9: note = Seed: VVGAVGVGK (KRAS G12V)
YVGKVRVGL

SEQ ID NO: 76161 - protein, 9 aa, synthetic construct
  source 1..9: note = Seed: VVGAVGVGK (KRAS G12V)
YVGKVRVGM

SEQ ID NO: 76162 - protein, 9 aa, synthetic construct
  source 1..9: note = Seed: VVGAVGVGK (KRAS G12V)
YVGKVRVGN

SEQ ID NO: 76163 - protein, 9 aa, synthetic construct
  source 1..9: note = Seed: VVGAVGVGK (KRAS G12V)
YVGKVRVGP

SEQ ID NO: 76164 - protein, 9 aa, synthetic construct
  source 1..9: note = Seed: VVGAVGVGK (KRAS G12V)
YVGKVRVGQ

SEQ ID NO: 76165 - protein, 9 aa, synthetic construct
  source 1..9: note = Seed: VVGAVGVGK (KRAS G12V)
YVGKVRVGR

SEQ ID NO: 76166 - protein, 9 aa, synthetic construct
  source 1..9: note = Seed: VVGAVGVGK (KRAS G12V)
YVGKVRVGS

SEQ ID NO: 76167 - protein, 9 aa, synthetic construct
  source 1..9: note = Seed: VVGAVGVGK (KRAS G12V)
YVGKVRVGT

SEQ ID NO: 76168 - protein, 9 aa, synthetic construct
  source 1..9: note = Seed: VVGAVGVGK (KRAS G12V)
YVGKVRVGV

SEQ ID NO: 76169 - protein, 9 aa, synthetic construct
  source 1..9: note = Seed: VVGAVGVGK (KRAS G12V)
YVGKVRVGY

SEQ ID NO: 76170 - protein, 9 aa, synthetic construct
  source 1..9: note = Seed: VVGAVGVGK (KRAS G12V)
YVGKVSVGA

SEQ ID NO: 76171 - protein, 9 aa, synthetic construct
  source 1..9: note = Seed: VVGAVGVGK (KRAS G12V)
YVGKVSVGI

SEQ ID NO: 76172 - protein, 9 aa, synthetic construct
  source 1..9: note = Seed: VVGAVGVGK (KRAS G12V)
YVGKVSVGL

SEQ ID NO: 76173 - protein, 9 aa, synthetic construct
  source 1..9: note = Seed: VVGAVGVGK (KRAS G12V)
YVGKVSVGM

SEQ ID NO: 76174 - protein, 9 aa, synthetic construct
  source 1..9: note = Seed: VVGAVGVGK (KRAS G12V)
YVGKVSVGV

SEQ ID NO: 76175 - protein, 9 aa, synthetic construct
  source 1..9: note = Seed: VVGAVGVGK (KRAS G12V)
YVGKVTVGL

SEQ ID NO: 76176 - protein, 9 aa, synthetic construct
  source 1..9: note = Seed: VVGAVGVGK (KRAS G12V)
YVGLVAVGA

SEQ ID NO: 76177 - protein, 9 aa, synthetic construct
  source 1..9: note = Seed: VVGAVGVGK (KRAS G12V)
YVGLVAVGD

SEQ ID NO: 76178 - protein, 9 aa, synthetic construct
  source 1..9: note = Seed: VVGAVGVGK (KRAS G12V)
YVGLVAVGE

SEQ ID NO: 76179 - protein, 9 aa, synthetic construct
  source 1..9: note = Seed: VVGAVGVGK (KRAS G12V)
YVGLVAVGG

SEQ ID NO: 76180 - protein, 9 aa, synthetic construct
  source 1..9: note = Seed: VVGAVGVGK (KRAS G12V)
YVGLVAVGH

SEQ ID NO: 76181 - protein, 9 aa, synthetic construct
  source 1..9: note = Seed: VVGAVGVGK (KRAS G12V)
YVGLVAVGI

SEQ ID NO: 76182 - protein, 9 aa, synthetic construct
  source 1..9: note = Seed: VVGAVGVGK (KRAS G12V)
YVGLVAVGK

SEQ ID NO: 76183 - protein, 9 aa, synthetic construct
  source 1..9: note = Seed: VVGAVGVGK (KRAS G12V)
YVGLVAVGL

SEQ ID NO: 76184 - protein, 9 aa, synthetic construct
  source 1..9: note = Seed: VVGAVGVGK (KRAS G12V)
YVGLVAVGM

SEQ ID NO: 76185 - protein, 9 aa, synthetic construct
  source 1..9: note = Seed: VVGAVGVGK (KRAS G12V)
YVGLVAVGN

SEQ ID NO: 76186 - protein, 9 aa, synthetic construct
  source 1..9: note = Seed: VVGAVGVGK (KRAS G12V)
YVGLVAVGP

SEQ ID NO: 76187 - protein, 9 aa, synthetic construct
  source 1..9: note = Seed: VVGAVGVGK (KRAS G12V)
YVGLVAVGQ

SEQ ID NO: 76188 - protein, 9 aa, synthetic construct
  source 1..9: note = Seed: VVGAVGVGK (KRAS G12V)
YVGLVAVGR

SEQ ID NO: 76189 - protein, 9 aa, synthetic construct
  source 1..9: note = Seed: VVGAVGVGK (KRAS G12V)
YVGLVAVGS

SEQ ID NO: 76190 - protein, 9 aa, synthetic construct
  source 1..9: note = Seed: VVGAVGVGK (KRAS G12V)
YVGLVAVGT

SEQ ID NO: 76191 - protein, 9 aa, synthetic construct
  source 1..9: note = Seed: VVGAVGVGK (KRAS G12V)
YVGLVAVGV

SEQ ID NO: 76192 - protein, 9 aa, synthetic construct
  source 1..9: note = Seed: VVGAVGVGK (KRAS G12V)
YVGLVAVGY

SEQ ID NO: 76193 - protein, 9 aa, synthetic construct
  source 1..9: note = Seed: VVGAVGVGK (KRAS G12V)
YVGLVDVGA

SEQ ID NO: 76194 - protein, 9 aa, synthetic construct
  source 1..9: note = Seed: VVGAVGVGK (KRAS G12V)
YVGLVDVGV

SEQ ID NO: 76195 - protein, 9 aa, synthetic construct
  source 1..9: note = Seed: VVGAVGVGK (KRAS G12V)
YVGLVEVGA

SEQ ID NO: 76196 - protein, 9 aa, synthetic construct
  source 1..9: note = Seed: VVGAVGVGK (KRAS G12V)
YVGLVGVGA

SEQ ID NO: 76197 - protein, 9 aa, synthetic construct
  source 1..9: note = Seed: VVGAVGVGK (KRAS G12V)
YVGLVGVGD

SEQ ID NO: 76198 - protein, 9 aa, synthetic construct
  source 1..9: note = Seed: VVGAVGVGK (KRAS G12V)
YVGLVGVGE

SEQ ID NO: 76199 - protein, 9 aa, synthetic construct
  source 1..9: note = Seed: VVGAVGVGK (KRAS G12V)
YVGLVGVGG

SEQ ID NO: 76200 - protein, 9 aa, synthetic construct
  source 1..9: note = Seed: VVGAVGVGK (KRAS G12V)
YVGLVGVGH

SEQ ID NO: 76201 - protein, 9 aa, synthetic construct
  source 1..9: note = Seed: VVGAVGVGK (KRAS G12V)
YVGLVGVGI

SEQ ID NO: 76202 - protein, 9 aa, synthetic construct
  source 1..9: note = Seed: VVGAVGVGK (KRAS G12V)
YVGLVGVGK

SEQ ID NO: 76203 - protein, 9 aa, synthetic construct
  source 1..9: note = Seed: VVGAVGVGK (KRAS G12V)
YVGLVGVGL

SEQ ID NO: 76204 - protein, 9 aa, synthetic construct
  source 1..9: note = Seed: VVGAVGVGK (KRAS G12V)
YVGLVGVGM

SEQ ID NO: 76205 - protein, 9 aa, synthetic construct
  source 1..9: note = Seed: VVGAVGVGK (KRAS G12V)
YVGLVGVGN

SEQ ID NO: 76206 - protein, 9 aa, synthetic construct
  source 1..9: note = Seed: VVGAVGVGK (KRAS G12V)
YVGLVGVGP

SEQ ID NO: 76207 - protein, 9 aa, synthetic construct
  source 1..9: note = Seed: VVGAVGVGK (KRAS G12V)
YVGLVGVGQ

SEQ ID NO: 76208 - protein, 9 aa, synthetic construct
  source 1..9: note = Seed: VVGAVGVGK (KRAS G12V)
YVGLVGVGR

SEQ ID NO: 76209 - protein, 9 aa, synthetic construct
  source 1..9: note = Seed: VVGAVGVGK (KRAS G12V)
YVGLVGVGS

SEQ ID NO: 76210 - protein, 9 aa, synthetic construct
  source 1..9: note = Seed: VVGAVGVGK (KRAS G12V)
YVGLVGVGT

SEQ ID NO: 76211 - protein, 9 aa, synthetic construct
  source 1..9: note = Seed: VVGAVGVGK (KRAS G12V)
YVGLVGVGV

SEQ ID NO: 76212 - protein, 9 aa, synthetic construct
  source 1..9: note = Seed: VVGAVGVGK (KRAS G12V)
YVGLVGVGY

SEQ ID NO: 76213 - protein, 9 aa, synthetic construct
  source 1..9: note = Seed: VVGAVGVGK (KRAS G12V)
YVGLVHVGH

SEQ ID NO: 76214 - protein, 9 aa, synthetic construct
  source 1..9: note = Seed: VVGAVGVGK (KRAS G12V)
YVGLVHVGI

SEQ ID NO: 76215 - protein, 9 aa, synthetic construct
  source 1..9: note = Seed: VVGAVGVGK (KRAS G12V)
YVGLVHVGK

SEQ ID NO: 76216 - protein, 9 aa, synthetic construct
  source 1..9: note = Seed: VVGAVGVGK (KRAS G12V)
YVGLVHVGL

SEQ ID NO: 76217 - protein, 9 aa, synthetic construct
  source 1..9: note = Seed: VVGAVGVGK (KRAS G12V)
YVGLVHVGM

SEQ ID NO: 76218 - protein, 9 aa, synthetic construct
  source 1..9: note = Seed: VVGAVGVGK (KRAS G12V)
YVGLVHVGN

SEQ ID NO: 76219 - protein, 9 aa, synthetic construct
  source 1..9: note = Seed: VVGAVGVGK (KRAS G12V)
YVGLVHVGR

SEQ ID NO: 76220 - protein, 9 aa, synthetic construct
  source 1..9: note = Seed: VVGAVGVGK (KRAS G12V)
YVGLVHVGT

SEQ ID NO: 76221 - protein, 9 aa, synthetic construct
  source 1..9: note = Seed: VVGAVGVGK (KRAS G12V)
YVGLVHVGV

SEQ ID NO: 76222 - protein, 9 aa, synthetic construct
  source 1..9: note = Seed: VVGAVGVGK (KRAS G12V)
YVGLVIVGR

SEQ ID NO: 76223 - protein, 9 aa, synthetic construct
  source 1..9: note = Seed: VVGAVGVGK (KRAS G12V)
YVGLVKVGA

SEQ ID NO: 76224 - protein, 9 aa, synthetic construct
  source 1..9: note = Seed: VVGAVGVGK (KRAS G12V)
YVGLVKVGD

SEQ ID NO: 76225 - protein, 9 aa, synthetic construct
  source 1..9: note = Seed: VVGAVGVGK (KRAS G12V)
YVGLVKVGE

SEQ ID NO: 76226 - protein, 9 aa, synthetic construct
  source 1..9: note = Seed: VVGAVGVGK (KRAS G12V)
YVGLVKVGG

SEQ ID NO: 76227 - protein, 9 aa, synthetic construct
  source 1..9: note = Seed: VVGAVGVGK (KRAS G12V)
YVGLVKVGH

SEQ ID NO: 76228 - protein, 9 aa, synthetic construct
  source 1..9: note = Seed: VVGAVGVGK (KRAS G12V)
YVGLVKVGK

SEQ ID NO: 76229 - protein, 9 aa, synthetic construct
  source 1..9: note = Seed: VVGAVGVGK (KRAS G12V)
YVGLVKVGL

SEQ ID NO: 76230 - protein, 9 aa, synthetic construct
  source 1..9: note = Seed: VVGAVGVGK (KRAS G12V)
YVGLVKVGM

SEQ ID NO: 76231 - protein, 9 aa, synthetic construct
  source 1..9: note = Seed: VVGAVGVGK (KRAS G12V)
YVGLVKVGN

SEQ ID NO: 76232 - protein, 9 aa, synthetic construct
  source 1..9: note = Seed: VVGAVGVGK (KRAS G12V)
YVGLVKVGP

SEQ ID NO: 76233 - protein, 9 aa, synthetic construct
  source 1..9: note = Seed: VVGAVGVGK (KRAS G12V)
YVGLVKVGQ

SEQ ID NO: 76234 - protein, 9 aa, synthetic construct
  source 1..9: note = Seed: VVGAVGVGK (KRAS G12V)
YVGLVKVGR

SEQ ID NO: 76235 - protein, 9 aa, synthetic construct
  source 1..9: note = Seed: VVGAVGVGK (KRAS G12V)
YVGLVKVGS

SEQ ID NO: 76236 - protein, 9 aa, synthetic construct
  source 1..9: note = Seed: VVGAVGVGK (KRAS G12V)
YVGLVKVGT

SEQ ID NO: 76237 - protein, 9 aa, synthetic construct
  source 1..9: note = Seed: VVGAVGVGK (KRAS G12V)
YVGLVKVGV

SEQ ID NO: 76238 - protein, 9 aa, synthetic construct
  source 1..9: note = Seed: VVGAVGVGK (KRAS G12V)
YVGLVKVGY

SEQ ID NO: 76239 - protein, 9 aa, synthetic construct
  source 1..9: note = Seed: VVGAVGVGK (KRAS G12V)
YVGLVNVGA

SEQ ID NO: 76240 - protein, 9 aa, synthetic construct
  source 1..9: note = Seed: VVGAVGVGK (KRAS G12V)
YVGLVNVGG

SEQ ID NO: 76241 - protein, 9 aa, synthetic construct
  source 1..9: note = Seed: VVGAVGVGK (KRAS G12V)
YVGLVNVGH

SEQ ID NO: 76242 - protein, 9 aa, synthetic construct
  source 1..9: note = Seed: VVGAVGVGK (KRAS G12V)
YVGLVNVGI

SEQ ID NO: 76243 - protein, 9 aa, synthetic construct
  source 1..9: note = Seed: VVGAVGVGK (KRAS G12V)
YVGLVNVGK

SEQ ID NO: 76244 - protein, 9 aa, synthetic construct
  source 1..9: note = Seed: VVGAVGVGK (KRAS G12V)
YVGLVNVGL

SEQ ID NO: 76245 - protein, 9 aa, synthetic construct
  source 1..9: note = Seed: VVGAVGVGK (KRAS G12V)
YVGLVNVGM

SEQ ID NO: 76246 - protein, 9 aa, synthetic construct
  source 1..9: note = Seed: VVGAVGVGK (KRAS G12V)
YVGLVNVGN

SEQ ID NO: 76247 - protein, 9 aa, synthetic construct
  source 1..9: note = Seed: VVGAVGVGK (KRAS G12V)
YVGLVNVGP

SEQ ID NO: 76248 - protein, 9 aa, synthetic construct
  source 1..9: note = Seed: VVGAVGVGK (KRAS G12V)
YVGLVNVGR

SEQ ID NO: 76249 - protein, 9 aa, synthetic construct
  source 1..9: note = Seed: VVGAVGVGK (KRAS G12V)
YVGLVNVGS

SEQ ID NO: 76250 - protein, 9 aa, synthetic construct
  source 1..9: note = Seed: VVGAVGVGK (KRAS G12V)
YVGLVNVGT

SEQ ID NO: 76251 - protein, 9 aa, synthetic construct
  source 1..9: note = Seed: VVGAVGVGK (KRAS G12V)
YVGLVNVGV

SEQ ID NO: 76252 - protein, 9 aa, synthetic construct
  source 1..9: note = Seed: VVGAVGVGK (KRAS G12V)
YVGLVNVGY

SEQ ID NO: 76253 - protein, 9 aa, synthetic construct
  source 1..9: note = Seed: VVGAVGVGK (KRAS G12V)
YVGLVPVGA

SEQ ID NO: 76254 - protein, 9 aa, synthetic construct
  source 1..9: note = Seed: VVGAVGVGK (KRAS G12V)
YVGLVPVGC

SEQ ID NO: 76255 - protein, 9 aa, synthetic construct
  source 1..9: note = Seed: VVGAVGVGK (KRAS G12V)
YVGLVPVGD

SEQ ID NO: 76256 - protein, 9 aa, synthetic construct
  source 1..9: note = Seed: VVGAVGVGK (KRAS G12V)
YVGLVPVGE

SEQ ID NO: 76257 - protein, 9 aa, synthetic construct
  source 1..9: note = Seed: VVGAVGVGK (KRAS G12V)
YVGLVPVGF

SEQ ID NO: 76258 - protein, 9 aa, synthetic construct
  source 1..9: note = Seed: VVGAVGVGK (KRAS G12V)
YVGLVPVGG

SEQ ID NO: 76259 - protein, 9 aa, synthetic construct
  source 1..9: note = Seed: VVGAVGVGK (KRAS G12V)
YVGLVPVGH

SEQ ID NO: 76260 - protein, 9 aa, synthetic construct
  source 1..9: note = Seed: VVGAVGVGK (KRAS G12V)
YVGLVPVGI

SEQ ID NO: 76261 - protein, 9 aa, synthetic construct
  source 1..9: note = Seed: VVGAVGVGK (KRAS G12V)
YVGLVPVGK

SEQ ID NO: 76262 - protein, 9 aa, synthetic construct
  source 1..9: note = Seed: VVGAVGVGK (KRAS G12V)
YVGLVPVGL

SEQ ID NO: 76263 - protein, 9 aa, synthetic construct
  source 1..9: note = Seed: VVGAVGVGK (KRAS G12V)
YVGLVPVGM

SEQ ID NO: 76264 - protein, 9 aa, synthetic construct
  source 1..9: note = Seed: VVGAVGVGK (KRAS G12V)
YVGLVPVGN

SEQ ID NO: 76265 - protein, 9 aa, synthetic construct
  source 1..9: note = Seed: VVGAVGVGK (KRAS G12V)
YVGLVPVGP

SEQ ID NO: 76266 - protein, 9 aa, synthetic construct
  source 1..9: note = Seed: VVGAVGVGK (KRAS G12V)
YVGLVPVGQ

SEQ ID NO: 76267 - protein, 9 aa, synthetic construct
  source 1..9: note = Seed: VVGAVGVGK (KRAS G12V)
YVGLVPVGR

SEQ ID NO: 76268 - protein, 9 aa, synthetic construct
  source 1..9: note = Seed: VVGAVGVGK (KRAS G12V)
YVGLVPVGS

SEQ ID NO: 76269 - protein, 9 aa, synthetic construct
  source 1..9: note = Seed: VVGAVGVGK (KRAS G12V)
YVGLVPVGT

SEQ ID NO: 76270 - protein, 9 aa, synthetic construct
  source 1..9: note = Seed: VVGAVGVGK (KRAS G12V)
YVGLVPVGV

SEQ ID NO: 76271 - protein, 9 aa, synthetic construct
  source 1..9: note = Seed: VVGAVGVGK (KRAS G12V)
YVGLVPVGY

SEQ ID NO: 76272 - protein, 9 aa, synthetic construct
  source 1..9: note = Seed: VVGAVGVGK (KRAS G12V)
YVGLVQVGH

SEQ ID NO: 76273 - protein, 9 aa, synthetic construct
  source 1..9: note = Seed: VVGAVGVGK (KRAS G12V)
YVGLVQVGK

SEQ ID NO: 76274 - protein, 9 aa, synthetic construct
  source 1..9: note = Seed: VVGAVGVGK (KRAS G12V)
YVGLVQVGM

SEQ ID NO: 76275 - protein, 9 aa, synthetic construct
  source 1..9: note = Seed: VVGAVGVGK (KRAS G12V)
YVGLVQVGR

SEQ ID NO: 76276 - protein, 9 aa, synthetic construct
  source 1..9: note = Seed: VVGAVGVGK (KRAS G12V)
YVGLVQVGT

SEQ ID NO: 76277 - protein, 9 aa, synthetic construct
  source 1..9: note = Seed: VVGAVGVGK (KRAS G12V)
YVGLVRVGA

SEQ ID NO: 76278 - protein, 9 aa, synthetic construct
  source 1..9: note = Seed: VVGAVGVGK (KRAS G12V)
YVGLVRVGD

SEQ ID NO: 76279 - protein, 9 aa, synthetic construct
  source 1..9: note = Seed: VVGAVGVGK (KRAS G12V)
YVGLVRVGE

SEQ ID NO: 76280 - protein, 9 aa, synthetic construct
  source 1..9: note = Seed: VVGAVGVGK (KRAS G12V)
YVGLVRVGG

SEQ ID NO: 76281 - protein, 9 aa, synthetic construct
  source 1..9: note = Seed: VVGAVGVGK (KRAS G12V)
YVGLVRVGH

SEQ ID NO: 76282 - protein, 9 aa, synthetic construct
  source 1..9: note = Seed: VVGAVGVGK (KRAS G12V)
YVGLVRVGK

SEQ ID NO: 76283 - protein, 9 aa, synthetic construct
  source 1..9: note = Seed: VVGAVGVGK (KRAS G12V)
YVGLVRVGL

SEQ ID NO: 76284 - protein, 9 aa, synthetic construct
  source 1..9: note = Seed: VVGAVGVGK (KRAS G12V)
YVGLVRVGM

SEQ ID NO: 76285 - protein, 9 aa, synthetic construct
  source 1..9: note = Seed: VVGAVGVGK (KRAS G12V)
YVGLVRVGN

SEQ ID NO: 76286 - protein, 9 aa, synthetic construct
  source 1..9: note = Seed: VVGAVGVGK (KRAS G12V)
YVGLVRVGP

SEQ ID NO: 76287 - protein, 9 aa, synthetic construct
  source 1..9: note = Seed: VVGAVGVGK (KRAS G12V)
YVGLVRVGQ

SEQ ID NO: 76288 - protein, 9 aa, synthetic construct
  source 1..9: note = Seed: VVGAVGVGK (KRAS G12V)
YVGLVRVGR

SEQ ID NO: 76289 - protein, 9 aa, synthetic construct
  source 1..9: note = Seed: VVGAVGVGK (KRAS G12V)
YVGLVRVGS

SEQ ID NO: 76290 - protein, 9 aa, synthetic construct
  source 1..9: note = Seed: VVGAVGVGK (KRAS G12V)
YVGLVRVGT

SEQ ID NO: 76291 - protein, 9 aa, synthetic construct
  source 1..9: note = Seed: VVGAVGVGK (KRAS G12V)
YVGLVRVGV

SEQ ID NO: 76292 - protein, 9 aa, synthetic construct
  source 1..9: note = Seed: VVGAVGVGK (KRAS G12V)
YVGLVRVGY

SEQ ID NO: 76293 - protein, 9 aa, synthetic construct
  source 1..9: note = Seed: VVGAVGVGK (KRAS G12V)
YVGLVSVGA

SEQ ID NO: 76294 - protein, 9 aa, synthetic construct
  source 1..9: note = Seed: VVGAVGVGK (KRAS G12V)
YVGLVSVGD

SEQ ID NO: 76295 - protein, 9 aa, synthetic construct
  source 1..9: note = Seed: VVGAVGVGK (KRAS G12V)
YVGLVSVGE

SEQ ID NO: 76296 - protein, 9 aa, synthetic construct
  source 1..9: note = Seed: VVGAVGVGK (KRAS G12V)
YVGLVSVGG

SEQ ID NO: 76297 - protein, 9 aa, synthetic construct
  source 1..9: note = Seed: VVGAVGVGK (KRAS G12V)
YVGLVSVGH

SEQ ID NO: 76298 - protein, 9 aa, synthetic construct
  source 1..9: note = Seed: VVGAVGVGK (KRAS G12V)
YVGLVSVGI

SEQ ID NO: 76299 - protein, 9 aa, synthetic construct
  source 1..9: note = Seed: VVGAVGVGK (KRAS G12V)
YVGLVSVGK

SEQ ID NO: 76300 - protein, 9 aa, synthetic construct
  source 1..9: note = Seed: VVGAVGVGK (KRAS G12V)
YVGLVSVGL

SEQ ID NO: 76301 - protein, 9 aa, synthetic construct
  source 1..9: note = Seed: VVGAVGVGK (KRAS G12V)
YVGLVSVGM

SEQ ID NO: 76302 - protein, 9 aa, synthetic construct
  source 1..9: note = Seed: VVGAVGVGK (KRAS G12V)
YVGLVSVGN

SEQ ID NO: 76303 - protein, 9 aa, synthetic construct
  source 1..9: note = Seed: VVGAVGVGK (KRAS G12V)
YVGLVSVGP

SEQ ID NO: 76304 - protein, 9 aa, synthetic construct
  source 1..9: note = Seed: VVGAVGVGK (KRAS G12V)
YVGLVSVGQ

SEQ ID NO: 76305 - protein, 9 aa, synthetic construct
  source 1..9: note = Seed: VVGAVGVGK (KRAS G12V)
YVGLVSVGR

SEQ ID NO: 76306 - protein, 9 aa, synthetic construct
  source 1..9: note = Seed: VVGAVGVGK (KRAS G12V)
YVGLVSVGS

SEQ ID NO: 76307 - protein, 9 aa, synthetic construct
  source 1..9: note = Seed: VVGAVGVGK (KRAS G12V)
YVGLVSVGT

SEQ ID NO: 76308 - protein, 9 aa, synthetic construct
  source 1..9: note = Seed: VVGAVGVGK (KRAS G12V)
YVGLVSVGV

SEQ ID NO: 76309 - protein, 9 aa, synthetic construct
  source 1..9: note = Seed: VVGAVGVGK (KRAS G12V)
YVGLVSVGY

SEQ ID NO: 76310 - protein, 9 aa, synthetic construct
  source 1..9: note = Seed: VVGAVGVGK (KRAS G12V)
YVGLVTVGA

SEQ ID NO: 76311 - protein, 9 aa, synthetic construct
  source 1..9: note = Seed: VVGAVGVGK (KRAS G12V)
YVGLVTVGG

SEQ ID NO: 76312 - protein, 9 aa, synthetic construct
  source 1..9: note = Seed: VVGAVGVGK (KRAS G12V)
YVGLVTVGH

SEQ ID NO: 76313 - protein, 9 aa, synthetic construct
  source 1..9: note = Seed: VVGAVGVGK (KRAS G12V)
YVGLVTVGI

SEQ ID NO: 76314 - protein, 9 aa, synthetic construct
  source 1..9: note = Seed: VVGAVGVGK (KRAS G12V)
YVGLVTVGK

SEQ ID NO: 76315 - protein, 9 aa, synthetic construct
  source 1..9: note = Seed: VVGAVGVGK (KRAS G12V)
YVGLVTVGL

SEQ ID NO: 76316 - protein, 9 aa, synthetic construct
  source 1..9: note = Seed: VVGAVGVGK (KRAS G12V)
YVGLVTVGM

SEQ ID NO: 76317 - protein, 9 aa, synthetic construct
  source 1..9: note = Seed: VVGAVGVGK (KRAS G12V)
YVGLVTVGN

SEQ ID NO: 76318 - protein, 9 aa, synthetic construct
  source 1..9: note = Seed: VVGAVGVGK (KRAS G12V)
YVGLVTVGP

SEQ ID NO: 76319 - protein, 9 aa, synthetic construct
  source 1..9: note = Seed: VVGAVGVGK (KRAS G12V)
YVGLVTVGR

SEQ ID NO: 76320 - protein, 9 aa, synthetic construct
  source 1..9: note = Seed: VVGAVGVGK (KRAS G12V)
YVGLVTVGS

SEQ ID NO: 76321 - protein, 9 aa, synthetic construct
  source 1..9: note = Seed: VVGAVGVGK (KRAS G12V)
YVGLVTVGT

SEQ ID NO: 76322 - protein, 9 aa, synthetic construct
  source 1..9: note = Seed: VVGAVGVGK (KRAS G12V)
YVGLVTVGV

SEQ ID NO: 76323 - protein, 9 aa, synthetic construct
  source 1..9: note = Seed: VVGAVGVGK (KRAS G12V)
YVGLVTVGY

SEQ ID NO: 76324 - protein, 9 aa, synthetic construct
  source 1..9: note = Seed: VVGAVGVGK (KRAS G12V)
YVGLVVVGH

SEQ ID NO: 76325 - protein, 9 aa, synthetic construct
  source 1..9: note = Seed: VVGAVGVGK (KRAS G12V)
YVGLVVVGK

SEQ ID NO: 76326 - protein, 9 aa, synthetic construct
  source 1..9: note = Seed: VVGAVGVGK (KRAS G12V)
YVGLVVVGN

SEQ ID NO: 76327 - protein, 9 aa, synthetic construct
  source 1..9: note = Seed: VVGAVGVGK (KRAS G12V)
YVGLVVVGR

SEQ ID NO: 76328 - protein, 9 aa, synthetic construct
  source 1..9: note = Seed: VVGAVGVGK (KRAS G12V)
YVGLVVVGS

SEQ ID NO: 76329 - protein, 9 aa, synthetic construct
  source 1..9: note = Seed: VVGAVGVGK (KRAS G12V)
YVGMVAVGA

SEQ ID NO: 76330 - protein, 9 aa, synthetic construct
  source 1..9: note = Seed: VVGAVGVGK (KRAS G12V)
YVGMVAVGD

SEQ ID NO: 76331 - protein, 9 aa, synthetic construct
  source 1..9: note = Seed: VVGAVGVGK (KRAS G12V)
YVGMVAVGE

SEQ ID NO: 76332 - protein, 9 aa, synthetic construct
  source 1..9: note = Seed: VVGAVGVGK (KRAS G12V)
YVGMVAVGG

SEQ ID NO: 76333 - protein, 9 aa, synthetic construct
  source 1..9: note = Seed: VVGAVGVGK (KRAS G12V)
YVGMVAVGH

SEQ ID NO: 76334 - protein, 9 aa, synthetic construct
  source 1..9: note = Seed: VVGAVGVGK (KRAS G12V)
YVGMVAVGI

SEQ ID NO: 76335 - protein, 9 aa, synthetic construct
  source 1..9: note = Seed: VVGAVGVGK (KRAS G12V)
YVGMVAVGK

SEQ ID NO: 76336 - protein, 9 aa, synthetic construct
  source 1..9: note = Seed: VVGAVGVGK (KRAS G12V)
YVGMVAVGL

SEQ ID NO: 76337 - protein, 9 aa, synthetic construct
  source 1..9: note = Seed: VVGAVGVGK (KRAS G12V)
YVGMVAVGM

SEQ ID NO: 76338 - protein, 9 aa, synthetic construct
  source 1..9: note = Seed: VVGAVGVGK (KRAS G12V)
YVGMVAVGN

SEQ ID NO: 76339 - protein, 9 aa, synthetic construct
  source 1..9: note = Seed: VVGAVGVGK (KRAS G12V)
YVGMVAVGP

SEQ ID NO: 76340 - protein, 9 aa, synthetic construct
  source 1..9: note = Seed: VVGAVGVGK (KRAS G12V)
YVGMVAVGQ

SEQ ID NO: 76341 - protein, 9 aa, synthetic construct
  source 1..9: note = Seed: VVGAVGVGK (KRAS G12V)
YVGMVAVGR

SEQ ID NO: 76342 - protein, 9 aa, synthetic construct
  source 1..9: note = Seed: VVGAVGVGK (KRAS G12V)
YVGMVAVGS

SEQ ID NO: 76343 - protein, 9 aa, synthetic construct
  source 1..9: note = Seed: VVGAVGVGK (KRAS G12V)
YVGMVAVGT

SEQ ID NO: 76344 - protein, 9 aa, synthetic construct
  source 1..9: note = Seed: VVGAVGVGK (KRAS G12V)
YVGMVAVGV

SEQ ID NO: 76345 - protein, 9 aa, synthetic construct
  source 1..9: note = Seed: VVGAVGVGK (KRAS G12V)
YVGMVAVGY

SEQ ID NO: 76346 - protein, 9 aa, synthetic construct
  source 1..9: note = Seed: VVGAVGVGK (KRAS G12V)
YVGMVCVGA

SEQ ID NO: 76347 - protein, 9 aa, synthetic construct
  source 1..9: note = Seed: VVGAVGVGK (KRAS G12V)
YVGMVDVGL

SEQ ID NO: 76348 - protein, 9 aa, synthetic construct
  source 1..9: note = Seed: VVGAVGVGK (KRAS G12V)
YVGMVDVGV

SEQ ID NO: 76349 - protein, 9 aa, synthetic construct
  source 1..9: note = Seed: VVGAVGVGK (KRAS G12V)
YVGMVEVGA

SEQ ID NO: 76350 - protein, 9 aa, synthetic construct
  source 1..9: note = Seed: VVGAVGVGK (KRAS G12V)
YVGMVGVGA

SEQ ID NO: 76351 - protein, 9 aa, synthetic construct
  source 1..9: note = Seed: VVGAVGVGK (KRAS G12V)
YVGMVGVGD

SEQ ID NO: 76352 - protein, 9 aa, synthetic construct
  source 1..9: note = Seed: VVGAVGVGK (KRAS G12V)
YVGMVGVGE

SEQ ID NO: 76353 - protein, 9 aa, synthetic construct
  source 1..9: note = Seed: VVGAVGVGK (KRAS G12V)
YVGMVGVGG

SEQ ID NO: 76354 - protein, 9 aa, synthetic construct
  source 1..9: note = Seed: VVGAVGVGK (KRAS G12V)
YVGMVGVGH

SEQ ID NO: 76355 - protein, 9 aa, synthetic construct
  source 1..9: note = Seed: VVGAVGVGK (KRAS G12V)
YVGMVGVGI

SEQ ID NO: 76356 - protein, 9 aa, synthetic construct
  source 1..9: note = Seed: VVGAVGVGK (KRAS G12V)
YVGMVGVGK

SEQ ID NO: 76357 - protein, 9 aa, synthetic construct
  source 1..9: note = Seed: VVGAVGVGK (KRAS G12V)
YVGMVGVGL

SEQ ID NO: 76358 - protein, 9 aa, synthetic construct
  source 1..9: note = Seed: VVGAVGVGK (KRAS G12V)
YVGMVGVGM

SEQ ID NO: 76359 - protein, 9 aa, synthetic construct
  source 1..9: note = Seed: VVGAVGVGK (KRAS G12V)
YVGMVGVGN

SEQ ID NO: 76360 - protein, 9 aa, synthetic construct
  source 1..9: note = Seed: VVGAVGVGK (KRAS G12V)
YVGMVGVGP

SEQ ID NO: 76361 - protein, 9 aa, synthetic construct
  source 1..9: note = Seed: VVGAVGVGK (KRAS G12V)
YVGMVGVGQ

SEQ ID NO: 76362 - protein, 9 aa, synthetic construct
  source 1..9: note = Seed: VVGAVGVGK (KRAS G12V)
YVGMVGVGR

SEQ ID NO: 76363 - protein, 9 aa, synthetic construct
  source 1..9: note = Seed: VVGAVGVGK (KRAS G12V)
YVGMVGVGS

SEQ ID NO: 76364 - protein, 9 aa, synthetic construct
  source 1..9: note = Seed: VVGAVGVGK (KRAS G12V)
YVGMVGVGT

SEQ ID NO: 76365 - protein, 9 aa, synthetic construct
  source 1..9: note = Seed: VVGAVGVGK (KRAS G12V)
YVGMVGVGV

SEQ ID NO: 76366 - protein, 9 aa, synthetic construct
  source 1..9: note = Seed: VVGAVGVGK (KRAS G12V)
YVGMVGVGY

SEQ ID NO: 76367 - protein, 9 aa, synthetic construct
  source 1..9: note = Seed: VVGAVGVGK (KRAS G12V)
YVGMVHVGH

SEQ ID NO: 76368 - protein, 9 aa, synthetic construct
  source 1..9: note = Seed: VVGAVGVGK (KRAS G12V)
YVGMVHVGI

SEQ ID NO: 76369 - protein, 9 aa, synthetic construct
  source 1..9: note = Seed: VVGAVGVGK (KRAS G12V)
YVGMVHVGK

SEQ ID NO: 76370 - protein, 9 aa, synthetic construct
  source 1..9: note = Seed: VVGAVGVGK (KRAS G12V)
YVGMVHVGL

SEQ ID NO: 76371 - protein, 9 aa, synthetic construct
  source 1..9: note = Seed: VVGAVGVGK (KRAS G12V)
YVGMVHVGM

SEQ ID NO: 76372 - protein, 9 aa, synthetic construct
  source 1..9: note = Seed: VVGAVGVGK (KRAS G12V)
YVGMVHVGN

SEQ ID NO: 76373 - protein, 9 aa, synthetic construct
  source 1..9: note = Seed: VVGAVGVGK (KRAS G12V)
YVGMVHVGR

SEQ ID NO: 76374 - protein, 9 aa, synthetic construct
  source 1..9: note = Seed: VVGAVGVGK (KRAS G12V)
YVGMVHVGS

SEQ ID NO: 76375 - protein, 9 aa, synthetic construct
  source 1..9: note = Seed: VVGAVGVGK (KRAS G12V)
YVGMVHVGT

SEQ ID NO: 76376 - protein, 9 aa, synthetic construct
  source 1..9: note = Seed: VVGAVGVGK (KRAS G12V)
YVGMVHVGV

SEQ ID NO: 76377 - protein, 9 aa, synthetic construct
  source 1..9: note = Seed: VVGAVGVGK (KRAS G12V)
YVGMVIVGH

SEQ ID NO: 76378 - protein, 9 aa, synthetic construct
  source 1..9: note = Seed: VVGAVGVGK (KRAS G12V)
YVGMVIVGR

SEQ ID NO: 76379 - protein, 9 aa, synthetic construct
  source 1..9: note = Seed: VVGAVGVGK (KRAS G12V)
YVGMVKVGA

SEQ ID NO: 76380 - protein, 9 aa, synthetic construct
  source 1..9: note = Seed: VVGAVGVGK (KRAS G12V)
YVGMVKVGD

SEQ ID NO: 76381 - protein, 9 aa, synthetic construct
  source 1..9: note = Seed: VVGAVGVGK (KRAS G12V)
YVGMVKVGE

SEQ ID NO: 76382 - protein, 9 aa, synthetic construct
  source 1..9: note = Seed: VVGAVGVGK (KRAS G12V)
YVGMVKVGG

SEQ ID NO: 76383 - protein, 9 aa, synthetic construct
  source 1..9: note = Seed: VVGAVGVGK (KRAS G12V)
YVGMVKVGH

SEQ ID NO: 76384 - protein, 9 aa, synthetic construct
  source 1..9: note = Seed: VVGAVGVGK (KRAS G12V)
YVGMVKVGI

SEQ ID NO: 76385 - protein, 9 aa, synthetic construct
  source 1..9: note = Seed: VVGAVGVGK (KRAS G12V)
YVGMVKVGK

SEQ ID NO: 76386 - protein, 9 aa, synthetic construct
  source 1..9: note = Seed: VVGAVGVGK (KRAS G12V)
YVGMVKVGL

SEQ ID NO: 76387 - protein, 9 aa, synthetic construct
  source 1..9: note = Seed: VVGAVGVGK (KRAS G12V)
YVGMVKVGM

SEQ ID NO: 76388 - protein, 9 aa, synthetic construct
  source 1..9: note = Seed: VVGAVGVGK (KRAS G12V)
YVGMVKVGN

SEQ ID NO: 76389 - protein, 9 aa, synthetic construct
  source 1..9: note = Seed: VVGAVGVGK (KRAS G12V)
YVGMVKVGP

SEQ ID NO: 76390 - protein, 9 aa, synthetic construct
  source 1..9: note = Seed: VVGAVGVGK (KRAS G12V)
YVGMVKVGQ

SEQ ID NO: 76391 - protein, 9 aa, synthetic construct
  source 1..9: note = Seed: VVGAVGVGK (KRAS G12V)
YVGMVKVGR

SEQ ID NO: 76392 - protein, 9 aa, synthetic construct
  source 1..9: note = Seed: VVGAVGVGK (KRAS G12V)
YVGMVKVGS

SEQ ID NO: 76393 - protein, 9 aa, synthetic construct
  source 1..9: note = Seed: VVGAVGVGK (KRAS G12V)
YVGMVKVGT

SEQ ID NO: 76394 - protein, 9 aa, synthetic construct
  source 1..9: note = Seed: VVGAVGVGK (KRAS G12V)
YVGMVKVGV

SEQ ID NO: 76395 - protein, 9 aa, synthetic construct
  source 1..9: note = Seed: VVGAVGVGK (KRAS G12V)
YVGMVKVGY

SEQ ID NO: 76396 - protein, 9 aa, synthetic construct
  source 1..9: note = Seed: VVGAVGVGK (KRAS G12V)
YVGMVNVGA

SEQ ID NO: 76397 - protein, 9 aa, synthetic construct
  source 1..9: note = Seed: VVGAVGVGK (KRAS G12V)
YVGMVNVGG

SEQ ID NO: 76398 - protein, 9 aa, synthetic construct
  source 1..9: note = Seed: VVGAVGVGK (KRAS G12V)
YVGMVNVGH

SEQ ID NO: 76399 - protein, 9 aa, synthetic construct
  source 1..9: note = Seed: VVGAVGVGK (KRAS G12V)
YVGMVNVGI

SEQ ID NO: 76400 - protein, 9 aa, synthetic construct
  source 1..9: note = Seed: VVGAVGVGK (KRAS G12V)
YVGMVNVGK

SEQ ID NO: 76401 - protein, 9 aa, synthetic construct
  source 1..9: note = Seed: VVGAVGVGK (KRAS G12V)
YVGMVNVGL

SEQ ID NO: 76402 - protein, 9 aa, synthetic construct
  source 1..9: note = Seed: VVGAVGVGK (KRAS G12V)
YVGMVNVGM

SEQ ID NO: 76403 - protein, 9 aa, synthetic construct
  source 1..9: note = Seed: VVGAVGVGK (KRAS G12V)
YVGMVNVGN

SEQ ID NO: 76404 - protein, 9 aa, synthetic construct
  source 1..9: note = Seed: VVGAVGVGK (KRAS G12V)
YVGMVNVGP

SEQ ID NO: 76405 - protein, 9 aa, synthetic construct
  source 1..9: note = Seed: VVGAVGVGK (KRAS G12V)
YVGMVNVGR

SEQ ID NO: 76406 - protein, 9 aa, synthetic construct
  source 1..9: note = Seed: VVGAVGVGK (KRAS G12V)
YVGMVNVGS

SEQ ID NO: 76407 - protein, 9 aa, synthetic construct
  source 1..9: note = Seed: VVGAVGVGK (KRAS G12V)
YVGMVNVGT

SEQ ID NO: 76408 - protein, 9 aa, synthetic construct
  source 1..9: note = Seed: VVGAVGVGK (KRAS G12V)
YVGMVNVGV

SEQ ID NO: 76409 - protein, 9 aa, synthetic construct
  source 1..9: note = Seed: VVGAVGVGK (KRAS G12V)
YVGMVNVGY

SEQ ID NO: 76410 - protein, 9 aa, synthetic construct
  source 1..9: note = Seed: VVGAVGVGK (KRAS G12V)
YVGMVPVGA

SEQ ID NO: 76411 - protein, 9 aa, synthetic construct
  source 1..9: note = Seed: VVGAVGVGK (KRAS G12V)
YVGMVPVGC

SEQ ID NO: 76412 - protein, 9 aa, synthetic construct
  source 1..9: note = Seed: VVGAVGVGK (KRAS G12V)
YVGMVPVGD

SEQ ID NO: 76413 - protein, 9 aa, synthetic construct
  source 1..9: note = Seed: VVGAVGVGK (KRAS G12V)
YVGMVPVGE

SEQ ID NO: 76414 - protein, 9 aa, synthetic construct
  source 1..9: note = Seed: VVGAVGVGK (KRAS G12V)
YVGMVPVGF

SEQ ID NO: 76415 - protein, 9 aa, synthetic construct
  source 1..9: note = Seed: VVGAVGVGK (KRAS G12V)
YVGMVPVGG

SEQ ID NO: 76416 - protein, 9 aa, synthetic construct
  source 1..9: note = Seed: VVGAVGVGK (KRAS G12V)
YVGMVPVGH

SEQ ID NO: 76417 - protein, 9 aa, synthetic construct
  source 1..9: note = Seed: VVGAVGVGK (KRAS G12V)
YVGMVPVGI

SEQ ID NO: 76418 - protein, 9 aa, synthetic construct
  source 1..9: note = Seed: VVGAVGVGK (KRAS G12V)
YVGMVPVGK

SEQ ID NO: 76419 - protein, 9 aa, synthetic construct
  source 1..9: note = Seed: VVGAVGVGK (KRAS G12V)
YVGMVPVGL

SEQ ID NO: 76420 - protein, 9 aa, synthetic construct
  source 1..9: note = Seed: VVGAVGVGK (KRAS G12V)
YVGMVPVGM

SEQ ID NO: 76421 - protein, 9 aa, synthetic construct
  source 1..9: note = Seed: VVGAVGVGK (KRAS G12V)
YVGMVPVGN

SEQ ID NO: 76422 - protein, 9 aa, synthetic construct
  source 1..9: note = Seed: VVGAVGVGK (KRAS G12V)
YVGMVPVGP

SEQ ID NO: 76423 - protein, 9 aa, synthetic construct
  source 1..9: note = Seed: VVGAVGVGK (KRAS G12V)
YVGMVPVGQ

SEQ ID NO: 76424 - protein, 9 aa, synthetic construct
  source 1..9: note = Seed: VVGAVGVGK (KRAS G12V)
YVGMVPVGR

SEQ ID NO: 76425 - protein, 9 aa, synthetic construct
  source 1..9: note = Seed: VVGAVGVGK (KRAS G12V)
YVGMVPVGS

SEQ ID NO: 76426 - protein, 9 aa, synthetic construct
  source 1..9: note = Seed: VVGAVGVGK (KRAS G12V)
YVGMVPVGT

SEQ ID NO: 76427 - protein, 9 aa, synthetic construct
  source 1..9: note = Seed: VVGAVGVGK (KRAS G12V)
YVGMVPVGV

SEQ ID NO: 76428 - protein, 9 aa, synthetic construct
  source 1..9: note = Seed: VVGAVGVGK (KRAS G12V)
YVGMVPVGY

SEQ ID NO: 76429 - protein, 9 aa, synthetic construct
  source 1..9: note = Seed: VVGAVGVGK (KRAS G12V)
YVGMVQVGH

SEQ ID NO: 76430 - protein, 9 aa, synthetic construct
  source 1..9: note = Seed: VVGAVGVGK (KRAS G12V)
YVGMVQVGK

SEQ ID NO: 76431 - protein, 9 aa, synthetic construct
  source 1..9: note = Seed: VVGAVGVGK (KRAS G12V)
YVGMVQVGL

SEQ ID NO: 76432 - protein, 9 aa, synthetic construct
  source 1..9: note = Seed: VVGAVGVGK (KRAS G12V)
YVGMVQVGM

SEQ ID NO: 76433 - protein, 9 aa, synthetic construct
  source 1..9: note = Seed: VVGAVGVGK (KRAS G12V)
YVGMVQVGN

SEQ ID NO: 76434 - protein, 9 aa, synthetic construct
  source 1..9: note = Seed: VVGAVGVGK (KRAS G12V)
YVGMVQVGR

SEQ ID NO: 76435 - protein, 9 aa, synthetic construct
  source 1..9: note = Seed: VVGAVGVGK (KRAS G12V)
YVGMVQVGS

SEQ ID NO: 76436 - protein, 9 aa, synthetic construct
  source 1..9: note = Seed: VVGAVGVGK (KRAS G12V)
YVGMVRVGA

SEQ ID NO: 76437 - protein, 9 aa, synthetic construct
  source 1..9: note = Seed: VVGAVGVGK (KRAS G12V)
YVGMVRVGD

SEQ ID NO: 76438 - protein, 9 aa, synthetic construct
  source 1..9: note = Seed: VVGAVGVGK (KRAS G12V)
YVGMVRVGE

SEQ ID NO: 76439 - protein, 9 aa, synthetic construct
  source 1..9: note = Seed: VVGAVGVGK (KRAS G12V)
YVGMVRVGG

SEQ ID NO: 76440 - protein, 9 aa, synthetic construct
  source 1..9: note = Seed: VVGAVGVGK (KRAS G12V)
YVGMVRVGH

SEQ ID NO: 76441 - protein, 9 aa, synthetic construct
  source 1..9: note = Seed: VVGAVGVGK (KRAS G12V)
YVGMVRVGI

SEQ ID NO: 76442 - protein, 9 aa, synthetic construct
  source 1..9: note = Seed: VVGAVGVGK (KRAS G12V)
YVGMVRVGK

SEQ ID NO: 76443 - protein, 9 aa, synthetic construct
  source 1..9: note = Seed: VVGAVGVGK (KRAS G12V)
YVGMVRVGL

SEQ ID NO: 76444 - protein, 9 aa, synthetic construct
  source 1..9: note = Seed: VVGAVGVGK (KRAS G12V)
YVGMVRVGM

SEQ ID NO: 76445 - protein, 9 aa, synthetic construct
  source 1..9: note = Seed: VVGAVGVGK (KRAS G12V)
YVGMVRVGN

SEQ ID NO: 76446 - protein, 9 aa, synthetic construct
  source 1..9: note = Seed: VVGAVGVGK (KRAS G12V)
YVGMVRVGP

SEQ ID NO: 76447 - protein, 9 aa, synthetic construct
  source 1..9: note = Seed: VVGAVGVGK (KRAS G12V)
YVGMVRVGQ

SEQ ID NO: 76448 - protein, 9 aa, synthetic construct
  source 1..9: note = Seed: VVGAVGVGK (KRAS G12V)
YVGMVRVGR

SEQ ID NO: 76449 - protein, 9 aa, synthetic construct
  source 1..9: note = Seed: VVGAVGVGK (KRAS G12V)
YVGMVRVGS

SEQ ID NO: 76450 - protein, 9 aa, synthetic construct
  source 1..9: note = Seed: VVGAVGVGK (KRAS G12V)
YVGMVRVGT

SEQ ID NO: 76451 - protein, 9 aa, synthetic construct
  source 1..9: note = Seed: VVGAVGVGK (KRAS G12V)
YVGMVRVGV

SEQ ID NO: 76452 - protein, 9 aa, synthetic construct
  source 1..9: note = Seed: VVGAVGVGK (KRAS G12V)
YVGMVRVGY

SEQ ID NO: 76453 - protein, 9 aa, synthetic construct
  source 1..9: note = Seed: VVGAVGVGK (KRAS G12V)
YVGMVSVGA

SEQ ID NO: 76454 - protein, 9 aa, synthetic construct
  source 1..9: note = Seed: VVGAVGVGK (KRAS G12V)
YVGMVSVGG

SEQ ID NO: 76455 - protein, 9 aa, synthetic construct
  source 1..9: note = Seed: VVGAVGVGK (KRAS G12V)
YVGMVSVGH

SEQ ID NO: 76456 - protein, 9 aa, synthetic construct
  source 1..9: note = Seed: VVGAVGVGK (KRAS G12V)
YVGMVSVGI

SEQ ID NO: 76457 - protein, 9 aa, synthetic construct
  source 1..9: note = Seed: VVGAVGVGK (KRAS G12V)
YVGMVSVGK

SEQ ID NO: 76458 - protein, 9 aa, synthetic construct
  source 1..9: note = Seed: VVGAVGVGK (KRAS G12V)
YVGMVSVGL

SEQ ID NO: 76459 - protein, 9 aa, synthetic construct
  source 1..9: note = Seed: VVGAVGVGK (KRAS G12V)
YVGMVSVGM

SEQ ID NO: 76460 - protein, 9 aa, synthetic construct
  source 1..9: note = Seed: VVGAVGVGK (KRAS G12V)
YVGMVSVGN

SEQ ID NO: 76461 - protein, 9 aa, synthetic construct
  source 1..9: note = Seed: VVGAVGVGK (KRAS G12V)
YVGMVSVGP

SEQ ID NO: 76462 - protein, 9 aa, synthetic construct
  source 1..9: note = Seed: VVGAVGVGK (KRAS G12V)
YVGMVSVGQ

SEQ ID NO: 76463 - protein, 9 aa, synthetic construct
  source 1..9: note = Seed: VVGAVGVGK (KRAS G12V)
YVGMVSVGR

SEQ ID NO: 76464 - protein, 9 aa, synthetic construct
  source 1..9: note = Seed: VVGAVGVGK (KRAS G12V)
YVGMVSVGS

SEQ ID NO: 76465 - protein, 9 aa, synthetic construct
  source 1..9: note = Seed: VVGAVGVGK (KRAS G12V)
YVGMVSVGT

SEQ ID NO: 76466 - protein, 9 aa, synthetic construct
  source 1..9: note = Seed: VVGAVGVGK (KRAS G12V)
YVGMVSVGV

SEQ ID NO: 76467 - protein, 9 aa, synthetic construct
  source 1..9: note = Seed: VVGAVGVGK (KRAS G12V)
YVGMVSVGY

SEQ ID NO: 76468 - protein, 9 aa, synthetic construct
  source 1..9: note = Seed: VVGAVGVGK (KRAS G12V)
YVGMVTVGA

SEQ ID NO: 76469 - protein, 9 aa, synthetic construct
  source 1..9: note = Seed: VVGAVGVGK (KRAS G12V)
YVGMVTVGG

SEQ ID NO: 76470 - protein, 9 aa, synthetic construct
  source 1..9: note = Seed: VVGAVGVGK (KRAS G12V)
YVGMVTVGH

SEQ ID NO: 76471 - protein, 9 aa, synthetic construct
  source 1..9: note = Seed: VVGAVGVGK (KRAS G12V)
YVGMVTVGI

SEQ ID NO: 76472 - protein, 9 aa, synthetic construct
  source 1..9: note = Seed: VVGAVGVGK (KRAS G12V)
YVGMVTVGK

SEQ ID NO: 76473 - protein, 9 aa, synthetic construct
  source 1..9: note = Seed: VVGAVGVGK (KRAS G12V)
YVGMVTVGL

SEQ ID NO: 76474 - protein, 9 aa, synthetic construct
  source 1..9: note = Seed: VVGAVGVGK (KRAS G12V)
YVGMVTVGM

SEQ ID NO: 76475 - protein, 9 aa, synthetic construct
  source 1..9: note = Seed: VVGAVGVGK (KRAS G12V)
YVGMVTVGN

SEQ ID NO: 76476 - protein, 9 aa, synthetic construct
  source 1..9: note = Seed: VVGAVGVGK (KRAS G12V)
YVGMVTVGP

SEQ ID NO: 76477 - protein, 9 aa, synthetic construct
  source 1..9: note = Seed: VVGAVGVGK (KRAS G12V)
YVGMVTVGR

SEQ ID NO: 76478 - protein, 9 aa, synthetic construct
  source 1..9: note = Seed: VVGAVGVGK (KRAS G12V)
YVGMVTVGS

SEQ ID NO: 76479 - protein, 9 aa, synthetic construct
  source 1..9: note = Seed: VVGAVGVGK (KRAS G12V)
YVGMVTVGT

SEQ ID NO: 76480 - protein, 9 aa, synthetic construct
  source 1..9: note = Seed: VVGAVGVGK (KRAS G12V)
YVGMVTVGV

SEQ ID NO: 76481 - protein, 9 aa, synthetic construct
  source 1..9: note = Seed: VVGAVGVGK (KRAS G12V)
YVGMVTVGY

SEQ ID NO: 76482 - protein, 9 aa, synthetic construct
  source 1..9: note = Seed: VVGAVGVGK (KRAS G12V)
YVGMVVVGA

SEQ ID NO: 76483 - protein, 9 aa, synthetic construct
  source 1..9: note = Seed: VVGAVGVGK (KRAS G12V)
YVGMVVVGG

SEQ ID NO: 76484 - protein, 9 aa, synthetic construct
  source 1..9: note = Seed: VVGAVGVGK (KRAS G12V)
YVGMVVVGH

SEQ ID NO: 76485 - protein, 9 aa, synthetic construct
  source 1..9: note = Seed: VVGAVGVGK (KRAS G12V)
YVGMVVVGK

SEQ ID NO: 76486 - protein, 9 aa, synthetic construct
  source 1..9: note = Seed: VVGAVGVGK (KRAS G12V)
YVGMVVVGN

SEQ ID NO: 76487 - protein, 9 aa, synthetic construct
  source 1..9: note = Seed: VVGAVGVGK (KRAS G12V)
YVGMVVVGR

SEQ ID NO: 76488 - protein, 9 aa, synthetic construct
  source 1..9: note = Seed: VVGAVGVGK (KRAS G12V)
YVGMVVVGS

SEQ ID NO: 76489 - protein, 9 aa, synthetic construct
  source 1..9: note = Seed: VVGAVGVGK (KRAS G12V)
YVGNVAVGA

SEQ ID NO: 76490 - protein, 9 aa, synthetic construct
  source 1..9: note = Seed: VVGAVGVGK (KRAS G12V)
YVGNVAVGF

SEQ ID NO: 76491 - protein, 9 aa, synthetic construct
  source 1..9: note = Seed: VVGAVGVGK (KRAS G12V)
YVGNVAVGG

SEQ ID NO: 76492 - protein, 9 aa, synthetic construct
  source 1..9: note = Seed: VVGAVGVGK (KRAS G12V)
YVGNVAVGH

SEQ ID NO: 76493 - protein, 9 aa, synthetic construct
  source 1..9: note = Seed: VVGAVGVGK (KRAS G12V)
YVGNVAVGI

SEQ ID NO: 76494 - protein, 9 aa, synthetic construct
  source 1..9: note = Seed: VVGAVGVGK (KRAS G12V)
YVGNVAVGK

SEQ ID NO: 76495 - protein, 9 aa, synthetic construct
  source 1..9: note = Seed: VVGAVGVGK (KRAS G12V)
YVGNVAVGL

SEQ ID NO: 76496 - protein, 9 aa, synthetic construct
  source 1..9: note = Seed: VVGAVGVGK (KRAS G12V)
YVGNVAVGM

SEQ ID NO: 76497 - protein, 9 aa, synthetic construct
  source 1..9: note = Seed: VVGAVGVGK (KRAS G12V)
YVGNVAVGN

SEQ ID NO: 76498 - protein, 9 aa, synthetic construct
  source 1..9: note = Seed: VVGAVGVGK (KRAS G12V)
YVGNVAVGQ

SEQ ID NO: 76499 - protein, 9 aa, synthetic construct
  source 1..9: note = Seed: VVGAVGVGK (KRAS G12V)
YVGNVAVGR

SEQ ID NO: 76500 - protein, 9 aa, synthetic construct
  source 1..9: note = Seed: VVGAVGVGK (KRAS G12V)
YVGNVAVGS

SEQ ID NO: 76501 - protein, 9 aa, synthetic construct
  source 1..9: note = Seed: VVGAVGVGK (KRAS G12V)
YVGNVAVGT

SEQ ID NO: 76502 - protein, 9 aa, synthetic construct
  source 1..9: note = Seed: VVGAVGVGK (KRAS G12V)
YVGNVAVGV

SEQ ID NO: 76503 - protein, 9 aa, synthetic construct
  source 1..9: note = Seed: VVGAVGVGK (KRAS G12V)
YVGNVAVGY

SEQ ID NO: 76504 - protein, 9 aa, synthetic construct
  source 1..9: note = Seed: VVGAVGVGK (KRAS G12V)
YVGNVGVGA

SEQ ID NO: 76505 - protein, 9 aa, synthetic construct
  source 1..9: note = Seed: VVGAVGVGK (KRAS G12V)
YVGNVGVGI

SEQ ID NO: 76506 - protein, 9 aa, synthetic construct
  source 1..9: note = Seed: VVGAVGVGK (KRAS G12V)
YVGNVGVGL

SEQ ID NO: 76507 - protein, 9 aa, synthetic construct
  source 1..9: note = Seed: VVGAVGVGK (KRAS G12V)
YVGNVGVGM

SEQ ID NO: 76508 - protein, 9 aa, synthetic construct
  source 1..9: note = Seed: VVGAVGVGK (KRAS G12V)
YVGNVGVGS

SEQ ID NO: 76509 - protein, 9 aa, synthetic construct
  source 1..9: note = Seed: VVGAVGVGK (KRAS G12V)
YVGNVGVGT

SEQ ID NO: 76510 - protein, 9 aa, synthetic construct
  source 1..9: note = Seed: VVGAVGVGK (KRAS G12V)
YVGNVGVGV

SEQ ID NO: 76511 - protein, 9 aa, synthetic construct
  source 1..9: note = Seed: VVGAVGVGK (KRAS G12V)
YVGNVKVGA

SEQ ID NO: 76512 - protein, 9 aa, synthetic construct
  source 1..9: note = Seed: VVGAVGVGK (KRAS G12V)
YVGNVKVGR

SEQ ID NO: 76513 - protein, 9 aa, synthetic construct
  source 1..9: note = Seed: VVGAVGVGK (KRAS G12V)
YVGNVKVGS

SEQ ID NO: 76514 - protein, 9 aa, synthetic construct
  source 1..9: note = Seed: VVGAVGVGK (KRAS G12V)
YVGNVLVGA

SEQ ID NO: 76515 - protein, 9 aa, synthetic construct
  source 1..9: note = Seed: VVGAVGVGK (KRAS G12V)
YVGNVMVGA

SEQ ID NO: 76516 - protein, 9 aa, synthetic construct
  source 1..9: note = Seed: VVGAVGVGK (KRAS G12V)
YVGNVNVGA

SEQ ID NO: 76517 - protein, 9 aa, synthetic construct
  source 1..9: note = Seed: VVGAVGVGK (KRAS G12V)
YVGNVNVGI

SEQ ID NO: 76518 - protein, 9 aa, synthetic construct
  source 1..9: note = Seed: VVGAVGVGK (KRAS G12V)
YVGNVNVGL

SEQ ID NO: 76519 - protein, 9 aa, synthetic construct
  source 1..9: note = Seed: VVGAVGVGK (KRAS G12V)
YVGNVNVGM

SEQ ID NO: 76520 - protein, 9 aa, synthetic construct
  source 1..9: note = Seed: VVGAVGVGK (KRAS G12V)
YVGNVNVGV

SEQ ID NO: 76521 - protein, 9 aa, synthetic construct
  source 1..9: note = Seed: VVGAVGVGK (KRAS G12V)
YVGNVPVGA

SEQ ID NO: 76522 - protein, 9 aa, synthetic construct
  source 1..9: note = Seed: VVGAVGVGK (KRAS G12V)
YVGNVPVGF

SEQ ID NO: 76523 - protein, 9 aa, synthetic construct
  source 1..9: note = Seed: VVGAVGVGK (KRAS G12V)
YVGNVPVGG

SEQ ID NO: 76524 - protein, 9 aa, synthetic construct
  source 1..9: note = Seed: VVGAVGVGK (KRAS G12V)
YVGNVPVGH

SEQ ID NO: 76525 - protein, 9 aa, synthetic construct
  source 1..9: note = Seed: VVGAVGVGK (KRAS G12V)
YVGNVPVGI

SEQ ID NO: 76526 - protein, 9 aa, synthetic construct
  source 1..9: note = Seed: VVGAVGVGK (KRAS G12V)
YVGNVPVGL

SEQ ID NO: 76527 - protein, 9 aa, synthetic construct
  source 1..9: note = Seed: VVGAVGVGK (KRAS G12V)
YVGNVPVGM

SEQ ID NO: 76528 - protein, 9 aa, synthetic construct
  source 1..9: note = Seed: VVGAVGVGK (KRAS G12V)
YVGNVPVGN

SEQ ID NO: 76529 - protein, 9 aa, synthetic construct
  source 1..9: note = Seed: VVGAVGVGK (KRAS G12V)
YVGNVPVGQ

SEQ ID NO: 76530 - protein, 9 aa, synthetic construct
  source 1..9: note = Seed: VVGAVGVGK (KRAS G12V)
YVGNVPVGR

SEQ ID NO: 76531 - protein, 9 aa, synthetic construct
  source 1..9: note = Seed: VVGAVGVGK (KRAS G12V)
YVGNVPVGS

SEQ ID NO: 76532 - protein, 9 aa, synthetic construct
  source 1..9: note = Seed: VVGAVGVGK (KRAS G12V)
YVGNVPVGT

SEQ ID NO: 76533 - protein, 9 aa, synthetic construct
  source 1..9: note = Seed: VVGAVGVGK (KRAS G12V)
YVGNVPVGV

SEQ ID NO: 76534 - protein, 9 aa, synthetic construct
  source 1..9: note = Seed: VVGAVGVGK (KRAS G12V)
YVGNVPVGY

SEQ ID NO: 76535 - protein, 9 aa, synthetic construct
  source 1..9: note = Seed: VVGAVGVGK (KRAS G12V)
YVGNVRVGA

SEQ ID NO: 76536 - protein, 9 aa, synthetic construct
  source 1..9: note = Seed: VVGAVGVGK (KRAS G12V)
YVGNVRVGK

SEQ ID NO: 76537 - protein, 9 aa, synthetic construct
  source 1..9: note = Seed: VVGAVGVGK (KRAS G12V)
YVGNVRVGL

SEQ ID NO: 76538 - protein, 9 aa, synthetic construct
  source 1..9: note = Seed: VVGAVGVGK (KRAS G12V)
YVGNVRVGR

SEQ ID NO: 76539 - protein, 9 aa, synthetic construct
  source 1..9: note = Seed: VVGAVGVGK (KRAS G12V)
YVGNVRVGS

SEQ ID NO: 76540 - protein, 9 aa, synthetic construct
  source 1..9: note = Seed: VVGAVGVGK (KRAS G12V)
YVGNVSVGA

SEQ ID NO: 76541 - protein, 9 aa, synthetic construct
  source 1..9: note = Seed: VVGAVGVGK (KRAS G12V)
YVGNVSVGG

SEQ ID NO: 76542 - protein, 9 aa, synthetic construct
  source 1..9: note = Seed: VVGAVGVGK (KRAS G12V)
YVGNVSVGI

SEQ ID NO: 76543 - protein, 9 aa, synthetic construct
  source 1..9: note = Seed: VVGAVGVGK (KRAS G12V)
YVGNVSVGL

SEQ ID NO: 76544 - protein, 9 aa, synthetic construct
  source 1..9: note = Seed: VVGAVGVGK (KRAS G12V)
YVGNVSVGM

SEQ ID NO: 76545 - protein, 9 aa, synthetic construct
  source 1..9: note = Seed: VVGAVGVGK (KRAS G12V)
YVGNVSVGN

SEQ ID NO: 76546 - protein, 9 aa, synthetic construct
  source 1..9: note = Seed: VVGAVGVGK (KRAS G12V)
YVGNVSVGS

SEQ ID NO: 76547 - protein, 9 aa, synthetic construct
  source 1..9: note = Seed: VVGAVGVGK (KRAS G12V)
YVGNVSVGT

SEQ ID NO: 76548 - protein, 9 aa, synthetic construct
  source 1..9: note = Seed: VVGAVGVGK (KRAS G12V)
YVGNVSVGV

SEQ ID NO: 76549 - protein, 9 aa, synthetic construct
  source 1..9: note = Seed: VVGAVGVGK (KRAS G12V)
YVGNVTVGA

SEQ ID NO: 76550 - protein, 9 aa, synthetic construct
  source 1..9: note = Seed: VVGAVGVGK (KRAS G12V)
YVGNVTVGI

SEQ ID NO: 76551 - protein, 9 aa, synthetic construct
  source 1..9: note = Seed: VVGAVGVGK (KRAS G12V)
YVGNVTVGL

SEQ ID NO: 76552 - protein, 9 aa, synthetic construct
  source 1..9: note = Seed: VVGAVGVGK (KRAS G12V)
YVGNVTVGM

SEQ ID NO: 76553 - protein, 9 aa, synthetic construct
  source 1..9: note = Seed: VVGAVGVGK (KRAS G12V)
YVGNVTVGV

SEQ ID NO: 76554 - protein, 9 aa, synthetic construct
  source 1..9: note = Seed: VVGAVGVGK (KRAS G12V)
YVGNVVVGA

SEQ ID NO: 76555 - protein, 9 aa, synthetic construct
  source 1..9: note = Seed: VVGAVGVGK (KRAS G12V)
YVGNVVVGL

SEQ ID NO: 76556 - protein, 9 aa, synthetic construct
  source 1..9: note = Seed: VVGAVGVGK (KRAS G12V)
YVGNVVVGM

SEQ ID NO: 76557 - protein, 9 aa, synthetic construct
  source 1..9: note = Seed: VVGAVGVGK (KRAS G12V)
YVGNVVVGR

SEQ ID NO: 76558 - protein, 9 aa, synthetic construct
  source 1..9: note = Seed: VVGAVGVGK (KRAS G12V)
YVGNVVVGV

SEQ ID NO: 76559 - protein, 9 aa, synthetic construct
  source 1..9: note = Seed: VVGAVGVGK (KRAS G12V)
YVGPVAVGI

SEQ ID NO: 76560 - protein, 9 aa, synthetic construct
  source 1..9: note = Seed: VVGAVGVGK (KRAS G12V)
YVGPVAVGL

SEQ ID NO: 76561 - protein, 9 aa, synthetic construct
  source 1..9: note = Seed: VVGAVGVGK (KRAS G12V)
YVGPVAVGM

SEQ ID NO: 76562 - protein, 9 aa, synthetic construct
  source 1..9: note = Seed: VVGAVGVGK (KRAS G12V)
YVGPVAVGV

SEQ ID NO: 76563 - protein, 9 aa, synthetic construct
  source 1..9: note = Seed: VVGAVGVGK (KRAS G12V)
YVGPVPVGL

SEQ ID NO: 76564 - protein, 9 aa, synthetic construct
  source 1..9: note = Seed: VVGAVGVGK (KRAS G12V)
YVGPVPVGV

SEQ ID NO: 76565 - protein, 9 aa, synthetic construct
  source 1..9: note = Seed: VVGAVGVGK (KRAS G12V)
YVGPVSVGI

SEQ ID NO: 76566 - protein, 9 aa, synthetic construct
  source 1..9: note = Seed: VVGAVGVGK (KRAS G12V)
YVGPVSVGL

SEQ ID NO: 76567 - protein, 9 aa, synthetic construct
  source 1..9: note = Seed: VVGAVGVGK (KRAS G12V)
YVGPVSVGV

SEQ ID NO: 76568 - protein, 9 aa, synthetic construct
  source 1..9: note = Seed: VVGAVGVGK (KRAS G12V)
YVGQVAVGA

SEQ ID NO: 76569 - protein, 9 aa, synthetic construct
  source 1..9: note = Seed: VVGAVGVGK (KRAS G12V)
YVGQVAVGF

SEQ ID NO: 76570 - protein, 9 aa, synthetic construct
  source 1..9: note = Seed: VVGAVGVGK (KRAS G12V)
YVGQVAVGG

SEQ ID NO: 76571 - protein, 9 aa, synthetic construct
  source 1..9: note = Seed: VVGAVGVGK (KRAS G12V)
YVGQVAVGH

SEQ ID NO: 76572 - protein, 9 aa, synthetic construct
  source 1..9: note = Seed: VVGAVGVGK (KRAS G12V)
YVGQVAVGI

SEQ ID NO: 76573 - protein, 9 aa, synthetic construct
  source 1..9: note = Seed: VVGAVGVGK (KRAS G12V)
YVGQVAVGK

SEQ ID NO: 76574 - protein, 9 aa, synthetic construct
  source 1..9: note = Seed: VVGAVGVGK (KRAS G12V)
YVGQVAVGL

SEQ ID NO: 76575 - protein, 9 aa, synthetic construct
  source 1..9: note = Seed: VVGAVGVGK (KRAS G12V)
YVGQVAVGM

SEQ ID NO: 76576 - protein, 9 aa, synthetic construct
  source 1..9: note = Seed: VVGAVGVGK (KRAS G12V)
YVGQVAVGN

SEQ ID NO: 76577 - protein, 9 aa, synthetic construct
  source 1..9: note = Seed: VVGAVGVGK (KRAS G12V)
YVGQVAVGP

SEQ ID NO: 76578 - protein, 9 aa, synthetic construct
  source 1..9: note = Seed: VVGAVGVGK (KRAS G12V)
YVGQVAVGQ

SEQ ID NO: 76579 - protein, 9 aa, synthetic construct
  source 1..9: note = Seed: VVGAVGVGK (KRAS G12V)
YVGQVAVGR

SEQ ID NO: 76580 - protein, 9 aa, synthetic construct
  source 1..9: note = Seed: VVGAVGVGK (KRAS G12V)
YVGQVAVGS

SEQ ID NO: 76581 - protein, 9 aa, synthetic construct
  source 1..9: note = Seed: VVGAVGVGK (KRAS G12V)
YVGQVAVGT

SEQ ID NO: 76582 - protein, 9 aa, synthetic construct
  source 1..9: note = Seed: VVGAVGVGK (KRAS G12V)
YVGQVAVGV

SEQ ID NO: 76583 - protein, 9 aa, synthetic construct
  source 1..9: note = Seed: VVGAVGVGK (KRAS G12V)
YVGQVAVGY

SEQ ID NO: 76584 - protein, 9 aa, synthetic construct
  source 1..9: note = Seed: VVGAVGVGK (KRAS G12V)
YVGQVGVGA

SEQ ID NO: 76585 - protein, 9 aa, synthetic construct
  source 1..9: note = Seed: VVGAVGVGK (KRAS G12V)
YVGQVGVGF

SEQ ID NO: 76586 - protein, 9 aa, synthetic construct
  source 1..9: note = Seed: VVGAVGVGK (KRAS G12V)
YVGQVGVGG

SEQ ID NO: 76587 - protein, 9 aa, synthetic construct
  source 1..9: note = Seed: VVGAVGVGK (KRAS G12V)
YVGQVGVGH

SEQ ID NO: 76588 - protein, 9 aa, synthetic construct
  source 1..9: note = Seed: VVGAVGVGK (KRAS G12V)
YVGQVGVGI

SEQ ID NO: 76589 - protein, 9 aa, synthetic construct
  source 1..9: note = Seed: VVGAVGVGK (KRAS G12V)
YVGQVGVGK

SEQ ID NO: 76590 - protein, 9 aa, synthetic construct
  source 1..9: note = Seed: VVGAVGVGK (KRAS G12V)
YVGQVGVGL

SEQ ID NO: 76591 - protein, 9 aa, synthetic construct
  source 1..9: note = Seed: VVGAVGVGK (KRAS G12V)
YVGQVGVGM

SEQ ID NO: 76592 - protein, 9 aa, synthetic construct
  source 1..9: note = Seed: VVGAVGVGK (KRAS G12V)
YVGQVGVGN

SEQ ID NO: 76593 - protein, 9 aa, synthetic construct
  source 1..9: note = Seed: VVGAVGVGK (KRAS G12V)
YVGQVGVGP

SEQ ID NO: 76594 - protein, 9 aa, synthetic construct
  source 1..9: note = Seed: VVGAVGVGK (KRAS G12V)
YVGQVGVGQ

SEQ ID NO: 76595 - protein, 9 aa, synthetic construct
  source 1..9: note = Seed: VVGAVGVGK (KRAS G12V)
YVGQVGVGR

SEQ ID NO: 76596 - protein, 9 aa, synthetic construct
  source 1..9: note = Seed: VVGAVGVGK (KRAS G12V)
YVGQVGVGS

SEQ ID NO: 76597 - protein, 9 aa, synthetic construct
  source 1..9: note = Seed: VVGAVGVGK (KRAS G12V)
YVGQVGVGT

SEQ ID NO: 76598 - protein, 9 aa, synthetic construct
  source 1..9: note = Seed: VVGAVGVGK (KRAS G12V)
YVGQVGVGV

SEQ ID NO: 76599 - protein, 9 aa, synthetic construct
  source 1..9: note = Seed: VVGAVGVGK (KRAS G12V)
YVGQVGVGY

SEQ ID NO: 76600 - protein, 9 aa, synthetic construct
  source 1..9: note = Seed: VVGAVGVGK (KRAS G12V)
YVGQVIVGA

SEQ ID NO: 76601 - protein, 9 aa, synthetic construct
  source 1..9: note = Seed: VVGAVGVGK (KRAS G12V)
YVGQVIVGH

SEQ ID NO: 76602 - protein, 9 aa, synthetic construct
  source 1..9: note = Seed: VVGAVGVGK (KRAS G12V)
YVGQVKVGA

SEQ ID NO: 76603 - protein, 9 aa, synthetic construct
  source 1..9: note = Seed: VVGAVGVGK (KRAS G12V)
YVGQVKVGG

SEQ ID NO: 76604 - protein, 9 aa, synthetic construct
  source 1..9: note = Seed: VVGAVGVGK (KRAS G12V)
YVGQVKVGH

SEQ ID NO: 76605 - protein, 9 aa, synthetic construct
  source 1..9: note = Seed: VVGAVGVGK (KRAS G12V)
YVGQVKVGN

SEQ ID NO: 76606 - protein, 9 aa, synthetic construct
  source 1..9: note = Seed: VVGAVGVGK (KRAS G12V)
YVGQVKVGP

SEQ ID NO: 76607 - protein, 9 aa, synthetic construct
  source 1..9: note = Seed: VVGAVGVGK (KRAS G12V)
YVGQVKVGQ

SEQ ID NO: 76608 - protein, 9 aa, synthetic construct
  source 1..9: note = Seed: VVGAVGVGK (KRAS G12V)
YVGQVKVGR

SEQ ID NO: 76609 - protein, 9 aa, synthetic construct
  source 1..9: note = Seed: VVGAVGVGK (KRAS G12V)
YVGQVKVGS

SEQ ID NO: 76610 - protein, 9 aa, synthetic construct
  source 1..9: note = Seed: VVGAVGVGK (KRAS G12V)
YVGQVKVGT

SEQ ID NO: 76611 - protein, 9 aa, synthetic construct
  source 1..9: note = Seed: VVGAVGVGK (KRAS G12V)
YVGQVKVGV

SEQ ID NO: 76612 - protein, 9 aa, synthetic construct
  source 1..9: note = Seed: VVGAVGVGK (KRAS G12V)
YVGQVMVGA

SEQ ID NO: 76613 - protein, 9 aa, synthetic construct
  source 1..9: note = Seed: VVGAVGVGK (KRAS G12V)
YVGQVNVGA

SEQ ID NO: 76614 - protein, 9 aa, synthetic construct
  source 1..9: note = Seed: VVGAVGVGK (KRAS G12V)
YVGQVNVGG

SEQ ID NO: 76615 - protein, 9 aa, synthetic construct
  source 1..9: note = Seed: VVGAVGVGK (KRAS G12V)
YVGQVNVGI

SEQ ID NO: 76616 - protein, 9 aa, synthetic construct
  source 1..9: note = Seed: VVGAVGVGK (KRAS G12V)
YVGQVNVGL

SEQ ID NO: 76617 - protein, 9 aa, synthetic construct
  source 1..9: note = Seed: VVGAVGVGK (KRAS G12V)
YVGQVNVGM

SEQ ID NO: 76618 - protein, 9 aa, synthetic construct
  source 1..9: note = Seed: VVGAVGVGK (KRAS G12V)
YVGQVNVGN

SEQ ID NO: 76619 - protein, 9 aa, synthetic construct
  source 1..9: note = Seed: VVGAVGVGK (KRAS G12V)
YVGQVNVGS

SEQ ID NO: 76620 - protein, 9 aa, synthetic construct
  source 1..9: note = Seed: VVGAVGVGK (KRAS G12V)
YVGQVNVGT

SEQ ID NO: 76621 - protein, 9 aa, synthetic construct
  source 1..9: note = Seed: VVGAVGVGK (KRAS G12V)
YVGQVNVGV

SEQ ID NO: 76622 - protein, 9 aa, synthetic construct
  source 1..9: note = Seed: VVGAVGVGK (KRAS G12V)
YVGQVPVGA

SEQ ID NO: 76623 - protein, 9 aa, synthetic construct
  source 1..9: note = Seed: VVGAVGVGK (KRAS G12V)
YVGQVPVGF

SEQ ID NO: 76624 - protein, 9 aa, synthetic construct
  source 1..9: note = Seed: VVGAVGVGK (KRAS G12V)
YVGQVPVGG

SEQ ID NO: 76625 - protein, 9 aa, synthetic construct
  source 1..9: note = Seed: VVGAVGVGK (KRAS G12V)
YVGQVPVGH

SEQ ID NO: 76626 - protein, 9 aa, synthetic construct
  source 1..9: note = Seed: VVGAVGVGK (KRAS G12V)
YVGQVPVGI

SEQ ID NO: 76627 - protein, 9 aa, synthetic construct
  source 1..9: note = Seed: VVGAVGVGK (KRAS G12V)
YVGQVPVGK

SEQ ID NO: 76628 - protein, 9 aa, synthetic construct
  source 1..9: note = Seed: VVGAVGVGK (KRAS G12V)
YVGQVPVGL

SEQ ID NO: 76629 - protein, 9 aa, synthetic construct
  source 1..9: note = Seed: VVGAVGVGK (KRAS G12V)
YVGQVPVGM

SEQ ID NO: 76630 - protein, 9 aa, synthetic construct
  source 1..9: note = Seed: VVGAVGVGK (KRAS G12V)
YVGQVPVGN

SEQ ID NO: 76631 - protein, 9 aa, synthetic construct
  source 1..9: note = Seed: VVGAVGVGK (KRAS G12V)
YVGQVPVGP

SEQ ID NO: 76632 - protein, 9 aa, synthetic construct
  source 1..9: note = Seed: VVGAVGVGK (KRAS G12V)
YVGQVPVGQ

SEQ ID NO: 76633 - protein, 9 aa, synthetic construct
  source 1..9: note = Seed: VVGAVGVGK (KRAS G12V)
YVGQVPVGR

SEQ ID NO: 76634 - protein, 9 aa, synthetic construct
  source 1..9: note = Seed: VVGAVGVGK (KRAS G12V)
YVGQVPVGS

SEQ ID NO: 76635 - protein, 9 aa, synthetic construct
  source 1..9: note = Seed: VVGAVGVGK (KRAS G12V)
YVGQVPVGT

SEQ ID NO: 76636 - protein, 9 aa, synthetic construct
  source 1..9: note = Seed: VVGAVGVGK (KRAS G12V)
YVGQVPVGV

SEQ ID NO: 76637 - protein, 9 aa, synthetic construct
  source 1..9: note = Seed: VVGAVGVGK (KRAS G12V)
YVGQVPVGY

SEQ ID NO: 76638 - protein, 9 aa, synthetic construct
  source 1..9: note = Seed: VVGAVGVGK (KRAS G12V)
YVGQVRVGA

SEQ ID NO: 76639 - protein, 9 aa, synthetic construct
  source 1..9: note = Seed: VVGAVGVGK (KRAS G12V)
YVGQVRVGG

SEQ ID NO: 76640 - protein, 9 aa, synthetic construct
  source 1..9: note = Seed: VVGAVGVGK (KRAS G12V)
YVGQVRVGH

SEQ ID NO: 76641 - protein, 9 aa, synthetic construct
  source 1..9: note = Seed: VVGAVGVGK (KRAS G12V)
YVGQVRVGK

SEQ ID NO: 76642 - protein, 9 aa, synthetic construct
  source 1..9: note = Seed: VVGAVGVGK (KRAS G12V)
YVGQVRVGL

SEQ ID NO: 76643 - protein, 9 aa, synthetic construct
  source 1..9: note = Seed: VVGAVGVGK (KRAS G12V)
YVGQVRVGM

SEQ ID NO: 76644 - protein, 9 aa, synthetic construct
  source 1..9: note = Seed: VVGAVGVGK (KRAS G12V)
YVGQVRVGN

SEQ ID NO: 76645 - protein, 9 aa, synthetic construct
  source 1..9: note = Seed: VVGAVGVGK (KRAS G12V)
YVGQVRVGP

SEQ ID NO: 76646 - protein, 9 aa, synthetic construct
  source 1..9: note = Seed: VVGAVGVGK (KRAS G12V)
YVGQVRVGQ

SEQ ID NO: 76647 - protein, 9 aa, synthetic construct
  source 1..9: note = Seed: VVGAVGVGK (KRAS G12V)
YVGQVRVGR

SEQ ID NO: 76648 - protein, 9 aa, synthetic construct
  source 1..9: note = Seed: VVGAVGVGK (KRAS G12V)
YVGQVRVGS

SEQ ID NO: 76649 - protein, 9 aa, synthetic construct
  source 1..9: note = Seed: VVGAVGVGK (KRAS G12V)
YVGQVRVGT

SEQ ID NO: 76650 - protein, 9 aa, synthetic construct
  source 1..9: note = Seed: VVGAVGVGK (KRAS G12V)
YVGQVRVGV

SEQ ID NO: 76651 - protein, 9 aa, synthetic construct
  source 1..9: note = Seed: VVGAVGVGK (KRAS G12V)
YVGQVSVGA

SEQ ID NO: 76652 - protein, 9 aa, synthetic construct
  source 1..9: note = Seed: VVGAVGVGK (KRAS G12V)
YVGQVSVGG

SEQ ID NO: 76653 - protein, 9 aa, synthetic construct
  source 1..9: note = Seed: VVGAVGVGK (KRAS G12V)
YVGQVSVGH

SEQ ID NO: 76654 - protein, 9 aa, synthetic construct
  source 1..9: note = Seed: VVGAVGVGK (KRAS G12V)
YVGQVSVGI

SEQ ID NO: 76655 - protein, 9 aa, synthetic construct
  source 1..9: note = Seed: VVGAVGVGK (KRAS G12V)
YVGQVSVGK

SEQ ID NO: 76656 - protein, 9 aa, synthetic construct
  source 1..9: note = Seed: VVGAVGVGK (KRAS G12V)
YVGQVSVGL

SEQ ID NO: 76657 - protein, 9 aa, synthetic construct
  source 1..9: note = Seed: VVGAVGVGK (KRAS G12V)
YVGQVSVGM

SEQ ID NO: 76658 - protein, 9 aa, synthetic construct
  source 1..9: note = Seed: VVGAVGVGK (KRAS G12V)
YVGQVSVGN

SEQ ID NO: 76659 - protein, 9 aa, synthetic construct
  source 1..9: note = Seed: VVGAVGVGK (KRAS G12V)
YVGQVSVGP

SEQ ID NO: 76660 - protein, 9 aa, synthetic construct
  source 1..9: note = Seed: VVGAVGVGK (KRAS G12V)
YVGQVSVGQ

SEQ ID NO: 76661 - protein, 9 aa, synthetic construct
  source 1..9: note = Seed: VVGAVGVGK (KRAS G12V)
YVGQVSVGR

SEQ ID NO: 76662 - protein, 9 aa, synthetic construct
  source 1..9: note = Seed: VVGAVGVGK (KRAS G12V)
YVGQVSVGS

SEQ ID NO: 76663 - protein, 9 aa, synthetic construct
  source 1..9: note = Seed: VVGAVGVGK (KRAS G12V)
YVGQVSVGT

SEQ ID NO: 76664 - protein, 9 aa, synthetic construct
  source 1..9: note = Seed: VVGAVGVGK (KRAS G12V)
YVGQVSVGV

SEQ ID NO: 76665 - protein, 9 aa, synthetic construct
  source 1..9: note = Seed: VVGAVGVGK (KRAS G12V)
YVGQVSVGY

SEQ ID NO: 76666 - protein, 9 aa, synthetic construct
  source 1..9: note = Seed: VVGAVGVGK (KRAS G12V)
YVGQVTVGA

SEQ ID NO: 76667 - protein, 9 aa, synthetic construct
  source 1..9: note = Seed: VVGAVGVGK (KRAS G12V)
YVGQVTVGG

SEQ ID NO: 76668 - protein, 9 aa, synthetic construct
  source 1..9: note = Seed: VVGAVGVGK (KRAS G12V)
YVGQVTVGH

SEQ ID NO: 76669 - protein, 9 aa, synthetic construct
  source 1..9: note = Seed: VVGAVGVGK (KRAS G12V)
YVGQVTVGI

SEQ ID NO: 76670 - protein, 9 aa, synthetic construct
  source 1..9: note = Seed: VVGAVGVGK (KRAS G12V)
YVGQVTVGL

SEQ ID NO: 76671 - protein, 9 aa, synthetic construct
  source 1..9: note = Seed: VVGAVGVGK (KRAS G12V)
YVGQVTVGM

SEQ ID NO: 76672 - protein, 9 aa, synthetic construct
  source 1..9: note = Seed: VVGAVGVGK (KRAS G12V)
YVGQVTVGN

SEQ ID NO: 76673 - protein, 9 aa, synthetic construct
  source 1..9: note = Seed: VVGAVGVGK (KRAS G12V)
YVGQVTVGR

SEQ ID NO: 76674 - protein, 9 aa, synthetic construct
  source 1..9: note = Seed: VVGAVGVGK (KRAS G12V)
YVGQVTVGS

SEQ ID NO: 76675 - protein, 9 aa, synthetic construct
  source 1..9: note = Seed: VVGAVGVGK (KRAS G12V)
YVGQVTVGT

SEQ ID NO: 76676 - protein, 9 aa, synthetic construct
  source 1..9: note = Seed: VVGAVGVGK (KRAS G12V)
YVGQVTVGV

SEQ ID NO: 76677 - protein, 9 aa, synthetic construct
  source 1..9: note = Seed: VVGAVGVGK (KRAS G12V)
YVGQVVVGA

SEQ ID NO: 76678 - protein, 9 aa, synthetic construct
  source 1..9: note = Seed: VVGAVGVGK (KRAS G12V)
YVGQVVVGH

SEQ ID NO: 76679 - protein, 9 aa, synthetic construct
  source 1..9: note = Seed: VVGAVGVGK (KRAS G12V)
YVGQVVVGN

SEQ ID NO: 76680 - protein, 9 aa, synthetic construct
  source 1..9: note = Seed: VVGAVGVGK (KRAS G12V)
YVGQVVVGR

SEQ ID NO: 76681 - protein, 9 aa, synthetic construct
  source 1..9: note = Seed: VVGAVGVGK (KRAS G12V)
YVGQVVVGS

SEQ ID NO: 76682 - protein, 9 aa, synthetic construct
  source 1..9: note = Seed: VVGAVGVGK (KRAS G12V)
YVGQVVVGT

SEQ ID NO: 76683 - protein, 9 aa, synthetic construct
  source 1..9: note = Seed: VVGAVGVGK (KRAS G12V)
YVGRVAVGA

SEQ ID NO: 76684 - protein, 9 aa, synthetic construct
  source 1..9: note = Seed: VVGAVGVGK (KRAS G12V)
YVGRVAVGI

SEQ ID NO: 76685 - protein, 9 aa, synthetic construct
  source 1..9: note = Seed: VVGAVGVGK (KRAS G12V)
YVGRVAVGL

SEQ ID NO: 76686 - protein, 9 aa, synthetic construct
  source 1..9: note = Seed: VVGAVGVGK (KRAS G12V)
YVGRVAVGM

SEQ ID NO: 76687 - protein, 9 aa, synthetic construct
  source 1..9: note = Seed: VVGAVGVGK (KRAS G12V)
YVGRVAVGR

SEQ ID NO: 76688 - protein, 9 aa, synthetic construct
  source 1..9: note = Seed: VVGAVGVGK (KRAS G12V)
YVGRVAVGV

SEQ ID NO: 76689 - protein, 9 aa, synthetic construct
  source 1..9: note = Seed: VVGAVGVGK (KRAS G12V)
YVGRVGVGL

SEQ ID NO: 76690 - protein, 9 aa, synthetic construct
  source 1..9: note = Seed: VVGAVGVGK (KRAS G12V)
YVGRVKVGA

SEQ ID NO: 76691 - protein, 9 aa, synthetic construct
  source 1..9: note = Seed: VVGAVGVGK (KRAS G12V)
YVGRVKVGG

SEQ ID NO: 76692 - protein, 9 aa, synthetic construct
  source 1..9: note = Seed: VVGAVGVGK (KRAS G12V)
YVGRVKVGH

SEQ ID NO: 76693 - protein, 9 aa, synthetic construct
  source 1..9: note = Seed: VVGAVGVGK (KRAS G12V)
YVGRVKVGK

SEQ ID NO: 76694 - protein, 9 aa, synthetic construct
  source 1..9: note = Seed: VVGAVGVGK (KRAS G12V)
YVGRVKVGQ

SEQ ID NO: 76695 - protein, 9 aa, synthetic construct
  source 1..9: note = Seed: VVGAVGVGK (KRAS G12V)
YVGRVKVGR

SEQ ID NO: 76696 - protein, 9 aa, synthetic construct
  source 1..9: note = Seed: VVGAVGVGK (KRAS G12V)
YVGRVKVGS

SEQ ID NO: 76697 - protein, 9 aa, synthetic construct
  source 1..9: note = Seed: VVGAVGVGK (KRAS G12V)
YVGRVKVGY

SEQ ID NO: 76698 - protein, 9 aa, synthetic construct
  source 1..9: note = Seed: VVGAVGVGK (KRAS G12V)
YVGRVRVGA

SEQ ID NO: 76699 - protein, 9 aa, synthetic construct
  source 1..9: note = Seed: VVGAVGVGK (KRAS G12V)
YVGRVRVGG

SEQ ID NO: 76700 - protein, 9 aa, synthetic construct
  source 1..9: note = Seed: VVGAVGVGK (KRAS G12V)
YVGRVRVGH

SEQ ID NO: 76701 - protein, 9 aa, synthetic construct
  source 1..9: note = Seed: VVGAVGVGK (KRAS G12V)
YVGRVRVGL

SEQ ID NO: 76702 - protein, 9 aa, synthetic construct
  source 1..9: note = Seed: VVGAVGVGK (KRAS G12V)
YVGRVRVGM

SEQ ID NO: 76703 - protein, 9 aa, synthetic construct
  source 1..9: note = Seed: VVGAVGVGK (KRAS G12V)
YVGRVRVGN

SEQ ID NO: 76704 - protein, 9 aa, synthetic construct
  source 1..9: note = Seed: VVGAVGVGK (KRAS G12V)
YVGRVRVGP

SEQ ID NO: 76705 - protein, 9 aa, synthetic construct
  source 1..9: note = Seed: VVGAVGVGK (KRAS G12V)
YVGRVRVGQ

SEQ ID NO: 76706 - protein, 9 aa, synthetic construct
  source 1..9: note = Seed: VVGAVGVGK (KRAS G12V)
YVGRVRVGR

SEQ ID NO: 76707 - protein, 9 aa, synthetic construct
  source 1..9: note = Seed: VVGAVGVGK (KRAS G12V)
YVGRVRVGS

SEQ ID NO: 76708 - protein, 9 aa, synthetic construct
  source 1..9: note = Seed: VVGAVGVGK (KRAS G12V)
YVGRVRVGT

SEQ ID NO: 76709 - protein, 9 aa, synthetic construct
  source 1..9: note = Seed: VVGAVGVGK (KRAS G12V)
YVGRVRVGV

SEQ ID NO: 76710 - protein, 9 aa, synthetic construct
  source 1..9: note = Seed: VVGAVGVGK (KRAS G12V)
YVGRVRVGY

SEQ ID NO: 76711 - protein, 9 aa, synthetic construct
  source 1..9: note = Seed: VVGAVGVGK (KRAS G12V)
YVGRVSVGI

SEQ ID NO: 76712 - protein, 9 aa, synthetic construct
  source 1..9: note = Seed: VVGAVGVGK (KRAS G12V)
YVGRVSVGL

SEQ ID NO: 76713 - protein, 9 aa, synthetic construct
  source 1..9: note = Seed: VVGAVGVGK (KRAS G12V)
YVGRVSVGM

SEQ ID NO: 76714 - protein, 9 aa, synthetic construct
  source 1..9: note = Seed: VVGAVGVGK (KRAS G12V)
YVGRVSVGV

SEQ ID NO: 76715 - protein, 9 aa, synthetic construct
  source 1..9: note = Seed: VVGAVGVGK (KRAS G12V)
YVGSVAVGA

SEQ ID NO: 76716 - protein, 9 aa, synthetic construct
  source 1..9: note = Seed: VVGAVGVGK (KRAS G12V)
YVGSVAVGF

SEQ ID NO: 76717 - protein, 9 aa, synthetic construct
  source 1..9: note = Seed: VVGAVGVGK (KRAS G12V)
YVGSVAVGG

SEQ ID NO: 76718 - protein, 9 aa, synthetic construct
  source 1..9: note = Seed: VVGAVGVGK (KRAS G12V)
YVGSVAVGH

SEQ ID NO: 76719 - protein, 9 aa, synthetic construct
  source 1..9: note = Seed: VVGAVGVGK (KRAS G12V)
YVGSVAVGI

SEQ ID NO: 76720 - protein, 9 aa, synthetic construct
  source 1..9: note = Seed: VVGAVGVGK (KRAS G12V)
YVGSVAVGK

SEQ ID NO: 76721 - protein, 9 aa, synthetic construct
  source 1..9: note = Seed: VVGAVGVGK (KRAS G12V)
YVGSVAVGL

SEQ ID NO: 76722 - protein, 9 aa, synthetic construct
  source 1..9: note = Seed: VVGAVGVGK (KRAS G12V)
YVGSVAVGM

SEQ ID NO: 76723 - protein, 9 aa, synthetic construct
  source 1..9: note = Seed: VVGAVGVGK (KRAS G12V)
YVGSVAVGN

SEQ ID NO: 76724 - protein, 9 aa, synthetic construct
  source 1..9: note = Seed: VVGAVGVGK (KRAS G12V)
YVGSVAVGP

SEQ ID NO: 76725 - protein, 9 aa, synthetic construct
  source 1..9: note = Seed: VVGAVGVGK (KRAS G12V)
YVGSVAVGQ

SEQ ID NO: 76726 - protein, 9 aa, synthetic construct
  source 1..9: note = Seed: VVGAVGVGK (KRAS G12V)
YVGSVAVGR

SEQ ID NO: 76727 - protein, 9 aa, synthetic construct
  source 1..9: note = Seed: VVGAVGVGK (KRAS G12V)
YVGSVAVGS

SEQ ID NO: 76728 - protein, 9 aa, synthetic construct
  source 1..9: note = Seed: VVGAVGVGK (KRAS G12V)
YVGSVAVGT

SEQ ID NO: 76729 - protein, 9 aa, synthetic construct
  source 1..9: note = Seed: VVGAVGVGK (KRAS G12V)
YVGSVAVGV

SEQ ID NO: 76730 - protein, 9 aa, synthetic construct
  source 1..9: note = Seed: VVGAVGVGK (KRAS G12V)
YVGSVAVGY

SEQ ID NO: 76731 - protein, 9 aa, synthetic construct
  source 1..9: note = Seed: VVGAVGVGK (KRAS G12V)
YVGSVGVGA

SEQ ID NO: 76732 - protein, 9 aa, synthetic construct
  source 1..9: note = Seed: VVGAVGVGK (KRAS G12V)
YVGSVGVGF

SEQ ID NO: 76733 - protein, 9 aa, synthetic construct
  source 1..9: note = Seed: VVGAVGVGK (KRAS G12V)
YVGSVGVGG

SEQ ID NO: 76734 - protein, 9 aa, synthetic construct
  source 1..9: note = Seed: VVGAVGVGK (KRAS G12V)
YVGSVGVGH

SEQ ID NO: 76735 - protein, 9 aa, synthetic construct
  source 1..9: note = Seed: VVGAVGVGK (KRAS G12V)
YVGSVGVGI

SEQ ID NO: 76736 - protein, 9 aa, synthetic construct
  source 1..9: note = Seed: VVGAVGVGK (KRAS G12V)
YVGSVGVGK

SEQ ID NO: 76737 - protein, 9 aa, synthetic construct
  source 1..9: note = Seed: VVGAVGVGK (KRAS G12V)
YVGSVGVGL

SEQ ID NO: 76738 - protein, 9 aa, synthetic construct
  source 1..9: note = Seed: VVGAVGVGK (KRAS G12V)
YVGSVGVGM

SEQ ID NO: 76739 - protein, 9 aa, synthetic construct
  source 1..9: note = Seed: VVGAVGVGK (KRAS G12V)
YVGSVGVGN

SEQ ID NO: 76740 - protein, 9 aa, synthetic construct
  source 1..9: note = Seed: VVGAVGVGK (KRAS G12V)
YVGSVGVGR

SEQ ID NO: 76741 - protein, 9 aa, synthetic construct
  source 1..9: note = Seed: VVGAVGVGK (KRAS G12V)
YVGSVGVGS

SEQ ID NO: 76742 - protein, 9 aa, synthetic construct
  source 1..9: note = Seed: VVGAVGVGK (KRAS G12V)
YVGSVGVGT

SEQ ID NO: 76743 - protein, 9 aa, synthetic construct
  source 1..9: note = Seed: VVGAVGVGK (KRAS G12V)
YVGSVGVGV

SEQ ID NO: 76744 - protein, 9 aa, synthetic construct
  source 1..9: note = Seed: VVGAVGVGK (KRAS G12V)
YVGSVGVGY

SEQ ID NO: 76745 - protein, 9 aa, synthetic construct
  source 1..9: note = Seed: VVGAVGVGK (KRAS G12V)
YVGSVHVGA

SEQ ID NO: 76746 - protein, 9 aa, synthetic construct
  source 1..9: note = Seed: VVGAVGVGK (KRAS G12V)
YVGSVHVGI

SEQ ID NO: 76747 - protein, 9 aa, synthetic construct
  source 1..9: note = Seed: VVGAVGVGK (KRAS G12V)
YVGSVHVGL

SEQ ID NO: 76748 - protein, 9 aa, synthetic construct
  source 1..9: note = Seed: VVGAVGVGK (KRAS G12V)
YVGSVHVGM

SEQ ID NO: 76749 - protein, 9 aa, synthetic construct
  source 1..9: note = Seed: VVGAVGVGK (KRAS G12V)
YVGSVHVGR

SEQ ID NO: 76750 - protein, 9 aa, synthetic construct
  source 1..9: note = Seed: VVGAVGVGK (KRAS G12V)
YVGSVHVGS

SEQ ID NO: 76751 - protein, 9 aa, synthetic construct
  source 1..9: note = Seed: VVGAVGVGK (KRAS G12V)
YVGSVHVGV

SEQ ID NO: 76752 - protein, 9 aa, synthetic construct
  source 1..9: note = Seed: VVGAVGVGK (KRAS G12V)
YVGSVKVGA

SEQ ID NO: 76753 - protein, 9 aa, synthetic construct
  source 1..9: note = Seed: VVGAVGVGK (KRAS G12V)
YVGSVKVGG

SEQ ID NO: 76754 - protein, 9 aa, synthetic construct
  source 1..9: note = Seed: VVGAVGVGK (KRAS G12V)
YVGSVKVGH

SEQ ID NO: 76755 - protein, 9 aa, synthetic construct
  source 1..9: note = Seed: VVGAVGVGK (KRAS G12V)
YVGSVKVGI

SEQ ID NO: 76756 - protein, 9 aa, synthetic construct
  source 1..9: note = Seed: VVGAVGVGK (KRAS G12V)
YVGSVKVGK

SEQ ID NO: 76757 - protein, 9 aa, synthetic construct
  source 1..9: note = Seed: VVGAVGVGK (KRAS G12V)
YVGSVKVGL

SEQ ID NO: 76758 - protein, 9 aa, synthetic construct
  source 1..9: note = Seed: VVGAVGVGK (KRAS G12V)
YVGSVKVGM

SEQ ID NO: 76759 - protein, 9 aa, synthetic construct
  source 1..9: note = Seed: VVGAVGVGK (KRAS G12V)
YVGSVKVGN

SEQ ID NO: 76760 - protein, 9 aa, synthetic construct
  source 1..9: note = Seed: VVGAVGVGK (KRAS G12V)
YVGSVKVGQ

SEQ ID NO: 76761 - protein, 9 aa, synthetic construct
  source 1..9: note = Seed: VVGAVGVGK (KRAS G12V)
YVGSVKVGR

SEQ ID NO: 76762 - protein, 9 aa, synthetic construct
  source 1..9: note = Seed: VVGAVGVGK (KRAS G12V)
YVGSVKVGS

SEQ ID NO: 76763 - protein, 9 aa, synthetic construct
  source 1..9: note = Seed: VVGAVGVGK (KRAS G12V)
YVGSVKVGT

SEQ ID NO: 76764 - protein, 9 aa, synthetic construct
  source 1..9: note = Seed: VVGAVGVGK (KRAS G12V)
YVGSVKVGV

SEQ ID NO: 76765 - protein, 9 aa, synthetic construct
  source 1..9: note = Seed: VVGAVGVGK (KRAS G12V)
YVGSVKVGY

SEQ ID NO: 76766 - protein, 9 aa, synthetic construct
  source 1..9: note = Seed: VVGAVGVGK (KRAS G12V)
YVGSVMVGA

SEQ ID NO: 76767 - protein, 9 aa, synthetic construct
  source 1..9: note = Seed: VVGAVGVGK (KRAS G12V)
YVGSVNVGA

SEQ ID NO: 76768 - protein, 9 aa, synthetic construct
  source 1..9: note = Seed: VVGAVGVGK (KRAS G12V)
YVGSVNVGI

SEQ ID NO: 76769 - protein, 9 aa, synthetic construct
  source 1..9: note = Seed: VVGAVGVGK (KRAS G12V)
YVGSVNVGL

SEQ ID NO: 76770 - protein, 9 aa, synthetic construct
  source 1..9: note = Seed: VVGAVGVGK (KRAS G12V)
YVGSVNVGM

SEQ ID NO: 76771 - protein, 9 aa, synthetic construct
  source 1..9: note = Seed: VVGAVGVGK (KRAS G12V)
YVGSVNVGN

SEQ ID NO: 76772 - protein, 9 aa, synthetic construct
  source 1..9: note = Seed: VVGAVGVGK (KRAS G12V)
YVGSVNVGR

SEQ ID NO: 76773 - protein, 9 aa, synthetic construct
  source 1..9: note = Seed: VVGAVGVGK (KRAS G12V)
YVGSVNVGS

SEQ ID NO: 76774 - protein, 9 aa, synthetic construct
  source 1..9: note = Seed: VVGAVGVGK (KRAS G12V)
YVGSVNVGT

SEQ ID NO: 76775 - protein, 9 aa, synthetic construct
  source 1..9: note = Seed: VVGAVGVGK (KRAS G12V)
YVGSVNVGV

SEQ ID NO: 76776 - protein, 9 aa, synthetic construct
  source 1..9: note = Seed: VVGAVGVGK (KRAS G12V)
YVGSVPVGA

SEQ ID NO: 76777 - protein, 9 aa, synthetic construct
  source 1..9: note = Seed: VVGAVGVGK (KRAS G12V)
YVGSVPVGC

SEQ ID NO: 76778 - protein, 9 aa, synthetic construct
  source 1..9: note = Seed: VVGAVGVGK (KRAS G12V)
YVGSVPVGF

SEQ ID NO: 76779 - protein, 9 aa, synthetic construct
  source 1..9: note = Seed: VVGAVGVGK (KRAS G12V)
YVGSVPVGG

SEQ ID NO: 76780 - protein, 9 aa, synthetic construct
  source 1..9: note = Seed: VVGAVGVGK (KRAS G12V)
YVGSVPVGH

SEQ ID NO: 76781 - protein, 9 aa, synthetic construct
  source 1..9: note = Seed: VVGAVGVGK (KRAS G12V)
YVGSVPVGI

SEQ ID NO: 76782 - protein, 9 aa, synthetic construct
  source 1..9: note = Seed: VVGAVGVGK (KRAS G12V)
YVGSVPVGK

SEQ ID NO: 76783 - protein, 9 aa, synthetic construct
  source 1..9: note = Seed: VVGAVGVGK (KRAS G12V)
YVGSVPVGL

SEQ ID NO: 76784 - protein, 9 aa, synthetic construct
  source 1..9: note = Seed: VVGAVGVGK (KRAS G12V)
YVGSVPVGM

SEQ ID NO: 76785 - protein, 9 aa, synthetic construct
  source 1..9: note = Seed: VVGAVGVGK (KRAS G12V)
YVGSVPVGN

SEQ ID NO: 76786 - protein, 9 aa, synthetic construct
  source 1..9: note = Seed: VVGAVGVGK (KRAS G12V)
YVGSVPVGP

SEQ ID NO: 76787 - protein, 9 aa, synthetic construct
  source 1..9: note = Seed: VVGAVGVGK (KRAS G12V)
YVGSVPVGQ

SEQ ID NO: 76788 - protein, 9 aa, synthetic construct
  source 1..9: note = Seed: VVGAVGVGK (KRAS G12V)
YVGSVPVGR

SEQ ID NO: 76789 - protein, 9 aa, synthetic construct
  source 1..9: note = Seed: VVGAVGVGK (KRAS G12V)
YVGSVPVGS

SEQ ID NO: 76790 - protein, 9 aa, synthetic construct
  source 1..9: note = Seed: VVGAVGVGK (KRAS G12V)
YVGSVPVGT

SEQ ID NO: 76791 - protein, 9 aa, synthetic construct
  source 1..9: note = Seed: VVGAVGVGK (KRAS G12V)
YVGSVPVGV

SEQ ID NO: 76792 - protein, 9 aa, synthetic construct
  source 1..9: note = Seed: VVGAVGVGK (KRAS G12V)
YVGSVPVGW

SEQ ID NO: 76793 - protein, 9 aa, synthetic construct
  source 1..9: note = Seed: VVGAVGVGK (KRAS G12V)
YVGSVPVGY

SEQ ID NO: 76794 - protein, 9 aa, synthetic construct
  source 1..9: note = Seed: VVGAVGVGK (KRAS G12V)
YVGSVRVGA

SEQ ID NO: 76795 - protein, 9 aa, synthetic construct
  source 1..9: note = Seed: VVGAVGVGK (KRAS G12V)
YVGSVRVGG

SEQ ID NO: 76796 - protein, 9 aa, synthetic construct
  source 1..9: note = Seed: VVGAVGVGK (KRAS G12V)
YVGSVRVGH

SEQ ID NO: 76797 - protein, 9 aa, synthetic construct
  source 1..9: note = Seed: VVGAVGVGK (KRAS G12V)
YVGSVRVGK

SEQ ID NO: 76798 - protein, 9 aa, synthetic construct
  source 1..9: note = Seed: VVGAVGVGK (KRAS G12V)
YVGSVRVGM

SEQ ID NO: 76799 - protein, 9 aa, synthetic construct
  source 1..9: note = Seed: VVGAVGVGK (KRAS G12V)
YVGSVRVGN

SEQ ID NO: 76800 - protein, 9 aa, synthetic construct
  source 1..9: note = Seed: VVGAVGVGK (KRAS G12V)
YVGSVRVGP

SEQ ID NO: 76801 - protein, 9 aa, synthetic construct
  source 1..9: note = Seed: VVGAVGVGK (KRAS G12V)
YVGSVRVGQ

SEQ ID NO: 76802 - protein, 9 aa, synthetic construct
  source 1..9: note = Seed: VVGAVGVGK (KRAS G12V)
YVGSVRVGR

SEQ ID NO: 76803 - protein, 9 aa, synthetic construct
  source 1..9: note = Seed: VVGAVGVGK (KRAS G12V)
YVGSVRVGS

SEQ ID NO: 76804 - protein, 9 aa, synthetic construct
  source 1..9: note = Seed: VVGAVGVGK (KRAS G12V)
YVGSVRVGT

SEQ ID NO: 76805 - protein, 9 aa, synthetic construct
  source 1..9: note = Seed: VVGAVGVGK (KRAS G12V)
YVGSVRVGV

SEQ ID NO: 76806 - protein, 9 aa, synthetic construct
  source 1..9: note = Seed: VVGAVGVGK (KRAS G12V)
YVGSVSVGA

SEQ ID NO: 76807 - protein, 9 aa, synthetic construct
  source 1..9: note = Seed: VVGAVGVGK (KRAS G12V)
YVGSVSVGF

SEQ ID NO: 76808 - protein, 9 aa, synthetic construct
  source 1..9: note = Seed: VVGAVGVGK (KRAS G12V)
YVGSVSVGG

SEQ ID NO: 76809 - protein, 9 aa, synthetic construct
  source 1..9: note = Seed: VVGAVGVGK (KRAS G12V)
YVGSVSVGH

SEQ ID NO: 76810 - protein, 9 aa, synthetic construct
  source 1..9: note = Seed: VVGAVGVGK (KRAS G12V)
YVGSVSVGI

SEQ ID NO: 76811 - protein, 9 aa, synthetic construct
  source 1..9: note = Seed: VVGAVGVGK (KRAS G12V)
YVGSVSVGK

SEQ ID NO: 76812 - protein, 9 aa, synthetic construct
  source 1..9: note = Seed: VVGAVGVGK (KRAS G12V)
YVGSVSVGL

SEQ ID NO: 76813 - protein, 9 aa, synthetic construct
  source 1..9: note = Seed: VVGAVGVGK (KRAS G12V)
YVGSVSVGM

SEQ ID NO: 76814 - protein, 9 aa, synthetic construct
  source 1..9: note = Seed: VVGAVGVGK (KRAS G12V)
YVGSVSVGN

SEQ ID NO: 76815 - protein, 9 aa, synthetic construct
  source 1..9: note = Seed: VVGAVGVGK (KRAS G12V)
YVGSVSVGR

SEQ ID NO: 76816 - protein, 9 aa, synthetic construct
  source 1..9: note = Seed: VVGAVGVGK (KRAS G12V)
YVGSVSVGS

SEQ ID NO: 76817 - protein, 9 aa, synthetic construct
  source 1..9: note = Seed: VVGAVGVGK (KRAS G12V)
YVGSVSVGT

SEQ ID NO: 76818 - protein, 9 aa, synthetic construct
  source 1..9: note = Seed: VVGAVGVGK (KRAS G12V)
YVGSVSVGV

SEQ ID NO: 76819 - protein, 9 aa, synthetic construct
  source 1..9: note = Seed: VVGAVGVGK (KRAS G12V)
YVGSVSVGY

SEQ ID NO: 76820 - protein, 9 aa, synthetic construct
  source 1..9: note = Seed: VVGAVGVGK (KRAS G12V)
YVGSVTVGA

SEQ ID NO: 76821 - protein, 9 aa, synthetic construct
  source 1..9: note = Seed: VVGAVGVGK (KRAS G12V)
YVGSVTVGG

SEQ ID NO: 76822 - protein, 9 aa, synthetic construct
  source 1..9: note = Seed: VVGAVGVGK (KRAS G12V)
YVGSVTVGH

SEQ ID NO: 76823 - protein, 9 aa, synthetic construct
  source 1..9: note = Seed: VVGAVGVGK (KRAS G12V)
YVGSVTVGI

SEQ ID NO: 76824 - protein, 9 aa, synthetic construct
  source 1..9: note = Seed: VVGAVGVGK (KRAS G12V)
YVGSVTVGK

SEQ ID NO: 76825 - protein, 9 aa, synthetic construct
  source 1..9: note = Seed: VVGAVGVGK (KRAS G12V)
YVGSVTVGL

SEQ ID NO: 76826 - protein, 9 aa, synthetic construct
  source 1..9: note = Seed: VVGAVGVGK (KRAS G12V)
YVGSVTVGM

SEQ ID NO: 76827 - protein, 9 aa, synthetic construct
  source 1..9: note = Seed: VVGAVGVGK (KRAS G12V)
YVGSVTVGN

SEQ ID NO: 76828 - protein, 9 aa, synthetic construct
  source 1..9: note = Seed: VVGAVGVGK (KRAS G12V)
YVGSVTVGR

SEQ ID NO: 76829 - protein, 9 aa, synthetic construct
  source 1..9: note = Seed: VVGAVGVGK (KRAS G12V)
YVGSVTVGS

SEQ ID NO: 76830 - protein, 9 aa, synthetic construct
  source 1..9: note = Seed: VVGAVGVGK (KRAS G12V)
YVGSVTVGT

SEQ ID NO: 76831 - protein, 9 aa, synthetic construct
  source 1..9: note = Seed: VVGAVGVGK (KRAS G12V)
YVGSVTVGV

SEQ ID NO: 76832 - protein, 9 aa, synthetic construct
  source 1..9: note = Seed: VVGAVGVGK (KRAS G12V)
YVGSVVVGA

SEQ ID NO: 76833 - protein, 9 aa, synthetic construct
  source 1..9: note = Seed: VVGAVGVGK (KRAS G12V)
YVGSVVVGH

SEQ ID NO: 76834 - protein, 9 aa, synthetic construct
  source 1..9: note = Seed: VVGAVGVGK (KRAS G12V)
YVGSVVVGN

SEQ ID NO: 76835 - protein, 9 aa, synthetic construct
  source 1..9: note = Seed: VVGAVGVGK (KRAS G12V)
YVGSVVVGS

SEQ ID NO: 76836 - protein, 9 aa, synthetic construct
  source 1..9: note = Seed: VVGAVGVGK (KRAS G12V)
YVGTVAVGA

SEQ ID NO: 76837 - protein, 9 aa, synthetic construct
  source 1..9: note = Seed: VVGAVGVGK (KRAS G12V)
YVGTVAVGF

SEQ ID NO: 76838 - protein, 9 aa, synthetic construct
  source 1..9: note = Seed: VVGAVGVGK (KRAS G12V)
YVGTVAVGG

SEQ ID NO: 76839 - protein, 9 aa, synthetic construct
  source 1..9: note = Seed: VVGAVGVGK (KRAS G12V)
YVGTVAVGH

SEQ ID NO: 76840 - protein, 9 aa, synthetic construct
  source 1..9: note = Seed: VVGAVGVGK (KRAS G12V)
YVGTVAVGI

SEQ ID NO: 76841 - protein, 9 aa, synthetic construct
  source 1..9: note = Seed: VVGAVGVGK (KRAS G12V)
YVGTVAVGK

SEQ ID NO: 76842 - protein, 9 aa, synthetic construct
  source 1..9: note = Seed: VVGAVGVGK (KRAS G12V)
YVGTVAVGL

SEQ ID NO: 76843 - protein, 9 aa, synthetic construct
  source 1..9: note = Seed: VVGAVGVGK (KRAS G12V)
YVGTVAVGM

SEQ ID NO: 76844 - protein, 9 aa, synthetic construct
  source 1..9: note = Seed: VVGAVGVGK (KRAS G12V)
YVGTVAVGN

SEQ ID NO: 76845 - protein, 9 aa, synthetic construct
  source 1..9: note = Seed: VVGAVGVGK (KRAS G12V)
YVGTVAVGR

SEQ ID NO: 76846 - protein, 9 aa, synthetic construct
  source 1..9: note = Seed: VVGAVGVGK (KRAS G12V)
YVGTVAVGS

SEQ ID NO: 76847 - protein, 9 aa, synthetic construct
  source 1..9: note = Seed: VVGAVGVGK (KRAS G12V)
YVGTVAVGT

SEQ ID NO: 76848 - protein, 9 aa, synthetic construct
  source 1..9: note = Seed: VVGAVGVGK (KRAS G12V)
YVGTVAVGV

SEQ ID NO: 76849 - protein, 9 aa, synthetic construct
  source 1..9: note = Seed: VVGAVGVGK (KRAS G12V)
YVGTVAVGY

SEQ ID NO: 76850 - protein, 9 aa, synthetic construct
  source 1..9: note = Seed: VVGAVGVGK (KRAS G12V)
YVGTVGVGA

SEQ ID NO: 76851 - protein, 9 aa, synthetic construct
  source 1..9: note = Seed: VVGAVGVGK (KRAS G12V)
YVGTVGVGF

SEQ ID NO: 76852 - protein, 9 aa, synthetic construct
  source 1..9: note = Seed: VVGAVGVGK (KRAS G12V)
YVGTVGVGG

SEQ ID NO: 76853 - protein, 9 aa, synthetic construct
  source 1..9: note = Seed: VVGAVGVGK (KRAS G12V)
YVGTVGVGI

SEQ ID NO: 76854 - protein, 9 aa, synthetic construct
  source 1..9: note = Seed: VVGAVGVGK (KRAS G12V)
YVGTVGVGL

SEQ ID NO: 76855 - protein, 9 aa, synthetic construct
  source 1..9: note = Seed: VVGAVGVGK (KRAS G12V)
YVGTVGVGM

SEQ ID NO: 76856 - protein, 9 aa, synthetic construct
  source 1..9: note = Seed: VVGAVGVGK (KRAS G12V)
YVGTVGVGN

SEQ ID NO: 76857 - protein, 9 aa, synthetic construct
  source 1..9: note = Seed: VVGAVGVGK (KRAS G12V)
YVGTVGVGS

SEQ ID NO: 76858 - protein, 9 aa, synthetic construct
  source 1..9: note = Seed: VVGAVGVGK (KRAS G12V)
YVGTVGVGT

SEQ ID NO: 76859 - protein, 9 aa, synthetic construct
  source 1..9: note = Seed: VVGAVGVGK (KRAS G12V)
YVGTVGVGV

SEQ ID NO: 76860 - protein, 9 aa, synthetic construct
  source 1..9: note = Seed: VVGAVGVGK (KRAS G12V)
YVGTVGVGY

SEQ ID NO: 76861 - protein, 9 aa, synthetic construct
  source 1..9: note = Seed: VVGAVGVGK (KRAS G12V)
YVGTVKVGA

SEQ ID NO: 76862 - protein, 9 aa, synthetic construct
  source 1..9: note = Seed: VVGAVGVGK (KRAS G12V)
YVGTVKVGG

SEQ ID NO: 76863 - protein, 9 aa, synthetic construct
  source 1..9: note = Seed: VVGAVGVGK (KRAS G12V)
YVGTVKVGH

SEQ ID NO: 76864 - protein, 9 aa, synthetic construct
  source 1..9: note = Seed: VVGAVGVGK (KRAS G12V)
YVGTVKVGK

SEQ ID NO: 76865 - protein, 9 aa, synthetic construct
  source 1..9: note = Seed: VVGAVGVGK (KRAS G12V)
YVGTVKVGN

SEQ ID NO: 76866 - protein, 9 aa, synthetic construct
  source 1..9: note = Seed: VVGAVGVGK (KRAS G12V)
YVGTVKVGQ

SEQ ID NO: 76867 - protein, 9 aa, synthetic construct
  source 1..9: note = Seed: VVGAVGVGK (KRAS G12V)
YVGTVKVGR

SEQ ID NO: 76868 - protein, 9 aa, synthetic construct
  source 1..9: note = Seed: VVGAVGVGK (KRAS G12V)
YVGTVKVGS

SEQ ID NO: 76869 - protein, 9 aa, synthetic construct
  source 1..9: note = Seed: VVGAVGVGK (KRAS G12V)
YVGTVKVGT

SEQ ID NO: 76870 - protein, 9 aa, synthetic construct
  source 1..9: note = Seed: VVGAVGVGK (KRAS G12V)
YVGTVNVGA

SEQ ID NO: 76871 - protein, 9 aa, synthetic construct
  source 1..9: note = Seed: VVGAVGVGK (KRAS G12V)
YVGTVNVGI

SEQ ID NO: 76872 - protein, 9 aa, synthetic construct
  source 1..9: note = Seed: VVGAVGVGK (KRAS G12V)
YVGTVNVGL

SEQ ID NO: 76873 - protein, 9 aa, synthetic construct
  source 1..9: note = Seed: VVGAVGVGK (KRAS G12V)
YVGTVNVGV

SEQ ID NO: 76874 - protein, 9 aa, synthetic construct
  source 1..9: note = Seed: VVGAVGVGK (KRAS G12V)
YVGTVPVGA

SEQ ID NO: 76875 - protein, 9 aa, synthetic construct
  source 1..9: note = Seed: VVGAVGVGK (KRAS G12V)
YVGTVPVGF

SEQ ID NO: 76876 - protein, 9 aa, synthetic construct
  source 1..9: note = Seed: VVGAVGVGK (KRAS G12V)
YVGTVPVGG

SEQ ID NO: 76877 - protein, 9 aa, synthetic construct
  source 1..9: note = Seed: VVGAVGVGK (KRAS G12V)
YVGTVPVGH

SEQ ID NO: 76878 - protein, 9 aa, synthetic construct
  source 1..9: note = Seed: VVGAVGVGK (KRAS G12V)
YVGTVPVGI

SEQ ID NO: 76879 - protein, 9 aa, synthetic construct
  source 1..9: note = Seed: VVGAVGVGK (KRAS G12V)
YVGTVPVGK

SEQ ID NO: 76880 - protein, 9 aa, synthetic construct
  source 1..9: note = Seed: VVGAVGVGK (KRAS G12V)
YVGTVPVGL

SEQ ID NO: 76881 - protein, 9 aa, synthetic construct
  source 1..9: note = Seed: VVGAVGVGK (KRAS G12V)
YVGTVPVGM

SEQ ID NO: 76882 - protein, 9 aa, synthetic construct
  source 1..9: note = Seed: VVGAVGVGK (KRAS G12V)
YVGTVPVGN

SEQ ID NO: 76883 - protein, 9 aa, synthetic construct
  source 1..9: note = Seed: VVGAVGVGK (KRAS G12V)
YVGTVPVGR

SEQ ID NO: 76884 - protein, 9 aa, synthetic construct
  source 1..9: note = Seed: VVGAVGVGK (KRAS G12V)
YVGTVPVGS

SEQ ID NO: 76885 - protein, 9 aa, synthetic construct
  source 1..9: note = Seed: VVGAVGVGK (KRAS G12V)
YVGTVPVGT

SEQ ID NO: 76886 - protein, 9 aa, synthetic construct
  source 1..9: note = Seed: VVGAVGVGK (KRAS G12V)
YVGTVPVGV

SEQ ID NO: 76887 - protein, 9 aa, synthetic construct
  source 1..9: note = Seed: VVGAVGVGK (KRAS G12V)
YVGTVPVGY

SEQ ID NO: 76888 - protein, 9 aa, synthetic construct
  source 1..9: note = Seed: VVGAVGVGK (KRAS G12V)
YVGTVRVGA

SEQ ID NO: 76889 - protein, 9 aa, synthetic construct
  source 1..9: note = Seed: VVGAVGVGK (KRAS G12V)
YVGTVRVGG

SEQ ID NO: 76890 - protein, 9 aa, synthetic construct
  source 1..9: note = Seed: VVGAVGVGK (KRAS G12V)
YVGTVRVGH

SEQ ID NO: 76891 - protein, 9 aa, synthetic construct
  source 1..9: note = Seed: VVGAVGVGK (KRAS G12V)
YVGTVRVGK

SEQ ID NO: 76892 - protein, 9 aa, synthetic construct
  source 1..9: note = Seed: VVGAVGVGK (KRAS G12V)
YVGTVRVGM

SEQ ID NO: 76893 - protein, 9 aa, synthetic construct
  source 1..9: note = Seed: VVGAVGVGK (KRAS G12V)
YVGTVRVGN

SEQ ID NO: 76894 - protein, 9 aa, synthetic construct
  source 1..9: note = Seed: VVGAVGVGK (KRAS G12V)
YVGTVRVGP

SEQ ID NO: 76895 - protein, 9 aa, synthetic construct
  source 1..9: note = Seed: VVGAVGVGK (KRAS G12V)
YVGTVRVGQ

SEQ ID NO: 76896 - protein, 9 aa, synthetic construct
  source 1..9: note = Seed: VVGAVGVGK (KRAS G12V)
YVGTVRVGR

SEQ ID NO: 76897 - protein, 9 aa, synthetic construct
  source 1..9: note = Seed: VVGAVGVGK (KRAS G12V)
YVGTVRVGS

SEQ ID NO: 76898 - protein, 9 aa, synthetic construct
  source 1..9: note = Seed: VVGAVGVGK (KRAS G12V)
YVGTVRVGT

SEQ ID NO: 76899 - protein, 9 aa, synthetic construct
  source 1..9: note = Seed: VVGAVGVGK (KRAS G12V)
YVGTVSVGA

SEQ ID NO: 76900 - protein, 9 aa, synthetic construct
  source 1..9: note = Seed: VVGAVGVGK (KRAS G12V)
YVGTVSVGF

SEQ ID NO: 76901 - protein, 9 aa, synthetic construct
  source 1..9: note = Seed: VVGAVGVGK (KRAS G12V)
YVGTVSVGG

SEQ ID NO: 76902 - protein, 9 aa, synthetic construct
  source 1..9: note = Seed: VVGAVGVGK (KRAS G12V)
YVGTVSVGH

SEQ ID NO: 76903 - protein, 9 aa, synthetic construct
  source 1..9: note = Seed: VVGAVGVGK (KRAS G12V)
YVGTVSVGI

SEQ ID NO: 76904 - protein, 9 aa, synthetic construct
  source 1..9: note = Seed: VVGAVGVGK (KRAS G12V)
YVGTVSVGK

SEQ ID NO: 76905 - protein, 9 aa, synthetic construct
  source 1..9: note = Seed: VVGAVGVGK (KRAS G12V)
YVGTVSVGL

SEQ ID NO: 76906 - protein, 9 aa, synthetic construct
  source 1..9: note = Seed: VVGAVGVGK (KRAS G12V)
YVGTVSVGM

SEQ ID NO: 76907 - protein, 9 aa, synthetic construct
  source 1..9: note = Seed: VVGAVGVGK (KRAS G12V)
YVGTVSVGN

SEQ ID NO: 76908 - protein, 9 aa, synthetic construct
  source 1..9: note = Seed: VVGAVGVGK (KRAS G12V)
YVGTVSVGR

SEQ ID NO: 76909 - protein, 9 aa, synthetic construct
  source 1..9: note = Seed: VVGAVGVGK (KRAS G12V)
YVGTVSVGS

SEQ ID NO: 76910 - protein, 9 aa, synthetic construct
  source 1..9: note = Seed: VVGAVGVGK (KRAS G12V)
YVGTVSVGT

SEQ ID NO: 76911 - protein, 9 aa, synthetic construct
  source 1..9: note = Seed: VVGAVGVGK (KRAS G12V)
YVGTVSVGV

SEQ ID NO: 76912 - protein, 9 aa, synthetic construct
  source 1..9: note = Seed: VVGAVGVGK (KRAS G12V)
YVGTVSVGY

SEQ ID NO: 76913 - protein, 9 aa, synthetic construct
  source 1..9: note = Seed: VVGAVGVGK (KRAS G12V)
YVGTVTVGA

SEQ ID NO: 76914 - protein, 9 aa, synthetic construct
  source 1..9: note = Seed: VVGAVGVGK (KRAS G12V)
YVGTVTVGI

SEQ ID NO: 76915 - protein, 9 aa, synthetic construct
  source 1..9: note = Seed: VVGAVGVGK (KRAS G12V)
YVGTVTVGL

SEQ ID NO: 76916 - protein, 9 aa, synthetic construct
  source 1..9: note = Seed: VVGAVGVGK (KRAS G12V)
YVGTVTVGV

SEQ ID NO: 76917 - protein, 9 aa, synthetic construct
  source 1..9: note = Seed: VVGAVGVGK (KRAS G12V)
YVGVVAVGA

SEQ ID NO: 76918 - protein, 9 aa, synthetic construct
  source 1..9: note = Seed: VVGAVGVGK (KRAS G12V)
YVGVVAVGG

SEQ ID NO: 76919 - protein, 9 aa, synthetic construct
  source 1..9: note = Seed: VVGAVGVGK (KRAS G12V)
YVGVVAVGH

SEQ ID NO: 76920 - protein, 9 aa, synthetic construct
  source 1..9: note = Seed: VVGAVGVGK (KRAS G12V)
YVGVVAVGI

SEQ ID NO: 76921 - protein, 9 aa, synthetic construct
  source 1..9: note = Seed: VVGAVGVGK (KRAS G12V)
YVGVVAVGK

SEQ ID NO: 76922 - protein, 9 aa, synthetic construct
  source 1..9: note = Seed: VVGAVGVGK (KRAS G12V)
YVGVVAVGL

SEQ ID NO: 76923 - protein, 9 aa, synthetic construct
  source 1..9: note = Seed: VVGAVGVGK (KRAS G12V)
YVGVVAVGM

SEQ ID NO: 76924 - protein, 9 aa, synthetic construct
  source 1..9: note = Seed: VVGAVGVGK (KRAS G12V)
YVGVVAVGN

SEQ ID NO: 76925 - protein, 9 aa, synthetic construct
  source 1..9: note = Seed: VVGAVGVGK (KRAS G12V)
YVGVVAVGR

SEQ ID NO: 76926 - protein, 9 aa, synthetic construct
  source 1..9: note = Seed: VVGAVGVGK (KRAS G12V)
YVGVVAVGS

SEQ ID NO: 76927 - protein, 9 aa, synthetic construct
  source 1..9: note = Seed: VVGAVGVGK (KRAS G12V)
YVGVVAVGT

SEQ ID NO: 76928 - protein, 9 aa, synthetic construct
  source 1..9: note = Seed: VVGAVGVGK (KRAS G12V)
YVGVVAVGV

SEQ ID NO: 76929 - protein, 9 aa, synthetic construct
  source 1..9: note = Seed: VVGAVGVGK (KRAS G12V)
YVGVVGVGA

SEQ ID NO: 76930 - protein, 9 aa, synthetic construct
  source 1..9: note = Seed: VVGAVGVGK (KRAS G12V)
YVGVVGVGG

SEQ ID NO: 76931 - protein, 9 aa, synthetic construct
  source 1..9: note = Seed: VVGAVGVGK (KRAS G12V)
YVGVVGVGH

SEQ ID NO: 76932 - protein, 9 aa, synthetic construct
  source 1..9: note = Seed: VVGAVGVGK (KRAS G12V)
YVGVVGVGI

SEQ ID NO: 76933 - protein, 9 aa, synthetic construct
  source 1..9: note = Seed: VVGAVGVGK (KRAS G12V)
YVGVVGVGK

SEQ ID NO: 76934 - protein, 9 aa, synthetic construct
  source 1..9: note = Seed: VVGAVGVGK (KRAS G12V)
YVGVVGVGL

SEQ ID NO: 76935 - protein, 9 aa, synthetic construct
  source 1..9: note = Seed: VVGAVGVGK (KRAS G12V)
YVGVVGVGM

SEQ ID NO: 76936 - protein, 9 aa, synthetic construct
  source 1..9: note = Seed: VVGAVGVGK (KRAS G12V)
YVGVVGVGN

SEQ ID NO: 76937 - protein, 9 aa, synthetic construct
  source 1..9: note = Seed: VVGAVGVGK (KRAS G12V)
YVGVVGVGR

SEQ ID NO: 76938 - protein, 9 aa, synthetic construct
  source 1..9: note = Seed: VVGAVGVGK (KRAS G12V)
YVGVVGVGS

SEQ ID NO: 76939 - protein, 9 aa, synthetic construct
  source 1..9: note = Seed: VVGAVGVGK (KRAS G12V)
YVGVVGVGT

SEQ ID NO: 76940 - protein, 9 aa, synthetic construct
  source 1..9: note = Seed: VVGAVGVGK (KRAS G12V)
YVGVVGVGV

SEQ ID NO: 76941 - protein, 9 aa, synthetic construct
  source 1..9: note = Seed: VVGAVGVGK (KRAS G12V)
YVGVVHVGH

SEQ ID NO: 76942 - protein, 9 aa, synthetic construct
  source 1..9: note = Seed: VVGAVGVGK (KRAS G12V)
YVGVVKVGA

SEQ ID NO: 76943 - protein, 9 aa, synthetic construct
  source 1..9: note = Seed: VVGAVGVGK (KRAS G12V)
YVGVVKVGG

SEQ ID NO: 76944 - protein, 9 aa, synthetic construct
  source 1..9: note = Seed: VVGAVGVGK (KRAS G12V)
YVGVVKVGH

SEQ ID NO: 76945 - protein, 9 aa, synthetic construct
  source 1..9: note = Seed: VVGAVGVGK (KRAS G12V)
YVGVVKVGK

SEQ ID NO: 76946 - protein, 9 aa, synthetic construct
  source 1..9: note = Seed: VVGAVGVGK (KRAS G12V)
YVGVVKVGM

SEQ ID NO: 76947 - protein, 9 aa, synthetic construct
  source 1..9: note = Seed: VVGAVGVGK (KRAS G12V)
YVGVVKVGN

SEQ ID NO: 76948 - protein, 9 aa, synthetic construct
  source 1..9: note = Seed: VVGAVGVGK (KRAS G12V)
YVGVVKVGP

SEQ ID NO: 76949 - protein, 9 aa, synthetic construct
  source 1..9: note = Seed: VVGAVGVGK (KRAS G12V)
YVGVVKVGQ

SEQ ID NO: 76950 - protein, 9 aa, synthetic construct
  source 1..9: note = Seed: VVGAVGVGK (KRAS G12V)
YVGVVKVGR

SEQ ID NO: 76951 - protein, 9 aa, synthetic construct
  source 1..9: note = Seed: VVGAVGVGK (KRAS G12V)
YVGVVKVGS

SEQ ID NO: 76952 - protein, 9 aa, synthetic construct
  source 1..9: note = Seed: VVGAVGVGK (KRAS G12V)
YVGVVKVGT

SEQ ID NO: 76953 - protein, 9 aa, synthetic construct
  source 1..9: note = Seed: VVGAVGVGK (KRAS G12V)
YVGVVNVGA

SEQ ID NO: 76954 - protein, 9 aa, synthetic construct
  source 1..9: note = Seed: VVGAVGVGK (KRAS G12V)
YVGVVNVGG

SEQ ID NO: 76955 - protein, 9 aa, synthetic construct
  source 1..9: note = Seed: VVGAVGVGK (KRAS G12V)
YVGVVNVGL

SEQ ID NO: 76956 - protein, 9 aa, synthetic construct
  source 1..9: note = Seed: VVGAVGVGK (KRAS G12V)
YVGVVNVGS

SEQ ID NO: 76957 - protein, 9 aa, synthetic construct
  source 1..9: note = Seed: VVGAVGVGK (KRAS G12V)
YVGVVNVGV

SEQ ID NO: 76958 - protein, 9 aa, synthetic construct
  source 1..9: note = Seed: VVGAVGVGK (KRAS G12V)
YVGVVPVGA

SEQ ID NO: 76959 - protein, 9 aa, synthetic construct
  source 1..9: note = Seed: VVGAVGVGK (KRAS G12V)
YVGVVPVGG

SEQ ID NO: 76960 - protein, 9 aa, synthetic construct
  source 1..9: note = Seed: VVGAVGVGK (KRAS G12V)
YVGVVPVGH

SEQ ID NO: 76961 - protein, 9 aa, synthetic construct
  source 1..9: note = Seed: VVGAVGVGK (KRAS G12V)
YVGVVPVGI

SEQ ID NO: 76962 - protein, 9 aa, synthetic construct
  source 1..9: note = Seed: VVGAVGVGK (KRAS G12V)
YVGVVPVGK

SEQ ID NO: 76963 - protein, 9 aa, synthetic construct
  source 1..9: note = Seed: VVGAVGVGK (KRAS G12V)
YVGVVPVGL

SEQ ID NO: 76964 - protein, 9 aa, synthetic construct
  source 1..9: note = Seed: VVGAVGVGK (KRAS G12V)
YVGVVPVGM

SEQ ID NO: 76965 - protein, 9 aa, synthetic construct
  source 1..9: note = Seed: VVGAVGVGK (KRAS G12V)
YVGVVPVGN

SEQ ID NO: 76966 - protein, 9 aa, synthetic construct
  source 1..9: note = Seed: VVGAVGVGK (KRAS G12V)
YVGVVPVGP

SEQ ID NO: 76967 - protein, 9 aa, synthetic construct
  source 1..9: note = Seed: VVGAVGVGK (KRAS G12V)
YVGVVPVGQ

SEQ ID NO: 76968 - protein, 9 aa, synthetic construct
  source 1..9: note = Seed: VVGAVGVGK (KRAS G12V)
YVGVVPVGR

SEQ ID NO: 76969 - protein, 9 aa, synthetic construct
  source 1..9: note = Seed: VVGAVGVGK (KRAS G12V)
YVGVVPVGS

SEQ ID NO: 76970 - protein, 9 aa, synthetic construct
  source 1..9: note = Seed: VVGAVGVGK (KRAS G12V)
YVGVVPVGT

SEQ ID NO: 76971 - protein, 9 aa, synthetic construct
  source 1..9: note = Seed: VVGAVGVGK (KRAS G12V)
YVGVVPVGV

SEQ ID NO: 76972 - protein, 9 aa, synthetic construct
  source 1..9: note = Seed: VVGAVGVGK (KRAS G12V)
YVGVVPVGY

SEQ ID NO: 76973 - protein, 9 aa, synthetic construct
  source 1..9: note = Seed: VVGAVGVGK (KRAS G12V)
YVGVVQVGR

SEQ ID NO: 76974 - protein, 9 aa, synthetic construct
  source 1..9: note = Seed: VVGAVGVGK (KRAS G12V)
YVGVVRVGA

SEQ ID NO: 76975 - protein, 9 aa, synthetic construct
  source 1..9: note = Seed: VVGAVGVGK (KRAS G12V)
YVGVVRVGE

SEQ ID NO: 76976 - protein, 9 aa, synthetic construct
  source 1..9: note = Seed: VVGAVGVGK (KRAS G12V)
YVGVVRVGG

SEQ ID NO: 76977 - protein, 9 aa, synthetic construct
  source 1..9: note = Seed: VVGAVGVGK (KRAS G12V)
YVGVVRVGH

SEQ ID NO: 76978 - protein, 9 aa, synthetic construct
  source 1..9: note = Seed: VVGAVGVGK (KRAS G12V)
YVGVVRVGK

SEQ ID NO: 76979 - protein, 9 aa, synthetic construct
  source 1..9: note = Seed: VVGAVGVGK (KRAS G12V)
YVGVVRVGM

SEQ ID NO: 76980 - protein, 9 aa, synthetic construct
  source 1..9: note = Seed: VVGAVGVGK (KRAS G12V)
YVGVVRVGN

SEQ ID NO: 76981 - protein, 9 aa, synthetic construct
  source 1..9: note = Seed: VVGAVGVGK (KRAS G12V)
YVGVVRVGP

SEQ ID NO: 76982 - protein, 9 aa, synthetic construct
  source 1..9: note = Seed: VVGAVGVGK (KRAS G12V)
YVGVVRVGQ

SEQ ID NO: 76983 - protein, 9 aa, synthetic construct
  source 1..9: note = Seed: VVGAVGVGK (KRAS G12V)
YVGVVRVGR

SEQ ID NO: 76984 - protein, 9 aa, synthetic construct
  source 1..9: note = Seed: VVGAVGVGK (KRAS G12V)
YVGVVRVGS

SEQ ID NO: 76985 - protein, 9 aa, synthetic construct
  source 1..9: note = Seed: VVGAVGVGK (KRAS G12V)
YVGVVRVGT

SEQ ID NO: 76986 - protein, 9 aa, synthetic construct
  source 1..9: note = Seed: VVGAVGVGK (KRAS G12V)
YVGVVRVGY

SEQ ID NO: 76987 - protein, 9 aa, synthetic construct
  source 1..9: note = Seed: VVGAVGVGK (KRAS G12V)
YVGVVSVGA

SEQ ID NO: 76988 - protein, 9 aa, synthetic construct
  source 1..9: note = Seed: VVGAVGVGK (KRAS G12V)
YVGVVSVGG

SEQ ID NO: 76989 - protein, 9 aa, synthetic construct
  source 1..9: note = Seed: VVGAVGVGK (KRAS G12V)
YVGVVSVGH

SEQ ID NO: 76990 - protein, 9 aa, synthetic construct
  source 1..9: note = Seed: VVGAVGVGK (KRAS G12V)
YVGVVSVGI

SEQ ID NO: 76991 - protein, 9 aa, synthetic construct
  source 1..9: note = Seed: VVGAVGVGK (KRAS G12V)
YVGVVSVGK

SEQ ID NO: 76992 - protein, 9 aa, synthetic construct
  source 1..9: note = Seed: VVGAVGVGK (KRAS G12V)
YVGVVSVGL

SEQ ID NO: 76993 - protein, 9 aa, synthetic construct
  source 1..9: note = Seed: VVGAVGVGK (KRAS G12V)
YVGVVSVGM

SEQ ID NO: 76994 - protein, 9 aa, synthetic construct
  source 1..9: note = Seed: VVGAVGVGK (KRAS G12V)
YVGVVSVGN

SEQ ID NO: 76995 - protein, 9 aa, synthetic construct
  source 1..9: note = Seed: VVGAVGVGK (KRAS G12V)
YVGVVSVGR

SEQ ID NO: 76996 - protein, 9 aa, synthetic construct
  source 1..9: note = Seed: VVGAVGVGK (KRAS G12V)
YVGVVSVGS

SEQ ID NO: 76997 - protein, 9 aa, synthetic construct
  source 1..9: note = Seed: VVGAVGVGK (KRAS G12V)
YVGVVSVGT

SEQ ID NO: 76998 - protein, 9 aa, synthetic construct
  source 1..9: note = Seed: VVGAVGVGK (KRAS G12V)
YVGVVSVGV

SEQ ID NO: 76999 - protein, 9 aa, synthetic construct
  source 1..9: note = Seed: VVGAVGVGK (KRAS G12V)
YVGVVTVGA

SEQ ID NO: 77000 - protein, 9 aa, synthetic construct
  source 1..9: note = Seed: VVGAVGVGK (KRAS G12V)
YVGVVTVGG

SEQ ID NO: 77001 - protein, 9 aa, synthetic construct
  source 1..9: note = Seed: VVGAVGVGK (KRAS G12V)
YVGVVTVGH

SEQ ID NO: 77002 - protein, 9 aa, synthetic construct
  source 1..9: note = Seed: VVGAVGVGK (KRAS G12V)
YVGVVTVGK

SEQ ID NO: 77003 - protein, 9 aa, synthetic construct
  source 1..9: note = Seed: VVGAVGVGK (KRAS G12V)
YVGVVTVGN

SEQ ID NO: 77004 - protein, 9 aa, synthetic construct
  source 1..9: note = Seed: VVGAVGVGK (KRAS G12V)
YVGVVTVGR

SEQ ID NO: 77005 - protein, 9 aa, synthetic construct
  source 1..9: note = Seed: VVGAVGVGK (KRAS G12V)
YVGVVTVGS

SEQ ID NO: 77006 - protein, 9 aa, synthetic construct
  source 1..9: note = Seed: VVGAVGVGK (KRAS G12V)
YVGVVTVGT

SEQ ID NO: 77007 - protein, 9 aa, synthetic construct
  source 1..9: note = Seed: VVGAVGVGK (KRAS G12V)
YVGVVVVGR

SEQ ID NO: 77008 - protein, 9 aa, synthetic construct
  source 1..9: note = Seed: VVGAVGVGK (KRAS G12V)
YVGWVAVGI

SEQ ID NO: 77009 - protein, 9 aa, synthetic construct
  source 1..9: note = Seed: VVGAVGVGK (KRAS G12V)
YVGWVAVGL

SEQ ID NO: 77010 - protein, 9 aa, synthetic construct
  source 1..9: note = Seed: VVGAVGVGK (KRAS G12V)
YVGWVAVGM

SEQ ID NO: 77011 - protein, 9 aa, synthetic construct
  source 1..9: note = Seed: VVGAVGVGK (KRAS G12V)
YVGWVAVGR

SEQ ID NO: 77012 - protein, 9 aa, synthetic construct
  source 1..9: note = Seed: VVGAVGVGK (KRAS G12V)
YVGWVAVGV

SEQ ID NO: 77013 - protein, 9 aa, synthetic construct
  source 1..9: note = Seed: VVGAVGVGK (KRAS G12V)
YVGWVKVGK

SEQ ID NO: 77014 - protein, 9 aa, synthetic construct
  source 1..9: note = Seed: VVGAVGVGK (KRAS G12V)
YVGWVKVGR

SEQ ID NO: 77015 - protein, 9 aa, synthetic construct
  source 1..9: note = Seed: VVGAVGVGK (KRAS G12V)
YVGWVPVGI

SEQ ID NO: 77016 - protein, 9 aa, synthetic construct
  source 1..9: note = Seed: VVGAVGVGK (KRAS G12V)
YVGWVPVGL

SEQ ID NO: 77017 - protein, 9 aa, synthetic construct
  source 1..9: note = Seed: VVGAVGVGK (KRAS G12V)
YVGWVPVGM

SEQ ID NO: 77018 - protein, 9 aa, synthetic construct
  source 1..9: note = Seed: VVGAVGVGK (KRAS G12V)
YVGWVPVGR

SEQ ID NO: 77019 - protein, 9 aa, synthetic construct
  source 1..9: note = Seed: VVGAVGVGK (KRAS G12V)
YVGWVPVGV

SEQ ID NO: 77020 - protein, 9 aa, synthetic construct
  source 1..9: note = Seed: VVGAVGVGK (KRAS G12V)
YVGWVRVGH

SEQ ID NO: 77021 - protein, 9 aa, synthetic construct
  source 1..9: note = Seed: VVGAVGVGK (KRAS G12V)
YVGWVRVGK

SEQ ID NO: 77022 - protein, 9 aa, synthetic construct
  source 1..9: note = Seed: VVGAVGVGK (KRAS G12V)
YVGWVRVGM

SEQ ID NO: 77023 - protein, 9 aa, synthetic construct
  source 1..9: note = Seed: VVGAVGVGK (KRAS G12V)
YVGWVRVGR

SEQ ID NO: 77024 - protein, 9 aa, synthetic construct
  source 1..9: note = Seed: VVGAVGVGK (KRAS G12V)
YVGWVSVGA

SEQ ID NO: 77025 - protein, 9 aa, synthetic construct
  source 1..9: note = Seed: VVGAVGVGK (KRAS G12V)
YVGWVSVGK

SEQ ID NO: 77026 - protein, 9 aa, synthetic construct
  source 1..9: note = Seed: VVGAVGVGK (KRAS G12V)
YVGWVSVGR

SEQ ID NO: 77027 - protein, 9 aa, synthetic construct
  source 1..9: note = Seed: VVGAVGVGK (KRAS G12V)
YVGWVSVGV

SEQ ID NO: 77028 - protein, 9 aa, synthetic construct
  source 1..9: note = Seed: VVGAVGVGK (KRAS G12V)
YVGYVAVGI

SEQ ID NO: 77029 - protein, 9 aa, synthetic construct
  source 1..9: note = Seed: VVGAVGVGK (KRAS G12V)
YVGYVAVGK

SEQ ID NO: 77030 - protein, 9 aa, synthetic construct
  source 1..9: note = Seed: VVGAVGVGK (KRAS G12V)
YVGYVAVGL

SEQ ID NO: 77031 - protein, 9 aa, synthetic construct
  source 1..9: note = Seed: VVGAVGVGK (KRAS G12V)
YVGYVAVGR

SEQ ID NO: 77032 - protein, 9 aa, synthetic construct
  source 1..9: note = Seed: VVGAVGVGK (KRAS G12V)
YVGYVGVGV

SEQ ID NO: 77033 - protein, 9 aa, synthetic construct
  source 1..9: note = Seed: VVGAVGVGK (KRAS G12V)
YVGYVKVGR

SEQ ID NO: 77034 - protein, 9 aa, synthetic construct
  source 1..9: note = Seed: VVGAVGVGK (KRAS G12V)
YVGYVPVGL

SEQ ID NO: 77035 - protein, 9 aa, synthetic construct
  source 1..9: note = Seed: VVGAVGVGK (KRAS G12V)
YVGYVPVGM

SEQ ID NO: 77036 - protein, 9 aa, synthetic construct
  source 1..9: note = Seed: VVGAVGVGK (KRAS G12V)
YVGYVRVGK

SEQ ID NO: 77037 - protein, 9 aa, synthetic construct
  source 1..9: note = Seed: VVGAVGVGK (KRAS G12V)
YVGYVRVGR

SEQ ID NO: 77038 - protein, 9 aa, synthetic construct
  source 1..9: note = Seed: VVGAVGVGK (KRAS G12V)
YVGYVSVGK

SEQ ID NO: 77039 - protein, 9 aa, synthetic construct
  source 1..9: note = Seed: VVGAVGVGK (KRAS G12V)
YVGYVSVGR

SEQ ID NO: 77040 - protein, 9 aa, Homo sapiens
  source 1..9: note = Native (KRAS G12V)
AVGVGKSAL

SEQ ID NO: 77041 - protein, 9 aa, Homo sapiens
  source 1..9: note = Native (KRAS G12V)
KLVVVGAVG

SEQ ID NO: 77042 - protein, 9 aa, Homo sapiens
  source 1..9: note = Native (KRAS G12V)
LVVVGAVGV

SEQ ID NO: 77043 - protein, 9 aa, Homo sapiens
  source 1..9: note = Native (KRAS G12V)
VVGAVGVGK

SEQ ID NO: 77044 - protein, 9 aa, synthetic construct
  source 1..9: note = Seed: LVVVGAGDV (KRAS G13D)
FVVLGAGDI

SEQ ID NO: 77045 - protein, 9 aa, synthetic construct
  source 1..9: note = Seed: LVVVGAGDV (KRAS G13D)
FVVLGAGDL

SEQ ID NO: 77046 - protein, 9 aa, synthetic construct
  source 1..9: note = Seed: LVVVGAGDV (KRAS G13D)
FVVLGAGDV

SEQ ID NO: 77047 - protein, 9 aa, synthetic construct
  source 1..9: note = Seed: LVVVGAGDV (KRAS G13D)
FVVLGGGDL

SEQ ID NO: 77048 - protein, 9 aa, synthetic construct
  source 1..9: note = Seed: LVVVGAGDV (KRAS G13D)
FVVLGGGDV

SEQ ID NO: 77049 - protein, 9 aa, synthetic construct
  source 1..9: note = Seed: LVVVGAGDV (KRAS G13D)
FVVLGSGDI

SEQ ID NO: 77050 - protein, 9 aa, synthetic construct
  source 1..9: note = Seed: LVVVGAGDV (KRAS G13D)
FVVLGSGDL

SEQ ID NO: 77051 - protein, 9 aa, synthetic construct
  source 1..9: note = Seed: LVVVGAGDV (KRAS G13D)
FVVLGSGDV

SEQ ID NO: 77052 - protein, 9 aa, synthetic construct
  source 1..9: note = Seed: LVVVGAGDV (KRAS G13D)
FVVMGAGDI

SEQ ID NO: 77053 - protein, 9 aa, synthetic construct
  source 1..9: note = Seed: LVVVGAGDV (KRAS G13D)
FVVMGAGDL

SEQ ID NO: 77054 - protein, 9 aa, synthetic construct
  source 1..9: note = Seed: LVVVGAGDV (KRAS G13D)
FVVMGAGDV

SEQ ID NO: 77055 - protein, 9 aa, synthetic construct
  source 1..9: note = Seed: LVVVGAGDV (KRAS G13D)
FVVMGGGDL

SEQ ID NO: 77056 - protein, 9 aa, synthetic construct
  source 1..9: note = Seed: LVVVGAGDV (KRAS G13D)
FVVMGSGDL

SEQ ID NO: 77057 - protein, 9 aa, synthetic construct
  source 1..9: note = Seed: LVVVGAGDV (KRAS G13D)
FVVMGSGDV

SEQ ID NO: 77058 - protein, 9 aa, synthetic construct
  source 1..9: note = Seed: GDVGKSALT (KRAS G13D)
ADVAKAALA

SEQ ID NO: 77059 - protein, 9 aa, synthetic construct
  source 1..9: note = Seed: GDVGKSALT (KRAS G13D)
ADVAKAALD

SEQ ID NO: 77060 - protein, 9 aa, synthetic construct
  source 1..9: note = Seed: GDVGKSALT (KRAS G13D)
ADVAKAALE

SEQ ID NO: 77061 - protein, 9 aa, synthetic construct
  source 1..9: note = Seed: GDVGKSALT (KRAS G13D)
ADVAKAALF

SEQ ID NO: 77062 - protein, 9 aa, synthetic construct
  source 1..9: note = Seed: GDVGKSALT (KRAS G13D)
ADVAKAALG

SEQ ID NO: 77063 - protein, 9 aa, synthetic construct
  source 1..9: note = Seed: GDVGKSALT (KRAS G13D)
ADVAKAALH

SEQ ID NO: 77064 - protein, 9 aa, synthetic construct
  source 1..9: note = Seed: GDVGKSALT (KRAS G13D)
ADVAKAALI

SEQ ID NO: 77065 - protein, 9 aa, synthetic construct
  source 1..9: note = Seed: GDVGKSALT (KRAS G13D)
ADVAKAALL

SEQ ID NO: 77066 - protein, 9 aa, synthetic construct
  source 1..9: note = Seed: GDVGKSALT (KRAS G13D)
ADVAKAALM

SEQ ID NO: 77067 - protein, 9 aa, synthetic construct
  source 1..9: note = Seed: GDVGKSALT (KRAS G13D)
ADVAKAALN

SEQ ID NO: 77068 - protein, 9 aa, synthetic construct
  source 1..9: note = Seed: GDVGKSALT (KRAS G13D)
ADVAKAALQ

SEQ ID NO: 77069 - protein, 9 aa, synthetic construct
  source 1..9: note = Seed: GDVGKSALT (KRAS G13D)
ADVAKAALS

SEQ ID NO: 77070 - protein, 9 aa, synthetic construct
  source 1..9: note = Seed: GDVGKSALT (KRAS G13D)
ADVAKAALT

SEQ ID NO: 77071 - protein, 9 aa, synthetic construct
  source 1..9: note = Seed: GDVGKSALT (KRAS G13D)
ADVAKAALV

SEQ ID NO: 77072 - protein, 9 aa, synthetic construct
  source 1..9: note = Seed: GDVGKSALT (KRAS G13D)
ADVAKPALA

SEQ ID NO: 77073 - protein, 9 aa, synthetic construct
  source 1..9: note = Seed: GDVGKSALT (KRAS G13D)
ADVAKSALI

SEQ ID NO: 77074 - protein, 9 aa, synthetic construct
  source 1..9: note = Seed: GDVGKSALT (KRAS G13D)
ADVAKSALM

SEQ ID NO: 77075 - protein, 9 aa, synthetic construct
  source 1..9: note = Seed: GDVGKSALT (KRAS G13D)
ADVAKSALN

SEQ ID NO: 77076 - protein, 9 aa, synthetic construct
  source 1..9: note = Seed: GDVGKSALT (KRAS G13D)
ADVAKSALS

SEQ ID NO: 77077 - protein, 9 aa, synthetic construct
  source 1..9: note = Seed: GDVGKSALT (KRAS G13D)
ADVAKSALT

SEQ ID NO: 77078 - protein, 9 aa, synthetic construct
  source 1..9: note = Seed: GDVGKSALT (KRAS G13D)
ADVAKSALV

SEQ ID NO: 77079 - protein, 9 aa, synthetic construct
  source 1..9: note = Seed: GDVGKSALT (KRAS G13D)
ADVAKTALA

SEQ ID NO: 77080 - protein, 9 aa, synthetic construct
  source 1..9: note = Seed: GDVGKSALT (KRAS G13D)
ADVAKTALS

SEQ ID NO: 77081 - protein, 9 aa, synthetic construct
  source 1..9: note = Seed: GDVGKSALT (KRAS G13D)
ADVAKTALT

SEQ ID NO: 77082 - protein, 9 aa, synthetic construct
  source 1..9: note = Seed: GDVGKSALT (KRAS G13D)
ADVAKTALV

SEQ ID NO: 77083 - protein, 9 aa, synthetic construct
  source 1..9: note = Seed: GDVGKSALT (KRAS G13D)
ADVAKVALA

SEQ ID NO: 77084 - protein, 9 aa, synthetic construct
  source 1..9: note = Seed: GDVGKSALT (KRAS G13D)
ADVAKVALS

SEQ ID NO: 77085 - protein, 9 aa, synthetic construct
  source 1..9: note = Seed: GDVGKSALT (KRAS G13D)
ADVGKAALA

SEQ ID NO: 77086 - protein, 9 aa, synthetic construct
  source 1..9: note = Seed: GDVGKSALT (KRAS G13D)
ADVGKAALI

SEQ ID NO: 77087 - protein, 9 aa, synthetic construct
  source 1..9: note = Seed: GDVGKSALT (KRAS G13D)
ADVGKAALS

SEQ ID NO: 77088 - protein, 9 aa, synthetic construct
  source 1..9: note = Seed: GDVGKSALT (KRAS G13D)
ADVGKAALT

SEQ ID NO: 77089 - protein, 9 aa, synthetic construct
  source 1..9: note = Seed: GDVGKSALT (KRAS G13D)
ADVGKAALV

SEQ ID NO: 77090 - protein, 9 aa, synthetic construct
  source 1..9: note = Seed: GDVGKSALT (KRAS G13D)
ADVGKVALA

SEQ ID NO: 77091 - protein, 9 aa, synthetic construct
  source 1..9: note = Seed: GDVGKSALT (KRAS G13D)
ADVSKAALA

SEQ ID NO: 77092 - protein, 9 aa, synthetic construct
  source 1..9: note = Seed: GDVGKSALT (KRAS G13D)
ADVSKAALI

SEQ ID NO: 77093 - protein, 9 aa, synthetic construct
  source 1..9: note = Seed: GDVGKSALT (KRAS G13D)
ADVSKAALS

SEQ ID NO: 77094 - protein, 9 aa, synthetic construct
  source 1..9: note = Seed: GDVGKSALT (KRAS G13D)
ADVSKAALT

SEQ ID NO: 77095 - protein, 9 aa, synthetic construct
  source 1..9: note = Seed: GDVGKSALT (KRAS G13D)
ADVSKAALV

SEQ ID NO: 77096 - protein, 9 aa, synthetic construct
  source 1..9: note = Seed: GDVGKSALT (KRAS G13D)
FDVAKAALA

SEQ ID NO: 77097 - protein, 9 aa, synthetic construct
  source 1..9: note = Seed: GDVGKSALT (KRAS G13D)
FDVAKAALS

SEQ ID NO: 77098 - protein, 9 aa, synthetic construct
  source 1..9: note = Seed: GDVGKSALT (KRAS G13D)
FDVAKAALT

SEQ ID NO: 77099 - protein, 9 aa, synthetic construct
  source 1..9: note = Seed: GDVGKSALT (KRAS G13D)
FDVAKGALA

SEQ ID NO: 77100 - protein, 9 aa, synthetic construct
  source 1..9: note = Seed: GDVGKSALT (KRAS G13D)
FDVAKPALA

SEQ ID NO: 77101 - protein, 9 aa, synthetic construct
  source 1..9: note = Seed: GDVGKSALT (KRAS G13D)
FDVAKPALS

SEQ ID NO: 77102 - protein, 9 aa, synthetic construct
  source 1..9: note = Seed: GDVGKSALT (KRAS G13D)
FDVAKPALT

SEQ ID NO: 77103 - protein, 9 aa, synthetic construct
  source 1..9: note = Seed: GDVGKSALT (KRAS G13D)
FDVAKPALV

SEQ ID NO: 77104 - protein, 9 aa, synthetic construct
  source 1..9: note = Seed: GDVGKSALT (KRAS G13D)
FDVGKAALA

SEQ ID NO: 77105 - protein, 9 aa, synthetic construct
  source 1..9: note = Seed: GDVGKSALT (KRAS G13D)
FDVGKAALS

SEQ ID NO: 77106 - protein, 9 aa, synthetic construct
  source 1..9: note = Seed: GDVGKSALT (KRAS G13D)
FDVGKAALT

SEQ ID NO: 77107 - protein, 9 aa, synthetic construct
  source 1..9: note = Seed: GDVGKSALT (KRAS G13D)
FDVGKAALV

SEQ ID NO: 77108 - protein, 9 aa, synthetic construct
  source 1..9: note = Seed: GDVGKSALT (KRAS G13D)
FDVGKPALA

SEQ ID NO: 77109 - protein, 9 aa, synthetic construct
  source 1..9: note = Seed: GDVGKSALT (KRAS G13D)
FDVGKPALS

SEQ ID NO: 77110 - protein, 9 aa, synthetic construct
  source 1..9: note = Seed: GDVGKSALT (KRAS G13D)
FDVGKPALV

SEQ ID NO: 77111 - protein, 9 aa, synthetic construct
  source 1..9: note = Seed: GDVGKSALT (KRAS G13D)
IDVAKAALA

SEQ ID NO: 77112 - protein, 9 aa, synthetic construct
  source 1..9: note = Seed: GDVGKSALT (KRAS G13D)
IDVAKAALS

SEQ ID NO: 77113 - protein, 9 aa, synthetic construct
  source 1..9: note = Seed: GDVGKSALT (KRAS G13D)
IDVAKAALT

SEQ ID NO: 77114 - protein, 9 aa, synthetic construct
  source 1..9: note = Seed: GDVGKSALT (KRAS G13D)
IDVAKGALA

SEQ ID NO: 77115 - protein, 9 aa, synthetic construct
  source 1..9: note = Seed: GDVGKSALT (KRAS G13D)
IDVAKPALA

SEQ ID NO: 77116 - protein, 9 aa, synthetic construct
  source 1..9: note = Seed: GDVGKSALT (KRAS G13D)
IDVAKPALS

SEQ ID NO: 77117 - protein, 9 aa, synthetic construct
  source 1..9: note = Seed: GDVGKSALT (KRAS G13D)
IDVAKPALT

SEQ ID NO: 77118 - protein, 9 aa, synthetic construct
  source 1..9: note = Seed: GDVGKSALT (KRAS G13D)
IDVAKPALV

SEQ ID NO: 77119 - protein, 9 aa, synthetic construct
  source 1..9: note = Seed: GDVGKSALT (KRAS G13D)
IDVGKAALA

SEQ ID NO: 77120 - protein, 9 aa, synthetic construct
  source 1..9: note = Seed: GDVGKSALT (KRAS G13D)
IDVGKAALS

SEQ ID NO: 77121 - protein, 9 aa, synthetic construct
  source 1..9: note = Seed: GDVGKSALT (KRAS G13D)
IDVGKAALT

SEQ ID NO: 77122 - protein, 9 aa, synthetic construct
  source 1..9: note = Seed: GDVGKSALT (KRAS G13D)
IDVGKAALV

SEQ ID NO: 77123 - protein, 9 aa, synthetic construct
  source 1..9: note = Seed: GDVGKSALT (KRAS G13D)
IDVGKPALA

SEQ ID NO: 77124 - protein, 9 aa, synthetic construct
  source 1..9: note = Seed: GDVGKSALT (KRAS G13D)
IDVGKPALS

SEQ ID NO: 77125 - protein, 9 aa, synthetic construct
  source 1..9: note = Seed: GDVGKSALT (KRAS G13D)
IDVGKPALT

SEQ ID NO: 77126 - protein, 9 aa, synthetic construct
  source 1..9: note = Seed: GDVGKSALT (KRAS G13D)
IDVGKPALV

SEQ ID NO: 77127 - protein, 9 aa, synthetic construct
  source 1..9: note = Seed: GDVGKSALT (KRAS G13D)
MDVAKAALA

SEQ ID NO: 77128 - protein, 9 aa, synthetic construct
  source 1..9: note = Seed: GDVGKSALT (KRAS G13D)
MDVAKAALS

SEQ ID NO: 77129 - protein, 9 aa, synthetic construct
  source 1..9: note = Seed: GDVGKSALT (KRAS G13D)
MDVAKPALA

SEQ ID NO: 77130 - protein, 9 aa, synthetic construct
  source 1..9: note = Seed: GDVGKSALT (KRAS G13D)
MDVGKAALA

SEQ ID NO: 77131 - protein, 9 aa, synthetic construct
  source 1..9: note = Seed: GDVGKSALT (KRAS G13D)
MDVGKAALS

SEQ ID NO: 77132 - protein, 9 aa, synthetic construct
  source 1..9: note = Seed: GDVGKSALT (KRAS G13D)
MDVGKAALV

SEQ ID NO: 77133 - protein, 9 aa, synthetic construct
  source 1..9: note = Seed: GDVGKSALT (KRAS G13D)
PDVAKAALA

SEQ ID NO: 77134 - protein, 9 aa, synthetic construct
  source 1..9: note = Seed: GDVGKSALT (KRAS G13D)
PDVAKAALS

SEQ ID NO: 77135 - protein, 9 aa, synthetic construct
  source 1..9: note = Seed: GDVGKSALT (KRAS G13D)
PDVGKAALA

SEQ ID NO: 77136 - protein, 9 aa, synthetic construct
  source 1..9: note = Seed: GDVGKSALT (KRAS G13D)
PDVGKAALS

SEQ ID NO: 77137 - protein, 9 aa, synthetic construct
  source 1..9: note = Seed: GDVGKSALT (KRAS G13D)
PDVGKVALA

SEQ ID NO: 77138 - protein, 9 aa, synthetic construct
  source 1..9: note = Seed: GDVGKSALT (KRAS G13D)
PDVGKVALS

SEQ ID NO: 77139 - protein, 9 aa, synthetic construct
  source 1..9: note = Seed: GDVGKSALT (KRAS G13D)
SDVAKAALA

SEQ ID NO: 77140 - protein, 9 aa, synthetic construct
  source 1..9: note = Seed: GDVGKSALT (KRAS G13D)
SDVAKAALS

SEQ ID NO: 77141 - protein, 9 aa, synthetic construct
  source 1..9: note = Seed: GDVGKSALT (KRAS G13D)
SDVAKAALT

SEQ ID NO: 77142 - protein, 9 aa, synthetic construct
  source 1..9: note = Seed: GDVGKSALT (KRAS G13D)
SDVAKAALV

SEQ ID NO: 77143 - protein, 9 aa, synthetic construct
  source 1..9: note = Seed: GDVGKSALT (KRAS G13D)
TDVAKAALA

SEQ ID NO: 77144 - protein, 9 aa, synthetic construct
  source 1..9: note = Seed: GDVGKSALT (KRAS G13D)
VDVAKAALA

SEQ ID NO: 77145 - protein, 9 aa, synthetic construct
  source 1..9: note = Seed: GDVGKSALT (KRAS G13D)
VDVAKAALS

SEQ ID NO: 77146 - protein, 9 aa, synthetic construct
  source 1..9: note = Seed: GDVGKSALT (KRAS G13D)
VDVAKAALT

SEQ ID NO: 77147 - protein, 9 aa, synthetic construct
  source 1..9: note = Seed: GDVGKSALT (KRAS G13D)
VDVAKPALA

SEQ ID NO: 77148 - protein, 9 aa, synthetic construct
  source 1..9: note = Seed: GDVGKSALT (KRAS G13D)
VDVAKPALS

SEQ ID NO: 77149 - protein, 9 aa, synthetic construct
  source 1..9: note = Seed: GDVGKSALT (KRAS G13D)
VDVGKAALA

SEQ ID NO: 77150 - protein, 9 aa, synthetic construct
  source 1..9: note = Seed: GDVGKSALT (KRAS G13D)
VDVGKAALS

SEQ ID NO: 77151 - protein, 9 aa, synthetic construct
  source 1..9: note = Seed: GDVGKSALT (KRAS G13D)
VDVGKAALT

SEQ ID NO: 77152 - protein, 9 aa, synthetic construct
  source 1..9: note = Seed: GDVGKSALT (KRAS G13D)
VDVGKAALV

SEQ ID NO: 77153 - protein, 9 aa, synthetic construct
  source 1..9: note = Seed: GDVGKSALT (KRAS G13D)
VDVGKPALA

SEQ ID NO: 77154 - protein, 9 aa, synthetic construct
  source 1..9: note = Seed: GDVGKSALT (KRAS G13D)
VDVGKPALS

SEQ ID NO: 77155 - protein, 9 aa, synthetic construct
  source 1..9: note = Seed: GDVGKSALT (KRAS G13D)
WDVAKAALA

SEQ ID NO: 77156 - protein, 9 aa, synthetic construct
  source 1..9: note = Seed: GDVGKSALT (KRAS G13D)
WDVAKPALA

SEQ ID NO: 77157 - protein, 9 aa, synthetic construct
  source 1..9: note = Seed: GDVGKSALT (KRAS G13D)
WDVGKAALA

SEQ ID NO: 77158 - protein, 9 aa, synthetic construct
  source 1..9: note = Seed: GDVGKSALT (KRAS G13D)
YDVAKAALA

SEQ ID NO: 77159 - protein, 9 aa, synthetic construct
  source 1..9: note = Seed: GDVGKSALT (KRAS G13D)
YDVAKGALA

SEQ ID NO: 77160 - protein, 9 aa, synthetic construct
  source 1..9: note = Seed: GDVGKSALT (KRAS G13D)
YDVAKPALA

SEQ ID NO: 77161 - protein, 9 aa, synthetic construct
  source 1..9: note = Seed: GDVGKSALT (KRAS G13D)
YDVGKAALA

SEQ ID NO: 77162 - protein, 9 aa, synthetic construct
  source 1..9: note = Seed: GDVGKSALT (KRAS G13D)
YDVGKAALS

SEQ ID NO: 77163 - protein, 9 aa, synthetic construct
  source 1..9: note = Seed: GDVGKSALT (KRAS G13D)
YDVGKAALT

SEQ ID NO: 77164 - protein, 9 aa, synthetic construct
  source 1..9: note = Seed: GDVGKSALT (KRAS G13D)
YDVGKAALV

SEQ ID NO: 77165 - protein, 9 aa, synthetic construct
  source 1..9: note = Seed: LVVVGAGDV (KRAS G13D)
CVVLGAGDI

SEQ ID NO: 77166 - protein, 9 aa, synthetic construct
  source 1..9: note = Seed: LVVVGAGDV (KRAS G13D)
CVVLGAGDL

SEQ ID NO: 77167 - protein, 9 aa, synthetic construct
  source 1..9: note = Seed: LVVVGAGDV (KRAS G13D)
CVVLGAGDV

SEQ ID NO: 77168 - protein, 9 aa, synthetic construct
  source 1..9: note = Seed: LVVVGAGDV (KRAS G13D)
CVVLGGGDL

SEQ ID NO: 77169 - protein, 9 aa, synthetic construct
  source 1..9: note = Seed: LVVVGAGDV (KRAS G13D)
CVVLGGGDV

SEQ ID NO: 77170 - protein, 9 aa, synthetic construct
  source 1..9: note = Seed: LVVVGAGDV (KRAS G13D)
CVVLGSGDI

SEQ ID NO: 77171 - protein, 9 aa, synthetic construct
  source 1..9: note = Seed: LVVVGAGDV (KRAS G13D)
CVVLGSGDL

SEQ ID NO: 77172 - protein, 9 aa, synthetic construct
  source 1..9: note = Seed: LVVVGAGDV (KRAS G13D)
CVVLGSGDV

SEQ ID NO: 77173 - protein, 9 aa, synthetic construct
  source 1..9: note = Seed: LVVVGAGDV (KRAS G13D)
CVVMGAGDI

SEQ ID NO: 77174 - protein, 9 aa, synthetic construct
  source 1..9: note = Seed: LVVVGAGDV (KRAS G13D)
CVVMGAGDL

SEQ ID NO: 77175 - protein, 9 aa, synthetic construct
  source 1..9: note = Seed: LVVVGAGDV (KRAS G13D)
CVVMGAGDV

SEQ ID NO: 77176 - protein, 9 aa, synthetic construct
  source 1..9: note = Seed: LVVVGAGDV (KRAS G13D)
CVVMGGGDL

SEQ ID NO: 77177 - protein, 9 aa, synthetic construct
  source 1..9: note = Seed: LVVVGAGDV (KRAS G13D)
CVVMGSGDI

SEQ ID NO: 77178 - protein, 9 aa, synthetic construct
  source 1..9: note = Seed: LVVVGAGDV (KRAS G13D)
CVVMGSGDL

SEQ ID NO: 77179 - protein, 9 aa, synthetic construct
  source 1..9: note = Seed: LVVVGAGDV (KRAS G13D)
CVVMGSGDV

SEQ ID NO: 77180 - protein, 9 aa, synthetic construct
  source 1..9: note = Seed: LVVVGAGDV (KRAS G13D)
FVVAGAGDA

SEQ ID NO: 77181 - protein, 9 aa, synthetic construct
  source 1..9: note = Seed: LVVVGAGDV (KRAS G13D)
FVVAGAGDC

SEQ ID NO: 77182 - protein, 9 aa, synthetic construct
  source 1..9: note = Seed: LVVVGAGDV (KRAS G13D)
FVVAGAGDD

SEQ ID NO: 77183 - protein, 9 aa, synthetic construct
  source 1..9: note = Seed: LVVVGAGDV (KRAS G13D)
FVVAGAGDE

SEQ ID NO: 77184 - protein, 9 aa, synthetic construct
  source 1..9: note = Seed: LVVVGAGDV (KRAS G13D)
FVVAGAGDF

SEQ ID NO: 77185 - protein, 9 aa, synthetic construct
  source 1..9: note = Seed: LVVVGAGDV (KRAS G13D)
FVVAGAGDG

SEQ ID NO: 77186 - protein, 9 aa, synthetic construct
  source 1..9: note = Seed: LVVVGAGDV (KRAS G13D)
FVVAGAGDH

SEQ ID NO: 77187 - protein, 9 aa, synthetic construct
  source 1..9: note = Seed: LVVVGAGDV (KRAS G13D)
FVVAGAGDI

SEQ ID NO: 77188 - protein, 9 aa, synthetic construct
  source 1..9: note = Seed: LVVVGAGDV (KRAS G13D)
FVVAGAGDL

SEQ ID NO: 77189 - protein, 9 aa, synthetic construct
  source 1..9: note = Seed: LVVVGAGDV (KRAS G13D)
FVVAGAGDM

SEQ ID NO: 77190 - protein, 9 aa, synthetic construct
  source 1..9: note = Seed: LVVVGAGDV (KRAS G13D)
FVVAGAGDN

SEQ ID NO: 77191 - protein, 9 aa, synthetic construct
  source 1..9: note = Seed: LVVVGAGDV (KRAS G13D)
FVVAGAGDP

SEQ ID NO: 77192 - protein, 9 aa, synthetic construct
  source 1..9: note = Seed: LVVVGAGDV (KRAS G13D)
FVVAGAGDQ

SEQ ID NO: 77193 - protein, 9 aa, synthetic construct
  source 1..9: note = Seed: LVVVGAGDV (KRAS G13D)
FVVAGAGDR

SEQ ID NO: 77194 - protein, 9 aa, synthetic construct
  source 1..9: note = Seed: LVVVGAGDV (KRAS G13D)
FVVAGAGDS

SEQ ID NO: 77195 - protein, 9 aa, synthetic construct
  source 1..9: note = Seed: LVVVGAGDV (KRAS G13D)
FVVAGAGDT

SEQ ID NO: 77196 - protein, 9 aa, synthetic construct
  source 1..9: note = Seed: LVVVGAGDV (KRAS G13D)
FVVAGAGDV

SEQ ID NO: 77197 - protein, 9 aa, synthetic construct
  source 1..9: note = Seed: LVVVGAGDV (KRAS G13D)
FVVAGAGDW

SEQ ID NO: 77198 - protein, 9 aa, synthetic construct
  source 1..9: note = Seed: LVVVGAGDV (KRAS G13D)
FVVAGAGDY

SEQ ID NO: 77199 - protein, 9 aa, synthetic construct
  source 1..9: note = Seed: LVVVGAGDV (KRAS G13D)
FVVAGCGDA

SEQ ID NO: 77200 - protein, 9 aa, synthetic construct
  source 1..9: note = Seed: LVVVGAGDV (KRAS G13D)
FVVAGCGDI

SEQ ID NO: 77201 - protein, 9 aa, synthetic construct
  source 1..9: note = Seed: LVVVGAGDV (KRAS G13D)
FVVAGCGDL

SEQ ID NO: 77202 - protein, 9 aa, synthetic construct
  source 1..9: note = Seed: LVVVGAGDV (KRAS G13D)
FVVAGCGDM

SEQ ID NO: 77203 - protein, 9 aa, synthetic construct
  source 1..9: note = Seed: LVVVGAGDV (KRAS G13D)
FVVAGCGDV

SEQ ID NO: 77204 - protein, 9 aa, synthetic construct
  source 1..9: note = Seed: LVVVGAGDV (KRAS G13D)
FVVAGDGDL

SEQ ID NO: 77205 - protein, 9 aa, synthetic construct
  source 1..9: note = Seed: LVVVGAGDV (KRAS G13D)
FVVAGEGDL

SEQ ID NO: 77206 - protein, 9 aa, synthetic construct
  source 1..9: note = Seed: LVVVGAGDV (KRAS G13D)
FVVAGFGDF

SEQ ID NO: 77207 - protein, 9 aa, synthetic construct
  source 1..9: note = Seed: LVVVGAGDV (KRAS G13D)
FVVAGFGDI

SEQ ID NO: 77208 - protein, 9 aa, synthetic construct
  source 1..9: note = Seed: LVVVGAGDV (KRAS G13D)
FVVAGFGDL

SEQ ID NO: 77209 - protein, 9 aa, synthetic construct
  source 1..9: note = Seed: LVVVGAGDV (KRAS G13D)
FVVAGFGDM

SEQ ID NO: 77210 - protein, 9 aa, synthetic construct
  source 1..9: note = Seed: LVVVGAGDV (KRAS G13D)
FVVAGFGDV

SEQ ID NO: 77211 - protein, 9 aa, synthetic construct
  source 1..9: note = Seed: LVVVGAGDV (KRAS G13D)
FVVAGFGDY

SEQ ID NO: 77212 - protein, 9 aa, synthetic construct
  source 1..9: note = Seed: LVVVGAGDV (KRAS G13D)
FVVAGGGDA

SEQ ID NO: 77213 - protein, 9 aa, synthetic construct
  source 1..9: note = Seed: LVVVGAGDV (KRAS G13D)
FVVAGGGDC

SEQ ID NO: 77214 - protein, 9 aa, synthetic construct
  source 1..9: note = Seed: LVVVGAGDV (KRAS G13D)
FVVAGGGDF

SEQ ID NO: 77215 - protein, 9 aa, synthetic construct
  source 1..9: note = Seed: LVVVGAGDV (KRAS G13D)
FVVAGGGDG

SEQ ID NO: 77216 - protein, 9 aa, synthetic construct
  source 1..9: note = Seed: LVVVGAGDV (KRAS G13D)
FVVAGGGDH

SEQ ID NO: 77217 - protein, 9 aa, synthetic construct
  source 1..9: note = Seed: LVVVGAGDV (KRAS G13D)
FVVAGGGDI

SEQ ID NO: 77218 - protein, 9 aa, synthetic construct
  source 1..9: note = Seed: LVVVGAGDV (KRAS G13D)
FVVAGGGDL

SEQ ID NO: 77219 - protein, 9 aa, synthetic construct
  source 1..9: note = Seed: LVVVGAGDV (KRAS G13D)
FVVAGGGDM

SEQ ID NO: 77220 - protein, 9 aa, synthetic construct
  source 1..9: note = Seed: LVVVGAGDV (KRAS G13D)
FVVAGGGDN

SEQ ID NO: 77221 - protein, 9 aa, synthetic construct
  source 1..9: note = Seed: LVVVGAGDV (KRAS G13D)
FVVAGGGDQ

SEQ ID NO: 77222 - protein, 9 aa, synthetic construct
  source 1..9: note = Seed: LVVVGAGDV (KRAS G13D)
FVVAGGGDS

SEQ ID NO: 77223 - protein, 9 aa, synthetic construct
  source 1..9: note = Seed: LVVVGAGDV (KRAS G13D)
FVVAGGGDT

SEQ ID NO: 77224 - protein, 9 aa, synthetic construct
  source 1..9: note = Seed: LVVVGAGDV (KRAS G13D)
FVVAGGGDV

SEQ ID NO: 77225 - protein, 9 aa, synthetic construct
  source 1..9: note = Seed: LVVVGAGDV (KRAS G13D)
FVVAGGGDY

SEQ ID NO: 77226 - protein, 9 aa, synthetic construct
  source 1..9: note = Seed: LVVVGAGDV (KRAS G13D)
FVVAGHGDA

SEQ ID NO: 77227 - protein, 9 aa, synthetic construct
  source 1..9: note = Seed: LVVVGAGDV (KRAS G13D)
FVVAGHGDI

SEQ ID NO: 77228 - protein, 9 aa, synthetic construct
  source 1..9: note = Seed: LVVVGAGDV (KRAS G13D)
FVVAGHGDL

SEQ ID NO: 77229 - protein, 9 aa, synthetic construct
  source 1..9: note = Seed: LVVVGAGDV (KRAS G13D)
FVVAGHGDS

SEQ ID NO: 77230 - protein, 9 aa, synthetic construct
  source 1..9: note = Seed: LVVVGAGDV (KRAS G13D)
FVVAGHGDV

SEQ ID NO: 77231 - protein, 9 aa, synthetic construct
  source 1..9: note = Seed: LVVVGAGDV (KRAS G13D)
FVVAGIGDA

SEQ ID NO: 77232 - protein, 9 aa, synthetic construct
  source 1..9: note = Seed: LVVVGAGDV (KRAS G13D)
FVVAGIGDC

SEQ ID NO: 77233 - protein, 9 aa, synthetic construct
  source 1..9: note = Seed: LVVVGAGDV (KRAS G13D)
FVVAGIGDD

SEQ ID NO: 77234 - protein, 9 aa, synthetic construct
  source 1..9: note = Seed: LVVVGAGDV (KRAS G13D)
FVVAGIGDG

SEQ ID NO: 77235 - protein, 9 aa, synthetic construct
  source 1..9: note = Seed: LVVVGAGDV (KRAS G13D)
FVVAGIGDH

SEQ ID NO: 77236 - protein, 9 aa, synthetic construct
  source 1..9: note = Seed: LVVVGAGDV (KRAS G13D)
FVVAGIGDI

SEQ ID NO: 77237 - protein, 9 aa, synthetic construct
  source 1..9: note = Seed: LVVVGAGDV (KRAS G13D)
FVVAGIGDL

SEQ ID NO: 77238 - protein, 9 aa, synthetic construct
  source 1..9: note = Seed: LVVVGAGDV (KRAS G13D)
FVVAGIGDM

SEQ ID NO: 77239 - protein, 9 aa, synthetic construct
  source 1..9: note = Seed: LVVVGAGDV (KRAS G13D)
FVVAGIGDN

SEQ ID NO: 77240 - protein, 9 aa, synthetic construct
  source 1..9: note = Seed: LVVVGAGDV (KRAS G13D)
FVVAGIGDQ

SEQ ID NO: 77241 - protein, 9 aa, synthetic construct
  source 1..9: note = Seed: LVVVGAGDV (KRAS G13D)
FVVAGIGDS

SEQ ID NO: 77242 - protein, 9 aa, synthetic construct
  source 1..9: note = Seed: LVVVGAGDV (KRAS G13D)
FVVAGIGDT

SEQ ID NO: 77243 - protein, 9 aa, synthetic construct
  source 1..9: note = Seed: LVVVGAGDV (KRAS G13D)
FVVAGIGDV

SEQ ID NO: 77244 - protein, 9 aa, synthetic construct
  source 1..9: note = Seed: LVVVGAGDV (KRAS G13D)
FVVAGKGDA

SEQ ID NO: 77245 - protein, 9 aa, synthetic construct
  source 1..9: note = Seed: LVVVGAGDV (KRAS G13D)
FVVAGKGDG

SEQ ID NO: 77246 - protein, 9 aa, synthetic construct
  source 1..9: note = Seed: LVVVGAGDV (KRAS G13D)
FVVAGKGDH

SEQ ID NO: 77247 - protein, 9 aa, synthetic construct
  source 1..9: note = Seed: LVVVGAGDV (KRAS G13D)
FVVAGKGDL

SEQ ID NO: 77248 - protein, 9 aa, synthetic construct
  source 1..9: note = Seed: LVVVGAGDV (KRAS G13D)
FVVAGKGDM

SEQ ID NO: 77249 - protein, 9 aa, synthetic construct
  source 1..9: note = Seed: LVVVGAGDV (KRAS G13D)
FVVAGKGDN

SEQ ID NO: 77250 - protein, 9 aa, synthetic construct
  source 1..9: note = Seed: LVVVGAGDV (KRAS G13D)
FVVAGKGDQ

SEQ ID NO: 77251 - protein, 9 aa, synthetic construct
  source 1..9: note = Seed: LVVVGAGDV (KRAS G13D)
FVVAGKGDS

SEQ ID NO: 77252 - protein, 9 aa, synthetic construct
  source 1..9: note = Seed: LVVVGAGDV (KRAS G13D)
FVVAGKGDT

SEQ ID NO: 77253 - protein, 9 aa, synthetic construct
  source 1..9: note = Seed: LVVVGAGDV (KRAS G13D)
FVVAGKGDV

SEQ ID NO: 77254 - protein, 9 aa, synthetic construct
  source 1..9: note = Seed: LVVVGAGDV (KRAS G13D)
FVVAGLGDA

SEQ ID NO: 77255 - protein, 9 aa, synthetic construct
  source 1..9: note = Seed: LVVVGAGDV (KRAS G13D)
FVVAGLGDN

SEQ ID NO: 77256 - protein, 9 aa, synthetic construct
  source 1..9: note = Seed: LVVVGAGDV (KRAS G13D)
FVVAGLGDS

SEQ ID NO: 77257 - protein, 9 aa, synthetic construct
  source 1..9: note = Seed: LVVVGAGDV (KRAS G13D)
FVVAGMGDA

SEQ ID NO: 77258 - protein, 9 aa, synthetic construct
  source 1..9: note = Seed: LVVVGAGDV (KRAS G13D)
FVVAGMGDC

SEQ ID NO: 77259 - protein, 9 aa, synthetic construct
  source 1..9: note = Seed: LVVVGAGDV (KRAS G13D)
FVVAGMGDN

SEQ ID NO: 77260 - protein, 9 aa, synthetic construct
  source 1..9: note = Seed: LVVVGAGDV (KRAS G13D)
FVVAGMGDS

SEQ ID NO: 77261 - protein, 9 aa, synthetic construct
  source 1..9: note = Seed: LVVVGAGDV (KRAS G13D)
FVVAGNGDA

SEQ ID NO: 77262 - protein, 9 aa, synthetic construct
  source 1..9: note = Seed: LVVVGAGDV (KRAS G13D)
FVVAGNGDC

SEQ ID NO: 77263 - protein, 9 aa, synthetic construct
  source 1..9: note = Seed: LVVVGAGDV (KRAS G13D)
FVVAGNGDD

SEQ ID NO: 77264 - protein, 9 aa, synthetic construct
  source 1..9: note = Seed: LVVVGAGDV (KRAS G13D)
FVVAGNGDF

SEQ ID NO: 77265 - protein, 9 aa, synthetic construct
  source 1..9: note = Seed: LVVVGAGDV (KRAS G13D)
FVVAGNGDG

SEQ ID NO: 77266 - protein, 9 aa, synthetic construct
  source 1..9: note = Seed: LVVVGAGDV (KRAS G13D)
FVVAGNGDI

SEQ ID NO: 77267 - protein, 9 aa, synthetic construct
  source 1..9: note = Seed: LVVVGAGDV (KRAS G13D)
FVVAGNGDL

SEQ ID NO: 77268 - protein, 9 aa, synthetic construct
  source 1..9: note = Seed: LVVVGAGDV (KRAS G13D)
FVVAGNGDM

SEQ ID NO: 77269 - protein, 9 aa, synthetic construct
  source 1..9: note = Seed: LVVVGAGDV (KRAS G13D)
FVVAGNGDN

SEQ ID NO: 77270 - protein, 9 aa, synthetic construct
  source 1..9: note = Seed: LVVVGAGDV (KRAS G13D)
FVVAGNGDQ

SEQ ID NO: 77271 - protein, 9 aa, synthetic construct
  source 1..9: note = Seed: LVVVGAGDV (KRAS G13D)
FVVAGNGDS

SEQ ID NO: 77272 - protein, 9 aa, synthetic construct
  source 1..9: note = Seed: LVVVGAGDV (KRAS G13D)
FVVAGNGDT

SEQ ID NO: 77273 - protein, 9 aa, synthetic construct
  source 1..9: note = Seed: LVVVGAGDV (KRAS G13D)
FVVAGNGDV

SEQ ID NO: 77274 - protein, 9 aa, synthetic construct
  source 1..9: note = Seed: LVVVGAGDV (KRAS G13D)
FVVAGNGDY

SEQ ID NO: 77275 - protein, 9 aa, synthetic construct
  source 1..9: note = Seed: LVVVGAGDV (KRAS G13D)
FVVAGPGDA

SEQ ID NO: 77276 - protein, 9 aa, synthetic construct
  source 1..9: note = Seed: LVVVGAGDV (KRAS G13D)
FVVAGPGDC

SEQ ID NO: 77277 - protein, 9 aa, synthetic construct
  source 1..9: note = Seed: LVVVGAGDV (KRAS G13D)
FVVAGPGDF

SEQ ID NO: 77278 - protein, 9 aa, synthetic construct
  source 1..9: note = Seed: LVVVGAGDV (KRAS G13D)
FVVAGPGDG

SEQ ID NO: 77279 - protein, 9 aa, synthetic construct
  source 1..9: note = Seed: LVVVGAGDV (KRAS G13D)
FVVAGPGDH

SEQ ID NO: 77280 - protein, 9 aa, synthetic construct
  source 1..9: note = Seed: LVVVGAGDV (KRAS G13D)
FVVAGPGDI

SEQ ID NO: 77281 - protein, 9 aa, synthetic construct
  source 1..9: note = Seed: LVVVGAGDV (KRAS G13D)
FVVAGPGDL

SEQ ID NO: 77282 - protein, 9 aa, synthetic construct
  source 1..9: note = Seed: LVVVGAGDV (KRAS G13D)
FVVAGPGDM

SEQ ID NO: 77283 - protein, 9 aa, synthetic construct
  source 1..9: note = Seed: LVVVGAGDV (KRAS G13D)
FVVAGPGDN

SEQ ID NO: 77284 - protein, 9 aa, synthetic construct
  source 1..9: note = Seed: LVVVGAGDV (KRAS G13D)
FVVAGPGDQ

SEQ ID NO: 77285 - protein, 9 aa, synthetic construct
  source 1..9: note = Seed: LVVVGAGDV (KRAS G13D)
FVVAGPGDS

SEQ ID NO: 77286 - protein, 9 aa, synthetic construct
  source 1..9: note = Seed: LVVVGAGDV (KRAS G13D)
FVVAGPGDT

SEQ ID NO: 77287 - protein, 9 aa, synthetic construct
  source 1..9: note = Seed: LVVVGAGDV (KRAS G13D)
FVVAGPGDV

SEQ ID NO: 77288 - protein, 9 aa, synthetic construct
  source 1..9: note = Seed: LVVVGAGDV (KRAS G13D)
FVVAGQGDI

SEQ ID NO: 77289 - protein, 9 aa, synthetic construct
  source 1..9: note = Seed: LVVVGAGDV (KRAS G13D)
FVVAGQGDL

SEQ ID NO: 77290 - protein, 9 aa, synthetic construct
  source 1..9: note = Seed: LVVVGAGDV (KRAS G13D)
FVVAGQGDV

SEQ ID NO: 77291 - protein, 9 aa, synthetic construct
  source 1..9: note = Seed: LVVVGAGDV (KRAS G13D)
FVVAGRGDA

SEQ ID NO: 77292 - protein, 9 aa, synthetic construct
  source 1..9: note = Seed: LVVVGAGDV (KRAS G13D)
FVVAGRGDG

SEQ ID NO: 77293 - protein, 9 aa, synthetic construct
  source 1..9: note = Seed: LVVVGAGDV (KRAS G13D)
FVVAGRGDH

SEQ ID NO: 77294 - protein, 9 aa, synthetic construct
  source 1..9: note = Seed: LVVVGAGDV (KRAS G13D)
FVVAGRGDI

SEQ ID NO: 77295 - protein, 9 aa, synthetic construct
  source 1..9: note = Seed: LVVVGAGDV (KRAS G13D)
FVVAGRGDK

SEQ ID NO: 77296 - protein, 9 aa, synthetic construct
  source 1..9: note = Seed: LVVVGAGDV (KRAS G13D)
FVVAGRGDL

SEQ ID NO: 77297 - protein, 9 aa, synthetic construct
  source 1..9: note = Seed: LVVVGAGDV (KRAS G13D)
FVVAGRGDM

SEQ ID NO: 77298 - protein, 9 aa, synthetic construct
  source 1..9: note = Seed: LVVVGAGDV (KRAS G13D)
FVVAGRGDN

SEQ ID NO: 77299 - protein, 9 aa, synthetic construct
  source 1..9: note = Seed: LVVVGAGDV (KRAS G13D)
FVVAGRGDP

SEQ ID NO: 77300 - protein, 9 aa, synthetic construct
  source 1..9: note = Seed: LVVVGAGDV (KRAS G13D)
FVVAGRGDQ

SEQ ID NO: 77301 - protein, 9 aa, synthetic construct
  source 1..9: note = Seed: LVVVGAGDV (KRAS G13D)
FVVAGRGDS

SEQ ID NO: 77302 - protein, 9 aa, synthetic construct
  source 1..9: note = Seed: LVVVGAGDV (KRAS G13D)
FVVAGRGDT

SEQ ID NO: 77303 - protein, 9 aa, synthetic construct
  source 1..9: note = Seed: LVVVGAGDV (KRAS G13D)
FVVAGRGDV

SEQ ID NO: 77304 - protein, 9 aa, synthetic construct
  source 1..9: note = Seed: LVVVGAGDV (KRAS G13D)
FVVAGSGDA

SEQ ID NO: 77305 - protein, 9 aa, synthetic construct
  source 1..9: note = Seed: LVVVGAGDV (KRAS G13D)
FVVAGSGDC

SEQ ID NO: 77306 - protein, 9 aa, synthetic construct
  source 1..9: note = Seed: LVVVGAGDV (KRAS G13D)
FVVAGSGDF

SEQ ID NO: 77307 - protein, 9 aa, synthetic construct
  source 1..9: note = Seed: LVVVGAGDV (KRAS G13D)
FVVAGSGDG

SEQ ID NO: 77308 - protein, 9 aa, synthetic construct
  source 1..9: note = Seed: LVVVGAGDV (KRAS G13D)
FVVAGSGDH

SEQ ID NO: 77309 - protein, 9 aa, synthetic construct
  source 1..9: note = Seed: LVVVGAGDV (KRAS G13D)
FVVAGSGDI

SEQ ID NO: 77310 - protein, 9 aa, synthetic construct
  source 1..9: note = Seed: LVVVGAGDV (KRAS G13D)
FVVAGSGDL

SEQ ID NO: 77311 - protein, 9 aa, synthetic construct
  source 1..9: note = Seed: LVVVGAGDV (KRAS G13D)
FVVAGSGDM

SEQ ID NO: 77312 - protein, 9 aa, synthetic construct
  source 1..9: note = Seed: LVVVGAGDV (KRAS G13D)
FVVAGSGDN

SEQ ID NO: 77313 - protein, 9 aa, synthetic construct
  source 1..9: note = Seed: LVVVGAGDV (KRAS G13D)
FVVAGSGDQ

SEQ ID NO: 77314 - protein, 9 aa, synthetic construct
  source 1..9: note = Seed: LVVVGAGDV (KRAS G13D)
FVVAGSGDR

SEQ ID NO: 77315 - protein, 9 aa, synthetic construct
  source 1..9: note = Seed: LVVVGAGDV (KRAS G13D)
FVVAGSGDS

SEQ ID NO: 77316 - protein, 9 aa, synthetic construct
  source 1..9: note = Seed: LVVVGAGDV (KRAS G13D)
FVVAGSGDT

SEQ ID NO: 77317 - protein, 9 aa, synthetic construct
  source 1..9: note = Seed: LVVVGAGDV (KRAS G13D)
FVVAGSGDV

SEQ ID NO: 77318 - protein, 9 aa, synthetic construct
  source 1..9: note = Seed: LVVVGAGDV (KRAS G13D)
FVVAGSGDY

SEQ ID NO: 77319 - protein, 9 aa, synthetic construct
  source 1..9: note = Seed: LVVVGAGDV (KRAS G13D)
FVVAGTGDA

SEQ ID NO: 77320 - protein, 9 aa, synthetic construct
  source 1..9: note = Seed: LVVVGAGDV (KRAS G13D)
FVVAGTGDC

SEQ ID NO: 77321 - protein, 9 aa, synthetic construct
  source 1..9: note = Seed: LVVVGAGDV (KRAS G13D)
FVVAGTGDF

SEQ ID NO: 77322 - protein, 9 aa, synthetic construct
  source 1..9: note = Seed: LVVVGAGDV (KRAS G13D)
FVVAGTGDG

SEQ ID NO: 77323 - protein, 9 aa, synthetic construct
  source 1..9: note = Seed: LVVVGAGDV (KRAS G13D)
FVVAGTGDH

SEQ ID NO: 77324 - protein, 9 aa, synthetic construct
  source 1..9: note = Seed: LVVVGAGDV (KRAS G13D)
FVVAGTGDI

SEQ ID NO: 77325 - protein, 9 aa, synthetic construct
  source 1..9: note = Seed: LVVVGAGDV (KRAS G13D)
FVVAGTGDL

SEQ ID NO: 77326 - protein, 9 aa, synthetic construct
  source 1..9: note = Seed: LVVVGAGDV (KRAS G13D)
FVVAGTGDM

SEQ ID NO: 77327 - protein, 9 aa, synthetic construct
  source 1..9: note = Seed: LVVVGAGDV (KRAS G13D)
FVVAGTGDN

SEQ ID NO: 77328 - protein, 9 aa, synthetic construct
  source 1..9: note = Seed: LVVVGAGDV (KRAS G13D)
FVVAGTGDQ

SEQ ID NO: 77329 - protein, 9 aa, synthetic construct
  source 1..9: note = Seed: LVVVGAGDV (KRAS G13D)
FVVAGTGDS

SEQ ID NO: 77330 - protein, 9 aa, synthetic construct
  source 1..9: note = Seed: LVVVGAGDV (KRAS G13D)
FVVAGTGDT

SEQ ID NO: 77331 - protein, 9 aa, synthetic construct
  source 1..9: note = Seed: LVVVGAGDV (KRAS G13D)
FVVAGTGDV

SEQ ID NO: 77332 - protein, 9 aa, synthetic construct
  source 1..9: note = Seed: LVVVGAGDV (KRAS G13D)
FVVAGVGDA

SEQ ID NO: 77333 - protein, 9 aa, synthetic construct
  source 1..9: note = Seed: LVVVGAGDV (KRAS G13D)
FVVAGVGDC

SEQ ID NO: 77334 - protein, 9 aa, synthetic construct
  source 1..9: note = Seed: LVVVGAGDV (KRAS G13D)
FVVAGVGDD

SEQ ID NO: 77335 - protein, 9 aa, synthetic construct
  source 1..9: note = Seed: LVVVGAGDV (KRAS G13D)
FVVAGVGDE

SEQ ID NO: 77336 - protein, 9 aa, synthetic construct
  source 1..9: note = Seed: LVVVGAGDV (KRAS G13D)
FVVAGVGDG

SEQ ID NO: 77337 - protein, 9 aa, synthetic construct
  source 1..9: note = Seed: LVVVGAGDV (KRAS G13D)
FVVAGVGDH

SEQ ID NO: 77338 - protein, 9 aa, synthetic construct
  source 1..9: note = Seed: LVVVGAGDV (KRAS G13D)
FVVAGVGDI

SEQ ID NO: 77339 - protein, 9 aa, synthetic construct
  source 1..9: note = Seed: LVVVGAGDV (KRAS G13D)
FVVAGVGDL

SEQ ID NO: 77340 - protein, 9 aa, synthetic construct
  source 1..9: note = Seed: LVVVGAGDV (KRAS G13D)
FVVAGVGDM

SEQ ID NO: 77341 - protein, 9 aa, synthetic construct
  source 1..9: note = Seed: LVVVGAGDV (KRAS G13D)
FVVAGVGDN

SEQ ID NO: 77342 - protein, 9 aa, synthetic construct
  source 1..9: note = Seed: LVVVGAGDV (KRAS G13D)
FVVAGVGDQ

SEQ ID NO: 77343 - protein, 9 aa, synthetic construct
  source 1..9: note = Seed: LVVVGAGDV (KRAS G13D)
FVVAGVGDS

SEQ ID NO: 77344 - protein, 9 aa, synthetic construct
  source 1..9: note = Seed: LVVVGAGDV (KRAS G13D)
FVVAGVGDT

SEQ ID NO: 77345 - protein, 9 aa, synthetic construct
  source 1..9: note = Seed: LVVVGAGDV (KRAS G13D)
FVVAGVGDV

SEQ ID NO: 77346 - protein, 9 aa, synthetic construct
  source 1..9: note = Seed: LVVVGAGDV (KRAS G13D)
FVVAGYGDI

SEQ ID NO: 77347 - protein, 9 aa, synthetic construct
  source 1..9: note = Seed: LVVVGAGDV (KRAS G13D)
FVVAGYGDL

SEQ ID NO: 77348 - protein, 9 aa, synthetic construct
  source 1..9: note = Seed: LVVVGAGDV (KRAS G13D)
FVVCGAGDA

SEQ ID NO: 77349 - protein, 9 aa, synthetic construct
  source 1..9: note = Seed: LVVVGAGDV (KRAS G13D)
FVVCGAGDI

SEQ ID NO: 77350 - protein, 9 aa, synthetic construct
  source 1..9: note = Seed: LVVVGAGDV (KRAS G13D)
FVVCGAGDL

SEQ ID NO: 77351 - protein, 9 aa, synthetic construct
  source 1..9: note = Seed: LVVVGAGDV (KRAS G13D)
FVVCGAGDM

SEQ ID NO: 77352 - protein, 9 aa, synthetic construct
  source 1..9: note = Seed: LVVVGAGDV (KRAS G13D)
FVVCGAGDV

SEQ ID NO: 77353 - protein, 9 aa, synthetic construct
  source 1..9: note = Seed: LVVVGAGDV (KRAS G13D)
FVVCGGGDA

SEQ ID NO: 77354 - protein, 9 aa, synthetic construct
  source 1..9: note = Seed: LVVVGAGDV (KRAS G13D)
FVVCGGGDI

SEQ ID NO: 77355 - protein, 9 aa, synthetic construct
  source 1..9: note = Seed: LVVVGAGDV (KRAS G13D)
FVVCGGGDL

SEQ ID NO: 77356 - protein, 9 aa, synthetic construct
  source 1..9: note = Seed: LVVVGAGDV (KRAS G13D)
FVVCGGGDV

SEQ ID NO: 77357 - protein, 9 aa, synthetic construct
  source 1..9: note = Seed: LVVVGAGDV (KRAS G13D)
FVVCGNGDL

SEQ ID NO: 77358 - protein, 9 aa, synthetic construct
  source 1..9: note = Seed: LVVVGAGDV (KRAS G13D)
FVVCGNGDV

SEQ ID NO: 77359 - protein, 9 aa, synthetic construct
  source 1..9: note = Seed: LVVVGAGDV (KRAS G13D)
FVVCGPGDL

SEQ ID NO: 77360 - protein, 9 aa, synthetic construct
  source 1..9: note = Seed: LVVVGAGDV (KRAS G13D)
FVVCGRGDA

SEQ ID NO: 77361 - protein, 9 aa, synthetic construct
  source 1..9: note = Seed: LVVVGAGDV (KRAS G13D)
FVVCGSGDA

SEQ ID NO: 77362 - protein, 9 aa, synthetic construct
  source 1..9: note = Seed: LVVVGAGDV (KRAS G13D)
FVVCGSGDI

SEQ ID NO: 77363 - protein, 9 aa, synthetic construct
  source 1..9: note = Seed: LVVVGAGDV (KRAS G13D)
FVVCGSGDL

SEQ ID NO: 77364 - protein, 9 aa, synthetic construct
  source 1..9: note = Seed: LVVVGAGDV (KRAS G13D)
FVVCGSGDV

SEQ ID NO: 77365 - protein, 9 aa, synthetic construct
  source 1..9: note = Seed: LVVVGAGDV (KRAS G13D)
FVVCGTGDL

SEQ ID NO: 77366 - protein, 9 aa, synthetic construct
  source 1..9: note = Seed: LVVVGAGDV (KRAS G13D)
FVVDGAGDI

SEQ ID NO: 77367 - protein, 9 aa, synthetic construct
  source 1..9: note = Seed: LVVVGAGDV (KRAS G13D)
FVVDGAGDV

SEQ ID NO: 77368 - protein, 9 aa, synthetic construct
  source 1..9: note = Seed: LVVVGAGDV (KRAS G13D)
FVVDGFGDI

SEQ ID NO: 77369 - protein, 9 aa, synthetic construct
  source 1..9: note = Seed: LVVVGAGDV (KRAS G13D)
FVVDGFGDL

SEQ ID NO: 77370 - protein, 9 aa, synthetic construct
  source 1..9: note = Seed: LVVVGAGDV (KRAS G13D)
FVVDGFGDV

SEQ ID NO: 77371 - protein, 9 aa, synthetic construct
  source 1..9: note = Seed: LVVVGAGDV (KRAS G13D)
FVVEGAGDA

SEQ ID NO: 77372 - protein, 9 aa, synthetic construct
  source 1..9: note = Seed: LVVVGAGDV (KRAS G13D)
FVVEGAGDG

SEQ ID NO: 77373 - protein, 9 aa, synthetic construct
  source 1..9: note = Seed: LVVVGAGDV (KRAS G13D)
FVVEGAGDI

SEQ ID NO: 77374 - protein, 9 aa, synthetic construct
  source 1..9: note = Seed: LVVVGAGDV (KRAS G13D)
FVVEGAGDL

SEQ ID NO: 77375 - protein, 9 aa, synthetic construct
  source 1..9: note = Seed: LVVVGAGDV (KRAS G13D)
FVVEGAGDM

SEQ ID NO: 77376 - protein, 9 aa, synthetic construct
  source 1..9: note = Seed: LVVVGAGDV (KRAS G13D)
FVVEGAGDS

SEQ ID NO: 77377 - protein, 9 aa, synthetic construct
  source 1..9: note = Seed: LVVVGAGDV (KRAS G13D)
FVVEGAGDT

SEQ ID NO: 77378 - protein, 9 aa, synthetic construct
  source 1..9: note = Seed: LVVVGAGDV (KRAS G13D)
FVVEGAGDV

SEQ ID NO: 77379 - protein, 9 aa, synthetic construct
  source 1..9: note = Seed: LVVVGAGDV (KRAS G13D)
FVVEGFGDA

SEQ ID NO: 77380 - protein, 9 aa, synthetic construct
  source 1..9: note = Seed: LVVVGAGDV (KRAS G13D)
FVVEGFGDF

SEQ ID NO: 77381 - protein, 9 aa, synthetic construct
  source 1..9: note = Seed: LVVVGAGDV (KRAS G13D)
FVVEGFGDI

SEQ ID NO: 77382 - protein, 9 aa, synthetic construct
  source 1..9: note = Seed: LVVVGAGDV (KRAS G13D)
FVVEGFGDL

SEQ ID NO: 77383 - protein, 9 aa, synthetic construct
  source 1..9: note = Seed: LVVVGAGDV (KRAS G13D)
FVVEGFGDM

SEQ ID NO: 77384 - protein, 9 aa, synthetic construct
  source 1..9: note = Seed: LVVVGAGDV (KRAS G13D)
FVVEGFGDV

SEQ ID NO: 77385 - protein, 9 aa, synthetic construct
  source 1..9: note = Seed: LVVVGAGDV (KRAS G13D)
FVVEGFGDY

SEQ ID NO: 77386 - protein, 9 aa, synthetic construct
  source 1..9: note = Seed: LVVVGAGDV (KRAS G13D)
FVVEGGGDA

SEQ ID NO: 77387 - protein, 9 aa, synthetic construct
  source 1..9: note = Seed: LVVVGAGDV (KRAS G13D)
FVVEGGGDI

SEQ ID NO: 77388 - protein, 9 aa, synthetic construct
  source 1..9: note = Seed: LVVVGAGDV (KRAS G13D)
FVVEGGGDL

SEQ ID NO: 77389 - protein, 9 aa, synthetic construct
  source 1..9: note = Seed: LVVVGAGDV (KRAS G13D)
FVVEGGGDM

SEQ ID NO: 77390 - protein, 9 aa, synthetic construct
  source 1..9: note = Seed: LVVVGAGDV (KRAS G13D)
FVVEGGGDS

SEQ ID NO: 77391 - protein, 9 aa, synthetic construct
  source 1..9: note = Seed: LVVVGAGDV (KRAS G13D)
FVVEGGGDT

SEQ ID NO: 77392 - protein, 9 aa, synthetic construct
  source 1..9: note = Seed: LVVVGAGDV (KRAS G13D)
FVVEGGGDV

SEQ ID NO: 77393 - protein, 9 aa, synthetic construct
  source 1..9: note = Seed: LVVVGAGDV (KRAS G13D)
FVVEGNGDA

SEQ ID NO: 77394 - protein, 9 aa, synthetic construct
  source 1..9: note = Seed: LVVVGAGDV (KRAS G13D)
FVVEGNGDI

SEQ ID NO: 77395 - protein, 9 aa, synthetic construct
  source 1..9: note = Seed: LVVVGAGDV (KRAS G13D)
FVVEGNGDL

SEQ ID NO: 77396 - protein, 9 aa, synthetic construct
  source 1..9: note = Seed: LVVVGAGDV (KRAS G13D)
FVVEGNGDM

SEQ ID NO: 77397 - protein, 9 aa, synthetic construct
  source 1..9: note = Seed: LVVVGAGDV (KRAS G13D)
FVVEGNGDS

SEQ ID NO: 77398 - protein, 9 aa, synthetic construct
  source 1..9: note = Seed: LVVVGAGDV (KRAS G13D)
FVVEGNGDV

SEQ ID NO: 77399 - protein, 9 aa, synthetic construct
  source 1..9: note = Seed: LVVVGAGDV (KRAS G13D)
FVVEGPGDA

SEQ ID NO: 77400 - protein, 9 aa, synthetic construct
  source 1..9: note = Seed: LVVVGAGDV (KRAS G13D)
FVVEGPGDI

SEQ ID NO: 77401 - protein, 9 aa, synthetic construct
  source 1..9: note = Seed: LVVVGAGDV (KRAS G13D)
FVVEGPGDL

SEQ ID NO: 77402 - protein, 9 aa, synthetic construct
  source 1..9: note = Seed: LVVVGAGDV (KRAS G13D)
FVVEGPGDV

SEQ ID NO: 77403 - protein, 9 aa, synthetic construct
  source 1..9: note = Seed: LVVVGAGDV (KRAS G13D)
FVVEGSGDA

SEQ ID NO: 77404 - protein, 9 aa, synthetic construct
  source 1..9: note = Seed: LVVVGAGDV (KRAS G13D)
FVVEGSGDI

SEQ ID NO: 77405 - protein, 9 aa, synthetic construct
  source 1..9: note = Seed: LVVVGAGDV (KRAS G13D)
FVVEGSGDL

SEQ ID NO: 77406 - protein, 9 aa, synthetic construct
  source 1..9: note = Seed: LVVVGAGDV (KRAS G13D)
FVVEGSGDM

SEQ ID NO: 77407 - protein, 9 aa, synthetic construct
  source 1..9: note = Seed: LVVVGAGDV (KRAS G13D)
FVVEGSGDS

SEQ ID NO: 77408 - protein, 9 aa, synthetic construct
  source 1..9: note = Seed: LVVVGAGDV (KRAS G13D)
FVVEGSGDT

SEQ ID NO: 77409 - protein, 9 aa, synthetic construct
  source 1..9: note = Seed: LVVVGAGDV (KRAS G13D)
FVVEGSGDV

SEQ ID NO: 77410 - protein, 9 aa, synthetic construct
  source 1..9: note = Seed: LVVVGAGDV (KRAS G13D)
FVVEGTGDA

SEQ ID NO: 77411 - protein, 9 aa, synthetic construct
  source 1..9: note = Seed: LVVVGAGDV (KRAS G13D)
FVVEGTGDI

SEQ ID NO: 77412 - protein, 9 aa, synthetic construct
  source 1..9: note = Seed: LVVVGAGDV (KRAS G13D)
FVVEGTGDL

SEQ ID NO: 77413 - protein, 9 aa, synthetic construct
  source 1..9: note = Seed: LVVVGAGDV (KRAS G13D)
FVVEGTGDV

SEQ ID NO: 77414 - protein, 9 aa, synthetic construct
  source 1..9: note = Seed: LVVVGAGDV (KRAS G13D)
FVVEGVGDA

SEQ ID NO: 77415 - protein, 9 aa, synthetic construct
  source 1..9: note = Seed: LVVVGAGDV (KRAS G13D)
FVVEGVGDI

SEQ ID NO: 77416 - protein, 9 aa, synthetic construct
  source 1..9: note = Seed: LVVVGAGDV (KRAS G13D)
FVVEGVGDL

SEQ ID NO: 77417 - protein, 9 aa, synthetic construct
  source 1..9: note = Seed: LVVVGAGDV (KRAS G13D)
FVVEGVGDV

SEQ ID NO: 77418 - protein, 9 aa, synthetic construct
  source 1..9: note = Seed: LVVVGAGDV (KRAS G13D)
FVVFGAGDA

SEQ ID NO: 77419 - protein, 9 aa, synthetic construct
  source 1..9: note = Seed: LVVVGAGDV (KRAS G13D)
FVVFGAGDG

SEQ ID NO: 77420 - protein, 9 aa, synthetic construct
  source 1..9: note = Seed: LVVVGAGDV (KRAS G13D)
FVVFGAGDI

SEQ ID NO: 77421 - protein, 9 aa, synthetic construct
  source 1..9: note = Seed: LVVVGAGDV (KRAS G13D)
FVVFGAGDL

SEQ ID NO: 77422 - protein, 9 aa, synthetic construct
  source 1..9: note = Seed: LVVVGAGDV (KRAS G13D)
FVVFGAGDM

SEQ ID NO: 77423 - protein, 9 aa, synthetic construct
  source 1..9: note = Seed: LVVVGAGDV (KRAS G13D)
FVVFGAGDN

SEQ ID NO: 77424 - protein, 9 aa, synthetic construct
  source 1..9: note = Seed: LVVVGAGDV (KRAS G13D)
FVVFGAGDR

SEQ ID NO: 77425 - protein, 9 aa, synthetic construct
  source 1..9: note = Seed: LVVVGAGDV (KRAS G13D)
FVVFGAGDS

SEQ ID NO: 77426 - protein, 9 aa, synthetic construct
  source 1..9: note = Seed: LVVVGAGDV (KRAS G13D)
FVVFGAGDT

SEQ ID NO: 77427 - protein, 9 aa, synthetic construct
  source 1..9: note = Seed: LVVVGAGDV (KRAS G13D)
FVVFGAGDV

SEQ ID NO: 77428 - protein, 9 aa, synthetic construct
  source 1..9: note = Seed: LVVVGAGDV (KRAS G13D)
FVVFGFGDF

SEQ ID NO: 77429 - protein, 9 aa, synthetic construct
  source 1..9: note = Seed: LVVVGAGDV (KRAS G13D)
FVVFGFGDI

SEQ ID NO: 77430 - protein, 9 aa, synthetic construct
  source 1..9: note = Seed: LVVVGAGDV (KRAS G13D)
FVVFGFGDL

SEQ ID NO: 77431 - protein, 9 aa, synthetic construct
  source 1..9: note = Seed: LVVVGAGDV (KRAS G13D)
FVVFGFGDM

SEQ ID NO: 77432 - protein, 9 aa, synthetic construct
  source 1..9: note = Seed: LVVVGAGDV (KRAS G13D)
FVVFGFGDV

SEQ ID NO: 77433 - protein, 9 aa, synthetic construct
  source 1..9: note = Seed: LVVVGAGDV (KRAS G13D)
FVVFGFGDY

SEQ ID NO: 77434 - protein, 9 aa, synthetic construct
  source 1..9: note = Seed: LVVVGAGDV (KRAS G13D)
FVVFGGGDA

SEQ ID NO: 77435 - protein, 9 aa, synthetic construct
  source 1..9: note = Seed: LVVVGAGDV (KRAS G13D)
FVVFGGGDI

SEQ ID NO: 77436 - protein, 9 aa, synthetic construct
  source 1..9: note = Seed: LVVVGAGDV (KRAS G13D)
FVVFGGGDL

SEQ ID NO: 77437 - protein, 9 aa, synthetic construct
  source 1..9: note = Seed: LVVVGAGDV (KRAS G13D)
FVVFGGGDM

SEQ ID NO: 77438 - protein, 9 aa, synthetic construct
  source 1..9: note = Seed: LVVVGAGDV (KRAS G13D)
FVVFGGGDS

SEQ ID NO: 77439 - protein, 9 aa, synthetic construct
  source 1..9: note = Seed: LVVVGAGDV (KRAS G13D)
FVVFGGGDT

SEQ ID NO: 77440 - protein, 9 aa, synthetic construct
  source 1..9: note = Seed: LVVVGAGDV (KRAS G13D)
FVVFGGGDV

SEQ ID NO: 77441 - protein, 9 aa, synthetic construct
  source 1..9: note = Seed: LVVVGAGDV (KRAS G13D)
FVVFGIGDA

SEQ ID NO: 77442 - protein, 9 aa, synthetic construct
  source 1..9: note = Seed: LVVVGAGDV (KRAS G13D)
FVVFGIGDN

SEQ ID NO: 77443 - protein, 9 aa, synthetic construct
  source 1..9: note = Seed: LVVVGAGDV (KRAS G13D)
FVVFGKGDA

SEQ ID NO: 77444 - protein, 9 aa, synthetic construct
  source 1..9: note = Seed: LVVVGAGDV (KRAS G13D)
FVVFGKGDH

SEQ ID NO: 77445 - protein, 9 aa, synthetic construct
  source 1..9: note = Seed: LVVVGAGDV (KRAS G13D)
FVVFGKGDS

SEQ ID NO: 77446 - protein, 9 aa, synthetic construct
  source 1..9: note = Seed: LVVVGAGDV (KRAS G13D)
FVVFGNGDA

SEQ ID NO: 77447 - protein, 9 aa, synthetic construct
  source 1..9: note = Seed: LVVVGAGDV (KRAS G13D)
FVVFGNGDD

SEQ ID NO: 77448 - protein, 9 aa, synthetic construct
  source 1..9: note = Seed: LVVVGAGDV (KRAS G13D)
FVVFGNGDE

SEQ ID NO: 77449 - protein, 9 aa, synthetic construct
  source 1..9: note = Seed: LVVVGAGDV (KRAS G13D)
FVVFGNGDF

SEQ ID NO: 77450 - protein, 9 aa, synthetic construct
  source 1..9: note = Seed: LVVVGAGDV (KRAS G13D)
FVVFGNGDI

SEQ ID NO: 77451 - protein, 9 aa, synthetic construct
  source 1..9: note = Seed: LVVVGAGDV (KRAS G13D)
FVVFGNGDL

SEQ ID NO: 77452 - protein, 9 aa, synthetic construct
  source 1..9: note = Seed: LVVVGAGDV (KRAS G13D)
FVVFGNGDM

SEQ ID NO: 77453 - protein, 9 aa, synthetic construct
  source 1..9: note = Seed: LVVVGAGDV (KRAS G13D)
FVVFGNGDS

SEQ ID NO: 77454 - protein, 9 aa, synthetic construct
  source 1..9: note = Seed: LVVVGAGDV (KRAS G13D)
FVVFGNGDT

SEQ ID NO: 77455 - protein, 9 aa, synthetic construct
  source 1..9: note = Seed: LVVVGAGDV (KRAS G13D)
FVVFGNGDV

SEQ ID NO: 77456 - protein, 9 aa, synthetic construct
  source 1..9: note = Seed: LVVVGAGDV (KRAS G13D)
FVVFGPGDA

SEQ ID NO: 77457 - protein, 9 aa, synthetic construct
  source 1..9: note = Seed: LVVVGAGDV (KRAS G13D)
FVVFGPGDI

SEQ ID NO: 77458 - protein, 9 aa, synthetic construct
  source 1..9: note = Seed: LVVVGAGDV (KRAS G13D)
FVVFGPGDL

SEQ ID NO: 77459 - protein, 9 aa, synthetic construct
  source 1..9: note = Seed: LVVVGAGDV (KRAS G13D)
FVVFGPGDM

SEQ ID NO: 77460 - protein, 9 aa, synthetic construct
  source 1..9: note = Seed: LVVVGAGDV (KRAS G13D)
FVVFGPGDN

SEQ ID NO: 77461 - protein, 9 aa, synthetic construct
  source 1..9: note = Seed: LVVVGAGDV (KRAS G13D)
FVVFGPGDS

SEQ ID NO: 77462 - protein, 9 aa, synthetic construct
  source 1..9: note = Seed: LVVVGAGDV (KRAS G13D)
FVVFGPGDT

SEQ ID NO: 77463 - protein, 9 aa, synthetic construct
  source 1..9: note = Seed: LVVVGAGDV (KRAS G13D)
FVVFGPGDV

SEQ ID NO: 77464 - protein, 9 aa, synthetic construct
  source 1..9: note = Seed: LVVVGAGDV (KRAS G13D)
FVVFGRGDA

SEQ ID NO: 77465 - protein, 9 aa, synthetic construct
  source 1..9: note = Seed: LVVVGAGDV (KRAS G13D)
FVVFGRGDG

SEQ ID NO: 77466 - protein, 9 aa, synthetic construct
  source 1..9: note = Seed: LVVVGAGDV (KRAS G13D)
FVVFGRGDH

SEQ ID NO: 77467 - protein, 9 aa, synthetic construct
  source 1..9: note = Seed: LVVVGAGDV (KRAS G13D)
FVVFGRGDS

SEQ ID NO: 77468 - protein, 9 aa, synthetic construct
  source 1..9: note = Seed: LVVVGAGDV (KRAS G13D)
FVVFGRGDT

SEQ ID NO: 77469 - protein, 9 aa, synthetic construct
  source 1..9: note = Seed: LVVVGAGDV (KRAS G13D)
FVVFGSGDA

SEQ ID NO: 77470 - protein, 9 aa, synthetic construct
  source 1..9: note = Seed: LVVVGAGDV (KRAS G13D)
FVVFGSGDD

SEQ ID NO: 77471 - protein, 9 aa, synthetic construct
  source 1..9: note = Seed: LVVVGAGDV (KRAS G13D)
FVVFGSGDE

SEQ ID NO: 77472 - protein, 9 aa, synthetic construct
  source 1..9: note = Seed: LVVVGAGDV (KRAS G13D)
FVVFGSGDF

SEQ ID NO: 77473 - protein, 9 aa, synthetic construct
  source 1..9: note = Seed: LVVVGAGDV (KRAS G13D)
FVVFGSGDG

SEQ ID NO: 77474 - protein, 9 aa, synthetic construct
  source 1..9: note = Seed: LVVVGAGDV (KRAS G13D)
FVVFGSGDI

SEQ ID NO: 77475 - protein, 9 aa, synthetic construct
  source 1..9: note = Seed: LVVVGAGDV (KRAS G13D)
FVVFGSGDK

SEQ ID NO: 77476 - protein, 9 aa, synthetic construct
  source 1..9: note = Seed: LVVVGAGDV (KRAS G13D)
FVVFGSGDL

SEQ ID NO: 77477 - protein, 9 aa, synthetic construct
  source 1..9: note = Seed: LVVVGAGDV (KRAS G13D)
FVVFGSGDM

SEQ ID NO: 77478 - protein, 9 aa, synthetic construct
  source 1..9: note = Seed: LVVVGAGDV (KRAS G13D)
FVVFGSGDN

SEQ ID NO: 77479 - protein, 9 aa, synthetic construct
  source 1..9: note = Seed: LVVVGAGDV (KRAS G13D)
FVVFGSGDR

SEQ ID NO: 77480 - protein, 9 aa, synthetic construct
  source 1..9: note = Seed: LVVVGAGDV (KRAS G13D)
FVVFGSGDS

SEQ ID NO: 77481 - protein, 9 aa, synthetic construct
  source 1..9: note = Seed: LVVVGAGDV (KRAS G13D)
FVVFGSGDT

SEQ ID NO: 77482 - protein, 9 aa, synthetic construct
  source 1..9: note = Seed: LVVVGAGDV (KRAS G13D)
FVVFGSGDV

SEQ ID NO: 77483 - protein, 9 aa, synthetic construct
  source 1..9: note = Seed: LVVVGAGDV (KRAS G13D)
FVVFGTGDA

SEQ ID NO: 77484 - protein, 9 aa, synthetic construct
  source 1..9: note = Seed: LVVVGAGDV (KRAS G13D)
FVVFGTGDD

SEQ ID NO: 77485 - protein, 9 aa, synthetic construct
  source 1..9: note = Seed: LVVVGAGDV (KRAS G13D)
FVVFGTGDE

SEQ ID NO: 77486 - protein, 9 aa, synthetic construct
  source 1..9: note = Seed: LVVVGAGDV (KRAS G13D)
FVVFGTGDI

SEQ ID NO: 77487 - protein, 9 aa, synthetic construct
  source 1..9: note = Seed: LVVVGAGDV (KRAS G13D)
FVVFGTGDL

SEQ ID NO: 77488 - protein, 9 aa, synthetic construct
  source 1..9: note = Seed: LVVVGAGDV (KRAS G13D)
FVVFGTGDM

SEQ ID NO: 77489 - protein, 9 aa, synthetic construct
  source 1..9: note = Seed: LVVVGAGDV (KRAS G13D)
FVVFGTGDN

SEQ ID NO: 77490 - protein, 9 aa, synthetic construct
  source 1..9: note = Seed: LVVVGAGDV (KRAS G13D)
FVVFGTGDS

SEQ ID NO: 77491 - protein, 9 aa, synthetic construct
  source 1..9: note = Seed: LVVVGAGDV (KRAS G13D)
FVVFGTGDV

SEQ ID NO: 77492 - protein, 9 aa, synthetic construct
  source 1..9: note = Seed: LVVVGAGDV (KRAS G13D)
FVVFGVGDA

SEQ ID NO: 77493 - protein, 9 aa, synthetic construct
  source 1..9: note = Seed: LVVVGAGDV (KRAS G13D)
FVVFGVGDD

SEQ ID NO: 77494 - protein, 9 aa, synthetic construct
  source 1..9: note = Seed: LVVVGAGDV (KRAS G13D)
FVVFGVGDI

SEQ ID NO: 77495 - protein, 9 aa, synthetic construct
  source 1..9: note = Seed: LVVVGAGDV (KRAS G13D)
FVVFGVGDL

SEQ ID NO: 77496 - protein, 9 aa, synthetic construct
  source 1..9: note = Seed: LVVVGAGDV (KRAS G13D)
FVVFGVGDN

SEQ ID NO: 77497 - protein, 9 aa, synthetic construct
  source 1..9: note = Seed: LVVVGAGDV (KRAS G13D)
FVVFGVGDS

SEQ ID NO: 77498 - protein, 9 aa, synthetic construct
  source 1..9: note = Seed: LVVVGAGDV (KRAS G13D)
FVVFGVGDV

SEQ ID NO: 77499 - protein, 9 aa, synthetic construct
  source 1..9: note = Seed: LVVVGAGDV (KRAS G13D)
FVVFGYGDI

SEQ ID NO: 77500 - protein, 9 aa, synthetic construct
  source 1..9: note = Seed: LVVVGAGDV (KRAS G13D)
FVVFGYGDL

SEQ ID NO: 77501 - protein, 9 aa, synthetic construct
  source 1..9: note = Seed: LVVVGAGDV (KRAS G13D)
FVVFGYGDV

SEQ ID NO: 77502 - protein, 9 aa, synthetic construct
  source 1..9: note = Seed: LVVVGAGDV (KRAS G13D)
FVVGGAGDA

SEQ ID NO: 77503 - protein, 9 aa, synthetic construct
  source 1..9: note = Seed: LVVVGAGDV (KRAS G13D)
FVVGGAGDF

SEQ ID NO: 77504 - protein, 9 aa, synthetic construct
  source 1..9: note = Seed: LVVVGAGDV (KRAS G13D)
FVVGGAGDI

SEQ ID NO: 77505 - protein, 9 aa, synthetic construct
  source 1..9: note = Seed: LVVVGAGDV (KRAS G13D)
FVVGGAGDL

SEQ ID NO: 77506 - protein, 9 aa, synthetic construct
  source 1..9: note = Seed: LVVVGAGDV (KRAS G13D)
FVVGGAGDM

SEQ ID NO: 77507 - protein, 9 aa, synthetic construct
  source 1..9: note = Seed: LVVVGAGDV (KRAS G13D)
FVVGGAGDS

SEQ ID NO: 77508 - protein, 9 aa, synthetic construct
  source 1..9: note = Seed: LVVVGAGDV (KRAS G13D)
FVVGGAGDT

SEQ ID NO: 77509 - protein, 9 aa, synthetic construct
  source 1..9: note = Seed: LVVVGAGDV (KRAS G13D)
FVVGGAGDV

SEQ ID NO: 77510 - protein, 9 aa, synthetic construct
  source 1..9: note = Seed: LVVVGAGDV (KRAS G13D)
FVVGGGGDA

SEQ ID NO: 77511 - protein, 9 aa, synthetic construct
  source 1..9: note = Seed: LVVVGAGDV (KRAS G13D)
FVVGGGGDI

SEQ ID NO: 77512 - protein, 9 aa, synthetic construct
  source 1..9: note = Seed: LVVVGAGDV (KRAS G13D)
FVVGGGGDL

SEQ ID NO: 77513 - protein, 9 aa, synthetic construct
  source 1..9: note = Seed: LVVVGAGDV (KRAS G13D)
FVVGGGGDM

SEQ ID NO: 77514 - protein, 9 aa, synthetic construct
  source 1..9: note = Seed: LVVVGAGDV (KRAS G13D)
FVVGGGGDV

SEQ ID NO: 77515 - protein, 9 aa, synthetic construct
  source 1..9: note = Seed: LVVVGAGDV (KRAS G13D)
FVVGGNGDA

SEQ ID NO: 77516 - protein, 9 aa, synthetic construct
  source 1..9: note = Seed: LVVVGAGDV (KRAS G13D)
FVVGGNGDI

SEQ ID NO: 77517 - protein, 9 aa, synthetic construct
  source 1..9: note = Seed: LVVVGAGDV (KRAS G13D)
FVVGGNGDL

SEQ ID NO: 77518 - protein, 9 aa, synthetic construct
  source 1..9: note = Seed: LVVVGAGDV (KRAS G13D)
FVVGGNGDM

SEQ ID NO: 77519 - protein, 9 aa, synthetic construct
  source 1..9: note = Seed: LVVVGAGDV (KRAS G13D)
FVVGGNGDV

SEQ ID NO: 77520 - protein, 9 aa, synthetic construct
  source 1..9: note = Seed: LVVVGAGDV (KRAS G13D)
FVVGGPGDI

SEQ ID NO: 77521 - protein, 9 aa, synthetic construct
  source 1..9: note = Seed: LVVVGAGDV (KRAS G13D)
FVVGGPGDL

SEQ ID NO: 77522 - protein, 9 aa, synthetic construct
  source 1..9: note = Seed: LVVVGAGDV (KRAS G13D)
FVVGGPGDV

SEQ ID NO: 77523 - protein, 9 aa, synthetic construct
  source 1..9: note = Seed: LVVVGAGDV (KRAS G13D)
FVVGGSGDA

SEQ ID NO: 77524 - protein, 9 aa, synthetic construct
  source 1..9: note = Seed: LVVVGAGDV (KRAS G13D)
FVVGGSGDI

SEQ ID NO: 77525 - protein, 9 aa, synthetic construct
  source 1..9: note = Seed: LVVVGAGDV (KRAS G13D)
FVVGGSGDL

SEQ ID NO: 77526 - protein, 9 aa, synthetic construct
  source 1..9: note = Seed: LVVVGAGDV (KRAS G13D)
FVVGGSGDM

SEQ ID NO: 77527 - protein, 9 aa, synthetic construct
  source 1..9: note = Seed: LVVVGAGDV (KRAS G13D)
FVVGGSGDV

SEQ ID NO: 77528 - protein, 9 aa, synthetic construct
  source 1..9: note = Seed: LVVVGAGDV (KRAS G13D)
FVVGGTGDA

SEQ ID NO: 77529 - protein, 9 aa, synthetic construct
  source 1..9: note = Seed: LVVVGAGDV (KRAS G13D)
FVVGGTGDI

SEQ ID NO: 77530 - protein, 9 aa, synthetic construct
  source 1..9: note = Seed: LVVVGAGDV (KRAS G13D)
FVVGGTGDL

SEQ ID NO: 77531 - protein, 9 aa, synthetic construct
  source 1..9: note = Seed: LVVVGAGDV (KRAS G13D)
FVVGGTGDM

SEQ ID NO: 77532 - protein, 9 aa, synthetic construct
  source 1..9: note = Seed: LVVVGAGDV (KRAS G13D)
FVVGGTGDV

SEQ ID NO: 77533 - protein, 9 aa, synthetic construct
  source 1..9: note = Seed: LVVVGAGDV (KRAS G13D)
FVVGGVGDI

SEQ ID NO: 77534 - protein, 9 aa, synthetic construct
  source 1..9: note = Seed: LVVVGAGDV (KRAS G13D)
FVVGGVGDL

SEQ ID NO: 77535 - protein, 9 aa, synthetic construct
  source 1..9: note = Seed: LVVVGAGDV (KRAS G13D)
FVVGGVGDV

SEQ ID NO: 77536 - protein, 9 aa, synthetic construct
  source 1..9: note = Seed: LVVVGAGDV (KRAS G13D)
FVVHGAGDA

SEQ ID NO: 77537 - protein, 9 aa, synthetic construct
  source 1..9: note = Seed: LVVVGAGDV (KRAS G13D)
FVVHGAGDI

SEQ ID NO: 77538 - protein, 9 aa, synthetic construct
  source 1..9: note = Seed: LVVVGAGDV (KRAS G13D)
FVVHGAGDL

SEQ ID NO: 77539 - protein, 9 aa, synthetic construct
  source 1..9: note = Seed: LVVVGAGDV (KRAS G13D)
FVVHGAGDM

SEQ ID NO: 77540 - protein, 9 aa, synthetic construct
  source 1..9: note = Seed: LVVVGAGDV (KRAS G13D)
FVVHGAGDS

SEQ ID NO: 77541 - protein, 9 aa, synthetic construct
  source 1..9: note = Seed: LVVVGAGDV (KRAS G13D)
FVVHGAGDT

SEQ ID NO: 77542 - protein, 9 aa, synthetic construct
  source 1..9: note = Seed: LVVVGAGDV (KRAS G13D)
FVVHGAGDV

SEQ ID NO: 77543 - protein, 9 aa, synthetic construct
  source 1..9: note = Seed: LVVVGAGDV (KRAS G13D)
FVVHGFGDA

SEQ ID NO: 77544 - protein, 9 aa, synthetic construct
  source 1..9: note = Seed: LVVVGAGDV (KRAS G13D)
FVVHGFGDF

SEQ ID NO: 77545 - protein, 9 aa, synthetic construct
  source 1..9: note = Seed: LVVVGAGDV (KRAS G13D)
FVVHGFGDI

SEQ ID NO: 77546 - protein, 9 aa, synthetic construct
  source 1..9: note = Seed: LVVVGAGDV (KRAS G13D)
FVVHGFGDL

SEQ ID NO: 77547 - protein, 9 aa, synthetic construct
  source 1..9: note = Seed: LVVVGAGDV (KRAS G13D)
FVVHGFGDM

SEQ ID NO: 77548 - protein, 9 aa, synthetic construct
  source 1..9: note = Seed: LVVVGAGDV (KRAS G13D)
FVVHGFGDT

SEQ ID NO: 77549 - protein, 9 aa, synthetic construct
  source 1..9: note = Seed: LVVVGAGDV (KRAS G13D)
FVVHGFGDV

SEQ ID NO: 77550 - protein, 9 aa, synthetic construct
  source 1..9: note = Seed: LVVVGAGDV (KRAS G13D)
FVVHGGGDA

SEQ ID NO: 77551 - protein, 9 aa, synthetic construct
  source 1..9: note = Seed: LVVVGAGDV (KRAS G13D)
FVVHGGGDI

SEQ ID NO: 77552 - protein, 9 aa, synthetic construct
  source 1..9: note = Seed: LVVVGAGDV (KRAS G13D)
FVVHGGGDL

SEQ ID NO: 77553 - protein, 9 aa, synthetic construct
  source 1..9: note = Seed: LVVVGAGDV (KRAS G13D)
FVVHGGGDM

SEQ ID NO: 77554 - protein, 9 aa, synthetic construct
  source 1..9: note = Seed: LVVVGAGDV (KRAS G13D)
FVVHGGGDV

SEQ ID NO: 77555 - protein, 9 aa, synthetic construct
  source 1..9: note = Seed: LVVVGAGDV (KRAS G13D)
FVVHGKGDA

SEQ ID NO: 77556 - protein, 9 aa, synthetic construct
  source 1..9: note = Seed: LVVVGAGDV (KRAS G13D)
FVVHGLGDI

SEQ ID NO: 77557 - protein, 9 aa, synthetic construct
  source 1..9: note = Seed: LVVVGAGDV (KRAS G13D)
FVVHGLGDL

SEQ ID NO: 77558 - protein, 9 aa, synthetic construct
  source 1..9: note = Seed: LVVVGAGDV (KRAS G13D)
FVVHGLGDV

SEQ ID NO: 77559 - protein, 9 aa, synthetic construct
  source 1..9: note = Seed: LVVVGAGDV (KRAS G13D)
FVVHGNGDA

SEQ ID NO: 77560 - protein, 9 aa, synthetic construct
  source 1..9: note = Seed: LVVVGAGDV (KRAS G13D)
FVVHGNGDI

SEQ ID NO: 77561 - protein, 9 aa, synthetic construct
  source 1..9: note = Seed: LVVVGAGDV (KRAS G13D)
FVVHGNGDL

SEQ ID NO: 77562 - protein, 9 aa, synthetic construct
  source 1..9: note = Seed: LVVVGAGDV (KRAS G13D)
FVVHGNGDV

SEQ ID NO: 77563 - protein, 9 aa, synthetic construct
  source 1..9: note = Seed: LVVVGAGDV (KRAS G13D)
FVVHGPGDI

SEQ ID NO: 77564 - protein, 9 aa, synthetic construct
  source 1..9: note = Seed: LVVVGAGDV (KRAS G13D)
FVVHGPGDL

SEQ ID NO: 77565 - protein, 9 aa, synthetic construct
  source 1..9: note = Seed: LVVVGAGDV (KRAS G13D)
FVVHGPGDV

SEQ ID NO: 77566 - protein, 9 aa, synthetic construct
  source 1..9: note = Seed: LVVVGAGDV (KRAS G13D)
FVVHGRGDA

SEQ ID NO: 77567 - protein, 9 aa, synthetic construct
  source 1..9: note = Seed: LVVVGAGDV (KRAS G13D)
FVVHGRGDS

SEQ ID NO: 77568 - protein, 9 aa, synthetic construct
  source 1..9: note = Seed: LVVVGAGDV (KRAS G13D)
FVVHGSGDA

SEQ ID NO: 77569 - protein, 9 aa, synthetic construct
  source 1..9: note = Seed: LVVVGAGDV (KRAS G13D)
FVVHGSGDI

SEQ ID NO: 77570 - protein, 9 aa, synthetic construct
  source 1..9: note = Seed: LVVVGAGDV (KRAS G13D)
FVVHGSGDL

SEQ ID NO: 77571 - protein, 9 aa, synthetic construct
  source 1..9: note = Seed: LVVVGAGDV (KRAS G13D)
FVVHGSGDM

SEQ ID NO: 77572 - protein, 9 aa, synthetic construct
  source 1..9: note = Seed: LVVVGAGDV (KRAS G13D)
FVVHGSGDV

SEQ ID NO: 77573 - protein, 9 aa, synthetic construct
  source 1..9: note = Seed: LVVVGAGDV (KRAS G13D)
FVVHGTGDI

SEQ ID NO: 77574 - protein, 9 aa, synthetic construct
  source 1..9: note = Seed: LVVVGAGDV (KRAS G13D)
FVVHGTGDL

SEQ ID NO: 77575 - protein, 9 aa, synthetic construct
  source 1..9: note = Seed: LVVVGAGDV (KRAS G13D)
FVVHGTGDV

SEQ ID NO: 77576 - protein, 9 aa, synthetic construct
  source 1..9: note = Seed: LVVVGAGDV (KRAS G13D)
FVVHGVGDL

SEQ ID NO: 77577 - protein, 9 aa, synthetic construct
  source 1..9: note = Seed: LVVVGAGDV (KRAS G13D)
FVVIGAGDA

SEQ ID NO: 77578 - protein, 9 aa, synthetic construct
  source 1..9: note = Seed: LVVVGAGDV (KRAS G13D)
FVVIGAGDC

SEQ ID NO: 77579 - protein, 9 aa, synthetic construct
  source 1..9: note = Seed: LVVVGAGDV (KRAS G13D)
FVVIGAGDD

SEQ ID NO: 77580 - protein, 9 aa, synthetic construct
  source 1..9: note = Seed: LVVVGAGDV (KRAS G13D)
FVVIGAGDE

SEQ ID NO: 77581 - protein, 9 aa, synthetic construct
  source 1..9: note = Seed: LVVVGAGDV (KRAS G13D)
FVVIGAGDF

SEQ ID NO: 77582 - protein, 9 aa, synthetic construct
  source 1..9: note = Seed: LVVVGAGDV (KRAS G13D)
FVVIGAGDG

SEQ ID NO: 77583 - protein, 9 aa, synthetic construct
  source 1..9: note = Seed: LVVVGAGDV (KRAS G13D)
FVVIGAGDH

SEQ ID NO: 77584 - protein, 9 aa, synthetic construct
  source 1..9: note = Seed: LVVVGAGDV (KRAS G13D)
FVVIGAGDI

SEQ ID NO: 77585 - protein, 9 aa, synthetic construct
  source 1..9: note = Seed: LVVVGAGDV (KRAS G13D)
FVVIGAGDK

SEQ ID NO: 77586 - protein, 9 aa, synthetic construct
  source 1..9: note = Seed: LVVVGAGDV (KRAS G13D)
FVVIGAGDL

SEQ ID NO: 77587 - protein, 9 aa, synthetic construct
  source 1..9: note = Seed: LVVVGAGDV (KRAS G13D)
FVVIGAGDM

SEQ ID NO: 77588 - protein, 9 aa, synthetic construct
  source 1..9: note = Seed: LVVVGAGDV (KRAS G13D)
FVVIGAGDN

SEQ ID NO: 77589 - protein, 9 aa, synthetic construct
  source 1..9: note = Seed: LVVVGAGDV (KRAS G13D)
FVVIGAGDP

SEQ ID NO: 77590 - protein, 9 aa, synthetic construct
  source 1..9: note = Seed: LVVVGAGDV (KRAS G13D)
FVVIGAGDQ

SEQ ID NO: 77591 - protein, 9 aa, synthetic construct
  source 1..9: note = Seed: LVVVGAGDV (KRAS G13D)
FVVIGAGDR

SEQ ID NO: 77592 - protein, 9 aa, synthetic construct
  source 1..9: note = Seed: LVVVGAGDV (KRAS G13D)
FVVIGAGDS

SEQ ID NO: 77593 - protein, 9 aa, synthetic construct
  source 1..9: note = Seed: LVVVGAGDV (KRAS G13D)
FVVIGAGDT

SEQ ID NO: 77594 - protein, 9 aa, synthetic construct
  source 1..9: note = Seed: LVVVGAGDV (KRAS G13D)
FVVIGAGDV

SEQ ID NO: 77595 - protein, 9 aa, synthetic construct
  source 1..9: note = Seed: LVVVGAGDV (KRAS G13D)
FVVIGAGDW

SEQ ID NO: 77596 - protein, 9 aa, synthetic construct
  source 1..9: note = Seed: LVVVGAGDV (KRAS G13D)
FVVIGAGDY

SEQ ID NO: 77597 - protein, 9 aa, synthetic construct
  source 1..9: note = Seed: LVVVGAGDV (KRAS G13D)
FVVIGCGDA

SEQ ID NO: 77598 - protein, 9 aa, synthetic construct
  source 1..9: note = Seed: LVVVGAGDV (KRAS G13D)
FVVIGCGDL

SEQ ID NO: 77599 - protein, 9 aa, synthetic construct
  source 1..9: note = Seed: LVVVGAGDV (KRAS G13D)
FVVIGCGDV

SEQ ID NO: 77600 - protein, 9 aa, synthetic construct
  source 1..9: note = Seed: LVVVGAGDV (KRAS G13D)
FVVIGDGDI

SEQ ID NO: 77601 - protein, 9 aa, synthetic construct
  source 1..9: note = Seed: LVVVGAGDV (KRAS G13D)
FVVIGDGDL

SEQ ID NO: 77602 - protein, 9 aa, synthetic construct
  source 1..9: note = Seed: LVVVGAGDV (KRAS G13D)
FVVIGDGDV

SEQ ID NO: 77603 - protein, 9 aa, synthetic construct
  source 1..9: note = Seed: LVVVGAGDV (KRAS G13D)
FVVIGEGDL

SEQ ID NO: 77604 - protein, 9 aa, synthetic construct
  source 1..9: note = Seed: LVVVGAGDV (KRAS G13D)
FVVIGFGDA

SEQ ID NO: 77605 - protein, 9 aa, synthetic construct
  source 1..9: note = Seed: LVVVGAGDV (KRAS G13D)
FVVIGFGDF

SEQ ID NO: 77606 - protein, 9 aa, synthetic construct
  source 1..9: note = Seed: LVVVGAGDV (KRAS G13D)
FVVIGFGDI

SEQ ID NO: 77607 - protein, 9 aa, synthetic construct
  source 1..9: note = Seed: LVVVGAGDV (KRAS G13D)
FVVIGFGDL

SEQ ID NO: 77608 - protein, 9 aa, synthetic construct
  source 1..9: note = Seed: LVVVGAGDV (KRAS G13D)
FVVIGFGDM

SEQ ID NO: 77609 - protein, 9 aa, synthetic construct
  source 1..9: note = Seed: LVVVGAGDV (KRAS G13D)
FVVIGFGDT

SEQ ID NO: 77610 - protein, 9 aa, synthetic construct
  source 1..9: note = Seed: LVVVGAGDV (KRAS G13D)
FVVIGFGDV

SEQ ID NO: 77611 - protein, 9 aa, synthetic construct
  source 1..9: note = Seed: LVVVGAGDV (KRAS G13D)
FVVIGFGDY

SEQ ID NO: 77612 - protein, 9 aa, synthetic construct
  source 1..9: note = Seed: LVVVGAGDV (KRAS G13D)
FVVIGGGDA

SEQ ID NO: 77613 - protein, 9 aa, synthetic construct
  source 1..9: note = Seed: LVVVGAGDV (KRAS G13D)
FVVIGGGDC

SEQ ID NO: 77614 - protein, 9 aa, synthetic construct
  source 1..9: note = Seed: LVVVGAGDV (KRAS G13D)
FVVIGGGDF

SEQ ID NO: 77615 - protein, 9 aa, synthetic construct
  source 1..9: note = Seed: LVVVGAGDV (KRAS G13D)
FVVIGGGDG

SEQ ID NO: 77616 - protein, 9 aa, synthetic construct
  source 1..9: note = Seed: LVVVGAGDV (KRAS G13D)
FVVIGGGDH

SEQ ID NO: 77617 - protein, 9 aa, synthetic construct
  source 1..9: note = Seed: LVVVGAGDV (KRAS G13D)
FVVIGGGDI

SEQ ID NO: 77618 - protein, 9 aa, synthetic construct
  source 1..9: note = Seed: LVVVGAGDV (KRAS G13D)
FVVIGGGDL

SEQ ID NO: 77619 - protein, 9 aa, synthetic construct
  source 1..9: note = Seed: LVVVGAGDV (KRAS G13D)
FVVIGGGDM

SEQ ID NO: 77620 - protein, 9 aa, synthetic construct
  source 1..9: note = Seed: LVVVGAGDV (KRAS G13D)
FVVIGGGDN

SEQ ID NO: 77621 - protein, 9 aa, synthetic construct
  source 1..9: note = Seed: LVVVGAGDV (KRAS G13D)
FVVIGGGDP

SEQ ID NO: 77622 - protein, 9 aa, synthetic construct
  source 1..9: note = Seed: LVVVGAGDV (KRAS G13D)
FVVIGGGDQ

SEQ ID NO: 77623 - protein, 9 aa, synthetic construct
  source 1..9: note = Seed: LVVVGAGDV (KRAS G13D)
FVVIGGGDS

SEQ ID NO: 77624 - protein, 9 aa, synthetic construct
  source 1..9: note = Seed: LVVVGAGDV (KRAS G13D)
FVVIGGGDT

SEQ ID NO: 77625 - protein, 9 aa, synthetic construct
  source 1..9: note = Seed: LVVVGAGDV (KRAS G13D)
FVVIGGGDV

SEQ ID NO: 77626 - protein, 9 aa, synthetic construct
  source 1..9: note = Seed: LVVVGAGDV (KRAS G13D)
FVVIGGGDY

SEQ ID NO: 77627 - protein, 9 aa, synthetic construct
  source 1..9: note = Seed: LVVVGAGDV (KRAS G13D)
FVVIGHGDA

SEQ ID NO: 77628 - protein, 9 aa, synthetic construct
  source 1..9: note = Seed: LVVVGAGDV (KRAS G13D)
FVVIGHGDG

SEQ ID NO: 77629 - protein, 9 aa, synthetic construct
  source 1..9: note = Seed: LVVVGAGDV (KRAS G13D)
FVVIGHGDH

SEQ ID NO: 77630 - protein, 9 aa, synthetic construct
  source 1..9: note = Seed: LVVVGAGDV (KRAS G13D)
FVVIGHGDI

SEQ ID NO: 77631 - protein, 9 aa, synthetic construct
  source 1..9: note = Seed: LVVVGAGDV (KRAS G13D)
FVVIGHGDL

SEQ ID NO: 77632 - protein, 9 aa, synthetic construct
  source 1..9: note = Seed: LVVVGAGDV (KRAS G13D)
FVVIGHGDM

SEQ ID NO: 77633 - protein, 9 aa, synthetic construct
  source 1..9: note = Seed: LVVVGAGDV (KRAS G13D)
FVVIGHGDQ

SEQ ID NO: 77634 - protein, 9 aa, synthetic construct
  source 1..9: note = Seed: LVVVGAGDV (KRAS G13D)
FVVIGHGDS

SEQ ID NO: 77635 - protein, 9 aa, synthetic construct
  source 1..9: note = Seed: LVVVGAGDV (KRAS G13D)
FVVIGHGDT

SEQ ID NO: 77636 - protein, 9 aa, synthetic construct
  source 1..9: note = Seed: LVVVGAGDV (KRAS G13D)
FVVIGHGDV

SEQ ID NO: 77637 - protein, 9 aa, synthetic construct
  source 1..9: note = Seed: LVVVGAGDV (KRAS G13D)
FVVIGIGDA

SEQ ID NO: 77638 - protein, 9 aa, synthetic construct
  source 1..9: note = Seed: LVVVGAGDV (KRAS G13D)
FVVIGIGDD

SEQ ID NO: 77639 - protein, 9 aa, synthetic construct
  source 1..9: note = Seed: LVVVGAGDV (KRAS G13D)
FVVIGIGDG

SEQ ID NO: 77640 - protein, 9 aa, synthetic construct
  source 1..9: note = Seed: LVVVGAGDV (KRAS G13D)
FVVIGIGDH

SEQ ID NO: 77641 - protein, 9 aa, synthetic construct
  source 1..9: note = Seed: LVVVGAGDV (KRAS G13D)
FVVIGIGDI

SEQ ID NO: 77642 - protein, 9 aa, synthetic construct
  source 1..9: note = Seed: LVVVGAGDV (KRAS G13D)
FVVIGIGDL

SEQ ID NO: 77643 - protein, 9 aa, synthetic construct
  source 1..9: note = Seed: LVVVGAGDV (KRAS G13D)
FVVIGIGDM

SEQ ID NO: 77644 - protein, 9 aa, synthetic construct
  source 1..9: note = Seed: LVVVGAGDV (KRAS G13D)
FVVIGIGDN

SEQ ID NO: 77645 - protein, 9 aa, synthetic construct
  source 1..9: note = Seed: LVVVGAGDV (KRAS G13D)
FVVIGIGDP

SEQ ID NO: 77646 - protein, 9 aa, synthetic construct
  source 1..9: note = Seed: LVVVGAGDV (KRAS G13D)
FVVIGIGDQ

SEQ ID NO: 77647 - protein, 9 aa, synthetic construct
  source 1..9: note = Seed: LVVVGAGDV (KRAS G13D)
FVVIGIGDS

SEQ ID NO: 77648 - protein, 9 aa, synthetic construct
  source 1..9: note = Seed: LVVVGAGDV (KRAS G13D)
FVVIGIGDT

SEQ ID NO: 77649 - protein, 9 aa, synthetic construct
  source 1..9: note = Seed: LVVVGAGDV (KRAS G13D)
FVVIGIGDV

SEQ ID NO: 77650 - protein, 9 aa, synthetic construct
  source 1..9: note = Seed: LVVVGAGDV (KRAS G13D)
FVVIGKGDA

SEQ ID NO: 77651 - protein, 9 aa, synthetic construct
  source 1..9: note = Seed: LVVVGAGDV (KRAS G13D)
FVVIGKGDG

SEQ ID NO: 77652 - protein, 9 aa, synthetic construct
  source 1..9: note = Seed: LVVVGAGDV (KRAS G13D)
FVVIGKGDH

SEQ ID NO: 77653 - protein, 9 aa, synthetic construct
  source 1..9: note = Seed: LVVVGAGDV (KRAS G13D)
FVVIGKGDI

SEQ ID NO: 77654 - protein, 9 aa, synthetic construct
  source 1..9: note = Seed: LVVVGAGDV (KRAS G13D)
FVVIGKGDK

SEQ ID NO: 77655 - protein, 9 aa, synthetic construct
  source 1..9: note = Seed: LVVVGAGDV (KRAS G13D)
FVVIGKGDL

SEQ ID NO: 77656 - protein, 9 aa, synthetic construct
  source 1..9: note = Seed: LVVVGAGDV (KRAS G13D)
FVVIGKGDM

SEQ ID NO: 77657 - protein, 9 aa, synthetic construct
  source 1..9: note = Seed: LVVVGAGDV (KRAS G13D)
FVVIGKGDN

SEQ ID NO: 77658 - protein, 9 aa, synthetic construct
  source 1..9: note = Seed: LVVVGAGDV (KRAS G13D)
FVVIGKGDP

SEQ ID NO: 77659 - protein, 9 aa, synthetic construct
  source 1..9: note = Seed: LVVVGAGDV (KRAS G13D)
FVVIGKGDQ

SEQ ID NO: 77660 - protein, 9 aa, synthetic construct
  source 1..9: note = Seed: LVVVGAGDV (KRAS G13D)
FVVIGKGDR

SEQ ID NO: 77661 - protein, 9 aa, synthetic construct
  source 1..9: note = Seed: LVVVGAGDV (KRAS G13D)
FVVIGKGDS

SEQ ID NO: 77662 - protein, 9 aa, synthetic construct
  source 1..9: note = Seed: LVVVGAGDV (KRAS G13D)
FVVIGKGDT

SEQ ID NO: 77663 - protein, 9 aa, synthetic construct
  source 1..9: note = Seed: LVVVGAGDV (KRAS G13D)
FVVIGKGDV

SEQ ID NO: 77664 - protein, 9 aa, synthetic construct
  source 1..9: note = Seed: LVVVGAGDV (KRAS G13D)
FVVIGLGDA

SEQ ID NO: 77665 - protein, 9 aa, synthetic construct
  source 1..9: note = Seed: LVVVGAGDV (KRAS G13D)
FVVIGLGDG

SEQ ID NO: 77666 - protein, 9 aa, synthetic construct
  source 1..9: note = Seed: LVVVGAGDV (KRAS G13D)
FVVIGLGDH

SEQ ID NO: 77667 - protein, 9 aa, synthetic construct
  source 1..9: note = Seed: LVVVGAGDV (KRAS G13D)
FVVIGLGDI

SEQ ID NO: 77668 - protein, 9 aa, synthetic construct
  source 1..9: note = Seed: LVVVGAGDV (KRAS G13D)
FVVIGLGDL

SEQ ID NO: 77669 - protein, 9 aa, synthetic construct
  source 1..9: note = Seed: LVVVGAGDV (KRAS G13D)
FVVIGLGDM

SEQ ID NO: 77670 - protein, 9 aa, synthetic construct
  source 1..9: note = Seed: LVVVGAGDV (KRAS G13D)
FVVIGLGDN

SEQ ID NO: 77671 - protein, 9 aa, synthetic construct
  source 1..9: note = Seed: LVVVGAGDV (KRAS G13D)
FVVIGLGDQ

SEQ ID NO: 77672 - protein, 9 aa, synthetic construct
  source 1..9: note = Seed: LVVVGAGDV (KRAS G13D)
FVVIGLGDS

SEQ ID NO: 77673 - protein, 9 aa, synthetic construct
  source 1..9: note = Seed: LVVVGAGDV (KRAS G13D)
FVVIGLGDT

SEQ ID NO: 77674 - protein, 9 aa, synthetic construct
  source 1..9: note = Seed: LVVVGAGDV (KRAS G13D)
FVVIGLGDV

SEQ ID NO: 77675 - protein, 9 aa, synthetic construct
  source 1..9: note = Seed: LVVVGAGDV (KRAS G13D)
FVVIGMGDA

SEQ ID NO: 77676 - protein, 9 aa, synthetic construct
  source 1..9: note = Seed: LVVVGAGDV (KRAS G13D)
FVVIGMGDG

SEQ ID NO: 77677 - protein, 9 aa, synthetic construct
  source 1..9: note = Seed: LVVVGAGDV (KRAS G13D)
FVVIGMGDH

SEQ ID NO: 77678 - protein, 9 aa, synthetic construct
  source 1..9: note = Seed: LVVVGAGDV (KRAS G13D)
FVVIGMGDI

SEQ ID NO: 77679 - protein, 9 aa, synthetic construct
  source 1..9: note = Seed: LVVVGAGDV (KRAS G13D)
FVVIGMGDL

SEQ ID NO: 77680 - protein, 9 aa, synthetic construct
  source 1..9: note = Seed: LVVVGAGDV (KRAS G13D)
FVVIGMGDM

SEQ ID NO: 77681 - protein, 9 aa, synthetic construct
  source 1..9: note = Seed: LVVVGAGDV (KRAS G13D)
FVVIGMGDN

SEQ ID NO: 77682 - protein, 9 aa, synthetic construct
  source 1..9: note = Seed: LVVVGAGDV (KRAS G13D)
FVVIGMGDQ

SEQ ID NO: 77683 - protein, 9 aa, synthetic construct
  source 1..9: note = Seed: LVVVGAGDV (KRAS G13D)
FVVIGMGDS

SEQ ID NO: 77684 - protein, 9 aa, synthetic construct
  source 1..9: note = Seed: LVVVGAGDV (KRAS G13D)
FVVIGMGDT

SEQ ID NO: 77685 - protein, 9 aa, synthetic construct
  source 1..9: note = Seed: LVVVGAGDV (KRAS G13D)
FVVIGMGDV

SEQ ID NO: 77686 - protein, 9 aa, synthetic construct
  source 1..9: note = Seed: LVVVGAGDV (KRAS G13D)
FVVIGNGDA

SEQ ID NO: 77687 - protein, 9 aa, synthetic construct
  source 1..9: note = Seed: LVVVGAGDV (KRAS G13D)
FVVIGNGDC

SEQ ID NO: 77688 - protein, 9 aa, synthetic construct
  source 1..9: note = Seed: LVVVGAGDV (KRAS G13D)
FVVIGNGDD

SEQ ID NO: 77689 - protein, 9 aa, synthetic construct
  source 1..9: note = Seed: LVVVGAGDV (KRAS G13D)
FVVIGNGDE

SEQ ID NO: 77690 - protein, 9 aa, synthetic construct
  source 1..9: note = Seed: LVVVGAGDV (KRAS G13D)
FVVIGNGDF

SEQ ID NO: 77691 - protein, 9 aa, synthetic construct
  source 1..9: note = Seed: LVVVGAGDV (KRAS G13D)
FVVIGNGDG

SEQ ID NO: 77692 - protein, 9 aa, synthetic construct
  source 1..9: note = Seed: LVVVGAGDV (KRAS G13D)
FVVIGNGDH

SEQ ID NO: 77693 - protein, 9 aa, synthetic construct
  source 1..9: note = Seed: LVVVGAGDV (KRAS G13D)
FVVIGNGDI

SEQ ID NO: 77694 - protein, 9 aa, synthetic construct
  source 1..9: note = Seed: LVVVGAGDV (KRAS G13D)
FVVIGNGDL

SEQ ID NO: 77695 - protein, 9 aa, synthetic construct
  source 1..9: note = Seed: LVVVGAGDV (KRAS G13D)
FVVIGNGDM

SEQ ID NO: 77696 - protein, 9 aa, synthetic construct
  source 1..9: note = Seed: LVVVGAGDV (KRAS G13D)
FVVIGNGDN

SEQ ID NO: 77697 - protein, 9 aa, synthetic construct
  source 1..9: note = Seed: LVVVGAGDV (KRAS G13D)
FVVIGNGDP

SEQ ID NO: 77698 - protein, 9 aa, synthetic construct
  source 1..9: note = Seed: LVVVGAGDV (KRAS G13D)
FVVIGNGDQ

SEQ ID NO: 77699 - protein, 9 aa, synthetic construct
  source 1..9: note = Seed: LVVVGAGDV (KRAS G13D)
FVVIGNGDS

SEQ ID NO: 77700 - protein, 9 aa, synthetic construct
  source 1..9: note = Seed: LVVVGAGDV (KRAS G13D)
FVVIGNGDT

SEQ ID NO: 77701 - protein, 9 aa, synthetic construct
  source 1..9: note = Seed: LVVVGAGDV (KRAS G13D)
FVVIGNGDV

SEQ ID NO: 77702 - protein, 9 aa, synthetic construct
  source 1..9: note = Seed: LVVVGAGDV (KRAS G13D)
FVVIGNGDY

SEQ ID NO: 77703 - protein, 9 aa, synthetic construct
  source 1..9: note = Seed: LVVVGAGDV (KRAS G13D)
FVVIGPGDA

SEQ ID NO: 77704 - protein, 9 aa, synthetic construct
  source 1..9: note = Seed: LVVVGAGDV (KRAS G13D)
FVVIGPGDC

SEQ ID NO: 77705 - protein, 9 aa, synthetic construct
  source 1..9: note = Seed: LVVVGAGDV (KRAS G13D)
FVVIGPGDD

SEQ ID NO: 77706 - protein, 9 aa, synthetic construct
  source 1..9: note = Seed: LVVVGAGDV (KRAS G13D)
FVVIGPGDE

SEQ ID NO: 77707 - protein, 9 aa, synthetic construct
  source 1..9: note = Seed: LVVVGAGDV (KRAS G13D)
FVVIGPGDF

SEQ ID NO: 77708 - protein, 9 aa, synthetic construct
  source 1..9: note = Seed: LVVVGAGDV (KRAS G13D)
FVVIGPGDG

SEQ ID NO: 77709 - protein, 9 aa, synthetic construct
  source 1..9: note = Seed: LVVVGAGDV (KRAS G13D)
FVVIGPGDH

SEQ ID NO: 77710 - protein, 9 aa, synthetic construct
  source 1..9: note = Seed: LVVVGAGDV (KRAS G13D)
FVVIGPGDI

SEQ ID NO: 77711 - protein, 9 aa, synthetic construct
  source 1..9: note = Seed: LVVVGAGDV (KRAS G13D)
FVVIGPGDL

SEQ ID NO: 77712 - protein, 9 aa, synthetic construct
  source 1..9: note = Seed: LVVVGAGDV (KRAS G13D)
FVVIGPGDM

SEQ ID NO: 77713 - protein, 9 aa, synthetic construct
  source 1..9: note = Seed: LVVVGAGDV (KRAS G13D)
FVVIGPGDN

SEQ ID NO: 77714 - protein, 9 aa, synthetic construct
  source 1..9: note = Seed: LVVVGAGDV (KRAS G13D)
FVVIGPGDP

SEQ ID NO: 77715 - protein, 9 aa, synthetic construct
  source 1..9: note = Seed: LVVVGAGDV (KRAS G13D)
FVVIGPGDQ

SEQ ID NO: 77716 - protein, 9 aa, synthetic construct
  source 1..9: note = Seed: LVVVGAGDV (KRAS G13D)
FVVIGPGDS

SEQ ID NO: 77717 - protein, 9 aa, synthetic construct
  source 1..9: note = Seed: LVVVGAGDV (KRAS G13D)
FVVIGPGDT

SEQ ID NO: 77718 - protein, 9 aa, synthetic construct
  source 1..9: note = Seed: LVVVGAGDV (KRAS G13D)
FVVIGPGDV

SEQ ID NO: 77719 - protein, 9 aa, synthetic construct
  source 1..9: note = Seed: LVVVGAGDV (KRAS G13D)
FVVIGPGDW

SEQ ID NO: 77720 - protein, 9 aa, synthetic construct
  source 1..9: note = Seed: LVVVGAGDV (KRAS G13D)
FVVIGPGDY

SEQ ID NO: 77721 - protein, 9 aa, synthetic construct
  source 1..9: note = Seed: LVVVGAGDV (KRAS G13D)
FVVIGQGDA

SEQ ID NO: 77722 - protein, 9 aa, synthetic construct
  source 1..9: note = Seed: LVVVGAGDV (KRAS G13D)
FVVIGQGDI

SEQ ID NO: 77723 - protein, 9 aa, synthetic construct
  source 1..9: note = Seed: LVVVGAGDV (KRAS G13D)
FVVIGQGDL

SEQ ID NO: 77724 - protein, 9 aa, synthetic construct
  source 1..9: note = Seed: LVVVGAGDV (KRAS G13D)
FVVIGQGDV

SEQ ID NO: 77725 - protein, 9 aa, synthetic construct
  source 1..9: note = Seed: LVVVGAGDV (KRAS G13D)
FVVIGRGDA

SEQ ID NO: 77726 - protein, 9 aa, synthetic construct
  source 1..9: note = Seed: LVVVGAGDV (KRAS G13D)
FVVIGRGDC

SEQ ID NO: 77727 - protein, 9 aa, synthetic construct
  source 1..9: note = Seed: LVVVGAGDV (KRAS G13D)
FVVIGRGDG

SEQ ID NO: 77728 - protein, 9 aa, synthetic construct
  source 1..9: note = Seed: LVVVGAGDV (KRAS G13D)
FVVIGRGDH

SEQ ID NO: 77729 - protein, 9 aa, synthetic construct
  source 1..9: note = Seed: LVVVGAGDV (KRAS G13D)
FVVIGRGDI

SEQ ID NO: 77730 - protein, 9 aa, synthetic construct
  source 1..9: note = Seed: LVVVGAGDV (KRAS G13D)
FVVIGRGDK

SEQ ID NO: 77731 - protein, 9 aa, synthetic construct
  source 1..9: note = Seed: LVVVGAGDV (KRAS G13D)
FVVIGRGDL

SEQ ID NO: 77732 - protein, 9 aa, synthetic construct
  source 1..9: note = Seed: LVVVGAGDV (KRAS G13D)
FVVIGRGDM

SEQ ID NO: 77733 - protein, 9 aa, synthetic construct
  source 1..9: note = Seed: LVVVGAGDV (KRAS G13D)
FVVIGRGDN

SEQ ID NO: 77734 - protein, 9 aa, synthetic construct
  source 1..9: note = Seed: LVVVGAGDV (KRAS G13D)
FVVIGRGDP

SEQ ID NO: 77735 - protein, 9 aa, synthetic construct
  source 1..9: note = Seed: LVVVGAGDV (KRAS G13D)
FVVIGRGDQ

SEQ ID NO: 77736 - protein, 9 aa, synthetic construct
  source 1..9: note = Seed: LVVVGAGDV (KRAS G13D)
FVVIGRGDR

SEQ ID NO: 77737 - protein, 9 aa, synthetic construct
  source 1..9: note = Seed: LVVVGAGDV (KRAS G13D)
FVVIGRGDS

SEQ ID NO: 77738 - protein, 9 aa, synthetic construct
  source 1..9: note = Seed: LVVVGAGDV (KRAS G13D)
FVVIGRGDT

SEQ ID NO: 77739 - protein, 9 aa, synthetic construct
  source 1..9: note = Seed: LVVVGAGDV (KRAS G13D)
FVVIGRGDV

SEQ ID NO: 77740 - protein, 9 aa, synthetic construct
  source 1..9: note = Seed: LVVVGAGDV (KRAS G13D)
FVVIGRGDY

SEQ ID NO: 77741 - protein, 9 aa, synthetic construct
  source 1..9: note = Seed: LVVVGAGDV (KRAS G13D)
FVVIGSGDA

SEQ ID NO: 77742 - protein, 9 aa, synthetic construct
  source 1..9: note = Seed: LVVVGAGDV (KRAS G13D)
FVVIGSGDC

SEQ ID NO: 77743 - protein, 9 aa, synthetic construct
  source 1..9: note = Seed: LVVVGAGDV (KRAS G13D)
FVVIGSGDD

SEQ ID NO: 77744 - protein, 9 aa, synthetic construct
  source 1..9: note = Seed: LVVVGAGDV (KRAS G13D)
FVVIGSGDE

SEQ ID NO: 77745 - protein, 9 aa, synthetic construct
  source 1..9: note = Seed: LVVVGAGDV (KRAS G13D)
FVVIGSGDF

SEQ ID NO: 77746 - protein, 9 aa, synthetic construct
  source 1..9: note = Seed: LVVVGAGDV (KRAS G13D)
FVVIGSGDG

SEQ ID NO: 77747 - protein, 9 aa, synthetic construct
  source 1..9: note = Seed: LVVVGAGDV (KRAS G13D)
FVVIGSGDH

SEQ ID NO: 77748 - protein, 9 aa, synthetic construct
  source 1..9: note = Seed: LVVVGAGDV (KRAS G13D)
FVVIGSGDI

SEQ ID NO: 77749 - protein, 9 aa, synthetic construct
  source 1..9: note = Seed: LVVVGAGDV (KRAS G13D)
FVVIGSGDK

SEQ ID NO: 77750 - protein, 9 aa, synthetic construct
  source 1..9: note = Seed: LVVVGAGDV (KRAS G13D)
FVVIGSGDL

SEQ ID NO: 77751 - protein, 9 aa, synthetic construct
  source 1..9: note = Seed: LVVVGAGDV (KRAS G13D)
FVVIGSGDM

SEQ ID NO: 77752 - protein, 9 aa, synthetic construct
  source 1..9: note = Seed: LVVVGAGDV (KRAS G13D)
FVVIGSGDN

SEQ ID NO: 77753 - protein, 9 aa, synthetic construct
  source 1..9: note = Seed: LVVVGAGDV (KRAS G13D)
FVVIGSGDP

SEQ ID NO: 77754 - protein, 9 aa, synthetic construct
  source 1..9: note = Seed: LVVVGAGDV (KRAS G13D)
FVVIGSGDQ

SEQ ID NO: 77755 - protein, 9 aa, synthetic construct
  source 1..9: note = Seed: LVVVGAGDV (KRAS G13D)
FVVIGSGDR

SEQ ID NO: 77756 - protein, 9 aa, synthetic construct
  source 1..9: note = Seed: LVVVGAGDV (KRAS G13D)
FVVIGSGDS

SEQ ID NO: 77757 - protein, 9 aa, synthetic construct
  source 1..9: note = Seed: LVVVGAGDV (KRAS G13D)
FVVIGSGDT

SEQ ID NO: 77758 - protein, 9 aa, synthetic construct
  source 1..9: note = Seed: LVVVGAGDV (KRAS G13D)
FVVIGSGDV

SEQ ID NO: 77759 - protein, 9 aa, synthetic construct
  source 1..9: note = Seed: LVVVGAGDV (KRAS G13D)
FVVIGSGDY

SEQ ID NO: 77760 - protein, 9 aa, synthetic construct
  source 1..9: note = Seed: LVVVGAGDV (KRAS G13D)
FVVIGTGDA

SEQ ID NO: 77761 - protein, 9 aa, synthetic construct
  source 1..9: note = Seed: LVVVGAGDV (KRAS G13D)
FVVIGTGDC

SEQ ID NO: 77762 - protein, 9 aa, synthetic construct
  source 1..9: note = Seed: LVVVGAGDV (KRAS G13D)
FVVIGTGDD

SEQ ID NO: 77763 - protein, 9 aa, synthetic construct
  source 1..9: note = Seed: LVVVGAGDV (KRAS G13D)
FVVIGTGDE

SEQ ID NO: 77764 - protein, 9 aa, synthetic construct
  source 1..9: note = Seed: LVVVGAGDV (KRAS G13D)
FVVIGTGDF

SEQ ID NO: 77765 - protein, 9 aa, synthetic construct
  source 1..9: note = Seed: LVVVGAGDV (KRAS G13D)
FVVIGTGDG

SEQ ID NO: 77766 - protein, 9 aa, synthetic construct
  source 1..9: note = Seed: LVVVGAGDV (KRAS G13D)
FVVIGTGDH

SEQ ID NO: 77767 - protein, 9 aa, synthetic construct
  source 1..9: note = Seed: LVVVGAGDV (KRAS G13D)
FVVIGTGDI

SEQ ID NO: 77768 - protein, 9 aa, synthetic construct
  source 1..9: note = Seed: LVVVGAGDV (KRAS G13D)
FVVIGTGDL

SEQ ID NO: 77769 - protein, 9 aa, synthetic construct
  source 1..9: note = Seed: LVVVGAGDV (KRAS G13D)
FVVIGTGDM

SEQ ID NO: 77770 - protein, 9 aa, synthetic construct
  source 1..9: note = Seed: LVVVGAGDV (KRAS G13D)
FVVIGTGDN

SEQ ID NO: 77771 - protein, 9 aa, synthetic construct
  source 1..9: note = Seed: LVVVGAGDV (KRAS G13D)
FVVIGTGDP

SEQ ID NO: 77772 - protein, 9 aa, synthetic construct
  source 1..9: note = Seed: LVVVGAGDV (KRAS G13D)
FVVIGTGDQ

SEQ ID NO: 77773 - protein, 9 aa, synthetic construct
  source 1..9: note = Seed: LVVVGAGDV (KRAS G13D)
FVVIGTGDS

SEQ ID NO: 77774 - protein, 9 aa, synthetic construct
  source 1..9: note = Seed: LVVVGAGDV (KRAS G13D)
FVVIGTGDT

SEQ ID NO: 77775 - protein, 9 aa, synthetic construct
  source 1..9: note = Seed: LVVVGAGDV (KRAS G13D)
FVVIGTGDV

SEQ ID NO: 77776 - protein, 9 aa, synthetic construct
  source 1..9: note = Seed: LVVVGAGDV (KRAS G13D)
FVVIGTGDY

SEQ ID NO: 77777 - protein, 9 aa, synthetic construct
  source 1..9: note = Seed: LVVVGAGDV (KRAS G13D)
FVVIGVGDA

SEQ ID NO: 77778 - protein, 9 aa, synthetic construct
  source 1..9: note = Seed: LVVVGAGDV (KRAS G13D)
FVVIGVGDC

SEQ ID NO: 77779 - protein, 9 aa, synthetic construct
  source 1..9: note = Seed: LVVVGAGDV (KRAS G13D)
FVVIGVGDD

SEQ ID NO: 77780 - protein, 9 aa, synthetic construct
  source 1..9: note = Seed: LVVVGAGDV (KRAS G13D)
FVVIGVGDE

SEQ ID NO: 77781 - protein, 9 aa, synthetic construct
  source 1..9: note = Seed: LVVVGAGDV (KRAS G13D)
FVVIGVGDG

SEQ ID NO: 77782 - protein, 9 aa, synthetic construct
  source 1..9: note = Seed: LVVVGAGDV (KRAS G13D)
FVVIGVGDH

SEQ ID NO: 77783 - protein, 9 aa, synthetic construct
  source 1..9: note = Seed: LVVVGAGDV (KRAS G13D)
FVVIGVGDI

SEQ ID NO: 77784 - protein, 9 aa, synthetic construct
  source 1..9: note = Seed: LVVVGAGDV (KRAS G13D)
FVVIGVGDL

SEQ ID NO: 77785 - protein, 9 aa, synthetic construct
  source 1..9: note = Seed: LVVVGAGDV (KRAS G13D)
FVVIGVGDM

SEQ ID NO: 77786 - protein, 9 aa, synthetic construct
  source 1..9: note = Seed: LVVVGAGDV (KRAS G13D)
FVVIGVGDN

SEQ ID NO: 77787 - protein, 9 aa, synthetic construct
  source 1..9: note = Seed: LVVVGAGDV (KRAS G13D)
FVVIGVGDP

SEQ ID NO: 77788 - protein, 9 aa, synthetic construct
  source 1..9: note = Seed: LVVVGAGDV (KRAS G13D)
FVVIGVGDQ

SEQ ID NO: 77789 - protein, 9 aa, synthetic construct
  source 1..9: note = Seed: LVVVGAGDV (KRAS G13D)
FVVIGVGDS

SEQ ID NO: 77790 - protein, 9 aa, synthetic construct
  source 1..9: note = Seed: LVVVGAGDV (KRAS G13D)
FVVIGVGDT

SEQ ID NO: 77791 - protein, 9 aa, synthetic construct
  source 1..9: note = Seed: LVVVGAGDV (KRAS G13D)
FVVIGVGDV

SEQ ID NO: 77792 - protein, 9 aa, synthetic construct
  source 1..9: note = Seed: LVVVGAGDV (KRAS G13D)
FVVIGYGDI

SEQ ID NO: 77793 - protein, 9 aa, synthetic construct
  source 1..9: note = Seed: LVVVGAGDV (KRAS G13D)
FVVIGYGDL

SEQ ID NO: 77794 - protein, 9 aa, synthetic construct
  source 1..9: note = Seed: LVVVGAGDV (KRAS G13D)
FVVIGYGDV

SEQ ID NO: 77795 - protein, 9 aa, synthetic construct
  source 1..9: note = Seed: LVVVGAGDV (KRAS G13D)
FVVKGAGDI

SEQ ID NO: 77796 - protein, 9 aa, synthetic construct
  source 1..9: note = Seed: LVVVGAGDV (KRAS G13D)
FVVKGAGDL

SEQ ID NO: 77797 - protein, 9 aa, synthetic construct
  source 1..9: note = Seed: LVVVGAGDV (KRAS G13D)
FVVKGAGDV

SEQ ID NO: 77798 - protein, 9 aa, synthetic construct
  source 1..9: note = Seed: LVVVGAGDV (KRAS G13D)
FVVKGFGDI

SEQ ID NO: 77799 - protein, 9 aa, synthetic construct
  source 1..9: note = Seed: LVVVGAGDV (KRAS G13D)
FVVKGFGDL

SEQ ID NO: 77800 - protein, 9 aa, synthetic construct
  source 1..9: note = Seed: LVVVGAGDV (KRAS G13D)
FVVKGFGDV

SEQ ID NO: 77801 - protein, 9 aa, synthetic construct
  source 1..9: note = Seed: LVVVGAGDV (KRAS G13D)
FVVKGKGDA

SEQ ID NO: 77802 - protein, 9 aa, synthetic construct
  source 1..9: note = Seed: LVVVGAGDV (KRAS G13D)
FVVKGKGDG

SEQ ID NO: 77803 - protein, 9 aa, synthetic construct
  source 1..9: note = Seed: LVVVGAGDV (KRAS G13D)
FVVKGKGDQ

SEQ ID NO: 77804 - protein, 9 aa, synthetic construct
  source 1..9: note = Seed: LVVVGAGDV (KRAS G13D)
FVVKGKGDS

SEQ ID NO: 77805 - protein, 9 aa, synthetic construct
  source 1..9: note = Seed: LVVVGAGDV (KRAS G13D)
FVVKGRGDA

SEQ ID NO: 77806 - protein, 9 aa, synthetic construct
  source 1..9: note = Seed: LVVVGAGDV (KRAS G13D)
FVVKGSGDL

SEQ ID NO: 77807 - protein, 9 aa, synthetic construct
  source 1..9: note = Seed: LVVVGAGDV (KRAS G13D)
FVVLGAGDA

SEQ ID NO: 77808 - protein, 9 aa, synthetic construct
  source 1..9: note = Seed: LVVVGAGDV (KRAS G13D)
FVVLGAGDC

SEQ ID NO: 77809 - protein, 9 aa, synthetic construct
  source 1..9: note = Seed: LVVVGAGDV (KRAS G13D)
FVVLGAGDD

SEQ ID NO: 77810 - protein, 9 aa, synthetic construct
  source 1..9: note = Seed: LVVVGAGDV (KRAS G13D)
FVVLGAGDE

SEQ ID NO: 77811 - protein, 9 aa, synthetic construct
  source 1..9: note = Seed: LVVVGAGDV (KRAS G13D)
FVVLGAGDF

SEQ ID NO: 77812 - protein, 9 aa, synthetic construct
  source 1..9: note = Seed: LVVVGAGDV (KRAS G13D)
FVVLGAGDG

SEQ ID NO: 77813 - protein, 9 aa, synthetic construct
  source 1..9: note = Seed: LVVVGAGDV (KRAS G13D)
FVVLGAGDH

SEQ ID NO: 77814 - protein, 9 aa, synthetic construct
  source 1..9: note = Seed: LVVVGAGDV (KRAS G13D)
FVVLGAGDK

SEQ ID NO: 77815 - protein, 9 aa, synthetic construct
  source 1..9: note = Seed: LVVVGAGDV (KRAS G13D)
FVVLGAGDM

SEQ ID NO: 77816 - protein, 9 aa, synthetic construct
  source 1..9: note = Seed: LVVVGAGDV (KRAS G13D)
FVVLGAGDN

SEQ ID NO: 77817 - protein, 9 aa, synthetic construct
  source 1..9: note = Seed: LVVVGAGDV (KRAS G13D)
FVVLGAGDP

SEQ ID NO: 77818 - protein, 9 aa, synthetic construct
  source 1..9: note = Seed: LVVVGAGDV (KRAS G13D)
FVVLGAGDQ

SEQ ID NO: 77819 - protein, 9 aa, synthetic construct
  source 1..9: note = Seed: LVVVGAGDV (KRAS G13D)
FVVLGAGDR

SEQ ID NO: 77820 - protein, 9 aa, synthetic construct
  source 1..9: note = Seed: LVVVGAGDV (KRAS G13D)
FVVLGAGDS

SEQ ID NO: 77821 - protein, 9 aa, synthetic construct
  source 1..9: note = Seed: LVVVGAGDV (KRAS G13D)
FVVLGAGDT

SEQ ID NO: 77822 - protein, 9 aa, synthetic construct
  source 1..9: note = Seed: LVVVGAGDV (KRAS G13D)
FVVLGAGDW

SEQ ID NO: 77823 - protein, 9 aa, synthetic construct
  source 1..9: note = Seed: LVVVGAGDV (KRAS G13D)
FVVLGAGDY

SEQ ID NO: 77824 - protein, 9 aa, synthetic construct
  source 1..9: note = Seed: LVVVGAGDV (KRAS G13D)
FVVLGCGDA

SEQ ID NO: 77825 - protein, 9 aa, synthetic construct
  source 1..9: note = Seed: LVVVGAGDV (KRAS G13D)
FVVLGCGDI

SEQ ID NO: 77826 - protein, 9 aa, synthetic construct
  source 1..9: note = Seed: LVVVGAGDV (KRAS G13D)
FVVLGCGDL

SEQ ID NO: 77827 - protein, 9 aa, synthetic construct
  source 1..9: note = Seed: LVVVGAGDV (KRAS G13D)
FVVLGCGDM

SEQ ID NO: 77828 - protein, 9 aa, synthetic construct
  source 1..9: note = Seed: LVVVGAGDV (KRAS G13D)
FVVLGCGDT

SEQ ID NO: 77829 - protein, 9 aa, synthetic construct
  source 1..9: note = Seed: LVVVGAGDV (KRAS G13D)
FVVLGCGDV

SEQ ID NO: 77830 - protein, 9 aa, synthetic construct
  source 1..9: note = Seed: LVVVGAGDV (KRAS G13D)
FVVLGDGDA

SEQ ID NO: 77831 - protein, 9 aa, synthetic construct
  source 1..9: note = Seed: LVVVGAGDV (KRAS G13D)
FVVLGDGDI

SEQ ID NO: 77832 - protein, 9 aa, synthetic construct
  source 1..9: note = Seed: LVVVGAGDV (KRAS G13D)
FVVLGDGDL

SEQ ID NO: 77833 - protein, 9 aa, synthetic construct
  source 1..9: note = Seed: LVVVGAGDV (KRAS G13D)
FVVLGDGDM

SEQ ID NO: 77834 - protein, 9 aa, synthetic construct
  source 1..9: note = Seed: LVVVGAGDV (KRAS G13D)
FVVLGDGDV

SEQ ID NO: 77835 - protein, 9 aa, synthetic construct
  source 1..9: note = Seed: LVVVGAGDV (KRAS G13D)
FVVLGEGDA

SEQ ID NO: 77836 - protein, 9 aa, synthetic construct
  source 1..9: note = Seed: LVVVGAGDV (KRAS G13D)
FVVLGEGDI

SEQ ID NO: 77837 - protein, 9 aa, synthetic construct
  source 1..9: note = Seed: LVVVGAGDV (KRAS G13D)
FVVLGEGDL

SEQ ID NO: 77838 - protein, 9 aa, synthetic construct
  source 1..9: note = Seed: LVVVGAGDV (KRAS G13D)
FVVLGEGDM

SEQ ID NO: 77839 - protein, 9 aa, synthetic construct
  source 1..9: note = Seed: LVVVGAGDV (KRAS G13D)
FVVLGEGDV

SEQ ID NO: 77840 - protein, 9 aa, synthetic construct
  source 1..9: note = Seed: LVVVGAGDV (KRAS G13D)
FVVLGFGDI

SEQ ID NO: 77841 - protein, 9 aa, synthetic construct
  source 1..9: note = Seed: LVVVGAGDV (KRAS G13D)
FVVLGFGDL

SEQ ID NO: 77842 - protein, 9 aa, synthetic construct
  source 1..9: note = Seed: LVVVGAGDV (KRAS G13D)
FVVLGFGDV

SEQ ID NO: 77843 - protein, 9 aa, synthetic construct
  source 1..9: note = Seed: LVVVGAGDV (KRAS G13D)
FVVLGGGDA

SEQ ID NO: 77844 - protein, 9 aa, synthetic construct
  source 1..9: note = Seed: LVVVGAGDV (KRAS G13D)
FVVLGGGDC

SEQ ID NO: 77845 - protein, 9 aa, synthetic construct
  source 1..9: note = Seed: LVVVGAGDV (KRAS G13D)
FVVLGGGDD

SEQ ID NO: 77846 - protein, 9 aa, synthetic construct
  source 1..9: note = Seed: LVVVGAGDV (KRAS G13D)
FVVLGGGDE

SEQ ID NO: 77847 - protein, 9 aa, synthetic construct
  source 1..9: note = Seed: LVVVGAGDV (KRAS G13D)
FVVLGGGDF

SEQ ID NO: 77848 - protein, 9 aa, synthetic construct
  source 1..9: note = Seed: LVVVGAGDV (KRAS G13D)
FVVLGGGDG

SEQ ID NO: 77849 - protein, 9 aa, synthetic construct
  source 1..9: note = Seed: LVVVGAGDV (KRAS G13D)
FVVLGGGDH

SEQ ID NO: 77850 - protein, 9 aa, synthetic construct
  source 1..9: note = Seed: LVVVGAGDV (KRAS G13D)
FVVLGGGDI

SEQ ID NO: 77851 - protein, 9 aa, synthetic construct
  source 1..9: note = Seed: LVVVGAGDV (KRAS G13D)
FVVLGGGDK

SEQ ID NO: 77852 - protein, 9 aa, synthetic construct
  source 1..9: note = Seed: LVVVGAGDV (KRAS G13D)
FVVLGGGDM

SEQ ID NO: 77853 - protein, 9 aa, synthetic construct
  source 1..9: note = Seed: LVVVGAGDV (KRAS G13D)
FVVLGGGDN

SEQ ID NO: 77854 - protein, 9 aa, synthetic construct
  source 1..9: note = Seed: LVVVGAGDV (KRAS G13D)
FVVLGGGDP

SEQ ID NO: 77855 - protein, 9 aa, synthetic construct
  source 1..9: note = Seed: LVVVGAGDV (KRAS G13D)
FVVLGGGDQ

SEQ ID NO: 77856 - protein, 9 aa, synthetic construct
  source 1..9: note = Seed: LVVVGAGDV (KRAS G13D)
FVVLGGGDR

SEQ ID NO: 77857 - protein, 9 aa, synthetic construct
  source 1..9: note = Seed: LVVVGAGDV (KRAS G13D)
FVVLGGGDS

SEQ ID NO: 77858 - protein, 9 aa, synthetic construct
  source 1..9: note = Seed: LVVVGAGDV (KRAS G13D)
FVVLGGGDT

SEQ ID NO: 77859 - protein, 9 aa, synthetic construct
  source 1..9: note = Seed: LVVVGAGDV (KRAS G13D)
FVVLGGGDW

SEQ ID NO: 77860 - protein, 9 aa, synthetic construct
  source 1..9: note = Seed: LVVVGAGDV (KRAS G13D)
FVVLGGGDY

SEQ ID NO: 77861 - protein, 9 aa, synthetic construct
  source 1..9: note = Seed: LVVVGAGDV (KRAS G13D)
FVVLGHGDA

SEQ ID NO: 77862 - protein, 9 aa, synthetic construct
  source 1..9: note = Seed: LVVVGAGDV (KRAS G13D)
FVVLGHGDG

SEQ ID NO: 77863 - protein, 9 aa, synthetic construct
  source 1..9: note = Seed: LVVVGAGDV (KRAS G13D)
FVVLGHGDH

SEQ ID NO: 77864 - protein, 9 aa, synthetic construct
  source 1..9: note = Seed: LVVVGAGDV (KRAS G13D)
FVVLGHGDI

SEQ ID NO: 77865 - protein, 9 aa, synthetic construct
  source 1..9: note = Seed: LVVVGAGDV (KRAS G13D)
FVVLGHGDL

SEQ ID NO: 77866 - protein, 9 aa, synthetic construct
  source 1..9: note = Seed: LVVVGAGDV (KRAS G13D)
FVVLGHGDM

SEQ ID NO: 77867 - protein, 9 aa, synthetic construct
  source 1..9: note = Seed: LVVVGAGDV (KRAS G13D)
FVVLGHGDS

SEQ ID NO: 77868 - protein, 9 aa, synthetic construct
  source 1..9: note = Seed: LVVVGAGDV (KRAS G13D)
FVVLGHGDT

SEQ ID NO: 77869 - protein, 9 aa, synthetic construct
  source 1..9: note = Seed: LVVVGAGDV (KRAS G13D)
FVVLGHGDV

SEQ ID NO: 77870 - protein, 9 aa, synthetic construct
  source 1..9: note = Seed: LVVVGAGDV (KRAS G13D)
FVVLGIGDA

SEQ ID NO: 77871 - protein, 9 aa, synthetic construct
  source 1..9: note = Seed: LVVVGAGDV (KRAS G13D)
FVVLGIGDC

SEQ ID NO: 77872 - protein, 9 aa, synthetic construct
  source 1..9: note = Seed: LVVVGAGDV (KRAS G13D)
FVVLGIGDD

SEQ ID NO: 77873 - protein, 9 aa, synthetic construct
  source 1..9: note = Seed: LVVVGAGDV (KRAS G13D)
FVVLGIGDE

SEQ ID NO: 77874 - protein, 9 aa, synthetic construct
  source 1..9: note = Seed: LVVVGAGDV (KRAS G13D)
FVVLGIGDG

SEQ ID NO: 77875 - protein, 9 aa, synthetic construct
  source 1..9: note = Seed: LVVVGAGDV (KRAS G13D)
FVVLGIGDH

SEQ ID NO: 77876 - protein, 9 aa, synthetic construct
  source 1..9: note = Seed: LVVVGAGDV (KRAS G13D)
FVVLGIGDI

SEQ ID NO: 77877 - protein, 9 aa, synthetic construct
  source 1..9: note = Seed: LVVVGAGDV (KRAS G13D)
FVVLGIGDL

SEQ ID NO: 77878 - protein, 9 aa, synthetic construct
  source 1..9: note = Seed: LVVVGAGDV (KRAS G13D)
FVVLGIGDM

SEQ ID NO: 77879 - protein, 9 aa, synthetic construct
  source 1..9: note = Seed: LVVVGAGDV (KRAS G13D)
FVVLGIGDN

SEQ ID NO: 77880 - protein, 9 aa, synthetic construct
  source 1..9: note = Seed: LVVVGAGDV (KRAS G13D)
FVVLGIGDP

SEQ ID NO: 77881 - protein, 9 aa, synthetic construct
  source 1..9: note = Seed: LVVVGAGDV (KRAS G13D)
FVVLGIGDQ

SEQ ID NO: 77882 - protein, 9 aa, synthetic construct
  source 1..9: note = Seed: LVVVGAGDV (KRAS G13D)
FVVLGIGDR

SEQ ID NO: 77883 - protein, 9 aa, synthetic construct
  source 1..9: note = Seed: LVVVGAGDV (KRAS G13D)
FVVLGIGDS

SEQ ID NO: 77884 - protein, 9 aa, synthetic construct
  source 1..9: note = Seed: LVVVGAGDV (KRAS G13D)
FVVLGIGDT

SEQ ID NO: 77885 - protein, 9 aa, synthetic construct
  source 1..9: note = Seed: LVVVGAGDV (KRAS G13D)
FVVLGIGDV

SEQ ID NO: 77886 - protein, 9 aa, synthetic construct
  source 1..9: note = Seed: LVVVGAGDV (KRAS G13D)
FVVLGKGDA

SEQ ID NO: 77887 - protein, 9 aa, synthetic construct
  source 1..9: note = Seed: LVVVGAGDV (KRAS G13D)
FVVLGKGDG

SEQ ID NO: 77888 - protein, 9 aa, synthetic construct
  source 1..9: note = Seed: LVVVGAGDV (KRAS G13D)
FVVLGKGDH

SEQ ID NO: 77889 - protein, 9 aa, synthetic construct
  source 1..9: note = Seed: LVVVGAGDV (KRAS G13D)
FVVLGKGDI

SEQ ID NO: 77890 - protein, 9 aa, synthetic construct
  source 1..9: note = Seed: LVVVGAGDV (KRAS G13D)
FVVLGKGDL

SEQ ID NO: 77891 - protein, 9 aa, synthetic construct
  source 1..9: note = Seed: LVVVGAGDV (KRAS G13D)
FVVLGKGDM

SEQ ID NO: 77892 - protein, 9 aa, synthetic construct
  source 1..9: note = Seed: LVVVGAGDV (KRAS G13D)
FVVLGKGDN

SEQ ID NO: 77893 - protein, 9 aa, synthetic construct
  source 1..9: note = Seed: LVVVGAGDV (KRAS G13D)
FVVLGKGDP

SEQ ID NO: 77894 - protein, 9 aa, synthetic construct
  source 1..9: note = Seed: LVVVGAGDV (KRAS G13D)
FVVLGKGDQ

SEQ ID NO: 77895 - protein, 9 aa, synthetic construct
  source 1..9: note = Seed: LVVVGAGDV (KRAS G13D)
FVVLGKGDR

SEQ ID NO: 77896 - protein, 9 aa, synthetic construct
  source 1..9: note = Seed: LVVVGAGDV (KRAS G13D)
FVVLGKGDS

SEQ ID NO: 77897 - protein, 9 aa, synthetic construct
  source 1..9: note = Seed: LVVVGAGDV (KRAS G13D)
FVVLGKGDT

SEQ ID NO: 77898 - protein, 9 aa, synthetic construct
  source 1..9: note = Seed: LVVVGAGDV (KRAS G13D)
FVVLGKGDV

SEQ ID NO: 77899 - protein, 9 aa, synthetic construct
  source 1..9: note = Seed: LVVVGAGDV (KRAS G13D)
FVVLGLGDA

SEQ ID NO: 77900 - protein, 9 aa, synthetic construct
  source 1..9: note = Seed: LVVVGAGDV (KRAS G13D)
FVVLGLGDH

SEQ ID NO: 77901 - protein, 9 aa, synthetic construct
  source 1..9: note = Seed: LVVVGAGDV (KRAS G13D)
FVVLGLGDI

SEQ ID NO: 77902 - protein, 9 aa, synthetic construct
  source 1..9: note = Seed: LVVVGAGDV (KRAS G13D)
FVVLGLGDL

SEQ ID NO: 77903 - protein, 9 aa, synthetic construct
  source 1..9: note = Seed: LVVVGAGDV (KRAS G13D)
FVVLGLGDM

SEQ ID NO: 77904 - protein, 9 aa, synthetic construct
  source 1..9: note = Seed: LVVVGAGDV (KRAS G13D)
FVVLGLGDN

SEQ ID NO: 77905 - protein, 9 aa, synthetic construct
  source 1..9: note = Seed: LVVVGAGDV (KRAS G13D)
FVVLGLGDS

SEQ ID NO: 77906 - protein, 9 aa, synthetic construct
  source 1..9: note = Seed: LVVVGAGDV (KRAS G13D)
FVVLGLGDT

SEQ ID NO: 77907 - protein, 9 aa, synthetic construct
  source 1..9: note = Seed: LVVVGAGDV (KRAS G13D)
FVVLGLGDV

SEQ ID NO: 77908 - protein, 9 aa, synthetic construct
  source 1..9: note = Seed: LVVVGAGDV (KRAS G13D)
FVVLGMGDA

SEQ ID NO: 77909 - protein, 9 aa, synthetic construct
  source 1..9: note = Seed: LVVVGAGDV (KRAS G13D)
FVVLGMGDH

SEQ ID NO: 77910 - protein, 9 aa, synthetic construct
  source 1..9: note = Seed: LVVVGAGDV (KRAS G13D)
FVVLGMGDI

SEQ ID NO: 77911 - protein, 9 aa, synthetic construct
  source 1..9: note = Seed: LVVVGAGDV (KRAS G13D)
FVVLGMGDL

SEQ ID NO: 77912 - protein, 9 aa, synthetic construct
  source 1..9: note = Seed: LVVVGAGDV (KRAS G13D)
FVVLGMGDM

SEQ ID NO: 77913 - protein, 9 aa, synthetic construct
  source 1..9: note = Seed: LVVVGAGDV (KRAS G13D)
FVVLGMGDN

SEQ ID NO: 77914 - protein, 9 aa, synthetic construct
  source 1..9: note = Seed: LVVVGAGDV (KRAS G13D)
FVVLGMGDQ

SEQ ID NO: 77915 - protein, 9 aa, synthetic construct
  source 1..9: note = Seed: LVVVGAGDV (KRAS G13D)
FVVLGMGDS

SEQ ID NO: 77916 - protein, 9 aa, synthetic construct
  source 1..9: note = Seed: LVVVGAGDV (KRAS G13D)
FVVLGMGDT

SEQ ID NO: 77917 - protein, 9 aa, synthetic construct
  source 1..9: note = Seed: LVVVGAGDV (KRAS G13D)
FVVLGMGDV

SEQ ID NO: 77918 - protein, 9 aa, synthetic construct
  source 1..9: note = Seed: LVVVGAGDV (KRAS G13D)
FVVLGNGDA

SEQ ID NO: 77919 - protein, 9 aa, synthetic construct
  source 1..9: note = Seed: LVVVGAGDV (KRAS G13D)
FVVLGNGDC

SEQ ID NO: 77920 - protein, 9 aa, synthetic construct
  source 1..9: note = Seed: LVVVGAGDV (KRAS G13D)
FVVLGNGDD

SEQ ID NO: 77921 - protein, 9 aa, synthetic construct
  source 1..9: note = Seed: LVVVGAGDV (KRAS G13D)
FVVLGNGDE

SEQ ID NO: 77922 - protein, 9 aa, synthetic construct
  source 1..9: note = Seed: LVVVGAGDV (KRAS G13D)
FVVLGNGDF

SEQ ID NO: 77923 - protein, 9 aa, synthetic construct
  source 1..9: note = Seed: LVVVGAGDV (KRAS G13D)
FVVLGNGDG

SEQ ID NO: 77924 - protein, 9 aa, synthetic construct
  source 1..9: note = Seed: LVVVGAGDV (KRAS G13D)
FVVLGNGDH

SEQ ID NO: 77925 - protein, 9 aa, synthetic construct
  source 1..9: note = Seed: LVVVGAGDV (KRAS G13D)
FVVLGNGDI

SEQ ID NO: 77926 - protein, 9 aa, synthetic construct
  source 1..9: note = Seed: LVVVGAGDV (KRAS G13D)
FVVLGNGDK

SEQ ID NO: 77927 - protein, 9 aa, synthetic construct
  source 1..9: note = Seed: LVVVGAGDV (KRAS G13D)
FVVLGNGDL

SEQ ID NO: 77928 - protein, 9 aa, synthetic construct
  source 1..9: note = Seed: LVVVGAGDV (KRAS G13D)
FVVLGNGDM

SEQ ID NO: 77929 - protein, 9 aa, synthetic construct
  source 1..9: note = Seed: LVVVGAGDV (KRAS G13D)
FVVLGNGDN

SEQ ID NO: 77930 - protein, 9 aa, synthetic construct
  source 1..9: note = Seed: LVVVGAGDV (KRAS G13D)
FVVLGNGDP

SEQ ID NO: 77931 - protein, 9 aa, synthetic construct
  source 1..9: note = Seed: LVVVGAGDV (KRAS G13D)
FVVLGNGDQ

SEQ ID NO: 77932 - protein, 9 aa, synthetic construct
  source 1..9: note = Seed: LVVVGAGDV (KRAS G13D)
FVVLGNGDR

SEQ ID NO: 77933 - protein, 9 aa, synthetic construct
  source 1..9: note = Seed: LVVVGAGDV (KRAS G13D)
FVVLGNGDS

SEQ ID NO: 77934 - protein, 9 aa, synthetic construct
  source 1..9: note = Seed: LVVVGAGDV (KRAS G13D)
FVVLGNGDT

SEQ ID NO: 77935 - protein, 9 aa, synthetic construct
  source 1..9: note = Seed: LVVVGAGDV (KRAS G13D)
FVVLGNGDV

SEQ ID NO: 77936 - protein, 9 aa, synthetic construct
  source 1..9: note = Seed: LVVVGAGDV (KRAS G13D)
FVVLGNGDW

SEQ ID NO: 77937 - protein, 9 aa, synthetic construct
  source 1..9: note = Seed: LVVVGAGDV (KRAS G13D)
FVVLGNGDY

SEQ ID NO: 77938 - protein, 9 aa, synthetic construct
  source 1..9: note = Seed: LVVVGAGDV (KRAS G13D)
FVVLGPGDA

SEQ ID NO: 77939 - protein, 9 aa, synthetic construct
  source 1..9: note = Seed: LVVVGAGDV (KRAS G13D)
FVVLGPGDC

SEQ ID NO: 77940 - protein, 9 aa, synthetic construct
  source 1..9: note = Seed: LVVVGAGDV (KRAS G13D)
FVVLGPGDD

SEQ ID NO: 77941 - protein, 9 aa, synthetic construct
  source 1..9: note = Seed: LVVVGAGDV (KRAS G13D)
FVVLGPGDE

SEQ ID NO: 77942 - protein, 9 aa, synthetic construct
  source 1..9: note = Seed: LVVVGAGDV (KRAS G13D)
FVVLGPGDF

SEQ ID NO: 77943 - protein, 9 aa, synthetic construct
  source 1..9: note = Seed: LVVVGAGDV (KRAS G13D)
FVVLGPGDG

SEQ ID NO: 77944 - protein, 9 aa, synthetic construct
  source 1..9: note = Seed: LVVVGAGDV (KRAS G13D)
FVVLGPGDH

SEQ ID NO: 77945 - protein, 9 aa, synthetic construct
  source 1..9: note = Seed: LVVVGAGDV (KRAS G13D)
FVVLGPGDI

SEQ ID NO: 77946 - protein, 9 aa, synthetic construct
  source 1..9: note = Seed: LVVVGAGDV (KRAS G13D)
FVVLGPGDL

SEQ ID NO: 77947 - protein, 9 aa, synthetic construct
  source 1..9: note = Seed: LVVVGAGDV (KRAS G13D)
FVVLGPGDM

SEQ ID NO: 77948 - protein, 9 aa, synthetic construct
  source 1..9: note = Seed: LVVVGAGDV (KRAS G13D)
FVVLGPGDN

SEQ ID NO: 77949 - protein, 9 aa, synthetic construct
  source 1..9: note = Seed: LVVVGAGDV (KRAS G13D)
FVVLGPGDP

SEQ ID NO: 77950 - protein, 9 aa, synthetic construct
  source 1..9: note = Seed: LVVVGAGDV (KRAS G13D)
FVVLGPGDQ

SEQ ID NO: 77951 - protein, 9 aa, synthetic construct
  source 1..9: note = Seed: LVVVGAGDV (KRAS G13D)
FVVLGPGDR

SEQ ID NO: 77952 - protein, 9 aa, synthetic construct
  source 1..9: note = Seed: LVVVGAGDV (KRAS G13D)
FVVLGPGDS

SEQ ID NO: 77953 - protein, 9 aa, synthetic construct
  source 1..9: note = Seed: LVVVGAGDV (KRAS G13D)
FVVLGPGDT

SEQ ID NO: 77954 - protein, 9 aa, synthetic construct
  source 1..9: note = Seed: LVVVGAGDV (KRAS G13D)
FVVLGPGDV

SEQ ID NO: 77955 - protein, 9 aa, synthetic construct
  source 1..9: note = Seed: LVVVGAGDV (KRAS G13D)
FVVLGPGDW

SEQ ID NO: 77956 - protein, 9 aa, synthetic construct
  source 1..9: note = Seed: LVVVGAGDV (KRAS G13D)
FVVLGPGDY

SEQ ID NO: 77957 - protein, 9 aa, synthetic construct
  source 1..9: note = Seed: LVVVGAGDV (KRAS G13D)
FVVLGQGDA

SEQ ID NO: 77958 - protein, 9 aa, synthetic construct
  source 1..9: note = Seed: LVVVGAGDV (KRAS G13D)
FVVLGQGDI

SEQ ID NO: 77959 - protein, 9 aa, synthetic construct
  source 1..9: note = Seed: LVVVGAGDV (KRAS G13D)
FVVLGQGDL

SEQ ID NO: 77960 - protein, 9 aa, synthetic construct
  source 1..9: note = Seed: LVVVGAGDV (KRAS G13D)
FVVLGQGDM

SEQ ID NO: 77961 - protein, 9 aa, synthetic construct
  source 1..9: note = Seed: LVVVGAGDV (KRAS G13D)
FVVLGQGDT

SEQ ID NO: 77962 - protein, 9 aa, synthetic construct
  source 1..9: note = Seed: LVVVGAGDV (KRAS G13D)
FVVLGQGDV

SEQ ID NO: 77963 - protein, 9 aa, synthetic construct
  source 1..9: note = Seed: LVVVGAGDV (KRAS G13D)
FVVLGRGDA

SEQ ID NO: 77964 - protein, 9 aa, synthetic construct
  source 1..9: note = Seed: LVVVGAGDV (KRAS G13D)
FVVLGRGDC

SEQ ID NO: 77965 - protein, 9 aa, synthetic construct
  source 1..9: note = Seed: LVVVGAGDV (KRAS G13D)
FVVLGRGDG

SEQ ID NO: 77966 - protein, 9 aa, synthetic construct
  source 1..9: note = Seed: LVVVGAGDV (KRAS G13D)
FVVLGRGDH

SEQ ID NO: 77967 - protein, 9 aa, synthetic construct
  source 1..9: note = Seed: LVVVGAGDV (KRAS G13D)
FVVLGRGDI

SEQ ID NO: 77968 - protein, 9 aa, synthetic construct
  source 1..9: note = Seed: LVVVGAGDV (KRAS G13D)
FVVLGRGDK

SEQ ID NO: 77969 - protein, 9 aa, synthetic construct
  source 1..9: note = Seed: LVVVGAGDV (KRAS G13D)
FVVLGRGDL

SEQ ID NO: 77970 - protein, 9 aa, synthetic construct
  source 1..9: note = Seed: LVVVGAGDV (KRAS G13D)
FVVLGRGDM

SEQ ID NO: 77971 - protein, 9 aa, synthetic construct
  source 1..9: note = Seed: LVVVGAGDV (KRAS G13D)
FVVLGRGDN

SEQ ID NO: 77972 - protein, 9 aa, synthetic construct
  source 1..9: note = Seed: LVVVGAGDV (KRAS G13D)
FVVLGRGDP

SEQ ID NO: 77973 - protein, 9 aa, synthetic construct
  source 1..9: note = Seed: LVVVGAGDV (KRAS G13D)
FVVLGRGDQ

SEQ ID NO: 77974 - protein, 9 aa, synthetic construct
  source 1..9: note = Seed: LVVVGAGDV (KRAS G13D)
FVVLGRGDR

SEQ ID NO: 77975 - protein, 9 aa, synthetic construct
  source 1..9: note = Seed: LVVVGAGDV (KRAS G13D)
FVVLGRGDS

SEQ ID NO: 77976 - protein, 9 aa, synthetic construct
  source 1..9: note = Seed: LVVVGAGDV (KRAS G13D)
FVVLGRGDT

SEQ ID NO: 77977 - protein, 9 aa, synthetic construct
  source 1..9: note = Seed: LVVVGAGDV (KRAS G13D)
FVVLGRGDV

SEQ ID NO: 77978 - protein, 9 aa, synthetic construct
  source 1..9: note = Seed: LVVVGAGDV (KRAS G13D)
FVVLGRGDY

SEQ ID NO: 77979 - protein, 9 aa, synthetic construct
  source 1..9: note = Seed: LVVVGAGDV (KRAS G13D)
FVVLGSGDA

SEQ ID NO: 77980 - protein, 9 aa, synthetic construct
  source 1..9: note = Seed: LVVVGAGDV (KRAS G13D)
FVVLGSGDC

SEQ ID NO: 77981 - protein, 9 aa, synthetic construct
  source 1..9: note = Seed: LVVVGAGDV (KRAS G13D)
FVVLGSGDD

SEQ ID NO: 77982 - protein, 9 aa, synthetic construct
  source 1..9: note = Seed: LVVVGAGDV (KRAS G13D)
FVVLGSGDE

SEQ ID NO: 77983 - protein, 9 aa, synthetic construct
  source 1..9: note = Seed: LVVVGAGDV (KRAS G13D)
FVVLGSGDF

SEQ ID NO: 77984 - protein, 9 aa, synthetic construct
  source 1..9: note = Seed: LVVVGAGDV (KRAS G13D)
FVVLGSGDG

SEQ ID NO: 77985 - protein, 9 aa, synthetic construct
  source 1..9: note = Seed: LVVVGAGDV (KRAS G13D)
FVVLGSGDH

SEQ ID NO: 77986 - protein, 9 aa, synthetic construct
  source 1..9: note = Seed: LVVVGAGDV (KRAS G13D)
FVVLGSGDK

SEQ ID NO: 77987 - protein, 9 aa, synthetic construct
  source 1..9: note = Seed: LVVVGAGDV (KRAS G13D)
FVVLGSGDM

SEQ ID NO: 77988 - protein, 9 aa, synthetic construct
  source 1..9: note = Seed: LVVVGAGDV (KRAS G13D)
FVVLGSGDN

SEQ ID NO: 77989 - protein, 9 aa, synthetic construct
  source 1..9: note = Seed: LVVVGAGDV (KRAS G13D)
FVVLGSGDP

SEQ ID NO: 77990 - protein, 9 aa, synthetic construct
  source 1..9: note = Seed: LVVVGAGDV (KRAS G13D)
FVVLGSGDQ

SEQ ID NO: 77991 - protein, 9 aa, synthetic construct
  source 1..9: note = Seed: LVVVGAGDV (KRAS G13D)
FVVLGSGDR

SEQ ID NO: 77992 - protein, 9 aa, synthetic construct
  source 1..9: note = Seed: LVVVGAGDV (KRAS G13D)
FVVLGSGDS

SEQ ID NO: 77993 - protein, 9 aa, synthetic construct
  source 1..9: note = Seed: LVVVGAGDV (KRAS G13D)
FVVLGSGDT

SEQ ID NO: 77994 - protein, 9 aa, synthetic construct
  source 1..9: note = Seed: LVVVGAGDV (KRAS G13D)
FVVLGSGDW

SEQ ID NO: 77995 - protein, 9 aa, synthetic construct
  source 1..9: note = Seed: LVVVGAGDV (KRAS G13D)
FVVLGSGDY

SEQ ID NO: 77996 - protein, 9 aa, synthetic construct
  source 1..9: note = Seed: LVVVGAGDV (KRAS G13D)
FVVLGTGDA

SEQ ID NO: 77997 - protein, 9 aa, synthetic construct
  source 1..9: note = Seed: LVVVGAGDV (KRAS G13D)
FVVLGTGDC

SEQ ID NO: 77998 - protein, 9 aa, synthetic construct
  source 1..9: note = Seed: LVVVGAGDV (KRAS G13D)
FVVLGTGDD

SEQ ID NO: 77999 - protein, 9 aa, synthetic construct
  source 1..9: note = Seed: LVVVGAGDV (KRAS G13D)
FVVLGTGDE

SEQ ID NO: 78000 - protein, 9 aa, synthetic construct
  source 1..9: note = Seed: LVVVGAGDV (KRAS G13D)
FVVLGTGDF

SEQ ID NO: 78001 - protein, 9 aa, synthetic construct
  source 1..9: note = Seed: LVVVGAGDV (KRAS G13D)
FVVLGTGDG

SEQ ID NO: 78002 - protein, 9 aa, synthetic construct
  source 1..9: note = Seed: LVVVGAGDV (KRAS G13D)
FVVLGTGDH

SEQ ID NO: 78003 - protein, 9 aa, synthetic construct
  source 1..9: note = Seed: LVVVGAGDV (KRAS G13D)
FVVLGTGDI

SEQ ID NO: 78004 - protein, 9 aa, synthetic construct
  source 1..9: note = Seed: LVVVGAGDV (KRAS G13D)
FVVLGTGDK

SEQ ID NO: 78005 - protein, 9 aa, synthetic construct
  source 1..9: note = Seed: LVVVGAGDV (KRAS G13D)
FVVLGTGDL

SEQ ID NO: 78006 - protein, 9 aa, synthetic construct
  source 1..9: note = Seed: LVVVGAGDV (KRAS G13D)
FVVLGTGDM

SEQ ID NO: 78007 - protein, 9 aa, synthetic construct
  source 1..9: note = Seed: LVVVGAGDV (KRAS G13D)
FVVLGTGDN

SEQ ID NO: 78008 - protein, 9 aa, synthetic construct
  source 1..9: note = Seed: LVVVGAGDV (KRAS G13D)
FVVLGTGDP

SEQ ID NO: 78009 - protein, 9 aa, synthetic construct
  source 1..9: note = Seed: LVVVGAGDV (KRAS G13D)
FVVLGTGDQ

SEQ ID NO: 78010 - protein, 9 aa, synthetic construct
  source 1..9: note = Seed: LVVVGAGDV (KRAS G13D)
FVVLGTGDR

SEQ ID NO: 78011 - protein, 9 aa, synthetic construct
  source 1..9: note = Seed: LVVVGAGDV (KRAS G13D)
FVVLGTGDS

SEQ ID NO: 78012 - protein, 9 aa, synthetic construct
  source 1..9: note = Seed: LVVVGAGDV (KRAS G13D)
FVVLGTGDT

SEQ ID NO: 78013 - protein, 9 aa, synthetic construct
  source 1..9: note = Seed: LVVVGAGDV (KRAS G13D)
FVVLGTGDV

SEQ ID NO: 78014 - protein, 9 aa, synthetic construct
  source 1..9: note = Seed: LVVVGAGDV (KRAS G13D)
FVVLGTGDW

SEQ ID NO: 78015 - protein, 9 aa, synthetic construct
  source 1..9: note = Seed: LVVVGAGDV (KRAS G13D)
FVVLGTGDY

SEQ ID NO: 78016 - protein, 9 aa, synthetic construct
  source 1..9: note = Seed: LVVVGAGDV (KRAS G13D)
FVVLGVGDA

SEQ ID NO: 78017 - protein, 9 aa, synthetic construct
  source 1..9: note = Seed: LVVVGAGDV (KRAS G13D)
FVVLGVGDC

SEQ ID NO: 78018 - protein, 9 aa, synthetic construct
  source 1..9: note = Seed: LVVVGAGDV (KRAS G13D)
FVVLGVGDD

SEQ ID NO: 78019 - protein, 9 aa, synthetic construct
  source 1..9: note = Seed: LVVVGAGDV (KRAS G13D)
FVVLGVGDE

SEQ ID NO: 78020 - protein, 9 aa, synthetic construct
  source 1..9: note = Seed: LVVVGAGDV (KRAS G13D)
FVVLGVGDF

SEQ ID NO: 78021 - protein, 9 aa, synthetic construct
  source 1..9: note = Seed: LVVVGAGDV (KRAS G13D)
FVVLGVGDG

SEQ ID NO: 78022 - protein, 9 aa, synthetic construct
  source 1..9: note = Seed: LVVVGAGDV (KRAS G13D)
FVVLGVGDH

SEQ ID NO: 78023 - protein, 9 aa, synthetic construct
  source 1..9: note = Seed: LVVVGAGDV (KRAS G13D)
FVVLGVGDI

SEQ ID NO: 78024 - protein, 9 aa, synthetic construct
  source 1..9: note = Seed: LVVVGAGDV (KRAS G13D)
FVVLGVGDL

SEQ ID NO: 78025 - protein, 9 aa, synthetic construct
  source 1..9: note = Seed: LVVVGAGDV (KRAS G13D)
FVVLGVGDM

SEQ ID NO: 78026 - protein, 9 aa, synthetic construct
  source 1..9: note = Seed: LVVVGAGDV (KRAS G13D)
FVVLGVGDN

SEQ ID NO: 78027 - protein, 9 aa, synthetic construct
  source 1..9: note = Seed: LVVVGAGDV (KRAS G13D)
FVVLGVGDP

SEQ ID NO: 78028 - protein, 9 aa, synthetic construct
  source 1..9: note = Seed: LVVVGAGDV (KRAS G13D)
FVVLGVGDQ

SEQ ID NO: 78029 - protein, 9 aa, synthetic construct
  source 1..9: note = Seed: LVVVGAGDV (KRAS G13D)
FVVLGVGDR

SEQ ID NO: 78030 - protein, 9 aa, synthetic construct
  source 1..9: note = Seed: LVVVGAGDV (KRAS G13D)
FVVLGVGDS

SEQ ID NO: 78031 - protein, 9 aa, synthetic construct
  source 1..9: note = Seed: LVVVGAGDV (KRAS G13D)
FVVLGVGDT

SEQ ID NO: 78032 - protein, 9 aa, synthetic construct
  source 1..9: note = Seed: LVVVGAGDV (KRAS G13D)
FVVLGVGDV

SEQ ID NO: 78033 - protein, 9 aa, synthetic construct
  source 1..9: note = Seed: LVVVGAGDV (KRAS G13D)
FVVLGVGDY

SEQ ID NO: 78034 - protein, 9 aa, synthetic construct
  source 1..9: note = Seed: LVVVGAGDV (KRAS G13D)
FVVLGWGDA

SEQ ID NO: 78035 - protein, 9 aa, synthetic construct
  source 1..9: note = Seed: LVVVGAGDV (KRAS G13D)
FVVLGWGDI

SEQ ID NO: 78036 - protein, 9 aa, synthetic construct
  source 1..9: note = Seed: LVVVGAGDV (KRAS G13D)
FVVLGWGDL

SEQ ID NO: 78037 - protein, 9 aa, synthetic construct
  source 1..9: note = Seed: LVVVGAGDV (KRAS G13D)
FVVLGWGDM

SEQ ID NO: 78038 - protein, 9 aa, synthetic construct
  source 1..9: note = Seed: LVVVGAGDV (KRAS G13D)
FVVLGWGDV

SEQ ID NO: 78039 - protein, 9 aa, synthetic construct
  source 1..9: note = Seed: LVVVGAGDV (KRAS G13D)
FVVLGYGDI

SEQ ID NO: 78040 - protein, 9 aa, synthetic construct
  source 1..9: note = Seed: LVVVGAGDV (KRAS G13D)
FVVLGYGDL

SEQ ID NO: 78041 - protein, 9 aa, synthetic construct
  source 1..9: note = Seed: LVVVGAGDV (KRAS G13D)
FVVLGYGDV

SEQ ID NO: 78042 - protein, 9 aa, synthetic construct
  source 1..9: note = Seed: LVVVGAGDV (KRAS G13D)
FVVMGAGDA

SEQ ID NO: 78043 - protein, 9 aa, synthetic construct
  source 1..9: note = Seed: LVVVGAGDV (KRAS G13D)
FVVMGAGDC

SEQ ID NO: 78044 - protein, 9 aa, synthetic construct
  source 1..9: note = Seed: LVVVGAGDV (KRAS G13D)
FVVMGAGDD

SEQ ID NO: 78045 - protein, 9 aa, synthetic construct
  source 1..9: note = Seed: LVVVGAGDV (KRAS G13D)
FVVMGAGDE

SEQ ID NO: 78046 - protein, 9 aa, synthetic construct
  source 1..9: note = Seed: LVVVGAGDV (KRAS G13D)
FVVMGAGDF

SEQ ID NO: 78047 - protein, 9 aa, synthetic construct
  source 1..9: note = Seed: LVVVGAGDV (KRAS G13D)
FVVMGAGDG

SEQ ID NO: 78048 - protein, 9 aa, synthetic construct
  source 1..9: note = Seed: LVVVGAGDV (KRAS G13D)
FVVMGAGDH

SEQ ID NO: 78049 - protein, 9 aa, synthetic construct
  source 1..9: note = Seed: LVVVGAGDV (KRAS G13D)
FVVMGAGDK

SEQ ID NO: 78050 - protein, 9 aa, synthetic construct
  source 1..9: note = Seed: LVVVGAGDV (KRAS G13D)
FVVMGAGDM

SEQ ID NO: 78051 - protein, 9 aa, synthetic construct
  source 1..9: note = Seed: LVVVGAGDV (KRAS G13D)
FVVMGAGDN

SEQ ID NO: 78052 - protein, 9 aa, synthetic construct
  source 1..9: note = Seed: LVVVGAGDV (KRAS G13D)
FVVMGAGDP

SEQ ID NO: 78053 - protein, 9 aa, synthetic construct
  source 1..9: note = Seed: LVVVGAGDV (KRAS G13D)
FVVMGAGDQ

SEQ ID NO: 78054 - protein, 9 aa, synthetic construct
  source 1..9: note = Seed: LVVVGAGDV (KRAS G13D)
FVVMGAGDR

SEQ ID NO: 78055 - protein, 9 aa, synthetic construct
  source 1..9: note = Seed: LVVVGAGDV (KRAS G13D)
FVVMGAGDS

SEQ ID NO: 78056 - protein, 9 aa, synthetic construct
  source 1..9: note = Seed: LVVVGAGDV (KRAS G13D)
FVVMGAGDT

SEQ ID NO: 78057 - protein, 9 aa, synthetic construct
  source 1..9: note = Seed: LVVVGAGDV (KRAS G13D)
FVVMGAGDW

SEQ ID NO: 78058 - protein, 9 aa, synthetic construct
  source 1..9: note = Seed: LVVVGAGDV (KRAS G13D)
FVVMGAGDY

SEQ ID NO: 78059 - protein, 9 aa, synthetic construct
  source 1..9: note = Seed: LVVVGAGDV (KRAS G13D)
FVVMGCGDA

SEQ ID NO: 78060 - protein, 9 aa, synthetic construct
  source 1..9: note = Seed: LVVVGAGDV (KRAS G13D)
FVVMGCGDI

SEQ ID NO: 78061 - protein, 9 aa, synthetic construct
  source 1..9: note = Seed: LVVVGAGDV (KRAS G13D)
FVVMGCGDL

SEQ ID NO: 78062 - protein, 9 aa, synthetic construct
  source 1..9: note = Seed: LVVVGAGDV (KRAS G13D)
FVVMGCGDM

SEQ ID NO: 78063 - protein, 9 aa, synthetic construct
  source 1..9: note = Seed: LVVVGAGDV (KRAS G13D)
FVVMGCGDT

SEQ ID NO: 78064 - protein, 9 aa, synthetic construct
  source 1..9: note = Seed: LVVVGAGDV (KRAS G13D)
FVVMGCGDV

SEQ ID NO: 78065 - protein, 9 aa, synthetic construct
  source 1..9: note = Seed: LVVVGAGDV (KRAS G13D)
FVVMGDGDA

SEQ ID NO: 78066 - protein, 9 aa, synthetic construct
  source 1..9: note = Seed: LVVVGAGDV (KRAS G13D)
FVVMGDGDI

SEQ ID NO: 78067 - protein, 9 aa, synthetic construct
  source 1..9: note = Seed: LVVVGAGDV (KRAS G13D)
FVVMGDGDL

SEQ ID NO: 78068 - protein, 9 aa, synthetic construct
  source 1..9: note = Seed: LVVVGAGDV (KRAS G13D)
FVVMGDGDM

SEQ ID NO: 78069 - protein, 9 aa, synthetic construct
  source 1..9: note = Seed: LVVVGAGDV (KRAS G13D)
FVVMGDGDV

SEQ ID NO: 78070 - protein, 9 aa, synthetic construct
  source 1..9: note = Seed: LVVVGAGDV (KRAS G13D)
FVVMGEGDA

SEQ ID NO: 78071 - protein, 9 aa, synthetic construct
  source 1..9: note = Seed: LVVVGAGDV (KRAS G13D)
FVVMGEGDI

SEQ ID NO: 78072 - protein, 9 aa, synthetic construct
  source 1..9: note = Seed: LVVVGAGDV (KRAS G13D)
FVVMGEGDL

SEQ ID NO: 78073 - protein, 9 aa, synthetic construct
  source 1..9: note = Seed: LVVVGAGDV (KRAS G13D)
FVVMGEGDM

SEQ ID NO: 78074 - protein, 9 aa, synthetic construct
  source 1..9: note = Seed: LVVVGAGDV (KRAS G13D)
FVVMGEGDV

SEQ ID NO: 78075 - protein, 9 aa, synthetic construct
  source 1..9: note = Seed: LVVVGAGDV (KRAS G13D)
FVVMGFGDA

SEQ ID NO: 78076 - protein, 9 aa, synthetic construct
  source 1..9: note = Seed: LVVVGAGDV (KRAS G13D)
FVVMGFGDI

SEQ ID NO: 78077 - protein, 9 aa, synthetic construct
  source 1..9: note = Seed: LVVVGAGDV (KRAS G13D)
FVVMGFGDL

SEQ ID NO: 78078 - protein, 9 aa, synthetic construct
  source 1..9: note = Seed: LVVVGAGDV (KRAS G13D)
FVVMGFGDM

SEQ ID NO: 78079 - protein, 9 aa, synthetic construct
  source 1..9: note = Seed: LVVVGAGDV (KRAS G13D)
FVVMGFGDV

SEQ ID NO: 78080 - protein, 9 aa, synthetic construct
  source 1..9: note = Seed: LVVVGAGDV (KRAS G13D)
FVVMGGGDA

SEQ ID NO: 78081 - protein, 9 aa, synthetic construct
  source 1..9: note = Seed: LVVVGAGDV (KRAS G13D)
FVVMGGGDC

SEQ ID NO: 78082 - protein, 9 aa, synthetic construct
  source 1..9: note = Seed: LVVVGAGDV (KRAS G13D)
FVVMGGGDF

SEQ ID NO: 78083 - protein, 9 aa, synthetic construct
  source 1..9: note = Seed: LVVVGAGDV (KRAS G13D)
FVVMGGGDG

SEQ ID NO: 78084 - protein, 9 aa, synthetic construct
  source 1..9: note = Seed: LVVVGAGDV (KRAS G13D)
FVVMGGGDH

SEQ ID NO: 78085 - protein, 9 aa, synthetic construct
  source 1..9: note = Seed: LVVVGAGDV (KRAS G13D)
FVVMGGGDI

SEQ ID NO: 78086 - protein, 9 aa, synthetic construct
  source 1..9: note = Seed: LVVVGAGDV (KRAS G13D)
FVVMGGGDK

SEQ ID NO: 78087 - protein, 9 aa, synthetic construct
  source 1..9: note = Seed: LVVVGAGDV (KRAS G13D)
FVVMGGGDM

SEQ ID NO: 78088 - protein, 9 aa, synthetic construct
  source 1..9: note = Seed: LVVVGAGDV (KRAS G13D)
FVVMGGGDN

SEQ ID NO: 78089 - protein, 9 aa, synthetic construct
  source 1..9: note = Seed: LVVVGAGDV (KRAS G13D)
FVVMGGGDP

SEQ ID NO: 78090 - protein, 9 aa, synthetic construct
  source 1..9: note = Seed: LVVVGAGDV (KRAS G13D)
FVVMGGGDQ

SEQ ID NO: 78091 - protein, 9 aa, synthetic construct
  source 1..9: note = Seed: LVVVGAGDV (KRAS G13D)
FVVMGGGDR

SEQ ID NO: 78092 - protein, 9 aa, synthetic construct
  source 1..9: note = Seed: LVVVGAGDV (KRAS G13D)
FVVMGGGDS

SEQ ID NO: 78093 - protein, 9 aa, synthetic construct
  source 1..9: note = Seed: LVVVGAGDV (KRAS G13D)
FVVMGGGDT

SEQ ID NO: 78094 - protein, 9 aa, synthetic construct
  source 1..9: note = Seed: LVVVGAGDV (KRAS G13D)
FVVMGGGDV

SEQ ID NO: 78095 - protein, 9 aa, synthetic construct
  source 1..9: note = Seed: LVVVGAGDV (KRAS G13D)
FVVMGGGDW

SEQ ID NO: 78096 - protein, 9 aa, synthetic construct
  source 1..9: note = Seed: LVVVGAGDV (KRAS G13D)
FVVMGGGDY

SEQ ID NO: 78097 - protein, 9 aa, synthetic construct
  source 1..9: note = Seed: LVVVGAGDV (KRAS G13D)
FVVMGHGDA

SEQ ID NO: 78098 - protein, 9 aa, synthetic construct
  source 1..9: note = Seed: LVVVGAGDV (KRAS G13D)
FVVMGHGDG

SEQ ID NO: 78099 - protein, 9 aa, synthetic construct
  source 1..9: note = Seed: LVVVGAGDV (KRAS G13D)
FVVMGHGDH

SEQ ID NO: 78100 - protein, 9 aa, synthetic construct
  source 1..9: note = Seed: LVVVGAGDV (KRAS G13D)
FVVMGHGDI

SEQ ID NO: 78101 - protein, 9 aa, synthetic construct
  source 1..9: note = Seed: LVVVGAGDV (KRAS G13D)
FVVMGHGDL

SEQ ID NO: 78102 - protein, 9 aa, synthetic construct
  source 1..9: note = Seed: LVVVGAGDV (KRAS G13D)
FVVMGHGDM

SEQ ID NO: 78103 - protein, 9 aa, synthetic construct
  source 1..9: note = Seed: LVVVGAGDV (KRAS G13D)
FVVMGHGDQ

SEQ ID NO: 78104 - protein, 9 aa, synthetic construct
  source 1..9: note = Seed: LVVVGAGDV (KRAS G13D)
FVVMGHGDS

SEQ ID NO: 78105 - protein, 9 aa, synthetic construct
  source 1..9: note = Seed: LVVVGAGDV (KRAS G13D)
FVVMGHGDT

SEQ ID NO: 78106 - protein, 9 aa, synthetic construct
  source 1..9: note = Seed: LVVVGAGDV (KRAS G13D)
FVVMGHGDV

SEQ ID NO: 78107 - protein, 9 aa, synthetic construct
  source 1..9: note = Seed: LVVVGAGDV (KRAS G13D)
FVVMGIGDA

SEQ ID NO: 78108 - protein, 9 aa, synthetic construct
  source 1..9: note = Seed: LVVVGAGDV (KRAS G13D)
FVVMGIGDC

SEQ ID NO: 78109 - protein, 9 aa, synthetic construct
  source 1..9: note = Seed: LVVVGAGDV (KRAS G13D)
FVVMGIGDD

SEQ ID NO: 78110 - protein, 9 aa, synthetic construct
  source 1..9: note = Seed: LVVVGAGDV (KRAS G13D)
FVVMGIGDE

SEQ ID NO: 78111 - protein, 9 aa, synthetic construct
  source 1..9: note = Seed: LVVVGAGDV (KRAS G13D)
FVVMGIGDF

SEQ ID NO: 78112 - protein, 9 aa, synthetic construct
  source 1..9: note = Seed: LVVVGAGDV (KRAS G13D)
FVVMGIGDG

SEQ ID NO: 78113 - protein, 9 aa, synthetic construct
  source 1..9: note = Seed: LVVVGAGDV (KRAS G13D)
FVVMGIGDH

SEQ ID NO: 78114 - protein, 9 aa, synthetic construct
  source 1..9: note = Seed: LVVVGAGDV (KRAS G13D)
FVVMGIGDI

SEQ ID NO: 78115 - protein, 9 aa, synthetic construct
  source 1..9: note = Seed: LVVVGAGDV (KRAS G13D)
FVVMGIGDK

SEQ ID NO: 78116 - protein, 9 aa, synthetic construct
  source 1..9: note = Seed: LVVVGAGDV (KRAS G13D)
FVVMGIGDL

SEQ ID NO: 78117 - protein, 9 aa, synthetic construct
  source 1..9: note = Seed: LVVVGAGDV (KRAS G13D)
FVVMGIGDM

SEQ ID NO: 78118 - protein, 9 aa, synthetic construct
  source 1..9: note = Seed: LVVVGAGDV (KRAS G13D)
FVVMGIGDN

SEQ ID NO: 78119 - protein, 9 aa, synthetic construct
  source 1..9: note = Seed: LVVVGAGDV (KRAS G13D)
FVVMGIGDP

SEQ ID NO: 78120 - protein, 9 aa, synthetic construct
  source 1..9: note = Seed: LVVVGAGDV (KRAS G13D)
FVVMGIGDQ

SEQ ID NO: 78121 - protein, 9 aa, synthetic construct
  source 1..9: note = Seed: LVVVGAGDV (KRAS G13D)
FVVMGIGDR

SEQ ID NO: 78122 - protein, 9 aa, synthetic construct
  source 1..9: note = Seed: LVVVGAGDV (KRAS G13D)
FVVMGIGDS

SEQ ID NO: 78123 - protein, 9 aa, synthetic construct
  source 1..9: note = Seed: LVVVGAGDV (KRAS G13D)
FVVMGIGDT

SEQ ID NO: 78124 - protein, 9 aa, synthetic construct
  source 1..9: note = Seed: LVVVGAGDV (KRAS G13D)
FVVMGIGDV

SEQ ID NO: 78125 - protein, 9 aa, synthetic construct
  source 1..9: note = Seed: LVVVGAGDV (KRAS G13D)
FVVMGIGDY

SEQ ID NO: 78126 - protein, 9 aa, synthetic construct
  source 1..9: note = Seed: LVVVGAGDV (KRAS G13D)
FVVMGKGDA

SEQ ID NO: 78127 - protein, 9 aa, synthetic construct
  source 1..9: note = Seed: LVVVGAGDV (KRAS G13D)
FVVMGKGDG

SEQ ID NO: 78128 - protein, 9 aa, synthetic construct
  source 1..9: note = Seed: LVVVGAGDV (KRAS G13D)
FVVMGKGDH

SEQ ID NO: 78129 - protein, 9 aa, synthetic construct
  source 1..9: note = Seed: LVVVGAGDV (KRAS G13D)
FVVMGKGDI

SEQ ID NO: 78130 - protein, 9 aa, synthetic construct
  source 1..9: note = Seed: LVVVGAGDV (KRAS G13D)
FVVMGKGDK

SEQ ID NO: 78131 - protein, 9 aa, synthetic construct
  source 1..9: note = Seed: LVVVGAGDV (KRAS G13D)
FVVMGKGDL

SEQ ID NO: 78132 - protein, 9 aa, synthetic construct
  source 1..9: note = Seed: LVVVGAGDV (KRAS G13D)
FVVMGKGDM

SEQ ID NO: 78133 - protein, 9 aa, synthetic construct
  source 1..9: note = Seed: LVVVGAGDV (KRAS G13D)
FVVMGKGDN

SEQ ID NO: 78134 - protein, 9 aa, synthetic construct
  source 1..9: note = Seed: LVVVGAGDV (KRAS G13D)
FVVMGKGDP

SEQ ID NO: 78135 - protein, 9 aa, synthetic construct
  source 1..9: note = Seed: LVVVGAGDV (KRAS G13D)
FVVMGKGDQ

SEQ ID NO: 78136 - protein, 9 aa, synthetic construct
  source 1..9: note = Seed: LVVVGAGDV (KRAS G13D)
FVVMGKGDR

SEQ ID NO: 78137 - protein, 9 aa, synthetic construct
  source 1..9: note = Seed: LVVVGAGDV (KRAS G13D)
FVVMGKGDS

SEQ ID NO: 78138 - protein, 9 aa, synthetic construct
  source 1..9: note = Seed: LVVVGAGDV (KRAS G13D)
FVVMGKGDT

SEQ ID NO: 78139 - protein, 9 aa, synthetic construct
  source 1..9: note = Seed: LVVVGAGDV (KRAS G13D)
FVVMGKGDV

SEQ ID NO: 78140 - protein, 9 aa, synthetic construct
  source 1..9: note = Seed: LVVVGAGDV (KRAS G13D)
FVVMGLGDA

SEQ ID NO: 78141 - protein, 9 aa, synthetic construct
  source 1..9: note = Seed: LVVVGAGDV (KRAS G13D)
FVVMGLGDG

SEQ ID NO: 78142 - protein, 9 aa, synthetic construct
  source 1..9: note = Seed: LVVVGAGDV (KRAS G13D)
FVVMGLGDH

SEQ ID NO: 78143 - protein, 9 aa, synthetic construct
  source 1..9: note = Seed: LVVVGAGDV (KRAS G13D)
FVVMGLGDI

SEQ ID NO: 78144 - protein, 9 aa, synthetic construct
  source 1..9: note = Seed: LVVVGAGDV (KRAS G13D)
FVVMGLGDL

SEQ ID NO: 78145 - protein, 9 aa, synthetic construct
  source 1..9: note = Seed: LVVVGAGDV (KRAS G13D)
FVVMGLGDM

SEQ ID NO: 78146 - protein, 9 aa, synthetic construct
  source 1..9: note = Seed: LVVVGAGDV (KRAS G13D)
FVVMGLGDN

SEQ ID NO: 78147 - protein, 9 aa, synthetic construct
  source 1..9: note = Seed: LVVVGAGDV (KRAS G13D)
FVVMGLGDQ

SEQ ID NO: 78148 - protein, 9 aa, synthetic construct
  source 1..9: note = Seed: LVVVGAGDV (KRAS G13D)
FVVMGLGDR

SEQ ID NO: 78149 - protein, 9 aa, synthetic construct
  source 1..9: note = Seed: LVVVGAGDV (KRAS G13D)
FVVMGLGDS

SEQ ID NO: 78150 - protein, 9 aa, synthetic construct
  source 1..9: note = Seed: LVVVGAGDV (KRAS G13D)
FVVMGLGDT

SEQ ID NO: 78151 - protein, 9 aa, synthetic construct
  source 1..9: note = Seed: LVVVGAGDV (KRAS G13D)
FVVMGLGDV

SEQ ID NO: 78152 - protein, 9 aa, synthetic construct
  source 1..9: note = Seed: LVVVGAGDV (KRAS G13D)
FVVMGMGDA

SEQ ID NO: 78153 - protein, 9 aa, synthetic construct
  source 1..9: note = Seed: LVVVGAGDV (KRAS G13D)
FVVMGMGDH

SEQ ID NO: 78154 - protein, 9 aa, synthetic construct
  source 1..9: note = Seed: LVVVGAGDV (KRAS G13D)
FVVMGMGDI

SEQ ID NO: 78155 - protein, 9 aa, synthetic construct
  source 1..9: note = Seed: LVVVGAGDV (KRAS G13D)
FVVMGMGDL

SEQ ID NO: 78156 - protein, 9 aa, synthetic construct
  source 1..9: note = Seed: LVVVGAGDV (KRAS G13D)
FVVMGMGDM

SEQ ID NO: 78157 - protein, 9 aa, synthetic construct
  source 1..9: note = Seed: LVVVGAGDV (KRAS G13D)
FVVMGMGDN

SEQ ID NO: 78158 - protein, 9 aa, synthetic construct
  source 1..9: note = Seed: LVVVGAGDV (KRAS G13D)
FVVMGMGDQ

SEQ ID NO: 78159 - protein, 9 aa, synthetic construct
  source 1..9: note = Seed: LVVVGAGDV (KRAS G13D)
FVVMGMGDR

SEQ ID NO: 78160 - protein, 9 aa, synthetic construct
  source 1..9: note = Seed: LVVVGAGDV (KRAS G13D)
FVVMGMGDS

SEQ ID NO: 78161 - protein, 9 aa, synthetic construct
  source 1..9: note = Seed: LVVVGAGDV (KRAS G13D)
FVVMGMGDT

SEQ ID NO: 78162 - protein, 9 aa, synthetic construct
  source 1..9: note = Seed: LVVVGAGDV (KRAS G13D)
FVVMGMGDV

SEQ ID NO: 78163 - protein, 9 aa, synthetic construct
  source 1..9: note = Seed: LVVVGAGDV (KRAS G13D)
FVVMGMGDY

SEQ ID NO: 78164 - protein, 9 aa, synthetic construct
  source 1..9: note = Seed: LVVVGAGDV (KRAS G13D)
FVVMGNGDA

SEQ ID NO: 78165 - protein, 9 aa, synthetic construct
  source 1..9: note = Seed: LVVVGAGDV (KRAS G13D)
FVVMGNGDC

SEQ ID NO: 78166 - protein, 9 aa, synthetic construct
  source 1..9: note = Seed: LVVVGAGDV (KRAS G13D)
FVVMGNGDD

SEQ ID NO: 78167 - protein, 9 aa, synthetic construct
  source 1..9: note = Seed: LVVVGAGDV (KRAS G13D)
FVVMGNGDE

SEQ ID NO: 78168 - protein, 9 aa, synthetic construct
  source 1..9: note = Seed: LVVVGAGDV (KRAS G13D)
FVVMGNGDF

SEQ ID NO: 78169 - protein, 9 aa, synthetic construct
  source 1..9: note = Seed: LVVVGAGDV (KRAS G13D)
FVVMGNGDG

SEQ ID NO: 78170 - protein, 9 aa, synthetic construct
  source 1..9: note = Seed: LVVVGAGDV (KRAS G13D)
FVVMGNGDH

SEQ ID NO: 78171 - protein, 9 aa, synthetic construct
  source 1..9: note = Seed: LVVVGAGDV (KRAS G13D)
FVVMGNGDI

SEQ ID NO: 78172 - protein, 9 aa, synthetic construct
  source 1..9: note = Seed: LVVVGAGDV (KRAS G13D)
FVVMGNGDK

SEQ ID NO: 78173 - protein, 9 aa, synthetic construct
  source 1..9: note = Seed: LVVVGAGDV (KRAS G13D)
FVVMGNGDL

SEQ ID NO: 78174 - protein, 9 aa, synthetic construct
  source 1..9: note = Seed: LVVVGAGDV (KRAS G13D)
FVVMGNGDM

SEQ ID NO: 78175 - protein, 9 aa, synthetic construct
  source 1..9: note = Seed: LVVVGAGDV (KRAS G13D)
FVVMGNGDN

SEQ ID NO: 78176 - protein, 9 aa, synthetic construct
  source 1..9: note = Seed: LVVVGAGDV (KRAS G13D)
FVVMGNGDP

SEQ ID NO: 78177 - protein, 9 aa, synthetic construct
  source 1..9: note = Seed: LVVVGAGDV (KRAS G13D)
FVVMGNGDQ

SEQ ID NO: 78178 - protein, 9 aa, synthetic construct
  source 1..9: note = Seed: LVVVGAGDV (KRAS G13D)
FVVMGNGDR

SEQ ID NO: 78179 - protein, 9 aa, synthetic construct
  source 1..9: note = Seed: LVVVGAGDV (KRAS G13D)
FVVMGNGDS

SEQ ID NO: 78180 - protein, 9 aa, synthetic construct
  source 1..9: note = Seed: LVVVGAGDV (KRAS G13D)
FVVMGNGDT

SEQ ID NO: 78181 - protein, 9 aa, synthetic construct
  source 1..9: note = Seed: LVVVGAGDV (KRAS G13D)
FVVMGNGDV

SEQ ID NO: 78182 - protein, 9 aa, synthetic construct
  source 1..9: note = Seed: LVVVGAGDV (KRAS G13D)
FVVMGNGDW

SEQ ID NO: 78183 - protein, 9 aa, synthetic construct
  source 1..9: note = Seed: LVVVGAGDV (KRAS G13D)
FVVMGNGDY

SEQ ID NO: 78184 - protein, 9 aa, synthetic construct
  source 1..9: note = Seed: LVVVGAGDV (KRAS G13D)
FVVMGPGDA

SEQ ID NO: 78185 - protein, 9 aa, synthetic construct
  source 1..9: note = Seed: LVVVGAGDV (KRAS G13D)
FVVMGPGDC

SEQ ID NO: 78186 - protein, 9 aa, synthetic construct
  source 1..9: note = Seed: LVVVGAGDV (KRAS G13D)
FVVMGPGDD

SEQ ID NO: 78187 - protein, 9 aa, synthetic construct
  source 1..9: note = Seed: LVVVGAGDV (KRAS G13D)
FVVMGPGDE

SEQ ID NO: 78188 - protein, 9 aa, synthetic construct
  source 1..9: note = Seed: LVVVGAGDV (KRAS G13D)
FVVMGPGDF

SEQ ID NO: 78189 - protein, 9 aa, synthetic construct
  source 1..9: note = Seed: LVVVGAGDV (KRAS G13D)
FVVMGPGDG

SEQ ID NO: 78190 - protein, 9 aa, synthetic construct
  source 1..9: note = Seed: LVVVGAGDV (KRAS G13D)
FVVMGPGDH

SEQ ID NO: 78191 - protein, 9 aa, synthetic construct
  source 1..9: note = Seed: LVVVGAGDV (KRAS G13D)
FVVMGPGDI

SEQ ID NO: 78192 - protein, 9 aa, synthetic construct
  source 1..9: note = Seed: LVVVGAGDV (KRAS G13D)
FVVMGPGDK

SEQ ID NO: 78193 - protein, 9 aa, synthetic construct
  source 1..9: note = Seed: LVVVGAGDV (KRAS G13D)
FVVMGPGDL

SEQ ID NO: 78194 - protein, 9 aa, synthetic construct
  source 1..9: note = Seed: LVVVGAGDV (KRAS G13D)
FVVMGPGDM

SEQ ID NO: 78195 - protein, 9 aa, synthetic construct
  source 1..9: note = Seed: LVVVGAGDV (KRAS G13D)
FVVMGPGDN

SEQ ID NO: 78196 - protein, 9 aa, synthetic construct
  source 1..9: note = Seed: LVVVGAGDV (KRAS G13D)
FVVMGPGDP

SEQ ID NO: 78197 - protein, 9 aa, synthetic construct
  source 1..9: note = Seed: LVVVGAGDV (KRAS G13D)
FVVMGPGDQ

SEQ ID NO: 78198 - protein, 9 aa, synthetic construct
  source 1..9: note = Seed: LVVVGAGDV (KRAS G13D)
FVVMGPGDR

SEQ ID NO: 78199 - protein, 9 aa, synthetic construct
  source 1..9: note = Seed: LVVVGAGDV (KRAS G13D)
FVVMGPGDS

SEQ ID NO: 78200 - protein, 9 aa, synthetic construct
  source 1..9: note = Seed: LVVVGAGDV (KRAS G13D)
FVVMGPGDT

SEQ ID NO: 78201 - protein, 9 aa, synthetic construct
  source 1..9: note = Seed: LVVVGAGDV (KRAS G13D)
FVVMGPGDV

SEQ ID NO: 78202 - protein, 9 aa, synthetic construct
  source 1..9: note = Seed: LVVVGAGDV (KRAS G13D)
FVVMGPGDW

SEQ ID NO: 78203 - protein, 9 aa, synthetic construct
  source 1..9: note = Seed: LVVVGAGDV (KRAS G13D)
FVVMGPGDY

SEQ ID NO: 78204 - protein, 9 aa, synthetic construct
  source 1..9: note = Seed: LVVVGAGDV (KRAS G13D)
FVVMGQGDA

SEQ ID NO: 78205 - protein, 9 aa, synthetic construct
  source 1..9: note = Seed: LVVVGAGDV (KRAS G13D)
FVVMGQGDI

SEQ ID NO: 78206 - protein, 9 aa, synthetic construct
  source 1..9: note = Seed: LVVVGAGDV (KRAS G13D)
FVVMGQGDL

SEQ ID NO: 78207 - protein, 9 aa, synthetic construct
  source 1..9: note = Seed: LVVVGAGDV (KRAS G13D)
FVVMGQGDM

SEQ ID NO: 78208 - protein, 9 aa, synthetic construct
  source 1..9: note = Seed: LVVVGAGDV (KRAS G13D)
FVVMGQGDT

SEQ ID NO: 78209 - protein, 9 aa, synthetic construct
  source 1..9: note = Seed: LVVVGAGDV (KRAS G13D)
FVVMGQGDV

SEQ ID NO: 78210 - protein, 9 aa, synthetic construct
  source 1..9: note = Seed: LVVVGAGDV (KRAS G13D)
FVVMGRGDA

SEQ ID NO: 78211 - protein, 9 aa, synthetic construct
  source 1..9: note = Seed: LVVVGAGDV (KRAS G13D)
FVVMGRGDC

SEQ ID NO: 78212 - protein, 9 aa, synthetic construct
  source 1..9: note = Seed: LVVVGAGDV (KRAS G13D)
FVVMGRGDF

SEQ ID NO: 78213 - protein, 9 aa, synthetic construct
  source 1..9: note = Seed: LVVVGAGDV (KRAS G13D)
FVVMGRGDG

SEQ ID NO: 78214 - protein, 9 aa, synthetic construct
  source 1..9: note = Seed: LVVVGAGDV (KRAS G13D)
FVVMGRGDH

SEQ ID NO: 78215 - protein, 9 aa, synthetic construct
  source 1..9: note = Seed: LVVVGAGDV (KRAS G13D)
FVVMGRGDI

SEQ ID NO: 78216 - protein, 9 aa, synthetic construct
  source 1..9: note = Seed: LVVVGAGDV (KRAS G13D)
FVVMGRGDK

SEQ ID NO: 78217 - protein, 9 aa, synthetic construct
  source 1..9: note = Seed: LVVVGAGDV (KRAS G13D)
FVVMGRGDL

SEQ ID NO: 78218 - protein, 9 aa, synthetic construct
  source 1..9: note = Seed: LVVVGAGDV (KRAS G13D)
FVVMGRGDM

SEQ ID NO: 78219 - protein, 9 aa, synthetic construct
  source 1..9: note = Seed: LVVVGAGDV (KRAS G13D)
FVVMGRGDN

SEQ ID NO: 78220 - protein, 9 aa, synthetic construct
  source 1..9: note = Seed: LVVVGAGDV (KRAS G13D)
FVVMGRGDP

SEQ ID NO: 78221 - protein, 9 aa, synthetic construct
  source 1..9: note = Seed: LVVVGAGDV (KRAS G13D)
FVVMGRGDQ

SEQ ID NO: 78222 - protein, 9 aa, synthetic construct
  source 1..9: note = Seed: LVVVGAGDV (KRAS G13D)
FVVMGRGDR

SEQ ID NO: 78223 - protein, 9 aa, synthetic construct
  source 1..9: note = Seed: LVVVGAGDV (KRAS G13D)
FVVMGRGDS

SEQ ID NO: 78224 - protein, 9 aa, synthetic construct
  source 1..9: note = Seed: LVVVGAGDV (KRAS G13D)
FVVMGRGDT

SEQ ID NO: 78225 - protein, 9 aa, synthetic construct
  source 1..9: note = Seed: LVVVGAGDV (KRAS G13D)
FVVMGRGDV

SEQ ID NO: 78226 - protein, 9 aa, synthetic construct
  source 1..9: note = Seed: LVVVGAGDV (KRAS G13D)
FVVMGRGDW

SEQ ID NO: 78227 - protein, 9 aa, synthetic construct
  source 1..9: note = Seed: LVVVGAGDV (KRAS G13D)
FVVMGRGDY

SEQ ID NO: 78228 - protein, 9 aa, synthetic construct
  source 1..9: note = Seed: LVVVGAGDV (KRAS G13D)
FVVMGSGDA

SEQ ID NO: 78229 - protein, 9 aa, synthetic construct
  source 1..9: note = Seed: LVVVGAGDV (KRAS G13D)
FVVMGSGDC

SEQ ID NO: 78230 - protein, 9 aa, synthetic construct
  source 1..9: note = Seed: LVVVGAGDV (KRAS G13D)
FVVMGSGDD

SEQ ID NO: 78231 - protein, 9 aa, synthetic construct
  source 1..9: note = Seed: LVVVGAGDV (KRAS G13D)
FVVMGSGDE

SEQ ID NO: 78232 - protein, 9 aa, synthetic construct
  source 1..9: note = Seed: LVVVGAGDV (KRAS G13D)
FVVMGSGDF

SEQ ID NO: 78233 - protein, 9 aa, synthetic construct
  source 1..9: note = Seed: LVVVGAGDV (KRAS G13D)
FVVMGSGDG

SEQ ID NO: 78234 - protein, 9 aa, synthetic construct
  source 1..9: note = Seed: LVVVGAGDV (KRAS G13D)
FVVMGSGDH

SEQ ID NO: 78235 - protein, 9 aa, synthetic construct
  source 1..9: note = Seed: LVVVGAGDV (KRAS G13D)
FVVMGSGDI

SEQ ID NO: 78236 - protein, 9 aa, synthetic construct
  source 1..9: note = Seed: LVVVGAGDV (KRAS G13D)
FVVMGSGDK

SEQ ID NO: 78237 - protein, 9 aa, synthetic construct
  source 1..9: note = Seed: LVVVGAGDV (KRAS G13D)
FVVMGSGDM

SEQ ID NO: 78238 - protein, 9 aa, synthetic construct
  source 1..9: note = Seed: LVVVGAGDV (KRAS G13D)
FVVMGSGDN

SEQ ID NO: 78239 - protein, 9 aa, synthetic construct
  source 1..9: note = Seed: LVVVGAGDV (KRAS G13D)
FVVMGSGDP

SEQ ID NO: 78240 - protein, 9 aa, synthetic construct
  source 1..9: note = Seed: LVVVGAGDV (KRAS G13D)
FVVMGSGDQ

SEQ ID NO: 78241 - protein, 9 aa, synthetic construct
  source 1..9: note = Seed: LVVVGAGDV (KRAS G13D)
FVVMGSGDR

SEQ ID NO: 78242 - protein, 9 aa, synthetic construct
  source 1..9: note = Seed: LVVVGAGDV (KRAS G13D)
FVVMGSGDS

SEQ ID NO: 78243 - protein, 9 aa, synthetic construct
  source 1..9: note = Seed: LVVVGAGDV (KRAS G13D)
FVVMGSGDT

SEQ ID NO: 78244 - protein, 9 aa, synthetic construct
  source 1..9: note = Seed: LVVVGAGDV (KRAS G13D)
FVVMGSGDW

SEQ ID NO: 78245 - protein, 9 aa, synthetic construct
  source 1..9: note = Seed: LVVVGAGDV (KRAS G13D)
FVVMGSGDY

SEQ ID NO: 78246 - protein, 9 aa, synthetic construct
  source 1..9: note = Seed: LVVVGAGDV (KRAS G13D)
FVVMGTGDA

SEQ ID NO: 78247 - protein, 9 aa, synthetic construct
  source 1..9: note = Seed: LVVVGAGDV (KRAS G13D)
FVVMGTGDC

SEQ ID NO: 78248 - protein, 9 aa, synthetic construct
  source 1..9: note = Seed: LVVVGAGDV (KRAS G13D)
FVVMGTGDD

SEQ ID NO: 78249 - protein, 9 aa, synthetic construct
  source 1..9: note = Seed: LVVVGAGDV (KRAS G13D)
FVVMGTGDE

SEQ ID NO: 78250 - protein, 9 aa, synthetic construct
  source 1..9: note = Seed: LVVVGAGDV (KRAS G13D)
FVVMGTGDF

SEQ ID NO: 78251 - protein, 9 aa, synthetic construct
  source 1..9: note = Seed: LVVVGAGDV (KRAS G13D)
FVVMGTGDG

SEQ ID NO: 78252 - protein, 9 aa, synthetic construct
  source 1..9: note = Seed: LVVVGAGDV (KRAS G13D)
FVVMGTGDH

SEQ ID NO: 78253 - protein, 9 aa, synthetic construct
  source 1..9: note = Seed: LVVVGAGDV (KRAS G13D)
FVVMGTGDI

SEQ ID NO: 78254 - protein, 9 aa, synthetic construct
  source 1..9: note = Seed: LVVVGAGDV (KRAS G13D)
FVVMGTGDK

SEQ ID NO: 78255 - protein, 9 aa, synthetic construct
  source 1..9: note = Seed: LVVVGAGDV (KRAS G13D)
FVVMGTGDL

SEQ ID NO: 78256 - protein, 9 aa, synthetic construct
  source 1..9: note = Seed: LVVVGAGDV (KRAS G13D)
FVVMGTGDM

SEQ ID NO: 78257 - protein, 9 aa, synthetic construct
  source 1..9: note = Seed: LVVVGAGDV (KRAS G13D)
FVVMGTGDN

SEQ ID NO: 78258 - protein, 9 aa, synthetic construct
  source 1..9: note = Seed: LVVVGAGDV (KRAS G13D)
FVVMGTGDP

SEQ ID NO: 78259 - protein, 9 aa, synthetic construct
  source 1..9: note = Seed: LVVVGAGDV (KRAS G13D)
FVVMGTGDQ

SEQ ID NO: 78260 - protein, 9 aa, synthetic construct
  source 1..9: note = Seed: LVVVGAGDV (KRAS G13D)
FVVMGTGDR

SEQ ID NO: 78261 - protein, 9 aa, synthetic construct
  source 1..9: note = Seed: LVVVGAGDV (KRAS G13D)
FVVMGTGDS

SEQ ID NO: 78262 - protein, 9 aa, synthetic construct
  source 1..9: note = Seed: LVVVGAGDV (KRAS G13D)
FVVMGTGDT

SEQ ID NO: 78263 - protein, 9 aa, synthetic construct
  source 1..9: note = Seed: LVVVGAGDV (KRAS G13D)
FVVMGTGDV

SEQ ID NO: 78264 - protein, 9 aa, synthetic construct
  source 1..9: note = Seed: LVVVGAGDV (KRAS G13D)
FVVMGTGDW

SEQ ID NO: 78265 - protein, 9 aa, synthetic construct
  source 1..9: note = Seed: LVVVGAGDV (KRAS G13D)
FVVMGTGDY

SEQ ID NO: 78266 - protein, 9 aa, synthetic construct
  source 1..9: note = Seed: LVVVGAGDV (KRAS G13D)
FVVMGVGDA

SEQ ID NO: 78267 - protein, 9 aa, synthetic construct
  source 1..9: note = Seed: LVVVGAGDV (KRAS G13D)
FVVMGVGDC

SEQ ID NO: 78268 - protein, 9 aa, synthetic construct
  source 1..9: note = Seed: LVVVGAGDV (KRAS G13D)
FVVMGVGDD

SEQ ID NO: 78269 - protein, 9 aa, synthetic construct
  source 1..9: note = Seed: LVVVGAGDV (KRAS G13D)
FVVMGVGDE

SEQ ID NO: 78270 - protein, 9 aa, synthetic construct
  source 1..9: note = Seed: LVVVGAGDV (KRAS G13D)
FVVMGVGDF

SEQ ID NO: 78271 - protein, 9 aa, synthetic construct
  source 1..9: note = Seed: LVVVGAGDV (KRAS G13D)
FVVMGVGDG

SEQ ID NO: 78272 - protein, 9 aa, synthetic construct
  source 1..9: note = Seed: LVVVGAGDV (KRAS G13D)
FVVMGVGDH

SEQ ID NO: 78273 - protein, 9 aa, synthetic construct
  source 1..9: note = Seed: LVVVGAGDV (KRAS G13D)
FVVMGVGDI

SEQ ID NO: 78274 - protein, 9 aa, synthetic construct
  source 1..9: note = Seed: LVVVGAGDV (KRAS G13D)
FVVMGVGDK

SEQ ID NO: 78275 - protein, 9 aa, synthetic construct
  source 1..9: note = Seed: LVVVGAGDV (KRAS G13D)
FVVMGVGDL

SEQ ID NO: 78276 - protein, 9 aa, synthetic construct
  source 1..9: note = Seed: LVVVGAGDV (KRAS G13D)
FVVMGVGDM

SEQ ID NO: 78277 - protein, 9 aa, synthetic construct
  source 1..9: note = Seed: LVVVGAGDV (KRAS G13D)
FVVMGVGDN

SEQ ID NO: 78278 - protein, 9 aa, synthetic construct
  source 1..9: note = Seed: LVVVGAGDV (KRAS G13D)
FVVMGVGDP

SEQ ID NO: 78279 - protein, 9 aa, synthetic construct
  source 1..9: note = Seed: LVVVGAGDV (KRAS G13D)
FVVMGVGDQ

SEQ ID NO: 78280 - protein, 9 aa, synthetic construct
  source 1..9: note = Seed: LVVVGAGDV (KRAS G13D)
FVVMGVGDR

SEQ ID NO: 78281 - protein, 9 aa, synthetic construct
  source 1..9: note = Seed: LVVVGAGDV (KRAS G13D)
FVVMGVGDS

SEQ ID NO: 78282 - protein, 9 aa, synthetic construct
  source 1..9: note = Seed: LVVVGAGDV (KRAS G13D)
FVVMGVGDT

SEQ ID NO: 78283 - protein, 9 aa, synthetic construct
  source 1..9: note = Seed: LVVVGAGDV (KRAS G13D)
FVVMGVGDV

SEQ ID NO: 78284 - protein, 9 aa, synthetic construct
  source 1..9: note = Seed: LVVVGAGDV (KRAS G13D)
FVVMGVGDY

SEQ ID NO: 78285 - protein, 9 aa, synthetic construct
  source 1..9: note = Seed: LVVVGAGDV (KRAS G13D)
FVVMGWGDA

SEQ ID NO: 78286 - protein, 9 aa, synthetic construct
  source 1..9: note = Seed: LVVVGAGDV (KRAS G13D)
FVVMGWGDI

SEQ ID NO: 78287 - protein, 9 aa, synthetic construct
  source 1..9: note = Seed: LVVVGAGDV (KRAS G13D)
FVVMGWGDL

SEQ ID NO: 78288 - protein, 9 aa, synthetic construct
  source 1..9: note = Seed: LVVVGAGDV (KRAS G13D)
FVVMGWGDM

SEQ ID NO: 78289 - protein, 9 aa, synthetic construct
  source 1..9: note = Seed: LVVVGAGDV (KRAS G13D)
FVVMGWGDV

SEQ ID NO: 78290 - protein, 9 aa, synthetic construct
  source 1..9: note = Seed: LVVVGAGDV (KRAS G13D)
FVVMGYGDI

SEQ ID NO: 78291 - protein, 9 aa, synthetic construct
  source 1..9: note = Seed: LVVVGAGDV (KRAS G13D)
FVVMGYGDL

SEQ ID NO: 78292 - protein, 9 aa, synthetic construct
  source 1..9: note = Seed: LVVVGAGDV (KRAS G13D)
FVVMGYGDM

SEQ ID NO: 78293 - protein, 9 aa, synthetic construct
  source 1..9: note = Seed: LVVVGAGDV (KRAS G13D)
FVVMGYGDV

SEQ ID NO: 78294 - protein, 9 aa, synthetic construct
  source 1..9: note = Seed: LVVVGAGDV (KRAS G13D)
FVVNGAGDA

SEQ ID NO: 78295 - protein, 9 aa, synthetic construct
  source 1..9: note = Seed: LVVVGAGDV (KRAS G13D)
FVVNGAGDF

SEQ ID NO: 78296 - protein, 9 aa, synthetic construct
  source 1..9: note = Seed: LVVVGAGDV (KRAS G13D)
FVVNGAGDI

SEQ ID NO: 78297 - protein, 9 aa, synthetic construct
  source 1..9: note = Seed: LVVVGAGDV (KRAS G13D)
FVVNGAGDL

SEQ ID NO: 78298 - protein, 9 aa, synthetic construct
  source 1..9: note = Seed: LVVVGAGDV (KRAS G13D)
FVVNGAGDM

SEQ ID NO: 78299 - protein, 9 aa, synthetic construct
  source 1..9: note = Seed: LVVVGAGDV (KRAS G13D)
FVVNGAGDS

SEQ ID NO: 78300 - protein, 9 aa, synthetic construct
  source 1..9: note = Seed: LVVVGAGDV (KRAS G13D)
FVVNGAGDT

SEQ ID NO: 78301 - protein, 9 aa, synthetic construct
  source 1..9: note = Seed: LVVVGAGDV (KRAS G13D)
FVVNGAGDV

SEQ ID NO: 78302 - protein, 9 aa, synthetic construct
  source 1..9: note = Seed: LVVVGAGDV (KRAS G13D)
FVVNGAGDW

SEQ ID NO: 78303 - protein, 9 aa, synthetic construct
  source 1..9: note = Seed: LVVVGAGDV (KRAS G13D)
FVVNGAGDY

SEQ ID NO: 78304 - protein, 9 aa, synthetic construct
  source 1..9: note = Seed: LVVVGAGDV (KRAS G13D)
FVVNGCGDI

SEQ ID NO: 78305 - protein, 9 aa, synthetic construct
  source 1..9: note = Seed: LVVVGAGDV (KRAS G13D)
FVVNGCGDV

SEQ ID NO: 78306 - protein, 9 aa, synthetic construct
  source 1..9: note = Seed: LVVVGAGDV (KRAS G13D)
FVVNGDGDI

SEQ ID NO: 78307 - protein, 9 aa, synthetic construct
  source 1..9: note = Seed: LVVVGAGDV (KRAS G13D)
FVVNGFGDF

SEQ ID NO: 78308 - protein, 9 aa, synthetic construct
  source 1..9: note = Seed: LVVVGAGDV (KRAS G13D)
FVVNGFGDI

SEQ ID NO: 78309 - protein, 9 aa, synthetic construct
  source 1..9: note = Seed: LVVVGAGDV (KRAS G13D)
FVVNGFGDL

SEQ ID NO: 78310 - protein, 9 aa, synthetic construct
  source 1..9: note = Seed: LVVVGAGDV (KRAS G13D)
FVVNGFGDM

SEQ ID NO: 78311 - protein, 9 aa, synthetic construct
  source 1..9: note = Seed: LVVVGAGDV (KRAS G13D)
FVVNGFGDV

SEQ ID NO: 78312 - protein, 9 aa, synthetic construct
  source 1..9: note = Seed: LVVVGAGDV (KRAS G13D)
FVVNGGGDA

SEQ ID NO: 78313 - protein, 9 aa, synthetic construct
  source 1..9: note = Seed: LVVVGAGDV (KRAS G13D)
FVVNGGGDF

SEQ ID NO: 78314 - protein, 9 aa, synthetic construct
  source 1..9: note = Seed: LVVVGAGDV (KRAS G13D)
FVVNGGGDI

SEQ ID NO: 78315 - protein, 9 aa, synthetic construct
  source 1..9: note = Seed: LVVVGAGDV (KRAS G13D)
FVVNGGGDL

SEQ ID NO: 78316 - protein, 9 aa, synthetic construct
  source 1..9: note = Seed: LVVVGAGDV (KRAS G13D)
FVVNGGGDM

SEQ ID NO: 78317 - protein, 9 aa, synthetic construct
  source 1..9: note = Seed: LVVVGAGDV (KRAS G13D)
FVVNGGGDV

SEQ ID NO: 78318 - protein, 9 aa, synthetic construct
  source 1..9: note = Seed: LVVVGAGDV (KRAS G13D)
FVVNGGGDY

SEQ ID NO: 78319 - protein, 9 aa, synthetic construct
  source 1..9: note = Seed: LVVVGAGDV (KRAS G13D)
FVVNGHGDI

SEQ ID NO: 78320 - protein, 9 aa, synthetic construct
  source 1..9: note = Seed: LVVVGAGDV (KRAS G13D)
FVVNGHGDL

SEQ ID NO: 78321 - protein, 9 aa, synthetic construct
  source 1..9: note = Seed: LVVVGAGDV (KRAS G13D)
FVVNGHGDV

SEQ ID NO: 78322 - protein, 9 aa, synthetic construct
  source 1..9: note = Seed: LVVVGAGDV (KRAS G13D)
FVVNGIGDA

SEQ ID NO: 78323 - protein, 9 aa, synthetic construct
  source 1..9: note = Seed: LVVVGAGDV (KRAS G13D)
FVVNGIGDF

SEQ ID NO: 78324 - protein, 9 aa, synthetic construct
  source 1..9: note = Seed: LVVVGAGDV (KRAS G13D)
FVVNGIGDI

SEQ ID NO: 78325 - protein, 9 aa, synthetic construct
  source 1..9: note = Seed: LVVVGAGDV (KRAS G13D)
FVVNGIGDL

SEQ ID NO: 78326 - protein, 9 aa, synthetic construct
  source 1..9: note = Seed: LVVVGAGDV (KRAS G13D)
FVVNGIGDM

SEQ ID NO: 78327 - protein, 9 aa, synthetic construct
  source 1..9: note = Seed: LVVVGAGDV (KRAS G13D)
FVVNGIGDS

SEQ ID NO: 78328 - protein, 9 aa, synthetic construct
  source 1..9: note = Seed: LVVVGAGDV (KRAS G13D)
FVVNGIGDT

SEQ ID NO: 78329 - protein, 9 aa, synthetic construct
  source 1..9: note = Seed: LVVVGAGDV (KRAS G13D)
FVVNGIGDV

SEQ ID NO: 78330 - protein, 9 aa, synthetic construct
  source 1..9: note = Seed: LVVVGAGDV (KRAS G13D)
FVVNGIGDY

SEQ ID NO: 78331 - protein, 9 aa, synthetic construct
  source 1..9: note = Seed: LVVVGAGDV (KRAS G13D)
FVVNGLGDF

SEQ ID NO: 78332 - protein, 9 aa, synthetic construct
  source 1..9: note = Seed: LVVVGAGDV (KRAS G13D)
FVVNGLGDI

SEQ ID NO: 78333 - protein, 9 aa, synthetic construct
  source 1..9: note = Seed: LVVVGAGDV (KRAS G13D)
FVVNGLGDL

SEQ ID NO: 78334 - protein, 9 aa, synthetic construct
  source 1..9: note = Seed: LVVVGAGDV (KRAS G13D)
FVVNGLGDM

SEQ ID NO: 78335 - protein, 9 aa, synthetic construct
  source 1..9: note = Seed: LVVVGAGDV (KRAS G13D)
FVVNGLGDV

SEQ ID NO: 78336 - protein, 9 aa, synthetic construct
  source 1..9: note = Seed: LVVVGAGDV (KRAS G13D)
FVVNGLGDY

SEQ ID NO: 78337 - protein, 9 aa, synthetic construct
  source 1..9: note = Seed: LVVVGAGDV (KRAS G13D)
FVVNGMGDF

SEQ ID NO: 78338 - protein, 9 aa, synthetic construct
  source 1..9: note = Seed: LVVVGAGDV (KRAS G13D)
FVVNGMGDI

SEQ ID NO: 78339 - protein, 9 aa, synthetic construct
  source 1..9: note = Seed: LVVVGAGDV (KRAS G13D)
FVVNGMGDL

SEQ ID NO: 78340 - protein, 9 aa, synthetic construct
  source 1..9: note = Seed: LVVVGAGDV (KRAS G13D)
FVVNGMGDM

SEQ ID NO: 78341 - protein, 9 aa, synthetic construct
  source 1..9: note = Seed: LVVVGAGDV (KRAS G13D)
FVVNGMGDV

SEQ ID NO: 78342 - protein, 9 aa, synthetic construct
  source 1..9: note = Seed: LVVVGAGDV (KRAS G13D)
FVVNGMGDY

SEQ ID NO: 78343 - protein, 9 aa, synthetic construct
  source 1..9: note = Seed: LVVVGAGDV (KRAS G13D)
FVVNGNGDA

SEQ ID NO: 78344 - protein, 9 aa, synthetic construct
  source 1..9: note = Seed: LVVVGAGDV (KRAS G13D)
FVVNGNGDF

SEQ ID NO: 78345 - protein, 9 aa, synthetic construct
  source 1..9: note = Seed: LVVVGAGDV (KRAS G13D)
FVVNGNGDI

SEQ ID NO: 78346 - protein, 9 aa, synthetic construct
  source 1..9: note = Seed: LVVVGAGDV (KRAS G13D)
FVVNGNGDL

SEQ ID NO: 78347 - protein, 9 aa, synthetic construct
  source 1..9: note = Seed: LVVVGAGDV (KRAS G13D)
FVVNGNGDM

SEQ ID NO: 78348 - protein, 9 aa, synthetic construct
  source 1..9: note = Seed: LVVVGAGDV (KRAS G13D)
FVVNGNGDS

SEQ ID NO: 78349 - protein, 9 aa, synthetic construct
  source 1..9: note = Seed: LVVVGAGDV (KRAS G13D)
FVVNGNGDT

SEQ ID NO: 78350 - protein, 9 aa, synthetic construct
  source 1..9: note = Seed: LVVVGAGDV (KRAS G13D)
FVVNGNGDV

SEQ ID NO: 78351 - protein, 9 aa, synthetic construct
  source 1..9: note = Seed: LVVVGAGDV (KRAS G13D)
FVVNGNGDW

SEQ ID NO: 78352 - protein, 9 aa, synthetic construct
  source 1..9: note = Seed: LVVVGAGDV (KRAS G13D)
FVVNGNGDY

SEQ ID NO: 78353 - protein, 9 aa, synthetic construct
  source 1..9: note = Seed: LVVVGAGDV (KRAS G13D)
FVVNGPGDA

SEQ ID NO: 78354 - protein, 9 aa, synthetic construct
  source 1..9: note = Seed: LVVVGAGDV (KRAS G13D)
FVVNGPGDF

SEQ ID NO: 78355 - protein, 9 aa, synthetic construct
  source 1..9: note = Seed: LVVVGAGDV (KRAS G13D)
FVVNGPGDI

SEQ ID NO: 78356 - protein, 9 aa, synthetic construct
  source 1..9: note = Seed: LVVVGAGDV (KRAS G13D)
FVVNGPGDL

SEQ ID NO: 78357 - protein, 9 aa, synthetic construct
  source 1..9: note = Seed: LVVVGAGDV (KRAS G13D)
FVVNGPGDM

SEQ ID NO: 78358 - protein, 9 aa, synthetic construct
  source 1..9: note = Seed: LVVVGAGDV (KRAS G13D)
FVVNGPGDV

SEQ ID NO: 78359 - protein, 9 aa, synthetic construct
  source 1..9: note = Seed: LVVVGAGDV (KRAS G13D)
FVVNGPGDY

SEQ ID NO: 78360 - protein, 9 aa, synthetic construct
  source 1..9: note = Seed: LVVVGAGDV (KRAS G13D)
FVVNGQGDI

SEQ ID NO: 78361 - protein, 9 aa, synthetic construct
  source 1..9: note = Seed: LVVVGAGDV (KRAS G13D)
FVVNGQGDV

SEQ ID NO: 78362 - protein, 9 aa, synthetic construct
  source 1..9: note = Seed: LVVVGAGDV (KRAS G13D)
FVVNGSGDA

SEQ ID NO: 78363 - protein, 9 aa, synthetic construct
  source 1..9: note = Seed: LVVVGAGDV (KRAS G13D)
FVVNGSGDF

SEQ ID NO: 78364 - protein, 9 aa, synthetic construct
  source 1..9: note = Seed: LVVVGAGDV (KRAS G13D)
FVVNGSGDI

SEQ ID NO: 78365 - protein, 9 aa, synthetic construct
  source 1..9: note = Seed: LVVVGAGDV (KRAS G13D)
FVVNGSGDL

SEQ ID NO: 78366 - protein, 9 aa, synthetic construct
  source 1..9: note = Seed: LVVVGAGDV (KRAS G13D)
FVVNGSGDM

SEQ ID NO: 78367 - protein, 9 aa, synthetic construct
  source 1..9: note = Seed: LVVVGAGDV (KRAS G13D)
FVVNGSGDS

SEQ ID NO: 78368 - protein, 9 aa, synthetic construct
  source 1..9: note = Seed: LVVVGAGDV (KRAS G13D)
FVVNGSGDT

SEQ ID NO: 78369 - protein, 9 aa, synthetic construct
  source 1..9: note = Seed: LVVVGAGDV (KRAS G13D)
FVVNGSGDV

SEQ ID NO: 78370 - protein, 9 aa, synthetic construct
  source 1..9: note = Seed: LVVVGAGDV (KRAS G13D)
FVVNGSGDY

SEQ ID NO: 78371 - protein, 9 aa, synthetic construct
  source 1..9: note = Seed: LVVVGAGDV (KRAS G13D)
FVVNGTGDA

SEQ ID NO: 78372 - protein, 9 aa, synthetic construct
  source 1..9: note = Seed: LVVVGAGDV (KRAS G13D)
FVVNGTGDF

SEQ ID NO: 78373 - protein, 9 aa, synthetic construct
  source 1..9: note = Seed: LVVVGAGDV (KRAS G13D)
FVVNGTGDI

SEQ ID NO: 78374 - protein, 9 aa, synthetic construct
  source 1..9: note = Seed: LVVVGAGDV (KRAS G13D)
FVVNGTGDL

SEQ ID NO: 78375 - protein, 9 aa, synthetic construct
  source 1..9: note = Seed: LVVVGAGDV (KRAS G13D)
FVVNGTGDM

SEQ ID NO: 78376 - protein, 9 aa, synthetic construct
  source 1..9: note = Seed: LVVVGAGDV (KRAS G13D)
FVVNGTGDV

SEQ ID NO: 78377 - protein, 9 aa, synthetic construct
  source 1..9: note = Seed: LVVVGAGDV (KRAS G13D)
FVVNGTGDY

SEQ ID NO: 78378 - protein, 9 aa, synthetic construct
  source 1..9: note = Seed: LVVVGAGDV (KRAS G13D)
FVVNGVGDA

SEQ ID NO: 78379 - protein, 9 aa, synthetic construct
  source 1..9: note = Seed: LVVVGAGDV (KRAS G13D)
FVVNGVGDF

SEQ ID NO: 78380 - protein, 9 aa, synthetic construct
  source 1..9: note = Seed: LVVVGAGDV (KRAS G13D)
FVVNGVGDI

SEQ ID NO: 78381 - protein, 9 aa, synthetic construct
  source 1..9: note = Seed: LVVVGAGDV (KRAS G13D)
FVVNGVGDL

SEQ ID NO: 78382 - protein, 9 aa, synthetic construct
  source 1..9: note = Seed: LVVVGAGDV (KRAS G13D)
FVVNGVGDM

SEQ ID NO: 78383 - protein, 9 aa, synthetic construct
  source 1..9: note = Seed: LVVVGAGDV (KRAS G13D)
FVVNGVGDS

SEQ ID NO: 78384 - protein, 9 aa, synthetic construct
  source 1..9: note = Seed: LVVVGAGDV (KRAS G13D)
FVVNGVGDT

SEQ ID NO: 78385 - protein, 9 aa, synthetic construct
  source 1..9: note = Seed: LVVVGAGDV (KRAS G13D)
FVVNGVGDV

SEQ ID NO: 78386 - protein, 9 aa, synthetic construct
  source 1..9: note = Seed: LVVVGAGDV (KRAS G13D)
FVVNGVGDY

SEQ ID NO: 78387 - protein, 9 aa, synthetic construct
  source 1..9: note = Seed: LVVVGAGDV (KRAS G13D)
FVVQGAGDA

SEQ ID NO: 78388 - protein, 9 aa, synthetic construct
  source 1..9: note = Seed: LVVVGAGDV (KRAS G13D)
FVVQGAGDC

SEQ ID NO: 78389 - protein, 9 aa, synthetic construct
  source 1..9: note = Seed: LVVVGAGDV (KRAS G13D)
FVVQGAGDF

SEQ ID NO: 78390 - protein, 9 aa, synthetic construct
  source 1..9: note = Seed: LVVVGAGDV (KRAS G13D)
FVVQGAGDG

SEQ ID NO: 78391 - protein, 9 aa, synthetic construct
  source 1..9: note = Seed: LVVVGAGDV (KRAS G13D)
FVVQGAGDH

SEQ ID NO: 78392 - protein, 9 aa, synthetic construct
  source 1..9: note = Seed: LVVVGAGDV (KRAS G13D)
FVVQGAGDI

SEQ ID NO: 78393 - protein, 9 aa, synthetic construct
  source 1..9: note = Seed: LVVVGAGDV (KRAS G13D)
FVVQGAGDL

SEQ ID NO: 78394 - protein, 9 aa, synthetic construct
  source 1..9: note = Seed: LVVVGAGDV (KRAS G13D)
FVVQGAGDM

SEQ ID NO: 78395 - protein, 9 aa, synthetic construct
  source 1..9: note = Seed: LVVVGAGDV (KRAS G13D)
FVVQGAGDN

SEQ ID NO: 78396 - protein, 9 aa, synthetic construct
  source 1..9: note = Seed: LVVVGAGDV (KRAS G13D)
FVVQGAGDP

SEQ ID NO: 78397 - protein, 9 aa, synthetic construct
  source 1..9: note = Seed: LVVVGAGDV (KRAS G13D)
FVVQGAGDQ

SEQ ID NO: 78398 - protein, 9 aa, synthetic construct
  source 1..9: note = Seed: LVVVGAGDV (KRAS G13D)
FVVQGAGDS

SEQ ID NO: 78399 - protein, 9 aa, synthetic construct
  source 1..9: note = Seed: LVVVGAGDV (KRAS G13D)
FVVQGAGDT

SEQ ID NO: 78400 - protein, 9 aa, synthetic construct
  source 1..9: note = Seed: LVVVGAGDV (KRAS G13D)
FVVQGAGDV

SEQ ID NO: 78401 - protein, 9 aa, synthetic construct
  source 1..9: note = Seed: LVVVGAGDV (KRAS G13D)
FVVQGAGDY

SEQ ID NO: 78402 - protein, 9 aa, synthetic construct
  source 1..9: note = Seed: LVVVGAGDV (KRAS G13D)
FVVQGFGDF

SEQ ID NO: 78403 - protein, 9 aa, synthetic construct
  source 1..9: note = Seed: LVVVGAGDV (KRAS G13D)
FVVQGFGDI

SEQ ID NO: 78404 - protein, 9 aa, synthetic construct
  source 1..9: note = Seed: LVVVGAGDV (KRAS G13D)
FVVQGFGDL

SEQ ID NO: 78405 - protein, 9 aa, synthetic construct
  source 1..9: note = Seed: LVVVGAGDV (KRAS G13D)
FVVQGFGDM

SEQ ID NO: 78406 - protein, 9 aa, synthetic construct
  source 1..9: note = Seed: LVVVGAGDV (KRAS G13D)
FVVQGFGDV

SEQ ID NO: 78407 - protein, 9 aa, synthetic construct
  source 1..9: note = Seed: LVVVGAGDV (KRAS G13D)
FVVQGGGDA

SEQ ID NO: 78408 - protein, 9 aa, synthetic construct
  source 1..9: note = Seed: LVVVGAGDV (KRAS G13D)
FVVQGGGDC

SEQ ID NO: 78409 - protein, 9 aa, synthetic construct
  source 1..9: note = Seed: LVVVGAGDV (KRAS G13D)
FVVQGGGDF

SEQ ID NO: 78410 - protein, 9 aa, synthetic construct
  source 1..9: note = Seed: LVVVGAGDV (KRAS G13D)
FVVQGGGDG

SEQ ID NO: 78411 - protein, 9 aa, synthetic construct
  source 1..9: note = Seed: LVVVGAGDV (KRAS G13D)
FVVQGGGDI

SEQ ID NO: 78412 - protein, 9 aa, synthetic construct
  source 1..9: note = Seed: LVVVGAGDV (KRAS G13D)
FVVQGGGDL

SEQ ID NO: 78413 - protein, 9 aa, synthetic construct
  source 1..9: note = Seed: LVVVGAGDV (KRAS G13D)
FVVQGGGDM

SEQ ID NO: 78414 - protein, 9 aa, synthetic construct
  source 1..9: note = Seed: LVVVGAGDV (KRAS G13D)
FVVQGGGDS

SEQ ID NO: 78415 - protein, 9 aa, synthetic construct
  source 1..9: note = Seed: LVVVGAGDV (KRAS G13D)
FVVQGGGDT

SEQ ID NO: 78416 - protein, 9 aa, synthetic construct
  source 1..9: note = Seed: LVVVGAGDV (KRAS G13D)
FVVQGGGDV

SEQ ID NO: 78417 - protein, 9 aa, synthetic construct
  source 1..9: note = Seed: LVVVGAGDV (KRAS G13D)
FVVQGIGDA

SEQ ID NO: 78418 - protein, 9 aa, synthetic construct
  source 1..9: note = Seed: LVVVGAGDV (KRAS G13D)
FVVQGIGDI

SEQ ID NO: 78419 - protein, 9 aa, synthetic construct
  source 1..9: note = Seed: LVVVGAGDV (KRAS G13D)
FVVQGIGDL

SEQ ID NO: 78420 - protein, 9 aa, synthetic construct
  source 1..9: note = Seed: LVVVGAGDV (KRAS G13D)
FVVQGIGDM

SEQ ID NO: 78421 - protein, 9 aa, synthetic construct
  source 1..9: note = Seed: LVVVGAGDV (KRAS G13D)
FVVQGIGDN

SEQ ID NO: 78422 - protein, 9 aa, synthetic construct
  source 1..9: note = Seed: LVVVGAGDV (KRAS G13D)
FVVQGIGDS

SEQ ID NO: 78423 - protein, 9 aa, synthetic construct
  source 1..9: note = Seed: LVVVGAGDV (KRAS G13D)
FVVQGIGDV

SEQ ID NO: 78424 - protein, 9 aa, synthetic construct
  source 1..9: note = Seed: LVVVGAGDV (KRAS G13D)
FVVQGKGDA

SEQ ID NO: 78425 - protein, 9 aa, synthetic construct
  source 1..9: note = Seed: LVVVGAGDV (KRAS G13D)
FVVQGKGDS

SEQ ID NO: 78426 - protein, 9 aa, synthetic construct
  source 1..9: note = Seed: LVVVGAGDV (KRAS G13D)
FVVQGMGDL

SEQ ID NO: 78427 - protein, 9 aa, synthetic construct
  source 1..9: note = Seed: LVVVGAGDV (KRAS G13D)
FVVQGNGDA

SEQ ID NO: 78428 - protein, 9 aa, synthetic construct
  source 1..9: note = Seed: LVVVGAGDV (KRAS G13D)
FVVQGNGDG

SEQ ID NO: 78429 - protein, 9 aa, synthetic construct
  source 1..9: note = Seed: LVVVGAGDV (KRAS G13D)
FVVQGNGDI

SEQ ID NO: 78430 - protein, 9 aa, synthetic construct
  source 1..9: note = Seed: LVVVGAGDV (KRAS G13D)
FVVQGNGDL

SEQ ID NO: 78431 - protein, 9 aa, synthetic construct
  source 1..9: note = Seed: LVVVGAGDV (KRAS G13D)
FVVQGNGDM

SEQ ID NO: 78432 - protein, 9 aa, synthetic construct
  source 1..9: note = Seed: LVVVGAGDV (KRAS G13D)
FVVQGNGDS

SEQ ID NO: 78433 - protein, 9 aa, synthetic construct
  source 1..9: note = Seed: LVVVGAGDV (KRAS G13D)
FVVQGNGDT

SEQ ID NO: 78434 - protein, 9 aa, synthetic construct
  source 1..9: note = Seed: LVVVGAGDV (KRAS G13D)
FVVQGNGDV

SEQ ID NO: 78435 - protein, 9 aa, synthetic construct
  source 1..9: note = Seed: LVVVGAGDV (KRAS G13D)
FVVQGPGDA

SEQ ID NO: 78436 - protein, 9 aa, synthetic construct
  source 1..9: note = Seed: LVVVGAGDV (KRAS G13D)
FVVQGPGDI

SEQ ID NO: 78437 - protein, 9 aa, synthetic construct
  source 1..9: note = Seed: LVVVGAGDV (KRAS G13D)
FVVQGPGDL

SEQ ID NO: 78438 - protein, 9 aa, synthetic construct
  source 1..9: note = Seed: LVVVGAGDV (KRAS G13D)
FVVQGPGDM

SEQ ID NO: 78439 - protein, 9 aa, synthetic construct
  source 1..9: note = Seed: LVVVGAGDV (KRAS G13D)
FVVQGPGDS

SEQ ID NO: 78440 - protein, 9 aa, synthetic construct
  source 1..9: note = Seed: LVVVGAGDV (KRAS G13D)
FVVQGPGDT

SEQ ID NO: 78441 - protein, 9 aa, synthetic construct
  source 1..9: note = Seed: LVVVGAGDV (KRAS G13D)
FVVQGPGDV

SEQ ID NO: 78442 - protein, 9 aa, synthetic construct
  source 1..9: note = Seed: LVVVGAGDV (KRAS G13D)
FVVQGRGDA

SEQ ID NO: 78443 - protein, 9 aa, synthetic construct
  source 1..9: note = Seed: LVVVGAGDV (KRAS G13D)
FVVQGRGDH

SEQ ID NO: 78444 - protein, 9 aa, synthetic construct
  source 1..9: note = Seed: LVVVGAGDV (KRAS G13D)
FVVQGRGDS

SEQ ID NO: 78445 - protein, 9 aa, synthetic construct
  source 1..9: note = Seed: LVVVGAGDV (KRAS G13D)
FVVQGRGDT

SEQ ID NO: 78446 - protein, 9 aa, synthetic construct
  source 1..9: note = Seed: LVVVGAGDV (KRAS G13D)
FVVQGSGDA

SEQ ID NO: 78447 - protein, 9 aa, synthetic construct
  source 1..9: note = Seed: LVVVGAGDV (KRAS G13D)
FVVQGSGDC

SEQ ID NO: 78448 - protein, 9 aa, synthetic construct
  source 1..9: note = Seed: LVVVGAGDV (KRAS G13D)
FVVQGSGDF

SEQ ID NO: 78449 - protein, 9 aa, synthetic construct
  source 1..9: note = Seed: LVVVGAGDV (KRAS G13D)
FVVQGSGDG

SEQ ID NO: 78450 - protein, 9 aa, synthetic construct
  source 1..9: note = Seed: LVVVGAGDV (KRAS G13D)
FVVQGSGDI

SEQ ID NO: 78451 - protein, 9 aa, synthetic construct
  source 1..9: note = Seed: LVVVGAGDV (KRAS G13D)
FVVQGSGDL

SEQ ID NO: 78452 - protein, 9 aa, synthetic construct
  source 1..9: note = Seed: LVVVGAGDV (KRAS G13D)
FVVQGSGDM

SEQ ID NO: 78453 - protein, 9 aa, synthetic construct
  source 1..9: note = Seed: LVVVGAGDV (KRAS G13D)
FVVQGSGDN

SEQ ID NO: 78454 - protein, 9 aa, synthetic construct
  source 1..9: note = Seed: LVVVGAGDV (KRAS G13D)
FVVQGSGDS

SEQ ID NO: 78455 - protein, 9 aa, synthetic construct
  source 1..9: note = Seed: LVVVGAGDV (KRAS G13D)
FVVQGSGDT

SEQ ID NO: 78456 - protein, 9 aa, synthetic construct
  source 1..9: note = Seed: LVVVGAGDV (KRAS G13D)
FVVQGSGDV

SEQ ID NO: 78457 - protein, 9 aa, synthetic construct
  source 1..9: note = Seed: LVVVGAGDV (KRAS G13D)
FVVQGTGDA

SEQ ID NO: 78458 - protein, 9 aa, synthetic construct
  source 1..9: note = Seed: LVVVGAGDV (KRAS G13D)
FVVQGTGDI

SEQ ID NO: 78459 - protein, 9 aa, synthetic construct
  source 1..9: note = Seed: LVVVGAGDV (KRAS G13D)
FVVQGTGDL

SEQ ID NO: 78460 - protein, 9 aa, synthetic construct
  source 1..9: note = Seed: LVVVGAGDV (KRAS G13D)
FVVQGTGDM

SEQ ID NO: 78461 - protein, 9 aa, synthetic construct
  source 1..9: note = Seed: LVVVGAGDV (KRAS G13D)
FVVQGTGDN

SEQ ID NO: 78462 - protein, 9 aa, synthetic construct
  source 1..9: note = Seed: LVVVGAGDV (KRAS G13D)
FVVQGTGDS

SEQ ID NO: 78463 - protein, 9 aa, synthetic construct
  source 1..9: note = Seed: LVVVGAGDV (KRAS G13D)
FVVQGTGDT

SEQ ID NO: 78464 - protein, 9 aa, synthetic construct
  source 1..9: note = Seed: LVVVGAGDV (KRAS G13D)
FVVQGTGDV

SEQ ID NO: 78465 - protein, 9 aa, synthetic construct
  source 1..9: note = Seed: LVVVGAGDV (KRAS G13D)
FVVQGVGDA

SEQ ID NO: 78466 - protein, 9 aa, synthetic construct
  source 1..9: note = Seed: LVVVGAGDV (KRAS G13D)
FVVQGVGDI

SEQ ID NO: 78467 - protein, 9 aa, synthetic construct
  source 1..9: note = Seed: LVVVGAGDV (KRAS G13D)
FVVQGVGDL

SEQ ID NO: 78468 - protein, 9 aa, synthetic construct
  source 1..9: note = Seed: LVVVGAGDV (KRAS G13D)
FVVQGVGDM

SEQ ID NO: 78469 - protein, 9 aa, synthetic construct
  source 1..9: note = Seed: LVVVGAGDV (KRAS G13D)
FVVQGVGDN

SEQ ID NO: 78470 - protein, 9 aa, synthetic construct
  source 1..9: note = Seed: LVVVGAGDV (KRAS G13D)
FVVQGVGDS

SEQ ID NO: 78471 - protein, 9 aa, synthetic construct
  source 1..9: note = Seed: LVVVGAGDV (KRAS G13D)
FVVQGVGDT

SEQ ID NO: 78472 - protein, 9 aa, synthetic construct
  source 1..9: note = Seed: LVVVGAGDV (KRAS G13D)
FVVQGVGDV

SEQ ID NO: 78473 - protein, 9 aa, synthetic construct
  source 1..9: note = Seed: LVVVGAGDV (KRAS G13D)
FVVRGRGDA

SEQ ID NO: 78474 - protein, 9 aa, synthetic construct
  source 1..9: note = Seed: LVVVGAGDV (KRAS G13D)
FVVRGRGDQ

SEQ ID NO: 78475 - protein, 9 aa, synthetic construct
  source 1..9: note = Seed: LVVVGAGDV (KRAS G13D)
FVVRGRGDS

SEQ ID NO: 78476 - protein, 9 aa, synthetic construct
  source 1..9: note = Seed: LVVVGAGDV (KRAS G13D)
FVVSGAGDA

SEQ ID NO: 78477 - protein, 9 aa, synthetic construct
  source 1..9: note = Seed: LVVVGAGDV (KRAS G13D)
FVVSGAGDC

SEQ ID NO: 78478 - protein, 9 aa, synthetic construct
  source 1..9: note = Seed: LVVVGAGDV (KRAS G13D)
FVVSGAGDF

SEQ ID NO: 78479 - protein, 9 aa, synthetic construct
  source 1..9: note = Seed: LVVVGAGDV (KRAS G13D)
FVVSGAGDG

SEQ ID NO: 78480 - protein, 9 aa, synthetic construct
  source 1..9: note = Seed: LVVVGAGDV (KRAS G13D)
FVVSGAGDH

SEQ ID NO: 78481 - protein, 9 aa, synthetic construct
  source 1..9: note = Seed: LVVVGAGDV (KRAS G13D)
FVVSGAGDI

SEQ ID NO: 78482 - protein, 9 aa, synthetic construct
  source 1..9: note = Seed: LVVVGAGDV (KRAS G13D)
FVVSGAGDL

SEQ ID NO: 78483 - protein, 9 aa, synthetic construct
  source 1..9: note = Seed: LVVVGAGDV (KRAS G13D)
FVVSGAGDM

SEQ ID NO: 78484 - protein, 9 aa, synthetic construct
  source 1..9: note = Seed: LVVVGAGDV (KRAS G13D)
FVVSGAGDN

SEQ ID NO: 78485 - protein, 9 aa, synthetic construct
  source 1..9: note = Seed: LVVVGAGDV (KRAS G13D)
FVVSGAGDQ

SEQ ID NO: 78486 - protein, 9 aa, synthetic construct
  source 1..9: note = Seed: LVVVGAGDV (KRAS G13D)
FVVSGAGDS

SEQ ID NO: 78487 - protein, 9 aa, synthetic construct
  source 1..9: note = Seed: LVVVGAGDV (KRAS G13D)
FVVSGAGDT

SEQ ID NO: 78488 - protein, 9 aa, synthetic construct
  source 1..9: note = Seed: LVVVGAGDV (KRAS G13D)
FVVSGAGDV

SEQ ID NO: 78489 - protein, 9 aa, synthetic construct
  source 1..9: note = Seed: LVVVGAGDV (KRAS G13D)
FVVSGAGDW

SEQ ID NO: 78490 - protein, 9 aa, synthetic construct
  source 1..9: note = Seed: LVVVGAGDV (KRAS G13D)
FVVSGAGDY

SEQ ID NO: 78491 - protein, 9 aa, synthetic construct
  source 1..9: note = Seed: LVVVGAGDV (KRAS G13D)
FVVSGFGDA

SEQ ID NO: 78492 - protein, 9 aa, synthetic construct
  source 1..9: note = Seed: LVVVGAGDV (KRAS G13D)
FVVSGFGDF

SEQ ID NO: 78493 - protein, 9 aa, synthetic construct
  source 1..9: note = Seed: LVVVGAGDV (KRAS G13D)
FVVSGFGDI

SEQ ID NO: 78494 - protein, 9 aa, synthetic construct
  source 1..9: note = Seed: LVVVGAGDV (KRAS G13D)
FVVSGFGDL

SEQ ID NO: 78495 - protein, 9 aa, synthetic construct
  source 1..9: note = Seed: LVVVGAGDV (KRAS G13D)
FVVSGFGDM

SEQ ID NO: 78496 - protein, 9 aa, synthetic construct
  source 1..9: note = Seed: LVVVGAGDV (KRAS G13D)
FVVSGFGDN

SEQ ID NO: 78497 - protein, 9 aa, synthetic construct
  source 1..9: note = Seed: LVVVGAGDV (KRAS G13D)
FVVSGFGDS

SEQ ID NO: 78498 - protein, 9 aa, synthetic construct
  source 1..9: note = Seed: LVVVGAGDV (KRAS G13D)
FVVSGFGDT

SEQ ID NO: 78499 - protein, 9 aa, synthetic construct
  source 1..9: note = Seed: LVVVGAGDV (KRAS G13D)
FVVSGFGDV

SEQ ID NO: 78500 - protein, 9 aa, synthetic construct
  source 1..9: note = Seed: LVVVGAGDV (KRAS G13D)
FVVSGFGDY

SEQ ID NO: 78501 - protein, 9 aa, synthetic construct
  source 1..9: note = Seed: LVVVGAGDV (KRAS G13D)
FVVSGGGDA

SEQ ID NO: 78502 - protein, 9 aa, synthetic construct
  source 1..9: note = Seed: LVVVGAGDV (KRAS G13D)
FVVSGGGDF

SEQ ID NO: 78503 - protein, 9 aa, synthetic construct
  source 1..9: note = Seed: LVVVGAGDV (KRAS G13D)
FVVSGGGDI

SEQ ID NO: 78504 - protein, 9 aa, synthetic construct
  source 1..9: note = Seed: LVVVGAGDV (KRAS G13D)
FVVSGGGDL

SEQ ID NO: 78505 - protein, 9 aa, synthetic construct
  source 1..9: note = Seed: LVVVGAGDV (KRAS G13D)
FVVSGGGDM

SEQ ID NO: 78506 - protein, 9 aa, synthetic construct
  source 1..9: note = Seed: LVVVGAGDV (KRAS G13D)
FVVSGGGDS

SEQ ID NO: 78507 - protein, 9 aa, synthetic construct
  source 1..9: note = Seed: LVVVGAGDV (KRAS G13D)
FVVSGGGDT

SEQ ID NO: 78508 - protein, 9 aa, synthetic construct
  source 1..9: note = Seed: LVVVGAGDV (KRAS G13D)
FVVSGGGDV

SEQ ID NO: 78509 - protein, 9 aa, synthetic construct
  source 1..9: note = Seed: LVVVGAGDV (KRAS G13D)
FVVSGIGDA

SEQ ID NO: 78510 - protein, 9 aa, synthetic construct
  source 1..9: note = Seed: LVVVGAGDV (KRAS G13D)
FVVSGIGDI

SEQ ID NO: 78511 - protein, 9 aa, synthetic construct
  source 1..9: note = Seed: LVVVGAGDV (KRAS G13D)
FVVSGIGDL

SEQ ID NO: 78512 - protein, 9 aa, synthetic construct
  source 1..9: note = Seed: LVVVGAGDV (KRAS G13D)
FVVSGIGDN

SEQ ID NO: 78513 - protein, 9 aa, synthetic construct
  source 1..9: note = Seed: LVVVGAGDV (KRAS G13D)
FVVSGIGDS

SEQ ID NO: 78514 - protein, 9 aa, synthetic construct
  source 1..9: note = Seed: LVVVGAGDV (KRAS G13D)
FVVSGIGDT

SEQ ID NO: 78515 - protein, 9 aa, synthetic construct
  source 1..9: note = Seed: LVVVGAGDV (KRAS G13D)
FVVSGIGDV

SEQ ID NO: 78516 - protein, 9 aa, synthetic construct
  source 1..9: note = Seed: LVVVGAGDV (KRAS G13D)
FVVSGKGDA

SEQ ID NO: 78517 - protein, 9 aa, synthetic construct
  source 1..9: note = Seed: LVVVGAGDV (KRAS G13D)
FVVSGKGDS

SEQ ID NO: 78518 - protein, 9 aa, synthetic construct
  source 1..9: note = Seed: LVVVGAGDV (KRAS G13D)
FVVSGLGDI

SEQ ID NO: 78519 - protein, 9 aa, synthetic construct
  source 1..9: note = Seed: LVVVGAGDV (KRAS G13D)
FVVSGLGDL

SEQ ID NO: 78520 - protein, 9 aa, synthetic construct
  source 1..9: note = Seed: LVVVGAGDV (KRAS G13D)
FVVSGLGDV

SEQ ID NO: 78521 - protein, 9 aa, synthetic construct
  source 1..9: note = Seed: LVVVGAGDV (KRAS G13D)
FVVSGNGDA

SEQ ID NO: 78522 - protein, 9 aa, synthetic construct
  source 1..9: note = Seed: LVVVGAGDV (KRAS G13D)
FVVSGNGDF

SEQ ID NO: 78523 - protein, 9 aa, synthetic construct
  source 1..9: note = Seed: LVVVGAGDV (KRAS G13D)
FVVSGNGDI

SEQ ID NO: 78524 - protein, 9 aa, synthetic construct
  source 1..9: note = Seed: LVVVGAGDV (KRAS G13D)
FVVSGNGDL

SEQ ID NO: 78525 - protein, 9 aa, synthetic construct
  source 1..9: note = Seed: LVVVGAGDV (KRAS G13D)
FVVSGNGDM

SEQ ID NO: 78526 - protein, 9 aa, synthetic construct
  source 1..9: note = Seed: LVVVGAGDV (KRAS G13D)
FVVSGNGDN

SEQ ID NO: 78527 - protein, 9 aa, synthetic construct
  source 1..9: note = Seed: LVVVGAGDV (KRAS G13D)
FVVSGNGDS

SEQ ID NO: 78528 - protein, 9 aa, synthetic construct
  source 1..9: note = Seed: LVVVGAGDV (KRAS G13D)
FVVSGNGDT

SEQ ID NO: 78529 - protein, 9 aa, synthetic construct
  source 1..9: note = Seed: LVVVGAGDV (KRAS G13D)
FVVSGNGDV

SEQ ID NO: 78530 - protein, 9 aa, synthetic construct
  source 1..9: note = Seed: LVVVGAGDV (KRAS G13D)
FVVSGPGDA

SEQ ID NO: 78531 - protein, 9 aa, synthetic construct
  source 1..9: note = Seed: LVVVGAGDV (KRAS G13D)
FVVSGPGDI

SEQ ID NO: 78532 - protein, 9 aa, synthetic construct
  source 1..9: note = Seed: LVVVGAGDV (KRAS G13D)
FVVSGPGDL

SEQ ID NO: 78533 - protein, 9 aa, synthetic construct
  source 1..9: note = Seed: LVVVGAGDV (KRAS G13D)
FVVSGPGDM

SEQ ID NO: 78534 - protein, 9 aa, synthetic construct
  source 1..9: note = Seed: LVVVGAGDV (KRAS G13D)
FVVSGPGDN

SEQ ID NO: 78535 - protein, 9 aa, synthetic construct
  source 1..9: note = Seed: LVVVGAGDV (KRAS G13D)
FVVSGPGDS

SEQ ID NO: 78536 - protein, 9 aa, synthetic construct
  source 1..9: note = Seed: LVVVGAGDV (KRAS G13D)
FVVSGPGDT

SEQ ID NO: 78537 - protein, 9 aa, synthetic construct
  source 1..9: note = Seed: LVVVGAGDV (KRAS G13D)
FVVSGPGDV

SEQ ID NO: 78538 - protein, 9 aa, synthetic construct
  source 1..9: note = Seed: LVVVGAGDV (KRAS G13D)
FVVSGRGDA

SEQ ID NO: 78539 - protein, 9 aa, synthetic construct
  source 1..9: note = Seed: LVVVGAGDV (KRAS G13D)
FVVSGRGDG

SEQ ID NO: 78540 - protein, 9 aa, synthetic construct
  source 1..9: note = Seed: LVVVGAGDV (KRAS G13D)
FVVSGRGDH

SEQ ID NO: 78541 - protein, 9 aa, synthetic construct
  source 1..9: note = Seed: LVVVGAGDV (KRAS G13D)
FVVSGRGDM

SEQ ID NO: 78542 - protein, 9 aa, synthetic construct
  source 1..9: note = Seed: LVVVGAGDV (KRAS G13D)
FVVSGRGDQ

SEQ ID NO: 78543 - protein, 9 aa, synthetic construct
  source 1..9: note = Seed: LVVVGAGDV (KRAS G13D)
FVVSGRGDS

SEQ ID NO: 78544 - protein, 9 aa, synthetic construct
  source 1..9: note = Seed: LVVVGAGDV (KRAS G13D)
FVVSGRGDT

SEQ ID NO: 78545 - protein, 9 aa, synthetic construct
  source 1..9: note = Seed: LVVVGAGDV (KRAS G13D)
FVVSGSGDA

SEQ ID NO: 78546 - protein, 9 aa, synthetic construct
  source 1..9: note = Seed: LVVVGAGDV (KRAS G13D)
FVVSGSGDF

SEQ ID NO: 78547 - protein, 9 aa, synthetic construct
  source 1..9: note = Seed: LVVVGAGDV (KRAS G13D)
FVVSGSGDG

SEQ ID NO: 78548 - protein, 9 aa, synthetic construct
  source 1..9: note = Seed: LVVVGAGDV (KRAS G13D)
FVVSGSGDI

SEQ ID NO: 78549 - protein, 9 aa, synthetic construct
  source 1..9: note = Seed: LVVVGAGDV (KRAS G13D)
FVVSGSGDL

SEQ ID NO: 78550 - protein, 9 aa, synthetic construct
  source 1..9: note = Seed: LVVVGAGDV (KRAS G13D)
FVVSGSGDM

SEQ ID NO: 78551 - protein, 9 aa, synthetic construct
  source 1..9: note = Seed: LVVVGAGDV (KRAS G13D)
FVVSGSGDN

SEQ ID NO: 78552 - protein, 9 aa, synthetic construct
  source 1..9: note = Seed: LVVVGAGDV (KRAS G13D)
FVVSGSGDS

SEQ ID NO: 78553 - protein, 9 aa, synthetic construct
  source 1..9: note = Seed: LVVVGAGDV (KRAS G13D)
FVVSGSGDT

SEQ ID NO: 78554 - protein, 9 aa, synthetic construct
  source 1..9: note = Seed: LVVVGAGDV (KRAS G13D)
FVVSGSGDV

SEQ ID NO: 78555 - protein, 9 aa, synthetic construct
  source 1..9: note = Seed: LVVVGAGDV (KRAS G13D)
FVVSGSGDY

SEQ ID NO: 78556 - protein, 9 aa, synthetic construct
  source 1..9: note = Seed: LVVVGAGDV (KRAS G13D)
FVVSGTGDA

SEQ ID NO: 78557 - protein, 9 aa, synthetic construct
  source 1..9: note = Seed: LVVVGAGDV (KRAS G13D)
FVVSGTGDF

SEQ ID NO: 78558 - protein, 9 aa, synthetic construct
  source 1..9: note = Seed: LVVVGAGDV (KRAS G13D)
FVVSGTGDI

SEQ ID NO: 78559 - protein, 9 aa, synthetic construct
  source 1..9: note = Seed: LVVVGAGDV (KRAS G13D)
FVVSGTGDL

SEQ ID NO: 78560 - protein, 9 aa, synthetic construct
  source 1..9: note = Seed: LVVVGAGDV (KRAS G13D)
FVVSGTGDM

SEQ ID NO: 78561 - protein, 9 aa, synthetic construct
  source 1..9: note = Seed: LVVVGAGDV (KRAS G13D)
FVVSGTGDN

SEQ ID NO: 78562 - protein, 9 aa, synthetic construct
  source 1..9: note = Seed: LVVVGAGDV (KRAS G13D)
FVVSGTGDS

SEQ ID NO: 78563 - protein, 9 aa, synthetic construct
  source 1..9: note = Seed: LVVVGAGDV (KRAS G13D)
FVVSGTGDT

SEQ ID NO: 78564 - protein, 9 aa, synthetic construct
  source 1..9: note = Seed: LVVVGAGDV (KRAS G13D)
FVVSGTGDV

SEQ ID NO: 78565 - protein, 9 aa, synthetic construct
  source 1..9: note = Seed: LVVVGAGDV (KRAS G13D)
FVVSGVGDA

SEQ ID NO: 78566 - protein, 9 aa, synthetic construct
  source 1..9: note = Seed: LVVVGAGDV (KRAS G13D)
FVVSGVGDH

SEQ ID NO: 78567 - protein, 9 aa, synthetic construct
  source 1..9: note = Seed: LVVVGAGDV (KRAS G13D)
FVVSGVGDI

SEQ ID NO: 78568 - protein, 9 aa, synthetic construct
  source 1..9: note = Seed: LVVVGAGDV (KRAS G13D)
FVVSGVGDL

SEQ ID NO: 78569 - protein, 9 aa, synthetic construct
  source 1..9: note = Seed: LVVVGAGDV (KRAS G13D)
FVVSGVGDM

SEQ ID NO: 78570 - protein, 9 aa, synthetic construct
  source 1..9: note = Seed: LVVVGAGDV (KRAS G13D)
FVVSGVGDN

SEQ ID NO: 78571 - protein, 9 aa, synthetic construct
  source 1..9: note = Seed: LVVVGAGDV (KRAS G13D)
FVVSGVGDQ

SEQ ID NO: 78572 - protein, 9 aa, synthetic construct
  source 1..9: note = Seed: LVVVGAGDV (KRAS G13D)
FVVSGVGDS

SEQ ID NO: 78573 - protein, 9 aa, synthetic construct
  source 1..9: note = Seed: LVVVGAGDV (KRAS G13D)
FVVSGVGDT

SEQ ID NO: 78574 - protein, 9 aa, synthetic construct
  source 1..9: note = Seed: LVVVGAGDV (KRAS G13D)
FVVSGVGDV

SEQ ID NO: 78575 - protein, 9 aa, synthetic construct
  source 1..9: note = Seed: LVVVGAGDV (KRAS G13D)
FVVSGYGDI

SEQ ID NO: 78576 - protein, 9 aa, synthetic construct
  source 1..9: note = Seed: LVVVGAGDV (KRAS G13D)
FVVSGYGDL

SEQ ID NO: 78577 - protein, 9 aa, synthetic construct
  source 1..9: note = Seed: LVVVGAGDV (KRAS G13D)
FVVSGYGDV

SEQ ID NO: 78578 - protein, 9 aa, synthetic construct
  source 1..9: note = Seed: LVVVGAGDV (KRAS G13D)
FVVTGAGDA

SEQ ID NO: 78579 - protein, 9 aa, synthetic construct
  source 1..9: note = Seed: LVVVGAGDV (KRAS G13D)
FVVTGAGDF

SEQ ID NO: 78580 - protein, 9 aa, synthetic construct
  source 1..9: note = Seed: LVVVGAGDV (KRAS G13D)
FVVTGAGDI

SEQ ID NO: 78581 - protein, 9 aa, synthetic construct
  source 1..9: note = Seed: LVVVGAGDV (KRAS G13D)
FVVTGAGDL

SEQ ID NO: 78582 - protein, 9 aa, synthetic construct
  source 1..9: note = Seed: LVVVGAGDV (KRAS G13D)
FVVTGAGDM

SEQ ID NO: 78583 - protein, 9 aa, synthetic construct
  source 1..9: note = Seed: LVVVGAGDV (KRAS G13D)
FVVTGAGDN

SEQ ID NO: 78584 - protein, 9 aa, synthetic construct
  source 1..9: note = Seed: LVVVGAGDV (KRAS G13D)
FVVTGAGDS

SEQ ID NO: 78585 - protein, 9 aa, synthetic construct
  source 1..9: note = Seed: LVVVGAGDV (KRAS G13D)
FVVTGAGDT

SEQ ID NO: 78586 - protein, 9 aa, synthetic construct
  source 1..9: note = Seed: LVVVGAGDV (KRAS G13D)
FVVTGAGDV

SEQ ID NO: 78587 - protein, 9 aa, synthetic construct
  source 1..9: note = Seed: LVVVGAGDV (KRAS G13D)
FVVTGFGDA

SEQ ID NO: 78588 - protein, 9 aa, synthetic construct
  source 1..9: note = Seed: LVVVGAGDV (KRAS G13D)
FVVTGFGDF

SEQ ID NO: 78589 - protein, 9 aa, synthetic construct
  source 1..9: note = Seed: LVVVGAGDV (KRAS G13D)
FVVTGFGDI

SEQ ID NO: 78590 - protein, 9 aa, synthetic construct
  source 1..9: note = Seed: LVVVGAGDV (KRAS G13D)
FVVTGFGDL

SEQ ID NO: 78591 - protein, 9 aa, synthetic construct
  source 1..9: note = Seed: LVVVGAGDV (KRAS G13D)
FVVTGFGDM

SEQ ID NO: 78592 - protein, 9 aa, synthetic construct
  source 1..9: note = Seed: LVVVGAGDV (KRAS G13D)
FVVTGFGDN

SEQ ID NO: 78593 - protein, 9 aa, synthetic construct
  source 1..9: note = Seed: LVVVGAGDV (KRAS G13D)
FVVTGFGDS

SEQ ID NO: 78594 - protein, 9 aa, synthetic construct
  source 1..9: note = Seed: LVVVGAGDV (KRAS G13D)
FVVTGFGDT

SEQ ID NO: 78595 - protein, 9 aa, synthetic construct
  source 1..9: note = Seed: LVVVGAGDV (KRAS G13D)
FVVTGFGDV

SEQ ID NO: 78596 - protein, 9 aa, synthetic construct
  source 1..9: note = Seed: LVVVGAGDV (KRAS G13D)
FVVTGFGDY

SEQ ID NO: 78597 - protein, 9 aa, synthetic construct
  source 1..9: note = Seed: LVVVGAGDV (KRAS G13D)
FVVTGGGDA

SEQ ID NO: 78598 - protein, 9 aa, synthetic construct
  source 1..9: note = Seed: LVVVGAGDV (KRAS G13D)
FVVTGGGDF

SEQ ID NO: 78599 - protein, 9 aa, synthetic construct
  source 1..9: note = Seed: LVVVGAGDV (KRAS G13D)
FVVTGGGDI

SEQ ID NO: 78600 - protein, 9 aa, synthetic construct
  source 1..9: note = Seed: LVVVGAGDV (KRAS G13D)
FVVTGGGDL

SEQ ID NO: 78601 - protein, 9 aa, synthetic construct
  source 1..9: note = Seed: LVVVGAGDV (KRAS G13D)
FVVTGGGDM

SEQ ID NO: 78602 - protein, 9 aa, synthetic construct
  source 1..9: note = Seed: LVVVGAGDV (KRAS G13D)
FVVTGGGDS

SEQ ID NO: 78603 - protein, 9 aa, synthetic construct
  source 1..9: note = Seed: LVVVGAGDV (KRAS G13D)
FVVTGGGDT

SEQ ID NO: 78604 - protein, 9 aa, synthetic construct
  source 1..9: note = Seed: LVVVGAGDV (KRAS G13D)
FVVTGGGDV

SEQ ID NO: 78605 - protein, 9 aa, synthetic construct
  source 1..9: note = Seed: LVVVGAGDV (KRAS G13D)
FVVTGIGDA

SEQ ID NO: 78606 - protein, 9 aa, synthetic construct
  source 1..9: note = Seed: LVVVGAGDV (KRAS G13D)
FVVTGIGDI

SEQ ID NO: 78607 - protein, 9 aa, synthetic construct
  source 1..9: note = Seed: LVVVGAGDV (KRAS G13D)
FVVTGIGDL

SEQ ID NO: 78608 - protein, 9 aa, synthetic construct
  source 1..9: note = Seed: LVVVGAGDV (KRAS G13D)
FVVTGIGDN

SEQ ID NO: 78609 - protein, 9 aa, synthetic construct
  source 1..9: note = Seed: LVVVGAGDV (KRAS G13D)
FVVTGIGDS

SEQ ID NO: 78610 - protein, 9 aa, synthetic construct
  source 1..9: note = Seed: LVVVGAGDV (KRAS G13D)
FVVTGIGDV

SEQ ID NO: 78611 - protein, 9 aa, synthetic construct
  source 1..9: note = Seed: LVVVGAGDV (KRAS G13D)
FVVTGKGDA

SEQ ID NO: 78612 - protein, 9 aa, synthetic construct
  source 1..9: note = Seed: LVVVGAGDV (KRAS G13D)
FVVTGKGDS

SEQ ID NO: 78613 - protein, 9 aa, synthetic construct
  source 1..9: note = Seed: LVVVGAGDV (KRAS G13D)
FVVTGLGDI

SEQ ID NO: 78614 - protein, 9 aa, synthetic construct
  source 1..9: note = Seed: LVVVGAGDV (KRAS G13D)
FVVTGLGDL

SEQ ID NO: 78615 - protein, 9 aa, synthetic construct
  source 1..9: note = Seed: LVVVGAGDV (KRAS G13D)
FVVTGLGDV

SEQ ID NO: 78616 - protein, 9 aa, synthetic construct
  source 1..9: note = Seed: LVVVGAGDV (KRAS G13D)
FVVTGMGDI

SEQ ID NO: 78617 - protein, 9 aa, synthetic construct
  source 1..9: note = Seed: LVVVGAGDV (KRAS G13D)
FVVTGMGDL

SEQ ID NO: 78618 - protein, 9 aa, synthetic construct
  source 1..9: note = Seed: LVVVGAGDV (KRAS G13D)
FVVTGNGDA

SEQ ID NO: 78619 - protein, 9 aa, synthetic construct
  source 1..9: note = Seed: LVVVGAGDV (KRAS G13D)
FVVTGNGDF

SEQ ID NO: 78620 - protein, 9 aa, synthetic construct
  source 1..9: note = Seed: LVVVGAGDV (KRAS G13D)
FVVTGNGDI

SEQ ID NO: 78621 - protein, 9 aa, synthetic construct
  source 1..9: note = Seed: LVVVGAGDV (KRAS G13D)
FVVTGNGDL

SEQ ID NO: 78622 - protein, 9 aa, synthetic construct
  source 1..9: note = Seed: LVVVGAGDV (KRAS G13D)
FVVTGNGDM

SEQ ID NO: 78623 - protein, 9 aa, synthetic construct
  source 1..9: note = Seed: LVVVGAGDV (KRAS G13D)
FVVTGNGDV

SEQ ID NO: 78624 - protein, 9 aa, synthetic construct
  source 1..9: note = Seed: LVVVGAGDV (KRAS G13D)
FVVTGPGDA

SEQ ID NO: 78625 - protein, 9 aa, synthetic construct
  source 1..9: note = Seed: LVVVGAGDV (KRAS G13D)
FVVTGPGDI

SEQ ID NO: 78626 - protein, 9 aa, synthetic construct
  source 1..9: note = Seed: LVVVGAGDV (KRAS G13D)
FVVTGPGDL

SEQ ID NO: 78627 - protein, 9 aa, synthetic construct
  source 1..9: note = Seed: LVVVGAGDV (KRAS G13D)
FVVTGPGDM

SEQ ID NO: 78628 - protein, 9 aa, synthetic construct
  source 1..9: note = Seed: LVVVGAGDV (KRAS G13D)
FVVTGPGDN

SEQ ID NO: 78629 - protein, 9 aa, synthetic construct
  source 1..9: note = Seed: LVVVGAGDV (KRAS G13D)
FVVTGPGDS

SEQ ID NO: 78630 - protein, 9 aa, synthetic construct
  source 1..9: note = Seed: LVVVGAGDV (KRAS G13D)
FVVTGPGDV

SEQ ID NO: 78631 - protein, 9 aa, synthetic construct
  source 1..9: note = Seed: LVVVGAGDV (KRAS G13D)
FVVTGRGDA

SEQ ID NO: 78632 - protein, 9 aa, synthetic construct
  source 1..9: note = Seed: LVVVGAGDV (KRAS G13D)
FVVTGRGDG

SEQ ID NO: 78633 - protein, 9 aa, synthetic construct
  source 1..9: note = Seed: LVVVGAGDV (KRAS G13D)
FVVTGRGDH

SEQ ID NO: 78634 - protein, 9 aa, synthetic construct
  source 1..9: note = Seed: LVVVGAGDV (KRAS G13D)
FVVTGRGDM

SEQ ID NO: 78635 - protein, 9 aa, synthetic construct
  source 1..9: note = Seed: LVVVGAGDV (KRAS G13D)
FVVTGRGDQ

SEQ ID NO: 78636 - protein, 9 aa, synthetic construct
  source 1..9: note = Seed: LVVVGAGDV (KRAS G13D)
FVVTGRGDS

SEQ ID NO: 78637 - protein, 9 aa, synthetic construct
  source 1..9: note = Seed: LVVVGAGDV (KRAS G13D)
FVVTGRGDT

SEQ ID NO: 78638 - protein, 9 aa, synthetic construct
  source 1..9: note = Seed: LVVVGAGDV (KRAS G13D)
FVVTGSGDA

SEQ ID NO: 78639 - protein, 9 aa, synthetic construct
  source 1..9: note = Seed: LVVVGAGDV (KRAS G13D)
FVVTGSGDF

SEQ ID NO: 78640 - protein, 9 aa, synthetic construct
  source 1..9: note = Seed: LVVVGAGDV (KRAS G13D)
FVVTGSGDI

SEQ ID NO: 78641 - protein, 9 aa, synthetic construct
  source 1..9: note = Seed: LVVVGAGDV (KRAS G13D)
FVVTGSGDL

SEQ ID NO: 78642 - protein, 9 aa, synthetic construct
  source 1..9: note = Seed: LVVVGAGDV (KRAS G13D)
FVVTGSGDM

SEQ ID NO: 78643 - protein, 9 aa, synthetic construct
  source 1..9: note = Seed: LVVVGAGDV (KRAS G13D)
FVVTGSGDN

SEQ ID NO: 78644 - protein, 9 aa, synthetic construct
  source 1..9: note = Seed: LVVVGAGDV (KRAS G13D)
FVVTGSGDS

SEQ ID NO: 78645 - protein, 9 aa, synthetic construct
  source 1..9: note = Seed: LVVVGAGDV (KRAS G13D)
FVVTGSGDT

SEQ ID NO: 78646 - protein, 9 aa, synthetic construct
  source 1..9: note = Seed: LVVVGAGDV (KRAS G13D)
FVVTGSGDV

SEQ ID NO: 78647 - protein, 9 aa, synthetic construct
  source 1..9: note = Seed: LVVVGAGDV (KRAS G13D)
FVVTGSGDY

SEQ ID NO: 78648 - protein, 9 aa, synthetic construct
  source 1..9: note = Seed: LVVVGAGDV (KRAS G13D)
FVVTGTGDA

SEQ ID NO: 78649 - protein, 9 aa, synthetic construct
  source 1..9: note = Seed: LVVVGAGDV (KRAS G13D)
FVVTGTGDF

SEQ ID NO: 78650 - protein, 9 aa, synthetic construct
  source 1..9: note = Seed: LVVVGAGDV (KRAS G13D)
FVVTGTGDI

SEQ ID NO: 78651 - protein, 9 aa, synthetic construct
  source 1..9: note = Seed: LVVVGAGDV (KRAS G13D)
FVVTGTGDL

SEQ ID NO: 78652 - protein, 9 aa, synthetic construct
  source 1..9: note = Seed: LVVVGAGDV (KRAS G13D)
FVVTGTGDM

SEQ ID NO: 78653 - protein, 9 aa, synthetic construct
  source 1..9: note = Seed: LVVVGAGDV (KRAS G13D)
FVVTGTGDN

SEQ ID NO: 78654 - protein, 9 aa, synthetic construct
  source 1..9: note = Seed: LVVVGAGDV (KRAS G13D)
FVVTGTGDS

SEQ ID NO: 78655 - protein, 9 aa, synthetic construct
  source 1..9: note = Seed: LVVVGAGDV (KRAS G13D)
FVVTGTGDV

SEQ ID NO: 78656 - protein, 9 aa, synthetic construct
  source 1..9: note = Seed: LVVVGAGDV (KRAS G13D)
FVVTGVGDA

SEQ ID NO: 78657 - protein, 9 aa, synthetic construct
  source 1..9: note = Seed: LVVVGAGDV (KRAS G13D)
FVVTGVGDI

SEQ ID NO: 78658 - protein, 9 aa, synthetic construct
  source 1..9: note = Seed: LVVVGAGDV (KRAS G13D)
FVVTGVGDL

SEQ ID NO: 78659 - protein, 9 aa, synthetic construct
  source 1..9: note = Seed: LVVVGAGDV (KRAS G13D)
FVVTGVGDM

SEQ ID NO: 78660 - protein, 9 aa, synthetic construct
  source 1..9: note = Seed: LVVVGAGDV (KRAS G13D)
FVVTGVGDN

SEQ ID NO: 78661 - protein, 9 aa, synthetic construct
  source 1..9: note = Seed: LVVVGAGDV (KRAS G13D)
FVVTGVGDS

SEQ ID NO: 78662 - protein, 9 aa, synthetic construct
  source 1..9: note = Seed: LVVVGAGDV (KRAS G13D)
FVVTGVGDT

SEQ ID NO: 78663 - protein, 9 aa, synthetic construct
  source 1..9: note = Seed: LVVVGAGDV (KRAS G13D)
FVVTGVGDV

SEQ ID NO: 78664 - protein, 9 aa, synthetic construct
  source 1..9: note = Seed: LVVVGAGDV (KRAS G13D)
FVVTGWGDL

SEQ ID NO: 78665 - protein, 9 aa, synthetic construct
  source 1..9: note = Seed: LVVVGAGDV (KRAS G13D)
FVVTGYGDI

SEQ ID NO: 78666 - protein, 9 aa, synthetic construct
  source 1..9: note = Seed: LVVVGAGDV (KRAS G13D)
FVVTGYGDL

SEQ ID NO: 78667 - protein, 9 aa, synthetic construct
  source 1..9: note = Seed: LVVVGAGDV (KRAS G13D)
FVVTGYGDV

SEQ ID NO: 78668 - protein, 9 aa, synthetic construct
  source 1..9: note = Seed: LVVVGAGDV (KRAS G13D)
FVVVGAGDA

SEQ ID NO: 78669 - protein, 9 aa, synthetic construct
  source 1..9: note = Seed: LVVVGAGDV (KRAS G13D)
FVVVGAGDC

SEQ ID NO: 78670 - protein, 9 aa, synthetic construct
  source 1..9: note = Seed: LVVVGAGDV (KRAS G13D)
FVVVGAGDD

SEQ ID NO: 78671 - protein, 9 aa, synthetic construct
  source 1..9: note = Seed: LVVVGAGDV (KRAS G13D)
FVVVGAGDE

SEQ ID NO: 78672 - protein, 9 aa, synthetic construct
  source 1..9: note = Seed: LVVVGAGDV (KRAS G13D)
FVVVGAGDF

SEQ ID NO: 78673 - protein, 9 aa, synthetic construct
  source 1..9: note = Seed: LVVVGAGDV (KRAS G13D)
FVVVGAGDG

SEQ ID NO: 78674 - protein, 9 aa, synthetic construct
  source 1..9: note = Seed: LVVVGAGDV (KRAS G13D)
FVVVGAGDH

SEQ ID NO: 78675 - protein, 9 aa, synthetic construct
  source 1..9: note = Seed: LVVVGAGDV (KRAS G13D)
FVVVGAGDI

SEQ ID NO: 78676 - protein, 9 aa, synthetic construct
  source 1..9: note = Seed: LVVVGAGDV (KRAS G13D)
FVVVGAGDL

SEQ ID NO: 78677 - protein, 9 aa, synthetic construct
  source 1..9: note = Seed: LVVVGAGDV (KRAS G13D)
FVVVGAGDM

SEQ ID NO: 78678 - protein, 9 aa, synthetic construct
  source 1..9: note = Seed: LVVVGAGDV (KRAS G13D)
FVVVGAGDN

SEQ ID NO: 78679 - protein, 9 aa, synthetic construct
  source 1..9: note = Seed: LVVVGAGDV (KRAS G13D)
FVVVGAGDP

SEQ ID NO: 78680 - protein, 9 aa, synthetic construct
  source 1..9: note = Seed: LVVVGAGDV (KRAS G13D)
FVVVGAGDQ

SEQ ID NO: 78681 - protein, 9 aa, synthetic construct
  source 1..9: note = Seed: LVVVGAGDV (KRAS G13D)
FVVVGAGDS

SEQ ID NO: 78682 - protein, 9 aa, synthetic construct
  source 1..9: note = Seed: LVVVGAGDV (KRAS G13D)
FVVVGAGDT

SEQ ID NO: 78683 - protein, 9 aa, synthetic construct
  source 1..9: note = Seed: LVVVGAGDV (KRAS G13D)
FVVVGAGDV

SEQ ID NO: 78684 - protein, 9 aa, synthetic construct
  source 1..9: note = Seed: LVVVGAGDV (KRAS G13D)
FVVVGAGDY

SEQ ID NO: 78685 - protein, 9 aa, synthetic construct
  source 1..9: note = Seed: LVVVGAGDV (KRAS G13D)
FVVVGFGDA

SEQ ID NO: 78686 - protein, 9 aa, synthetic construct
  source 1..9: note = Seed: LVVVGAGDV (KRAS G13D)
FVVVGFGDF

SEQ ID NO: 78687 - protein, 9 aa, synthetic construct
  source 1..9: note = Seed: LVVVGAGDV (KRAS G13D)
FVVVGFGDI

SEQ ID NO: 78688 - protein, 9 aa, synthetic construct
  source 1..9: note = Seed: LVVVGAGDV (KRAS G13D)
FVVVGFGDL

SEQ ID NO: 78689 - protein, 9 aa, synthetic construct
  source 1..9: note = Seed: LVVVGAGDV (KRAS G13D)
FVVVGFGDM

SEQ ID NO: 78690 - protein, 9 aa, synthetic construct
  source 1..9: note = Seed: LVVVGAGDV (KRAS G13D)
FVVVGFGDN

SEQ ID NO: 78691 - protein, 9 aa, synthetic construct
  source 1..9: note = Seed: LVVVGAGDV (KRAS G13D)
FVVVGFGDT

SEQ ID NO: 78692 - protein, 9 aa, synthetic construct
  source 1..9: note = Seed: LVVVGAGDV (KRAS G13D)
FVVVGFGDV

SEQ ID NO: 78693 - protein, 9 aa, synthetic construct
  source 1..9: note = Seed: LVVVGAGDV (KRAS G13D)
FVVVGFGDY

SEQ ID NO: 78694 - protein, 9 aa, synthetic construct
  source 1..9: note = Seed: LVVVGAGDV (KRAS G13D)
FVVVGGGDA

SEQ ID NO: 78695 - protein, 9 aa, synthetic construct
  source 1..9: note = Seed: LVVVGAGDV (KRAS G13D)
FVVVGGGDC

SEQ ID NO: 78696 - protein, 9 aa, synthetic construct
  source 1..9: note = Seed: LVVVGAGDV (KRAS G13D)
FVVVGGGDF

SEQ ID NO: 78697 - protein, 9 aa, synthetic construct
  source 1..9: note = Seed: LVVVGAGDV (KRAS G13D)
FVVVGGGDG

SEQ ID NO: 78698 - protein, 9 aa, synthetic construct
  source 1..9: note = Seed: LVVVGAGDV (KRAS G13D)
FVVVGGGDI

SEQ ID NO: 78699 - protein, 9 aa, synthetic construct
  source 1..9: note = Seed: LVVVGAGDV (KRAS G13D)
FVVVGGGDL

SEQ ID NO: 78700 - protein, 9 aa, synthetic construct
  source 1..9: note = Seed: LVVVGAGDV (KRAS G13D)
FVVVGGGDM

SEQ ID NO: 78701 - protein, 9 aa, synthetic construct
  source 1..9: note = Seed: LVVVGAGDV (KRAS G13D)
FVVVGGGDN

SEQ ID NO: 78702 - protein, 9 aa, synthetic construct
  source 1..9: note = Seed: LVVVGAGDV (KRAS G13D)
FVVVGGGDS

SEQ ID NO: 78703 - protein, 9 aa, synthetic construct
  source 1..9: note = Seed: LVVVGAGDV (KRAS G13D)
FVVVGGGDT

SEQ ID NO: 78704 - protein, 9 aa, synthetic construct
  source 1..9: note = Seed: LVVVGAGDV (KRAS G13D)
FVVVGGGDV

SEQ ID NO: 78705 - protein, 9 aa, synthetic construct
  source 1..9: note = Seed: LVVVGAGDV (KRAS G13D)
FVVVGHGDA

SEQ ID NO: 78706 - protein, 9 aa, synthetic construct
  source 1..9: note = Seed: LVVVGAGDV (KRAS G13D)
FVVVGHGDI

SEQ ID NO: 78707 - protein, 9 aa, synthetic construct
  source 1..9: note = Seed: LVVVGAGDV (KRAS G13D)
FVVVGHGDL

SEQ ID NO: 78708 - protein, 9 aa, synthetic construct
  source 1..9: note = Seed: LVVVGAGDV (KRAS G13D)
FVVVGHGDS

SEQ ID NO: 78709 - protein, 9 aa, synthetic construct
  source 1..9: note = Seed: LVVVGAGDV (KRAS G13D)
FVVVGHGDV

SEQ ID NO: 78710 - protein, 9 aa, synthetic construct
  source 1..9: note = Seed: LVVVGAGDV (KRAS G13D)
FVVVGIGDA

SEQ ID NO: 78711 - protein, 9 aa, synthetic construct
  source 1..9: note = Seed: LVVVGAGDV (KRAS G13D)
FVVVGIGDG

SEQ ID NO: 78712 - protein, 9 aa, synthetic construct
  source 1..9: note = Seed: LVVVGAGDV (KRAS G13D)
FVVVGIGDH

SEQ ID NO: 78713 - protein, 9 aa, synthetic construct
  source 1..9: note = Seed: LVVVGAGDV (KRAS G13D)
FVVVGIGDI

SEQ ID NO: 78714 - protein, 9 aa, synthetic construct
  source 1..9: note = Seed: LVVVGAGDV (KRAS G13D)
FVVVGIGDL

SEQ ID NO: 78715 - protein, 9 aa, synthetic construct
  source 1..9: note = Seed: LVVVGAGDV (KRAS G13D)
FVVVGIGDM

SEQ ID NO: 78716 - protein, 9 aa, synthetic construct
  source 1..9: note = Seed: LVVVGAGDV (KRAS G13D)
FVVVGIGDN

SEQ ID NO: 78717 - protein, 9 aa, synthetic construct
  source 1..9: note = Seed: LVVVGAGDV (KRAS G13D)
FVVVGIGDQ

SEQ ID NO: 78718 - protein, 9 aa, synthetic construct
  source 1..9: note = Seed: LVVVGAGDV (KRAS G13D)
FVVVGIGDS

SEQ ID NO: 78719 - protein, 9 aa, synthetic construct
  source 1..9: note = Seed: LVVVGAGDV (KRAS G13D)
FVVVGIGDT

SEQ ID NO: 78720 - protein, 9 aa, synthetic construct
  source 1..9: note = Seed: LVVVGAGDV (KRAS G13D)
FVVVGIGDV

SEQ ID NO: 78721 - protein, 9 aa, synthetic construct
  source 1..9: note = Seed: LVVVGAGDV (KRAS G13D)
FVVVGKGDA

SEQ ID NO: 78722 - protein, 9 aa, synthetic construct
  source 1..9: note = Seed: LVVVGAGDV (KRAS G13D)
FVVVGKGDG

SEQ ID NO: 78723 - protein, 9 aa, synthetic construct
  source 1..9: note = Seed: LVVVGAGDV (KRAS G13D)
FVVVGKGDH

SEQ ID NO: 78724 - protein, 9 aa, synthetic construct
  source 1..9: note = Seed: LVVVGAGDV (KRAS G13D)
FVVVGKGDI

SEQ ID NO: 78725 - protein, 9 aa, synthetic construct
  source 1..9: note = Seed: LVVVGAGDV (KRAS G13D)
FVVVGKGDL

SEQ ID NO: 78726 - protein, 9 aa, synthetic construct
  source 1..9: note = Seed: LVVVGAGDV (KRAS G13D)
FVVVGKGDM

SEQ ID NO: 78727 - protein, 9 aa, synthetic construct
  source 1..9: note = Seed: LVVVGAGDV (KRAS G13D)
FVVVGKGDN

SEQ ID NO: 78728 - protein, 9 aa, synthetic construct
  source 1..9: note = Seed: LVVVGAGDV (KRAS G13D)
FVVVGKGDP

SEQ ID NO: 78729 - protein, 9 aa, synthetic construct
  source 1..9: note = Seed: LVVVGAGDV (KRAS G13D)
FVVVGKGDQ

SEQ ID NO: 78730 - protein, 9 aa, synthetic construct
  source 1..9: note = Seed: LVVVGAGDV (KRAS G13D)
FVVVGKGDS

SEQ ID NO: 78731 - protein, 9 aa, synthetic construct
  source 1..9: note = Seed: LVVVGAGDV (KRAS G13D)
FVVVGKGDT

SEQ ID NO: 78732 - protein, 9 aa, synthetic construct
  source 1..9: note = Seed: LVVVGAGDV (KRAS G13D)
FVVVGKGDV

SEQ ID NO: 78733 - protein, 9 aa, synthetic construct
  source 1..9: note = Seed: LVVVGAGDV (KRAS G13D)
FVVVGLGDA

SEQ ID NO: 78734 - protein, 9 aa, synthetic construct
  source 1..9: note = Seed: LVVVGAGDV (KRAS G13D)
FVVVGLGDN

SEQ ID NO: 78735 - protein, 9 aa, synthetic construct
  source 1..9: note = Seed: LVVVGAGDV (KRAS G13D)
FVVVGLGDS

SEQ ID NO: 78736 - protein, 9 aa, synthetic construct
  source 1..9: note = Seed: LVVVGAGDV (KRAS G13D)
FVVVGMGDA

SEQ ID NO: 78737 - protein, 9 aa, synthetic construct
  source 1..9: note = Seed: LVVVGAGDV (KRAS G13D)
FVVVGMGDG

SEQ ID NO: 78738 - protein, 9 aa, synthetic construct
  source 1..9: note = Seed: LVVVGAGDV (KRAS G13D)
FVVVGMGDI

SEQ ID NO: 78739 - protein, 9 aa, synthetic construct
  source 1..9: note = Seed: LVVVGAGDV (KRAS G13D)
FVVVGMGDL

SEQ ID NO: 78740 - protein, 9 aa, synthetic construct
  source 1..9: note = Seed: LVVVGAGDV (KRAS G13D)
FVVVGMGDM

SEQ ID NO: 78741 - protein, 9 aa, synthetic construct
  source 1..9: note = Seed: LVVVGAGDV (KRAS G13D)
FVVVGMGDN

SEQ ID NO: 78742 - protein, 9 aa, synthetic construct
  source 1..9: note = Seed: LVVVGAGDV (KRAS G13D)
FVVVGMGDS

SEQ ID NO: 78743 - protein, 9 aa, synthetic construct
  source 1..9: note = Seed: LVVVGAGDV (KRAS G13D)
FVVVGMGDV

SEQ ID NO: 78744 - protein, 9 aa, synthetic construct
  source 1..9: note = Seed: LVVVGAGDV (KRAS G13D)
FVVVGNGDA

SEQ ID NO: 78745 - protein, 9 aa, synthetic construct
  source 1..9: note = Seed: LVVVGAGDV (KRAS G13D)
FVVVGNGDC

SEQ ID NO: 78746 - protein, 9 aa, synthetic construct
  source 1..9: note = Seed: LVVVGAGDV (KRAS G13D)
FVVVGNGDD

SEQ ID NO: 78747 - protein, 9 aa, synthetic construct
  source 1..9: note = Seed: LVVVGAGDV (KRAS G13D)
FVVVGNGDE

SEQ ID NO: 78748 - protein, 9 aa, synthetic construct
  source 1..9: note = Seed: LVVVGAGDV (KRAS G13D)
FVVVGNGDF

SEQ ID NO: 78749 - protein, 9 aa, synthetic construct
  source 1..9: note = Seed: LVVVGAGDV (KRAS G13D)
FVVVGNGDG

SEQ ID NO: 78750 - protein, 9 aa, synthetic construct
  source 1..9: note = Seed: LVVVGAGDV (KRAS G13D)
FVVVGNGDH

SEQ ID NO: 78751 - protein, 9 aa, synthetic construct
  source 1..9: note = Seed: LVVVGAGDV (KRAS G13D)
FVVVGNGDI

SEQ ID NO: 78752 - protein, 9 aa, synthetic construct
  source 1..9: note = Seed: LVVVGAGDV (KRAS G13D)
FVVVGNGDL

SEQ ID NO: 78753 - protein, 9 aa, synthetic construct
  source 1..9: note = Seed: LVVVGAGDV (KRAS G13D)
FVVVGNGDM

SEQ ID NO: 78754 - protein, 9 aa, synthetic construct
  source 1..9: note = Seed: LVVVGAGDV (KRAS G13D)
FVVVGNGDN

SEQ ID NO: 78755 - protein, 9 aa, synthetic construct
  source 1..9: note = Seed: LVVVGAGDV (KRAS G13D)
FVVVGNGDQ

SEQ ID NO: 78756 - protein, 9 aa, synthetic construct
  source 1..9: note = Seed: LVVVGAGDV (KRAS G13D)
FVVVGNGDS

SEQ ID NO: 78757 - protein, 9 aa, synthetic construct
  source 1..9: note = Seed: LVVVGAGDV (KRAS G13D)
FVVVGNGDT

SEQ ID NO: 78758 - protein, 9 aa, synthetic construct
  source 1..9: note = Seed: LVVVGAGDV (KRAS G13D)
FVVVGNGDV

SEQ ID NO: 78759 - protein, 9 aa, synthetic construct
  source 1..9: note = Seed: LVVVGAGDV (KRAS G13D)
FVVVGPGDA

SEQ ID NO: 78760 - protein, 9 aa, synthetic construct
  source 1..9: note = Seed: LVVVGAGDV (KRAS G13D)
FVVVGPGDG

SEQ ID NO: 78761 - protein, 9 aa, synthetic construct
  source 1..9: note = Seed: LVVVGAGDV (KRAS G13D)
FVVVGPGDH

SEQ ID NO: 78762 - protein, 9 aa, synthetic construct
  source 1..9: note = Seed: LVVVGAGDV (KRAS G13D)
FVVVGPGDI

SEQ ID NO: 78763 - protein, 9 aa, synthetic construct
  source 1..9: note = Seed: LVVVGAGDV (KRAS G13D)
FVVVGPGDL

SEQ ID NO: 78764 - protein, 9 aa, synthetic construct
  source 1..9: note = Seed: LVVVGAGDV (KRAS G13D)
FVVVGPGDM

SEQ ID NO: 78765 - protein, 9 aa, synthetic construct
  source 1..9: note = Seed: LVVVGAGDV (KRAS G13D)
FVVVGPGDN

SEQ ID NO: 78766 - protein, 9 aa, synthetic construct
  source 1..9: note = Seed: LVVVGAGDV (KRAS G13D)
FVVVGPGDQ

SEQ ID NO: 78767 - protein, 9 aa, synthetic construct
  source 1..9: note = Seed: LVVVGAGDV (KRAS G13D)
FVVVGPGDS

SEQ ID NO: 78768 - protein, 9 aa, synthetic construct
  source 1..9: note = Seed: LVVVGAGDV (KRAS G13D)
FVVVGPGDT

SEQ ID NO: 78769 - protein, 9 aa, synthetic construct
  source 1..9: note = Seed: LVVVGAGDV (KRAS G13D)
FVVVGPGDV

SEQ ID NO: 78770 - protein, 9 aa, synthetic construct
  source 1..9: note = Seed: LVVVGAGDV (KRAS G13D)
FVVVGQGDA

SEQ ID NO: 78771 - protein, 9 aa, synthetic construct
  source 1..9: note = Seed: LVVVGAGDV (KRAS G13D)
FVVVGQGDL

SEQ ID NO: 78772 - protein, 9 aa, synthetic construct
  source 1..9: note = Seed: LVVVGAGDV (KRAS G13D)
FVVVGRGDA

SEQ ID NO: 78773 - protein, 9 aa, synthetic construct
  source 1..9: note = Seed: LVVVGAGDV (KRAS G13D)
FVVVGRGDG

SEQ ID NO: 78774 - protein, 9 aa, synthetic construct
  source 1..9: note = Seed: LVVVGAGDV (KRAS G13D)
FVVVGRGDH

SEQ ID NO: 78775 - protein, 9 aa, synthetic construct
  source 1..9: note = Seed: LVVVGAGDV (KRAS G13D)
FVVVGRGDI

SEQ ID NO: 78776 - protein, 9 aa, synthetic construct
  source 1..9: note = Seed: LVVVGAGDV (KRAS G13D)
FVVVGRGDK

SEQ ID NO: 78777 - protein, 9 aa, synthetic construct
  source 1..9: note = Seed: LVVVGAGDV (KRAS G13D)
FVVVGRGDL

SEQ ID NO: 78778 - protein, 9 aa, synthetic construct
  source 1..9: note = Seed: LVVVGAGDV (KRAS G13D)
FVVVGRGDM

SEQ ID NO: 78779 - protein, 9 aa, synthetic construct
  source 1..9: note = Seed: LVVVGAGDV (KRAS G13D)
FVVVGRGDN

SEQ ID NO: 78780 - protein, 9 aa, synthetic construct
  source 1..9: note = Seed: LVVVGAGDV (KRAS G13D)
FVVVGRGDP

SEQ ID NO: 78781 - protein, 9 aa, synthetic construct
  source 1..9: note = Seed: LVVVGAGDV (KRAS G13D)
FVVVGRGDQ

SEQ ID NO: 78782 - protein, 9 aa, synthetic construct
  source 1..9: note = Seed: LVVVGAGDV (KRAS G13D)
FVVVGRGDR

SEQ ID NO: 78783 - protein, 9 aa, synthetic construct
  source 1..9: note = Seed: LVVVGAGDV (KRAS G13D)
FVVVGRGDS

SEQ ID NO: 78784 - protein, 9 aa, synthetic construct
  source 1..9: note = Seed: LVVVGAGDV (KRAS G13D)
FVVVGRGDT

SEQ ID NO: 78785 - protein, 9 aa, synthetic construct
  source 1..9: note = Seed: LVVVGAGDV (KRAS G13D)
FVVVGRGDV

SEQ ID NO: 78786 - protein, 9 aa, synthetic construct
  source 1..9: note = Seed: LVVVGAGDV (KRAS G13D)
FVVVGSGDA

SEQ ID NO: 78787 - protein, 9 aa, synthetic construct
  source 1..9: note = Seed: LVVVGAGDV (KRAS G13D)
FVVVGSGDC

SEQ ID NO: 78788 - protein, 9 aa, synthetic construct
  source 1..9: note = Seed: LVVVGAGDV (KRAS G13D)
FVVVGSGDD

SEQ ID NO: 78789 - protein, 9 aa, synthetic construct
  source 1..9: note = Seed: LVVVGAGDV (KRAS G13D)
FVVVGSGDF

SEQ ID NO: 78790 - protein, 9 aa, synthetic construct
  source 1..9: note = Seed: LVVVGAGDV (KRAS G13D)
FVVVGSGDG

SEQ ID NO: 78791 - protein, 9 aa, synthetic construct
  source 1..9: note = Seed: LVVVGAGDV (KRAS G13D)
FVVVGSGDH

SEQ ID NO: 78792 - protein, 9 aa, synthetic construct
  source 1..9: note = Seed: LVVVGAGDV (KRAS G13D)
FVVVGSGDI

SEQ ID NO: 78793 - protein, 9 aa, synthetic construct
  source 1..9: note = Seed: LVVVGAGDV (KRAS G13D)
FVVVGSGDL

SEQ ID NO: 78794 - protein, 9 aa, synthetic construct
  source 1..9: note = Seed: LVVVGAGDV (KRAS G13D)
FVVVGSGDM

SEQ ID NO: 78795 - protein, 9 aa, synthetic construct
  source 1..9: note = Seed: LVVVGAGDV (KRAS G13D)
FVVVGSGDN

SEQ ID NO: 78796 - protein, 9 aa, synthetic construct
  source 1..9: note = Seed: LVVVGAGDV (KRAS G13D)
FVVVGSGDQ

SEQ ID NO: 78797 - protein, 9 aa, synthetic construct
  source 1..9: note = Seed: LVVVGAGDV (KRAS G13D)
FVVVGSGDS

SEQ ID NO: 78798 - protein, 9 aa, synthetic construct
  source 1..9: note = Seed: LVVVGAGDV (KRAS G13D)
FVVVGSGDT

SEQ ID NO: 78799 - protein, 9 aa, synthetic construct
  source 1..9: note = Seed: LVVVGAGDV (KRAS G13D)
FVVVGSGDV

SEQ ID NO: 78800 - protein, 9 aa, synthetic construct
  source 1..9: note = Seed: LVVVGAGDV (KRAS G13D)
FVVVGTGDA

SEQ ID NO: 78801 - protein, 9 aa, synthetic construct
  source 1..9: note = Seed: LVVVGAGDV (KRAS G13D)
FVVVGTGDD

SEQ ID NO: 78802 - protein, 9 aa, synthetic construct
  source 1..9: note = Seed: LVVVGAGDV (KRAS G13D)
FVVVGTGDE

SEQ ID NO: 78803 - protein, 9 aa, synthetic construct
  source 1..9: note = Seed: LVVVGAGDV (KRAS G13D)
FVVVGTGDG

SEQ ID NO: 78804 - protein, 9 aa, synthetic construct
  source 1..9: note = Seed: LVVVGAGDV (KRAS G13D)
FVVVGTGDH

SEQ ID NO: 78805 - protein, 9 aa, synthetic construct
  source 1..9: note = Seed: LVVVGAGDV (KRAS G13D)
FVVVGTGDI

SEQ ID NO: 78806 - protein, 9 aa, synthetic construct
  source 1..9: note = Seed: LVVVGAGDV (KRAS G13D)
FVVVGTGDL

SEQ ID NO: 78807 - protein, 9 aa, synthetic construct
  source 1..9: note = Seed: LVVVGAGDV (KRAS G13D)
FVVVGTGDM

SEQ ID NO: 78808 - protein, 9 aa, synthetic construct
  source 1..9: note = Seed: LVVVGAGDV (KRAS G13D)
FVVVGTGDN

SEQ ID NO: 78809 - protein, 9 aa, synthetic construct
  source 1..9: note = Seed: LVVVGAGDV (KRAS G13D)
FVVVGTGDQ

SEQ ID NO: 78810 - protein, 9 aa, synthetic construct
  source 1..9: note = Seed: LVVVGAGDV (KRAS G13D)
FVVVGTGDS

SEQ ID NO: 78811 - protein, 9 aa, synthetic construct
  source 1..9: note = Seed: LVVVGAGDV (KRAS G13D)
FVVVGTGDT

SEQ ID NO: 78812 - protein, 9 aa, synthetic construct
  source 1..9: note = Seed: LVVVGAGDV (KRAS G13D)
FVVVGTGDV

SEQ ID NO: 78813 - protein, 9 aa, synthetic construct
  source 1..9: note = Seed: LVVVGAGDV (KRAS G13D)
FVVVGVGDA

SEQ ID NO: 78814 - protein, 9 aa, synthetic construct
  source 1..9: note = Seed: LVVVGAGDV (KRAS G13D)
FVVVGVGDG

SEQ ID NO: 78815 - protein, 9 aa, synthetic construct
  source 1..9: note = Seed: LVVVGAGDV (KRAS G13D)
FVVVGVGDH

SEQ ID NO: 78816 - protein, 9 aa, synthetic construct
  source 1..9: note = Seed: LVVVGAGDV (KRAS G13D)
FVVVGVGDI

SEQ ID NO: 78817 - protein, 9 aa, synthetic construct
  source 1..9: note = Seed: LVVVGAGDV (KRAS G13D)
FVVVGVGDL

SEQ ID NO: 78818 - protein, 9 aa, synthetic construct
  source 1..9: note = Seed: LVVVGAGDV (KRAS G13D)
FVVVGVGDM

SEQ ID NO: 78819 - protein, 9 aa, synthetic construct
  source 1..9: note = Seed: LVVVGAGDV (KRAS G13D)
FVVVGVGDN

SEQ ID NO: 78820 - protein, 9 aa, synthetic construct
  source 1..9: note = Seed: LVVVGAGDV (KRAS G13D)
FVVVGVGDQ

SEQ ID NO: 78821 - protein, 9 aa, synthetic construct
  source 1..9: note = Seed: LVVVGAGDV (KRAS G13D)
FVVVGVGDS

SEQ ID NO: 78822 - protein, 9 aa, synthetic construct
  source 1..9: note = Seed: LVVVGAGDV (KRAS G13D)
FVVVGVGDT

SEQ ID NO: 78823 - protein, 9 aa, synthetic construct
  source 1..9: note = Seed: LVVVGAGDV (KRAS G13D)
FVVVGVGDV

SEQ ID NO: 78824 - protein, 9 aa, synthetic construct
  source 1..9: note = Seed: LVVVGAGDV (KRAS G13D)
FVVVGYGDI

SEQ ID NO: 78825 - protein, 9 aa, synthetic construct
  source 1..9: note = Seed: LVVVGAGDV (KRAS G13D)
FVVVGYGDL

SEQ ID NO: 78826 - protein, 9 aa, synthetic construct
  source 1..9: note = Seed: LVVVGAGDV (KRAS G13D)
FVVVGYGDV

SEQ ID NO: 78827 - protein, 9 aa, synthetic construct
  source 1..9: note = Seed: LVVVGAGDV (KRAS G13D)
FVVWGAGDA

SEQ ID NO: 78828 - protein, 9 aa, synthetic construct
  source 1..9: note = Seed: LVVVGAGDV (KRAS G13D)
FVVWGAGDI

SEQ ID NO: 78829 - protein, 9 aa, synthetic construct
  source 1..9: note = Seed: LVVVGAGDV (KRAS G13D)
FVVWGAGDL

SEQ ID NO: 78830 - protein, 9 aa, synthetic construct
  source 1..9: note = Seed: LVVVGAGDV (KRAS G13D)
FVVWGAGDM

SEQ ID NO: 78831 - protein, 9 aa, synthetic construct
  source 1..9: note = Seed: LVVVGAGDV (KRAS G13D)
FVVWGAGDV

SEQ ID NO: 78832 - protein, 9 aa, synthetic construct
  source 1..9: note = Seed: LVVVGAGDV (KRAS G13D)
FVVWGFGDL

SEQ ID NO: 78833 - protein, 9 aa, synthetic construct
  source 1..9: note = Seed: LVVVGAGDV (KRAS G13D)
FVVWGGGDL

SEQ ID NO: 78834 - protein, 9 aa, synthetic construct
  source 1..9: note = Seed: LVVVGAGDV (KRAS G13D)
FVVWGNGDI

SEQ ID NO: 78835 - protein, 9 aa, synthetic construct
  source 1..9: note = Seed: LVVVGAGDV (KRAS G13D)
FVVWGNGDL

SEQ ID NO: 78836 - protein, 9 aa, synthetic construct
  source 1..9: note = Seed: LVVVGAGDV (KRAS G13D)
FVVWGNGDV

SEQ ID NO: 78837 - protein, 9 aa, synthetic construct
  source 1..9: note = Seed: LVVVGAGDV (KRAS G13D)
FVVWGSGDI

SEQ ID NO: 78838 - protein, 9 aa, synthetic construct
  source 1..9: note = Seed: LVVVGAGDV (KRAS G13D)
FVVWGSGDL

SEQ ID NO: 78839 - protein, 9 aa, synthetic construct
  source 1..9: note = Seed: LVVVGAGDV (KRAS G13D)
FVVWGSGDV

SEQ ID NO: 78840 - protein, 9 aa, synthetic construct
  source 1..9: note = Seed: LVVVGAGDV (KRAS G13D)
FVVYGAGDI

SEQ ID NO: 78841 - protein, 9 aa, synthetic construct
  source 1..9: note = Seed: LVVVGAGDV (KRAS G13D)
FVVYGAGDL

SEQ ID NO: 78842 - protein, 9 aa, synthetic construct
  source 1..9: note = Seed: LVVVGAGDV (KRAS G13D)
FVVYGAGDV

SEQ ID NO: 78843 - protein, 9 aa, synthetic construct
  source 1..9: note = Seed: LVVVGAGDV (KRAS G13D)
FVVYGFGDI

SEQ ID NO: 78844 - protein, 9 aa, synthetic construct
  source 1..9: note = Seed: LVVVGAGDV (KRAS G13D)
FVVYGFGDL

SEQ ID NO: 78845 - protein, 9 aa, synthetic construct
  source 1..9: note = Seed: LVVVGAGDV (KRAS G13D)
FVVYGFGDV

SEQ ID NO: 78846 - protein, 9 aa, synthetic construct
  source 1..9: note = Seed: LVVVGAGDV (KRAS G13D)
FVVYGGGDL

SEQ ID NO: 78847 - protein, 9 aa, synthetic construct
  source 1..9: note = Seed: LVVVGAGDV (KRAS G13D)
FVVYGNGDA

SEQ ID NO: 78848 - protein, 9 aa, synthetic construct
  source 1..9: note = Seed: LVVVGAGDV (KRAS G13D)
FVVYGNGDF

SEQ ID NO: 78849 - protein, 9 aa, synthetic construct
  source 1..9: note = Seed: LVVVGAGDV (KRAS G13D)
FVVYGNGDI

SEQ ID NO: 78850 - protein, 9 aa, synthetic construct
  source 1..9: note = Seed: LVVVGAGDV (KRAS G13D)
FVVYGNGDL

SEQ ID NO: 78851 - protein, 9 aa, synthetic construct
  source 1..9: note = Seed: LVVVGAGDV (KRAS G13D)
FVVYGNGDM

SEQ ID NO: 78852 - protein, 9 aa, synthetic construct
  source 1..9: note = Seed: LVVVGAGDV (KRAS G13D)
FVVYGNGDT

SEQ ID NO: 78853 - protein, 9 aa, synthetic construct
  source 1..9: note = Seed: LVVVGAGDV (KRAS G13D)
FVVYGNGDV

SEQ ID NO: 78854 - protein, 9 aa, synthetic construct
  source 1..9: note = Seed: LVVVGAGDV (KRAS G13D)
FVVYGSGDA

SEQ ID NO: 78855 - protein, 9 aa, synthetic construct
  source 1..9: note = Seed: LVVVGAGDV (KRAS G13D)
FVVYGSGDI

SEQ ID NO: 78856 - protein, 9 aa, synthetic construct
  source 1..9: note = Seed: LVVVGAGDV (KRAS G13D)
FVVYGSGDL

SEQ ID NO: 78857 - protein, 9 aa, synthetic construct
  source 1..9: note = Seed: LVVVGAGDV (KRAS G13D)
FVVYGSGDM

SEQ ID NO: 78858 - protein, 9 aa, synthetic construct
  source 1..9: note = Seed: LVVVGAGDV (KRAS G13D)
FVVYGSGDV

SEQ ID NO: 78859 - protein, 9 aa, synthetic construct
  source 1..9: note = Seed: LVVVGAGDV (KRAS G13D)
FVVYGTGDI

SEQ ID NO: 78860 - protein, 9 aa, synthetic construct
  source 1..9: note = Seed: LVVVGAGDV (KRAS G13D)
FVVYGTGDL

SEQ ID NO: 78861 - protein, 9 aa, synthetic construct
  source 1..9: note = Seed: LVVVGAGDV (KRAS G13D)
FVVYGTGDV

SEQ ID NO: 78862 - protein, 9 aa, synthetic construct
  source 1..9: note = Seed: LVVVGAGDV (KRAS G13D)
IVVAGAGDA

SEQ ID NO: 78863 - protein, 9 aa, synthetic construct
  source 1..9: note = Seed: LVVVGAGDV (KRAS G13D)
IVVAGAGDC

SEQ ID NO: 78864 - protein, 9 aa, synthetic construct
  source 1..9: note = Seed: LVVVGAGDV (KRAS G13D)
IVVAGAGDF

SEQ ID NO: 78865 - protein, 9 aa, synthetic construct
  source 1..9: note = Seed: LVVVGAGDV (KRAS G13D)
IVVAGAGDI

SEQ ID NO: 78866 - protein, 9 aa, synthetic construct
  source 1..9: note = Seed: LVVVGAGDV (KRAS G13D)
IVVAGAGDL

SEQ ID NO: 78867 - protein, 9 aa, synthetic construct
  source 1..9: note = Seed: LVVVGAGDV (KRAS G13D)
IVVAGAGDM

SEQ ID NO: 78868 - protein, 9 aa, synthetic construct
  source 1..9: note = Seed: LVVVGAGDV (KRAS G13D)
IVVAGAGDS

SEQ ID NO: 78869 - protein, 9 aa, synthetic construct
  source 1..9: note = Seed: LVVVGAGDV (KRAS G13D)
IVVAGAGDT

SEQ ID NO: 78870 - protein, 9 aa, synthetic construct
  source 1..9: note = Seed: LVVVGAGDV (KRAS G13D)
IVVAGAGDV

SEQ ID NO: 78871 - protein, 9 aa, synthetic construct
  source 1..9: note = Seed: LVVVGAGDV (KRAS G13D)
IVVAGGGDA

SEQ ID NO: 78872 - protein, 9 aa, synthetic construct
  source 1..9: note = Seed: LVVVGAGDV (KRAS G13D)
IVVAGGGDI

SEQ ID NO: 78873 - protein, 9 aa, synthetic construct
  source 1..9: note = Seed: LVVVGAGDV (KRAS G13D)
IVVAGGGDL

SEQ ID NO: 78874 - protein, 9 aa, synthetic construct
  source 1..9: note = Seed: LVVVGAGDV (KRAS G13D)
IVVAGGGDM

SEQ ID NO: 78875 - protein, 9 aa, synthetic construct
  source 1..9: note = Seed: LVVVGAGDV (KRAS G13D)
IVVAGGGDS

SEQ ID NO: 78876 - protein, 9 aa, synthetic construct
  source 1..9: note = Seed: LVVVGAGDV (KRAS G13D)
IVVAGGGDT

SEQ ID NO: 78877 - protein, 9 aa, synthetic construct
  source 1..9: note = Seed: LVVVGAGDV (KRAS G13D)
IVVAGGGDV

SEQ ID NO: 78878 - protein, 9 aa, synthetic construct
  source 1..9: note = Seed: LVVVGAGDV (KRAS G13D)
IVVAGKGDA

SEQ ID NO: 78879 - protein, 9 aa, synthetic construct
  source 1..9: note = Seed: LVVVGAGDV (KRAS G13D)
IVVAGKGDS

SEQ ID NO: 78880 - protein, 9 aa, synthetic construct
  source 1..9: note = Seed: LVVVGAGDV (KRAS G13D)
IVVAGNGDA

SEQ ID NO: 78881 - protein, 9 aa, synthetic construct
  source 1..9: note = Seed: LVVVGAGDV (KRAS G13D)
IVVAGNGDI

SEQ ID NO: 78882 - protein, 9 aa, synthetic construct
  source 1..9: note = Seed: LVVVGAGDV (KRAS G13D)
IVVAGNGDL

SEQ ID NO: 78883 - protein, 9 aa, synthetic construct
  source 1..9: note = Seed: LVVVGAGDV (KRAS G13D)
IVVAGNGDM

SEQ ID NO: 78884 - protein, 9 aa, synthetic construct
  source 1..9: note = Seed: LVVVGAGDV (KRAS G13D)
IVVAGNGDS

SEQ ID NO: 78885 - protein, 9 aa, synthetic construct
  source 1..9: note = Seed: LVVVGAGDV (KRAS G13D)
IVVAGNGDT

SEQ ID NO: 78886 - protein, 9 aa, synthetic construct
  source 1..9: note = Seed: LVVVGAGDV (KRAS G13D)
IVVAGNGDV

SEQ ID NO: 78887 - protein, 9 aa, synthetic construct
  source 1..9: note = Seed: LVVVGAGDV (KRAS G13D)
IVVAGPGDA

SEQ ID NO: 78888 - protein, 9 aa, synthetic construct
  source 1..9: note = Seed: LVVVGAGDV (KRAS G13D)
IVVAGPGDI

SEQ ID NO: 78889 - protein, 9 aa, synthetic construct
  source 1..9: note = Seed: LVVVGAGDV (KRAS G13D)
IVVAGPGDL

SEQ ID NO: 78890 - protein, 9 aa, synthetic construct
  source 1..9: note = Seed: LVVVGAGDV (KRAS G13D)
IVVAGPGDV

SEQ ID NO: 78891 - protein, 9 aa, synthetic construct
  source 1..9: note = Seed: LVVVGAGDV (KRAS G13D)
IVVAGRGDA

SEQ ID NO: 78892 - protein, 9 aa, synthetic construct
  source 1..9: note = Seed: LVVVGAGDV (KRAS G13D)
IVVAGRGDH

SEQ ID NO: 78893 - protein, 9 aa, synthetic construct
  source 1..9: note = Seed: LVVVGAGDV (KRAS G13D)
IVVAGRGDK

SEQ ID NO: 78894 - protein, 9 aa, synthetic construct
  source 1..9: note = Seed: LVVVGAGDV (KRAS G13D)
IVVAGRGDM

SEQ ID NO: 78895 - protein, 9 aa, synthetic construct
  source 1..9: note = Seed: LVVVGAGDV (KRAS G13D)
IVVAGRGDQ

SEQ ID NO: 78896 - protein, 9 aa, synthetic construct
  source 1..9: note = Seed: LVVVGAGDV (KRAS G13D)
IVVAGRGDS

SEQ ID NO: 78897 - protein, 9 aa, synthetic construct
  source 1..9: note = Seed: LVVVGAGDV (KRAS G13D)
IVVAGRGDT

SEQ ID NO: 78898 - protein, 9 aa, synthetic construct
  source 1..9: note = Seed: LVVVGAGDV (KRAS G13D)
IVVAGSGDA

SEQ ID NO: 78899 - protein, 9 aa, synthetic construct
  source 1..9: note = Seed: LVVVGAGDV (KRAS G13D)
IVVAGSGDI

SEQ ID NO: 78900 - protein, 9 aa, synthetic construct
  source 1..9: note = Seed: LVVVGAGDV (KRAS G13D)
IVVAGSGDL

SEQ ID NO: 78901 - protein, 9 aa, synthetic construct
  source 1..9: note = Seed: LVVVGAGDV (KRAS G13D)
IVVAGSGDM

SEQ ID NO: 78902 - protein, 9 aa, synthetic construct
  source 1..9: note = Seed: LVVVGAGDV (KRAS G13D)
IVVAGSGDS

SEQ ID NO: 78903 - protein, 9 aa, synthetic construct
  source 1..9: note = Seed: LVVVGAGDV (KRAS G13D)
IVVAGSGDT

SEQ ID NO: 78904 - protein, 9 aa, synthetic construct
  source 1..9: note = Seed: LVVVGAGDV (KRAS G13D)
IVVAGSGDV

SEQ ID NO: 78905 - protein, 9 aa, synthetic construct
  source 1..9: note = Seed: LVVVGAGDV (KRAS G13D)
IVVAGTGDA

SEQ ID NO: 78906 - protein, 9 aa, synthetic construct
  source 1..9: note = Seed: LVVVGAGDV (KRAS G13D)
IVVAGTGDI

SEQ ID NO: 78907 - protein, 9 aa, synthetic construct
  source 1..9: note = Seed: LVVVGAGDV (KRAS G13D)
IVVAGTGDL

SEQ ID NO: 78908 - protein, 9 aa, synthetic construct
  source 1..9: note = Seed: LVVVGAGDV (KRAS G13D)
IVVAGTGDM

SEQ ID NO: 78909 - protein, 9 aa, synthetic construct
  source 1..9: note = Seed: LVVVGAGDV (KRAS G13D)
IVVAGTGDV

SEQ ID NO: 78910 - protein, 9 aa, synthetic construct
  source 1..9: note = Seed: LVVVGAGDV (KRAS G13D)
IVVAGVGDI

SEQ ID NO: 78911 - protein, 9 aa, synthetic construct
  source 1..9: note = Seed: LVVVGAGDV (KRAS G13D)
IVVAGVGDL

SEQ ID NO: 78912 - protein, 9 aa, synthetic construct
  source 1..9: note = Seed: LVVVGAGDV (KRAS G13D)
IVVAGVGDV

SEQ ID NO: 78913 - protein, 9 aa, synthetic construct
  source 1..9: note = Seed: LVVVGAGDV (KRAS G13D)
IVVDGAGDI

SEQ ID NO: 78914 - protein, 9 aa, synthetic construct
  source 1..9: note = Seed: LVVVGAGDV (KRAS G13D)
IVVDGAGDL

SEQ ID NO: 78915 - protein, 9 aa, synthetic construct
  source 1..9: note = Seed: LVVVGAGDV (KRAS G13D)
IVVDGAGDV

SEQ ID NO: 78916 - protein, 9 aa, synthetic construct
  source 1..9: note = Seed: LVVVGAGDV (KRAS G13D)
IVVDGNGDI

SEQ ID NO: 78917 - protein, 9 aa, synthetic construct
  source 1..9: note = Seed: LVVVGAGDV (KRAS G13D)
IVVDGNGDV

SEQ ID NO: 78918 - protein, 9 aa, synthetic construct
  source 1..9: note = Seed: LVVVGAGDV (KRAS G13D)
IVVDGSGDI

SEQ ID NO: 78919 - protein, 9 aa, synthetic construct
  source 1..9: note = Seed: LVVVGAGDV (KRAS G13D)
IVVEGAGDA

SEQ ID NO: 78920 - protein, 9 aa, synthetic construct
  source 1..9: note = Seed: LVVVGAGDV (KRAS G13D)
IVVEGAGDI

SEQ ID NO: 78921 - protein, 9 aa, synthetic construct
  source 1..9: note = Seed: LVVVGAGDV (KRAS G13D)
IVVEGAGDL

SEQ ID NO: 78922 - protein, 9 aa, synthetic construct
  source 1..9: note = Seed: LVVVGAGDV (KRAS G13D)
IVVEGAGDV

SEQ ID NO: 78923 - protein, 9 aa, synthetic construct
  source 1..9: note = Seed: LVVVGAGDV (KRAS G13D)
IVVEGFGDI

SEQ ID NO: 78924 - protein, 9 aa, synthetic construct
  source 1..9: note = Seed: LVVVGAGDV (KRAS G13D)
IVVEGFGDL

SEQ ID NO: 78925 - protein, 9 aa, synthetic construct
  source 1..9: note = Seed: LVVVGAGDV (KRAS G13D)
IVVEGFGDV

SEQ ID NO: 78926 - protein, 9 aa, synthetic construct
  source 1..9: note = Seed: LVVVGAGDV (KRAS G13D)
IVVFGAGDA

SEQ ID NO: 78927 - protein, 9 aa, synthetic construct
  source 1..9: note = Seed: LVVVGAGDV (KRAS G13D)
IVVFGAGDI

SEQ ID NO: 78928 - protein, 9 aa, synthetic construct
  source 1..9: note = Seed: LVVVGAGDV (KRAS G13D)
IVVFGAGDL

SEQ ID NO: 78929 - protein, 9 aa, synthetic construct
  source 1..9: note = Seed: LVVVGAGDV (KRAS G13D)
IVVFGAGDM

SEQ ID NO: 78930 - protein, 9 aa, synthetic construct
  source 1..9: note = Seed: LVVVGAGDV (KRAS G13D)
IVVFGAGDT

SEQ ID NO: 78931 - protein, 9 aa, synthetic construct
  source 1..9: note = Seed: LVVVGAGDV (KRAS G13D)
IVVFGAGDV

SEQ ID NO: 78932 - protein, 9 aa, synthetic construct
  source 1..9: note = Seed: LVVVGAGDV (KRAS G13D)
IVVFGDGDI

SEQ ID NO: 78933 - protein, 9 aa, synthetic construct
  source 1..9: note = Seed: LVVVGAGDV (KRAS G13D)
IVVFGDGDL

SEQ ID NO: 78934 - protein, 9 aa, synthetic construct
  source 1..9: note = Seed: LVVVGAGDV (KRAS G13D)
IVVFGDGDV

SEQ ID NO: 78935 - protein, 9 aa, synthetic construct
  source 1..9: note = Seed: LVVVGAGDV (KRAS G13D)
IVVFGGGDA

SEQ ID NO: 78936 - protein, 9 aa, synthetic construct
  source 1..9: note = Seed: LVVVGAGDV (KRAS G13D)
IVVFGGGDI

SEQ ID NO: 78937 - protein, 9 aa, synthetic construct
  source 1..9: note = Seed: LVVVGAGDV (KRAS G13D)
IVVFGGGDL

SEQ ID NO: 78938 - protein, 9 aa, synthetic construct
  source 1..9: note = Seed: LVVVGAGDV (KRAS G13D)
IVVFGGGDM

SEQ ID NO: 78939 - protein, 9 aa, synthetic construct
  source 1..9: note = Seed: LVVVGAGDV (KRAS G13D)
IVVFGGGDS

SEQ ID NO: 78940 - protein, 9 aa, synthetic construct
  source 1..9: note = Seed: LVVVGAGDV (KRAS G13D)
IVVFGGGDT

SEQ ID NO: 78941 - protein, 9 aa, synthetic construct
  source 1..9: note = Seed: LVVVGAGDV (KRAS G13D)
IVVFGGGDV

SEQ ID NO: 78942 - protein, 9 aa, synthetic construct
  source 1..9: note = Seed: LVVVGAGDV (KRAS G13D)
IVVFGKGDA

SEQ ID NO: 78943 - protein, 9 aa, synthetic construct
  source 1..9: note = Seed: LVVVGAGDV (KRAS G13D)
IVVFGKGDH

SEQ ID NO: 78944 - protein, 9 aa, synthetic construct
  source 1..9: note = Seed: LVVVGAGDV (KRAS G13D)
IVVFGKGDS

SEQ ID NO: 78945 - protein, 9 aa, synthetic construct
  source 1..9: note = Seed: LVVVGAGDV (KRAS G13D)
IVVFGNGDA

SEQ ID NO: 78946 - protein, 9 aa, synthetic construct
  source 1..9: note = Seed: LVVVGAGDV (KRAS G13D)
IVVFGNGDF

SEQ ID NO: 78947 - protein, 9 aa, synthetic construct
  source 1..9: note = Seed: LVVVGAGDV (KRAS G13D)
IVVFGNGDH

SEQ ID NO: 78948 - protein, 9 aa, synthetic construct
  source 1..9: note = Seed: LVVVGAGDV (KRAS G13D)
IVVFGNGDI

SEQ ID NO: 78949 - protein, 9 aa, synthetic construct
  source 1..9: note = Seed: LVVVGAGDV (KRAS G13D)
IVVFGNGDL

SEQ ID NO: 78950 - protein, 9 aa, synthetic construct
  source 1..9: note = Seed: LVVVGAGDV (KRAS G13D)
IVVFGNGDM

SEQ ID NO: 78951 - protein, 9 aa, synthetic construct
  source 1..9: note = Seed: LVVVGAGDV (KRAS G13D)
IVVFGNGDS

SEQ ID NO: 78952 - protein, 9 aa, synthetic construct
  source 1..9: note = Seed: LVVVGAGDV (KRAS G13D)
IVVFGNGDT

SEQ ID NO: 78953 - protein, 9 aa, synthetic construct
  source 1..9: note = Seed: LVVVGAGDV (KRAS G13D)
IVVFGNGDV

SEQ ID NO: 78954 - protein, 9 aa, synthetic construct
  source 1..9: note = Seed: LVVVGAGDV (KRAS G13D)
IVVFGNGDY

SEQ ID NO: 78955 - protein, 9 aa, synthetic construct
  source 1..9: note = Seed: LVVVGAGDV (KRAS G13D)
IVVFGPGDI

SEQ ID NO: 78956 - protein, 9 aa, synthetic construct
  source 1..9: note = Seed: LVVVGAGDV (KRAS G13D)
IVVFGPGDL

SEQ ID NO: 78957 - protein, 9 aa, synthetic construct
  source 1..9: note = Seed: LVVVGAGDV (KRAS G13D)
IVVFGPGDV

SEQ ID NO: 78958 - protein, 9 aa, synthetic construct
  source 1..9: note = Seed: LVVVGAGDV (KRAS G13D)
IVVFGRGDA

SEQ ID NO: 78959 - protein, 9 aa, synthetic construct
  source 1..9: note = Seed: LVVVGAGDV (KRAS G13D)
IVVFGRGDG

SEQ ID NO: 78960 - protein, 9 aa, synthetic construct
  source 1..9: note = Seed: LVVVGAGDV (KRAS G13D)
IVVFGRGDH

SEQ ID NO: 78961 - protein, 9 aa, synthetic construct
  source 1..9: note = Seed: LVVVGAGDV (KRAS G13D)
IVVFGRGDK

SEQ ID NO: 78962 - protein, 9 aa, synthetic construct
  source 1..9: note = Seed: LVVVGAGDV (KRAS G13D)
IVVFGRGDQ

SEQ ID NO: 78963 - protein, 9 aa, synthetic construct
  source 1..9: note = Seed: LVVVGAGDV (KRAS G13D)
IVVFGRGDS

SEQ ID NO: 78964 - protein, 9 aa, synthetic construct
  source 1..9: note = Seed: LVVVGAGDV (KRAS G13D)
IVVFGRGDT

SEQ ID NO: 78965 - protein, 9 aa, synthetic construct
  source 1..9: note = Seed: LVVVGAGDV (KRAS G13D)
IVVFGSGDA

SEQ ID NO: 78966 - protein, 9 aa, synthetic construct
  source 1..9: note = Seed: LVVVGAGDV (KRAS G13D)
IVVFGSGDF

SEQ ID NO: 78967 - protein, 9 aa, synthetic construct
  source 1..9: note = Seed: LVVVGAGDV (KRAS G13D)
IVVFGSGDG

SEQ ID NO: 78968 - protein, 9 aa, synthetic construct
  source 1..9: note = Seed: LVVVGAGDV (KRAS G13D)
IVVFGSGDH

SEQ ID NO: 78969 - protein, 9 aa, synthetic construct
  source 1..9: note = Seed: LVVVGAGDV (KRAS G13D)
IVVFGSGDI

SEQ ID NO: 78970 - protein, 9 aa, synthetic construct
  source 1..9: note = Seed: LVVVGAGDV (KRAS G13D)
IVVFGSGDL

SEQ ID NO: 78971 - protein, 9 aa, synthetic construct
  source 1..9: note = Seed: LVVVGAGDV (KRAS G13D)
IVVFGSGDM

SEQ ID NO: 78972 - protein, 9 aa, synthetic construct
  source 1..9: note = Seed: LVVVGAGDV (KRAS G13D)
IVVFGSGDS

SEQ ID NO: 78973 - protein, 9 aa, synthetic construct
  source 1..9: note = Seed: LVVVGAGDV (KRAS G13D)
IVVFGSGDT

SEQ ID NO: 78974 - protein, 9 aa, synthetic construct
  source 1..9: note = Seed: LVVVGAGDV (KRAS G13D)
IVVFGSGDV

SEQ ID NO: 78975 - protein, 9 aa, synthetic construct
  source 1..9: note = Seed: LVVVGAGDV (KRAS G13D)
IVVFGTGDA

SEQ ID NO: 78976 - protein, 9 aa, synthetic construct
  source 1..9: note = Seed: LVVVGAGDV (KRAS G13D)
IVVFGTGDI

SEQ ID NO: 78977 - protein, 9 aa, synthetic construct
  source 1..9: note = Seed: LVVVGAGDV (KRAS G13D)
IVVFGTGDL

SEQ ID NO: 78978 - protein, 9 aa, synthetic construct
  source 1..9: note = Seed: LVVVGAGDV (KRAS G13D)
IVVFGTGDM

SEQ ID NO: 78979 - protein, 9 aa, synthetic construct
  source 1..9: note = Seed: LVVVGAGDV (KRAS G13D)
IVVFGTGDS

SEQ ID NO: 78980 - protein, 9 aa, synthetic construct
  source 1..9: note = Seed: LVVVGAGDV (KRAS G13D)
IVVFGTGDT

SEQ ID NO: 78981 - protein, 9 aa, synthetic construct
  source 1..9: note = Seed: LVVVGAGDV (KRAS G13D)
IVVFGTGDV

SEQ ID NO: 78982 - protein, 9 aa, synthetic construct
  source 1..9: note = Seed: LVVVGAGDV (KRAS G13D)
IVVFGVGDL

SEQ ID NO: 78983 - protein, 9 aa, synthetic construct
  source 1..9: note = Seed: LVVVGAGDV (KRAS G13D)
IVVFGVGDV

SEQ ID NO: 78984 - protein, 9 aa, synthetic construct
  source 1..9: note = Seed: LVVVGAGDV (KRAS G13D)
IVVGGAGDI

SEQ ID NO: 78985 - protein, 9 aa, synthetic construct
  source 1..9: note = Seed: LVVVGAGDV (KRAS G13D)
IVVGGAGDL

SEQ ID NO: 78986 - protein, 9 aa, synthetic construct
  source 1..9: note = Seed: LVVVGAGDV (KRAS G13D)
IVVGGAGDV

SEQ ID NO: 78987 - protein, 9 aa, synthetic construct
  source 1..9: note = Seed: LVVVGAGDV (KRAS G13D)
IVVHGAGDI

SEQ ID NO: 78988 - protein, 9 aa, synthetic construct
  source 1..9: note = Seed: LVVVGAGDV (KRAS G13D)
IVVHGAGDR

SEQ ID NO: 78989 - protein, 9 aa, synthetic construct
  source 1..9: note = Seed: LVVVGAGDV (KRAS G13D)
IVVHGAGDV

SEQ ID NO: 78990 - protein, 9 aa, synthetic construct
  source 1..9: note = Seed: LVVVGAGDV (KRAS G13D)
IVVHGFGDI

SEQ ID NO: 78991 - protein, 9 aa, synthetic construct
  source 1..9: note = Seed: LVVVGAGDV (KRAS G13D)
IVVHGFGDL

SEQ ID NO: 78992 - protein, 9 aa, synthetic construct
  source 1..9: note = Seed: LVVVGAGDV (KRAS G13D)
IVVHGFGDV

SEQ ID NO: 78993 - protein, 9 aa, synthetic construct
  source 1..9: note = Seed: LVVVGAGDV (KRAS G13D)
IVVHGNGDI

SEQ ID NO: 78994 - protein, 9 aa, synthetic construct
  source 1..9: note = Seed: LVVVGAGDV (KRAS G13D)
IVVHGNGDL

SEQ ID NO: 78995 - protein, 9 aa, synthetic construct
  source 1..9: note = Seed: LVVVGAGDV (KRAS G13D)
IVVHGNGDV

SEQ ID NO: 78996 - protein, 9 aa, synthetic construct
  source 1..9: note = Seed: LVVVGAGDV (KRAS G13D)
IVVHGSGDI

SEQ ID NO: 78997 - protein, 9 aa, synthetic construct
  source 1..9: note = Seed: LVVVGAGDV (KRAS G13D)
IVVHGSGDL

SEQ ID NO: 78998 - protein, 9 aa, synthetic construct
  source 1..9: note = Seed: LVVVGAGDV (KRAS G13D)
IVVHGSGDR

SEQ ID NO: 78999 - protein, 9 aa, synthetic construct
  source 1..9: note = Seed: LVVVGAGDV (KRAS G13D)
IVVHGVGDR

SEQ ID NO: 79000 - protein, 9 aa, synthetic construct
  source 1..9: note = Seed: LVVVGAGDV (KRAS G13D)
IVVIGAGDA

SEQ ID NO: 79001 - protein, 9 aa, synthetic construct
  source 1..9: note = Seed: LVVVGAGDV (KRAS G13D)
IVVIGAGDI

SEQ ID NO: 79002 - protein, 9 aa, synthetic construct
  source 1..9: note = Seed: LVVVGAGDV (KRAS G13D)
IVVIGAGDL

SEQ ID NO: 79003 - protein, 9 aa, synthetic construct
  source 1..9: note = Seed: LVVVGAGDV (KRAS G13D)
IVVIGAGDM

SEQ ID NO: 79004 - protein, 9 aa, synthetic construct
  source 1..9: note = Seed: LVVVGAGDV (KRAS G13D)
IVVIGAGDS

SEQ ID NO: 79005 - protein, 9 aa, synthetic construct
  source 1..9: note = Seed: LVVVGAGDV (KRAS G13D)
IVVIGAGDT

SEQ ID NO: 79006 - protein, 9 aa, synthetic construct
  source 1..9: note = Seed: LVVVGAGDV (KRAS G13D)
IVVIGAGDV

SEQ ID NO: 79007 - protein, 9 aa, synthetic construct
  source 1..9: note = Seed: LVVVGAGDV (KRAS G13D)
IVVIGGGDA

SEQ ID NO: 79008 - protein, 9 aa, synthetic construct
  source 1..9: note = Seed: LVVVGAGDV (KRAS G13D)
IVVIGGGDI

SEQ ID NO: 79009 - protein, 9 aa, synthetic construct
  source 1..9: note = Seed: LVVVGAGDV (KRAS G13D)
IVVIGGGDL

SEQ ID NO: 79010 - protein, 9 aa, synthetic construct
  source 1..9: note = Seed: LVVVGAGDV (KRAS G13D)
IVVIGGGDM

SEQ ID NO: 79011 - protein, 9 aa, synthetic construct
  source 1..9: note = Seed: LVVVGAGDV (KRAS G13D)
IVVIGGGDS

SEQ ID NO: 79012 - protein, 9 aa, synthetic construct
  source 1..9: note = Seed: LVVVGAGDV (KRAS G13D)
IVVIGGGDT

SEQ ID NO: 79013 - protein, 9 aa, synthetic construct
  source 1..9: note = Seed: LVVVGAGDV (KRAS G13D)
IVVIGGGDV

SEQ ID NO: 79014 - protein, 9 aa, synthetic construct
  source 1..9: note = Seed: LVVVGAGDV (KRAS G13D)
IVVIGKGDA

SEQ ID NO: 79015 - protein, 9 aa, synthetic construct
  source 1..9: note = Seed: LVVVGAGDV (KRAS G13D)
IVVIGKGDG

SEQ ID NO: 79016 - protein, 9 aa, synthetic construct
  source 1..9: note = Seed: LVVVGAGDV (KRAS G13D)
IVVIGKGDH

SEQ ID NO: 79017 - protein, 9 aa, synthetic construct
  source 1..9: note = Seed: LVVVGAGDV (KRAS G13D)
IVVIGKGDK

SEQ ID NO: 79018 - protein, 9 aa, synthetic construct
  source 1..9: note = Seed: LVVVGAGDV (KRAS G13D)
IVVIGKGDL

SEQ ID NO: 79019 - protein, 9 aa, synthetic construct
  source 1..9: note = Seed: LVVVGAGDV (KRAS G13D)
IVVIGKGDM

SEQ ID NO: 79020 - protein, 9 aa, synthetic construct
  source 1..9: note = Seed: LVVVGAGDV (KRAS G13D)
IVVIGKGDN

SEQ ID NO: 79021 - protein, 9 aa, synthetic construct
  source 1..9: note = Seed: LVVVGAGDV (KRAS G13D)
IVVIGKGDQ

SEQ ID NO: 79022 - protein, 9 aa, synthetic construct
  source 1..9: note = Seed: LVVVGAGDV (KRAS G13D)
IVVIGKGDR

SEQ ID NO: 79023 - protein, 9 aa, synthetic construct
  source 1..9: note = Seed: LVVVGAGDV (KRAS G13D)
IVVIGKGDS

SEQ ID NO: 79024 - protein, 9 aa, synthetic construct
  source 1..9: note = Seed: LVVVGAGDV (KRAS G13D)
IVVIGKGDT

SEQ ID NO: 79025 - protein, 9 aa, synthetic construct
  source 1..9: note = Seed: LVVVGAGDV (KRAS G13D)
IVVIGKGDV

SEQ ID NO: 79026 - protein, 9 aa, synthetic construct
  source 1..9: note = Seed: LVVVGAGDV (KRAS G13D)
IVVIGNGDA

SEQ ID NO: 79027 - protein, 9 aa, synthetic construct
  source 1..9: note = Seed: LVVVGAGDV (KRAS G13D)
IVVIGNGDI

SEQ ID NO: 79028 - protein, 9 aa, synthetic construct
  source 1..9: note = Seed: LVVVGAGDV (KRAS G13D)
IVVIGNGDL

SEQ ID NO: 79029 - protein, 9 aa, synthetic construct
  source 1..9: note = Seed: LVVVGAGDV (KRAS G13D)
IVVIGNGDM

SEQ ID NO: 79030 - protein, 9 aa, synthetic construct
  source 1..9: note = Seed: LVVVGAGDV (KRAS G13D)
IVVIGNGDQ

SEQ ID NO: 79031 - protein, 9 aa, synthetic construct
  source 1..9: note = Seed: LVVVGAGDV (KRAS G13D)
IVVIGNGDS

SEQ ID NO: 79032 - protein, 9 aa, synthetic construct
  source 1..9: note = Seed: LVVVGAGDV (KRAS G13D)
IVVIGNGDT

SEQ ID NO: 79033 - protein, 9 aa, synthetic construct
  source 1..9: note = Seed: LVVVGAGDV (KRAS G13D)
IVVIGNGDV

SEQ ID NO: 79034 - protein, 9 aa, synthetic construct
  source 1..9: note = Seed: LVVVGAGDV (KRAS G13D)
IVVIGPGDA

SEQ ID NO: 79035 - protein, 9 aa, synthetic construct
  source 1..9: note = Seed: LVVVGAGDV (KRAS G13D)
IVVIGPGDI

SEQ ID NO: 79036 - protein, 9 aa, synthetic construct
  source 1..9: note = Seed: LVVVGAGDV (KRAS G13D)
IVVIGPGDL

SEQ ID NO: 79037 - protein, 9 aa, synthetic construct
  source 1..9: note = Seed: LVVVGAGDV (KRAS G13D)
IVVIGPGDM

SEQ ID NO: 79038 - protein, 9 aa, synthetic construct
  source 1..9: note = Seed: LVVVGAGDV (KRAS G13D)
IVVIGPGDV

SEQ ID NO: 79039 - protein, 9 aa, synthetic construct
  source 1..9: note = Seed: LVVVGAGDV (KRAS G13D)
IVVIGRGDA

SEQ ID NO: 79040 - protein, 9 aa, synthetic construct
  source 1..9: note = Seed: LVVVGAGDV (KRAS G13D)
IVVIGRGDG

SEQ ID NO: 79041 - protein, 9 aa, synthetic construct
  source 1..9: note = Seed: LVVVGAGDV (KRAS G13D)
IVVIGRGDH

SEQ ID NO: 79042 - protein, 9 aa, synthetic construct
  source 1..9: note = Seed: LVVVGAGDV (KRAS G13D)
IVVIGRGDI

SEQ ID NO: 79043 - protein, 9 aa, synthetic construct
  source 1..9: note = Seed: LVVVGAGDV (KRAS G13D)
IVVIGRGDK

SEQ ID NO: 79044 - protein, 9 aa, synthetic construct
  source 1..9: note = Seed: LVVVGAGDV (KRAS G13D)
IVVIGRGDL

SEQ ID NO: 79045 - protein, 9 aa, synthetic construct
  source 1..9: note = Seed: LVVVGAGDV (KRAS G13D)
IVVIGRGDM

SEQ ID NO: 79046 - protein, 9 aa, synthetic construct
  source 1..9: note = Seed: LVVVGAGDV (KRAS G13D)
IVVIGRGDN

SEQ ID NO: 79047 - protein, 9 aa, synthetic construct
  source 1..9: note = Seed: LVVVGAGDV (KRAS G13D)
IVVIGRGDP

SEQ ID NO: 79048 - protein, 9 aa, synthetic construct
  source 1..9: note = Seed: LVVVGAGDV (KRAS G13D)
IVVIGRGDQ

SEQ ID NO: 79049 - protein, 9 aa, synthetic construct
  source 1..9: note = Seed: LVVVGAGDV (KRAS G13D)
IVVIGRGDR

SEQ ID NO: 79050 - protein, 9 aa, synthetic construct
  source 1..9: note = Seed: LVVVGAGDV (KRAS G13D)
IVVIGRGDS

SEQ ID NO: 79051 - protein, 9 aa, synthetic construct
  source 1..9: note = Seed: LVVVGAGDV (KRAS G13D)
IVVIGRGDT

SEQ ID NO: 79052 - protein, 9 aa, synthetic construct
  source 1..9: note = Seed: LVVVGAGDV (KRAS G13D)
IVVIGRGDV

SEQ ID NO: 79053 - protein, 9 aa, synthetic construct
  source 1..9: note = Seed: LVVVGAGDV (KRAS G13D)
IVVIGRGDY

SEQ ID NO: 79054 - protein, 9 aa, synthetic construct
  source 1..9: note = Seed: LVVVGAGDV (KRAS G13D)
IVVIGSGDA

SEQ ID NO: 79055 - protein, 9 aa, synthetic construct
  source 1..9: note = Seed: LVVVGAGDV (KRAS G13D)
IVVIGSGDI

SEQ ID NO: 79056 - protein, 9 aa, synthetic construct
  source 1..9: note = Seed: LVVVGAGDV (KRAS G13D)
IVVIGSGDL

SEQ ID NO: 79057 - protein, 9 aa, synthetic construct
  source 1..9: note = Seed: LVVVGAGDV (KRAS G13D)
IVVIGSGDM

SEQ ID NO: 79058 - protein, 9 aa, synthetic construct
  source 1..9: note = Seed: LVVVGAGDV (KRAS G13D)
IVVIGSGDS

SEQ ID NO: 79059 - protein, 9 aa, synthetic construct
  source 1..9: note = Seed: LVVVGAGDV (KRAS G13D)
IVVIGSGDT

SEQ ID NO: 79060 - protein, 9 aa, synthetic construct
  source 1..9: note = Seed: LVVVGAGDV (KRAS G13D)
IVVIGSGDV

SEQ ID NO: 79061 - protein, 9 aa, synthetic construct
  source 1..9: note = Seed: LVVVGAGDV (KRAS G13D)
IVVIGTGDA

SEQ ID NO: 79062 - protein, 9 aa, synthetic construct
  source 1..9: note = Seed: LVVVGAGDV (KRAS G13D)
IVVIGTGDI

SEQ ID NO: 79063 - protein, 9 aa, synthetic construct
  source 1..9: note = Seed: LVVVGAGDV (KRAS G13D)
IVVIGTGDL

SEQ ID NO: 79064 - protein, 9 aa, synthetic construct
  source 1..9: note = Seed: LVVVGAGDV (KRAS G13D)
IVVIGTGDM

SEQ ID NO: 79065 - protein, 9 aa, synthetic construct
  source 1..9: note = Seed: LVVVGAGDV (KRAS G13D)
IVVIGTGDS

SEQ ID NO: 79066 - protein, 9 aa, synthetic construct
  source 1..9: note = Seed: LVVVGAGDV (KRAS G13D)
IVVIGTGDV

SEQ ID NO: 79067 - protein, 9 aa, synthetic construct
  source 1..9: note = Seed: LVVVGAGDV (KRAS G13D)
IVVKGKGDA

SEQ ID NO: 79068 - protein, 9 aa, synthetic construct
  source 1..9: note = Seed: LVVVGAGDV (KRAS G13D)
IVVKGRGDA

SEQ ID NO: 79069 - protein, 9 aa, synthetic construct
  source 1..9: note = Seed: LVVVGAGDV (KRAS G13D)
IVVKGRGDH

SEQ ID NO: 79070 - protein, 9 aa, synthetic construct
  source 1..9: note = Seed: LVVVGAGDV (KRAS G13D)
IVVKGRGDI

SEQ ID NO: 79071 - protein, 9 aa, synthetic construct
  source 1..9: note = Seed: LVVVGAGDV (KRAS G13D)
IVVKGRGDL

SEQ ID NO: 79072 - protein, 9 aa, synthetic construct
  source 1..9: note = Seed: LVVVGAGDV (KRAS G13D)
IVVKGRGDM

SEQ ID NO: 79073 - protein, 9 aa, synthetic construct
  source 1..9: note = Seed: LVVVGAGDV (KRAS G13D)
IVVKGRGDQ

SEQ ID NO: 79074 - protein, 9 aa, synthetic construct
  source 1..9: note = Seed: LVVVGAGDV (KRAS G13D)
IVVKGRGDS

SEQ ID NO: 79075 - protein, 9 aa, synthetic construct
  source 1..9: note = Seed: LVVVGAGDV (KRAS G13D)
IVVKGRGDT

SEQ ID NO: 79076 - protein, 9 aa, synthetic construct
  source 1..9: note = Seed: LVVVGAGDV (KRAS G13D)
IVVKGRGDV

SEQ ID NO: 79077 - protein, 9 aa, synthetic construct
  source 1..9: note = Seed: LVVVGAGDV (KRAS G13D)
IVVLGAGDA

SEQ ID NO: 79078 - protein, 9 aa, synthetic construct
  source 1..9: note = Seed: LVVVGAGDV (KRAS G13D)
IVVLGAGDC

SEQ ID NO: 79079 - protein, 9 aa, synthetic construct
  source 1..9: note = Seed: LVVVGAGDV (KRAS G13D)
IVVLGAGDF

SEQ ID NO: 79080 - protein, 9 aa, synthetic construct
  source 1..9: note = Seed: LVVVGAGDV (KRAS G13D)
IVVLGAGDG

SEQ ID NO: 79081 - protein, 9 aa, synthetic construct
  source 1..9: note = Seed: LVVVGAGDV (KRAS G13D)
IVVLGAGDH

SEQ ID NO: 79082 - protein, 9 aa, synthetic construct
  source 1..9: note = Seed: LVVVGAGDV (KRAS G13D)
IVVLGAGDI

SEQ ID NO: 79083 - protein, 9 aa, synthetic construct
  source 1..9: note = Seed: LVVVGAGDV (KRAS G13D)
IVVLGAGDL

SEQ ID NO: 79084 - protein, 9 aa, synthetic construct
  source 1..9: note = Seed: LVVVGAGDV (KRAS G13D)
IVVLGAGDM

SEQ ID NO: 79085 - protein, 9 aa, synthetic construct
  source 1..9: note = Seed: LVVVGAGDV (KRAS G13D)
IVVLGAGDN

SEQ ID NO: 79086 - protein, 9 aa, synthetic construct
  source 1..9: note = Seed: LVVVGAGDV (KRAS G13D)
IVVLGAGDS

SEQ ID NO: 79087 - protein, 9 aa, synthetic construct
  source 1..9: note = Seed: LVVVGAGDV (KRAS G13D)
IVVLGAGDT

SEQ ID NO: 79088 - protein, 9 aa, synthetic construct
  source 1..9: note = Seed: LVVVGAGDV (KRAS G13D)
IVVLGAGDV

SEQ ID NO: 79089 - protein, 9 aa, synthetic construct
  source 1..9: note = Seed: LVVVGAGDV (KRAS G13D)
IVVLGGGDA

SEQ ID NO: 79090 - protein, 9 aa, synthetic construct
  source 1..9: note = Seed: LVVVGAGDV (KRAS G13D)
IVVLGGGDG

SEQ ID NO: 79091 - protein, 9 aa, synthetic construct
  source 1..9: note = Seed: LVVVGAGDV (KRAS G13D)
IVVLGGGDI

SEQ ID NO: 79092 - protein, 9 aa, synthetic construct
  source 1..9: note = Seed: LVVVGAGDV (KRAS G13D)
IVVLGGGDL

SEQ ID NO: 79093 - protein, 9 aa, synthetic construct
  source 1..9: note = Seed: LVVVGAGDV (KRAS G13D)
IVVLGGGDM

SEQ ID NO: 79094 - protein, 9 aa, synthetic construct
  source 1..9: note = Seed: LVVVGAGDV (KRAS G13D)
IVVLGGGDN

SEQ ID NO: 79095 - protein, 9 aa, synthetic construct
  source 1..9: note = Seed: LVVVGAGDV (KRAS G13D)
IVVLGGGDS

SEQ ID NO: 79096 - protein, 9 aa, synthetic construct
  source 1..9: note = Seed: LVVVGAGDV (KRAS G13D)
IVVLGGGDT

SEQ ID NO: 79097 - protein, 9 aa, synthetic construct
  source 1..9: note = Seed: LVVVGAGDV (KRAS G13D)
IVVLGGGDV

SEQ ID NO: 79098 - protein, 9 aa, synthetic construct
  source 1..9: note = Seed: LVVVGAGDV (KRAS G13D)
IVVLGHGDA

SEQ ID NO: 79099 - protein, 9 aa, synthetic construct
  source 1..9: note = Seed: LVVVGAGDV (KRAS G13D)
IVVLGHGDL

SEQ ID NO: 79100 - protein, 9 aa, synthetic construct
  source 1..9: note = Seed: LVVVGAGDV (KRAS G13D)
IVVLGIGDA

SEQ ID NO: 79101 - protein, 9 aa, synthetic construct
  source 1..9: note = Seed: LVVVGAGDV (KRAS G13D)
IVVLGIGDL

SEQ ID NO: 79102 - protein, 9 aa, synthetic construct
  source 1..9: note = Seed: LVVVGAGDV (KRAS G13D)
IVVLGIGDV

SEQ ID NO: 79103 - protein, 9 aa, synthetic construct
  source 1..9: note = Seed: LVVVGAGDV (KRAS G13D)
IVVLGKGDA

SEQ ID NO: 79104 - protein, 9 aa, synthetic construct
  source 1..9: note = Seed: LVVVGAGDV (KRAS G13D)
IVVLGKGDG

SEQ ID NO: 79105 - protein, 9 aa, synthetic construct
  source 1..9: note = Seed: LVVVGAGDV (KRAS G13D)
IVVLGKGDH

SEQ ID NO: 79106 - protein, 9 aa, synthetic construct
  source 1..9: note = Seed: LVVVGAGDV (KRAS G13D)
IVVLGKGDI

SEQ ID NO: 79107 - protein, 9 aa, synthetic construct
  source 1..9: note = Seed: LVVVGAGDV (KRAS G13D)
IVVLGKGDK

SEQ ID NO: 79108 - protein, 9 aa, synthetic construct
  source 1..9: note = Seed: LVVVGAGDV (KRAS G13D)
IVVLGKGDL

SEQ ID NO: 79109 - protein, 9 aa, synthetic construct
  source 1..9: note = Seed: LVVVGAGDV (KRAS G13D)
IVVLGKGDM

SEQ ID NO: 79110 - protein, 9 aa, synthetic construct
  source 1..9: note = Seed: LVVVGAGDV (KRAS G13D)
IVVLGKGDN

SEQ ID NO: 79111 - protein, 9 aa, synthetic construct
  source 1..9: note = Seed: LVVVGAGDV (KRAS G13D)
IVVLGKGDQ

SEQ ID NO: 79112 - protein, 9 aa, synthetic construct
  source 1..9: note = Seed: LVVVGAGDV (KRAS G13D)
IVVLGKGDR

SEQ ID NO: 79113 - protein, 9 aa, synthetic construct
  source 1..9: note = Seed: LVVVGAGDV (KRAS G13D)
IVVLGKGDS

SEQ ID NO: 79114 - protein, 9 aa, synthetic construct
  source 1..9: note = Seed: LVVVGAGDV (KRAS G13D)
IVVLGKGDT

SEQ ID NO: 79115 - protein, 9 aa, synthetic construct
  source 1..9: note = Seed: LVVVGAGDV (KRAS G13D)
IVVLGKGDV

SEQ ID NO: 79116 - protein, 9 aa, synthetic construct
  source 1..9: note = Seed: LVVVGAGDV (KRAS G13D)
IVVLGMGDL

SEQ ID NO: 79117 - protein, 9 aa, synthetic construct
  source 1..9: note = Seed: LVVVGAGDV (KRAS G13D)
IVVLGMGDM

SEQ ID NO: 79118 - protein, 9 aa, synthetic construct
  source 1..9: note = Seed: LVVVGAGDV (KRAS G13D)
IVVLGNGDA

SEQ ID NO: 79119 - protein, 9 aa, synthetic construct
  source 1..9: note = Seed: LVVVGAGDV (KRAS G13D)
IVVLGNGDI

SEQ ID NO: 79120 - protein, 9 aa, synthetic construct
  source 1..9: note = Seed: LVVVGAGDV (KRAS G13D)
IVVLGNGDL

SEQ ID NO: 79121 - protein, 9 aa, synthetic construct
  source 1..9: note = Seed: LVVVGAGDV (KRAS G13D)
IVVLGNGDM

SEQ ID NO: 79122 - protein, 9 aa, synthetic construct
  source 1..9: note = Seed: LVVVGAGDV (KRAS G13D)
IVVLGNGDS

SEQ ID NO: 79123 - protein, 9 aa, synthetic construct
  source 1..9: note = Seed: LVVVGAGDV (KRAS G13D)
IVVLGNGDT

SEQ ID NO: 79124 - protein, 9 aa, synthetic construct
  source 1..9: note = Seed: LVVVGAGDV (KRAS G13D)
IVVLGNGDV

SEQ ID NO: 79125 - protein, 9 aa, synthetic construct
  source 1..9: note = Seed: LVVVGAGDV (KRAS G13D)
IVVLGPGDA

SEQ ID NO: 79126 - protein, 9 aa, synthetic construct
  source 1..9: note = Seed: LVVVGAGDV (KRAS G13D)
IVVLGPGDI

SEQ ID NO: 79127 - protein, 9 aa, synthetic construct
  source 1..9: note = Seed: LVVVGAGDV (KRAS G13D)
IVVLGPGDL

SEQ ID NO: 79128 - protein, 9 aa, synthetic construct
  source 1..9: note = Seed: LVVVGAGDV (KRAS G13D)
IVVLGPGDM

SEQ ID NO: 79129 - protein, 9 aa, synthetic construct
  source 1..9: note = Seed: LVVVGAGDV (KRAS G13D)
IVVLGPGDS

SEQ ID NO: 79130 - protein, 9 aa, synthetic construct
  source 1..9: note = Seed: LVVVGAGDV (KRAS G13D)
IVVLGPGDT

SEQ ID NO: 79131 - protein, 9 aa, synthetic construct
  source 1..9: note = Seed: LVVVGAGDV (KRAS G13D)
IVVLGPGDV

SEQ ID NO: 79132 - protein, 9 aa, synthetic construct
  source 1..9: note = Seed: LVVVGAGDV (KRAS G13D)
IVVLGRGDA

SEQ ID NO: 79133 - protein, 9 aa, synthetic construct
  source 1..9: note = Seed: LVVVGAGDV (KRAS G13D)
IVVLGRGDG

SEQ ID NO: 79134 - protein, 9 aa, synthetic construct
  source 1..9: note = Seed: LVVVGAGDV (KRAS G13D)
IVVLGRGDH

SEQ ID NO: 79135 - protein, 9 aa, synthetic construct
  source 1..9: note = Seed: LVVVGAGDV (KRAS G13D)
IVVLGRGDI

SEQ ID NO: 79136 - protein, 9 aa, synthetic construct
  source 1..9: note = Seed: LVVVGAGDV (KRAS G13D)
IVVLGRGDK

SEQ ID NO: 79137 - protein, 9 aa, synthetic construct
  source 1..9: note = Seed: LVVVGAGDV (KRAS G13D)
IVVLGRGDL

SEQ ID NO: 79138 - protein, 9 aa, synthetic construct
  source 1..9: note = Seed: LVVVGAGDV (KRAS G13D)
IVVLGRGDM

SEQ ID NO: 79139 - protein, 9 aa, synthetic construct
  source 1..9: note = Seed: LVVVGAGDV (KRAS G13D)
IVVLGRGDN

SEQ ID NO: 79140 - protein, 9 aa, synthetic construct
  source 1..9: note = Seed: LVVVGAGDV (KRAS G13D)
IVVLGRGDP

SEQ ID NO: 79141 - protein, 9 aa, synthetic construct
  source 1..9: note = Seed: LVVVGAGDV (KRAS G13D)
IVVLGRGDQ

SEQ ID NO: 79142 - protein, 9 aa, synthetic construct
  source 1..9: note = Seed: LVVVGAGDV (KRAS G13D)
IVVLGRGDR

SEQ ID NO: 79143 - protein, 9 aa, synthetic construct
  source 1..9: note = Seed: LVVVGAGDV (KRAS G13D)
IVVLGRGDS

SEQ ID NO: 79144 - protein, 9 aa, synthetic construct
  source 1..9: note = Seed: LVVVGAGDV (KRAS G13D)
IVVLGRGDT

SEQ ID NO: 79145 - protein, 9 aa, synthetic construct
  source 1..9: note = Seed: LVVVGAGDV (KRAS G13D)
IVVLGRGDV

SEQ ID NO: 79146 - protein, 9 aa, synthetic construct
  source 1..9: note = Seed: LVVVGAGDV (KRAS G13D)
IVVLGRGDY

SEQ ID NO: 79147 - protein, 9 aa, synthetic construct
  source 1..9: note = Seed: LVVVGAGDV (KRAS G13D)
IVVLGSGDA

SEQ ID NO: 79148 - protein, 9 aa, synthetic construct
  source 1..9: note = Seed: LVVVGAGDV (KRAS G13D)
IVVLGSGDC

SEQ ID NO: 79149 - protein, 9 aa, synthetic construct
  source 1..9: note = Seed: LVVVGAGDV (KRAS G13D)
IVVLGSGDG

SEQ ID NO: 79150 - protein, 9 aa, synthetic construct
  source 1..9: note = Seed: LVVVGAGDV (KRAS G13D)
IVVLGSGDI

SEQ ID NO: 79151 - protein, 9 aa, synthetic construct
  source 1..9: note = Seed: LVVVGAGDV (KRAS G13D)
IVVLGSGDL

SEQ ID NO: 79152 - protein, 9 aa, synthetic construct
  source 1..9: note = Seed: LVVVGAGDV (KRAS G13D)
IVVLGSGDM

SEQ ID NO: 79153 - protein, 9 aa, synthetic construct
  source 1..9: note = Seed: LVVVGAGDV (KRAS G13D)
IVVLGSGDN

SEQ ID NO: 79154 - protein, 9 aa, synthetic construct
  source 1..9: note = Seed: LVVVGAGDV (KRAS G13D)
IVVLGSGDS

SEQ ID NO: 79155 - protein, 9 aa, synthetic construct
  source 1..9: note = Seed: LVVVGAGDV (KRAS G13D)
IVVLGSGDT

SEQ ID NO: 79156 - protein, 9 aa, synthetic construct
  source 1..9: note = Seed: LVVVGAGDV (KRAS G13D)
IVVLGSGDV

SEQ ID NO: 79157 - protein, 9 aa, synthetic construct
  source 1..9: note = Seed: LVVVGAGDV (KRAS G13D)
IVVLGTGDA

SEQ ID NO: 79158 - protein, 9 aa, synthetic construct
  source 1..9: note = Seed: LVVVGAGDV (KRAS G13D)
IVVLGTGDI

SEQ ID NO: 79159 - protein, 9 aa, synthetic construct
  source 1..9: note = Seed: LVVVGAGDV (KRAS G13D)
IVVLGTGDL

SEQ ID NO: 79160 - protein, 9 aa, synthetic construct
  source 1..9: note = Seed: LVVVGAGDV (KRAS G13D)
IVVLGTGDM

SEQ ID NO: 79161 - protein, 9 aa, synthetic construct
  source 1..9: note = Seed: LVVVGAGDV (KRAS G13D)
IVVLGTGDS

SEQ ID NO: 79162 - protein, 9 aa, synthetic construct
  source 1..9: note = Seed: LVVVGAGDV (KRAS G13D)
IVVLGTGDT

SEQ ID NO: 79163 - protein, 9 aa, synthetic construct
  source 1..9: note = Seed: LVVVGAGDV (KRAS G13D)
IVVLGTGDV

SEQ ID NO: 79164 - protein, 9 aa, synthetic construct
  source 1..9: note = Seed: LVVVGAGDV (KRAS G13D)
IVVLGVGDA

SEQ ID NO: 79165 - protein, 9 aa, synthetic construct
  source 1..9: note = Seed: LVVVGAGDV (KRAS G13D)
IVVLGVGDI

SEQ ID NO: 79166 - protein, 9 aa, synthetic construct
  source 1..9: note = Seed: LVVVGAGDV (KRAS G13D)
IVVLGVGDL

SEQ ID NO: 79167 - protein, 9 aa, synthetic construct
  source 1..9: note = Seed: LVVVGAGDV (KRAS G13D)
IVVLGVGDM

SEQ ID NO: 79168 - protein, 9 aa, synthetic construct
  source 1..9: note = Seed: LVVVGAGDV (KRAS G13D)
IVVLGVGDS

SEQ ID NO: 79169 - protein, 9 aa, synthetic construct
  source 1..9: note = Seed: LVVVGAGDV (KRAS G13D)
IVVLGVGDT

SEQ ID NO: 79170 - protein, 9 aa, synthetic construct
  source 1..9: note = Seed: LVVVGAGDV (KRAS G13D)
IVVLGVGDV

SEQ ID NO: 79171 - protein, 9 aa, synthetic construct
  source 1..9: note = Seed: LVVVGAGDV (KRAS G13D)
IVVMGAGDA

SEQ ID NO: 79172 - protein, 9 aa, synthetic construct
  source 1..9: note = Seed: LVVVGAGDV (KRAS G13D)
IVVMGAGDC

SEQ ID NO: 79173 - protein, 9 aa, synthetic construct
  source 1..9: note = Seed: LVVVGAGDV (KRAS G13D)
IVVMGAGDF

SEQ ID NO: 79174 - protein, 9 aa, synthetic construct
  source 1..9: note = Seed: LVVVGAGDV (KRAS G13D)
IVVMGAGDG

SEQ ID NO: 79175 - protein, 9 aa, synthetic construct
  source 1..9: note = Seed: LVVVGAGDV (KRAS G13D)
IVVMGAGDH

SEQ ID NO: 79176 - protein, 9 aa, synthetic construct
  source 1..9: note = Seed: LVVVGAGDV (KRAS G13D)
IVVMGAGDI

SEQ ID NO: 79177 - protein, 9 aa, synthetic construct
  source 1..9: note = Seed: LVVVGAGDV (KRAS G13D)
IVVMGAGDL

SEQ ID NO: 79178 - protein, 9 aa, synthetic construct
  source 1..9: note = Seed: LVVVGAGDV (KRAS G13D)
IVVMGAGDM

SEQ ID NO: 79179 - protein, 9 aa, synthetic construct
  source 1..9: note = Seed: LVVVGAGDV (KRAS G13D)
IVVMGAGDN

SEQ ID NO: 79180 - protein, 9 aa, synthetic construct
  source 1..9: note = Seed: LVVVGAGDV (KRAS G13D)
IVVMGAGDS

SEQ ID NO: 79181 - protein, 9 aa, synthetic construct
  source 1..9: note = Seed: LVVVGAGDV (KRAS G13D)
IVVMGAGDT

SEQ ID NO: 79182 - protein, 9 aa, synthetic construct
  source 1..9: note = Seed: LVVVGAGDV (KRAS G13D)
IVVMGAGDV

SEQ ID NO: 79183 - protein, 9 aa, synthetic construct
  source 1..9: note = Seed: LVVVGAGDV (KRAS G13D)
IVVMGGGDA

SEQ ID NO: 79184 - protein, 9 aa, synthetic construct
  source 1..9: note = Seed: LVVVGAGDV (KRAS G13D)
IVVMGGGDI

SEQ ID NO: 79185 - protein, 9 aa, synthetic construct
  source 1..9: note = Seed: LVVVGAGDV (KRAS G13D)
IVVMGGGDL

SEQ ID NO: 79186 - protein, 9 aa, synthetic construct
  source 1..9: note = Seed: LVVVGAGDV (KRAS G13D)
IVVMGGGDM

SEQ ID NO: 79187 - protein, 9 aa, synthetic construct
  source 1..9: note = Seed: LVVVGAGDV (KRAS G13D)
IVVMGGGDN

SEQ ID NO: 79188 - protein, 9 aa, synthetic construct
  source 1..9: note = Seed: LVVVGAGDV (KRAS G13D)
IVVMGGGDS

SEQ ID NO: 79189 - protein, 9 aa, synthetic construct
  source 1..9: note = Seed: LVVVGAGDV (KRAS G13D)
IVVMGGGDT

SEQ ID NO: 79190 - protein, 9 aa, synthetic construct
  source 1..9: note = Seed: LVVVGAGDV (KRAS G13D)
IVVMGGGDV

SEQ ID NO: 79191 - protein, 9 aa, synthetic construct
  source 1..9: note = Seed: LVVVGAGDV (KRAS G13D)
IVVMGHGDA

SEQ ID NO: 79192 - protein, 9 aa, synthetic construct
  source 1..9: note = Seed: LVVVGAGDV (KRAS G13D)
IVVMGHGDL

SEQ ID NO: 79193 - protein, 9 aa, synthetic construct
  source 1..9: note = Seed: LVVVGAGDV (KRAS G13D)
IVVMGIGDA

SEQ ID NO: 79194 - protein, 9 aa, synthetic construct
  source 1..9: note = Seed: LVVVGAGDV (KRAS G13D)
IVVMGIGDI

SEQ ID NO: 79195 - protein, 9 aa, synthetic construct
  source 1..9: note = Seed: LVVVGAGDV (KRAS G13D)
IVVMGIGDL

SEQ ID NO: 79196 - protein, 9 aa, synthetic construct
  source 1..9: note = Seed: LVVVGAGDV (KRAS G13D)
IVVMGIGDM

SEQ ID NO: 79197 - protein, 9 aa, synthetic construct
  source 1..9: note = Seed: LVVVGAGDV (KRAS G13D)
IVVMGIGDV

SEQ ID NO: 79198 - protein, 9 aa, synthetic construct
  source 1..9: note = Seed: LVVVGAGDV (KRAS G13D)
IVVMGKGDA

SEQ ID NO: 79199 - protein, 9 aa, synthetic construct
  source 1..9: note = Seed: LVVVGAGDV (KRAS G13D)
IVVMGKGDG

SEQ ID NO: 79200 - protein, 9 aa, synthetic construct
  source 1..9: note = Seed: LVVVGAGDV (KRAS G13D)
IVVMGKGDH

SEQ ID NO: 79201 - protein, 9 aa, synthetic construct
  source 1..9: note = Seed: LVVVGAGDV (KRAS G13D)
IVVMGKGDI

SEQ ID NO: 79202 - protein, 9 aa, synthetic construct
  source 1..9: note = Seed: LVVVGAGDV (KRAS G13D)
IVVMGKGDK

SEQ ID NO: 79203 - protein, 9 aa, synthetic construct
  source 1..9: note = Seed: LVVVGAGDV (KRAS G13D)
IVVMGKGDL

SEQ ID NO: 79204 - protein, 9 aa, synthetic construct
  source 1..9: note = Seed: LVVVGAGDV (KRAS G13D)
IVVMGKGDM

SEQ ID NO: 79205 - protein, 9 aa, synthetic construct
  source 1..9: note = Seed: LVVVGAGDV (KRAS G13D)
IVVMGKGDN

SEQ ID NO: 79206 - protein, 9 aa, synthetic construct
  source 1..9: note = Seed: LVVVGAGDV (KRAS G13D)
IVVMGKGDQ

SEQ ID NO: 79207 - protein, 9 aa, synthetic construct
  source 1..9: note = Seed: LVVVGAGDV (KRAS G13D)
IVVMGKGDR

SEQ ID NO: 79208 - protein, 9 aa, synthetic construct
  source 1..9: note = Seed: LVVVGAGDV (KRAS G13D)
IVVMGKGDS

SEQ ID NO: 79209 - protein, 9 aa, synthetic construct
  source 1..9: note = Seed: LVVVGAGDV (KRAS G13D)
IVVMGKGDT

SEQ ID NO: 79210 - protein, 9 aa, synthetic construct
  source 1..9: note = Seed: LVVVGAGDV (KRAS G13D)
IVVMGKGDV

SEQ ID NO: 79211 - protein, 9 aa, synthetic construct
  source 1..9: note = Seed: LVVVGAGDV (KRAS G13D)
IVVMGLGDL

SEQ ID NO: 79212 - protein, 9 aa, synthetic construct
  source 1..9: note = Seed: LVVVGAGDV (KRAS G13D)
IVVMGLGDM

SEQ ID NO: 79213 - protein, 9 aa, synthetic construct
  source 1..9: note = Seed: LVVVGAGDV (KRAS G13D)
IVVMGMGDI

SEQ ID NO: 79214 - protein, 9 aa, synthetic construct
  source 1..9: note = Seed: LVVVGAGDV (KRAS G13D)
IVVMGMGDL

SEQ ID NO: 79215 - protein, 9 aa, synthetic construct
  source 1..9: note = Seed: LVVVGAGDV (KRAS G13D)
IVVMGMGDM

SEQ ID NO: 79216 - protein, 9 aa, synthetic construct
  source 1..9: note = Seed: LVVVGAGDV (KRAS G13D)
IVVMGNGDA

SEQ ID NO: 79217 - protein, 9 aa, synthetic construct
  source 1..9: note = Seed: LVVVGAGDV (KRAS G13D)
IVVMGNGDH

SEQ ID NO: 79218 - protein, 9 aa, synthetic construct
  source 1..9: note = Seed: LVVVGAGDV (KRAS G13D)
IVVMGNGDI

SEQ ID NO: 79219 - protein, 9 aa, synthetic construct
  source 1..9: note = Seed: LVVVGAGDV (KRAS G13D)
IVVMGNGDL

SEQ ID NO: 79220 - protein, 9 aa, synthetic construct
  source 1..9: note = Seed: LVVVGAGDV (KRAS G13D)
IVVMGNGDM

SEQ ID NO: 79221 - protein, 9 aa, synthetic construct
  source 1..9: note = Seed: LVVVGAGDV (KRAS G13D)
IVVMGNGDQ

SEQ ID NO: 79222 - protein, 9 aa, synthetic construct
  source 1..9: note = Seed: LVVVGAGDV (KRAS G13D)
IVVMGNGDS

SEQ ID NO: 79223 - protein, 9 aa, synthetic construct
  source 1..9: note = Seed: LVVVGAGDV (KRAS G13D)
IVVMGNGDT

SEQ ID NO: 79224 - protein, 9 aa, synthetic construct
  source 1..9: note = Seed: LVVVGAGDV (KRAS G13D)
IVVMGNGDV

SEQ ID NO: 79225 - protein, 9 aa, synthetic construct
  source 1..9: note = Seed: LVVVGAGDV (KRAS G13D)
IVVMGPGDA

SEQ ID NO: 79226 - protein, 9 aa, synthetic construct
  source 1..9: note = Seed: LVVVGAGDV (KRAS G13D)
IVVMGPGDI

SEQ ID NO: 79227 - protein, 9 aa, synthetic construct
  source 1..9: note = Seed: LVVVGAGDV (KRAS G13D)
IVVMGPGDL

SEQ ID NO: 79228 - protein, 9 aa, synthetic construct
  source 1..9: note = Seed: LVVVGAGDV (KRAS G13D)
IVVMGPGDM

SEQ ID NO: 79229 - protein, 9 aa, synthetic construct
  source 1..9: note = Seed: LVVVGAGDV (KRAS G13D)
IVVMGPGDS

SEQ ID NO: 79230 - protein, 9 aa, synthetic construct
  source 1..9: note = Seed: LVVVGAGDV (KRAS G13D)
IVVMGPGDT

SEQ ID NO: 79231 - protein, 9 aa, synthetic construct
  source 1..9: note = Seed: LVVVGAGDV (KRAS G13D)
IVVMGPGDV

SEQ ID NO: 79232 - protein, 9 aa, synthetic construct
  source 1..9: note = Seed: LVVVGAGDV (KRAS G13D)
IVVMGRGDA

SEQ ID NO: 79233 - protein, 9 aa, synthetic construct
  source 1..9: note = Seed: LVVVGAGDV (KRAS G13D)
IVVMGRGDG

SEQ ID NO: 79234 - protein, 9 aa, synthetic construct
  source 1..9: note = Seed: LVVVGAGDV (KRAS G13D)
IVVMGRGDH

SEQ ID NO: 79235 - protein, 9 aa, synthetic construct
  source 1..9: note = Seed: LVVVGAGDV (KRAS G13D)
IVVMGRGDI

SEQ ID NO: 79236 - protein, 9 aa, synthetic construct
  source 1..9: note = Seed: LVVVGAGDV (KRAS G13D)
IVVMGRGDK

SEQ ID NO: 79237 - protein, 9 aa, synthetic construct
  source 1..9: note = Seed: LVVVGAGDV (KRAS G13D)
IVVMGRGDL

SEQ ID NO: 79238 - protein, 9 aa, synthetic construct
  source 1..9: note = Seed: LVVVGAGDV (KRAS G13D)
IVVMGRGDM

SEQ ID NO: 79239 - protein, 9 aa, synthetic construct
  source 1..9: note = Seed: LVVVGAGDV (KRAS G13D)
IVVMGRGDN

SEQ ID NO: 79240 - protein, 9 aa, synthetic construct
  source 1..9: note = Seed: LVVVGAGDV (KRAS G13D)
IVVMGRGDP

SEQ ID NO: 79241 - protein, 9 aa, synthetic construct
  source 1..9: note = Seed: LVVVGAGDV (KRAS G13D)
IVVMGRGDQ

SEQ ID NO: 79242 - protein, 9 aa, synthetic construct
  source 1..9: note = Seed: LVVVGAGDV (KRAS G13D)
IVVMGRGDR

SEQ ID NO: 79243 - protein, 9 aa, synthetic construct
  source 1..9: note = Seed: LVVVGAGDV (KRAS G13D)
IVVMGRGDS

SEQ ID NO: 79244 - protein, 9 aa, synthetic construct
  source 1..9: note = Seed: LVVVGAGDV (KRAS G13D)
IVVMGRGDT

SEQ ID NO: 79245 - protein, 9 aa, synthetic construct
  source 1..9: note = Seed: LVVVGAGDV (KRAS G13D)
IVVMGRGDV

SEQ ID NO: 79246 - protein, 9 aa, synthetic construct
  source 1..9: note = Seed: LVVVGAGDV (KRAS G13D)
IVVMGRGDY

SEQ ID NO: 79247 - protein, 9 aa, synthetic construct
  source 1..9: note = Seed: LVVVGAGDV (KRAS G13D)
IVVMGSGDA

SEQ ID NO: 79248 - protein, 9 aa, synthetic construct
  source 1..9: note = Seed: LVVVGAGDV (KRAS G13D)
IVVMGSGDI

SEQ ID NO: 79249 - protein, 9 aa, synthetic construct
  source 1..9: note = Seed: LVVVGAGDV (KRAS G13D)
IVVMGSGDL

SEQ ID NO: 79250 - protein, 9 aa, synthetic construct
  source 1..9: note = Seed: LVVVGAGDV (KRAS G13D)
IVVMGSGDM

SEQ ID NO: 79251 - protein, 9 aa, synthetic construct
  source 1..9: note = Seed: LVVVGAGDV (KRAS G13D)
IVVMGSGDN

SEQ ID NO: 79252 - protein, 9 aa, synthetic construct
  source 1..9: note = Seed: LVVVGAGDV (KRAS G13D)
IVVMGSGDS

SEQ ID NO: 79253 - protein, 9 aa, synthetic construct
  source 1..9: note = Seed: LVVVGAGDV (KRAS G13D)
IVVMGSGDT

SEQ ID NO: 79254 - protein, 9 aa, synthetic construct
  source 1..9: note = Seed: LVVVGAGDV (KRAS G13D)
IVVMGSGDV

SEQ ID NO: 79255 - protein, 9 aa, synthetic construct
  source 1..9: note = Seed: LVVVGAGDV (KRAS G13D)
IVVMGTGDA

SEQ ID NO: 79256 - protein, 9 aa, synthetic construct
  source 1..9: note = Seed: LVVVGAGDV (KRAS G13D)
IVVMGTGDI

SEQ ID NO: 79257 - protein, 9 aa, synthetic construct
  source 1..9: note = Seed: LVVVGAGDV (KRAS G13D)
IVVMGTGDL

SEQ ID NO: 79258 - protein, 9 aa, synthetic construct
  source 1..9: note = Seed: LVVVGAGDV (KRAS G13D)
IVVMGTGDM

SEQ ID NO: 79259 - protein, 9 aa, synthetic construct
  source 1..9: note = Seed: LVVVGAGDV (KRAS G13D)
IVVMGTGDS

SEQ ID NO: 79260 - protein, 9 aa, synthetic construct
  source 1..9: note = Seed: LVVVGAGDV (KRAS G13D)
IVVMGTGDT

SEQ ID NO: 79261 - protein, 9 aa, synthetic construct
  source 1..9: note = Seed: LVVVGAGDV (KRAS G13D)
IVVMGTGDV

SEQ ID NO: 79262 - protein, 9 aa, synthetic construct
  source 1..9: note = Seed: LVVVGAGDV (KRAS G13D)
IVVMGVGDA

SEQ ID NO: 79263 - protein, 9 aa, synthetic construct
  source 1..9: note = Seed: LVVVGAGDV (KRAS G13D)
IVVMGVGDI

SEQ ID NO: 79264 - protein, 9 aa, synthetic construct
  source 1..9: note = Seed: LVVVGAGDV (KRAS G13D)
IVVMGVGDL

SEQ ID NO: 79265 - protein, 9 aa, synthetic construct
  source 1..9: note = Seed: LVVVGAGDV (KRAS G13D)
IVVMGVGDM

SEQ ID NO: 79266 - protein, 9 aa, synthetic construct
  source 1..9: note = Seed: LVVVGAGDV (KRAS G13D)
IVVMGVGDS

SEQ ID NO: 79267 - protein, 9 aa, synthetic construct
  source 1..9: note = Seed: LVVVGAGDV (KRAS G13D)
IVVMGVGDT

SEQ ID NO: 79268 - protein, 9 aa, synthetic construct
  source 1..9: note = Seed: LVVVGAGDV (KRAS G13D)
IVVMGVGDV

SEQ ID NO: 79269 - protein, 9 aa, synthetic construct
  source 1..9: note = Seed: LVVVGAGDV (KRAS G13D)
IVVNGAGDA

SEQ ID NO: 79270 - protein, 9 aa, synthetic construct
  source 1..9: note = Seed: LVVVGAGDV (KRAS G13D)
IVVNGAGDF

SEQ ID NO: 79271 - protein, 9 aa, synthetic construct
  source 1..9: note = Seed: LVVVGAGDV (KRAS G13D)
IVVNGAGDI

SEQ ID NO: 79272 - protein, 9 aa, synthetic construct
  source 1..9: note = Seed: LVVVGAGDV (KRAS G13D)
IVVNGAGDL

SEQ ID NO: 79273 - protein, 9 aa, synthetic construct
  source 1..9: note = Seed: LVVVGAGDV (KRAS G13D)
IVVNGAGDM

SEQ ID NO: 79274 - protein, 9 aa, synthetic construct
  source 1..9: note = Seed: LVVVGAGDV (KRAS G13D)
IVVNGAGDQ

SEQ ID NO: 79275 - protein, 9 aa, synthetic construct
  source 1..9: note = Seed: LVVVGAGDV (KRAS G13D)
IVVNGAGDS

SEQ ID NO: 79276 - protein, 9 aa, synthetic construct
  source 1..9: note = Seed: LVVVGAGDV (KRAS G13D)
IVVNGAGDT

SEQ ID NO: 79277 - protein, 9 aa, synthetic construct
  source 1..9: note = Seed: LVVVGAGDV (KRAS G13D)
IVVNGAGDV

SEQ ID NO: 79278 - protein, 9 aa, synthetic construct
  source 1..9: note = Seed: LVVVGAGDV (KRAS G13D)
IVVNGAGDW

SEQ ID NO: 79279 - protein, 9 aa, synthetic construct
  source 1..9: note = Seed: LVVVGAGDV (KRAS G13D)
IVVNGAGDY

SEQ ID NO: 79280 - protein, 9 aa, synthetic construct
  source 1..9: note = Seed: LVVVGAGDV (KRAS G13D)
IVVNGCGDI

SEQ ID NO: 79281 - protein, 9 aa, synthetic construct
  source 1..9: note = Seed: LVVVGAGDV (KRAS G13D)
IVVNGCGDL

SEQ ID NO: 79282 - protein, 9 aa, synthetic construct
  source 1..9: note = Seed: LVVVGAGDV (KRAS G13D)
IVVNGCGDV

SEQ ID NO: 79283 - protein, 9 aa, synthetic construct
  source 1..9: note = Seed: LVVVGAGDV (KRAS G13D)
IVVNGDGDI

SEQ ID NO: 79284 - protein, 9 aa, synthetic construct
  source 1..9: note = Seed: LVVVGAGDV (KRAS G13D)
IVVNGDGDL

SEQ ID NO: 79285 - protein, 9 aa, synthetic construct
  source 1..9: note = Seed: LVVVGAGDV (KRAS G13D)
IVVNGDGDV

SEQ ID NO: 79286 - protein, 9 aa, synthetic construct
  source 1..9: note = Seed: LVVVGAGDV (KRAS G13D)
IVVNGFGDI

SEQ ID NO: 79287 - protein, 9 aa, synthetic construct
  source 1..9: note = Seed: LVVVGAGDV (KRAS G13D)
IVVNGFGDV

SEQ ID NO: 79288 - protein, 9 aa, synthetic construct
  source 1..9: note = Seed: LVVVGAGDV (KRAS G13D)
IVVNGGGDA

SEQ ID NO: 79289 - protein, 9 aa, synthetic construct
  source 1..9: note = Seed: LVVVGAGDV (KRAS G13D)
IVVNGGGDF

SEQ ID NO: 79290 - protein, 9 aa, synthetic construct
  source 1..9: note = Seed: LVVVGAGDV (KRAS G13D)
IVVNGGGDI

SEQ ID NO: 79291 - protein, 9 aa, synthetic construct
  source 1..9: note = Seed: LVVVGAGDV (KRAS G13D)
IVVNGGGDL

SEQ ID NO: 79292 - protein, 9 aa, synthetic construct
  source 1..9: note = Seed: LVVVGAGDV (KRAS G13D)
IVVNGGGDM

SEQ ID NO: 79293 - protein, 9 aa, synthetic construct
  source 1..9: note = Seed: LVVVGAGDV (KRAS G13D)
IVVNGGGDV

SEQ ID NO: 79294 - protein, 9 aa, synthetic construct
  source 1..9: note = Seed: LVVVGAGDV (KRAS G13D)
IVVNGGGDY

SEQ ID NO: 79295 - protein, 9 aa, synthetic construct
  source 1..9: note = Seed: LVVVGAGDV (KRAS G13D)
IVVNGHGDF

SEQ ID NO: 79296 - protein, 9 aa, synthetic construct
  source 1..9: note = Seed: LVVVGAGDV (KRAS G13D)
IVVNGHGDI

SEQ ID NO: 79297 - protein, 9 aa, synthetic construct
  source 1..9: note = Seed: LVVVGAGDV (KRAS G13D)
IVVNGHGDL

SEQ ID NO: 79298 - protein, 9 aa, synthetic construct
  source 1..9: note = Seed: LVVVGAGDV (KRAS G13D)
IVVNGHGDM

SEQ ID NO: 79299 - protein, 9 aa, synthetic construct
  source 1..9: note = Seed: LVVVGAGDV (KRAS G13D)
IVVNGHGDV

SEQ ID NO: 79300 - protein, 9 aa, synthetic construct
  source 1..9: note = Seed: LVVVGAGDV (KRAS G13D)
IVVNGIGDA

SEQ ID NO: 79301 - protein, 9 aa, synthetic construct
  source 1..9: note = Seed: LVVVGAGDV (KRAS G13D)
IVVNGIGDF

SEQ ID NO: 79302 - protein, 9 aa, synthetic construct
  source 1..9: note = Seed: LVVVGAGDV (KRAS G13D)
IVVNGIGDI

SEQ ID NO: 79303 - protein, 9 aa, synthetic construct
  source 1..9: note = Seed: LVVVGAGDV (KRAS G13D)
IVVNGIGDL

SEQ ID NO: 79304 - protein, 9 aa, synthetic construct
  source 1..9: note = Seed: LVVVGAGDV (KRAS G13D)
IVVNGIGDM

SEQ ID NO: 79305 - protein, 9 aa, synthetic construct
  source 1..9: note = Seed: LVVVGAGDV (KRAS G13D)
IVVNGIGDS

SEQ ID NO: 79306 - protein, 9 aa, synthetic construct
  source 1..9: note = Seed: LVVVGAGDV (KRAS G13D)
IVVNGIGDT

SEQ ID NO: 79307 - protein, 9 aa, synthetic construct
  source 1..9: note = Seed: LVVVGAGDV (KRAS G13D)
IVVNGIGDV

SEQ ID NO: 79308 - protein, 9 aa, synthetic construct
  source 1..9: note = Seed: LVVVGAGDV (KRAS G13D)
IVVNGIGDW

SEQ ID NO: 79309 - protein, 9 aa, synthetic construct
  source 1..9: note = Seed: LVVVGAGDV (KRAS G13D)
IVVNGIGDY

SEQ ID NO: 79310 - protein, 9 aa, synthetic construct
  source 1..9: note = Seed: LVVVGAGDV (KRAS G13D)
IVVNGKGDI

SEQ ID NO: 79311 - protein, 9 aa, synthetic construct
  source 1..9: note = Seed: LVVVGAGDV (KRAS G13D)
IVVNGKGDV

SEQ ID NO: 79312 - protein, 9 aa, synthetic construct
  source 1..9: note = Seed: LVVVGAGDV (KRAS G13D)
IVVNGLGDA

SEQ ID NO: 79313 - protein, 9 aa, synthetic construct
  source 1..9: note = Seed: LVVVGAGDV (KRAS G13D)
IVVNGLGDF

SEQ ID NO: 79314 - protein, 9 aa, synthetic construct
  source 1..9: note = Seed: LVVVGAGDV (KRAS G13D)
IVVNGLGDI

SEQ ID NO: 79315 - protein, 9 aa, synthetic construct
  source 1..9: note = Seed: LVVVGAGDV (KRAS G13D)
IVVNGLGDL

SEQ ID NO: 79316 - protein, 9 aa, synthetic construct
  source 1..9: note = Seed: LVVVGAGDV (KRAS G13D)
IVVNGLGDM

SEQ ID NO: 79317 - protein, 9 aa, synthetic construct
  source 1..9: note = Seed: LVVVGAGDV (KRAS G13D)
IVVNGLGDV

SEQ ID NO: 79318 - protein, 9 aa, synthetic construct
  source 1..9: note = Seed: LVVVGAGDV (KRAS G13D)
IVVNGLGDY

SEQ ID NO: 79319 - protein, 9 aa, synthetic construct
  source 1..9: note = Seed: LVVVGAGDV (KRAS G13D)
IVVNGMGDA

SEQ ID NO: 79320 - protein, 9 aa, synthetic construct
  source 1..9: note = Seed: LVVVGAGDV (KRAS G13D)
IVVNGMGDF

SEQ ID NO: 79321 - protein, 9 aa, synthetic construct
  source 1..9: note = Seed: LVVVGAGDV (KRAS G13D)
IVVNGMGDI

SEQ ID NO: 79322 - protein, 9 aa, synthetic construct
  source 1..9: note = Seed: LVVVGAGDV (KRAS G13D)
IVVNGMGDL

SEQ ID NO: 79323 - protein, 9 aa, synthetic construct
  source 1..9: note = Seed: LVVVGAGDV (KRAS G13D)
IVVNGMGDM

SEQ ID NO: 79324 - protein, 9 aa, synthetic construct
  source 1..9: note = Seed: LVVVGAGDV (KRAS G13D)
IVVNGMGDV

SEQ ID NO: 79325 - protein, 9 aa, synthetic construct
  source 1..9: note = Seed: LVVVGAGDV (KRAS G13D)
IVVNGMGDY

SEQ ID NO: 79326 - protein, 9 aa, synthetic construct
  source 1..9: note = Seed: LVVVGAGDV (KRAS G13D)
IVVNGNGDA

SEQ ID NO: 79327 - protein, 9 aa, synthetic construct
  source 1..9: note = Seed: LVVVGAGDV (KRAS G13D)
IVVNGNGDF

SEQ ID NO: 79328 - protein, 9 aa, synthetic construct
  source 1..9: note = Seed: LVVVGAGDV (KRAS G13D)
IVVNGNGDI

SEQ ID NO: 79329 - protein, 9 aa, synthetic construct
  source 1..9: note = Seed: LVVVGAGDV (KRAS G13D)
IVVNGNGDL

SEQ ID NO: 79330 - protein, 9 aa, synthetic construct
  source 1..9: note = Seed: LVVVGAGDV (KRAS G13D)
IVVNGNGDM

SEQ ID NO: 79331 - protein, 9 aa, synthetic construct
  source 1..9: note = Seed: LVVVGAGDV (KRAS G13D)
IVVNGNGDQ

SEQ ID NO: 79332 - protein, 9 aa, synthetic construct
  source 1..9: note = Seed: LVVVGAGDV (KRAS G13D)
IVVNGNGDS

SEQ ID NO: 79333 - protein, 9 aa, synthetic construct
  source 1..9: note = Seed: LVVVGAGDV (KRAS G13D)
IVVNGNGDT

SEQ ID NO: 79334 - protein, 9 aa, synthetic construct
  source 1..9: note = Seed: LVVVGAGDV (KRAS G13D)
IVVNGNGDV

SEQ ID NO: 79335 - protein, 9 aa, synthetic construct
  source 1..9: note = Seed: LVVVGAGDV (KRAS G13D)
IVVNGNGDW

SEQ ID NO: 79336 - protein, 9 aa, synthetic construct
  source 1..9: note = Seed: LVVVGAGDV (KRAS G13D)
IVVNGNGDY

SEQ ID NO: 79337 - protein, 9 aa, synthetic construct
  source 1..9: note = Seed: LVVVGAGDV (KRAS G13D)
IVVNGPGDA

SEQ ID NO: 79338 - protein, 9 aa, synthetic construct
  source 1..9: note = Seed: LVVVGAGDV (KRAS G13D)
IVVNGPGDF

SEQ ID NO: 79339 - protein, 9 aa, synthetic construct
  source 1..9: note = Seed: LVVVGAGDV (KRAS G13D)
IVVNGPGDI

SEQ ID NO: 79340 - protein, 9 aa, synthetic construct
  source 1..9: note = Seed: LVVVGAGDV (KRAS G13D)
IVVNGPGDL

SEQ ID NO: 79341 - protein, 9 aa, synthetic construct
  source 1..9: note = Seed: LVVVGAGDV (KRAS G13D)
IVVNGPGDM

SEQ ID NO: 79342 - protein, 9 aa, synthetic construct
  source 1..9: note = Seed: LVVVGAGDV (KRAS G13D)
IVVNGPGDV

SEQ ID NO: 79343 - protein, 9 aa, synthetic construct
  source 1..9: note = Seed: LVVVGAGDV (KRAS G13D)
IVVNGPGDY

SEQ ID NO: 79344 - protein, 9 aa, synthetic construct
  source 1..9: note = Seed: LVVVGAGDV (KRAS G13D)
IVVNGQGDI

SEQ ID NO: 79345 - protein, 9 aa, synthetic construct
  source 1..9: note = Seed: LVVVGAGDV (KRAS G13D)
IVVNGQGDL

SEQ ID NO: 79346 - protein, 9 aa, synthetic construct
  source 1..9: note = Seed: LVVVGAGDV (KRAS G13D)
IVVNGQGDV

SEQ ID NO: 79347 - protein, 9 aa, synthetic construct
  source 1..9: note = Seed: LVVVGAGDV (KRAS G13D)
IVVNGRGDI

SEQ ID NO: 79348 - protein, 9 aa, synthetic construct
  source 1..9: note = Seed: LVVVGAGDV (KRAS G13D)
IVVNGSGDA

SEQ ID NO: 79349 - protein, 9 aa, synthetic construct
  source 1..9: note = Seed: LVVVGAGDV (KRAS G13D)
IVVNGSGDF

SEQ ID NO: 79350 - protein, 9 aa, synthetic construct
  source 1..9: note = Seed: LVVVGAGDV (KRAS G13D)
IVVNGSGDI

SEQ ID NO: 79351 - protein, 9 aa, synthetic construct
  source 1..9: note = Seed: LVVVGAGDV (KRAS G13D)
IVVNGSGDL

SEQ ID NO: 79352 - protein, 9 aa, synthetic construct
  source 1..9: note = Seed: LVVVGAGDV (KRAS G13D)
IVVNGSGDM

SEQ ID NO: 79353 - protein, 9 aa, synthetic construct
  source 1..9: note = Seed: LVVVGAGDV (KRAS G13D)
IVVNGSGDS

SEQ ID NO: 79354 - protein, 9 aa, synthetic construct
  source 1..9: note = Seed: LVVVGAGDV (KRAS G13D)
IVVNGSGDT

SEQ ID NO: 79355 - protein, 9 aa, synthetic construct
  source 1..9: note = Seed: LVVVGAGDV (KRAS G13D)
IVVNGSGDV

SEQ ID NO: 79356 - protein, 9 aa, synthetic construct
  source 1..9: note = Seed: LVVVGAGDV (KRAS G13D)
IVVNGSGDW

SEQ ID NO: 79357 - protein, 9 aa, synthetic construct
  source 1..9: note = Seed: LVVVGAGDV (KRAS G13D)
IVVNGSGDY

SEQ ID NO: 79358 - protein, 9 aa, synthetic construct
  source 1..9: note = Seed: LVVVGAGDV (KRAS G13D)
IVVNGTGDA

SEQ ID NO: 79359 - protein, 9 aa, synthetic construct
  source 1..9: note = Seed: LVVVGAGDV (KRAS G13D)
IVVNGTGDF

SEQ ID NO: 79360 - protein, 9 aa, synthetic construct
  source 1..9: note = Seed: LVVVGAGDV (KRAS G13D)
IVVNGTGDI

SEQ ID NO: 79361 - protein, 9 aa, synthetic construct
  source 1..9: note = Seed: LVVVGAGDV (KRAS G13D)
IVVNGTGDL

SEQ ID NO: 79362 - protein, 9 aa, synthetic construct
  source 1..9: note = Seed: LVVVGAGDV (KRAS G13D)
IVVNGTGDM

SEQ ID NO: 79363 - protein, 9 aa, synthetic construct
  source 1..9: note = Seed: LVVVGAGDV (KRAS G13D)
IVVNGTGDS

SEQ ID NO: 79364 - protein, 9 aa, synthetic construct
  source 1..9: note = Seed: LVVVGAGDV (KRAS G13D)
IVVNGTGDT

SEQ ID NO: 79365 - protein, 9 aa, synthetic construct
  source 1..9: note = Seed: LVVVGAGDV (KRAS G13D)
IVVNGTGDV

SEQ ID NO: 79366 - protein, 9 aa, synthetic construct
  source 1..9: note = Seed: LVVVGAGDV (KRAS G13D)
IVVNGTGDY

SEQ ID NO: 79367 - protein, 9 aa, synthetic construct
  source 1..9: note = Seed: LVVVGAGDV (KRAS G13D)
IVVNGVGDA

SEQ ID NO: 79368 - protein, 9 aa, synthetic construct
  source 1..9: note = Seed: LVVVGAGDV (KRAS G13D)
IVVNGVGDF

SEQ ID NO: 79369 - protein, 9 aa, synthetic construct
  source 1..9: note = Seed: LVVVGAGDV (KRAS G13D)
IVVNGVGDI

SEQ ID NO: 79370 - protein, 9 aa, synthetic construct
  source 1..9: note = Seed: LVVVGAGDV (KRAS G13D)
IVVNGVGDL

SEQ ID NO: 79371 - protein, 9 aa, synthetic construct
  source 1..9: note = Seed: LVVVGAGDV (KRAS G13D)
IVVNGVGDM

SEQ ID NO: 79372 - protein, 9 aa, synthetic construct
  source 1..9: note = Seed: LVVVGAGDV (KRAS G13D)
IVVNGVGDS

SEQ ID NO: 79373 - protein, 9 aa, synthetic construct
  source 1..9: note = Seed: LVVVGAGDV (KRAS G13D)
IVVNGVGDT

SEQ ID NO: 79374 - protein, 9 aa, synthetic construct
  source 1..9: note = Seed: LVVVGAGDV (KRAS G13D)
IVVNGVGDV

SEQ ID NO: 79375 - protein, 9 aa, synthetic construct
  source 1..9: note = Seed: LVVVGAGDV (KRAS G13D)
IVVNGVGDW

SEQ ID NO: 79376 - protein, 9 aa, synthetic construct
  source 1..9: note = Seed: LVVVGAGDV (KRAS G13D)
IVVNGVGDY

SEQ ID NO: 79377 - protein, 9 aa, synthetic construct
  source 1..9: note = Seed: LVVVGAGDV (KRAS G13D)
IVVNGYGDI

SEQ ID NO: 79378 - protein, 9 aa, synthetic construct
  source 1..9: note = Seed: LVVVGAGDV (KRAS G13D)
IVVNGYGDV

SEQ ID NO: 79379 - protein, 9 aa, synthetic construct
  source 1..9: note = Seed: LVVVGAGDV (KRAS G13D)
IVVQGAGDA

SEQ ID NO: 79380 - protein, 9 aa, synthetic construct
  source 1..9: note = Seed: LVVVGAGDV (KRAS G13D)
IVVQGAGDI

SEQ ID NO: 79381 - protein, 9 aa, synthetic construct
  source 1..9: note = Seed: LVVVGAGDV (KRAS G13D)
IVVQGAGDL

SEQ ID NO: 79382 - protein, 9 aa, synthetic construct
  source 1..9: note = Seed: LVVVGAGDV (KRAS G13D)
IVVQGAGDM

SEQ ID NO: 79383 - protein, 9 aa, synthetic construct
  source 1..9: note = Seed: LVVVGAGDV (KRAS G13D)
IVVQGAGDV

SEQ ID NO: 79384 - protein, 9 aa, synthetic construct
  source 1..9: note = Seed: LVVVGAGDV (KRAS G13D)
IVVQGGGDA

SEQ ID NO: 79385 - protein, 9 aa, synthetic construct
  source 1..9: note = Seed: LVVVGAGDV (KRAS G13D)
IVVQGGGDI

SEQ ID NO: 79386 - protein, 9 aa, synthetic construct
  source 1..9: note = Seed: LVVVGAGDV (KRAS G13D)
IVVQGGGDL

SEQ ID NO: 79387 - protein, 9 aa, synthetic construct
  source 1..9: note = Seed: LVVVGAGDV (KRAS G13D)
IVVQGGGDV

SEQ ID NO: 79388 - protein, 9 aa, synthetic construct
  source 1..9: note = Seed: LVVVGAGDV (KRAS G13D)
IVVQGNGDA

SEQ ID NO: 79389 - protein, 9 aa, synthetic construct
  source 1..9: note = Seed: LVVVGAGDV (KRAS G13D)
IVVQGNGDI

SEQ ID NO: 79390 - protein, 9 aa, synthetic construct
  source 1..9: note = Seed: LVVVGAGDV (KRAS G13D)
IVVQGNGDL

SEQ ID NO: 79391 - protein, 9 aa, synthetic construct
  source 1..9: note = Seed: LVVVGAGDV (KRAS G13D)
IVVQGNGDV

SEQ ID NO: 79392 - protein, 9 aa, synthetic construct
  source 1..9: note = Seed: LVVVGAGDV (KRAS G13D)
IVVQGRGDA

SEQ ID NO: 79393 - protein, 9 aa, synthetic construct
  source 1..9: note = Seed: LVVVGAGDV (KRAS G13D)
IVVQGRGDS

SEQ ID NO: 79394 - protein, 9 aa, synthetic construct
  source 1..9: note = Seed: LVVVGAGDV (KRAS G13D)
IVVQGSGDA

SEQ ID NO: 79395 - protein, 9 aa, synthetic construct
  source 1..9: note = Seed: LVVVGAGDV (KRAS G13D)
IVVQGSGDI

SEQ ID NO: 79396 - protein, 9 aa, synthetic construct
  source 1..9: note = Seed: LVVVGAGDV (KRAS G13D)
IVVQGSGDL

SEQ ID NO: 79397 - protein, 9 aa, synthetic construct
  source 1..9: note = Seed: LVVVGAGDV (KRAS G13D)
IVVQGSGDV

SEQ ID NO: 79398 - protein, 9 aa, synthetic construct
  source 1..9: note = Seed: LVVVGAGDV (KRAS G13D)
IVVRGKGDA

SEQ ID NO: 79399 - protein, 9 aa, synthetic construct
  source 1..9: note = Seed: LVVVGAGDV (KRAS G13D)
IVVRGKGDQ

SEQ ID NO: 79400 - protein, 9 aa, synthetic construct
  source 1..9: note = Seed: LVVVGAGDV (KRAS G13D)
IVVRGKGDS

SEQ ID NO: 79401 - protein, 9 aa, synthetic construct
  source 1..9: note = Seed: LVVVGAGDV (KRAS G13D)
IVVRGRGDA

SEQ ID NO: 79402 - protein, 9 aa, synthetic construct
  source 1..9: note = Seed: LVVVGAGDV (KRAS G13D)
IVVRGRGDG

SEQ ID NO: 79403 - protein, 9 aa, synthetic construct
  source 1..9: note = Seed: LVVVGAGDV (KRAS G13D)
IVVRGRGDQ

SEQ ID NO: 79404 - protein, 9 aa, synthetic construct
  source 1..9: note = Seed: LVVVGAGDV (KRAS G13D)
IVVRGRGDS

SEQ ID NO: 79405 - protein, 9 aa, synthetic construct
  source 1..9: note = Seed: LVVVGAGDV (KRAS G13D)
IVVSGAGDA

SEQ ID NO: 79406 - protein, 9 aa, synthetic construct
  source 1..9: note = Seed: LVVVGAGDV (KRAS G13D)
IVVSGAGDF

SEQ ID NO: 79407 - protein, 9 aa, synthetic construct
  source 1..9: note = Seed: LVVVGAGDV (KRAS G13D)
IVVSGAGDI

SEQ ID NO: 79408 - protein, 9 aa, synthetic construct
  source 1..9: note = Seed: LVVVGAGDV (KRAS G13D)
IVVSGAGDL

SEQ ID NO: 79409 - protein, 9 aa, synthetic construct
  source 1..9: note = Seed: LVVVGAGDV (KRAS G13D)
IVVSGAGDM

SEQ ID NO: 79410 - protein, 9 aa, synthetic construct
  source 1..9: note = Seed: LVVVGAGDV (KRAS G13D)
IVVSGAGDV

SEQ ID NO: 79411 - protein, 9 aa, synthetic construct
  source 1..9: note = Seed: LVVVGAGDV (KRAS G13D)
IVVSGAGDY

SEQ ID NO: 79412 - protein, 9 aa, synthetic construct
  source 1..9: note = Seed: LVVVGAGDV (KRAS G13D)
IVVSGFGDI

SEQ ID NO: 79413 - protein, 9 aa, synthetic construct
  source 1..9: note = Seed: LVVVGAGDV (KRAS G13D)
IVVSGFGDL

SEQ ID NO: 79414 - protein, 9 aa, synthetic construct
  source 1..9: note = Seed: LVVVGAGDV (KRAS G13D)
IVVSGFGDV

SEQ ID NO: 79415 - protein, 9 aa, synthetic construct
  source 1..9: note = Seed: LVVVGAGDV (KRAS G13D)
IVVSGGGDA

SEQ ID NO: 79416 - protein, 9 aa, synthetic construct
  source 1..9: note = Seed: LVVVGAGDV (KRAS G13D)
IVVSGGGDI

SEQ ID NO: 79417 - protein, 9 aa, synthetic construct
  source 1..9: note = Seed: LVVVGAGDV (KRAS G13D)
IVVSGGGDL

SEQ ID NO: 79418 - protein, 9 aa, synthetic construct
  source 1..9: note = Seed: LVVVGAGDV (KRAS G13D)
IVVSGGGDV

SEQ ID NO: 79419 - protein, 9 aa, synthetic construct
  source 1..9: note = Seed: LVVVGAGDV (KRAS G13D)
IVVSGIGDI

SEQ ID NO: 79420 - protein, 9 aa, synthetic construct
  source 1..9: note = Seed: LVVVGAGDV (KRAS G13D)
IVVSGIGDV

SEQ ID NO: 79421 - protein, 9 aa, synthetic construct
  source 1..9: note = Seed: LVVVGAGDV (KRAS G13D)
IVVSGNGDF

SEQ ID NO: 79422 - protein, 9 aa, synthetic construct
  source 1..9: note = Seed: LVVVGAGDV (KRAS G13D)
IVVSGNGDI

SEQ ID NO: 79423 - protein, 9 aa, synthetic construct
  source 1..9: note = Seed: LVVVGAGDV (KRAS G13D)
IVVSGNGDL

SEQ ID NO: 79424 - protein, 9 aa, synthetic construct
  source 1..9: note = Seed: LVVVGAGDV (KRAS G13D)
IVVSGNGDM

SEQ ID NO: 79425 - protein, 9 aa, synthetic construct
  source 1..9: note = Seed: LVVVGAGDV (KRAS G13D)
IVVSGNGDV

SEQ ID NO: 79426 - protein, 9 aa, synthetic construct
  source 1..9: note = Seed: LVVVGAGDV (KRAS G13D)
IVVSGNGDY

SEQ ID NO: 79427 - protein, 9 aa, synthetic construct
  source 1..9: note = Seed: LVVVGAGDV (KRAS G13D)
IVVSGPGDI

SEQ ID NO: 79428 - protein, 9 aa, synthetic construct
  source 1..9: note = Seed: LVVVGAGDV (KRAS G13D)
IVVSGPGDL

SEQ ID NO: 79429 - protein, 9 aa, synthetic construct
  source 1..9: note = Seed: LVVVGAGDV (KRAS G13D)
IVVSGPGDV

SEQ ID NO: 79430 - protein, 9 aa, synthetic construct
  source 1..9: note = Seed: LVVVGAGDV (KRAS G13D)
IVVSGRGDA

SEQ ID NO: 79431 - protein, 9 aa, synthetic construct
  source 1..9: note = Seed: LVVVGAGDV (KRAS G13D)
IVVSGRGDS

SEQ ID NO: 79432 - protein, 9 aa, synthetic construct
  source 1..9: note = Seed: LVVVGAGDV (KRAS G13D)
IVVSGSGDA

SEQ ID NO: 79433 - protein, 9 aa, synthetic construct
  source 1..9: note = Seed: LVVVGAGDV (KRAS G13D)
IVVSGSGDF

SEQ ID NO: 79434 - protein, 9 aa, synthetic construct
  source 1..9: note = Seed: LVVVGAGDV (KRAS G13D)
IVVSGSGDI

SEQ ID NO: 79435 - protein, 9 aa, synthetic construct
  source 1..9: note = Seed: LVVVGAGDV (KRAS G13D)
IVVSGSGDL

SEQ ID NO: 79436 - protein, 9 aa, synthetic construct
  source 1..9: note = Seed: LVVVGAGDV (KRAS G13D)
IVVSGSGDM

SEQ ID NO: 79437 - protein, 9 aa, synthetic construct
  source 1..9: note = Seed: LVVVGAGDV (KRAS G13D)
IVVSGSGDV

SEQ ID NO: 79438 - protein, 9 aa, synthetic construct
  source 1..9: note = Seed: LVVVGAGDV (KRAS G13D)
IVVSGSGDY

SEQ ID NO: 79439 - protein, 9 aa, synthetic construct
  source 1..9: note = Seed: LVVVGAGDV (KRAS G13D)
IVVSGTGDI

SEQ ID NO: 79440 - protein, 9 aa, synthetic construct
  source 1..9: note = Seed: LVVVGAGDV (KRAS G13D)
IVVSGTGDL

SEQ ID NO: 79441 - protein, 9 aa, synthetic construct
  source 1..9: note = Seed: LVVVGAGDV (KRAS G13D)
IVVSGTGDV

SEQ ID NO: 79442 - protein, 9 aa, synthetic construct
  source 1..9: note = Seed: LVVVGAGDV (KRAS G13D)
IVVSGVGDI

SEQ ID NO: 79443 - protein, 9 aa, synthetic construct
  source 1..9: note = Seed: LVVVGAGDV (KRAS G13D)
IVVSGVGDV

SEQ ID NO: 79444 - protein, 9 aa, synthetic construct
  source 1..9: note = Seed: LVVVGAGDV (KRAS G13D)
IVVTGAGDI

SEQ ID NO: 79445 - protein, 9 aa, synthetic construct
  source 1..9: note = Seed: LVVVGAGDV (KRAS G13D)
IVVTGAGDL

SEQ ID NO: 79446 - protein, 9 aa, synthetic construct
  source 1..9: note = Seed: LVVVGAGDV (KRAS G13D)
IVVTGAGDV

SEQ ID NO: 79447 - protein, 9 aa, synthetic construct
  source 1..9: note = Seed: LVVVGAGDV (KRAS G13D)
IVVTGFGDI

SEQ ID NO: 79448 - protein, 9 aa, synthetic construct
  source 1..9: note = Seed: LVVVGAGDV (KRAS G13D)
IVVTGFGDL

SEQ ID NO: 79449 - protein, 9 aa, synthetic construct
  source 1..9: note = Seed: LVVVGAGDV (KRAS G13D)
IVVTGFGDV

SEQ ID NO: 79450 - protein, 9 aa, synthetic construct
  source 1..9: note = Seed: LVVVGAGDV (KRAS G13D)
IVVTGNGDI

SEQ ID NO: 79451 - protein, 9 aa, synthetic construct
  source 1..9: note = Seed: LVVVGAGDV (KRAS G13D)
IVVTGNGDL

SEQ ID NO: 79452 - protein, 9 aa, synthetic construct
  source 1..9: note = Seed: LVVVGAGDV (KRAS G13D)
IVVTGNGDV

SEQ ID NO: 79453 - protein, 9 aa, synthetic construct
  source 1..9: note = Seed: LVVVGAGDV (KRAS G13D)
IVVTGRGDA

SEQ ID NO: 79454 - protein, 9 aa, synthetic construct
  source 1..9: note = Seed: LVVVGAGDV (KRAS G13D)
IVVTGRGDS

SEQ ID NO: 79455 - protein, 9 aa, synthetic construct
  source 1..9: note = Seed: LVVVGAGDV (KRAS G13D)
IVVTGSGDI

SEQ ID NO: 79456 - protein, 9 aa, synthetic construct
  source 1..9: note = Seed: LVVVGAGDV (KRAS G13D)
IVVTGSGDL

SEQ ID NO: 79457 - protein, 9 aa, synthetic construct
  source 1..9: note = Seed: LVVVGAGDV (KRAS G13D)
IVVTGSGDV

SEQ ID NO: 79458 - protein, 9 aa, synthetic construct
  source 1..9: note = Seed: LVVVGAGDV (KRAS G13D)
IVVVGAGDA

SEQ ID NO: 79459 - protein, 9 aa, synthetic construct
  source 1..9: note = Seed: LVVVGAGDV (KRAS G13D)
IVVVGAGDI

SEQ ID NO: 79460 - protein, 9 aa, synthetic construct
  source 1..9: note = Seed: LVVVGAGDV (KRAS G13D)
IVVVGAGDL

SEQ ID NO: 79461 - protein, 9 aa, synthetic construct
  source 1..9: note = Seed: LVVVGAGDV (KRAS G13D)
IVVVGAGDM

SEQ ID NO: 79462 - protein, 9 aa, synthetic construct
  source 1..9: note = Seed: LVVVGAGDV (KRAS G13D)
IVVVGAGDT

SEQ ID NO: 79463 - protein, 9 aa, synthetic construct
  source 1..9: note = Seed: LVVVGAGDV (KRAS G13D)
IVVVGAGDV

SEQ ID NO: 79464 - protein, 9 aa, synthetic construct
  source 1..9: note = Seed: LVVVGAGDV (KRAS G13D)
IVVVGGGDA

SEQ ID NO: 79465 - protein, 9 aa, synthetic construct
  source 1..9: note = Seed: LVVVGAGDV (KRAS G13D)
IVVVGGGDI

SEQ ID NO: 79466 - protein, 9 aa, synthetic construct
  source 1..9: note = Seed: LVVVGAGDV (KRAS G13D)
IVVVGGGDL

SEQ ID NO: 79467 - protein, 9 aa, synthetic construct
  source 1..9: note = Seed: LVVVGAGDV (KRAS G13D)
IVVVGGGDM

SEQ ID NO: 79468 - protein, 9 aa, synthetic construct
  source 1..9: note = Seed: LVVVGAGDV (KRAS G13D)
IVVVGGGDV

SEQ ID NO: 79469 - protein, 9 aa, synthetic construct
  source 1..9: note = Seed: LVVVGAGDV (KRAS G13D)
IVVVGKGDA

SEQ ID NO: 79470 - protein, 9 aa, synthetic construct
  source 1..9: note = Seed: LVVVGAGDV (KRAS G13D)
IVVVGKGDH

SEQ ID NO: 79471 - protein, 9 aa, synthetic construct
  source 1..9: note = Seed: LVVVGAGDV (KRAS G13D)
IVVVGKGDM

SEQ ID NO: 79472 - protein, 9 aa, synthetic construct
  source 1..9: note = Seed: LVVVGAGDV (KRAS G13D)
IVVVGKGDQ

SEQ ID NO: 79473 - protein, 9 aa, synthetic construct
  source 1..9: note = Seed: LVVVGAGDV (KRAS G13D)
IVVVGKGDS

SEQ ID NO: 79474 - protein, 9 aa, synthetic construct
  source 1..9: note = Seed: LVVVGAGDV (KRAS G13D)
IVVVGKGDT

SEQ ID NO: 79475 - protein, 9 aa, synthetic construct
  source 1..9: note = Seed: LVVVGAGDV (KRAS G13D)
IVVVGNGDA

SEQ ID NO: 79476 - protein, 9 aa, synthetic construct
  source 1..9: note = Seed: LVVVGAGDV (KRAS G13D)
IVVVGNGDI

SEQ ID NO: 79477 - protein, 9 aa, synthetic construct
  source 1..9: note = Seed: LVVVGAGDV (KRAS G13D)
IVVVGNGDL

SEQ ID NO: 79478 - protein, 9 aa, synthetic construct
  source 1..9: note = Seed: LVVVGAGDV (KRAS G13D)
IVVVGNGDS

SEQ ID NO: 79479 - protein, 9 aa, synthetic construct
  source 1..9: note = Seed: LVVVGAGDV (KRAS G13D)
IVVVGNGDV

SEQ ID NO: 79480 - protein, 9 aa, synthetic construct
  source 1..9: note = Seed: LVVVGAGDV (KRAS G13D)
IVVVGPGDI

SEQ ID NO: 79481 - protein, 9 aa, synthetic construct
  source 1..9: note = Seed: LVVVGAGDV (KRAS G13D)
IVVVGPGDL

SEQ ID NO: 79482 - protein, 9 aa, synthetic construct
  source 1..9: note = Seed: LVVVGAGDV (KRAS G13D)
IVVVGPGDV

SEQ ID NO: 79483 - protein, 9 aa, synthetic construct
  source 1..9: note = Seed: LVVVGAGDV (KRAS G13D)
IVVVGRGDA

SEQ ID NO: 79484 - protein, 9 aa, synthetic construct
  source 1..9: note = Seed: LVVVGAGDV (KRAS G13D)
IVVVGRGDG

SEQ ID NO: 79485 - protein, 9 aa, synthetic construct
  source 1..9: note = Seed: LVVVGAGDV (KRAS G13D)
IVVVGRGDH

SEQ ID NO: 79486 - protein, 9 aa, synthetic construct
  source 1..9: note = Seed: LVVVGAGDV (KRAS G13D)
IVVVGRGDI

SEQ ID NO: 79487 - protein, 9 aa, synthetic construct
  source 1..9: note = Seed: LVVVGAGDV (KRAS G13D)
IVVVGRGDK

SEQ ID NO: 79488 - protein, 9 aa, synthetic construct
  source 1..9: note = Seed: LVVVGAGDV (KRAS G13D)
IVVVGRGDL

SEQ ID NO: 79489 - protein, 9 aa, synthetic construct
  source 1..9: note = Seed: LVVVGAGDV (KRAS G13D)
IVVVGRGDM

SEQ ID NO: 79490 - protein, 9 aa, synthetic construct
  source 1..9: note = Seed: LVVVGAGDV (KRAS G13D)
IVVVGRGDN

SEQ ID NO: 79491 - protein, 9 aa, synthetic construct
  source 1..9: note = Seed: LVVVGAGDV (KRAS G13D)
IVVVGRGDQ

SEQ ID NO: 79492 - protein, 9 aa, synthetic construct
  source 1..9: note = Seed: LVVVGAGDV (KRAS G13D)
IVVVGRGDR

SEQ ID NO: 79493 - protein, 9 aa, synthetic construct
  source 1..9: note = Seed: LVVVGAGDV (KRAS G13D)
IVVVGRGDS

SEQ ID NO: 79494 - protein, 9 aa, synthetic construct
  source 1..9: note = Seed: LVVVGAGDV (KRAS G13D)
IVVVGRGDT

SEQ ID NO: 79495 - protein, 9 aa, synthetic construct
  source 1..9: note = Seed: LVVVGAGDV (KRAS G13D)
IVVVGRGDV

SEQ ID NO: 79496 - protein, 9 aa, synthetic construct
  source 1..9: note = Seed: LVVVGAGDV (KRAS G13D)
IVVVGSGDA

SEQ ID NO: 79497 - protein, 9 aa, synthetic construct
  source 1..9: note = Seed: LVVVGAGDV (KRAS G13D)
IVVVGSGDI

SEQ ID NO: 79498 - protein, 9 aa, synthetic construct
  source 1..9: note = Seed: LVVVGAGDV (KRAS G13D)
IVVVGSGDL

SEQ ID NO: 79499 - protein, 9 aa, synthetic construct
  source 1..9: note = Seed: LVVVGAGDV (KRAS G13D)
IVVVGSGDM

SEQ ID NO: 79500 - protein, 9 aa, synthetic construct
  source 1..9: note = Seed: LVVVGAGDV (KRAS G13D)
IVVVGSGDV

SEQ ID NO: 79501 - protein, 9 aa, synthetic construct
  source 1..9: note = Seed: LVVVGAGDV (KRAS G13D)
IVVVGTGDA

SEQ ID NO: 79502 - protein, 9 aa, synthetic construct
  source 1..9: note = Seed: LVVVGAGDV (KRAS G13D)
IVVVGTGDL

SEQ ID NO: 79503 - protein, 9 aa, synthetic construct
  source 1..9: note = Seed: LVVVGAGDV (KRAS G13D)
IVVVGTGDS

SEQ ID NO: 79504 - protein, 9 aa, synthetic construct
  source 1..9: note = Seed: LVVVGAGDV (KRAS G13D)
IVVWGAGDI

SEQ ID NO: 79505 - protein, 9 aa, synthetic construct
  source 1..9: note = Seed: LVVVGAGDV (KRAS G13D)
IVVWGAGDL

SEQ ID NO: 79506 - protein, 9 aa, synthetic construct
  source 1..9: note = Seed: LVVVGAGDV (KRAS G13D)
IVVWGAGDV

SEQ ID NO: 79507 - protein, 9 aa, synthetic construct
  source 1..9: note = Seed: LVVVGAGDV (KRAS G13D)
IVVWGGGDI

SEQ ID NO: 79508 - protein, 9 aa, synthetic construct
  source 1..9: note = Seed: LVVVGAGDV (KRAS G13D)
IVVWGGGDL

SEQ ID NO: 79509 - protein, 9 aa, synthetic construct
  source 1..9: note = Seed: LVVVGAGDV (KRAS G13D)
IVVWGGGDV

SEQ ID NO: 79510 - protein, 9 aa, synthetic construct
  source 1..9: note = Seed: LVVVGAGDV (KRAS G13D)
IVVWGNGDA

SEQ ID NO: 79511 - protein, 9 aa, synthetic construct
  source 1..9: note = Seed: LVVVGAGDV (KRAS G13D)
IVVWGNGDF

SEQ ID NO: 79512 - protein, 9 aa, synthetic construct
  source 1..9: note = Seed: LVVVGAGDV (KRAS G13D)
IVVWGNGDI

SEQ ID NO: 79513 - protein, 9 aa, synthetic construct
  source 1..9: note = Seed: LVVVGAGDV (KRAS G13D)
IVVWGNGDL

SEQ ID NO: 79514 - protein, 9 aa, synthetic construct
  source 1..9: note = Seed: LVVVGAGDV (KRAS G13D)
IVVWGNGDM

SEQ ID NO: 79515 - protein, 9 aa, synthetic construct
  source 1..9: note = Seed: LVVVGAGDV (KRAS G13D)
IVVWGNGDV

SEQ ID NO: 79516 - protein, 9 aa, synthetic construct
  source 1..9: note = Seed: LVVVGAGDV (KRAS G13D)
IVVWGSGDA

SEQ ID NO: 79517 - protein, 9 aa, synthetic construct
  source 1..9: note = Seed: LVVVGAGDV (KRAS G13D)
IVVWGSGDI

SEQ ID NO: 79518 - protein, 9 aa, synthetic construct
  source 1..9: note = Seed: LVVVGAGDV (KRAS G13D)
IVVWGSGDL

SEQ ID NO: 79519 - protein, 9 aa, synthetic construct
  source 1..9: note = Seed: LVVVGAGDV (KRAS G13D)
IVVWGSGDM

SEQ ID NO: 79520 - protein, 9 aa, synthetic construct
  source 1..9: note = Seed: LVVVGAGDV (KRAS G13D)
IVVWGSGDV

SEQ ID NO: 79521 - protein, 9 aa, synthetic construct
  source 1..9: note = Seed: LVVVGAGDV (KRAS G13D)
IVVWGTGDI

SEQ ID NO: 79522 - protein, 9 aa, synthetic construct
  source 1..9: note = Seed: LVVVGAGDV (KRAS G13D)
IVVWGTGDL

SEQ ID NO: 79523 - protein, 9 aa, synthetic construct
  source 1..9: note = Seed: LVVVGAGDV (KRAS G13D)
IVVWGTGDV

SEQ ID NO: 79524 - protein, 9 aa, synthetic construct
  source 1..9: note = Seed: LVVVGAGDV (KRAS G13D)
IVVYGAGDA

SEQ ID NO: 79525 - protein, 9 aa, synthetic construct
  source 1..9: note = Seed: LVVVGAGDV (KRAS G13D)
IVVYGAGDI

SEQ ID NO: 79526 - protein, 9 aa, synthetic construct
  source 1..9: note = Seed: LVVVGAGDV (KRAS G13D)
IVVYGAGDL

SEQ ID NO: 79527 - protein, 9 aa, synthetic construct
  source 1..9: note = Seed: LVVVGAGDV (KRAS G13D)
IVVYGAGDM

SEQ ID NO: 79528 - protein, 9 aa, synthetic construct
  source 1..9: note = Seed: LVVVGAGDV (KRAS G13D)
IVVYGAGDS

SEQ ID NO: 79529 - protein, 9 aa, synthetic construct
  source 1..9: note = Seed: LVVVGAGDV (KRAS G13D)
IVVYGAGDT

SEQ ID NO: 79530 - protein, 9 aa, synthetic construct
  source 1..9: note = Seed: LVVVGAGDV (KRAS G13D)
IVVYGAGDV

SEQ ID NO: 79531 - protein, 9 aa, synthetic construct
  source 1..9: note = Seed: LVVVGAGDV (KRAS G13D)
IVVYGDGDI

SEQ ID NO: 79532 - protein, 9 aa, synthetic construct
  source 1..9: note = Seed: LVVVGAGDV (KRAS G13D)
IVVYGDGDL

SEQ ID NO: 79533 - protein, 9 aa, synthetic construct
  source 1..9: note = Seed: LVVVGAGDV (KRAS G13D)
IVVYGDGDV

SEQ ID NO: 79534 - protein, 9 aa, synthetic construct
  source 1..9: note = Seed: LVVVGAGDV (KRAS G13D)
IVVYGGGDA

SEQ ID NO: 79535 - protein, 9 aa, synthetic construct
  source 1..9: note = Seed: LVVVGAGDV (KRAS G13D)
IVVYGGGDI

SEQ ID NO: 79536 - protein, 9 aa, synthetic construct
  source 1..9: note = Seed: LVVVGAGDV (KRAS G13D)
IVVYGGGDL

SEQ ID NO: 79537 - protein, 9 aa, synthetic construct
  source 1..9: note = Seed: LVVVGAGDV (KRAS G13D)
IVVYGGGDM

SEQ ID NO: 79538 - protein, 9 aa, synthetic construct
  source 1..9: note = Seed: LVVVGAGDV (KRAS G13D)
IVVYGGGDS

SEQ ID NO: 79539 - protein, 9 aa, synthetic construct
  source 1..9: note = Seed: LVVVGAGDV (KRAS G13D)
IVVYGGGDT

SEQ ID NO: 79540 - protein, 9 aa, synthetic construct
  source 1..9: note = Seed: LVVVGAGDV (KRAS G13D)
IVVYGGGDV

SEQ ID NO: 79541 - protein, 9 aa, synthetic construct
  source 1..9: note = Seed: LVVVGAGDV (KRAS G13D)
IVVYGIGDL

SEQ ID NO: 79542 - protein, 9 aa, synthetic construct
  source 1..9: note = Seed: LVVVGAGDV (KRAS G13D)
IVVYGNGDA

SEQ ID NO: 79543 - protein, 9 aa, synthetic construct
  source 1..9: note = Seed: LVVVGAGDV (KRAS G13D)
IVVYGNGDF

SEQ ID NO: 79544 - protein, 9 aa, synthetic construct
  source 1..9: note = Seed: LVVVGAGDV (KRAS G13D)
IVVYGNGDG

SEQ ID NO: 79545 - protein, 9 aa, synthetic construct
  source 1..9: note = Seed: LVVVGAGDV (KRAS G13D)
IVVYGNGDH

SEQ ID NO: 79546 - protein, 9 aa, synthetic construct
  source 1..9: note = Seed: LVVVGAGDV (KRAS G13D)
IVVYGNGDI

SEQ ID NO: 79547 - protein, 9 aa, synthetic construct
  source 1..9: note = Seed: LVVVGAGDV (KRAS G13D)
IVVYGNGDL

SEQ ID NO: 79548 - protein, 9 aa, synthetic construct
  source 1..9: note = Seed: LVVVGAGDV (KRAS G13D)
IVVYGNGDM

SEQ ID NO: 79549 - protein, 9 aa, synthetic construct
  source 1..9: note = Seed: LVVVGAGDV (KRAS G13D)
IVVYGNGDS

SEQ ID NO: 79550 - protein, 9 aa, synthetic construct
  source 1..9: note = Seed: LVVVGAGDV (KRAS G13D)
IVVYGNGDT

SEQ ID NO: 79551 - protein, 9 aa, synthetic construct
  source 1..9: note = Seed: LVVVGAGDV (KRAS G13D)
IVVYGNGDV

SEQ ID NO: 79552 - protein, 9 aa, synthetic construct
  source 1..9: note = Seed: LVVVGAGDV (KRAS G13D)
IVVYGNGDY

SEQ ID NO: 79553 - protein, 9 aa, synthetic construct
  source 1..9: note = Seed: LVVVGAGDV (KRAS G13D)
IVVYGPGDI

SEQ ID NO: 79554 - protein, 9 aa, synthetic construct
  source 1..9: note = Seed: LVVVGAGDV (KRAS G13D)
IVVYGPGDL

SEQ ID NO: 79555 - protein, 9 aa, synthetic construct
  source 1..9: note = Seed: LVVVGAGDV (KRAS G13D)
IVVYGPGDV

SEQ ID NO: 79556 - protein, 9 aa, synthetic construct
  source 1..9: note = Seed: LVVVGAGDV (KRAS G13D)
IVVYGSGDA

SEQ ID NO: 79557 - protein, 9 aa, synthetic construct
  source 1..9: note = Seed: LVVVGAGDV (KRAS G13D)
IVVYGSGDF

SEQ ID NO: 79558 - protein, 9 aa, synthetic construct
  source 1..9: note = Seed: LVVVGAGDV (KRAS G13D)
IVVYGSGDG

SEQ ID NO: 79559 - protein, 9 aa, synthetic construct
  source 1..9: note = Seed: LVVVGAGDV (KRAS G13D)
IVVYGSGDH

SEQ ID NO: 79560 - protein, 9 aa, synthetic construct
  source 1..9: note = Seed: LVVVGAGDV (KRAS G13D)
IVVYGSGDI

SEQ ID NO: 79561 - protein, 9 aa, synthetic construct
  source 1..9: note = Seed: LVVVGAGDV (KRAS G13D)
IVVYGSGDL

SEQ ID NO: 79562 - protein, 9 aa, synthetic construct
  source 1..9: note = Seed: LVVVGAGDV (KRAS G13D)
IVVYGSGDM

SEQ ID NO: 79563 - protein, 9 aa, synthetic construct
  source 1..9: note = Seed: LVVVGAGDV (KRAS G13D)
IVVYGSGDS

SEQ ID NO: 79564 - protein, 9 aa, synthetic construct
  source 1..9: note = Seed: LVVVGAGDV (KRAS G13D)
IVVYGSGDT

SEQ ID NO: 79565 - protein, 9 aa, synthetic construct
  source 1..9: note = Seed: LVVVGAGDV (KRAS G13D)
IVVYGSGDV

SEQ ID NO: 79566 - protein, 9 aa, synthetic construct
  source 1..9: note = Seed: LVVVGAGDV (KRAS G13D)
IVVYGSGDY

SEQ ID NO: 79567 - protein, 9 aa, synthetic construct
  source 1..9: note = Seed: LVVVGAGDV (KRAS G13D)
IVVYGTGDA

SEQ ID NO: 79568 - protein, 9 aa, synthetic construct
  source 1..9: note = Seed: LVVVGAGDV (KRAS G13D)
IVVYGTGDI

SEQ ID NO: 79569 - protein, 9 aa, synthetic construct
  source 1..9: note = Seed: LVVVGAGDV (KRAS G13D)
IVVYGTGDL

SEQ ID NO: 79570 - protein, 9 aa, synthetic construct
  source 1..9: note = Seed: LVVVGAGDV (KRAS G13D)
IVVYGTGDM

SEQ ID NO: 79571 - protein, 9 aa, synthetic construct
  source 1..9: note = Seed: LVVVGAGDV (KRAS G13D)
IVVYGTGDT

SEQ ID NO: 79572 - protein, 9 aa, synthetic construct
  source 1..9: note = Seed: LVVVGAGDV (KRAS G13D)
IVVYGTGDV

SEQ ID NO: 79573 - protein, 9 aa, synthetic construct
  source 1..9: note = Seed: LVVVGAGDV (KRAS G13D)
IVVYGVGDA

SEQ ID NO: 79574 - protein, 9 aa, synthetic construct
  source 1..9: note = Seed: LVVVGAGDV (KRAS G13D)
IVVYGVGDI

SEQ ID NO: 79575 - protein, 9 aa, synthetic construct
  source 1..9: note = Seed: LVVVGAGDV (KRAS G13D)
IVVYGVGDL

SEQ ID NO: 79576 - protein, 9 aa, synthetic construct
  source 1..9: note = Seed: LVVVGAGDV (KRAS G13D)
IVVYGVGDV

SEQ ID NO: 79577 - protein, 9 aa, synthetic construct
  source 1..9: note = Seed: LVVVGAGDV (KRAS G13D)
LVVAGAGDA

SEQ ID NO: 79578 - protein, 9 aa, synthetic construct
  source 1..9: note = Seed: LVVVGAGDV (KRAS G13D)
LVVAGAGDC

SEQ ID NO: 79579 - protein, 9 aa, synthetic construct
  source 1..9: note = Seed: LVVVGAGDV (KRAS G13D)
LVVAGAGDG

SEQ ID NO: 79580 - protein, 9 aa, synthetic construct
  source 1..9: note = Seed: LVVVGAGDV (KRAS G13D)
LVVAGAGDI

SEQ ID NO: 79581 - protein, 9 aa, synthetic construct
  source 1..9: note = Seed: LVVVGAGDV (KRAS G13D)
LVVAGAGDL

SEQ ID NO: 79582 - protein, 9 aa, synthetic construct
  source 1..9: note = Seed: LVVVGAGDV (KRAS G13D)
LVVAGAGDM

SEQ ID NO: 79583 - protein, 9 aa, synthetic construct
  source 1..9: note = Seed: LVVVGAGDV (KRAS G13D)
LVVAGAGDN

SEQ ID NO: 79584 - protein, 9 aa, synthetic construct
  source 1..9: note = Seed: LVVVGAGDV (KRAS G13D)
LVVAGAGDS

SEQ ID NO: 79585 - protein, 9 aa, synthetic construct
  source 1..9: note = Seed: LVVVGAGDV (KRAS G13D)
LVVAGAGDT

SEQ ID NO: 79586 - protein, 9 aa, synthetic construct
  source 1..9: note = Seed: LVVVGAGDV (KRAS G13D)
LVVAGAGDV

SEQ ID NO: 79587 - protein, 9 aa, synthetic construct
  source 1..9: note = Seed: LVVVGAGDV (KRAS G13D)
LVVAGFGDI

SEQ ID NO: 79588 - protein, 9 aa, synthetic construct
  source 1..9: note = Seed: LVVVGAGDV (KRAS G13D)
LVVAGFGDL

SEQ ID NO: 79589 - protein, 9 aa, synthetic construct
  source 1..9: note = Seed: LVVVGAGDV (KRAS G13D)
LVVAGFGDV

SEQ ID NO: 79590 - protein, 9 aa, synthetic construct
  source 1..9: note = Seed: LVVVGAGDV (KRAS G13D)
LVVAGGGDA

SEQ ID NO: 79591 - protein, 9 aa, synthetic construct
  source 1..9: note = Seed: LVVVGAGDV (KRAS G13D)
LVVAGGGDI

SEQ ID NO: 79592 - protein, 9 aa, synthetic construct
  source 1..9: note = Seed: LVVVGAGDV (KRAS G13D)
LVVAGGGDL

SEQ ID NO: 79593 - protein, 9 aa, synthetic construct
  source 1..9: note = Seed: LVVVGAGDV (KRAS G13D)
LVVAGGGDM

SEQ ID NO: 79594 - protein, 9 aa, synthetic construct
  source 1..9: note = Seed: LVVVGAGDV (KRAS G13D)
LVVAGGGDS

SEQ ID NO: 79595 - protein, 9 aa, synthetic construct
  source 1..9: note = Seed: LVVVGAGDV (KRAS G13D)
LVVAGGGDT

SEQ ID NO: 79596 - protein, 9 aa, synthetic construct
  source 1..9: note = Seed: LVVVGAGDV (KRAS G13D)
LVVAGGGDV

SEQ ID NO: 79597 - protein, 9 aa, synthetic construct
  source 1..9: note = Seed: LVVVGAGDV (KRAS G13D)
LVVAGKGDA

SEQ ID NO: 79598 - protein, 9 aa, synthetic construct
  source 1..9: note = Seed: LVVVGAGDV (KRAS G13D)
LVVAGKGDS

SEQ ID NO: 79599 - protein, 9 aa, synthetic construct
  source 1..9: note = Seed: LVVVGAGDV (KRAS G13D)
LVVAGNGDA

SEQ ID NO: 79600 - protein, 9 aa, synthetic construct
  source 1..9: note = Seed: LVVVGAGDV (KRAS G13D)
LVVAGNGDI

SEQ ID NO: 79601 - protein, 9 aa, synthetic construct
  source 1..9: note = Seed: LVVVGAGDV (KRAS G13D)
LVVAGNGDL

SEQ ID NO: 79602 - protein, 9 aa, synthetic construct
  source 1..9: note = Seed: LVVVGAGDV (KRAS G13D)
LVVAGNGDM

SEQ ID NO: 79603 - protein, 9 aa, synthetic construct
  source 1..9: note = Seed: LVVVGAGDV (KRAS G13D)
LVVAGNGDS

SEQ ID NO: 79604 - protein, 9 aa, synthetic construct
  source 1..9: note = Seed: LVVVGAGDV (KRAS G13D)
LVVAGNGDV

SEQ ID NO: 79605 - protein, 9 aa, synthetic construct
  source 1..9: note = Seed: LVVVGAGDV (KRAS G13D)
LVVAGPGDA

SEQ ID NO: 79606 - protein, 9 aa, synthetic construct
  source 1..9: note = Seed: LVVVGAGDV (KRAS G13D)
LVVAGPGDI

SEQ ID NO: 79607 - protein, 9 aa, synthetic construct
  source 1..9: note = Seed: LVVVGAGDV (KRAS G13D)
LVVAGPGDL

SEQ ID NO: 79608 - protein, 9 aa, synthetic construct
  source 1..9: note = Seed: LVVVGAGDV (KRAS G13D)
LVVAGPGDV

SEQ ID NO: 79609 - protein, 9 aa, synthetic construct
  source 1..9: note = Seed: LVVVGAGDV (KRAS G13D)
LVVAGRGDA

SEQ ID NO: 79610 - protein, 9 aa, synthetic construct
  source 1..9: note = Seed: LVVVGAGDV (KRAS G13D)
LVVAGRGDH

SEQ ID NO: 79611 - protein, 9 aa, synthetic construct
  source 1..9: note = Seed: LVVVGAGDV (KRAS G13D)
LVVAGRGDQ

SEQ ID NO: 79612 - protein, 9 aa, synthetic construct
  source 1..9: note = Seed: LVVVGAGDV (KRAS G13D)
LVVAGRGDS

SEQ ID NO: 79613 - protein, 9 aa, synthetic construct
  source 1..9: note = Seed: LVVVGAGDV (KRAS G13D)
LVVAGSGDA

SEQ ID NO: 79614 - protein, 9 aa, synthetic construct
  source 1..9: note = Seed: LVVVGAGDV (KRAS G13D)
LVVAGSGDI

SEQ ID NO: 79615 - protein, 9 aa, synthetic construct
  source 1..9: note = Seed: LVVVGAGDV (KRAS G13D)
LVVAGSGDL

SEQ ID NO: 79616 - protein, 9 aa, synthetic construct
  source 1..9: note = Seed: LVVVGAGDV (KRAS G13D)
LVVAGSGDM

SEQ ID NO: 79617 - protein, 9 aa, synthetic construct
  source 1..9: note = Seed: LVVVGAGDV (KRAS G13D)
LVVAGSGDS

SEQ ID NO: 79618 - protein, 9 aa, synthetic construct
  source 1..9: note = Seed: LVVVGAGDV (KRAS G13D)
LVVAGSGDT

SEQ ID NO: 79619 - protein, 9 aa, synthetic construct
  source 1..9: note = Seed: LVVVGAGDV (KRAS G13D)
LVVAGSGDV

SEQ ID NO: 79620 - protein, 9 aa, synthetic construct
  source 1..9: note = Seed: LVVVGAGDV (KRAS G13D)
LVVAGTGDA

SEQ ID NO: 79621 - protein, 9 aa, synthetic construct
  source 1..9: note = Seed: LVVVGAGDV (KRAS G13D)
LVVAGTGDI

SEQ ID NO: 79622 - protein, 9 aa, synthetic construct
  source 1..9: note = Seed: LVVVGAGDV (KRAS G13D)
LVVAGTGDL

SEQ ID NO: 79623 - protein, 9 aa, synthetic construct
  source 1..9: note = Seed: LVVVGAGDV (KRAS G13D)
LVVAGTGDV

SEQ ID NO: 79624 - protein, 9 aa, synthetic construct
  source 1..9: note = Seed: LVVVGAGDV (KRAS G13D)
LVVAGVGDA

SEQ ID NO: 79625 - protein, 9 aa, synthetic construct
  source 1..9: note = Seed: LVVVGAGDV (KRAS G13D)
LVVAGVGDL

SEQ ID NO: 79626 - protein, 9 aa, synthetic construct
  source 1..9: note = Seed: LVVVGAGDV (KRAS G13D)
LVVAGVGDN

SEQ ID NO: 79627 - protein, 9 aa, synthetic construct
  source 1..9: note = Seed: LVVVGAGDV (KRAS G13D)
LVVAGVGDV

SEQ ID NO: 79628 - protein, 9 aa, synthetic construct
  source 1..9: note = Seed: LVVVGAGDV (KRAS G13D)
LVVDGAGDI

SEQ ID NO: 79629 - protein, 9 aa, synthetic construct
  source 1..9: note = Seed: LVVVGAGDV (KRAS G13D)
LVVEGAGDL

SEQ ID NO: 79630 - protein, 9 aa, synthetic construct
  source 1..9: note = Seed: LVVVGAGDV (KRAS G13D)
LVVEGFGDI

SEQ ID NO: 79631 - protein, 9 aa, synthetic construct
  source 1..9: note = Seed: LVVVGAGDV (KRAS G13D)
LVVEGFGDL

SEQ ID NO: 79632 - protein, 9 aa, synthetic construct
  source 1..9: note = Seed: LVVVGAGDV (KRAS G13D)
LVVEGFGDV

SEQ ID NO: 79633 - protein, 9 aa, synthetic construct
  source 1..9: note = Seed: LVVVGAGDV (KRAS G13D)
LVVFGAGDA

SEQ ID NO: 79634 - protein, 9 aa, synthetic construct
  source 1..9: note = Seed: LVVVGAGDV (KRAS G13D)
LVVFGAGDI

SEQ ID NO: 79635 - protein, 9 aa, synthetic construct
  source 1..9: note = Seed: LVVVGAGDV (KRAS G13D)
LVVFGAGDL

SEQ ID NO: 79636 - protein, 9 aa, synthetic construct
  source 1..9: note = Seed: LVVVGAGDV (KRAS G13D)
LVVFGAGDV

SEQ ID NO: 79637 - protein, 9 aa, synthetic construct
  source 1..9: note = Seed: LVVVGAGDV (KRAS G13D)
LVVFGGGDA

SEQ ID NO: 79638 - protein, 9 aa, synthetic construct
  source 1..9: note = Seed: LVVVGAGDV (KRAS G13D)
LVVFGGGDI

SEQ ID NO: 79639 - protein, 9 aa, synthetic construct
  source 1..9: note = Seed: LVVVGAGDV (KRAS G13D)
LVVFGGGDL

SEQ ID NO: 79640 - protein, 9 aa, synthetic construct
  source 1..9: note = Seed: LVVVGAGDV (KRAS G13D)
LVVFGGGDM

SEQ ID NO: 79641 - protein, 9 aa, synthetic construct
  source 1..9: note = Seed: LVVVGAGDV (KRAS G13D)
LVVFGGGDV

SEQ ID NO: 79642 - protein, 9 aa, synthetic construct
  source 1..9: note = Seed: LVVVGAGDV (KRAS G13D)
LVVFGKGDA

SEQ ID NO: 79643 - protein, 9 aa, synthetic construct
  source 1..9: note = Seed: LVVVGAGDV (KRAS G13D)
LVVFGKGDH

SEQ ID NO: 79644 - protein, 9 aa, synthetic construct
  source 1..9: note = Seed: LVVVGAGDV (KRAS G13D)
LVVFGKGDS

SEQ ID NO: 79645 - protein, 9 aa, synthetic construct
  source 1..9: note = Seed: LVVVGAGDV (KRAS G13D)
LVVFGNGDA

SEQ ID NO: 79646 - protein, 9 aa, synthetic construct
  source 1..9: note = Seed: LVVVGAGDV (KRAS G13D)
LVVFGNGDF

SEQ ID NO: 79647 - protein, 9 aa, synthetic construct
  source 1..9: note = Seed: LVVVGAGDV (KRAS G13D)
LVVFGNGDI

SEQ ID NO: 79648 - protein, 9 aa, synthetic construct
  source 1..9: note = Seed: LVVVGAGDV (KRAS G13D)
LVVFGNGDL

SEQ ID NO: 79649 - protein, 9 aa, synthetic construct
  source 1..9: note = Seed: LVVVGAGDV (KRAS G13D)
LVVFGNGDM

SEQ ID NO: 79650 - protein, 9 aa, synthetic construct
  source 1..9: note = Seed: LVVVGAGDV (KRAS G13D)
LVVFGNGDS

SEQ ID NO: 79651 - protein, 9 aa, synthetic construct
  source 1..9: note = Seed: LVVVGAGDV (KRAS G13D)
LVVFGNGDT

SEQ ID NO: 79652 - protein, 9 aa, synthetic construct
  source 1..9: note = Seed: LVVVGAGDV (KRAS G13D)
LVVFGNGDV

SEQ ID NO: 79653 - protein, 9 aa, synthetic construct
  source 1..9: note = Seed: LVVVGAGDV (KRAS G13D)
LVVFGRGDA

SEQ ID NO: 79654 - protein, 9 aa, synthetic construct
  source 1..9: note = Seed: LVVVGAGDV (KRAS G13D)
LVVFGRGDG

SEQ ID NO: 79655 - protein, 9 aa, synthetic construct
  source 1..9: note = Seed: LVVVGAGDV (KRAS G13D)
LVVFGRGDH

SEQ ID NO: 79656 - protein, 9 aa, synthetic construct
  source 1..9: note = Seed: LVVVGAGDV (KRAS G13D)
LVVFGRGDQ

SEQ ID NO: 79657 - protein, 9 aa, synthetic construct
  source 1..9: note = Seed: LVVVGAGDV (KRAS G13D)
LVVFGRGDS

SEQ ID NO: 79658 - protein, 9 aa, synthetic construct
  source 1..9: note = Seed: LVVVGAGDV (KRAS G13D)
LVVFGSGDA

SEQ ID NO: 79659 - protein, 9 aa, synthetic construct
  source 1..9: note = Seed: LVVVGAGDV (KRAS G13D)
LVVFGSGDF

SEQ ID NO: 79660 - protein, 9 aa, synthetic construct
  source 1..9: note = Seed: LVVVGAGDV (KRAS G13D)
LVVFGSGDI

SEQ ID NO: 79661 - protein, 9 aa, synthetic construct
  source 1..9: note = Seed: LVVVGAGDV (KRAS G13D)
LVVFGSGDL

SEQ ID NO: 79662 - protein, 9 aa, synthetic construct
  source 1..9: note = Seed: LVVVGAGDV (KRAS G13D)
LVVFGSGDM

SEQ ID NO: 79663 - protein, 9 aa, synthetic construct
  source 1..9: note = Seed: LVVVGAGDV (KRAS G13D)
LVVFGSGDS

SEQ ID NO: 79664 - protein, 9 aa, synthetic construct
  source 1..9: note = Seed: LVVVGAGDV (KRAS G13D)
LVVFGSGDT

SEQ ID NO: 79665 - protein, 9 aa, synthetic construct
  source 1..9: note = Seed: LVVVGAGDV (KRAS G13D)
LVVFGSGDV

SEQ ID NO: 79666 - protein, 9 aa, synthetic construct
  source 1..9: note = Seed: LVVVGAGDV (KRAS G13D)
LVVFGTGDA

SEQ ID NO: 79667 - protein, 9 aa, synthetic construct
  source 1..9: note = Seed: LVVVGAGDV (KRAS G13D)
LVVFGTGDI

SEQ ID NO: 79668 - protein, 9 aa, synthetic construct
  source 1..9: note = Seed: LVVVGAGDV (KRAS G13D)
LVVFGTGDL

SEQ ID NO: 79669 - protein, 9 aa, synthetic construct
  source 1..9: note = Seed: LVVVGAGDV (KRAS G13D)
LVVFGTGDM

SEQ ID NO: 79670 - protein, 9 aa, synthetic construct
  source 1..9: note = Seed: LVVVGAGDV (KRAS G13D)
LVVFGTGDV

SEQ ID NO: 79671 - protein, 9 aa, synthetic construct
  source 1..9: note = Seed: LVVVGAGDV (KRAS G13D)
LVVGGAGDA

SEQ ID NO: 79672 - protein, 9 aa, synthetic construct
  source 1..9: note = Seed: LVVVGAGDV (KRAS G13D)
LVVGGAGDI

SEQ ID NO: 79673 - protein, 9 aa, synthetic construct
  source 1..9: note = Seed: LVVVGAGDV (KRAS G13D)
LVVGGAGDL

SEQ ID NO: 79674 - protein, 9 aa, synthetic construct
  source 1..9: note = Seed: LVVVGAGDV (KRAS G13D)
LVVGGAGDV

SEQ ID NO: 79675 - protein, 9 aa, synthetic construct
  source 1..9: note = Seed: LVVVGAGDV (KRAS G13D)
LVVGGSGDI

SEQ ID NO: 79676 - protein, 9 aa, synthetic construct
  source 1..9: note = Seed: LVVVGAGDV (KRAS G13D)
LVVGGSGDL

SEQ ID NO: 79677 - protein, 9 aa, synthetic construct
  source 1..9: note = Seed: LVVVGAGDV (KRAS G13D)
LVVGGSGDV

SEQ ID NO: 79678 - protein, 9 aa, synthetic construct
  source 1..9: note = Seed: LVVVGAGDV (KRAS G13D)
LVVHGFGDI

SEQ ID NO: 79679 - protein, 9 aa, synthetic construct
  source 1..9: note = Seed: LVVVGAGDV (KRAS G13D)
LVVHGFGDL

SEQ ID NO: 79680 - protein, 9 aa, synthetic construct
  source 1..9: note = Seed: LVVVGAGDV (KRAS G13D)
LVVHGFGDV

SEQ ID NO: 79681 - protein, 9 aa, synthetic construct
  source 1..9: note = Seed: LVVVGAGDV (KRAS G13D)
LVVIGAGDA

SEQ ID NO: 79682 - protein, 9 aa, synthetic construct
  source 1..9: note = Seed: LVVVGAGDV (KRAS G13D)
LVVIGAGDI

SEQ ID NO: 79683 - protein, 9 aa, synthetic construct
  source 1..9: note = Seed: LVVVGAGDV (KRAS G13D)
LVVIGAGDL

SEQ ID NO: 79684 - protein, 9 aa, synthetic construct
  source 1..9: note = Seed: LVVVGAGDV (KRAS G13D)
LVVIGAGDM

SEQ ID NO: 79685 - protein, 9 aa, synthetic construct
  source 1..9: note = Seed: LVVVGAGDV (KRAS G13D)
LVVIGAGDN

SEQ ID NO: 79686 - protein, 9 aa, synthetic construct
  source 1..9: note = Seed: LVVVGAGDV (KRAS G13D)
LVVIGAGDS

SEQ ID NO: 79687 - protein, 9 aa, synthetic construct
  source 1..9: note = Seed: LVVVGAGDV (KRAS G13D)
LVVIGAGDT

SEQ ID NO: 79688 - protein, 9 aa, synthetic construct
  source 1..9: note = Seed: LVVVGAGDV (KRAS G13D)
LVVIGAGDV

SEQ ID NO: 79689 - protein, 9 aa, synthetic construct
  source 1..9: note = Seed: LVVVGAGDV (KRAS G13D)
LVVIGFGDV

SEQ ID NO: 79690 - protein, 9 aa, synthetic construct
  source 1..9: note = Seed: LVVVGAGDV (KRAS G13D)
LVVIGGGDA

SEQ ID NO: 79691 - protein, 9 aa, synthetic construct
  source 1..9: note = Seed: LVVVGAGDV (KRAS G13D)
LVVIGGGDI

SEQ ID NO: 79692 - protein, 9 aa, synthetic construct
  source 1..9: note = Seed: LVVVGAGDV (KRAS G13D)
LVVIGGGDL

SEQ ID NO: 79693 - protein, 9 aa, synthetic construct
  source 1..9: note = Seed: LVVVGAGDV (KRAS G13D)
LVVIGGGDM

SEQ ID NO: 79694 - protein, 9 aa, synthetic construct
  source 1..9: note = Seed: LVVVGAGDV (KRAS G13D)
LVVIGGGDS

SEQ ID NO: 79695 - protein, 9 aa, synthetic construct
  source 1..9: note = Seed: LVVVGAGDV (KRAS G13D)
LVVIGGGDT

SEQ ID NO: 79696 - protein, 9 aa, synthetic construct
  source 1..9: note = Seed: LVVVGAGDV (KRAS G13D)
LVVIGGGDV

SEQ ID NO: 79697 - protein, 9 aa, synthetic construct
  source 1..9: note = Seed: LVVVGAGDV (KRAS G13D)
LVVIGKGDA

SEQ ID NO: 79698 - protein, 9 aa, synthetic construct
  source 1..9: note = Seed: LVVVGAGDV (KRAS G13D)
LVVIGKGDG

SEQ ID NO: 79699 - protein, 9 aa, synthetic construct
  source 1..9: note = Seed: LVVVGAGDV (KRAS G13D)
LVVIGKGDH

SEQ ID NO: 79700 - protein, 9 aa, synthetic construct
  source 1..9: note = Seed: LVVVGAGDV (KRAS G13D)
LVVIGKGDK

SEQ ID NO: 79701 - protein, 9 aa, synthetic construct
  source 1..9: note = Seed: LVVVGAGDV (KRAS G13D)
LVVIGKGDM

SEQ ID NO: 79702 - protein, 9 aa, synthetic construct
  source 1..9: note = Seed: LVVVGAGDV (KRAS G13D)
LVVIGKGDQ

SEQ ID NO: 79703 - protein, 9 aa, synthetic construct
  source 1..9: note = Seed: LVVVGAGDV (KRAS G13D)
LVVIGKGDR

SEQ ID NO: 79704 - protein, 9 aa, synthetic construct
  source 1..9: note = Seed: LVVVGAGDV (KRAS G13D)
LVVIGKGDS

SEQ ID NO: 79705 - protein, 9 aa, synthetic construct
  source 1..9: note = Seed: LVVVGAGDV (KRAS G13D)
LVVIGKGDT

SEQ ID NO: 79706 - protein, 9 aa, synthetic construct
  source 1..9: note = Seed: LVVVGAGDV (KRAS G13D)
LVVIGKGDV

SEQ ID NO: 79707 - protein, 9 aa, synthetic construct
  source 1..9: note = Seed: LVVVGAGDV (KRAS G13D)
LVVIGMGDA

SEQ ID NO: 79708 - protein, 9 aa, synthetic construct
  source 1..9: note = Seed: LVVVGAGDV (KRAS G13D)
LVVIGNGDA

SEQ ID NO: 79709 - protein, 9 aa, synthetic construct
  source 1..9: note = Seed: LVVVGAGDV (KRAS G13D)
LVVIGNGDI

SEQ ID NO: 79710 - protein, 9 aa, synthetic construct
  source 1..9: note = Seed: LVVVGAGDV (KRAS G13D)
LVVIGNGDL

SEQ ID NO: 79711 - protein, 9 aa, synthetic construct
  source 1..9: note = Seed: LVVVGAGDV (KRAS G13D)
LVVIGNGDM

SEQ ID NO: 79712 - protein, 9 aa, synthetic construct
  source 1..9: note = Seed: LVVVGAGDV (KRAS G13D)
LVVIGNGDS

SEQ ID NO: 79713 - protein, 9 aa, synthetic construct
  source 1..9: note = Seed: LVVVGAGDV (KRAS G13D)
LVVIGNGDV

SEQ ID NO: 79714 - protein, 9 aa, synthetic construct
  source 1..9: note = Seed: LVVVGAGDV (KRAS G13D)
LVVIGPGDA

SEQ ID NO: 79715 - protein, 9 aa, synthetic construct
  source 1..9: note = Seed: LVVVGAGDV (KRAS G13D)
LVVIGPGDI

SEQ ID NO: 79716 - protein, 9 aa, synthetic construct
  source 1..9: note = Seed: LVVVGAGDV (KRAS G13D)
LVVIGPGDL

SEQ ID NO: 79717 - protein, 9 aa, synthetic construct
  source 1..9: note = Seed: LVVVGAGDV (KRAS G13D)
LVVIGPGDM

SEQ ID NO: 79718 - protein, 9 aa, synthetic construct
  source 1..9: note = Seed: LVVVGAGDV (KRAS G13D)
LVVIGPGDS

SEQ ID NO: 79719 - protein, 9 aa, synthetic construct
  source 1..9: note = Seed: LVVVGAGDV (KRAS G13D)
LVVIGPGDV

SEQ ID NO: 79720 - protein, 9 aa, synthetic construct
  source 1..9: note = Seed: LVVVGAGDV (KRAS G13D)
LVVIGRGDA

SEQ ID NO: 79721 - protein, 9 aa, synthetic construct
  source 1..9: note = Seed: LVVVGAGDV (KRAS G13D)
LVVIGRGDG

SEQ ID NO: 79722 - protein, 9 aa, synthetic construct
  source 1..9: note = Seed: LVVVGAGDV (KRAS G13D)
LVVIGRGDH

SEQ ID NO: 79723 - protein, 9 aa, synthetic construct
  source 1..9: note = Seed: LVVVGAGDV (KRAS G13D)
LVVIGRGDI

SEQ ID NO: 79724 - protein, 9 aa, synthetic construct
  source 1..9: note = Seed: LVVVGAGDV (KRAS G13D)
LVVIGRGDK

SEQ ID NO: 79725 - protein, 9 aa, synthetic construct
  source 1..9: note = Seed: LVVVGAGDV (KRAS G13D)
LVVIGRGDL

SEQ ID NO: 79726 - protein, 9 aa, synthetic construct
  source 1..9: note = Seed: LVVVGAGDV (KRAS G13D)
LVVIGRGDM

SEQ ID NO: 79727 - protein, 9 aa, synthetic construct
  source 1..9: note = Seed: LVVVGAGDV (KRAS G13D)
LVVIGRGDN

SEQ ID NO: 79728 - protein, 9 aa, synthetic construct
  source 1..9: note = Seed: LVVVGAGDV (KRAS G13D)
LVVIGRGDP

SEQ ID NO: 79729 - protein, 9 aa, synthetic construct
  source 1..9: note = Seed: LVVVGAGDV (KRAS G13D)
LVVIGRGDQ

SEQ ID NO: 79730 - protein, 9 aa, synthetic construct
  source 1..9: note = Seed: LVVVGAGDV (KRAS G13D)
LVVIGRGDR

SEQ ID NO: 79731 - protein, 9 aa, synthetic construct
  source 1..9: note = Seed: LVVVGAGDV (KRAS G13D)
LVVIGRGDS

SEQ ID NO: 79732 - protein, 9 aa, synthetic construct
  source 1..9: note = Seed: LVVVGAGDV (KRAS G13D)
LVVIGRGDT

SEQ ID NO: 79733 - protein, 9 aa, synthetic construct
  source 1..9: note = Seed: LVVVGAGDV (KRAS G13D)
LVVIGRGDV

SEQ ID NO: 79734 - protein, 9 aa, synthetic construct
  source 1..9: note = Seed: LVVVGAGDV (KRAS G13D)
LVVIGRGDY

SEQ ID NO: 79735 - protein, 9 aa, synthetic construct
  source 1..9: note = Seed: LVVVGAGDV (KRAS G13D)
LVVIGSGDA

SEQ ID NO: 79736 - protein, 9 aa, synthetic construct
  source 1..9: note = Seed: LVVVGAGDV (KRAS G13D)
LVVIGSGDI

SEQ ID NO: 79737 - protein, 9 aa, synthetic construct
  source 1..9: note = Seed: LVVVGAGDV (KRAS G13D)
LVVIGSGDL

SEQ ID NO: 79738 - protein, 9 aa, synthetic construct
  source 1..9: note = Seed: LVVVGAGDV (KRAS G13D)
LVVIGSGDM

SEQ ID NO: 79739 - protein, 9 aa, synthetic construct
  source 1..9: note = Seed: LVVVGAGDV (KRAS G13D)
LVVIGSGDS

SEQ ID NO: 79740 - protein, 9 aa, synthetic construct
  source 1..9: note = Seed: LVVVGAGDV (KRAS G13D)
LVVIGSGDT

SEQ ID NO: 79741 - protein, 9 aa, synthetic construct
  source 1..9: note = Seed: LVVVGAGDV (KRAS G13D)
LVVIGSGDV

SEQ ID NO: 79742 - protein, 9 aa, synthetic construct
  source 1..9: note = Seed: LVVVGAGDV (KRAS G13D)
LVVIGTGDA

SEQ ID NO: 79743 - protein, 9 aa, synthetic construct
  source 1..9: note = Seed: LVVVGAGDV (KRAS G13D)
LVVIGTGDI

SEQ ID NO: 79744 - protein, 9 aa, synthetic construct
  source 1..9: note = Seed: LVVVGAGDV (KRAS G13D)
LVVIGTGDL

SEQ ID NO: 79745 - protein, 9 aa, synthetic construct
  source 1..9: note = Seed: LVVVGAGDV (KRAS G13D)
LVVIGTGDM

SEQ ID NO: 79746 - protein, 9 aa, synthetic construct
  source 1..9: note = Seed: LVVVGAGDV (KRAS G13D)
LVVIGTGDS

SEQ ID NO: 79747 - protein, 9 aa, synthetic construct
  source 1..9: note = Seed: LVVVGAGDV (KRAS G13D)
LVVIGTGDV

SEQ ID NO: 79748 - protein, 9 aa, synthetic construct
  source 1..9: note = Seed: LVVVGAGDV (KRAS G13D)
LVVIGVGDA

SEQ ID NO: 79749 - protein, 9 aa, synthetic construct
  source 1..9: note = Seed: LVVVGAGDV (KRAS G13D)
LVVKGKGDA

SEQ ID NO: 79750 - protein, 9 aa, synthetic construct
  source 1..9: note = Seed: LVVVGAGDV (KRAS G13D)
LVVKGRGDA

SEQ ID NO: 79751 - protein, 9 aa, synthetic construct
  source 1..9: note = Seed: LVVVGAGDV (KRAS G13D)
LVVKGRGDH

SEQ ID NO: 79752 - protein, 9 aa, synthetic construct
  source 1..9: note = Seed: LVVVGAGDV (KRAS G13D)
LVVKGRGDI

SEQ ID NO: 79753 - protein, 9 aa, synthetic construct
  source 1..9: note = Seed: LVVVGAGDV (KRAS G13D)
LVVKGRGDL

SEQ ID NO: 79754 - protein, 9 aa, synthetic construct
  source 1..9: note = Seed: LVVVGAGDV (KRAS G13D)
LVVKGRGDM

SEQ ID NO: 79755 - protein, 9 aa, synthetic construct
  source 1..9: note = Seed: LVVVGAGDV (KRAS G13D)
LVVKGRGDQ

SEQ ID NO: 79756 - protein, 9 aa, synthetic construct
  source 1..9: note = Seed: LVVVGAGDV (KRAS G13D)
LVVKGRGDS

SEQ ID NO: 79757 - protein, 9 aa, synthetic construct
  source 1..9: note = Seed: LVVVGAGDV (KRAS G13D)
LVVKGRGDT

SEQ ID NO: 79758 - protein, 9 aa, synthetic construct
  source 1..9: note = Seed: LVVVGAGDV (KRAS G13D)
LVVKGRGDV

SEQ ID NO: 79759 - protein, 9 aa, synthetic construct
  source 1..9: note = Seed: LVVVGAGDV (KRAS G13D)
LVVKGRGDY

SEQ ID NO: 79760 - protein, 9 aa, synthetic construct
  source 1..9: note = Seed: LVVVGAGDV (KRAS G13D)
LVVLGAGDA

SEQ ID NO: 79761 - protein, 9 aa, synthetic construct
  source 1..9: note = Seed: LVVVGAGDV (KRAS G13D)
LVVLGAGDC

SEQ ID NO: 79762 - protein, 9 aa, synthetic construct
  source 1..9: note = Seed: LVVVGAGDV (KRAS G13D)
LVVLGAGDG

SEQ ID NO: 79763 - protein, 9 aa, synthetic construct
  source 1..9: note = Seed: LVVVGAGDV (KRAS G13D)
LVVLGAGDH

SEQ ID NO: 79764 - protein, 9 aa, synthetic construct
  source 1..9: note = Seed: LVVVGAGDV (KRAS G13D)
LVVLGAGDI

SEQ ID NO: 79765 - protein, 9 aa, synthetic construct
  source 1..9: note = Seed: LVVVGAGDV (KRAS G13D)
LVVLGAGDL

SEQ ID NO: 79766 - protein, 9 aa, synthetic construct
  source 1..9: note = Seed: LVVVGAGDV (KRAS G13D)
LVVLGAGDM

SEQ ID NO: 79767 - protein, 9 aa, synthetic construct
  source 1..9: note = Seed: LVVVGAGDV (KRAS G13D)
LVVLGAGDN

SEQ ID NO: 79768 - protein, 9 aa, synthetic construct
  source 1..9: note = Seed: LVVVGAGDV (KRAS G13D)
LVVLGAGDS

SEQ ID NO: 79769 - protein, 9 aa, synthetic construct
  source 1..9: note = Seed: LVVVGAGDV (KRAS G13D)
LVVLGAGDT

SEQ ID NO: 79770 - protein, 9 aa, synthetic construct
  source 1..9: note = Seed: LVVVGAGDV (KRAS G13D)
LVVLGAGDV

SEQ ID NO: 79771 - protein, 9 aa, synthetic construct
  source 1..9: note = Seed: LVVVGAGDV (KRAS G13D)
LVVLGGGDA

SEQ ID NO: 79772 - protein, 9 aa, synthetic construct
  source 1..9: note = Seed: LVVVGAGDV (KRAS G13D)
LVVLGGGDC

SEQ ID NO: 79773 - protein, 9 aa, synthetic construct
  source 1..9: note = Seed: LVVVGAGDV (KRAS G13D)
LVVLGGGDG

SEQ ID NO: 79774 - protein, 9 aa, synthetic construct
  source 1..9: note = Seed: LVVVGAGDV (KRAS G13D)
LVVLGGGDI

SEQ ID NO: 79775 - protein, 9 aa, synthetic construct
  source 1..9: note = Seed: LVVVGAGDV (KRAS G13D)
LVVLGGGDL

SEQ ID NO: 79776 - protein, 9 aa, synthetic construct
  source 1..9: note = Seed: LVVVGAGDV (KRAS G13D)
LVVLGGGDM

SEQ ID NO: 79777 - protein, 9 aa, synthetic construct
  source 1..9: note = Seed: LVVVGAGDV (KRAS G13D)
LVVLGGGDN

SEQ ID NO: 79778 - protein, 9 aa, synthetic construct
  source 1..9: note = Seed: LVVVGAGDV (KRAS G13D)
LVVLGGGDS

SEQ ID NO: 79779 - protein, 9 aa, synthetic construct
  source 1..9: note = Seed: LVVVGAGDV (KRAS G13D)
LVVLGGGDT

SEQ ID NO: 79780 - protein, 9 aa, synthetic construct
  source 1..9: note = Seed: LVVVGAGDV (KRAS G13D)
LVVLGGGDV

SEQ ID NO: 79781 - protein, 9 aa, synthetic construct
  source 1..9: note = Seed: LVVVGAGDV (KRAS G13D)
LVVLGHGDL

SEQ ID NO: 79782 - protein, 9 aa, synthetic construct
  source 1..9: note = Seed: LVVVGAGDV (KRAS G13D)
LVVLGIGDA

SEQ ID NO: 79783 - protein, 9 aa, synthetic construct
  source 1..9: note = Seed: LVVVGAGDV (KRAS G13D)
LVVLGIGDL

SEQ ID NO: 79784 - protein, 9 aa, synthetic construct
  source 1..9: note = Seed: LVVVGAGDV (KRAS G13D)
LVVLGIGDM

SEQ ID NO: 79785 - protein, 9 aa, synthetic construct
  source 1..9: note = Seed: LVVVGAGDV (KRAS G13D)
LVVLGIGDV

SEQ ID NO: 79786 - protein, 9 aa, synthetic construct
  source 1..9: note = Seed: LVVVGAGDV (KRAS G13D)
LVVLGKGDA

SEQ ID NO: 79787 - protein, 9 aa, synthetic construct
  source 1..9: note = Seed: LVVVGAGDV (KRAS G13D)
LVVLGKGDG

SEQ ID NO: 79788 - protein, 9 aa, synthetic construct
  source 1..9: note = Seed: LVVVGAGDV (KRAS G13D)
LVVLGKGDH

SEQ ID NO: 79789 - protein, 9 aa, synthetic construct
  source 1..9: note = Seed: LVVVGAGDV (KRAS G13D)
LVVLGKGDI

SEQ ID NO: 79790 - protein, 9 aa, synthetic construct
  source 1..9: note = Seed: LVVVGAGDV (KRAS G13D)
LVVLGKGDK

SEQ ID NO: 79791 - protein, 9 aa, synthetic construct
  source 1..9: note = Seed: LVVVGAGDV (KRAS G13D)
LVVLGKGDL

SEQ ID NO: 79792 - protein, 9 aa, synthetic construct
  source 1..9: note = Seed: LVVVGAGDV (KRAS G13D)
LVVLGKGDM

SEQ ID NO: 79793 - protein, 9 aa, synthetic construct
  source 1..9: note = Seed: LVVVGAGDV (KRAS G13D)
LVVLGKGDN

SEQ ID NO: 79794 - protein, 9 aa, synthetic construct
  source 1..9: note = Seed: LVVVGAGDV (KRAS G13D)
LVVLGKGDQ

SEQ ID NO: 79795 - protein, 9 aa, synthetic construct
  source 1..9: note = Seed: LVVVGAGDV (KRAS G13D)
LVVLGKGDR

SEQ ID NO: 79796 - protein, 9 aa, synthetic construct
  source 1..9: note = Seed: LVVVGAGDV (KRAS G13D)
LVVLGKGDS

SEQ ID NO: 79797 - protein, 9 aa, synthetic construct
  source 1..9: note = Seed: LVVVGAGDV (KRAS G13D)
LVVLGKGDT

SEQ ID NO: 79798 - protein, 9 aa, synthetic construct
  source 1..9: note = Seed: LVVVGAGDV (KRAS G13D)
LVVLGKGDV

SEQ ID NO: 79799 - protein, 9 aa, synthetic construct
  source 1..9: note = Seed: LVVVGAGDV (KRAS G13D)
LVVLGMGDL

SEQ ID NO: 79800 - protein, 9 aa, synthetic construct
  source 1..9: note = Seed: LVVVGAGDV (KRAS G13D)
LVVLGNGDA

SEQ ID NO: 79801 - protein, 9 aa, synthetic construct
  source 1..9: note = Seed: LVVVGAGDV (KRAS G13D)
LVVLGNGDI

SEQ ID NO: 79802 - protein, 9 aa, synthetic construct
  source 1..9: note = Seed: LVVVGAGDV (KRAS G13D)
LVVLGNGDL

SEQ ID NO: 79803 - protein, 9 aa, synthetic construct
  source 1..9: note = Seed: LVVVGAGDV (KRAS G13D)
LVVLGNGDM

SEQ ID NO: 79804 - protein, 9 aa, synthetic construct
  source 1..9: note = Seed: LVVVGAGDV (KRAS G13D)
LVVLGNGDS

SEQ ID NO: 79805 - protein, 9 aa, synthetic construct
  source 1..9: note = Seed: LVVVGAGDV (KRAS G13D)
LVVLGNGDT

SEQ ID NO: 79806 - protein, 9 aa, synthetic construct
  source 1..9: note = Seed: LVVVGAGDV (KRAS G13D)
LVVLGNGDV

SEQ ID NO: 79807 - protein, 9 aa, synthetic construct
  source 1..9: note = Seed: LVVVGAGDV (KRAS G13D)
LVVLGPGDA

SEQ ID NO: 79808 - protein, 9 aa, synthetic construct
  source 1..9: note = Seed: LVVVGAGDV (KRAS G13D)
LVVLGPGDI

SEQ ID NO: 79809 - protein, 9 aa, synthetic construct
  source 1..9: note = Seed: LVVVGAGDV (KRAS G13D)
LVVLGPGDL

SEQ ID NO: 79810 - protein, 9 aa, synthetic construct
  source 1..9: note = Seed: LVVVGAGDV (KRAS G13D)
LVVLGPGDM

SEQ ID NO: 79811 - protein, 9 aa, synthetic construct
  source 1..9: note = Seed: LVVVGAGDV (KRAS G13D)
LVVLGPGDS

SEQ ID NO: 79812 - protein, 9 aa, synthetic construct
  source 1..9: note = Seed: LVVVGAGDV (KRAS G13D)
LVVLGPGDT

SEQ ID NO: 79813 - protein, 9 aa, synthetic construct
  source 1..9: note = Seed: LVVVGAGDV (KRAS G13D)
LVVLGPGDV

SEQ ID NO: 79814 - protein, 9 aa, synthetic construct
  source 1..9: note = Seed: LVVVGAGDV (KRAS G13D)
LVVLGRGDA

SEQ ID NO: 79815 - protein, 9 aa, synthetic construct
  source 1..9: note = Seed: LVVVGAGDV (KRAS G13D)
LVVLGRGDG

SEQ ID NO: 79816 - protein, 9 aa, synthetic construct
  source 1..9: note = Seed: LVVVGAGDV (KRAS G13D)
LVVLGRGDH

SEQ ID NO: 79817 - protein, 9 aa, synthetic construct
  source 1..9: note = Seed: LVVVGAGDV (KRAS G13D)
LVVLGRGDI

SEQ ID NO: 79818 - protein, 9 aa, synthetic construct
  source 1..9: note = Seed: LVVVGAGDV (KRAS G13D)
LVVLGRGDK

SEQ ID NO: 79819 - protein, 9 aa, synthetic construct
  source 1..9: note = Seed: LVVVGAGDV (KRAS G13D)
LVVLGRGDL

SEQ ID NO: 79820 - protein, 9 aa, synthetic construct
  source 1..9: note = Seed: LVVVGAGDV (KRAS G13D)
LVVLGRGDM

SEQ ID NO: 79821 - protein, 9 aa, synthetic construct
  source 1..9: note = Seed: LVVVGAGDV (KRAS G13D)
LVVLGRGDN

SEQ ID NO: 79822 - protein, 9 aa, synthetic construct
  source 1..9: note = Seed: LVVVGAGDV (KRAS G13D)
LVVLGRGDP

SEQ ID NO: 79823 - protein, 9 aa, synthetic construct
  source 1..9: note = Seed: LVVVGAGDV (KRAS G13D)
LVVLGRGDQ

SEQ ID NO: 79824 - protein, 9 aa, synthetic construct
  source 1..9: note = Seed: LVVVGAGDV (KRAS G13D)
LVVLGRGDR

SEQ ID NO: 79825 - protein, 9 aa, synthetic construct
  source 1..9: note = Seed: LVVVGAGDV (KRAS G13D)
LVVLGRGDS

SEQ ID NO: 79826 - protein, 9 aa, synthetic construct
  source 1..9: note = Seed: LVVVGAGDV (KRAS G13D)
LVVLGRGDT

SEQ ID NO: 79827 - protein, 9 aa, synthetic construct
  source 1..9: note = Seed: LVVVGAGDV (KRAS G13D)
LVVLGRGDV

SEQ ID NO: 79828 - protein, 9 aa, synthetic construct
  source 1..9: note = Seed: LVVVGAGDV (KRAS G13D)
LVVLGRGDY

SEQ ID NO: 79829 - protein, 9 aa, synthetic construct
  source 1..9: note = Seed: LVVVGAGDV (KRAS G13D)
LVVLGSGDA

SEQ ID NO: 79830 - protein, 9 aa, synthetic construct
  source 1..9: note = Seed: LVVVGAGDV (KRAS G13D)
LVVLGSGDC

SEQ ID NO: 79831 - protein, 9 aa, synthetic construct
  source 1..9: note = Seed: LVVVGAGDV (KRAS G13D)
LVVLGSGDG

SEQ ID NO: 79832 - protein, 9 aa, synthetic construct
  source 1..9: note = Seed: LVVVGAGDV (KRAS G13D)
LVVLGSGDI

SEQ ID NO: 79833 - protein, 9 aa, synthetic construct
  source 1..9: note = Seed: LVVVGAGDV (KRAS G13D)
LVVLGSGDL

SEQ ID NO: 79834 - protein, 9 aa, synthetic construct
  source 1..9: note = Seed: LVVVGAGDV (KRAS G13D)
LVVLGSGDM

SEQ ID NO: 79835 - protein, 9 aa, synthetic construct
  source 1..9: note = Seed: LVVVGAGDV (KRAS G13D)
LVVLGSGDN

SEQ ID NO: 79836 - protein, 9 aa, synthetic construct
  source 1..9: note = Seed: LVVVGAGDV (KRAS G13D)
LVVLGSGDS

SEQ ID NO: 79837 - protein, 9 aa, synthetic construct
  source 1..9: note = Seed: LVVVGAGDV (KRAS G13D)
LVVLGSGDT

SEQ ID NO: 79838 - protein, 9 aa, synthetic construct
  source 1..9: note = Seed: LVVVGAGDV (KRAS G13D)
LVVLGSGDV

SEQ ID NO: 79839 - protein, 9 aa, synthetic construct
  source 1..9: note = Seed: LVVVGAGDV (KRAS G13D)
LVVLGTGDA

SEQ ID NO: 79840 - protein, 9 aa, synthetic construct
  source 1..9: note = Seed: LVVVGAGDV (KRAS G13D)
LVVLGTGDI

SEQ ID NO: 79841 - protein, 9 aa, synthetic construct
  source 1..9: note = Seed: LVVVGAGDV (KRAS G13D)
LVVLGTGDL

SEQ ID NO: 79842 - protein, 9 aa, synthetic construct
  source 1..9: note = Seed: LVVVGAGDV (KRAS G13D)
LVVLGTGDM

SEQ ID NO: 79843 - protein, 9 aa, synthetic construct
  source 1..9: note = Seed: LVVVGAGDV (KRAS G13D)
LVVLGTGDN

SEQ ID NO: 79844 - protein, 9 aa, synthetic construct
  source 1..9: note = Seed: LVVVGAGDV (KRAS G13D)
LVVLGTGDS

SEQ ID NO: 79845 - protein, 9 aa, synthetic construct
  source 1..9: note = Seed: LVVVGAGDV (KRAS G13D)
LVVLGTGDT

SEQ ID NO: 79846 - protein, 9 aa, synthetic construct
  source 1..9: note = Seed: LVVVGAGDV (KRAS G13D)
LVVLGTGDV

SEQ ID NO: 79847 - protein, 9 aa, synthetic construct
  source 1..9: note = Seed: LVVVGAGDV (KRAS G13D)
LVVLGVGDA

SEQ ID NO: 79848 - protein, 9 aa, synthetic construct
  source 1..9: note = Seed: LVVVGAGDV (KRAS G13D)
LVVLGVGDI

SEQ ID NO: 79849 - protein, 9 aa, synthetic construct
  source 1..9: note = Seed: LVVVGAGDV (KRAS G13D)
LVVLGVGDL

SEQ ID NO: 79850 - protein, 9 aa, synthetic construct
  source 1..9: note = Seed: LVVVGAGDV (KRAS G13D)
LVVLGVGDM

SEQ ID NO: 79851 - protein, 9 aa, synthetic construct
  source 1..9: note = Seed: LVVVGAGDV (KRAS G13D)
LVVLGVGDN

SEQ ID NO: 79852 - protein, 9 aa, synthetic construct
  source 1..9: note = Seed: LVVVGAGDV (KRAS G13D)
LVVLGVGDS

SEQ ID NO: 79853 - protein, 9 aa, synthetic construct
  source 1..9: note = Seed: LVVVGAGDV (KRAS G13D)
LVVLGVGDT

SEQ ID NO: 79854 - protein, 9 aa, synthetic construct
  source 1..9: note = Seed: LVVVGAGDV (KRAS G13D)
LVVLGVGDV

SEQ ID NO: 79855 - protein, 9 aa, synthetic construct
  source 1..9: note = Seed: LVVVGAGDV (KRAS G13D)
LVVMGAGDA

SEQ ID NO: 79856 - protein, 9 aa, synthetic construct
  source 1..9: note = Seed: LVVVGAGDV (KRAS G13D)
LVVMGAGDC

SEQ ID NO: 79857 - protein, 9 aa, synthetic construct
  source 1..9: note = Seed: LVVVGAGDV (KRAS G13D)
LVVMGAGDG

SEQ ID NO: 79858 - protein, 9 aa, synthetic construct
  source 1..9: note = Seed: LVVVGAGDV (KRAS G13D)
LVVMGAGDH

SEQ ID NO: 79859 - protein, 9 aa, synthetic construct
  source 1..9: note = Seed: LVVVGAGDV (KRAS G13D)
LVVMGAGDI

SEQ ID NO: 79860 - protein, 9 aa, synthetic construct
  source 1..9: note = Seed: LVVVGAGDV (KRAS G13D)
LVVMGAGDL

SEQ ID NO: 79861 - protein, 9 aa, synthetic construct
  source 1..9: note = Seed: LVVVGAGDV (KRAS G13D)
LVVMGAGDM

SEQ ID NO: 79862 - protein, 9 aa, synthetic construct
  source 1..9: note = Seed: LVVVGAGDV (KRAS G13D)
LVVMGAGDN

SEQ ID NO: 79863 - protein, 9 aa, synthetic construct
  source 1..9: note = Seed: LVVVGAGDV (KRAS G13D)
LVVMGAGDS

SEQ ID NO: 79864 - protein, 9 aa, synthetic construct
  source 1..9: note = Seed: LVVVGAGDV (KRAS G13D)
LVVMGAGDT

SEQ ID NO: 79865 - protein, 9 aa, synthetic construct
  source 1..9: note = Seed: LVVVGAGDV (KRAS G13D)
LVVMGAGDV

SEQ ID NO: 79866 - protein, 9 aa, synthetic construct
  source 1..9: note = Seed: LVVVGAGDV (KRAS G13D)
LVVMGGGDA

SEQ ID NO: 79867 - protein, 9 aa, synthetic construct
  source 1..9: note = Seed: LVVVGAGDV (KRAS G13D)
LVVMGGGDI

SEQ ID NO: 79868 - protein, 9 aa, synthetic construct
  source 1..9: note = Seed: LVVVGAGDV (KRAS G13D)
LVVMGGGDL

SEQ ID NO: 79869 - protein, 9 aa, synthetic construct
  source 1..9: note = Seed: LVVVGAGDV (KRAS G13D)
LVVMGGGDM

SEQ ID NO: 79870 - protein, 9 aa, synthetic construct
  source 1..9: note = Seed: LVVVGAGDV (KRAS G13D)
LVVMGGGDN

SEQ ID NO: 79871 - protein, 9 aa, synthetic construct
  source 1..9: note = Seed: LVVVGAGDV (KRAS G13D)
LVVMGGGDS

SEQ ID NO: 79872 - protein, 9 aa, synthetic construct
  source 1..9: note = Seed: LVVVGAGDV (KRAS G13D)
LVVMGGGDT

SEQ ID NO: 79873 - protein, 9 aa, synthetic construct
  source 1..9: note = Seed: LVVVGAGDV (KRAS G13D)
LVVMGGGDV

SEQ ID NO: 79874 - protein, 9 aa, synthetic construct
  source 1..9: note = Seed: LVVVGAGDV (KRAS G13D)
LVVMGHGDL

SEQ ID NO: 79875 - protein, 9 aa, synthetic construct
  source 1..9: note = Seed: LVVVGAGDV (KRAS G13D)
LVVMGIGDA

SEQ ID NO: 79876 - protein, 9 aa, synthetic construct
  source 1..9: note = Seed: LVVVGAGDV (KRAS G13D)
LVVMGIGDI

SEQ ID NO: 79877 - protein, 9 aa, synthetic construct
  source 1..9: note = Seed: LVVVGAGDV (KRAS G13D)
LVVMGIGDL

SEQ ID NO: 79878 - protein, 9 aa, synthetic construct
  source 1..9: note = Seed: LVVVGAGDV (KRAS G13D)
LVVMGIGDM

SEQ ID NO: 79879 - protein, 9 aa, synthetic construct
  source 1..9: note = Seed: LVVVGAGDV (KRAS G13D)
LVVMGIGDN

SEQ ID NO: 79880 - protein, 9 aa, synthetic construct
  source 1..9: note = Seed: LVVVGAGDV (KRAS G13D)
LVVMGIGDS

SEQ ID NO: 79881 - protein, 9 aa, synthetic construct
  source 1..9: note = Seed: LVVVGAGDV (KRAS G13D)
LVVMGIGDV

SEQ ID NO: 79882 - protein, 9 aa, synthetic construct
  source 1..9: note = Seed: LVVVGAGDV (KRAS G13D)
LVVMGKGDA

SEQ ID NO: 79883 - protein, 9 aa, synthetic construct
  source 1..9: note = Seed: LVVVGAGDV (KRAS G13D)
LVVMGKGDG

SEQ ID NO: 79884 - protein, 9 aa, synthetic construct
  source 1..9: note = Seed: LVVVGAGDV (KRAS G13D)
LVVMGKGDH

SEQ ID NO: 79885 - protein, 9 aa, synthetic construct
  source 1..9: note = Seed: LVVVGAGDV (KRAS G13D)
LVVMGKGDI

SEQ ID NO: 79886 - protein, 9 aa, synthetic construct
  source 1..9: note = Seed: LVVVGAGDV (KRAS G13D)
LVVMGKGDK

SEQ ID NO: 79887 - protein, 9 aa, synthetic construct
  source 1..9: note = Seed: LVVVGAGDV (KRAS G13D)
LVVMGKGDL

SEQ ID NO: 79888 - protein, 9 aa, synthetic construct
  source 1..9: note = Seed: LVVVGAGDV (KRAS G13D)
LVVMGKGDM

SEQ ID NO: 79889 - protein, 9 aa, synthetic construct
  source 1..9: note = Seed: LVVVGAGDV (KRAS G13D)
LVVMGKGDN

SEQ ID NO: 79890 - protein, 9 aa, synthetic construct
  source 1..9: note = Seed: LVVVGAGDV (KRAS G13D)
LVVMGKGDQ

SEQ ID NO: 79891 - protein, 9 aa, synthetic construct
  source 1..9: note = Seed: LVVVGAGDV (KRAS G13D)
LVVMGKGDR

SEQ ID NO: 79892 - protein, 9 aa, synthetic construct
  source 1..9: note = Seed: LVVVGAGDV (KRAS G13D)
LVVMGKGDS

SEQ ID NO: 79893 - protein, 9 aa, synthetic construct
  source 1..9: note = Seed: LVVVGAGDV (KRAS G13D)
LVVMGKGDT

SEQ ID NO: 79894 - protein, 9 aa, synthetic construct
  source 1..9: note = Seed: LVVVGAGDV (KRAS G13D)
LVVMGKGDV

SEQ ID NO: 79895 - protein, 9 aa, synthetic construct
  source 1..9: note = Seed: LVVVGAGDV (KRAS G13D)
LVVMGLGDL

SEQ ID NO: 79896 - protein, 9 aa, synthetic construct
  source 1..9: note = Seed: LVVVGAGDV (KRAS G13D)
LVVMGLGDM

SEQ ID NO: 79897 - protein, 9 aa, synthetic construct
  source 1..9: note = Seed: LVVVGAGDV (KRAS G13D)
LVVMGMGDI

SEQ ID NO: 79898 - protein, 9 aa, synthetic construct
  source 1..9: note = Seed: LVVVGAGDV (KRAS G13D)
LVVMGMGDL

SEQ ID NO: 79899 - protein, 9 aa, synthetic construct
  source 1..9: note = Seed: LVVVGAGDV (KRAS G13D)
LVVMGMGDM

SEQ ID NO: 79900 - protein, 9 aa, synthetic construct
  source 1..9: note = Seed: LVVVGAGDV (KRAS G13D)
LVVMGMGDV

SEQ ID NO: 79901 - protein, 9 aa, synthetic construct
  source 1..9: note = Seed: LVVVGAGDV (KRAS G13D)
LVVMGNGDA

SEQ ID NO: 79902 - protein, 9 aa, synthetic construct
  source 1..9: note = Seed: LVVVGAGDV (KRAS G13D)
LVVMGNGDI

SEQ ID NO: 79903 - protein, 9 aa, synthetic construct
  source 1..9: note = Seed: LVVVGAGDV (KRAS G13D)
LVVMGNGDL

SEQ ID NO: 79904 - protein, 9 aa, synthetic construct
  source 1..9: note = Seed: LVVVGAGDV (KRAS G13D)
LVVMGNGDM

SEQ ID NO: 79905 - protein, 9 aa, synthetic construct
  source 1..9: note = Seed: LVVVGAGDV (KRAS G13D)
LVVMGNGDQ

SEQ ID NO: 79906 - protein, 9 aa, synthetic construct
  source 1..9: note = Seed: LVVVGAGDV (KRAS G13D)
LVVMGNGDS

SEQ ID NO: 79907 - protein, 9 aa, synthetic construct
  source 1..9: note = Seed: LVVVGAGDV (KRAS G13D)
LVVMGNGDT

SEQ ID NO: 79908 - protein, 9 aa, synthetic construct
  source 1..9: note = Seed: LVVVGAGDV (KRAS G13D)
LVVMGNGDV

SEQ ID NO: 79909 - protein, 9 aa, synthetic construct
  source 1..9: note = Seed: LVVVGAGDV (KRAS G13D)
LVVMGPGDA

SEQ ID NO: 79910 - protein, 9 aa, synthetic construct
  source 1..9: note = Seed: LVVVGAGDV (KRAS G13D)
LVVMGPGDI

SEQ ID NO: 79911 - protein, 9 aa, synthetic construct
  source 1..9: note = Seed: LVVVGAGDV (KRAS G13D)
LVVMGPGDL

SEQ ID NO: 79912 - protein, 9 aa, synthetic construct
  source 1..9: note = Seed: LVVVGAGDV (KRAS G13D)
LVVMGPGDM

SEQ ID NO: 79913 - protein, 9 aa, synthetic construct
  source 1..9: note = Seed: LVVVGAGDV (KRAS G13D)
LVVMGPGDS

SEQ ID NO: 79914 - protein, 9 aa, synthetic construct
  source 1..9: note = Seed: LVVVGAGDV (KRAS G13D)
LVVMGPGDT

SEQ ID NO: 79915 - protein, 9 aa, synthetic construct
  source 1..9: note = Seed: LVVVGAGDV (KRAS G13D)
LVVMGPGDV

SEQ ID NO: 79916 - protein, 9 aa, synthetic construct
  source 1..9: note = Seed: LVVVGAGDV (KRAS G13D)
LVVMGRGDA

SEQ ID NO: 79917 - protein, 9 aa, synthetic construct
  source 1..9: note = Seed: LVVVGAGDV (KRAS G13D)
LVVMGRGDG

SEQ ID NO: 79918 - protein, 9 aa, synthetic construct
  source 1..9: note = Seed: LVVVGAGDV (KRAS G13D)
LVVMGRGDH

SEQ ID NO: 79919 - protein, 9 aa, synthetic construct
  source 1..9: note = Seed: LVVVGAGDV (KRAS G13D)
LVVMGRGDI

SEQ ID NO: 79920 - protein, 9 aa, synthetic construct
  source 1..9: note = Seed: LVVVGAGDV (KRAS G13D)
LVVMGRGDK

SEQ ID NO: 79921 - protein, 9 aa, synthetic construct
  source 1..9: note = Seed: LVVVGAGDV (KRAS G13D)
LVVMGRGDL

SEQ ID NO: 79922 - protein, 9 aa, synthetic construct
  source 1..9: note = Seed: LVVVGAGDV (KRAS G13D)
LVVMGRGDM

SEQ ID NO: 79923 - protein, 9 aa, synthetic construct
  source 1..9: note = Seed: LVVVGAGDV (KRAS G13D)
LVVMGRGDN

SEQ ID NO: 79924 - protein, 9 aa, synthetic construct
  source 1..9: note = Seed: LVVVGAGDV (KRAS G13D)
LVVMGRGDP

SEQ ID NO: 79925 - protein, 9 aa, synthetic construct
  source 1..9: note = Seed: LVVVGAGDV (KRAS G13D)
LVVMGRGDQ

SEQ ID NO: 79926 - protein, 9 aa, synthetic construct
  source 1..9: note = Seed: LVVVGAGDV (KRAS G13D)
LVVMGRGDR

SEQ ID NO: 79927 - protein, 9 aa, synthetic construct
  source 1..9: note = Seed: LVVVGAGDV (KRAS G13D)
LVVMGRGDS

SEQ ID NO: 79928 - protein, 9 aa, synthetic construct
  source 1..9: note = Seed: LVVVGAGDV (KRAS G13D)
LVVMGRGDT

SEQ ID NO: 79929 - protein, 9 aa, synthetic construct
  source 1..9: note = Seed: LVVVGAGDV (KRAS G13D)
LVVMGRGDV

SEQ ID NO: 79930 - protein, 9 aa, synthetic construct
  source 1..9: note = Seed: LVVVGAGDV (KRAS G13D)
LVVMGRGDY

SEQ ID NO: 79931 - protein, 9 aa, synthetic construct
  source 1..9: note = Seed: LVVVGAGDV (KRAS G13D)
LVVMGSGDA

SEQ ID NO: 79932 - protein, 9 aa, synthetic construct
  source 1..9: note = Seed: LVVVGAGDV (KRAS G13D)
LVVMGSGDC

SEQ ID NO: 79933 - protein, 9 aa, synthetic construct
  source 1..9: note = Seed: LVVVGAGDV (KRAS G13D)
LVVMGSGDG

SEQ ID NO: 79934 - protein, 9 aa, synthetic construct
  source 1..9: note = Seed: LVVVGAGDV (KRAS G13D)
LVVMGSGDI

SEQ ID NO: 79935 - protein, 9 aa, synthetic construct
  source 1..9: note = Seed: LVVVGAGDV (KRAS G13D)
LVVMGSGDL

SEQ ID NO: 79936 - protein, 9 aa, synthetic construct
  source 1..9: note = Seed: LVVVGAGDV (KRAS G13D)
LVVMGSGDM

SEQ ID NO: 79937 - protein, 9 aa, synthetic construct
  source 1..9: note = Seed: LVVVGAGDV (KRAS G13D)
LVVMGSGDN

SEQ ID NO: 79938 - protein, 9 aa, synthetic construct
  source 1..9: note = Seed: LVVVGAGDV (KRAS G13D)
LVVMGSGDS

SEQ ID NO: 79939 - protein, 9 aa, synthetic construct
  source 1..9: note = Seed: LVVVGAGDV (KRAS G13D)
LVVMGSGDT

SEQ ID NO: 79940 - protein, 9 aa, synthetic construct
  source 1..9: note = Seed: LVVVGAGDV (KRAS G13D)
LVVMGSGDV

SEQ ID NO: 79941 - protein, 9 aa, synthetic construct
  source 1..9: note = Seed: LVVVGAGDV (KRAS G13D)
LVVMGTGDA

SEQ ID NO: 79942 - protein, 9 aa, synthetic construct
  source 1..9: note = Seed: LVVVGAGDV (KRAS G13D)
LVVMGTGDI

SEQ ID NO: 79943 - protein, 9 aa, synthetic construct
  source 1..9: note = Seed: LVVVGAGDV (KRAS G13D)
LVVMGTGDL

SEQ ID NO: 79944 - protein, 9 aa, synthetic construct
  source 1..9: note = Seed: LVVVGAGDV (KRAS G13D)
LVVMGTGDM

SEQ ID NO: 79945 - protein, 9 aa, synthetic construct
  source 1..9: note = Seed: LVVVGAGDV (KRAS G13D)
LVVMGTGDS

SEQ ID NO: 79946 - protein, 9 aa, synthetic construct
  source 1..9: note = Seed: LVVVGAGDV (KRAS G13D)
LVVMGTGDT

SEQ ID NO: 79947 - protein, 9 aa, synthetic construct
  source 1..9: note = Seed: LVVVGAGDV (KRAS G13D)
LVVMGTGDV

SEQ ID NO: 79948 - protein, 9 aa, synthetic construct
  source 1..9: note = Seed: LVVVGAGDV (KRAS G13D)
LVVMGVGDA

SEQ ID NO: 79949 - protein, 9 aa, synthetic construct
  source 1..9: note = Seed: LVVVGAGDV (KRAS G13D)
LVVMGVGDI

SEQ ID NO: 79950 - protein, 9 aa, synthetic construct
  source 1..9: note = Seed: LVVVGAGDV (KRAS G13D)
LVVMGVGDL

SEQ ID NO: 79951 - protein, 9 aa, synthetic construct
  source 1..9: note = Seed: LVVVGAGDV (KRAS G13D)
LVVMGVGDM

SEQ ID NO: 79952 - protein, 9 aa, synthetic construct
  source 1..9: note = Seed: LVVVGAGDV (KRAS G13D)
LVVMGVGDN

SEQ ID NO: 79953 - protein, 9 aa, synthetic construct
  source 1..9: note = Seed: LVVVGAGDV (KRAS G13D)
LVVMGVGDS

SEQ ID NO: 79954 - protein, 9 aa, synthetic construct
  source 1..9: note = Seed: LVVVGAGDV (KRAS G13D)
LVVMGVGDT

SEQ ID NO: 79955 - protein, 9 aa, synthetic construct
  source 1..9: note = Seed: LVVVGAGDV (KRAS G13D)
LVVMGVGDV

SEQ ID NO: 79956 - protein, 9 aa, synthetic construct
  source 1..9: note = Seed: LVVVGAGDV (KRAS G13D)
LVVNGAGDA

SEQ ID NO: 79957 - protein, 9 aa, synthetic construct
  source 1..9: note = Seed: LVVVGAGDV (KRAS G13D)
LVVNGAGDF

SEQ ID NO: 79958 - protein, 9 aa, synthetic construct
  source 1..9: note = Seed: LVVVGAGDV (KRAS G13D)
LVVNGAGDI

SEQ ID NO: 79959 - protein, 9 aa, synthetic construct
  source 1..9: note = Seed: LVVVGAGDV (KRAS G13D)
LVVNGAGDL

SEQ ID NO: 79960 - protein, 9 aa, synthetic construct
  source 1..9: note = Seed: LVVVGAGDV (KRAS G13D)
LVVNGAGDM

SEQ ID NO: 79961 - protein, 9 aa, synthetic construct
  source 1..9: note = Seed: LVVVGAGDV (KRAS G13D)
LVVNGAGDS

SEQ ID NO: 79962 - protein, 9 aa, synthetic construct
  source 1..9: note = Seed: LVVVGAGDV (KRAS G13D)
LVVNGAGDT

SEQ ID NO: 79963 - protein, 9 aa, synthetic construct
  source 1..9: note = Seed: LVVVGAGDV (KRAS G13D)
LVVNGAGDV

SEQ ID NO: 79964 - protein, 9 aa, synthetic construct
  source 1..9: note = Seed: LVVVGAGDV (KRAS G13D)
LVVNGAGDW

SEQ ID NO: 79965 - protein, 9 aa, synthetic construct
  source 1..9: note = Seed: LVVVGAGDV (KRAS G13D)
LVVNGAGDY

SEQ ID NO: 79966 - protein, 9 aa, synthetic construct
  source 1..9: note = Seed: LVVVGAGDV (KRAS G13D)
LVVNGCGDI

SEQ ID NO: 79967 - protein, 9 aa, synthetic construct
  source 1..9: note = Seed: LVVVGAGDV (KRAS G13D)
LVVNGGGDA

SEQ ID NO: 79968 - protein, 9 aa, synthetic construct
  source 1..9: note = Seed: LVVVGAGDV (KRAS G13D)
LVVNGGGDF

SEQ ID NO: 79969 - protein, 9 aa, synthetic construct
  source 1..9: note = Seed: LVVVGAGDV (KRAS G13D)
LVVNGGGDI

SEQ ID NO: 79970 - protein, 9 aa, synthetic construct
  source 1..9: note = Seed: LVVVGAGDV (KRAS G13D)
LVVNGGGDL

SEQ ID NO: 79971 - protein, 9 aa, synthetic construct
  source 1..9: note = Seed: LVVVGAGDV (KRAS G13D)
LVVNGGGDM

SEQ ID NO: 79972 - protein, 9 aa, synthetic construct
  source 1..9: note = Seed: LVVVGAGDV (KRAS G13D)
LVVNGGGDV

SEQ ID NO: 79973 - protein, 9 aa, synthetic construct
  source 1..9: note = Seed: LVVVGAGDV (KRAS G13D)
LVVNGGGDY

SEQ ID NO: 79974 - protein, 9 aa, synthetic construct
  source 1..9: note = Seed: LVVVGAGDV (KRAS G13D)
LVVNGHGDI

SEQ ID NO: 79975 - protein, 9 aa, synthetic construct
  source 1..9: note = Seed: LVVVGAGDV (KRAS G13D)
LVVNGHGDL

SEQ ID NO: 79976 - protein, 9 aa, synthetic construct
  source 1..9: note = Seed: LVVVGAGDV (KRAS G13D)
LVVNGHGDV

SEQ ID NO: 79977 - protein, 9 aa, synthetic construct
  source 1..9: note = Seed: LVVVGAGDV (KRAS G13D)
LVVNGIGDA

SEQ ID NO: 79978 - protein, 9 aa, synthetic construct
  source 1..9: note = Seed: LVVVGAGDV (KRAS G13D)
LVVNGIGDF

SEQ ID NO: 79979 - protein, 9 aa, synthetic construct
  source 1..9: note = Seed: LVVVGAGDV (KRAS G13D)
LVVNGIGDI

SEQ ID NO: 79980 - protein, 9 aa, synthetic construct
  source 1..9: note = Seed: LVVVGAGDV (KRAS G13D)
LVVNGIGDL

SEQ ID NO: 79981 - protein, 9 aa, synthetic construct
  source 1..9: note = Seed: LVVVGAGDV (KRAS G13D)
LVVNGIGDM

SEQ ID NO: 79982 - protein, 9 aa, synthetic construct
  source 1..9: note = Seed: LVVVGAGDV (KRAS G13D)
LVVNGIGDS

SEQ ID NO: 79983 - protein, 9 aa, synthetic construct
  source 1..9: note = Seed: LVVVGAGDV (KRAS G13D)
LVVNGIGDT

SEQ ID NO: 79984 - protein, 9 aa, synthetic construct
  source 1..9: note = Seed: LVVVGAGDV (KRAS G13D)
LVVNGIGDV

SEQ ID NO: 79985 - protein, 9 aa, synthetic construct
  source 1..9: note = Seed: LVVVGAGDV (KRAS G13D)
LVVNGIGDY

SEQ ID NO: 79986 - protein, 9 aa, synthetic construct
  source 1..9: note = Seed: LVVVGAGDV (KRAS G13D)
LVVNGLGDA

SEQ ID NO: 79987 - protein, 9 aa, synthetic construct
  source 1..9: note = Seed: LVVVGAGDV (KRAS G13D)
LVVNGLGDF

SEQ ID NO: 79988 - protein, 9 aa, synthetic construct
  source 1..9: note = Seed: LVVVGAGDV (KRAS G13D)
LVVNGLGDI

SEQ ID NO: 79989 - protein, 9 aa, synthetic construct
  source 1..9: note = Seed: LVVVGAGDV (KRAS G13D)
LVVNGLGDL

SEQ ID NO: 79990 - protein, 9 aa, synthetic construct
  source 1..9: note = Seed: LVVVGAGDV (KRAS G13D)
LVVNGLGDM

SEQ ID NO: 79991 - protein, 9 aa, synthetic construct
  source 1..9: note = Seed: LVVVGAGDV (KRAS G13D)
LVVNGLGDV

SEQ ID NO: 79992 - protein, 9 aa, synthetic construct
  source 1..9: note = Seed: LVVVGAGDV (KRAS G13D)
LVVNGLGDY

SEQ ID NO: 79993 - protein, 9 aa, synthetic construct
  source 1..9: note = Seed: LVVVGAGDV (KRAS G13D)
LVVNGMGDF

SEQ ID NO: 79994 - protein, 9 aa, synthetic construct
  source 1..9: note = Seed: LVVVGAGDV (KRAS G13D)
LVVNGMGDI

SEQ ID NO: 79995 - protein, 9 aa, synthetic construct
  source 1..9: note = Seed: LVVVGAGDV (KRAS G13D)
LVVNGMGDL

SEQ ID NO: 79996 - protein, 9 aa, synthetic construct
  source 1..9: note = Seed: LVVVGAGDV (KRAS G13D)
LVVNGMGDM

SEQ ID NO: 79997 - protein, 9 aa, synthetic construct
  source 1..9: note = Seed: LVVVGAGDV (KRAS G13D)
LVVNGMGDV

SEQ ID NO: 79998 - protein, 9 aa, synthetic construct
  source 1..9: note = Seed: LVVVGAGDV (KRAS G13D)
LVVNGMGDY

SEQ ID NO: 79999 - protein, 9 aa, synthetic construct
  source 1..9: note = Seed: LVVVGAGDV (KRAS G13D)
LVVNGNGDA

SEQ ID NO: 80000 - protein, 9 aa, synthetic construct
  source 1..9: note = Seed: LVVVGAGDV (KRAS G13D)
LVVNGNGDF

SEQ ID NO: 80001 - protein, 9 aa, synthetic construct
  source 1..9: note = Seed: LVVVGAGDV (KRAS G13D)
LVVNGNGDI

SEQ ID NO: 80002 - protein, 9 aa, synthetic construct
  source 1..9: note = Seed: LVVVGAGDV (KRAS G13D)
LVVNGNGDL

SEQ ID NO: 80003 - protein, 9 aa, synthetic construct
  source 1..9: note = Seed: LVVVGAGDV (KRAS G13D)
LVVNGNGDM

SEQ ID NO: 80004 - protein, 9 aa, synthetic construct
  source 1..9: note = Seed: LVVVGAGDV (KRAS G13D)
LVVNGNGDS

SEQ ID NO: 80005 - protein, 9 aa, synthetic construct
  source 1..9: note = Seed: LVVVGAGDV (KRAS G13D)
LVVNGNGDT

SEQ ID NO: 80006 - protein, 9 aa, synthetic construct
  source 1..9: note = Seed: LVVVGAGDV (KRAS G13D)
LVVNGNGDV

SEQ ID NO: 80007 - protein, 9 aa, synthetic construct
  source 1..9: note = Seed: LVVVGAGDV (KRAS G13D)
LVVNGNGDW

SEQ ID NO: 80008 - protein, 9 aa, synthetic construct
  source 1..9: note = Seed: LVVVGAGDV (KRAS G13D)
LVVNGNGDY

SEQ ID NO: 80009 - protein, 9 aa, synthetic construct
  source 1..9: note = Seed: LVVVGAGDV (KRAS G13D)
LVVNGPGDF

SEQ ID NO: 80010 - protein, 9 aa, synthetic construct
  source 1..9: note = Seed: LVVVGAGDV (KRAS G13D)
LVVNGPGDI

SEQ ID NO: 80011 - protein, 9 aa, synthetic construct
  source 1..9: note = Seed: LVVVGAGDV (KRAS G13D)
LVVNGPGDL

SEQ ID NO: 80012 - protein, 9 aa, synthetic construct
  source 1..9: note = Seed: LVVVGAGDV (KRAS G13D)
LVVNGPGDM

SEQ ID NO: 80013 - protein, 9 aa, synthetic construct
  source 1..9: note = Seed: LVVVGAGDV (KRAS G13D)
LVVNGPGDV

SEQ ID NO: 80014 - protein, 9 aa, synthetic construct
  source 1..9: note = Seed: LVVVGAGDV (KRAS G13D)
LVVNGPGDY

SEQ ID NO: 80015 - protein, 9 aa, synthetic construct
  source 1..9: note = Seed: LVVVGAGDV (KRAS G13D)
LVVNGQGDI

SEQ ID NO: 80016 - protein, 9 aa, synthetic construct
  source 1..9: note = Seed: LVVVGAGDV (KRAS G13D)
LVVNGQGDV

SEQ ID NO: 80017 - protein, 9 aa, synthetic construct
  source 1..9: note = Seed: LVVVGAGDV (KRAS G13D)
LVVNGSGDA

SEQ ID NO: 80018 - protein, 9 aa, synthetic construct
  source 1..9: note = Seed: LVVVGAGDV (KRAS G13D)
LVVNGSGDF

SEQ ID NO: 80019 - protein, 9 aa, synthetic construct
  source 1..9: note = Seed: LVVVGAGDV (KRAS G13D)
LVVNGSGDI

SEQ ID NO: 80020 - protein, 9 aa, synthetic construct
  source 1..9: note = Seed: LVVVGAGDV (KRAS G13D)
LVVNGSGDL

SEQ ID NO: 80021 - protein, 9 aa, synthetic construct
  source 1..9: note = Seed: LVVVGAGDV (KRAS G13D)
LVVNGSGDM

SEQ ID NO: 80022 - protein, 9 aa, synthetic construct
  source 1..9: note = Seed: LVVVGAGDV (KRAS G13D)
LVVNGSGDS

SEQ ID NO: 80023 - protein, 9 aa, synthetic construct
  source 1..9: note = Seed: LVVVGAGDV (KRAS G13D)
LVVNGSGDT

SEQ ID NO: 80024 - protein, 9 aa, synthetic construct
  source 1..9: note = Seed: LVVVGAGDV (KRAS G13D)
LVVNGSGDV

SEQ ID NO: 80025 - protein, 9 aa, synthetic construct
  source 1..9: note = Seed: LVVVGAGDV (KRAS G13D)
LVVNGSGDY

SEQ ID NO: 80026 - protein, 9 aa, synthetic construct
  source 1..9: note = Seed: LVVVGAGDV (KRAS G13D)
LVVNGTGDA

SEQ ID NO: 80027 - protein, 9 aa, synthetic construct
  source 1..9: note = Seed: LVVVGAGDV (KRAS G13D)
LVVNGTGDF

SEQ ID NO: 80028 - protein, 9 aa, synthetic construct
  source 1..9: note = Seed: LVVVGAGDV (KRAS G13D)
LVVNGTGDI

SEQ ID NO: 80029 - protein, 9 aa, synthetic construct
  source 1..9: note = Seed: LVVVGAGDV (KRAS G13D)
LVVNGTGDL

SEQ ID NO: 80030 - protein, 9 aa, synthetic construct
  source 1..9: note = Seed: LVVVGAGDV (KRAS G13D)
LVVNGTGDM

SEQ ID NO: 80031 - protein, 9 aa, synthetic construct
  source 1..9: note = Seed: LVVVGAGDV (KRAS G13D)
LVVNGTGDV

SEQ ID NO: 80032 - protein, 9 aa, synthetic construct
  source 1..9: note = Seed: LVVVGAGDV (KRAS G13D)
LVVNGTGDY

SEQ ID NO: 80033 - protein, 9 aa, synthetic construct
  source 1..9: note = Seed: LVVVGAGDV (KRAS G13D)
LVVNGVGDA

SEQ ID NO: 80034 - protein, 9 aa, synthetic construct
  source 1..9: note = Seed: LVVVGAGDV (KRAS G13D)
LVVNGVGDF

SEQ ID NO: 80035 - protein, 9 aa, synthetic construct
  source 1..9: note = Seed: LVVVGAGDV (KRAS G13D)
LVVNGVGDI

SEQ ID NO: 80036 - protein, 9 aa, synthetic construct
  source 1..9: note = Seed: LVVVGAGDV (KRAS G13D)
LVVNGVGDL

SEQ ID NO: 80037 - protein, 9 aa, synthetic construct
  source 1..9: note = Seed: LVVVGAGDV (KRAS G13D)
LVVNGVGDM

SEQ ID NO: 80038 - protein, 9 aa, synthetic construct
  source 1..9: note = Seed: LVVVGAGDV (KRAS G13D)
LVVNGVGDS

SEQ ID NO: 80039 - protein, 9 aa, synthetic construct
  source 1..9: note = Seed: LVVVGAGDV (KRAS G13D)
LVVNGVGDT

SEQ ID NO: 80040 - protein, 9 aa, synthetic construct
  source 1..9: note = Seed: LVVVGAGDV (KRAS G13D)
LVVNGVGDV

SEQ ID NO: 80041 - protein, 9 aa, synthetic construct
  source 1..9: note = Seed: LVVVGAGDV (KRAS G13D)
LVVNGVGDY

SEQ ID NO: 80042 - protein, 9 aa, synthetic construct
  source 1..9: note = Seed: LVVVGAGDV (KRAS G13D)
LVVQGAGDA

SEQ ID NO: 80043 - protein, 9 aa, synthetic construct
  source 1..9: note = Seed: LVVVGAGDV (KRAS G13D)
LVVQGAGDI

SEQ ID NO: 80044 - protein, 9 aa, synthetic construct
  source 1..9: note = Seed: LVVVGAGDV (KRAS G13D)
LVVQGAGDL

SEQ ID NO: 80045 - protein, 9 aa, synthetic construct
  source 1..9: note = Seed: LVVVGAGDV (KRAS G13D)
LVVQGAGDM

SEQ ID NO: 80046 - protein, 9 aa, synthetic construct
  source 1..9: note = Seed: LVVVGAGDV (KRAS G13D)
LVVQGAGDV

SEQ ID NO: 80047 - protein, 9 aa, synthetic construct
  source 1..9: note = Seed: LVVVGAGDV (KRAS G13D)
LVVQGGGDA

SEQ ID NO: 80048 - protein, 9 aa, synthetic construct
  source 1..9: note = Seed: LVVVGAGDV (KRAS G13D)
LVVQGGGDI

SEQ ID NO: 80049 - protein, 9 aa, synthetic construct
  source 1..9: note = Seed: LVVVGAGDV (KRAS G13D)
LVVQGGGDL

SEQ ID NO: 80050 - protein, 9 aa, synthetic construct
  source 1..9: note = Seed: LVVVGAGDV (KRAS G13D)
LVVQGGGDV

SEQ ID NO: 80051 - protein, 9 aa, synthetic construct
  source 1..9: note = Seed: LVVVGAGDV (KRAS G13D)
LVVQGNGDL

SEQ ID NO: 80052 - protein, 9 aa, synthetic construct
  source 1..9: note = Seed: LVVVGAGDV (KRAS G13D)
LVVQGRGDA

SEQ ID NO: 80053 - protein, 9 aa, synthetic construct
  source 1..9: note = Seed: LVVVGAGDV (KRAS G13D)
LVVQGSGDA
